United States Patent Application Publication US 2008/0256662 A1 - sequence listing, part 5

SEQ ID NO: 36353 - DNA, 256 bp, Glycine max
  Clone ID: 701110438H1
cgagcagtgaataccagttgctcctatagccggcgctcaacaacatggcggacaaggcagtcaccatccgaaccagaaagttcatgacaaacaggcttctctccagaaagcaattcatcgttgatgtccttcatccagggagggctaatgtttccaaggctgaactgaaggagaaattgggcagaatgtatgacgtgaaagacactaacactgtatttgtcttcaagtttcgaactcattttggtggtggcaagtc

SEQ ID NO: 36354 - DNA, 257 bp, Glycine max
  unsure (1)..(257): unsure at all n locations; Clone ID: 701110439H1
ccgatcgaatccaatccaccaaatcggcnacgtcgcnttncgctanagatccgnggcggaaccaccgtatctgnctatctccgattgatcttccgataaaagtggaccggaaatgccggttgccgcttccgccatttactttctcaacctccgcggngacgttctcatcaaccgcctctatcgcgacgatgtcgggggaaatatggtggatgcttttaggacgcatgttatgcaaacgaaggagcttggtattgccc

SEQ ID NO: 36355 - DNA, 260 bp, Glycine max
  Clone ID: 701110440H1
ccgcactccgtcttcatcaatcagcatcaccaccgctccaacacaggggaaaatgagggagatccttcacgttcagggagggcaatgcgggaaccagatcggttcgaagttctgggaagtggtgtgcgacgagcacggcatagatccgacggggaagtacgtcggaaactcagatctacaacttcgagcgcgtgaacgtgtactacaacgaagcttcctgcgggcggtttgtcccacgcgcagtgctgatggacctggag

SEQ ID NO: 36356 - DNA, 257 bp, Glycine max
  Clone ID: 701110441H1
gccaacttactgatgaatgtttgtctgccacaacggcctcatgcccattgattgagtcattaatattgatgtcatgcccatcaattggtttagatggactttgttctttgcgtcggctcccaaatttgaccctgctggatttatcatacacctttttggtcaatttgcagcctgtttttgagtcttgttcacagctaaaggaatgtaaccagtatactcctcttatatgacatgtgcaatcctcctcccttaagtca

SEQ ID NO: 36357 - DNA, 251 bp, Glycine max
  unsure (1)..(251): unsure at all n locations; Clone ID: 701110442H1
caaggtctcaatctctaactaggacgacatgccttctctctccgttttcccatcactncccatcgcttcaaaaccctaacttgagccaacccaatttcttcaatttccgcttaccgncgctctgtcaccgtcncctcgtcaaaagcactgcaacttttcaccgtagantcctctgcaaagccttcagagattccggcgaggacatcaaggcggtgctcaagtccgacgacggtggtggcagcggcgacggc

SEQ ID NO: 36358 - DNA, 256 bp, Glycine max
  Clone ID: 701110443H1
cagttagttacatgttcaatggcggttcagagctccacttccagcgaatcgcaagcttcggagaacgttatgcatcgccatttctttttatggagagagtttctgtggggagctgttgcgggtgcatttggggaaggaatgatgcatccagtggatactgttaaaactcgattacaaagtcaagctattctaaatggaattcagaaccagaaaaacatattgcagatggtgcgatatgtgtggcaggttgatggat

SEQ ID NO: 36359 - DNA, 256 bp, Glycine max
  unsure (1)..(256): unsure at all n locations; Clone ID: 701110444H1
ctctctgcttgcggtgcttcacaagccaaatctaacttgtctctgntttctccgatctagtactactatcaatggccggaaaaggagatggtcctgctatcggaatcgatctcggcaccacctactcctgcgtcggagtgtggcagcacgaccgtgtcgaaatcatcgccaatgancagggtaacagaaccacgccgtcttacgtngctttcactgattccgagcgtttgatcggtgacgccgccaagaaccaggt

SEQ ID NO: 36360 - DNA, 261 bp, Glycine max
  unsure (1)..(261): unsure at all n locations; Clone ID: 701110445H1
cncgngggganatcgagtntcccggttgatnctgtgcatcgtananggattctggacattangattcttaacaccgatangcatggctnggaacttgttggttaggnaacttnatggcattgggagttttggtcaggtggagttgattcccattgatcatgggntctgcctgcctnaaactttggaggatccatattttnaatggattcattggccacaggcttccattccggtctcagaggangagcttgnctacattga

SEQ ID NO: 36361 - DNA, 261 bp, Glycine max
  unsure (1)..(261): unsure at all n locations; Clone ID: 701110446H1
gcaaaaagcccaagcagtcgtcttggtgctgccgattggtcaaaatatataaatccatttgttgaaatttgttactgtattgcattgcgtttgctgcacccatcaatggcaggcgtttctctcaagtgcggngactgcngtgctctgctgagaaccgtagaagaagcgcaagagcacgctgaactcacctgcccactncaacttctccgaatccaccgaaccggttctcaacctcatctgcaccgttgctccanacnctgc

SEQ ID NO: 36362 - DNA, 262 bp, Glycine max
  Clone ID: 701110447H1
gaagcatagtagcatcaatgccttccttatacagaagacaaaattagcagagtgcatgcggccaggcggttatttgagtacctatcccacaattctctaaacttccctgttattcaccatattcagttcccaaatgggattcacagagatgacttggtaattggtgctggttctgatgctggagcccttctggtggatgggcttggagatggacttcttttggaagcgccagacaaggatttgaatttattagaaacacttc

SEQ ID NO: 36363 - DNA, 262 bp, Glycine max
  unsure (1)..(262): unsure at all n locations; Clone ID: 701110449H1
atcctccaaacttgagacacgcaggctccaatcaacagcaatttgtggcattgcttaaacacaaaagcaatcanagagaagcagaaaaaatatgccgctcgctgttgtctggaaaatattggaacttagagttctggttttactgagtttggccttccnaataatgctaatagtttttggcaaccaaaganagtaccaagcaggtcaaggagctacaattggttgtgtgggtggcctatctgttggcagatttggttgctac

SEQ ID NO: 36364 - DNA, 262 bp, Glycine max
  Clone ID: 701110450H1
aggaaacaaagcaacacccgaacgaaccgcgcaaggtaacgaacgtagctgagcaaaagcaagcagtaacaatgccattgtcaacggtcgtttcccccttttgttcttcctcagccaccttcctatccacagttatcgcgcgctcttcactccctccaaaacgcaacgtctccccttccccattttccactctctctcgcagaggcattgctctgctttccttcctctccctctccctctccctctcagcaccagcctccgc

SEQ ID NO: 36365 - DNA, 258 bp, Glycine max
  unsure (1)..(258): unsure at all n locations; Clone ID: 701110451H1
aaagctggtgcttcaagggttattgcagtcgaggctagtgccaagatggcagcagtagcatctcagattgcaaaagataatggtcttttgctgagtaaaagccaaaatggagttgatggcttccaaaagggagtcatagaagtggttcatggtatggttgangagattgataaaacagttgaagttcaacctcacagtgttgatgtactgctaagtgactggatgggatattgcctgctgtatgaatccatgcttggt

SEQ ID NO: 36366 - DNA, 247 bp, Glycine max
  unsure (1)..(247): unsure at all n locations; Clone ID: 701110452H1
ctcttttctggtgcagggttgttgctgaactaagaaaactatggtctgaggaacaatacttaccaggagtcccccagaatgagattcctgatctgaagtcatgtcttctatatcaacattttcaagtaattaattgctgcatctctcggaaaaggttccgtattattgccaccgaatctttagactctatgatgatgcaagctaattcagacataaaagaatcaactgnttgttgcgctggagctcc

SEQ ID NO: 36367 - DNA, 255 bp, Glycine max
  unsure (1)..(255): unsure at all n locations; Clone ID: 701110453H1
ggattgcatctgtaattacccaacagaggagccagatgaagataataatgatggcaactttcgcttattcacgtatagagaattgaattctgccacacgtggttttcacccatcggaaaagattggagaaggaggcttggcactgtctacaaggggcagcttcgggatggaactttggtggcagtgaaagtgctttcaattgancnanattccttgagaggagagagggagtttgtggcagaattgaatacacta

SEQ ID NO: 36368 - DNA, 100 bp, Glycine max
  Clone ID: 701110454H1
caagagctcaacgtctatctagagattactattttaaacaggtcatggagacttcattgcatcataagtatgacctttggaaaaaattgtagctgggttg

SEQ ID NO: 36369 - DNA, 259 bp, Glycine max
  Clone ID: 701110455H1
ccaggatgaagccctggtgtaactgcgatctttgcaagagctacttgacggtgagttggctgaaaaagttccccaatctctgcgactggtacactcatctcttgcgtaaatccccaaccggcaccatccacgttcacgtgctggggaacaccatcacctcgaatccccacaacgtggagcaacttctcaagacgaatttccaaaactaccccaagggaaaacccttctccaccatcctcggcgatcttttgggaagagg

SEQ ID NO: 36370 - DNA, 259 bp, Glycine max
  unsure (1)..(259): unsure at all n locations; Clone ID: 701110456H1
attgtattagaaatgattgaacttcgagaactggatactgcacgtgctattttaaggcaaacacaggtgatgggtgtaatgaaacaagagcagcctgaaagatatttgcgtcttgaacatctcctagttagaacttattttgatccaaatgaggcttatcaagactcaacaaaaganaagcgacgtgcacaaatagcccaagctcttgcagcagaagttactgtagtgccaccatcccgattgatggctttaattggtc

SEQ ID NO: 36371 - DNA, 256 bp, Glycine max
  Clone ID: 701110458H1
aattgttgtaactttttgattcctaaattctctaaaattcgaaattctaatttcgttaggggaaagagattgtttgtgtgtgagtgagtatggctggaaaaggcgagggtcctgctatcggaatcgatttgggaacgacgtactcttgcgtcggcgtgtggcaacacgatcgtgttgaaatcatagccaacgatcagggtaacagaactaccccatcctacgtggctttcaccgacacagaacggttgatcggcga

SEQ ID NO: 36372 - DNA, 256 bp, Glycine max
  Clone ID: 701110459H1
gcaaaaagaacgaggcatcatattcatattgatataagtgtagtaggatctgagaattggagtgagtttgatggcgagagcaagctctggtctgcaatacccagagcggttctacgccgcggcctcttacgttggattcgacggatccaccaaatctctcacttccaagttctccaactccaccgctcttcttctctacagcctctatcagcaggctagtataggaccttgtaatgtcccagaacccagttcatgg

SEQ ID NO: 36373 - DNA, 215 bp, Glycine max
  Clone ID: 701110460H1
agctacttcaccactccaaacccaccacaccaccattattcatatctcattctctaacctttcactcttccttactcactctctactttgctcatcatcgtagatgaaccaacacttctagtctctcttactttataaccatgtaaaaatgagtcacctaatgaaaaattagtagcttcttgttgtgctttttattttgtttgtgttgagataaa

SEQ ID NO: 36374 - DNA, 260 bp, Glycine max
  Clone ID: 701110461H1
cgaagatcgagatatctatttagatctcagaaaaacagtgtttcatttcaattcattcagtcttattattattagggtttggcgattcagagagaaagagaaatgggagaacgaaaaggaatcccaattgctctggggctcttggcgatgctcctcttcttcattgcttcttcctcttcctctcacctcgttcgcgcttccgaggacgccgacgacgcgatcttctacgagtcattcgacgaggatttgacggacggtgg

SEQ ID NO: 36375 - DNA, 219 bp, Glycine max
  unsure (1)..(219): unsure at all n locations; Clone ID: 701110462H1
caagtacctgtataatatgcaaagagacagaaanaagggcagtaagtatcctcccggggagtcttctaatcctcaatcatcagaaaaagatgatcacaataatgatacaaatcttgctgaaggatctagtaaaccagagctgagtaacaagaatactccacaatcactgaaggccaaatctaaaattgtnaagaaatccaagggtggtaagttcaagac

SEQ ID NO: 36376 - DNA, 264 bp, Glycine max
  Clone ID: 701110463H1
ctcctttcttccatcttcttctcttttcacgtcattatcctaaacttgcagattttcacatcccaagcaacatgaaggggaggttcatgtttctgtcggtgctcctttgtgccacctttcatgtctccttctccattactgacggcttagtagcaaacggcaacttcgagctgggtccgaagccctccgccctgaaaggaactgtggtgattggtggcagccacttcgatcccagaatgggagatctctggcttcgtggagtac

SEQ ID NO: 36377 - DNA, 258 bp, Glycine max
  Clone ID: 701110466H1
cagaacaagaccaagaacaaaaaccagaactagaacaacgaggttaacatggccgaatcctcaccctcgtggtgctttggttgaggcaacaccacaaccaacaagttcacctccttcaccgagagatggatccatcaaggtgcttgcgtttcctgagaaccgtgctgatgacattcaagctgaggccagagcactggctcgtgctgccaatgcaacttcgtacacccctcagcttgtggcctccaaatatggctccca

SEQ ID NO: 36378 - DNA, 257 bp, Glycine max
  Clone ID: 701110467H1
ctcaaggatacactccggacttaattacgttattttgttagggtcaccgtttcgagatattctaaacttgtactgaaaaatatggagggaaaagaagaggacgtaagagttggagccaacaggtacggagagaggcagccaatagggaccgctgctcaggctaaagactacagagagccaccgtcggcgcctctcttcgaaccgggagagttgtcatcgtggtctttctatagggctggcatagcagagtttgtggc

SEQ ID NO: 36379 - DNA, 254 bp, Glycine max
  unsure (1)..(254): unsure at all n locations; Clone ID: 701110468H1
ctccaagttccaatggagattttcaaatgcttctacatcanaaatcttattcttgttaccttcttcatggtatcatcagcagttctagcaattgacccttactcagaggcacttctcagcctaaaatcggagcttgtagatgatgacaacagcttgcacaattgggtggtgccctctggaggaaaattaactgggaaatcctatgcatgttcttggtccggcatcaagtgtaacaatgactcaacaattgtnac

SEQ ID NO: 36380 - DNA, 255 bp, Glycine max
  unsure (1)..(255): unsure at all n locations; Clone ID: 701110469H1
aaaagtggtgttggtggttgtcctcctcattggtatggcaaccctttcctccatcctctcctncctctcttcctcttttccatcgctaccctaaccctaacccttcgctctttcgcccctccctttctctctctttctctcgcactaaaccccgttcccccttcctcgttctcgctgcctcttcccatgatttnncctccaactccaagaaatcagtgctcaccgagttgatacaaganatagaacctctggntg

SEQ ID NO: 36381 - DNA, 253 bp, Glycine max
  Clone ID: 701110470H1
gggtggttgaagtttttagctttagctttgcagagatgtcaggtggtggatgcagcagcatagtgtggttcagaagagatctgaggatagaagacaatccagcactgacagcaggagtgagagctggtgctgttgttgcagttttcatatgggcacctgaagaagaaggacaatactaccctggcagggtctctagatggtggctcaagaacagtttggctcaccttgattcctctctcaggaatcttggcac

SEQ ID NO: 36382 - DNA, 254 bp, Glycine max
  unsure (1)..(254): unsure at all n locations; Clone ID: 701110472H1
cagaaagggatatgatatcaaatttcttttantangagtattttggtgggtatatnttaactatnaagganctangcttatatgcttctttttctagttctagcttctgtgatgtattgctaaaaaaattgttcagtgtcatatttgcaaaattcgagaaactttttcatttcaaagtttagcaatatcagagggttatgagcgaaananccnaaggganggnnaannnggngnncnccnctnntggaccccna

SEQ ID NO: 36383 - DNA, 253 bp, Glycine max
  Clone ID: 701110473H1
ctcgtgggttgggaagctccttcattgcttcctgtgttgccaagaggaattcaaggccattctccacagccacagggctcaggtgttgagacccccattggatcgcatggtgtctgaatactttgagcgcagtgtgaaggctttagatgtttgcaatgccattcgtgacggtattgagcagattcgccaatggcagaagctgttggagattgtgctctatgcattggggcatcagaggagcattggtgagggc

SEQ ID NO: 36384 - DNA, 246 bp, Glycine max
  unsure (1)..(246): unsure at all n locations; Clone ID: 701110474H1
ctagtgaaatatctgatcaattaatggctcagtatttctttttgtttgttttgnngtttgccagccaactgatggctggattcaatgcaccgctaccgctaccatctccgtcatatggaaatcatacaaccattctcagcatagacggtggtggtatcaggggcattattcctgcgactgttcttgaatacttagacaaggctcttaaggctaaggatccaacaacatctttagcccattattttg

SEQ ID NO: 36385 - DNA, 254 bp, Glycine max
  unsure (1)..(254): unsure at all n locations; Clone ID: 701110475H1
gtaagtatacctacaaatcactgtaaatctccattaccactctcttagttattaacttagaatcttccctttctagttctaaattataatcattctnnnnnnnnnnnnnnnnnnnnnnatatggttatatatattattgggntctatacatattagaagagtcagagataaattaatagtccaaggtagtttcattttctggggtgtggttatntgatcatagaaatggctagtggtagtngtattggaatctc

SEQ ID NO: 36386 - DNA, 253 bp, Glycine max
  Clone ID: 701110476H1
caaatacaatcaaagaatcttctttgctttctctcctttgcactttccttctcctcgtgattttttgtttgcatcaaagggagaaactgggagacacagaagatgagagagataattagtattcatattggacaagctggaattcagtgacacctctgttggcattgcacacgatgctttcaacaccttcttcagcgagaccggattcggcaagcatgtgccaagggctttatttgttgatttggaacctagt

SEQ ID NO: 36387 - DNA, 255 bp, Glycine max
  Clone ID: 701110477H1
gggacatcgagtttcccggttgcttctgtgcatcgtatagggattttggacattaggattcttaacaccgataggcatgctgggaacttgttggttaggaaacttgatggcattgggagttttggtcaggtggagttgattcccattgatcatgggctctgcctgcctgaaactttggaggatccatattttgaatggattcattggccacaggcttccattccgttctcagaggatgagcttgcctacattgaa

SEQ ID NO: 36388 - DNA, 257 bp, Glycine max
  Clone ID: 701110478H1
aaagtgagaaactaccaatggttcttatttaaagcaaataaatattgaaagacaagaggtaacagataaatagagtgtgtgaataataataagtagttgtagctggggagagtggaacattgtcagcttcataataaagatgacaatgaagctggttttggtagttgttgttgaagttgcatgcttagtttctgggatcttgtccttggatctgagacactctctgagctttctttcttagaaaacgatgtcgtctc

SEQ ID NO: 36389 - DNA, 260 bp, Glycine max
  unsure (1)..(260): unsure at all n locations; Clone ID: 701110479H1
gtttgttgtgagctataagctagtttatcgtgaggagaatatgaagttgtttgttttctttgttgctgcagtagttttggtagcatggccatgccatggcgcaggctaccaaaggttccctctccgaatgaaaactggctatggtgagcgttcttcggaggtaaaatgcgcaagttttaggcttgctgtggaagcacacaacatccgagccttaaaaccattcctgaagagtgcgttgaaccancaaaggactacattat

SEQ ID NO: 36390 - DNA, 262 bp, Glycine max
  Clone ID: 701110480H1
tcactttcaaatcaactcaagagattcaaccaagaaatatagaagctagggttttgttacatttgtgttagcacgcaaaactttgcaaatatggagagcagcttaggagacatgttggttaaggttgtggtgttcattctagttcaagccttggtttaccttatcctctccaattcatcaaacgtgttcaacaagaacatgaagaaatctaacagcttcaggccggcacgttcggtgagcattcgccggatgctcgctttga

SEQ ID NO: 36391 - DNA, 258 bp, Glycine max
  Clone ID: 701110482H1
ccttcacaagattctcacaaacaactcttgagaaagaaagaatggctgccaacacattgatgagttctgccatctcagccttcccatctctcctttcctcctcaaaatccagatttgccgcagcagttcctctttccagctttgttgtcaccaatgcctcttcttctcgcttttccatgagtgctgactggatgcctggccagcctagacccccctaccttgatggttcagcacctggtgactttggattcgaccctc

SEQ ID NO: 36392 - DNA, 254 bp, Glycine max
  unsure (1)..(254): unsure at all n locations; Clone ID: 701110483H1
caatcttctgagagtgtttggttgaaagtagcaaagatgtttcctttcgggcaaaagggtcaaaanataaaggggantatggtggttatgnagaagaatgtgttggatatcaacagcatcaccagtgttggagggatcgttgaccaaggctaggcttcataggcagtgcagtcgatgcacttacttttgcagccaccaaaatctccatccagttgattagtgctaccaacgctgatggtgggaaaggaaaaatt

SEQ ID NO: 36393 - DNA, 250 bp, Glycine max
  unsure (1)..(250): unsure at all n locations; Clone ID: 701110484H1
tttctctttctctcttcttcatgctcgagtgcttggnctcgctcctttacaaaaaaagctatggancacaacatctaatctaatctnnnnnnnnnnnnnnnnnctcctcttaattattctnntgattctcaaatnctcttcggttntnttccctntcnnnttggttncattgagtatgggttcggtggactgttatccttctcgtacggnngatgctnccgtggngtctntggattcnctgcctnagggt

SEQ ID NO: 36394 - DNA, 232 bp, Glycine max
  unsure (1)..(232): unsure at all n locations; Clone ID: 701110485H1
attttatttgcctttaaaattcaaanctttcagcaattataattctgaattattgactcaaattaatgtaggtgagcattgttatggaacaaatgttgcgcctgcttcatacctgtggcttacctgcagaagatgtagacttcataaattctgatgggaagacaatgaacaggctgttgctggaggcaaatccacgantgaccctctttactggnagttcaagagtggcaga

SEQ ID NO: 36395 - DNA, 255 bp, Glycine max
  unsure (1)..(255): unsure at all n locations; Clone ID: 701110486H1
ctcgagcctcgaaatcttgctacacatcttcttcatctggaaatccgaaacgaagcaaccaaannnnnnnnnnnnnnnnnnnnnnnnnnnnnnnnnnnnnnnnnnnnnnnnnnnnnnnnnnnnnnnnnnnnnnnnnnnnnnnnnnnnnnnngcttcgttatcgttcccaacattccaaaccctaaatttgttgcntcggtcttccattcccaatctccgaactccgacgcggagtggcagcagagaacaancatg

SEQ ID NO: 36396 - DNA, 258 bp, Glycine max
  unsure (1)..(258): unsure at all n locations; Clone ID: 701110488H1
attnnattananatgantgnacttcganaactggatacngcatcgtgctattttaaggcaaacacangtgatgggtgtaatnaaacaagagcagcctgaaagatatttgcgtcttgaacatctcctagttanaacttattttgatccnnatgaggcttatcaagactcaacaaaagagaagcgacgtgcacaaatagcccangctcttgcagcanaagttactgtagtgccaccatcncgattgatggnttattggtc

SEQ ID NO: 36397 - DNA, 254 bp, Glycine max
  Clone ID: 701110489H1
ccggtctcagttctccagcagaagtaccattgaactcttcatcctcaactgttcttaaaaaggtgcctgacacttcgatgccaattgacaatacttccctcttcagccgtttctacctttccaaacttgacatttcggtggacttagtactgccagaattgtatgaccagtgcatgtgtgctctgaatattgacaagaatgctacaggtgatgcagttgccaatacagaactattattaaagaatggttcaaga

SEQ ID NO: 36398 - DNA, 255 bp, Glycine max
  Clone ID: 701110490H1
gaactcactatgcagtcatgagctcctacgagtacctcagcactggacttcgccagtacttggacaacaaaatggatggattctacattgctccagcttttatggacaagcttgttgttcacatctccaagaacttcatgaccctgcccaacatcaaggttcctctcattcttggtatctggggaggcaagggacaaggaaaatctttccaatgtgagcttgcctttgccaagatgggaatcaaccccatcatga

SEQ ID NO: 36399 - DNA, 254 bp, Glycine max
  Clone ID: 701110491H1
ggcgtctaactctgcttccgctctttacttccttttatgcctatcgcccatcactttgcttctttctgcgtttcgtgctcaagctcaatctcatgctccagctcccactttcaagtactgtgaaaagaatgcagactatgctgtgaaggtgagtggagtggaaatattgcctgaccccgtggagagaggagtgccattcacctttaagatcccagcttatactcctgaaccaattcaaagcggggacttgttat

SEQ ID NO: 36400 - DNA, 255 bp, Glycine max
  Clone ID: 701110492H1
caatttttctctcaaccggcccaatttagcataagcccagcatggccaccgcaacagcagcagccacctcgtccttcatggggacgcgcctcctggaggcccattccggggcggggcgggtgcaggcccggttcgggtttggcaagaagaaagccgccgccccgaagaaagtttccagggggtcgggctctagctccgataggcccctgtggtatccgggcgccaaggcgcccgagtacctggatgggagccttg

SEQ ID NO: 36401 - DNA, 260 bp, Glycine max
  unsure (1)..(260): unsure at all n locations; Clone ID: 701110493H1
cccaaccctagccaaacgcaaaccattcattcattcagttcagtaactcacctcaccatggccgcatccattacattgtccaggctcgtctcttccaccctcaccactgcctctttcttcccanccaaaaccctgccttccaaactctcctctctccgactccccanncgccgccaccccaagccactcagattctcctcntccaccatcaccgcngaccatctccgtcggcgacaagctcccggaggccaccttctcta

SEQ ID NO: 36402 - DNA, 239 bp, Glycine max
  unsure (1)..(239): unsure at all n locations; Clone ID: 701110494H1
gtcactcttcttgcataacccagatctgcagacaatatgcgangaactgggcttgttacattnnttatgccttgtcattgctttagtaagtgtgcaagcagaagatgcgtataagtattacacatggacggtgacttatggaactatttctccattgggtagtccccagcaggttattcttatcaatggtcagtttcctgggcctagacttgacttggtgactaatgagaatgtaattc

SEQ ID NO: 36403 - DNA, 263 bp, Glycine max
  unsure (1)..(263): unsure at all n locations; Clone ID: 701110495H1
ctatctgnttccncgtagtacttcattgagaganacatgngacactgtactaagtactacgctgctactcatgttggcatgctccatcgtgcatgttcttcgttcactacaagcaagaatgagaaganaatcnnactacaatcttccaccaggaccctctcttctcancatcattaggaactctaaanaactctataaaaagccacagcagacaatggccaagcttgccaaaacctatggcnccataatgcgtttcaccatag

SEQ ID NO: 36404 - DNA, 209 bp, Glycine max
  unsure (1)..(209): unsure at all n locations; Clone ID: 701110496H1
cttgtttgagtacnagaaaagtagtgatggagaggtctacgactcctttaccatttcaagagactacagagatgttttggcctgtgtgcacgatggttgtgagaaaactactctagcaacatgagttatgttgtgtctatgtgtagacccgatatggacttgaaatgaaataaattattgtccaaataaataatggttaatttacttaa

SEQ ID NO: 36405 - DNA, 257 bp, Glycine max
  unsure (1)..(257): unsure at all n locations; Clone ID: 700968301H1
caaaggatttcaactttaggctccatctaaaaaaaatggctggtttggctagcaatcttcctctaattgttatgataggtctgcaaattcattatgcagcacttgccatattcacaagagccgctctcttagatgggttgagtacaacggtgtttgtagtatacaggcaaggcatagccactttggctttggcgcctatatttttctctcctaagaggagncaatcagtggaagattctttgggattcaggggttnt

SEQ ID NO: 36406 - DNA, 256 bp, Glycine max
  unsure (1)..(256): unsure at all n locations; Clone ID: 700968302H1
gggagagcagaacctagaaatcgcgttggttcgttggtttatgacttggagtgaaaccctaactaatattgaagatgagcattcggaggttgagtgccgaagaatcgcaaacactttactctctcctcagagcagagcaacgttcgctccatgagatcctctcccaattcaacgctgcaatcccttccacccgccatttcactctctcttcctatctcctcatccnattgcaggacaataaggtgctcngancatt

SEQ ID NO: 36407 - DNA, 254 bp, Glycine max
  unsure (1)..(254): unsure at all n locations; Clone ID: 700968303H1
tttagcttcatccctagctactagctagcactttcacttccgttaatttaacagtagaccattaacttgaaaatttcaaaacaccgcatcaaaattttcttctgaaggcactaccgaagaatggctgtttttgcatcttcatcatctttacaaacccatttgcattcctcgctcttggcaccttcttttgaaggtgcacatgatcacaactcgtggtgggtgcgagcgagatcacagaaacgcattgntcaaag

SEQ ID NO: 36408 - DNA, 253 bp, Glycine max
  unsure (1)..(253): unsure at all n locations; Clone ID: 700968304H1
ctttcaactttcaagtcaaaaggacaatagtttcaaggatcaaactcttggtaagatttcctatatgtaacccttcttgtcttctagctgttgagaatttgggatagttataactctataaggaaatactccctttgatcattatgcatgtctggccctgtggccacagttgataatttggatggagcactttcttgtgcagagagancaaaatctcttgatgccatttctgaaatagactgtttatctatat

SEQ ID NO: 36409 - DNA, 250 bp, Glycine max
  Clone ID: 700968305H1
cagattagtaacattgcaagtatatggtttatctctctctttctttccatctttgcaaccggtatccttgagatgaggtggagtggtgttggaattgatgagtggtggagaaatgaacaattttgggttattggtggtgtttcggcccatctttttgccgtgttccaaggtttactcaaagtgcttgctggaattgacactaacttcaccgttacctcaaaggcatcagatgaggatggagacttcgcaa

SEQ ID NO: 36410 - DNA, 250 bp, Glycine max
  Clone ID: 700968306H1
ctcaggggctgtttggcttggcctctttggaggaccgtggaatggtgatgctcattaacttggctttcagtgagggtgagtatgctggcagcactctcagcatgcttgggaggaaccctgttcaggacactgttagggaaatgcccattgttggaggcacgggcgtgttcaggtttgccaagggctatgccattgccaagagtctttgggaaatttctgacaatgagcattttgtggtggagtatcatgt

SEQ ID NO: 36411 - DNA, 251 bp, Glycine max
  unsure (1)..(251): unsure at all n locations; Clone ID: 700968307H1
caacaaaccaaaaaggtaaactttttgcaacaaccatggttgcaatggcagcagcaacagcatccacccagttgattttctcaaagccttgttcaccttcacgtctatgccccttccaactatgtgtatttgacactaaacaagtgctatcaagtggcaggagaaggcatgtggggggttctggaatancgtgcatggctgtgggggaagcagcaaccactgggacaaagaagagaagtggatatgagctt

SEQ ID NO: 36412 - DNA, 113 bp, Glycine max
  unsure (1)..(113): unsure at all n locations; Clone ID: 700968309H1
ccgtanattcagagtttctaacatttccatttncaattatacatcccatagataggaagaaagaaaacaagtatganaacacttcactcctctcctccatgttcccagattcc

SEQ ID NO: 36413 - DNA, 249 bp, Glycine max
  unsure (1)..(249): unsure at all n locations; Clone ID: 700968310H1
ccaagtctcatagctgagagtttaggatcggaattctgcctcccttcttcttcatctcacctacaaccttaacctcatattagcacaaacttggtttgcttctatgagccaaatctcgtgtttccttcagcttcataatggtcttgaagggtctatgtgagaggattgtttcttcaaaatgctcttctaaaagctcaaccgagactgtagataatacacaggngccngtttatncaaaagcaggntcta

SEQ ID NO: 36414 - DNA, 249 bp, Glycine max
  Clone ID: 700968311H1
cgaaatgctttccatatttcgcaaaggagaggagttcaaccatggagtggagtttgtgcttctgatatcatttaatgaggatgcactgggtaaccaggcagagcatgcattagcctctctggcatcaatgatgttggaatctccttccttgatagtccaatttacacatggtttgaattttagtccaagctctaaggaatatactcatggagttgtgattcgatttcgatcagttgaggcatttgagat

SEQ ID NO: 36415 - DNA, 250 bp, Glycine max
  unsure (1)..(250): unsure at all n locations; Clone ID: 700968312H1
caagatctctctccatcttccccgtcctcttctacctacttctccttttgtgcaacttgccttgtacaacaacacttccatatcctttgtgttgtgttgcccactctannnnnnnnnnnnnnnnnnnnnnnnnnnnnnnnnngacaacatcccaccatttgtggctgccctctattttagtccctagccttaatcatgccatcaggtgctaagaagaggaaagctgccaagaaaaagaaggaaaaggant

SEQ ID NO: 36416 - DNA, 250 bp, Glycine max
  unsure (1)..(250): unsure at all n locations; Clone ID: 700968313H1
ggctgataaagacaacactcataccgttggaaagaaggatgctgctggccatgttgcttaatttagttcttgcttcctttgtcttcttgagttttatcagagacgggagtgcagggatcactagctctttcattcggtcagagtggccggcagttgacatcccccttgatcatgaagcatttgcagttccaaagggttataatgcacctcaacaagtgcacatcacgcaaggtgactatganggaaaant

SEQ ID NO: 36417 - DNA, 250 bp, Glycine max
  Clone ID: 700968314H1
ggtcttccttctcccctattaccattgttacttgatgctcaaaaacaatggcgtcagggctgagagggctgcacttggtgctattctctttctgttcgcttttctctatgccttttggcgcatgggcattcactttccaatgccatctccagataaaggtttcttcaccatgcctcaactggtgagtcgaattggggttattggtgttactgtcatggctgtgctatctggtttggtgctgtaaacctcc

SEQ ID NO: 36418 - DNA, 252 bp, Glycine max
  unsure (1)..(252): unsure at all n locations; Clone ID: 700968315H1
tcagggttatttcaataatgtttcagaatatctcagaattggacctcctgtgtattttgttgtgaaaaactataactacagctcagaatcancgcatacaaatcagctttgctccattagccattgcanttcagactctcntttaaatgagattgctagagcggcccttgtaccagacacaagtnatattgccaagccagctgcctcatggcttgatgattnncttgtgtgggtgtctccagaagcatntgg

SEQ ID NO: 36419 - DNA, 253 bp, Glycine max
  Clone ID: 700968316H1
taaaatatagaacacactaccctcaacatagtaaagcagctggtgcaagtgaagcaatggctcaaaccatgttgctcatgtctagtgtctctagcagttattccgtggatttgaagaaagaccttttcctccaattgcagagtcaaagtttaaggcctaagttctctcaactctcattcaacccacttccaccatcaacttcttccttttcttcaccccgtacattcacaaccctggctctcttcaaatctaa

SEQ ID NO: 36420 - DNA, 254 bp, Glycine max
  unsure (1)..(254): unsure at all n locations; Clone ID: 700968317H1
ctcgacntctcttgcggcnagggttttagcgcanttcttctagatttaaggaagatgggtaaggaaaaggttcacatcagtattctggtcattggccatgtcgactctgggaaatccactaccactggtcacctgatttacaagcttggaggcattgacaagcgtgttattgagaggtttgagaaggaagctgctgagatgaacaagaggtctttcaagtatgccctgggtgctggacaaacttaaggctgagc

SEQ ID NO: 36421 - DNA, 254 bp, Glycine max
  Clone ID: 700968318H1
ctccttgcaacatactactaagctagaaagacataaacaaagtgggttgatttagatttgaccaacagcttttgctacctctttgaattttattggaagacatggattgttcatcatggattaacacttccttggatctcagcattaatcctcgcagagttcatgaagaagctgttcctaaggtggtagaaagcaagcttttctctttgggaatgcccaagtttaacgtcgaagaagagtctactagtgacttg

SEQ ID NO: 36422 - DNA, 253 bp, Glycine max
  Clone ID: 700968319H1
caagaacaagaccaacaaagtaacgtgaaagagaaagagatggaggaaattgttccagtggtggatttccagaggctttcagaggaagaggagcgcaagaagctgagaaaaacatgtgagaaaccagggtgtttcagaatcatcaaccactcaattccaccaacactcatggctgacatgaagtcagtggttaaatacttgcatgaccttcccacggaaatcaaaatgcgcaacaaaccctccgtccctgagg

SEQ ID NO: 36423 - DNA, 251 bp, Glycine max
  unsure (1)..(251): unsure at all n locations; Clone ID: 700968320H1
aaaagtttagtggccatgggaatgggatgctccagatgctctatttctgcactattattccccctgtttttctttgtcctttccttcatctttttctttccctggaagaaacaaaaccatcttanccatcactttgcttntgctcctcctttggtcctttccactatcaaaaactcaganaaccacacagatatnagaacctctctttctccctcaccnnaaccacnaccacnannatttgagnttctgtc

SEQ ID NO: 36424 - DNA, 249 bp, Glycine max
  Clone ID: 700968321H1
tcctctcgaaacagtaaccctctctcgtcgccgccactgctctcactcttctctccctttagcgccgtcagatcccttcattctccgccgcctttctccgcagccgaagccatgcccgaaactgagactcacgatgtggagtggccggcgaaggcgttagggacactttcatcagcttcttccaggacaaaaatcacgtcaactggaagtctagccctgtcgtccccttcaatgaccccactctctctt

SEQ ID NO: 36425 - DNA, 249 bp, Glycine max
  unsure (1)..(249): unsure at all n locations; Clone ID: 700968322H1
gggaagagatccagcagcaatggtgtacgtcaaggctcagaaatcaaaagcctacttcaagagatatcaagtcaagttcaagagaagaagagagggaaaaaccgattaccgtgccaggattcggttgattaatcaggacaagaacaaatataacactccgaaataccgatttgtggttcgctttagnaacaaggacattgttgcacaaataatatctgctagcattgccggcgatttagttcttgctac

SEQ ID NO: 36426 - DNA, 250 bp, Glycine max
  Clone ID: 700968323H1
atctcattcttcacctgcaactatttggattgctgatttttgttaataccatatttactgatattggcgcatttctttgagaaagttactaattcctagatagaggcaaaaatgttgggaattttcaaggagaagttggttaaagcacccaaagagctgaacagtccagcttcgttgaattcatgcactaagcctaagctaagtcatgaaatccttcaggatttcatgtcctgcaattcctccaatgctt

SEQ ID NO: 36427 - DNA, 228 bp, Glycine max
  unsure (1)..(228): unsure at all n locations; Clone ID: 700968324H1
gagcggtaatatggtgttccacanctgaatctcaactccactgttctgattctgaatgantctgcttctgctgtctctgcacggaacacaaaaacataaaaagttcattttcacaatcacggtcgcttcctacgactatcgaattcgcgtcagcctcaattctcatggagtttgggattgangcctccatnaatggtgagacagtnggaaatgctactatngtgcagt

SEQ ID NO: 36428 - DNA, 247 bp, Glycine max
  unsure (1)..(247): unsure at all n locations; Clone ID: 700968325H1
gcaaaagctttctaggtatgcagccgaggcaactgcggaagttgttggccgaaaggctaggggtttgggattgaaatctgttgtcatgaaagtgaatggatttactcattttaggagaaaaaggaatgcaataatgagctggaaggagggctttactgctggttctcgaggggatagaaatccaattgtatacattgaagatactacaagaaaaccccataatggttgcagactcccaaagaancga

SEQ ID NO: 36429 - DNA, 163 bp, Glycine max
  Clone ID: 700968326H1
ttcttattcgtttattattcctaaggagtttattctttttaatggatgtggttttatgaaagtgagttgtttgtcggtaggactagctgcttttaattgtcataggtatatcatgcatgatatatatttcctgttcagtgaattttggaagagggttaccatg

SEQ ID NO: 36430 - DNA, 248 bp, Glycine max
  unsure (1)..(248): unsure at all n locations; Clone ID: 700968327H1
ctgcttctcctctcctcttttttgaatcgatttctctctttcccttcacaacatacatagaaaatttacacaacaatcttttgtgctgttagtattctcctatagttgttcaaatgtcaagaaggagcaaaagggtgtgctttagccccgatgtgaaagacaaaccaaccatctttctcaaatactgtggtgatggtggcaacggcaatgatgatagngtttcaagaaaccggaagaggatcagcagg

SEQ ID NO: 36431 - DNA, 169 bp, Glycine max
  unsure (1)..(169): unsure at all n locations; Clone ID: 700968328H1
aattgagctacttactataagatttagatctcccaacagagagtttcacaaaattgccaagtacccttttcaggatcaaggaagagantcaagaaccaacaaaaggtgttgttcattgttgtagttgtttgtaactgtagcaacaggaagatggttggaaagttggttg

SEQ ID NO: 36432 - DNA, 250 bp, Glycine max
  unsure (1)..(250): unsure at all n locations; Clone ID: 700968329H1
ggaagcagcagcataagcatgacatgtctatgccttacccattcaatcactcaaactcataaccataaccataaccttccacacgctactantaagnnctcttcttctctccataaccgtaaccccctctttcaattattctccgtaagtaaccaattccctcttctatctngcgcttggtttcagagtagtattctcngacctcganttcgaccattttccacnaanttanntgntncttattctgcgc

SEQ ID NO: 36433 - DNA, 190 bp, Glycine max
  unsure (1)..(190): unsure at all n locations; Clone ID: 700968330H1
tggnaggttgggctatcgcggtgcatggtggcgctggtgtggaccctaatcttccactcgagcgtcaagaagaagcgaaacaacttctcacgcnctgtctcaatcttggaatctctgctctaaattctaatcttcccgccatagatgtcgttgaacttgtggtgagggaattggaaacggatccgctgtt

SEQ ID NO: 36434 - DNA, 251 bp, Glycine max
  Clone ID: 700968331H1
ccgtgacttgagaagagccagggctgcagcactgaacattgtcccaaccagcactggagctgccaaggctgtgtctctagtgttgccacagctgaagggcaagcttaatggaatagcgctccgtgtgcctacacccaatgtttcagttgttgaccttgttgtgaatgttgagaagaagggtcttactgctgaagatgtgaatgcagcattcagaaaggcagctgagggtccactgaaaggtgtgttggacg

SEQ ID NO: 36435 - DNA, 254 bp, Glycine max
  unsure (1)..(254): unsure at all n locations; Clone ID: 700968333H1
ggaggttcacattcacattacaagcaacancttaacgcttaacaacagcactctccctaatccttctgtgtatgcaaaatganaccatgcaaatgcaaatgcaatgttctctctgctctcattcttcttgncacattcctttttantgcttcttccgnccactgtgaagacccatatcggtanctcanttggaaggtcacctatggtgncatctatcctcttggtgtcaagcnncaagggatcttaatnaatgg

SEQ ID NO: 36436 - DNA, 252 bp, Glycine max
  unsure (1)..(252): unsure at all n locations; Clone ID: 700968334H1
ctgctcgcagcttaacgctgcaatttctttccaagttgatcgagagacttcaggattgccttgcatacttttggtgtttgaagagctaatctgtctaccaaaatgaagggacgtgtaaggtgggatgaggctaatattggagaaattgaggcaaacaaacctgtgaggcagaaaattactgagcctaagactccatatcatcctatgattgatgatganngtctctcaaccncctgnaggnggaagttttga

SEQ ID NO: 36437 - DNA, 244 bp, Glycine max
  unsure (1)..(244): unsure at all n locations; Clone ID: 700968335H1
aatcggatttgggcttttcacaacatcatcaccaaagcggtggagcaaggaagacnagtgctcatggctactacagtggcatcatcaatggtagtagcatccttttgttccttttcaaaccccatcaccancaccccatcatcactctctttcaaagccannaccatcaccagaacaagaccaagaacaanaaccagaactagaacaacgaggttaacatggccgaatcctcaccctcgtggtg

SEQ ID NO: 36438 - DNA, 204 bp, Glycine max
  unsure (1)..(204): unsure at all n locations; Clone ID: 700968336H1
acgaatatttgtgtacttcctcttttgtgggtagattcaatttaccatgtcgagttcatcggaatactctcaattttccggccagaaaccggcgaggtcgccgganaaatcgagcttctctcagacttgtagcctgttgagtcaatacatcaaggagaagggtagcttcggagatcttaccctcggaatgacatcatgtgggnc

SEQ ID NO: 36439 - DNA, 248 bp, Glycine max
  Clone ID: 700968337H1
aaatggcaactgttcctgctcgtctctgttatctctccacaaaccccacaaccagaaacctcaacttctcagttttaaaaccaaatgtgttgtcactgcgttcattctctcttcctcaaaaacactatcttcgtctccgtccctgcaagtgttcctccaccgcccccgtgtccaccaccacctacgagttttctgatggttcttcggaggtggagttaagattaaacataggaggtttggatgtccga

SEQ ID NO: 36440 - DNA, 248 bp, Glycine max
  Clone ID: 700968338H1
ctttcttcgctacgtcgtcgttagggtcttcttcggatcggtggaacttgaccctgccggcgtgaattccgacgctactcgtggcgccgaattgctatagcggtgacgaatatgaaggttttcgttaagactctcaaaggcactcacttcgaaatcgaagtgacgccgcaagacacggtttctgaagtgaaaaaaaatatagaaactgttcagggtgcagatgtctatcctgctgcacagcaaatgct

SEQ ID NO: 36441 - DNA, 245 bp, Glycine max
  Clone ID: 700968339H1
agaattttttttctctctttcataacctagtgagactctgtgtcagagtttgtgaagtgaatcccataatcatgaagaaaggaaacttgggacttggtctcaaactctcagttcctgtgtctgatcaatctaattttgccaggttcctgactgaaagtgggacttttaaggatggggatctgcttgtcaacagggatggagttcgaattgtctctcagaatgatgtcgaagctccacctccaatc

SEQ ID NO: 36442 - DNA, 247 bp, Glycine max
  Clone ID: 700968340H1
ctctctccatccaacatcgaaacgaggtcgttttgtgttccgccgaaggaaccggaggttgtagcaggctagcagctatggatttggcatccaatctcggtggcaagattgacaaagccgaagttctctctgccgttcagaagtatgagaagtatcatgtttgctatggaggtcaagaggaagagaggaaagctaattataccgatatggttaataaatactacgatcttgttaccagcttttatgg

SEQ ID NO: 36443 - DNA, 248 bp, Glycine max
  unsure (1)..(248): unsure at all n locations; Clone ID: 700968341H1
cttaaagcaaatatggatgctgcttcattttggagtcagcaaccantaactgcaagggagtatgctttgagcactataattccagcatgtgctgctgttgccaaggcttcaaataatgcaaaggatctcattgagaaagnagtgtctacattttatcgaagtccagataatagtctctacatgcttccttcttccccanaggcactgcttgaggccatgggtgctagtggaccacctggccaggaagt

SEQ ID NO: 36444 - DNA, 245 bp, Glycine max
  unsure (1)..(245): unsure at all n locations; Clone ID: 700968342H1
tttttttagaggcaagtggataatctcccaattgcttgctgctaaggtaggtgttgaatatttcaggtgagtgctgctttcaagaaaatgtgcctaatacttgnttggaaattaaaccatgtgtcattatgtggataaatgcttgcattcctagctcatcccatgtggcatctggttcaagcgggtgatgacattaattaatagaatgcttnaggtcagncatagtcccataaatcantaaatct

SEQ ID NO: 36445 - DNA, 246 bp, Glycine max
  Clone ID: 700968343H1
gaaggcttgcaatgcccttctgttgaaggtgaatcaaattggtagtgtaactgaaagtattgaagctgtgagaatgtctaaacaagctggttggggtgtcatggctagccacaggagtggtgaaactgaggataccttcattgctgacctatcagttggattagcaactggccagatcaagactggagctccctgccgatctgaaaggcttgccaagtacaaccagcttctgaggattgaggagga

SEQ ID NO: 36446 - DNA, 226 bp, Glycine max
  unsure (1)..(226): unsure at all n locations; Clone ID: 700968344H1
gnacgctgctgccgaaacccttaccgatccctaaggtaantgagtaatcggtggttgagactggtggagaaggcgaagggtaggaaggaggaggtggttaccagagagtacaccattaacctccacaagcgcctccatggctgcacatttaagaagaaagctcctaaagctattaaggngatanggaaatttgcccaanaggccatggggacnaatgatgngaggg

SEQ ID NO: 36447 - DNA, 247 bp, Glycine max
  unsure (1)..(247): unsure at all n locations; Clone ID: 700968345H1
catcgctattctcttcattccatggctttgcccaaccagcaaaccgtggattaccctagtttcaaactcgttatcgtcggcgatggtggcacaggaaagacaacctttgtgaaaaggcatctcaccggagaattcgagaaganatatgagccaaccatcggtgtggaggttcacccattggattttttcacaaactgtggaaagattcgnttttacngctgggatncngcnggacnggagaattggg

SEQ ID NO: 36448 - DNA, 249 bp, Glycine max
  unsure (1)..(249): unsure at all n locations; Clone ID: 700968346H1
ctctttcataatattcccagctggtcccccaaaaatcaatcaaatngcggcgaaacgattttttgatgattctgatcaagacaacaataataagccaccaggcgataaacggatgagaactacaccaagaccttcttttgcttcggtaataggagaagtggtgatggtgaaaaacttgcagaaccttttctcaggcttggagcccttgcttagaagagtggtgaatgaagagatggagagagtgatgag

SEQ ID NO: 36449 - DNA, 250 bp, Glycine max
  unsure (1)..(250): unsure at all n locations; Clone ID: 700968347H1
ctactatactgcttcaccttctgctctagaaaattcagtggctgaaacatggcttcggctactctctctgtagccaaaccagcccttcaggcaaatgggaaaggcttctctgaattctctggcctccgaagctcatcaggcttccttcccttttctagaaaatcttcagaggatttccattctgtcattgccttccagacctatgcagttggaagcagtggaggatacnagaagggtgtgacagaagcaa

SEQ ID NO: 36450 - DNA, 252 bp, Glycine max
  unsure (1)..(252): unsure at all n locations; Clone ID: 700968348H1
gttcaggatgaggataagccttttcctgagtttccctccttcatcnccttccatggcagcaccttcacnctcctccggtctcaagtctctctnnnnnnnnnnnnnnnnnnnnnnnnnnnnnnnnnnctcncgccgcttctctctnctccctcnacnctcacaccaaccctncaaanncctcttcntnaccctnaaatccaaaccctccgacgacattgacacatcgttcttcgacaacatcaacccgnaaga

SEQ ID NO: 36451 - DNA, 148 bp, Glycine max
  unsure (1)..(148): unsure at all n locations; Clone ID: 700968349H1
cgaagggctatatagcataaacatttganncttcattgcacaatgtcgacctcttccattaacgggtggtgcntctcttccatctccccagccanancctctctcaagaaggccacattaggcccttctgtcttcgcaaccgttagca

SEQ ID NO: 36452 - DNA, 180 bp, Glycine max
  Clone ID: 700968350H1
cactcaccctcattaccaacacgaaagcatagccaaaaccttttttcgaagtctctgattttcctaatggctccggcaaaggcagagaagaagccggcggagaagaagccagcggcggagaaggcaccggcggagaagaagccgaagggcagaagaagatctcgaaggaaggagggagcg

SEQ ID NO: 36453 - DNA, 250 bp, Glycine max
  unsure (1)..(250): unsure at all n locations; Clone ID: 700968351H1
ctcttcttctcttcccanatcgcttccaatctcctaatntctcttcagcttctggggtctccattttccttcgtcttctgcatctgcattccgtagattcagttctcgtcggaaaatggacgttcgccgaagacccattcctccctccggcgatcgccgacaaacccagnagctgaagancancgncaccaccgnttcgcagactcttctgnntctctacctcaccaacgccctcttcttcgnngtgttt

SEQ ID NO: 36454 - DNA, 87 bp, Glycine max
  unsure (1)..(87): unsure at all n locations; Clone ID: 700968352H1
aaatgagggaagcangttatcagcttcagtgaggcacccttgangccaacacctgcctgccagtttctgtctggngnatgcatgcgt

SEQ ID NO: 36455 - DNA, 245 bp, Glycine max
  unsure (1)..(245): unsure at all n locations; Clone ID: 700968353H1
gcttagtacacttangctgttgaaattttttatcttcccttntcntgttagtgntngtggattttttcattcctgattttttaagtgtaatttggtctgntttcanatttattctgcatcatgtgttgtagtcattgttagtgatntcantcatgtcatgtntaattagtngttangctgtagnagatataagnagtttgnccattcgtgaatanatatctanaacattcatcgntgtnncgntc

SEQ ID NO: 36456 - DNA, 246 bp, Glycine max
  unsure (1)..(246): unsure at all n locations; Clone ID: 700968354H1
cgagaagcacgacaaagacgcaaactttgcagtgtacagagacaagaacttcaccaactatggaacgngtcgacccggtgggctcgactcgttcaaaaactactccgagggagagaatattccagtgaacgatttccggcgatacagccgtgactccgccggccacaaggacgggtttttaagngncggcacgagcggcaacgtcgtgcagcagagcttccacacctacgccgccgnagcnaccgg

SEQ ID NO: 36457 - DNA, 246 bp, Glycine max
  Clone ID: 700968355H1
aggaactgtattttgtcaaaggaagcaattaactcatggatgcacaaaccaaaaatcaaaggattacattgtgcaggatagctgcatgttacagcattcggagaaagcattgaggaggacacttttcctttctgtcttggtctcagctggtgtttttccaactttgtcgtcttatggcaagacaaagagtaagaatccgtatgatgaaaaacggttgcttcaacaaaatcggcggatacagaaagt

SEQ ID NO: 36458 - DNA, 247 bp, Glycine max
  unsure (1)..(247): unsure at all n locations; Clone ID: 700968356H1
gcagctgcttctcctatggcaagccaactcaagtccaccttcactaaaactcttgtagctcccaagggcctctctgcctcttcaccattccacctcctgccttctaagaggcaatttagcttcactgttagggccatccaatcagaaaagccaacctatcaagngattcaaccaatcaacggngatcccttcattggaagccttgaaaccccngttacatccagcccctnggattgcatggtncttt

SEQ ID NO: 36459 - DNA, 245 bp, Glycine max
  unsure (1)..(245): unsure at all n locations; Clone ID: 700968357H1
ttcactcttcagttctcgttgttgttcttcgctttcctgaaactagggttttcaatttcgattcattcgttaataattaaagatgtttgggagggcaccgaagaagancgataatacgaggtactacgaaatcctcggcgtctcgaagaacgcttcgcaggatgatctgaagaaggcttacaagananccgccatcaagaatcaccctgacaanggcggtgatcccgagaagtttaaagagntgg

SEQ ID NO: 36460 - DNA, 247 bp, Glycine max
  unsure (1)..(247): unsure at all n locations; Clone ID: 700968358H1
acacaaagcacaaagcaaagctcatccttgagttaaaaaatggcagcagcttcttccatggctctctcatccccatccttggctggcaaggccgtgaagctgggcccatcagccccagaagtgggaagggtgancatgaggaagaccgtcaccaagcaggtctcctcaggaagcccatggtacggcccagaccgagtcaagtacttgggcccattctcnggggagcccccgtccnacctaaccgggg

SEQ ID NO: 36461 - DNA, 246 bp, Glycine max
  unsure (1)..(246): unsure at all n locations; Clone ID: 700968359H1
cctgccatgccacancgccagggcgcccatggtggaactcccccctttttcgttttgtttttaaaatctcttttaagggttaacttcatacttaaaacatatcaggcccccatttcattacttgtatttgctccttctctcgtgaaagcntgaaacctagggtttcacatgtcttctctcttgtgaacctcttgagctttggcaagcttttccaangaacaaatcnggnaacctataacttcttct

SEQ ID NO: 36462 - DNA, 247 bp, Glycine max
  unsure (1)..(247): unsure at all n locations; Clone ID: 700968360H1
aagtatttgtgccaaagcagaagtccagtatcatgtggtactctaaataccttaacaatccaccaggcagagtcctcactcttgccgtcaccctcacgcttggttggcccttgtacttggcttttaatgtttctggaaggccttatgatagatttgcttgccactatgacccttatggtcccatttactctgaccgagaacgacttcaaatatatatatcagatgcaggagtactngcagtangnta

SEQ ID NO: 36463 - DNA, 248 bp, Glycine max
  Clone ID: 700968362H1
cccgaactattgtcccgcaacggggtcaagtttggagaagctgtgtggttcaaggccgggtcccagatcttcagcgagggtgggctggactacttgggcaacccaagccttgtccacgcccagagcatcctcgccatctgggccacccaagttatcctaatgggtgctgttgagggttatcgtattgctggtgggcccctcggtgaggtcactgacccaatctaccctggtggcagctttgacccatt

SEQ ID NO: 36464 - DNA, 249 bp, Glycine max
  Clone ID: 700968363H1
atcaagggttgtgaaagcagagaagtgagatacactaagttatcctcataaatacactctaattaggtggcaagataagtgtctaaccttagtaacattgccacatattgtgttcattttggaattgtgccactaaaattctattcaattcatctatggctgcctcttcttatgctatgcaatcaatcctggcaaaccctttgatccgcatttccagcgggtctagggtgaaccaatttggcgttcctg

SEQ ID NO: 36465 - DNA, 249 bp, Glycine max
  unsure (1)..(249): unsure at all n locations; Clone ID: 700968365H1
cttttactgcaaagggaatgcaagtgcttgaatatgttggtaaggagacaatggacttattaatcagtgaaactggaattgaagttgagaaagataaaanagaaggtgaagaagaaaatgatgaggatcaattatcagaggaagtgacttttgatcgatgcttttacatttatggaggtccagaacaattggaggaactggaggctttgtctagtcattatgcattggtatttaaccgaagaaaagcca

SEQ ID NO: 36466 - DNA, 249 bp, Glycine max
  unsure (1)..(249): unsure at all n locations; Clone ID: 700968366H1
ggtttatttgctcgtatgtatattgtcatgttgtttaatatttttgtgattagaattgaattgaaagtcttacaattaattgactatanaatcaatttccttcagaagagatcaatgtagattactactagctgccataatatatataaactatgacgtgtttattttcatgattaggattgaattcaaagtntcgtacaattaaatgactcgttcaatgttggtaatcggnatacaatctacttcaaa

SEQ ID NO: 36467 - DNA, 247 bp, Glycine max
  unsure (1)..(247): unsure at all n locations; Clone ID: 700968367H1
cgctgtggttttcatcgtcttccttctcttatatttcttttttttttgncttcgccgcacgccgaaacaatggccggaaaaggagagggtcctgctatcggaatcgatctcggaaccacctactcttgtgtcggtgtgtggcaacatgaccgagttgaaatcatngccaacgaccaagggaacagaangangccgtctnangtcggnttcactgntacngagcgtctnatnggtgatgcggctaaga

SEQ ID NO: 36468 - DNA, 100 bp, Glycine max
  unsure (1)..(100): unsure at all n locations; Clone ID: 700968368H1
cacacctagacaattggctcnnannngnagnagagcaancaaaaatggttctcacatccactggcatcacanccagangacgcaagancanagcctaaac

SEQ ID NO: 36469 - DNA, 245 bp, Glycine max
  unsure (1)..(245): unsure at all n locations; Clone ID: 700968369H1
caaatattgcctattccgcaatatggcggaaaatgcttcgattgagctgaacaagtttgtgttcttttgtttgttggtgctaatacaagtggcagtttctgaaatcatttttgaagagcgttttgatgatggatggcgaggtaggtgggtgaagtcagactggaaaagcagtgaaggcaaagcangttcattcaagcacacagctggaaaatgggccagtgatccagatgataaaggtattcaaa

SEQ ID NO: 36470 - DNA, 248 bp, Glycine max
  unsure (1)..(248): unsure at all n locations; Clone ID: 700968370H1
cgggaatatccgctattctagttgctgcttctgtctgtaacacaatacaatcanacattcatcaaatcactgnaaccaaagccacaagctngcgacatgcagaagaatggaagacggtgttnaccacttgggctttcgagaggaacaagggcgcagttcgatgttgaggacatgaaaatncatttggnnccggtttctcgtcaagaactttgnggcttgtcggatcgnatttttcggccntgntngcc

SEQ ID NO: 36471 - DNA, 246 bp, Glycine max
  unsure (1)..(246): unsure at all n locations; Clone ID: 700968371H1
gatcgagataactagaaacagtgtgatgaaaatgaaggtccttgttttcttcgttgctacaattttngtagcatggcaatgccatgcgtaacgatatgttccctctccgnatgaacactggctatggtgcccgtactccggaggtgaaatgcgcaagttggaggcttgcngtggaagcacacaacatctttggctttgagaccattcctgaagagtgcgttgaagcaacaaaggaatacatcnatg

SEQ ID NO: 36472 - DNA, 243 bp, Glycine max
  unsure (1)..(243): unsure at all n locations; Clone ID: 700968372H1
gctataggggccatgcttagaggtcgtgtgtatctgcaatgaagaggcctagccaccttcatcaccatatgnnnnnnnnnnnnnnnnnnnnnnnngaaactatgaactgcgtttatgcatgtcggaaaatcttctttngataagagtttggaaatcctcttgtaacaaaattttcattattnaaccttgntctttatatagcccgcaacacngagngagatgacaaattaacttggttaatga

SEQ ID NO: 36473 - DNA, 72 bp, Glycine max
  unsure (1)..(72): unsure at all n locations; Clone ID: 700968373H1
aagaatactactnnctgngttgtaatacctnagtggagnacaagatgaanccatggngtcatgagaacttcc

SEQ ID NO: 36474 - DNA, 243 bp, Glycine max
  unsure (1)..(243): unsure at all n locations; Clone ID: 700968374H1
gagaaagagggttctggattttcatcttcttccactgccgaggaagttactgaaggaatcgatggcactgccctcactggctattgttacaggggcatctagtggtattggtgctgagactacccgtgttcttgctatgcgtggtgtccatgtaattatgggggtgaaaaatatgaatgctgcanaaaatataaaaganncaatacttaaagggnttccctcagctaaagttgatgcgangga

SEQ ID NO: 36475 - DNA, 243 bp, Glycine max
  unsure (1)..(243): unsure at all n locations; Clone ID: 700968375H1
ttcattttcatattggatatggcatganttgggcatcatgccatcttctatntttccaagtgtcagatgtggcttggaaatggctatcctcaatgccattgctgatgcaaaaggctctaacatgctgaacatactctatccctcaataaatgggaacaataaatgtgaaaggtcattaaatgttcagatttgtgcattanttgattcaaatggatctccagctgaagttgctaatgttgctgc

SEQ ID NO: 36476 - DNA, 243 bp, Glycine max
  unsure (1)..(243): unsure at all n locations; Clone ID: 700968376H1
aagctccgtgtctctattctcaaacatgtagcaccaaacccnagttggcatccaagnnttataacactaatactgcatataatattattataatatacatancancagttattgatattgtngtgattgtgngtgattctggtgtcgtcccnttttcgangtctaaggttgtncggagtttatgtgnagattcaatgcggcganaagaaaccttagtgggatattgtgaggggtnctgggggg

SEQ ID NO: 36477 - DNA, 175 bp, Glycine max
  unsure (1)..(175): unsure at all n locations; Clone ID: 700968377H1
cggatctagagtcttcagtttctcctcgttgttcttcgctttcctgttttcaatttcgattcnttcgtaaatttaataagatgtttgggncggcaccgaagaagagcgataatacgaggtactacgaaatcctcggcgtctccaagaacggcttcgcaggatgatctgaagaagg

SEQ ID NO: 36478 - DNA, 245 bp, Glycine max
  Clone ID: 700968378H1
cgcgggtgaggtagaacccttccacggtggtgactgcgcgatgggtgcctacaagtatgtttcagagctatggcgcaagaagcagtctgatgtcatgcgcttcttgcagcgggtgaggtgctgggagtataggcagcaaccttccattgttcgcttgacaaggtcgacccgccctgacaaggctcgtcgcttgggcttcaaggctaagcagggctatgtgatataccgtgttcgtgttaggaggg

SEQ ID NO: 36479 - DNA, 247 bp, Glycine max
  Clone ID: 700968379H1
aaagaatcccaggcgaggagaaagatggaggggaaggagcaggatgtgtcgttgggagcgaacaagttccccgagagacagccaattgggacggcggcgcagagccaagacgacggcaaggactaccaggagccggcgccggcgccgctggttgacccgacggagtttacgtcatggtcgttttacagagcagggatagcagagtttgtggccacttttctgtttctctacatcactgtcttaaccg

SEQ ID NO: 36480 - DNA, 242 bp, Glycine max
  Clone ID: 700968380H1
attccccttatctttctctcttctctctccccgcccaaaccctaacttccctaccctattccgctttctctcatccatcatgaaaggaggaaagtccaagaccgaatctaagagagccgatgccaaacttgctgtgaataagaagggcgccgccaccaagactaggaaacccgccggaaaggggaaggcagcgaaagatcctaacaagccaaagaggcctccaagtgctttcttcgttttca

SEQ ID NO: 36481 - DNA, 248 bp, Glycine max
  unsure (1)..(248): unsure at all n locations; Clone ID: 700968381H1
cttgggcatgtgatatgtatctaatgcagctgtgcagtggaattgatgnaaatgcaattggagcgtgtgcacagcttgtgtttgcacctattgatgaatcatttgcagatgatgctctcttactgccttctggnttccgtatcataccattggnncctaaaanngatggtttgcgnttnanctgggatttgngnnttatcatcaacactgganacaggatctggtaatgnctgctcagctggtgaaag

SEQ ID NO: 36482 - DNA, 83 bp, Glycine max
  unsure (1)..(83): unsure at all n locations; Clone ID: 700968382H1
ttntttttctctgcactctgcaccaangcaactncgaagagataacantgcattgccatattcacaaaaggcgncacacaaac

SEQ ID NO: 36483 - DNA, 245 bp, Glycine max
  Clone ID: 700968383H1
cgcgcactctctctttttctctctgttttttgttctctcttcgcttaaaccctatcgttcttctcgttttcgccgattctcgccatgccgaaagctaaatccgacgccaaagccgccgatagcaggttgaagcggaagggcgctggtgctgggaggaagcaatcgaggaaagctgctaaggaccctaacaagccgaagagacctccaagcgctttcttcgttttcatgtccgagttcagagagca

SEQ ID NO: 36484 - DNA, 246 bp, Glycine max
  Clone ID: 700968384H1
gcctcacaccatgaaaccccttctccgcttcggaatcgccttcatcctcctcctccattcctccctcgcttctcatatcccctaccccaaagcaatttccgatttgaaggatacaattgtgaagggatttgggttcacggcggaagatgatgttacgattacggggttcgatcctcgagacgccgaggtagggcattccgtggagtaccaattcgacctcgaaatcgatcacaaggttattccctt

SEQ ID NO: 36485 - DNA, 244 bp, Glycine max
  unsure (1)..(244): unsure at all n locations; Clone ID: 700968385H1
tcataaccggccaaagcttctctctcttccatttatcccccataaataaaactaggtgaaaaaaatatactctgtgcttctcatgatgatagtgtagctgaagctgcttctgctgcagcattggtgatttggacacaaaaaaagtttcaaacttntcagttctctgngcttctggttnatcaattttgaaggggttcaatactntaccctattagttggttccctgaaatttgtagtggtatgg

SEQ ID NO: 36486 - DNA, 245 bp, Glycine max
  unsure (1)..(245): unsure at all n locations; Clone ID: 700968387H1
atactcctctcttgtctgtgcaatcaaaacaacaacattcattcatactgatcacttccttgcctattgcacattcttcatcacttcattcaacattnctctctcccttagctagtttttaccaatggctgctgcggttagtgctgcagtctcttttccatccaccaagtctacntctcncccaagcaggacctccatcattaccccagagngagttgtattcaagaaggcntnattgcaataca

SEQ ID NO: 36487 - DNA, 242 bp, Glycine max
  unsure (1)..(242): unsure at all n locations; Clone ID: 700968388H1
ccgctgcttctctctccaccgccgccagtttccgccggaataaatgcaccaccagcaagatttttcattcctcttccacgtgcatgccctctttcttgcatgatcatcactaccactctttcttattgcgagttgccaatgatgctgatagangtgaagtgtcatctgatactgcaatcaagacatcgtattcagaagccgataagatggttgatggtatggactttggtgagctttgcaat

SEQ ID NO: 36488 - DNA, 221 bp, Glycine max
  unsure (1)..(221): unsure at all n locations; Clone ID: 700968389H1
taactttcggttcctcccattttccngttcaataaattaaattaaaaaaaccgaaccggcggatctcggtggtttcatggaggctcatggcggagggctccgtcgcatccttgtgctcgccttctgcgtcgccggaatctggtccgcgtacatctaccaaggcgttcttcaggaaaatgtgtcgacgaagcgattcaacggtgaaaggttcgagcaccttg

SEQ ID NO: 36489 - DNA, 244 bp, Glycine max
  unsure (1)..(244): unsure at all n locations; Clone ID: 700968390H1
caaaagctgttggagttgatgcaaagaaggctttccctttccgcacctatcacttctatgcagaacctagagcagccaaagctaaattnggatggcaatcaaccacaaacctccctgangacctannanancggtttgaggagtacgtaaagattgggagagataaganatccatccagttcgagctagatgataagatattggaggcattgaaggttccggtgtcagtgtgatccatttatat

SEQ ID NO: 36490 - DNA, 243 bp, Glycine max
  unsure (1)..(243): unsure at all n locations; Clone ID: 700968391H1
gtcgattgacataacacccgaatccaagtgaaacgagaaaacactcatcatcatggattcagttgcattaaatggcaaaagcnatgataagcctcttcacgttgccatgctcccatggctggccatgggtcacatatacccttacttcgaagtcgccaagattcttgctcaaaagggtnactttgttaccttcataaanngccccaaaaacattgaccgcntgcccaaaaccnggaaacattt

SEQ ID NO: 36491 - DNA, 243 bp, Glycine max
  unsure (1)..(243): unsure at all n locations; Clone ID: 700968392H1
gttggcattcttgggcattgcatgggcctttggtggcatgatcttcatccttgtctactgcactgctgggatttcaggaggtcacattaacccagcagtgacatttgggctgtttttggctcgcaaggtgtctttgatccgagccatcatgtacatggtggctcatgcttgggtgctntctgtggagttggtttagttaaggctttccaaaactcttacttcaacaattatggtgggggngct

SEQ ID NO: 36492 - DNA, 247 bp, Glycine max
  unsure (1)..(247): unsure at all n locations; Clone ID: 700968393H1
ctttgtttctgtgtgttcgagattgaagaagatgatgcaggctggacccggcggcatggcccaacaagcgaaccaacaatacgcacagcancagcaacaaccctacatgatgatgccgccgcagcctcagccccctcagatgtgggccacatcggcccagcctccgtcccagtcggtggctcctccgcaacccaccagcgccgatgaggtccgtaccctctggatcggtgatttncagtactggatg

SEQ ID NO: 36493 - DNA, 248 bp, Glycine max
  unsure (1)..(248): unsure at all n locations; Clone ID: 700968401H1
gttctgattctctctctttctgactttctctttctctcccccctcatatattcttcttttcttcagaaggaccacttcactttcagaaacccagtttcgcatctgggtttttgcttgttgaagtgccaattttgaagattaaaataaaataactatgacttggaaaagcagaggagaattgccttctagaagcgttatctcgcagagatgggcactgtttctctgcttaggaagtttctgtgcngnaa

SEQ ID NO: 36494 - DNA, 246 bp, Glycine max
  Clone ID: 700968402H1
gttgaatgcacatgctggtctccggtccggttagggcatttctgggaccttaaatcaccaatttctcacccaatcaattccaattaagctgagagtgtttctgatctatatgtgatgggtgctccgaagcagaaatggactgcagaagaggaacaagcacttaaagccggagttgtcaagcatggtgttggtaaatggcgcaccatactgaaggatccagagtttagtagtgtcttgtacctgcgg

SEQ ID NO: 36495 - DNA, 245 bp, Glycine max
  unsure (1)..(245): unsure at all n locations; Clone ID: 700968403H1
attanattctctcactctcttactctttcactctacttctctctcctatnncggctagggtttaggtttttctttcaccgtctccgttccttcaatcttcttattctctttcatctctgatggagacgttgcgggtttagttctaaggggtggttctggcctngggtttttggaacgnacggtgttcgtttncgggttgggaaaacaaattctgagagatggcaaccacgaacccttttganttg

SEQ ID NO: 36496 - DNA, 254 bp, Glycine max
  unsure (1)..(254): unsure at all n locations; Clone ID: 700968404H1
attggttttgctgttaatgagttaaaggagcatgttgagaactggcacctattatctagcaaagtatactttgttatgcaagttgaacccctgatatcaagaattcgcacttcagggctcaatattttccagcagctgaagggnttctnagcatggtccnccntgggganttnaggnccctnaatttnagntcnntgtagcagaaaaacttgaggctttgggggnccanganggaattccnccccagtcattag

SEQ ID NO: 36497 - DNA, 244 bp, Glycine max
  unsure (1)..(244): unsure at all n locations; Clone ID: 700968405H1
cttcactctgctatcccccatattcctgtgtttcctttgaaaaaaaaagaagaagaaaaaacatgtctaggttttttggattcttctttgtgggtcttacgttgatgttggtcggtgtggcaaatgctatggctaactcttccaacaaatttgatcaactcttccaaccaagttgggctttngaccactttattcatgaaagggatcttctcaaactcaaacttgacaaattttccggggctgg

SEQ ID NO: 36498 - DNA, 205 bp, Glycine max
  unsure (1)..(205): unsure at all n locations; Clone ID: 700968406H1
gaaannccgtgctttgctaatctantaattttaccgcgtagcttcgangttaattcttcgtgttcttgtgatcttctgttggagtatttacaacactcctttgtaagtttaactaaagaggctaattaattttcaattggaccgcagcagatggctgaggagggtcacagggttactctaaatgtttatgacttgagccaaggtc

SEQ ID NO: 36499 - DNA, 243 bp, Glycine max
  Clone ID: 700968407H1
ttgaaagttaagaagtagcaaagatgtttccattcgggcacaagggtcaaaagataaaggggactatggtggttatgcagaagaatgtgttggatatcaacagcatcaccagtgttgacgggatcgtcggcaccggcttagacttcttaggcagtgcactcgatacagttacttttttagcctcctccatctccatccaacttattagtgctaccaaggctgatggtgggaaaggaaaagttg

SEQ ID NO: 36500 - DNA, 234 bp, Glycine max
  Clone ID: 700968408H1
cattttctctctctaaatttttctttctcattttctctctctttcttatctcggaaaatctttctgagctttcaaacgaactttggaattctccagaaccttctcgtttttccgccgaggatcgcgattccgcagaatcgttctcaatcgtcgcttgattcggttcgattccgtggttcgagctgcatgaactggttcgggaagctggattcatcatcgtcgaacttgaacttt

SEQ ID NO: 36501 - DNA, 241 bp, Glycine max
  unsure (1)..(241): unsure at all n locations; Clone ID: 700968409H1
tttgtgtgaaagtnagacggatctgtggcaattttcgctttctttatgttattgtgctgttcaatttcgatgttgtcttgggatttggttggtgggtttttgttgtcaacttgttttgactatggatctgttgggattagtggttttcggcattgaaatcacgtgcatttagttcgtggttctgcatttgttgctagatctgcttttgtctgagtggtcaaattatagtcatgctgaagct

SEQ ID NO: 36502 - DNA, 242 bp, Glycine max
  unsure (1)..(242): unsure at all n locations; Clone ID: 700968410H1
ggtttgaggagatgaacatggatttgttnaggaagtgcatggagccggtggagaagtgtttgcgtgacgccaagatagacaagagtcaggttcatgaggttgtgcttgttggaggttccactaggatccccaaggttcagcaactcttgcaggatttcttcaacggaaaagagctttgcaagagtattaaccccgatgaagctgtggcgtacggtgctgctgttcaggccgcgatcttgagc

SEQ ID NO: 36503 - DNA, 239 bp, Glycine max
  Clone ID: 700968411H1
aaaagaagagcatcactgaactaacaaagcaaccctatgtcgaaggtggtttgtgtcaccggagccagcggcgccatcggatcatgggtggtcctactcctcctccagcgtggttacaccgtccatgccaccgtccaagatatcaaggatgaaaatgagacgaaacatttggaggaaatggaaggagcaaagagtcatctccatttttttgaaatggatcttcttgacatcgactccat

SEQ ID NO: 36504 - DNA, 242 bp, Glycine max
  unsure (1)..(242): unsure at all n locations; Clone ID: 700968412H1
ctgcatcagcatcagagcacccgctagggtttcttctgcacacccnaccaaatggctgatcctgagttggaagcaatcagacagagaaggttgcaggagcttatggctggccatggtggcgtgggaaatcaacagaactctgaacaggagaaagctcaggatgatgcaaagagggaggctgaggaacggagacagatgatgcttagtcagatattgtctgctgaagcgcgagaaaggcttgc

SEQ ID NO: 36505 - DNA, 244 bp, Glycine max
  unsure (1)..(244): unsure at all n locations; Clone ID: 700968414H1
acctttcttatattcaggaaagtaagatcatctgcatcgccgacgcttccaacaataacaatggccgataatgcaacaacgcaaggaagcaacaccctattttctccttacaagatggccaaattcaacctctctcatagggtggtgttggctcctatgacaagatgcagagcgttgaactggattccacaggcagcgcttgctgaatactacgctcaaagatcaacaccaggtggntttctca

SEQ ID NO: 36506 - DNA, 246 bp, Glycine max
  Clone ID: 700968415H1
gtcgtgcgcacgcagcacctcttgcttcttcttgaaccctagcctcttcgttgttgttccattgaatctcttccacattgaagcaatctaccgcctcttcgtcgagttccttccgacgagttcgaccttcccggctggaacttccgaatcaaggactgccagcagggctttcgctccaacgtcggcaacaaagacattggtctcacttcgaagaaaccagggaagacggaggtcatcaatcagttc

SEQ ID NO: 36507 - DNA, 247 bp, Glycine max
  unsure (1)..(247): unsure at all n locations; Clone ID: 700968417H1
cagcaccgcacttgttctgctccgccgcgattgcaatcgtttccactcccgccgctgatgggtttctcaaaggaacagcttcttgcgcggttaaaggagcttcaggttccattttcccagtatgagcatcctgttgttttgaccgtcgacgctcaggctcaatatgttggacatttggggggtggcctcagcaagaatttgtttctcaaggacangaaaagcaggttgaatntggtncgnnttnanc

SEQ ID NO: 36508 - DNA, 244 bp, Glycine max
  unsure (1)..(244): unsure at all n locations; Clone ID: 700968418H1
gctctcaatgtgtggtttggaagtttgcttgcatgtaaattgtttcatgcagatgtacatgcaggaaatctgtggcttctacatgatggtcatattgggtttcttaacttcggatgttgatgctaagacctttgccagagatttggaaaaagtattctcatcaattaaggcaagtattgtaactcacatatactcactggncaatcangggggactacggggggaatggcatttttgaggnncc

SEQ ID NO: 36509 - DNA, 245 bp, Glycine max
  unsure (1)..(245): unsure at all n locations; Clone ID: 700968419H1
caaaaaggggttcaattctagctagttctattacgtcgtccgcnaccatgaacatggcgatcgcgcttctgtncatggttttcgcagtttcatcagctttagacatgtcaataatatcacacgacaacgctcatgcggatagggccacgaggcgcaccgacgaggaggtgatgtcaatgttcgaggagtggctggtgaaacacgacaaggtgtacaacgcgctcggtgagaaggagaagaggttt

SEQ ID NO: 36510 - DNA, 245 bp, Glycine max
  Clone ID: 700968420H1
agagaagcaaaaaatacaaagaaaatttgaggtggaaaaagcaaaatcgttaggtgggaatagcacgggcccaacgaatgacgtccaaaaattacgtaccatgaactgaacagaaattaggccgaacaggtaaacataaactgaataaagagagagaaacgttggtggccatgtaatgacagagaggccaacgaggaagagaaaaatgggagacacaaaggagagagctacgaagaaacccgcgg

SEQ ID NO: 36511 - DNA, 244 bp, Glycine max
  unsure (1)..(244): unsure at all n locations; Clone ID: 700968421H1
ctagaacataacaagagttcaattctctccttcctctacctattcatgtcnnnnnnnnnnnnnnnnnnnnnnatccttctctctgagaaagaaccagtgagtctctgaaaaccctagagtgtgagtgcgagagagaaatgtctgaaaccttctgcagcgactgcaagaggcagacggaggtggtgttcgaccactctgcgggggacacggtgtgctcngatngggcctctttnggngtcacacc

SEQ ID NO: 36512 - DNA, 244 bp, Glycine max
  unsure (1)..(244): unsure at all n locations; Clone ID: 700968422H1
ctttagcaaaagaaaaaaagaaaaaaaagagtgcatcagattanttcagaagaatgggtgaagaggtgaaaagcttggttgttgaagaggaaatgggggtggtggaaagcaaagaatggtacttggtatcttatgctccacacggtgttccaaccaccgatcatcttaaactccgcaaggttcgtctatcaattgcacctgaatcaatccctgacgcccatgtngccattgagatgctgctttt

SEQ ID NO: 36513 - DNA, 242 bp, Glycine max
  unsure (1)..(242): unsure at all n locations; Clone ID: 700968423H1
cgtaaagctcaaagctttttgacagtttgagcatttcagacaaacatgggggatgatggaaagaagattagtggagagggggggttagtgaaggttgagccaaaacccagcaatggtttcacctcaaaagtggttgatttgttggagaaattggtggtgaagttcttgtatgattcttcactgccccatcactacctcactggtaattttgctcccgtgagtnagacccctccaaccaggga

SEQ ID NO: 36514 - DNA, 244 bp, Glycine max
  unsure (1)..(244): unsure at all n locations; Clone ID: 700968424H1
ctttcttctcttctcttctctgcaacacaatctctctccatctggttcaaacactgtcattcttctcctgcaggaaaaaaaatcagatctaccctctcacaatgttgcaggagatgtggaatgctcctcccggtctcagaccctccaagtctgcaccttgttctccggcaaagcctcttggggtcgttccaagaacgcgttctgagtccttccacgtggctcanaaggtcccagttggtgacac

SEQ ID NO: 36515 - DNA, 242 bp, Glycine max
  unsure (1)..(242): unsure at all n locations; Clone ID: 700968425H1
atcttccttcccctctctcattcaagacaggcctgtttttgctgcccctgcccccatcatcaccccaactgtgagagaggatatggcaaaggaatacgagaaagctattgaagaacttcagaaattgttgagggagaagagtgaactcaaagcgacagtgctgaaaaagtggagcagataacagcttctctagggacatcatcatctgatggcatcccatcatcagaagcctcagacangat

SEQ ID NO: 36516 - DNA, 243 bp, Glycine max
  unsure (1)..(243): unsure at all n locations; Clone ID: 700968426H1
ctttatatcctcattatttgaagttagctctagtaatttgatcgagtactatgaatcctagaggtttggagggagcaggaagaggaagaggaagaggaagagtcacaacccttctgattaagtgcacgttggcaggtaaatgggaaggggttatcgacatgtaccgtaatttcccaacgtgtncagattcacaaagatcaccgagtccctgggcactgcactgcacgtggccgtagacatgaa

SEQ ID NO: 36517 - DNA, 240 bp, Glycine max
  Clone ID: 700968427H1
tttcttcttcaattcatatcatatcaattagatttgttttcagagtttgctagtgagataccatggacaactacaacagcaatgacttttggaaattcagtgaccagttgaggcttgaatctggtttggccaatctgtctctgaatgattattccatttggagcaacagctacagctccaagaggcctgatcagaggaggaactttgatgtcaagggcagtgatttcaacaactcatcaa

SEQ ID NO: 36518 - DNA, 243 bp, Glycine max
  Clone ID: 700968429H1
atcgagataactagaaacagtgtgatgaaaatgaaggtccttgttttcttcgttgctacaattttggtagcatggcaatgccatgcgtacgatatgttccctctccgaatgaacactggctatggtgcccgtactccggaggtgaaatgcgcaagttggaggcttgctgtggaagcacacaacatctttggctttgagaccattcctgaagagtgcgttgaagcaacaaaggaatacatccat

SEQ ID NO: 36519 - DNA, 228 bp, Glycine max
  unsure (1)..(228): unsure at all n locations; Clone ID: 700968432H1
ctcaaattctgaggtacagaaatncgaatttgagcttcttagattggattcacgcccagangtcccatgtgaaagccttgaatggttggctggtaagatgtctattatacgaacccgaagaagtacccgatgattcaactcccttctcacctagcaagattggggcaccacctgtgtttgtgatctgtcacaaatggtcaagggcagtggataatctctcagagaaga

SEQ ID NO: 36520 - DNA, 247 bp, Glycine max
  Clone ID: 700968433H1
ctcataacacaaagcacaaagcaaagctcatccttgagttaaaaaatggcagcagcttcttccatggctctctcatccccatccttggctggcaaggccgtgaagctgggcccatcagccccagaagtgggaagggtgagcatgaggaagaccgtcaccaagcaggtctcctcaggaagcccatggtacggcccagaccgagtcaagtacttgggcccattctctggcgagcccccgtcctacctaa

SEQ ID NO: 36521 - DNA, 244 bp, Glycine max
  unsure (1)..(244): unsure at all n locations; Clone ID: 700968434H1
cccacccttcctcactctcactttcctcctccttttcttcaatgcttccntcgctgcgatttactcaacgacaacatgttccaacatagtgtcgctgagatatcgcagcgacagaatttccgtaacggactttggaggtgtcggcgacggccgcacgctgaacacgaaagcgttcagggcggccgtataccgcattcagcaccttagaaggcgcggtggcacggtgntttacgtgcctcccggg

SEQ ID NO: 36522 - DNA, 246 bp, Glycine max
  unsure (1)..(246): unsure at all n locations; Clone ID: 700968435H1
caaaaatttggaaccctaatatgcaaattaacttatcatcaaggctagtacagatacaaagtcctggactcaatcccatcttcaattcccatcttagctacttctcaaaccctcttatcatcacaagtcacagctgcaaagaaagtacnagtaaccattctctctctctccttccacgcaataatcaangtcgcaatcaacctntatgatanaaanatccccaatccccaaccgttaattnttcat

SEQ ID NO: 36523 - DNA, 242 bp, Glycine max
  unsure (1)..(242): unsure at all n locations; Clone ID: 700968436H1
ccgaagcagggtggattgaaaagcacgaacaggagcgatggccgcggcaacgttgtacttggcaaaaccgccttcgtcttttactcccaaaattccgtttccaagagtgagggacagtggaattggaactgtaaagtgtcaagttaaaacccaagtgaaagcgggtatcctgggactgggtctgggtctgntccatnccttaacttcgttcgaacccggttcatgtctccaactgcaattcc

SEQ ID NO: 36524 - DNA, 242 bp, Glycine max
  unsure (1)..(242): unsure at all n locations; Clone ID: 700968437H1
tgtgagctataagctagtttatcgtgaggagaatatgaagttgtttgttntctttgttgctgcagtagttttggtagcatggccatgccatggcgcaggctaccaaaggttccctctccgaatgaaaactggctatggtgagcgttcttcggaggtaaaatgcgcaagttttaggcttgctgtggaagcacacaanatcngagcctntaaaaccattcctgaagagngcgttgaaccaacat

SEQ ID NO: 36525 - DNA, 241 bp, Glycine max
  unsure (1)..(241): unsure at all n locations; Clone ID: 700968439H1
aaagagagtgtagaactgaagatccaggagcttttggaactgagaaattgttggaggaaacagtctttcangatcagaagaagagatctcatggggtctactattgaatatcacatccaacacataattaaaatcccagaagagattgagcctgcattgtggccagaatgttgtatctacaaggtacctactagtcttttgaaggtgaaagaggtggcctacactcctctattgatctcaa

SEQ ID NO: 36526 - DNA, 242 bp, Glycine max
  unsure (1)..(242): unsure at all n locations; Clone ID: 700968440H1
cttggtaaacgcaacagcgatagaactctagacatagaatagtaaacggtgttagcttcgatagattaaacgaacacagagcgagcgaaagtagaatctgaaaaacaatggcggcgaactacgacacccacgccgtggcttccgatctgatcgacttcctcaacgcttctccaacggctttccangccgtcgacgaggnaaagaggcgtttgcgtangcggggtaccaccaactctctgtgg

SEQ ID NO: 36527 - DNA, 241 bp, Glycine max
  Clone ID: 700968441H1
ctcacttcaatctgcaacaccaactgttcagcaactccagatccgtgggattagatatcagaaaaagaacaactgcttatgcccttcaacatgccaattcaaatgcattagatgagagaaacaataattctttgaatagtggcctgttagttggatctctgtctgtatgttacacatccttaaagaagtgctcatcattggcagcatcagctaaggctcatttttccagtagtgatgatca

SEQ ID NO: 36528 - DNA, 237 bp, Glycine max
  unsure (1)..(237): unsure at all n locations; Clone ID: 700968442H1
gcgaccttccacacagaaaccgngagcncagggttggccttgagcagactccacatcctattccactcnntggcactcnngtttctctatnactaccgcataagccanatcttactggaaccaagctttgtatggatttncatgaccatagcggagntatcttcggcgagctctggctcttcaaacaggcgttccggtggcggcccgtgtcgagggccgtcatgccgganaagctgc

SEQ ID NO: 36529 - DNA, 237 bp, Glycine max
  unsure (1)..(237): unsure at all n locations; Clone ID: 700968443H1
caaagtgaacctcaaaatcagcctctaatatttttctcactgtnctctccagagaacttgatagagagatggcagctgcaacatctggtgctgtgttaaatgggttgggatcttccttcttgagtggaggaaacaggagccaaacccttctggccactgctattggaggcaaagttggtgctgcgttactgtnatccccagaagncccatgtggnacntgtgttgcaccnaaanatt

SEQ ID NO: 36530 - DNA, 241 bp, Glycine max
  Clone ID: 700968444H1
cacagttgcatccttcatccaattcaaaacgaaattgacacaaactcaacagatcgaaaatccataatgttgttgcgtaagaacaataaaaatctcccatttgtgttttcttctcttcacgcacaccaacaaaacctctctctcatcggaatctccaaaaagaatggacaacaaaacgcagcagtccgagagtaagcaaaacgacaacgacgaggaagttgcgccaaaacgacaagaccct

SEQ ID NO: 36531 - DNA, 239 bp, Glycine max
  Clone ID: 700968445H1
gatgccgtacgtggaaaaagcaagcaaactggagtaggtcacggccaacgaagatagagatgatttggattcctcaattttggatgggaaatcgaccagaccaagaacattgatgtgcctgaattgtgtttagttatttgtttgtaccctggtgtttataaatctgacaaggttgatcctgaagtctaatcaaaattcgattggttttttcagaaggatgtggtggggaaaaaaagatg

SEQ ID NO: 36532 - DNA, 242 bp, Glycine max
  unsure (1)..(242): unsure at all n locations; Clone ID: 700968447H1
tcccagtgatcaattcaacgatgttagagcagttgctgatattcacgcgcggagggctcatcctctggacctgcaaccacctcagcaacgccctgaggggatctccgatcgacacgttgatccgatcctgcctcctggaggagcgatccggtgcggcctccttcaactacgacgcacctggagccgcatactctctcaaatggaccttccacaacgacctaggccncgtctttggtcgcngt

SEQ ID NO: 36533 - DNA, 245 bp, Glycine max
  Clone ID: 700968448H1
gcatggagagggaggaagatgttaaggttggagcacagaaattctcagagaggcaagcattggggacaggagctcagggtgacaaggactacaaggaggcaccaccagcacccttgtttgagccaggggagttaaagtcatggtctttttacagagctgggattgcagagtttgtggccacattcttgttcctctacatcactgtcttgactgtcatgggtgtcaacagggcacccaacaagtgc

SEQ ID NO: 36534 - DNA, 241 bp, Glycine max
  unsure (1)..(241): unsure at all n locations; Clone ID: 700968449H1
tcaaatgagctatanagaagggccattctgttacaatgttggatactctcaaatggatttagaagacaagttccttgccaaggggagggttctgggctctagtgcaggtggtctagctactgctgattgatgcatacatgataacaagtttctggtgttcaaagcctttcattcagngctcaangtacncngnaaaaaangggcttccattnggtttnaaaatgtnnagntcttnttgngg

SEQ ID NO: 36535 - DNA, 156 bp, Glycine max
  unsure (1)..(156): unsure at all n locations; Clone ID: 700968450H1
gaagctgatgctgagggcagcaaaatggaggaggttgattaaacttttatatcatgcggaacggagttggctatgttttttctcttttnttcctttcggattgctctgacagtgtttaatggataattagctaattagctataatttcgtggttct

SEQ ID NO: 36536 - DNA, 242 bp, Glycine max
  Clone ID: 700968451H1
catgcttttaatttcctagatctcccaaacaaattgtagcataagtcccatggccaaagagactagtgttgtttatctatatcccagcaaatcacaagtttggggtgagaattttgatcataaaaaacttgtaataacaacactagctgctaatggaaagaaggaggagagtaatggagcacctaatgacacatatcctgcgtttcccgggtggtatgctgatgtttcctggccaggagaag

SEQ ID NO: 36537 - DNA, 244 bp, Glycine max
  Clone ID: 700968452H1
attcccagttccctttgtcaagtatggctcttaatcttctaaatctttcaatcttgttctttttactctttattgtgaatccatttccctttgtcgagccaagagccttacaattacctgtgttcaccaaaactctccaaaacctcaggggcgttcacaagggacaaaaggcgaacggtgtgggagaactcagaagctacctccaacattttggctacctaacaaacggtgattcttcgaacga

SEQ ID NO: 36538 - DNA, 243 bp, Glycine max
  Clone ID: 700968453H1
tttcaagtaacttaaggtttcaaacctaggaagttggaagtcatggcagcaacattgatggcagcaacaacaagttctggtactcttaaagcaactcctttccttggccaaggcaagggtgccaatgccaatgctcttagggatgttgtctccatgggaactgggaagtacaccatgggcaatgatttgtggtatggaccagacagagtgaaatacttgggacccttctcagctcagacccct

SEQ ID NO: 36539 - DNA, 242 bp, Glycine max
  Clone ID: 700968454H1
tagtaagagccttatttgaacatctatcgtatccaaaaacacaagtttggaaaaacgttaattgtgggaaacaaaggaacagaacaatgagcgggaagccagtgagacctcgtacccgtgtgggaaagtacgagctgggaaaaaccattggtgagggaagctttgctaaggtcaagtttgctaagaacgttgagaatggtaaccatgttgccatcaaaatccttgatcgtaaccacgtcctc

SEQ ID NO: 36540 - DNA, 242 bp, Glycine max
  Clone ID: 700968455H1
ctcaatgaagggagttacagtgaaagttgaagaaacaatggcgtatgctaatgctgcttcaactagcccagcaacatcttcaaacctctccccgcaacccatggaagggttgcacgaggtgggtccccctccgtttctcaccaaaaccttcgacgttgtggaagacccatccaccaacgacatcgtttcgtggagcagagcccgcaacagtttcgtcgtttgggactctcacaagttctcta

SEQ ID NO: 36541 - DNA, 242 bp, Glycine max
  unsure (1)..(242): unsure at all n locations; Clone ID: 700968456H1
gttctaagcaatggcgattatctccgatttcaacgaagaggagccgaaacccgctcactcttcaccaccgcaaccccaannnnnnnnnnnnnnnnnnnnnntcagtgctacttttgaccggtcaaatcccatcgctttcctggagagagtcttcgaattcgtctccgaacagagcgactttctggcgacgcagagcgccgagaaggagatagtgtcgctggtgcacgccgccgggaagaaga

SEQ ID NO: 36542 - DNA, 239 bp, Glycine max
  unsure (1)..(239): unsure at all n locations; Clone ID: 700968457H1
ctttctctccttctggtgagcacacatgatttttgccaacaaagattgagccaattgataagaaacgaactcatatcccttaaggatgtggatttgattctcgttgtcgatatgaagaccttgttggtaggtaatctatacgtaccttataagcgttctttgagtcttgagccctgtcttgacctcggtgaatccaggatccagctcacctaaattttccacaaataaaaaaantagtt

SEQ ID NO: 36543 - DNA, 238 bp, Glycine max
  Clone ID: 700968458H1
ggaaaacgtgtggggcttcacactgtgctggttggtacatcacaaagatgtaaaggtgcagattatgctttggaaagcattcacaaccttagggaggctgtgcctgaactatgggaggctgatataaaatcagaagctgcataccctggaaagctagctgtggagacatcagtcacagcttgagattattattatgtgcatgaaattaattaagccccttcaatattgttcatttaat

SEQ ID NO: 36544 - DNA, 133 bp, Glycine max
  unsure (1)..(133): unsure at all n locations; Clone ID: 700968459H1
gcactattcaaataggagcattagctatgtttgttaatgtcacnttatgttatgtgggtaagtcacctaagacactccacgtacctacgttgttgtctcttaccggctttaataaatcttctgcccttgttcc

SEQ ID NO: 36545 - DNA, 240 bp, Glycine max
  unsure (1)..(240): unsure at all n locations; Clone ID: 700968460H1
accactctctcactcttctctgatatgctttttctttttnttttttgcattatttttaatctctctaggttctactactactctttaacaagcaaggaatgcttcaccattaccgnactcanaaccatnaagtgcaaattgcaaaacactagaaagaaccctgtcttctctttctttctcgagcccctaccttctttactatctctctctctacttgtgtgttgtagtcctgtagtaata

SEQ ID NO: 36546 - DNA, 242 bp, Glycine max
  Clone ID: 700968461H1
aagcttttcacatggaaatcggctcccccgcattccttaccctcgaagactattcttccttcttcttccctgacatggatcccattcccaattccaatgtcaacaagcgtcgtgcaaacaacgaccagttcgacttaaatgactccgcattcagccacctcctcaattccatcatggatcctaaccatttccaacaccaatccaaaccaatccaattcgactcctccccaaccaagagagct

SEQ ID NO: 36547 - DNA, 244 bp, Glycine max
  unsure (1)..(244): unsure at all n locations; Clone ID: 700968462H1
caatttcattgctcagagttcccaaattctccccaagagataaaatgtctctaatcccaaaggncttcggtggccggagaaacaatgtgttcgatcctttctcactggacgtgtgggatcccttcaaggattttcctttcccaaatacgctttcttcagcttccttccctgaattttctcgggaaaattcagcatttgtgagcacccgtgtggactggaaggagaccccagaggcgcacgtgtt

SEQ ID NO: 36548 - DNA, 241 bp, Glycine max
  unsure (1)..(241): unsure at all n locations; Clone ID: 700968463H1
ttctggattccgactcgccgcattgactcggtccgggttggggtcgactcagttcggtttttcattctctcgcgaatctaatctataggaaaagctaagggcacatcacaatgaaggcattgattctggttggggggtttggaacaaggctgaggccactgacactcagttttcctaagcctctngtggattttgcnaacaanntaggnttctgcancagatagggcccttaaggccnngg

SEQ ID NO: 36549 - DNA, 245 bp, Glycine max
  unsure (1)..(245): unsure at all n locations; Clone ID: 700968464H1
aaaaacacactgtatgaggtgaaagaggttcttgagcttctagacatagncaattttcagcagaaacttaaaggtgttggatcaccaatcaagtgtccttttggtgttcctgaaaaccctggattcactgttgggttgaatccactgttgagcaagttgaagatggaggttctcagggacggtatgtccacccatttgttgactggtttgggtggatctggtaaaacaactttggctacaaagct

SEQ ID NO: 36550 - DNA, 215 bp, Glycine max
  unsure (1)..(215): unsure at all n locations; Clone ID: 700968465H1
catgaatgtgtagaattgcttaaagatatacccacacaaaacctttattagacatgactaaggtttatcatgctaagttttttaacatctgcaagaaacgaaaggctgtcaaagaagcttttgatttcattaggctcattccaaatccaatgctgagtacatttaatatgcttatgtcagtgtgtgcaagctcccaagattcagaaggtaatntc

SEQ ID NO: 36551 - DNA, 241 bp, Glycine max
  Clone ID: 700968466H1
cttcttcagtggtggaagctactagaacactagtttgttgagcactgcgatgaggaagtggacggttgcttccgctctccttcttctctctctcctctttctctttgcagatcaaggtcgaaagtttcaggcgaatgccgagggagattccgacgagcttgtagatcctccgaaggtggaggacaagatcggtgctgtgcctcatggcctttccaccgattcagatgtcgtcaagagggag

SEQ ID NO: 36552 - DNA, 243 bp, Glycine max
  unsure (1)..(243): unsure at all n locations; Clone ID: 700968467H1
tggtttccaattgcgtgcacccatgtcctctttnctctccttatcactcttctgcgccctccctccacgattcttccttcctccatggaacaaagctctttcccttttctcgaagagtggcaccacgccgcttcaactcttcctctgccaagtgctccctcgaccacatccccaaacagttcagaaagnnaaatctcaaagatggattgatggaaaactacaagaatgcacctcaattttatt

SEQ ID NO: 36553 - DNA, 241 bp, Glycine max
  Clone ID: 700968468H1
cacttgcaaactagttttgttttgggaacatcatcacattacattagattggtggtaatggcagcgtcactacaagcagcagctactttcatgcaacccaccaagttgagcaggagcaacactttgcagcaaaagtctactcagtccatttccaaggcttttggtttggaacctgttggagctaaaaaggtcacatgctcccttcaggctgatcttaaggacttggctcacaagtgtgttg

SEQ ID NO: 36554 - DNA, 242 bp, Glycine max
  Clone ID: 700968469H1
ctcataacacaaagcacaaagcaaagctcatccttgagttaaaaaatggcagcagcttcttccatggctctctcatccccatccttggctggcaaggccgtgaagctgggcccatcagccccagaagtgggaagggtgagcatgaggaagaccgtcaccaagcaggtctcctcaggaagcccatggtacggcccagaccgagtcaagtacttgggcccattctctggcgagcccccgtccta

SEQ ID NO: 36555 - DNA, 198 bp, Glycine max
  unsure (1)..(198): unsure at all n locations; Clone ID: 700968470H1
ctttctcagaaatcagaattgagcaagcgattggatttggataacngaaggngatcatcattngatatattantataaggagttcatcanataattgntcagaaatatncgatggggagctttganactgagntgaancttanggccacagagttgaggttgggantacncggctgtgatganactcatgacaaaagt

SEQ ID NO: 36556 - DNA, 239 bp, Glycine max
  unsure (1)..(239): unsure at all n locations; Clone ID: 700968473H1
cacaaagactttctcaaacaaaaccagacggttatctagtcttccaatcttccccctattccctgttcctattcctattttatcaatcaataacataaataacacttcttcttgccttttaatatatttttctctcttcccctcttgtttcacctttcaacacttaattagagangacccactttccttgcagatctttttccagggaaaagtttggatgttttgtggtaagagttaga

SEQ ID NO: 36557 - DNA, 236 bp, Glycine max
  unsure (1)..(236): unsure at all n locations; Clone ID: 700968474H1
aacgacaaggttccattcaggatnccaatggccacagtatacagacctgcaggtcaatggtgttcctgttcgtgcaactaacagacctggttcacagttgcttggggctaatggtcgggatgacggtccaattatcacgccatatacaaaagacggaattaataagatttccttaacaggatgcgatgctcgcattttttgtttaggggttcgtattgttaaaaggcgcacatgca

SEQ ID NO: 36558 - DNA, 238 bp, Glycine max
  unsure (1)..(238): unsure at all n locations; Clone ID: 700968475H1
gcagtgctcaccagcagggcaattttccaaaggatgaagaattatactatctatgctgtgtcaatccaccattcgtatagtgtttggtttcatgtttattgcattgatttggaaatttgattttgcacccttcatggtgttgattattgccatactagacgatggtaccatcatgacaatatccaaggatcgagtgaaaccatctccaatgccngacagctggaantgagggagattt

SEQ ID NO: 36559 - DNA, 239 bp, Glycine max
  Clone ID: 700968476H1
ggtccgcaaaattgaatgttccgaaatggaggacgagaagccggagattctgccgccagatccgccgtatacggcggcgacggtggcggattgcctgtacttcgaggcttccgactcggtgccccggctgcacacgacggactcgagctgctccgagcaggtggtgtcggcggagtttgcgagcgaggtgcagagcgagccgaagaggggcaacaacaacaacgagtttgcatataatt

SEQ ID NO: 36560 - DNA, 239 bp, Glycine max
  Clone ID: 700968477H1
cagtgcacagcgttttttatttcttatttttgtttgatttgggcttcgttatttttgatgaattgttcacttggatgctgagatattctctagatgtacgatattttggctccttgctggtaatcctattagatatacgtgttgaattttggtacaggtttaactggagtagtgtggtaagatgggaggtggatttagagtgcttcatttagttaggccgtttctatcgtttcttcctg

SEQ ID NO: 36561 - DNA, 240 bp, Glycine max
  Clone ID: 700968478H1
aacaagcctcagccaaaaccatggttaagcataacaatgttatcccaaacggacacttgggtaagcactggcagaactatgtgaagacttggttcaatcagccagcacggaagacaaggagacgattggctcgtcagaagaaagctgtgaagatattccccagacctacggctggacctctcaggcccattgtacatggtcaaactttgaaatacaacatgaaagtgagaggtggagggg

SEQ ID NO: 36562 - DNA, 239 bp, Glycine max
  Clone ID: 700968479H1
gctgatgatgcctggtggattggagagacattttgatggatctgatgaagaaaaacctgcatcatatgtctcaactaatactcgaatggtggttccaacatccaagaatgttaactcctctcagaaacctgctctcaagttcttgatctatggcagaacaggttggattgggggtttgctggggaagttgtgtgaaaagcaaggaattccctatgaatatggaaaaggacgcctggagg

SEQ ID NO: 36563 - DNA, 243 bp, Glycine max
  unsure (1)..(243): unsure at all n locations; Clone ID: 700968480H1
cagggtctaatgggtaactgcctagattcttctgccaaagttgatgcagctcagagctccagatccacttctgcatcaggaatctcaaaaactactccttccagtttatctattccatcatacagtgaaaaaagcaatgcctcaagtcttcccacaccaaggtccgagggtgaaatcttgtcttctcccaatcttaagcccttcacattcaatgagctgaagantgccaccagantttgcgcc

SEQ ID NO: 36564 - DNA, 243 bp, Glycine max
  unsure (1)..(243): unsure at all n locations; Clone ID: 700968481H1
ctgattgatggttcctactttggggttcatatatgtttcaagttcttgtgcagaaacctttgtcactgcactcaaaatctgcactagctaggtggaacagaaatggcagaggattggaaccgcacggctcttcttgtgatcgatatgcagaaagattttatagaagattggantcctgtggcactaaaaggagggaaagacattgtcccaaatgtgattaaggccgtggaagttgccaggcag

SEQ ID NO: 36565 - DNA, 241 bp, Glycine max
  Clone ID: 700968482H1
catgggtcattactcaattcatcatcagcttgtggccatagtctcattatttatccttttgcttccaaatatccatgggtggggagacgatgggcatgtcattgtttgcaagattgcacaggctcgcctcagtgaagcagctgcagaggctgtgaagaaactgctgccaatatccgcaggaaatgatttgtccacaaagtgttcttgggcagatcatgttcatcatatctatccttgggcc

SEQ ID NO: 36566 - DNA, 240 bp, Glycine max
  Clone ID: 700968483H1
atttgcttttactgatctcagtcttccacctcactgtcctagattgtggggtttctcttttcagttctcatcgtaactaccatagttgctgctccgaaaagggttttcctaacaccgcccatgcaatcaatttccgggttgtacaattcgtgaataggttgttgcttgttctgaaaagtagtggatagtaaaaaatattgaactttttttgagagaaaaatgcagagtaaagaagctgtt

SEQ ID NO: 36567 - DNA, 210 bp, Glycine max
  unsure (1)..(210): unsure at all n locations; Clone ID: 700968484H1
aaaccctacttctacttccctttgttctcaaaccttatcccttatcctcccaaaaccaaaccatgtctacctccgcagcttctctcgcactcccaaccctcactctccgaactcgacaacctctctgttctccccaatgcttctcctcgtccctctccctcacccctaantccaaacccatttccatttccgccgttttcctcaaaacaa

SEQ ID NO: 36568 - DNA, 241 bp, Glycine max
  Clone ID: 700968485H1
caagcttgagaaagaatctgggttcttttttaacatgaagtactttgaggaaaaagtgcaggctggcgagtgggaagaggttgagaagtacttatcaggatttaccaaagttgatgataatagatactcaatgaaaatattttttgaaatcaggaaacagaaatatctggaagcacttgatcagcaagacaaggcaaaggccgtggagatattagtgggtgatttgaaaatgttctccacc

SEQ ID NO: 36569 - DNA, 240 bp, Glycine max
  unsure (1)..(240): unsure at all n locations; Clone ID: 700968486H1
attgattaaggtggtaaaggagttgtggagggctttctttttcctctgctcaccacaattctggagaatggcgttgctctggactttttctattctttattcttattaccaattattcaaaccactaattcatgagaaatgttccctcttctctcacaaactcgtatcctatccaaggtgcncccctttcacaactacttttaagcctgtctgcgtcatcactggtgctacgtctggtct

SEQ ID NO: 36570 - DNA, 239 bp, Glycine max
  unsure (1)..(239): unsure at all n locations; Clone ID: 700968487H1
tccagcaaaatacgcaagtntgtttttggattctgttgttgtggtctttgaccttcaaacaatgaaagcaaggagaggaaaacgctcagaggcnttctggccttccattgtgatgaaaaaatggttaaacatcaagcctaaggtgaatgattttagtgaagatgaagttgacactgaaactgaaagtgaagatgatgcttgctcaattagaggctcaagaatgtgtgtgcgtgaagata

SEQ ID NO: 36571 - DNA, 241 bp, Glycine max
  Clone ID: 700968488H1
aacaaagctatgtgaaactacaaggtcatggtcaattcagtagtaattcaatatgtcctagttagttccccctttatataataccaagatgcagaagttctgaaaattaaccaaactcaaaaatttccaaaactttatagaattagagggacaacatggctggagggttgcttggagataaccttggattgaaggaagatgtgatcaagagggtgtgtggtttggcctccaaagctcacaa

SEQ ID NO: 36572 - DNA, 239 bp, Glycine max
  unsure (1)..(239): unsure at all n locations; Clone ID: 700968489H1
gctcacttctacttcgtcccggtaccctctctctctcaaccctaaatctcaccgtcgccccccaaagcctcccttcttcaatgannnnnnnnnnnnnnnnnnnnnacggcgtcactccattgatatctacntcaaatcgatgagagtggaatgataaaccgaattgtcggcgtgttcgcgaggagaggatgcaacatcgaatcgctcacgtttggcctcaatgaggacaaggctantcc

SEQ ID NO: 36573 - DNA, 239 bp, Glycine max
  Clone ID: 700968490H1
caacatctttgtctaacaaaaaaaatggcatcagctctaccaaatgtaggtttccatgcccgcacttccatctagtagaatgaacaaattttccaatgtcaaattgctaccattgacaagcaaaaggaatagaactttctgcagcaatgtaaaggctatggcaggaggtgaaacgagtttgcagaagtcaaagcagcaagtgcaaccaaagatgaaggtgccacaagcttcacctaaag

SEQ ID NO: 36574 - DNA, 239 bp, Glycine max
  unsure (1)..(239): unsure at all n locations; Clone ID: 700968491H1
aagaatcactcccttatccatttccacacnacaccatggngcgaaccaacgctctctcttcagcctccattctacgctctcccaacngncagtctctgacccgaagagcgaaccataatggaagagtaaattacnggaaaccgnataaccgtttctccgtnaaagcctccgccaaagagattgcctttgancagcattcccgctctgctatgcaggccggcatggacaagctcgccgat

SEQ ID NO: 36575 - DNA, 238 bp, Glycine max
  Clone ID: 700968492H1
ctcctcggagctttgctcgttattcttctttttcttttctttttttcgtttcgttcggaaaacgcgtaggctgtgccgtcgtttttagtgggtggatgggaacgacgtcgtgtgagtacgtgagctgggaggaggtgtttatgtcgaacgacaaggggaggagggaggttcattacttgcttaaacgacgaggcggtggctcggatctggccgttttgggaaaagagaagagcctcat

SEQ ID NO: 36576 - DNA, 239 bp, Glycine max
  Clone ID: 700968493H1
gttgagaagttttataagctaaaatctcagctccaaggtgtatcactcagaattcaggtatgctattgtggtgactgtatctatttctttgtaatttgttctagcatatatggttaatgtaggataatggttcttccctaagattcatggcattttgtttttattggtatataactaactggccaacagtctcgaaacttttatcaaaacagatgtgtcttgtgatattcaagtaataa

SEQ ID NO: 36577 - DNA, 240 bp, Glycine max
  unsure (1)..(240): unsure at all n locations; Clone ID: 700968494H1
aatccaacaggcgagctcttagggagctgcttttcactgctcctggtgttcttcaatatctcagtggtgtcatcctctttgaggnaaccctctaccagagcacagctgcaggcaagccctttgtgaatgtcttgaaggaagctggtgtgcttcctggcatcaaggttgacaagggcacagtcgagcttgctggaactaanggagaaaccaccantcagggtctagatggccttggtcagc

SEQ ID NO: 36578 - DNA, 242 bp, Glycine max
  unsure (1)..(242): unsure at all n locations; Clone ID: 700968495H1
cgcattatagcacaccacacaaaaaagcaaaacagagagaacaactgttactcacacacgccatgggtaaatgaatggtttttgagcaacagcagttaaaagagaaaagggattcagcgaagatgacatcggttggtgtggcaccaacttcgggtttgagagaagccagtgggcatggagcagcagcggcggatagtttgcccggggtggtgaccnttntgaaattggggggttgtnaaana

SEQ ID NO: 36579 - DNA, 267 bp, Glycine max
  unsure (1)..(267): unsure at all n locations; Clone ID: 701015501H1
ggagcggagnncgtagttcagaggctcccatcccatacccatgagatccttctcctcttccctctttctccttctcttcttcttctcttcttcactctccaatccccaaaatgcccctctctcactcaaaggtgttatattgaaaggccggttttggagttctccccttccgttcttcccggtatttcgggttctctaggtgttaaggacgctttacgatgcgagcgtgttcgggtttcgggcatctcgagagtgaaattgggagct

SEQ ID NO: 36580 - DNA, 264 bp, Glycine max
  unsure (1)..(264): unsure at all n locations; Clone ID: 701015502H1
cagcgtcctagatttcctcttctctgcttcggaagaaagagaaaacaaacaaaacaatggcgttcgcttctttcctnggcagagtcctcttcgcttctgtcttcatactctctgcttaccaacaatttaatgaatatgagttgatgggggacctgctacaaaagcactcagacctaagtttgatgcctttacacatcgggtgcattctcaagtgggcttcaaattccagagattaatctgaaatttttaattgctggggtatgc

SEQ ID NO: 36581 - DNA, 264 bp, Glycine max
  Clone ID: 701015503H1
aggataagtttcaacactgggaagtacatcccaaatggtttctttccttatgtgtctctagtgtttgaaatcaaggagtcacaaaaaagggaacatttccatgttcctctcctgctttcaccattctcattcagacttaccgtggaagctaggattataggcacagttgccaaatggatgtcactgatatttgtgggtacctagcatgaatttctgaagatttggtgaattgaacttgtgttcatgcccatagaacatggtaaa

SEQ ID NO: 36582 - DNA, 261 bp, Glycine max
  Clone ID: 701015504H1
attgtcacagcttcaaatggaaagactatagaggttaacaacactgatgctgaaggtagacttaccctggcagatgctctggtatatgcttgtaaccaaggtgttgaaaagattattgacttggcaaccttgatggggcttgtgttgttgctcttggaccctcaattgctggtgtgtttacaccctgtgatgacctagcaaaggaagtttttgaagcttctgatgtgagtggggagaaactatggcggctgccattagagg

SEQ ID NO: 36583 - DNA, 265 bp, Glycine max
  unsure (1)..(265): unsure at all n locations; Clone ID: 701015506H1
cnganggcatccttctaacttattcaattccccttacattcaactctcctatgccgaatctgcaacaattannactaaatgaattgctaacaacacgcacacaaactctccgtctttttttctttttcttctctcttctctaagaagagcgcgctttctcgtctctcctcgttttaacaggaagcgcatcgcattcgatgggtgatacgaaggaaanaagtgggttttgcgtgtggccagatgcgagacaatttgcttagggaaa

SEQ ID NO: 36584 - DNA, 261 bp, Glycine max
  unsure (1)..(261): unsure at all n locations; Clone ID: 701015507H1
gagatncactaagttatcctcataaatacactctaattaggtggcaagataagtgtctaaccttagtaacattgccacntattgtgttcattttggaattgtgccactaaaattctattcaattcatctatggtgcctcttcttatgctatgcaatcaatcctggcaaaccctttgatccgcatttccagcgggtctagggtgaaccaatttggcgttcctgctttgcacatgagaaggaatgttggcctgagagttaggt

SEQ ID NO: 36585 - DNA, 262 bp, Glycine max
  Clone ID: 701015509H1
gctgcgtgcagaaacagagaaggagagaagaatggacgaggagaatggttacagtgggagtagcagctcaaacttggagactacaaaagcagagagatctgtgtggctgatgaagtgccctttggtggtggctagtcatggcaggctcatcctccttctcaacctctcgccaaggttgtgctctcccttgatcctctccaccctgaagaagacgatccctctgcagtccagtttacaatggagatggctggctccgaagctg

SEQ ID NO: 36586 - DNA, 258 bp, Glycine max
  Clone ID: 701015510H1
ttattcacagcctcgcatgtttggttctcaccttcatctccttcaatccttgtaaagcagaacaagcacaaactattttgaattccctcagcattgaccaaatcctacagaaaatatatgaatggggaaatgtgcacaagggttccaagaaggccagattcaaatttcaggccctatagtggtggcaggagtgctgtgtttcatagcttcttcaatatctagtgctggtggattggtggtggtggacttttcttacca

SEQ ID NO: 36587 - DNA, 261 bp, Glycine max
  Clone ID: 701015511H1
atagctagttgtttaaagtgagagaaaaagaaagaagaaaatggcaaactttccagttgttgacatggggaaacttaacaccgaagagagagcagcagccatggagattataaaagatgcctgtgagaactgggtttctttgagttggtgaaccatgggatatccattgagttgatggacactgtggagaggctcacaaaagagcactacaagaagactatggagcaaaggttcaaagaaatggtggccagcaaagggctt

SEQ ID NO: 36588 - DNA, 259 bp, Glycine max
  Clone ID: 701015512H1
ggggaactatattgtggcagacctatattacctggaaaaacagaggttgaacaattgcataggatatttaaactttgtggctcaccatctgaggattattggcgtaagtgcggacgccacattcaacagtatcaggcctccccaccattataggcagtgtgttgctgaaacatttaaagaatgcccatctgctgccacaaggcttattgaaaccctactttctttagatcccacattcgaggaacagcactacagcccg

SEQ ID NO: 36589 - DNA, 251 bp, Glycine max
  Clone ID: 701015513H1
cttgaatatgatggtgaattgaaacttccaagtcattaccttgtttctccaccagagattgacaggacttctggtgaatatttagtgtataatggtattcggacttttgcttgcagtgagactgtaaatttggtcacgtcacattcttctggaatggaaaccgctctgggtattttaattcagaattggaggagtatgtggaaattcccagtgactctgggattacattcatgaccacccataatgaagct

SEQ ID NO: 36590 - DNA, 267 bp, Glycine max
  unsure (1)..(267): unsure at all n locations; Clone ID: 701015514H1
gttgaagaatagaaacttagttaatggcaaganaaaacacgttaattganaacccgaatgtgtaatgaatgatgaaaagtaaaacgggtagcaccgaccacaataacggnaaccacgatctctgaccgactgactgactaccacgatctctgactgactgactattctcactttccaccggatcgaattctctctcattcgaagaaaaacgaactcaactgtgtctgcgagaactccaattcctaaaccctagcttgaatccaacga

SEQ ID NO: 36591 - DNA, 267 bp, Glycine max
  unsure (1)..(267): unsure at all n locations; Clone ID: 701015515H1
ggaacaccaacagcagcaacccgctactgctgcagtgtggtggcagttgccatgcttgcaagttagaaagaaagaaacagtgctcgctcgaatttcgagaacganaganaggnagaaaaaatgtacagcagtggtgcgctgaagccgaatcggaatctgaatctgagcgcaatagaatgggtgatgataaggaagancagggctcctcgttcaaganctgggccaaacaaacggaggagagttatcagctgcagctcgctcttgctc

SEQ ID NO: 36592 - DNA, 257 bp, Glycine max
  Clone ID: 701015517H1
agaggaactactcagcttagcttgagtattttcaagaggggatcaaagggaagaagaagggaaggactcaaacttgcacacgcaacctttggttcctttcccaacactcaccatggtggcagatttaagtccaattccgacctctccttcggaaaaatctttgccagcagtgctttctctgcatgtttcgctgaggtgtgtactattcctttggatactgccaaagtgaggcttcagcttcaaaagcaagctgtagc

SEQ ID NO: 36593 - DNA, 261 bp, Glycine max
  unsure (1)..(261): unsure at all n locations; Clone ID: 701015518H1
gtttcaaacatgacttcgttggaatttgtgctgttgtggttgctggcatcgccgttgcctttgcattaatctttggtgctgcaatcaagacctttaacttccaaaagagatagatggatagattgaactcttctccaacgtcaaagattctttatattttctccctttttctttttttcttcttgtntttgttttccctttaagcttataatatttgtatctatcatttaatcatttgtgcaaaaccagcccgtttgaagg

SEQ ID NO: 36594 - DNA, 262 bp, Glycine max
  Clone ID: 701015519H1
acccgctcagcacgcagaggagcagaagcctaagccttcaacatggcgagagggttgaagaaacacttgaagaggctcaatgctccaaaacactggatgcttgacaagcttggtggggcctttgcaccgaagcatcatctggaccccacaagtccagggagtgtcttcctttgatcctcatcctacggaacaggctaaagtatgctctaacatatagagaagttattgccatcttgatgcagcgccatgttcttgttgatgg

SEQ ID NO: 36595 - DNA, 260 bp, Glycine max
  Clone ID: 701015520H1
ctttctgttctcttcactcttggtcttgcgagagaaagccatgccagagacgaagatttttggcatgctgtttggccaaacactcccattccaagttcattgcgagatcttctaaagcctggccctgcaagtgtgaaatcgatgatcaccctatgcaaattgaagaaacacagtacccgaaaaccttcttctataaagaagaccttcatccaggcaaaacaatgaaagtacattcagcaagcctccctttcaacaaccag

SEQ ID NO: 36596 - DNA, 259 bp, Glycine max
  unsure (1)..(259): unsure at all n locations; Clone ID: 701015521H1
aggcgcacgtnaggcaaaagctcgtggaattgctagcaatggcgaggatcaaggtttacgagctgaggcagaagacgaaggctgatctgctgaatcaactgaaggacctgaaggcggagcttgccttgcttgtgttgctaaggtcaccggtggtgcccctaacaagctttccaagataaaggtggtgaggttgaacattgcccaggttttgacggtgatttctcagaagcagaaggctgcgttgagggatgcctacaaa

SEQ ID NO: 36597 - DNA, 260 bp, Glycine max
  unsure (1)..(260): unsure at all n locations; Clone ID: 701015522H1
gggagagtgtgcaaatagctatccgaccaaaggtttcatggagtggttctagtgttgcagggactgtgcagattcagtgcagtgacctatgctccacatcaggagacagtcgctgctgttgcggcgagtggtccaattttaggtgtacctgatgctcttgntcctgttgatcttccagtcagtcanatnaatctatttcctgggganacgactgctcnttggatatccantgannntccangtnctcannctccaggnng

SEQ ID NO: 36598 - DNA, 258 bp, Glycine max
  unsure (1)..(258): unsure at all n locations; Clone ID: 701015523H1
cgcaactcgagatattaataagcttcttcttcgtcagttattaccattcgtggaagagaaaaagaaaaaagtaactaaaaaaataaactgtaataaagagtccaaaatgaaagccaaaacggtgaaaggaaatggagcttgaggacgaacaagctcagcttcccttacgtcttnnnnnnnnnnnnnnnnnnnnnnnncgctggattcttcggtttcactctcttctctcactctcagggcgatggagatggttgaggc

SEQ ID NO: 36599 - DNA, 249 bp, Glycine max
  unsure (1)..(249): unsure at all n locations; Clone ID: 701015524H1
cnnactcttgttcgtcggtctcctcctattnttcgctgccgtagatcaccgtcgaacgnatcgntgatgaagacnaacttntganccgtcaaatggtgncngacgcggangancancacctgctaangcggagnaccanttctccgccttcaagacgaagttcgccaagacctacgccacgnaggaggagcacgatcaacgttcngtatcttcaagaacaattgctccgcgccaagtcgcaccaaaatt

SEQ ID NO: 36600 - DNA, 257 bp, Glycine max
  Clone ID: 701015525H1
gcggtgaatggtgttgctcagttacacagtgatatactaaagtcagaattatttgcaaattatgtttcaatatggccaacaaagttccaaaataaaaccaatgggattacacctagaagatggcttcaatttgcaaccctgagctaagcgggataatcaccaagtggttgaaaactgataagtgggtaaccaatcttgacttgttaacaggtctccgacagtttgctgacaatgaagatctgcagcagatggctgtc

SEQ ID NO: 36601 - DNA, 256 bp, Glycine max
  unsure (1)..(256): unsure at all n locations; Clone ID: 701015526H1
aatacatgggctcatcttctagggaggnntctgcaacagtgagctcnctgactgnnactagtggttcaccatatagtgattctacatgataacaattaaggaggctggacagggggnnagtgcnacatcangcatgagtcnccttggtannatcttcgcaangnngctncnacatttgttncacagaccctcaaagaggacgcagggatctgtggcatcncaatgcngtcgtgtgtcgntnggnntcttctgnnac

SEQ ID NO: 36602 - DNA, 262 bp, Glycine max
  unsure (1)..(262): unsure at all n locations; Clone ID: 701015529H1
gttggctcagcattttaatggttctgtttcttgggtggctgaggaaagagaatttcttattttgatttcatggacagccagaatgggtgtatatatattagttcgtcagatgatgacttggaggagatagaaatccaaggaggactcttccgcaatgggctactaatacagagaagagttcatataatggtggatggtctaggcgggatagttcttcaagaggggcaaatagttcaaacccaagctcttctaatgtttantt

SEQ ID NO: 36603 - DNA, 266 bp, Glycine max
  Clone ID: 701015531H1
gccgcagcagcctcaggaggagaataaggatgtctcacaggaagttcgagcacccaaggcacgggtcactgggatttctccccaggaagcgtgctgctcgtcacaggggaaaagtgaaggcattccccaaggatgcccatccaaggcacccaagctcactgcattcttgggttacaaggctggtatgactcacattgttagagaggtcgagaagccaggatcaaagcttcacaagaaggaaacatgtgagcctgttacaatattga

SEQ ID NO: 36604 - DNA, 265 bp, Glycine max
  unsure (1)..(265): unsure at all n locations; Clone ID: 701015533H1
attaaaaatgcagatcttcgtgaaanccctaacggggaagaccataaccctcgaggtcgaaagcagcgacaccattgacaatgtcaaggctaagattcaagacaaggaaggcatccctccggatcagcagcgttgattttcgccggaaagcaacttgaagatggaaggaccttggccgattacaacatccagaaggaatcaacccttcaccttgtcctcaggcttcgtggtggcatcatcgagccttccctcatggctttggctc

SEQ ID NO: 36605 - DNA, 255 bp, Glycine max
  unsure (1)..(255): unsure at all n locations; Clone ID: 701015534H1
ggctgaggtgggatctattttcttcacaaccagccattcctacagttacaccaacagttgatttgttttccattcctgaaccggcagtgcagccagacaccaagtcagagaagtctgttcctatgaataacagactattgatcccttgctgctgttcctctaataatttgatggatctgatattttggtgactttacttctcaatctgatctgngtcttcccagccctccaataatgtttcagtgaggnaagcag

SEQ ID NO: 36606 - DNA, 254 bp, Glycine max
  unsure (1)..(254): unsure at all n locations; Clone ID: 701015535H1
atagataacaccgtactctctaatatcccatactatgaaaaacatggatatggggtggaggaatttaatgaaaccttatatgatgaatgggttaacaagggcgacgcaccggcattgccagagactcttaaaattacaacaagctgttgtctcttggctcaagattgtattcttgtcggaagatatcttgacaaatgggcgtancaggagcaaacctaaagnaagctnggnttcacacatgggagcattattct

SEQ ID NO: 36607 - DNA, 258 bp, Glycine max
  Clone ID: 701015536H1
aaacgctcataggttcattagtagtttgcagaagggttatgacacgttagtaggggaacgaggagttcaattatctgggggacagaagcagcgtgtggcaattgcacgagctatagtgaagaacccaaaatattactgctagatgaagccacaagtgcactggatgctgagtctgaaaaagtggttcaggatgcactagaccgtgtcatggtggaccgaaccacaatagtagtggctcataggttatccactattaag

SEQ ID NO: 36608 - DNA, 258 bp, Glycine max
  Clone ID: 701015537H1
aatctcaacaactttcgtgtagtgcactgttttgctatagtaacccattaattaaaccgacctacgtagtagccatgaagagaggcagagaagagagtaagttagacatggctaattgcttgatgctattacgaaagttggagagagtgaaaccaattacccaatatcaaagggtagtgatattggtgatttcaagtgcaagacttgcaatagaaggttctcttcttttcaagcccttggtggccatagagcaagcca

SEQ ID NO: 36609 - DNA, 140 bp, Glycine max
  Clone ID: 701015538H1
gcatccttctaacttattcaattccccttacattcaactctcctatgccgaatctgcaacaattacactaaatgaattgctaacaacacgcacacaaactctccgtctttttttctttttcttctctcttttctaagaag

SEQ ID NO: 36610 - DNA, 97 bp, Glycine max
  unsure (1)..(97): unsure at all n locations; Clone ID: 701015539H1
ccgcatttcnacctcctaactctagccctctaccatgtatcntnctcttcnagcatctntccggcntaacaagaacncnacaagagcaaaagttcct

SEQ ID NO: 36611 - DNA, 255 bp, Glycine max
  unsure (1)..(255): unsure at all n locations; Clone ID: 701015540H1
cttcgtttgcgtttttatcacagaggaattaacatatatatagcnngcatggcagtcacactctacgaccttagctcttcctctgggttgaagaaacttgatgagtaccttctcccacgcagttacatcacgggtaccaagctacaaaggatgatcttactgtttatgcagctttgccaactgctccatcagatgaatatggaaatgtttccaggnggtacaagnacntngatgctttgttgagaatcctggtgt

SEQ ID NO: 36612 - DNA, 258 bp, Glycine max
  unsure (1)..(258): unsure at all n locations; Clone ID: 701015541H1
agagctccctattgaagaggttccacttttgcaggaagagataataagcatatgccgtagcatgggaaaggctgttattntggcaacaaatatgctggaaagcatgattgttcacccaacaccaaccaggccgaggtatccgatattgcaattgctgttcgagaaggttctgatgcaataatgctttctggggaaactgctcacggaaagttcccgctaaaaagccgtgaaagtaatgcataccgtagntttacggac

SEQ ID NO: 36613 - DNA, 258 bp, Glycine max
  Clone ID: 701015544H1
gcgaaacgctgtcgttgcgccaatcgcggcgttgttgttggtggtgctactcgcggcgagtgtggtggtggaggctcaggagaactcggacgtgaagacgctggtgaagcacatgcacgggaagaagtatgcgacaaaggatgggaatgtaagggctggtcaatttactgttgtaacctcactattactgattatttccagacctaccagttcgagaatctcttctccaagcggaactcgccggtggcgcacgccgtc

SEQ ID NO: 36614 - DNA, 111 bp, Glycine max
  unsure (1)..(111): unsure at all n locations; Clone ID: 701015545H1
gaactgctgctgaatcccacgggcaggcnagngatcaacnctgngtgaaactgnagacatncttagtagcccagtnggaaaagaccagcataaagncgattccccgtagtt

SEQ ID NO: 36615 - DNA, 106 bp, Glycine max
  unsure (1)..(106): unsure at all n locations; Clone ID: 701015546H1
tctctgtttccatggatgtggagggtggcaaagacctcttagtaacggtttatcatctgtgattcctgggtggntctctgaaattagttcaatgtggcctggagag

SEQ ID NO: 36616 - DNA, 263 bp, Glycine max
  unsure (1)..(263): unsure at all n locations; Clone ID: 701015547H1
gngcaatggnaatggtgaagtctcccaataagcaagtgaacctcttctactcccttgactgcgaggaccttgcccacaacgttgctcttcaatcacctaacatcattctccagaatatcaaatggaggtcattgctgatggatttccaaatatanatataaataatgcagaagaactccgaggtcaacatgttgctttcttggcatctttcagctcncctgnacatgtctttnaacaantttctgtcatatatgcntccctcg

SEQ ID NO: 36617 - DNA, 268 bp, Glycine max
  unsure (1)..(268): unsure at all n locations; Clone ID: 701015548H1
cagcttctgcagtagctttaagctacgaaagattttccttgaccatggggcaaaagcatttagtgacggtgttctgtttatgggctttaacatgttcccttcttccatctttctcctttggaattctgagaattggttgaagaagagacctctagatctgatagtattaatgctgctagaaaggcaaganaaggtctaagatctgtaagaccaatgatgggtgcacatgatcagtttattggtaagtcaaaaggtgaagatatagtac

SEQ ID NO: 36618 - DNA, 257 bp, Glycine max
  unsure (1)..(257): unsure at all n locations; Clone ID: 701015549H1
ccgcgaccggcgaatccagccaccgtgtgcggcttcgaattgagtccgagaacgcagttagacaggctttatattgnaacttgagacttgaagggaagctgttataattggtcagtcttcccatggcgtacccttctcagatttcaagtatcagatggcctcactggagtgggtatcttcttnnggncaggnaatngtctgtnangntatcccatgggtcctaannatcggnccattcttacaaaaaccttaggtcc

SEQ ID NO: 36619 - DNA, 258 bp, Glycine max
  unsure (1)..(258): unsure at all n locations; Clone ID: 701015550H1
aaacccctcaaactaactatatctatccattaagggatattcaatgcaattagcgaatgagagaatgaagagccggtggttcgtgtggcttttggcggtactaggcatcatcggagccacactcttcatgtgagcttgatccaaacctcggagaacaacttcctatgttccataacaagaacgatnnnnnnnnnnnnnnnnnnnttcaccgatggccccacatcgatgcaactcaaagccatcctccactacgcgact

SEQ ID NO: 36620 - DNA, 248 bp, Glycine max
  Clone ID: 701015551H1
attcaacgtttgtcgatccactcattctggtaaaacaatggctgtagctttgcaacctacccaagagatcacgacaataaaaaaaacctcccacgaagcaaaggcgagtggttgtgacagattgggtgtggttacaccacttgggcatgagccagatatcttctacaataatttgcttgatggtgctagtggcataagcgagattgaaacatttgattgtgcagaatatccaacaaggattgctggtg

SEQ ID NO: 36621 - DNA, 256 bp, Glycine max
  unsure (1)..(256): unsure at all n locations; Clone ID: 701015552H1
gttgaagcttctttaaataacagtgaattacggaaagattcagccattctaataaatgagatgggggtcaatggagattgttatgatggtagaaacaaggaagttaacccagttcttggcgaaagctcgaatgggaaattcaatgggaggatcttgatattggtgngcgtattggtattggttcttatggtgaagtttatcgtgctgattgcaatggcactgaagttgctgtaaagaagtttctggaccaanattt

SEQ ID NO: 36622 - DNA, 257 bp, Glycine max
  unsure (1)..(257): unsure at all n locations; Clone ID: 701015553H1
gtttctggatgcacctgtcccctacatagttggtatcaagaacaagaccaatgaagttcagtcaaagttaactaataatgntatcctgattgacgtcagcagaaaccaggtgtgtgtttnntntcctttctttttctgttctccaatgccataaattgtagtcncnaccccccttccccaacagtatttnatncattgnggaataggntgcatgactacgngnctccnctaatcttncaaaattcagggtttttttt

SEQ ID NO: 36623 - DNA, 259 bp, Glycine max
  unsure (1)..(259): unsure at all n locations; Clone ID: 701015554H1
tnggaacctgtcangccacggctttgtcactcacaaaaatgatctcatcatgctaggagatgggaaggttctganatccatagtgcgaggtcacgaattgaggacatggaagatgatcagcatggttcagtagatcaataggggtgggtatcaacagcgatgctgctgatattggcagtgaagtgcatggaagtttggttggtggtagtagtgagggggatttagaatatttccgtgatcatgatactactacacacag

SEQ ID NO: 36624 - DNA, 254 bp, Glycine max
  unsure (1)..(254): unsure at all n locations; Clone ID: 701015555H1
cgaatatcttgttgtttggagcgatccgagaaaaactctgtaaacatgttggtttaccaggacctccttacaggtgatgagcttctctctgantccttccgttacaaggnaattgngantggantgctngggnagttgnngggaagtgggntgttaaaggagcagttgatgtaganattggtgcaaacccttntgntganggtngnnnngaagntnanggagnngatgatggantgtnaaagtgnttgacntng

SEQ ID NO: 36625 - DNA, 252 bp, Glycine max
  Clone ID: 701015556H1
tctcactcttgttcttcggtctcctcctattctccgctgccgtagccaccgtcgaacgaatcgacgatgaagacaaccttctgatccgtcaagtggtgccggacgcggaggaccaccacctgccaacgcggagcaccacttctccgccttcaagacaaagttcgccaagacctacgccacgcaggaggagcacgaccaccgcttccgtatcttcaagaacaacttgctccgcgccaagtcgcaccagaaatt

SEQ ID NO: 36626 - DNA, 253 bp, Glycine max
  unsure (1)..(253): unsure at all n locations; Clone ID: 701015557H1
ggggatacttcactcgatcttaacgttgatccttctactatgcacatggatggggctttggtagaagagttgcgtcgtctaagttgtgagaacaagaggntgacccacttgtgtgagaactacatggtctgcanaagcaactgngcnaattgatcnacacgnnttttgatcngcaattagnctacccanttgaatcttcacgcaagnnnnnagctgccgagagtgatcaatgttgtaccaacaatttgttggt

SEQ ID NO: 36627 - DNA, 257 bp, Glycine max
  unsure (1)..(257): unsure at all n locations; Clone ID: 701015558H1
atagaaaaccatcaaccgcaaccgtgtaaatttctggaactttccaccatgatcgagatcctacacctgtagaacactaacttcaatacccgaatgatttaaacaccgtattccttcgacaccattanatcaacaacctcaaattccaagcacaagttctctgagttgttttgtgagatagcacatagcatagcaaggaaggagtattacaaccgaaaccctgaagaaaaaaagagtagaggaaganaaaacacctg

SEQ ID NO: 36628 - DNA, 119 bp, Glycine max
  Clone ID: 701015559H1
gtttggacagtctccagtatttgtggcctccacactcttggataatggtggagttccacaggggcgtgagtccctggcatcacttttaaaagaagccatccaagtcatcagttgtggtt

SEQ ID NO: 36629 - DNA, 253 bp, Glycine max
  unsure (1)..(253): unsure at all n locations; Clone ID: 701015560H1
gtttggggaagtcggagaagaaattaacggcggagattgttccacgcgacggggccaaagtgtatcccaccgtccgtttacacggctcgcccaagagcattctcgccgcttatatccgtttcgcgcttcccacaagtccgtttcgttggacttggtcgaaacggaaacggagcgcnnnnnnnnnnnnnnnnnnnnncggttacncnccaggtggggtcggagttntttcgggctcacgcgaaacatgtgnggt

SEQ ID NO: 36630 - DNA, 250 bp, Glycine max
  unsure (1)..(250): unsure at all n locations; Clone ID: 701015561H1
ctccagcattcttantgnttctntnctcttnngtngctgatgnaagnntntntcttagnntganttcatggacngccagtatgggacgnananatacnagttcgtcagatgatgacttggaggagatngaagttccanggaggactcttccgcaatgggctactaatacaganaagagttcatataatggtggntgntcnaggcggganantccttcnagaggggcaatagttcaaacccagcncttcta

SEQ ID NO: 36631 - DNA, 240 bp, Glycine max
  unsure (1)..(240): unsure at all n locations; Clone ID: 701015562H1
ctcaaattncaaggaatccatatcanntgacccatatggantccttcctctcttggaatacacctaatcacttangtaattggccggaatcacangcaatcccaagcttcaagngttacacagttaaacttgncanganacaagttngagggatncatatctccccacgtagganatctctctnanntgatanngtnnacccnagcaaccaacagcttccngggnngatcccannngaat

SEQ ID NO: 36632 - DNA, 253 bp, Glycine max
  unsure (1)..(253): unsure at all n locations; Clone ID: 701015563H1
ccttgagcaactttcaaaatttgagaacactgcaaataataggggtatcgantcaggggtactcaagggtataagtctagaagatataaagcgtgctggagagcgtctgatactacaagatggtgccctaacttctttcagagcattgttaagaatgaaaatttgaatgccaacgtgcanntttctttcatactgctggtgtggtgacctcaagcttcacaaganggcnncangtgagnctgncacannnagg

SEQ ID NO: 36633 - DNA, 131 bp, Glycine max
  unsure (1)..(131): unsure at all n locations; Clone ID: 701015564H1
ggttcnagcggcncnngantgggtcangctnttncatgactgctatagccttcctgtttatccttctaatcacttanacagggcacaacagatgcacantccggggtatgttatgggaagacttggcnaca

SEQ ID NO: 36634 - DNA, 257 bp, Glycine max
  Clone ID: 701015565H1
gttccattccccaagaaccaggcaatgaggatatactcaagcctgtggaatgcagatgattgggccacaaggggaggtcttgttaagacagattggacacaggctcctttcacagcttcttacagaacttcaatgccaatgcctgcactatgtcctccggaacttcatcttgcggttcaaacaacccttcctcttctaacaataatgtttggctctcagaagagttggattcaatgatcaggagaggctcaagtggg

SEQ ID NO: 36635 - DNA, 256 bp, Glycine max
  unsure (1)..(256): unsure at all n locations; Clone ID: 701015566H1
cttgttttnncttcagaactcataagnattgagcaagtattgattttgattactaatgctgtgntgggntntggncanaatntcagaatcttantggaaaactcagaccacgacgancccgncnagnnnggcgtcatctcacctctgtctcttcncgcactcctcgaaactccatcnactctcctacnaacaacaaaactgntgncgcaggagtcttacagttccagaatcagcagcttgtagcncgagatagagt

SEQ ID NO: 36636 - DNA, 254 bp, Glycine max
  Clone ID: 701015567H1
ttctctctctcccgaattattgttcgttcgacccttttacttagtattccctgtttccggtattcgctccctttttttctgcattctggttttacttagatctctgtcccgcaccagatctggtgcaggtgagagggttgggttcattaattttgtatcaatcttccttctgagcggtaggcgtggggataccagagtcttttcgggaagcaagagagggttctctccgttttcaatagatctctcatgtcttc

SEQ ID NO: 36637 - DNA, 253 bp, Glycine max
  unsure (1)..(253): unsure at all n locations; Clone ID: 701015568H1
ggctaatacaccttcgaattcttcaattctcctctccctttttctattggccatcgccctctccctcgctgagtcccaatctttcatcggagtaaactacggccaggtcgccgacaaccttccgggccggaggacacggccagcctcctcaaatccaccaccatcggaaaagtccgtctctacggcgccgatcccgccatcatcaaggcnctcgnnaactccggnatnggnatcgtcatcggngcntcnaagg

SEQ ID NO: 36638 - DNA, 253 bp, Glycine max
  unsure (1)..(253): unsure at all n locations; Clone ID: 701015569H1
annnacgagtnaaanngntcgggccanattnacctttgggccatgcgtaacccgtttttattacnagtttactcaaatgctctgtttctgactccacgcacttaaactgtttgatgaaactccccatgagtttctactctttcctccttttgaagctaccaatactaaagttttgatgacaacactgtgaacctcaatgcccaatgtaaaanttcacttgctgatttcaagcaatagtcataatggataatgc

SEQ ID NO: 36639 - DNA, 254 bp, Glycine max
  unsure (1)..(254): unsure at all n locations; Clone ID: 701015570H1
gggtttcttttcgtttcgtttcaatggggagcgaagaggagaacggcgaattctacctgcgatactacgtcgggcacaagggcaagttcggtcacgagttcttggagttcgagttccgccccgacggaagctccgctacgccaacaactccaactacaaaaacgacaccatcatccgcaaggaggtttacctcacccccgccgttctccgcgagtgccgtcgcatcatctccgagagcganttatgaaggaagt

SEQ ID NO: 36640 - DNA, 78 bp, Glycine max
  unsure (1)..(78): unsure at all n locations; Clone ID: 701015571H1
cttatcccctttctccttctaacgagtgaggaanaatggcgcgtaagnagatnagagagtncgactcnaagangttgt

SEQ ID NO: 36641 - DNA, 253 bp, Glycine max
  unsure (1)..(253): unsure at all n locations; Clone ID: 701015572H1
gatggcctcacaggtttgcaaagctgcttccagagccgcgaggtcccttctctccgcttccagagcctcccatggacgtgcggttggggctgctacggctgtttcattgagctgcaaagtgcctctttctacggaaagaacggttctggaagtggtnnnnnnnnnnnnnnnnnnnnnnnnnggatttcaggagcacttgctcttcctgccgcagcttacatgttccaagatcaggaggtgcgcgcantgagct

SEQ ID NO: 36642 - DNA, 78 bp, Glycine max
  unsure (1)..(78): unsure at all n locations; Clone ID: 701015573H1
aganctccctattgnagaggttccacttttgcaggnagaganaataagcatatnccgtancatgggaaangctnntat

SEQ ID NO: 36643 - DNA, 254 bp, Glycine max
  unsure (1)..(254): unsure at all n locations; Clone ID: 701015574H1
ttctagggnnggaatctagcaacattaagctgnanggactgnaaactagtggtttcaccatataagtgattnctncnatgatnaccattaaggnggctggaaaagagggacngtgcaacatccaggcatgagtccccttggtaccatcttcgcaaagaagctacaacanttgtttcacagacccttcanagaggacgcagatctgtggnatctcactgcaagtcgtgtgtcnataatgccttcctccggtaana

SEQ ID NO: 36644 - DNA, 257 bp, Glycine max
  Clone ID: 701015576H1
gttgggatgccaatgtcaaggaactggggtcagaactgggcaaagcaacaactaccttaatggtcagagcctctccttcaaggtcacaacaagtgatggcagaactgtggcatccaacaatgttgcccatctggctggtcctttggtcaaacctacactggtgctcaattccgctagatcttgttgtcacacgcataccagtagtgctatatagtataatagatatatagtattatgttctaggagtattattattt

SEQ ID NO: 36645 - DNA, 258 bp, Glycine max
  Clone ID: 701015577H1
acttaccaacaccacttccaatggcttcatatcatgaagaagaagtgaggctattgggcaagtgggccagcccatttagcaacagagtagaccttgctctcaagctcaagggtgttccctacaaatatccgaggaagatcttgctaacaagagtgctgatcttctcaagtacaaccccgttcacaagaaggttccggttttggtccacaatgggaacccattgcccgagtcactcatcattgttgaatacatagatgg

SEQ ID NO: 36646 - DNA, 261 bp, Glycine max
  unsure (1)..(261): unsure at all n locations; Clone ID: 701015578H1
ggagcatancacaaacncattccctttgngactcttgcttgcttcccaccattttccttcgatgctgtgctcccaaacgaaaacgaaaagtataattcttccnttcctttcgccagccccactccacacgnctcaatgccaagccanaccnttttgatcaaaggccaaaaatgtntccaccttttggtggggctttgtttagcttctcttttcaaacatgggntgtgtccatggcaagtgctgtanccgttaccctcaccc

SEQ ID NO: 36647 - DNA, 250 bp, Glycine max
  unsure (1)..(250): unsure at all n locations; Clone ID: 701015579H1
tctacccgccgctcgatgggaattgcgcttcaaggnntctcgtagggctaatacgcctcacgagggtcaccaacggcacgtgcctttggggggccgaggccccctactgctggtcggcaacggacggcgggcgcacgcgtcgcttctagcccggattctgacttagaggcgttcagtcataatccaacgcacggtagcttcgcgccactggcttttcaaccaagcgcgatgaccaattgtgcgaatcaac

SEQ ID NO: 36648 - DNA, 226 bp, Glycine max
  unsure (1)..(226): unsure at all n locations; Clone ID: 701015581H1
ctagaatttgcatgcactgttcttcntacaatggagttacantagcttattgtgatggggttattgctnnctggtttgtcttgcaaaggtttcatcgatgttaacatagaaaaggagcaagatgaagaatttcgctttcctgttgaccatcttatcgtgagaggcgggaacagaaggctaatgcaggacatagattgtggaggattgtgcaagacaaggtgcagtg

SEQ ID NO: 36649 - DNA, 251 bp, Glycine max
  Clone ID: 701015582H1
agatccaacttggtcggagtaaacatggcggctagtggaagttccttttccaacatcactagcttccttcgcaaccaacaaccctcttcccaacctctcgattcttctctcttcctctctgctcttcaatttttgtttcaggttcgagatccatggtgagttttgaagcagaaggagggaaggggtgtaacggctccttcttccgcgcgtttgacatggacgacaatggggacgagtgcatggatgagtat

SEQ ID NO: 36650 - DNA, 223 bp, Glycine max
  Clone ID: 701015583H1
tctcctcgacggcgtcctccgtacatcccgaaccgcattcctgacccttcctatgtccgcattttcgacaccactctccgcgacggcgagcagtcccgggcgcctccatgacctccaaggagaagctggatgtggcgcggcagttgccaagctcggcgtcgacatcatcgaggccggcttccctgccgcctccaaggatgacttcgaggccgtcaaaatgatc

SEQ ID NO: 36651 - DNA, 250 bp, Glycine max
  Clone ID: 701015585H1
atcctatcgcacatctttctcagttctacgatggagttttggggtgccgaggttaaggttggagagtctgttaaggtagacccagccgaatttgaggcatgcatacacctttctcaggctgctttggtgaggcaaagaaagataagcctgaaccggtggttctctacatgaaagttggtgaacagaaatttgtcttgggaaccctttccagggagaaaatccctcaaatatctctggattggttttggaa

SEQ ID NO: 36652 - DNA, 252 bp, Glycine max
  unsure (1)..(252): unsure at all n locations; Clone ID: 701015586H1
gcgctggttcgtcttcctctctcgaattcacgcttccacgacgatgctgctccgatgattattaggcactctctgttttcgagccgaannnnnnnnnnnnnnnnnnnnagttataaggttccaagcgtcatcaagtgttcgtggttgaagccaagggcaaaaagggaatgatgtctcgtcaatttcagcgcaatgctcctcctcctttacccaagattgaagacgatggcaatcccaaattcgtcatcttca

SEQ ID NO: 36653 - DNA, 250 bp, Glycine max
  Clone ID: 701015588H1
tctcactcttgttcttcggtctcctcctattctccgctgccgtagccaccgtcgaacgaatcgacgatgaagacaaccttctgatccgtcaagtggtgccggacgcggaggaccaccacctgctaacgcggagcaccacttctccgccttcaagacaaagttcgccaagacctacgccacgcaggaggagcacgaccaccgttccgtatcttcaagaacaattgctccgcgccaatcgcaccagaattgg

SEQ ID NO: 36654 - DNA, 171 bp, Glycine max
  unsure (1)..(171): unsure at all n locations; Clone ID: 701015589H1
aatctcatatactgattcngttctntacatnacnatccganatttacctatcaaaccaaaaattctcaaaatctcttcacctctgngatgaccatggnatacagnaccttagnnctcaacntntatccgcnnaggacatcaagaacgttnncctcttctcnaagatggncg

SEQ ID NO: 36655 - DNA, 81 bp, Glycine max
  unsure (1)..(81): unsure at all n locations; Clone ID: 701015591H1
ctcaacaacttcaccttcttcctcctngatcatggctcacttcaagggnaagtacaatgaaactntnangntcaacntctg

SEQ ID NO: 36656 - DNA, 126 bp, Glycine max
  unsure (1)..(126): unsure at all n locations; Clone ID: 701015592H1
ggccagatgaacttgtttttcacatanattatcttgncatctgntcagccnacnttcacattgantttntccnaaggatctagtcaaatnatngctcaatatnagcaattgattcggctnggcttt

SEQ ID NO: 36657 - DNA, 133 bp, Glycine max
  unsure (1)..(133): unsure at all n locations; Clone ID: 701015593H1
gctctctctgccattgngcnangaaacncgttanttganaacccgantntgtaatgnatgntgaaaagtaanacgggtagcaccgancacnatnacggaaaccacgatctctgaccgactgantactaccacg

SEQ ID NO: 36658 - DNA, 204 bp, Glycine max
  unsure (1)..(204): unsure at all n locations; Clone ID: 701015594H1
gtgagaagtgttttgatgagattaattgatagttataagnggtgttttcttggtttatgtaatgtttctgcttcttgnagttgtntcagatattgttttaggttgaattgcagacaatattggcattggcacatatagtttgtttttgcttgacttctcagtgagaagtgttttgatgagattaattgatagttataagaggtg

SEQ ID NO: 36659 - DNA, 259 bp, Glycine max
  unsure (1)..(259): unsure at all n locations; Clone ID: 701015595H1
caggntgccggcaaanntnaacgcactgagangcactgagnataatagggttancgacttcaggggtantcaagggnataagtctagaagatataaagcgtgctggagagcgtctgatactacaagatggtgccctaacttctttcagagcattgttaagaatganaatttgaatgccaacgtgcatgttctttcatactgctggtgtggtgacctcataggcnacttntccttccggtacatatcctttgcnaggagc

SEQ ID NO: 36660 - DNA, 267 bp, Glycine max
  Clone ID: 701015601H1
aagacatcaacatcttttgtctcagaatttaaaattggttatttttcattaaaaggaaataatttttattaattaacaaaacaagaggtaattggcaccgttaagaaacattatggtctgatgtcatatatataagtgtccaccgcgtggctgtggtttgctgaagaaaaacgcaagctgcttgtttgatagggaagagaagaaagagagaaaacaaagggcggtggtgagtgcttctgcttcatcatcatcagagaatggcggcta

SEQ ID NO: 36661 - DNA, 263 bp, Glycine max
  unsure (1)..(263): unsure at all n locations; Clone ID: 701015605H1
aaagaacagcgccatagcataacccttcgaagtcgccgtttgttttcttttcgttcgcatcttctctctctctcagaaagatgaaggtggtcgccgcgtatttgctcgcngtcctcggtggcaacaacagcccctccgccgatgtcatcaaggaaatccttggctccgttggagtagaagcagatgaagataggattgaatcgtttttgtctgaagttaggggtaggataagttgngctnatggtgccgggtggggaanaatt

SEQ ID NO: 36662 - DNA, 262 bp, Glycine max
  unsure (1)..(262): unsure at all n locations; Clone ID: 701015606H1
gcgagcgctcccactccacgcgaagagttcgtgtacatggcgaactngcggagcaggccgagcgctacgaggagatggtggagttcatggagaaggtctccgcctccgccgagagcgaggagctgaccgtggaggagcgcaacctcctctccgtcgcctacaagaacgtaatcggcgctcgccgcgcctcctggcgcatcatctcctccattgagcagaaggaggagacccgcggnaacgaggacnattcgccgtnatccgt

SEQ ID NO: 36663 - DNA, 228 bp, Glycine max
  unsure (1)..(228): unsure at all n locations; Clone ID: 701015607H1
cgagttcaaccgaaccaaactccgaagctatggcagagctccaaaccaaggttgaacctgttacggtcccggctccggctccggtggatcccgagccaccgctagctgaggctccgccgctcgagaagaaagcngtggcggtgccaccacctgttccggctgcggcagaggaaaccaaagctcttgttgttgtggagaaggagaatgagaagataccagaacctgtaa

SEQ ID NO: 36664 - DNA, 119 bp, Glycine max
  unsure (1)..(119): unsure at all n locations; Clone ID: 701015608H1
gtaagtttctctttttttctttcattccccatatgcgctcattccacttttttttttttncaatttnggggatcaaggcccccaatncnanngnttaagncnttcccaattttttcccc

SEQ ID NO: 36665 - DNA, 247 bp, Glycine max
  unsure (1)..(247): unsure at all n locations; Clone ID: 701015609H1
tattctcagatcagaaaagagaagaagaaatggtgttaggcgtgaganagataagctgtagcggagagccagtccttgacagtgataacggggaggagttgatgcaggtgcaaccgggcatagacatagtcctcggcgatcttcctcgccagtcccccggcacactctatatcactaacaagcaagtaatatgggtgagtgatgtagacaagactaaaggatatgccgttgatttcttgtgtatanc

SEQ ID NO: 36666 - DNA, 211 bp, Glycine max
  unsure (1)..(211): unsure at all n locations; Clone ID: 701015610H1
gtgtccgcatatccttcccgccgataacctttcnggtgatcgttcttcgntcacgcacgcgttaagctgaaggcatgaatgcgttcaaggcatanaaggcctgtgtgccaattgcttggacnccccaatatcnatgtaantctggtgagggggaattccagggacnaggaggntccataggngcagtttngggnnncttccgtttgcncag

SEQ ID NO: 36667 - DNA, 108 bp, Glycine max
  unsure (1)..(108): unsure at all n locations; Clone ID: 701015611H1
tacnttttcaaatccanganatctcagcagtcnaatttggtaatttgcaagctcagatctggcatcnctcgagagtgtagcntnganntccgccttngcnaganctga

SEQ ID NO: 36668 - DNA, 255 bp, Glycine max
  unsure (1)..(255): unsure at all n locations; Clone ID: 701015612H1
gntagcccccgtctacctcgccgccgttctcgaatatctcgctgctgaggttttggaattggctggaaacgctgcgaganataacaagaagactcgaattgttccacgccacatccaattggcggtgaggaacgacgaagagttgagcaagcttctaggagatgttaccattgctaacggcggtgttatgcctaacattcacaaccttcttcttcccaagaaggctgggggctcatccaagggtgctgctgctga

SEQ ID NO: 36669 - DNA, 256 bp, Glycine max
  Clone ID: 701015614H1
gaacatctctagagagagaaactaagggttggtttttttggttcagttgccaccacagcctctgactgtctagagggacattggctccccacggatgtgcccagagcaagattgttgcacctactgtaagcacaaatcaaatgccatccctaaaaatgaagagcaaagtaagcgtgagtgtttaacagaaacaaaggatcttcgtgtgtgtccgaaatcaaaaataatttccaaaagcccgtgttctaaaatcatg

SEQ ID NO: 36670 - DNA, 263 bp, Glycine max
  unsure (1)..(263): unsure at all n locations; Clone ID: 701015615H1
ggttggattcaatttacgggtcttttgataagcnctctgagnagaanaagggatacctgcttcccaggtccaagatggtgaattcgnacntctncaggatnattaattcngatgaggtgcaatctgttgtgaggcncattaagaaggatgtgaagaggggccactntcaagaagannccctccttaagaatcnccaacttcgatgctgaagctgaaccttatgccagnaccgctnagaggangggcccttctcgntggggnag

SEQ ID NO: 36671 - DNA, 205 bp, Glycine max
  unsure (1)..(205): unsure at all n locations; Clone ID: 701015616H1
gtcatgtnngaantcgtcnanannnacnnttccttcttngncaancagtttngaangggcacccagagcgtcgnnttcagcananagagcaacaatctctacaacctcaattcgttcaagtactctggtttggcaaacaanacaactgttactgttcagcctgagggcaaanatcaggctgtgtngttggctacaaccnagncaa

SEQ ID NO: 36672 - DNA, 261 bp, Glycine max
  unsure (1)..(261): unsure at all n locations; Clone ID: 701015618H1
agacccttctcttcggtgacaagccagtcactatttttggacacagaaaccctgaagagatcccatgggggtcaactggagctgacatcattgttgagtccaccggagttttcaccgataaggacaaggccgccgcacatttgaagggtggtgcaaagaaggttattatttctgcccccagtaaggatgcccccatgtttgttgttggtgtcaacgagcacgnagtacaagccagnnttgatattatttcnaatgctanng

SEQ ID NO: 36673 - DNA, 260 bp, Glycine max
  unsure (1)..(260): unsure at all n locations; Clone ID: 701015619H1
aatgtcggaagctaagacccaaattgaatccataaggaagtgggtcgtcgagcacaagctccgtactgttgggtgtctgtggctcagtggtatttcgggttcaatcgcttacaattggtctcgacccaatatgaaaactagtgttaagatcattcacgcaaggttgcatgcacaggctcttacgctgggagcattagccggagctgcactagtngatattatgntcgtaatgcaggagcaaaggcttcaaaananntttg

SEQ ID NO: 36674 - DNA, 260 bp, Glycine max
  unsure (1)..(260): unsure at all n locations; Clone ID: 701015620H1
ctctcttctcaccatcgaggagggtattttcgaggtgaaggccactgctggtgatactcacttgggaggtgaagattttgataacagaatggtgaaccattttgttcaggaattcaagaggaagaacaagaaggatattagtggaaatgccaganctctgaggaggttgagaacagcatgtgagcgggcaaagaggactctctcttccactgctcaaaccaccatagagattgattccttntacgagggtattgacttct

SEQ ID NO: 36675 - DNA, 261 bp, Glycine max
  unsure (1)..(261): unsure at all n locations; Clone ID: 701015621H1
gccatggcaggctctcaccttctttctcactcaccctcccttcccaaaacctataactactccttaaaccaaaaccctttatcccaaaatcttttttttccacccctcaaattcaaaagcnccacaaaancgcgtgttctcagagctgttctctcccaanaggctgcaaaanccgcggtagaggacacaaagaacgctcattttcagcattgtttcaccaaatccgaagatgggtatctgtactgtgagggcctcaaggtg

SEQ ID NO: 36676 - DNA, 260 bp, Glycine max
  Clone ID: 701015622H1
gcgatttcagtttattgtgatgaaccgtcgcaatactgaaaatttggtggagaatctcttgggcgatttcgagtatgaagttcaggttccatatttgctgtatagaaatgctgctcaagaagtgaatggtatctggttctataatgcacgtgaatgtgaagaggttgccaatctttttagcaggatccttaatgcgtatgctaaggttcctcccaagtcgaaggtttcttccacaaagagtgagtttgaggaactagaag

SEQ ID NO: 36677 - DNA, 234 bp, Glycine max
  unsure (1)..(234): unsure at all n locations; Clone ID: 701015624H1
aatgcagctgcggaattaaaaattgaagaaatggaattacgaattgaaaagcttgaagaggagcttagagaagttnctgctcttgaagtgtcactttatgctnttgccnccagancatggcagctgcaacacacaaggtgccncacacctgctcggcgcctttcnaggctcnnngatacatgccngtnaagcnttncgcccnnaaaagnggcnnnncnannatngcnaannaga

SEQ ID NO: 36678 - DNA, 265 bp, Glycine max
  unsure (1)..(265): unsure at all n locations; Clone ID: 701015625H1
ggaagacatttacccaaggaggtggttgaaaccatgggcatccctgaatgaggttctttcttgttttctctaataatacttttgctacctcatgaaaattgagaagattctgtctctaacatttgtgatatttcttggcatgtagaaaccactcattcttgctctctccaacccaacttcacaatctgagtgcacggctgaagaagcttatanatggagcanggtaatttttcattatatcataatgcttagcaccngaaacatc

SEQ ID NO: 36679 - DNA, 203 bp, Glycine max
  unsure (1)..(203): unsure at all n locations; Clone ID: 701015626H1
gtngcttatcatcctnttcttactcagaggactanaagcaagtttgncnttgctggtgcnttccanntcaacnggnacccgtttaacgatatatagctccggagcngcttccggtnaaatncggtggngctaggnaaacanaggcgagttcnggaatnncgatnctgnttncagaagttnagagtgagggccgggagnaaaaa

SEQ ID NO: 36680 - DNA, 263 bp, Glycine max
  unsure (1)..(263): unsure at all n locations; Clone ID: 701015628H1
gttcgctacgacgcctacgggggaggtcctgccggnctcaagcacgttgaagttgccgttcccagtccaaaggcaaatgaggttttaatcaaactgggagcagttagcattaaccctnttgattggaagattcagaagggtnttctnccgtccttnatttctccccagaacctttccccagaatacccttgnaacngatgtggctggnagaaaatanttggngatnggaacnaagtcaagtttnaanatnggggcncnannnc

SEQ ID NO: 36681 - DNA, 246 bp, Glycine max
  unsure (1)..(246): unsure at all n locations; Clone ID: 701015631H1
gtgagtttctgattcctttcttcnnnattccaagtttncatttcgttaaggacaaaagatngtganatagagtatggctggaaaaggcgaaggtcntgctatcgggatcgtttnggaacgacnnactcttgggtcggcnnngtngncaacacgancgtgttgcaaatncaaagccaaangaccatggtagcnagaactaccnccatctaacgtggntttcagcgacncagaaggggttgancgggg

SEQ ID NO: 36682 - DNA, 255 bp, Glycine max
  unsure (1)..(255): unsure at all n locations; Clone ID: 701015633H1
ggagagttcgaagatgtcgggcgttaccaacaacaacgaggaagacaagaagccaaccgaacagggagcacacatcaaccttaaggttaaggggcaggatgggaatgaagtttttttcaggatcaagagaagcactcaattgaagaagcttatgaatgcttatgtgaccgacagtcggtggattcnaccccatngntttcctgttngangancnccnccccggtntgagnanccccagatgnttngaaattgggg

SEQ ID NO: 36683 - DNA, 258 bp, Glycine max
  unsure (1)..(258): unsure at all n locations; Clone ID: 701015634H1
gatattgtgccctcttctcacaactgtgatgttcctcatgtgaatcgtactgattaccagctcnttgatattgatgaggntggatttttgagtctgcttactgaaaatgggaacaccaaggatgacntcaagnttcccacngatganagtctgntcactcagataaangatggatttnaccgagggcaaggatntggtngtgnnctgnatntcngnaaggggtgacganaatattngncnccnnaaangntanggggc

SEQ ID NO: 36684 - DNA, 252 bp, Glycine max
  unsure (1)..(252): unsure at all n locations; Clone ID: 701015635H1
atggacacatcactagtgtttactgtgaggaggagtgaggcagagctgatagctccggcgaacccacccctcgtgaagtgaagctactctcagacatagatgaccaagatgggttacgtttccaaattccggtgatacagttctatcgccacgacccatcaatggcagggaaagaccctgtcgatgtgataagaaggctgtgcnnaaacgcttgttttaacnnatncntnnggggtgncttggggaagntng

SEQ ID NO: 36685 - DNA, 257 bp, Glycine max
  Clone ID: 701015636H1
gaaaaatctgggttggtatgctgcggtaggctgctagcatcatagcaatagcacgccattttcatctgcttgatcggatctgccaccgaacgaaccctaaacactcttccctctctctctcttcaattctcgttcgattaacatggcatctcatttactcaatcactcctccaagatgagaaatgcttccaagttgctgcaccacgagcgcgctcttttggttcgttggttttccggcgatgctcattcatcctcaa

SEQ ID NO: 36686 - DNA, 257 bp, Glycine max
  Clone ID: 701015637H1
tcccttccaatgatcatctgaaattacataggatttatagggtcatcaagaactcttcagcatcacaaaagggtattgttcttttcttctctgtcttcctttaccaaccccaaacatttcttttgtgttaaatttactgattctactcagcaatcagcaatcagcaatcagcaatcagcaatcagcatcattacttttccttgtagccatgtcaatttgttttctgtttcaaaaaccaatatgtctttctctttttc

SEQ ID NO: 36687 - DNA, 211 bp, Glycine max
  Clone ID: 701015638H1
atgttcttgtagcggaaccgttcttgcttctcggagaacatggcctccatctcctccgccgaactcaattacctcgtttatcgctaccttcaagaatcaggtttcacgcatgctgcttttacttttggttatgaagctggtattaacaaatgctccattgatggaaatttggtgccgtcaggtgctcttgttacatttattcagaagggtc

SEQ ID NO: 36688 - DNA, 248 bp, Glycine max
  Clone ID: 701015639H1
ctatttttttataaaaaaaactattaattaaatattcatttattatttacttgaccagcaagttctttttcatttgttaaaactttatgaaattagatatttcattttctgtgaaaaaatcaattcattaaatactgttgaaaatcatggtcagaatttgagcttttggcaactatggacagaaatatgaacttttcgtatttggaggagaagcaatcctttttcggtttcgctgtttccattttcag

SEQ ID NO: 36689 - DNA, 232 bp, Glycine max
  unsure (1)..(232): unsure at all n locations; Clone ID: 701015640H1
tcacatctgtgagtcctgaagaccagagatcagctgctggcganatccgccttcttgcaaagcncaacgcaganaaccgcgttgccattgctgagnctggtgaaatacctctccttgtnggtcttntgncctgtgcctgantcccgcactcaagancangccgngaacngccgcccgggaatcntgccaananggaganccnaagaggggnattnnnngctcncncgggnga

SEQ ID NO: 36690 - DNA, 259 bp, Glycine max
  unsure (1)..(259): unsure at all n locations; Clone ID: 701015641H1
ctgttgctgcacttttaggagttcttctattctaacaacctctgccaaccaacacaagcctgaaaataaaataaagatgctgcctccttgctggagatcgttcgggaagaaacagtaatgctactgacatgggaaagaaggggagttggttttctgcaatcaagaganttttcacacaccactccaagggganggattcngataataaccagaggcacaaangagnagangaaantctnggaaanctaagnntggannc

SEQ ID NO: 36691 - DNA, 79 bp, Glycine max
  unsure (1)..(79): unsure at all n locations; Clone ID: 701015643H1
ggcaaatggaagccagctgctaaagtggcttatgggaagtaanttgtggaaaataattgaagcnttattttaaattgag

SEQ ID NO: 36692 - DNA, 266 bp, Glycine max
  Clone ID: 701015645H1
gaaaccctcttcatcttgttctatctgtgacgagcatcatggcctcaagagcagtgttattgttggctatgtgtgtgcttccggcgatggttgtggccattcgcccagcaaagaaccctttttgcgtgaagggtcgtgtctactgtgacccttgccgtgctggttttgagacctcagctaccacctacattgctggtgctgagattatgttgcaatgcaagagcagggttagcaacgaggttgtgtacacgaagaagggtacaccg

SEQ ID NO: 36693 - DNA, 151 bp, Glycine max
  unsure (1)..(151): unsure at all n locations; Clone ID: 701015646H1
gccattttcgccattatcactcctctcgcaccaaaagcgatgaagctcnagttgctgctttnntcgttttgatccgtacattttnccctcnncngcnncnatccccgaagcngcgagaancnnctgcntcgattgcgnncttnatgtgatt

SEQ ID NO: 36694 - DNA, 283 bp, Glycine max
  unsure (1)..(283): unsure at all n locations; Clone ID: 701015647H1
tgcgatttttgtggaggacnagctnanaaactggcccttgcaaagtatanacaggtgatttggcaaaggagggttctcagctctcaattccactgattgnagagttgaggngtcgaggtcgttgcncaatgactacntgaagaggttgggantgttgactaggcagtctatggcgntttnacancaagcactcgnttatatcntgacctnntcataaggtnnaatcatggtngcttggttttgacacantanangctttnatgnnatctganttgttncttgt

SEQ ID NO: 36695 - DNA, 271 bp, Glycine max
  unsure (1)..(271): unsure at all n locations; Clone ID: 701015648H1
ggcgtcgtcacaaccagagatggagcatccaaagaaggtttttggttgggctgctcgggantncatctggngctctctccccattcaacttctccagaagagaaacgggggagaaagatttggtattcaaagtgcaatactgtggaatatgccactcagatctacatatgttaaagaacgagtggggcaacacaacctatcctctggttcctgggcacgagattgctggtgtggtaacagaagttggaagcaaggtgcaaaanttcaaagt

SEQ ID NO: 36696 - DNA, 114 bp, Glycine max
  unsure (1)..(114): unsure at all n locations; Clone ID: 701015649H1
tgacctactatggaactgcnccacgtgtagngcancagtcnaatggtgctngcggctggnacttgtcatagctgcgcgnggntggncaagggcctagangagctnggcngccag

SEQ ID NO: 36697 - DNA, 135 bp, Glycine max
  unsure (1)..(135): unsure at all n locations; Clone ID: 701015651H1
tggtgacnggtgtcgtttcaatcaccctccgcgatcgtgctgcggttgctgcggcagtaagagctacaggggantacccanaaanggtgggggaacctccgtgtcngtattatttaaanaccggaacctgtaant

SEQ ID NO: 36698 - DNA, 247 bp, Glycine max
  unsure (1)..(247): unsure at all n locations; Clone ID: 701015652H1
agaaggtgttgtgaaaggttaagatcgagaaattagggtgaagtgaaggagaagctcttgagaaggcatgttctgtcgggaatgattgtagctgacttgaaagttgaaactgaagatgggagaagcaacagaaagatatgcagttgtgacgggtgcaaataaaggaattggattagagatagttagacagttagcttcagctggaatcaaagtgttgctcacagcnangaaatgagaagaagggtcc

SEQ ID NO: 36699 - DNA, 134 bp, Glycine max
  unsure (1)..(134): unsure at all n locations; Clone ID: 701015656H1
tcagacaagccactcaggcttccattgcaggatgtctacaaaattggtggtattggtaccgtgccagtgggacgtgttnagactggtgtngtnaagcccggtatggtggtgacttttggncccactgggctgac

SEQ ID NO: 36700 - DNA, 141 bp, Glycine max
  unsure (1)..(141): unsure at all n locations; Clone ID: 701015657H1
gaagacatttacccaaggaggtggttgaaaccatgggcatccctgaatgaggttctttcttgttttctctaatantacttttgctacctcatgaaaattgagaagattctgtctctaacntttgtgatatttcttggcatg

SEQ ID NO: 36701 - DNA, 260 bp, Glycine max
  unsure (1)..(260): unsure at all n locations; Clone ID: 701015658H1
acgtctgtgcttgngagcttccatttnaantcaattnatctgntcatgagtgtcattgtgggagttgnctantaaggaaanaattctcaaangatgctcttcctgagtangttgattggcagctaaanaaagagataggtttgggatttggggttttaagcaatgaccttgctacgcttactgtgtgaaccagangaaaatgggggttttaccanttatanggcaantgtcatcaggaaggtttgaaatggnagaaantc

SEQ ID NO: 36702 - DNA, 264 bp, Glycine max
  unsure (1)..(264): unsure at all n locations; Clone ID: 701015659H1
acttcctcagccacttccccaatactcaaacatgagtggttccagacatccttctggacttgacctggtttctggattcatgaacgggatgtatccgagcaacaggatgtacagccaatatggaaacacattcaggcctaattctcatttcggatctgctgcgtatggatctagaatgggctctttcgatagcaaacataatggtgcagggtatggctgcggtcttaaccattttaaaaaaagtatggatggtttcnncganca

SEQ ID NO: 36703 - DNA, 143 bp, Glycine max
  Clone ID: 701015660H1
gaccatagatgtactgctttatgtggatcgcttggatgtgtatagagtggacaacttggataaggtagtcgccaaagctataacagatagttttggaaaaggaatatggagcaagactattctagcactcacacatgcccagt

SEQ ID NO: 36704 - DNA, 265 bp, Glycine max
  unsure (1)..(265): unsure at all n locations; Clone ID: 701015662H1
gcttagtactctttttttggtctctggagttacaccacagccacggagctctaggactgctcattaggtagtttttttatttagaggctaacatgagctttgctgcgccatcacttggttctgctggtggtagatctgctagaagagcatttgagtttgggagaacctatgttgtcaggcctaaaggtaaacaccaagcaactatagtctggttgcatggcctcggggataaggctccattggtcccagctattngagacccttc

SEQ ID NO: 36705 - DNA, 264 bp, Glycine max
  unsure (1)..(264): unsure at all n locations; Clone ID: 701015663H1
caaaccacaaaataatcaattgagctacttactataagatttagatctcccaacagagagtttcacaaaattgccaagtacccttttcaggatcaaggaagagaatcaagaaccaacaaaaggtgttgttcattgttgtagttgtttgtaactgtagcaacaggaagatggttggaaagttggttgtggtgaggcttgtgttggccatatctgtgttgactctcctccttctgacacctcggcacagacagcngcaggggccag

SEQ ID NO: 36706 - DNA, 179 bp, Glycine max
  unsure (1)..(179): unsure at all n locations; Clone ID: 701015665H1
ataaaattgttttcacataccatggacaacaacaatgacttttggaaattcagtgaccagttgaggcttgaatctggtttggccaatctgtctctgaatgattattccatttggagcaacagctacagctccaanaggcctgatcagaggaggaactttgatgtcaagggcagtgattt

SEQ ID NO: 36707 - DNA, 109 bp, Glycine max
  unsure (1)..(109): unsure at all n locations; Clone ID: 701015666H1
agttatactctctctctctcactttgatcactgatctcatctcaattttcntatatgtcgacatctgataagccagaagaggtgnaaaggggtancnagggnganaagg

SEQ ID NO: 36708 - DNA, 111 bp, Glycine max
  unsure (1)..(111): unsure at all n locations; Clone ID: 701015667H1
gttcctcacatcatgtaccgctttgcaacctccctcgcctccnaagctagaattgccaggagcagcactcancagattggaagtagggtcaattggaacaggaattatgng

SEQ ID NO: 36709 - DNA, 255 bp, Glycine max
  unsure (1)..(255): unsure at all n locations; Clone ID: 701015668H1
tacagaanaacgttaattatccaaccgaggcaagacaaagggctatttttnagcttctaggctctgtcacttgccttcttcaggcccagtcttcacgttcgnatgtttctcttcccngaaagagactgtggtggtggtaccttttagtttgtactaatcaacagaganaactcnttaatggngaaactgaaagtgtctgctangaatgatcctgnctggccagcngtgatcagggcngactcatttccaatgttc

SEQ ID NO: 36710 - DNA, 253 bp, Glycine max
  Clone ID: 701015669H1
ctcaagaggacgaggaggctatggaaatcgtggtttaacgtcaggttccaatgccattcctctaggttcgaagcggccctggcattgtctatagttttggtgctgctttgggcaaattcttagttttacaaatgttggggtgttgattttgaacatgcatctatttgaccacaattacacttgaaacagcacattgttagattttaggacaaaaattgatcttattttttcaacgactgaagtctggaaagca

SEQ ID NO: 36711 - DNA, 252 bp, Glycine max
  unsure (1)..(252): unsure at all n locations; Clone ID: 701015671H1
ggagcttctgcatttgctctctttgttcaatcaagctggcatttattttaatcaccgtggacgtcacaagattgaagatacgtttgacaccgatgatgaatagtgcaccctgctgagatgcttatcaactgctttgtgtanaacatcatcatcggtttgttttttcactaganagcaagcntccttgattngntgntnttntgagaaanagtantgcacaccnaagcananntgagggtatnanaatgagag

SEQ ID NO: 36712 - DNA, 133 bp, Glycine max
  Clone ID: 701015672H1
cgtggactgtaaacatctggtaaaccaatataataactcagaaaaatgttataaaacttaggagttccagctagaagaaccaattaaaactgagctttacagcaagcacaatccctggtttggctcaaattat

SEQ ID NO: 36713 - DNA, 260 bp, Glycine max
  unsure (1)..(260): unsure at all n locations; Clone ID: 701015674H1
tcganccggggaagancatcnagaccatgaagatgagcantatcatggagtaaagggtttgtcatcatatgaaccagatctaagtgctgttgaagaaggggaggtatccgcacttgatgacattggtgtagggcttccatcacctaagtcaaggcaatcgcaaganaaaagcaggaagctcccctgaaagaggggtggangggaaacgtcataattatggccccgggcctcaccacagtaatcgntttgatacatggggg

SEQ ID NO: 36714 - DNA, 119 bp, Glycine max
  unsure (1)..(119): unsure at all n locations; Clone ID: 701015675H1
gngaccttgaagagctatggctgtcggaaagaatgagaagatttccaagggttancagggtggcaacncgncagccgcnggtccctctgncaaggnagaccgggtannctctcnaangc

SEQ ID NO: 36715 - DNA, 196 bp, Glycine max
  Clone ID: 701015676H1
gttgacaagatggcaactggtttaatcaaacttgcacaggaagacccttctttccacttctcccgtgatgaagagataaaccagacagtaattgaaggaatgggagaattacatcttgaaatcattgttgatcggctcaaaagagaatttaaggtggaagctaacgttggtgccccccaagtaaactacagggaaa

SEQ ID NO: 36716 - DNA, 263 bp, Glycine max
  Clone ID: 701015677H1
ccgatagccctttggtgtaaagcttgaaatttgaggcgtttgaaggaaaaaaagggtttatcgtttcgtcgtggatggcgaacccatctgggaaccatcaagaacacacgcacgtggtgtcatcttctgctccggagacttcaggtgcggctctcgccatgaagcacaaccctggcatatccctcgattggaccgcagaagaacaagccattctcgaagatggatctcccaatatgcctcggaatccaacatagtacgctatg

SEQ ID NO: 36717 - DNA, 263 bp, Glycine max
  unsure (1)..(263): unsure at all n locations; Clone ID: 701015678H1
caggaatcgtttatatatagcttcgtggctcgggggacgatggtgttagccgagtacaccgagttcactgggaacttccctgcaattgcagctcagtgcctccagaaactaccctcttccaataacaagttcacctacaattgcgaccaccacaccttcaattttctcgtcgaagaggttacgcttactgtgttgttgccaaggaatctgttagcaaacaaatctctattgctttccttgaacgtgtaaaagcggatttanga

SEQ ID NO: 36718 - DNA, 266 bp, Glycine max
  Clone ID: 701015680H1
gcgcaggaacacccacagaaagaaacggagaaaagtagttttgaaaagactcacgcacataatgtttcaaatggatctgaggttgttagtgaaaaaaggaaatctggcaataaaaagattttggatcatgctgtcactgatgtttcagagcagggcccaaatgcctcttcagagaaaaagaaagatttgaccgtgccaaagtcaaaagagtctgatcctgagaaaggtgatggacaggaagcaaaagaccaagaatgataatgagc

SEQ ID NO: 36719 - DNA, 132 bp, Glycine max
  unsure (1)..(132): unsure at all n locations; Clone ID: 701015681H1
gagaaactaagcatattgcctaggtcaggaggggctttgggatttncttacactcctccaaccaaatgaggacagatacttgcttttcattgatgagttgcgtggccgcctggttaccctacttggaggacg

SEQ ID NO: 36720 - DNA, 251 bp, Glycine max
  Clone ID: 701015682H1
gtccctttctgttctcttcactcttggtcttgcgagagaaagccatgccagagacgaagatttttggcatgctgtttggccaaacactcccattccaagttcattgcgagatcttctaaagcctggccctgcaagtgttgaaatcgatgatcaccctatgcaaattgaagaaacacagtacccgaaaaccttcttctataaagaagaccttcatccaggcaaaacaatgaaagtacattcagcaagcctcc

SEQ ID NO: 36721 - DNA, 252 bp, Glycine max
  unsure (1)..(252): unsure at all n locations; Clone ID: 701015684H1
gttatgttgcctcaaactcaaaggatgaccctgcaaaggaggctgctaacttcacagcccaagtccatcatcatgaaccaccctggtcagattggaaatggctatgcccctgtcctcgactgccacacttctcacattgctgtcaagtttgctgaactcatgaccaagattgacaggcgatccggcaaagagcttgagaagnagcccgagtttttgangaacggtgatgctggttttgttaatatgattccc

SEQ ID NO: 36722 - DNA, 248 bp, Glycine max
  Clone ID: 701015686H1
gttgtctctgatgcaatgtttctcgatcttagtgcaaccatggtcatcatattcactatagagtgttgacatgaacacctcttcattataaacaccctgttaacacttatttttcctattacatcataatacctgtcatacatatacttctctttctttatccctctaggtgtccaatagcatatggatgtctattaatcattttcctgcgctatagtattagagcaggggagactcttattttggtc

SEQ ID NO: 36723 - DNA, 178 bp, Glycine max
  unsure (1)..(178): unsure at all n locations; Clone ID: 701015687H1
ttgaatatggctacactgacttggtcagtggtaacttctgttcaagggcgtgttcctgttggctagtgagngcntcgngtttggttgtaanctnttatgatggtgaatgacatacttgtancatttggaggatacaatggacattgacaanaatnaggtctaannnccatagacnacg

SEQ ID NO: 36724 - DNA, 130 bp, Glycine max
  unsure (1)..(130): unsure at all n locations; Clone ID: 701015688H1
aaaactcccttgnanattgttgcagctctagctanggtttcgcaagnncgatccaanaagaacaacgacnatggcgatggctgcagtctgcgtngcgaangaaggngcntnatccaaccaatcaacgccc

SEQ ID NO: 36725 - DNA, 255 bp, Glycine max
  unsure (1)..(255): unsure at all n locations; Clone ID: 701015689H1
tgacctgcaaagagctagagataaccctgatgatcaatatgctactaggcagaaagatgatgcctgggtaccaagggagaggggtgataggcagagagatagggaggagtggcatcggatgaaacagtcccatgaagaacacctacccaagcgtgaaagagaagaaggacgaattctgtaagaagtggacgaggggctgaacatanactttctgagaaagattacccattcnngngacctatgcggnaaatncct

SEQ ID NO: 36726 - DNA, 255 bp, Glycine max
  unsure (1)..(255): unsure at all n locations; Clone ID: 701015690H1
caccacgcgacgtgcggtgcgcccccggcggcccttnaaaatccggaggaccgagtgcctcccacgcccggtcgtactcatnaccgcatcaggtctccaaggtgaacagcctctggtcgatggaacaatgtaggcaagggaagtcggcaaaatggatccgtaacctcgggaaaaggattggctctgagggctgggcangggggtccagtcccgaacccgtnggctgtnggtggactgctcnagctgcttccgcgg

SEQ ID NO: 36727 - DNA, 258 bp, Glycine max
  Clone ID: 701015693H1
ggggcgaacatactagttgatcctaatggtgaaatcaaactggcagactttggaatggctaaacatataaattcttctgcctcaatgctttcattcaaaggaagtccatactggatggcacctgaggttgtaatgaatacaaatggctatagtcttccagttgatatatggagcttgggatgcacaattattgaaatggcaacatcaaaacctccatggatccagtatgaaggggtactgccatatttaaattgggac

SEQ ID NO: 36728 - DNA, 263 bp, Glycine max
  Clone ID: 701015695H1
gggcagctcgtgtgggagatcgtcaagaaaaacaattccttcttggtcaagcagtttggaaggggcacccagagcgtcgaattcagcagagagagcaacaatctctacaacctcaattcgttcaagtactctggtttggcaaacaagaaaactgttactgttcagcctgagggcaaagatcaggctgtgttgttggctacaaccaagacaaagaagcaaaacaagcccgctgcattgctccacaaatctgtgatgaagaagga

SEQ ID NO: 36729 - DNA, 188 bp, Glycine max
  unsure (1)..(188): unsure at all n locations; Clone ID: 701117301H1
tcangagcagtgttnttgntngctatgtgtgtgnttccggcgatngttgtggccatncnnccagcaaagaaccctttttgacgtgaacggtcgtgtctactgngaccctgccgtgctgngttttgagactcagtctaccacctacattgcnggtgctgagattatgttncatgcangagcagggttag

SEQ ID NO: 36730 - DNA, 307 bp, Glycine max
  unsure (1)..(307): unsure at all n locations; Clone ID: 701117302H1
atgggcaccaccttgatganatgctcccacgcaaacncnaccttcagagctctcaaaaccaaaccccgcaattcttcactgccactttcttcaatggccattcaacaaaggtgtgactgtggatccagctatgataaagcagggatttaagagagcatttgctgctccgtggcctgaaaagctgcgctaccagggagatgggaggccattttggaaacttgtagtttctgaagccactggttgtggagatgaagatattttgaggaagtttatgagtactctgcaaaaggtgatgcgtggcatcttc

SEQ ID NO: 36731 - DNA, 303 bp, Glycine max
  unsure (1)..(303): unsure at all n locations; Clone ID: 701117304H1
ggaangctctttttttcttttttgttggtttctcttgttttttttttgtaggtactnaggaagaaagaccaaaactttatccgttacttcacttagctcaagagcgtacaattcaggcaaaggccttgaagtcggagtgtgtgttaaggatttcttaggagttgcttctgtcttgactgaagaaatggaggtatatggcaaatctatggttgcaggtcctgcaantgttatttttctgtcaagtgttttgggccaagaaggtccagttcccggtcacaaatgcgatggaaatgtcaaaaganc

SEQ ID NO: 36732 - DNA, 288 bp, Glycine max
  unsure (1)..(288): unsure at all n locations; Clone ID: 701117307H1
cagaagtctttcctagtcgantaanagccaaagccatggcagtctgtatgtncagtagcattgggtgatnantttntttgttggactantgttcttncgtttgcnggagaaattggtcnacancngcctttangtatgntggctacctttgcacaaggcantaatttttgtaaaaagaaatgtggtggaaaccaaagggaagtcacttcatgaaatcgagntcgcacttctacgccaagactagagcatcttatgnagctctattcatngattgctctgaattctgct

SEQ ID NO: 36733 - DNA, 247 bp, Glycine max
  unsure (1)..(247): unsure at all n locations; Clone ID: 701117308H1
gatctatcacccaaatgttgatgagatgtcaggatcagtttgtctggatgttancaatcaaacctggagtcccatgtttgatcttgttaatgtntttgangngtttctacctcaacttctgctgtntcccaanccannagacccctgantggagaagctgcagctttaatgatgcgtgatcgaccaggttatgnacanngggtnaaaggtcttatctgctgatggaatcgacttcgttgncannccg

SEQ ID NO: 36734 - DNA, 305 bp, Glycine max
  unsure (1)..(305): unsure at all n locations; Clone ID: 701117309H1
atttgaatacattccttgtagtttatactgaaagatgggtttgaagatggcgttactgatcctaggcctttccctcatgctccttttggtctcntctgaggtggcatccacgaatacaaaagaggaggcaaatggagtggatgatgccaaatatcccggtggaagctatggagggggttacccaggtcatggcggtggcggttatcctggccatggcggtggcggttatcctggccatggcggtggtggtggctatcctggtcaggtggtggccaccctggtcatggtggcggctaaccctggcc

SEQ ID NO: 36735 - DNA, 307 bp, Glycine max
  Clone ID: 701117310H1
gaatctgctcagagtgaagcgcggacttgacatggtcagagtgctctttgagcagattctagttacagagggtaattcccttagggatccagcttccaaagcttacgaacaggtgtttgcacctcaccatggctgggcgatcaggaaggctgtttctgcgggaatgtatgcccttcctacaaaggaacagcttctgaagaaactcaatgaggatgaggcatcggcaaaagaccacatggcaaagttatgtcactgcttccgcacctctaatccaatacattgacaaactctttgtttctagagactt

SEQ ID NO: 36736 - DNA, 301 bp, Glycine max
  unsure (1)..(301): unsure at all n locations; Clone ID: 701117314H1
gaaagttagggttagggattttgagagatggcatcgactaagaagatcaccctgaagagttcggacggtgaggccttcgaggtggangangcggtggcgctggagtcgcagacgatcaagcacatgatcgaggacgactgcgccgacagtggaatccctctccccaatgtcaccagcaagattctggcgaaggttatcgagtactgcaagaagcacgttgaggcgaacatgctgatgagaagcccagtgaggatgtgctcaaggcttgggacgtggatttcgtcaacgttgatccaggcca

SEQ ID NO: 36737 - DNA, 300 bp, Glycine max
  unsure (1)..(300): unsure at all n locations; Clone ID: 701117316H1
cgatcaccaacgcaaagcaatgggcgctatactttctgccttaactggcggtgccgcaacggcggcgacgtcttcgccgganagttctgcttctagggtccagtctttccactcttcggcgcgctggcagctccacttcaacgagctcaaagaaaccaataagctcgttgtgatagatttctcggcgtcgtggtgcggcccttgcaaattcatagagccagcgattcacgccatgtccgaaaagttcaccgaacgttgacttcgtcaagatcgacgtcgacgantgccggatgtggcgaa

SEQ ID NO: 36738 - DNA, 303 bp, Glycine max
  unsure (1)..(303): unsure at all n locations; Clone ID: 701117317H1
ananaaaggaaaacnatgggttccgntaatcaccagaacttggagttcttgaaggagatcggtttgggctcttccaacattggctcttacattaatggcccagtgganagccactggttcttctgtcacttctgttaatccttctaacaatcagagtatagctcaagtgaccgaagcaactttggcaagattttgaggaggggttgcgagcttgcagtgaagcagctaagacatggatgactataccggcaccgaagagaggtgagattgtganacagattggtgaagcatgagggccaattg

SEQ ID NO: 36739 - DNA, 308 bp, Glycine max
  unsure (1)..(308): unsure at all n locations; Clone ID: 701117318H1
ctngcagccnggttactgtctgntnaagctanccatctctntctctctntcttaagnggntccttngnnacannntagaatggcctnagaaattncctattcacnctnnatcagtgaacgngnggcancctgcacaggnnctgtgaccagatctccgatgctgtgntcngattcatgcttggagcaggaccctgagagcaaggttgcctgtgaagcctgcaacaagaccaacatggtggtggttttcggagagatcacaaccaaggccaacgtggnctatganaagattgtgcgggacacatgcaagg

SEQ ID NO: 36740 - DNA, 302 bp, Glycine max
  unsure (1)..(302): unsure at all n locations; Clone ID: 701117321H1
gacctaccagaatttttccaatcttaatgttaccggcgacctgaacaaacagcttatttcagcaaatcttgtccatacgatncggtgtccccgacgttaacttcgactacaacttcaccgncgacaacacttcctatcccaaagccggacaccgctggttcccaaacaganacctcacatacggttttcttcccgaaaaccaaatcccagacaacatgactaaggtgttcagagattcctttgcgaggtgggcccaagcttcggggactttgagtctnaggagacaactacgacaacgngga

SEQ ID NO: 36741 - DNA, 267 bp, Glycine max
  unsure (1)..(267): unsure at all n locations; Clone ID: 701117322H1
ggttntcnttgctcgaactcgaacgaagatngcgtgagattcttcacatccagggangtccatgcgggaaccagatcnggngccannttctgggaggnggtgtgcgcngagcacgggatcgattcaacggggaggtaccaaggggacaacgagttgcaactcgagcgagtcaacgtctactacaatgaagcgagttgcggaaggttcgtgcctagggcggtgctcatggatctggagccagggaccatggacagcgtcagatctggt

SEQ ID NO: 36742 - DNA, 168 bp, Glycine max
  unsure (1)..(168): unsure at all n locations; Clone ID: 701117327H1
gaaaatggggcaatctagaanacaaggcacatccactgtctctntnttcnccgtgttgacgcggtaagtgantgttcgagaaggtgggtttaagcgcacatcaganccagacatctctgcanaaccagtgggcgtttcattgaatcttcttcatcactgccaaaaacg

SEQ ID NO: 36743 - DNA, 299 bp, Glycine max
  Clone ID: 701117329H1
attgggtatatatattctgcaatatccaaaccccaaacgctcactgaaaagtgaagcacttgacattgaagagcttgctgatcagttacagatagggtcaaagttttatgtgattgatgtctcaatgggatcatatgctacctggagttgtttgaactacatccccaacaggctagcaggtgtgactatgatagctccagtgataaattatcaatggccttccttccctgagggtctgataaaagaggactataggaggaaacttatcaagtggtccatctgacttgcaaactatttac

SEQ ID NO: 36744 - DNA, 296 bp, Glycine max
  unsure (1)..(296): unsure at all n locations; Clone ID: 701117331H1
cgagattccgatggcgactctggattccgacgtgcctatggttcccgccggcnagccctcgagcagcgccggtccttcttccaagaagcccaagcgcttcgagatcaagaagtgaaacgccgtcgctctctgggcttgggacatcgttgtcgataactgtgctatctgccggaaccacatcatggatctctgcatcgagtgccaagccaaccaggctagcgccactagcgaggaatgcatgtggcatggggagtctgtaaccatgcttttcattccattgcattagtcgatggctc

SEQ ID NO: 36745 - DNA, 241 bp, Glycine max
  unsure (1)..(241): unsure at all n locations; Clone ID: 701117332H1
cctgggacattctgcaggagggggctttgccaacagggcatctgcgggattannnnnnnnnnnnnnnnnnnnnntccgaatgctataaatgtcatcaaagtggtcattatgnaagagattgtcctggtttcagtgcagcacctccatcatcatatgggagcaattcaggtggtggtggttctggcgaatgctttaaatgccatcaaactggccatgggcaagagatgttcctggtctcatg

SEQ ID NO: 36746 - DNA, 298 bp, Glycine max
  Clone ID: 701117333H1
ggaggtgatgcatcactatgaggtggatactgatgctgaggtgttggacttgcttgacaccgcttctagggagaaacaggtgactgtggtggcaaagctatactggggggatgcaagagagaaaattgtggaagctgttggggatttaaagcttgactctttggtcatgggtagcagaggattgggcgccatacagagggtattgctggggagtgtgactaattatgtcaccacaaatgcgagttgccctataacgattgtgaaagactctgccccttctactactgatatgctactg

SEQ ID NO: 36747 - DNA, 297 bp, Glycine max
  Clone ID: 701117334H1
gttttgacgaactgggaagttacggcggaagaaaacctcttgcagttgttgacttgttggtgcaggtagttgaatatagtacattttgtcacacgaaagtttctgtgttacaatggaggagctgaaatctgctatggaggagcacatggaccttatggcagatcttgttcagaagctctcttcagatcttcgcgctggctttcgccccgcttacgataactttatcggttttttccatgccattgactggaaggaaccttggctaatgggatattaggattccagttgtgttgctgc

SEQ ID NO: 36748 - DNA, 52 bp, Glycine max
  unsure (1)..(52): unsure at all n locations; Clone ID: 701117335H1
gntagctcatgcttagcacaagcnccaggtgctgcacccacacaanntncna

SEQ ID NO: 36749 - DNA, 301 bp, Glycine max
  unsure (1)..(301): unsure at all n locations; Clone ID: 701117338H1
atttactcgtgcagtggaaggccaacactgntgagctcangggcggtgacgatggnggatttgtacgccgaggaanagagggagctattggttgacnttgagagttccagcatcgtcaggaactggggcccacaaccacgtgatgacggtacggtgtttgtataaagaccctgccacgcaggagatcgtatacggtagggagcanggtcttctggtgccgccgccccagagttccggtacaaggattgagaggctaaggaatctcttcataaccgcccgagccattgcagagtcgaggagg

SEQ ID NO: 36750 - DNA, 302 bp, Glycine max
  unsure (1)..(302): unsure at all n locations; Clone ID: 701117339H1
cagatgagnnnagccaagtgtacccanaatttgtgtttgatgattnnatgaagntctatgctggtctcaagtttcaggctaaagagccaaggtttgcacgctatgaaggcnaangcaagcgtngtnnannngggggccatagccacagtttgagtctcagggctctcagcatgtggaatcggttatgtntnnttctgttaatnatgaacaaaggctactcacaacntnttactagtgtttggtgtccttggataatggcatggnngcttgtgcttgtgccatataatcgagccttatatagt

SEQ ID NO: 36751 - DNA, 298 bp, Glycine max
  unsure (1)..(298): unsure at all n locations; Clone ID: 701117340H1
ggtggtcatggttacctttgtagcagtggtctccctgagttatttgctgtttatgttcctngnctgcacgtatgaaggagacaatgttgtgctactgttacaggtggcaaggcatctcatgaagactgtttctcagctgggctctggaaataagcccgttggtactacagcttatatggctcgagtggaacaactgatgcaatatcactctgatgttgaaaaggctgaggattggttgaagcctaatgtagtgttggaaacattgaagctagggctgctaggatgtcattgctgtgcc

SEQ ID NO: 36752 - DNA, 300 bp, Glycine max
  Clone ID: 701117341H1
gctccccaaaccatttccattctcaacctcttaccagaacctgatgtcttcattcacacttcccatggaacacgcattccagcccacgcacccattctggcttctatgtccccggttctggagaacttgatagatcgcccacgtaagcatcggagctccgagagaataatccaaatccacggcgtcccctgcgacgctgtcaccgccttcgtccgattcctctactcctccaggtgtacggaggaagagattgaccagtacgggatgcacctccttgcattgtcccacgtgtacatggtg

SEQ ID NO: 36753 - DNA, 299 bp, Glycine max
  unsure (1)..(299): unsure at all n locations; Clone ID: 701117343H1
atccaatgtccttcttctanacagcagaaangngnaaanaagagcatgagtattcntcantgcaaccacaaccaggnggngttgtactcttgaatcagcctcacatgttatacaacatcaatgacaatggaagtaacaataacancaacaataccaattctcggaagagaggtagagaagacccgggtgttggcaacaacacaatcactgcagcttctaatgttatcgatcaattctctttacaatctcagcctccgcaacttgttcatctctctcagctccacaatcaccaccaacna

SEQ ID NO: 36754 - DNA, 298 bp, Glycine max
  unsure (1)..(298): unsure at all n locations; Clone ID: 701117344H1
gctgctttggtgaatgaaggnttcgcaaagagattcganctcatattgaaaactagctccattaaattctgaggtgaataaggcnatggttgatggaaagcnagtagtgtttacagggcactcttctggtgcngcaatagcaattcttgctaccttttgggccttggaagagtaccttaacccaaccaaaccccaaaacctncaagcntnnntnttgtgttacttntgggtctcccttaattggcaatcatatatctctcactcttcaaggagagaaaattggtctcacnatttcata

SEQ ID NO: 36755 - DNA, 298 bp, Glycine max
  unsure (1)..(298): unsure at all n locations; Clone ID: 701117345H1
gtgctctccttttcgttatgccttttattattacctatctgtcgctccactccgtattacgacncctggatcagagggatacatcagaggattcgctccaactcctatcgaataaggtattatctgtcaatttacattggaaagggttaggatattgaattttacanaattaaagatagaatcaacgatagctatagttttaaaattaaccatcgatttagttgcaactggaacacaggtttctttcaatganataatattaatatcaatttaataagctggtaatgtaaaatactgc

SEQ ID NO: 36756 - DNA, 82 bp, Glycine max
  unsure (1)..(82): unsure at all n locations; Clone ID: 701117346H1
cttcaacctgagtattttccgttttctagannccccanattanttanagcacaccaagtgacncatcaancattncctatta

SEQ ID NO: 36757 - DNA, 293 bp, Glycine max
  unsure (1)..(293): unsure at all n locations; Clone ID: 701117348H1
tggaagcaactaatggccaccaaaacggttcattttgcttgtccactgccaagggaagtagtgatcccttgaactggggagcggcggcggaggcgatgaaggggagtcacctggacgaggtgaagcgcatggtggccgagtaccgcaagccggtggtccggctcggcggagagactctcaccatcgcttcaggtggccgccgtggccggacacgaccacggcgtggcggtggagctctcagagtcagcgagagaaggagtaaaggcgagcagtgagtgngtgatgaacagcat

SEQ ID NO: 36758 - DNA, 288 bp, Glycine max
  Clone ID: 701117349H1
atcctcatccaaattggcatcttggaatgcgaggtacccaacaccgcgcagttcatgtggcgtgtctggaaagagggtggcacaggatttttgtactggggagccaactgctatgagaaggcaactgtagccagtgcagagataaaattcaggcatggtcttccccctggagatggagttctatactatcctggtgaggtgttctcaacttctcatcagccagtggcttctcttagactagagcgcatacttaatggcttgcaggacattgagtacctgagactctat

SEQ ID NO: 36759 - DNA, 132 bp, Glycine max
  unsure (1)..(132): unsure at all n locations; Clone ID: 701117352H1
ttatatagagtaatctcaagggggtttagtccagttggttgatctgtagagtgtgtaanttgttgtaaatctcctganacctgtctttgattcttatatnttaggaaaaanannaaaaacctagacnanngg

SEQ ID NO: 36760 - DNA, 302 bp, Glycine max
  unsure (1)..(302): unsure at all n locations; Clone ID: 701117356H1
attgggngntgcnttgaagatgaacatcgccntntngtctacgaattnntgccangtggaagcttggaaaaccatttgntcnagagagngctnatatgttanncnnntttccaggannttancgtntgaaggtagctcttggatgctgccaaagggcttgcatttctccacagtgcagnaagcnnnagtgatatctagagattttaagacttcnaatatcttgctggcattcagtatgtgaacttttnntctttaatcttatagtgaaagaaaaaagatctggtgantgtagnaaccattgg

SEQ ID NO: 36761 - DNA, 296 bp, Glycine max
  unsure (1)..(296): unsure at all n locations; Clone ID: 701117357H1
gttcgatcaaatagctcccagtactttaattgatttctgaatatcatcacttaatttgaaggaaagatggtgagcgtagtgagatccgccaggcacaaagggcagaaggcccagcaaccatccttgccattggaactgcaaacccaccaaactgtgttgatcagagcacctatcctgactactacttcagaatcaccaacagtgagcacatgaccgagctcaaagagaaattccagcgcatgtgtgacaagtctatgatcaagaggagatatatgtacctnaacgaagagatcttg

SEQ ID NO: 36762 - DNA, 294 bp, Glycine max
  Clone ID: 701117358H1
aaccccactctctttttccgagtcttccagtgaaagaaaggcagcgatggaagaagacttcgacatccccggcggcgaggaaatggatctcggcgaagacgaggtcggcgaggagagggagatcggctctggcggcctcaagaagaagctcctcaaggaaggtcaaggctgggaaacccccgaagtcggtgacgaagtccaagttcattacacggggactttgctcgacgggactaagttcgattcgagccgcgacagggatctcccttcagcttcacgctcggacaagggcaa

SEQ ID NO: 36763 - DNA, 290 bp, Glycine max
  unsure (1)..(290): unsure at all n locations; Clone ID: 701117361H1
tgcattttnccaaggtggaaggatnaactgttcttgcagccacagagtagaagattcattttcaaatagagtaccgtgtgatgcattaatggagtaatgcatttatgtgcttgtgacggtaaggcatgcatgaggggtcatgtaaataatgttaatgatgactatgacaagagtgcgactggtggaagagtttattatggtgttcattagttaggattttgtgtttctcatgtacagttgcgctttctaatacaataaaacatatgctttggctgagattttctaataag

SEQ ID NO: 36764 - DNA, 294 bp, Glycine max
  unsure (1)..(294): unsure at all n locations; Clone ID: 701117365H1
gcgcatcctgagctctccgattggtacaattcgctggcggatctataccagaacaagctctggcaccagcttaccctcaagcttgancagttcgtggctctcgccgtcttccaggccggtgatgcattaatacaattatatcacaatttcattcacagactttgagnccaaaatcaaccttctcaagcttgcgcatttcgctgttatagtttctcggcagtatgctgagaaagaagctgcggttggttatcttggaggggttattcagaaacttcaagatatagagagcagcgc

SEQ ID NO: 36765 - DNA, 290 bp, Glycine max
  unsure (1)..(290): unsure at all n locations; Clone ID: 701117366H1
gaggagatgaatttacttgttggagctgaccaaccaggaaatcaactggatgattatatttccnagttgnatactatttnatcactaaaggctgcaggaatctttcaattgcagacacagttggctcaatttcagagacgcttaaatgagtataatgttgtcgtaacgtctggtaattgatggtgctaatgggcaaatgattggtgtgttgtggtgaggaattctccgttctcttaggtattgcttctatgatttcattgccgtggattgtttctcaatgtgaagaattt

SEQ ID NO: 36766 - DNA, 296 bp, Glycine max
  unsure (1)..(296): unsure at all n locations; Clone ID: 701117372H1
ggcaccgccaganccaaacggcaaaagggtgctttgattcgcattctgtganctcaacgtcgcattctngtatctcaacgatggagcgtccactgtcaccancagcnagcgccntgaacgttgaggncaggangatgaagaagaaggcgaaggcggtggaaaatgangacgataacggggagngcgtggaggggctggcgcatttcgangacaaccttctgttcgaggtcttgaaacacgtggacgcggcggacctggcgatgttcgggtncgtggaacaagcaatggcacaagga

SEQ ID NO: 36767 - DNA, 293 bp, Glycine max
  Clone ID: 701117373H1
ggggattagggtttaggaagcagcgacaacaatggatttcacagtggagaagaaggaatcagagaacaacgccgaaaatgctcacccaacaacgttagattcttcttctcaattggcatcggcacttgattccaacaacaaagaaatcgaagaacgacaagctcgtgaactcaaagccggacttcaccccctaaagcagcacaagtttgtcttctggtacactcgtcgaacacctggagttcgaaatcaaacatcatatgaggacaacataaagaaattgttgaatttagtac

SEQ ID NO: 36768 - DNA, 289 bp, Glycine max
  Clone ID: 701117376H1
gttaggtagcaagcataagtgtctaaccttagaaacatatctgctacatatcgtgtgcattttggaattgtgccactaaaattctattcatctatggctgcctcatcttatgctatgcaatcaatccttgcaaaccctatgatccgcatttccagcgggtctagggagaaccattttggtgttcctgcttatcacatgagaaggaatgttggcctgagagttaggtccaggctgaggaagagcaaccaagtcagccgcgaccccagttacaccaccaccagcagaaccc

SEQ ID NO: 36769 - DNA, 288 bp, Glycine max
  unsure (1)..(288): unsure at all n locations; Clone ID: 701117377H1
cttcttcatcatccacgttactactacttngatgggaccctcaacantaaagaacaattgaagggcaataagttgaagtttggctacaaatcgtggactttttttgttgggtattggcacgtgtgcagtcggttctggtgcgtgccaatgaagtgtgtacgtgtgatttttctttttcttggtttttctttgcgggagctgtttatatattttttcctatttttggccatgagttttggcctaactatacaggactccaaggctggtgtccgcgcgtgtgatggaaac

SEQ ID NO: 36770 - DNA, 287 bp, Glycine max
  Clone ID: 701117379H1
gctagtccagcgccactgttaggggatcgactgtgtgaaaatggatttgagtgtgttaaaattctccctgccaccaatgatgcacatggaggagtcattgtggacttaaaggagccttgcactccgaagtttttgctactttgcttagatcttcacttttacattggaagcaacagggaaaagatggtgtttggatcaagtttcctattgagcttgttaatcttgttgaaactgcagttaaggtgctggttctggaaaaaaaaggaggatttcatgggattggtgtt

SEQ ID NO: 36771 - DNA, 267 bp, Glycine max
  unsure (1)..(267): unsure at all n locations; Clone ID: 701117380H1
gggcctcctggtactggtaaaacatngttagccagggctattngccagtaatatagatgctaacttcctaaaggttgtttccagtgccataattgacaagtacattggagaaagtgccaggttaatcagagagatgtttggttatgcacgtgatcaccagccgtgcatcatttttatggatgagatcgatgccattggaggtcgccgtttcagtgagggaacaagtgcagatccgtgagattcagagaacgctaatggagctgctta

SEQ ID NO: 36772 - DNA, 288 bp, Glycine max
  unsure (1)..(288): unsure at all n locations; Clone ID: 701117389H1
tttntcagctctncgatcgcttnanggcttcgtntctncggaacgacttcgataactgttccaatctccttnntcagctnaaggtgttacttacaggtttcagaagcctgncaccgttgttngcagatacacctaatgcagttcatgaattaacaatagnaatggatatntatgagcatgctgtngtncntagtgtgaaaattgaggatcaagatgctttcgnaagggatttcttccagttgnagccttattatncagatgcctgcantcgtcttccancatntcctc

SEQ ID NO: 36773 - DNA, 288 bp, Glycine max
  Clone ID: 701117390H1
atggaccaaaacccatttcaattgtggggagtactggttcaattggaactcagacactagatattgtggcagagaatccagataagtttaaagttgtggcacttgcagctggttcaaatgttactcttcttgcagaccaggtaaaaagatttaagcctcaacttgttgctgttagaaatgagtccctaattgctgaacttgaagaggccttgcatgatgttgaagaaaaacctgagatcatccctggagagcagggaatcattgaggttgctcgtcacccagatgcag

SEQ ID NO: 36774 - DNA, 287 bp, Glycine max
  unsure (1)..(287): unsure at all n locations; Clone ID: 701117392H1
gctagggatgctattcttagcgggaaatttgatcaggtacgcgtcaaccttccaaatggtgacatggtggggcatacaggtgacattgaagcaacagttgtggcatgcaaggcagctgatgctgctgtgaagatgattcttgatgcaatagagcaagtgggtggaatttatgttgtcacagctgaccacgggaatgctgaggatatggtcaagagggataaatctggaaaaccacttctaggcaaggntggaaaaatccagattcttacttcnccatactntgagcc

SEQ ID NO: 36775 - DNA, 300 bp, Glycine max
  unsure (1)..(300): unsure at all n locations; Clone ID: 701117393H1
ccacagcatctcgtatctgtctgctacgtacgttggtggaacgaaaagatgatgaaggtgtggaactggtaccaaaattgcctttcctgtnncatcccagtaaagacccaagccatgcagttctgnccantctctggggcgttggatatctttcagctncagtnacatcactcattcagtctgcaaaaaaaccccttcaactntctgcattccagatgccnaaatttacgntgaaactggaatcgcttggttgttacaagtatgtttggattcggtttcgttgggaacagtgggccactt

SEQ ID NO: 36776 - DNA, 286 bp, Glycine max
  unsure (1)..(286): unsure at all n locations; Clone ID: 701117394H1
atccaagttcaaagatgaagatgatccacgttcttttcctctttgctcttgtctcgttcacttcccatgcttctgtcaatgatttctgtgtagcagacctaaaaggtccagatagcccttcaggctatcagtgcaagccacctaacacagtcacagtggatgactttgtgttctctggctttgtagctggaaacaccacaaacactttcatgctgcattaacctccgcatntgttaactgnattttccaggtgtgaatggtcttggtgtatctgtggcaggttaga

SEQ ID NO: 36777 - DNA, 65 bp, Glycine max
  unsure (1)..(65): unsure at all n locations; Clone ID: 701117405H1
tgtgctgttgttcctatttctcattctttcgcaagtnaatgtngaactgactctnccggttnggt

SEQ ID NO: 36778 - DNA, 276 bp, Glycine max
  unsure (1)..(276): unsure at all n locations; Clone ID: 701117406H1
gttcgtcactcgctccatctgattgaacaaaatgtacacctcgaggaagaaaattcacaaggataaggatgccncncccactgaatttgaggagacagttgcacagtacttgtttgacttggagaacaccaatcaggatctgnaaagtgacttgaaagatctctacataaatcaagcaattcaaatggatgtggctggtaatcgcaaggctgtagtcatctatgtgcccttcagattgaggaaggcattccgcaagattcatcttcgacttgtcag

SEQ ID NO: 36779 - DNA, 273 bp, Glycine max
  Clone ID: 701117407H1
tatggggaaggtggaaggtcgttttggatacacaacacaggaccattggggtgcctgccatacatgctggatcgctatcccatgaaaccaactcaaatggatgagtttgggtgtgccaaaccattcaacgaggttgcccaatattttaaccgtaaattaaaagaagttgttgagcaactgcggaaagaattgccaggagctgcaatcacctatgttgatgtgtatacggtcaagtacaccctcatcagccatgcccaaaaatatggtaagcaa

SEQ ID NO: 36780 - DNA, 201 bp, Glycine max
  unsure (1)..(201): unsure at all n locations; Clone ID: 701117409H1
gtctttctggaacaggaagactgatccagatgtaacaaaggatagtctttctggaacaggaaccttttgacctttatagtaangagccaggatatgagaaaactttatccccgtggggatgcatgtaggcatttcttctncatacttctcaattattttcaggattattgcgttaatgaattaaatatattacctcttcga

SEQ ID NO: 36781 - DNA, 275 bp, Glycine max
  unsure (1)..(275): unsure at all n locations; Clone ID: 701117412H1
cagttgcagtcactggtgttgttggcttcatagggactggactccctccttttgttgcattaagagctgacatggatgctcttcctcattcaggaaatggtggagtgggagcacaagagtaaagtacctggaaagatgcatgcatgcggtcatgatgctcatgttgccatgcttctcggtgctgcaaagatcctcaaacggcatgaaaatgagatacgaggaatgttgttcttgttttncaaaccagcagaagaaggagtggagggctaagaaat

SEQ ID NO: 36782 - DNA, 96 bp, Glycine max
  unsure (1)..(96): unsure at all n locations; Clone ID: 701117413H1
gggatattngnggnagcgtttattcattnccttaaaatggcatacggagcttcaattggnncccaggcttcagattnccaagacaacatangannt

SEQ ID NO: 36783 - DNA, 274 bp, Glycine max
  unsure (1)..(274): unsure at all n locations; Clone ID: 701117418H1
ccgatccgagaaaaactctgtaaacatgttggtttaccaggacctccttacaggtnnatgagcttctctctgactccttccgttacaaggaaattgagaatggaatgctgtgggaagttgaggggaagtgggttgttaaaggagcagttgatgtagacattggtgcaaacccttctgctgagggtggagaagaagatgagggagttgatgatgcagctgttaaggttgtngacattgttgacacattcagacttcaggagcaacccgcattcga

SEQ ID NO: 36784 - DNA, 279 bp, Glycine max
  unsure (1)..(279): unsure at all n locations; Clone ID: 701117419H1
cttaatcgatcatcacttcacttcactaanacatcatggcagacgaannancagaacaagtatgagagctctgaggttgaggtccaggatcgtggtgtttttgactttctcggtaagaaaaaggatgaagaagacaagcctcatcctcaggaggaggtcatcgccaccgagtttcaaaaagtcactgtctcagaccaaggagagaacaagcanagcctcttagaaaagcttcaccgatctgacagcagctctagctctgtaagcttcttttcctttatt

SEQ ID NO: 36785 - DNA, 275 bp, Glycine max
  unsure (1)..(275): unsure at all n locations; Clone ID: 701117420H1
ttaacacgtatatagcaagcatggcagtcactctacgaccttagctctgcctctgggttgaagaagcttgatgagtaccttctcccacgcagctacatcacngggtaccaagctacaaaggatgatcttactgtttatgcagctttgccaactgctccatcagatgaatatggaaatgtttccaggtggtacaagcacattgatgctttgttgagaatctctggtgtttctggcgagggatctggtgttattgttgagggatccctggttgcgga

SEQ ID NO: 36786 - DNA, 274 bp, Glycine max
  unsure (1)..(274): unsure at all n locations; Clone ID: 701117421H1
gantcgctctgcaaagagacgatgttgaactcgttgccgttaacgaccctttcattaccaccgattacatgacatacatgtttaaatacgacagtgttcacggacactggaagcatcacgatgtcaccgttaaggacgagaagacccttctcttcggtgacaaggcagtcactgtttttggacacagaaaccctgaagagatcccatgggggtcaactggagctgacatcattgttgagtccaccggagttttcaccgataaggacaaggctgc

SEQ ID NO: 36787 - DNA, 271 bp, Glycine max
  unsure (1)..(271): unsure at all n locations; Clone ID: 701117423H1
gccttgtctgagttgccccacgcccgtatctatcctatgaggacacaggttctacgagcaatatcaaagtgtcttgacgattcaaagagagctgttcgccatgaagctgtcaaatgtcggcaaacatgggcatcaatgtaatctaggagtctccatttctgaagttcaaaaccaacttcccaaggtactgggaaagcttttgacctttgttttctaattaacagtgattctttcaccgaaaggaaantctgaatttttgaaatgtaaaata

SEQ ID NO: 36788 - DNA, 271 bp, Glycine max
  unsure (1)..(271): unsure at all n locations; Clone ID: 701117425H1
agagattggcggattacataggtttgccatgtcgaattgctcngggttgtaggtactgtgtttcagatcatagatcgtcttgccttgtcaagattaaagatgatagacagctctcaagggaatatgtagttgatctggttggggaaccaggaaatatccatgggccggattcctctattaatggagcatatgtgtcttcaataccttccccatttcaaatttctcatttgaaagaatcccaatcaccatatgtggatgttgcagcatgttc

SEQ ID NO: 36789 - DNA, 274 bp, Glycine max
  unsure (1)..(274): unsure at all n locations; Clone ID: 701117426H1
ctcacactcgtgttggtggtgctgtttttcgcccccgttgacgcgcattttccggcaaccggagagcttccaacgttccgcgaggngccggcattccgcaacggaagagaatgccgcaaccgcgcgcggaggactccgtgatccacatcgcgatgangctggacgcganctacctccgcggctccgtcnccggtgtgttctccgtcctgcgggcangcatcatgtccggagaacatcgtgttccatttatcgggcaccacgcgncgaagcacgg

SEQ ID NO: 36790 - DNA, 267 bp, Glycine max
  unsure (1)..(267): unsure at all n locations; Clone ID: 701117427H1
caaaacgcttcgcataaggtacttatgcgcgataagactgtactggtaaccggcggagcgtttaacatcggcagccacaccgttcttcagctcttgctacggaggtttcagagccgtcgtcctcganaacctcgaaaattcctccgaggttgccatccacagagtcagggagctcgccggcgaatttgggaacaacctctcctttcacaaggtggacctacgggacagagctgctctagaccaaatattttcttccacacaacatag

SEQ ID NO: 36791 - DNA, 280 bp, Glycine max
  unsure (1)..(280): unsure at all n locations; Clone ID: 701117430H1
ataggaagcaagaganacgagagaaacatgaganggggcatnctcntgnttcagatgtcaggaagagncacaagaaagataaggagaggagaagacatgattctgattgaatatactctatgggggattttcttatctattgtgaaatagcatgtttatttctattttcataacttaatatggatgctgtaccttggtaattgaccgtcctaaatgtctgcatgtttgtcctaacaatcaggcattctcatgtgttattttaaattttggaattcgtgaa

SEQ ID NO: 36792 - DNA, 79 bp, Glycine max
  Clone ID: 701117433H1
gttcattttccccaacattatttagtagtatgttgtgttagttaaaccatcgtttttattattaaaccctagttgtaga

SEQ ID NO: 36793 - DNA, 278 bp, Glycine max
  unsure (1)..(278): unsure at all n locations; Clone ID: 701117434H1
atctgcccctaattgtttgttcccttcacatnncatncctaaataaattacnagatcatttatttgccatatttcccaaataaaattccccgattaaccttcgtgctacccacgaaatctatttttctcccatttttttctgagcatttagctgtcgcttctttttgtttgtttttgtcatcctcggcagatcaggtnttgtttntgcttcngctccagctttggaagatccacagtctctctctgagtggatggtttagtgnatatttnnaagatac

SEQ ID NO: 36794 - DNA, 274 bp, Glycine max
  unsure (1)..(274): unsure at all n locations; Clone ID: 701117435H1
ggacctgcagattcatgctggttcttctatgattgcacagtacaatcatcttccccaatgtcctcctcatgcgaatgggatgacaaatttcccatattatccaatgaacatttgcttacaacctggtcagatttctactaattcttggccatcattaggaagttcaagttcatgtgaagtacaaataagtaaagttgataggagagagncagcattgatgaagtttagacagaaaaggaaagagcgctgctttgataagaaaattaggtatgtc

SEQ ID NO: 36795 - DNA, 255 bp, Glycine max
  unsure (1)..(255): unsure at all n locations; Clone ID: 701117437H1
aaatcatccttcagaaatnatagccaaaagacagattggccgagtgtccaaccctgctttcaatcatcaagaagctagtaattttaaatatccgcaacagtctcctgttgctcttcaccagagcactgaagatttcttattgcaagaattcaaaattaatgtgaaacaaactacagaggttctgggagatatgcaggataatgacattgcagatattgatgaatttgaaagtttcaacattcaaaagagtgctcc

SEQ ID NO: 36796 - DNA, 58 bp, Glycine max
  unsure (1)..(58): unsure at all n locations; Clone ID: 701117438H1
tgcccctatcttccttagctacctagattattcacttcaattccacacaacaanngng

SEQ ID NO: 36797 - DNA, 269 bp, Glycine max
  Clone ID: 701117439H1
gtttccaattcaccaaactcacaatggttgatctagattggcaaacaaagatggttcactccaacatcatgcctccaatgtcccccaaactctctctcccggatcataacattccaatcccaactttgcaactcccccttcgccaaaacgacatcaccgcagcgtcgtctcctatctgcgctgcatacgacaactaccttcgtctccctgagctcagagccctctgggcctccaaggacttccccaattgggccaagagcccatcttaa

SEQ ID NO: 36798 - DNA, 270 bp, Glycine max
  Clone ID: 701117440H1
ggagggtagacgagacacaaaataactctatattcttaactgatgtgctgaatgggaagtgttcaaaaaatgtgtcattgccaaacaacagccaacagctgtctttgggaaccaatagtacattggaaaataaagaaaatagtcaggatggtggtgagaatgagaacaatgcgacaaggaatggaaattctgcaaaccatcaaattgttgagcagtgtgaggagcaaaaagtggctgatacttatacacaatctaatggtaaagatggat

SEQ ID NO: 36799 - DNA, 269 bp, Glycine max
  unsure (1)..(269): unsure at all n locations; Clone ID: 701117441H1
accaaataggtatttagttagcctttttagttccanacantatnncatatgnaggtatccttgttttgtttgtgttgtgtaaattgctgacaaancncaggtgatgccactgtctggatttctcataagcacactcttaaatcttgcaccacattttgcagcaggnttaatattaattgggtgcagtccaggaggcacagctagtaacattataacatatctttcacgtggaaatgtggcgctatctgtaataatgacaactgcaagta

SEQ ID NO: 36800 - DNA, 274 bp, Glycine max
  Clone ID: 701117445H1
gttccctctctggaactaagctctctttcaagccctctcgccacactgtcaaatccaagaacttcaggagtggtgccgtggtagcaaagtatggtgacaagagtgtgtactttgatttggaggatctgggcaacactacggggcagtgggacttgtatggctcagatgcaccttcaccctacaaccctcttcagagcaagttcttcgagacatttgctgctccattcacaaagaggggattgttactcaagtttctgatattgggaggtggttc

SEQ ID NO: 36801 - DNA, 275 bp, Glycine max
  unsure (1)..(275): unsure at all n locations; Clone ID: 701117446H1
gttgatgaggctgctggtaaactgagagctaaaggaatcgnagncttggcggttgtttgccacgtttcaaatgcccaacaaaggaaaaatttgatagacaaaactttacaggatgcagctcctcacttgaagaagggttcttctgttgttctcattgcctcacttgttgcttataatccaccacctactatggctatgtatggagtgaccaaaacagcagttcttggacttaccaaagctatggctagtgaaatgggccctaatactcgggtgaa

SEQ ID NO: 36802 - DNA, 277 bp, Glycine max
  unsure (1)..(277): unsure at all n locations; Clone ID: 701117449H1
cacaatccggtgtttgtgctgcatttagccgagagaccaatgaaagaatatgcttcttgaatgtcagtcctgatgaagtcntaaggagtttgttttataataaaaataatgactcacttatcacagtctctgtctatgcatcagacagttacagttctttaaaatgccgaagcacaaggatcgaatatataaggagggttaaaccagatgctggctttgctctttttgaatctgagtcattgaaatggccaggttttgtagagtttgatgatgtaaa

SEQ ID NO: 36803 - DNA, 137 bp, Glycine max
  unsure (1)..(137): unsure at all n locations; Clone ID: 701117453H1
gataagcttagttacgaaatcttctccattctcgaaagcaagtttctcttcggctacgacgatccaaagctctggttcccnaagcanatagctngccnagccggaatctcagactccggcagcnaccgccgcngtgg

SEQ ID NO: 36804 - DNA, 246 bp, Glycine max
  unsure (1)..(246): unsure at all n locations; Clone ID: 701117456H1
atttaattaactattaatctttgaacaatagcaataatttttnatattggtttcgagtttttaacttgttcaataagaagttgcnagttttatttatgttcagcatacatttgctatttatcaacctatatctgtattttaaatcagatgtagaattgtgcctgtattttagggttgattgatgttttgctgccattgtaatatgtagcttttagttgcacctgtactggttctnttggggatatg

SEQ ID NO: 36805 - DNA, 265 bp, Glycine max
  Clone ID: 701117457H1
ttttggatggctgtgatcatttggaaagagcatcattttgtccagttggtcttttatctctcaatttaggaatatgtccaaaattgaacacactcagcattgaagcaccgtttatggtttcacttgagttgaaaggatgtggtgtactatctgaagcattcattaattgtccactcttagcatctctcgatgcttccttttgcagccaactaacggatggctgcttgtctgcaacaactgtctcatgcccactgattgaatcatt

SEQ ID NO: 36806 - DNA, 269 bp, Glycine max
  unsure (1)..(269): unsure at all n locations; Clone ID: 701117458H1
gtctgttcnngctaccatctctctnctctctttcttagtgcctccttgccagaagttaaantggcccaagaaactttcctattcacatctgaatnagtgaacgaggggcaccctgacaagctctgtgaccagatctccgatgctgtgctcgatgcatgcttggagcaggaccctgacagcanngttgcctgtgaaacctgcaccaagaccaacatggtgatggttttcggagagatcacnaccaaggncaacgtggactatgagaagat

SEQ ID NO: 36807 - DNA, 270 bp, Glycine max
  unsure (1)..(270): unsure at all n locations; Clone ID: 701117460H1
ccatcgatgctcagatctctccactccgccgccacccgcggcgcctctcatctcttccgtcgtgggtacgcctccganccggtgccggagcgcaaggtagccgttctcggcgccgccggcgggatcgggcagcctctctcccttctcatgaagctcaatcccctcgtttcgagcctctccctttacgatatcgccggaactcccggcgtcgccgccgatatcagccacataaacaccagatctgagtagtggggtaccaaggtgatgaag

SEQ ID NO: 36808 - DNA, 271 bp, Glycine max
  unsure (1)..(271): unsure at all n locations; Clone ID: 701117461H1
ctgcaactatgagcaaggattatctaatcatactttctctccttctttccacggtgcttgcaacttccaagnnnnnnnnnnnnnnnnnnnnncctctatcttgggaagggcttctcccatcgcaaattgtctcccagttatcacattcacaaaaccattgacgaatcctatgcagttatcttcgatgctggtagcacgggaagccgtgtacatgtctatcgttttaaccaacaattagatctccttcgcatggccaagacttgagtgtttg

SEQ ID NO: 36809 - DNA, 55 bp, Glycine max
  unsure (1)..(55): unsure at all n locations; Clone ID: 701117463H1
ctntgaagttcgaaccttgttgtacccttattctaggttccacacaacatacgng

SEQ ID NO: 36810 - DNA, 268 bp, Glycine max
  unsure (1)..(268): unsure at all n locations; Clone ID: 701117465H1
cgnnncgagcaancntgtcggtnngcctcatacanncntaagtcnatctgtanaaagtacaagccatttgnccatctttgcatgtaccgagtcattatgngcagcacatgtntatgaatcngacaactgatgaatggaagcgtntggtganaaagccaagctcctacacttctaactcaggtgtactgcagaaaagaagtgctgatggttgcactaagagnanggacaatgatttacacaggttgctttttatgccaaatgggntact

SEQ ID NO: 36811 - DNA, 272 bp, Glycine max
  unsure (1)..(272): unsure at all n locations; Clone ID: 701117466H1
attctccatacctcaacgaagaggttaaagagacggcaacactttgctgtccgccttgaccgagcagagcttcgtcttggccctcgattttgccctaaagtactctcagtcacaacagacacnnnnnnnnnnnnnnnnnnnnnnaatggcaccgaagcagaccaaggctgagaagaagatcgcttacgatgcgaantgtgcgacctaatggaggagtacggccagatcctcgttgtgaactccgataacgtgggatcgaaccagctccagaa

SEQ ID NO: 36812 - DNA, 173 bp, Glycine max
  unsure (1)..(173): unsure at all n locations; Clone ID: 701117467H1
ctgaccgaatgatgctcacattctctgtgttcccatcccctaagntttctgacactgttgttgagccttacaatgcaaccctatcagtgcaccngctcgttnagaatgcagatgaatgcatggttttggataacgaagctctctatgacatctgcttccncacnntnnaggac

SEQ ID NO: 36813 - DNA, 268 bp, Glycine max
  unsure (1)..(268): unsure at all n locations; Clone ID: 701117468H1
actgccatggacacagacnangtgaaaatatatggtgcacgtgttngtgttgattctatggctagagttgctcaaattgaaacagcagaganagagaaaatgagnganaaggtgcagaagataataggtcatggtatcaactgttttgttancagacagttgatttacaattttccagaggagctctttgctgatgcgggaatattggctattgnacatgctgattttgatggtattgagcgtctggctttggtaacnggtggtgaaa

SEQ ID NO: 36814 - DNA, 267 bp, Glycine max
  unsure (1)..(267): unsure at all n locations; Clone ID: 701117469H1
gcagaatcgtgagtaacagcngagcagaacaccgataaatcgctatgactgctcagacccaagaggagcttcttgcggccgaccttgagcaacaaaagatccatgatgatgagcctgtannnnnnnnnnnnnnnnnnnnnnnnnnnnnngacgacgatgaggatgacgacaatgttgaagaaggtgatgcatctggtaggtccaagcagaccagaagcgaaaagaagagtcgcaaggcaatgctcaaacttggaatgaaacctgtcc

SEQ ID NO: 36815 - DNA, 204 bp, Glycine max
  unsure (1)..(204): unsure at all n locations; Clone ID: 701117471H1
actatgnctatgatgtctagcaaagttgatcccttcnagcatctcaaactcgncncncaattccgacggcacgatncactcgccagcgtgatgacccacccatcncancctcactcaatcccanccntcccgncctcanccaagacgcaancatcaagcgatcaaacaanaccttcgcccgcatattcctaccccgcgaagact

SEQ ID NO: 36816 - DNA, 263 bp, Glycine max
  Clone ID: 701117472H1
tacggaacaaggatccagagtggttcttcttctgtccgcaggaccggaagtatccaaacgggcacaggttgaaccgagctacgaatcatggctattggaaggcgacggggaaggatcgaaagattaagtctggctccaccttgattggaatgaagaagactcttgttttctataccggtcgtgctcccaaggggaagaggaccaattgggttatgcatgagtacaggcctaccttgaaggagcttgaaggaaccaatcctgga

SEQ ID NO: 36817 - DNA, 265 bp, Glycine max
  unsure (1)..(265): unsure at all n locations; Clone ID: 701117473H1
aagtattgatggnggaactcctaaggaagtttgctgatacgganagattaacatgggagcaatggggaatttgtattggaattgcagctgtgtcatggccaattgcttggtttacaaagctcgtacctgtttcagatataacgttctttagccatcacgttaagtgggtaaaagtattggtcttcaagattaagcatttgttttcattttacctcgtcacacgtttgaagaatcataaattccaagcatcttaaaacacttgaat

SEQ ID NO: 36818 - DNA, 264 bp, Glycine max
  Clone ID: 701117474H1
gctcactcatctcttacaacgaaaccctcttcatcttgttctatctgtgacgagcatcatggcctcaagagcagtgttattgttggctatgtgtgtgcttccggcgatggttgtggccattcgcccagcaaagaaccctttttgcgtgaagggtcgtgtctactgtgacccttgccgtgctggttttgagacctcagctaccacctacattgctggtgctgagattatgttgcaatgcaagagcagggttagcaacgaggttgt

SEQ ID NO: 36819 - DNA, 107 bp, Glycine max
  unsure (1)..(107): unsure at all n locations; Clone ID: 701117475H1
cagattcactccaaaactgaangctatngaaaatgttcaaaaaattttcaggtgaagatgtatctgcacagaaccaagtgaangcatctgttnccacacaacatacg

SEQ ID NO: 36820 - DNA, 267 bp, Glycine max
  unsure (1)..(267): unsure at all n locations; Clone ID: 701117476H1
tcccaaccaaaaaaagttagtgctgccacgtggcggacgcagttgggttgacaaagagaaaattaaaaagaagaagncaaatttagaaaacacggtcggcgtcgtttgggctggatgatgcaattcaaattctggagtacgttgttaacacgagggaggaaaaactcgggaccgcaaatcctgaggtggatgatgagaagaggaggttgggtgagttgttgaaggaagcaggtagagttcggagcagaaaagccaggtcactggaga

SEQ ID NO: 36821 - DNA, 269 bp, Glycine max
  unsure (1)..(269): unsure at all n locations; Clone ID: 701117477H1
ctgtgacgngcatcatggcctcaagagcagtgttattgttggctatgtgtgtgcttccggcgatggncgtggccattcgcccagcaaagaaccctttttgcgtgaagggtcgtgtctactgtgacccttgccgtgctggttttnagacctcagctaccacctacattgctggtgctgagattatgttgcaatgcaagagcagggttagcaacgaggttgtgtacacgaagaaggggtacaccgactcaaccggagcatacacaatgtac

SEQ ID NO: 36822 - DNA, 277 bp, Glycine max
  Clone ID: 701117479H1
gttagtgctgcagtctcttttccatccaccaagtctacctctctcccaagcaggacctccatcattaccccagagagagttgtattcaagaaggcttcattgcaatacagagatgtttgtagcagtggaagggtagtttccatcagagctcaagtcaccactgaggctccagccaaggttgaaaaagagttccaagaaacaggatgaaggtgtggttgtgaacaagttcaaacccaagaccccttacgttggtagatgcctgctcaacacaaagatc

SEQ ID NO: 36823 - DNA, 271 bp, Glycine max
  unsure (1)..(271): unsure at all n locations; Clone ID: 701117481H1
tcgaggnaaaggngcaaagggattcctaacaggtanaacctcagcttcagccaaagacaaagacanagacnagaagaaacccgtttctcgttcttctagagctggtcttcagtttcctgttggacgaattcaccgtcttttgaagtcaagggtgagtgccaatggaagagttggggccacagctgctgtgtattctgctgctatactggagtatctaactgcagaggtgttggagttggctggtaatgcaagcaaggatctgaaggngaag

SEQ ID NO: 36824 - DNA, 258 bp, Glycine max
  unsure (1)..(258): unsure at all n locations; Clone ID: 701117482H1
cgcatctcgagtttttatttacgaaacaaaaaacgaaggaaatgccgtgttagtagagagacagagacaccggtcacagtcacaccacaccggcaaatnttttgcattgcttagggttttggaacagattcaattcagcgttacttcaatccaagcacatggcgaaangaaagcatacgcatacccgagcacaggggaagaagtggtcaacgttctcgctggttctgtgggcgcttttcttcctcacactcatcctcc

SEQ ID NO: 36825 - DNA, 101 bp, Glycine max
  unsure (1)..(101): unsure at all n locations; Clone ID: 701117487H1
gggattcggcaacgtccgtggggaaaatgggccgcggagattcgcgatccaagaaaaggggttcgtgtctggttgggcaccttcaacacnncatangannc

SEQ ID NO: 36826 - DNA, 262 bp, Glycine max
  Clone ID: 701117489H1
aacaccacttccaatggcttcatatcatgaagaagaagtgaggctattgggcaagtgggccagcccatttagcaacagagtagaccttgctctcaagctcaagggtgttccctacaaatactccgaggaagatcttgctaacaagagtgctgatcttctcaagtacaaccccgttcacaagaaggttccggttttggtccacaatgggaacccattgcccgagtcatcatcattgttgaatacatagatgagacgtggaaaa

SEQ ID NO: 36827 - DNA, 263 bp, Glycine max
  Clone ID: 701117490H1
ctccgaattagttatcttgagaaacattattcccattgctatatattatggctagcatgaaggttacatgggtggttgtgatcatgtgcatggccgtggtgggtgcaccgatgatggcgcaagccatggacatgcaatgatgtgacggtgaacatggcacagtgcctatcctacctgatgcagggaggaacaccttcaacactctgctgtcaccaccgttgacaaacaaactgtgtgcaactgtctcaaggcggatgctgcta

SEQ ID NO: 36828 - DNA, 265 bp, Glycine max
  unsure (1)..(265): unsure at all n locations; Clone ID: 701117492H1
ataccttaggtcttccgaattcgaagttaatttgcaagatggctaaggaaaaggctcagatcaacattgtggtggttgntcatgtggaccctgaggaggcaaccaccattaacgagctgaagaagcctgttgtggagaaagaagctccagggcatgccatatgagggcatgcacgtacggctcggaggggaaccagaaaattatgttaacaaaataatctggaaccctaatgtatcatgtcatcatcagtgtgtagtttaagcta

SEQ ID NO: 36829 - DNA, 271 bp, Glycine max
  Clone ID: 701117494H1
tttttaagagaacttcgtcatcaattatacttccatctggattatttggagatgttaaaaatactcgagcttcctatattggtgatactggatgaagcatacattgagttttcagcaattgaatcaaggatgagttgggtgaagaaacatgataatttgattgttcttcggacatttagcaaaagagctggtttagctggacttcgagtgggatatggagcttttcctttgagtataattgagtatctttggagagcaaagcagccgtatt

SEQ ID NO: 36830 - DNA, 277 bp, Glycine max
  Clone ID: 701117495H1
gtgcatcaagatctctgtctctctgcaatcgaaaatgagcaagggaccggcacctcttcaccgatatcggcaaaaaatccaaagatcttttgactaaggactacagctccgatcagaaactcaccgtttcctcctacagcgtctccggagtgaccctcacttcaacatctgtgacgaaaggaggactctcaacaggggatgtggcagcactgtacagtataagaacactgttattgatgttaaacttgacaccgcatcaactatctccacaaccctc

SEQ ID NO: 36831 - DNA, 281 bp, Glycine max
  Clone ID: 701117496H1
ccctcttgaaggaaattcatggtttactcagacaaggtgttgaagttgacaagatatcttctcagctaacaccatgggcatctgctttatttgaatttctgccaccctttattaggagacagttgctcctttaccctgaatccgacgactcagcacagttatcacagattgaaactgagaaattactagcatatcttgtggaagtcgagattaacaagcgtctgaaagaaggcacatacaaggggaagaaattcaatggccatttgccacttttttggtta

SEQ ID NO: 36832 - DNA, 294 bp, Glycine max
  unsure (1)..(294): unsure at all n locations; Clone ID: 701117501H2
cgttgctcgagctaaagggtgacaacgctttgttctcatcttctgccattgataatgcccacattgaccagtggattgatttttcatccttggagatcgatgctaatctcatgaaattgctcctaccaagacttggatttgccccataccttcctccagttgaggagggtgcaaatctgcgttgaagagagcatttgaggcctgaacactcatctggctncaatacttacctggtgggcattctgttaacctgtgacatcntgacaacangcaacttgtanttaggnntcagcc

SEQ ID NO: 36833 - DNA, 296 bp, Glycine max
  unsure (1)..(296): unsure at all n locations; Clone ID: 701117502H2
gggagcgaagaggagaacggcgaattctacctgcgatnactacgtcgggcacaagggcaagttcggtcacgagttcttggagttcgagttccgccccgncgggaagctccgctacgccaacaactccaactacaaaaacgacaccatcatccgcaaggaggtttacctcacccccgccgttctccgcgagtgccgtcgcatcatctccgagagcgagattatgaaggaagatgataacaactggccggaacctgatcgggtngggcggcaggagctggagattgttatggggaaga

SEQ ID NO: 36834 - DNA, 156 bp, Glycine max
  unsure (1)..(156): unsure at all n locations; Clone ID: 701117504H2
cttctctcatctatcgttataatttactttgatacgaagctctctcgatctaattttccgattancactancaatgacggatgcagctgaagacgctacacgancgccgtaatgcggtggccgagtaccgcaagaaacttcttcnacacaaggnat

SEQ ID NO: 36835 - DNA, 293 bp, Glycine max
  unsure (1)..(293): unsure at all n locations; Clone ID: 701117505H2
gggccaacacaataggatcagaatcctgtggtgttatcccatgctaatgtatacagagcgtaggcttgcnttgagcactctaatttcttcaaagtaacagcaccggaggcacganccggccagttaaggacaggaggagaagtggccagcaagactaacccancatacttattggttgacaaattctcaagttggagtttatggaaaacctgcccctgangattttactgctgattatggacactgnaaacgtatagtgtccaagtcttatcttaatgggntagggattattg

SEQ ID NO: 36836 - DNA, 288 bp, Glycine max
  unsure (1)..(288): unsure at all n locations; Clone ID: 701117506H2
tatgnggaaggtggaaggtcgttttggntacacnacacaggaccattggggtgcctgccatacgtgctggatncgctatcccatganaccnactcaaatggatgagtttgggtgggncaaaccattcaacgaggttgcccaatattttaaccgtaagttnaaanaagttgttgagcaactgcggaaaganttggccaggagctgcaatcacctatgttgatgtgtatacggtcaagtacaccctcatnngccatgcccaaanatatggtaagcaataganaaacacca

SEQ ID NO: 36837 - DNA, 300 bp, Glycine max
  unsure (1)..(300): unsure at all n locations; Clone ID: 701117507H2
gagncctcanctagcnntcagaacccaggatttggtganacgatgaanagtgataggaaaattggggttgcctnggacttttncagaggnngcaaaatcgctcctggnatgggangatggagaatcttatnagcnaacggtgagcactntctacatcgtccacaccaagncttccggnggaaatnaatcaggaaatcttctctggtccacnantggttcacctntggattccantggtcggaatttcgtgnanangagggtgaggcgtcatatgaggtggatactgatgnngaagtggtg

SEQ ID NO: 36838 - DNA, 291 bp, Glycine max
  unsure (1)..(291): unsure at all n locations; Clone ID: 701117510H2
attagggngcactcagncagtcttgtatgggacattanagagcacaataagtctgtgacatgctgttcacttcatgagccgtcagacagccttttnagcggtnccactgataaaaccatangggtttggaaaatgatccatagaaagctggaatgtgttgnagttntagcattgaaggaaccaattcatcatttgcgtgcacatggtgaaacaatttttgcaattagcganagccacggattaaagctagttaatgnatcnagantgancaaagatattttgaaaggtnag

SEQ ID NO: 36839 - DNA, 97 bp, Glycine max
  unsure (1)..(97): unsure at all n locations; Clone ID: 701117511H2
ccngcctctggntgatacaaccttaactccggtcgcnctncggttctttccaagttccatncacgggttttgtntnttccncacganatacgannaa

SEQ ID NO: 36840 - DNA, 292 bp, Glycine max
  unsure (1)..(292): unsure at all n locations; Clone ID: 701117512H2
gnggcngctcgcnaaagatgtcgggtcgtggaaagggacgcaanggtttgggtaagggangagccaagaggtcacaggaangtgctccgcgataacatccagggaatcacaaaacccgncattcgccgtttggctcgcagangcgncgtcaagagaatcannngnctcatctatgaagaaacccgcggcgtccttaagatcttcctcgagaacgttattcgcgacgctgttacctacaccgagcatgctatgaggaanactgttaccgctatggatgttgtttatgctctcc

SEQ ID NO: 36841 - DNA, 106 bp, Glycine max
  unsure (1)..(106): unsure at all n locations; Clone ID: 701117513H2
cttgttgtgagtaagagaaaaggcttcctgcaccgagcacaccaacttgatacctctgattctttctntgcttagaattccacacaacatacganangagcggtng

SEQ ID NO: 36842 - DNA, 288 bp, Glycine max
  unsure (1)..(288): unsure at all n locations; Clone ID: 701117514H2
cttttcgcttcaaatttcatttagatccaaaatttctgaatcagngaagaatcttagattctgtgggaaaagcttctcaatctttgacgaagataaacaacaatgtcttcacttgcggctgctagagcagacaacttttactatcccccagaatgggaaccgaatcagggttcgctgaacaagtttcatggtcaacatgccttgcgaganagggcgagaaaattagatcagggtatcctgattataaggtttgagatgcctttaatatatggtgtggaggatgcattc

SEQ ID NO: 36843 - DNA, 289 bp, Glycine max
  unsure (1)..(289): unsure at all n locations; Clone ID: 701117517H2
gcgcgcacgtgctaggaaccatcgattcgagaatgggcaacgactgtgtgccgtcganggcggcggcggangtcatggcggtggtggccgttgagctcactgacgcctccagctggtggcacgacatcgacgactctccggcgtggcaggatcgtatcttctacactctcgccgtactctacgtatcgtggccaccgtagtttggnttcaactggctcggatacattgaagantgcggagtacgttggaccagcnagaagntcttcactttctcaatttttgggganng

SEQ ID NO: 36844 - DNA, 283 bp, Glycine max
  unsure (1)..(283): unsure at all n locations; Clone ID: 701117518H2
atccgagaaaaactctgtaaacatgttggtttaccaggacctccttacaggncgatgagcttctctctgactccttccgttacaaggaaattgagaatggaatgctgtgggaagttgaggggaagtgggttgttaaaggagcagttgatgtagacattggtgcaaacccttctgctgagggtggagaagaagatgagggagttgatgatgcagctgttaaggttgttgacattgttgacacattcagacttcaggagcaacccgnattcgataagaagcattt

SEQ ID NO: 36845 - DNA, 293 bp, Glycine max
  unsure (1)..(293): unsure at all n locations; Clone ID: 701117520H2
gtcgctcgatgggaattncgcttcaagncgtntcgtagggctaatccgctcacgagggtcaccaacggcacgtnnnntggggggccgatgcccctacttnctggtgcggcaaacggacgngcnggcgcacggtcgctnntagcncggnttctgatttntaggcnttcantgcntaatccatcgcacggtagnttcgngccactgggnttttcaacaaagcgcngatgaccattgtagcgantccangggttcntctcgtangaggttgnatnnctatggctagnctgtcatcc

SEQ ID NO: 36846 - DNA, 290 bp, Glycine max
  unsure (1)..(290): unsure at all n locations; Clone ID: 701117521H2
gaaaacccnnaataaccgagaaaagaaaattagatagagagaagaagaaagcgtatctggaattttcgtttcgttngtgtgtcgngtgcgtgtggaggttcnnntctttgaggnctttccttcnaattctagattgcttcgcntcttttctntcccttataacaagcancctctccctntcccccttttcatttcttcctcgattttccatttccataaccttagtcatcctcttctttcatctttctccctaacggtatcgagggaaaaatatgggcggaagaacacag

SEQ ID NO: 36847 - DNA, 284 bp, Glycine max
  unsure (1)..(284): unsure at all n locations; Clone ID: 701117522H2
ataatttcgcgangnttaaggttatccaccttaacctcctcactcctaaaaccctcttcttattctatnaccaatttcatctccaacaaccctaaacccccaatcttcaaaccctcacaattccttccacccatcaggtttctntcanccaacaacaaagantcntccactttagatnccgacgaaacccaaaagcccagcccaggcccaagcccaagcccatacccgagcnnnaacccaaacttcaagcaccaggagatagaaggcccaacagtggagcgcga

SEQ ID NO: 36848 - DNA, 289 bp, Glycine max
  Clone ID: 701117523H2
cgcctgaaccagggtcatcttttacttcattgtgcattgcacaatttaggttcttcctcttcagagcagtatgttcgggcatgctcttcacttgatggttggaaacagcatattggttctggaaaccctaggattgagaaatgtggcagcattttggataatcttctgcggtcacttgatctgccaaaggttaaaaagtctgctaaagggaaggttttgatgcaagctatgtatggagtaaaggtgcagacagtatttttagcagtgtgtttgctgcggctttttcggg

SEQ ID NO: 36849 - DNA, 292 bp, Glycine max
  unsure (1)..(292): unsure at all n locations; Clone ID: 701117524H2
agcaagctcatcctagagttttaaaaatggcagcagcctcctccatggctctctcttccccatccttggctggcaaggccgtgaagctgggcccatcagnccccgaagtcgggagggtnagcatgaggaagaccgtcaccaagcaggcctcctccggaagcccatggtacggcccagaccgcgtcaagtacttgggcccattctctggcgagcccccgtcctacctnactggcgagttcccaggtgactacggctgggacactgctgggctttcggccgacccagaaanctt

SEQ ID NO: 36850 - DNA, 276 bp, Glycine max
  Clone ID: 701117526H2
cgggtcactacgtgatttattgggaattgttgaccaaggactcgacgaactcacccagtcacgaggtgttgaatcggtgttgtttggagatggaggagtgcttgaactcggtgtatagacaatgtcgtgttgctgatcattccattggcccattggaaattcgtgttgtgaggaatgggacctttgaggagcttatggattatgcaatctcaagaggtgcgtccataaatcaatataaggtgccaagatgtgtgaatttcacacccataatggagt

SEQ ID NO: 36851 - DNA, 287 bp, Glycine max
  unsure (1)..(287): unsure at all n locations; Clone ID: 701117528H2
atggngagggaaggatgtggttcatataaagcagacaaaaaattcagatttacagcaggccgaactggcagaaattgctaaagcagttagctgatgagaggttttctgaggcttcaaatcatagttctaatgtagatcctgctgacaaatcaagaaaagtaaaggataatcgtgctaagatgtgggggtccaaaccgattcctgctgctggcaggccagttgtaagaaatcactccaagaatgatgatatngtgagcatttctgttcgaagagggggtattgataat

SEQ ID NO: 36852 - DNA, 288 bp, Glycine max
  unsure (1)..(288): unsure at all n locations; Clone ID: 701117529H2
gtctatttcaaagatttccttcagatttgttgacacagctgaagacagattgtctcgtcctgcanaattcatcgttntgccatatccccacgnaagcttcaatataataccaagttatctgacttttttgagattctgggcaacatctgaggatagagatggaaagactttcgtttccacagcacgtggtaggnaatatcccgtgactgtcaacctatggcaaccagagaaaaatgcttttgaatgggctacatctttgaaagcccctcacacagaggatgcaattcg

SEQ ID NO: 36853 - DNA, 285 bp, Glycine max
  Clone ID: 701117530H2
ataggaagcaagagaaacgagagaaacatgagagggggcattctcgtgattcagatggcaggaagagacacaagaaagataaggagaggagaagacatgattctgattgaatatactctatgggggattttcttatctattgtgaaatagcatgtttatttctattttcataacttaatatggatgctgtaccttggtaattgaccgtcctaaatgtctgcatgtttgtcctaacaatcaggcattctcatgtgttattttaaattttggaattcgtgaagtgaa

SEQ ID NO: 36854 - DNA, 289 bp, Glycine max
  Clone ID: 701117532H2
caatgctcaaggaggtgtggcaagacccagtaccacaagccctgcatgtttttctgtcagaagtgttgtaggaagtggcctatgtgtgccaccggggtattatgggaacaaagcagtgtgccttgctacaacaactggaagaccaaggaaggaggacccaaatggcccttaataaccttatgctatgttcttcatcaaattaacaaagatataatatagctttaatttattatatccatatcatataattttcttggtcctttctatgtcttaattaaccaaaaaatgt

SEQ ID NO: 36855 - DNA, 293 bp, Glycine max
  Clone ID: 701117533H2
ccacccatatccccaaaacctgcctctgtcatctgtgagagtggctcataccatatcatatcacatcttatccagacaaaacaactgttatggataggtatcagagggtagagaagcccaaggcagagagccctataaacgagaacgagatacgcgttacttctcaaggaaggacgaggaattacatcacctacgccaccactctccttcaggagaaaggatctagtgaaattgttctcaaagcaatgggacgtgcataaataagactgtatgattgctgaactgatcagaga

SEQ ID NO: 36856 - DNA, 97 bp, Glycine max
  unsure (1)..(97): unsure at all n locations; Clone ID: 701117534H2
gtcagggncatganagtgatcaatatgacttnggagaaaaganaaatntngcngtgtttccatcgatacaaggggggccacacaacatacgagnagg

SEQ ID NO: 36857 - DNA, 197 bp, Glycine max
  unsure (1)..(197): unsure at all n locations; Clone ID: 701117535H2
aaacaaccanacaaaaaaaatcaatcattttattttatntttctacgaaaatggttgatttacattggaaatcaaagatgcctagttccaaaacaccaaaactctctctctccgacaacaagtccttaccctctttgcanctacccttccgcaccacagatatcgatnccgtngctccncccgntnngacgctnagg

SEQ ID NO: 36858 - DNA, 282 bp, Glycine max
  unsure (1)..(282): unsure at all n locations; Clone ID: 701117537H2
cttcttcttcttcgagaagccgctggagttacgatnctctcangaattnccgtnagatctctccgctggttcagaatcacatcanacgggtntattttacgttatgttgcgctgtggtagctgctgctgttagaacttttgcgtnnatgttctgtggaaaatgggggttnctcaccacgttggcttccatnggaagcatggtatggttgctatctacaccccctgttnaagagcaagagaggttgtctctgnngtggcttnggcctggtttcagggatcntc

SEQ ID NO: 36859 - DNA, 286 bp, Glycine max
  unsure (1)..(286): unsure at all n locations; Clone ID: 701117538H2
tgttgatgaggctgctggtaaactgagagctaaaggaatcgaagtattgngcggttgtttgccacgtttcaaatgcccaacaaagganaaatttgatagacaaaactttacaggatgcagctcctcacttgaagaagggttcttctgttgttctcattgcctcacttgttgcttataatccaccacctactatggctatgtatggagtgaccaaaacagcagttcttggacttaccaaagctatggctagtgaaatgggccctaatactcgggtgaattgtgttgt

SEQ ID NO: 36860 - DNA, 285 bp, Glycine max
  unsure (1)..(285): unsure at all n locations; Clone ID: 701117539H2
gaccgttgttagcattccatgtggtccttctgcattagctgtcaaggaagcagcatggggacttgcacgttatgctgctatctntcaggganaatggtcttgtgccaatcgttgagcctganattcttcttgatggagaccacccaattgagaggacgctggaagtggctganaaggtctggtcagaagtctttttctatttggctgaaaacaatgtcctttttgagggaattttgctcaaacctagcaggttacacctggggctgaacacaaggaaaaggcttc

SEQ ID NO: 36861 - DNA, 282 bp, Glycine max
  unsure (1)..(282): unsure at all n locations; Clone ID: 701117541H2
tgcccgtgtaactgatgggatttatgaaggcattgctattggaggagatgttttccctggttccacactttctgaccanagnntacggtttaacaacatgccacaggttaaaatgatggtagtacttggggaacttggtgggcgtgatgagtattccttagtggaggccttaaaacaaggaaaggtatccaaaccggttgttgcctgggtcagtggcacatgtgcacgactcttcaaatctgaagtacaatttggtcatgcaggagccaaaagtggtggtga

SEQ ID NO: 36862 - DNA, 122 bp, Glycine max
  unsure (1)..(122): unsure at all n locations; Clone ID: 701117545H2
cggccttcactctcatctcctggtctccagtgagatgaaccctagctccaattggtcccattagttacctctntcctgcatctcatatctcccattctttctcatccacacaacatacgnng

SEQ ID NO: 36863 - DNA, 281 bp, Glycine max
  unsure (1)..(281): unsure at all n locations; Clone ID: 701117546H2
gcaaaanctcgtggaattgctagcaatggcgaggatcaaggtttacgagctgaggcagaagacgaaggctgatctgctgaatcaactgaaggaccctgaaggcgganttgccttgcttcgtgttgctaaggtcaccggtggtgcccctaacaagctttccaagataaaggtggtgaggttgaacattgcccaggttttgacggtgatttctcagaagcagaaggctgcgttgagggatgcctacaagaataagaagtacttgcctctcgatctccgcccta

SEQ ID NO: 36864 - DNA, 286 bp, Glycine max
  unsure (1)..(286): unsure at all n locations; Clone ID: 701117548H2
gcggcgtactacgacgagctggcccgtaatgngaagggagctgcgaggttcaagcaaggtctaggcttttctcttcagcaccaaacgangnnagngcagaaccctccctncncnnncctctncaaattcgtctaagnttnntcngngtnggagaagcaagcgcagttccaatccatccacgacaagctcaagataaaatcnctcttccgagtntagggtttcgagcagcggacagaagcaggagcagagaaaaacgtaggaaaaggagcagaagcggagatagata

SEQ ID NO: 36865 - DNA, 286 bp, Glycine max
  unsure (1)..(286): unsure at all n locations; Clone ID: 701117549H2
ctatttctcantctctgtntttncngctnaggattccgaacgagtgaccttcttcgtttctcgcaaagtttnagtaatcatgggtaaggaaaaggttcacatcaacattgtcgtcattggacatgtcgactctgggaagtcaactagccactggtcacttgatctacaagcttggaggtattgncnagcgtgtgattganaggttcnggaaggnaggtgccganatggnccagaggtcntccagtnntcctgggtgctcggcaangctcnaaantgngcngtgnaa

SEQ ID NO: 36866 - DNA, 290 bp, Glycine max
  unsure (1)..(290): unsure at all n locations; Clone ID: 701117550H2
aagcaaatggcttcctcaatgatctcttccccagctgttaccactgtcaaccntgccggtgccggcatggttgctccattcactggcctcaagtccatgngctggcttccccaccaggaagaccaacaatgacattacctccattgctagcaacggtggaagagtgcaatgcatgcaggtgtggccaaccagttggcaagaaggaagtttgagactctttnctaacctgnccagaccttgatgatgcacaattggcnaaagnaantagaataccttctaaggaagggnng

SEQ ID NO: 36867 - DNA, 281 bp, Glycine max
  unsure (1)..(281): unsure at all n locations; Clone ID: 701117551H2
gtgaaggtgcttcggngacttctcgagacaccaggggttcaccaggggccagcctgtttcgacgctctgggtgcgaacttcatagaatccgctggcttcccctactgcatcaccagtggcttctccatcgccgcttccaggttggctctgcccgacancnggctcatctctacggcgaaatgctggagcanggcaaactnatcanccaaggccgtttccattcccgtnattggcgacgcgacaacggctacggcatgcaatggaacctcangngaaccgtc

SEQ ID NO: 36868 - DNA, 281 bp, Glycine max
  Clone ID: 701117552H2
gggttcacaaaattgtatggataggaagcactatgttctggtgcatggggcatgccatggagcttggtgttggtataagctcaagccacgcttggaatctgcaggccataaggtcacagtacttgaccttgcagcttctggaaccaacatgaagaaaattgaagatgttgatactttctcagagtattctgcgcctttgttgcagctaatggccacaattccctcaaatgagaagttagttctagttggtcacagccttgggagggctgaacatagcactt

SEQ ID NO: 36869 - DNA, 281 bp, Glycine max
  unsure (1)..(281): unsure at all n locations; Clone ID: 701117553H2
tctaggtctaggtcaagatctaggtcgaggtctaggcctagacaaaggccaagatcccgttctataagtcatggcaggtcaagatcaccaattcatggaaggtcaaggtcacccattcatggnatgtccgagccttcaaatcctggtgacacacttnatgtaaccggtctatcttcaagggtcactgaaagagacctagaggagcatttctccaaggaaggaaaggtttcttcatgttttcttgtggtggagccccgtacacggatttctcgtggttttgc

SEQ ID NO: 36870 - DNA, 277 bp, Glycine max
  unsure (1)..(277): unsure at all n locations; Clone ID: 701117558H2
gtcacccaacacatccaggtcatggatgttccactgccacgggataanttggctttagattngattaataatgagcnctcccctgcaaacacgngcancagcaagatatatgtaattctggtggcaactggaagcttnaatccacctactttcatgcatttacgcatgtttgancttgcaagagatgcattgaattcagatggctactgcgtaattggaggttacttgtctcctgtgaatgatgcatacaaganaaagggcctaatatctgctgaac

SEQ ID NO: 36871 - DNA, 278 bp, Glycine max
  Clone ID: 701117562H2
gcggtacccttgctctccaagaggatcgtgaagaagcgcgtcaagaagtttatacgcccccagagtgatcgcaagatctccgtcaagccaagctgggcgcagacccaagggtattgattctcgtgtcaggagaaagttcaaaggatgcactttgatgcccaacattggttatggctcagacaagaaaacccgccattatctaccaaatggtttcaagaaatttgtcgtgcacaatgtgaaagactggaattctcatgatgcataacaggacatactgt

SEQ ID NO: 36872 - DNA, 265 bp, Glycine max
  unsure (1)..(265): unsure at all n locations; Clone ID: 701117564H2
atggaacaatgtaggcaaggngaagtcggcaaaatggatccgtaacctcgggaaaaggattngctctgaggnctgggcacgggggtcccagtcncgaacccgtcggtgtcggtggactgctcgactgttccgcggcgagagcgggtcgtcgcgtgccggtcgagggacggnttgggaacggnccttcgggcttcttcccgggcgtcgaacagtcaactcagaatggtacggacaagggatcgatgttaattaaacnaagcattnc

SEQ ID NO: 36873 - DNA, 278 bp, Glycine max
  Clone ID: 701117567H2
aaaattcaagccattcaaacctcaatatcaaaactcctaatccaccctttgctgtggagactaacaggctttgtctcaagcatagttggattcagctgttatgccctcagtccctctttccacaacatgttcggacactggaacgcgctgaagatcttcgtgtacactgtcgtaagctcacttttatctatcttcatgttcttcattaaaagatgtagctggggacatgggaggagtttcttgttgaaagcacaagtgggttttgtggtcttaacgcc

SEQ ID NO: 36874 - DNA, 275 bp, Glycine max
  Clone ID: 701117573H2
agaactaagaagaaggaaatggcttcctcaatgatctcctccccagctgttaccaccgtcaaccgtgccggtgccggcatggttgctccattcaccggcctcaaatccatggctggcttccccacgaggaagaccaacaatgacattacctccattgctagcaacggtggaagagtacaatgcatacaggtgtggccaccaattggcaagaagaagttcgagactctttcctacttgccagacctcgatgatgcccaattggcaaaggaagtcga

SEQ ID NO: 36875 - DNA, 251 bp, Glycine max
  unsure (1)..(251): unsure at all n locations; Clone ID: 701117574H2
agtaaatcgaaagggttcatatttangattgctattagtttncntaatcgcaggagataaaaatgttcctttgaaatatagcaaagatcggagtgttgtaatgacagtggcagccactggaatattaaggaaaggtggtgggttgttggagaggccaaccatagagacaacatcacctggtcgggaatctgaatttgacttgaggaatcgnggaaaacatccccacctacgggntttgctgcacaatgaca

SEQ ID NO: 36876 - DNA, 140 bp, Glycine max
  Clone ID: 701117575H2
gtagctagcactagctagctaaacacagtacgagtagtgatcataggcaagcaaaagcatattcataatatgggcaaccatgggacgacatgaacaacatgagtggtgaaattacacttccaggcttccgattccacaca

SEQ ID NO: 36877 - DNA, 275 bp, Glycine max
  unsure (1)..(275): unsure at all n locations; Clone ID: 701117577H2
cgccggancctccaaaacctaccctcagcaagccggtaccatccgcaagaacggctacatcgtcatcaaagggccgcccctgcaagttgtggaagtttcgacttccaaaactggaaagnacggtcacgctaaagtgtcactttgttgggaatggatattttcactgccaagaaacttgaggatattgtgccctcttntcacaactgcgatgttcctcatgtgaatcgtactgattaccanntcattgatattgctgaggatggatttttgaagtc

SEQ ID NO: 36878 - DNA, 281 bp, Glycine max
  unsure (1)..(281): unsure at all n locations; Clone ID: 701117578H2
cagtgaaanaaaatggcgttgtacctggacnaagaagagatttggaagtgcccgaagcatccatncgaagcgaagaagangcggantttgccatatttggccttcgcgaccggtcncgtaactnctttaccctgantgtgctaaggtgcgcccctgttcctgctacgccaccagctcctcctcttcttcttnctcttncgtctttcctgctcgcgnttttccggcgcnanngactaccgtnngcngngttcacacnacatacgantnnaaatcnnggntgc

SEQ ID NO: 36879 - DNA, 298 bp, Glycine max
  unsure (1)..(298): unsure at all n locations; Clone ID: 701117580H2
ataccctttgctgctgctctttacccatccattcttcagatggaaaagctccatggcttctgtgctcgcccttgtattccttcttgtcatnctatttcangaaggattggtaacatgtatgaagaatgaagacggatcagangaatggggatatgtgcaagttagancaaaagccccacttgttctggtggctttacagaagtccatacagagtggagaatccctcnaagccttggccatcattctctggcttcagggaggaccaggctcttcaggagttgggtttggaattttggag

SEQ ID NO: 36880 - DNA, 277 bp, Glycine max
  unsure (1)..(277): unsure at all n locations; Clone ID: 701117581H2
ggccggtcgtcgccgacnctgttgcttcactctgttcctcttcgtgcgaagtactaggatcagatggctttgcgaggggtttggcaacttaacaagctgattgtcagttattgcaactggggcngaagtagcagaggtataagggcatttatggagtctcatttgccagcatttaaggagaagaatcctcaattagaggtggttactgaactcatccgtggtcagcatccacatctgaaaggttattacaagaacaagnatcagcgagtgatatgtg

SEQ ID NO: 36881 - DNA, 272 bp, Glycine max
  Clone ID: 701117582H2
atgccattgtcaaggaagcaatgaggctgctgtcagtggcaccaatgttggttccaagactagccagagaggactgcaatcttggagggtatgacatccccaaagggacacaagtgcttgtgaatgtgtggactattgggagagaccttcaatttgggacaaccctaatgagttccaaccagagaggttcttaataaggagattgatgtgaaggggcatgactatgagctattgccatttggtgctgggagaaggatgtgccctgggtaccc

SEQ ID NO: 36882 - DNA, 276 bp, Glycine max
  unsure (1)..(276): unsure at all n locations; Clone ID: 701117583H2
gttgcagcttcagcagcagcggcaagcaactccatccgcaatgggaatcgntttgaaggcaggaggtaagtccaagaagaccaaacgtacagcccccaaatccaatgatatttacctcaagctcctcgtcaagctgtaccgntttcttgttcggaggactggtagtaacttcaatggccgtcatcctcaaacgccttttcatggagcaaggtcaacaagcccccgctatccctctctagattgattcgttacaccaagggaaaggaggatangata

SEQ ID NO: 36883 - DNA, 270 bp, Glycine max
  unsure (1)..(270): unsure at all n locations; Clone ID: 701117589H2
acccgaaccgcttccaaacctccgaaatccactctcaaattcctctgtagctacggcggcaaaattctccttcgttaccccgatggcaagctccgttacctcggcggccatacctgcgtcctcgccgtcgatcgctccattccattctccgagctattgctgaagctagaggagctctgcngtgcctctgtgaggcacctccgctgccaattaccttctgaagacctcgacgctcttgtctccatcacctccgacgaggatctcacaaaa

SEQ ID NO: 36884 - DNA, 269 bp, Glycine max
  unsure (1)..(269): unsure at all n locations; Clone ID: 701117590H2
gctagcgcgagtnaccggagcggcgaagatagagtcagatcggaagcggaagaaggcgtcgacctcggcggcggnnaaggagaaccggaataagcataagaannnnnnnnnnnnnnnnnnnnnnnnnaagggtggtggcggtattgaggttagggcttcgcacatattgataaagcacgaaggttctagaaggaaggcctcgtggaaggatcctgaaggtcgcatcatcaagagcacaaccagagaaaacgcggtttctcagctcaagg

SEQ ID NO: 36885 - DNA, 269 bp, Glycine max
  unsure (1)..(269): unsure at all n locations; Clone ID: 701117591H2
gaaaattattatacccattaagatgaaaccgtacctacgtgcaatattcctattattccttatccttccttcggcgagatggggcgaggctaanattgataggaagacgataacaatgttttggggcaaggttaaagatgcgacgataaaaaatttcccgagtcgtgatgagcggaagaaactgagggagtattacgagaaattcagggaattcatggatcgtgtagaacaaaagacganccctcccccaccgccaatgtaccgtttac

SEQ ID NO: 36886 - DNA, 270 bp, Glycine max
  Clone ID: 701117593H2
cgtactatcattacagagccttctttgtcatctttactctctaatataacaaaagaaagtcgaagaggttttgcatctcaactactttcaattattgaagtccgtgatatggaggaaaacaaagaacttgagaggagtttacatgctgaagatgacgagtcactctcattacctggaagaagaagtgggaatgaggaatggcgcaaatccagattagaaatgggttctgataagctaagttcctctgcttgcccagttcgtttgtgcgta

SEQ ID NO: 36887 - DNA, 291 bp, Glycine max
  unsure (1)..(291): unsure at all n locations; Clone ID: 701117594H2
atggncgcatnagtggtgggcaccatgattcatgatttgaanatgccataagcntattgaggttnttgggttcttgttagagagatgtgataacagattatgctcaaattntgatttnagactgagtgtctttgtgtattagacatgcncaatgtnnatgtngcttcagtcattttagataatattgctacattnaatttgagtntttcnttggacattcttgttcctnaagnggccttttnggaatgaaatgaatttgaagggaaagttaactggatgacanggtgnngt

SEQ ID NO: 36888 - DNA, 277 bp, Glycine max
  unsure (1)..(277): unsure at all n locations; Clone ID: 701117595H2
aacattagtatctttcaactgttgctctgcttctgcacacaganaatnnttgtgggntggganacagagatgatctatntgtngntcacaggtnccactgtttccctgcctcaccctnatgtagcaaggacnagaattaagcananacacccggccaacnacggtagagtcatcnctttcgggaacttcacnattttggtntctggatatggggagtcttgctctggaaancgnggatgtantctcagatatagnnctttcgctnggggttnaggna

SEQ ID NO: 36889 - DNA, 272 bp, Glycine max
  unsure (1)..(272): unsure at all n locations; Clone ID: 701117596H2
tcganccggttttcgtctccacttgtaactgcgccttagcttctttttctcttctccgnnnnnnnnnnnnnnnnnnnnttttggttttctgcttaattcgnaaagtgtttcggtgggntttagcnatntggcgtcttttgctggtgttngcaacgcctgtaactggggccttagcagcgtnctctgctgcgcaacgggcgatgtttgggccttttccttgtgtcntnctattgcggaaagtgttccgtgggtttnacttnctgntgcgtggc

SEQ ID NO: 36890 - DNA, 281 bp, Glycine max
  unsure (1)..(281): unsure at all n locations; Clone ID: 701117602H1
ttctttgcatataggaagaagattctctgctctcggtgctgatgaagagttggagtttggcaacgtgtatatcttcttcccgatgaggagagtnaactctcttgtcaccgcccctgacatggcagtactcttcttggccgccaactctnccgccaaaagattgtccggcagtaaggcgcgtgttctgccggacaactgtggcggcaaaacatggcaacaacgggaagaagaagaagagagttcaaaagatgaaagtttaagtgtgattccaaggttgagtt

SEQ ID NO: 36891 - DNA, 279 bp, Glycine max
  Clone ID: 701117603H1
aacaccttcaactgctttggcttacctcaatccttcctattgggacgaaaggttctcgaaggaggagcaatacgagtggttctaggattattcctattttcgccacttgattcaaccccatctggaactatggatgtattgttcgtggacagtggtaacccatggaatccaaagcctgaaactatatccaaggtcatggccacgttgaaaggtgttcacggggttttgaaagctggtggcacatttatctcagtaacttttggacagccacatttcagg

SEQ ID NO: 36892 - DNA, 281 bp, Glycine max
  unsure (1)..(281): unsure at all n locations; Clone ID: 701117604H1
agaacacgatgttgcttgaacttgcacttggtttattggttttggntctgtttctgcacttgcgtcccacacncactgcnannncanaagcacttcgccatctcccaaacccaccaagcccaaagcctcgtcttcccttcataggacaccttcatctcttaaaagacaaacttctccactacgcactcatcgacctctccaaaaaacatggtcccttattctctctctactttggctccatgccaaccgttgnnncctccacaccagaattgttcnagctc

SEQ ID NO: 36893 - DNA, 279 bp, Glycine max
  unsure (1)..(279): unsure at all n locations; Clone ID: 701117605H1
gtttganatccctcaagggatccactaactgaaggagcaatggggttgacatttaccaagctttttagccggcttttcgccaagaaggaaatgcgaattctaatggttggtcttgatgccgctggtaagaccaccatcctgtacaagctcaaacttggagagatcgttaccacaattcccaccattgggttcaacgtggagactgtggaatacaagaacattagtttcactgtctgggatgttggtggccaggacaagattcgtcccttgtggaggcac

SEQ ID NO: 36894 - DNA, 278 bp, Glycine max
  unsure (1)..(278): unsure at all n locations; Clone ID: 701117607H1
tcaaaagttcaatttagggtaacaaaatggaaaatcaagcctcatcatcgatgcagttcctcatcctcgaacaagttcagttcttgaaggtgatngacgattccctcttgcagtgggaactcgtcgacgtcgttgacgccgaagaggagatagatggctttggttcttcggattcttccgtttcttggttcgaatccgattcttctccctgcgatgccccaattgaagaaattcgacaccttcttcttcatcccgatgttggnntacaagatcgacat

SEQ ID NO: 36895 - DNA, 276 bp, Glycine max
  Clone ID: 701117608H1
gtgccgtttgtgttgttttcgggacgaagaagaagatggtgtcaggttctggaatctgcgcaaagcgggtggtggtggacgcgcgccaccacatgctgggtcgtctagcctccatcgtggcgaaggagcttctgaacggccagaaagtggtggtcgttcgctgtgaagagatttgcatctcgggcgggctggtgaggcagaagatgaaatacttgaggttcctcgcaaacgcatgaacaccaaaccctcccatggccccatccacttccgtgcccc

SEQ ID NO: 36896 - DNA, 277 bp, Glycine max
  unsure (1)..(277): unsure at all n locations; Clone ID: 701117609H1
gagaaagagaaacgattgtntaatgtgaaggcttgggaagaaagtgaaaaagaaagcagaatatggtgaaaaaaatgaaaaacaaaatagccttagttcacaagcaagcagaggagaagagagcaatggttgaagccaagcgtggtgaagaaattctcaaggcagaggaaatagctgcaaaacaccgtggcaactggaacctctccaaagaaggcctttggatgcttttaaatttttattccttttttgttgttgtgctttgtgcctgatgtcatag

SEQ ID NO: 36897 - DNA, 130 bp, Glycine max
  unsure (1)..(130): unsure at all n locations; Clone ID: 701117610H1
cnttatgatacaanaatccccaatgccccaaccgttaatttttcaatnttttatttttattttntggnntntcttctaatggcgacggatgcaaggggcgaagttccaaaacccggaattccggcccgat

SEQ ID NO: 36898 - DNA, 273 bp, Glycine max
  unsure (1)..(273): unsure at all n locations; Clone ID: 701117612H1
cttcgttcgttatcntcntcttttgttntttgtntgtttnnntnttctctcacctgaaaatgtcttgctgcgttggtaactgtggttgcggaacgcctgnnaatngcggcaacgctgcggaggctgcaagatgtacccagaacttgagctacacccgagtcaancaccaccgagacntggtcatgggagtggcaccagttaaggctcaattcgagagtgctgaaatgggtgttcccgctgagaacgatggctgcaaatgtgnagctaactgca

SEQ ID NO: 36899 - DNA, 277 bp, Glycine max
  unsure (1)..(277): unsure at all n locations; Clone ID: 701117614H1
cggaagtcttagcttggggcagcgaatcacaatggcgagaggattgaagaagcatttgaagaggcttaatgccccaaagcattggatgcttgacaaactgggtggtgcatttgctcctaagccctcatctggaccacacaaatccagggtatgcctgcnactcatactcattttgcgaaaccggctgaagtatgctctgacataccgngaagtcattggctattctgatgcagcgacatgtccttgttgatggcaaagttcaggacagacaagacnt

SEQ ID NO: 36900 - DNA, 277 bp, Glycine max
  unsure (1)..(277): unsure at all n locations; Clone ID: 701117615H1
ancttctgcttcganagnnananaccaatggtttctgttgagataggacatggaagcattctcatcaggcatcctagctctatagctcgtgatgangagtctgaggctagctctctctcanttgataataaacaatgcntaatgaatgaagcntattcatnttctagnaccattcctatatatagtgatcgcagtagcatgaacttctcatctcacggagttgaanntntcaaaaactcagctggccaaatcatgcaacaagagaagcttgaaaggg

SEQ ID NO: 36901 - DNA, 191 bp, Glycine max
  unsure (1)..(191): unsure at all n locations; Clone ID: 701117617H1
tatnngnataagcggnatcggagcaattggcctccaatttcaaggctctcanagccatctccagctgcttccttatcagaagcgcttcgccccagagatnctnngcttctctccntcaatcctcttccaacgctattaattacaaaattaacctctccgcntccctccgatccatncantccctcnctctt

SEQ ID NO: 36902 - DNA, 281 bp, Glycine max
  unsure (1)..(281): unsure at all n locations; Clone ID: 701117619H1
gaaatcgcccactcttgatccctttcgaccgtcatcggatctttctgcgggccaccgtctatcgcacttcgntgccgtcatcggggcggaattctgaatccttaatggaagttgtgaagtgatgatgaagtggaagagtattccaataacatgacatgaatttccaaaattttcnatnctngaaaattaagcccagcttaaacaanacaagggtgttcgcggtgttataggggatngggnatnnttgntcaacanggnggggcntnaaggcattanggggg

SEQ ID NO: 36903 - DNA, 277 bp, Glycine max
  Clone ID: 701117620H1
agagcatgctcctacataccccggtatcgaacatgtaggaggagatatgtttgagagtgttcccaacggagacgccatttttatgaagtggatacttcacgattggagtgatgaacaatgcttgaagttgttgaagaattgtcataaagctattcctagtgatggaaaagtgattgttgtggacttaattcttcccattttgcccgagagcacagttactgctaagagtggtttccaagctgacctcttaatgatgactcaaaactcaggaggaaaa

SEQ ID NO: 36904 - DNA, 279 bp, Glycine max
  unsure (1)..(279): unsure at all n locations; Clone ID: 701117621H1
gcaccatatacctaacatgggtgatgcctcttacaacacaagggaaatgcacacaacggaggtccnccctgcagcccccatcccttctgagactgggaagtcaaggcgggccaagcgaccaaaggaaccaaagtcagctccacctaataaaaagacttcaaaaccctcaaaaaaagtcaagaaggagagtgaagacttgaataatatgtttggcaaggcacatgagtggaagagtggtcaggaaatggtcaatggaggtgatgatcttaacaagcagtt

SEQ ID NO: 36905 - DNA, 277 bp, Glycine max
  unsure (1)..(277): unsure at all n locations; Clone ID: 701117622H1
atttagcaagtggaggtgaagatggtgttgtttgcatatggcgtgttacatcactggataagtccagtatttgttccaccacagaagacagtnattctaatagtaaagtggaatgtgacaactcttctcctcggaacaaacactcaagtcaacccttcattttccttccaaatagtatttttcaaattgaggaatcaccactgnnngaattctttggtcattccagtgatgtcttggatttggcntnngnnnaattcagatattctcctttcatctt

SEQ ID NO: 36906 - DNA, 272 bp, Glycine max
  Clone ID: 701117624H1
aaaagaccatcaaagtttcacttcagccttatccggtttagggtttcggtttttgacccaacctttgacgtatcgaaaccttaagtttcggatcaggtctgagcaatctggttggtagaacctttggtcttagagagtcaagttttatgtctgaattagacgatcaaattcctactgccttcgatcctttgctgatgcaaatgctgatgactcgggtgctgggtcaaaggagtatgtgcatattcgcgtacagcagcgaaatggaaggaaaa

SEQ ID NO: 36907 - DNA, 272 bp, Glycine max
  unsure (1)..(272): unsure at all n locations; Clone ID: 701117625H1
gggaantcagagttgaagcatgtggagaatgtgatgtttggatgtggtcattggaatagaggcctatttcatggtgctgctggtttggctaggattggggaaaggaccattgttcattgcttctcaaatgcaatctctctatggtcaatccttttcctattgtcttgtggataggaatagcaatgcaagtgttagcagcaagttgatttttggtgaggacaaggagctcctcagccaccccaatttgaatttcacttcttttggtggtggga

SEQ ID NO: 36908 - DNA, 270 bp, Glycine max
  Clone ID: 701117626H1
caacaacttcaccttcttcctcctcgatcatgtctcacttcaagggcaagtaccatgatgagcttatcgccaatgctgcgtacattggcactcctggaaagggtattcttgctgctgatgagtcaacagggacaattggcaagcgtttggccagcatcagtgtagagaacattgaatccaacaggcgagctcttagggagctgcttttcactgctcctggtgttcttcaatatctcagtggtgtcatcctctttgaggaaaccctctacc

SEQ ID NO: 36909 - DNA, 268 bp, Glycine max
  unsure (1)..(268): unsure at all n locations; Clone ID: 701117628H1
tanananctggttgaccantaattttcctgaagctgaggcnctctttgtaaaggtgctactgaagctnacattcaggagttgganaatgtattaaaggtgaaattgccacttccttcaaggatcctttatcgttttcacaatgggcaagaaattgcaaaagcagatccagaaactactacatatggcagttctttgggtctaattggtggctactccttctatagtcatttggtgaatgtttatctattacctatacgtcagataatc

SEQ ID NO: 36910 - DNA, 276 bp, Glycine max
  unsure (1)..(276): unsure at all n locations; Clone ID: 701117632H1
aagcttctttcttcttatatatcgaacatggctaagtatcatttcaagtgggaaaagctcttccatgactggtatagccttcctgtttatccttctaatcacttatacaggcacaacagatgcacaatccggggtatgttatggaagacttggcaacaacttaccaacncctcaagaagttgtggccctctacaatcaagccaacattcgcaggatgcgaatctacggtccaagcccagaagtcctcgaagcactaagaggttccaacattgagct

SEQ ID NO: 36911 - DNA, 280 bp, Glycine max
  Clone ID: 701117633H1
tgcagcttcagcagcagcggcaagcaactccatccgcaatgggaatcgatttgaaggcaggaggtaagtccaagaagaccaaacgtacagcccccaaatccaatgatatttacctcaagctcctcgtcaagctgtaccgttttcttgttcggaggactggtagtaacttcaatgccgtcatcctcaaacgccttttcatgagcaaggtcaacaagcccccgctatccctctctagattgattcgttacaccaagggaaaggaggataagatagctgtggt

SEQ ID NO: 36912 - DNA, 235 bp, Glycine max
  unsure (1)..(235): unsure at all n locations; Clone ID: 701117634H1
gattgccttcaaatcacacactctcttcaatttctagggttttgctattgctttgcctccgntccccctttctcacaaaaacaacgccttttctcttctccttcgtatctattctttncntttngntttnggttgattgaaggcattcacagcgtaattngttgctgcatttnnatcgatttatctaaccaggactgaatgacctaatggagtctaaaggtgggaaaaagaagtc

SEQ ID NO: 36913 - DNA, 154 bp, Glycine max
  Clone ID: 701117636H1
ggatatctcggctcttgcatcgatgaagaacgtagcgaaatgcgatacttggtgtgaattgcagaatcccgtgaaccatcgagtctttgaacgcaagttgcgcccgaagccattaggccgagggcacgcctgcctgggtgtcacacatcgtttc

SEQ ID NO: 36914 - DNA, 275 bp, Glycine max
  unsure (1)..(275): unsure at all n locations; Clone ID: 701117638H1
cttttaattcatctcactcacaaatcacaatgctcttcctttcttccttaataataataccataataatctgttacgttacggggcccaaatgtctgttacggagctcaaggagcgtcactctgctgccaccgacaccgtcaacaatctcagacaccgtttaaagcagaagcgcctttcgttgctcgacacagatatttctanngtatgcaaggtctcagggtagaacgcctgtgacctttggacnntnngatctggtttgctgtagaaccttgc

SEQ ID NO: 36915 - DNA, 273 bp, Glycine max
  Clone ID: 701117639H1
gcaggcctaagtattcccaaagacttgtcgagtgaggaagctaatcaatatttgaaggacgtgtgcttgaagtatgagatcaaatgtcctccccctgagacaactgctcgtttgttggataaacttgttggtcactttttggaagagacatgtgtaaatcctacattcataataaaccaccctgagatcatgagtcctttagcaaagtggcacagatcaaaacctggcctgactgaacgttttgaattgtttgttaataaacatgaactttgc

SEQ ID NO: 36916 - DNA, 124 bp, Glycine max
  unsure (1)..(124): unsure at all n locations; Clone ID: 701117640H1
gcttcatcatcttctctctatctttgttgcanacttaccaacacagtactgagtttaagtgttcancagnaanaacaatggatgatgatattgtaggactcggttttcgtccagannanatagg

SEQ ID NO: 36917 - DNA, 269 bp, Glycine max
  Clone ID: 701117641H1
gttcgatcttttgaaggattctgataaaggggtcatcacttttgagagcctcaagaggaattcttacttgcttggtcttcagggtctcagtgatgaggatcttcgctccatggttttggaaggtgactttgatggtgacggtgcactcaaccagatggagttctgtgtcttgatgttcagactcagccctgaattgatggagggctcaaagatgtggcttgaacaagtccttcaacaagagctaaagattatttctaattcttgtaatt

SEQ ID NO: 36918 - DNA, 268 bp, Glycine max
  Clone ID: 701117642H1
ccgagactaacccaatgttccaaccttcttctactgaagatgtggtccttgacttagatgctcagagtgactacactctatggaggttaaaggcttttgtaaaagattcactagaagagcaagtaaaggtcaatgcaggcgcaggtattaatcctaatgataaccctgatgacaagaaaaacaagaagaggcgagattctggtgattcttcgggcaagacaaacccaaaaaggaagaaactatctacattgtgattcattagttgcaa

SEQ ID NO: 36919 - DNA, 265 bp, Glycine max
  unsure (1)..(265): unsure at all n locations; Clone ID: 701117644H1
tgctgcntttcctaccacgtttcgcagtctcgatcatcgcaatttctcagcgttatgttcggatatccaaaatcctggctatgttgattancattcaaattcnaataagtctacatctcaagcgtctttgttttngcgttctgattccacnaatagtagcangctcgtgctnggtggagcactttgtgtgaacccctcnggcaggagaaacctagttggtccggcttcttattctgtagagacgagtgcttatgatgtggctctt

SEQ ID NO: 36920 - DNA, 266 bp, Glycine max
  unsure (1)..(266): unsure at all n locations; Clone ID: 701117647H1
canaaacctgcatgaaatcatcttcaatcataattaacaccatccaagaattggaaagtgaagttctcatggccttatggctcgaacccannatatataacattggtccactttcattgttaggaaggcatttcctgataaaggacaagggcttcaaggtgagtgggtcaaatcttgganaaatgactcaaaatgtatccaatggctagaccaatgggtaccttcctcagtcatatatgtgaattatggaagtatactgtgatgtc

SEQ ID NO: 36921 - DNA, 275 bp, Glycine max
  Clone ID: 701117649H1
gttgttgagatctgaatcaaaatcagaaacgataatggctacaccggaccacctcttcaacctccgcaacaacttctacctcggcgttaccaagccgccatcaacagcagcgacgttgccaacctctcccaagaagataccctcgagcgcgacaccctcgtccaccgctgctacatcgccctcggccagctccagttcgtcatctccgagatccacgacgatgctcccacaccactccaagccgtcaaactcctcgccctctatttctcctctcc

SEQ ID NO: 36922 - DNA, 273 bp, Glycine max
  unsure (1)..(273): unsure at all n locations; Clone ID: 701117651H1
attgtatgaccccctgggcaatgcctgatgtcgataaattaaatgctgcatatctttcaatacacggaagttccattttagggcggtccctttggcagagaacttcacaatctttacagcaagcctaggatctatatgtattgtcaggtcaattttaggcattaaggcttcaaaatatggctgtcttacaattttgcgtttgtttcaacatgagtggaagagcatgttaattagatcaatggtagtantttatgatgtaatactgaatatcaa

SEQ ID NO: 36923 - DNA, 276 bp, Glycine max
  unsure (1)..(276): unsure at all n locations; Clone ID: 701117652H1
aaacccaccaccccaattngcaccaccatcaaccaccatgtcctcctagccaccaaagtccgcaaacccaaaaaccctcatagagttagctagaaacacccnaaaagattcattttgttttaaagcgcaacttatggcatccattgccaccttcttcaacaagttcctctacttctttatcctcttagtccacctcggctgcttcatcttcaccaccgccgggaaacaatcgccgccgtcaaagaaacgcaaaacctcacctttatcccaaccctc

SEQ ID NO: 36924 - DNA, 272 bp, Glycine max
  unsure (1)..(272): unsure at all n locations; Clone ID: 701117654H1
gtgtatntcgctacctctcccntcaagatncagatnttcgtcaagantctnaacggcaagagcatcacncttngaggtggatagctctaccaccatcgnnaacgtcaaggncaagtccangacaaggaaggaatccccccggaccagcaacgtctcattttcgccggaaagcaacttgaggacggccgtacccttgctgactacaacattcagaaggagagtactcttcacctcgtcctccgtctccgtggtggcatgcagatcttcgttaa

SEQ ID NO: 36925 - DNA, 266 bp, Glycine max
  unsure (1)..(266): unsure at all n locations; Clone ID: 701117655H1
cttagaaagttgaagctttttttgttgaggtgaaagtgaaatgnttggcaaggataatctgagggctgaggacttgaacttgtgctttaagaagctatgatggtggccgggagtgggaacagtgagaaaggggtgaacttgaaggttggggtgatcaccgagtggaaggatattcctgtggagcttctgatgcaaattctgtccctgtggatgatcagacggtgatcatagctctggagtttgtcgtggatggagagatgctattt

SEQ ID NO: 36926 - DNA, 253 bp, Glycine max
  unsure (1)..(253): unsure at all n locations; Clone ID: 701117656H1
ggagagaagaagaaacttaatcgantcatcacttcacttcactaatacatcatgggcagacgagacccagaacaagtatgagagctctgaggttgaggtccaggatcgtggtgtttttgactttctcggtaagaaaaaggatgaagaagacaagcctcatcctcaggaggaggtcatcgccaccgagtttcaaaaagtcactgtctcagaccaaggagagaacaagcacagcctcttagaaaagcttcaccga

SEQ ID NO: 36927 - DNA, 266 bp, Glycine max
  unsure (1)..(266): unsure at all n locations; Clone ID: 701117657H1
gtggtattggtactgtgccagtgggacgtgtagagactggggttgtgaagcctggtatggtggtgacttttggtcccactgggctgacaactgaggttaagtctgttgagatgcaccatgaggctctcacagaggctcttccaggtgacaatgttggatttaatgtgaagaatgttgcagtcaaggatctcaagcgtggttttgttgnatccaactccaaggacgaccctgccaaggaagctgccaacttcacatcccaagtcatt

SEQ ID NO: 36928 - DNA, 262 bp, Glycine max
  unsure (1)..(262): unsure at all n locations; Clone ID: 701117658H1
cacaaccaagcttctctgttaaaaaaaaattaggcgtctaaagggccaaagcttagaaagttgaagcttttttgttgaggtgaaagtgaaatggttggcaaggataatctgagggctgangacttgaacttgtgctttaagaagctatgatggtggccgggantgggaacagtgagaaaggggtgaacttgaaggttggggtgatcaccgagtggaaggatattcctgtggagcttctgatgcaaattctgtcccttgtgga

SEQ ID NO: 36929 - DNA, 266 bp, Glycine max
  unsure (1)..(266): unsure at all n locations; Clone ID: 701117659H1
gtnaatatnanangatggcgatcgtaccaggncanntnatatgngaggtcgtaaagaagaacaactctttcttggtgaaagagttcggaaggngcactcagagcgtgcagttcagcagagagcccaacaatctctacaacctcaacanttcaagtactccggtttggcgaacaagaaaactgtcactgttcaacctgcgggtaaagaccagtctgtgttgctggcaacaaccaagacaaagaagcaaaacaagcctgctgctttgc

SEQ ID NO: 36930 - DNA, 67 bp, Glycine max
  unsure (1)..(67): unsure at all n locations; Clone ID: 701117661H1
cacctgtcntcctgacttctaaactgccctctttcgttcgcntttccccnccnccnacacaananag

SEQ ID NO: 36931 - DNA, 269 bp, Glycine max
  Clone ID: 701117669H1
atcaacatctgaatctggtgctgtgattacgatctcaaaggaggagtttgactcactaagccataaagttgaggagtcagataaattagcagatatgaaagtggctgctgccaaggcacaggttgaagctgtgaaggctagtgaaaatgaggctctcaaaaggttggagacaacacaaaaggagattgaggatatgaagactgcaacacaggaggcttgaaaaaggctgaaatggctgaagcagcgaaaagggcagtggagagtgagct

SEQ ID NO: 36932 - DNA, 267 bp, Glycine max
  Clone ID: 701117671H1
aaggatgtgtttgaaaggattgttcacacctccttcccttcattgagattcaaagtttatgtgtttagggaaagtcttgttgacaatctcatatctccttcaattagggaggcacttgacaaccctcttaactatgcaagaagttaccttcctgatttgcttgatcaatgcattgaaagggtcatatacttggactctgatgttatagttgttgatgatgttcaagagctttggaaggtttcatgacagggtcaagagtcattggtg

SEQ ID NO: 36933 - DNA, 267 bp, Glycine max
  Clone ID: 701117672H1
cggtttctgtgggtggtgaagagcccaaacgaagaaatagccaacgcgacgtacttcagcgccgagagccaagcggatcccttgcagttcttaccggaagggttcgtggagagaacaaaaggaagagggtttttggttcagtcttgggctccgcagcctcaggtattgggccatccatccacgggtgggttcttgacccactgcggctggaactctattctggagagcgtggtgaacggtgtgcctttcatagcctggcctctgttc

SEQ ID NO: 36934 - DNA, 133 bp, Glycine max
  unsure (1)..(133): unsure at all n locations; Clone ID: 701117674H1
tcatcaacaagaaaacaagttttttatctaatatcgctttacctttcttcataattttcatcctacgatgtctgtttcctctctcnctcttnctgttttgtanatantgtcntttttcnnnccacacaacana

SEQ ID NO: 36935 - DNA, 264 bp, Glycine max
  unsure (1)..(264): unsure at all n locations; Clone ID: 701117679H1
gtcgcaccttccctgaggcttctcttgtctgtcgcgagtnancatggtganggttagtgtgctgaacgatgctctgaagagcatgtannatgctgagaaaaggggaaagcgccaagtcatgattcggccatcctccaaagtcattatcaaattccttttggtgatgcagaagcacggatacattggagagtttgagtatgttgatgaccacagggctggtaaaatcgtggttgaattgaacggtagactgaacaagtgtggggt

SEQ ID NO: 36936 - DNA, 169 bp, Glycine max
  unsure (1)..(169): unsure at all n locations; Clone ID: 701117680H1
atctgtgacgagcatcatggctcgagagagtgtattgttggctatgtgtgtgttccggcatggtgtngccattcgccagcaaagaanccttttgcgtgaaggtcgcgtctactgtganccttgccgtgctggtttgagactcagcaaccaactacattgccgtgtgaga

SEQ ID NO: 36937 - DNA, 269 bp, Glycine max
  unsure (1)..(269): unsure at all n locations; Clone ID: 701117681H1
ggagggtgggaacaacagcagcagtaacaacaaccctgatgagttggcggtggggtgcttgctttcgatcaggacaacgttggggcgacgaattcgaaggccaggtcgtcaccttcgatcgcccctccaacattctcgtactccaggagccttccaaacctagncctcgtcgaaatcttaggttgctcaaagccaattacatcaaagacttcacctttctcggccatgcccaagaccctcttgatcccaacacctgcttccttgactca

SEQ ID NO: 36938 - DNA, 267 bp, Glycine max
  unsure (1)..(267): unsure at all n locations; Clone ID: 701117682H1
attcatcttgcaattccaantgaatcnaangggaaatgggtcaggtaaaacttgcttcaaagggatgtaaaacctgatagtggagaatctgagaaggattgctctgcggaggataaactgaactcaacatggagggaagctttcatgaaggcatacaaggctatggacaaagagctcaggtctcatccgaatctggattgcttctgtagtgggagcactgctgtgactatagtgaagcagggttcaaatctgttcatgggctatatc

SEQ ID NO: 36939 - DNA, 268 bp, Glycine max
  unsure (1)..(268): unsure at all n locations; Clone ID: 701117684H1
cagaaactgaacatacaagctaactataattttttactacaccagtataccaataccatgatgatgttttaattgaattcgttaagtctcttcagaatttggtatactgctacagtcagaaatcgtagctagcttgtttgttcagtttctgaacttagttaaaatatcatcaggcattggtatactactatagttagcttgcttgtacagtttctgncactcattctgaccaggagtttgcacatggcctatgaatatatcaatggaa

SEQ ID NO: 36940 - DNA, 266 bp, Glycine max
  unsure (1)..(266): unsure at all n locations; Clone ID: 701117685H1
caggcggtggagccggagcttgaggatgaggacgtggaggggtatgttccggaggcgatgttcgacgangcggacactggaaggaagaggaagaaggggnaggagggtgggagtgggaagaaggagaagaggatgaagggggagaagagttttgggagcagcggtgggaagagtgggtccaaatttgggagtggaaagaaagggtttggtgggaaggcagggaaggatcatgatggtgaagttaaggagatgtgggatacaattgc

SEQ ID NO: 36941 - DNA, 75 bp, Glycine max
  unsure (1)..(75): unsure at all n locations; Clone ID: 701117686H1
cttgtaacggaactttttgataactagctgtgtgaagacgacaactgccacacattncccacacaacatanngag

SEQ ID NO: 36942 - DNA, 264 bp, Glycine max
  unsure (1)..(264): unsure at all n locations; Clone ID: 701117696H1
ctttancaactcctaacaatttctctctgtttccttcttcaccgcatcaatggngtggacggcgttctcctcggcatgtgcaaccctctcctcgacatctctgccgtcgtcgacgacgctttcttgcaaaaatacggtatcaagttgaacgatgcgattctcgctgaggataagcacaaacctatgtatgaagaattggctaacaatcctaatgtggagtacattgctggaggtgctactcagaattcaatcagggttgctcag

SEQ ID NO: 36943 - DNA, 250 bp, Glycine max
  Clone ID: 701117701H2
gggagagggcttgtttggctcctaattctgcacccgctgatgagttggttattccgtttaactcctccggcgagtggttcagacagaccttcacctcgtggcagaaaggtgacgtcttgggaaatgggtccttcggaactgtctatgaaggcttcactgatgatggattctttttgcggtaaaggaggtgtctttgctggatgaaggtagccagggaaagcagagttttttccaacttcagcaggaaata

SEQ ID NO: 36944 - DNA, 106 bp, Glycine max
  unsure (1)..(106): unsure at all n locations; Clone ID: 701117704H2
ggatttttactttgaattttacagtgtcagcagttctccttttatgttgcattnctttncatggctgtgctggctggcttttgcttncatggctgcccactttcct

SEQ ID NO: 36945 - DNA, 250 bp, Glycine max
  unsure (1)..(250): unsure at all n locations; Clone ID: 701117705H2
aagaagaaaatccagcgaaagtaaaaccagcatccgaaaaanatgagcagcatcggaacaggttacgatctctccgtcaccactttctcccccgatggccgtgttttccagattcgagtatgctgccaaagccgtcgataacagcgggactgttattgggatcaagtgcaaagatggggttgtgttgggcgttgagaagcttattccgtcgaaaatgatgcttccgggttccaatagnagaatacactcc

SEQ ID NO: 36946 - DNA, 249 bp, Glycine max
  unsure (1)..(249): unsure at all n locations; Clone ID: 701117709H2
gttcgcaacaatggcgatgaggagattctacaacgagatcaaggggaagagggtgagcgaggttccggagcacgtgaagccgatgctgtcgctgaactacatcaagaaggcgattcagagaggcttcgataattaccatggcaagtacattgaaaccagctcccccgatcccatcttccatgtctgctacggcggcatgatncttctcctacctcgttgctctcccccacgagcgccgccacctccagc

SEQ ID NO: 36947 - DNA, 249 bp, Glycine max
  unsure (1)..(249): unsure at all n locations; Clone ID: 701117710H2
aattattaatataataatagaaataagttgttatctcgaagaagaaaggagcaatcgaattgaatcgaagagtgaagaaagatgcttccctcatttctaagcctggtgtcagtgtacagcctctacctccgacgctgcttcacgggcgcggggctctcatncgcagacgcttagagtggacgacgaatccacgctccacttctggggccccgacaaactcaacggcccagaagccttccctggttctga

SEQ ID NO: 36948 - DNA, 246 bp, Glycine max
  Clone ID: 701117711H2
ggacactgctgggctttcggccgacccagaaaccttcgccagaaaccgtgagctcgaagtgatccactccaggtgggccatgctcggggccttgggctgcgtcttccccgaactattgtcccgcaacggggtcaagtttggagaagctgtgtggttcaaggccgggtcccagatcttcagcgagggtgggctggactacttgggcaacccaagccttgtccacgcccagagcatcctcgccatctg

SEQ ID NO: 36949 - DNA, 247 bp, Glycine max
  unsure (1)..(247): unsure at all n locations; Clone ID: 701117712H2
gggtctcccaccctaaccaagccagatcccgttttcaattccttctcagtttccttttctctgaaaaaacatgttgagggttgcagctanaaggctctcttcttctctctcatcttcttctccgttgcggcccaatcacgccgcttccgcttttctctctcgaaacgacgtcgtcgtcgatgaccgcagatctgctccttcctcccatccccttcttcccttcagaggttatgctactgaatccctg

SEQ ID NO: 36950 - DNA, 230 bp, Glycine max
  unsure (1)..(230): unsure at all n locations; Clone ID: 701117713H2
ggcgaaaatgccttcccacaagacgttcagannccaagaagnagctcgcgaagaagntganggnagaacagacccatcccttattggatccgcatgagaaccgacnacactatcaggttccgactaccctaatttttgttatagctcgttctacaaacttntaccaaacgctgcgttttgcanattttgcctctgcctcatttcagtnctcttganttctatcganaacg

SEQ ID NO: 36951 - DNA, 245 bp, Glycine max
  Clone ID: 701117714H2
gtttgttttttctctcacctgaaaatgtcttgctgcggtggtaactgtggttgcggaagctcctgcaagtgcggcaacggctgcggaggctgcaagatgtacccagacttgagctacactgagtcaaccaccaccgagacttggtcatgggagtggcacctgttaaggctcaatttgagggtgctgaaatgggtgtgcccgctgagaacgatggctgcaaatgtggaccaaactgctcctgcaac

SEQ ID NO: 36952 - DNA, 250 bp, Glycine max
  unsure (1)..(250): unsure at all n locations; Clone ID: 701117716H2
tttccannagcagaatgantgcataaagtttggtggcgactgatcctttttcgatcccacataaccaaagagaatgnnaatatcactggtaggtttgattatttaacagaaaaggactgctggaaaatgggaggttgctgttgttctgccaggaaacctcacctgcatggaacaccagtgtattactattgcccaccaactttagaagagcgtgagtctttaacatctaatgatggtagggctatgtccc

SEQ ID NO: 36953 - DNA, 247 bp, Glycine max
  Clone ID: 701117717H2
cgtcgcatgactttggttatggaatggatgggcatgcatgcattaatgatttatatccttgctgcttgcaatgttttcccaattttccttcaaggattttattggggaagtcctcacaataacattctcaagttaattggagttggcacttgaagaaaggcacataaacatgctattggataaaagattatatgcagtaagactgtgaacatgttttactgtaaaagaaatggctacccgagttttt

SEQ ID NO: 36954 - DNA, 249 bp, Glycine max
  unsure (1)..(249): unsure at all n locations; Clone ID: 701117718H2
gcggctctaatcaccggattctccctcgcgatggcttctcttccggcggctttgtagtcgtanctgcagtcgtggcggtcggagtaccggtggctcggcgcagaagagctcgccgcattcggcaccgaaatccggtgagtngaccttcctcctgcagccggagcagcggttcaccacgcgcttcgcctccnacggggtcgtctggtctgaagacggaggatccgccggcagcgagggnctcctcgggaa

SEQ ID NO: 36955 - DNA, 247 bp, Glycine max
  Clone ID: 701117719H2
gttagatctgtacctgcctagccattgatttggaaaagtccaagcttcaaagatgagtaagcttcagagtgatgctcttagagaagctatctcaggaatcatgactgattccaaggaaaagaacaggaaatttgtggagaccattgaactccaaattgggctgaaaaactatgatccccagaaggacaagcgttttagtggctctgttaagttgcctcacattcctcgccccaagatgaagatttgt

SEQ ID NO: 36956 - DNA, 245 bp, Glycine max
  unsure (1)..(245): unsure at all n locations; Clone ID: 701117721H2
ggaagaagaaggaatcggcggtgttcaactgacgatcgcatctcaaagtttggtcacgatcgttgctttgcttgttcgacaccgaggagatgtaagcatgcaaaatggactggatggcaatgatctacgattgaagctcatgcgaaaaagtgcattggggcaggctgacagcaatggcagtaagntgcatatggacctccgtgaaaagctgtcaaaggcaagtcaccctctggctaacacttata

SEQ ID NO: 36957 - DNA, 247 bp, Glycine max
  unsure (1)..(247): unsure at all n locations; Clone ID: 701117722H2
attccattgcttctcttcttcacaaattccattcntagagagaganagaagcaacaacatcataatcggaatttgattgaattccgatttgggtgatgagcgcgtgaaaannnnnnnnnnnnnnnnnnnnngcagggaagaaggggtggcggcagaagacgcaataagggccattggtttaggttacgatctcacaaacgatctcaagctcaaattctgcaagaaccactccagattgatcgctatc

SEQ ID NO: 36958 - DNA, 247 bp, Glycine max
  unsure (1)..(247): unsure at all n locations; Clone ID: 701117723H2
cttctctttctctctgcgacaccagatgatggagacgacggcgaanngaaacgctgtccgttgccgccaatcgcggcgttgttgttggtggtgctactcgcggcgagtgtggtggtggaggctcaggagaactcggacgtgaagacgctggtgaagcacatgcacgggaagaagtactgcgacaaaggatgggaatgtaagggctggttcaatttactgttgtaacctcactattactgattatttc

SEQ ID NO: 36959 - DNA, 245 bp, Glycine max
  Clone ID: 701117724H2
atttgtcaccaaacaattgttgttagctctcacaagcaagcttcagcaacgacaatgaagaaagtagtcttacagttggacttacatggtgatagaatcaagcaaaaagctatgaaaacagcatctggcctttcaggggtgaatcagtttctgttgatatgaaagacatgaaaatgatcgtgttgggggacattgatccagtgagtgcagtgtccaagctacgaaagtgttgtcacactgaaata

SEQ ID NO: 36960 - DNA, 195 bp, Glycine max
  unsure (1)..(195): unsure at all n locations; Clone ID: 701117725H2
gngtattgagcatggaggcgccatctctcaccaaacccaacgacccaacaaaaccttccaacacttccagcaccacttagtctgnagggggggccgggcgaaggtagcnccactccgaaaaatgtttgcggtggcgtccatcgccgccggcatacagttcgggtgggctctgnagctgtctctcttaacccccta

SEQ ID NO: 36961 - DNA, 244 bp, Glycine max
  Clone ID: 701117726H2
gcttcaagtcaggaggaggtgacccttttgggagctactggaagcccatttgtgtgcagggttcatattgccctcaagttgaagggagttcaatacaaatatgtcgaagaaaatttgaggaacaagagtgaactgcttctcaaatccaacccagttcacaagaaggttccagtgtttattcacaatgagaagcccatagcagagtctcttgtgattgttgaatacattgatgagacatggaaga

SEQ ID NO: 36962 - DNA, 242 bp, Glycine max
  Clone ID: 701117727H2
gttcggggcttgtgctgcttgttttcccaggttttagagctccaaaccttcagatccacctcattcgtctccagatcttccttccttgataacgttttcgggttcgagaaggcacttgtttgtttgtcgtacgaaatgagactaaaccgagttcggtgatggttacgctcagttacggcgcgttgacgtgcgccgcggaagttctcgcgactttgctagcttctgctgtcgtcaaagccacg

SEQ ID NO: 36963 - DNA, 244 bp, Glycine max
  Clone ID: 701117729H2
gcttctcctctctcccaagaaagaatcatcaatggcgattgaacacgaagacgatctcaaagacgagaagaaccctcgacctctcgacgaggatgacatcgccctcctcaagacctacggtttgggaccttactccaaagcataaaaaaggcggagaaggaaatcaaagatatggccaagaaagtgaatgacttatgtggtataaaggagtctgatactggtttagctgcaccaagccagtggg

SEQ ID NO: 36964 - DNA, 245 bp, Glycine max
  unsure (1)..(245): unsure at all n locations; Clone ID: 701117731H2
gtgcgtttntgctgtnctagggnttctgcancttccacctccgtcgcgatgaaaccaggctcatctgattccgatttcccttcgctccttctcctccttaaccttcatcttcttcgattcctctacaaattatgattatattatgatgaactcgatnttcgcctcgnataaccttcgcgtcttcggtcccggcttgaatcccttcgcaccttattgcatcgccaatcactcccttttcctttccc

SEQ ID NO: 36965 - DNA, 246 bp, Glycine max
  Clone ID: 701117733H2
gcgactgcagagcagttctctgtcgcaaaggagaggccattgacatgtctcaagatcacaggcctatttatccatcagagaggaggcgagttgaagaattgggtggctacatagaagatggttatctcaatggggtttatcagttactcgagcactgggggactgggacatgaagttacctaagggtgctccctcacctttgattgcagagccggagttccggcaagtggctctaacagatgatga

SEQ ID NO: 36966 - DNA, 241 bp, Glycine max
  Clone ID: 701117734H2
agtagatatctctccagtgaaaacataccgaactagaaccacgacaaagacagcttataggactgctgaatatgtatatggaagttgcaatggattgcatttctaaatgttacttaagggtcttccttcatcttaggttttcaaaataaatatatgttgttggcttcagttatgtaggagagagcttgtgtgtacagtcaattgaaccttggtaggtatagagttttcagaggatacagag

SEQ ID NO: 36967 - DNA, 244 bp, Glycine max
  unsure (1)..(244): unsure at all n locations; Clone ID: 701117735H2
ctcgcttcttcctttttgggttctattgctgnnattgggagttcttgaccgctctcctcctttttagttcttccccttaatcttctttcttcacaatttttatttccttccttattagacgtattagatcagattgaacaaaagggtttttctttccttnctntcttggggaataatagaaataagaaaagattagtgaggtnnaaatgtcgcaacgatcggtgccggcgccgttcttgacgaa

SEQ ID NO: 36968 - DNA, 244 bp, Glycine max
  unsure (1)..(244): unsure at all n locations; Clone ID: 701117736H2
gtgggtggttgctggtttgagtttgatagtggtgggtggctactttttcgagtttggcggttgtgtgtgggtgctgattcaagttcgatggtggcgtgtgggtcgccccttcaccgtcggcgctgacgtggaccactacaagaccaccctgaaccaccgccctcgccgtgttgcctgtccgcctcctcgctaaacaacgaggaagagaaggtgtggtgcatcgcgannggaacgaggtgatgtg

SEQ ID NO: 36969 - DNA, 242 bp, Glycine max
  Clone ID: 701117737H2
ggaggtctcatgttgtggtcaaggtactacgataaaattagtggatacagtacccgcattcaaaatcctctaagaaatgggacagcaaaccctctatgcacacggaaaagtcaagcatgtaggagccatgagggcgtttcgcggagcttcttggttacatgtccacgctcggtatcaaagtttatgaagacgacaacaatggaacacagtgctgtgagatcatatgtaggaacaactgttcc

SEQ ID NO: 36970 - DNA, 246 bp, Glycine max
  unsure (1)..(246): unsure at all n locations; Clone ID: 701117738H2
gccccttctgccctccccagccattaactgaaaaaaaaaaccaaaaaaccaaaaatactacaaatttttttcagtttctccgccgccgcacaaccaccacctcctccgttcggatctccggcggacctactatccctactactagtctactactatttacacggaagnacaaaaaactatccccctcccccanaaaaaaccccaaagcggctcggttagggtttagttttgtaccatttcgtgtaa

SEQ ID NO: 36971 - DNA, 244 bp, Glycine max
  Clone ID: 701117739H2
gaaatttccacctgcatcatcttcaaacctgcgcttcttttgaaccgatttgtgctgttttgttagtgaagcacattcgagtgcaaactgtcgaacaggcatgggcaagcctgttgacaacatcagccatcacctattctcctctcaacaatggttccaaggatttcagaaagtcagggaattcttctaaaggaaggtgttgcataaaagcaatggggatagagaaatccttggaggaattgta

SEQ ID NO: 36972 - DNA, 234 bp, Glycine max
  unsure (1)..(234): unsure at all n locations; Clone ID: 701117740H2
cttaggtttcatctttacaaggagaacaaagatacccacgaagccttgggggttattggaaatatgctcagtgtccagccaaaatcatttggatttgcgggtacaaaggacaagcgtgctgtcacganccaaagggttactgtttacaagcagcgagcaagtcggctagcttcccttaacaagcgcttgttcggtataaatngggtgatttcnnnnntgttaaggnaggactnt

SEQ ID NO: 36973 - DNA, 243 bp, Glycine max
  Clone ID: 701117741H2
gctccctgagagagctcgtcgcggcggttgcagaagaagattgcaagatgaagttcaacatcgcgaatcccaccactggatgccagaagaagcttcgagatcgacgacgatctgaaactggcgagcattttgggacaaaggatctcacaggaggtcatcggagatgcactcggtgaggaatttaagggctatgtcttcaaaattaccggaggttgtgacaaacaaggatttccaatgaagcag

SEQ ID NO: 36974 - DNA, 221 bp, Glycine max
  unsure (1)..(221): unsure at all n locations; Clone ID: 701117743H2
ctaaagtcaaactcaatcactctacttctctcccaacctntcttcgtctacgtcaatcacttcagccctcgccagaagatctctgcagatttcatcggggctcctncccattgctcgcctcattgtgaccagcagtgctggaaccgaccacatagacttggttgagtgcagccgccatgatattcaggttgtctctgttccaggagatcaagccaaggatg

SEQ ID NO: 36975 - DNA, 241 bp, Glycine max
  Clone ID: 701117744H2
gaagaaaaagaagcgaaactaaagtcagcattcgaaaaagatgagtagcatcggtacaggttacgatctatcggtcaccactttctcccctgatggccgcgttttccagatcgagtatgccgctaaagccgtcgacaacagcgggactgttattgggatcaagtgcaaagatggggttgtgttgggcgttgagaagcttattccgtcgaaaatgatgcttccgggttccaatagaagaata

SEQ ID NO: 36976 - DNA, 240 bp, Glycine max
  Clone ID: 701117745H2
atttaccctctgcagaatgtgtttgttcgtaaagtcaagatcctgaaagctcctaagtttgatcttgggaaactgatggaggttcatggagattactccgaggatgttggtgcaaaggtagacagacctgctgatgaaatagtggcagaggaacccactgaaattgttggagcttgatttagtgataatgcatattcaaattgttctaggttttctgtttctatgttatcattgaaaatt

SEQ ID NO: 36977 - DNA, 243 bp, Glycine max
  unsure (1)..(243): unsure at all n locations; Clone ID: 701117746H2
gccagtactatatgaggacgggatcatgcaaatttggtgcgtcctgcaagtaccaccatcctaggcaggtgccaggcactgctaccnctgtgccactanattattatggatacccattgcgagtgggtcagaaanagtgttcctattacgtgaannctngacagtgcaagtttggtgcaacttgtaaattccatcatccacagcctggcaggcgtccaagttctagcaccatcaccagttcct

SEQ ID NO: 36978 - DNA, 241 bp, Glycine max
  unsure (1)..(241): unsure at all n locations; Clone ID: 701117747H2
tactactcacactcactgcagatctnaatccatggctaccattgttagcatcaaggcccgccagatctttgacagtcgtggcaatccaaccgtcgaggtggatttgacatgctccgatggtacttttgctagagcgctgttccaagtggtgcatccactgggatttatgaggcccttgaattgagagatggaggatctgactaccttggaaagggtgtatcaaaggctgttgacaatgtga

SEQ ID NO: 36979 - DNA, 243 bp, Glycine max
  Clone ID: 701117749H2
ggacaacatactggtgttacacatgcaggcagccaatctggcttgaagggagggaagccatttgcccctactgtgacggaggctttgtgcaagaacttaatgagctgcgaggagttgcgcgccaacacggcttctcatcgcggatggaagatgctcatcaaatgcctgacattatggatgctgtaagagctgttatggagcaaagaggttctgaaccgagaattcgggttagagatgctgttg

SEQ ID NO: 36980 - DNA, 242 bp, Glycine max
  Clone ID: 701117750H2
gcgaaagaacaacagcaacaacaatcagtgctcctcaagcaaggaagacgctgacatgaatagcaaccaccttcggtttgaagaagctgacgaggctgtcgacgagagttccaacctcgaccaatccatgtgcgcatcgaagaatccgatgataaaaccagcgccgactattacttcgattcctactctcattttggaattcacgaagaaatgttgaaggacagtgtgagaaccaagacata

SEQ ID NO: 36981 - DNA, 242 bp, Glycine max
  Clone ID: 701117751H2
ggaaactctctaccaatccacaactgatggcaggaagattgtcgacgtgctcctcgagcaaaacattgttcccggtattaaagtcgacaagggtttggtaccccttgctggttccaacgacgagtcatggtgccaaggtcttgatggtcttgcctctcgctcggctgcatactaccagcaaggtgcccgtttcgccaaatggcgtactgttgtgagcatccccaacggtccctctgctctgg

SEQ ID NO: 36982 - DNA, 240 bp, Glycine max
  Clone ID: 701117752H2
ctgagagttaggtccatggctgaggaagagcaaccaagtcagcctgcgaccccagttacaccaccaccagcagaacccaaaccacagccagtctctactccttcaccaaaggtgagcaccaagttttctgatgtgttggcgttcagtgggccagcacctgagaggatcaatggaagtcagccatgattgggtttgtgggtgcaatggcagtggaagtagccaaagggcaaggtgtgtttg

SEQ ID NO: 36983 - DNA, 239 bp, Glycine max
  Clone ID: 701117753H2
cagtgttgagggtttatctcggaggcttttctatcttgctcttccaccttcagtatatccatcagtttgcaagatgatcaagacttgttgcatgaataaatctgatcttggtggatggacacgtgttgttgttgagaaaccttttggtaaggatctagaatctgcagaggaactcagtactgagattggaaagttgtttgaggaaccacagatttatcgtattgatcactacttgggaa

SEQ ID NO: 36984 - DNA, 242 bp, Glycine max
  Clone ID: 701117754H2
gcaaaattgaagagatttaagacctctgtcttttctgttgaattagattccataatcttccattagtttccattctgccactttgctacaaagttcttctcctctttggaacacgcaattttaggcctatgcatttcagcaagttctgcaaacaaaattgagagttttactgtcaatgaggttgaagcactgtttgtgctttttaggagcatcagcaattctattgtcaatgatggactgct

SEQ ID NO: 36985 - DNA, 200 bp, Glycine max
  unsure (1)..(200): unsure at all n locations; Clone ID: 701117755H2
ttcgccgtcgcattttccggcgaggtttctctgtttngtttaaccgaaatggaggatccgtacgttctcggttggattctgtgctccgtcctgagnctcttggcgctctacagcctggncttcggcggagcgggccgtcgccgcgcttcgccggagaagaggaacgagttatcggagaccgtgacgacttccgccggaga

SEQ ID NO: 36986 - DNA, 240 bp, Glycine max
  Clone ID: 701117756H2
ctcgattcttcgttctagggtttgaaaagatgaacatttgtggttgttgggtttcatcaatgaaattgcccttcctcgggtggcgcttttcaaggccttttacctctctctgttcttcttctttttcgccacgcttatgaccattcaaagttgttcttctccttcttcttcagcctccttatcaacgtcagagtcgaaagagatgaagaaggaagcttcaccttggttaattgttggcct

SEQ ID NO: 36987 - DNA, 238 bp, Glycine max
  Clone ID: 701117757H2
gttggcacttgtggctgcaattccgtgccaggaccgtggattacatgtccattttaccattcccaggaattactcctgggctgctgcaatcctctcacttcacgaaaggatcgtggaggagtcgaagaaacgggagcggaagaattcttgtggcttgcttaaggagattcatcagattgagaaatgtgctagagtgatgaatgatttggctgattctgtccacttcccattgacggag

SEQ ID NO: 36988 - DNA, 237 bp, Glycine max
  Clone ID: 701117758H2
cttttaggcagttccttgagattgtagtaaacatgaagtttgatgaagaacctaactattccaggctaatatctttgtttgatggtatgcttggaccgaatcctgcattgaggccaattaacactgaaggtgtcaaaaggttgggcagaagaggggtagattgaatattgaggaagaggatgattcacagcccaaaaagaaggttcgtttgggggttcctgctacacaatggatttc

SEQ ID NO: 36989 - DNA, 238 bp, Glycine max
  unsure (1)..(238): unsure at all n locations; Clone ID: 701117760H2
accctactcattctccatacctcaacgaagaggttaaagagacggcaacactttgctgtccgccttgaccgagcagagcttcgtcttggccctcgattttgccctaaagtactctcagtcacaacagacacnnnnnnnnnnnnnnnnnnnnnnaatggcaccgaagcagaccaaggctgagaagaagatcgcttacgatgcgaantgtgcgacctaatggaggagtacggccagatcc

SEQ ID NO: 36990 - DNA, 222 bp, Glycine max
  unsure (1)..(222): unsure at all n locations; Clone ID: 701117761H2
ctttctcttcttcaacccctagcttaacnnttatgctctaaaaccctccctttttcaggtttantgggagagcaaaaatgctcgtattgtttgaancaacccgcgggttttgccntttaaagtgctggatgaaggcaagctttctaaagttgaggacttgtggaagaacttttccagtggcagatactgctagacaggtggtcaagttgaaagcattttcta

SEQ ID NO: 36991 - DNA, 240 bp, Glycine max
  Clone ID: 701117762H2
gtttgctacatttgatatgccttgtcattgctttagtaagtgtgtcgcttgtgcaagcagaagatgcgtataagtatttcacatggacggtgacttatgggactcttatcccttggctagtccccagcaggttattcttatcaatggttcagtttcctgggcctagacttgacttggtaactaatgaaaatgtaattctcaaccttatcaacaagctggacgaaccatttttactcactt

SEQ ID NO: 36992 - DNA, 241 bp, Glycine max
  unsure (1)..(241): unsure at all n locations; Clone ID: 701117763H2
gctttctgcaccttcttcaccctctcttctaagatgtccttcatccctgcttctgaattctagggttagggttttccatacaatanccaaccccacacgcccanctttccaagcttcaatcttttcactcaaccaacgcaatctcactccaatggatcttcccagaaacgtctcctccgctgccttggtgggagacaacgttcggccagaccatttgccaattgactcagatgctagaatc

SEQ ID NO: 36993 - DNA, 240 bp, Glycine max
  Clone ID: 701117765H2
ggaggcactgtggcagaagtcctaggagtgtaaaacagagacgcaaaatgaagacgatcttgtcgtctgagaccatgaatattcccgacggcgtgagcatcaaggttcacgctaaggttatcgaggttgagggcctcgtggaaaactcgtgcgagacttccaccatctgaacttggacttccaacttattaccgacgatggcggtaaaaggaagctcaagattgattcttggtttggttc

SEQ ID NO: 36994 - DNA, 219 bp, Glycine max
  unsure (1)..(219): unsure at all n locations; Clone ID: 701117766H2
gggacaagtgatcggtgtccacagantagaggagtggaagnnacatctcaagaagggagaacgagtccaagaaattgattgtggtggattttactgcttcttggtgcggtccagccgtttcattgccccaattcttgcagagtttgctaaaaagttgccgaatgtcaccttcctcaaggtggatgtggatgaattggagactgtttccaaggagtgggg

SEQ ID NO: 36995 - DNA, 211 bp, Glycine max
  Clone ID: 701117767H2
ttgttgtttgtgtgtttgttttttctctcacctgaaaatgtcttgctgcggtggtaactgtggttgcggaaggcctgcaagtgcggcaacggctgcggaggctgcaagatgtacccagacttgagctacaccgagtcaaccaccaccgagaccttggtcatgggagtggcaccagttaaggctcaattcgagagtgctgaaatgggtgttc

SEQ ID NO: 36996 - DNA, 240 bp, Glycine max
  Clone ID: 701117768H2
actccacccaaccaaccaccttcttaattaataaccgtcgtcgtttcaatctcgttacacacctcaaaacgcagcggcacactcactagaatgcaagccgtttcgctctcacctttgtcgtttagggattcttccgacgagttcgctggaaagttcgaacacgatttcatggccaacctcaaaatcaacgaagagaaagtcgaaaacgaaaacgaagagaagcataacgaagatgagata

SEQ ID NO: 36997 - DNA, 220 bp, Glycine max
  unsure (1)..(220): unsure at all n locations; Clone ID: 701117769H2
ggtcaagcaagaatccatttatagactcatgatgattcttcnnggtagcaacctttctactaccaaacctcaaataggtagccctaatcctagtcctccttcgaatggggaattgttccttcaaacaggtcgccaactaaagattcgattgatgggggtgttgatttgaattcaagagcagtagcagtaccatcacttcttgaagaagatgttgaatttg

SEQ ID NO: 36998 - DNA, 239 bp, Glycine max
  Clone ID: 701117770H2
attgtatggagtgaattctggcaagtaattttggatctagacaaaagcttggggggtttgaaggattcatcaggattgatgggtaagaaggtttttgatctttaccattttaatgggattgccaaatcggatctgaatggaagtcaagtaaattctgggggcgaaactccactgcaaagaccccggctcacaaaattgagagtttcagttcccccaaggtggacgcctgaggaatttat

SEQ ID NO: 36999 - DNA, 229 bp, Glycine max
  Clone ID: 701117771H2
aaataatcaagttttgaagaaagaaatcttcactcactatgctcctctgctgcaatagtacggtaaaatgaatcactgtgttccagatttcgaaacccaaatggacgacgacttagaattctcattcccgtctcaaagaaaccctccacgcaaaacgacgagatcatggaactgttatggcaaaacggccaggtcgtgatgcaaagccagaaccaacgacccttcagaa

SEQ ID NO: 37000 - DNA, 237 bp, Glycine max
  Clone ID: 701117772H2
gttccctgtgattgcagtgtctaaggctttaaaaatcttaaggaaaaggggtcactgggttcgtgtaattcaagtagctaagtggatgttaagcaaaggtcaaggagcaacgatgggaacatatgacaccctcttctggcatttgatatggacaagagggtagacgaggcagaatcgttgtggaatatgatcatacatgcccacatgcgctctgtctcaaaaagattgttttctagg

SEQ ID NO: 37001 - DNA, 179 bp, Glycine max
  unsure (1)..(179): unsure at all n locations; Clone ID: 701117773H2
gaganattttttagaacaatggaggcatcaaagatgaagtttttcttggttttggtgattgccatgttggcgatggtagcaactggggtttcagctgctgaggcacctgccccaggtccttcatccgatgccancgccttctttgtacccatgctcttgctctctctttgttcttgcat

SEQ ID NO: 37002 - DNA, 236 bp, Glycine max
  Clone ID: 701117774H2
gatcagaaccgttgaatcaagttgaggaagatggcactagtctctggaggaagatcaacactgaaccctaacgcccctctttacattcctgccgcgtttcgccaagtggaggatttctctccggaatggtggcagctggtgacgacgctgacatggtaccatgactactggctaagccagcagcacgatgagggagccttctacggcgaggacgacgggtttgatggcaatgatgt

SEQ ID NO: 37003 - DNA, 214 bp, Glycine max
  Clone ID: 701117775H2
gttttctcaacatactctgacaaacagcctggtgtgcttatccaggtctttgagggtgaaagagcaaggaccagagataacaatttgttgggcaaatttgagctatctggcattcctcctgcacccaggggtgttcctcagattacagtgtgcttgacattgatgccaatggtatcttgaatgtctctgccgaagataaaaccactggccagaa

SEQ ID NO: 37004 - DNA, 226 bp, Glycine max
  Clone ID: 701117776H2
cgaatatcttgttgtttggagcgatccgagaaaaactctgtaaacatgttggtttaccaggacctccttacaggtgatgagcttctctctgactccttccgttacaaggaaattgagaatggaatgctgtgggaagttgaggggaagtgggttgttaaaggagcagttgatgtagacattggtgcaaacccttctgctgagggtggaggagaagatgagggagttg

SEQ ID NO: 37005 - DNA, 227 bp, Glycine max
  Clone ID: 701117777H2
cgaatatcttgttgtttggagcgatccgagaaaaactctgtaaacatgttggtttaccaggacctccttacaggtgatgagcttctctctgactccttccgttacaaggaaattgagaatggaatgctgtgggaagttgaggggaagtgggttgttaaaggagcagttgatgtagacattggtgcaaacccttctgctgagggtggaggagaagatgagggagttga

SEQ ID NO: 37006 - DNA, 235 bp, Glycine max
  Clone ID: 701117778H2
ggtgaacctgcttttagtgttctggtttcaagatttcttttgggtgagagctttcctgtgccagtctatctgtctttaattccaatcattggtggatgtgcacttgctgctgtgactgagctcaatttcatatgatcggttttatgggggccatgatatcgaatttggcatttgtattccgtaatatcttttcgaaaaagggcatgaagggaaagtctgttagtggaatgaatta

SEQ ID NO: 37007 - DNA, 243 bp, Glycine max
  unsure (1)..(243): unsure at all n locations; Clone ID: 701117779H2
ctttccattgattgagcgaaatgnttgtttgttctgagatgcanttnccattgggtggaagaaatnctcaacctttagtcgananagcaaggatctgagtgagtgagcgatcatgtgtngtggtgcgattatctccgacttnattgccagcgggtacccgccggcggggngcagcgcgtgaccgccgacatcctgtggccgaattgaggaagcggttntncgaagtcgctgctggaacgatga

SEQ ID NO: 37008 - DNA, 255 bp, Glycine max
  unsure (1)..(255): unsure at all n locations; Clone ID: 701117781H2
caaaatcctactnnnncgctaggnngggnnananagagcnacanagagagcgtnaggagaactctggtgagaaatggcagtctctacactcgcanncttcancatcantncgcgcctcgcacttgangctntcatctcgtcctcaatncagactgcttttcctccaatgaaaaaccccccaccggttnccccanatcgacgacgtgaacaacaaagagctnaancgcanatcgagacctattcaagggcgacgag

SEQ ID NO: 37009 - DNA, 236 bp, Glycine max
  unsure (1)..(236): unsure at all n locations; Clone ID: 701117784H2
gtggagataatgggagaaacaaaggacgaagcatacgaggaagagcttctcgattacgaggaggaagacgaaaaggcccccgactccgccggagctaaagttcaacggcgaantaccaagaagggctatgtggaattcacagttcgggattcagggacttccttctgaagccagagcttcttcgggctattgtggactcgggatttgagcatccatctgaagtgcaacatgagtgc

SEQ ID NO: 37010 - DNA, 235 bp, Glycine max
  unsure (1)..(235): unsure at all n locations; Clone ID: 701117785H2
catggccatgcttcgaacagcnctgcctggttgtgatgatgggtcatatagtcgtgtcttcaaggctttaatgcctttggagaaagataaaaaaaagaggataattgaccatatcaacaaaatatcaacattagaagatgtagcttcttgtcagctggcctctgacatcttagtgcaaagatttctggtacctttaaaaggagtgagcttacccatggaaggaagattttaatga

SEQ ID NO: 37011 - DNA, 238 bp, Glycine max
  Clone ID: 701117788H2
gcaacactttccatttccatgtctctgtctcttcttcgtatctactcttccccccaccttctttcctcctctctcttctttccaaccccacctctctcttctttccttcccaaattaccaaatgccccccgcactccccacattgttttatgccaccgtagggacgcctcctcagcttcgaagcagcgagtcccagaagatacagaatacgaacaacccatgaggaccagttacgacg

SEQ ID NO: 37012 - DNA, 237 bp, Glycine max
  Clone ID: 701117789H2
ctaggcactctctattcccattcattgcagaagaagatggaggctcacccctacgtcccacgcgatttgcacttacccggctacgctccctgcttcctttccatgtccaacattctttccgtcttcgcctcctcctcattgcttcatcgtcacttctcgtctggatcttctctgggacgctttaagaaaaccaaagttgatagagtgctgatgtgctggtgggcttcacaggtctca

SEQ ID NO: 37013 - DNA, 234 bp, Glycine max
  unsure (1)..(234): unsure at all n locations; Clone ID: 701117790H2
gcagcagctccgatctgaagacgatgatgaagaagaaggtgcaatggttctggacttgggttcttggttccgtcgttttgaggctcattctcctcttcttccccaaaaatctcaacctctcttctcgcccgaagtctccacccccctcaccagcntccgtcgtctggccgagggttactggctgaagcagtcatcgctgtcaccctatgctggatcaatgtaccatggttcccc

SEQ ID NO: 37014 - DNA, 236 bp, Glycine max
  unsure (1)..(236): unsure at all n locations; Clone ID: 701117791H2
aaaaaacattgcttctaggtacttggtgtccaaaactcgaggatgtccacagcattattcaacaccanacgaacaatanttttntttttaattaaaaataccaancacactagttttctttgtaactttcaaccgaacattttaattaaccatctttcataatctttgaccccaagcattcttccngattttnatacatgctcaatggttctatttttncggttcatgatttattg

SEQ ID NO: 37015 - DNA, 235 bp, Glycine max
  Clone ID: 701117792H2
cacaacacccctcccaaccctctttttctcttaatttctcatcatatcatatctattaatcttacacatatattaagacatagatataatttttttcgttttatttttccctgcatgggctgttaagataagatgtctcgcacgtgctcactgtgcggcaacaacggccacaactcgcggacatgcaccgacggtggcgccgccgcttcctgcggcgggtctcccagggagaacg

SEQ ID NO: 37016 - DNA, 236 bp, Glycine max
  Clone ID: 701117793H2
cttcgttcctcgattctggtggaacccttccaattgcaacctcttcattttagtaacagacccgttagggcttgtccgtttcgccgtggcaaaggagtgaccctccgttgctccagcaatgagacgccgtcgtttcaggacgatcaaggtccacctcaagaagccgtgttgaaggccatttccgaggtatctaaggcagaagggagggttggccaaactacgaacatggttattgg

SEQ ID NO: 37017 - DNA, 204 bp, Glycine max
  unsure (1)..(204): unsure at all n locations; Clone ID: 701117794H2
ggctgaatctagnttctctcaatatctaaggatatagnatctgaacctgaagaaggagttaatcgttttgcagcagcagtataattgtagtgagtgagatggatcattatggttcttctggaggaagctggacgatgatcccaacccacaattcaagnattcaatcccaatgcccaatcgaaccaggaccctaacctctttctt

SEQ ID NO: 37018 - DNA, 238 bp, Glycine max
  Clone ID: 701117795H2
gtttgttttgtgctttagataaaagttctgccaaatcaagaggggttttaagatcatagtgtgtgttttgcaacaatggctaagttctttgctgctatgatcttggcactctttgccatttccatacttcaacagtggtaatggctgctaatgaacaaggaggccacttgtatgacaacaagagcaaatatggaagtggaagtgtcaagagttaccaatgcccatcacaatgctcgag

SEQ ID NO: 37019 - DNA, 262 bp, Glycine max
  Clone ID: 701117801H2
ctatgggaaagtcttacccaactgtgagtgctgattaccagaaggccgttgagaaggcgaagaagaagctcagaggcttcattcgctgagaagagatgcgctcctctaatgctccgtttggcatggcactctgctggaacctttgacaagggcacgaagaccggtggacccttcggaaccatcaagcaccctgccgaactggctcacagcgctaacaacggtcttgacatcgctgttaggctttggagccactcaaggcgga

SEQ ID NO: 37020 - DNA, 260 bp, Glycine max
  unsure (1)..(260): unsure at all n locations; Clone ID: 701117802H2
tgtaacttcaaaacatactcctctgttctctctgtttctcttcaatcttcctgaaaaaacaaaaacacgaaaaattcatcnnnnnnnnnnnnnnnnnnnnnnnnnnnntttcaactaatatggcaattgaaaaccaagacaacactgtcagagaaatcaagccaaagaacaggagaatcatgggtgctggaggccctgatgatgacgacaataggtggccaccgtggttgaagccactgctgaaagagagcttctttgtt

SEQ ID NO: 37021 - DNA, 225 bp, Glycine max
  unsure (1)..(225): unsure at all n locations; Clone ID: 701117803H2
ggggtagtgtcgganntgaagtaactagaananatatagttacaacatcaaccttccattnttcttcatgtttcacttctgctttaagtttgtggctttctactttctctttctagagtaggactaaactcatacactgatcatgggagtggatttaagacaagtggtggcgggtgtcctcaccctcacaatgttcgtcatgctatacacatgatcaaaagagac

SEQ ID NO: 37022 - DNA, 233 bp, Glycine max
  unsure (1)..(233): unsure at all n locations; Clone ID: 701117804H2
gaggcggaaaataatgcagaganantttgagattgaggtanngactgttgacagaactggaactttcttgggttccttatgggagtcaaggaccaatatggcaattacactgctcgaagctggtcttgcaaagctgcaaacctcctttggcagtgacagaattcctgattttcatcttctggagcantgggaacaatctgccaagaagcaaaagctgagaatttgggagaact

SEQ ID NO: 37023 - DNA, 249 bp, Glycine max
  Clone ID: 701117805H2
aaagttcgttgctttctgcttcactggcgaagatgaacggtggtccatctggtttcacaaatgctcccgtcacaagggccttcatcatcgcttcggcgcttttcacaatcttctttgggatccaaggccgtttcggcactctggggttgtcgtatcaggatatttttggaaagattcgcctttggaagttgatcatgtccatattttccttctcgtcaacaccagagttgatgtttggactgtatctct

SEQ ID NO: 37024 - DNA, 249 bp, Glycine max
  unsure (1)..(249): unsure at all n locations; Clone ID: 701117806H2
anaataagcaaganttatcctcttgcagttactaaggttgaggaatctggggagcacactattttagggactggtgagctgtacttggattcaattatgaaggacctgagagagctctattccgaagtagaagtcaaggtagcagatcctgttgtctcattttgtgaaactgttgttgaatctcctcaatgaaatgttttgctgaaacaccaaacaagaagaataaaataactatggttgctgagccat

SEQ ID NO: 37025 - DNA, 252 bp, Glycine max
  unsure (1)..(252): unsure at all n locations; Clone ID: 701117807H2
anaccctaacacctaaaagccagaagaagcgaaatcgtaatcgcaatctagcggatatgaaggtcgtcgctgcatacttgctcgcagtgttgggagggaatccatctccttctgccgatgatatcaaaaacatcctcggcgcagttggagctgaggctgagcatgagttgattganttgctcttgaccgaagtcaagggcaaagacttcaatgagctacttgctagtggaagtgaaaagatttctgcagtgg

SEQ ID NO: 37026 - DNA, 251 bp, Glycine max
  unsure (1)..(251): unsure at all n locations; Clone ID: 701117808H2
gggctcgagccctgccacttttgaaacactcgctatggatcggaganagaaggaggatanacttanagaccttgtgaagtttaagaagggaaaggattnttatgtcnagataggtaaagcttggaagcgtggctatcttntgtacggtcctccggggactggtaagtctaccatgattgctgctattgctaatttcatgaactatgatgtgtatgntcttgagttaaccgcggtgaaggacaacactgagc

SEQ ID NO: 37027 - DNA, 250 bp, Glycine max
  Clone ID: 701117810H2
ggtgggtgcaatccaaggattgatgattcctatagtccgacattttccgcgcaagtgaaataattgacgatgaagctgtccccattctcgatgggcttacgctctacgggcccaagtgggacatcgtaaaacgctgggctgggcgaattaaaaaaagtatcatgctatgcgatccattcattatcacatgagaggagagagggaagaagagaagattttcatcagttgagttgagagaaggaaagggaaa

SEQ ID NO: 37028 - DNA, 164 bp, Glycine max
  unsure (1)..(164): unsure at all n locations; Clone ID: 701117813H2
ctaagttgaanntccgttcgaaccccggggaaatttaatttcccgggaacccgggtaacctggccaggccgtaacccaggcttttcccctcatacgtgaagtncgtattaagacgctttgggcgtaaatncatgngtncataggctgttttccctgttgtgaaa

SEQ ID NO: 37029 - DNA, 254 bp, Glycine max
  unsure (1)..(254): unsure at all n locations; Clone ID: 701117814H2
agatacactaagttatcctcataaatacactctaattaggtggcaagataagtgtctaaccttagtaacattgccacatattgtgttcattttggaattgtgccactaaaattctattcaattcatctatggctgcctcttcttatgctatgcaatcaatcctggnaaaccctttgatccgcatttccagcgggtctagggtgaaccaatttggggttcctgctttgcacatgagaaggatgttggctgagagt

SEQ ID NO: 37030 - DNA, 259 bp, Glycine max
  Clone ID: 701117818H2
gacaaatttcacgtgaaattaaccaggacataatacaatcaaacatcatttaagaatctggatcacaattttccagggtcaagcaatccaactctgaaaagacagacaccattgaacatatgtgaatgagatcaataaaaattacaccagagttggctaacacttaggcctgtccatcatttccttcccaacactgaagtttgaacacactcccaagacaatcaatcagtttaccaagcaaccatttcaacgcccattt

SEQ ID NO: 37031 - DNA, 255 bp, Glycine max
  unsure (1)..(255): unsure at all n locations; Clone ID: 701117820H2
gnccaatcagcaaaccgtcgattaccccagcttcaagcttgtcatcgtcggcgacggtggcacaggaaagacaaccttcgtgaagaggcatctcactggtgaattcgagaagaaatatgaaccgaccattggtgtggaggttcatccgttggattttttcacgaactgtggaaagattcgcngcctattgttgggatactgctgggcaagagaagtttggtggcctcagagatggatattatatccatgggcaat

SEQ ID NO: 37032 - DNA, 251 bp, Glycine max
  unsure (1)..(251): unsure at all n locations; Clone ID: 701117821H2
tcctctttctccctcacaacatccaattnnatttcgctgcgatngctgcatctgttcaatcttccttttttactttaccaaattcaaaaccatctcttcgatcccttttccaatttggatcgaggaacaatgagataatatattggattatgcattttccccaaataataggaaaagaataatagataaaacaaaatattagcggtgttgatcgatttgcaaatctcagagtaaaaccttgtgctgcgatt

SEQ ID NO: 37033 - DNA, 255 bp, Glycine max
  unsure (1)..(255): unsure at all n locations; Clone ID: 701117822H2
ggnntntaaggccatcatccantacagntcttcttcgtcgtcatgngatgcgatntgtcncctacatatgntgtgtttgtcagcttccgcggtgaagacacgcgcaacaacttcactgcttttctctttgatgctctctttgagaatggcatccatgccttcagagatgatacacatcttcagaaaggcgaatccntagcacccgagctgcctactggccattcaagnctctcgcctttccttgtggtncnctcc

SEQ ID NO: 37034 - DNA, 252 bp, Glycine max
  Clone ID: 701117823H2
gggagctcaagattttatggacaagaggggaaccagaaaggcattgtcctcatatccaagaggataaccaatcaattgacagccaccattgatgggcacttcagcagcagatttgtaccctcccaagtattagtttatagaagagtgatagggtctcttaggacattatgtaacagttgtaactttgttgtaacagaatttcagccaaatggtatgacagcatagacttaaaagttaaatcagcagctaaga

SEQ ID NO: 37035 - DNA, 250 bp, Glycine max
  unsure (1)..(250): unsure at all n locations; Clone ID: 701117824H2
aaaggccgttagtgttactattcgtaaaatggccactcttgttctttaccaattctttctcaaactnttgctcctaatttcagtctttcagctttcctttgctgctaggagactcaaccagctggttcaggaccagtcacagttactccattaccacaacggtcctcttctatacggcaaaatcgccgtgaacctaatctggtatggtcacttcaaaccatcccaaaaggccatcatcaccgatttcgtt

SEQ ID NO: 37036 - DNA, 253 bp, Glycine max
  unsure (1)..(253): unsure at all n locations; Clone ID: 701117825H2
ggnatgcacgagtgttccatctgtcacaagagtttccctaccggtcaggccctgggtggccacaagcgctgccactacgacggcgggaacaaccacagtaacagcaacgccaacggaaacaacagcagcngcgccactacctccgacggcggcgctgcctcctcctcccacacgctccgtgggtttgacctgaaccttccggcgccgctgacggagttctggtcgccgatggggtttgatttcgggaagaaga

SEQ ID NO: 37037 - DNA, 251 bp, Glycine max
  unsure (1)..(251): unsure at all n locations; Clone ID: 701117826H2
gnaaaacaaaggagggaggttcttaccaacagcggattctgacagaatacctgaaaggcattgaaactagagcagaggagattgttcaagtgctccaggggagaccacaatagcattttcttcgaacttgaaattggcttggcaattggatgtcatgagccaaaacattgttctgcatgatggtagaagtggtttattatttgaagaacagatcaagctaatacactaaggtggagaaatatagatgatca

SEQ ID NO: 37038 - DNA, 251 bp, Glycine max
  unsure (1)..(251): unsure at all n locations; Clone ID: 701117827H2
attaattatgatgaaatcttcttcacatctttctgcaatattcctattgttctttctccttactgccctatccccttcggatggagtttcattctcttcattcctaaagcaattaaaacagaagctggagaagagtcccaccctaaaagatttcctgaaacccaccactataggggatatttattatacgttgaatttcacagaaatcttctcttccgaagagagaagcgcannnnggtgtctctcatcaa

SEQ ID NO: 37039 - DNA, 252 bp, Glycine max
  unsure (1)..(252): unsure at all n locations; Clone ID: 701117828H2
anacgacggacaaattgttaatgttattgacaccccaggattatttgatttgtctgtcggatctgagtttgttggtaaggaaattgtcaaatgcattgatttggccaaggatgggatccatgctgtcattgtagtgttctcggttagaacacgcnttactgaggaagaagaaactgctcttcggagcttgcagacattatttggaagcaaaattgttgattacatgattgtggtctcactggaggagatgaa

SEQ ID NO: 37040 - DNA, 246 bp, Glycine max
  Clone ID: 701117829H2
cgaatatcttgttgtttggagcgatccgagaaaaactctgtaaacatgttggtttaccaggacctccttacaggtgatgagcttctctctgactccttccgttacaaggaaattgagaatggaatgctgtgggaagttgaggggaagtgggttgttaaaggagcagttgatgtagacattggtgcaaacccttctgctgagggtggaggagaagatgagggagttgatgatgcagctgttaaggtt

SEQ ID NO: 37041 - DNA, 238 bp, Glycine max
  unsure (1)..(238): unsure at all n locations; Clone ID: 701117830H2
ggggttagctacagtgaatccatantccatggcggctgcatnngcaactacaactgcaacactgagactgccaaatgttggagaaagcaaaagtttgcagctccgtaagtgtaaccctaatcccaataagcttaaggttatgcgggggtttggcggttgttctggagtggcagtgagtgtgagaattggaattggaagggttcgggcgagttcgagttcttcttcttctgaggaggag

SEQ ID NO: 37042 - DNA, 240 bp, Glycine max
  unsure (1)..(240): unsure at all n locations; Clone ID: 701117831H2
agaccggcgaggtgttaccggcaantaaagaacaaaccgtacnccgaaatcccgtttctgcacgcggcgtgccggagccgaagatccgaatctacgacgtgggaatgaagaagaaaggcgtggacgagttcccgttctgcgtgcacctggtctcgtgggagaaggagaacgtctccagcgaggctttggaggcggcgcgcatcgcatgcaacaagtacatggccaattcgccggaaaaga

SEQ ID NO: 37043 - DNA, 263 bp, Glycine max
  Clone ID: 701117832H2
gctcgtgcctctagggttatcatatctccatttccatttcctctctctcagtttccaagaatcttaagctatgggaaagtcttacccaaccgtgagcgctgattaccagaaggccgttgagaaggcgaagaagaagctcagaggcttcatcgctgagaagagatgcgctcctctaatgctccgtttggcatggcactctgctggaacttacgacgtgagcttcgaagaccggtggtccttcggaaccataaagcacccctccg

SEQ ID NO: 37044 - DNA, 256 bp, Glycine max
  unsure (1)..(256): unsure at all n locations; Clone ID: 701117834H2
cnactttattgtctcaactttttttgatcaagttgtgacactatcaacccatccatatggttgccgggtgatacagagagtactggagcattgcaaagaccctaacacccagcaaaaagttatggatgagattttaggagcagttagcatgttagcccaggatcagtatggcaattatgttgtccagcatgtacttgagcatgggaaacctcatgagcgatccgccattatcaaggaattagcaggaaagatagtt

SEQ ID NO: 37045 - DNA, 180 bp, Glycine max
  unsure (1)..(180): unsure at all n locations; Clone ID: 701117835H2
ctcatggcgccgccgnnaccaccaccctcnttcacttcaattttatcaagcccaagcccaaccccaagccnnntaagagcttcgacgacgtcgtgagaaactcccctcgtgccagccgcgatttcggttcctccgccgccgtcgaccaaggtcttcccttgnctcgcccctccgtcttct

SEQ ID NO: 37046 - DNA, 251 bp, Glycine max
  Clone ID: 701117836H2
gtgtggtattcttgctgttcttggttgttctgatgactctcgagccaaaagggtccgcgtgcttgagctctctcgcagattgaagcaccgtggccctgactggagtgggctccatcaacatggtgactgctttttggcacatcaacggttagccatagttgatcctgcttctggggatcaacctctctttaacgaggacaaatccgtcattgttacggtaaatggagagatttacaaccatgaagagctca

SEQ ID NO: 37047 - DNA, 249 bp, Glycine max
  unsure (1)..(249): unsure at all n locations; Clone ID: 701117839H2
agttctggaaaacttctgaagtatggttcgcttgttattgctacaggatgtacggcatcaaggtttccagaganaattgggggaaacctacctggtgttcactatattcgggatgttggagatgccgatgcactaattttatcgttggagaaagcaaaaaaggttgtagttgttggaggtggttatataggaatggaggttgctgcngctgctgttggttggaaacttgntacaacaatcatattccca

SEQ ID NO: 37048 - DNA, 248 bp, Glycine max
  unsure (1)..(248): unsure at all n locations; Clone ID: 701117840H2
ggcctccctggttgcgagtctccagagagaaaatcaggttctgcactctgtctttttggcaaagagttgcagaacaacaataacaatgtttgtnctttgaacngctggggccaagaggggcttctctgatgccattgacacctcttctgtcactgagggatctcaaggagctctgctttgttctctccaagaggtggcaatgttgggaagcctcttattggtttagacactcaaactaacaccaccat

SEQ ID NO: 37049 - DNA, 249 bp, Glycine max
  unsure (1)..(249): unsure at all n locations; Clone ID: 701117841H2
gttactttctgcattcttagaaacatcttttcnaatcttcttctcacantaatttgaattcnccatgaccttctgtggtggtgcctttgttaagccaaactattctgtgtccccatgccacaaacacaaagctcnaagtccataccaaggtggcagantcaagttctgtgtgagagtttcagcaagtggctcagctgatgaggagaggactattataaggaaagagaaagttgggtggaagatcattac

SEQ ID NO: 37050 - DNA, 248 bp, Glycine max
  unsure (1)..(248): unsure at all n locations; Clone ID: 701117842H2
atatgatggaaccatttgttgcccaaacacatgtgtcatgggtgggaatgctgagtccacgtttaggaattgcaagtcaaaagcaagtaaaaatggagtgaagtcagaggaatcggttcatactggtttgaagttggtgattattctacaagtgattctggttatntttctggtatttctctggagttttcgttgccgcaccagatctagaaggnnacgttaccggtgaattgaaagagacctgcagt

SEQ ID NO: 37051 - DNA, 246 bp, Glycine max
  unsure (1)..(246): unsure at all n locations; Clone ID: 701117843H2
tttctcagatgtgtcagattcttccgagtacttggcctgggactttgtngccggtggcatggaagaatactatgttgatgatagtgacagttatgatggaatgtgggatgatgaagggaggctagatgagcttcagttcgggttttatgaanggatagaagatgcaggaatgtattggcctccatctccataagaagctatagctgctgcatgcattactgtgatcaattgtatgcttttctactc

SEQ ID NO: 37052 - DNA, 68 bp, Glycine max
  unsure (1)..(68): unsure at all n locations; Clone ID: 701117844H2
ttcnnccgngcaaaaatgaactcggacacgacgtngtattngtnctacagttgcacgcnctncgttca

SEQ ID NO: 37053 - DNA, 256 bp, Glycine max
  unsure (1)..(256): unsure at all n locations; Clone ID: 701117848H2
gcagccgtcagcaaaagctcgtggaattgctagcaatggcgaggatcaaggtttacgagctgaggcagaagacgaaggctgatctgctgaatcaactgaaggacctgaaggcggacttgccttgcttcgtgttgctaaggtcaccggtggtgcccctaacaagctttccaagataaaggtggtgaggttgaacattgcccagttttgacggtgatttctcagaagcagaaggctgcgatnacggatgctacaanaa

SEQ ID NO: 37054 - DNA, 253 bp, Glycine max
  unsure (1)..(253): unsure at all n locations; Clone ID: 701117850H2
gggagcgtgtcgtcntggcggcgagggttgaaggattttgatgatagagaganggtggtgcgttctcccaagggtttgagggatgtgaagtctccgtcgtggtcgaaggattctgtttctgagagcgagcaatcgaagaagaggtctcttcttctccgagaccattcagagatggtaactccgtcaagtctaagtccaagtnctcccacttggtccaaggattcggagagcgagctgtccaagagtgttgagg

SEQ ID NO: 37055 - DNA, 252 bp, Glycine max
  Clone ID: 701117851H2
gtcaaagctgataaactaacaagactcagtctcacgaggtggagtgcggattggaaaagtgctactgttctttatgagcaggcagctaatgggtttagagttgccaaggactatgagaatgctaaaatagcatatgagaaagcttcgaaaggacaagaaatgctttcttcaccttgggatgcggctaagcacatggaatccgctgctgctctcgcaaaggatctaagacactggcaagaagttgtggacttc

SEQ ID NO: 37056 - DNA, 254 bp, Glycine max
  unsure (1)..(254): unsure at all n locations; Clone ID: 701117852H2
gcagtttccggtgcatctcatcgtctccgaaaatgaacgacgcagatgtctcgaagcaaatccagcagatggtgcggttcatccgccaggaagctgaggaaaaggccaacgagatctctgtctccgccgaagaggaattcaatatcgagaagctgcagttggtcgaagccgacaagaagaagatcaggcaagaatacgaacgcaaagagcgccaagttgaaattcgcnagaagattgagtactcaatgcagctg

SEQ ID NO: 37057 - DNA, 248 bp, Glycine max
  Clone ID: 701117855H2
ttctaaagtgcttctctcatttgtgaaaggctttgacagagtagtcattgatgtgcattactacaatctttattccagcaaattcaacaacatgactgctcaacaaaatattgactacataagaaatgaacgagcctcagatcttagtggcgtctcttcctcaaatgctctgagttttgtaggggagtggactggtgcgtggagcataaaaggtgcgtctaaggaagacctcaaaaggtatgcccaag

SEQ ID NO: 37058 - DNA, 248 bp, Glycine max
  unsure (1)..(248): unsure at all n locations; Clone ID: 701117857H2
gngcgacccctgcttacgctggaagatggtgaacttttagatggtggatttgatatgtctacaggtggagtttgtggatatttacatgatgttatctacataacatgctttgtgcaagtcatgtccatcgtctctggaaagttctggtacacatatcttgtgataccggcttttggagcataccagtccttggtttcattaaangatttttgccagggggttcagaggatcatttgaagatgaaaaga

SEQ ID NO: 37059 - DNA, 248 bp, Glycine max
  unsure (1)..(248): unsure at all n locations; Clone ID: 701117858H2
tctttttcaatcggtgcttcctccggcggcgcgtggnagtgtctttngcgcgtgattcctagttccccgcttacctatgctttcgctcgacccgcattgtagagttcacgccggaganacggcggaatctcaccggacgatcgtgatttcgcatctcatggcttccgcctaccggaacgaacctaattggccacggcatagaagcggtggagctggattcatgggaaaagtacctttctctaacccta

SEQ ID NO: 37060 - DNA, 240 bp, Glycine max
  unsure (1)..(240): unsure at all n locations; Clone ID: 701117860H2
aaaaaaatgaccaagatcttctttgtattgctgttatgtctgatcatagcagantcttctgggtttgtgaattgctttgatgttgaaaagaaggaaaagattggaatatttgagctcaataaaggtgacctttctttgaangtcaccaactggggtgcttcaattttgtccctggtgattcctgataagaatggaaagttgagtgatgttgttctggatatgattctgttaaggatacac

SEQ ID NO: 37061 - DNA, 258 bp, Glycine max
  unsure (1)..(258): unsure at all n locations; Clone ID: 701117861H2
gttcgccacaatgcacttccccattctctttctctttctcctaccttcactcttcaagctttcacattcaaccacaatactagtagatggatcttccgagtggaagagccccacagtttccatcggtgactcgatcattttcaagcacaagcaacactacaacctctacattttcaagaacgagaaagccttcaagctctgtaacatcactcaaggcactcttctcaggcaaccccttnaacatggcatccatctcgg

SEQ ID NO: 37062 - DNA, 258 bp, Glycine max
  unsure (1)..(258): unsure at all n locations; Clone ID: 701117862H2
gtttgttttctttgttgctgcagtagttttggtagcatggccatgccatggcgcaggctaccaaaggttccctctccgaatgaaaactggctatggtgagcgttcttcggaggtaaaatgcgcaagttttaggcttgctgtggaagcacacaacatccgagcncttaaaaccattcctgaagagtgcgttgaaccaacaaaggactacattaatgggcgaacaatttagatcagactctaaaacagttaaccaacaag

SEQ ID NO: 37063 - DNA, 255 bp, Glycine max
  unsure (1)..(255): unsure at all n locations; Clone ID: 701117863H2
gaaaattcatccaacattttctaggcagccaaacacttcccaccatgaacagatccgctnctcctcgctgcctccgtcgccgccgcgtcggccaccgctgcttccctttcctcctccgcaaaactctctctccaggacggtggggctcagagagancacggcggatcctcgccggcgggagtttcggcgtcaacggagaagttcgcgacgcggttcgaaggttgggtncattganagctgattatgcganaagat

SEQ ID NO: 37064 - DNA, 261 bp, Glycine max
  Clone ID: 701117864H2
ggtccacaaaccttgactggtacaagggtccaactctgcttgatgcacttgaccagattagtgagcccaagaggccctctgacaagcccctcaggcttccccttcaggatgtgtacaagattggaggtattggaactgtgccagtgggacgtgttgagaccggtgtcttgaagcctggaatggtggtgacttttgcaccaactggactgacaactgaagtcaagttctgtggagatgcaaccatgaatctcttacagaggc

SEQ ID NO: 37065 - DNA, 250 bp, Glycine max
  unsure (1)..(250): unsure at all n locations; Clone ID: 701117867H2
gncgcgtttcatttgatcagatcataacaatggtgtccgaaggcactctcctgggcatgggtaaccctctcctcgacatctccgccgtcgtcgatgaagacttcttaaaaaaatatgatatcacctcgaacaatgcgattctgcggaggacaagcacaagcctatgtatcaagaattggctgagaaatataatgtggagtacattgctggaggtgccactcagaattcaatcaaggttgctcaatggatg

SEQ ID NO: 37066 - DNA, 250 bp, Glycine max
  Clone ID: 701117868H2
cggagagagacgtcgcaatggggaggaggcctgcaaggtgttatcggcagataaaaaacaagccataccccaaatcacgcttttgccgtggtgttcctgatcctaagatcagaatttatgatgttggtatgaagaagaaaggtgttgatgagtttcccttctgtgttcatctggttagctgggaaaaagaaaatgtttcaagtgaagcattggaagctgctagaattgcatgcaacaaatatatggcgag

SEQ ID NO: 37067 - DNA, 248 bp, Glycine max
  unsure (1)..(248): unsure at all n locations; Clone ID: 701117869H2
gncatgccatggcgcaggctaccanaggttccctctccgaatgaaaactggctatggtgagcgttcttcggaggtaaaatgcgcaagttttaggcttgctgtggaagcacacaacatccgagcntttaaaaccattcctgaagagtgcgttgaaccaacaaaggactacattaatggcgaacaatttagatcagactctnnaacagttaaccaacaagctttcttttatgctagtgaacgcgaagtcc

SEQ ID NO: 37068 - DNA, 243 bp, Glycine max
  unsure (1)..(243): unsure at all n locations; Clone ID: 701117870H2
aaacaaaacaccacaacatgggaggtcataggcagaagaagtcttctnccggtttcttctctattttcaacattttctcatcaaggaagcccagaggagggtactatgatgcctctgattcggggcgcaaggtctggcctagcgattacgacaaaggtaactggggtgttgctgaacccaatancgacatgaaagctgaagcttcatgcgaagtatgagaaacgtgtttcagaatctgcactc

SEQ ID NO: 37069 - DNA, 247 bp, Glycine max
  unsure (1)..(247): unsure at all n locations; Clone ID: 701117871H2
gtgaggatgagccagaagcaatggagcaagatgatgatgattctganacagataggaacttgagttttaaagagcacagaaaggcccactatgatgaatttcttaaagtcaaagagctgcaacagaggggttctcttgaggatgaaagtgacgaagataataattctgaacccagtaaggtggagaaatgtgagtcgtctcactgagtgatagtgtaaaanagatggacatcgngggnaannagtct

SEQ ID NO: 37070 - DNA, 111 bp, Glycine max
  unsure (1)..(111): unsure at all n locations; Clone ID: 701117872H2
gnagatgctgtagccaccaaaattttcctctnaaagtaggtcattactcagaagccaataacaataagnaatggcnacancagnagggaangttnnttgtacngcnactng

SEQ ID NO: 37071 - DNA, 244 bp, Glycine max
  unsure (1)..(244): unsure at all n locations; Clone ID: 701117874H2
gngaaatcgtaatcgcaatctagcggatatgaaggtcgtcgctgcatacttgctcgcagtgttgggagggaatccatctccttctgccgatgatatcaaaaacatcctcggcgcagttggagctgaggctgagcatgagttgattgatttgctctgaccgaagtcaagggcaaagacttcaatgagctacttgctagtggaantgaaaagattctgcagtggctggtggtggtgcagcggttgc

SEQ ID NO: 37072 - DNA, 247 bp, Glycine max
  unsure (1)..(247): unsure at all n locations; Clone ID: 701117875H2
ttganacattatcattctaagtgtagggatgaaattatgaatttacttggtgatggagaatccagtattaaatccataatcaatgcaattgatgaaaaagtctggagttttgatctgagtactgtaccgaatttgacccctcaaagagatgcagaaccagaagagtctgnatgtgcagatttacatataagccctcaagctaaacctgtcctcagagtccaagaggaatagtcctagtgcactgtca

SEQ ID NO: 37073 - DNA, 249 bp, Glycine max
  unsure (1)..(249): unsure at all n locations; Clone ID: 701117876H2
tnacaatggacacacagacaatattttgtacaagttttcttgggttaacgttgcggctctgcatganacaccaccttctgtgcctcaaccaaaaatctcccttctaaccttattcttcttctcttccttcaccatcattgcgcatgcaattgttcctcanaacgaaaccttcaaatttgagaactcaggtgaacttggaccctacatcgttgagtacggtgcagattacagaatgataagcatcttcaa

SEQ ID NO: 37074 - DNA, 250 bp, Glycine max
  unsure (1)..(250): unsure at all n locations; Clone ID: 701117877H2
tatgataaaacccccttgttgagagctattcagcaaccaaaggncttagctacaactaaagctaggagagtaattccattgctgttgctgttattagttcattttcacaaaatggaagagagcatcaagncgaaacacactagtctnatccatgaactaatccaaggnaaggaactaacaaagcagcttagtanccaccggtttcatcttctccaatgtcccatcaaaccaatgaattgtttgttgagaa

SEQ ID NO: 37075 - DNA, 252 bp, Glycine max
  unsure (1)..(252): unsure at all n locations; Clone ID: 701117878H2
atttggaaagcggttctcgcccgctgtatccgatgatgcttgagagccccgaactgcgctggtctttcatcagaaaagtatactccataatcgccatacagttgctcgtaaccatcgtcgtcngcgcngtcgtcgtcaccgtccgcccaatcagcgtcttcttcgccaccaccggcgccggattggctctctacatcgtctcatctttgtccccttcatcacattgtgtccactttactatactcccagaag

SEQ ID NO: 37076 - DNA, 234 bp, Glycine max
  unsure (1)..(234): unsure at all n locations; Clone ID: 701117880H2
cggttganttgaagatgaaaatcactgtcatgactgctgatgaacaaatcatcacgttagatgtggatccccacgaatctgtggaaaacgtcaaagcattgctcgaggttgagacaagtgtgcctctcaacaacagcagcttctgnttaatgggaaggnagtgaggaantctgagaagttgagtgctctnggtgttaaggangatgattngccatgatggtgtcnggtgctggc

SEQ ID NO: 37077 - DNA, 254 bp, Glycine max
  unsure (1)..(254): unsure at all n locations; Clone ID: 701117881H2
ttttgtcttngttccattatctagttctcaattctcttcaccctttgcctctgaaagaaatgggtagtcttgaagcggaaagaacaacagtaggattggcagcaaganacccttcagggattctctccccatacacctacaatctaagaaacacaggccctgatgatgtttacattaaagttcactactgtggagtttgccattctgatctccaccagnttaaaaatgatcttgggcatgtccaactatcccat

SEQ ID NO: 37078 - DNA, 250 bp, Glycine max
  Clone ID: 701117882H2
ggtcaatccgcgatctcgtaatttttcatcatataatagcaaagatgagctaaccattgaggaagaagctgagaggaaagtcggatggctattgaagacgatattttttgtgactgcaggggtagcaggataccatttctttccttatatgggagataatttgatgcaacagtctgtttcacttttgcgtgtcaaggatcccttgttcaaaaggatgggagctctagattggctcgttttgcggtagatg

SEQ ID NO: 37079 - DNA, 244 bp, Glycine max
  unsure (1)..(244): unsure at all n locations; Clone ID: 701117883H2
ggaccagctaaacncaatcaacgcttgctctttgctctttgcantgtttactatttttcgctgactccggcgagatccgngtcacttctncagcatcacttgtctnagtnccgtccaccggcgntgcnatgnnatcnggctccncaatntccgattctgnaanncacacnctcnnggnccnnatcgaanatgcgngccacgacannactccccntnggagaganggcgagttcaagagttgtgg

SEQ ID NO: 37080 - DNA, 247 bp, Glycine max
  unsure (1)..(247): unsure at all n locations; Clone ID: 701117884H2
gcaggaatggaggtcgcaacaaacacggccgcggccacgtcaagttcattcgatgctccaactgcggcaaatgctgccctaaggacaaggctatcaagaggtttctggtgaggnacattgttgaacaggctgcagtcagagatgtgcaggaggcttgtgtctacgaacaatacacgcttccgaagctgtatgtgaagatgcagtattgtgtttcctgtgctatccactctcatgttgtgagggttcg

SEQ ID NO: 37081 - DNA, 248 bp, Glycine max
  unsure (1)..(248): unsure at all n locations; Clone ID: 701117886H2
anctttctctctcattaatattaataatattattgtgttacattttttctacaacaatggagttgggaagcatactccattttcttcaggataagagcattttgatcactggagccaccggttttcttgccaaagttttgttggagaagatattgagggtccaaccaaatgttaagaagctttaccttcttttaagaactgnngatgccaaatctgctactcatcgcttgcacaatgagatcataggg

SEQ ID NO: 37082 - DNA, 245 bp, Glycine max
  unsure (1)..(245): unsure at all n locations; Clone ID: 701117887H2
atgggattgttgcttatggcttgtaatcactcaaccttgctttcaatgacttctccaactctcaattctcatttatctttgctgagtttgtgagcctcncacacctcaacttgtcctcttcttactttaaaggtgaaattagaatcacttgatctctcttttaattacaccagttaaagtggaaagaaagcagttggatgagttttaaggcagcttgtctggatgaaacagatatgtcttcaatt

SEQ ID NO: 37083 - DNA, 86 bp, Glycine max
  unsure (1)..(86): unsure at all n locations; Clone ID: 701117888H2
taactcccaaaacaatggcttgctttgcaatgctgctcttattcttccacaccaancanatcgagatttngngnggggnggtagng

SEQ ID NO: 37084 - DNA, 245 bp, Glycine max
  unsure (1)..(245): unsure at all n locations; Clone ID: 701117889H2
gtaganacgatgaaggaactatgggcacaaatggggtcactaatggccactattgtgttcatgtacacaatctttgagngcttcttccctccacacttgcgtgaaaaacttcaagcctatactcaaaaactcaccaaccatttcaacccttacatccaaataagcttccctgagttctcaggggaacgactgaagaagagtgaagcatacacagccatccaaacctacctgagtgcaaatcatcc

SEQ ID NO: 37085 - DNA, 245 bp, Glycine max
  unsure (1)..(245): unsure at all n locations; Clone ID: 701117890H2
gaatcaagcagagtttcaaatgaaattgcaaatttatcacatgcaacagaacangtttccttgggaaacaagagctctacgccaattcgtcatgctagtgagccaagaactaacgttgaaggaaaaacagtgtccagtctcgaggtgcccagcacagaaagtgagtttaaggccatggctgcagatgcttctgtttttacctttggagatgatgaagactacgaaagtgattgaactacaacaac

SEQ ID NO: 37086 - DNA, 245 bp, Glycine max
  unsure (1)..(245): unsure at all n locations; Clone ID: 701117891H2
gtttttgttgatcctgtgaacttatggctgacggggtggttctgttggatacatgggccagcatgtttgggatgagggttaggattgcattagctgaaaagggtgttgagtatgaatacaaggaagaaaatctcaggaacaagagtccttgcttttgcaaatgaacccaattcacaagaaaattccagttctgatccataatggcaaaccaatttgtgaatctgcanttatagtgcagtacattg

SEQ ID NO: 37087 - DNA, 248 bp, Glycine max
  unsure (1)..(248): unsure at all n locations; Clone ID: 701117892H2
ggcattccgtaaaggcggtgaagtcatggggctggaagttcttggtgccaccatgtacacctgtgttgtgtgggtggtgaattgccaaatggcattatcnatcagttacttcacttacatacaacatatattcatctggggaagntgntattctggtatatattcctcctggcatatggagccatagacccttccttctcaaccacagcctataaggtcttcattgaagctcttgcaccagccccatt

SEQ ID NO: 37088 - DNA, 255 bp, Glycine max
  unsure (1)..(255): unsure at all n locations; Clone ID: 701117895H2
tnccatcacagacaaagaagcaattaattcaccagctacatagtttttctgtttgaagtgctacaaacaatggcagctactcaggaagatgtgacgcttttgggagttgttggaagcccgtttgtgttgcagggtccagattgccctcaaattgaagggaattgantgcaaatttttggaagaaaatttggcaaacaagagtgatctactttctcaaatccaaccccgtttacnannnnnccccngtgtttatca

SEQ ID NO: 37089 - DNA, 254 bp, Glycine max
  Clone ID: 701117896H2
ttgtctcaaagattaagccatgcatgtgtaagtatgaactaattcagactgtgaaactgcgaatggctcattaaatcagttatagtttgtttgatggtatctactcggataaccgtagtaattctagagctaatacgtgcaacaaaccccgacttctggaagggatgcatttattagataaaaggtcaacacaggctctgcctgttgcttgatgattcatgataactcgtcggatcgcacggcctttgtgccgg

SEQ ID NO: 37090 - DNA, 281 bp, Glycine max
  unsure (1)..(281): unsure at all n locations; Clone ID: 701117901H2
atcgaaactcagaagtagaaagaaacacaaatcacaatcgctatggctaggtacgaccgagcaatcaccgtgttctcccctgacggccatctcttccaggtcgagtacgccctcgaagccgtccgcaagggcaacgccgccgtcggntccgcggcaccgacaatgttgtcctcggcgtcgagaagaaatccaccgccaaactccaagactccaggtcggtgaggaagatagtgaatctggacgaccacattgcgctgggctgcgcggggttgaaggcgacg

SEQ ID NO: 37091 - DNA, 267 bp, Glycine max
  unsure (1)..(267): unsure at all n locations; Clone ID: 701117902H2
gtanactngatggtgnaaaggtanncnatcangnantnnaaaccatgantancnttcttaagctgtacctctgntcatgcnttatatgtnnnaatactgnaaactanaatgcatttcttttcactnntgttgaccctcatgaatctncngtgctaaagggtgaaactttttataggtgaagttatggtgtgactggccnttctggcctgatgatggcntgtgccggttgcngggctgtagtgtgtgtgaatgccctgaaagcgagtt

SEQ ID NO: 37092 - DNA, 276 bp, Glycine max
  unsure (1)..(276): unsure at all n locations; Clone ID: 701117903H2
atcggcttctgcttcaaggaaggagagcttgttattctctatcaacaagtaaaatgtcaggtgaagagggtgtcattgcagttgagcnnnnnnnnnnnnnnnnnnncatcccaggcgagccaatggatatcatgactgccttacaacttgtgctcagaaaatctctggcttatggtggtttgtcgcgtggccttcatgaaggtgcaaaagtgattgagaagcatgctgcacaactctgtgttcttgcagaagactgtgaccagcctgactatgtta

SEQ ID NO: 37093 - DNA, 273 bp, Glycine max
  unsure (1)..(273): unsure at all n locations; Clone ID: 701117905H2
ggaattagatgagacaagccaagtgtacccgaaatttgtgtttgatgattacatgaagctctatgctggtctcaagtttcaggctaaagagccaaggtttgaagctatgaaggccaatgcaagcgtggttgatgtgggggccatagccacagtttgagtctcaggctctcagcatgtggaagcaacatgggaacggttatgtgtgttttctgttaataataaacaaaggctactcagaacatattagtgtttggtgtccntgggataattggg

SEQ ID NO: 37094 - DNA, 272 bp, Glycine max
  unsure (1)..(272): unsure at all n locations; Clone ID: 701117906H2
atcggcttctgcttcaaggaaggagagcttgttattctctatcaacaagtaaaatgtcangtgaagagggtgtcattgcagttgagcnnnnnnnnnnnnnnnnnnncatcccaggcgagccaatggatatcatgactgccttacaacttgtggctcagaaaatctctggcttatggtggtttgtcgcgtggccttcatgaaggtgcaaaagtgattgagaagcatgctgcacaactctgtgttcttgcagaagactgtgancagcctgatat

SEQ ID NO: 37095 - DNA, 270 bp, Glycine max
  unsure (1)..(270): unsure at all n locations; Clone ID: 701117907H2
gcaggaagtggtagaagggttcaagttcgaacagaggcacgggaaagagcgcgtganagtggcgcgcgtgtggaagacgaggcaggggcagcacttcgttgtggagtggcgcgtgggcatcactctcttctcagactgcgtcaactcgtatctccgcgatgacaactctgacatcgttgctactgataccatgaaaaacacagtgtatgcaaaagcaaaggaatgctcagacatactctctgctgaggactttgctattttgctgctaaa

SEQ ID NO: 37096 - DNA, 269 bp, Glycine max
  unsure (1)..(269): unsure at all n locations; Clone ID: 701117908H2
gtcccactttcttctccttttagggtttcctttttgtttctcctttccagatctgcatcttccattttttaggattaagcggtgagattcgtgaatctgagaaatgtcggattcttctcgggaggagaatgtttacatggcgaaattggcggagaggccgagcgttacgaggagatggttgagttcatggagaaggtagcaaagactgtggaggttgaggagttgacggtggaggagagaaatcttctntctgtggcttacaaagaacg

SEQ ID NO: 37097 - DNA, 270 bp, Glycine max
  unsure (1)..(270): unsure at all n locations; Clone ID: 701117909H2
aagcagtggtcgttctgagcaatatttgtcgatctggaatgaaccttctcgcatgctgcatgatttcatccccacaagttctgcacgttaatttgtttctgctacttctgctgcagggaagcaataaatgagtttgcacctgcgatgctagaagtatctangttgttggccagcattctagcacaaaacctgggctacccagaggatgcacttgaaaaactttgtgatgctggtgcatgctttctgagattaaatcactatccatgctgc

SEQ ID NO: 37098 - DNA, 268 bp, Glycine max
  unsure (1)..(268): unsure at all n locations; Clone ID: 701117910H2
gnagcctcaggaggagaaggatgtctcacaggaagttcgagcacccaaggcacggttcactgggatttcttcccaggaagcgtgctgctcgtcacaggggaaaagtgaaggcattccccaaggatgacccatccaaggcacccaagctcactgcattcttgggttacaaggccggtatgactcacattgttagagaggtcgagaagccaggatcaaagcttcacaagaaggaaacttgtgagcctgttacaatattgagacccctcca

SEQ ID NO: 37099 - DNA, 270 bp, Glycine max
  unsure (1)..(270): unsure at all n locations; Clone ID: 701117911H2
atttttcaaggtctatttctctctttntattattcttntntttctttttatgtgcccatctttttttttnctggtgaagaatttttngttttngagaaaaaaaaattactttggagttttgtggtanggtantgaatctataacaagagggcttcttgtngtaggtaaaggcaggtcagacttgtatttgcngatggttnanaccttactgtngtatttgcctataactttgtntcttgntaatgtggaatatcctgggaattaaccatt

SEQ ID NO: 37100 - DNA, 269 bp, Glycine max
  Clone ID: 701117912H2
gttatcctcataaatacactctaattaggtggcaagataagtgtctaaccttagtaacattgccacatattgtgttcattttggaattgtgccactaaaattctattcaattcatctatggctgcctcttcttatgctatgcaatcaatcctggcaaaccctttgatccgcatttccagcgggtctagggtgaaccaatttggcgttcctgctttgcacatgagaaggaatgttggcctgagagttaggtccatggctaaggaagaaca

SEQ ID NO: 37101 - DNA, 122 bp, Glycine max
  unsure (1)..(122): unsure at all n locations; Clone ID: 701117913H2
attaaatncnactnaaaacatccctcagcagcaaaggaaatggactaaaaccctatagctgctgagggatgttttaagttgcatttaatttataacgaagtttataaactgtttatggttta

SEQ ID NO: 37102 - DNA, 278 bp, Glycine max
  unsure (1)..(278): unsure at all n locations; Clone ID: 701117915H2
gctagcggcttcttctctcgcattccgtggagatctagtgctgccaaacctcgctgaaaattanggtttcgtttcggaggtagacgaagatgttcggaagggcaccgaagaaaagcgacagcatccaggtactacgaaaatccctcggcgtttcgaagaacgctttcgccggatgatttaaagaaggcttacaagaaaggccgncattaagaaccaccctggacaaaagcggtgatcctgggaaggttcaaagagcttgctcaagcctatgaggttct

SEQ ID NO: 37103 - DNA, 253 bp, Glycine max
  unsure (1)..(253): unsure at all n locations; Clone ID: 701117916H2
ggnacgggttgctcaaatggagcanngctcattccgatgggactcgccccacttcgcaatttaagtgaggaggatcggagatggtttatggaagcgatgcagtcacagaccattgatgttgtaaaacgtatganagagatcacacttgtgatgcaaactccagaacaagtcttgaaagaccaaggagttacccctgcagacattgaagatatgttggatgagttncnngagcatgttgagtcaattgacatgg

SEQ ID NO: 37104 - DNA, 276 bp, Glycine max
  unsure (1)..(276): unsure at all n locations; Clone ID: 701117917H2
aggcttcggactacnnngaaacgtaggatgcannngnactnaannncnnngtntcaggacccgacgttcgttgcggatngcatgnctggtnctgctatgtatgaactcgtgcgtnttggtcatgataatctcattggtgaaattattcgtctcgaaggggattctgctaccatccaagtttatgaggaaactgctggtttgatggttaatgatncggtcttttcggtacgcnacaagccttgtccgtggagtttnggttcnggaattttgggggnt

SEQ ID NO: 37105 - DNA, 274 bp, Glycine max
  unsure (1)..(274): unsure at all n locations; Clone ID: 701117918H2
ctaaccctacaattcgccgatccttccagttagggtttttcgctctcagcgaaaacggtgtatatagaaaccctatctattcctccgatgcaccaggggaattgaatatatataataagaaaanggcaaaanaaagaggtgaaaaaaattggtctggtaaattgttaattctgttgttttgcgtgtttctggactcaggagctgcgctgttcccggggaaaagntgtacagtatgaacactaaatgcagtgctggggattgccattgatgtcca

SEQ ID NO: 37106 - DNA, 272 bp, Glycine max
  unsure (1)..(272): unsure at all n locations; Clone ID: 701117919H2
gagaaagggagaaaaaaaaaggtcttattattctgtcatctttcacattaatgatcaatatacaccgatcagttcttcattttattcattgtntnnnnnnnnnnnnnnnnnnnnnnnnnnngatactttacagaaatcaatgttaagcaacatatcaagcatggctgtgttaattgaacacagtttccttgaagcatacggtggagaatcaagagatggctcttcaactgcaaaattctccactggggacataatatcctgaactcagcagt

SEQ ID NO: 37107 - DNA, 273 bp, Glycine max
  unsure (1)..(273): unsure at all n locations; Clone ID: 701117920H2
gcgagatcttgagtcgccgatttgaaaagatgagtaagcttcagagtgatgctttgcgtgaagccatnctcaggaatcatggccgattccaaggagaagaatcgcaaatttgtggagaccatcgaactccaaatcggtttgaagaactacgatccacagaaggacaagcgtttcagtggctcngtcaagttgccccacatcccttcgccccaagatgaaaatttgcatgcntggtgatgctcagcatgttgaagaggcagagaagataggact

SEQ ID NO: 37108 - DNA, 270 bp, Glycine max
  Clone ID: 701117922H2
cacctcattccccaagtgatcctacagtgaagaaagttgctgacaaattggcaagttttgtggctaaaaatggaaggcaatttgaggatgtaacacgtcaaaaaaatcctggggatacacctttcaaatttttgtttgatgagagatgtgctgaatacaagtattatgaatatcggcttgctcaagaagaaaatgctcttgtgcaatcaagggaatcacaggtgcctcgtaatgggggtacaagcacttcatcttccaaacagactaatg

SEQ ID NO: 37109 - DNA, 268 bp, Glycine max
  Clone ID: 701117923H2
gttgccaacactgacagtcttctctatgatgatgaattcagcaaatacctcaaggattatccggacaatttccgctacaatcgagccctcagcagagaacaaaagaacaagagtgggggcaaaatgtatgttcaggataagattgaggagtacagtgatgaaatcttcaaactcctggataatggggcccacatatatttctgtggtctgaaagggatgatgccagggatccaagatacgctgaagaaggttgctgagcaaagaggag

SEQ ID NO: 37110 - DNA, 268 bp, Glycine max
  Clone ID: 701117924H2
atagaagcagcactatttttgaagatgctacccctgagatggtgagggacttgttttgggatgacgagttccgaccgagatgggatgacatgcttgcaagctcttcaatcattgaagagtgtcccactactggtactatgaaagtgcagtggatacggaaggtgaataacatttttaacttgatttaagtgtatttaattaattggtgtcttggttcagtgtgctaatgggatgctaattatctgtgcaacagtttccctttttctgt

SEQ ID NO: 37111 - DNA, 269 bp, Glycine max
  unsure (1)..(269): unsure at all n locations; Clone ID: 701117925H2
gggagccccactcaaccaccacacctctcctcgttcacgctacccctttctgctcttcttctacctttcaagttttaaaagtataaagatggcagagacattcctatttacctcagagtcggtgaacgagggacaccctgacaagctctgcgaccaaatctccgatgctgtcctcgacgcttgcctcgagcaggacccagacagcaaagttgcctgcgaaatntgcaccaaaaccaacttggtcatggtcttcggagaaatcacgacca

SEQ ID NO: 37112 - DNA, 267 bp, Glycine max
  Clone ID: 701117926H2
gtcaactgggcattggtcactcactcattcccaagtcctaaaccctctgccaatttgaacggcgaactccctcattcttcttccgcaatctccgttctactatctatctgattagaagatagcgtaaattctaagcaaaatattaccgtgttctttagcgtgacccaccttcataaataataaaaccctatgcaactgcaccatcctcgtgttctcttcaaacctctcatcctctctttctctttctgatcacaatgtcgaccttcg

SEQ ID NO: 37113 - DNA, 271 bp, Glycine max
  unsure (1)..(271): unsure at all n locations; Clone ID: 701117927H2
agaatcagaggnagtaccagctgtaagtaatnagacttctggatattatattgggagattcnaaaactttgaaaacannanactactgcncctgttgataaaactgtagaagttgagggagagtcaaatgccgaaagggatgatgattatggagattcatgggaaactgaaganataccaaaagtggtctcactagtccccatcttgcagcatcagatgggcccagcatcattcaggagcctagtgggagaagtggatgatgggagggaat

SEQ ID NO: 37114 - DNA, 255 bp, Glycine max
  unsure (1)..(255): unsure at all n locations; Clone ID: 701117929H2
ctttgatcctagtggcaccattttagtgacagcttccattcagggtcataatntaaatgttttcaagataatgcctgcaagtgggactttgtcagcttctgttgttggtcgttcttatgtgcatttgtacaggttgcaacgtggcttactaatgcggtnatacaagatatcagtttcagtgatgacagcaagtggattatgattagttctcaangggaactagccatctatttgccataaatcctcaaggaggac

SEQ ID NO: 37115 - DNA, 266 bp, Glycine max
  unsure (1)..(266): unsure at all n locations; Clone ID: 701117930H2
tggtcgatggaacaatgtangcaatggaagtcggcaaaatggatccgtaacctcgggaaaaggattggctctganggctgggcacgggggtcccagtcccgaacccgtcggctgtcggtggactgctcgagctgcttccgcggcgagancgggtctcgcgtgccggtcgggggacggattgggaacgggcccttcngggcctcttnccccgggcgtcgaacagtcaatcagaactggtacggacaaggggaatccgactgtttaat

SEQ ID NO: 37116 - DNA, 258 bp, Glycine max
  unsure (1)..(258): unsure at all n locations; Clone ID: 701117931H2
atgggatcaacatctgctgtgtgccttgcctttatcttccccggtgctattgttctaagggattcttacggtatatcaacaagaagggacaaaattattgcactgtttatggttatactagctgcgataacaagtgtgattgctatctccaccaacatatacaaagnctttcagtagnacctcgnaaattgtgttntcntttnccttctctaattttccccntatataaaaattttngatcaagggagagagagagac

SEQ ID NO: 37117 - DNA, 149 bp, Glycine max
  unsure (1)..(149): unsure at all n locations; Clone ID: 701117933H2
aaacaggngagagaaagtnaaaaaatacctttnntttagagagagaaagagaaggtagccctataaaaatatgcaaccagataaggacttttgcagctgagacactgcaaaaagagtnattatattgngagngaaaaganagattatct

SEQ ID NO: 37118 - DNA, 227 bp, Glycine max
  Clone ID: 701117935H2
gctttgttcgcaggcagtaacttccagtgagcggcggatgtatttgtttattgtaattggtagatgcatttgaggtgcatcttgtgaggtcatctgaaagatggatcttgagggcaaaaaatttgggaagggcaatagagaatttggaagtactcgtgatctcataaatcagaatagactttggctctactataaattctctgcaagaagtcactcccagtgtcaat

SEQ ID NO: 37119 - DNA, 265 bp, Glycine max
  unsure (1)..(265): unsure at all n locations; Clone ID: 701117939H2
gcagatttcaagatgaagttcaacattgcgaatcccaccaccggttgtcagaagaagctggagatcgatgatgacctgaagctgcgagcattttgggacaagaggatctcacaagaggttgttggtgatgctctgggtgaggaattcaaaggttatgtcttcaaaattactggaggttgcgacaagcaaggatttccaatgnagcaaggagtgttgacccctggtcgtgttcgcctcttgctgcatagaggaactccttgtttcg

SEQ ID NO: 37120 - DNA, 267 bp, Glycine max
  unsure (1)..(267): unsure at all n locations; Clone ID: 701117941H2
gagggtgtgaacaacatcaacattaacatctccgattcgtataagaagaatcgcattcaggtctctaacaccaagaagcccctcttcttctacgttaatctcgccaagagatatatgcaacagcatgatgaggtcgagctctcagctctaggaatggctattgccacagtagtaactgttgctgaaattttgaaaaacaacggacttgctgttgaannnnnnatcacgacatcaactgttgacataaaggatgactctagaggtcga

SEQ ID NO: 37121 - DNA, 265 bp, Glycine max
  Clone ID: 701117942H2
attaattttcactgatgaactcccaaagaagatacatgagtcaacaaaactaaattcatgtacaccaggttgttctacacatatatgctggaaacctttccgaattttcaaattcacatttgacccatcaggttgagtcaggtaaccatcaacattgtgagtggagataacattgacccagtagcctttttgaacaaaaaggattccttctaagtcctcagcaccaacatttacatctatgaagctctgttcccagcaccaatta

SEQ ID NO: 37122 - DNA, 263 bp, Glycine max
  Clone ID: 701117943H2
agactggttgctgtggttagtacataagcaatactagtctgagtgcaattctgagatcaaattgctatcacaagaaagggcatgaggctccttgcaaatatgggggcaatctgtatatggcactgtttggacttgttcagattgtaatgtcattcataccggatctccataacatggcatgggtttcagttgttgccgcacttatgtcctttacatactcattcattggactaggacttggcatagcaacagtcataaaaaat

SEQ ID NO: 37123 - DNA, 265 bp, Glycine max
  unsure (1)..(265): unsure at all n locations; Clone ID: 701117945H2
gtatagggataagagagcagcaagtaatgatggatgcgctgataaangtgcagttcaacgcaccaaaaccatnaaaagcgcttctttcgtcttatggcatgtctgangaggaagaagcactgcgtcaaaggccaacatcgttgatttctttcccaccccatgacaattcttcgcttcttctgccccttctttatactcttcttcactccaatagcttctgtgcaagcgttcaccggaacctatggtataaattatggtaggattg

SEQ ID NO: 37124 - DNA, 266 bp, Glycine max
  unsure (1)..(266): unsure at all n locations; Clone ID: 701117946H2
gtggcttagtccaaaacctcacacgactccctttgttgcgttgtgtttcctttcgccgaaaccctcgctcgcaacttctacagaatccctttcaccatggatattnaggaggacatccgttctttacagctcgattcagcagaagacaataatggggtggtaaatgcagaggatggaaggccagaagaagttgagaaatctgataagatggatgaagatccaaagcaggatgttgaggctgagccaaaggctgttgaggctgagcc

SEQ ID NO: 37125 - DNA, 267 bp, Glycine max
  Clone ID: 701117948H2
ctcacattctcaactgcggatatggggaagaaactcatgcatgcggttcagtatgatagctacggtggaggacctgctggcttaaagcatgttgaagttcccatacctactcccagcaaagatgaggttttgattaaggttgaagcagctagtataaatccatttgattggaaagtacagaaacgcatgttgtggccacttttgcctcgcaagttcccacatatacctggcactgatataactggagaggtcacagaggttggtcaa

SEQ ID NO: 37126 - DNA, 271 bp, Glycine max
  Clone ID: 701117949H2
gggaaagttgtccttgaactggcagctaaaagcaatcttaagcctgttactttggaacttggtgggaaatccccctttattgtgtgtgaagatgctgatgtagatcaggctgttgagctagcccattttgctttattctttaatcagggacaatgttgctgtgctgggtctcgaacatttgtacatgaaagtgtatacgatgagtttgttgagaaagcaaaggctcgtgctttgaagcgtgttgttggtgatccattcaaggggggaatag

SEQ ID NO: 37127 - DNA, 271 bp, Glycine max
  unsure (1)..(271): unsure at all n locations; Clone ID: 701117950H2
attgggcagttaggcgaattcaaagatctttgaacacctccttctttattacctttttccaacacctacctcttcngnactctttctccctctcacacactcgtcctagngttgattttcccttccttctcccantactcctccattattttataacactctagcttcgttacttgcccnnntctctgcccagctacatgcttgtgtaagaactaataagccagctgaagaatgngggatcgaatgactcccccgancagagaaaggactt

SEQ ID NO: 37128 - DNA, 134 bp, Glycine max
  unsure (1)..(134): unsure at all n locations; Clone ID: 701117951H2
ggcacctctcacttatctctncttcccacttttcctcctactntgccttaacacactcccgaagcacacnatacncctccnaaacganactcctngangtcgtttcctcccgcnaaaacgcacacaatgccgtt

SEQ ID NO: 37129 - DNA, 257 bp, Glycine max
  unsure (1)..(257): unsure at all n locations; Clone ID: 701117952H2
ggaacaacagctacatttgtnttggttgatggatggactgtcactgttgcatctgttggggattcccgctgcatatcagatactcagggaggtgtagtttctctcttgacagttgatcacagactggaagagaatgcagaagagagggagcgtgttactgccagcggtggtgaattaggaagactcaatgtatttggagggcaatnaggttgggcctcttcgctgctggccatgtggatngtgcctatnccagntca

SEQ ID NO: 37130 - DNA, 261 bp, Glycine max
  unsure (1)..(261): unsure at all n locations; Clone ID: 701117954H2
ctctctatcactctcccatggcttcctcttccctctttctctcactctctctnaccctttgccttgtttcctctctctgctatgctcacaaatcttccttaaccctacctgtgacaaaagacgattcaacccaccaatacntaanaaccctctcttatggcacccctgttgagtctgcaaaattcgtgcttgatctcggaggctcaatctctggggctgantgtgcatcagnacnacnccatcttcnacccttgccnnatt

SEQ ID NO: 37131 - DNA, 262 bp, Glycine max
  Clone ID: 701117955H2
gtccccttttactcatttccaaactttagcctttaaattctcaagttttcagtttgagttaatcctcatctctttttaagtttgttgtctctagtcgaacccatgccagtctcagctagtccagcgccactgttaggggatcgactgtgtgaaaatggatttgagtgtgttaaaattctccctgccaccaatgatgcacatggaggagtcattgtggacttaaaggagcctttgcactccgaagtttttgctactttgctta

SEQ ID NO: 37132 - DNA, 73 bp, Glycine max
  unsure (1)..(73): unsure at all n locations; Clone ID: 701117956H2
ggggaggtngcatgtttctgtcggagctcctttgtgccancctttcatgtctccttnctacattacnnaccgg

SEQ ID NO: 37133 - DNA, 261 bp, Glycine max
  Clone ID: 701117958H2
ggaccttgcagtggtcaagcttgcataggaatagactatttgcttgttgaggagaagttctcatctgctgtgataaaactattaaagaagttcataagaagattttatggtgaaaacccagtggagtcaaaggtaatttcaagaataataaacaagcagcactttgagagattatgcaatcttctcaaagaccctcttgttgcggcttccatcgttcatggtggttcagtcgacgaagaaaacttgttcatgagcctacaa

SEQ ID NO: 37134 - DNA, 252 bp, Glycine max
  unsure (1)..(252): unsure at all n locations; Clone ID: 701117959H2
ccaaagttaaggtccctctggctttgtttggaggttcaggaaactatgcctctgctttgtatattgcatctgtgaaagccaatgcagtggaaaaggttgagactgagcttctgcaatttgttgaggcagtaaagaatagtcccatattttcacagtttataagggacttgtctgtggctaaggatgttagagtgaaagttatccaggatatttgtggggnnnnnnagttttcggatgttacaaagaacttcc

SEQ ID NO: 37135 - DNA, 262 bp, Glycine max
  Clone ID: 701117961H2
agcatcactaatccttttcctttgtgtttattttccatcttccattaatatgggtgttgttactcagatttatgatacccctgctgctgtgcctcctactaggcttttcaaagccatgacattagatttccataacctcttcccaaagcttgtggatagcatccacagcattgttttcacccaaggaaatggtggtcctggcaccatcaagaagatcaccaccattgaaggtgacaaaaccaagtatgtgctgcacagagtt

SEQ ID NO: 37136 - DNA, 267 bp, Glycine max
  unsure (1)..(267): unsure at all n locations; Clone ID: 701117963H2
aattaaaaaaaagacaacttcaaaaaagagtgttgctgagcatgacagtgcttctgcctccgttaagtcaaagcaacctgcatccaaganacagaaaactgttagtgaaaagcaggacactaaggggaaaactgcaagcnaaaaacaaactgacaaatcttcaaaggctttggtttnaggatccaggggaaagtaaaagtnataaggaaggccaaggcagaaccccataagcaggacatgctgcngtagttgttgatattctgaagg

SEQ ID NO: 37137 - DNA, 273 bp, Glycine max
  unsure (1)..(273): unsure at all n locations; Clone ID: 701117965H2
gggcttggactgcctggaaacgtaggaggcactggcactgaagaagtgctcatcaggaagagaggtttctctgagactgaaactgaaactgaggaggatgagtctgctaccactgtggatttgatgcttaatctttcttctaaggaannnnnnnnnnnnnnnnnnnnnnnngataagcacaagactttgcctaaggagaagactcttctgcctgcagatcctgctaagcctccagccaaggcacaggtggtaggttgggccacctgtgcggtc

SEQ ID NO: 37138 - DNA, 270 bp, Glycine max
  Clone ID: 701117966H2
ctcactcactcgcaagcaaaaagaaagaatcccaggcgaggagaaagatggaggggaaggagcaggatgtgtcgttgggagcgaacaagttccccgagagacagccaattgggacggcggcgcagagccaagacgacggcaaggactaccaggagccggcgccggcgccgctggttgacccgacggagtttacgtcatggtcgttttacagagcagggatagcagagtttgtggccacttttctgtttctctacatcactgtcttaaacc

SEQ ID NO: 37139 - DNA, 269 bp, Glycine max
  unsure (1)..(269): unsure at all n locations; Clone ID: 701117967H2
aaacagagtaacctctccaatgtccaatccatcaaagcaatttataaccaagtctttctctaccctataatgaagaaagatctatgccactacaccatcacctcttcttagangaanctatnatggcacatcgttacncagaaccccttgctaggcacgctctactgcttagacgatcacatccattgggaggnagaggagcangtagactatnatgtgnacaggnacacnacnaccanggganactaatcctccaatgtggtnttgtt

SEQ ID NO: 37140 - DNA, 262 bp, Glycine max
  unsure (1)..(262): unsure at all n locations; Clone ID: 701117968H2
aacccctcgagaggaacaccaggtatgttgatgctgttcttaccattcccaaaggaacattgttccccatgtgtggtatgnatctggcattcgatcgtcagctgattggacctncaatgtatnttngactcatgggtgatggtcaacctataggacgatacgatgatatgtgggctggatggtgtgtnaaggttatctgtgaccatttgggcttgggagtnaatactggcctccatacntctggcacagcaaancangcant

SEQ ID NO: 37141 - DNA, 257 bp, Glycine max
  unsure (1)..(257): unsure at all n locations; Clone ID: 701117969H2
ctctcnantccaacctanccctgatntcttctcccaccaactncncngtncngcttcctcnatgcatntgctcacttcaagggcaagnaccatgatgagcttattggtcaatgctgcntacattggnactcctggnaaagggtattcntgtctgcttatnagncancaggnnccanttgggcaagcggttgggccagcatcagtntaagngaatgtttngatccnacaggcgngcttctntagggnagctntttttc

SEQ ID NO: 37142 - DNA, 262 bp, Glycine max
  Clone ID: 701117971H2
gttagaggagaaatcatcatggcatcagcagcatctgggtttgtgttgtcacttaatgttgcagctgccaccacaaactcaagggtggtcatgttcaacacaaagaacaacgcttctaggcttgttgtaagggcttcagatgagcctgcagcggcggcacccgccaccgccacacccccagctgaagctgaagctaaaccaaagccaccacctattggccccaagagaggtgctaaggtgaagattcttaggaaggaatctt

SEQ ID NO: 37143 - DNA, 259 bp, Glycine max
  Clone ID: 701117974H2
atctgcttaaaagtagttatccaggagcacatattggacctgagccaacaactgataggtttgttgttgtcatgtctggatctgatgagagaagcgttcctggaaatacttttgctgtccaagcagacatgccatttagtggtcttacaacttttggcacagcatttttgtcaaaatttgtgtgttcacagatgcctcatcctctactggaacacatcacatttgttgacactccgggagttctatctggagaaaagca

SEQ ID NO: 37144 - DNA, 259 bp, Glycine max
  Clone ID: 701117975H2
cattgaatcagctataaaagcattacacaagaagtttcaacccagtgctttcgttgagatgaactaggatgatgttctaaatgctatggtccatttcttttggatgccaacagaatgaaaacctttcatggctgggatcatatcattctcatattatctacaaatataagatgcattgggataaagatggagagggcagaaaacaaggtgctgctgtgttgctagaagaaagaacaatggtacaaggaggtgactgaat

SEQ ID NO: 37145 - DNA, 260 bp, Glycine max
  Clone ID: 701117977H2
gaaaatggcagtgactcttacatcaacactctttctggctttgctatttgctgcttcagcttttgctgctcttcagcctagagtacctgaagcttacctccaaaatgggaactttgaggagcagccaaaccctaaatacctgaagaaaacaaagctctttggtaaatacgctttgcctaaatgggagatcaatggtctggttgagtatgtctctgggggtccccaacctggaggcatgttcttcccagtgactcatggaa

SEQ ID NO: 37146 - DNA, 260 bp, Glycine max
  Clone ID: 701117978H2
gttgctgtggataacatttcaagcggaacagacactgtcataaaggttgatagcgcgaacaagcgtgggagcttgttggaggtggttcaggttctcactgatatgaatctcagtgttagaagagcttatatttcctctgatggagaatggttcatggatgtttttcatgtcacggatcaaaatgggaaaaagtttatgcaagatgatgttgctgaccgcattcaacagtcactgggtccaagagcctctagttttcgatc

SEQ ID NO: 37147 - DNA, 263 bp, Glycine max
  unsure (1)..(263): unsure at all n locations; Clone ID: 701117979H2
cttgtctcaaagattaagccatgcatgtgtaagtatgaactaattcagactgtgaaactgcgaatggctcattaaatcagttatagtttgtttgatggtatctactactcggataaccgtagtaattctagaggctaatacgtgcaacaaaccccgacttctggaagggatgcatttattagataaaagggtcaacacaggctctgcctgttggcttgatgattcatgataactcgtcggatncgcacggcctttgtgccggc

SEQ ID NO: 37148 - DNA, 262 bp, Glycine max
  Clone ID: 701117980H2
aacttgcagattttggattggctagggcttttggaattcctgttaggacatttacacatgaggtggtaacactgtggtacagagctccagaaattttgcttggatcccatcattattctaccccagttgatatttggtcagtgggatgcatatttgcagagatggtaaatcaacgacctcttttccctggggactctgagattgatgaattgtttaaaatattcagaatcatgggtacaccaaatgaagacacatggcctgg

SEQ ID NO: 37149 - DNA, 267 bp, Glycine max
  Clone ID: 701117981H2
gtacactagatggtgtaaaggttaactattatgaaatcgacactacacctacaggaacttgtgctgtttgtgtggttggtggtgaaaggtcccttgttgccaacttatcagctgcaaattgctacaagtctgagcatttgacgagaccggaaaattgggcattagttgaaaaggccaagtattactacatttctggcttttcctcactgtatctcctgattccatacaattggttgctgaacatgcagctgcaaataacaagatctt

SEQ ID NO: 37150 - DNA, 263 bp, Glycine max
  Clone ID: 701117982H2
gccattgtttacttttcattgattgagccaaagctttgtattttctgcgataattttccattgggtggaagaaagtctcaacctttattcgaaagagcaaggatctgagttgagttgagtgatcatgtgtggtggtgcgattatctccgacttcataccggcaggtcccgccagcggggcgcggcgcgtgaccgccgacatcctgtggccgagtttgaggaagcgctctcgaagccgctgctggacgatgatttcgaggctgg

SEQ ID NO: 37151 - DNA, 264 bp, Glycine max
  unsure (1)..(264): unsure at all n locations; Clone ID: 701117983H2
tgaaggtccttgttttcttcgttgctacaattttngtagcatggcaatgccatgcgtacgatatgttccctctccgaatgaacactggctatggtgcccgtactccggaggtgaaatgcgcaanttggaggcttgctgtggaagcacacaacatctttggctttgagaccattcctgaagagtgcgttgaagcaacaaaggaatacatccatggcgaacaatatagatcagactccaaaacagttaaccaacaagcttactttt

SEQ ID NO: 37152 - DNA, 259 bp, Glycine max
  unsure (1)..(259): unsure at all n locations; Clone ID: 701117985H2
gcaacgttagggagtccggagacgtcggcgggggccccggaaagagttatcttttctgtttaacagcctgcccaccctggaaacggctcagccggaggtagggtccagcggctggaagagcaccgcacgtcgcgtggtgtccggtgcgcccccggcggcccttgaaaatccggaggaccgagtgcctcccacgcccggtcgtatcataaccgcatcaggtctccaaggtgaacagcctntggtcgatggaacaatgtag

SEQ ID NO: 37153 - DNA, 260 bp, Glycine max
  unsure (1)..(260): unsure at all n locations; Clone ID: 701117986H2
gtttctctgtctgcttcttcactttctctcgtttcaatcgaaaccaaaacaaaatcatgggcagaaaattcttcgttggtggcaactggaaatgcaatgggaccactgaggaggtaaagaagattgttactactttgaatgaggctaaagtccctggagaagatgtcgtagaagttgttgtgagccctccttttgtgttccttcctgttgtnaaaagtttgctgcgccctgatttccatgtttcggcacaaaactgttgg

SEQ ID NO: 37154 - DNA, 258 bp, Glycine max
  Clone ID: 701117987H2
ctgagatcggagaaccctctctttcttctccttcttcagcagttgaaaataaaaaatggcagatggtgaggatattcaaccactcgtctgcgataatgggacaggaatggtgaaagctggatttgctggggatgctccgagggctgtgtttcccagcattgttggtcgtccccgtcacacgggagtgatggttggcatgggccaaaaagatgcatatgttggggatgaagctcagtccaagagaggtatattaactct

SEQ ID NO: 37155 - DNA, 250 bp, Glycine max
  unsure (1)..(250): unsure at all n locations; Clone ID: 701117988H2
ctctgatgctcttgtcaaaaaaactagctgaacatggcttcaaagtcacttttntcaacacagatttcaaccacaaganagtgttgagtgcaacaaatgaggagggatcagcagtgagattaatctcaatcccagatggtttaggccctgaggatgacagaaataacgtggtcaatttatgttcggaatccttaagcagtaccatgacttctgcnctgagaaggtcataaaggatattgatgcacttgat

SEQ ID NO: 37156 - DNA, 259 bp, Glycine max
  unsure (1)..(259): unsure at all n locations; Clone ID: 701117990H2
ggaggaggaggcggagaaacagaagaagcacttagcaatgctggaacgcctttccaaacgcacccaaagccgttcgcaaaaccccgattcctcatcatcagaatcctccacttcctccatcctttcacgcttcacccacttaaaatcctcgattgantcccaactggcccaatcccaatccatttnctccgacccctccaacctcaaactccacttcaatcaaatctccgaatcaatctccgatttagaaaaattcgtc

SEQ ID NO: 37157 - DNA, 259 bp, Glycine max
  unsure (1)..(259): unsure at all n locations; Clone ID: 701117991H2
ggagtgccagagacttggcctcaccaaagccattggagtcagcaacttctccatcaagaagcttgaaaaattgctctcttttgctaccatccctcccgcagtgaatcaagtagaagttnaccttgggtggcaacaacagaagcttagagatttctgcaaggnaaagggtattactgtnacttcnttctnnanccctgaggnagggtgctagtaggggtgctaattttgtgctggacaatgatgtaatcaaagaattggc

SEQ ID NO: 37158 - DNA, 259 bp, Glycine max
  Clone ID: 701117992H2
cttgtaagcatggagtcctcaaagatctatgcttacctcttcctttgcatgctcttcctctcctccgccactcccattctcggttgtggctactgtggcaaaccccccaaaaagcacaagcctggtaaaacaccaaagacacccacagtacccgttgttaagccaccagtcacaatccctcccattgttaagccaccagtcacaatccctcccattgttaatccaccagtcacaatccctcccattgttaatccaccag

SEQ ID NO: 37159 - DNA, 259 bp, Glycine max
  Clone ID: 701117993H2
cttctttcttcttatatatcgaacatggctaagtatcattcaagtgggaaaagctcttccatgactgctatagccttcctgtttatccttctaatcacttatacaggcacaacagatgcacaatccggggtatgttatggaagacttggcaacaacttaccaacccctcaagaagttgtggccctctacaatcaagccaacattcgcaggatgcgaatctacggtccaagcccagaagtcctcgaagcactaagaggtt

SEQ ID NO: 37160 - DNA, 259 bp, Glycine max
  Clone ID: 701117994H2
gacccatcacagacaaagaagcaattaattcaccagctacatagtttttctgtttgaagtgctacaaacaatggcagctactcaggaagatgtgacgcttttgggagttgttggaagcccgtttgtgttgcagggtccagattgccctcaaattgaagggaattgaatgcaaatttttggaagaaaatttggcaaacaagagtgatctacttctcaaatccaaccccgtttacaagaaggttccagtgtttattcataa

SEQ ID NO: 37161 - DNA, 260 bp, Glycine max
  Clone ID: 701117995H2
gcgatttctcatttctcattcttaacaacacacttcaacaatggccaaaaccttcaaatacatcatcctcggaggaggagtttccgctggttatgcggcgagggagtttgccaaacagggcgttaagccaggggagttggctatcatttccaaagaagcggtagcaccttatgaacgtcctgctctgagcaaggcttacctttttccagagtcccctgctagacttcctgggttccatgtctgtgttggaagtggagggg

SEQ ID NO: 37162 - DNA, 258 bp, Glycine max
  unsure (1)..(258): unsure at all n locations; Clone ID: 701118002H2
annnnntcnttgttacatgccattcattcannatttcaggntggcngctccggccatagtttcncaaactttgctctnatttcttattctccatgccattctcatgtctctggccacatcacagccaaacttcgnnaaacattactgttttgaccaaaatggtaactacactgctaatagtacgtttcaggccaacctcnaataccttggtggccaaactttgcttcccacactgaaatcgatatggttctacaatnt

SEQ ID NO: 37163 - DNA, 299 bp, Glycine max
  unsure (1)..(299): unsure at all n locations; Clone ID: 701118004H2
tgagttcttgtttttccgaaatcctagtgctgatatgctacttcaagagtccgagcttgataaaaatctcataaagaaggctaaaattttccattatggttccatcagcttgattgatgagccatgcaagtctgctcatctgctgctaatgagatttgnctaaagaatctggttgcattcctttccgtaatgatcccaaatttgagaattggcacntaatgggccaatctggctggaaggctggctcggggatgggcaataaatggagttatnatgggggttcaaaggccggattgttc

SEQ ID NO: 37164 - DNA, 274 bp, Glycine max
  Clone ID: 701118005H2
actaagttatcctcataaatacactctaattaggtggcaagataagtgtctaaccttagtaacattgccacatattgtgttcattttggaattgtgccactaaaattctattcaattcatctatggctgcctcttcttatgctatgcaatcaatcctggcaaaccctttgatccgcatttccagcgggtctagggtgaaccaatttgggcgttcctgctttggcacatgagaaggaatgttggcctgagagttaggtccatgggctaaggaaga

SEQ ID NO: 37165 - DNA, 269 bp, Glycine max
  unsure (1)..(269): unsure at all n locations; Clone ID: 701118006H2
agantcccnatttctctcttcttcaactttctcagaacaggtattcgaagaaagaattctgggtgtattgaaagntgaatcttttaagcctctaaatttccnccatacattnacctgcatttccaatnttgaagtntggatacggtaataatcaaaatggnctcttgcgtgtcaacaattgacagcaccttctaatactagaaatacaccaagggtgtntactgttggaggaagaaatctgactgtaatnancctgggagagctgtttc

SEQ ID NO: 37166 - DNA, 271 bp, Glycine max
  unsure (1)..(271): unsure at all n locations; Clone ID: 701118007H2
ctataagctagtttatcgtgaggngaatatgaagttgtttgttttctttgttgctgcagtagttttggtagcatggccatgccatggcgcaggctaccaaaggttccctctccgaatgaaaactggctatggtgagcgttcttcggaggtaaaatgcgcaagttttaggcttgctgtggaagcacacaacatccgagcctttaaaaccattcctgaagagngcgttgaaccaacaaaggactacattaatggcgaacaatttagatcagac

SEQ ID NO: 37167 - DNA, 270 bp, Glycine max
  Clone ID: 701118008H2
gttaatagtatgtgaactacttaaagccaacttatatgagtttcacaaatttaatcgagaatcagggggtgaagtgtatttcacgatgccaaggttgcaggtttgtagtgtgccgtgatatgttctttttatatttacatatcatgctgtttgtactgttatctttagttttcatcctttctgctagtctaatactgtcataaacacttttcaacttatgtgagcagtcaattaccattcagtgtttggaagcacttcagtttttgcaca

SEQ ID NO: 37168 - DNA, 261 bp, Glycine max
  unsure (1)..(261): unsure at all n locations; Clone ID: 701118009H2
atggcttcttccaccatcacctcctccntcctcacatcacaccctttntcccacttcaacaaatcatcatcttcatcattcccctccttccatgccacccccactctccgcccccacaggccacgcgcctccatgtccgcggcaggccaccgccgccctacgacttcggctcgttccggttcgagccgattagggagtcgatcgtgtcgcgcgagatgacccgcaggtacatgaccgacatggtcacccacgccgacacga

SEQ ID NO: 37169 - DNA, 269 bp, Glycine max
  Clone ID: 701118010H2
attctgtctcttatgggtcagatgatgaagcctaggaaaacagagatcactgacaagttgaggcaagaaattaacaaggttgtcaaccgatatattgatgaaggtgtagcagagcttgttcctggagttctattcattgatgaggttcatatgctagatatggagtgtttttcgtatttaaatcgtgctttagagagctccctatctccaatagtaatctttgctactaatagaggaatatgcaatgtaagagggactgatatgaccag

SEQ ID NO: 37170 - DNA, 270 bp, Glycine max
  unsure (1)..(270): unsure at all n locations; Clone ID: 701118011H2
cattgatcgctgaaacgatacgatgacagggaaggcgaacganaggaagcacacggcgaaggagatcgcggcgaaggtggacgcggcgaccacgaaccgcggcggcgggaaggcgggtatgaaggaccgaaccgggttggagaagggcgggcacgcgaaatacgagtgccctcactgcaaggtgacggcgccggacgtgaaatcgatgcagatccaccacgacgcgcgtcaccccaagatccccttcgaggaggacaaagttgtcatctt

SEQ ID NO: 37171 - DNA, 268 bp, Glycine max
  unsure (1)..(268): unsure at all n locations; Clone ID: 701118012H2
tcggcttntgcttcaaggangganagnttgtnantctctatcannaagnnnnatgtcaggtganganggtgtcattgcagntgagccagctgcngcngctgctgcgatcccaggcganccaatggntatcatgantgccttacaacttgtgctcagaaaatntctggctatggtggtttgtcgcgtggccttcatgaaggtgcanaantgnttgnnaagcatgctgcacaactctgtgttcttgcagaagactgtgaccagcctgact

SEQ ID NO: 37172 - DNA, 272 bp, Glycine max
  unsure (1)..(272): unsure at all n locations; Clone ID: 701118013H2
ggatacactaagttatcctcataaatacactctaattaggtggcaagataagtgtctaaccttagtaacattgccacatattgtgttcattttggaattgtgccactaaaattctattcaattcatctatggctgcctcttcttatgctatgnaatcaatcctggcaaaccctttgatccgcatttccagcgggtctagggtgaaccaatttggcgttcctgctttgcacatgagaaggaatgttggcctgagagttaggtccatggctaag

SEQ ID NO: 37173 - DNA, 271 bp, Glycine max
  Clone ID: 701118014H2
gctccttcacctccttagtttcgaaagcatggcttccctggcggcttccaccgcggctatgtcagaaatccttggaaaccccgttaacctcagatgcgcaaccaggtctgctccatcaccaactacacctgccaccttcaagaccgtcgcacttttctccaagaagaagccagctccacctccaaagaaaaagcctgccgctgtatcccccgccaatgaggaatcgccaagtggtatggtctgacagaaggatcttcttgcctgagggtct

SEQ ID NO: 37174 - DNA, 276 bp, Glycine max
  unsure (1)..(276): unsure at all n locations; Clone ID: 701118016H2
cttgantcgncgatttganaagatnagtaagcttcanagtgatgctttgcgtgnagccatctcangannccatggccgactccaaggagaagaatcgcaaatttgtggagaccatcgaactccaaatcggtttgaagaactacgatccacagaaggacaagcgnttcagtgggctccgtcaagttgccccacatccctcgccccaagatgaaaatttgcatgcttggtgatgctcagcatgttgaagaggcagagaagataggactggactggatg

SEQ ID NO: 37175 - DNA, 265 bp, Glycine max
  unsure (1)..(265): unsure at all n locations; Clone ID: 701118017H2
gccgncanngttgcgcccacacaccttccctttgtttccattttccattttctcaantctcacttccaaaactcctccattcattcctcgcatttccatcttccaaagctctttctctcaaagatcgagctttggaaaacttgaggaagcatttgagtaacaaaccctttttcagatccctgaagggttgtgttcatttgtcgaaataataacaacttgcttggaacaagcataaggccatggcaagcgcgttgcagcagttcaa

SEQ ID NO: 37176 - DNA, 271 bp, Glycine max
  unsure (1)..(271): unsure at all n locations; Clone ID: 701118018H2
caaaacctcgtttggcttatctctcttccacttttcttcttctannctgttgtaactgtctttacttcggtgtcggcacaagccccagaatccccatcactctacaacaccttccttcaatgcctcaccaaatacacaantaacccctccaacatagtcttcgccaacaccaaccccaagttccccactatcctccaaanctacatccgaaacgcgngtttcaacacctcctcgacgcgaaaaccattatcatcgtcactccccagcaaga

SEQ ID NO: 37177 - DNA, 268 bp, Glycine max
  Clone ID: 701118019H2
tctgttctgtcccgcgggagcagacgacctgtcttcatcgccaaacaacctcaaaaacattcatcaacgttcactattaatccatccatcattaagtaagaaaataaggttcgatttttttatcttgttttgcttctgatccatcatggaggtgccgagttccgggatgccctcgcaaacagctgacgctgcagagagtgatctagagtcttggattgagcgtttactaaaacaatcccaacaaagtaaacacacagatgcaagcttt

SEQ ID NO: 37178 - DNA, 268 bp, Glycine max
  Clone ID: 701118020H2
aaccccttcggcgttttgtccttacgttgttattaagaagcgtaacgcattcaccacgatggtgaccaaagcgatggaggtggtgaaggatctggacgtgaagcggtacatgggtcggtggtacgagattgcgtgcttcccgtcgaggtttcaacccagtgacggcaccaacaccagagccacctacactctccgagatgacggcaccatcaacgttcttaacgagacttggagtggcggcaaaagaggtttcattgagggcatgctt

SEQ ID NO: 37179 - DNA, 269 bp, Glycine max
  unsure (1)..(269): unsure at all n locations; Clone ID: 701118022H2
gtttactcatttctgtctacttctcatccatcatatgacatatgttccttcgatccccttctctattttcctttatcccattgtccgaattcacgttctttttcgtcccaatccttaagctttaagctctaaactggatccaccccacccacatacccagtcttcccttttttgaggtaaacgctatgctatattactcaatataaaatattcattcattcttgcgtgtgcgtgtgtgttgcgataatgacgactcnnattcgataatt

SEQ ID NO: 37180 - DNA, 250 bp, Glycine max
  unsure (1)..(250): unsure at all n locations; Clone ID: 701118023H2
attccttcctggtattaaggaaatactctttcgttgaagctctnaatattaananagcatcatcggcagatggggtctgaaggtcctccagcagctgtgacagttcatgtaacaggtttcaagaaattccatggagtttctgagaatccaacggagacaattgtcaataatttgacggaatatttgaagaagaagggtttgtcaaaaggtttagttattgggagctgcagcattcttgagactgctggtc

SEQ ID NO: 37181 - DNA, 259 bp, Glycine max
  Clone ID: 701118024H2
gttactggacacttgatgcaattgattatagaattgctaggttgttggaaaacgccacttcgggtaaagtaccgtacaaattatcaggaataactttaaatccagggagagcttacagatacgggaaatcaatgctattaatgaattatagcggggagatacaatttctcaagtgggatgaggatgaccggcaatgggataaacgctggtcaaggcctggctgacaagtgcgacatatataactgttgcgggagttcgg

SEQ ID NO: 37182 - DNA, 267 bp, Glycine max
  Clone ID: 701118025H2
ctgaggtgacagcaataagagaggcttgtaagaagcttaagcagatagaacttgcagattgtgaaatatatgcttcttgtgaaccttgccccatgtgctttggtgcaatccacctttctcgaattaagaggttggtttatggagcgaaggctgaggcagcaattgctattgggtttgatgatttcattgcagatgcactgcgaggtactggattctatcagaaagcaacactggaaattaagagagctgatggtaatgaggccatca

SEQ ID NO: 37183 - DNA, 268 bp, Glycine max
  Clone ID: 701118026H2
ctgctccttcctcaccccacaggctgatactagactgtaactttcagaagtcagttgaagagcatgggtcgtggagttagcagtggtggtggtcaaagttccttgggttatctttttggcagtggagaggcccctgccgcaaaaccggcaacaaacaatgccccagcccaacctgaagtgcaggctgtaaataatgcgcctccttcaaaagcatctcctcctactaaaacaatagaccctaacaaggctgctggtataaacagtcatt

SEQ ID NO: 37184 - DNA, 267 bp, Glycine max
  Clone ID: 701118027H2
accctaaacggtctactgagcattggtccactactcccaagtcctaaccccctctgccaatttcaacggcgaactccctcattcctccgctgccatctccgttcgacgctctatctgattagcggatagcgaaaatcctaagcaaaatattataccgtgttctttagcgtgacccaccttcgtaaataaaaaccctatgcaactgcactattctcgtgttcgctttaaatcaaaccgctcatctcctcaatcatacctcaatctctc

SEQ ID NO: 37185 - DNA, 270 bp, Glycine max
  unsure (1)..(270): unsure at all n locations; Clone ID: 701118028H2
gncccccaaaaaaatgaagcgcttcatgctcccaaganaccctctcagcgacgcagcagagcttccttcttcgccaagcccaaccccaactaccagctttgccaaactccgtccctcttctnacaaacacaaaccctccaaagagaacgacctccctccgatcccaatctcgttactccctcccctgccaaattgaagagccccttgcccccaagacccccttcttccaaccctctcaagcgcaagctcaccatcgttgatgccctaacg

SEQ ID NO: 37186 - DNA, 269 bp, Glycine max
  unsure (1)..(269): unsure at all n locations; Clone ID: 701118029H2
caattagtctggttgtagtgggaaaagaaaagaaaatgaaaatgggtggtgggtgcaagtgtttggtatcgttggtgttggctttggtgttgatgaggagtttggcggangcgcaatcgggcaccagcaccacttgcgcccaggagctaattccatgtgtgaactttctgaatgggacaaccaccccaccaagctcttgctgtgaccctctcaaacaaaccgtggaaaaccaactggattgcctctgcaacatcttcttcagccccggc

SEQ ID NO: 37187 - DNA, 270 bp, Glycine max
  Clone ID: 701118030H2
gtcgatttcagtgctccgcattccatgggaaccactatcatcggcgttacttacaacggcggtgtcgttctcggagccgactctcgaaccagcactggagtgtatgttgccaaccgagcatcggacaaaatcacacagctcactgataatgtttacgtgtgtcgctctggatcggctgctgattctcagattgtctctgactatgtgcgctacttccttcaccaacacacgatacaacttggacaacctgcgacagttaaagttgctgca

SEQ ID NO: 37188 - DNA, 272 bp, Glycine max
  unsure (1)..(272): unsure at all n locations; Clone ID: 701118031H2
gttgnnaanactgnnagncttctctatgatgatgnattcagcaaatncctcnaggattatccggacantttccgctacaatcgagncctcagcagagannnaaagancaagagtgggggnaaaatgtatgtctcaggntaagattgangagtacagtgatgaaatctncaaactcctggataatggggcncanatatatttctgtggtctgantcggatgatgccanggatccaagatacgctgaagaaggttgctgagctaagaggagana

SEQ ID NO: 37189 - DNA, 271 bp, Glycine max
  unsure (1)..(271): unsure at all n locations; Clone ID: 701118032H2
tatgagcnaggattatctaatcatactttctctccttctntccacggtgcttgcaacacnaagnnnnnnnnnnnnnnnnnnnnncctctatcttgggaagggttctcccatcgcaaattgtctcccagttatcacattcnganaaccattgacgaatcctatgcagttatnttcgatgctggtagcacgggaagccgngtacatgtctatcgttttaaccnncaattagntctccttcgcattggccaagncttnagttgtttgtcaagac

SEQ ID NO: 37190 - DNA, 271 bp, Glycine max
  unsure (1)..(271): unsure at all n locations; Clone ID: 701118034H2
ttcgacaggctgctgtttatggtgttggtgtttgtgctgagtttggtggatctgttttcaaaccccttgttggagaggcactttcaaggttagatgctgtgataaggcatccaaatgcactacattctgataacataatgggcatatgacaatgctgtttcagctccttggaaaaatatgcccaattccatcgtgatagcataaatggcagcacaggttgttcctgcctggctaaaattgccttgcctaataaaggtgattnaattgaagc

SEQ ID NO: 37191 - DNA, 267 bp, Glycine max
  Clone ID: 701118035H2
ccagtagtcatatgcttgtctcaaagattaagccatgcatgtgtaagtatgaactaattcagactgtgaaactgcgaatggctcattaaatcagttatagtttgtttgatggtatctactactcggataaccgtagtaattctagagctaatacgtgcaacaaaccccgacttctggaagggatgcatttattagataaaaggtcaacacaggctctgcctgttgctttgatgattcatgataactcgtcggatcgcacggcctttg

SEQ ID NO: 37192 - DNA, 312 bp, Glycine max
  unsure (1)..(312): unsure at all n locations; Clone ID: 701118036H2
gaagcttggggtttgaatcgaatcgaatcgaagcgattcatcgatcgatcgatggctcttgtaggagttgaactgaagcatgcngcggagggcgtaccggaggcgaattgcttccgccaagcccaccaagcaggggcgaggngcctccgccaactaactaattctcntcaaacnatcccacggagncatcnagcttcctttctttcggccaaaaaagacttcattaaaccttcaaaccggtcttcggaaggcttccagaggaaaacggaccttcaatttcttaaggggtggaaggattgcttgcggccgaaa

SEQ ID NO: 37193 - DNA, 234 bp, Glycine max
  unsure (1)..(234): unsure at all n locations; Clone ID: 701118037H2
gacgcccattctantgatgcttctcaaaantacatgtancnatgtcataaacaacttgtcanttggaaagaaagtgactcctagggccatgagtgatgtgaagctcttgataccatacataggtagcagccatgacaggctcaacggccggtcattcatcaatactcgtgatttaggtgccaatgttactatagagcattatattcagatagttaaaactgaggtagtgactag

SEQ ID NO: 37194 - DNA, 267 bp, Glycine max
  unsure (1)..(267): unsure at all n locations; Clone ID: 701118038H2
aaggggtgaaaccatggcgcttttggatgaagcttgtcaganatggggtttctttctgattgagaaccatgaaattgacaaaaacctgatggaaaaggtgaaggagctaattaatattcactatgaggagaacctgaaggaaggtttctaccagttccgagatagcaaagacctggagaaaaaacagaacacctctgatatagattgggaaagtgccttcttcatttggcaccgtcccacttccaacattaagaaaatcacaaacat

SEQ ID NO: 37195 - DNA, 249 bp, Glycine max
  Clone ID: 701118039H2
aaactatgctgctactcacactcacaacaaacgattagttgctactgcttctacagctccatcagttagcggttcaggtgctgaatattccgagcagatggtggatgtgggagcaaaaaagaaaaagaagagtatagcaggcatagatcaggacgaattagtggatccaaagcttttagctgatctagacagttgtttttgtgagttccaaaggagtgcatatacaccacaagatatgtgatgccgaat

SEQ ID NO: 37196 - DNA, 264 bp, Glycine max
  Clone ID: 701118040H2
gcagatgttggtgttggaatatgtgggcaggaagggcgccaagcagtgatggcatcagattttgctatgggacaattccagttcttgaataaattacttctagttcatggacactggaattaccagcgtgttggttatttaattctgtacaacttctaccgaaatgctgtctttgtgttgatgctattctggtatatattatgcactgctttttctacaacttctgcattaacagattggagtagtgtattttattctgtgata

SEQ ID NO: 37197 - DNA, 264 bp, Glycine max
  Clone ID: 701118042H2
ggagcattgccattttatcttgtacattcgcttaatttgtaactacaatggctgaaattgtagtggtttttgacttcgacaagaccatcgtcgactgtgacagtgataactgggttgttgacgagttgggtttcaatgaattgttcaatcggctccttcccacaatgccttggaacactctcatggataagatgatgatggagcttcattcccatggaaaaaccattgaggacattgtgcaagttcttcagaggattcctatac

SEQ ID NO: 37198 - DNA, 263 bp, Glycine max
  Clone ID: 701118043H2
ttgtaactcgttcttcttcttttgttgttctgtgtttgtgtttgttttttctctcacctgaaaatgtcttgctgcggtggtaactgtggttgcggaagctcctgcaagtgcggcaacggctgcggaggctgcaagatgtacccagacttgagctacactgagtcaaccaccaccgagaccttggtcatgggagtggcacctgttaaggctcaatttgagggtgctgaaatgggtgtgcccgctgagaacgatggctgcaaatg

SEQ ID NO: 37199 - DNA, 265 bp, Glycine max
  Clone ID: 701118045H2
tcagcatcaaggccaattgggagctggcaacagtgccattctggtgtggaatctttttatggacctccaacagggttcactgggccttttattgctcctcctggaggcattccaggagtccaggggccaccacacatggttgtttataaccattttgctcctgttgggcaatttggtcaagttggcttgagtttcatgggaaccacttatataccctctggaaagcagcctgattggaaacacatccctacatcatctgctgtgg

SEQ ID NO: 37200 - DNA, 266 bp, Glycine max
  Clone ID: 701118046H2
gtacgaaaagcaatggaagggctactagaacctgttgaggaacaagtaacaattggttcagcagtagtacgagccgtattcagcagtggtagtggtcgtgttgctggatgcatggttacagaggggaaaatactaaatgactgtggtattcgagtcaagcggaaggggaaagtagttcatgttggtattcttgattctttgagacgggtgaaggagattgttaaagaggtaaatgccggtctcgagtgtggacttgggttagaaga

SEQ ID NO: 37201 - DNA, 271 bp, Glycine max
  Clone ID: 701118047H2
aatggtgtacgtcaaggctcagaaatcaaaagcctacttcaagagatatcaagtcaagttcaagagaagaagagagggaaaaaccgattaccgtgccaggattcggttgattaatcaggacaagaacaaatataacactccgaaataccgatttgtggttcgctttagcaacaaggacattgttgcacaaataatatctgctagcattgccggcgatttagttcttgctacagcatattcacatgagctgcccacgatatggtcttgaagt

SEQ ID NO: 37202 - DNA, 263 bp, Glycine max
  unsure (1)..(263): unsure at all n locations; Clone ID: 701118048H2
atggccatgccatggcgcaggctaccaaaggttccctctccgaatgaaaactggctatggtgagcgttcttcggaggtaaaatgcgcaagttttaggcttgctgtggaagcacacaacatccgagctntttaaaaccattcctgaagagtgcgttgaaccaacaaaggactacattaatggcgaacaatttagatcagactctaaaacagttaaccaacaagctttcttttatgctagtgaacgcgaagtccatcacaacgac

SEQ ID NO: 37203 - DNA, 264 bp, Glycine max
  Clone ID: 701118050H2
gagcaattttccctcaccaaagaagaagaagcaaacaatggccgatcaacttaccgatgaacagatctccgagttcaaggaagccttcagcttgttcgacaaggacggcgatggttgcatcacaaccaaggagcttggaactgttatgcgttcattggggcaaaacccaactgagggcagagctccaggacatgatccatgaagtggatgctgatgggaatggtaccattgacttccctgagttcctaaatctcatggccagga

SEQ ID NO: 37204 - DNA, 260 bp, Glycine max
  unsure (1)..(260): unsure at all n locations; Clone ID: 701118052H2
ccccgaggtaactcatcttgctgctagtgctgtctcttttttgtgtgatttggatctacaaggtttganagggtactggcatccaaaaaatgggttctaaaactaatgcttcgggccatagagcacgaaggccgctgtcaatatttgctgtgcttggtctttgctgtttctttatcttttgggagcatggcaaagaagtggatctgggaagggagataaccttgcattgaaagttaataacctgatgactgactgcacgt

SEQ ID NO: 37205 - DNA, 262 bp, Glycine max
  unsure (1)..(262): unsure at all n locations; Clone ID: 701118053H2
tggtatngattggattatggtttcgcatcagaaagcaacctcagtgatcgaaacagtgacgtttttttttgcaacttccacctaatatcaatcangncacttcgactttaagatactaagaaggaaggaaggcggggaagtgagnngtgtaacggcttctgagagggaatgttttgacctctctggacccttacatttaacttatgttgactgggataatgcatatcatcgaaagtcggttgctgctagtttggtccaaggt

SEQ ID NO: 37206 - DNA, 239 bp, Glycine max
  unsure (1)..(239): unsure at all n locations; Clone ID: 701118055H2
aatacaagactaagtgatttgaannttgaagggataaacnntttgaagattgaaaggatgcaggaactggaagcagtgacaagtgagatcgttaggttgattgacacagcaacagtgcctattttggccgttgatgttgatgggctggtcaatgggtggaacataaaaattgctgagttgacgggtcttccaattggtgaagctactggaaagcatttactcacacttgttgaggattc

SEQ ID NO: 37207 - DNA, 244 bp, Glycine max
  unsure (1)..(244): unsure at all n locations; Clone ID: 701118056H2
cttcaagtcaggaggaggtgacccttttgggagctactggaagaccatttgtangcagggttcatattgccctcaagttgaagggagttcaatacaaatatgtcgaagaaaatttgaggaacaagagtgaactgcttctcaaatccaacccagttcacaagaaggttccagtgtttattcacaatgagaagcccatagcagagtctcttgtgattgttgaatacattgatgagactggaagaac

SEQ ID NO: 37208 - DNA, 260 bp, Glycine max
  Clone ID: 701118058H2
agggaccaaggagaggacttcagcagaagacattgcactgtctggtgatggaaaagcagggaagggtggtcaattgaagcagaagacaaaaaagcgtcatggaagacaccataaacatgattgtttatgtgctatttgtgttctaaagcgacgtaggaaggaacgggaagagaatgctcgaattgctagaggcaattttggatctagtggtgataagcatgctaatgaggaatcaatacaagtagagagtcccggtggtg

SEQ ID NO: 37209 - DNA, 262 bp, Glycine max
  Clone ID: 701118059H2
ccacctccaacttctctattgttctctccgtctccctagccttctttttggtgctacttaccaaggcacactcgaccgataccgtttctttcaccttcaacaagttcaacccagtccaaccaaacattatgctccaaaaagatgctagtatttcatcctctggggtgttacaactcaccaaagttggcagcaacggcgtgcccacctcgggatctctcggtcgtgccctttacgctgccccaatccagatttgggacagcga

SEQ ID NO: 37210 - DNA, 263 bp, Glycine max
  Clone ID: 701118060H2
cagcagtccaagaaatttggatcatgatggaagaattgacaatgaaagttctgggacaagtacttcattacaacaaaatgctaccagtcatcaaaaaaagtttccaagtggttctttactacctgataattttctttttcccaaaaagattgttactgatggggacagggattatctacaaacaaagtattcttcagacaggaatcacagtggtccgttgcaatatcggcagaagagagacaccaacaaccttccatggttga

SEQ ID NO: 37211 - DNA, 264 bp, Glycine max
  unsure (1)..(264): unsure at all n locations; Clone ID: 701118061H2
aganagcgcgtcttaataaacgctcttctctgaaaacccccatttcttttcttctttcttcttctctttcgcttcttcgatcttcgatcttcgtcgctgaaaatgagagagtgcatttcaatccacatcggccaggccgggattcaggttggaaacgcctgctgggagctttactgcctcgaacacggcattcagcctgatgggcagatgccaagtgacaagaccgttggtggaggtgatgatgctttcaacaccttcttcagt

SEQ ID NO: 37212 - DNA, 262 bp, Glycine max
  unsure (1)..(262): unsure at all n locations; Clone ID: 701118062H2
gaccttacaaagtacagtggctatgatgaattagttgctgaattggatcagctgtttgaatttgggggtgaattattgtcaactannaaagattggcttatcgtctttactgataatgagggtgatatgatgctgtaggcgatgatccatggcaggaatnctgtgccatggttcgcnaaatttatatctaccctaaagaggagatccagaaaatgngcccaggtaccttgagctcgaaaaatggagagaatcattcggtgac

SEQ ID NO: 37213 - DNA, 266 bp, Glycine max
  unsure (1)..(266): unsure at all n locations; Clone ID: 701118063H2
gtgagcctnttanaattattgagaccccnccaangggttattgttggtgttgtgggttatgtgaaaactaccacgtggtctccgaacattgaacactgtctgggctcagcatttgagtgaggaattgaaacgtaggttctacaagaactggtgcaagtccaagaagaaggcctcncccaagtactctaagcagtatganactgaggagggaaagaaaaacattgaggcgcactggagaaactgaagaagtatgctactgtggttcg

SEQ ID NO: 37214 - DNA, 268 bp, Glycine max
  unsure (1)..(268): unsure at all n locations; Clone ID: 701118064H2
gtttattatcaggaagcccaccaagattcactctcgctcacgtgcccgnngaangaaggaagccaagaggaaaggacgtcactctggatatggtaagcgtaagggtacaagggaggcaaggctcccactaaaatccttggatgaggagaatgcgtgtgcttagacgcttgcttcgcaaatacagggaatctaagaagattgacaagcacatgtatcatgacatgtacatgaaggtcaagggtaacgttttcaagaacaaaagagtttt

SEQ ID NO: 37215 - DNA, 264 bp, Glycine max
  unsure (1)..(264): unsure at all n locations; Clone ID: 701118065H2
gagaatatgaagttgtttgttttctttgttgctgcagtagttttggtagcatggccatgccatggcgcaggctaccaaaggttccctctccgaatgaaaactggctatggtgagcgttcttcggaggtaaaatgcgcaagttttaggcttgctgtggaagcacacaacatccgagcncttaaaaccattcctgaagagtgcgttgaaccaacaaaggactacattaatggcgaacaatttagatcagactctaaaacagttaaa

SEQ ID NO: 37216 - DNA, 258 bp, Glycine max
  unsure (1)..(258): unsure at all n locations; Clone ID: 701118067H2
ttctttgtggacgaggtgccaatcagggtgttcaagaacagcaaggacttgggagtgaaattcccattcgaccagccaatgaagatctacaacagtttgtggaacgctgatgactgggcaacgaggggtggtttggagaaaacgggattggtcgaaagcacccttcatagcagcgtacaaggggtttcacatcgacgggtgcgaggcttcgtgaacgccaagttctgcgacacgcagggcaagangtggtgggacagc

SEQ ID NO: 37217 - DNA, 233 bp, Glycine max
  unsure (1)..(233): unsure at all n locations; Clone ID: 701118069H2
ctactccgcncccaagaataaaccctctcttcaatacntcggcgannccctcaangagcagaagcgcctcgccaacgtcgccgtcgacgccgtcctcgacagcgtctcaatcgccnnaacgcaccgcaaaatcctagaaaaggccggcgttatattctgctccatctccgaggccattaaggaatatctgatttggtgaaaaagtatttggggaaagttgtcccgtcagacga

SEQ ID NO: 37218 - DNA, 257 bp, Glycine max
  unsure (1)..(257): unsure at all n locations; Clone ID: 701118072H2
annacaatgggttccgataatcaccagaacntngagtnctngaaggagatcggnttgggcncnncccaacatnggctcttacnataanggccagtggaaanccactngtnctnctgtcacttcngtnaatcctctaacaatcagagtatagctcaagtgaccgaagcaactttgcaagatttngangaggggttgcgagcttgcagtgaagcagctaagacatggatgacntaccggcaccgaagagaggtganatt

SEQ ID NO: 37219 - DNA, 258 bp, Glycine max
  Clone ID: 701118075H2
tgaacaagcctcaggtaagccaaaaccatggttaagcataacaatgttatcccaaacggacacttccgtaagcactggcagaactatgtgaagacttggttcaatcagccagcacggaagacaaggagacgattggctcgtcagaagaaagctgtgaagatattccccagacctacggctggacctctcaggcccattgtacatggtcaaactttgaaatacaacatgaaagtgagaggtggaaggggattttctctt

SEQ ID NO: 37220 - DNA, 259 bp, Glycine max
  Clone ID: 701118076H2
attgcatcatcagtttctaaaatttttgcatccacattgacatatcctcacgaggttgtacgttccagattgcaagaacaagggcatcattcggagaaacggtactctggtgtgattgattgtattagaaaggtttttcaacaagaaggtgtacagggtttttaccgaggttgtgccaccaaccttctgaggacaacaccagctgctgtgatcacattcaccagctttgaaatgatacaccgatttcttgtttcccttt

SEQ ID NO: 37221 - DNA, 259 bp, Glycine max
  Clone ID: 701118077H2
caaaacatatcacataatatggcatttaaaggctatttcgttttgggcctcatagctcttgttgtcgttggcacttccaaagttacatgcgaaatagaagcagataaagtttcacctattattgacttttccctcaatcggaacagtttccctgaaggcttcatctttggggcggcatcatcctcctaccagttcgaaggtgcagcaaaggaaggtggtagaggaccaagtgtatgggataccttcacccataaatatc

SEQ ID NO: 37222 - DNA, 253 bp, Glycine max
  unsure (1)..(253): unsure at all n locations; Clone ID: 701118078H2
atctttttctgctctttgaagaaagaagggtctttgcttgattttggagatgtctctgctctcagatctcatcaaccttaacctctccgataccaccganaaggtgatcgcagagtacatatggatcggtggatcaggaatggacctgaggagcaaagcaaggactctcccaggaccagttagcgacccttcagagcttcccaagtggaactatgatggttccagcacaggtcaagctcctggtgaagacagt

SEQ ID NO: 37223 - DNA, 263 bp, Glycine max
  Clone ID: 701118079H2
cgggaccagaagttcgatgagaaggaaaacattgtgttcatcacagtggtgtgttgtagccccgagaagataagagacaagctttgctacaaaggtggaggctctatcaagagcattgagatactggaactgcccaagcccaaggccgagaagcctaaagcagaccctcccaaagctgagaagcccaaggccgagcccgagaaaaagaaggacggtggcggcgagaagcccaaggccgagcccgagaaaaagaaggacggtgg

SEQ ID NO: 37224 - DNA, 277 bp, Glycine max
  unsure (1)..(277): unsure at all n locations; Clone ID: 701118081H2
cgggnactcncgatcnanncncnnnncgantcggctcgagagaacatgttngatgtntatgtcagnnnttgaaggatactgcaccctcttgattganagggtncntctcatcgagcaagagaggttggtttactcgtaattttgtttggtgaaanattggttttcggttttgtnttnaaaatgatgggtttggtctctgttacagagaatgtcctgaggaactgaaggagggcagcatcgggattactctatgcagcttcanggtgtggagatttcc

SEQ ID NO: 37225 - DNA, 254 bp, Glycine max
  Clone ID: 701118083H2
ctcttcatcttgttctatttgtgacgagcatcatggcctcaagagcagtgttattgttggctatgtgtgtgcttccggcgatggttgtggccattcgcccagcaaagaacccttttgcgtgaagggtcgtgtctactgtgacccttgccgtgctggttttgagacctcagctaccacctacattgctggtgctgagattatgttgcaatgcaagagcagggttagcaacgaggttgtgtacacgaagaaggggt

SEQ ID NO: 37226 - DNA, 257 bp, Glycine max
  unsure (1)..(257): unsure at all n locations; Clone ID: 701118084H2
gtttttctgcattccgattacccatcccaccgcattcacaatcncaattgcaatagggttttcgtttcccttcggcttgnttctgtggtaattgcagctttctcgattgaattttggatttagggttccgattccgagtcttactctaaaagccgtcgattcgtcctggaatttcaggctcncggagncgcagagatagggttcttccattttgtcatgntccnncaaggaaaaagaganagagaggggtcaacgaa

SEQ ID NO: 37227 - DNA, 246 bp, Glycine max
  unsure (1)..(246): unsure at all n locations; Clone ID: 701118085H2
ggttcggcctctttntgatctcttaggaaaaaggtttcatttgtaaaaccactanncctttctgtnatatntcttactaancattgctctgtaggagaaaggaatttatgttatgattttataatatcgaaattatgtatgtttcacaaactcctcagagttgctagatgatggtaaggtagantcttngggnttagntgcngttgcctttgatctcagaccgaataggtntaaaactcaaatttt

SEQ ID NO: 37228 - DNA, 255 bp, Glycine max
  unsure (1)..(255): unsure at all n locations; Clone ID: 701118086H2
ctcttcatcttgttctatttgtgacgagcatcatggcctcaagagcagtgttattgttggctatgtgtgtgcttccggcgatggttgtggccattcgcccagcaaagaaccctttttgcgtgaagggtcgtgtctactgtgacccttgccgtgctggttttgagacctcagctaccacctacattgctggtgctgagattatgttgcaatgcaagagcagggttagcaacgaggttgtgtacnnnnagaaggggt

SEQ ID NO: 37229 - DNA, 256 bp, Glycine max
  Clone ID: 701118087H2
gaagttggagatagtgattctggttctgttctgttcttctttctactcacaacaacatcagaatcagaaacaacaatggccaacactaacttggaagatgttccctctctggatctcatgactgagctccttcgtcgtctcaagtgctcttccaaacctgacaagcgtcttattctcattggcccacctggatctggaaaaggcacccagtcaccaatcataaaagatgagtactgcttatgccacttagctaccg

SEQ ID NO: 37230 - DNA, 256 bp, Glycine max
  Clone ID: 701118088H2
aggtggttaacttatatccttgcagctccttttgttctccattcacaaggaatagtcaccaaataaagcacaagttggtttttctattttccttttctttgttttgtaatcatcaccaaacccatatttggtgagtatgagaaattattaaatgatcccataccatcatagtctcaatcaatctccacgtgacacataatcgagttttattaactctttcatgcaaagtgaaaagctcaaccatatgtcacatgga

SEQ ID NO: 37231 - DNA, 255 bp, Glycine max
  unsure (1)..(255): unsure at all n locations; Clone ID: 701118089H2
cctctgttcaaagtntggtgactaccgcaangatgatccatcatcttttacattaaacccatcattttcacttttccctcagtttatgttcaatctgcgacgctcgcagtttgtacaggtttttaacaacagtccagacgagactgcatatttccgtatgttgttaaacagggaaaatattagtaatgctgctgttatgattcagccgtcattgatatcatattcattaatgcgctgcntgcaccagcnntctta

SEQ ID NO: 37232 - DNA, 257 bp, Glycine max
  Clone ID: 701118091H2
aacccaccggcggcatcacacgacgagccacttcacagtaaaccctaaacacttaacagagaaagagagactcacgttgatactctagaaagttcactatgggaaactgcaacgcctgtgcgaaagtgatgtcgtagaagacagcaccaacaacaggaacaagaagtctaatgaaacgaaccgcggtggtaggaagaaagagcagaaccagaaaaaaccgaacccgttctcagacgaaaccggcccggtcggcggct

SEQ ID NO: 37233 - DNA, 258 bp, Glycine max
  Clone ID: 701118094H2
gcaccgtctttttattggcaatgttcctagaagctggggtgttgaagatctgaagaagattgtaactgagattggacctggagttactggtgtggaactagtcaaggatatgaagaacaccaacaataaccggggctttgcttttattgactattataaccatgcatgtgctgagtattcaaggcaaaagatgatgagcccaacatttaagctaggtgagaatgctccaacagtgagctgggctgatcctaaaaatgc

SEQ ID NO: 37234 - DNA, 258 bp, Glycine max
  Clone ID: 701118095H2
aagacattatcccattcttccagagcgttgttcttccaaaagaagctaccactgttcagaagtgctacattgagcttgccaagcaagtcaaggaaaagcttaccaaggtagatcctactttgacaagttggcagatgccatggtcacttggattgaagctgggatgagcttaacccagctggagcatcagtggccaatggcaaagcatgaatcagttttggttaactgcataacaacagccacagaacttgaagtgga

SEQ ID NO: 37235 - DNA, 263 bp, Glycine max
  unsure (1)..(263): unsure at all n locations; Clone ID: 701118096H2
gtggccaccaattggcaagaagaagttcgagactctttcctacttgccagacctcgatgatgcccaattggcaaaggaagtcgaataccttctaaggaaaggatggattccttgcttggaattcganttggagcacggtttcgtgtaccgtgagcacaacaggtcacctggatactatgatggacgctactggaccatgtggaagctgncctatgtttggctgcactgatgcttctcagtgttgaaggagctcaagaggctaa

SEQ ID NO: 37236 - DNA, 270 bp, Glycine max
  unsure (1)..(270): unsure at all n locations; Clone ID: 701118103H1
cttggactcnaagtccaccatcggtgttgaatttcagancgaggactttggttatcgatcacaagaccgttaaggctcagatctgggacactgccggccaagaacgatacagagcagttacgagtgcatattacaggggtgctgtgggggcaatgttggtttatgacatcactanacgccaaacctttgatcacataccacgttggttagaagaactgcgcaaccatgctgncaagaacatagtcatcattcttacaggcaacaaatgtg

SEQ ID NO: 37237 - DNA, 271 bp, Glycine max
  unsure (1)..(271): unsure at all n locations; Clone ID: 701118105H1
aagggaacgagttgaatgcgaangggatntaaggagtacagacanaaggttgaattggagctatcgancatctgtaatgatgttatgagagtgattgatgagcaccttatcccttcggntgcagctggtgaatccactgtgttttactataagatgaaaggagattattatcgttatcttgctgaatttaagtcaggcaatgagaagaaggaagctgctgatcagtctatgaaagcatctgagtctgctaccgctgcagcagaggctgatt

SEQ ID NO: 37238 - DNA, 271 bp, Glycine max
  unsure (1)..(271): unsure at all n locations; Clone ID: 701118106H1
cancaatggtgccgcaacncattttngcatctaacccttttgtgcattaataatctctctgaccactctttccttggtcgntgccgccgatcccacatttggcttcacncctcttggattatctagtagctcaaacttgcaaatccaaaagccttacgacgntgcagtcaacgagcgctacagcttttcaaatggagtgcacagattttgggtatactccanggacaagcctcntatgcaaggcagcaatacgnagccacgaattgagttc

SEQ ID NO: 37239 - DNA, 59 bp, Glycine max
  unsure (1)..(59): unsure at all n locations; Clone ID: 701118107H1
tttgtnacttacnctactacactntagttgttccaacacacntanttntggcaacaact

SEQ ID NO: 37240 - DNA, 272 bp, Glycine max
  unsure (1)..(272): unsure at all n locations; Clone ID: 701118108H1
gtntacctatntacgttgnttcaatgctcctggcatatcnaatgttcaantgtatanaacacttagattgtncntntngtatnggaatcagcttcgcgtaaanatngagatttgacctggtcctaattgtgggaacttcaacttttcntntagaactgtttgcaaccagggacnctatagtgccccaagaccatccntanctgtaantccaccagcccccnttataagcccatatagagccngtcatcccttctacnatggtggnttgngca

SEQ ID NO: 37241 - DNA, 273 bp, Glycine max
  unsure (1)..(273): unsure at all n locations; Clone ID: 701118109H1
gttggaatnccactgccaatgatgggatcaccctatggacctcttggtatgcctccgcctggggcaatgcagcctctttcacatggtatatcacctgctcctggtccaccaattncccctggagtcttcatgtcaccatttactcctggtgtttggcctggagcacgaggtgtcgatatgaatattataggtgtaccacctgcagtgtctcctgtacccccaggnccacgatttaatgctgctaatatagggaacccaccaaatcctgtaatg

SEQ ID NO: 37242 - DNA, 267 bp, Glycine max
  unsure (1)..(267): unsure at all n locations; Clone ID: 701118113H1
agaaggcactggttcagnggttnctgtngatcaggaacccgacactcgctaccctgttgtggttcgattcaacanagtcaactatgccaatgtatcaacaaacaactatgctttggatgagattgtggaagtggaatgagtctaatttatntgtaattttgattctggtcatgctatcgcagttactagcctaaggttnttttatgtcaaaaacaaaaaagaatttgtatcanaaaangaaaannnnnaanaaaanngganagcaga

SEQ ID NO: 37243 - DNA, 277 bp, Glycine max
  unsure (1)..(277): unsure at all n locations; Clone ID: 701118114H1
cganaaggatggtattcgaattagatnccataatggccatctcaaatccctggcttcatgcgatcanagatanagttaatgtgaagggctactatatatggtcatttncagatagctttgaatgggatgctggttacacagctcgatttggcatcatatatgtggattacaagaacaatttgagtagataccctaagtcctctgcgttttggctganaaaattccttctcaagtgatctaaatctattgttcctttggcatgctgcccagtttttct

SEQ ID NO: 37244 - DNA, 277 bp, Glycine max
  unsure (1)..(277): unsure at all n locations; Clone ID: 701118115H1
ganacatgtaactgacagaatgatgctcaatgctgccaacattttccccttcaacactccaaccaccaaagaagcataccactatagaatgatatttgagaggttcttccctcagaactcagcaaggctcactgttcctggaggaccaagtgttgcatgtagcacagcaaaagctgttgagtgggatgctgcttggtctaacacccttgntccatcaggtagagcagcacttggagtgcatgcatcagcttatggaaaccaggtcaaagctgtagaa

SEQ ID NO: 37245 - DNA, 267 bp, Glycine max
  unsure (1)..(267): unsure at all n locations; Clone ID: 701118117H1
gttgacttctacaccacaatcacccntgccaggtttgaggagctcaacatggatctcttcaggaagtgtatggagcctgttgagaagtgtttgagggatgccaagatggacaagagcnctgtccatgatgttgtccttgttggtggatccactagaattcctaaagtccagcaattgttgcaagatttcttcaatggaaaggaactttgcaagagcattaaccctgatgaggccgtgcttatggagctgctgttcaggctgctattt

SEQ ID NO: 37246 - DNA, 272 bp, Glycine max
  unsure (1)..(272): unsure at all n locations; Clone ID: 701118118H1
gttgaaagagagagtctcgtganttngaggangncacacacncccctctcccatctnccgaaacaaaagctncaaatttacggtcantnttnaaacaaaangngatttattnaaaanctttgtttgtattanatacaanatccagatcttngngngtggcanngcatagagagnnagaagagggaagaagnctcatgggtgtgngattttgaagtaaaaggtgaagtntttgaatagatcaaaggtgatntcgtgnnctgcttcatctggnc

SEQ ID NO: 37247 - DNA, 265 bp, Glycine max
  unsure (1)..(265): unsure at all n locations; Clone ID: 701118122H1
gttgggggatctcanccattttcngtngaggngataaccgtgtgtcggtgaaggaaatgacagctagtaaaccacatactactgaacnantgcataatgtgcntcattctctacaattcatttgagagagcccccttctgtctgagaccattggagagcaattcagagaccgaagcgttgaaatcacagtaacaangttgcttttgaaatcatactntgacattgtcaggaaaaatgttgagganctgtccccaaagcaattatg

SEQ ID NO: 37248 - DNA, 275 bp, Glycine max
  unsure (1)..(275): unsure at all n locations; Clone ID: 701118125H1
cnttnttcgnttcgggttcaagtncgnagangaaaancgatgagttcgggtagtagcagcagccacngcagtnagaagganaaggagaagcagngagttantcncacgtcgctgatactctggcacgcgcaccaaaacgacgccgcagctgtgcggaagctcctccaggaggatccctcgctcgtcaaggccagagactacgacaancgcacgccgctncacgtngcgtcgctccacggctggatcgacgtcgccacctgtctcatcgagttcgg

SEQ ID NO: 37249 - DNA, 275 bp, Glycine max
  unsure (1)..(275): unsure at all n locations; Clone ID: 701118127H1
gtacttancaaaaagcaagtncctgaagaatatacaactaaggagatggaagagcncactgnaaganaggtagcattgagtcaaatcttaaatgaggcattaaacagtgttnnaagtgcaancagaaagcancatgctgctgaagaggcactcggagatggattcctcaggatgatctaagaggtcanccagtgtacaactatcattaagcccaagaagttcatcaagctggaaattgtccagattctcctctaccagatgtaaccaggtcgatt

SEQ ID NO: 37250 - DNA, 277 bp, Glycine max
  unsure (1)..(277): unsure at all n locations; Clone ID: 701118128H1
cctgccagtagtcatatgcttgtctcaaagattngagccatgcatgtgtaagtatgaactaattcagactgtgaaactgcgaatggctcattaaatcagttatagtttgtntgatggtatctactactcggataaccgtagtaattctagagctaatacgtgcaacaaaccccgacttctggaagggatgcatttattatcatanaaggtcaacacaggctctgcctgttgctttgatgattcatgatnactcgtcggatcgcacggcctttgtgcc

SEQ ID NO: 37251 - DNA, 278 bp, Glycine max
  unsure (1)..(278): unsure at all n locations; Clone ID: 701118129H1
anccctagnnagtgaaccctctctataaaacctcttcnttncttncattcggtgcctattcccattttcttcctctanaccctaaacancctctnncncttcttccttcgctcgttgttctccctcgcgtagatcgacaatggcggagacaganacgtttgctttccaggctgagatcaacnanctcctcagtctcatcatcaacaccttctactccaacaaggagattttccttcgtgaatcatcagcaacgcctccgatgctttggacaagattcg

SEQ ID NO: 37252 - DNA, 280 bp, Glycine max
  unsure (1)..(280): unsure at all n locations; Clone ID: 701118132H1
cgaggcatgtggatgtctgtgggtatacttggctgatttgcggacatcagaaggaggttcccatgtgcatcacaatcctttttatgatccaccaaagcataatggtcctcttctgcccccagcagcagcattagcccctactttgtggccccaattccaccttcgttgggcatntccagaagaagcacaagctggggagattgaagcacgatgcaggaagataattatgaaatacgctgagatgcagaaggctaaagaaatggcagaaaggaaagctaaa

SEQ ID NO: 37253 - DNA, 200 bp, Glycine max
  unsure (1)..(200): unsure at all n locations; Clone ID: 701118134H1
gaggaccccgttagctgcatggttagagactgttaggtggctcnntganatgaagatnggtggtgttnagngtctggggcgagagctgntaagatnacacnagctgctancttntctgggaatttctccnttggcaancgctatgnncagccctccanngctgngaccnactagnactnacttctcatatgccatnntnt

SEQ ID NO: 37254 - DNA, 270 bp, Glycine max
  unsure (1)..(270): unsure at all n locations; Clone ID: 701118139H1
caatgtnccangttctgcttcttcncgnncatcctttgtgggaagaaaaagcgttccacgcagcctgtcctntcnctgcatgcacaactttgtggagacaagnttcccacagattncagttngattggcaccaaaaataggtcgcagtccagttatcgttanncctaaagcagtntctgattcccagaactgcacaaacgtnccttgatcccgatgctagcagaagtgtgctggcattatacntggaggtngtgctgggantcggcttat

SEQ ID NO: 37255 - DNA, 228 bp, Glycine max
  unsure (1)..(228): unsure at all n locations; Clone ID: 701118141H1
gaaatttcctatactctanaaatggnnncaannatcccttacccacccttttgtgcaagnngtccttccncctagagacccacttnntaccttcttcaaagcccgctatnaaagtctntctgcttcaaaatagacttatttanggatatttgttgaacaacttgtgtcttgtngagttattgatgtttgaatntcatggcaaatgatactagctatatgtnaatccca

SEQ ID NO: 37256 - DNA, 270 bp, Glycine max
  unsure (1)..(270): unsure at all n locations; Clone ID: 701118143H1
atttatagttnactattgaaagatgggtntnaaaatggcantacttatcctangcctgctggccatgtnccttntggtctcctcanaggtggcatccgcgaattcnaaagaggtgacnaatggagttgaagatgccaaatatcctggtggaggctatggtgngggttacccaggcaatggcggtggtggctatcctggccgtggtggtggctaccctggncgtggtggtggctatccaggtcgcggtngtggttnccctngtcntggtgg

SEQ ID NO: 37257 - DNA, 272 bp, Glycine max
  unsure (1)..(272): unsure at all n locations; Clone ID: 701118144H1
tatcaatnagatttnttttcanagtttgcnagtgatatancatggncaactanaacagcaatgagcttttggaaattnagtgaccagttgaggcntgaatctggnttggccaatctgtntctgaatgattattccatttggngcaacagcnanagctccaagaggcctgatcagaggaggnactttnatgtcaagggcantgatttcancaactcatcaangccttttgatgatgatttcaatgatggctggaagatcaccatgccaatgga

SEQ ID NO: 37258 - DNA, 276 bp, Glycine max
  unsure (1)..(276): unsure at all n locations; Clone ID: 701118146H1
gnttggagcagcttaactcattacaagatangaatggtgangatgtatcanatatcantgttgcaagcaganaaaagcctggttaaagattacttggttgaccataatgcaagatctcagaaaagaattataccagttcccaggcccagcatccattgaggatatgagggcaacgatcatagaganctcattaaaattgatccanacagaaagcaaaatcacacgtctggcagcatctccaaatagaactcctttcgcagacgtgaatcagtcaat

SEQ ID NO: 37259 - DNA, 270 bp, Glycine max
  unsure (1)..(270): unsure at all n locations; Clone ID: 701118153H1
cngntcgagaaaattagttcgtcgccataccaaaggaaggtataaaaaatnctatgaatanctgagtcatctgnattagatganacnaatagtganaagcaagtttctcgtagtaatgaattgaggaaattatatatgcgaaaaactttgcaaatttctacagttagaccatcaattgtgtgtttgaaganaaagcttattattcttganctaaatgggctgcttgtggacatagtttctccccctccaaagtaccgtaaaccagctgca

SEQ ID NO: 37260 - DNA, 60 bp, Glycine max
  unsure (1)..(60): unsure at all n locations; Clone ID: 701118154H1
ggaganaagcataggatnntcatcnacctaganagcgnatccttcggaagttngttttcc

SEQ ID NO: 37261 - DNA, 273 bp, Glycine max
  unsure (1)..(273): unsure at all n locations; Clone ID: 701118157H1
gcttttcaaggatnacttcgtngacgagangaagaagcttngaagcaccaagatcaccaacaacaataatgaacttanatgcgctattgaccacattttggatgcccagagnaaaggcgagatcaacgaagacaacgtcctctacattgttgaaaacatcnacgttgctgcaattgaaacaactctatggtcgattgagtggggcattgctgagcttgtgaaccacccagagatccagcaaaagtnaagggatgagattgacagagttcttgg

SEQ ID NO: 37262 - DNA, 227 bp, Glycine max
  unsure (1)..(227): unsure at all n locations; Clone ID: 701118158H1
cttcncgttgaccaaggagnacattttgaagtngctggncnancacgancagcatattnggtggtgtacngntantttggaagcatanngcaacttgcantgatactctccttagcngnactagngagggggcttnatgnttcggggcaacanttcatgatgggttgtgaggagaagcgacanngacganaggggtggnttccagaagggttntcaccnangaaccg

SEQ ID NO: 37263 - DNA, 273 bp, Glycine max
  unsure (1)..(273): unsure at all n locations; Clone ID: 701118159H1
atgtctataanagtgcgcgtaancntaancttgagccanttgctnnttatcagangtttgctgttgtngtattcccananccggaaganctcaagatacggtatgataaaagatttacagaaatgggganagaagtgccacctgatgctgtgaataagatgatagctaattatgttctgcctanaagcagcgatatgccttgttctgatgaatngttttatcagaatcttncatatatatcttgtaatanctcatcaacatgatcacctggng

SEQ ID NO: 37264 - DNA, 265 bp, Glycine max
  unsure (1)..(265): unsure at all n locations; Clone ID: 701118165H1
ggtgtacagcctaaagacattaattgcttncaacttagccatgtataatatggagtagctacattgatttgttgtccatggctgngcttagtgagggtgtgtggtgtngtgtggcagctttggacaaaattacggtttnctttgcatagttctctttatgtgaaacctcctggattatctagactatncttgncncgttgtttcttgacattacattttgttttttggatgataaaattagaggaaggggatggtgccccaatac

SEQ ID NO: 37265 - DNA, 266 bp, Glycine max
  unsure (1)..(266): unsure at all n locations; Clone ID: 701118166H1
gtcaatttnaagccactattactgagcttcacaaaatcaaagnnctcgctgctgcagctaccaccngaagcttatctaantgtcactaaacatngcaatgtctgcttgggaattctagatggcactgaaataggactaggaaatactaacataattggagatatctctttacaagataagttagtgatttatgacaacgagaaacagcagattggatgggcctcngccaattgtgatagatcttccaattcataaataaatcatgt

SEQ ID NO: 37266 - DNA, 195 bp, Glycine max
  unsure (1)..(195): unsure at all n locations; Clone ID: 701118167H1
ggangaccnagttgcctcccacgcncgggcgtactcatnancncancaggtctgacaaggngaacaaccgctgntcnatntaanantgtaggcgagggaantctgcnagatgtgatccgttaactcgggaanaggntttgctctgagggctgagcactngggtcccagtncccnaatnngtaggctgttcggtng

SEQ ID NO: 37267 - DNA, 269 bp, Glycine max
  unsure (1)..(269): unsure at all n locations; Clone ID: 701118168H1
ttatgatggtgtagatgggattcttgacaagcaacttntgggaaantgcaattctngaagaagtanagacngcttacnaaaattgcagcnnaaatgtttnnncaaatcanctaggnanngcccctccattggngaggtttcgcagggtatattgtngatnaagcnaagacgcctcatgnnagangacaccatgtcatgtgacaagcngcaacttctcccgnagtgtgagtcanatagangancagcaggttgaatnangtaaaatcacc

SEQ ID NO: 37268 - DNA, 265 bp, Glycine max
  unsure (1)..(265): unsure at all n locations; Clone ID: 701118169H1
ggggcaggttccatcttaggtggggatgtagagaagtacttcatgacanatctgctgatgggagtatttatgttacaggactntccatgtcaaaggctactgccaananaattgtgaaagctgatgcttatgtagctgcttgtgatgtccctggaattaagagattacttccatcaaagtggagggcacaggagtttttcaataacatatatgaatagttggagttcctgtagtcacagtgcaacttagatacaatggttgggtt

SEQ ID NO: 37269 - DNA, 265 bp, Glycine max
  unsure (1)..(265): unsure at all n locations; Clone ID: 701118170H1
gcaatntccaatgttgtaaccccggttgtttgccgtagtgacagatatgatgcttgtcatgcaccanatcaaattgtattaccaactgcggaggagtttcaancattgaactattatgacccaagaaacgagctnttggatgataaattantctcccctgtacttgcacatattcaaccagaatttcatnatcaagcaaacatcgaatcagatgattggtatgggcttcaatatggtacaaatgagacaaacatgtcagactttt

SEQ ID NO: 37270 - DNA, 270 bp, Glycine max
  unsure (1)..(270): unsure at all n locations; Clone ID: 701118172H1
atccggtgctctaatctctancattctgtgatngctccaaaaccgataacgagtcncgtccccgattcgtggtaccccacgntctccgtcttcacnctcgccatcggcctcgtcttaaccgactctttcttncatntatgaagcaacatctgctaggaaaagtcgttcacttgttcaggagctgacaactggtgcagtggcntcagtcttcttganagctttaaatgaaaaattgcattggacgttttagtttcntatccgactctaggt

SEQ ID NO: 37271 - DNA, 268 bp, Glycine max
  unsure (1)..(268): unsure at all n locations; Clone ID: 701118174H1
cgaattagtaaganctgagaacantttgagagctatcacatatgctaggaaatatcttgcgccatggggagccacccacatgaaagaattgcagcgantcattgcaacactagctttanaagggatactgaatgtgccacatacaaggttttatttgaagctaagcaatgggattatctagtggaccnattcaaacaggagtnctgcaagttatatggcatgactttagagccctgctcaatatctatctgcaagctggcctttctgc

SEQ ID NO: 37272 - DNA, 269 bp, Glycine max
  unsure (1)..(269): unsure at all n locations; Clone ID: 701118178H1
gggtcccagtcccgaacccgtcggctgtcggtngactgctcgagctgnttccgcggcgagagcgggtcgtcgcgtgccggtcnggggacggattgggaacgggcccttcggggctcttccccgggcgtcgaacagtcaactcagaactggtacggacaaggggancccgactgtntaattaaaacaaagcattgcgatggtccctgcggatgttgacgcaatgtgatttctgcccagtgctctgaatgtcaaagtgangaaattcaacc

SEQ ID NO: 37273 - DNA, 276 bp, Glycine max
  unsure (1)..(276): unsure at all n locations; Clone ID: 701118180H1
gggtaagggaacggggagtttcggtaagaggaggaacaagacccacaccctctgtgtgaggtgtggccgccgcagcttccacctccagaagagtcgttgctctgcgtgcgcttaccccgctgcgcgcaccaggaaatataactggagcgtgaaggccnctaggagaaagaccaccggaactggaaggatgaggtacttgcgtaacgtgcctcgcagattcnngagcggcttcagagagggtaccgaagctgcacccaggaagagaggagctgctgc

SEQ ID NO: 37274 - DNA, 266 bp, Glycine max
  unsure (1)..(266): unsure at all n locations; Clone ID: 701118181H1
cggcttcaaccttgtagttattctcnttnttcttntntagccacncctctcttnanaaatctagatctcnttcttncctnganctatgttacgcttntagtgaccgganctgtatngatctgaaccanatctacacgccgatggtggttttggcctggtctttcatagatctnatgcatggaggctcagatctactgtacagaggtgtgcgattcatgttcgtntctcttttggaatctgtttcgtagaaagtcgtttggtcttcc

SEQ ID NO: 37275 - DNA, 267 bp, Glycine max
  unsure (1)..(267): unsure at all n locations; Clone ID: 701118183H1
gcaatggtgtncgtnaaggctcaganntcaaaagcctacttcaagagatatgcaagtcaagttcaagagaagaagagagggnaaaaccgattaccgtgccaggattcggnttattaatcaggacaaggacaaatataacactccgaaataccgatttgttgttcgctttagcaacaaggacagtgttgcacaaataatatctgctagcattgctggcgatattgttcttgctgcngcatatgcacatganctgccacaatatggtct

SEQ ID NO: 37276 - DNA, 266 bp, Glycine max
  unsure (1)..(266): unsure at all n locations; Clone ID: 701118185H1
gncacctgcaacactgtctctgtctctcctcctcctggtctcactacagcatcgcngtaaccgttagattcnagcgactacgactacgattgtgtgtacactgcatacgttagaaccggttcggngttgaagggcggaacggnctctaagatcgggctgaagctgtacgacaagtacggctactacatctacattaaaaacctcgaagcatggggcggcttgatgggcaagggctacgactacttcgagcgcggcaacctcgacat

SEQ ID NO: 37277 - DNA, 269 bp, Glycine max
  unsure (1)..(269): unsure at all n locations; Clone ID: 701118188H1
atctcactttcatactcacccttattgcantatgttgacctcaatggcaccaagttccngcagtgccagatgancaggcaagcccctgaataatgcgtccaatttctgagtgtttgattnncattntgtntttgatagagaggttncccttcngtattgacatgctaatcctttttttggtaaaaatganagatntattnataattgatacacttacctaccnccaataaagggtttctgcaattttcactcaaacaanatanggtggt

SEQ ID NO: 37278 - DNA, 269 bp, Glycine max
  unsure (1)..(269): unsure at all n locations; Clone ID: 701118189H1
cttaaaagacacggagatttgacagagcgtcttgctannggattctanacaagataatatttgagcgtctacagaaggagtttgaagctgcacgagcttctcaaactgaagagatatgtttagacggggaagagtggaatgatggactactagctacaataagagagcgggtgcatatggaggcagacagaaaagcaatgcatggggatgctgacatattagcatgtcctcaggataaaattacatataaattggaaacaaggtaattg

SEQ ID NO: 37279 - DNA, 101 bp, Glycine max
  unsure (1)..(101): unsure at all n locations; Clone ID: 701118190H1
gngcgaaaagactaaattgaccttggatcttcgtctttcctnctctctccgattcgtttttccgttggtactncnaaaagcttctnccacncagcanagna

SEQ ID NO: 37280 - DNA, 272 bp, Glycine max
  unsure (1)..(272): unsure at all n locations; Clone ID: 701118192H1
gtttgcttcccaagtctctcgaagcatctntctttctcttcctgcagaagctatccgtgttacttgttcccaagtgctccaacaagcaaagtacatggttgatttggaaatccaggtccccagcgcattcgacccgtttgccgaggcgagagaatcagatgcccccggggcaaaggagtatgtgcacatacgaattcagcagaggaatggaaagaagagtctgacaacagtgcaagggctgaagaaggagttcagctacgagaagatcctca

SEQ ID NO: 37281 - DNA, 273 bp, Glycine max
  unsure (1)..(273): unsure at all n locations; Clone ID: 701118194H1
gcgctgttggacactgttttgaatgttctttagatgattcaagtgtcagcaaagtatttcttgtccttcgaatatgtaccaaatggcacgctcaggaattggatctctgatgagcatgctagnaaatccttgagttggactcaacacataggagctgcaattggagtggcaaaaggaatccagtttttgcatacagggattgtccctggtgtatattccaatgatctgaagatagaagatgttttattggatcagaatcttgttgcaaaaatc

SEQ ID NO: 37282 - DNA, 275 bp, Glycine max
  unsure (1)..(275): unsure at all n locations; Clone ID: 701118195H1
gagaatgatgatgaagtctgctatgtgtgcagtggtggttgtagcacttcttacttgctggcggaagtggggcccatggctgaggctgtgacatgnaccccaacagagttgagtccgtgtcttccagcaatcacttccggtgctaaaccttccaatgcntgntgcacgaagctgaagcagcaaaaaccatgcttatgtggctacctcaaaaacgctagcttgaagcagtatgttaactctcctaatgcccgaaaaaccgttgcntcntgtgggnt

SEQ ID NO: 37283 - DNA, 275 bp, Glycine max
  Clone ID: 701118196H1
cttgagaaggtgttcggaaccgagcactcccacattcttcgagttccctttagaactgagaagggaattgttcgtcagtggatctcaagattcgaagtctggccatacttggaaacttacactgaggatgttgctcatgagcttgccaaagagttgcaaggcaagccagatctgattgtcggaaactacagtgatggaaacattgttgcctctttgttggcacataaattaggagtcatcagtgtaccattgctcatgcacttgagaagaccaat

SEQ ID NO: 37284 - DNA, 298 bp, Glycine max
  unsure (1)..(298): unsure at all n locations; Clone ID: 701118201H1
gagaatatgaagttgtttgtnttctttgttgctgcagtagttttngtagcatggccatgccatggngcaggctaccaaangttgccctctccgaatgaaaactgggctatggtgagcgttcttcggaggtaaaatgcgcaagttttaggcttgctgtggaagcacacaacatccgagcnnntaaaaccattcctgaagantgcgttgaaccaacaaaggactacattaaatgggcgaacaatttaggtcagnctctnaaacagttaaccaacangcttgcttttatgctggtgnncgc

SEQ ID NO: 37285 - DNA, 94 bp, Glycine max
  unsure (1)..(94): unsure at all n locations; Clone ID: 701118202H1
cagggtattaagatttagattcaagtaatgnggannngcaaggttcttntngtggggggaactgggnacatagngcancganganacgtgacgg

SEQ ID NO: 37286 - DNA, 269 bp, Glycine max
  unsure (1)..(269): unsure at all n locations; Clone ID: 701118203H1
cacaaatggagcagtggtanaatgggcccttcatgnananagtatatgtccatcctgcttttgatgncattccaatcctcctcaggtganttctgtgaaccatcctcatggtatgaagatgttttcagttcccaatnaagcaatntcagtttccatgggacatcnatncctnnagagtcattnagcaattggttggttcnnagaaggnangtnggcgaanggnnnagccaancagnngnggggggnaantcacngtnganaggggccnc

SEQ ID NO: 37287 - DNA, 285 bp, Glycine max
  unsure (1)..(285): unsure at all n locations; Clone ID: 701118205H1
ctccctaccctattccgctttctctcatccatccatgaaaggaggaaagtccaagaccgaatctaagagagccgatgccaaacttgctgtgaataagaagggcgccgncaccaagactaggaaacccgccggaaaggggaaggcagcgaaagatcctaacaagccaaagaggcctccaagtgctttcttcgttttcatggaggaattcaggaaggtgttcaacaaggaacatcccganancaaagcagttntctgctgtgggcaaagctgctggagcaaaatgga

SEQ ID NO: 37288 - DNA, 280 bp, Glycine max
  unsure (1)..(280): unsure at all n locations; Clone ID: 701118206H1
aaccctagtagtgaaccctctctataaaacctcttncttctttcattcggtgcctattcccattttcttcctctaaaccctaaacaactctntctcttcttccttcgctcgttgttctccctcgcgtagatcgacaatggcggagacagagacgtttgctttccaggctgagatcaaccagctcctcagtctcatcatcaacaccttctactccaacaaggagattttccttcgtggaatcatcagcaacgcctccgatgctttggacaagattcgattt

SEQ ID NO: 37289 - DNA, 278 bp, Glycine max
  unsure (1)..(278): unsure at all n locations; Clone ID: 701118208H1
cttattcgttcctcactcannancngtcccttctctcttctctnatcagtaaacggctgttttgtatacgagctgtcccagtntcagcctatacatcccaggacatcaaaacaantggttgggntccttgtatgggcttcttcctcagttggtagaagggctacatnttcancacnatctgtatcancangtgagccanttgtatctgtagattggctttgtgatnacctgaaganccagatatcaaggtactagatgcttcgtggtacatgccggat

SEQ ID NO: 37290 - DNA, 287 bp, Glycine max
  unsure (1)..(287): unsure at all n locations; Clone ID: 701118211H1
ctaacaccagctgcttgcaccattgtttcttcgctcanaancnntnaatgtcgantcctatgttctatntgngtccagcctgctttgtttatgtcntanaagatcatcatcgcaacctgtggtnctactangctattgcttgnaatcccacccatattgnngttcgctganatgctttccctgaatgttaagtctgtgaattacaccaagggaagtttcattttnnncatgctcagncatntccccgtcgcaacttttctgaggaagntgctattcttggatggcta

SEQ ID NO: 37291 - DNA, 288 bp, Glycine max
  unsure (1)..(288): unsure at all n locations; Clone ID: 701118212H1
aacatggagtccacctaattatggtgcttnaaaaattgtaattgctgatgaagatgagcaganagataaacctacanggagctgtggntgccacccctaaagaaaaaggattcagaaatctattttngaaacaaaagtttgaagagtatcctcaggccatgcgagtagttcatatgttcantcagcgttttgggcgcataggtntatgccnaganccagaggnactntcaangtcccttggnattcgcnatatggacgtnctgttcaagttaccttgctntaatgttg

SEQ ID NO: 37292 - DNA, 269 bp, Glycine max
  unsure (1)..(269): unsure at all n locations; Clone ID: 701118213H1
cgcaaatctcaatcgaatctcaganaaatgagaganatcatcagcattcacataggtnagagccgggatccaggtcggaaactcctgctgggaactctantgcctcgaacatggcatccagcccgacggcatgatgccttgtggctccannttcggtgtngcccacgacgccttcaanaccttcttcagcgaaacncgggtctggcaagnacgtncccngtgntgtctnggtngacctngancccacngtcatcgncgaggtcgctgcg

SEQ ID NO: 37293 - DNA, 262 bp, Glycine max
  unsure (1)..(262): unsure at all n locations; Clone ID: 701118215H1
tccaacccatcttatatctccggtatgattganacttgagagactactactactggctgngaagttgcaacaggagaaatattccccttcctgtagaagggtttcatattccacagggttccgnnannntgacagcggcacaagggcagtttttgcancnnagnttncccaggcgagggggcnagcgntgggnggagagnacatccnangggcncnnggtnagngnnactnccgaganggggggggtaacncttgnggggna

SEQ ID NO: 37294 - DNA, 270 bp, Glycine max
  unsure (1)..(270): unsure at all n locations; Clone ID: 701118216H1
gcttattgcaagcttgagtctgcttctttgttccataggttcgtaccttacattgctgctattgacacaagggtgtgttgttgtgtttttatcatcattgaganctaattnnngtacgngtanatgggtaagaagcttgatnctngccttggtagaaccttcnanggctgcaaagttgcaaggcnnatnattaancctggcnnntcngngcgncttgccattnnaangaacgagngacaagcctcanctgagaanngccncngttnnnga

SEQ ID NO: 37295 - DNA, 228 bp, Glycine max
  unsure (1)..(228): unsure at all n locations; Clone ID: 701118218H1
agcagatcctccatggcctccaccnaggaangtgaaaacttcgtgctaagtcgncaagntcgncgnacangccngacgctatgganaaatggnggaagcaatgaagaatgtgggcgaantanacgtggaattnanggtagangnacggagccttctgtcggttgggtacaaanaacgtggtgggtgtccgnaggcntnntggangnttctttcccngatggnanaant

SEQ ID NO: 37296 - DNA, 285 bp, Glycine max
  unsure (1)..(285): unsure at all n locations; Clone ID: 701118219H1
cttagtgctattcaataattangnanaaccaacancgagtgttgtttttgtntggtccaggctggaccagggaatgaatagagatgagaggctttcggttgaaganaactgagttaagcggcgaacatgacggcagaatcggcggcagaaattgncaccggaagcncgtcgaaganggtgaaccanacacaaaattccntccaccacttntcttttcaatncccaactnaaatcggtgangaaaatctcaattttctagttgtaattctnggcactgctgctagt

SEQ ID NO: 37297 - DNA, 285 bp, Glycine max
  unsure (1)..(285): unsure at all n locations; Clone ID: 701118220H1
ggtgcatctgacccttatgtgaagctaaagnttagctgangataaattgccatcaaaagagactactgtgaagcacaataacttaaatcctgaatggnatgaagaattcaatctagttgttaangatccagactcccaggttttagagattantgtttntgactgggagcaggttgggaagcgtgacaagatgggtattaatgggntcccttngnagngaagtttccccnggaaanntanangtttnaaccntnggcncccnaaanantgnggnngcnanggntc

SEQ ID NO: 37298 - DNA, 280 bp, Glycine max
  unsure (1)..(280): unsure at all n locations; Clone ID: 701118221H1
agaagatggattacagtgntggttngagtctgtttccgttgnacngttgcaaaaccattgcacctngttggtgatgcacgcgcaggggattnacaatgtggagggtgacaaaaactacaaagcctacatgaaccccgattacttcgatgctcatctcactcccttgggatggcaacaggttgacaatttgcgtaagnatgttcgcgactctggccttatcaacaccattgatctagtcttgcatctccnttggatgangactctncnaacactgttgggg

SEQ ID NO: 37299 - DNA, 282 bp, Glycine max
  unsure (1)..(282): unsure at all n locations; Clone ID: 701118222H1
agacaccanaaagagggtcccaccggaacaatgttggagcaatcacncaggagacangtagacgcagagnganggagttactaaaaatgaggtttggtttggagggagttgcatcggcgacaaatactgtngtngttgttgttggagaagaatgaattctgagaacaagagactcacaagaagcagcntttagaatgcgnaattggtaanancagagggtatgagtnattncaaagggggnccaggnaaaagtggcgttgnggnncttcggangcgttcnaa

SEQ ID NO: 37300 - DNA, 285 bp, Glycine max
  unsure (1)..(285): unsure at all n locations; Clone ID: 701118224H1
gcgagtgttctttcttcgtttcaacaccttnntttgcanncgntgcttcttctcgcttgaganntggcacaagaaaccnttctatncacatctgantctgtanacgagggtcaccccggacaagctgtgcgnccagatctctgatggcagtgctcgatgcgtgcctgnacnggaccctgagcagcgaggttgcctgtnagacatgcaccaagaccngnntggncatggtctttggngagatcagnanccaaggncagcagtaggctatgagaannttnnncgtga

SEQ ID NO: 37301 - DNA, 289 bp, Glycine max
  unsure (1)..(289): unsure at all n locations; Clone ID: 701118225H1
ctctccttctntctcctattgcngntagngtttgggtttgtcactagtcagcntctccattccttcnaccttgcttgcttntctttgatntctgatggagangntccgtgtntagtagcaagggttagttgaggccntgtgtttngaaacgtacggtgtcntgttggaattgggaaaacaaatanttctgagagatggcaacnacgaacccttttgattcgttggggnactacgctgcaggacncttntgcagntcntnggcngccgngtcaacttnnnggngggggct

SEQ ID NO: 37302 - DNA, 284 bp, Glycine max
  unsure (1)..(284): unsure at all n locations; Clone ID: 701118226H1
gagaattcaaagatgatgactgaggcaagctaagaataagtggtgnatgtcagtgaaccaacancgtcacaatttntgcntcgagacacctcctcctcacntncaccaagttcaactgtcacattgccatttcccaagcagaatctgcntttctctggccaaagtgtaganantttcaaaggnaaggagttcanatttgtaaatatgnggtatngnngatccagggtnggtggggtgtnggcnacnnggcnnnatccgngtgaaggngagaggnnntagnggnc

SEQ ID NO: 37303 - DNA, 254 bp, Glycine max
  unsure (1)..(254): unsure at all n locations; Clone ID: 701118230H1
gagaantctnatcccacctgcnatattttggnactcctgcgtgtgctgggagggtttcagncancttncgcntcgttngagggtcctaatggtttctgatagctttgccaagggaaaaatcttggatttagntgagctatgtgttacaactggtgctagggtgcttctagaggantttgtnnactggtaagcttactnccaaaatnaggnnaggnaaaatnacaagnggcnntgngagngnncnagnggtnnag

SEQ ID NO: 37304 - DNA, 294 bp, Glycine max
  unsure (1)..(294): unsure at all n locations; Clone ID: 701118232H1
atctcaatggaggcccaggagctgaagcgcgtgttccagatgttcgaccgnaacggcgacgggagaataacgaagaaggagctgaacgactcgctggagaacctgggcatcttcatctctgacaaggacctgagccaaatgatccagaggatcgacgtcaacggcgacggttgcgtggacatggacgagtttngggagctgtatcagaccataatggacgagcgcgacaatgaggaggacatgaggnaggcttnnacgttttcnacnagaacgccgagggntnatcaccgtcgg

SEQ ID NO: 37305 - DNA, 289 bp, Glycine max
  unsure (1)..(289): unsure at all n locations; Clone ID: 701118233H1
cagcaatggtatacgtcaaggntcagaaatcaaaancctacttcaagagntatcaagtcaagttcaagccaangaganagggngaaancgnttaccgtgccagnattcggttnattaatcaggacaagagcananataacactccgaaatnccgatttgtggttcgctttaacaacaagganattgttgcacanataatatntactagcattgcnggcgatttagttcttgnngcngcatattcacatgagntgcnagatatggtcttgangtanggntgcgaattatg

SEQ ID NO: 37306 - DNA, 227 bp, Glycine max
  unsure (1)..(227): unsure at all n locations; Clone ID: 701118234H1
tttaaggagaattgaactcaattgttagtgagcaaattagagctnattnngntgtaagtgcnagagangnnactgcttgnctgaagccaagggtatcaatggtttgcnanctgtttttggggaagtctatccggatcctgttagagtngtgtcaattgganaaanaattgagggtcttcctggatgnnccncaganatgaaaacanggtnaccnntttnnncagatg

SEQ ID NO: 37307 - DNA, 61 bp, Glycine max
  unsure (1)..(61): unsure at all n locations; Clone ID: 701118235H1
tggggtgtgcagaaacatggacaagaagananntaaattggttntnatcgtanatgatgca

SEQ ID NO: 37308 - DNA, 252 bp, Glycine max
  unsure (1)..(252): unsure at all n locations; Clone ID: 701118240H1
cttntttntgttgttntgttgcnnctgttcatttcttctngatntagctcttggcgctgnnaaatttggtgctgnacaacgtggttttgtttttcctgaatttcttttgctaaaggcgagtattttgagtccgtgatgaagatttatctgtgccggaggaagtgatatgttttgctcgtcggtgacggcncaattcctctaagaagttcngagctcaacattcaatttttttancctttgattgctatttta

SEQ ID NO: 37309 - DNA, 198 bp, Glycine max
  unsure (1)..(198): unsure at all n locations; Clone ID: 701118241H1
ctagatgncactgnctggntttcaagaacttcnagnaatggggagacattgaattnccactgnccattnggaagngnnatgagtgccacngagtgctttccntncatngattagatgaanagacaagtgcatccttanaattcacagtgntgaacccagagggccgaattnggncaanggtacctggggnaggncctg

SEQ ID NO: 37310 - DNA, 299 bp, Glycine max
  unsure (1)..(299): unsure at all n locations; Clone ID: 701118247H1
ctcaagtccancctacccctttttcttctcccaccaacttcaccgtcttcttcctcgatcatgtctcacttgcaagggcaagtaccatgatgancttattatnaatnctgcttacattggcactcctggaaagggtattnttgctggntgatgagtcaacagggacaattgggnangcgtttgnncnggcatcagtgtaggnantgttgaatccaacangcgtgntcttaggnagttgnttttnaccgatccnggggngcgtgaantagctcagggntgntcagccctcttgngggaaa

SEQ ID NO: 37311 - DNA, 218 bp, Glycine max
  unsure (1)..(218): unsure at all n locations; Clone ID: 701118248H1
gatttgatggaagagcactngaatcccctgcaccaattgctaaccanggagtcatcnctcanctttctgntcagatttcagcattanatgaaagaatggatgaattcacctcccgtattgaagantgattcanngttcnttngaaagatcagcggcgtcacganacttgnntnagggtgggcngnatggagggcnnantngntnnngaggngggggca

SEQ ID NO: 37312 - DNA, 292 bp, Glycine max
  unsure (1)..(292): unsure at all n locations; Clone ID: 701118253H1
gtacggacaaggggaatncgantgtttaattanaacaaagcattgngatggtccctngnggatgttgangcaatgtggtttgctgcccattagctctgaatgtnaaagtgaagacnattcaaccaagcgcgggtaaacggcgggagtaactatggactctcttaaggtangccaaatgcctccgttcatctaattagtgngcggcgcatgatatgggattagcgaggtttccnctggtncctgttntactntnccagcgaaaccacagcnaagggaacgggctttgcggaat

SEQ ID NO: 37313 - DNA, 269 bp, Glycine max
  unsure (1)..(269): unsure at all n locations; Clone ID: 701118256H1
cgaaccagcntgtggaatggagcaagatccagacgcntacggacgaatggntgtgcctacgacactttggcgcnanctncctgaaggttcttcggaggtnaagantctattggacaagcttgtggtgttgaagctaaatggaggcttgggaacaactatgggttgcactggtcctaaatctgtaattgnnttcgtgcacgggtganntttcgtatnttgcaatnccatgccnaattggnggnacntcanttnccnactntggcgngcnt

SEQ ID NO: 37314 - DNA, 275 bp, Glycine max
  unsure (1)..(275): unsure at all n locations; Clone ID: 701118258H1
caatctcacacttgccactnagagtagtcctcttgttatcattnnntttaagcagattcagcntcantagcnagnangttgtgtcnantgtctcaacctggattcgggcagancatttccattttactcatcnntttacactccaagcaacccttccttnaccagcatccttgantcatcagcacagagtctgagctntttnggggccttnaggcgcagannacncgntgngnatgcntnaangccctnacgttgacccgcatgnttnaagnant

SEQ ID NO: 37315 - DNA, 270 bp, Glycine max
  unsure (1)..(270): unsure at all n locations; Clone ID: 701118259H1
cttnccgcaactnanattgnncaaagaacaaggaaaaancataaccncattggcnttgttntccagtattggtgncaaagtttcangctctnttgtgnttcctctgnntccccagggtaagaatctgctttccctttcgagtttacagcgatttgattcnggcccctttgtgnttttatnctaatcagngancttgtctctactgggtggtttgnttanaggnnnnggtgngggaantganggnaatgnaggaccggnatctgaattata

SEQ ID NO: 37316 - DNA, 292 bp, Glycine max
  unsure (1)..(292): unsure at all n locations; Clone ID: 701118262H1
atgggcgagtnaagcgactctgtctccattgacattgatttgattcctttaggaggaaaggantgcacggtgaaaacaagtaaaggctccatgtctgtgcttgtttntggggatcgagaaaaacccgctctaataacctacccagacgtnggctctcaattatgtctcttgtttccagggtnngtggtttgccnnnaggcagncttgctttgnnngncngnanaanttctggnntanngnacanttgtngctccgggnanatggngaatgncccncnaggnggnganntaaa

SEQ ID NO: 37317 - DNA, 292 bp, Glycine max
  unsure (1)..(292): unsure at all n locations; Clone ID: 701118265H1
gacgtcatttggntccaatgcaagccctncaccaaatgctactcccaaaccgaccnantcttcgaccgcatcanaatccaaatccttcnacggaatnncctggctactcccctntgcngcngncgnctcgactnncccggctgnagcctaaagaacancctgtgacagtnacnaggtttcttacggtganaggntnacttcacattacggagatttntcaacggaaacntcangttccgagcgntgcaagtnccgngngtgnccatnggtgnggccangacaacgagggact

SEQ ID NO: 37318 - DNA, 292 bp, Glycine max
  unsure (1)..(292): unsure at all n locations; Clone ID: 701118266H1
caatcgtcgtggacgtcgattcctaagatctgataggcnacagtctctttttgactacatagatattggtagngtggtgagaccagggcaantacagactggtgagaccatatcctaggcgtgcttttagtgatggagaaagtgctgcgacattggnatgaactgggcctgaccaacntgtcagnaagcttgttngtagagttatnctggnngccgnngacggcgtttggnngnnannacgaggntntngaanggtggnagtctgagtgaantnagaatgntgagnnccnct

SEQ ID NO: 37319 - DNA, 202 bp, Glycine max
  unsure (1)..(202): unsure at all n locations; Clone ID: 701118272H1
gttagnactgtggctaaggtttgtangaaaccaccgnngttgnagnaagcngaagnacnagtggtggctggcagtagtcgnnaagccgaatgtctccgncaaggncgaanacctcgctgaaattcgacngataantcgtcntgctccatcgagacgttagcagganntccaagacgagcttnanaagatcagngaggnnggc

SEQ ID NO: 37320 - DNA, 253 bp, Glycine max
  unsure (1)..(253): unsure at all n locations; Clone ID: 701118273H1
gtgtnaattctgatgaggangaatagcntgnattaactcaatggggntcaattatctggctggctatcttnacancatgggtatctntatngtcnngataccttgtngacgccatacagggagcntctgagtcattgaatatgtcagtggcttgtanttcngtcancgtgnctcganttgnaggccaattgcnagcagcagcatgcnccgttgcanntcngtgttntnccgtncgatgcnnaagntttgcatg

SEQ ID NO: 37321 - DNA, 287 bp, Glycine max
  unsure (1)..(287): unsure at all n locations; Clone ID: 701118275H1
tgttggtngaactagtagcttgagatgactntngcttgcctaattttgnacagcatgggccttggatntgatgcagaccctcatgtttccaggccaagtttccgnctntttgatctgtgacactgattcaatggctcatgcttttagtgatgaagacnatctggcagtttnttgntactgatcntgcaatcgcatgttcaaggcagatctncagagtgntnattgataggcttcatgttggcacgtcccanagccaatggtngtgcacgnaggagatggagagaggt

SEQ ID NO: 37322 - DNA, 286 bp, Glycine max
  unsure (1)..(286): unsure at all n locations; Clone ID: 701118276H1
cttatgggactccatggtcaatgttcgagnaacaaagtgntgatggtgnttctccatcanattctgatnagtcntggtggcttaatgcatgtgctgaganacatnaacatggcttcagagttgcagaagtgtgtnngngtttganatgattaaganaatnaacgaaggaacttatngtgttgtctacaaggctanggantnataagactggagaactagtagcattggaganngngaagatgaacatcgagagggntgggnttccaatgtcatccttgagagaaat

SEQ ID NO: 37323 - DNA, 203 bp, Glycine max
  unsure (1)..(203): unsure at all n locations; Clone ID: 701118277H1
agcanttacnaatgananttgaagcacagggtagatncttgcnaaagatcntagaggaanagcagaaattangtagtncnttggtcaacctcggagaccctcccttggtccctgntaagcacantcatcctcagtcagaggcttntggatctaatgatgtcccgngnaaagcantggnggctcnaattgngagnnnatgcaat

SEQ ID NO: 37324 - DNA, 62 bp, Glycine max
  unsure (1)..(62): unsure at all n locations; Clone ID: 701118279H1
atttgcatttgcnnttcatttggcgttnngtttctttctggnagcttcgttncgggnatcaa

SEQ ID NO: 37325 - DNA, 165 bp, Glycine max
  unsure (1)..(165): unsure at all n locations; Clone ID: 701118280H1
aaaaactcanacaccttncaagaacttgtatctttcgnngttagtangtgttactacanttttacattcttgtnatctctacgtatttcattagtcatngcacctcaagcagtttccttcangtgcntngccgttngncgnagtggggangnngttncttcnccg

SEQ ID NO: 37326 - DNA, 181 bp, Glycine max
  unsure (1)..(181): unsure at all n locations; Clone ID: 701118281H1
agaagaggtgcncaagatcnttcancaagttcggcaagaacggacgacggcnagatctngtgcgcggantgaaggagatgatggcggcnctgggatccaaaacgacgtcggancaaggtgaagcgcatnatnncggantgncaccgtnnctgcgangggnanattgacttnangggnttgc

SEQ ID NO: 37327 - DNA, 209 bp, Glycine max
  unsure (1)..(209): unsure at all n locations; Clone ID: 701118282H1
gtgaaanttctgatgaggaggaagaacatgaattanctcnatgggangnaattatctggnttnntatctnnacagcntgggtatctatattgtctggatancttgtagacgccatacagggagcatctaattcattgaatntntcagtggcttnnattncagtcatncttggcttccantngtaggcgtgntgccggaanntgnnaagg

SEQ ID NO: 37328 - DNA, 278 bp, Glycine max
  unsure (1)..(278): unsure at all n locations; Clone ID: 701118283H1
attctgangagancctttgatgatnaagagcatccttatctgccagagcacattttatacaggcagaaagaacaattcagtgatggagttggctatagttggattgatggccttaaggcccatgctgcaanacatgtganctgaaaaaatgntgctaatgctggnaacatttacccccanaggaccccngnnaccngggaannangnnactgngtagtgntcttnnggggacntnctccnnnngganctcntnnaggtcccattgtncctgggagngt

SEQ ID NO: 37329 - DNA, 284 bp, Glycine max
  unsure (1)..(284): unsure at all n locations; Clone ID: 701118286H1
gcatcatgngcctcaagatcagtgttattgttggctatgtgtgtgcttcnggcgatggttgtngccattcgcccagcaaanaaccctttttgcatnaagggtngtgtctactgtnacccttgccgtgctggttttgagacctcagctaccncctacattggctggtgctgatnttatgttgcaatgcaagnagcanggttagcaacnaggttgngttnnacgaagaangnggtgcaccanctcaaacgggaacatacaacaatgngacntnggatgnaggnncc

SEQ ID NO: 37330 - DNA, 280 bp, Glycine max
  unsure (1)..(280): unsure at all n locations; Clone ID: 701118289H1
gtgaggataacaagaaggtgaaaaaggtatcanaacctngctcttattccagcagtagaggttgatccancaggctgctctttgcaatccctcacatgaaagtcaccaggatacattagcttctgctgttgcggaagaaatgcaaaaaatctacaaaaatgaattgggccctgaaccagtggccattaactgttcctggagaagctattgctgaagaagatatgtattttcttgatgtggacaatgggagtgacaatgatgaaagtactcttgaaaatga

SEQ ID NO: 37331 - DNA, 279 bp, Glycine max
  unsure (1)..(279): unsure at all n locations; Clone ID: 701118290H1
ggactacataatgtcgaagcacgcggtgttggggttgatgcgttcggcgagcgtgcagcttgcggaacacgggataagagtgaactgcgtctcacccaatgggttggcaacgccgttgacttgtaaacagcgagggatgagcgaggaggaggggcaagaggtttaccggaaatacgcgagattgcaaggagtggtgctcacncccaaacacgtggcagacgccgtgttgtttctcgnctctgnatgactccgcctttgtcactgcccttgatcttaggg

SEQ ID NO: 37332 - DNA, 263 bp, Glycine max
  unsure (1)..(263): unsure at all n locations; Clone ID: 701118291H1
ctacgatnggtaagggagcggngcactttcggtnagagaagacacaagacccanaccctgctangtggngtgtggncgccgcagtntncacctccagaagagtcgttgcgccgcgtgcgctttccccgctgcgcgcaccaggacatataactggagcgtgaaggccattagggagaaataccaccggaactngnaaggatgaagtanttcgtnancgtgccccgtagatttaagatggcttcanagncggtaccgaancttcc

SEQ ID NO: 37333 - DNA, 292 bp, Glycine max
  unsure (1)..(292): unsure at all n locations; Clone ID: 701118293H1
cgcatagctgcgttttccgnatngaaaggtgacgttagtaantaacaatggtggagaaggccaagggtaggaaggangaggttgtcactcgagagtacnccatcaacctccacaaacgcttgcatggctgcacatttaagaagaagggctcctaaagcaattaaggagatnaggagttngctcagaaagtcgntgggggacgaatgatgtaagntgntttnaaanccnnaacnaggtctntntggaancnaggggntncgnanacnccccaaaggangttnagggtncccca

SEQ ID NO: 37334 - DNA, 227 bp, Glycine max
  unsure (1)..(227): unsure at all n locations; Clone ID: 701118294H1
ggnggctgcgaactctnagggcaatgctcagaaaccgagttcggaaacgtttnagttattctcttcctccgcttcngccttcggaatcttngacgatgctgncgcaacaagttcctcctatacctcctcntccctgcgttgaagtcctcgcttnggagatggagtnattnagttaaaggggngggtangtncnnnagtagngttnnanggangcgncnnacngngca

SEQ ID NO: 37335 - DNA, 163 bp, Glycine max
  unsure (1)..(163): unsure at all n locations; Clone ID: 701118295H1
aatggcnccgaagtaanccganaaccacgacaaggnaccctgatttggttanggggattggcaagtattcnangtcgcagatgtatccacaagangnggcatctgggtctcaaggccaaannctgtggcnttttgcncngccangatncccaagccnaagncc

SEQ ID NO: 37336 - DNA, 227 bp, Glycine max
  unsure (1)..(227): unsure at all n locations; Clone ID: 701118296H1
caccancagctacctncgctnttggaancaccggttccctcggccaaanangnagctcgnttnctccaatcanagtcctttggggtgaanttcnnctctctggatcatttnaagggcntctnnggnctcgaggccatgttcatccgtgagatgtgagtcaggaatnntgccttcttnggtnncaaaaccggtgntcgctntgacagacgtcttntcccatccaaagc

SEQ ID NO: 37337 - DNA, 288 bp, Glycine max
  Clone ID: 701118301H1
gtttcacacttcgtggacgattcactcccggagctgtcacttttatacccggttcgttcggaggaagcgaaccggtttgttgaaccggaaccctcagtgaagaaaacgcctcgttttccgtgggaaatgaaaataacgagcaaggcgagaagcgtacggaataggaagcccaacactacgcgtgtggtcattgggcagcacgttgctctcgctcccgtcttcgccgcccgcgaagaagcagaagaagcgggctgaggcccaggttccagcccgttggagtccagattc

SEQ ID NO: 37338 - DNA, 259 bp, Glycine max
  unsure (1)..(259): unsure at all n locations; Clone ID: 701118302H1
cgctcgagtataacacttancattaatttgggatacnttcatttncatatntcttcaagtttcattctaaacttttttccttctaataatggctgcaacaacaagttcccgtgcatccatctacgatgtgttcctcaacttcagaggggnagacacacgctatggtttcaccagcaatctctacagggctctttctgacaagggaattcgtnccttctntgacgaaganaancttnacagcggagaggaataacacctg

SEQ ID NO: 37339 - DNA, 261 bp, Glycine max
  unsure (1)..(261): unsure at all n locations; Clone ID: 701118303H1
gcggtgttacggtgacagnnntgaganatgggtctantttctaacagagtggagagacancgagatcaagcctggcgatcacatctacacatacagagctgttttcacctattctcatcatggcatttttgttgggggaagcaaggttgtacatttcagacctgaaagaaacttaaagtcaatgactgagacatcatcaaactgggatganccaacatcaaacccatgtccaacctttcctgattgtggattcagacaacc

SEQ ID NO: 37340 - DNA, 228 bp, Glycine max
  unsure (1)..(228): unsure at all n locations; Clone ID: 701118305H1
cggccactcttctctgaaaaagcctccagcctccttcttcatccatcttccctctccaccaaaatcctccgcngttcgttccgttattcatcgaaccgttctctcaagtctcgtacttggcttagttcacaactcgaaacttcaccgaacgcattccattcaccaattcgtccaagtctcgtatcaatcagtcaatcggtctcgtggaggttggagagatcggagggg

SEQ ID NO: 37341 - DNA, 285 bp, Glycine max
  unsure (1)..(285): unsure at all n locations; Clone ID: 701118306H1
tctcctttgtcttcctcaccctatctcctcctccgcacactgtcgtctcncaccaaacctgtaactgcactgctgaacctgcaaacgagttggggttcgttactatcacgattaagttatggaggagcaattcatacttagagttccacctaatgtggcagancggatagagcgtcttctgaatgaaaacaatgcttcttcatctgaagacaagncactagatttgtcatttagagnggntggaagangnggncntttaggatgggggaagnannattcccagnt

SEQ ID NO: 37342 - DNA, 139 bp, Glycine max
  unsure (1)..(139): unsure at all n locations; Clone ID: 701118307H1
aactccttctggccatgagctgtctntgcnaaggcaaccccgnacgcgcttttgatnngcaacggcttcaaggacgcggagtacatttctcttgccctggttgccaacaaacttgccctcaacaccgngatngttgtgg

SEQ ID NO: 37343 - DNA, 173 bp, Glycine max
  Clone ID: 701118308H1
gttagcccacccagaacaacaacgcgtttcagctggccacacacattcttaatttttttggctggcctatagtaaaaactcatatcaatgtcctcaagaacgttgaggagaagactccatcatggggatgttgatggcaaaaggcaggagcatttggagacttcgggattagt

SEQ ID NO: 37344 - DNA, 284 bp, Glycine max
  unsure (1)..(284): unsure at all n locations; Clone ID: 701118309H1
tgtaattcattttctctctccccccgaacactcaagttttatctctcagcctcagtttgctgctagaggttgcatatttggggtttcacacgtgcgcaattngcaagatttggtaatttaggtattattggaggagagagtgtaaatgaagaaaccaacaaccgacgcaattagtatggggaaaaggagcctggagggtggagaagatgaccagcctgancggaataggnctgctcttgccatgtaattgtggaagctctgnaggtggacatttgcngaagctt

SEQ ID NO: 37345 - DNA, 261 bp, Glycine max
  Clone ID: 701118310H1
gagcgtgcaactttcggcaaccactgaccatgacattcaacgcgcaggaatggaggtcgacacaaacacggccgcggccatgtcaaattcatccgatgctccaactgcggaaaatgctgccccaaggacaaggccatcaagaggtttttggttaggaacattgttgaacaggctgcagtcagagatgtgcaggaagcttgtgtctatgaacaatatacattccaaaactctatgtgaagatgcatactgtgtttcctgtgc

SEQ ID NO: 37346 - DNA, 281 bp, Glycine max
  Clone ID: 701118312H1
gggtggataagggttttggacattgtgggttttatgcccctttctctgtctcttgtttgctgggttagatttttggggtgttagggtttcgtggcttgattttttggttgtgctgtatgaaataggtttgatttcgaaagcgattttgagggaagaagaagatgaggccgatttttgctgggaacttggagtacgatactcgtcaatcagagcttgagcgcttgttctcaaagtatggaaggattgaccgcgtggacatgaaatctggttttgcttttgtc

SEQ ID NO: 37347 - DNA, 286 bp, Glycine max
  Clone ID: 701118313H1
gccaattaggaggtacccgaggaagagtggtgcaacatttcctctgaggccaatgtggctatatggttcaatatgggatgcatcatcatgggcaactgaggatggaaagtacaaagctgattataaataccaaccttttgtggcaaagtataccaatttcaaagctagtggttgctcagcctatgcccctcgttggtgccatccagtttcagcctcaccatataggtctggtgggttgagtaggcaacaacatagtgccatgagatgggtgcaaagataccacatg

SEQ ID NO: 37348 - DNA, 193 bp, Glycine max
  unsure (1)..(193): unsure at all n locations; Clone ID: 701118314H1
cgacaacacatgtttctctcattcggtgctcaattctccttcgtcttctgcactgcaatttgcaacccactaacagtttaacaatcattctcaaaccccctcacaggtangccttcattgaatgtnttggcttttgggnagttgaaaggtanccaggtgctgctttantctngactgcncgagaaggtttctc

SEQ ID NO: 37349 - DNA, 100 bp, Glycine max
  unsure (1)..(100): unsure at all n locations; Clone ID: 701118316H1
gcctcatgaaacgcgtcttcagcatcatccccgccgccgccttccgcaagatgtcctcccagctggagaactcnatcggcgangnngccnannncgtnng

SEQ ID NO: 37350 - DNA, 287 bp, Glycine max
  unsure (1)..(287): unsure at all n locations; Clone ID: 701118317H1
ctttacagagggaaccttcaccgggtaccggacgtgccccgtcnatggcccatgccagcccccaaaatcactctcaaagacttcaaatccnttctcgctcgtcgctccaaggcactttcgcgccttcaaaactcaaaccctaaccctacccctacccctctccccaacggttcccaaaccgaaccacctcccaccgttaccgttaatcacggcgaaggcccttccaccaccgtcgcccgtgaagacggatatcgcaaagaaacgccgctcgtngccgttagttccgc

SEQ ID NO: 37351 - DNA, 286 bp, Glycine max
  unsure (1)..(286): unsure at all n locations; Clone ID: 701118320H1
gccaaatcaaaatattgaaaagccgcgaggngaggtttcgtttcgtttcgttcagttcncacattctattctctatcgattcctcttccctttttctcaatccactacaccacagttatgaggagccaacttgtgtgtaatgggtgtaggagcatcttggtttacccncagaggagcaaccaatgtttgctgtgcgttgtgcaacaccattacctctgttcctcctcctggaatggacatgtcacaactctanngtggaggctgtacgacattgctaatgtacaca

SEQ ID NO: 37352 - DNA, 156 bp, Glycine max
  unsure (1)..(156): unsure at all n locations; Clone ID: 701118322H1
acgtnagnaatgcatgctgcagtttagggaaaaannaaatatactagatagataatnntcntatatanattttaggaaaatnatatatttattcanggcaatttanataancttcaacaagtttgnaggtgcccatggttctanagggtcnacccc

SEQ ID NO: 37353 - DNA, 142 bp, Glycine max
  unsure (1)..(142): unsure at all n locations; Clone ID: 701118323H1
gctagccatctgcttcaaagtttaaattctaagaaacaagtaaaccttagaagtnagaagaagaagaggttttgaatttaaagtcatggaatcgtcgtccattggaatccgaagatatgaagagcttccaacggttaaggnc

SEQ ID NO: 37354 - DNA, 118 bp, Glycine max
  unsure (1)..(118): unsure at all n locations; Clone ID: 701118325H1
gtttggagattcctttggcctatttgacaatgttttagcaatttcccatcttttgatactttcaaagactgattcttttggattcaaatccntncaattnngnnccattgaagaaaaa

SEQ ID NO: 37355 - DNA, 283 bp, Glycine max
  unsure (1)..(283): unsure at all n locations; Clone ID: 701118326H1
atcataatcgtcagcgtcaattgaagaagatgccgatcagaaacatcgccgtcggaaggcctgaagaggcgactcaccncgacacgttgaaggcggctttggctgagttcatctcaaccttcatcttcgtgttcgccggctcaggctccggcatcgcctacaacaagctcaccgacaacggcgctgccacccctgccggcctcatctccgcctccatcgcccatgcattcgccctcttcgtcgccgtctccgtcggcgccaaatctccggcgggcnagtcaac

SEQ ID NO: 37356 - DNA, 286 bp, Glycine max
  Clone ID: 701118329H1
ctaggcactctctattcccattcattgcagaagaagatggaggctcacccctacgtcccacgcgatttgcacttacccggctacgctccctgcttcctttccatgtccaacattctttccgtcttcgcctcctcctcattgctcatcgtcactctcgtctggatcttctctggacgctttaagaaaaccaaagttgatagagtgctgatgtgctggtgggccttcacaggtctcacacacattattcttgagggttattttgttttctctcctgagtttttcaagg

SEQ ID NO: 37357 - DNA, 225 bp, Glycine max
  unsure (1)..(225): unsure at all n locations; Clone ID: 701118331H1
ctttcaagcacacagcaggnaaatggtctggggatcctgatgacnaaggtcttcagacatataatgacgccaagcattttgccatatctgcaaagatacccgagctaagcaacaaggacagaaccctggtgctgcagtattctattaggtttgagcaggacattgaatgcggtggcggttacatcaaacttctttctggttatgtcaatcagaagagttnggggg

SEQ ID NO: 37358 - DNA, 285 bp, Glycine max
  unsure (1)..(285): unsure at all n locations; Clone ID: 701118332H1
tcggctggtatggtggagaaaaatggtgaacttggagggaagagtttggggctttctgggaagcttaagaaggaaaatagctttgtgaatcggagagaagctttttcagattcaaggtctaatagtggtcactctagaaagcaaaagaagcacgatactgggttttcccatgaacttggtttatcgtctccttcacctggggggaaacaggtgagtcagnggggttctattcnggaaaaagcaggcgaannnccagtggntgntnggaacacnttggngngggcc

SEQ ID NO: 37359 - DNA, 283 bp, Glycine max
  unsure (1)..(283): unsure at all n locations; Clone ID: 701118333H1
gnacaagcaagtgcttctaaaggactatgttaccggttttcccaaagaatccgacatgaatattgtcgaaagtaccataacattgaancttccacaaggttccaatgatgtcttgctcaaaaatttgtatttgtcttgtgatccgtatatgaggaatctcatgaacaggcccgaaggccctcccaatagtcgtgcttacactcctggctctccattaataggatatggtgtgtctaaagtcctggaatctgggcacccanattataaggaaggtgatttagtg

SEQ ID NO: 37360 - DNA, 281 bp, Glycine max
  Clone ID: 701118334H1
ttgggtacaaatggaccgttgccgtgcagcagcatcgttaccttcgatcaaagagaaacaaccagaaagtcatagtaatcgtgtcagactcggtcaagaaatcaaaggtcttgatgaagggaatatggctgaaattgatagctatcaaaacttgtttggtttgatgaaacagaggtttctgagtttcaagagccaaaaatatatacagaaaagagttggagcattttgaagctctgctgaagctcaatttcctaaggtgatagcaaacagtttatggtgat

SEQ ID NO: 37361 - DNA, 281 bp, Glycine max
  Clone ID: 701118335H1
atcaaggcacttcttgttgctgcaactgactgtgaacctcaatatctaatccgtttgctacagacaaagttgcgaattggctatgctgagaaaactctcttagctgcattgggccaagctgcagtatacactgaagaacactctaaaccacctcctgatattcagtctcctttagaagaggcttcagagattgttaaacaagtctattctgtacttcctgactatgacaaaataatatctgcactgcttacagagggtctatggatgcttccaaagaaatg

SEQ ID NO: 37362 - DNA, 279 bp, Glycine max
  unsure (1)..(279): unsure at all n locations; Clone ID: 701118336H1
gctataagctagtttatcgtgaggngaatatgaagttgtttgttttctttgttgctgcagtagttttggtagcatggccatgccatggcgcaggctaccaaaggttccctctccgaatgaaaactggctatggtgagcgttcttcggaggtaaaatgcgcaagttttaggcttgctgtggaagcacacaacatccgagcncttaaaaccatcctgaagagtgcgttgaaccaacaaaggactacattaatggcgaacaattagatcagatctaaaacag

SEQ ID NO: 37363 - DNA, 279 bp, Glycine max
  Clone ID: 701118337H1
acaagcaaggccaaactcgtcttgctcaatactacgaatatctcaccctcgaagagcgacgtgccctcgaaggcgaaatcgttcgcaaatgcctcgcccgcaacgaacagcagaatgagctggctattttggaatttatacatctcttggttgaaaccatggatcgtcattttggcaatgtgcaagatattttgcataccttgatctctagcaatacgcaagccctgtaaaactccccataactcagcaacaaaggctatagtgcactcatttttttgc

SEQ ID NO: 37364 - DNA, 270 bp, Glycine max
  unsure (1)..(270): unsure at all n locations; Clone ID: 701118338H1
cgaactctgaggtctctacgaataactctttcttcntcactttgactttgaacagctcaattcaattgttttaactttttggcagggtaatggtcagaaaccgagattggaaacgtttcagttattctcttcctccgcttccgccttcggaatcttcgacgatgctgcgcaacaagttcctcatatacctcctctccctgcgttgaagtccttgcttctgaggttccttcatccatcaaacacaangggacncngaaattnggatggatt

SEQ ID NO: 37365 - DNA, 153 bp, Glycine max
  unsure (1)..(153): unsure at all n locations; Clone ID: 701118340H1
ggaaaggcatccactcgtttcatttgtncattattgtcattgcctgtacctcctactaancctcctggggtcaaagataattctactaactatncaacaagatctgtgcctgaatatttggagcatggtagagttcaganacttttgttgttg

SEQ ID NO: 37366 - DNA, 224 bp, Glycine max
  unsure (1)..(224): unsure at all n locations; Clone ID: 701118341H1
ctcacttctagggttttctctgcgctataagcaatcatggcggangaaacaccaaatgagatgaaggaggaggttccagaaattgttccttttgatcctaccnnnnnnnnnnnnnnnnnnnnnnttacaattgtagatcctgctgatgaacctgtggagaaattggctgagaagacagaaaacctctcagtttccgagggggttgagactgcatttactggttt

SEQ ID NO: 37367 - DNA, 280 bp, Glycine max
  unsure (1)..(280): unsure at all n locations; Clone ID: 701118342H1
cntcaccacttcactctcttcttcntcctcngctttcttagctccctacttccttcaattccagaggacaggttncgttgcctgtgaagagcgtgagcatttgcaaatgcgttgccacacccgnngctgagaccgcctacangacaggggtcactcgcaatccanatatggggaaacttcaagctggctatctcnttccngagattgctagaagaaggtctgcacacttgctgaagtaccctgatgctaaagtaataagccttggattggtgatacaact

SEQ ID NO: 37368 - DNA, 279 bp, Glycine max
  Clone ID: 701118343H1
ctataatggacactactaccatagccattatgatactgaaagtaaccaaatacaaaatgatgagatcattgcacgggctcttcaagaagaattttcccggctagatattgctgagtgttcaggatattcacagacagatgaagaacagttccatgcttctgagcctacatgtgattggaataacacatcgatgatgaactactgttcagatttttttgtattccggtcatgattatgctacatggagttggtgacatagaaccttctagttcatcagtg

SEQ ID NO: 37369 - DNA, 222 bp, Glycine max
  unsure (1)..(222): unsure at all n locations; Clone ID: 701118346H1
ggaagcagaaatagcaatgtttgagaataacattgttctttacaagtttgtccaagatcttcacttctttgttaccggtggtgattatgaaaatgagcttatcttagccacagttctgcaggcattttttgattctgtgggcctctgctcagaggcaatgtagacaagaaggaagcactagagaacttggatctcattcattgtgcattgatgaaatngtng

SEQ ID NO: 37370 - DNA, 210 bp, Glycine max
  unsure (1)..(210): unsure at all n locations; Clone ID: 701118347H1
ttatatcctattatccagggcgtctcagatgccattgagacagaatcacttgcgaagattgttggggaattaggcagagcaacagagaagctttcacaaggactagatcttcttacaaaggaagtcgatagctttttccaagtggtcttgactggtcgtgatgcctgctatctagtttgaggtcaggtgcaatttcattganagcttcgg

SEQ ID NO: 37371 - DNA, 199 bp, Glycine max
  unsure (1)..(199): unsure at all n locations; Clone ID: 701118348H1
ggcgaaacanacaaacancaaaataatcaattgagccacttaccatcagattnagatctcccaacagagagtttctcaaaattgccaagtacccttttcaggatcnaggaagagaatcaagaaccaccaaaaggtgttgttctttgttgtagttgtttgtaactgtagcaacatgaagatggttagnaagtnggntgng

SEQ ID NO: 37372 - DNA, 262 bp, Glycine max
  unsure (1)..(262): unsure at all n locations; Clone ID: 701118349H1
ctagttctccatacatcaacttggannggttaaagagacggacnacgttgtgctgtccgccangaccgagccagagcttcgtcttggccctcgattttgccctgtaaaactaatcccagtcacaacagaaataatcaatggcaccgaaacagaccaaggctgagaagaagatcgcttacgatgcgaantgtgcgacctaatggaggagtacggccaaatcctcgttgtaaatccgacaacgtgggatcgaaccagctccaga

SEQ ID NO: 37373 - DNA, 263 bp, Glycine max
  unsure (1)..(263): unsure at all n locations; Clone ID: 701118350H1
gttttaatttcttccaattccatggctgggaaagatngaatcctgattttgggacccactggagccattggaaggcacatagtctgggcaagtgtgaaggcagggaacccaacatttgtgttggtgaggaacacccctggctctaacaacagggtcaatctggtcaaagctgctaatcctgaaaccaaggaagagctcattgagagcttcaaaaattcaggantaatctaattcagggagatatgaatgatcatgagagtctg

SEQ ID NO: 37374 - DNA, 118 bp, Glycine max
  Clone ID: 701118351H1
gcctcatgtttcaaccggtccattcacaaaaaatggtgttcctgaagaacctatcacttttgaagcaagaggtcaacagatctcatctgcagacttggctttcaatgccacacaacat

SEQ ID NO: 37375 - DNA, 252 bp, Glycine max
  unsure (1)..(252): unsure at all n locations; Clone ID: 701118352H1
ctcttattntaagttcacattacaaaatcaancaaaagcnaactataaacgagnctgattggncggtggaggaaacattagtagcatcaagcaagcagcggaagaaaagaaaagaaaagacaacgcaaaaggttgttgtgagcgatttcacaccanaaacaaaccagaaacaatgcttggaagaatgacggttgaagaacaaagagacaaagaaagaggcattgttcttcttccatcgaaaaaactnccggc

SEQ ID NO: 37376 - DNA, 236 bp, Glycine max
  unsure (1)..(236): unsure at all n locations; Clone ID: 701118354H1
gcgatttttccctcaccaaagaagaaccaaaacaatggcggatcaactcaccgatgaacagatctccgagttcaaggaagccttcagcttgttcgataaggacggcgatggttgcatcacaaccaaggagcttggaactgttatgcgttcattggggcaaaacccaactgaggcaganctccaggacatgatcattgaagtggatgctgatgggatggtaccattgactncccggg

SEQ ID NO: 37377 - DNA, 195 bp, Glycine max
  unsure (1)..(195): unsure at all n locations; Clone ID: 701118355H1
taaccctttttgcgtgaagggtcgcgtctactgtgacccttgccgtgctggttttgagacctcagcaaccacctacattgccgntgctgagattatgttgcaatgcaagagcagggttagcaacgaggttgtgtacaccaagaaggggtacactgactcaacnggagcatancacaatgtacgtggacgaggntc

SEQ ID NO: 37378 - DNA, 184 bp, Glycine max
  unsure (1)..(184): unsure at all n locations; Clone ID: 701118356H1
cngcaacgttgtgctgtccgccttgaccgagccagancttcgtcttggccctcgattttgccctgtaaaactaatcccagtcacaacagcaataatcaatggcaccgaaacagaccaaggctgagaagaagatcgcttacgatgcgaactgtggcgacctaatggaggagtacggcnaatcctc

SEQ ID NO: 37379 - DNA, 275 bp, Glycine max
  unsure (1)..(275): unsure at all n locations; Clone ID: 701118357H1
gcgaaacgctgtcgttgcgccantcgcggcgttgtngttgntggtgctactcncggcgagngnggnngtggangctcangaganctcggacgtgnngacnctggtgaagcacatgcacgggaagaagtactncgacaaaggatgggaatgtnagggctggtcaatttactgttgtaaccncactattactgantatttccanaccnacnanttcgagantctctnctccaagggattntcgncgaaagnccccgngtatttttggggnncncncc

SEQ ID NO: 37380 - DNA, 108 bp, Glycine max
  unsure (1)..(108): unsure at all n locations; Clone ID: 701118358H1
ctgattctgaagcgggtgtgacgttttgtgctctgtttgtattcgtcnagttgatgctgtaatgagattcaattgtngaaggtgtttgtnttttttttttgttttgtt

SEQ ID NO: 37381 - DNA, 279 bp, Glycine max
  unsure (1)..(279): unsure at all n locations; Clone ID: 701118359H1
ggcgatcctagcactctcttctncagctttcgccgacagcttcattcaccatggctgagcaaaccgagaaggcttttttgaaacaaccaaaagtgtttctcagctcgaagaaaactgggaagggaaagagacccggaaagggtgggaaccgcttttggaaatccattgggcttggatttaagactcccagggaagccatcgaaggaacctacattgacaagaagtgccccttcatggcaatgtttccatccgtggccgtatcttggctggaacatgtca

SEQ ID NO: 37382 - DNA, 282 bp, Glycine max
  unsure (1)..(282): unsure at all n locations; Clone ID: 701118361H1
tcttganntctgangcattggaagangttgttccttcaatnaaaggagggtgtgnagaagaagggttgaacctgaaggctactgagctgaggcttgggttgccagggtgtgagtcaccagaganggatggtgtgtttaanactgtngtggtgtctggggccaagaggggtttctctnatgccattgatnggaaactggaatggtggaggatctgaaananatgccgctgccttgttttctccaacttcaangggtgctgttagcgtcngtgttantgcngcc

SEQ ID NO: 37383 - DNA, 229 bp, Glycine max
  unsure (1)..(229): unsure at all n locations; Clone ID: 701118363H1
agttatcctcataaatacactctaattaggtggcaagataagtgtctaaccttagtaacattgccacatattgtgttcattttggaattgtgccactaaaattctattcaattcatctatggctgcctcttcttatgctatgcaatcaatcctggcaaaccctttgatccgcatttccagcgggtctagggtgaaccattgggcgtncctgntttgcacagaaaaggnt

SEQ ID NO: 37384 - DNA, 281 bp, Glycine max
  unsure (1)..(281): unsure at all n locations; Clone ID: 701118364H1
ctgtgattgatgttggttcctattctatttggtaagattatcaactttaactaatttgcagctgtttagattggttcctactacacacttttcnccatttttnttcttcattttccattgaattcaataaaactctttctatttcttggtttcctcatatatttactttngtatttttagctttaatgttcagggttggcactcgatgctgcttctnggaataagtgctgccatangggganttcgatgccggnccataaagaaaagaatantttcngngg

SEQ ID NO: 37385 - DNA, 278 bp, Glycine max
  unsure (1)..(278): unsure at all n locations; Clone ID: 701118366H1
atttgtctatgggacatctcatcatgctcatcacagttcacctgagtttaggaatagagatttgagaagccagtagtaccaacagttgcttcttactgttgcaacagactctgtggatcttgtagcttatccactgaacagatggtgncatttaagtgcaaatgggaattggcttccagatcatgcgttttgttatgctatctattgacattttagattatgtgcaccttcatctaccatggattgcatgtatcagaatattatgtatggcagagatg

SEQ ID NO: 37386 - DNA, 278 bp, Glycine max
  unsure (1)..(278): unsure at all n locations; Clone ID: 701118367H1
caggaatacaaggagcggaatgttgaagtggaaaatgaagcttttgaccgatacatgcagaatgtagatttactggaggnagtattagctgtgaagtcgttggatgagaatgtgccctctgncattggagtctaatcctactacaatggagagcaatgaggcaatgatccctgggttaaaattgcagctatgatcaaattctatgagaagtgatggtttgagaatgagaatacaacaaattgtagacgagggttaaagaagctcaagaaaagtgctgt

SEQ ID NO: 37387 - DNA, 278 bp, Glycine max
  Clone ID: 701118369H1
gaacgagcgaccttcttcgtttctcgcaaagtttaagtcatcatgggtaaggaaaagactcacatcaacattgtcgtcattggacatgtcgactctgggaagtcaactaccactggtcatttgatctacaagcttggaggtattgacaagcgtgtgattgagaggttcgagaaggaggctgctgagatgaacaagaggtcattcaagtatgcctgggtgcttgacaagctcaaggctgagcgcgaaagaggattaccattgatattgctttgtggaag

SEQ ID NO: 37388 - DNA, 205 bp, Glycine max
  unsure (1)..(205): unsure at all n locations; Clone ID: 701118371H1
gaaggcggcttctctctctcgtctcagcttttctcctttcgnncgctttcgcttttcgtgtcgccggtaaggcaattcgatacctctgaaccctaatcagacgcagccaccgtttagggtttccatcctcctcncatactntgcctgattgctttcgtgttgcgttgctctngtntgcagtncaattgtnganacggtcggcngt

SEQ ID NO: 37389 - DNA, 227 bp, Glycine max
  unsure (1)..(227): unsure at all n locations; Clone ID: 701118372H1
ctgagtttccacactgcataccttaggtcttccgaattcgaagttnatttgcaagatggctaaggaaaaggctcagatcaacattgtggtggttggtcatgtggaccctgaggaggcaaccaccattaacgagctgaagaagcctgttgtggagaaagaagctccagggcatgccatatgagggcatgcacgtacggcctcggagggganccagaaattntgttnac

SEQ ID NO: 37390 - DNA, 276 bp, Glycine max
  unsure (1)..(276): unsure at all n locations; Clone ID: 701118373H1
cattttctgagttcactcactttttctcgctttcaaccttccttttctctgcgagcattttccgctatggccgaagaatttgtgaagggctctgttcatcaaaacggcgtcgctgtcataaccctcgatcgccccaaagctctcaacgccatgaacctagatatggatgtaaagtataaaagttatcttgatgatgggatctgncccngggtcanatgcgtactggttgatagcagctcgcctcgagccttttgcgctggtatggatatnaaaggg

SEQ ID NO: 37391 - DNA, 81 bp, Glycine max
  unsure (1)..(81): unsure at all n locations; Clone ID: 701118374H1
cgttctctttcttcttcttcgaaaccctaataagcttctgcactnccttctgatnccacanaanatanaactncgaaaaaa

SEQ ID NO: 37392 - DNA, 275 bp, Glycine max
  unsure (1)..(275): unsure at all n locations; Clone ID: 701118376H1
ctcctttgtcttcctcaccctatctcctcctccgcacactgtcgtctcgcaccaaacctgtaactgcactgctgaacctgcaaacgagttggggttcgttactatcacgattaagttatggaggagcaattcatacttagagttccacctaatgtggcagagcggatagagcgtcttctgaatgaaaacaatgcttcttcatctgaagacaagtcactagatttgtcattagagaggatggaagaagtggtacgtttatgattgggatgaacnat

SEQ ID NO: 37393 - DNA, 188 bp, Glycine max
  unsure (1)..(188): unsure at all n locations; Clone ID: 701118378H1
ctggcctgnngctgtgatattgnggcagcgcagaatacgtaanaanttctatcantgangaagtttccggnctccgaaaatgnccgacgcagatgtctcgaagcaaatccagcagatggtgcggnccatccgccaggaagctgaggaaaaggccaacgagatctctgtctccgccgaanagnaattca

SEQ ID NO: 37394 - DNA, 227 bp, Glycine max
  Clone ID: 701118380H1
atgaaaccaaccccgttttgtttctgagcccgaggttcaagggcccaaggttgcgtttctcttcattgcacggaacaggctccctttggaaatggtttgggatgctttctttaggggaggcgatcgcaaattctcaatttttgtacactgcaggcctgggtttcttctcaacaaggcaacgactagatcaccatattttttgaatcgtcaagttaatgatagcgtac

SEQ ID NO: 37395 - DNA, 276 bp, Glycine max
  Clone ID: 701118381H1
aagctgaggaccctgctgctcgacgttacattatttcattcaatgcaaacaccactcttgtagttgagggcgtggaatttgtaaagtgtgaggttgtgggacagagcttcatgcttcatcagatacggaagatgattgggctggcagtggcaatcatgagaaattgtgcaccagagtcacttatcgatgaagctttgcagcaggatgttaacattaatgtgcctactgcccctgaggtgggattatatttggacgagtgcttcttcacttcatata

SEQ ID NO: 37396 - DNA, 241 bp, Glycine max
  unsure (1)..(241): unsure at all n locations; Clone ID: 701118382H1
cggctantgatacttcccatccantggagtcatcacaacattantgtttggcngctatgtttcagccgccaattttggagttccatccacagagccgattacatggcattgcgcttaggcttcattactaatcatggtcttcccacaacatacgatttcccacaactatatgcttcgaagcatggatgaggaatttcgtgacatagttggtgttagtgtgcttctctggatatatgccatc

SEQ ID NO: 37397 - DNA, 118 bp, Glycine max
  unsure (1)..(118): unsure at all n locations; Clone ID: 701118383H1
cgggcaactgggcaggaatatgcggacttctangaggagttcatgcgcgcagttaagcagaattatggggagaaagttctcgtacagtttgaggatttcgccaatcataatgcatttg

SEQ ID NO: 37398 - DNA, 225 bp, Glycine max
  unsure (1)..(225): unsure at all n locations; Clone ID: 701118385H1
tgtccgggatcatccacaagattgaggagaccctccatgtgggagggcacaagatagaggagcacaaaggagancaccatggtgagcacaaaggtgaacacaaaggagaacaccatggtgagcacaaaggtgaacacannggagaacaacaccatggggagcacaaggagggacttgtgnataagntcanggncaattcctggtnntggcntgacagggtaanaa

SEQ ID NO: 37399 - DNA, 171 bp, Glycine max
  unsure (1)..(171): unsure at all n locations; Clone ID: 701118386H1
ccccttcctacaagttacaaactncctataaaactaatgaacctaaatttctngacttgagaggagctgatgctgcaatttgcttgtnaagtagcccattaattttgtgacaagttgcaatgaatcatctaaaagttatactggaagtctgatctcttccactgcaaaagt

SEQ ID NO: 37400 - DNA, 274 bp, Glycine max
  unsure (1)..(274): unsure at all n locations; Clone ID: 701118387H1
gggatattgaattttacataattaaagataaaatcaacgatagctatagttttaaaattaaccatcgatttagttgcaactggaacacaggtttctttcaatgaaataatattaatatcaatttaataagcnggtaatgtaaaatactgctaatgttaatatgaagtttggntggtcttattggcagaagatgctaggtggtgttccancatatcctgaanggaaaccgntntnggtnnaaggaantacccngggnccnanccncgcnngggcc

SEQ ID NO: 37401 - DNA, 279 bp, Glycine max
  unsure (1)..(279): unsure at all n locations; Clone ID: 701118388H1
tctctctcacaaaatgacaacaatatcaaattgctcccttctcttcctcttcctcttcctctccaccctccacatagcttccaccctctcaacccccaccaacttcatcaagtcctcctgcagcaccacccagtacccagccctctgcatccagtccctctccgnctacgcctccaccatccagcaagacccccacgagctcgtccagacagccctcttcctctcctnaaccacaccgnggccaccaaaacttcgtcgcaaaangcaanaattcagagg

SEQ ID NO: 37402 - DNA, 274 bp, Glycine max
  unsure (1)..(274): unsure at all n locations; Clone ID: 701118389H1
gtccctccttcctctgccttataattcttgtgacncttttngctggtagcattgaaagtggcaccagcaaacgtgaagccaagccattatgctgcacccttcaataggagtgtttttcctctggttttctatttggaataggctctgcagcttaccagatagaaggagcagcagctatagatggcagaggaccagtatatgggacacctatataaacagcaaccagggaagatttgggatccatagtgatggaagtctagcaattgntttttat

SEQ ID NO: 37403 - DNA, 171 bp, Glycine max
  unsure (1)..(171): unsure at all n locations; Clone ID: 701118390H1
acangcccnaaagagggtaccggtggaggggangaaggncannnacagctncanagcaaacaaanaacacagccaccgccattccaattcgaagnagantnctagttcaagagtttgttggcaaccatggcgatgcgcgacctcgtttctggtgccgcggcatgtggcgac

SEQ ID NO: 37404 - DNA, 276 bp, Glycine max
  Clone ID: 701118391H1
attgggtacaaatggaccgttgccgtgcagcagcatcgttaccttcgatcaaagagaaacaaccagaaagtcatagtaatcgtgtcagactcggtcaagaaatcaaaggtcttgatgaagggaatatggctgaaattgatagctatcaaaacttgtttggtttgatgaaacagaggtttctgagtttcaagagccaaaaatatatacagaaaagagttggagcttttgaagctctgctgaagccccatttcctaaggtgatagcaaacatttatgg

SEQ ID NO: 37405 - DNA, 280 bp, Glycine max
  unsure (1)..(280): unsure at all n locations; Clone ID: 701118392H1
aaaaaattactttatagtaatgtgaatctgaaggnagtgagtcacatgtgtcctttcaattctgctgcttttccagacagtttggcaatnngcaaaagaaggtgagcttactattggcactattgatgatatacaaaaacttcatattcgctctattccgctgggggagcacgcacgacgtatctgccaccaggagcaatctaggacttttgcatttgtagtttgaaatacaacccagctagtggtgaagactcagaaatgcactttgtccgcttgctgg

SEQ ID NO: 37406 - DNA, 277 bp, Glycine max
  unsure (1)..(277): unsure at all n locations; Clone ID: 701118393H1
ccgattccccgacaatggccacccaaatgagcaagaagagaaagttcgtagctgatggagtgttcttcgctgaactgaacgaggttctgacaagggagttagccgaggacggatactccggcgtggaagttagggttacgccgatgcgcaccgaaatcatcatcagagccaccagaacccaagccgttctcggtgagaagggaaggagaatcagggaattacctcggtggttcagangaggttcaatttcccgagaacatgttgnactttatgctga

SEQ ID NO: 37407 - DNA, 68 bp, Glycine max
  unsure (1)..(68): unsure at all n locations; Clone ID: 701118394H1
caaaatcgnagccnagatcgaagacaaagcagnactcgaggnnanctcnccgccgcaacgcttgcagc

SEQ ID NO: 37408 - DNA, 275 bp, Glycine max
  unsure (1)..(275): unsure at all n locations; Clone ID: 701118395H1
cgaggagtgggctttggagaagaagcaggaactcgatgccgcaaagaaaaagaggttcgaaacgcggaagctgatttttaacagagccaaacagtactcaaaggaatacgacgagcagcaaaaggagttgattaggttgaagcgtgaagccaagcttaagggagggttttatgttgaacctgaagctaagctcttgttcatcatcaggatccgtggtatcatgcnnggatcctaaaacanggnnnttccgcatcttgctnnaaaaaattttttcc

SEQ ID NO: 37409 - DNA, 280 bp, Glycine max
  unsure (1)..(280): unsure at all n locations; Clone ID: 701118396H1
gtttggcattggtctgttaacagaatggctgccactgccacgagctgcaggaacatcatggttgtgcttcccctcataggttgtgatcacagcccttaggtcatgtgaagctctttccacatgcttcctcactggacatcctgggtgtgtacacttgtagtaactcctacatgtcacaagtttagcacagtatcagacaagcccatctaggagtgctattattcttctaaatcannnggacacntngnaaaancgaangtngccantntgccgngggttt

SEQ ID NO: 37410 - DNA, 285 bp, Glycine max
  Clone ID: 701118401H1
atcaaccaccaccttaacacaacaacacgatgatgtccatcttcagccacttcgagatcgcgcaggcccagaactggagcttttctttgctcccagtaaaaagcacgaattcgaagcccaacacagaagccacttcctcctccgctgagtccaaaccgccagaaaagtttccaatctatcacaacccggtggatccaagcaaaacccgccccgtttgaggcccagatttgcgccggagttggacgggttacactgctttgaatccattgtaccctgctagatgga

SEQ ID NO: 37411 - DNA, 282 bp, Glycine max
  unsure (1)..(282): unsure at all n locations; Clone ID: 701118402H1
gaaagtgctacctctatttaggaacatacaccacagtccagacaacttcaaggagccagaaaaatttgatccctcaagatttgaggctgctccaaaacccaacacttttatgccatttggcagtgggatccacatgtgtccanggaacgaatagccaagttggagattttggtcctcctacatcatctgaccacaaagtacaggtggtctgttgtgggtgcaaagaatgggattcaatacggcccttttgctcttccccaaaacggcttacccatcacatta

SEQ ID NO: 37412 - DNA, 279 bp, Glycine max
  Clone ID: 701118403H1
cttggactccaagtccaccatcggtgttgaatttcagacgaggactttggttatcgatcacaagaccgttaaggctcagatctgggacactgccggccaagaacgatacagagcagttacgagtgcatattacaggggtgctgtgggggcaatgttggtttatgacatcactaaacgccaaacctttgatcacataccacgttggttagaagaactgcgcaaccatgctgacaagaacatagtcatcattcttacaggcaacaaatgtgatcttgagaa

SEQ ID NO: 37413 - DNA, 278 bp, Glycine max
  unsure (1)..(278): unsure at all n locations; Clone ID: 701118404H1
gctacctntgacaagctcctctccgaggcacccaaatacaaactcattactccttccattctctctgaccgtttgnggattaatggatcacttgcaaggaaggctattagggaattgatggccagaggttcaataaggatggtgtctgnccatgctagtcagcagatttacactagagcgacaaacacctagatgtactggttataatttatgtagtattgatgcnaccgctgaagtgannattttgttnttttctgtttgagactacctcntgctag

SEQ ID NO: 37414 - DNA, 256 bp, Glycine max
  unsure (1)..(256): unsure at all n locations; Clone ID: 701118405H1
atgatggtaaccgtccaacttgtnccntgcctgagaggttanccttcctaagtctccggatnagtggaatatgtcaatttcaccaaacggctgtgttccaaggaataaatctaactgccaaaacagtttacagatggcttcttcaagtacgcacacacgaaaatgccagacacatcttcttcgtggtttaatacaaccatgaaccttgatgaatgtcggaagtcatgtcttaaaaactgttcttgtactgcatatg

SEQ ID NO: 37415 - DNA, 275 bp, Glycine max
  unsure (1)..(275): unsure at all n locations; Clone ID: 701118406H1
cntatcagtcacacttcagtgaatacatcaagcgtggaatagaagctgatggtattgaggcactgtacaagaaggttcatgctgccatccgtgctgatccttctctcaagaaatctgagaagcagcccccgaaggaacacaagaggtcaatctgaagaaactcacttatgaggagaggaaggctaagttgattgctcgtgtggcggctatcaactctgctgctgataatgatgaagatgatgagtgaaagttcattgcagattccatgtcatcgt

SEQ ID NO: 37416 - DNA, 270 bp, Glycine max
  unsure (1)..(270): unsure at all n locations; Clone ID: 701118407H1
ttgttacttacactactacactttagttgttccaacacaagtgtttgtggcaacaactttgatttgaggttctactttttttntgtgtaatcaagantatntaaggnttttatttgatattcgncgagtcagtccattttttgcttttgagtaaagtgatatcctctgcttcttcattcttaactccaaactttagacgctccaccgtgtttttttgttacctatactacaccctttaagtgtttgtagcaaggacttttgtgtgaggtt

SEQ ID NO: 37417 - DNA, 272 bp, Glycine max
  unsure (1)..(272): unsure at all n locations; Clone ID: 701118408H1
cnagcctgtaaganatanatatagatatttcatatatatcctatggtccgtnagtncncttgttctgtancaaccctttcttccacntgttgagttncancatcgtcctctcnngagtccccatatcnaatacccaccggattcaacccccntntaacaantctcctcccatcccatttttcagcaccanagtttgaaacttntctcaattgggttgaggagagtttgactcanatttttatntttctaacgaagcagtagctattagaagt

SEQ ID NO: 37418 - DNA, 271 bp, Glycine max
  unsure (1)..(271): unsure at all n locations; Clone ID: 701118409H1
ggcgtttcgctttaccgcggtaacgctttgccggattcttctttgcctttggttncatgcagggaatgtgagtaatggtgctatgaatgggaacttgtgtatcacgggaacgttgtctcctgagaaagttgctgggaagatcgtgtgtgtgaccgtgggttgaccgctagggttcagaaaggctcggtggtgaaatccgccggagcgttggggatggtgctgtccaacaccgncgctaacggcgatgagctagttgcggatgctcatttat

SEQ ID NO: 37419 - DNA, 270 bp, Glycine max
  Clone ID: 701118410H1
gtacaggtaatccagttgatggctgtgcaatcttttggcgtaactcaaggttcaaactgttatacgaagaatgcattgagtttaataagctgggactcagggataatgttgctcaactatgtgtactagaattcattaatcaaaaggatctctcccatccagcttgacagggtctagtaaagttgtggtttgcaacattcatgtgctttacaatcctaacaggggagaaattaagcttggccaggttcgagtgctgcttgataaggctaa

SEQ ID NO: 37420 - DNA, 269 bp, Glycine max
  Clone ID: 701118411H1
ggaaggccattggtggaggcagtggaacacaaggaggatttctatgagcaccaagagccaagtggatgtgggtatggatgctttcagggttttgggttgagttggtgtagaagccatgaagaaggtaaaggcctggtggagcaaagggcaattcgtggctgagttgcaagttgaggaagataaaggagttttcagaagtgattgcaggccccaagtggaaaacattcatcagaaagataagcgggtatggaaggaagcagcagcagaag

SEQ ID NO: 37421 - DNA, 261 bp, Glycine max
  unsure (1)..(261): unsure at all n locations; Clone ID: 701118413H1
acggcagtgaagttattagaatctgtgttgtgttgtgttgtgttgagcagancnagagagtgagggataagaagagaatagggttagggttagggttagggttagggtttgattgaggatgccgaanaacaagggaagggaggtaagaacaggaagaggggaaagaacnaggcggacgacgagaancgggagctggtgttcaaggaggacgggcaggagtacgcgcaggtgctccggatgctggggaacgggcggtgcgag

SEQ ID NO: 37422 - DNA, 68 bp, Glycine max
  unsure (1)..(68): unsure at all n locations; Clone ID: 701118415H1
agcgganctaggnatgtggttggctgncgcagtaaagtagataaggaaaaantgnnntgntggtacga

SEQ ID NO: 37423 - DNA, 283 bp, Glycine max
  unsure (1)..(283): unsure at all n locations; Clone ID: 701118417H1
ctatggatatgtaccagaaagaacaacttcatgataataccatgnccaatgatgcaatctcaacatttctcccagatggggaggactgctggtttcagtttgggaggattatatccatcacatcgtacacaacagcaacagcagcatgcccctctgtcagtagcaatggtgtctccttttcatctgtaaacaatcaagatcttctccatctgcatggaacggatatttttccatcttcacactcaacatatcatncccagaccagtggacctcctggcattgg

SEQ ID NO: 37424 - DNA, 269 bp, Glycine max
  unsure (1)..(269): unsure at all n locations; Clone ID: 701118418H1
acggcagtnnaagttattagaatctgtgttgtgttgtgttgtgttgagcaganngagagagtgagggataagaagagaatagggttanggttanggttagggttagggtttgattgaggatgccgaagaacaagggaaaggaggtaagaacaggaagangggaaagaacgangcggacgacgagaagcgggactggtgttcaaggaggacgggcaggagtacgcgcaggtgctccggatgctggggaacgggcggtgcgaggcgatgtg

SEQ ID NO: 37425 - DNA, 278 bp, Glycine max
  unsure (1)..(278): unsure at all n locations; Clone ID: 701118419H1
ggtttctgnagcctccaaccagaaagagnngncaaatggctcccaaacatcctagtacgggtttgnntgttggattgaacaagggncncgttgtcaccnagaaggagttgcctccacgcccttcagatcnnaagggganaacnagcaaggagtgcactttgtgaggaacctcattcgagaggttgccggctttgcnnttatgaaaagcgaatnactgagttgctcaaggttggaaaagataagagggcactgaaagttgccaagagaaagcttggaac

SEQ ID NO: 37426 - DNA, 277 bp, Glycine max
  unsure (1)..(277): unsure at all n locations; Clone ID: 701118420H1
gaaggtatggttcgagaatctggaccactttttggcttaaatttgaagtcgatttggtggcttcacattcgttgtnttacctttttcttttacttaggtgatttatgtacattagtacaacatattcctgtatgaaaatgccatagtcaattttgcctctcaaggcgctgagagttgtgtcatgttgagtacttgaggtgctttcttgctattttttcggaggtagttgctcggtcttgctgtctaaagttatagtgttgttgaatgcaatttggta

SEQ ID NO: 37427 - DNA, 275 bp, Glycine max
  unsure (1)..(275): unsure at all n locations; Clone ID: 701118421H1
attaatctcaatatcantcctaagggacanaagggcaaggttgaagatgagctttttcacccatccagatctttcaagaaaaacannagnctcaacaaaaaacatggggncnnnnnnnnnnnnnnnnnnnnnnnnggattccaaggctgtggcgacaagagattcaaaacgctgccaccatcagagtctcttcctagggatgaaaccattggaggctatatctttgtttgcaacaatgataccatggctgagaatctcaagagacaatcttcggt

SEQ ID NO: 37428 - DNA, 274 bp, Glycine max
  unsure (1)..(274): unsure at all n locations; Clone ID: 701118422H1
ggcagtccaaatgtcttcaagtataagatgacagcaaaggaaagtgcaacctggcttgcaatcatcaatcaagaggaggccttagcaagagagctataccctgattanatccccccattagcctcagctggaggtagtggatctttgggatcaatgatagcaatgagtatgatgttgaagggggtgaggatgagcctaacttgacgtggaagactgcaaacatgagaatcttcacacatccaatcttggggatngaaagagtgagggtaactct

SEQ ID NO: 37429 - DNA, 271 bp, Glycine max
  unsure (1)..(271): unsure at all n locations; Clone ID: 701118423H1
aaggcnctcctgctatcattccttcccagcctggatttggctatcaacaacaacttatgcctggtatgacgccaggtgcagntcctgtgccgaatttntncgtgccaatggttcagcagggacaacanggacagcgtnccggtggaggcgtccaggtgnagttcancagtcccagcagccagttgctatgatgccacagcagatgcttcctaggggacgnntctatcgttatcctcctggtaggggtattcctgatgttcctatacctggg

SEQ ID NO: 37430 - DNA, 272 bp, Glycine max
  unsure (1)..(272): unsure at all n locations; Clone ID: 701118424H1
ggaacatcctgtntgggttngaaagcanctgngaanctcattangcactggaaaattctcagaggagatcctgttatgataacaaggggcaaagntcagggtgagaccgggcttctaaagcgtgtctgncgctctcaaaatcgtgtattgtaganagtanaaacctggtaaagnngcatataaagccagggcaagtcatgcaagggggcatctttacagtggaaagccccactgcatgcctccnatgtgccagttcctgacccangacaagg

SEQ ID NO: 37431 - DNA, 104 bp, Glycine max
  unsure (1)..(104): unsure at all n locations; Clone ID: 701118425H1
gttnatnatcctcacctattattctgcgnanagagaatcttccgtcggtgtaatatcctccgtgcgatangnncaccnagccatattattagagtganacgnga

SEQ ID NO: 37432 - DNA, 85 bp, Glycine max
  unsure (1)..(85): unsure at all n locations; Clone ID: 701118426H1
atccattcnaagcttcaatcttnnnctctcttcngccctangaacttcccctacaaacccttnnctacattgcgacnggaggtga

SEQ ID NO: 37433 - DNA, 265 bp, Glycine max
  unsure (1)..(265): unsure at all n locations; Clone ID: 701118427H1
gtnatagagggggaaagtnactgacgtgtggctgaattgtttacatggattgtttctgctgcttcaacaatcaggtggttggaggacgcacttcatgtggctctggcaagggcaagagccatcagggctcagttaagtatgntttagcctagttaaagggaaagcaaaccacccaatggaggactatcatgtagcaaaaattgtcaagcttggagggcaagagttaggactttttgctatatatgacggncacttgggagacagt

SEQ ID NO: 37434 - DNA, 278 bp, Glycine max
  Clone ID: 701118433H1
aacatggcagatgaggtggttctgctagatttctggccaagtccatttgggatgagggtcaggattgcacttgctgaaaagggtatcaaatatgagtacaaagaagaggacttgaggaacaagagtcctcttctcctccaaatgaaccggttcacaagaagattccggttctcatccacaatggcaaacccatttgtgaatccctcattgctgttcagtacattgaggaggtttggaatgacagaaatcccttgttgccttctgacccttaccagaga

SEQ ID NO: 37435 - DNA, 276 bp, Glycine max
  Clone ID: 701118434H1
gaaattctgattggaagtatgttactcagtgaattgagttttgttggagggagggatcaacatctcctcccagtcccatccattaagaggagggaatgcacacagccaaattgttcagtaatgaaacatgtgaatactcttctcaatgatcaacgaaggtgggagtgagtgctatccaaatgtacgagaaacttgaaacaggagctgtgccgcttgaatcaaaatccattccatatatggtaacaaagaaccaaagttgacagagaccttggtgaa

SEQ ID NO: 37436 - DNA, 274 bp, Glycine max
  unsure (1)..(274): unsure at all n locations; Clone ID: 701118435H1
agangtcatagacacaacacaagtnnatgtctgttgttgagtcaggtgaacacaacaacatcagaggagtacctactcatggtggacgctatgttcagtacaatatctatggcaatctctttgaagtttccagaaagtatgtccctcctattcgccctgtgggtagaggcgcttatggtattgtttgcgctgctgtaaatgcagagacaggtgaggaagttgccattaagaagattggcaatgcattgataacagaatagatgccaaaaggacc

SEQ ID NO: 37437 - DNA, 272 bp, Glycine max
  unsure (1)..(272): unsure at all n locations; Clone ID: 701118436H1
gtcctgtnnctaaggacattgaagtcaatggnaaggnanctgccgtggttantccagaggaatccatcggtgttgttgatgnttacattcatcaggctatggncattcntancatctgcatataccacaagcaagatgtttntctaagntttgcttgacgagtaatcctgagaattctgtctctaccaagactatcaatggaggaggaaggaaccccgtgtttaatgagnntcttcgtctaagtgttaggnctgttgattctgctgtcaaat

SEQ ID NO: 37438 - DNA, 104 bp, Glycine max
  unsure (1)..(104): unsure at all n locations; Clone ID: 701118438H1
cattnatcncccattcatttnntctgcanctgnantctccaaaatggcgtccttagaggaggagctcttcnncttnaaccgccaggcaagttcaagatcgcgcg

SEQ ID NO: 37439 - DNA, 110 bp, Glycine max
  unsure (1)..(110): unsure at all n locations; Clone ID: 701118439H1
tcnagccncnacggngcctttctgtagcncactctngcgtggaacaacaggttccagtaaaaaagcttgcgggcangatggaattnctgatcgaggagaaagtgangcgc

SEQ ID NO: 37440 - DNA, 267 bp, Glycine max
  unsure (1)..(267): unsure at all n locations; Clone ID: 701118440H1
attgtngtgtgcatttgctatgcatggcaggtttttnagnctcttatgctcagcttactcctacgttctacagagaaacatgtccaaatctgttccctattgtgtttggagtaatcttcgacgngatctttcaccgatcccgaatcggggncagtctcatgaggcttcattttcatgantgctttgttcaaggttgtgatggatcagttttgcngaacaacactgatacaatagaaagcgagcaagatgcacttccaaatatcaact

SEQ ID NO: 37441 - DNA, 268 bp, Glycine max
  unsure (1)..(268): unsure at all n locations; Clone ID: 701118441H1
attggccgtttggttgccagantcgctctgcaaagagacgatgtggagctcgttgccgttaacgaccctttcattaccaccgattacatgacatacatgtttaaatacgacagtgttcacggacactggaagcatcacgattcaccgttaaggacgagaagacccttctcttcggtgacaagccagttcactgnttttggacacaggaaaccctgaagagtcccangggggtcaactgggagctgatatcattgttgagtccaccgga

SEQ ID NO: 37442 - DNA, 246 bp, Glycine max
  unsure (1)..(246): unsure at all n locations; Clone ID: 701118442H1
cacaaccttaaacctttctttcttntnaactttattgattgcattctgagaatagaactaananggtctagaacatggctaacgcaattgcagcttcttntntggttctgcttctggctttcccactgtatttggagctgaccatgangttggtgacactagtggatgggccctcggagttaattacaacncctgggcctctggganaactttcacagttggtganactttggtgttcaagtatga

SEQ ID NO: 37443 - DNA, 267 bp, Glycine max
  unsure (1)..(267): unsure at all n locations; Clone ID: 701118443H1
gcaattttcccctcggaagagacatcgaagaaaatcacgtcacggcaatggaggaaaagcacgcagcagccaatgaatctgcacacgccgaatccaacggcgtctctcacggcgccgaccacggttggcagaaggtgacctagctnnnnnnnnnnnnnnnnnnnccgttaacgccgccaacagcgccgattcccgtgcgaattccaacaagctcgttccgaacggcacgctgtccggcaacgatggcgttttccggtcgctcgagct

SEQ ID NO: 37444 - DNA, 267 bp, Glycine max
  unsure (1)..(267): unsure at all n locations; Clone ID: 701118444H1
gtgaaaattctgatgaggaggaagaacatgaattaactcaatgggaggcaattatctggcttgctatcttgacagcatgggtatctatattgtctggnnaccttgtagacgccatacagggagcatctgagtcattgaatagtcagtggcttttatttctgtcatcntgcttccanttgtaggcaatgctgcagaacatgccagtgctatcatgtttgccgtgaaggacaagcttgatatcactattggagttgcnattgggatcgt

SEQ ID NO: 37445 - DNA, 268 bp, Glycine max
  Clone ID: 701118448H1
ggcctcgagagcagtgctattgttggctatgtgtgtgcttccggccatggttgtggccattcgcccagcaaagaaccctttttgcgtgaagggtcgcgtctactgtgacccttgccgtgctggttttgagacctcagcaacacctacattgccggtgctgagattatgttgcaatgcaagagcagggttagcaacgaggttgtgtacaccaagaaggggtacactgactcaactggagcatacacaatgtacgtggacgaggatcacg

SEQ ID NO: 37446 - DNA, 276 bp, Glycine max
  unsure (1)..(276): unsure at all n locations; Clone ID: 701118449H1
ttctggctctggctctgcccttttnggttttctctcgttaccgaaaccagaagaaccatttgtggtggacatggatctggaccagtggatctccaaggtcaaagatggccagcatcttcttgaagacgagcttnancttctctgcgaatttgtaaaagagatccttantgaggagtccaatgtgcagcctgtcaatagtccagtgactgtttgtggtnatattcatggtcaattccatgatctaatgaaacttttccagactgggggtcatgtncc

SEQ ID NO: 37447 - DNA, 266 bp, Glycine max
  unsure (1)..(266): unsure at all n locations; Clone ID: 701118450H1
ttttcatttttcttaatttaatttaatttcatcccttttttttggggggaganaagaaagaaagtatttccttccatttttctcagatctgcgcaacctcgttgccccccgaacatgggaaactgctgcgccacgcgtccacggacgaaacggcgnacaagaagggcaaaaagggaaaaaangaaaaccccttcgcgatcgactacggtttcaacgccaccgccgcgaacgggtcgaagctcaccgttttgaagtccccgacgggc

SEQ ID NO: 37448 - DNA, 266 bp, Glycine max
  unsure (1)..(266): unsure at all n locations; Clone ID: 701118455H1
gttatgatattggagtgatgagtggagcagccatatacataanaagggacctgnnagtctcngacgagcaaatcgagatcctgctcggaatcatcaacctatactctctgataggctcatgtctcgncggcagaacctccgctggataggtcgccgttacaggattgttttcgccggcgccatcttctttgtgcggagnacttctcatgggtttctcccccaattatcctttctcatgnttggccgtttcgtcgctggcatnggca

SEQ ID NO: 37449 - DNA, 267 bp, Glycine max
  Clone ID: 701118456H1
cccctgaagtttactggaagtcgaagcttcccaccactccaatgccgaaagccattacagatatccttcacccagatttggcagaagacaaaagcacctctgtggccgtaggaaaggggggcgtaaacgttaacgcagggaaacaaagccaggaggcacatcagtgaacgtaggaaaaggaggagtgaacgtgaacacagggaaaggaaagcccaacaaaggcacatcagtgaacgtaggcaaaggtggagtgaacgtaaacacagg

SEQ ID NO: 37450 - DNA, 267 bp, Glycine max
  Clone ID: 701118457H1
ctcaaccttctttcttcttatatatcgaacatggctaagtatcattcaagtgggaaaagctcttccatgactgctatagccttcctgtttatccttctaatcacttatacaggcacaacagatgcacaatccggggtatgtatggaagacttggcaacaacttaccaacccctcaagaagttgtggccctctacaatcaagccaacattcgcaggatgcgaatctacggtccaagcccagaagtcctcgaagcactaagaggttcca

SEQ ID NO: 37451 - DNA, 264 bp, Glycine max
  Clone ID: 701118458H1
atggcccaagtgagggtgttcctcgggttctggcatgctttagcaataatctcctccgtggagagcccctcaagcttgtggatggtggccaatcccagaggacttttgtgtatattaaggatgctattgaagctgtcttatgatgattgaaaatcccgccagggctaatggacatatttttaatgtgggaaacccaaacaatgaggttacagttaggcagcttgctgaaatgatgactcaggtttattcaaaggtaagtggaga

SEQ ID NO: 37452 - DNA, 268 bp, Glycine max
  unsure (1)..(268): unsure at all n locations; Clone ID: 701118459H1
ctnaacaacagcacaaagcgggttactgtctgttcaagctaccatcctctctctctctttcttagtgcctccttgccagaagttaaaatggcccaagaaactttcctattcacatctgaatcagtgaacgaggggcaccctgacaagctctgtgaccagatctccgatgctgtgctcgatgcatgcttggagcaggaccctgacagcaaggttgcctgtnaaacctgcaccaagaccaacatggtgatggttttcggagagatcacaa

SEQ ID NO: 37453 - DNA, 268 bp, Glycine max
  unsure (1)..(268): unsure at all n locations; Clone ID: 701118460H1
tctctctcacccagatcttgtagcaatggcgagcgctnccactccacgcgaagagttcgtntacatggcgaactggcggagcaggccgagcgctacgaggagatggtggagttcatgnagaaggtctccgcctccgccgagagcgaggagctgaccgtggaggagcgtaacctcctctccgtcgcctacaagaacgtncatcggcgctcgccgcgcctcctggcgcatcatctcctcaatcgagcagaaggaggagagccgcggcaac

SEQ ID NO: 37454 - DNA, 270 bp, Glycine max
  unsure (1)..(270): unsure at all n locations; Clone ID: 701118463H1
gtttttactctaaatttcttatcttgaaattttgcgcagtttcagatttagaattgttgatcagaaaaggttgagggtgaagaaagagactagtgaaaagcaagtatggggatggactactatgggattttggaggttgacagaatgcctcagatgaagagttgaagagagcctacagaaagcttgcaatgaaatggcaccctgacaagaacccaaccaataagaaagagngctgagattcaattcaaacagntatctgaatcctacgag

SEQ ID NO: 37455 - DNA, 148 bp, Glycine max
  unsure (1)..(148): unsure at all n locations; Clone ID: 701118465H1
gnatagggataagagagcagcangtaatgatggatgcgctgataaaggtgcagttcnacgcaccgcaaccatnnganaacgggtctttcgtnttanggcatgtcngaggacttacntncnctgcgtcaanggccannntcgttgattc

SEQ ID NO: 37456 - DNA, 275 bp, Glycine max
  Clone ID: 701118466H1
aaccctagctggataggtcaaacatcatcatgtcggacgaagagcaccatttcgagtccaaggcagacgccggtgcctccaaaacctaccctcagcaagccggtaccattcgcaagaacggctacatcgtcatcaaaggacgccctgcaaggttgtggaagtttcgacttccaaaactggaaagcacggtcacgccaagtgccactttgttggaattgatattttcactgccaagaaacttgaggatattgtgccctcttctcacaactgtgatg

SEQ ID NO: 37457 - DNA, 271 bp, Glycine max
  unsure (1)..(271): unsure at all n locations; Clone ID: 701118468H1
cgaaactgaggtcgtagacagaatggcgaaaacgacgtcgttgttgctctttaacactgctcctcttcagaancttagctctcatccaggcgangaaatcganggaggatttgaaggnagtgacccacaaggtttnctttgatgtngagattaatggaaaagaagcaggtcgtattgtgntgggtcttttggaaaggctgttccaaaaactgcagaaaactttcgagctctttgcactggnganaagggaactggtaaaagtggcaagnct

SEQ ID NO: 37458 - DNA, 270 bp, Glycine max
  unsure (1)..(270): unsure at all n locations; Clone ID: 701118469H1
caaatttaacaatatctgagaaaagaagatgctcttccctgttactcctggaagggaggcccaaagattctccaaaagcagagaagactggtgtcaacatcctttcaaaatccgaaattgatgcagagctatcgaaaatgaaggtgtgacacctcaagaggctgcggcggcagctgcaaaagcagttgcagaggcagangctgccattgccgaggctgaggcagcagctagggaggcagatgctgcagaagccgaggcagaggctgcacg

SEQ ID NO: 37459 - DNA, 263 bp, Glycine max
  unsure (1)..(263): unsure at all n locations; Clone ID: 701118474H1
gggcacttctccaatctcaacaactttcgtgtagtgcactgttttgctatagtaacccattaattaaaccganctacgtagtagccatgaagagaggcagagaagagagtaagttagacatggctaattgcttgatgctttgacgaaagttggagagagtgaaaccaattacccaatatcaaagggtagtgatattggtgatttcaagtgcaagactgcaatagaaggttctcttcntttcaagcccttggtggccatagagc

SEQ ID NO: 37460 - DNA, 106 bp, Glycine max
  unsure (1)..(106): unsure at all n locations; Clone ID: 701118476H1
ggattattcacagnctcgcatgtttggntctcaccttcatannccttacaatccntgtaaaggcagaaacaagcacaancnatntatgaaattcccnacagcantg

SEQ ID NO: 37461 - DNA, 237 bp, Glycine max
  unsure (1)..(237): unsure at all n locations; Clone ID: 701118477H1
caaaaagcaccctctncttcctctcctccccacntctnnttctctnttcacncctcacccttatctcctccattgcagcttctgctttttcttcnaatcaacanacaaacnanccatccccatttcnnntcagaaganacccttttctntcccaaggctcctgaaccgttgtgctttttttgttttttaaatttcnttnanngnanaactntttctnccnanggnggaacattnncc

SEQ ID NO: 37462 - DNA, 217 bp, Glycine max
  unsure (1)..(217): unsure at all n locations; Clone ID: 701118479H1
atctgtgacgagnntcatggcctcgagagcagtgctattgttggctatgtgtgtgcttccggccatggttgtggccattcgcccagcaaagaccctttttgcgtgaagggtcgcgtctactgtgacccttgccgtgctggttttgagacctcagcaaccacctacattgccggtgctgagattatgttgcaatgcaagagcagggttagcaacgagg

SEQ ID NO: 37463 - DNA, 270 bp, Glycine max
  unsure (1)..(270): unsure at all n locations; Clone ID: 701118480H1
anagtgtggtaaaagaagtcaanagtgaaagcaatggtatagggaatactggncgttcatgataacatgaacaaacctactgcagataaagaaanggcccctcccttacccacaggnaaaaagaaagtacaagctgataaaatggttctgttaatggnngttcattagcaagccttggggccgtgcatctgcaaaacccaagccttgcccctcatcagcagaacataatcaacaaaatttccaaatcccantgtatnctactgaagctgg

SEQ ID NO: 37464 - DNA, 260 bp, Glycine max
  unsure (1)..(260): unsure at all n locations; Clone ID: 701118484H1
gcaaattcttgtgggcatccaagacctgcttgatcaaccaaatcctgctgaccctgcccagacggagggttatcatctattcatccaggtagctaacctaaaaatcctacacttttcactgtttattaanagaacttaaatttgttggctaccttcactttttattttttgaattttattatattattactttacaatgttgggaactcatggggatactcaaacaaggatgggagtcaaaattaccccaagaagaggga

SEQ ID NO: 37465 - DNA, 218 bp, Glycine max
  unsure (1)..(218): unsure at all n locations; Clone ID: 701118485H1
gggatcatccacaagattgaggagaccctccatgtgggagggcacaaganagaggagcacaaaggagaacaccatggtgagcacaaaggtgaacacaaaggagaacaccatggtgagcacaaaggtgtacacaaaggagaaaacaccatggggagcacaaggagggacttgtggataagatcaaggacaagatcctggtgatggccatgacaagggtg

SEQ ID NO: 37466 - DNA, 269 bp, Glycine max
  unsure (1)..(269): unsure at all n locations; Clone ID: 701118486H1
ggccactctcttttccttcttcccattttgcccttgaattttctctagattttcctcatttccctccgaacatatcatatcanacacccatatagcnccaaaagccacaacctgcgaaatccaaaaagaacnagannnnnnnnnnnnnnnnnnnnnnnnnnnnntntcgtattccattccataatgttgtgtaaactggttccggtgccgcgcaagaaaaaacccggtttgnacccggtttaccttaacgtctacgacctaaccccaat

SEQ ID NO: 37467 - DNA, 265 bp, Glycine max
  unsure (1)..(265): unsure at all n locations; Clone ID: 701118487H1
aaatgttcagaaaccagtacgacacggacgtgaccacatggagccctgcggggaggctgttccangtggagtacgctatggaggcggtgaancnnggctcggcggcgatagggctccgatcgaagacccacgtggtcctgcatgcgtcaacaaggccaactccgaactctcctcgcaccagaagaagatcttcaaggtcgacaatcacatcggcgtcgccatcgctggcctcancgccgatggccgcgtcctctcccgctacatg

SEQ ID NO: 37468 - DNA, 270 bp, Glycine max
  unsure (1)..(270): unsure at all n locations; Clone ID: 701118488H1
cacactcncatctcacncacccctcgcatccaacaatgtctctcaccattccctccaacctctccaagcncgctgccctccgncccanactaagcccanagctaaggtcngccgcacacaaccaccatngtctgaagcaccnnnnnnnnnnnnnnnnnnnnnnngtgtcntccgacctgaaggcgttcttagccgcgctggcccnnncctaanatcctnctanacgncnctctccccgccggcgangaacatctgggggtcaaaccaatg

SEQ ID NO: 37469 - DNA, 264 bp, Glycine max
  Clone ID: 701118489H1
ggtttccactagatcaaaagctgctggctttgatttgaagacatactgggccaacctaatggtgcagatcaatcagaagctggacgaagctatcccggttcagtttcctccgcagatatatgaagctatgaggtattcatccttgccaaaggtgccaagcgagccccacctgttatgtgcatctctgcctgtgaactctttggtggcagccgccttgccgcctttcccactgcctgtgcccttgaaatggttcatgcagcttca

SEQ ID NO: 37470 - DNA, 264 bp, Glycine max
  unsure (1)..(264): unsure at all n locations; Clone ID: 701118490H1
cccaacaagaganacaaaaanaaaagaaagaagaaantgaaaacgaaaacttcacgttcctgaaaganagacagananaangttaaggacttaaatngtttgtttcagnncgngaattccnttagatctcttgcatttgtaacngtttnncggggnttttgctttgtacgcaacaagttgtactttttttncctgtgncggnaactgagtttcatcggaaacttcgtnncttgatcgaagtttggttcatcggancgagttcga

SEQ ID NO: 37471 - DNA, 264 bp, Glycine max
  Clone ID: 701118491H1
aaaaattagaaagtactgtgacatgacactcttatcatgtgcctatgctggaactggaaatgttctcaaggttcaaaatctgttgggtcattgttcacaacatcttgataaaggtgaaactcaccaaggtcctgctgtgttggaattgctatggtagctatggctgaagaattgggacttgagatggcaattcgatcattagaacatcttctacaatatggagagcagaatattcgccgagcagttcctttggcccttggtcta

SEQ ID NO: 37472 - DNA, 266 bp, Glycine max
  Clone ID: 701118492H1
tgcagagagtgatctagagtcttggattgagcgtttactaaaacaactccaacaagtaaacacacagatgcaagcttgggtatcatctggtggttcagaaatggtttctcatactttgactagacaccaagaaattcttcagatctcacccaggagttttatcgtcttcgctcaagtcttaaagctaagcaagaacatgcttcactgctagaagattttaaagaatttgatcgaacaagattagatttggaacaagtagactctga

SEQ ID NO: 37473 - DNA, 98 bp, Glycine max
  unsure (1)..(98): unsure at all n locations; Clone ID: 701118493H1
gcgaagttctgttacggcgttaactttcgagatcacggtttcacaacgtggncggcgctgcactgcgccgctgtgttccttccaananaaacanaacg

SEQ ID NO: 37474 - DNA, 265 bp, Glycine max
  Clone ID: 701118494H1
tgacccaacacagccacatggtctaaagctcatattggaagactacccttatgcagctgatggaatactaatctggtctgcaatagaagactgggttcgaacctatgtgaaccattactaccctcactcaagccttatagcaatgacaaagagttacaatcttggtactctgagtcaatcaatgtaggccatgctgatctcaggcatgaaagttggtggccaacattgaacaatagtgaggatcttgtgtccattctttccacat

SEQ ID NO: 37475 - DNA, 267 bp, Glycine max
  Clone ID: 701118495H1
ggctgctggttttccctcgcattatttcaatgggctcggttttcaatggccctccagcgccttctttctcccaaaggcatcttatactcggaagatacagaacagtataagctgctaaagctaaggactgcctagtttgagaagtcatcacaccagttacaaggatagaagtatgttttaataaaaaaaaaaagaggatagtagtatgttggaccatctcagcttatgggttaagcgagttaagaccaggacaaccggctaaaaagt

SEQ ID NO: 37476 - DNA, 258 bp, Glycine max
  unsure (1)..(258): unsure at all n locations; Clone ID: 701118496H1
tgagcaactaactgattttntatgttgtctggagtaggaagatgttgattggncatgaataggagctccatctataccaatcttcttcaattgccctgcatcccttagttcatataataactcggtgttgtaagggccgctcgcgggggcagctaaagggagggccaagccattcaatccaaattcatgctttgttccaaatggatacccatctgcgtattattatggaggtaaggttatgatgggcaaggtgattgg

SEQ ID NO: 37477 - DNA, 278 bp, Glycine max
  unsure (1)..(278): unsure at all n locations; Clone ID: 701118501H1
ggctccctgtgaatccttgaaggtanttataagcaatttgagatcgttcatcatggctccgtagttcaacatattcaatatcaccagaaaatgaaaagaactccttaatgtcttgctcagttgcaataactcaggatccagattaccagcttccacctgctgcgttaggtcatctgtaagagaaactcaaactcctggtggtgctgactctgctttacggaaggcagaggatgtggtctccggcatgctagccaagggctttatcttaggaaaagatg

SEQ ID NO: 37478 - DNA, 289 bp, Glycine max
  unsure (1)..(289): unsure at all n locations; Clone ID: 701118502H1
gaggtactcaatgctctagacgatgccggctttccagcaaacgatgaggangttcagcaagaagtggttgcaatgtctaaaacaaatatatttaggcccgggattgatgttacacaggcagttcttttgcctcagttgacttggaggcgacaggagaaaacagaaatggtagggccttggaaagctaaggtgtatgatatgcacaatgtagttgtgagcataaaatctagaggagtnacctggagccatgacagatgatgagctctttctcttgcnatgaaaatgaaac

SEQ ID NO: 37479 - DNA, 283 bp, Glycine max
  unsure (1)..(283): unsure at all n locations; Clone ID: 701118503H1
ttttctgttttggttttttctttttgtatagataatagttacttttttttttctttcttttctgcagcttaatggcatgagactgtgaggaatatcttatgtgctattattgantattgtatgcaaatgttcaaataaggtcatttcgttgcctgtctcatcttccttttgtaggcaagcgtggcagaaattgggtgctatgcctcctgaagatgcaatgcagaagtacattgatatgtgaccgagatctatcctacttggctgatggttcactttgaggana

SEQ ID NO: 37480 - DNA, 286 bp, Glycine max
  unsure (1)..(286): unsure at all n locations; Clone ID: 701118504H1
aaaaaataaccatgatgatgcatgtccnttgcttctcagtgttcctagcagcagcaatgcaaggaacactggcggttgaatacagtgtcaccaacaacgccctctcaacccctggtggtgttcgtttccgtgatgcaataggggacgaatacgccaaacaaannttgactcagccacccaattcatatggggggtcttccagcaaaacgctcctgctgatagaaaagatatacaaaaaataaacttatttgtggaggacaggttgtgccaatggtgttgttgcata

SEQ ID NO: 37481 - DNA, 282 bp, Glycine max
  unsure (1)..(282): unsure at all n locations; Clone ID: 701118505H1
cagcacttggctgagaagctagacttggaaatgtctgccctccagtatatgataaaagaataccctggaaacgaggaggagaggatgagagcagccattgggaaatttggactgtctggcaaagcgcaggtcatgcctatgaagaatttatccgatgggcagaggagccgtgtgatattcgcatggttagcttatagacagcctcncctgctacttttggatgagccaacgaaccattggatatagaaacaatgactcatggctgaggcntgaatgangggg

SEQ ID NO: 37482 - DNA, 285 bp, Glycine max
  unsure (1)..(285): unsure at all n locations; Clone ID: 701118506H1
cccatttctcgttctgaaaatcggagttaaacactattattatatttgtnatttgtgatatcttctatctgattcagcatcatggttcagctaatgaggtctgatacggataatcactgtttgaaaaangtgaagttggaggttcaagatgaaatcccccctcttcacacccacaagcgacccaaattggaatctccacccaagtgtggttcaagcgatgaatcccttcaatcccaccagcttcgtataaccccttggatgagccaagccctttgggtttgcgtc

SEQ ID NO: 37483 - DNA, 285 bp, Glycine max
  unsure (1)..(285): unsure at all n locations; Clone ID: 701118507H1
tttatagaggttgccttcctgatggcaaggaacttgctgttaagatcttaaagccatctgatgatgttttgaaggagtttgttctagaaatagaaattatcactaccttaaatcacaaaaacattatttccctccttggattctgctttgaagatggcaatcttcttttggtctatgatttcttatcaagaggaagccttgaagagaatctccatggtaataagaaaaatccacttgtgtttggttggactgagagatacancgtggcaatgggtgttgctgagg

SEQ ID NO: 37484 - DNA, 286 bp, Glycine max
  Clone ID: 701118508H1
ggcatcctccatgctttgggtccgcaatcttcgccgtttcatcggatccggcgccggcctcggatccgaagccttgatggagcttgaaactaagagaattttgctcgacatttttaaggaaaagcagaagaaaaccgccgaagctgctacaattcccactttctacaagaagaaacctgaagatggatcaatcagtcatagagttcagagattggcaaagtatcgctttctaaggaaacaatccgatcttttgctgaatgctgatgatttggatgcaagtgggtgt

SEQ ID NO: 37485 - DNA, 286 bp, Glycine max
  Clone ID: 701118509H1
ggacaatcggggaaggcgtggaggcaggtcatatgattcaggattcactttctactttaaccctgttgatttattctggtactgggatccatattattataggaggcgaaggctacaagctgatgatgacaagatgaacttcattgaatcggtcttctcctttgtatttggagatggtgatcccaatcaaggaattgaagaagagagatggaagttggtaataattgaggactgaattcagtgattgggcaatacatagcatctaatggtggcgttgttgcagctg

SEQ ID NO: 37486 - DNA, 285 bp, Glycine max
  Clone ID: 701118510H1
gtgaagtttctgaaaccaaacaaagccgtcatcgtccttcagggacgctacgccggcaaaaaagccgtgatagtgcgaacctttcgatgaaggcacgcgcgaggcccctacgggcactgcttggtggcagggataaagaagtaccctgcgaagtgatcaagaaggattcggccaagaagacggccaagaagtcgcgtgtgaaggcgttcgtgaagctcgtgaataccagcacctcatgcccacgcgctacacgctcgatgtcgatttgaaggacgcggttacccc

SEQ ID NO: 37487 - DNA, 289 bp, Glycine max
  unsure (1)..(289): unsure at all n locations; Clone ID: 701118511H1
tctctcctctcaagatgcagatattcgtgaaaactttgaccggcaagaccatcacccttgaggtggaatcctnccgacaccattgacaacgtaaaagctaagattcaagacaaggaagggatcccancngaccagcagagacntaactttgcgggnaaacaacttgaggaaggacggcacccttgccgattacaacatccaaaaggaatcaaccctccatctcgtgcttcgcctcaggggtggcatgcaaatctttgtcaagactttgaccgggaagaccatcaccttg

SEQ ID NO: 37488 - DNA, 284 bp, Glycine max
  unsure (1)..(284): unsure at all n locations; Clone ID: 701118512H1
gttaatggagaagatccctgaaattgtggcagttgaaccaattngctgatgaagaaactggtcttgagntcaatgaagataatatagagaaggttcttgaggaaatgagaccctacntggatggggctgctgatggaactctgaattggtggccattgatgagccanttgtgaaggtccgaatcacaggtcctgctgctagtgtcctgactgtgcgtgtagctgttaacacaaaagttgcgagaaaaatacctgcnatagcagcattcagcttttatgatattt

SEQ ID NO: 37489 - DNA, 287 bp, Glycine max
  unsure (1)..(287): unsure at all n locations; Clone ID: 701118513H1
cttctccctcttctttccacccatttcccctttnctctctctctacaaaacccacttctttcaaccctcgccctctcttccctcgcaccatgcacgcctcgcgcatccaagatgccgtnggaggggcactggccctcgtccaatcgtcccccgctacgtggcagtccgcgcttctcagcaacgcgctgatctttttcttggggtctccgattttggtcagcgggttgtctctttccgggatcggtgctgcgtttctgctcggaagctcattggcgcgttttgggctt

SEQ ID NO: 37490 - DNA, 290 bp, Glycine max
  unsure (1)..(290): unsure at all n locations; Clone ID: 701118514H1
tactactnaagctagaaagacatgaacaaagtgggttgatttagatttgaccaacagcttntncnacctctttgaattttattggaagacatggattgtncatcatggnttaacacttccttggatctcagcattaatcctcgcagagttcatgaagaagctgntgataaggtggtagaaagcaagcttttctctttgggaatgcccaagtttaacgtcgaagaagagtctactnaagactggaggaggaactgaagcgggtgagtgcagaaaacaagaagttggccgaa

SEQ ID NO: 37491 - DNA, 229 bp, Glycine max
  unsure (1)..(229): unsure at all n locations; Clone ID: 701118515H1
ctcaaatattaattttaggttcttcgttacgcgttgtgttgcgttgtgcgtgagaaagtgcgcgtggnaaaaagcatggctctcagctccgagacgnacntcggaagtcgttccttncaacctaaggcttctctcgtgctcatccgatcggcntcctcccgggaggcncgccgaacgcgatcgcaacatatcagntgtgccatagatggagncatanagatgatgacta

SEQ ID NO: 37492 - DNA, 294 bp, Glycine max
  unsure (1)..(294): unsure at all n locations; Clone ID: 701118516H1
gtttgctcttcaagcaatgtctgaccattcctggtaatgttgagaatgtggcggaaactgttaagccacccagcatttgatctgcgcaatcccaaccanagtgtactctctcattggaggtttctgtgggtctccggtgaactttcatgcaaaggatgggntaggctacaagtttttgggagagattgtgctgcaacttgacaagctaaatcctcaggttgcctcgagaatggtgtcagccttctcaagatggaggcgttatgatgaagacagacaaaaacttgcgaagcccag

SEQ ID NO: 37493 - DNA, 285 bp, Glycine max
  Clone ID: 701118518H1
attatttccaatgctagctgcacaaccaactgccttgccccacttgccaaggttatcaatgacaggtttggcattgttgagggtttgatgaccactgttcattccatcaccgctacccagaagactgttgatggaccatcagccaaggactggagaggtggaagagctgcttcatttaacatcattcctagcagcactggagctgccaaggctgttgggaaagtcctccctgctttgaatggaaaatgactggtaggcatccgtgttcccaccgtggagtctctg

SEQ ID NO: 37494 - DNA, 283 bp, Glycine max
  unsure (1)..(283): unsure at all n locations; Clone ID: 701118519H1
cagactttggccttgcaaaggatggtccgatgggggaccaaacccatgtttcaacacgagtaatgggcacatatggatatgctgctncctgagtatgtcatgactgggcatttgacagctagaagtgatgtgtatggttttggggtggtgctgcttgaaatgctattggtagaagagcattagacaagagcaggcccagccgagagcacaacttggttgagtgggcccgtccatactgnatcataacaaaaagcttttgaaantctagacccaaaatagaggg

SEQ ID NO: 37495 - DNA, 289 bp, Glycine max
  unsure (1)..(289): unsure at all n locations; Clone ID: 701118520H1
tttttatttgttcctgagttccaatggctcttcaggctgcttccttggtttctgcttctttttcnattgctaaagagggaaagtctggtgtatctctcagggacnccacaatgtttggtgtttcattgtcggatactctcaaatctgacttcagctctccntcatcgacttgcaaaagggaattccancaaaaattnggcccgttnagggttcagntcagtggcaacaacaactccaggagtcaccaaggcttcaccagaanncnannaaactttgagnnaaggcagtg

SEQ ID NO: 37496 - DNA, 281 bp, Glycine max
  Clone ID: 701118521H1
ctgttttgtagtctttatttacgactcctttcatttttcgtactcaatgattgcaattcatccgttttgggtactgtttgaggtttaaacgttttgaaagtttggatctttaatctactggttttgtttccgtcacggatgtcttcagaatctggtcctgctcactagttagaatttgagtggggtaaattagaactgttccggtttgtggaatgctcatcaatatcacatcccataagttgggatctgtttctctaaagtcaacacttgcttataggata

SEQ ID NO: 37497 - DNA, 255 bp, Glycine max
  unsure (1)..(255): unsure at all n locations; Clone ID: 701118522H1
ttggcttctgcagatgttgagtaccgttgctttgtcggtgggctcgcttggnncactgnggaccatgccctcgagagagccttctctcagtacggcgaaatcgttnaaacgaagattatcaacgatcgtgagactggcagatccaggggacttggatttgtgaccttcgcctcggagcagtccatgaaagatgcgatcggagcgatgaatggacagaacttggacggccgtaacatcatgtcaatgaagctcatc

SEQ ID NO: 37498 - DNA, 276 bp, Glycine max
  unsure (1)..(276): unsure at all n locations; Clone ID: 701118523H1
tttttaagtttcttgcttctttctctctgaaagaaaattgaagtcctaaccagttggctcttttgttttatcgttctccatggctcagaaaaccgagaaagaagaaaccgacttcaaagttccggaaacgattacgctttgcgtcaacaactgcggcgtcaccggaaaccctgccacgaataacatgtgccagaagtgcttcactgcctctaccgccaccacttccggcgccggangtgcggaatagcttctccggcgaccagatccggcgtctcc

SEQ ID NO: 37499 - DNA, 288 bp, Glycine max
  unsure (1)..(288): unsure at all n locations; Clone ID: 701118524H1
ctgatgctccanaagcgacactcgancttctngnacncngnanttaacncgagctcatacatctaagcggntntgncgnaattggnaggtatncagntncaccngangtnagaacgncgccaacggcgtngagagggnttggaaacatggngnggattttaccagagcataaggcctactcagatgggtctttccccncaatatganaggcctctgctgcgttcaatgaacccncccagttgnggaatatgnngaccagcattaggcacagatatcctgtcggggcat

SEQ ID NO: 37500 - DNA, 112 bp, Glycine max
  unsure (1)..(112): unsure at all n locations; Clone ID: 701118525H1
gtatgtttnggttccgttgacactaagcagacctncangtttnaattttgactagagagttgtttaaattgatgatnggaatgancangttaaaatttncnaattagngatt

SEQ ID NO: 37501 - DNA, 282 bp, Glycine max
  Clone ID: 701118526H1
gcgatttatcactgtcgaattaaatcgaagattcagaaaaagaaaagcattttacgttcgaagtcgagtcgaagagttttgggagccaaatgggtctctgagcatcataaggaaaatcaagcggaaagagaaggaaatgcgaattctaatggtgtaagttttttcttcaattccaatttctctttgattctctccattcataatacattgatatctgaatcagttgttgttctgcagcggatggacaatctgggaaaaccacaatcgttctaaagataaacg

SEQ ID NO: 37502 - DNA, 290 bp, Glycine max
  unsure (1)..(290): unsure at all n locations; Clone ID: 701118527H1
ggcgtgagtncattcggatcatgcagtgactttaccccagagnatgtggagggttatggagaagctgaanggcccagggggangaactttgaggttntgcngcnaaccncaaannaagcaggcnnnncaaaccanagagcacacanncaaaagngccngggacanccngncnttcaagganaaaatctgtgggaagccangctcggtacttcgagctttcaaaccctccccatttggttattattggaccagatgggaaaatcttcattctaangttgtgaggcattgag

SEQ ID NO: 37503 - DNA, 279 bp, Glycine max
  unsure (1)..(279): unsure at all n locations; Clone ID: 701118528H1
gccgatttgaaaagatgagtaagcttcagagtgatgctttgcgtgaagccanctcaggaatcatggccgattccaaggagaagaatcgcaaatttgtggagaccatcgaactccaaatcggtttgaagaactacgatccacagaaggacaagcgttttcagtggctccgtcaagttgcccccacatccctcggcccccaagatggaaaattttgcatgcttggtgatgctcagcatgttggaagagggcagagaaggtanggatgggntggattgatgt

SEQ ID NO: 37504 - DNA, 291 bp, Glycine max
  unsure (1)..(291): unsure at all n locations; Clone ID: 701118530H1
tcccagggcgaggagaaagatggaggggaaggagcaggatgtgtcgttgggagcgaacaagttccccgagagacagccaattgggacggcggcgcagagccaagacgacggcaaggactaccaggagccggcgccggcgccgctggttgacccgacggagtttacgtcatggtcgttttacagagcagggatagcagagtttgtggccacttttctgtttctctacatcactgtcttaaccgttatgggagtngccgggggccaagtctaagtgtagtaccgttgggatca

SEQ ID NO: 37505 - DNA, 287 bp, Glycine max
  Clone ID: 701118532H1
gttttctgttaatgcaagtggacagttctgtggggttgcagagatggttggtacagttgactttagcaagaatatggacttttggcagcaagataaatggagtggaagctttcctgtgaagtggcacattataaaagatgtaccaaatccaaattttaggcacattatactggagaacaatgaaaataagccagtaactaatagcagagacgcacaagagataatgtatttgaaaggtttggaaatgctgaaaatattcaaaatctacttgaagacatcttgctgtg

SEQ ID NO: 37506 - DNA, 277 bp, Glycine max
  unsure (1)..(277): unsure at all n locations; Clone ID: 701118533H1
attggcgcttcatcaagatgggtatttctagggattccatgcacaagaggcgtgacactggtggcaagaaaaaggcttggagaaagaagagaaagtatgagcttgggcgtcaggcagcaaacaccaagttatcaagcaacaagacaatcaggaggattcgtgttagaggtggcatgttaaatggagggcatgaggcnggatatggcaattactctggggtagtgaagcagttactcgcaagactcgtattctagatgttgttacatgcctcaacaac

SEQ ID NO: 37507 - DNA, 283 bp, Glycine max
  unsure (1)..(283): unsure at all n locations; Clone ID: 701118534H1
tttatcctaagtctttgggaatagtgctgcaatggcttcaagtcaggaggaggtgacccttttgggagctactggaagcccatttgtgtgcagggttcatattgccctcaagttgaagggagttcaatacaaatatgtcgaagaaaatttgaggaacaagagtgaactgcttctcaaattccaacccagttcacaagaaggttccagtgtttattccacaatgagaagcccatagcagagtctctgtgatgttgaatacntgatgagacnggaagaacacccc

SEQ ID NO: 37508 - DNA, 284 bp, Glycine max
  unsure (1)..(284): unsure at all n locations; Clone ID: 701118535H1
tttagaagttgttttcatctcaagtgacaganatcaaacctcctttgatgaattctttgcgggaatgccatggttggnacttcccttggngactcgaggaagaaattcctgagtcgcaaattcagggtatctggcatccccatgcttgtggccattgcatcaagtggtcagacattgacaacaaaagctcgagatctggtttcactctatggagcagatgcatatcctttcaccgaggagagaataaaagaaatagagacagaacaagaagagactgcaaaggg

SEQ ID NO: 37509 - DNA, 95 bp, Glycine max
  Clone ID: 701118537H1
ggacgtgatcctcgtctcatgtacttgagtcgtgatggatatattgatcaatttttgccccttgtcttgataggccagggacaaattcttgtggc

SEQ ID NO: 37510 - DNA, 271 bp, Glycine max
  unsure (1)..(271): unsure at all n locations; Clone ID: 701118538H1
aaacggagaaagcaacgtgtgaaggtttttagggatcggagatattggtgttacngtttctgtaaggggggttagataggtaggtagtgatgtcgttagttttaaaacgctgttaaagacggaagggtggggtataagaataagaaatagaaatgtgggtctggtatatgtgaatctagaatgtgtagtttgatgggggtttcgtatggtagaagaaatttgatgcgttgtgtatgttttaggtgatgttggtgtgatgttcattcttata

SEQ ID NO: 37511 - DNA, 282 bp, Glycine max
  unsure (1)..(282): unsure at all n locations; Clone ID: 701118539H1
aaaaaatggcgacgtcggaggtatccatcaagggaaattcggtgaacggaaaaggagataatagttctggtggctacaccaacgatgttaggaacggttctggtggaggcgaggctcggaannnnnnnnnnnnnnnnnnnnncgcgagagacgcggaagctgcgctttacagggagctgtggcacgagtgtgcaggtcctctggtgacggtgcccagagaaggagagcgcgtgttctactttccacacaacatannnnngaanannnaagcgtncacaanac

SEQ ID NO: 37512 - DNA, 284 bp, Glycine max
  Clone ID: 701118540H1
aagcggagaaaaccaaagaatcaagcttcgtcaaagtgtctgtcacacacagtctttaagatctggaagcgcttctcacttgcccacaataagaattcctctcaaatttcaatttttcatttgaaaataataaaaccctaaaagaggggttgcaagcaaaatgagaagctcgaagatgtggatggttttcatgtgtctgacggtgagcttcttcgctcgcattgaatcgctatccgtgacggtgaacgacgtcgagtgcgtctacgagtacgtactttacgagg

SEQ ID NO: 37513 - DNA, 276 bp, Glycine max
  unsure (1)..(276): unsure at all n locations; Clone ID: 701118541H1
gganaacccaaatcgaaaatggcagtgatggagaggttgaagatgttcgtcgttcaagagccagttgttgccgcttcctgtctcatcgctggcttcggtctttttcttccagcttttgtgaggcccatgttggattcatatcaggcaaccaagcaacctccccagcctgctttaagtgacgtggttgcaggaatgactggtaaaaagtaaaggtgatttacttgacagatgcaagggcaatttgctaatttctgtttgaattatttaatctcaang

SEQ ID NO: 37514 - DNA, 277 bp, Glycine max
  unsure (1)..(277): unsure at all n locations; Clone ID: 701118542H1
cnaaatttaaggnattggctccatatgatcctgactggtattatgttagggctgcctcaatggcaagaaagatttatttgagaggcggtcttggtgttggggctttccagaggatctatggtggaagcaagagaaatggaagccgtcccccacatttctgcaagagcagtggggctattgcaagacacattctgcaacaattgcaaaacatgagcattgttgagattgatacaaaaggaggtaggaaaatcacatctatggtcgaaggatctgatca

SEQ ID NO: 37515 - DNA, 281 bp, Glycine max
  unsure (1)..(281): unsure at all n locations; Clone ID: 701118543H1
catttctcgttctgaaaatcggagttaaacactattattatatttgtgatttgtgatatcttctatctgattcagcatcatggttcagctaatgaggtcngatacgganaancacagnttgaaaaangggaaganggangggcangaagaaaacnccccnnnncanaaccacaancgacccaaattggaatctccacccaagtgtggttcaagcgatgaatccctttcaatcccaccagcttcgtataaccccttggatgagccaagccctttgggttgcg

SEQ ID NO: 37516 - DNA, 286 bp, Glycine max
  unsure (1)..(286): unsure at all n locations; Clone ID: 701118545H1
cacccctcccaagaagacgccgctgccacactcctcaacctctnccatcaccctaaaggagcccctcatgtccacacgtggcgtcctcncacgccatcgcccacgtcatctctcaccaccacaccacctcctctccccctgcggttcagtccgccgccgccaccatccacagcntcctctcctcggncgactcctaccgccccgntgtcggctccaagcgcgagattgtctatccctcatcgacatcctccgctgccantctcgtcactccccgcattatcaggat

SEQ ID NO: 37517 - DNA, 280 bp, Glycine max
  unsure (1)..(280): unsure at all n locations; Clone ID: 701118548H1
gcatttacatctgaagaagtatatctgaaggtgcttgatctgcaaaccaaggtactccgtctcttctacttgtctaaatcacaagacagtgtaattgcatgngattttacaggnctcagaaagcagnncacctcagtgnggaanggcatttacagggtgccagtattaatagaattcccaagcccaaacctaaggttcagaagcctgtaaagaacgaaactgagagcagcagtgcgcagaatacagagacttctgattctaatcagctgatagttcctct

SEQ ID NO: 37518 - DNA, 287 bp, Glycine max
  unsure (1)..(287): unsure at all n locations; Clone ID: 701118549H1
gacgaattagaagaaaccctactcacccaaatcgactgggaatcgttcctcgacgacatacctgtcacttaacgtcgatgattttntgcaggacgacaacgccgttcctgttgttaccgacaatcattcctccccgaacgacgaccccgttttgtccgagatcgagaacatgctcatgacgcaggccgaaaacgacgctgtcgttttgcccgagacgccgtcttncggaggccgggtatacaagctctcgaggagattctgttggaggagcccaaggaaggaccgtg

SEQ ID NO: 37519 - DNA, 281 bp, Glycine max
  Clone ID: 701118550H1
tcaaatattaattttaggttcttcgttacgcgttgtgttgcgttgtgcgtgagaaagtgcgcgtggtgaaaaagcatggcttctcagctcctgagacgaaccttcggaagtcgtttccttgcaaaccctaaggccttctcctccgctgcttccactccgatccgcgccactctcttccccggcgacggcatcggccccgagatcgccgattccgtcaaacagatattccaagcagctgatgtcccaatagaatgggaagagcatatgtaggaatgaattga

SEQ ID NO: 37520 - DNA, 279 bp, Glycine max
  unsure (1)..(279): unsure at all n locations; Clone ID: 701118551H1
gaaaccctaaaccccgttttcggtnagatcgagatcgatcgaacatggatgaggagtacgatgtgatcgtgttgggcacgggtctcaaggagtgcattctcagcggtcttctctccgtcgatggcctcaaggttctgcatatggataggaacgactattacggaggagaatccacttcgctcaatcttattcagtttgaactgcgaaatgatgatttctctgtcctcctctcagctttggaagagntcaggggagatgacaagcctcctccacattggg

SEQ ID NO: 37521 - DNA, 284 bp, Glycine max
  unsure (1)..(284): unsure at all n locations; Clone ID: 701118552H1
gtancgttgctcttcgtgaattagganataccagaagagtancgagcttttnatccggaagctccccttccagaggctggttcgtgaaattgctccaggacttcaagactgatctgcgtttccagagccacgccgtgcttgcattgcaagaagctgctgaggcataccttgttgggctctttgaggacactaacctgtgtgctnttcacgccaagcgtgtaaccatatgcccaaggatattcagctggcaagaaggattcgtggtgagcgtgcttgagttggtg

SEQ ID NO: 37522 - DNA, 284 bp, Glycine max
  unsure (1)..(284): unsure at all n locations; Clone ID: 701118553H1
tcttcctgcagaagctatccgtgttacttgttcccaagtctccanacaagcanagtacatggttgatttggaaanccaggtccccagcgcattcgacccgtttgccgaggcgagagaatcagatgcccccggggcaaaggagtatgtgcacatacgaattcagcagaggaatggaaagaagagtctgacaacagtgncaagggctgaagaaggagttcagctacgagnagatcctcaaggacctcaagaaggacttctgctgcaacgggatgtggtgcaggaca

SEQ ID NO: 37523 - DNA, 281 bp, Glycine max
  unsure (1)..(281): unsure at all n locations; Clone ID: 701118556H1
ggaagctangcatcctctctagcatcaancctttgtcgtcatttctcatttgctgaaatcaaggctgccacanacaactttganggnggcanngcntcatggtgtgggaggattcggnnaggttacaaaggagaaatgatggtggaacaaccaaggtagcattaaaacgngggcatccactanctgagcagggggtgcanggnttccngactgagattgganangctcncaaaacttcgtcaccgncaccttgttncacngattggctacgtgaanaaaac

SEQ ID NO: 37524 - DNA, 275 bp, Glycine max
  unsure (1)..(275): unsure at all n locations; Clone ID: 701118557H1
attctcattgcnctccaaacnnctcttcaacacctcttcatcctcaacaaacnnacctccaacgacaacacacaacacaaaccaaacgactaactaacagcaaaacgcaaacactctcctcaaaacgacaaccgccacaaaacaacacaaccaccgcccctcgccgccttcatcttccctctctctctcaagggtcgatggctgaactcggaaacaacaacaacggcgccaacacgacgtcgtctaggttctccttcttcaaccgctccctcacc

SEQ ID NO: 37525 - DNA, 281 bp, Glycine max
  unsure (1)..(281): unsure at all n locations; Clone ID: 701118558H1
cattaatttgcactcgctgtttcagcttcatcacccttcttttgcatcatttatatctcttgagaaatggcacaagaaacctttctattcacatctgaatctgtaaacnagggtcaccccganangctgtgcgancagatctctgatgcagtacttgatgcgtgccttgaacaggaccctnacagcaaggttgcctgtgagacatgcaccaagaccaacatggtcatggtctcggagagatcacaaccaaggccaacgtagactatgaaaagatgtccgcg

SEQ ID NO: 37526 - DNA, 282 bp, Glycine max
  unsure (1)..(282): unsure at all n locations; Clone ID: 701118560H1
tccggcatgttcattcccaagaacaaggatccaattntntctgggatagcatttgggtagagactaaagaaaagaagtgcatcccagacacaatgagtctacatgcaggatgccctgtaattgaaggtgagaaatggtcagcaacaaaatggattcatgtggactcatttgataagatggtggcagatgggggngattgcaatgataagcaagaaaactgtgatagatgggctacccttggagaatgcactagtaatcccattatatggttggatcacaggc

SEQ ID NO: 37527 - DNA, 277 bp, Glycine max
  unsure (1)..(277): unsure at all n locations; Clone ID: 701118561H1
agaggnagaatcagaaganagctgagattctctacagtgcaattgatggcagcaaagggttctataaatgccctgttgagaagtctgtgagatctttgatgaatgtgcctttcactttggagaaatcagagctgnnagggtgagtttatcaaggaggctgcttcagagaagatggtncagctcaagggacatagatcagtgggaggtatgagggctctattacaatgccnagccctggctggggttgagaattggtggcttcagaagntttcagcaa

SEQ ID NO: 37528 - DNA, 284 bp, Glycine max
  unsure (1)..(284): unsure at all n locations; Clone ID: 701118562H1
gatgaggggttcatgaaataagggtcgatgctttatcgaaaatgagtcaccttaagttgctcaaantttggggtgtgacttcttctggaagcctcaatcatctttctgatgaattaggatatattacttgggataaatatcctttcgtatgtttgcctaaaagttttcagccaaacaaactagttgagttgtgcctggaatacagcaacatcaaacatctatggaaagatagaaagcctccacacaacatagnnnntaaagntcngcgcntcnggcanagnaag

SEQ ID NO: 37529 - DNA, 286 bp, Glycine max
  unsure (1)..(286): unsure at all n locations; Clone ID: 701118563H1
cagggtgtcaagaattgaggcaagaacatttatgatncctgtacagatacggtagagacacactattcaaagatgaaaaagtaggtatgcctaatcttaattattaatatactttggaattgtggttgatttccattatgtgatttatttacttgtgttagtagatgtgaggtgacaagggcaaataaaggggggcttataaggaaaggatacttatcagcagcagcatcaatctttcaaacttgcatagtgctcctctttgtatcaaggatgaaaataatgacct

SEQ ID NO: 37530 - DNA, 288 bp, Glycine max
  unsure (1)..(288): unsure at all n locations; Clone ID: 701118564H1
ggaaaccctagctggataggtcaaacatcatcatgtcggacgaagagcaccatttcgagtccaaggcagacgccggtgcctccaaaacctaccctcagcaagccggtaccattcgcaagancggctacatcgtcatcaaaggacgcccctgcaaggttgtggaagtttcgacttccaaaactggaaagcncggtcacgccaagtgccactttgttggaattgatattttcactgccaagaaacttgaggatatgtgccctcttctcacaatgtgatgttcctcatgtg

SEQ ID NO: 37531 - DNA, 284 bp, Glycine max
  unsure (1)..(284): unsure at all n locations; Clone ID: 701118567H1
gcaacancnactgnaacatcttcatccatntacgaacgnngcctacatttncnntctatccctttncctctgcntcngncngtgnttttntagnacaaattctgngagaggcanggaggaagntgaaggaaagcagtgatgggtttgtgacagcggatcagattgatgctgaagagcatagatgaacagttggagaggcacctcagcaaggtgttgaccataggnaagaaaaagcgctctgnagggaagaagatgctgatcatgttcaattcatgttcacanng

SEQ ID NO: 37532 - DNA, 278 bp, Glycine max
  unsure (1)..(278): unsure at all n locations; Clone ID: 701118568H1
attggttcaattccggcngcccaaaaacacgctgcgtagtctgcttagcctgaaccggtcacttcggnggcaanaaaacgtngtgnagaagcatcccatgcngagacactcnctnanngccctctttgngtcctcgccgccacganaggagcgtgtgcatgannatgnaacnactccaatgttggcttccgttgccgttcnccntcttctggagtaatgaaancggttcaannaaccngcntntngccggttttcgntgcangttcctgttaaanagg

SEQ ID NO: 37533 - DNA, 279 bp, Glycine max
  Clone ID: 701118569H1
cttggcttcttcccctatcattgataccatttttagggcctggtttataccttctcctacggccatcattatcaacagtggccatttcacaaactcctgttgagccagagtaaagttccatgtgatgactgtcaacaatacaagtatacactttccatgctacaaatttgaatttgatttcaagtttggttcagaaagacaatttcatgtacagagtccacagcatggtgagagcagcttgccaccctactcaatagtccataaaagtattgagatccc

SEQ ID NO: 37534 - DNA, 275 bp, Glycine max
  Clone ID: 701118570H1
ggactacatcaagaggcagcaattgcgtgaacttgctttgctgaattcaaatttccagagaagagagtcctggaccaagtggtagtgtgtccccattcaactctagtggaatgaaacgtgcaaagacgggtcgctgagttgttcttgattgatggtgtagatgatgagtattgtggtcctccagccattgattgctgggaatatctccagtacatgatgtctcatcaatgcaagctataaaagaataggctaacaatctgcggttagcatctggt

SEQ ID NO: 37535 - DNA, 277 bp, Glycine max
  Clone ID: 701118571H1
gagaaatcgagcttctctcagacttgcagtctgttgagtcaatacatcaaggagaagggtagcttcggagatcttaccctcggaatgacatcatgtgggtcacctgagacatcttgtcaatctgctacaaccatgaacttgtttcctcccaaggaaaacaacgtggcaccaaagaacctgacagctatggatttgctctctccacaagcttcctcctatggaccttcagaggagatccaacctggttaattcctacgcaattaagtctgtgagcaag

SEQ ID NO: 37536 - DNA, 279 bp, Glycine max
  unsure (1)..(279): unsure at all n locations; Clone ID: 701118572H1
ggcggcggcatagagtggaagtagtaaggatcaatggcagttccagggaggcgcaacggcatgaacgacgacgaagaggaattagacgacaacgcccttttcgaagaacaaggtgccgtcgaagagacgccgatacccctcctcacctccgcgacctctccgccgccgctcagctaggcgacgttccacgccctccgtatcgctcttgataacttgactggtagtatgatgagccagtggaaganggggatatgctcttccattgacatgtctatnagg

SEQ ID NO: 37537 - DNA, 277 bp, Glycine max
  unsure (1)..(277): unsure at all n locations; Clone ID: 701118573H1
gtcaaatggtccttagttctgggagtgttgatgcttgagtcttgacggaacgaacggaaaaggggatctcaatggacaacaccaagccccttatcgaactggaactcgacgatgatggcagaatcagaagaaccgggaatgtgtggactgctagcatacacattataacagtggttgtaggggcaggggtgctgtctttggcatgggttatggcacaactaggatggttagctggcatagccagttatcnttaccttttcagctgtctccatttcat

SEQ ID NO: 37538 - DNA, 248 bp, Glycine max
  Clone ID: 701118574H1
gagaaagaaaagaatggcaaagttaataaaattctttgagttgaacacaggggccaagattccttctgttgggttaggcacttggcaagctgagcctggtgttgtagccaaagctgtcaccacagccattctggttggatacaggcatattgattgtgctcaagcgtataacaatcaagcagagattggttctgctcttaagaagcttttgatgatggtgtggtgaagcgtgaggactatggatcacc

SEQ ID NO: 37539 - DNA, 275 bp, Glycine max
  unsure (1)..(275): unsure at all n locations; Clone ID: 701118575H1
attcntttcttcctccgtcacattctcgaattggcgtgtgctcttgctatccctcaaaggtcttttgaagcagacnnaanggacttcttnnccaagngacatccacgaagacncgaagcgtagacagngcannanacaggagggncaaacagggncnancaannnaccncagcnntnaacnncngcgcaaacnanggccgancaggagcnaaagggccaattttgaagatggtcccattttgattggcattaggttttccagggatgatngttat

SEQ ID NO: 37540 - DNA, 280 bp, Glycine max
  unsure (1)..(280): unsure at all n locations; Clone ID: 701118576H1
cctcgccgtcctccgccacgttccgcttcagcttccacgncttttcgtggntcnccacgcgcccagatgctgtnctccgagggggagcntcgnctgcncggnggtgccggcccgcgggagcatttatgtggccggtgggggcacttgcatacgatgtncggggcggcggggtcgaggattcggtcggtggagcggtacgaggtgnngagggaccggtgggtgccgatggagaatctccccgggtttcgtgccgggtgcgtggggtttgtcggagagaggg

SEQ ID NO: 37541 - DNA, 282 bp, Glycine max
  unsure (1)..(282): unsure at all n locations; Clone ID: 701118577H1
ttcccccctatcaatctatttttgctaagctatcatatggagagagccagatgcttgacaaggcattctatgaggaggaggtgnaaaggctttgcttggcatttgagcaacagtttcattatgctgtgttctncgcatatatgaggttaagggaacaggagatcaggaacttaatgtggatttcagaatgtgttgctcagaatcagaagtccagagtttcaggacagtgttgtctcatattttaggcggattgctcgttatagtttgtatgttcgttgggac

SEQ ID NO: 37542 - DNA, 284 bp, Glycine max
  unsure (1)..(284): unsure at all n locations; Clone ID: 701118578H1
ggagtttcaagggttaccggaaggttgcattgctagtatactctctcgcactacgtcggcggacgtgtgtaggttttccgtcgtatcaaagattttccgttcggccgctgaatcggacgcngtgnggaaacgnnttctcccttccgattaccattccatcatttcccagtctccttcgcctctcaactatccttccaagaaggagctctatctcgctctctcggatcgccctnatcatcatcgatcagggtaaaaagagctttcattggagaaaaagagtggga

SEQ ID NO: 37543 - DNA, 283 bp, Glycine max
  unsure (1)..(283): unsure at all n locations; Clone ID: 701118580H1
ctctcctctccctcctaattacaatttaataaatccacctcactcattcatcccttcttcactcttccaaaaccattgaatcantccaatggatcctcctctcatcagcgactccacattctcccccgcttatccctcgccgagatttggcctggaatgccccattttgccgatcactctcacctcaccgncaccgctcccaccaagggaaaggactccaccgncgccgacgaggtcctctctccaacaacantggcaaactnnccaatnatggattnggtag

SEQ ID NO: 37544 - DNA, 282 bp, Glycine max
  unsure (1)..(282): unsure at all n locations; Clone ID: 701118582H1
gctctgcccaaagctaaggagatcgtgtcgtccaattccgtcgtcgttttcagcaaaacctattgccctttctgcgtcgatgtgaagaanctcttcggtgacctcggttncaattacaaggccatcgaactcgacactgaatccgatggaaaagagctccaagcagcattagttgagtggacggaccagcgaaccgtgcctaatgtgtttatggtggaaaccacattggtggctgtgactcaacaactgccctgcacacttcaggggaagctggttcctctg

SEQ ID NO: 37545 - DNA, 282 bp, Glycine max
  unsure (1)..(282): unsure at all n locations; Clone ID: 701118583H1
cttctctctcctccctccanttctccctcctctccaaacctctcccactcctcttcgcaaccaccaccctcaaatccaaaccctccgacgacattgacacatcgttcttcgacaacatcaacccgcaagacgacatcacattcaaccctccggagcccccggagggcttcgtggcgcctccgtccttcgacgacggccccctggagactgaggacgaaatcgccgcagcctacgaggagctctacggccccggctacagcggcgtctcggtctcggcaacga

SEQ ID NO: 37546 - DNA, 274 bp, Glycine max
  unsure (1)..(274): unsure at all n locations; Clone ID: 701118586H1
gaaccacccaattcanctgaaccctgcgcactacatcagtgagattattagagaaggcacaaaanatggcactgctttctttaagtgccatggacatgagcaatttgagatgacgggtttggatcctgagtataataggttgttcaatgagggcatggtgtgcactgctagggttgtgtccaaggctgtgatcactggctacaaagatgggttcaaccagattaagtcctggttgatgttggaggtggcntggagggtctnttcggagatgtag

SEQ ID NO: 37547 - DNA, 269 bp, Glycine max
  unsure (1)..(269): unsure at all n locations; Clone ID: 701118587H1
cgccccaatctctgcagcgccttcgatctagaaaacatgactaagagaacaaannaggctggcattgttggaaaatacggtacccgttatggtgccagtctgcgaaagcagattaagaagatggaagttagtcagcacagcaaatttttctgtgaattttgtgggaagtatgctgtgaagaggaaagctgtaggaatatggggatgcaaggactgtggtaaagtgaaagcaggcggtgcttatactttgaataccgcaatgctgtgacg

SEQ ID NO: 37548 - DNA, 278 bp, Glycine max
  unsure (1)..(278): unsure at all n locations; Clone ID: 701118588H1
gaaaacccccaactccaacctctgttcatcgtctaccgcgctttcttttcaaccagaactatgattnagctttttaaagtanaggaaaagcagagagaacttgcagaaaatgcaagtggcggaccacctgttaagaagcaaagtgcggagagttgcgtcttcacaaaggttttcttatttttattatatggagtgtcttttctatgttttactatgccccatttgtgtngcattctaangtttcaaacaaggaaacggatagggcaagaggaaanaaa

SEQ ID NO: 37549 - DNA, 257 bp, Glycine max
  unsure (1)..(257): unsure at all n locations; Clone ID: 701118589H1
atttaacgagggagtgaagcttagantccggtgttaacaaganntctctactgagtgttgangttggactcccggtttgnnnnnnnnnnnnnnnnnnnatatacatacacaccaaatagatatttcagatgcacccctgcacgtcacactaagctgatttttcagtatcaactgcggattatgatcatgaatcatgactatatttaacatgcagaatgttggtcctcatttgaaacatggaatgctggtgttcttgg

SEQ ID NO: 37550 - DNA, 110 bp, Glycine max
  unsure (1)..(110): unsure at all n locations; Clone ID: 701118590H1
caagntttttctttcaacaactaatatctggagttagctattgtcattccatggtcacatatagcatncnagaatnnncatgtnggngttaattnaaaagngcnntngga

SEQ ID NO: 37551 - DNA, 276 bp, Glycine max
  unsure (1)..(276): unsure at all n locations; Clone ID: 701118591H1
gtgaagaagagggtaactgcaaacaaagcaagcaaaacaaaagacgcatgatggagaggatgaagagggtgcttctgcngcttctggcctcactgnncttctcatgntgccagaagcntctgcnacaaagtttactgttggaaacaaccagttttggaaccccaatattaactacactgagtgggctanaggcaaacatttctaccttggtgactggctctattttgtgtacgataggaaccaagcgagcgtgttggaatgaacagacagttatga

SEQ ID NO: 37552 - DNA, 275 bp, Glycine max
  unsure (1)..(275): unsure at all n locations; Clone ID: 701118592H1
actccctccctaaatactcatgctcctactcagaatttgggttcgctgaacgatcaaactcttacaatttcaacgggccaatccaanagggaagtgggttttgtgcagcaaatgatccagagcttaagaggaagaagagaatcaaggcttataacgtgttcactgtggaggagaagcttaaaacaagtgttagaaacgggttcaagtggatcaaggacangnttggtgacttcacatggggtgtgaatatgcaacgtttgttagataaaagnggg

SEQ ID NO: 37553 - DNA, 131 bp, Glycine max
  unsure (1)..(131): unsure at all n locations; Clone ID: 701118593H1
gttcctcactcctcttccatngcntgcggccttnactctcatctcctggtctccagggagatgaaccctagctccaattggtccctttaatcaattacctcttaattagtaattacttaatcngcaattag

SEQ ID NO: 37554 - DNA, 283 bp, Glycine max
  unsure (1)..(283): unsure at all n locations; Clone ID: 701118594H1
ttttccaattcaattatcgattcccctactcacaaaaattaacatgcaatccatttctttgtnccaattcctcaccaatattattcnatccattttcaccatctaggccatgttctaatggcaagaaaatgaattcgtttgctccaactaaggcttccatgagaggatcagcggatcagaacttcagtggaaggttggtggatgagagcatgataatactgaggaagaggatccagagatgaacatgatagatnggaatatgagcctccttcagattggagga

SEQ ID NO: 37555 - DNA, 286 bp, Glycine max
  unsure (1)..(286): unsure at all n locations; Clone ID: 701118595H1
ctgaaacgtctccttccactgctcggtgacngaanncttcccaatcactttcctttcccatttcccatttcccatttccgatataagcnccaaacccttctncaccttcttcttcccaactcacccttttgcgttganactttgagtctttctttganacttttnagaccaaagacgaaaccatgtccatcaacaacacggagagatctagaaagtggaggggcgaacaagaatacaacaacataagctacagtgctgctcccacttcctatgtttacgatcccga

SEQ ID NO: 37556 - DNA, 285 bp, Glycine max
  Clone ID: 701118596H1
ggggagtatttatgtagattgtggtaatcttgatcttgcagaggcatgctatgagaatgcccttgcaattaggcacacaagagctcatcaaggtctagcacgggtttatcatcagaaaaatcaacgaaaagctgcatatgatgagatgaccaagctaattgaaaaggcagagagcaatgcctcagcatatgagaaacgatcagaatactgtgaccgtgagatggcaaaggttgaccttgatgtagcaacccaactggatccttgaaaacatatccgtatagatac

SEQ ID NO: 37557 - DNA, 283 bp, Glycine max
  unsure (1)..(283): unsure at all n locations; Clone ID: 701118602H1
ctngtnngncgtggatnggnggtgcnggcggagtnnagcgggacnannagctttcgcacagngcaatcncgcgtnnagatcccttgaaaaaatccccggcaacaacgacacgcacgtttcttactctcaggatcgntacatcttccatgttaaacgcaccgatggactcaccgttctntgcatggccgacganaccgccggaagggaattccttttgcgnttcttnaggntattnatcagaagttcgtgcggacttacggacgcgccgttcatccgctcagcc

SEQ ID NO: 37558 - DNA, 299 bp, Glycine max
  unsure (1)..(299): unsure at all n locations; Clone ID: 701118603H1
accaaacaccatgaacaaagttcacatcctggcgttcccatacccagcacagggccacatcctcccactcctcgacctcatccaccacttagccctacgaggcctaaccgtcacaatcataatcacaccaaaaaacgttcctatcttaaaccctctcttatcctcgcatccaaacacggtccaaactttagttctcccattccctccccaccctaacatccccgctggcgnagagaacgtccgtgaggtcggcaacagaggaaataccccttcatcaacgccctctccaaatccaacca

SEQ ID NO: 37559 - DNA, 278 bp, Glycine max
  unsure (1)..(278): unsure at all n locations; Clone ID: 701118604H1
tnacccattcatacgtggtgttgannactgctgctcttttannttttcttttctctttagnactntcttcccntnnnnnnnnnnnnnnnnnnnnnnnnngagcttgtttaagcttttcttccattaacatattatcanaatgtgtggtattnttgctgttcttggttgttctgatgactctcgagccaaaagggtccgcgtgcttgagctctctcgcagattgaagcaccgtgggccctgactggagtgggctccatcaacatggtgactgctttttg

SEQ ID NO: 37560 - DNA, 299 bp, Glycine max
  unsure (1)..(299): unsure at all n locations; Clone ID: 701118605H1
atcgctatgactgctcagacccaagaggagcttcttgcggccgaccttgagcaacaaaagatccatgatgatgagcntgtannnnnnnnnnnnnnnnnnnnnnnnnnnnnngacgacgatgaggatgacgacaatgttgaagaaggtgatgcatctggtaggtccaagcagaccagaagcgaaaagaagagtcgcaaggcaatgctcaaacttggaatgaaacctgtcacaggtgtnagtcgtgtgactgttaagaagagcaaaaatatcctgtttgttatatcaaaaccagatgtttt

SEQ ID NO: 37561 - DNA, 299 bp, Glycine max
  unsure (1)..(299): unsure at all n locations; Clone ID: 701118606H1
ggatcggcagggaacaagttccgcatgtcactgggtctncnggtggcggcgacggtgaactgcgccgacaacacnggcgcgaagaatctctacatcatatcagtgaaggggatcaagggaaggctgaaccggttgccgtcagcttgcgtgggtgacatggttatggccaccgtcaagaagggaaagcctgatctccgtaaaaaggtgctccccgccgtcatcgtccgtcagcgcaagccgtggcgccgaaaggacggtgtttacatgtacttcgaagataatgctggggtcatagtgaa

SEQ ID NO: 37562 - DNA, 299 bp, Glycine max
  unsure (1)..(299): unsure at all n locations; Clone ID: 701118607H1
cngaagaagaccgctcngcccaggaaacngtccacaatggngtcgcctnngacggagctaggcggcgaggagatggacatcgntgaggtgacggccgccggaagagtgaagggaccgtggtctccagaggaggacgcgctgctgagccgattggtggcgcagttcggtgcaaggaactggagcatgatcgcncggggagtgccgggacgctccggcaagtcgtgccggctccggtggtgtaatcagctggacccttgcgtgaaacgcaagcccttcatgaggaagaggatagcatcata

SEQ ID NO: 37563 - DNA, 300 bp, Glycine max
  Clone ID: 701118608H1
gtcctatcagttctgaagcagaaaggcaaagagtgattcattgtttggaggctgctgttaggagacgaacttctgaggtactactaccacacatgatttggatgctaattcacaattttttaccaaatatttattagtgacactgttattttgtatttgatattgtagggtataaagctagaattatgtggggaagacagggttggccttctgtctgatgtaactcgcatctttagagaaaatggtctttcagtcaaccgtgctgaagttacaaccaggggcagccaagccatgaatgtt

SEQ ID NO: 37564 - DNA, 300 bp, Glycine max
  unsure (1)..(300): unsure at all n locations; Clone ID: 701118609H1
gcagacaatggganatggaagaaacctgagagtggttgggtgaagctgaatgtggatggttcacgtattcatgaagaacccgcctctgcgggttgtggtggggttataagggacgaatggggaacatggtgcgtgggctttgatcagaaattggaccccaacatttgtcgacaagcccattatacagagttacaagctattctaacgggcctgaaggtggctncggaggacatgatcantgtggaaaaactggttgtggagtcagacagtgagcccgcggtgaacatggtgaagagtagg

SEQ ID NO: 37565 - DNA, 303 bp, Glycine max
  unsure (1)..(303): unsure at all n locations; Clone ID: 701118610H1
aacactagtttgttgagcactgcgatgangaagtggacggttgcttccgctctccttcttctctactntcctctttactctttgcagatcaaggtcgaaagtttcaggcgnatgccgagggagattccgacgagcttgtagatccacccaaggtgnagganaagatcggtgctgtgcctcatggcctttcaaccgattcagatgtcgtcaagagggaggcgggtcgatctcgnaggagatctctccggagcaacgcggagaagtttgnagttccaagcggaagtgntcgcggcttatggatat

SEQ ID NO: 37566 - DNA, 299 bp, Glycine max
  unsure (1)..(299): unsure at all n locations; Clone ID: 701118611H1
gaagactaaaaggttgcagaatgttatgaactctttagtccacgacaagcagaagcaatatggaggtttctattacagatgaaattgcaggcactatggagctcaaccctgataggctggntgagctcaaagcatttgatgacacaaaagctggtgtgaaaggccttgttgatgaaggggtcgcaaagatcccaagattatttcatcatccacctgatgaatttgtnagggcttcaaagttaggcaacacagaatacactatacctgttatagaccttgaagaagttggcaaagatcca

SEQ ID NO: 37567 - DNA, 300 bp, Glycine max
  unsure (1)..(300): unsure at all n locations; Clone ID: 701118613H1
caagatcttgaaggtcatccgtaagaacttggtcaagaagtgccttgagctcttctttnaaattgcananaacaaggaggattacaacaagttctatgaggctttctctaagaacttaaagcttggtatccatgaggattcccagaacaagggaaagattgctganttgctcaggtaccactccaccaagagtggtgatgagctgacaagcctcaaggattatgtgaccangatgaaggaaggtcagagtgacatctactanatcaccggtganagcaagaaggctgttgnagaactccc

SEQ ID NO: 37568 - DNA, 299 bp, Glycine max
  unsure (1)..(299): unsure at all n locations; Clone ID: 701118614H1
aatgtatatgctagtttgggagangggacgagacaaccgaaaccattgatccaacccaacccacaccagttgttgaagagagagagagagtaatttaaaattatttttaattggacgggtaaagaagaagnnnnnnnnnnnnnnnnnnnnnnnngattggggaactgagactgagtgagttgagtagcagaagnnaagagaagatgggatctgtntgtatctgagactgtgcatcaccccattccctgttgcggttgattcttgaggacaggcagagataggntaacttaatatgncga

SEQ ID NO: 37569 - DNA, 298 bp, Glycine max
  unsure (1)..(298): unsure at all n locations; Clone ID: 701118615H1
tgatttttgtgcatgtgcaacttctcctattttacgtttggactgatggttaggactctgtaggctgataaagacaacactcataccgttggaaagaaggatgctgctggccatgttgcttaatttagttcttgcttcctttgtcttcttgagttttatcagagacgggagtgcagggatcactagctctttcattcggtcagagtggncggcagttgacatcccccttgatcatgaagcattgcagttccaaagggttataatgcacctcaacaagtgcacatcacgcaagtgacta

SEQ ID NO: 37570 - DNA, 301 bp, Glycine max
  unsure (1)..(301): unsure at all n locations; Clone ID: 701118616H1
accaatcttgtaacggaactttttgataactagctgtgtgaagacgacaactgccacccattccaacacacagagaggttntagcaattacctttccttgtttgttccgtcttatactctctctagtctnttcgtgcgaacatcatataaaccacctcggattttgcttcntctgctgcgttttaacgcccatcacgcgtttctttgcttatacactaactaagatttcaaaccccccgcggccaactaactaagatctggttttgttctgattgattcgtgcatgggactgtgaaacgca

SEQ ID NO: 37571 - DNA, 296 bp, Glycine max
  unsure (1)..(296): unsure at all n locations; Clone ID: 701118618H1
gnttcaactcatctgcttcccctagcaaccttcttcttacttctctccgcttcttatctccagattgctggggcggaagcacaaccgttgactagtctcaaacttaactctcatattcttcaggagtctactgctaaagagattaatgaaaatcccgaggcaggatgggaggctgctataaatcctcgtttctccaattatacagttgaacaatttaagcgccttcttggagtcaaaccaatgcctaagaaggaacttagaagtacacctgctatatctcacccaaagacgttgaa

SEQ ID NO: 37572 - DNA, 297 bp, Glycine max
  unsure (1)..(297): unsure at all n locations; Clone ID: 701118619H1
actaaagactaaagaaagangaancaatntctgtntntgtgtgngtgcgtgcgtgttttcntctntntgnntgataaaatanaataatatcccaaaccatcgaaaggaagcaacgaagaaaaaaaaaataaatgaaaagcgtagagaaccaaatactgctcncttttgtttgnatatncatgtgagagttctganacattctcttccnntntngctgcgtggnttgttngncttggtggtttntantgagtnacaaantnggtgagtgagcgagtgaactnaatggnttcttcctcg

SEQ ID NO: 37573 - DNA, 296 bp, Glycine max
  Clone ID: 701118620H1
gccatatccccatcgcaacttttctgaggaagttgctattcttgatggctactttggcaaacttggtgcaggaagcaatgcttatattttgggtggccaagacaaagcacagaactggcatgtctactctgcttctgcagattctgtaactcaatgtgacaatgtttacactcttgagatgtgcatgactggcctggatagagagaaagcacaggttttctacaaagaacaatctgcttcagctgccatgatgactgttaattccggcattagaaaaattcttccagattccgaga

SEQ ID NO: 37574 - DNA, 288 bp, Glycine max
  Clone ID: 701118621H1
ctcttatggacccgacactcgcgacatagacgaactcgttctcatggatcctacacggacgttgcctcctcaccgttcgtcgaaagcggccgagtttgcatcaacggtgggaaggtttcaaaggggagagaatggacggtgataaacccatcttcagcgtgaggagagcgtcgatcataggacggtcgcgtgcgagtttgacggtggagatgtacgataaccccggtgaggagtaccagatcgaggggtgcttctcgcagcgttgctgcacggttttcaatgtgacga

SEQ ID NO: 37575 - DNA, 295 bp, Glycine max
  unsure (1)..(295): unsure at all n locations; Clone ID: 701118622H1
gatggcttctgcagatgttgagtaccgttgctttgtcggtnggctcgcttggnccactgacgaccatgccctcgagaggnccttctctcagtacggcgaaatcgttgaaacgaagattatcaacgatcgtgagactggcagatccaggggttntngatttgtgaccttcgcctcggagcagtccatgaaagatgcgatcggagcgatgaatggacagaacttggacggccgtaacatcactgtcaatgaagctcagtcccgcggtggcggcgnnngcggcggaggaggaggatac

SEQ ID NO: 37576 - DNA, 296 bp, Glycine max
  unsure (1)..(296): unsure at all n locations; Clone ID: 701118625H1
aatcgatctctctntctctctctgcttattgcaataacctaacctcgtgtcgtgatccgggcactggaactagggtttgcgctttctgtgttcaacaatcaagtttcaagaggagaggagaagagatggatgactgttgtgccgtttgcnctgagcctttggaatgggttgcgtacggaccctgtttgcaccgggaggtgtgttccacgtncgtcgntcgtctccgtttcatctgcgacgatcgnngttgctgcatctgcaagaccgaatgcaacctcgttttcgtcaccaaggct

SEQ ID NO: 37577 - DNA, 296 bp, Glycine max
  unsure (1)..(296): unsure at all n locations; Clone ID: 701118626H1
aagagaagttactcgatagttcaaatcagaagatggttcctgtcacaccaactcaataacagattcanaccaaacccaaactgttaggtttnctttgtttggtgtgaagcnatggntgattcttcttccaacctgaaatccgacgcgataatggagcagatgaagcaacacctcgccaccgacgctggcaaacaagtcaccaataaaattggactcgtttatcagtttcacattgctcctaagaaattggattcgacgaggtcgtctacaccgttgatctcaagaaaggagaggtc

SEQ ID NO: 37578 - DNA, 265 bp, Glycine max
  unsure (1)..(265): unsure at all n locations; Clone ID: 701118627H1
cgtgggcttctggnntncagcaagtttggtntncgnnagannnncaaggagtcggtccgaacgnnngatccacccccttccttgncgnacacagagacgtgtgttttggnttctatttgtgccgtggtttgagatttagatgcaantaantntataccctgtcttgtgccgtgtcccctttaagccaattgcaatcaaacaaagtttcggttattggtgttcattttcttcctccatctttctctaaaacataattganctctcc

SEQ ID NO: 37579 - DNA, 293 bp, Glycine max
  unsure (1)..(293): unsure at all n locations; Clone ID: 701118628H1
ggcatatctncagccatnctaagagaaagaanctcggttttggtgcaaccctaagnagcagtgagctgagctgagtctctntctgtctntctcttaggncnnctctatntctgtgtcatantctcacacngtnccttcttcanttncattcagatngnttgcagtgtccaggagcccngctcnnattcgganccccatngtaatctctctttgncattcagaggaaacncacgccatggnctctgtgtcatnaccgnnacgcngcatacgncngancngggngnggagggggc

SEQ ID NO: 37580 - DNA, 285 bp, Glycine max
  unsure (1)..(285): unsure at all n locations; Clone ID: 701118629H1
tcttcccatcattggtatgctttttgttatggaggacgctgtcattattttanttttnacggcccagggcctttctctagcaagacttgaacttaaccccaaaccggtgatttgaatttgccattcttctctctaattttgggtctagcagaatgcgttgttgcaattttgttgcttgcttgtntgtttgtcttattactaaagattgtagattgctgctttctctttctctgtgttttgttttaatatccgtgaggtggttctgtaaatttgaaacttgtttaa

SEQ ID NO: 37581 - DNA, 296 bp, Glycine max
  unsure (1)..(296): unsure at all n locations; Clone ID: 701118630H1
atccaagaagaacaacgacgatggcgatggctgcagctctgcgtcgcgaaggaaggcgtttgacccaaccaatcaacgccctccactcttctctcaattcctccctcatctctcaagaccaagcccctcatggcgcgcgctccatttccantcaagttgtgaggnaccgaatgaagagtgtgaggatatccagaagatcaccaaggccatgaagatggttgcngcgtccaagctgcgggccgttcagaccagaactgaaaatttcncgcggcttctggcaaccgttcacgctcttc

SEQ ID NO: 37582 - DNA, 298 bp, Glycine max
  unsure (1)..(298): unsure at all n locations; Clone ID: 701118631H1
agaatttctatctatctcttgtttcaatttcaacaacggttactcctttttcgttttgagtttcaatcaagccatcatcatgtctaccgcatcgcaacccaaggccaagaaaacggcgtcgtccaagaagcccctctcccaccctcccttcgccgtgatgatagcagaggcgattgcnagtctgaaagagagaaccggttcgagccaatacgcgataaccagatacatcgaagggaagcacaaggagttgcctgcaacctacaagaagttgtcctcgttcatctcaagaaatctgttg

SEQ ID NO: 37583 - DNA, 299 bp, Glycine max
  unsure (1)..(299): unsure at all n locations; Clone ID: 701118632H1
cagcanatcttcaatgaattggntgattctcnctggcntgacccaactgncactcggggcttttagagattgtgctcttcaggatattgntttaggcgaatatgtgggagtgagcgatgattggatggatgtcatctcntcacaaagggntgtctntactttcagttgatgtttctggttctcaggtganagtaacggactgngattcctaaaggattgtcagntcttcaagcattgactctcaattttgtgaccagttttcagaatnatggggcntaagcacattagtggtctttnaa

SEQ ID NO: 37584 - DNA, 295 bp, Glycine max
  unsure (1)..(295): unsure at all n locations; Clone ID: 701118633H1
gcaggcagtcaaagaagtggctttgcttcaagaggaattggagaagaaaactgcngagtttagagaaacaagtgccgttnttnaggttaaagagtcagagcttgttgatgntaagctagaaatccagcgtttgaaatctgaaaaggcttctnttcagggtatcttggaggagaaagacttggagntttccagtgntaggaaaatgctgggggatgttaaccaggaatctatgatcttaagatgcttgatgcacagtaaagaaacccagctcattgaagcaaacagtatgctaagg

SEQ ID NO: 37585 - DNA, 294 bp, Glycine max
  unsure (1)..(294): unsure at all n locations; Clone ID: 701118634H1
cgnaagtcttactcgttntgntnttgttctctctnntctctnggntcgcgttgnagnttngatggttgtgtatctgtggttctcttgtagggatcagtggnttttagagatttagctcacaagttctctcgttgtattgtgtantattggaantctcgggcttcanctgctntggaaaggttcgctaccttgccattgtcatagaaagtgaagnagcttatcagatttccagagttgttaancttttgcagtggcnggacattattggtgtaaagnatgtgtgcctctatgnca

SEQ ID NO: 37586 - DNA, 290 bp, Glycine max
  unsure (1)..(290): unsure at all n locations; Clone ID: 701118635H1
gnatgaagcagctgaacttttaagggatgaacagaaagatgatcctatagctgctgtagaatttctttccaaatactgcnaatgggctgttgtaacattgggtgctaatgggtgcattgccaaacatggaaaggagatgatacaagtcccggccattggggaaacaaaggcaaccgatgctacaggagcaggggacctttttgcaagtggatttttgtatggagtggtcaagggtttgtcactagaagaatgctgcaaagtaggcacatgcagtggtggatctgttatcc

SEQ ID NO: 37587 - DNA, 250 bp, Glycine max
  unsure (1)..(250): unsure at all n locations; Clone ID: 701118636H1
aaaccanatcaaaccacgccagcttcaaaacgctgcgtttnantccngtcctcgcgtngctcccaaaccctaatcctatccgcggtattcctctggtcgcngtcgacaccgtcccggtcgcgccaaccgccgcaacccgaagaaaccgaatcgatctgagagaaggtgcgatctcggaggtgggagcnaaacgaaacgatgccgtctcacgcggatctggagcgacagatcgagcagctgatggactgca

SEQ ID NO: 37588 - DNA, 285 bp, Glycine max
  unsure (1)..(285): unsure at all n locations; Clone ID: 701118637H1
ctcatacccaccatgttcatggatgggagtggnttgtgaccctnccanttctgctgtantaggggatatctttaattcggtattcactgtctgcttcagactttctgccacttgtttgcaaaattcaaactttggagcnttttgatgtctccaacaaccgtctgagctcagtcccagatggtttcatcactgagtgtggaaagattaaggggttaaaaaagctgaatttcagtggaaacatgttagggggtgattttaccatctgttcatggttttgatgnntgg

SEQ ID NO: 37589 - DNA, 293 bp, Glycine max
  unsure (1)..(293): unsure at all n locations; Clone ID: 701118638H1
aggttgcattgctagtatactctctcgcactacgccggcggacgtgtgtaggttttccgtcgtatcaaagattttccgttcggccgctgantcggacgctgtgtggaaacgttttctcccttccgattaccattccatcatttcccagtctccttcgcctctcaactatccttccaagaaggagctctatctcgctctctcggatcgccctatcatcatcgatcagggtaaaaagagctttcaattggagaaaaagagtgggaagaagtgttacatgcttgctgctagagctc

SEQ ID NO: 37590 - DNA, 293 bp, Glycine max
  unsure (1)..(293): unsure at all n locations; Clone ID: 701118642H1
ctctctctctgttatgttccctccttctagantatnaattcacgagaganacacganaatctttcgattccggacaanaaagnactcnggacggtgaaattggagggttttccgggatcccaaggccgaatcttgattcaatttacgaaaagagaacaccntccgttgctgaatcttgaagccgantcaaatcgtnnnnnnnnnnnnnnnnnnnnnnnnnngcgaatagcgtttagagagagaaaggtgaagtggggttgtctaaagtttgggtcttgtgtttgttgtgtgtg

SEQ ID NO: 37591 - DNA, 109 bp, Glycine max
  unsure (1)..(109): unsure at all n locations; Clone ID: 701118643H1
tttcctcgnccttctttcttnnttgtgtgtcgngcatggctaagtntcattcangtgggaggagctcttccgtgantgctgtgagccttcncggtntntccttntggtc

SEQ ID NO: 37592 - DNA, 214 bp, Glycine max
  unsure (1)..(214): unsure at all n locations; Clone ID: 701118645H1
gcngncgacgggattctcgtactatcggcgacaatgtacacgtgtgcggtgaactataaacgacgtcgcgtggnggtttcaagcagtgtcgtgtgaagaaagaactaaaatggcctaaacaaccacttgaccattacattacatgtttggatnntcaatctccttcaaagaacgaccancgnatttttccccttcaaccttgtncttccacaca

SEQ ID NO: 37593 - DNA, 293 bp, Glycine max
  unsure (1)..(293): unsure at all n locations; Clone ID: 701118648H1
attaacggtaantttacnttnttngagcatgtctagcttttntgntattttcctgctttttcatcatcagtnatatggcatgccaatgatgagcattcagagactnttattcttcaccntggtgtacctatttgattacatgagttagaacttagaagcaaagcaatgcacannaagaaaaacagttttcatttgaacatgtccctggcatgacacatcagaggacatctatctatttgtgttctcagggcaccnacaccttgcnatccaaagcatgtatatcttgtagggtg

SEQ ID NO: 37594 - DNA, 280 bp, Glycine max
  unsure (1)..(280): unsure at all n locations; Clone ID: 701118649H1
aaccagagatggagcatccaaagaaggtttttggttgggctgntcgggactcatctggnctnntntncccattnaacttctccagaagagaaacgggggagaaagatttggtattcaaagtgcaatactgtggaatatgccactnagatctacatatgttaaagaacgagtggggcaacacaacctatcctctggttccngggcacgagattgcnggtgtggtaacacaagttggaagcaangtgcaaaagttcaaagttggagaccgggtaggtgtggg

SEQ ID NO: 37595 - DNA, 118 bp, Glycine max
  unsure (1)..(118): unsure at all n locations; Clone ID: 701118651H1
ttcgaactcgggggtatttttatgcaggagttgtggctcggtagctacaaatccaaaatcaaaaaaaaaanaaaagggaagantggattttnnaaannntgnncggntnaaaantanc

SEQ ID NO: 37596 - DNA, 288 bp, Glycine max
  unsure (1)..(288): unsure at all n locations; Clone ID: 701118653H1
caaaacccaagatgccatgtttttntttaggaatcctgagggtatgtggatcccatgtgggccaaagcaacagggttcagtgcaaactacaatgcaggatattgctgcgaaaggacttgcttctaagatcctcccacctcctatatcgagaacagattttgacaaagtacttgctagacaaagacccaccgtaagcaagtctgaccttgatgttcatgagagattcacaaaggagttcggagaggaaggataattctgacggaatttttcttcaatcatctgcactag

SEQ ID NO: 37597 - DNA, 283 bp, Glycine max
  Clone ID: 701118656H1
agagcttgatattatttccaacgctagctgcacaaccaactgccttgctccactgcgcccaaggttatcaatgacaggtttggcattgttgagggtttgatgaccactgttcattccatcactgctacccagaagactgttgatgggccatcagccaaggactggagaggtggaagagctgcttcatttaacatcattcctagcagcactggagcttccaaggctgttgggaaagtccttcctgctttgaatggaaaattgactggtatggcattccgtgttc

SEQ ID NO: 37598 - DNA, 235 bp, Glycine max
  unsure (1)..(235): unsure at all n locations; Clone ID: 701118657H1
gggtgcaaggagtaagattctggtgaggagttgccgagctgacgtgatgaagttgacattatttttggagagagttgtgttttgtaatcanctcctccgtagttggtttaagttttattttgttgagttaaagatgtaaaacttggattttaattatatttatgaacagatttaatttccattatgcgtatgatgtgtaacaagttactnttcctatntnattatatattcactt

SEQ ID NO: 37599 - DNA, 287 bp, Glycine max
  unsure (1)..(287): unsure at all n locations; Clone ID: 701118658H1
ggttgttcgcgtcacgaagatgatcgaggtggtgttgaacgatcgattggggaagaaggtgcgcgtgaagtgcaacgacngatganaccatcggcgacctgaagaagctggtggcggctcagacgggcacaagagccgacaagatccgcatccagaagtggtacaccatatacaaggatcacatcactctcaaggattacgagatccacgacggcatgggtctcgaactctactacaactaaacacaaggtctatacccatctcattcttctttttatagatactag

SEQ ID NO: 37600 - DNA, 289 bp, Glycine max
  unsure (1)..(289): unsure at all n locations; Clone ID: 701118661H1
gaggattcagaccaatgtttatgggnaatggtagcaccaacattgggcagagaggaaagatatggtctctggtttgaccctgcagatgatttccatcagtacactattgtctggacagactctcagatcatattttatgtggacaatgttcctattagagaagtgacgcgaacagaatctatgggaggagatttcccttctaagccaatgactttgtatgcaacaatatgggatgcatctgattgggctaccaatggaggcaaatacagggttaactacaagtatgcac

SEQ ID NO: 37601 - DNA, 287 bp, Glycine max
  unsure (1)..(287): unsure at all n locations; Clone ID: 701118662H1
aacaacttcncctgtaaatngcgtttcgtttgtgcaaggttttaaaagatggctgatgctgaggacattcaacntcttgttgttgataatggaactggaatggtcaaggctggttttgcaggtgatgatgntcctagggccgtgttccccagnattattgggagaccacgccatactggngtgatggttgggatgggtcagaaggatgcttacgtgggtgatgaagcccaatcaaaaaggggtatactcaccttgnagtatcctatagagcatggcatagtcagcaa

SEQ ID NO: 37602 - DNA, 280 bp, Glycine max
  unsure (1)..(280): unsure at all n locations; Clone ID: 701118664H1
accctcttcatcttgttctatctgtgacgagcatcatggcntcaagagcagtgttattgttggctatgtgtgtgcttccggcgatggttgtggccattcgcccancnaagaaccctttttgcgtgaagggtcgtgtctactgtgaccttgccgtgctggttntnagacntcagctaccanctacattgctggtgctgagattatgttgcaatgcaagagcagggttagcaacgaggttgtgtacacgaagaaggggtacaccgactcaaccggagcatac

SEQ ID NO: 37603 - DNA, 289 bp, Glycine max
  unsure (1)..(289): unsure at all n locations; Clone ID: 701118665H1
caanctcacgctaacactcttccnaccttcaatggacttncagttgccctattgggttgcagtgtgcnactgaaatctctgctcttctctctcctccctctcctcttcaagttcagaantattatcacgaccttttgactgcaagagggtgcagtggtatcaaagtcaaacaggatggcaactttggaaaaggtttatatgcagacatggacttcaaagagggggaactggttctgaaggaccccatgcttgtaggagctcancatcccctcaacaagattgattgttt

SEQ ID NO: 37604 - DNA, 283 bp, Glycine max
  unsure (1)..(283): unsure at all n locations; Clone ID: 701118666H1
tcgagncgatttcatgaagcatctacaaacgccctaggaccactaggctccattatattatnaattattcaacgtggcaataacttattggtcatttcatgaaagagataagatattgcatggtcataccaccatgtcctttttttttgtgatttacgttccatatattcatcctttggtccattctttggttcagtnttcagattacattgcaaaaatggcatcattcaccatgacagcttccatccttggcggcccagcngtcaccaacnggttggnagta

SEQ ID NO: 37605 - DNA, 284 bp, Glycine max
  unsure (1)..(284): unsure at all n locations; Clone ID: 701118667H1
gaaaacagagcaacattcaatggcgtctaggaagggcttcctttcgaaagtncagttccatgtttgcatcatcaagcaccgatttgggagcccaaatccacagatggtgacttggaattggatgaagctgacgtgttcaactggaacatgtcnnnnnnnnnnnnnnnnnnnnnnnctgtgacagagtcgaagaagaggccacgatctggtaagaagaaaaaggtggagggtggtggtggcaaagtgaaccctgtggcctcgtcctcatgccagtggctattcct

SEQ ID NO: 37606 - DNA, 285 bp, Glycine max
  unsure (1)..(285): unsure at all n locations; Clone ID: 701118669H1
aacaacaccactagtgtagcaacttctatcagcactaataacaattctcttcagagtcttagaccaccaaccccttccaagaactccaaccatatccanatctatgcaaaagcaaattaatattcctttaacatagcaaagagtcaagaaacgagtcatctccaggctcctccttgtctctagtggtggtgaaaacattattgtaagattgttgattcatgtaagaccccattaatggatttccaaaccctgagaatccaaagcttcctgaactgtgctgcatat

SEQ ID NO: 37607 - DNA, 170 bp, Glycine max
  unsure (1)..(170): unsure at all n locations; Clone ID: 701118670H1
cttggtaccattccatggtgggagttgagttgagtagagagaaagaagatggtggngcgcaggtttcaggtgatccacgacgattctgantttgatctccattacgacacagacgacggcttcgaagtttttcaattccagctctattccctctnttccgttccacntna

SEQ ID NO: 37608 - DNA, 285 bp, Glycine max
  unsure (1)..(285): unsure at all n locations; Clone ID: 701118671H1
cttatgacagacaaggaagcagggatagggatagggcttatgacacacaaggaagcaaggatagggaaagggcttatgacagacgaggaagcaaggatagggatagggaatacgaaaganagggtagcaaagttaggttgaaggggaagcatgatgaggggagggaagatttggtggagccacgactctcgtcacattctcataagcggaaagagagggagcacagtgaggacagggactacgaggataagaaaattaggatttccgaggagaggaaggaaggga

SEQ ID NO: 37609 - DNA, 287 bp, Glycine max
  unsure (1)..(287): unsure at all n locations; Clone ID: 701118672H1
ctgaagaagaagaagttctgaagaagcatgtgtggaggtgctatcatctcagacttcattggtgtgaagcgtggccgcaacctcgccgcgcaggaactgtggtccgagcttgaccctttctctgacctccttggcttcgatnnnnnnnnnnnnnnnnnnnnnnnnnnnnnnnnnnnnnnnnnnnnnnnnnnnnnnnnnnnnnnnnnnnnnnnnnnnnnnngtgtgagtgcagaaaagaagagtggtgggcgagctcggaagaacgtgtacagaggaatcaggcaaag

SEQ ID NO: 37610 - DNA, 286 bp, Glycine max
  unsure (1)..(286): unsure at all n locations; Clone ID: 701118673H1
gctctattcaacatggaactaaggagctttcaaacccctnacttcttgttcctggggaagaattcaagaaggtattctcagtnagttctgatatgaacatttccaagctcaaactgggaaccatgtgtttgagttggaggagagacnttggggttgaagagcaatctgnttctacttcaacattgcnttgggttgtgactaaacaaaagctgcnggatgtgaacgtggagttacctccaatgattgtgagttttgaatgtcccccttatgccgtagtgggcgaccc

SEQ ID NO: 37611 - DNA, 276 bp, Glycine max
  unsure (1)..(276): unsure at all n locations; Clone ID: 701118674H1
agttgctcctatagccggcgctcaacaacatggcggacaaggcagtcaccatccncaaccagaaagttcatgacaaacaggcttctctccagaaagcaattcatcgttgatgtccttcatccagggagggctaatgtttccaaggctgaactgaaggagaaattgggcagaatgtatgacgtgaaagacactaacactgtatttgtcttcaagtttcgaactcattttggtggtggcaagtccactgggtttggtttgatctatgattcagttgag

SEQ ID NO: 37612 - DNA, 284 bp, Glycine max
  unsure (1)..(284): unsure at all n locations; Clone ID: 701118675H1
cnaagcacccagtgcttctcactgaggntcntctcaacccaaaggccaacagagaaaagatgacccaaatcatgtttganaccttcaatgtgcntgcnatgtatgtngccatccaggctgttctctccttgtatgcnagtggtcgcacaactggtattgtgttggactctggtgatggtgtgagtnacactgtaccaatctatgaggggtatgcactcccccatgccatccttcgtttggatctcgcaggtngtgatctaactgatcatttgatgaagatcctc

SEQ ID NO: 37613 - DNA, 219 bp, Glycine max
  unsure (1)..(219): unsure at all n locations; Clone ID: 701118676H1
ttnatnnattagtncnnancnattaattncnattgaagtccgaaaacagaanccaaaaatacgggntgatgaaatcncatangncaaaaanaaatgggnatgtagtttaggtacaacaaacaaagtggggnggctanagatgctttgcaaattttnnaatgncttggaaccctgggggcttntaggcgatgaacctgttncactgnattggngaacgtt

SEQ ID NO: 37614 - DNA, 256 bp, Glycine max
  unsure (1)..(256): unsure at all n locations; Clone ID: 701118677H1
ccagttcgttanactcgttttttgnnngangcaggaagagangagnancnnncggnccgcgcaatgtcgttgagctgcttnctgtnngntttnggtctcccggcagagngtttcacnaagttgccaagtacccttttcaggntcnaggaagagatcnaganccnncaanaggtgttgttcttgttgtagttgtntgtaactgtagcacaggaagtggttggaagttggttgtggtgaggntgtgttggccntgtct

SEQ ID NO: 37615 - DNA, 248 bp, Glycine max
  unsure (1)..(248): unsure at all n locations; Clone ID: 701118678H1
ctcgagacgcattcattccttttacctgntgacacttgacatgaccactgttactacttcagtgaacgggtgttggagatattggtgacgtgaaaataattgatctacaggctccaattagtagccttattggaaaacaagtggtgaaggttggaagaagctctggcttgaccacgggagtagttttgggcttatgccctagagtacaatgatgagaaaggtatatgctttctgacggatctcttgtt

SEQ ID NO: 37616 - DNA, 293 bp, Glycine max
  unsure (1)..(293): unsure at all n locations; Clone ID: 701118679H1
cgacgaagtagcagctgagagatttgganacatttgttgcctcntttncnctgcaataaatgatttacatgncgaaggatttgatgcanactttgagtcttagnttaccggangatctggnatggtgctgantggttttccagagcanctgttcagaggttccttcattttgctagtttcaccaganttgntacatggccatcagtagtatcctagatgaggtgtctcagntggaggattcanaggnntttcatgtttcttgtatggggagggcaatcaaggatcatcttgga

SEQ ID NO: 37617 - DNA, 267 bp, Glycine max
  unsure (1)..(267): unsure at all n locations; Clone ID: 701118680H1
caagtnaggaggaggtgacccttttggnagctactggaagcccatttgtgtgaanggttcatattgccctcaagttgaagggagttcaatacaaatatgtcgangaaaatttgaggaacaagagtgaactgcttctcaaatccagcccagttcacaagaaggttccagtgtttattcacaatgagaagcccatagcagagtctcttgtgattgttgaatacntgatgngaatggaagaacaaccccntcttggccttctgntccntg

SEQ ID NO: 37618 - DNA, 301 bp, Glycine max
  unsure (1)..(301): unsure at all n locations; Clone ID: 701118681H1
gaatggggattctgtacgcgcnggttggtngtggatnggnggtgcaggnncgagnagcattgngacgaagaggttttcanggatttannnttcnttgttcgnagatgtgnncngttnntgattagttgatgataagctgtcgacaaatttcacatggaaaganaacgaacacgggnacggnctcgtcttgcatgggacgtgcccctccctcagtgtccgaggngcaacgggctctgccagtgcccggtgnngaagaattcgaaagaaagcacgtttcgcctccgganaagggacgacgtcg

SEQ ID NO: 37619 - DNA, 264 bp, Glycine max
  unsure (1)..(264): unsure at all n locations; Clone ID: 701118683H1
aatttgaatacttnttatgnaactatagtgaggntaagagattggtccataattaatcaaaatgttggntatattcnacaaagnttttgntcatccacntgaagagctcaacagccctgcatnttacaaaggttncaagaagcctaaggttcccgaggaaactctnaaagatttcntttcccaccatcntcacaacacttgctctnatgagctttggtgatgntgctgttctagcttatgtncgtcctgatcaatctttntctc

SEQ ID NO: 37620 - DNA, 281 bp, Glycine max
  unsure (1)..(281): unsure at all n locations; Clone ID: 701118684H1
antggantagcctccagatggttgtgttaanagnaatncctgctctctgccgtcngtgctggtnatcctcgtactgcatggngtgcagcagcacgacttcttaggtcctactatcctctantaacacctgctgggcaaaatgggcttgctaatgcactttcaaattcagctgagaggctgccaccagggactcgtngtgctgntcctgctttaccctttgtgaggtccaatgaaaacctctgaagatagtcctacaaatggatctactgtgccccctggca

SEQ ID NO: 37621 - DNA, 279 bp, Glycine max
  unsure (1)..(279): unsure at all n locations; Clone ID: 701118685H1
tgaatggngaggggagtgaagcaatgcaagtngagaaggagagcttggtgtacatgtggggttacctgcncggagctntgcngnagaggacgcntntgttgacgcngcttcttgttagggttccgncctctggttacttttggaaggatgtntgcngcggtggttgtggattcgccatggctatntntgagcntggaaagctcataacatggggttcaacagatgatttaggccaaagctatgttacatctggcaaanatggggaaactccagagcntt

SEQ ID NO: 37622 - DNA, 286 bp, Glycine max
  unsure (1)..(286): unsure at all n locations; Clone ID: 701118688H1
gctgactcagatgcagatgaggaagaacgaagtnattgtgcagatcttgatgtttccactgatatgccactgaagaagaaagggaaaacaagtgctggtgaatcaaccaagcaaggaaagatggatgtttcttccaaaagcagtggagcagcagcatccaatagatcaaagggtgcatccacaaagtctagccagaagtccaaggatggcaacaaatccaaagattccaaggctaatagcaaatctgaggatggagttaatagaaaatctaaggacagcactccta

SEQ ID NO: 37623 - DNA, 281 bp, Glycine max
  unsure (1)..(281): unsure at all n locations; Clone ID: 701118689H1
atcccacttcctttttnttctttttttgttctttgttttttgtttgataagaaactgcgagaagaaagtaaaaggttcaatttttacccttttttcttcccagaagcgatctctgaagccgacccattttggaattcggaaaaccnagtgctgatcgctctctgggtgttcccaaaatgaagnttcggagatcttcgctgtgcgtctttctagggtttctngtgctgttcctttngccgcngccatctatggcgaaattngtggtggagaagaacagcttg

SEQ ID NO: 37624 - DNA, 212 bp, Glycine max
  unsure (1)..(212): unsure at all n locations; Clone ID: 701118690H1
caagcctaacaaacaaagntgctganccgagnngcaacctcntgaaggcgaaacaaacactgaaagagtattcntgtnttgcncntgtntctccctcgaagacagccctcntntgacggaatcccaggcnatcggngtggtggcggcgtcgnaggcnaattcatgcgcgtnatcgtccccgaaaatgacgaaccttctggaagcttccgcgg

SEQ ID NO: 37625 - DNA, 281 bp, Glycine max
  Clone ID: 701118692H1
attggctttggagcccctccttctccacttccgtttcatcttcgcctggcttcctctccttctcctttggccttcccaataatccacaaattccaaaacgcagggcaagtcagtgataacaatctgttcaaagaaaaatgcaaaatcaagggtggtcactctctgctctgcacctgtgcaagttgatatgcaggagcaggaggttagtgatattactttgagagagagaagtgtttcggttgtcctattggctggagggcagggcaagaggatgggagcta

SEQ ID NO: 37626 - DNA, 200 bp, Glycine max
  unsure (1)..(200): unsure at all n locations; Clone ID: 701118693H1
tttggagngatcngagaaaaactctgtaaacatgttggtttaccaggacntccttncaggtgatgagcttntctntggctcattncgttgcaaggaagttgaggtgggatgctgtgggaagttgaggggaagtgggttgttaaaggagcagttgatgtagncattggtgcaaacccttntgctgagggtggaggagaaga

SEQ ID NO: 37627 - DNA, 281 bp, Glycine max
  unsure (1)..(281): unsure at all n locations; Clone ID: 701118694H1
tcgtggttcaagaaacccgtgccgaagaacttgatgggaaagaaaagagaggaattggatctggaggagaagattaaacancatgagcaggaggtttctactacgatgaatgcttttcacatcatttcgctctcggaggggttcgatttgtcgccgttgttcgaggaaaagaagagagaagagaaagagttacggtttgcgaccacgcgccccgcgagcagcgtgatttcgagattggaagatttggcgaaggcggtgaagttcgacgtgaagaagagcga

SEQ ID NO: 37628 - DNA, 283 bp, Glycine max
  unsure (1)..(283): unsure at all n locations; Clone ID: 701118695H1
agtcacggggaggaaactgctaccagatgctaaacctctctacctctaatctagtaaccacntactacacancttacattaactcctctctcatattcaacaccatctccctcattgatatatataatctcaagactattattagcgtgtttggttccacttttgggatgtgattttaagaagctaatacttatagattccacgtctcgaacatgatttctnacttctgaacggagtttccaaacacgctatacganatgttagaccacaaatncatatgggg

SEQ ID NO: 37629 - DNA, 283 bp, Glycine max
  unsure (1)..(283): unsure at all n locations; Clone ID: 701118696H1
aaaagggtgcttgcgtttctttctgtgatctcaaccatgaatnctccactcacaccttcagccagcggcatgaagactaacaagaaagccaaggcgatggaaaatgacgaagacgtggaggggctggggcgtttcgacgacaaccttctgttcgaggtgttgaagcacgtggacgcgcggacgctggcgatggcgggatgcgtgaacaaacagtggcacanaactgcgcaagacgagaggctctgggaactgatctgcacaaagcagtgggcaaacacagggt

SEQ ID NO: 37630 - DNA, 283 bp, Glycine max
  Clone ID: 701118701H1
gtgggttgggagatgttcttggaggtctaccaccggcattggcaggttttgggcatcgagtaatgactattgtgccgcgctatgaccagtacaaagatgcatgggatacaagtgttgtaattgaggtgaaagtaggagatagaacagaaaaggttcgcttctccattgttataagaggggagttgatcgtgtcttgtggatcacccttggtttcttgaaaaggtatgggggaaaactggacaaaaactttatggaccactactggaatgattacgaagaccaa

SEQ ID NO: 37631 - DNA, 279 bp, Glycine max
  unsure (1)..(279): unsure at all n locations; Clone ID: 701118703H1
ttccgttgggcacaggggaataatctaccgtttgcatttggntgggggaagaanannccaggnacgnatgaacaggcggtcaagtcagttctagatcaagtaatgaaagctaaggaaatgaaaatagacaactggcacattcttatgcggatgagagctccaaaacatggtccatgtgatccaattcctcctcttgagttaccacattctttgcatgccttccatcatatatctgaggcagatgaacttaatgtggggctgttgttgttctnattgcnc

SEQ ID NO: 37632 - DNA, 280 bp, Glycine max
  unsure (1)..(280): unsure at all n locations; Clone ID: 701118706H1
gccatgggataatgacaaccctggcacggtagaaggttgcaagcctgtaaaggacagnaaacgaaaatctcgagagcatgacgaaccagcaaaggaatcagtactgaatacaaatggtgaatcgggtgttgcagtggcaaatggaaaatccccacaaggacacaaatccaaaagacaaaagggcaacaataagagtaaaaaggcactgaaagaaaatcgagaagcagccttgtccatgaagccaaagaataacgaaaatggccataacatggtggtgcat

SEQ ID NO: 37633 - DNA, 280 bp, Glycine max
  Clone ID: 701118707H1
gggcatccaggcaacccttttgatctctcagcaatgtctggtctgctcaatgatccaagtatcaaggaattgggctgaacagatagcaaaagatccatcgttcaatcagatggctgagcagcttcagaaaacttttcaaggagctccacaagatgctatccctagcttcgataatcaacaatatttttcaaccatgcaacaggttatgcagaatcctaattttatgaccatggctgagcgcctgggtaatgcattgatgcaggatccgtctatgtctgcc

SEQ ID NO: 37634 - DNA, 278 bp, Glycine max
  unsure (1)..(278): unsure at all n locations; Clone ID: 701118708H1
gcttgtnctccttctgcctagtaagaagcaacttgttttagaaagaaaagaaaaacagtgtcattgctctttggcacaataagataatagaaaatggaaagcgacaggaattgggagcagaacgcactcatcagtgagctaattcaggggttggaggtagcaagaaagttgaaggaagacttgagttcagcctcttcggttgacgctagggactcacactcactactgcagaggatattgtctcttatgacaaggctttgctttttctaagatggang

SEQ ID NO: 37635 - DNA, 276 bp, Glycine max
  Clone ID: 701118709H1
gttaggttctgcacgctctgcttccagcgagtgttctttcttcgtttcaacaccttaatttgcacacgctgcttcttcagcttgagaaatggcacaagaaacctttctattcacatctgaatctgtaaacgagggtcaccccgacaagctgtgcgaccagatctctgatgcagtgctcgatgcgtgccttgaacaggaccctgacagcaaggttgcctgtgagacatgcaccaagaccaacatggtcatggtctttggagagatcacaaccaaggc

SEQ ID NO: 37636 - DNA, 276 bp, Glycine max
  unsure (1)..(276): unsure at all n locations; Clone ID: 701118710H1
aaccccatcagtagcaacattcgcctccaatggacgtgaaggctttagcgaaatcaaagagaagccacacgcagcaccacagcaaaaattctcaccatagccacaagcccaacaaagccgnnnnnnnnnnnnnnnnnnnnnnnnnngtgggccccaatgacgctgcgaagaagaacccattggggaagcagcaagtgagcgaggagaagaagaagaaaagccaccattccgcgcttccctcgaattgggacaggtacgaggatgaggaagaagatt

SEQ ID NO: 37637 - DNA, 275 bp, Glycine max
  Clone ID: 701118711H1
aaaaacaactcctccgccattgctcacccaaccctattccatttccctcactccttcactccttcactcagtccctatcaaaatgcacagtgcaacgcacgccgaagcagagcgtcttctcagcatgcaatcccatattcgcgaccttggcttggactcctccttggagctgcacacagtctcggaggacatggtcgggcaaatcacaatctcaccggcccctttgatttaggtgtcaaatttgacggcgacatcgcaggacctacactgcagtc

SEQ ID NO: 37638 - DNA, 272 bp, Glycine max
  Clone ID: 701118713H1
aatggctattactacaccttccaattcttcaattctcctctccctttctctattgctcatctccctctccctcgctgagtcgcaatctttcatcggagtaaactacggccaggtcgccgacaaccttccggcgccggaggacacggccaacctcctcaaatccacaaccatcggaaaagtccgtctctacggtgccgatcccgccatcatcaaggccctcgccaattccggcatcggaatcgtcatcggcgccgccaacgggacattccgag

SEQ ID NO: 37639 - DNA, 268 bp, Glycine max
  Clone ID: 701118715H1
actggtcacctgatttacaagcttggaggcattgacaagcgtgttattgagaggtttgagaaggaagctgctgagatgaacaagaggtctttcaagtatgcctgggtgctggacaaacttaaggctgagcgtgaaagaggaatcaccattgatattgctttgtggaagtttgaaacaacaaagtattattgcacagttattgatgcgcctggacatagggatttcataagaatatgattactgggacatcccaagctgactgtgctgt

SEQ ID NO: 37640 - DNA, 250 bp, Glycine max
  unsure (1)..(250): unsure at all n locations; Clone ID: 701118716H1
ctccgcaccagtttcaccgcacgacntatcttgttgtntnngagcgatccgagaaaaacactgtaaacatgttggtttaccaggacctccttacaggtgatgagcttctctctgactccttccgttacaaggaaattgagaatggaatgctgtgggaagttgaggggaagtgggttgttaaaggagcagttgatgtagacattggtgcaaacccttctgctgagggtggaggagaagatgagggagttga

SEQ ID NO: 37641 - DNA, 280 bp, Glycine max
  unsure (1)..(280): unsure at all n locations; Clone ID: 701118717H1
gctctgcttccagcgagtgttctttcttcgtttcaacaccttaatttgcanacgctgcttcttcnnnttgagaaatnncacaaganacctttctattcacatctgaatctgtaaacgagggtcaccccgacaagctgtgcgaccagatctctgatgcagtgctcgatgcgtgccttgaacaggaccctgacagcaaggttgcctgtgagacatgcaccaagaccaacatggtcatggtctttggagagatcacaaccaaggccaacgtagactatgagat

SEQ ID NO: 37642 - DNA, 258 bp, Glycine max
  unsure (1)..(258): unsure at all n locations; Clone ID: 701118718H1
ggaaccgcggccaaccctctcttcantcttcttcttcaatncttttataacctttatagnttcattcttaatcgttgggaaaaatgttcatcgagaattttaaggtagagagtcctaatgtgaagtacaccgagactgagattcagtccgtgtacaactacgaaaccaccgaacttgttcacgagaacaggnatggcacctatcagtggattgtcaaacccaaatccgtcaactaccaatttaaaaccaacacccatg

SEQ ID NO: 37643 - DNA, 257 bp, Glycine max
  unsure (1)..(257): unsure at all n locations; Clone ID: 701118719H1
ccccactatagcatgtctctaagnctagccatcaaactacacctggcttcttcttctcactctttttccctccttaccctcaacaaccaccaacatgcaaacaagttaacaacttccgaaacttgttccaacaccaaggttcgtncccaaacccatttatagcaccaaccctttgatcattcccacgtgtaaagtgaggccaagagtgcaatactgtggcaccatgatcaagagttctttgatagagcctgatgggg

SEQ ID NO: 37644 - DNA, 273 bp, Glycine max
  Clone ID: 701118721H1
gagtaatggtgttttctaatggtgataaatgctggaatggtccagataggagtttgaaggtcaagttaagatgcgggttgaaaaacgagattactgatgtagatgaaccaagccgttgcgaatatgtagctgtattatctaccccgaccctttgccaagaggaaaggctgaaggagttacaactcaaactagaccttttgaattcggaaataccagcaaaccatgacgagttgtgaacaaccgggacagattttaactggtagtatgatgatc

SEQ ID NO: 37645 - DNA, 277 bp, Glycine max
  Clone ID: 701118723H1
ctggataggtcaaacatcatcatgtcggacgaagagcaccatttacgagtccaaggcagacgccggtggcctccaaaacctaccctcagcaagccggtaccattcgcaagaacggctacatcgtcatcaaaggacgcccctgcaaggttgtggaagtttcgacttccaaaactggaaagcacggtcacgccaagtgccactttgttggaattgatattttcactgccaagaaacttgaggatattgtgccctcttctcacaactgtgatgttcctca

SEQ ID NO: 37646 - DNA, 276 bp, Glycine max
  unsure (1)..(276): unsure at all n locations; Clone ID: 701118724H1
acacacacagagagagatggntacgacgaggattgaggcagagaagaagccgaagacgaagatcgtgtgcactctgggccccgcatcacggtcggtcccaatgatcgagaagcttctgcgagcaggcatgaacgtggcgcgcttcaacttctcccatgggtcccacgagtaccaccaggaaaccctcgacaacctccgcgccgccatggagaacaccggtattctctgcgccgtcatgctcgacaccaaggggcctgagattcgaactggttttct

SEQ ID NO: 37647 - DNA, 273 bp, Glycine max
  Clone ID: 701118725H1
caaaaatcacgtactcgctgcatctccgttctgcactgaatcactgatcagagatcgcttacgaactcgaaaaggttaatgaacgagcacgtcattgcgcttctactactcttccactttaccttccttcgcagataaaccgtgttgcatattcgcgctgcttcctctctagggtttcttcaacctcatggcttcccctactcatttcgacgatgacttcgatttcggtgacggatttggcggaaggcattcaggtaataagaggtcatctcc

SEQ ID NO: 37648 - DNA, 153 bp, Glycine max
  unsure (1)..(153): unsure at all n locations; Clone ID: 701118726H1
gntgttccctggcntggccaggccattgactcttgagtcttgagccagttcctttttcgggttgttgaacattcnggattttaaagcattgccttctaccagtncatattcttntcacttctaaaaaatggaaaactcagatacaacactgac

SEQ ID NO: 37649 - DNA, 270 bp, Glycine max
  Clone ID: 701118727H1
cttaacaagaagctcgatttggtcaatggagtgctcttcactggtgggtgggctgtttctggtccatatttggatactcttggaaacatttttaagaaagctttagagaaaaatgatgctggagaccatttcccagtaattgccttcaacttaggtggaaacctcgtaataaggatcgtaagcgagcaaactgatattcttgaaccattactgcgtcgagtttgccaagttctcttgtattgtggaaggaagcaaatgctaaaggaagtc

SEQ ID NO: 37650 - DNA, 269 bp, Glycine max
  unsure (1)..(269): unsure at all n locations; Clone ID: 701118729H1
cttctgaatctccagctgttagctcctttcttcctcttcttaatacttccagtgtttttnttcttctgtttcacctcctcaggtcctacaaaaggaaccatccctattccaaaaccataccctattattggtcactacttcgccctcaaaagcgtcggcaaccgccgtatccagtggctatccgatattgtcaaaatctcaccggccggcacgttcaccctccaccgccccttgggccgccgtggagtcatcaccggcaaccccgccac

SEQ ID NO: 37651 - DNA, 265 bp, Glycine max
  Clone ID: 701118730H1
tctttcggagagttcgaagatgtcgggcgttaccaacaacaacgaggaagacaagaagccaaccgaacagggagcacacatcaaccttaaggttaaggggcaggatgggaatgaagtttttttcaggatcaagagaagcactcaattgaagaagcttatgaatgcttactgtgaccgacagtcggtggatttcaactccattgcttttctgtttgatggacgccgcctccgagctgagcagactccagatgagttggaatggagg

SEQ ID NO: 37652 - DNA, 260 bp, Glycine max
  unsure (1)..(260): unsure at all n locations; Clone ID: 701118731H1
gttcaatttgcagttgcacgcttcccaattcgcacacccatatcacatcacatctttntncacacgcaacgcaaccncttnataatcaatcatcctcantngcatttnatgnngcagcantcttngccgtganangggaccatggaggcaaattcaggtgccagcgaccgaatttcgagaatcgccggccacctccgcccccagagagaggatgatgtttgtttgaagcgtagantntgccgtgcaaaaggtggggtctc

SEQ ID NO: 37653 - DNA, 237 bp, Glycine max
  unsure (1)..(237): unsure at all n locations; Clone ID: 701118732H1
gtttgctccccaaggaaagaagcagagtgtntcttttganatcagctagaaaagatgtcaggtgaanaggtagctgttgcagctgaggcacctgctgcttcaattccaggtgagccaatggacatcatgactgctctacagcttgtgctgagaaaatctctggcctatggtggtcttgcacgaggtcttcatgaaggtgctaaggtgatcgagaagcatgctgcacagctctgcgtt

SEQ ID NO: 37654 - DNA, 277 bp, Glycine max
  Clone ID: 701118733H1
ggaacaatgtaggcaagggaagtcggcaaaatggatccgtaacctcgggaaaaggattggctctgagggctgggcacgggggtcccagtcccgaacccgtcggctgtcggtggactgctcgagctgcttccgcggcgagagcgggtcgtcgcgtgccggtcgggggacggattgggaacgggcccttcggggcctcttccccgggcgtcgaacagtcaactcagaactggtacggacaaggggaatccgactgtttaattaaaacaaagcattgcga

SEQ ID NO: 37655 - DNA, 271 bp, Glycine max
  Clone ID: 701118734H1
aacaaaatcaacacgcatgtgctcttgaatgtctacgatctcacccctgtcaataattacgtctactggtttggatttggcatctttcactctggcattgaagtacatggtaaggagtatggttttggagcccatgacttcccagctagtggagtttttgaagtggagccaaggaaatgccctggattcatatatagatgttccatctctttgggtcaaaccaatatgaatcctctgaattcgtacatttattgaaaacatggctctgagt

SEQ ID NO: 37656 - DNA, 255 bp, Glycine max
  unsure (1)..(255): unsure at all n locations; Clone ID: 701118735H1
ctctttcttctttttttctnttctantcaccctcaaaattactcactctctttatcttccaacttttcagtttaaagcttcagatcacaacagatccaccattcacctcaccactttctcttcacaaggcaaatctaacaagaaaaagtagtctctgaagccgatccagtgtcttgtgaatttggaattggtggtgaatttagatctaaaaagccatagcaatgtcttttatcggtacccagcaaaagtgcaagg

SEQ ID NO: 37657 - DNA, 272 bp, Glycine max
  unsure (1)..(272): unsure at all n locations; Clone ID: 701118737H1
atggctgtccnggntgacagtggcatnanacgcatgancctgattgcccgtngctgctgagtcctattgctgatgggnatatagtgaatgtacagattcgcagatatcgacagtggcagctctctcaaactagttctgttgcnacangcatanttcctgcgtcantgtnacnngggcagagggaantacttgaacaggganctccgaaatttcaaccggtttggtgggtggctggggaagaactcgacaatgggcanaaacttncggctttt

SEQ ID NO: 37658 - DNA, 272 bp, Glycine max
  unsure (1)..(272): unsure at all n locations; Clone ID: 701118738H1
ctaggcatgattcaacaaatgcaacangtntgtncctgactgcngangatctggtgaggacatttatctctctcgttaatgacctcaccagatcctctgcagtcaggacagacatcgagaatgtgtttggcttgcgaatgaattgtggcgtcgtgggctgatggccggcacgagcctctctcacgtgatccaatcnacggtcctagaattgcccagaaccacccgccacgtcagaatctccgccaagagccaccgcgtctccgccacctctg

SEQ ID NO: 37659 - DNA, 272 bp, Glycine max
  unsure (1)..(272): unsure at all n locations; Clone ID: 701118739H1
atttccccctgaatgtcagantctaagtcaattngntcccaatgtgctagatgctgaggagaatgtaacaagtttaaatcatgtccgggtttcaaatgatatatttagagctccacctgagaatattacntctgaaaaatctgacatggcaggggatagtggtgacaaagcaggaagtgtgcagaatggcatagttttatgttcaagcaggccttcaaaaggtagtgataaccaaaatgccagtgaaattgaaaatggctctgaatccaaga

SEQ ID NO: 37660 - DNA, 272 bp, Glycine max
  Clone ID: 701118740H1
gcctcatgtttcaaccggtccattcacaaaaaatggtgttcctgaagaacctatcacttttgaagcaagaggtcaacagatcccatctgcagacttggctttcaatgccactcaacaagtggaggcaggagttgcccctgttgatctcaatgtccctccttttgatccttttttagctcagttccctgatggtgatggcaagaagggtgaaatgctggctgtcaatagttctgctagtaaggatgacaatagtgggatatgctcaagttctg

SEQ ID NO: 37661 - DNA, 269 bp, Glycine max
  unsure (1)..(269): unsure at all n locations; Clone ID: 701118742H1
ctgggaggctgctgtcccttttcctttatccacttttttttttccattgcgttatttatttgcccgtgtctctcactcagtcactcactcattctctctgcaaattctaatcttcgcaaatcaacaacgtctctctctgttactctgaaaactgacttcaagttagtgtaactagctgcnaagttgtgatggcattggtctctggaagaagttctgctctgaacccaaatgcacctatgttcatacctgctgcacttcgtcaggtggag

SEQ ID NO: 37662 - DNA, 267 bp, Glycine max
  unsure (1)..(267): unsure at all n locations; Clone ID: 701118744H1
ctaaagcctatacaaacacaaagaacaatataacactttctaatatgttctagagtctagatctactcattctccttattcactctttcttgagatataaatggaagattcagaggaagaagagcttctgaatcttactctttcagttgatgccggtagggagaggagaattaagaaaggaaggacaagggnnnnnnnnnnnnnnnnnnnntctgttattattcctatgaagtccaatgacgggtatgaagggaagatcttcaggct

SEQ ID NO: 37663 - DNA, 262 bp, Glycine max
  unsure (1)..(262): unsure at all n locations; Clone ID: 701118746H1
cggtggnagacgtgtnggtgccgtgcgttttgatcccgaacttcacttgcgtcatgtnttacagcatcaaggatcattttcaccgttacgctttcaagagttcctcacggatattcctntcatttccgtcataagatcccttntcattctctgtgtttatncngnatgtgatggtcctgctctctcacatggtccttaccttggaactgtgactctgtgctcctttctgtcaattgttctcctttcggtcaaagcttgtgtt

SEQ ID NO: 37664 - DNA, 236 bp, Glycine max
  unsure (1)..(236): unsure at all n locations; Clone ID: 701118747H1
cttccctctcaacttcattttcctttcaaatagtaacactagagnacaaaagctctggctagaacttgtaatgtatatgcaagccatcatcattcagaacaattagtgcatcatcctccttcaactgaagaactttatttaatttgctcctaaaatattttgtcagaggatgtggcataaaacctgcaatgagatggctttcttcccagcaaatttcatgctccaaacccctcacc

SEQ ID NO: 37665 - DNA, 266 bp, Glycine max
  unsure (1)..(266): unsure at all n locations; Clone ID: 701118748H1
tctacaatcaagccaacattcgcaggatgcgaatctaangtccaagcccagaagtcctcgaagcactaagaggttccaacattgagcttttgctagacattccaaatgacaacctcagaaacctagcatctagccaagacaatgcaaacaaatgggtgcaagacaacatcaaaaactatgccaacaatgttcagattcagatacgtttcagtgggaaatgaagtgaaacccgaacactcatttgcacatttctagtgcctgcattg

SEQ ID NO: 37666 - DNA, 273 bp, Glycine max
  Clone ID: 701118749H1
gttttggctgatgcttatgatgaagagcagatgaagcttgtaaccttaacagcttctctctgtgtagaccagtcctcaattcagcgaccggttatgagccaggtgttagatatactaagaggggaagaagagagcttaagaatcatgaaagaacgatcgaagtcaaaacttcagaggacatactctgaagaactcttagatgcagaagagtacaactcaacaaagtttttgagtgagagggatcgacatatggagactattctaggctgcagt

SEQ ID NO: 37667 - DNA, 270 bp, Glycine max
  unsure (1)..(270): unsure at all n locations; Clone ID: 701118750H1
gcggaggtaagattgcaatgccaagttggaacgatgggaagctncnattcaagactnngnnangctattaagaganaagccaggggatgaggaggtggcaagggctctgtttgagacccagctccaactcaagatgctacncggtgaagatattaaggacttgaaatttggctcaaatttgtttttcatctcaagcaatgatcggtttagacattatgtaacatcacctgggatgtctgtggtactcttttgtaacaaggcaacccataa

SEQ ID NO: 37668 - DNA, 269 bp, Glycine max
  Clone ID: 701118751H1
gttattggtgggtgtagaaagtagcaggaaatggctgtgatcccgtgtcactgttaccgtaccgtcggatcagacaaaccctacctctccggtcagagtctccgccgtcgcgctcctttccccgccgtctctgtttcatttcgacgccgaatatcatgcgtcgcctcttctgccatcgctcacaaagttgggctgaaagattttcttcacttagatgattttgataaggacactattctgaagatgctggaccgggcacttgaggtcaa

SEQ ID NO: 37669 - DNA, 248 bp, Glycine max
  unsure (1)..(248): unsure at all n locations; Clone ID: 701118752H1
aaattatccaaaacagtaaaatagccttaaacaaaacgntcaatagtttccccagatttatatttaaaaaacacgaaacaaacataagagagaaggaaaaagagagagaaacaaagtcttcttcctcaatcgagagggacctcaacatcaccatcggaaatctcctgctgcaagtcctttggatcctttccatcaacggtgcaaccaaccgaaacgcatgttccgagaatctccttaatggagccgct

SEQ ID NO: 37670 - DNA, 270 bp, Glycine max
  unsure (1)..(270): unsure at all n locations; Clone ID: 701118753H1
tntctctctacactctattcaacccttcacattttctctcttctttatcttaaattacttttccatggaggaaagcaagaaacgagtccgggacgagtccagctactcacccgagtcccaaactcagctggtcgactctcccgagtctgaaagtccagcgggtcgactcacctgagtctaagattcgtcgagttgactcgtccgagtctcaactcgactcggtccttgactcggaggtgcgtctacaagacgacatttttaacatacttg

SEQ ID NO: 37671 - DNA, 270 bp, Glycine max
  unsure (1)..(270): unsure at all n locations; Clone ID: 701118755H1
gcggtacccttgctctccaagaggatcgtgaagaagcgcgtcangaagtttatacgcccccagagtgatcgcaagatctccgtcaagccaagctggcgcagacccaagggtattgattctcgtgtcaggagaaagttcaaaggatgcactttgatgcccaacattggttatggctcagacaagaaaacccgccattatctaccaaatggtttcaagaaatttgtcgtgcacaatgtgaaagacctggaacttctcatgatgcataacagg

SEQ ID NO: 37672 - DNA, 266 bp, Glycine max
  Clone ID: 701118757H1
gctctgcttccagcgagtgttctttcttcgtttcaacaccttaatttgcacacgctgcttcttcagcttgagaaatggcacaagaaacctttctattcacatctgaatctgtaaacgagggtcaccccgacaagctgtgcgaccagatctctgatgcagtgctcgatgcgtgccttgaacaggaccctgacagcaaggttgcctgtgagacatgcaccaagaccaacatggtcatggtctttggagagatcacaaccaaggccaac

SEQ ID NO: 37673 - DNA, 264 bp, Glycine max
  unsure (1)..(264): unsure at all n locations; Clone ID: 701118758H1
cttcttcttgttctctgtttaaggcaatacaacatttactactcatactcaaagtagcttagtgttttgtttagcatatcatggagaataataatcagtcgttttggcaattcagtgaccagctgaggttacaggcatccaatttggcgaacctttctctaaacgattcgatttggagcnacaattacatctccaagaggcgtgatgaaaggattaattttgacatcaataggggggtgagatcaactctttcaagtcaaagga

SEQ ID NO: 37674 - DNA, 147 bp, Glycine max
  unsure (1)..(147): unsure at all n locations; Clone ID: 701118759H1
cttctttgcaaaacacgactgaggaccttncaacaccggcgtntccctgccttcctctcctctctctgcctttacctttgattgtaggtttntnattatttggcggcgggttgaatatttttgttttagcgtctgagctttgaatta

SEQ ID NO: 37675 - DNA, 261 bp, Glycine max
  Clone ID: 701118762H1
cgaagtgccacctaggaagaagggagcagctaccactgcataaacctgtcaaagatcgttgtttgctgggtacggacttacaagaatagattgcttttttgtgcttatggcaagtattttggaacaattatttttagagtctgattgctactttgtccttcatttaatttgtagttgctttatatttcaacaagatcataagacttattgattattcagtcggctatgttacatttatagtttgtggtttaagcagttttc

SEQ ID NO: 37676 - DNA, 259 bp, Glycine max
  unsure (1)..(259): unsure at all n locations; Clone ID: 701118763H1
ctcgtatcccctatttgcttcatgttcagatgactgcactgcatatgtttttnatggaatggtttattctgatctcaatcaaaatcctcttattgttcctttagaaattctacgaggtcataccaattcaaatgggagagggatactggactgtaaatttcacccgagacagccatggttatttacggctggtgctgataaactgattaaactttattgtcataatataaacatggacatacgtgcatgtgataggcgg

SEQ ID NO: 37677 - DNA, 266 bp, Glycine max
  unsure (1)..(266): unsure at all n locations; Clone ID: 701118764H1
aagctanntagagcttgcanntattggtntcttntacaatatnctctcatagtgntgnttctnctnnnncatgtngattgtcaggaatgggagnggttctctgnnntnctncatgaggnggtgaanagaagctttnnactttcgtatgatncntgagtacagatnggttggtggatctggtatggacctcagaagcaaagccaggactcttcctgggccagtgagtgaccctgcaaagcttccaaagtggnactacgatggctctt

SEQ ID NO: 37678 - DNA, 271 bp, Glycine max
  Clone ID: 701118765H1
aaccaacagaattgaaagtcttgatccagctttgctacgacctggtcgaattgacaggaagatagaatttcctcttcctgatatcaaaacaaggagacgcatcttccagatacacacgtcaaggatgacattagctgatgatgtcaacttggaagaatttgttatgactaaagacgaattctccggagctgatataaaggcaatatgtactgaagctggtttacttgctctacgagaacgtcgaatgaaggtgactcatgccgactttaag

SEQ ID NO: 37679 - DNA, 270 bp, Glycine max
  Clone ID: 701118766H1
acacacacagagagagatggctacgacgaggattgaggcagagaagaagccgaagacgaagattcgtgtgcactctgggccccgcatcacggtcggtcccaatgatcgagaagcttctgcgagcaggcatgaacgtggcgcgcttcaacttctcccatgggtcccacgagtaccaccaggaaaccctcgacaacctccgcgccgccatggagaacaccggtattctctgcgccgtcatgctcgacaccaaggggcctgagattcgaactg

SEQ ID NO: 37680 - DNA, 257 bp, Glycine max
  Clone ID: 701118767H1
cttctactttcgttcctctcttctctgtttcaaacaaacggagaacaacctcaactaaagatttgaagggagtgcgcaattgatggatgaatattctgctaaaagagccactgatggggtggtagtccctagaaaggggatacgccatgcatttagagatactgctaacgccagagatcaaaatggtcaggtgtgcagccgcattacttgtagtagcagagtcaatactcctaaaggtgctcaaattggttctctga

SEQ ID NO: 37681 - DNA, 266 bp, Glycine max
  Clone ID: 701118768H1
gctatcttctcaatttccgatcactgcattggttctgttgacgagggttttgttctacttgacttgcatacttgatggcgtcaaagttgcagaagttgcagtccgcagcatgtcaagcatctcaatttgtatccagtcgtggaactaactactacaggcaattgctggaacagaacaagcaacacattcaggagcctcctacagtagagaaatgcaacctgctggcaaagcaattgttttacacccgccttgctagtattccgggt

SEQ ID NO: 37682 - DNA, 264 bp, Glycine max
  unsure (1)..(264): unsure at all n locations; Clone ID: 701118769H1
gccggtttccaagttggtcattgggatgatactgcaatgatgtctgacaacgttggtggtctcaaaagatttagtgaagaagattcaaaaccattttctggcttaaatgcggttgagactcagaatgaaacgggacagactcatgctcctttggcccatcagttgagtttgccaaatacttcagctgaaatggctgccattgagaagtttctgcagttttcagattctgttccgtgcaaaatccgtgcnaaacggggctgtgcc

SEQ ID NO: 37683 - DNA, 266 bp, Glycine max
  Clone ID: 701118772H1
cttatatctcatccactggcccctcagttctcagccagggaagttctcctttcctattgaggtagatgatctcttgcctttcgatgtgaagggtgtgtgggaatccatggaagagtgccagaaacttggcctcaccaaagccattggagtcagcaacttctctgtcaagaagcttcagaatctgctctctgttgctaccatccgtcccgtggtcgatcaagtggagatgaaccttgcatggcaacagaagaagctaagagagttct

SEQ ID NO: 37684 - DNA, 265 bp, Glycine max
  unsure (1)..(265): unsure at all n locations; Clone ID: 701118773H1
gctttttcngctggtttgcatggntgggcttttaccctgactaactttgccaagatgtatgcatccaagtttggagttgatgaaggaaagatgatggaaaggctcnggggtgaaaacttttttgatccagccacaaagaaatgnaccagcaagaatagtggttctgctacctgcaagcgtgggtttgttcagtnctgttatgagcccatcaagcagattattaacacttgtcatgaatgatcaggaaggataagctgtggcctat

SEQ ID NO: 37685 - DNA, 263 bp, Glycine max
  unsure (1)..(263): unsure at all n locations; Clone ID: 701118774H1
attttggtcaagccctttcgttcatagagtgatatgggctctaaagttgaagaacattagttatgagtacatagaggttgataggttcaacaaaagtgagctacttcttcaatccaatccagtttacaagaaagtccctgtgcttattcatggaggcaaagccattgcagagtctctcgtcattcttgaatacatcgaagaaacgtggccagagaaccacccattgctaccanaagacaaccatcaaagggccttggctcgct

SEQ ID NO: 37686 - DNA, 262 bp, Glycine max
  Clone ID: 701118775H1
gtcatatgcttgtctcaaagattaagccatgcatgtgtaagtatgaactaattcagactgtgaaactgcgaatggctcattaaatcagttatagtttgtttgatggtatcttctactcggataaccgtagtaattctagagctaatacgtgcaacaaaccccgacttctggaagggatgcatttattagataaaaggtcaacacaggctctgccgttggctttgatgattcatgataactcgtcggatcgcacggcctttgt

SEQ ID NO: 37687 - DNA, 243 bp, Glycine max
  unsure (1)..(243): unsure at all n locations; Clone ID: 701118776H1
ggtggatatggcaacaattccaacacacaagagcaantanctantcaccctccccaaatccaaccatctccatcgtcgtcatcgtngccttcatcatcgttaccatcttctccctctgcatcacgttgcttgtcttcactctgaattttgctctctcctttggcagtaggcgtgttgatcaatagcagccggtagagatccggggccaaaagcggctcgagaacacttccaattacaatatac

SEQ ID NO: 37688 - DNA, 261 bp, Glycine max
  Clone ID: 701118777H1
ggagtcagaccttgtcgttccaaccgataaactaagtttcctgaatagagcctgtgttatcaaagatcgggaacaagaaatagcctcggatggttcagcatcaaatccatggaaactcctgcacagtagatcaagtagaggaactaaaagccattattaaagtgattcccttgtggtctacagggatcatgatgtcagttaacattggaggctcatttggattgctgcaagctaagtccctggacagacacatcacctcac

SEQ ID NO: 37689 - DNA, 191 bp, Glycine max
  Clone ID: 701118778H1
ctaaagcctatacaaacacaaagaacaatataacactttctaatatgttctagagtctagatctactcattctccttattcactctttcttgagatataaatggaagattcagaggaagaagagcttctgaatcttactctttcagttgatgccggtagggagaggagaattaagaaaggaaggacaaggg

SEQ ID NO: 37690 - DNA, 258 bp, Glycine max
  unsure (1)..(258): unsure at all n locations; Clone ID: 701118779H1
attgatgcagtgaagcagaggcagtcccaagaacaggctaggagaaaaaagatgtcgagggctcaagatggaatnttgaagtacatgctgaagatgatggaggtttgtnangcccaaggatttgtctatgggattattcctgagaagggaaaaccggtgactggggcatctgataatcttcgtgaatggtggaaggataaagtccggtttgatcgaaatggtcctgctgccatagccaagtatcaagctgataacact

SEQ ID NO: 37691 - DNA, 257 bp, Glycine max
  unsure (1)..(257): unsure at all n locations; Clone ID: 701118780H1
cccagagagcgcgtcttaataaacgctcttctctgaaaacccccatttcttttcttctttcttcttctctttcgcttcttcgatcttcgatcttcgtcgctgaaaatgagagagtgcatttcaatccacatcggccaggccgggattcaggttggaaacgcctgctgggagctttactgcctcgaacacggcattcagcctgatgggcagatgccaagtgacaagaccgttggtggaggngatgntgtnccnanaat

SEQ ID NO: 37692 - DNA, 246 bp, Glycine max
  unsure (1)..(246): unsure at all n locations; Clone ID: 701118781H1
attttattttactcattcacatannntctttttctaatttagcaaccttaatatttgcctaggtctagtttattggttgtgttgtctccgaggattgaaatccaatccgttcctcctttttatctgataacacaaaaatggtaaatgctttgagagttggcagtgttatctcactctactcccttcggaacacgagaccccatcttccccttctctccaacgccacgcgcttccgttccaagttcc

SEQ ID NO: 37693 - DNA, 264 bp, Glycine max
  Clone ID: 701118784H1
atgaaatccgacagagagaaggagaaagagaaagagaatgatcactgcatcagttctcatatgcagacccttcatcgccgtcttctccacgccttaaaccttggcaccagatctcaacttggcacccccatcccacccagtcacttccctccagacattttgatgagaagacaaatagatggaaaaatgtgctatgatcaattggtgcgctcttgattcattatcaggagatgcacatgcagcacgtcatgctattgttaagga

SEQ ID NO: 37694 - DNA, 217 bp, Glycine max
  unsure (1)..(217): unsure at all n locations; Clone ID: 701118785H1
tatcaagatgtctttgctttcggatctcatcaacctcaatctctcagaatccacagaaaagatcgttacntgagtacatatgggttggtggatctggtatggacctcagaagcaaagccaggactcttcctgggccagtgagtgaccctgcaaagcttccaaagtggaactacgatggctctagcacagaccaagctccaggggatgacagtgaagt

SEQ ID NO: 37695 - DNA, 263 bp, Glycine max
  unsure (1)..(263): unsure at all n locations; Clone ID: 701118786H1
gttttcatcgtcttccttctcttatatttntntttttttttngttcttcgccgcacgccgaaanaatggccggaaaaggagagggtcctgcnatnggaatcgatctcggaaccacctactcttgtgtcggtgtgtggcaacatgaccgagttgaaatcatcgccaacgaccaagggaacagaacgangccgtcttacgtcggcttcactgataccgggngtctcatnggtgatgcggctaagaaccaagtcgccatgaacccc

SEQ ID NO: 37696 - DNA, 264 bp, Glycine max
  Clone ID: 701118787H1
gactgctatagccttcctgtttatccttctaatcacttatacaggcacaacagatgcacaatccggggtatgttatggaagacttggcaacaacttaccaacccctcaagaagttgtggccctctacaatcaagccaacattcgcaggatgcgaatctacggtccaagcccagaagtcctcgaagcactaagaggttccaacattgagcttttgctagacattccaaatgacaacctcagaaacctagcatctagccaagacaa

SEQ ID NO: 37697 - DNA, 263 bp, Glycine max
  Clone ID: 701118788H1
ggaaagttggaatggcgaaaaaggcagtgttgatcggaataaactacccaggaacaaaggcggagctgagaggatgcataaacgacgtgtggagaatgcatcgctgcctgatcgagcgatacggtttctccgaagacgacatcaccgttttgatcgacacggacgagtcctacacggagcccaccgggaagaacatccggtcagcgctgaccaggctggtccgatcggcggacccggggacgttctgtttgtgcatacagcgg

SEQ ID NO: 37698 - DNA, 258 bp, Glycine max
  unsure (1)..(258): unsure at all n locations; Clone ID: 701118790H1
ggggtctagaagcncgtgtaccatttttggacaaggcgtttatcaatgctgcaatgagtattgaccctgagtggaagatgataaaaagagatgaaggacgaattgagaagtggattctgaggagagcctttgatgatgaagagcatccttatctgccaaagcacattttatacaggcagaaagaacaattcagtgatggagttggctatagttggatgatggccttaaggcncatgctgcaaaacatgtgactgaaaa

SEQ ID NO: 37699 - DNA, 259 bp, Glycine max
  Clone ID: 701118791H1
ctcgatcagcctcacaacaacaacataggattatactaactattttcttgatggctcaagacatcctcagaatcatacccactctcctctctgcagcttcaatcgccgtcatggtcaccaacaaccaaaccgttctcatcttcgctatccgcttccaagcccacttttattactcaccctccttcaagttttttgttgcagcaaatggtgtagtcgttgccttgtctttgctgacactggtactgaactttctcatgaa

SEQ ID NO: 37700 - DNA, 256 bp, Glycine max
  unsure (1)..(256): unsure at all n locations; Clone ID: 701118792H1
caggaatacagttgtgttgtcatttgaaccagatttcaataatgattcttgctgctcttctaacttcagttgtaattaaccttggcctatgttttatatttttcaccctctactctgtanntgaggaagcagcctggtaatattaccgtctatgcaccacgcttagtttctgaagggaaacgtcaagagggtgatcaatttaacttggaacgtttgttacctgctactactgctggttgggtgagaaaagcaggga

SEQ ID NO: 37701 - DNA, 236 bp, Glycine max
  unsure (1)..(236): unsure at all n locations; Clone ID: 701118793H1
gagaaattggtggatctgcttgatanggcattatctgcagacacagttaacactgtgaagaatttgagagtgatcatggaaactggtgtcgagccattggctttaatgtcacaacttgctacagtaattactgatatacttgctgggacctatgatttcacaaaagaaaggcganggaggaagttcttccggagacaaccattgtccaaagaagacatggagaagctgcgccaagc

SEQ ID NO: 37702 - DNA, 256 bp, Glycine max
  unsure (1)..(256): unsure at all n locations; Clone ID: 701118794H1
atggcttctgtgcctcaaccaaaaatctcccttctaaccttattcttcttctcttccttcaccatcattgcgnatgcaattgttcctcaaaacgaaaccttnaaatttgagaactcaggtgaacttggaccctacatcgttgagtacggtgcagattacagaatgataagcatcttcaactctccattccaagttggtttctacaacaccaccccaaatgccttcactctagctttgcgtgtagggctccaacgct

SEQ ID NO: 37703 - DNA, 254 bp, Glycine max
  Clone ID: 701118795H1
caagctactacatttttaacttcctctttctacatttcattcaaaacaatcatggcttctcttcattccattacattttcaacaaaaactgtcctttatgtatttgtattggcctcttccatcgcagcctctgctggcaacttctaccaggattttgacgtaacttggggagatggtcgtgccaagatactcaacaacggcgatcttctcactctttcccttgacaaagcctctggctcggggtttcagtccaa

SEQ ID NO: 37704 - DNA, 217 bp, Glycine max
  unsure (1)..(217): unsure at all n locations; Clone ID: 701118796H1
attagagggagagttagtgagcnaggtggatcgaaggcaagggaagangnctctccctgctcatgaggngannnaagaagctttgcaactttgcctattattcatncaacaccatcttcaaantcganaggaacaagcttcaccatncacccttttcactcctcatgagtnacaacanngacaacaccnnntncccangtggaactacnaggctcta

SEQ ID NO: 37705 - DNA, 282 bp, Glycine max
  Clone ID: 701118801H1
ggaggagctatgcacgaagatctcgtgctgtgacgctctgatagtcaggagcgggacgaaggtgacgagggaagtgtttgaagctgggaaagggaggttgaaggtcgtgggaagagccggcgtggggattgacaacgtggatctgcaagctgccactgaatttggttgcctggtcgtcaatgctcccactgccaacactattgctgctgccgagcatgggatcgctctccttgctgccatggcccgcaacgttgcccaggctgacgcctccaccaaagctgg

SEQ ID NO: 37706 - DNA, 278 bp, Glycine max
  unsure (1)..(278): unsure at all n locations; Clone ID: 701118802H1
ggnaaggncgctgacttggaccaaaattattgttggtgtngttgaggcttgcnattcccttggggtcatggcatagagatctcaagcctgaaaactttctcttggtcaacaaagatgatgatttctctcttaaagccattgactttggcctctccgttttcttcaaacccggtcaagttttcactgatgtagtcggcagcccatactatgttgctcctgaggttctcctcaaacatatgggcctgaagcagatgtgtggacagcgggtgtcatatgta

SEQ ID NO: 37707 - DNA, 272 bp, Glycine max
  unsure (1)..(272): unsure at all n locations; Clone ID: 701118803H1
ggcggctctcagaaaagccgtgttctttgtaatcgctcaatgcttcaccttttccgcatatgctgcaaggtttgaaatcacaaaccgatgcacatacactgtctgggctgcgtctgtgcctgttggcggtggcgtgcaattaaacccgggccagtcatggtccgtggacgtgcctgtnggaacgaaaggggcccgcgtttngncccgaaccggctgcaacttcgacggttcgggcngcggtggatgccagaccggtgactgcgggggtgtcc

SEQ ID NO: 37708 - DNA, 267 bp, Glycine max
  unsure (1)..(267): unsure at all n locations; Clone ID: 701118804H1
cagcacttggctgagaagctagacttggaaatgtctgccctccagnatatgatanaagaataccctggaaacnaggagganangatgagagcagccattgggaaatttggactgtctggcaaagcgcaggtcatgcctatgaagaatttatccgatgggcagaggaaccgngtgatattcgcatggttagcttatagacagcctcacctgctacttttggatgagccaacgaaccattggatatagaaacattgactcatggctgag

SEQ ID NO: 37709 - DNA, 267 bp, Glycine max
  Clone ID: 701118805H1
ctgttgttctttggctttattgaactgctgtatttctcagcttcactgacaaagttttgtgagggtgcctggttacctattctgctggccctattcctcatgattataatgtttctttggcactatgcgaccatcagaaaatatgaatacgatcttcacaacaaggtgtcactagattggctctagccttaggtccaagcttgggaattgctagagtcccaggaataggcctagtgttcactgacctcaccactggcatcccagcaa

SEQ ID NO: 37710 - DNA, 267 bp, Glycine max
  Clone ID: 701118807H1
gggagtttctcaagaagcagatgaagaagggcaagggaaagggtaagggtgaaggtgacggtgaggcccacaagtatgtcgcaaaatatagggaggaatctgaacgttgtgttgccgaggttgccttgtctgttaaagaggctctcactgccaagcgcaagagcccttcacaaccccaccatgatgctaagaagttgaaaatatggatggggaagaggaaattgaatgaaagtgatagtgattatagtgatgattctgatgaagagg

SEQ ID NO: 37711 - DNA, 264 bp, Glycine max
  unsure (1)..(264): unsure at all n locations; Clone ID: 701118808H1
catggcgtcgtcgtcttcaaactgaagaccggagngagtcaccgtcgtcactttccggagaacagaacagaacaagtgcataagagaatcatcgaattttcattcctttgtatagaagatgaagcgcaagctcgggcataagaaagggaaggcaaaggcagcactaaccatggaagcagtggtgctgatgctaacaaggaagaaacctctggtttggaggttgacacaccttcttccacggggaccggatggatcagcagcagc

SEQ ID NO: 37712 - DNA, 263 bp, Glycine max
  Clone ID: 701118809H1
ctaaagggagatcttcctattggagttgacagaaacagtgtggatacctgggtttatccaaatttgtttcgaatgaacacttctactggggcacctccagattattttgataaaaatggccagaattggggtttccctacttataattgggaagaaatgtcaaaggacaactatggttggtggagagctcgattgacacagatggcaaaatattttacagcttacaggattgatcacattttgggattctccgaatttgggaa

SEQ ID NO: 37713 - DNA, 265 bp, Glycine max
  unsure (1)..(265): unsure at all n locations; Clone ID: 701118810H1
cttgttttcttcgttgctacaattttngtagcatggcaatgccatgcgtaacgatatgttccctctccgaatgaacactggctatggtgcccgtactccggaggtnnaatgcgcaagttggaggcttgctgtggaagcacacaacatctttggctttgagaccattcctgaagagtgcgttgaagcaacaaaggaatacatccatggcgaacaatatagatcagactccaaaacagttaaccaacaagcttacttttatgccaga

SEQ ID NO: 37714 - DNA, 261 bp, Glycine max
  unsure (1)..(261): unsure at all n locations; Clone ID: 701118811H1
caagcatggcagtcacactctacgaccttagctcttcctctgggttgaanaaacttgatgagtaccttctcccacgcagttacatcaccgggtaccaagctacaaaggatgatcttactgtttatgcagctttgccaactgctccatcagatgaatatggaaatgtttccaggtggtacaagcacattgatgctttgttgagaatctctggtgttactggcgagggatctggtgttatgttgagggatctctagttgcaga

SEQ ID NO: 37715 - DNA, 254 bp, Glycine max
  Clone ID: 701118812H1
ggaacaagaagatatctgctagtgtacttggtgtagccactgctgtttggatcttttttgagttgcttgaatatcacctgcttactctagtttgtcacatttcgattctggtgcttgcagttttgtttttgtggtccaatgcccatacctttattcacaaggcaccgccttgcatcccaaccgttcatctccctgaagaaccaattcgccaattcgcatctgcattgacaattgaaatcaaccgtggattgctg

SEQ ID NO: 37716 - DNA, 237 bp, Glycine max
  unsure (1)..(237): unsure at all n locations; Clone ID: 701118813H1
ggcaaatcaaaacagaaacacgactacaaaaagaagaaaagaagaaaaagaatcaatgcattcattgatcgctgaaacgatacgatgacagggaaggcgaaccanagaagcacacggcgaaggagatcgcggcgaaggtggacgcggcgaccacgaaccgcggcggcggaaggcgggtatgaaggaccgaaccgggttggagaagggcgggcacgcgaaatacgagtgccctcatgc

SEQ ID NO: 37717 - DNA, 267 bp, Glycine max
  unsure (1)..(267): unsure at all n locations; Clone ID: 701118816H1
cttctattcagagggaaggatagtcttggtgaagaagttgtgnnaccatatactcctacaacattggatactgatgttggatactttgaattggttgtgaagatgtatccacaaggacggatgtctcatcactttagggagatacgtgaaggtgattacatggctgtgaagggaccaaagggacgttttaagtaccagcccaaccaagtaagagctttgggtatgattgctggtggcactggcatcaccccaatgtttcaagttaca

SEQ ID NO: 37718 - DNA, 280 bp, Glycine max
  unsure (1)..(280): unsure at all n locations; Clone ID: 701118817H1
tagganngngctatatgtatggantcttcaanaacaagaggattgtgctttatgacacattaattcaacagtgacaaagacgatgaggagattgttgctgttattgcccatgagttgggacactggaagctcaaccatactgtgtacacgtttgttgctatgcagattcttacacttctacaatttggaggatatacactggtgcgaaattcaactgatctgtatcgaagctttgggtttgatacccagccagtcctcatgggctcatcatatttcagca

SEQ ID NO: 37719 - DNA, 265 bp, Glycine max
  unsure (1)..(265): unsure at all n locations; Clone ID: 701118819H1
attccatatgattaacatggaagacgtaaggnagtttacccttacattatgtatcacttttcgttgtataagagtttttcttgagcagcattgaagaacgagtagtctgttagtgattgtttatgtgaaaaaaatatgtatttgagatttccctagcgtacattttatttatatggattgaatttatcagtaatctgggttcaatctctttgtttctctccattggcatctctactgtcgctatctatacaaagcacataccttt

SEQ ID NO: 37720 - DNA, 270 bp, Glycine max
  Clone ID: 701118820H1
cggaatctttcaagttctagcaatcctcatattataaatagagctgattgaatcacaccccatatccaatcgaaaaaaattgataacatcacacagcattagtatgtatcagcaacaagggtcagatccaacaaagcaatcaccggcaaccggttttccggtgagctatagcaattcaacaacgtattcgaccaacgaggcttcctacgctccagtcccacctccccagcccaaacctcttgtcgattggtccaccggcctctgtgactg

SEQ ID NO: 37721 - DNA, 269 bp, Glycine max
  unsure (1)..(269): unsure at all n locations; Clone ID: 701118821H1
gcgaatatgctttcttggaaagtnctcctcgtctccgccgcngtcttgttcgcggcgttaggcctncanagtctctcttccagtcgccgccaccaacctccctcttctttggagtttcttcctcttgtgtttcaagcctccttacctcttcgttgttctcaacgcnatcatcatctccatcgtcgcttcttcacggtttcatcactcatcanaccctnaatctccggagncaactcctccacgtgttgaatccatgcccgctcccaagt

SEQ ID NO: 37722 - DNA, 147 bp, Glycine max
  unsure (1)..(147): unsure at all n locations; Clone ID: 701118822H1
aagnacacnaagggcttnacctctncttcaagagttttggtgttgtngaaagggtttaagcttnnncanttcactttcatcagtatctatattattatacacntaatagtcctnatagatagncatagtttttccacgcancatacg

SEQ ID NO: 37723 - DNA, 260 bp, Glycine max
  unsure (1)..(260): unsure at all n locations; Clone ID: 701118824H1
cagatatccaaaccttaaattcggtcctcgaatctttctgatcatnggttgtnttnnattctttcaaatacattccaaaatctcttggaaantgcgagattcactgcttatcctagcancagattnngggttctgacncaattattcattttccccaactgggtctgtngattnantgtnngggttntaaatttcgtgttgctgggttngaaagtnatttcctnctccccgtctggattcaactcccaagtatttgcttt

SEQ ID NO: 37724 - DNA, 242 bp, Glycine max
  unsure (1)..(242): unsure at all n locations; Clone ID: 701118825H1
ggaanngcnnnaaccctctcttatncttcttcttcaatncttttataacctttatagncctcattcttaatcgntgggaaaaatgttcatcgagaattttaaggtagagagtcctaatgtgaagtacaccgagactgagattcagtccgtgtacaactacgaaaccaccgaacttgttcacgagaacaggaatggcacctatcagtggattgtcaaacccaaatccgtcaactaccatttaa

SEQ ID NO: 37725 - DNA, 192 bp, Glycine max
  unsure (1)..(192): unsure at all n locations; Clone ID: 701118826H1
cgagaaacggaggaggagacaaggaggaacagattccggtggcgctgccggtncaccggcttcgatatcgtcatcgacgcgctgccgttcggggacgatcaacgacctccacgagattgcgaacgaatggtggcaggaggtttcgggaaggagtgctctcacgtgttacagcagctgccggagggagtttct

SEQ ID NO: 37726 - DNA, 256 bp, Glycine max
  unsure (1)..(256): unsure at all n locations; Clone ID: 701118828H1
ttgaaaatgaaggtccttgttttcttcgttgctacaattttngtagcatggcaatgccatgcgtaacgatatgttccctctccgaatgaacactggctatggtgcccgtactccggaggtgaaatgcgcaagttggangcttgctgtggaagcacacaacatctttggctttgagaccattcctgaagagtgcgttgaagcaacaaaggaatacatccatggcgaacaatatagtccagactccaaaacagttaac

SEQ ID NO: 37727 - DNA, 258 bp, Glycine max
  Clone ID: 701118830H1
aattatgatgaaatcttcttcacatctttctgcattattcctattgttctttctccttactgccctatccccttacggatggagtttcattctcttcattcctaaagcaattaaaacagaagctggagaagagtcccaccctaaaagatttcctgaaacccaccactataggggatatttattatacgttgaatttcacagaaatcttctcttccgaagagagaagcgcaccaccggtgtctctcatcaaagattact

SEQ ID NO: 37728 - DNA, 256 bp, Glycine max
  Clone ID: 701118831H1
attggattccaaatccaaacatgacacagcaaaagaagatgatgacgctttgaaagacagcactgaagccgaagtcaccaaaattcgtctcatgagagcctttgttgaaagccgagatccctcttccaaggaagaaaatgatttgatgatgagaagattctgcgggctcgtagtttggatgtggagaaggcttcggcaatgttcctaagtacttgaaatggaagcgttcattgttccaaatggttgcatatcaccg

SEQ ID NO: 37729 - DNA, 269 bp, Glycine max
  unsure (1)..(269): unsure at all n locations; Clone ID: 701118832H1
ttccncnntcaacaacatgnncnatggttgcttctctagtnctcnangccangatgctnccncncagntggttngcgagntncagttgtngatgactgatctaacatggttganaatccttgaaaagatgctcaagaagtgcttatatgaagtgactanatgttgtttagcaacagaggccctgaaaaaacttcgtgaaaggaaagaagnatatgacatagtgatcagcgatgtgaacatgcctganatggatggtttcaaacttctgg

SEQ ID NO: 37730 - DNA, 277 bp, Glycine max
  unsure (1)..(277): unsure at all n locations; Clone ID: 701118833H1
tattnagaactccgcatgncngtcaaaggncaaggcacgggaganctacctacgttttagatgcnccgtgttgctncantacccactcatacttggaatgaaacctctttgacacctaaaatcctaantgncaccanttttgtcttaggcntcgtcttnctcaanactctctctgctcactcaggttgcctgcccttgctatttggagnacacaaattcaggggnttccaaataagttaaacaggtaaaacggttccaatangacaatangnccnag

SEQ ID NO: 37731 - DNA, 274 bp, Glycine max
  unsure (1)..(274): unsure at all n locations; Clone ID: 701118834H1
gctccttagtgctgctccttgcagctctaattctatcccctcaagttcttgcaaactatgagaatnccccagtgtacaagcctcccactgagaaancaccagtttataagcccccagttgagaagcctcctgtttacaancctccagttgagaanccnccantntataagcctccagtngagaagccaccagtgtacaagcccccagttgagaancctccagtttacaagccnccagtngagaaaccaccagtgtacaagccgncagtngagaa

SEQ ID NO: 37732 - DNA, 264 bp, Glycine max
  unsure (1)..(264): unsure at all n locations; Clone ID: 701118835H1
agtgagtgttagcggttctggaaattgattgantcgaaaagaatcctaacataaaatggattctcaggttgccgtagctcttgctctttcacttgttggtggtgtcagcacttctatcggtgcactttttgtaattgttaataaaacgcccagtttgaagatgcttgggctattacagggttttgctgctggtttgatgcttagcatatcgttctttgatttggcccacaatgctttgaactcactgggctctgaaaggaaacc

SEQ ID NO: 37733 - DNA, 262 bp, Glycine max
  unsure (1)..(262): unsure at all n locations; Clone ID: 701118839H1
caatcctctaatctcctctctcccctctcataacacacgagagagagagattgtgttgtgttgtgttgtgtcatgttaaatgcaaagtcttcttctcttcctctcgagtttccccctttcagnaacccaaggcacatgaaatgaaaatgcaaccataataacctccattttnctccctacaacccacaaaataaaaaccancattaacccatttctccaaaaacttgagatcttttgtgtcaaacaaccacaagtcccgcgt

SEQ ID NO: 37734 - DNA, 139 bp, Glycine max
  unsure (1)..(139): unsure at all n locations; Clone ID: 701118840H1
gttgattggtgaagttgctggtgnccccagaagaatnggnngtgttggnatatncttgttaagctttgaatntttgaagtagtggcagaaaggttcattgacccttttttggnagacttncttgtncngtggtccntca

SEQ ID NO: 37735 - DNA, 258 bp, Glycine max
  Clone ID: 701118841H1
caaagattaagccatgcatgtgtaagtatgaactaattcagactgtgaaactgcgaatggctcattaaatcagttatagtttgtttgatggtatctactactcggataaccgtagtaattctagagctaatacgtgcaacaaaccccgacttctggaagggatgcatttattagataaaaggtcaacacaggctctgccgttgctttgatgattcatgataactcgtcggatcgcacggcctttgtgccggcgacgca

SEQ ID NO: 37736 - DNA, 77 bp, Glycine max
  unsure (1)..(77): unsure at all n locations; Clone ID: 701118842H1
caaggngncgcagaatggctgatgcaggtgcagaaggagcatcttcttccacggnaggnaanatncgncgtantgtg

SEQ ID NO: 37737 - DNA, 258 bp, Glycine max
  unsure (1)..(258): unsure at all n locations; Clone ID: 701118843H1
ctgcatccctgaatcagagtagctctgacattcctgagaatattgtcaaaaagattgcgaganggtgcagtggttctcccttggcacttatagtgactggcaaatcactaagtcgtgaaccaccgtgggcttggaacaacagggctaagaaactgtccaagggtcaaccaattcttgcttttagtgcagatgtgcttacttgtctccaaaaaagcttcgatgacttggatcctaaggtggctgagtgttttagggacc

SEQ ID NO: 37738 - DNA, 263 bp, Glycine max
  Clone ID: 701118846H1
aaccttcctcgcctttgcctccgtttcgtgagtccactgcttcttcgattctagcgtgactgagatggctggaggtgttattcagcagatattgaggaggaaactccaccctcggtttactaactctcccttgttgtcacccatcgtagcaaaaaaagatgatgctggctctactggcagtcagtccttaagagcacttgcattaattggagctggtttgtcaggtctttcagtttttcaacaatggcagcagctgatgaagc

SEQ ID NO: 37739 - DNA, 263 bp, Glycine max
  Clone ID: 701118847H1
gtgcaacctagcagcctccaaatccaatggcttcagagaagaaactttcgaacccaatgagggagataaaagtgcagaagctcgtcctcaatatctctgttggcgagagtggagatcgtctcaccagagccgccaaggtgttggaacaacttagtggccaaaccccagtgttttccaaagcaaggtacactgttcgttccttgggattagaagaaatgagaagattgcatgctatgtcactgtcagaggtgacaaggcatgca

SEQ ID NO: 37740 - DNA, 273 bp, Glycine max
  unsure (1)..(273): unsure at all n locations; Clone ID: 701118848H1
cttctattcaganggaagtgatagtgctnnagtgaagnagtagtnacaacatacgncntntatngggttggntactnntgnngntnactncgnngcggggcgngaagatgtatncacnngggntcgntaanaaaaangctcncgncccaaagaaagcctccaggggatcgggccgagacaccgacagacccctttggtatccgggcgccaaagcgcccganatatctcgatgggagtcttgtcggagatacgggttcgatccgtttgggctag

SEQ ID NO: 37741 - DNA, 272 bp, Glycine max
  Clone ID: 701118849H1
gtcccacaatcgagaatgggaaaattgtggtaagagctccgactttggatggatgcagattgctgaacctgtaatgaaactctatacagaggcgactgatggttcctctattgaaagaaaagaaagtgctttggtctggcaataccgtgatgcagaccttggttttggatctgctcaggctaaggaaatgttagatcatctagaaagtgttttggccaatgagcctgttgctgtgaagagtggccatttattgttgaagtaaaaccccagga

SEQ ID NO: 37742 - DNA, 269 bp, Glycine max
  unsure (1)..(269): unsure at all n locations; Clone ID: 701118850H1
cgagctctgcaccgaagaacgaagccatggggaagacacatggaatgggntctgctcgcaagctcaagtcccaccgcaggaggcaaaggtgggctgacaagtcatacaagaaatcacatcttggaaatgaatggaagaaaccttttgctggttcatcccatgccaagggaattntccttgaaaagataggtattgaggctaagcagcccaactctgccattcgtaagtgtgccagggttcaacttatcaagatgggaagaagntgccgc

SEQ ID NO: 37743 - DNA, 265 bp, Glycine max
  unsure (1)..(265): unsure at all n locations; Clone ID: 701118851H1
gtaaagcatggctttgttggtggagaaaaccacgagtggtcgcgagtacaaggtcaaggacctttcccaggccgacttcggccgcctcgagatcgagctggccgaggttgagatgcccggcctcatggcctgtcggaccgagttcggcccctcccagcccttcaagggggcccgcatcaccggctccctccacatgaccatccagancgccgttctcattgagaccctcaccgcccttggcgccgaggtccgctggtgtcctgca

SEQ ID NO: 37744 - DNA, 262 bp, Glycine max
  Clone ID: 701118852H1
gttttagaagctcagctaagcacaatagagagtttaattaggccattaacatatgcatatgggtgtgactaagcctcatgtgcttatgctgttgatcatcatggttgtctcaattgcagagaaaccatcagtaatagaaggaagggctctttccttgatatctggtcaagggtactcaaagatttttgcaacgctggacttgtatgcaagtgttgtgatggggttggaggtgcctgcactagtacatggacagaatctgcaa

SEQ ID NO: 37745 - DNA, 261 bp, Glycine max
  unsure (1)..(261): unsure at all n locations; Clone ID: 701118853H1
ggagaatatgaagttgtttgtnttctttgttgctgcagtagttttggtagcatggccatgccatggcgcaggctaccaaaggttccctctccgaatgaaaactggctatggtgagcgttcttcggaggtaaaatgcgcaagttttaggcttgctgtggaagcacacaacatccgagcnttaaaaccattcctgaagagtgcgttgaaccaacaaaggactacattaatggcgaacatttagatcagactctaaaacagtta

SEQ ID NO: 37746 - DNA, 143 bp, Glycine max
  unsure (1)..(143): unsure at all n locations; Clone ID: 701118854H1
tgcgagttntggggatgattgatttcacgtgaaagttctggcacaggttccgngagtgtntcgagtntggcgtagagtggaggagtttgcganaaaagccaaccactttaaccgcagtaagtgtacnccgatttcatggatcc

SEQ ID NO: 37747 - DNA, 243 bp, Glycine max
  Clone ID: 701118855H1
aggcacgagactatcattcccttttgacacgcaagcatgtgaacccaaagacaacagcaactcttcgcaaccatgcattggcggaagagatcattcaggagtgatcataagaaatagtgagaccaacattgttggtaggtaggtatatgatgcttatgtgaatgatatgtagctaggttcgtgcatgcaatgcaacatgtcttgaaaagcttttcaccagagactgcagaagggagaaagtgg

SEQ ID NO: 37748 - DNA, 248 bp, Glycine max
  Clone ID: 701118856H1
aatgggtgcctacaagtatgtttcggagctatggcgcaagaagcagtctgatgttatgagattcttgcagcgggtgaggtgctgggagtatcgccagcaaccttctattgtccgtttgacaaggtctactcgcccagataaggctcgtcgcttgggtttcaaggctaagcagggttacgtgatttaccgtgttcgcgtacgaagggtggccgtaagagaccagttccaaagggtattgtttatggtaa

SEQ ID NO: 37749 - DNA, 262 bp, Glycine max
  unsure (1)..(262): unsure at all n locations; Clone ID: 701118857H1
tgaagaagcatttagaatcgaaattggaaganaagagggtatgaatgattacaaaggaagagaaggagaaagtagcgttgttgttgttcggaagcgattcaaggaaaagcaacaaccctgtccttcccacaaggcccatcatcaancaacaacaccgtcgctctgcttccctccctaacactcaatacgaggaatctgaaacagatgtcgaagtatctgatgttagtgtttcagaaggggatgacacatcttggatctcatg

SEQ ID NO: 37750 - DNA, 266 bp, Glycine max
  unsure (1)..(266): unsure at all n locations; Clone ID: 701118858H1
gnacnaagaaggcaaaggaaaacaanatcaacccatcaaccagacaanccccanggaaacgatggtttnaagtcacgagatgggaaaggaagtgatcgtggtgagggtaattctcctnacatttncatgaacatggtgancatgcgtantccattacaatgatggaagtgaagatctggaagagagaccatcagctactcaaccgtgtgnttcggatgtcgagaccctggaagaatnccctagtgatacttcaanagaattatgtt

SEQ ID NO: 37751 - DNA, 263 bp, Glycine max
  unsure (1)..(263): unsure at all n locations; Clone ID: 701118859H1
accatttcgagtccaaggcagacgccggtgcctccaaaacctaccctcagcaagccggtaccattcgcaagancggctacatcgtcatcaaaggacgcccctgcaaggntgtggaagtttcgacttccaaaactggaaagcacggtcacgccaagtgccactttgttggaattgatattttcactgccaagaaacttgaggatattgtgccctcttcncacaactgtgatgttcctcatgtgaatcgtactgattaccagctc

SEQ ID NO: 37752 - DNA, 261 bp, Glycine max
  Clone ID: 701118862H1
ctttggttggatagatctctgatctgaagatgagtgcgtcgaggttcattaagtgcgtcaccgtcggcgacgcgctgtcggcaaaacctgcttgttgatttcctacaccagcaacacttttcccacggactacgtgcccacggtttttgacaatttcagtgctaatgttgtggtggatggaagcaccgtaaacttggcattgtgggatactgctggtcaggaagattataataggcttagaccctgagctatcgaggagct

SEQ ID NO: 37753 - DNA, 266 bp, Glycine max
  unsure (1)..(266): unsure at all n locations; Clone ID: 701118863H1
gctcacactcgtcacgacttaagagatatttttccaagaaaaaagaaaaaacactctccatttgtgcttgtgttttgcccgggaaaactgagttcgaaatgatgaagaagaaaccgagcgcgagagagaatnnnnnnnnnnnnnnnnnnnnnnnnagagaagaagagagcgaatgggaaatgaggcccggaggaatgctggtgcagaaaagaaccacgaatacggatgttgtaacacgcaatttgcgcctccgaatcgcgtatggc

SEQ ID NO: 37754 - DNA, 273 bp, Glycine max
  unsure (1)..(273): unsure at all n locations; Clone ID: 701118865H1
cttanaattncgngatcggttccgattcgattgattctcttctctctcacgcgaacagagaacacgaactaagaatccatggcgacaccaacgacgacgaagagaaaaccggtgttcgtgaaggtggatcagctaaaacctggcaccaacggccacacgctgacggtgaaggtggtcagctccaagccggtgaagacggtgaccacttcgcggcggtcgatcgtcggtgctcgcngcgcgcccgtcgcncatcgccgagtgcctcgtcggaaa

SEQ ID NO: 37755 - DNA, 268 bp, Glycine max
  Clone ID: 701118866H1
ctacagggcactggccaacatatccgcccatggatgttagacttcctcatgaattgaatgtttaccaggatattttcaaagagttctatctaagcaaatacagtggaagacgtctgatgtggcaaaattcactaggtcattgtgtcttgaaggcagagtttcccaaaggaagaaaggagttggctgtgtccctatttcagactgttgttctaatgttattcaatgatgctgagaagctaagtcttcaagatatcaaagatgctactgg

SEQ ID NO: 37756 - DNA, 261 bp, Glycine max
  unsure (1)..(261): unsure at all n locations; Clone ID: 701118868H1
atttttaaatcaaatcggcattacaaaaacattaggtgaaaganattaaaagttaacttctaggaaccacacctaatgctaaccacaaaccatccggcantatattttgatgttgaaataatctgggtcaaagtggtgcaaccgtacataaccatcttcacctccacttgaaaaactttttccatcagggttaaaagccaatgcattaattggtccaaaatgcccttttacacccccaatttctcttgaagaatcttgtct

SEQ ID NO: 37757 - DNA, 250 bp, Glycine max
  unsure (1)..(250): unsure at all n locations; Clone ID: 701118869H1
cagctttgcaaatcatctggcaaacttctgaagggtggtgagcctgacctgatgactgcggcaaagatgatacttcatgactggcagangggccgaattccctttnttgtttcccctcctagggttgaggacttgtccgaggaacctaatgntaatggtgttgacttagatgattcanttgatggcaatgaggctctgctgctatgaaggctatcgcagatgttctttcatcgcagcagcaaacaagtgt

SEQ ID NO: 37758 - DNA, 255 bp, Glycine max
  unsure (1)..(255): unsure at all n locations; Clone ID: 701118870H1
aaagaagagaggtggtcgtcgtcttaggaagatgaaggaaaggtatgcaataacagacatgaggaagttagccaataggatgcaatttggagtcccagaagagagttcattaggagatggtctgggtgagggctatggaatgcttggtcaggctggcagtggcaagctcgtgtgtctgttggtcaaagcaaacttgcagcaaaagttgctaaaaanttaaggaaaagattatggtagtagtggtgctacctctgg

SEQ ID NO: 37759 - DNA, 256 bp, Glycine max
  Clone ID: 701118871H1
aattgtttctgtggagaatgcaaggatgggaattcggaatagtggctctacgggaatgcttgtcgccggaatggaggctcaagtagttagtgtggatactctgaagcctctccctcctggacagttgggggagatatgggtacggggccctaatatgatgcaaggttatcacaacaatccacaagccacaagattgactatggataaaaaagggtgggtacatacaggagatcttggatattttgatgaggatggg

SEQ ID NO: 37760 - DNA, 257 bp, Glycine max
  unsure (1)..(257): unsure at all n locations; Clone ID: 701118872H1
ctggaggctgctgtcccttttcctttatccacttttttttttccattgcgttatttatttgcccgtgtctctcactcagtcactcactcattctctctgcaaattctaatcttcgcaaatcaacaacgtctctctctgtnactctgaaaactgacttcaagttagtgtaactagctgccaagttgtgatggcattggnctctggaagaagttctgctctgaacccaaatgcacctatgttcatacctgctgcacttc

SEQ ID NO: 37761 - DNA, 257 bp, Glycine max
  Clone ID: 701118873H1
cgaggagcagcctcaggaggagaaggatgtctcacaggaagttcgagcacccaaggcacggttcactgggatttcttcccaggaagcgtgctgctcgtcacaggggaaaagtgaaggcattccccaaggatgacccatccaaggcacccaagctcactgcattcttgggttacaaggccggtatgactcacattgttagagaggtcgagaagccaggatcaaagcttcacaagaaggaaacttgtgagcctgttaca

SEQ ID NO: 37762 - DNA, 257 bp, Glycine max
  Clone ID: 701118874H1
caagaacatgctctagctgttgaacacctggcaccaagcttagctgctcttagaatggagctctgccccggatacatgagtgatggtaacttttggaagatatactttgttctcgtgcaccctagacttagcaaaactgatgctgctattttatccactccacaaataatggaagctagagcaatgttaactctggctttagacaaaagaagtaaggaaaagaaagaatctgacttatctgcaggagggaatgttcc

SEQ ID NO: 37763 - DNA, 139 bp, Glycine max
  unsure (1)..(139): unsure at all n locations; Clone ID: 701118876H1
gntgttccctggcntgggccaggcnattgactcttgagtcttgagccagttccttttgcgggttgttgaacattccggattttaaagcattgccttcnaccagtcatattcttntcacttctaaaaaatgnaaaactcc

SEQ ID NO: 37764 - DNA, 259 bp, Glycine max
  unsure (1)..(259): unsure at all n locations; Clone ID: 701118878H1
gccgatatcactgttgatgcaaggngttttagttgggcagtggacagtgcgataaagagtgagactgcgtcaattttgggagaatcccgaatccatagtttttgttccgtagtggacaatgccataaggagtaggactgcatcagatttgggaacatctccttcccctgtccatagtcttgcttcggcagtggccaatgcaatgngcagcagtagtgctgcaccattttcacaactggaaacgtctccttctcctgtcc

SEQ ID NO: 37765 - DNA, 259 bp, Glycine max
  unsure (1)..(259): unsure at all n locations; Clone ID: 701118879H1
cttaacaagaagctcgatttgntnaatggagtgctcttcactggtgggtgggctgtttctggtccatatttggatactcttggaaacatttttaagncagctttagagaaaaatgatgctggagaccatttcccagtaattgccttcaacttaggtggaaacctcgtaataaggatcgtaagcgagcaaactgatattcttgaaccatttactgcgtcgagtttgccaagttctcttgtattgtggaaggaagcaaatg

SEQ ID NO: 37766 - DNA, 224 bp, Glycine max
  unsure (1)..(224): unsure at all n locations; Clone ID: 701118880H1
ganttcccaaacaangatactaattccctttccctttttaacattaaaaaagatgacaagcatgctgaaaactcaggccttactagttctcgtgttattggtgaactttgcttttttcagggcttagaagcccgtccataagtatcatgagacggggaaatcagccactggaggggaagaggtggattctttgatggttagctctgggagcaatgaaggatctg

SEQ ID NO: 37767 - DNA, 268 bp, Glycine max
  unsure (1)..(268): unsure at all n locations; Clone ID: 701118881H1
acttggggtccttttagaatgaataattagagtcccatggttagtctcataattggtggcagcttcagaacctttcaagatgtttctctaaacatgtttttggtttggatttgttgcttttnattgatattttgattctgtatttctaatgcagaattcttttttgatacatatgtnaattatatttaataataaaatcccttctcttttgggtggtaggaaaaccaaaaaagaagggatttattattaaatataattcacatagtat

SEQ ID NO: 37768 - DNA, 144 bp, Glycine max
  unsure (1)..(144): unsure at all n locations; Clone ID: 701118882H1
gnanatcanagcgacgatcaggnaaaactctanactgtncaaaaaccactgcgatacantngcaacgatcaaggccgtgaaagctngccagatcttacgacagccgtggaaatccaaccgtcgaagttgacgttntnctcagcg

SEQ ID NO: 37769 - DNA, 251 bp, Glycine max
  Clone ID: 701118883H1
gatggcatctatgaaaacttttgtgggtttgcttttctcttcctgtttttctggggtaagattatgtttgttatgaggggatagggaagggcggtgtcttaatttgataaaaataactatgttcaacaaccactgtgatgtttttatcatgatgcgaacgcatgaacaagatgttatttgtgtcatggctgtggtgttactctatgaagtaatgtagaaatagtcatatgttttaaacagctttttccaag

SEQ ID NO: 37770 - DNA, 255 bp, Glycine max
  unsure (1)..(255): unsure at all n locations; Clone ID: 701118884H1
aaacctttagggttcctctgttcttcttcgccccaaaaaaaattctcaggctgcaganaaattcaaccgttctcgccattgccgaagctccagcccctcgcatttccaattctccgcccaaacccttttgttggaaacagagnatccgagagacccttcacaacatggcaaaaangaggccaggccagaaaagacgtggattcctacaccatcagaggcnccaacaagatcgtaagagctggggactgtgtgctg

SEQ ID NO: 37771 - DNA, 258 bp, Glycine max
  unsure (1)..(258): unsure at all n locations; Clone ID: 701118886H1
cgaaaccctggagtcgccagcgcagcccgaaacctagtccagtttgcagtttcttgtgcggtttatcatgggggatagtcagtattcgttttctctgcaccacatttagcccttctggaaancttgttcagattgagcatgccttgacagctgttggctctggacagacgtctttgggaataaaagctgcaaatggagttgtcattgccaccgagaagaaattgccatctatattggttgatgaaacatcagtccaga

SEQ ID NO: 37772 - DNA, 258 bp, Glycine max
  unsure (1)..(258): unsure at all n locations; Clone ID: 701118887H1
ctctcttcggcaccagaatcaccctcctacgcgccacctncatcgtcccgttccctccccaacacaagttgcagtgccacgtcagcaaccgtgtcgtttagcctccccaccccgaaacccctttcggatacgcccgataaaaccccaaagtggtcggagagggctataaaatcgtatgcaatgggggaattggaagcgaggaagctcaagtatccaaacacgggaaccgaggcgattctcatggggattttggttgaa

SEQ ID NO: 37773 - DNA, 259 bp, Glycine max
  unsure (1)..(259): unsure at all n locations; Clone ID: 701118888H1
aaaagntgtannctccancaaatntgattggagngtanntttcgcagaagtatcnttnttctctctcncatnccgcgccccaaatnttagggttttcacccaattcaattcctggaactctcctcgattngattccacatccccnccncgttaatgagatttgtgtgattggatcgtacgatggcggcgccgaggaatgtgacgcgacgagggacgaagagaagggcgaggaagacgatcgccctccgccaagaagccc

SEQ ID NO: 37774 - DNA, 257 bp, Glycine max
  Clone ID: 701118889H1
ctcgtatcccctatttgcttcatgttcagatgactgcactgcatatgtttttcatggaatggtttattctgatctcaatcaaaatcctcttattgttcctttagaaattctacgaggtcataccaattcaaatgggagagggatactggactgtaaatttcacccgagacagccatggttatttacggctggtgctgataaactgattaaactttattgtcattaatataaacatggacatacgtgcatgtgatagg

SEQ ID NO: 37775 - DNA, 257 bp, Glycine max
  unsure (1)..(257): unsure at all n locations; Clone ID: 701118890H1
gttccttgatctctcctctcaagatgcagatnttcgtgaaaactttgaccggcaagaccatcacccttgaggtggaatcctccgacaccattgacaacgtaaaagctaagattcaagacaaggaagggatcccacctgaccagcagagacttatctttgcgggtaaacaacttgaggatggtcgcacccttgccgattacaacatccaaaaggaatcaaccctccatctcgtgcttcgcctcaggggtggcatgcaa

SEQ ID NO: 37776 - DNA, 251 bp, Glycine max
  unsure (1)..(251): unsure at all n locations; Clone ID: 701118892H1
attcccacccaattgtctccccattaaacaataacntnaatantgttaggaatggatacagagaagaaaaatcattctgctatttccaccccnaacaggtaaacngttggggtgtgtcccctgtgcttgnatgagaggctcctcatactgtntgcaaaacaaggtngcnaccacaaccgttcttnctctncatacatgtctgncacacaggcttcaaacanntncagacacagaanaaagccnnnagntgc

SEQ ID NO: 37777 - DNA, 258 bp, Glycine max
  unsure (1)..(258): unsure at all n locations; Clone ID: 701118894H1
gntgtcgttncgccaatcgcggcgttgttgttggtggtgctactcnnggcgagtgnggtggtggaggctcaggagaactcggacgtgaagacgctggtgaagcacatgcacgggaagaagtactgcgacaaaggatgggaatttcgagaatctcttctccaagnggaactcgccggtggcacacgccgtcggattttgggactaccactcgttcatcgccgctgccgcgcttttcgagccgcaaggttcggcaccacc

SEQ ID NO: 37778 - DNA, 191 bp, Glycine max
  unsure (1)..(191): unsure at all n locations; Clone ID: 701118895H1
aatggcaccgaagcagaccaaggctgagaagaagatcgcttacgatgcgaantgttgcgacctaatggaggagtacggccagatcctcgttgtgaactccgataacgtgggatcgaaccagctccagaacattcgcaagggtctccgtggcgactccgtcgtcctcatggggaagaacaccatgatgaagc

SEQ ID NO: 37779 - DNA, 143 bp, Glycine max
  unsure (1)..(143): unsure at all n locations; Clone ID: 701118896H1
acgaatcacactctccacagtgcgattcattnaccaatggatcgcaacggtgttctctctcttgcattcatctgcattgtagtncgccggcgtcggaggccagttctcccgccgcagcgccctcgaacactccggcaaccccc

SEQ ID NO: 37780 - DNA, 288 bp, Glycine max
  unsure (1)..(288): unsure at all n locations; Clone ID: 701118904H1
cttccattctgtttattccanacatctatncntcganaagtagaacgccaagcccccagtagtgaagggactatcatatnctttcnttccaaaacatgccccaagcttgagtccattgtgaggaaacatctcaagaaggtgttcaaggatgacaatggccaagctcctgccttactccgcattttcttccatgattgttttgttcagggatgtgatggatcattgctgctagatgggagtccaagtgaaagagaccaaccagccaacggaggcatcagaactgaggcc

SEQ ID NO: 37781 - DNA, 285 bp, Glycine max
  unsure (1)..(285): unsure at all n locations; Clone ID: 701118906H1
aatcgattcattccttctgttgtnttgcatcgcaactttnttttgtgtttgggggcaatgtccttcgctaaccatctttcaattttnctttttcttttttccaaccaagacccacnatantctgttattcattaagctttttaatccatcaaatttagaatcctaccaatttgaatgcatcagaatttatcattttcagatgtccacttgcagattatagaagggatactgcttctccataaacctgcaatgcgatagattaccaggttcttcctcacctatatt

SEQ ID NO: 37782 - DNA, 286 bp, Glycine max
  unsure (1)..(286): unsure at all n locations; Clone ID: 701118907H1
cagagtntctctgagatttgctttaattcaggtttgaaaacaaactattacgcagaaaaagnanaantcatatgggaatgactctnattgagtnttttgtttcttctctttgatacattcacgatgttgaggaatactatctgatttgcttcaattgtnattggtgagcatngnccctcttctcaaaatcntctctttatntctntgctttccttcccgagaacttganatcncagaaaaaanaacaantntngagagaganagagagtgatggcaccaaatactg

SEQ ID NO: 37783 - DNA, 284 bp, Glycine max
  Clone ID: 701118908H1
gtggtgaccatggaaggtatcgaggaggtggatctggtcatgatgattatggatatcgtggtgaccgtggaaggtctccaaggcactcaccaccatatcgaggtggtagagattattcaccgaggcactcacccccaccttatggtggaagatctaggagggacaggtccaggtcacttccttattctccatatggtagcccagataggaggtatgctcgtggatctaggtgatgtcttttaagtttgaagatggtaatgaaaaaattatctattatggtatcg

SEQ ID NO: 37784 - DNA, 288 bp, Glycine max
  unsure (1)..(288): unsure at all n locations; Clone ID: 701118909H1
tttcaatcctcagtttctttcttcaacgtttccatcatacacagatccnaatcctctctcaagccctaatttcccctgcatttccatggccacagaaganacnactgtcgcggtggaacccgctcccgaacctgcctccgccgatcctcccccggaggagaaggaggagaccaaacctgaagccaaggctaagaaaaccaaggagcccaaacctaaaaaggtttccagacctcgcaaccctcccactcatccttcctacgaagagatggttaaagatgcattacctcg

SEQ ID NO: 37785 - DNA, 283 bp, Glycine max
  Clone ID: 701118911H1
gatttccttaacccacaaactctcaaataccctctctctctcaccgaccactatgttgcagagacctagacgccgctgcgagggcactgccatgggcgccatcgttctcgatctccgtcccggtctcggaattggacccttctccctcgggatgcctatatgtgaagcatttgctcagatagagcagcaacctaacatatacgatgtggtgcatgtcaagtattttgatgaggaacccctgaagttggatgttgttattagctttcctgatcatggcttccat

SEQ ID NO: 37786 - DNA, 282 bp, Glycine max
  unsure (1)..(282): unsure at all n locations; Clone ID: 701118912H1
gttagactaagcaagangtcgttcagtgtaagtactccttgttcttgtttctgtttcatcatttttgatcttatgctagtcgaatcaattgtgatgcttagaattagtcaatgaagctccctgtgcgttacttgattgttattttgaccttcgtctgcacctcggtttgctacatcgaacgagttgggttttccatcgcgtacacagttgctgctgacggtgccggagtgaatcaatcgagcaaaggtacaatactgtccaccttctattacggatacgcct

SEQ ID NO: 37787 - DNA, 285 bp, Glycine max
  unsure (1)..(285): unsure at all n locations; Clone ID: 701118914H1
atgaagtgtccttcaatatgtagtggccaaaatggtgatttctgcatatgcacaagagattaaattttcgccacagttttgcaaatgcattcaatgccagttcagctgctagccctgctgatgaagctgaaatcgataagttggaggagcgagcctcttctctaagaagggagcttgcnaacaagaacttgcacctaaagacactcatagatcaactgcgtgatcttatcactgatatatcaacatggcatagtcctttttcaacctgaagtttgggacgagtac

SEQ ID NO: 37788 - DNA, 289 bp, Glycine max
  unsure (1)..(289): unsure at all n locations; Clone ID: 701118915H1
aatattttgaatggcttccacaaganacannantgnnngctgaacatcagagaggctattggagatggagcaaacaagatctccttgcctgaggagtccttccaaagctggagcaactacgtttccgccctttctcaaacacggctaaggttcaaggaccgtctcttagcaagatcagatgatgccactgagacagaggaactcaagaaacaaagtgagcatgacatgaaacgttgcctcaactggtgggacctcatatggttcggttttggcgcatgataggagcagg

SEQ ID NO: 37789 - DNA, 292 bp, Glycine max
  unsure (1)..(292): unsure at all n locations; Clone ID: 701118916H1
gcttgangttcggagagacgctgtgctcggtgttnattccgctccataggaatagtacaagctttggttttnacattcgccagttgcttcgatttccaatctcccaagaagaataagaaacattcttctaccttcgatgacattctcaccctcgccgaggattctccatttagtgttaatgaaatcgaggcgttgcatgagttgttcaagaagttgagtagttctatcattgatgatggcctcatccacaaggaagagctcgcattggcactgttgaagaccaccactggcg

SEQ ID NO: 37790 - DNA, 287 bp, Glycine max
  unsure (1)..(287): unsure at all n locations; Clone ID: 701118918H1
atcctctcacccagaggtacgattcgtaccatgtagttgtgggatttcggctttgccacttcttgattccaataattttggtttctttttttcccctaatttgatttccccagttagggtttttaactctattcgatcggcgatttcgaatactcggaggctcgaatcgtgttgggggttttccgttttgattaaaaaagtttccgttttttgtgttgggtgatcaagggttgtttgattttnttcttgcgatcgagaatgggtgaggctcgggagctggttccgct

SEQ ID NO: 37791 - DNA, 277 bp, Glycine max
  unsure (1)..(277): unsure at all n locations; Clone ID: 701118919H1
ctttaccatctcagtntcaactntctccaacaacnacaatggtaagnttgggcgcngcctcctcctcngctcgcatnattccctcngtctcantcncttcntcttctcgctccttcttctnactctnatcctcttcttccaaactccaatgcttgngctcctctcctcgtatttngcacctctttctcaatcagcgaagagcggaggttcgcgtttcgagtggaggatacggaactgtgtnggcaccgaagtnagttgcgtctgatcctgatnagtt

SEQ ID NO: 37792 - DNA, 284 bp, Glycine max
  unsure (1)..(284): unsure at all n locations; Clone ID: 701118920H1
cgactcanttgctgtcagcgagtgagtgagtcgtttctctgcagcaacaaggtttagccactccaaacagacgggaaatgggtcgtggggtcagtgctggtggtggtcagagttccttaggttatctcttntngcagtggggtgcctgccagcagtgcaaacagtcagcctgcaaatggtgctcgcactcaaaatgctagtgctccttcaccaccagtcgataagcaaagtccagcaccagcaccagcaccagcacctgcatcatcaccaattgataagcaatt

SEQ ID NO: 37793 - DNA, 282 bp, Glycine max
  unsure (1)..(282): unsure at all n locations; Clone ID: 701118921H1
cttagccatatctttacttcccataacttgctctacnatgagtanccttcgttcttttgcaagaaacaaggatatatcaaaagtaggacgcagaggtatccattgcatgcagaaactatgtgcagaaaaaatatctcctgattcactagagaaggcccaaaatcgtgtgatagatgctgcactcacacttgttcgagaaaatacaaggcttaagaaagaacttgtgcatagtttgggaggtgctgtagcaacttcaactcttcttggagttccttgggtcat

SEQ ID NO: 37794 - DNA, 280 bp, Glycine max
  Clone ID: 701118922H1
gttgctactgcccttgccaagcaggacaaagaagaagtacagcatcacatatctgtcttgctttttattgggttatcttgtggcgttgggatgcttttgttctcaaggctatttggtgcatcactaataactgctttcactgggccaaagaatgcacacgtagtacctgcagctagcaattatgtgaagattcgaggcttggcatggcctgctttacttgttggatgggttgctcagagtgcaaggtgcaaatattctttttattctaacatctgattct

SEQ ID NO: 37795 - DNA, 284 bp, Glycine max
  unsure (1)..(284): unsure at all n locations; Clone ID: 701118923H1
cacaagcacaagcacttctctaattccctttcacactctattacagatttcacaagtgcttacacttcaaatggctttggaagctcttcaatcacccaccacatccactccatcgtttagtccctttgaaganaccagtctcagttacttagagacaccgtggacgaaaggaaagcgttctaagcgtanccgcacggagcaacaactgcaacacccttcatgcaccgaggaagagtacctcgctctttgtctcatcatgctcgctcgcngcggcgccggcagtg

SEQ ID NO: 37796 - DNA, 282 bp, Glycine max
  Clone ID: 701118924H1
gatcctgtgaaaattgctgtggaaggggttgaacgattcaagcaagaaaactgtgatcttataattgttgacactagtgggcggcacaaacaggaagctgctctttttgaagaaatgcgccaagtttcagaagcaacgaaaccagatcttgtcatatttgttatggatagcagtatcggtcaggctgcttttgatcaggctcaagcatttaaacagagtgttgcagttggagctgtcatgtcactaaaatggatggccacgcaaagggtggtggtgctctta

SEQ ID NO: 37797 - DNA, 280 bp, Glycine max
  Clone ID: 701118925H1
ggaggtccccatatccctcttaagactggaagaagggatggtagaaggagcagagctgatgtggttgagcagttcctcccagaccacaatgagtccatttctgcagttcttgacaagtttggtgccatgggaattgacacccctggcgtcgttgcactgcttggagcacacagtgttggtcgaacccattgtgtgaagttggtgcaccgtttgtacccagagattgatccagctctgaaccctgaccacgtccctcacatctgaagaagtgccctgatgc

SEQ ID NO: 37798 - DNA, 284 bp, Glycine max
  unsure (1)..(284): unsure at all n locations; Clone ID: 701118927H1
cttttctatttaatnccnnnaaatcccattgcttctncgctcattnctctgcactgccatcatccccaacttccncacaangtnngacagnntaaagagntgtgccaccatgtcggacgatgaaagggaggagaaagagttggatctctcttctgccgaagttgtcaccaaatacaaaaccgnnggctgagatcgttaacaaggccccgaagctagttatntcagaatgtaaaccaaagncgaagattgtgggatatttgtgagaaaggggattcatacattag

SEQ ID NO: 37799 - DNA, 279 bp, Glycine max
  unsure (1)..(279): unsure at all n locations; Clone ID: 701118928H1
catgattganaggtccaccaaccttgactgcacacaagggaccaactctccttgaggctcttgaccaaatcaatgagcccaagaggccctccgacaagcctctaaggcttccattgcaggatgtctacaagattggtggtattggtactgtgccagtgggacgtgtagagactggggttgtgaagcctggtatggtggtgacttttggtcccactgggctgacaactgaggttaagtctgttgagatgcaccatgaggctctcacagaggctcttccag

SEQ ID NO: 37800 - DNA, 100 bp, Glycine max
  unsure (1)..(100): unsure at all n locations; Clone ID: 701118929H1
cacacagccatggcaggctcaaacattctttctgcactctccttcccttgcccnanaccttcngntccggnttnaaccanancgcgttntgcccanaagt

SEQ ID NO: 37801 - DNA, 241 bp, Glycine max
  unsure (1)..(241): unsure at all n locations; Clone ID: 701118930H1
ctctttctcgctncgcggcgagtgtgaacaccaaacggcggcgttcgcagcaaacagagtctcgaaaccctagttccctattcctcccatgtcctccgaagacatcactctcgtacccgaccagaggatcgagaacggtctcaattcccctctcgtcttccaagacgaccctctccgcttcaattgccccaccccgcaccagcgtcgggtcggggaccgcctccgaagacccgcgaattgg

SEQ ID NO: 37802 - DNA, 287 bp, Glycine max
  unsure (1)..(287): unsure at all n locations; Clone ID: 701118931H1
ctttgttgctgcagtagttttggtagcatggccatgccatgggcgcaggctaccaaaggttccctctccgaatgatnactggctatggtgagcgttcttcggaggtaaaatgcgcaagttttaggcttgcacgtggaagcacacaacatccgagcnattaaaaccattcctgaaagagtgcgttgaaccaacaaaggactacattaatggcgaacaatttagatcagactctaaaacagttaaccaacaagctttcttttatgctagtgaacgcgagtccatcacaa

SEQ ID NO: 37803 - DNA, 266 bp, Glycine max
  unsure (1)..(266): unsure at all n locations; Clone ID: 701118932H1
gnagaattagcagtcttgggggataaaatagaaaagttgtctggtatgctagaaggctttatatggtctcccaggagtagtgaagccaatgaccgtgtcaatgattgggcttttgaggaggggccccattctgntnatactggaccaaactctggaagcacagcttgtgtggctgtcatccgaggaaacaaacttgttgttgctaatgctggagattctagatgtgtctatcaaggaaaggccaggcacacatttgtccaaggacc

SEQ ID NO: 37804 - DNA, 290 bp, Glycine max
  Clone ID: 701118933H1
acaattttgccattgtgatggtgacctctttactcttctctccgtgtacaaggaatgggaagctttgcctcgagaaaggaagaacaaatggtgttgggaaaacagtatcaatgccaaatccatgaggaggtgccaagacacaattttggagttagaaacttgccttgagcgtgaacatgacgttgttactccgagttactggcgttgggacccttgtatgccctctaatcatgataagaattgaaaagggtaatactgttctcacttgctgagaatgtagccatgtactc

SEQ ID NO: 37805 - DNA, 286 bp, Glycine max
  Clone ID: 701118934H1
aagtaatgtgctaatctttgaagattacaaggccaagatagccgactttaacctttctaatcaggcccctgacatggctgcacgccttcattcaactcgtgtattgggaacttttgggtatcatgctccagaatatgcaatgactgggcagttgactcaaaaaagtgatgtctatagttttggtgtggttcttcttgagcttcttactggcagaaaacctgttgaccataccatgcctagaggacagcagagtcttgtcacatgggctactccaagattaagtgaa

SEQ ID NO: 37806 - DNA, 283 bp, Glycine max
  Clone ID: 701118935H1
tttctatctcattttcgttcggttcaaacactctcatggcatcagacaagaagattaggatcggcatcaacggatttggaaggattggccgtttggtggccagggttgctcttcagaggaatgacgttgaacttgttgctgtcaacgatcctttcatcaccactgattacatgacatacatgttcaagtacgacaccgttcatgggcagtggaagcattttgatgtgaagctgaaggactctaagacccttctcttcggtgagaagcccgtcaccgtttttgg

SEQ ID NO: 37807 - DNA, 281 bp, Glycine max
  unsure (1)..(281): unsure at all n locations; Clone ID: 701118936H1
agaacagaaaacttccattaccaccananaactcccctgaacattaccatcataagaaggagtcagaccttgtcgttccaaccgataaactaagtttcctgaatagagcctgtgttatcaaagatcgggaacaagaaatagcctcggatggttcagcatcaaatccatggaaactctgcacagtagatcaagtagaggaactaaaagccattattaaagtgattcccttgtggtctacagggatcatgatgtcagttaacattggaggctcatttggattg

SEQ ID NO: 37808 - DNA, 278 bp, Glycine max
  unsure (1)..(278): unsure at all n locations; Clone ID: 701118937H1
actcacaccatagcatggtgagtgaaccattttgaatgagaagggtgtggttggttattccagataagggtcccaaaaacgagtgcacgctgatatggggnccaaacttgcttcctctttttgtatcctagtcatgttagagagaaaatgaagaaatttttttcactggctgtgagagatcgaggtaacttggtgcggttggctcgggcacactcgttcacaagtttccaccgggatagttacagcagtgtagtgtaggacgcatgtgggaaacagat

SEQ ID NO: 37809 - DNA, 278 bp, Glycine max
  Clone ID: 701118939H1
atgtttctccacagggtcctctcacacctctgctcctaggaggagcaggatccgctaagggtctctcaagccctggacggaacagtgtggatgcagaagatgagcaatcatcagattgccggaattggaaaggagggctccaccaccagcagcttgaaactgataatcacagcctctaaaattttgcagataaatgataatacaatacataaaatgatgaggagttgaaggcccagaatttgacaacataagaataatagagatctaacacataaaag

SEQ ID NO: 37810 - DNA, 277 bp, Glycine max
  unsure (1)..(277): unsure at all n locations; Clone ID: 701118941H1
ggaaagtgaagttgagagtttaagaagaacaagaaatgggggttggttcccaggatgccatcaagcagttccaggcattcattgaccaagttgaggagcctttgcgaacaacgtttcagaatgttcatcaaggatttgtcactgcaactttaatgcggtttctaaaagcaagggactgggatccttacaaggcacagaaaatgttggttgattgtttaaattggagggtgcaaatgagattgacaatatattatctaaaccantgttcctgctgatt

SEQ ID NO: 37811 - DNA, 277 bp, Glycine max
  unsure (1)..(277): unsure at all n locations; Clone ID: 701118943H1
atcccatactatgaaaaacatggatatggggtggaggaatttaatgaaaccttatatgatgaatgggttaacaagggcgacgcaccggcattgccagagactcttaaaaattacaacaagctgttgtctcttggcttcaagattgtattcttgtcaggaagatatcttgacaaaatggccgtaacagaagcaaacctaaagaaggctggcttccacacatgggagcagttnattctcaaggatccacatcttatcactccaaatgcactttcataca

SEQ ID NO: 37812 - DNA, 275 bp, Glycine max
  unsure (1)..(275): unsure at all n locations; Clone ID: 701118944H1
ctgtgtttgtntttgtnttttctctcacctgaaaatgtcttgcncgcggtggtaactgtggttgcggaagctcctgcaagtgcggcaacggctgctgaggctgcaagatgtacccagacttgagctacactgagtcaaccaccaccgagaccttggtcatgggagtggcacctgttaaggctcaatttgagggtgctgaaatgggtgtgcccgctgagaacgatggctgcaaatgtggaccaaactgctcctgcaacccctgcattgcaagtgag

SEQ ID NO: 37813 - DNA, 279 bp, Glycine max
  unsure (1)..(279): unsure at all n locations; Clone ID: 701118947H1
gaaggtccttgttttcttcgttgctntattttngtagcatggcaatgccatgcgtacgatatgttccctctccgaatgaacactggctatggtgcccgtactccggaggtgaaatgnncaagttggaggcttgctgtggaagcacacaacatctttggctttgagaccattcctgaagagtgcgttgaagcaacaaaggaatacatccatggcgaacaatatagatcagactccaaaacagttaaccaacaagcttacttttatgccagagacctcgaa

SEQ ID NO: 37814 - DNA, 289 bp, Glycine max
  unsure (1)..(289): unsure at all n locations; Clone ID: 701118949H1
ggcgcattgatcttctcttctcccttgantgccccaaaggcacaaatttggcaatgaattcgacaccagcgaacctgncaatcatcactttcagttcccagtgttcaagagttagcattccaacggccagagaaagtgccagcaaggtacataagagatcaagacggtgatggcatcattgccacctacccttctcatccatctcttcgtgtgcccttcatagacatgggccaagttggtcaacgctgacacacatcaaaaggaggagcttcgtaagcttcatcttgct

SEQ ID NO: 37815 - DNA, 282 bp, Glycine max
  Clone ID: 701118950H1
ggcagcttcttcaattcaaaacaaaactctctggggtgttggtgttggtgagggatctgaggcaaaggtgttgatgatatgggagcgtgtgtttcaactccacaagggtgcgtgggagggaggttgagctcttccaagaagaaaaccagaaagagaaggagagagggactcagaagaagagttacttctcggttgtgtaaggaatcatcggagaaagttgatgtggcagggttgcctgattgttcctttgctaaccccactttccaaggaatattgaagagg

SEQ ID NO: 37816 - DNA, 280 bp, Glycine max
  unsure (1)..(280): unsure at all n locations; Clone ID: 701118951H1
gcctccttctggtctccctggtgttggtctcctacgctgcccggtcngaatcagcgctgggcggctggagccccatcaaggacgtaaacgacagccacgtggcggagatcgccaactacgcgctgagcgagtacgacaagcgttctggggccaagctcacccttgtcaaggtcgtcaagggcgagactcaggtcgtttccggcaccaactaccgtctcgtcctcaaagccaaggatggatccgccacggccagttacgaagccatcgtctgggagaagct

SEQ ID NO: 37817 - DNA, 268 bp, Glycine max
  Clone ID: 701118952H1
atggcagtgaaagtatacggtccccactgtgcttccaccaagcgggtgctgtacttgtctggttgagaaggaagtcgaatttgaggttgtccctgttgatgtcactaagggggagcagaaggatcctgagtacctcaaactacagccatttggagttgttcctgtcatcaaagatggagattataccttatatgaatctcgtgctataatgaggtattatgcagaaaaatacagatctcaaggggttgagttgctgggaaaaacaata

SEQ ID NO: 37818 - DNA, 274 bp, Glycine max
  Clone ID: 701118953H1
aattttctagggttttattcattttccgatggcttctgcagatgttgagtaccgttgctttgtcggtgggctcgcttgggccactgacgaccatgccctcgagagagccttctctcagtacggcgaaatcgttgaaacgaagattatcaacgatcgtgagactggcagatccaggggttttggatttgtgaccttcgcctcggagcagtccatgaaagatgcgatcggagcgatgaatggacagaacttggacggccgtaacatcactgtcaat

SEQ ID NO: 37819 - DNA, 143 bp, Glycine max
  unsure (1)..(143): unsure at all n locations; Clone ID: 701118955H1
gaaacaatagagagggtagcaagtgatgatgaaccatttgctggactggcttttaagatcatgagtgatccatttgtaggctcccttacgtttgtcagggtgtatgctgggaagctaantgctgggtcttacgtactcaatgc

SEQ ID NO: 37820 - DNA, 280 bp, Glycine max
  Clone ID: 701118956H1
ggtcaagattcacttctgcggataaaataaaaaaaaataccacttcctagttctcatccctttaaatacctctgctgcaatacaagggactcatcaacccaagttagcataacttccttagcaacctagaatttcagaccattcctgttatcaccgctgctgctaatcctttcaattaaacagaaagcttattaattatcaatcatgcagacttcacttcttcaagttgttggaactccagtcatctcagcaacatatgatcagcttcaaaagtcagtta

SEQ ID NO: 37821 - DNA, 274 bp, Glycine max
  unsure (1)..(274): unsure at all n locations; Clone ID: 701118957H1
ctccgatctgcgactttctatttctccctcaacacaacacgagacangatgttcctctttgactggttctatggcattctcgcttccctcggtctctggcagaaagaagccaaaattctcttccttggtctcgataatgccggcaaaaccaccctccttcacatgctcaaagacgagagattagttcagcaccagccgacccagcaccccacttcggaggaattgagcatgggaagatcaagtttaaggctttcgatttggggggccatcaagt

SEQ ID NO: 37822 - DNA, 252 bp, Glycine max
  unsure (1)..(252): unsure at all n locations; Clone ID: 701118959H1
ggctacaaactccacttcttccacaccaacatacgacagcacctntncaacacnnnancaccnnacctacaancaccattctntcgnntncnctactactnctcataacttcaccctccttggcaacncgnngcggcatccaaccctgatcangtcaagcacaacagaaacaacaaccaaggtggtggtgctggtgctggtgntggcgggtctttggccctggaggagggttcagatacncggttttggaaa

SEQ ID NO: 37823 - DNA, 275 bp, Glycine max
  unsure (1)..(275): unsure at all n locations; Clone ID: 701118961H1
ggggatcgatctcaaggccggaggtaagagcaaaaagaccaaaagaacagcacccangtccaatgatatctatctcaagctcttggtcaagctttatcgcttccttgttcggagaactggcagcaacttcaatgctgttatacttaagagattgttcatgagcaaggtttacaaacccccattgtctttgtcaaggttgattaagtatacgaaggggaaggaagataagattgcagtggtggtggggtctataaccgatgatattcgtgtttatg

SEQ ID NO: 37824 - DNA, 281 bp, Glycine max
  unsure (1)..(281): unsure at all n locations; Clone ID: 701118962H1
gcgccactnagntgtttccatntgcctgcataccacntggtattgtggggtgnggttcggtnagtggtntcaggncttgcgancntgagggtgcaggggnngtaatcgggatgtntttgttgcacggctccatgcttgcgcatgcaacgtgtgacntgcatccttgnccngtgtnnccttggcctncggggcttangtggctggacnatggggtcntgtgttgcctacctaccaaacggtattcgtgtngctagtcagncccantccntccaggcctcttt

SEQ ID NO: 37825 - DNA, 280 bp, Glycine max
  unsure (1)..(280): unsure at all n locations; Clone ID: 701118964H1
ggagaactttccagttgttgacatgggnaaacctgaattattgaaganaagatcagcaaccatggagataatcaaagatgcctgtgagaactggggtttctttgagttggtgaaccatgggatatccatagagttgatgatggacnccgtggagaggatgacaaaagagcactacaaaaagtgtatggagcaaaggttccaagaaatggtagcaagcaaaggcttggagtctgctcaatctgaaatcaatgatttggactgggaaagcactttctttttg

SEQ ID NO: 37826 - DNA, 284 bp, Glycine max
  unsure (1)..(284): unsure at all n locations; Clone ID: 701118965H1
ctttggagtccatttcttcacttatagtgaacttgaagaggccaacaacttctttgatcctgccagagaactaggagatggaggatttggaactgtgtattttggcaaacttcacgatggacgtgtagttgcagtgaagagaatgtacgagaacagttatagaagagtggagcaattcgtgaatgaagtagagatcctaacaggcctacaccaccaaaacctcgngtcactgtacggatgcacatctcgacacagcagagaacttctgctcgtatacgaataca

SEQ ID NO: 37827 - DNA, 280 bp, Glycine max
  Clone ID: 701118966H1
cttgacttatgaaggtgctgttgatctggaaacaatggaagatgatttgcaaagagcagctatcgaagaccagatagccaactttggtcagactccaatccagatatttcgtaagaaacacccaagaagagggccacctattccaattgcacatcctttgtactttgctcctgattctattagtttgacttccattgtttgtaatacaagtcaatattcatctgctatgctttatgttggtctgatggactcgaatattgtccttgtggacgagggtctc

SEQ ID NO: 37828 - DNA, 278 bp, Glycine max
  Clone ID: 701118967H1
ttcccattttgccccttcctcctttccttgtttccgaggagggccaaccacatatgctaaacaaggaaacaaatttctaacctccttcagatctacaccacccttctctttttttccagtttcataaattctacaccatgggcacggaggttctacggccacaagattgtttcacccaccgcatcgctgttccaccggcggggttttcccggagaagaacctctgggacacacaacaacaattacttcaggggcacgcggaagccggttacccgaccc

SEQ ID NO: 37829 - DNA, 275 bp, Glycine max
  unsure (1)..(275): unsure at all n locations; Clone ID: 701118968H1
gtctgaacccctaagcttctctgctccttcctgattcgctttcgctgcagttaaacacttgaactggctcaacgattcatcatcttcacggagagattcaagttctacactacacatacatntcatggtggtcacatcctctgcgcgcgattacatcaatcgcatcttgcaggacatctccggcatgaaggttctcatcctcgattctcaaacggtattgtgagtgtcgtgtattcacagtcggagcttcttcagaaagaagtgtttttggtaga

SEQ ID NO: 37830 - DNA, 244 bp, Glycine max
  unsure (1)..(244): unsure at all n locations; Clone ID: 701118969H1
ggctccctgagagagctcgtcgcggcggttgcagacannagactgcaagatgaagttcaacatcgcgaancccaccactggatgccagaagaagctcgagatcgacgacgatctgaaactgcgagcattttgggacaagaggatctcacaggaggtcatcggagatgcactcggtgaggaatttaagggctatgtcttcaaaattaccggaggttgtgacaaacaaggattccaatgaagcagg

SEQ ID NO: 37831 - DNA, 183 bp, Glycine max
  Clone ID: 701118970H1
tacggtacgatggtagtgaggagccagaatccctcttcctgctttatgatataataaaaataaaatagcgattccggaaatcatgtctgtagctgctctttttatttatgtgataaatgtaaaacgctttggtttggctggccgttgtgcattaggttgaaaaaataaatgttataattactc

SEQ ID NO: 37832 - DNA, 273 bp, Glycine max
  unsure (1)..(273): unsure at all n locations; Clone ID: 701118971H1
aaaacagtgtcattgctctttggcacaataagataatagaaaatggaaagcgacaggaattgggagcagaacgcactcatcagtgagctaattcaggggttggaggtagcaagaaagttgaaggaagacttgagttcagcctcttcggttgacgctagggactcacactcactactgcagaggatattgtcttcttatgacaaggctttgctttttctaagatggaatgaatcagtgtccatgcaacaaccaactnaaaacttcttcaccaca

SEQ ID NO: 37833 - DNA, 271 bp, Glycine max
  unsure (1)..(271): unsure at all n locations; Clone ID: 701118972H1
cagcacttatcgttctcatgcaacaagggaaaatgaggcctattttctgtggaaattttgaatatgatgcccggcagtcagagctggagcggctttttagacgatatgggaaggttgatagggtggatatgaagtctggatttgcttttatctatatggaagacgagaganatgctgaggctgcaattcgtgctcttgatcgagtagaatttggtcggaagggacgcagactccgtgtggaatggacaaagcatgaacgtggtgttagaag

SEQ ID NO: 37834 - DNA, 271 bp, Glycine max
  Clone ID: 701118973H1
gatcaatgagggtgggtcaacgagtgacttggaagcaagtaagcaacaaaaacagcggtagttacaacttacaattctcgaactcacacgcagagagagtagttcagtgtggagagatgagtgcatatttgataacagccattcatctgttacttgtgttcctgtcatcatccacttccctttcgaccgtgttcggctccgaggaggaacaattctatgccaaagaaattctcggagcagcacagaaggagaaggaatggttagtttcagt

SEQ ID NO: 37835 - DNA, 268 bp, Glycine max
  Clone ID: 701118974H1
ggaattttcttgaagaggaataaacgtagatatgctggtaatgatgaattttcaagccaggctatggaaggactacaaattattaatggtctggagtgtaagatagcttgcagttcatctaaggtctcatatgttttagataccgaagactttttgtttcggataagaaggaaaaaaagagttttgcatccaaagagttcaggcgcccatgaacaggcacagtctccaaagagttcaagcagagtacaacgattccgcatttgttttc

SEQ ID NO: 37836 - DNA, 269 bp, Glycine max
  unsure (1)..(269): unsure at all n locations; Clone ID: 701118975H1
gtttaaagtgagagaaaaagaaagaagaaaatggcaaactttccagttgttgacatggggaaacttaacaccgaaganagagcagcagccatggagattataaaagatgcctgtgagaactggggtttctttgagttggtgaaccatgggatatccattgagttgatggacactgtggagaggctcacaaaagagcactacaagaagactatggagcaaaggttcaaagaaatggtggccagcaaagggcttgagtcagttcaatcaga

SEQ ID NO: 37837 - DNA, 271 bp, Glycine max
  unsure (1)..(271): unsure at all n locations; Clone ID: 701118976H1
attaaattaacaacacagataacataattccttcannactgatcactcgtttcataaaaggatctctaactagataaaataagaggcaaacaaagaaacccatagtagaatgggtaacccttattctcaaacacaaagtggttaattaacaacacgagtagaaagatgatagatctatcatcttctatcaaagcactcttaattaattttttaaaattaacaatgtttggtgcagaagcatctgcgacggaagccacggcagtgtcctcca

SEQ ID NO: 37838 - DNA, 263 bp, Glycine max
  Clone ID: 701118977H1
tgcatgtagccaaaaatccaagatcagaatagttattcagtggtcaacttcaacttttatttgttcacatacaattctcaatatccatggctgcagattccaactcaaaccttagaatcaccattgaaagaaacccttcccagtcacgccttgctgagttgaacatcaagtgctggcctaagtacatcctcttctctctctttctttctcttcttgttccattcttttgctatgtattatatgaaaaaaataaaacttagata

SEQ ID NO: 37839 - DNA, 270 bp, Glycine max
  unsure (1)..(270): unsure at all n locations; Clone ID: 701118978H1
ttggcagtcaaatgttggagagagcagaggtttgcagctgcgtaagtgtaaccctaatcctaataagctgaaggttatgggggggtttggaggttgttctggagtggcagtgggtgtgatagatnagaaaaggaattggaagggttagggttcgggttcgggcgagttcttcgtcggacgaggcagtgagtgcgcagtcaaaagtgactcagaaagtattctttgacgtcatattggaaatccagttgggaagcttgtgggacgtattgt

SEQ ID NO: 37840 - DNA, 274 bp, Glycine max
  Clone ID: 701118979H1
gttgaacacaggggccaagattccttctcttgggttagggacttggcaagctgaacctggtgttgtagctgaagctctcaccacagccattcaggttggatacaggcatattgactgtgctagtgcgtataagaatcaagcagagattggttctgctcttaagaagctttttgatgatggtgtggtgaagcgtgaggacttatggatcacttccaaactctggtgttcagatcatgcaccagaagatgtgccaaaagcattggataaaacatta

SEQ ID NO: 37841 - DNA, 223 bp, Glycine max
  Clone ID: 701118980H1
aattcgcagagaggttcagtttgtgtcatgtgcatacagcaatcggattgtttggatcagaagtcaattcgaggtgtagatggaacttgaagcaagtaatcaacccaagcaagagcgttcaaggacaagatggacagcatcccttgacaagatatttgcagacttggttgtcaagcagattcaactggggaacagaccaaacaatgtttttgacaagaaaaca

SEQ ID NO: 37842 - DNA, 279 bp, Glycine max
  unsure (1)..(279): unsure at all n locations; Clone ID: 701118981H1
annggntccatatccgtcnctnanntnatcanncataaaatatactcatggccgnagcacggttttgatgnacatgatgtaggatatgtgcctgaggaccccaattttcctcagaatcattctgatgaacatgatgtagggactgtgattgatagctccggatntncntcacctgctacctgatgaagatgatgcaggcaatttgatggaggacgccaattttcctgaaaatgattttgttgggcatgaacatgatgttggaggttggctggggacgcc

SEQ ID NO: 37843 - DNA, 277 bp, Glycine max
  unsure (1)..(277): unsure at all n locations; Clone ID: 701118982H1
ctctctttgacggnggtgctgtcagcattgacctcagcttgagcantaaaacatcatcagcactactacggtacnatggctgtgctgcaatctttcgtttcggtccacccagattctcacttccccatacagaacctcccttacggagtcttcaagccccaatccgcttcgcctcctcgtcccggngtcgccatcggngactttcgtcctcgacctctccgaaatatcttccgctggtctcttcgacggtcctctcctcaaaaactccgatggtttt

SEQ ID NO: 37844 - DNA, 269 bp, Glycine max
  Clone ID: 701118984H1
catgattgagaggtccaccaaccttgactggtacaagggaccaactctccttgaggctcttgaccaaatcaatgagcccaagaggccctccgacaagcctctaaggcttccattgcaggatgtctacaagattggtggtattggtactgtgccagtgggacgtgtagagactggggttgtgaagcctggtatggtggtgacttttggtcccactgggctgacaactgaggttaagtctgttgagatgcaccatgaggctctcacagagg

SEQ ID NO: 37845 - DNA, 268 bp, Glycine max
  unsure (1)..(268): unsure at all n locations; Clone ID: 701118986H1
gttgttgtnatgggaaacctgaataatgaagagagatcagcaaccatggagataatcaaagatgcctgtgagaantggggtttctttgagttggtgaaccatgggatatccatagagttgatgatggacaccgtggagaggatgacaaaagagcactacaaaaagtgtatggagcaaaggttccaagaaatggtagcaagcaaaggcttggagtctgctcaatctgaaatcaatgatttggactgggaaagcacttctttttgcgcca

SEQ ID NO: 37846 - DNA, 268 bp, Glycine max
  Clone ID: 701118987H1
gaaaaactctgtaaacatgttggtttaccaggacctccttacaggtgatgagcttctctctgactccttccgttacaaggaaattgagaatggaatgctgtgggaagttgaggggaagtgggttgttaaaggagcagttgatgtagacattggtgcaaacccttctgctgagggtggaggagaagatgagggagttgatgatgcagctgttaaggttgttgacattgttgacacattcagacttcaggagcaacccgcttcgataaga

SEQ ID NO: 37847 - DNA, 272 bp, Glycine max
  unsure (1)..(272): unsure at all n locations; Clone ID: 701118988H1
atcatccccaacttcctcacaangttacatcctctanagagntgtgccaccatgtcggacgatgaaagggaggagaatncagttggatctctcttctgccgaagttgtcaccaaatacaaaaccgctgctgagatcgttaacaaggccttgaagctagttatttcagaatgtaaaccaaaggcgaagattgtggatatttgtgagaaaggggattcatacattagagagcaaactggaaatgtgtacaagaatgtgaagaggaagatgagag

SEQ ID NO: 37848 - DNA, 271 bp, Glycine max
  unsure (1)..(271): unsure at all n locations; Clone ID: 701118989H1
actcccttctcatcgttgggcaagatgagtgccatgaaattttgccgtgaatgcaataacattctgtaccctaaggaagacagagaccagaaagttcttcctcttcgcttgcggnaantgngacaatcaggaggttnctgataacttctgtgtgtatnggaatgagatacatcactctgttggagagcgcactcaggtgttgcaggatgtcgctggcagatccaacgcttcctcgaaccaagtctgttcgctgcagtcaatgcaatcatgg

SEQ ID NO: 37849 - DNA, 266 bp, Glycine max
  unsure (1)..(266): unsure at all n locations; Clone ID: 701118990H1
attgcagttaaaaccccaacagacacnctccatctattcgattttntttaattttngtgaatgaattaattttggaatcccgcgcaatctgtnggangcaagcaagcaagcaattncttttgttttgttatgtttcttctctctcgcgcgccntaattctcgaatctctgtatnggtgttccgatggcggaggagaagagggcgccgtcgtcgttcgtgaagaaaggcgaccggcaaatgttcacggtggagctctggccaggtga

SEQ ID NO: 37850 - DNA, 264 bp, Glycine max
  unsure (1)..(264): unsure at all n locations; Clone ID: 701118991H1
ggaggctattnggcctatggccaattgattcctgcaaatggaggaatgctcactgccctataccaattccactctcgcgatgtgtcaagattcgtgctagggttaacaagtttttttgtagtggtgaatggtttgtgctcgtttcaaatctatggcatgccagcattcgatgacatggaatcagggtacactacaaggatgaagaagccatgcccgtggtggctgcgtgcattattagggtgttctttgggttcttgtgcttct

SEQ ID NO: 37851 - DNA, 261 bp, Glycine max
  unsure (1)..(261): unsure at all n locations; Clone ID: 701118992H1
gcagcttcttcaattcaaaacaaaactctctggggtgttggtgttggtgagggatctgaggcaaaggtgttgatgatatgggagcgtgtgtttcaactccacaagggtgcgtgggagggaggttgagctcttccangangaaanccagaaaganagggagagnggntctcaagaanagttcttntccgggtgtntgagnnatcatcggagaaagttgatgtggcaggttgcccgattgntccttgctaaccccatttccag

SEQ ID NO: 37852 - DNA, 273 bp, Glycine max
  unsure (1)..(273): unsure at all n locations; Clone ID: 701118994H1
attnagntctcgacggtngctttcgatccgcnaccgtccgatctcctcntccgtaactgacgacggtgtactcgatatcttacatactctctctagccacagcatgctncancnntagttgatgaaaaattatacattgctggtgggagtngtaatngtcgatacttatctgatgttcaggtttttgatttaagaagtttgatgtggtcttctctgaaactaaaagcaaatgttgggaaaagatgatgacgatagctcacaggagattctnca

SEQ ID NO: 37853 - DNA, 278 bp, Glycine max
  unsure (1)..(278): unsure at all n locations; Clone ID: 701118995H1
ggacctctatggtaacattgttctttcaggaggaacaaccatgttccctggtattgctgacatnaatgagcaaggaaatttcggcattggcacccagcagcatgaagatcaaggttgtagcaccaccggagagaaaatacagtgtctggatcggtggttctaatcttgggcatctcttagcaccttccagcagatgtggattgcaaaggcagaatatgacgagtctggtccatcaattgtgcacagaaagtgcttctaaaactgtttgagagataggg

SEQ ID NO: 37854 - DNA, 125 bp, Glycine max
  unsure (1)..(125): unsure at all n locations; Clone ID: 701119001H1
gtttccctctctctcacactcacactgcacactcctcccaaaaacccaaaaccctaactctctttcgcacacttncncacgctcgcngcagccatgaatngntccatctcnngnnnngtnncgga

SEQ ID NO: 37855 - DNA, 252 bp, Glycine max
  unsure (1)..(252): unsure at all n locations; Clone ID: 701119002H1
cggcaacgttgtgctgtccgccttgaccgagccagagcttcgtcttggccctcgattttgccctgtaaaactaatcccagtcacaacagaaataatcaatggcaccgaaacagaccaaggcttcagaagaagatcgcttacgatgcgaantgtgcgacctaatggaggagtacggccaaatcctcgttgtaaactccgacaacgtgggatcgaaccagctccagaacattcgcaagggtctcgcggcgactc

SEQ ID NO: 37856 - DNA, 254 bp, Glycine max
  Clone ID: 701119003H1
gttctcagggaaacaatgccgttctgccacccaagtcaccagaaaaacatgagaaaccagcacacagtcataacattgacattcaccatgcacaggcatcacaagaaagccttgcaaagttcagaagtatcttgtgctgtcaacacagataatctggacaatggagatatggcatatgctttcactttcccttccacttcatttggatgcatgaaacaagacaaccacagcttgattcctttggccctggagaa

SEQ ID NO: 37857 - DNA, 252 bp, Glycine max
  unsure (1)..(252): unsure at all n locations; Clone ID: 701119004H1
ctttanctctcttactctctctgtctagaatgcctctattctccnctgtcggtcacacagcgatagtcanataatagagaatagaaagcattcataggcgccaatannnnnnnnnnnnnnnnnnnnnnnnnnnnnnnnnnnnnnntacacaangcagagagacaagtttgtgtttntctacttttccattttttggggganagagatctgnttcntcaccataagtgtcatngcttngccttgcctctcact

SEQ ID NO: 37858 - DNA, 223 bp, Glycine max
  unsure (1)..(223): unsure at all n locations; Clone ID: 701119005H1
caacccccatcactctntccttcaccacaatgtccacaaaaacatctctctcantctctgaacaagtctcactcattctcagagagatcgatttgtcccagaagaaactggcccagatggagaaagagcttctaggatatgaaagcattgatctttcgagacccaacattgcatccgagctcaaactcttcctccagcgccaccagctccctctggggaaaga

SEQ ID NO: 37859 - DNA, 252 bp, Glycine max
  Clone ID: 701119006H1
aaaacaatggcttctttcaatctctcttattcttcctcaccagccctctcatgtcccccgggcgagcaaacaattcaaattattcaatgattgccttttgtccgaatgaattctaaatttccctcaagtgacaatgctattgggagaattaaagctaagttgatctctggagggggtgatctactttcctatccaaatggcaatggcattgtgataggtaaaaatctggttggtgatgaatctgttcgaatt

SEQ ID NO: 37860 - DNA, 252 bp, Glycine max
  unsure (1)..(252): unsure at all n locations; Clone ID: 701119007H1
caaacaccaaacaccaaactagttgggctcaattctctttgaatggctttggaggcttgaaattcaccaacagcagccaccactccgttccgtggctaccnnnnnnnnnnnnnnnnnnnnnnnnctgaccttcacttacgtgagccttgggctaaaaggaaacgctccaaacgaccgcgttttgagacggaggaagagtacctcgctctttgcctcatcatgctcgcacaaagcggtaacaccagaaacatc

SEQ ID NO: 37861 - DNA, 253 bp, Glycine max
  Clone ID: 701119009H1
attcgctggttatgggaagcaggggcctcagcacaatccaaaggatcatattgggaagtgtaagcaacttgtgatgacaaatgctccttgccctgtgactatcgtcaaggaaccacctagcagcagcaagtaaagatgatcactttgggagagaacatttaaatttcatatgatatttttcttggattgtacctgaactagttgggtcaattcccttacagttcgctcctttcctaagtattagtttggtgtc

SEQ ID NO: 37862 - DNA, 252 bp, Glycine max
  unsure (1)..(252): unsure at all n locations; Clone ID: 701119010H1
aganggaagtggaagtnacggaagagaagaagganattgaagtaacagaagagnagaaggaagctcaagtcatagaagagaagaaggaagtggaagtgacggaagagaagaaggaaattgaagtaacagaagagaagaaggaagcagaagtgaaagaagagaagaaggaaggggaagtgacggaaganaagaaggaagttgaagtgacggaagagaagaaggaagcggaagtgatagtagaagagaagaagg

SEQ ID NO: 37863 - DNA, 251 bp, Glycine max
  unsure (1)..(251): unsure at all n locations; Clone ID: 701119011H1
gtttcgccggcgccggagacgcggcgganaaaaacccgttcaccccaaaagccttcgcgattcggtattgggacaaagagatccgcagcgggttaccgaagccaccgtttcttgtatcaaangtgtcgccgctgagcgcggcggaggcggcggcgttcttaaagctcgtctccgggaactcgctctccacgcggctgccggaattctgcgccgccgcgaactcctctgcttcccggaggtggggccccgcc

SEQ ID NO: 37864 - DNA, 249 bp, Glycine max
  Clone ID: 701119012H1
ggaagctactagaacactagtttgttgagcactgcgatgaggaagtggacggttgcttccgctctccttcttctctctctcctctttctctttgcagatcaaggtcgaaagtttcaggcgaatgccgagggagattccgacgagcttgtagatcctccgaaggtggaggacaagatcggtgctgtgcctcatggcctttccaccgattcagatgtcgtcaagagggagtcggagtcgatctcgaagaga

SEQ ID NO: 37865 - DNA, 249 bp, Glycine max
  Clone ID: 701119013H1
gaccaatggcaatggagttgataatgatgccaagcaagggaatcagaatcaccagcgaaactattcacattcggggataaacatgaaaggaagggatcatgaggatcctgagactaaggctaacatgaaggaaatggcagcgagagctctctggcatttagccaaaggtaactcgccaatttgtcgtagcattactgaatcaagagccctgttgtgtttttctgttcttcttgaaaaaggaacagaggc

SEQ ID NO: 37866 - DNA, 250 bp, Glycine max
  unsure (1)..(250): unsure at all n locations; Clone ID: 701119015H1
tctcttttccaaaattagggaaacaacaaggacgcaaaatgacacaatagcccttcttccctgtttccagcttttgtccttctctcnnnnnnnnnnnnnnnnnnnnnnnactcagtcagatccaactcctcagataacacaagaccaaacccgctttttctgcntttctagactagacgttctaccggagaagtataattttttgggtgaacttggagcatttttagtccgattgatttctcgatatcat

SEQ ID NO: 37867 - DNA, 252 bp, Glycine max
  unsure (1)..(252): unsure at all n locations; Clone ID: 701119016H1
atttctaggctttcatctcagacagtgaaaaaatgatagatataagtacacttaatgctgcacagattactgtgctgggatctgccttttgtgctatgctttccatgcatttcacgtcgcagttactgtctcagcatctcttttattggaagaatccgaaagagcaaaaggctattatcattatcatcctcatggctccaatctatgcagctgtctcctttgtgggtctcttggatatcagaggaagccnnt

SEQ ID NO: 37868 - DNA, 250 bp, Glycine max
  unsure (1)..(250): unsure at all n locations; Clone ID: 701119018H1
cttctttcacaaaagaacaatatctcttgctatttgccaaactacgaacatcatttagaaccatgtcttctctaccaaattgccttggtccttttattttcatccctttttatccatgcatctttagctgagatggtgtgtgaggacctgccaaaggaagtgtgtgctttctcattagcttcatcagggaagaggtgtttgttggagaccgagaaggtngccgacggtngcgtcaagtaccaatggccgg

SEQ ID NO: 37869 - DNA, 251 bp, Glycine max
  Clone ID: 701119019H1
atgagagagtgcatttcaatccacatcggccaggccgggattcaggttggaaacgcctgctgggagctttactgcctcgaacacggcattcagcctgatgggcagatgccaagtgacaagaccgttggtggaggtgatgatgctttcaacaccttcttcagtgaaactggggcaggaaagcacgtgccccgcgcgatttttgtagatcttgagcccactgtgattgatgaggttaggactgggacataccg

SEQ ID NO: 37870 - DNA, 253 bp, Glycine max
  unsure (1)..(253): unsure at all n locations; Clone ID: 701119020H1
gtccctccttcctctgccttataactcttgtggcccttttngctggtagcattgaaagtggcaccagcaagcgtgaagccaagccattatgctgcaccattcaataggagtgtttttccttctggttttctatttggaataggctctgcagcttaccagatagaaggagcagcagcaatagacggcagaggaccaagtatatgagacacctacactaaacaacaaccagggaagatttgggatcatagtgatg

SEQ ID NO: 37871 - DNA, 250 bp, Glycine max
  Clone ID: 701119021H1
atctgctcagcatgcttataaacaatttcgagacaaggcagcttcatccagatcaatgactgtagaaaagatggaggagtttgcacagggaagggtttggactggtaaggatgcagctttgcgtggtttagttgatgctattggtggccttctcgagctattgccatagcaaaaatgaaggctgatatacctcaagacagacaggttacacttgtggagatctctagagccagcccttctctacccgaga

SEQ ID NO: 37872 - DNA, 251 bp, Glycine max
  unsure (1)..(251): unsure at all n locations; Clone ID: 701119022H1
ctcgcgcttccttcttccaccttccccgggtttnactgtgccgatgacttttcttctgagganagagatcgtcatccatcgcgtgccttcgttttcccttcatgaaccggggcaggctttggcgttcttggaacttcttcttccgccactggacttgaccctaccccccccaattagggttatctatttcttccatttttntccttagaaaaaaaaacccgtttcttcttctctcgctgccgacgagtctt

SEQ ID NO: 37873 - DNA, 251 bp, Glycine max
  Clone ID: 701119023H1
aagatcttgaaggtcatccgtaagaacttggtcaagaagtgccttgagctcttctttgaaattgcagagaacaaggaggattacaacaagttctatgaggctttctctaagaacttaaagcttggtatccatgaggattcccagaacaagggaaagattgctgaattgctcaggtaccactccaccaagagtggtgatgagctgacaagcctcaaggattatgtgaccaggatgaaggaaggtcagagtga

SEQ ID NO: 37874 - DNA, 254 bp, Glycine max
  Clone ID: 701119024H1
attgtattgtgttcaaactttgtttcttccataccctcttcttctttggccttaaccgtcatatttgggctttgaaatggagttcgaggaccgcttcagacaccaggttcagagaccaaaatatgattgccttctttttgatttagatgacactttgtatcctctcaaatctggtctggcaaaatcatgtctccaaaatattaaacactacatggttgagaagcttggcatagaccctagcaaaattgatgacc

SEQ ID NO: 37875 - DNA, 252 bp, Glycine max
  Clone ID: 701119025H1
tacatagtgagttacactattatcaacttgaggttgtgaagaatattaagagtgtgtcacatcacttttactacatttacttgcaagaaatcgatgatgagttcaagtaggagagcatggactgtggcgattagtgttggagttgtggagaccttgaaggaccaaggcctctgcagatggaattcggctttcaagtcagctcaacaaagtgtgaaaagccatcttagatctttgtcacaggcaaagaagctc

SEQ ID NO: 37876 - DNA, 251 bp, Glycine max
  Clone ID: 701119026H1
gtgggattggaccttcaggagttggatcaagttcttcctatgccccaaaggagctaaataaaggaagtgatgcctgaaaagaatgtaaaaacctttaaggatgtgaaaggttgtgatgatgcaaagcaagaacttgaggaagttgtggagtacctaaaaaatccatctaagtttacacgccttggaggaaagttgccaaaggggattcttttgacaggagcacctggaactggaaaaactctgctagccaa

SEQ ID NO: 37877 - DNA, 230 bp, Glycine max
  unsure (1)..(230): unsure at all n locations; Clone ID: 701119027H1
gggcaagcgaggaaggaagtgaagantcaaggttgacgcaaanaattgaattgaagtgataagtattatatagcatgcaaagaaaatggtaaggtaaggtaagatcgatagcagaaaaggaaaaaatgacgatggacgatgatagctccatatatgtagggggtcttccctacgacgccaccgaagaaaccattcgcaccgtcttcaatttgtatggcgctatccttgat

SEQ ID NO: 37878 - DNA, 249 bp, Glycine max
  Clone ID: 701119028H1
cgaggatcaaacctcaggctctgctacagcaaagcaaaaggaagaagggtccttctcggataagtgccgtgactgttatattttactttttgattcttgccttggttgggtttttcctgtttgcttcgtacagacattggtccagcagatcaagattacaatccgaagatcacttgtcagtctctgagggtgaaaatacttttgtggactccaagaaatctgagctgcctggatatgctgttttaaata

SEQ ID NO: 37879 - DNA, 247 bp, Glycine max
  Clone ID: 701119029H1
ccgaggccttcactgggcccatgccggacccaccgggcctcaaactcaagaaggaaggactcaaggtgaagcaccctgtggtttttgtgcccgggattgtcactggggggcttgaactgtgggagggtcacctgtgtgctgaggggttgttcaggaaacgcttatggggtggtaccttcggagaagtttataaaagaccttcatgctgggtggatcacatgtcactggacaatgaaacaggattgga

SEQ ID NO: 37880 - DNA, 248 bp, Glycine max
  unsure (1)..(248): unsure at all n locations; Clone ID: 701119030H1
atcttaagcgaagatgatgcacatgancttctactggagcagaaaggtgaatctcctaatcgattcatggaagaccaacgattggacggactatctcctcactctgctcgcntgcctcgtcgtcgccgccttctaccagttcctcgagaatcgccgcatccgcctcaagctcatcggctccggaaancccttcccggcggnnatcgaggnccctcttctgcggcggaagtcgccggaaaccgcgtcaa

SEQ ID NO: 37881 - DNA, 251 bp, Glycine max
  Clone ID: 701119031H1
cgcaaatgggagtctgttgttgatcatgctgtactgggagcatggcttgaacagatgcagcttgatcatcttgtggctcagcaaaactgaaatgagtttctgctgaccctgaggtagttaacaacagaaatgtttcagtaaataataatcatatatattcgtttatgaattttgttgatggaagaaggttacagtaactaagaaaggaagcagtactaagaaaaagaaccacatcactgagcaaaattcat

SEQ ID NO: 37882 - DNA, 251 bp, Glycine max
  Clone ID: 701119032H1
cagagagagacgcagccatggggcgaagacccgcgaggtgttataggcaaattaagaacaaaccataccccaagtcacggttttgccgtggtgttcctgatcccaagatcaggatttacgatgttggtatgaagaagaagggtgttgatgaatttcctttctgtgtccatctggttagttgggagaaggaaaacgtttctagtgaggccctggaagctgctcgtattgcttgcaacaagtacatggccaaa

SEQ ID NO: 37883 - DNA, 252 bp, Glycine max
  Clone ID: 701119033H1
gttgactatgaagaagggtgagatagcattgttgattataggacctgaatatgcttttggttcatcagagtctcagctggaacttgcagtggttccacctaactccacagtatattacgaggttgagctagtatcatttgagaaggagaaggaatcctgggacatggacacgccagagaagattgaagctgctggtaagaagaaagaagaaggaaatgcattatttaaagctggtaaatatgcaagagcttc

SEQ ID NO: 37884 - DNA, 249 bp, Glycine max
  Clone ID: 701119035H1
ggactaccttggacaactacaccatcagaatctggtaaaattgattggatactgtgcagatggagagaaccggttgttggtatacgagtttatgtccaaagggagcttagagaatcatctgtttagaagaggaccacaacctctttcttggtcagtgaggatgaaagtggccattggtgctgctagaggactttcttttcttcataatgccaaatccacaagtcatataccgtgattttaaagcatcca

SEQ ID NO: 37885 - DNA, 249 bp, Glycine max
  Clone ID: 701119037H1
tgtttttctccccttttgttacacatttgcaattagatttttgttgaaagaaagctctagtttgggccctttctactggaatttttactagtaccgaaggatggagggaatttaactactgagaccttcatggttgactgtaagggtcataacagctttttagttgcccttctgtagtttttctttaatctcaaatgtcttttagtttgtgacagataacccttttatgtattattttcttccaaaaaa

SEQ ID NO: 37886 - DNA, 248 bp, Glycine max
  unsure (1)..(248): unsure at all n locations; Clone ID: 701119038H1
ataatgtgaagcagtggctcagtgaaattgatcgctatgcaagtgataatgttaacaagctttnggttggaaacaagtgtgatctggaagcaaatagagctgtgtcatatgaaacagctaaagcattcgcagatgaaataggcataccttttatggaaacaagtgcaaaagatgctacaaatgttgaacaggctttcatggcaatggctgcttcaatcaaggatagaatggcaagccaacctgcaaac

SEQ ID NO: 37887 - DNA, 165 bp, Glycine max
  Clone ID: 701119039H1
tgatgataggttattggagggttaatgtgtgggtgtaaggactcacttaggaaaattcttgttcccattgctattccagcatatgattttttcatatattttgtaatatacaactttctacttttccattcaaaggaaacaactgaatgaaaaatcttgctttcc

SEQ ID NO: 37888 - DNA, 251 bp, Glycine max
  unsure (1)..(251): unsure at all n locations; Clone ID: 701119040H1
ggctccatctaaaaaaaatggctggtttggctagcaatcttcctctaattgttatgataggtctgcaaattccattatgcagcacttgccatattcacaagagccgctctcttagatgggttgagtacaacggtgtttgtagtatacaggcaaggcatagccactttggctttggcgcctatatttttctctcctaagaggagacaatcagtgaaagattctttgggattcaggngcttcttttngatgtt

SEQ ID NO: 37889 - DNA, 256 bp, Glycine max
  unsure (1)..(256): unsure at all n locations; Clone ID: 701119041H1
ggccactagtgctgcaacttcacaagacggaagatgggacacaggagtatgctgagtttcttccacatagccangaaggagattcaccgactttgctggctgtgaggaaggaaatatcggatgaaacagatcgtataactgggaagacaaagcaaatttctaatattccaattcacctcagcatttattctccaaatgttgtgaacttaaccctcatagatcttcctgggttaacaaaggttgcagtagagggnca

SEQ ID NO: 37890 - DNA, 250 bp, Glycine max
  Clone ID: 701119042H1
ggatatttccatatttgaagtgccacggtgctaccccaagaggcttgtggcaacttaaagtagatcaaaaagtgataaagtgtgtgatgaagaaaagttctggtacctcccagaaacttggttcatttctaagtccaggggcaccaaactatagagagaaaagcattgggagccaaaaggggtggagctcagagagggtgttgctgcagccatcatcaaacagcataaggaatgctagtgtggctaactt

SEQ ID NO: 37891 - DNA, 249 bp, Glycine max
  Clone ID: 701119043H1
ctcaaagattaagccatgcatgtgtaagtatgaactaattcagactgtgaaactgcgaatgggctcattaaatcagttatagtttgtttgatggtatctactactcggataaccgtagtaattctagagctaatacgtgcaacaaaccccgacttctggaagggatgcatttattagataaaaggtcaacacaggctctgcctgttgctttgatgattcatgataactcgtcggatcgcacggcctttg

SEQ ID NO: 37892 - DNA, 246 bp, Glycine max
  unsure (1)..(246): unsure at all n locations; Clone ID: 701119044H1
attcatacgtggtgttgttactgctgctcttttctcttttcttttctctttagttctctcttcccctnnnnnnnnnnnnnnnnnnnnnnnnngagcttgtttaagcttttcttccattaacatattatcacaatgtgtggtattcttgctgttcttggttgttctgatgactctcgagccaaaaagggtccgcgtgcttgagctctctcgcagattgaagcaccgtggccctgactggagtgggct

SEQ ID NO: 37893 - DNA, 248 bp, Glycine max
  Clone ID: 701119045H1
cttgaatgtttgtgagctcggatctatctgaatggggcaagcgctgtcgcgaattcaccgtatgattgtttcgagcagtgtaaaagagaaaaagaaaaacacagcaatctcgcgagttcaacctttagccatggctagcaattgttcaatagaaggaccactagtggaggagttcacttaccaagcaggatcagctcccttcaagagttgtcatgcttctaccattgttgaggttgataaggatcatt

SEQ ID NO: 37894 - DNA, 248 bp, Glycine max
  unsure (1)..(248): unsure at all n locations; Clone ID: 701119046H1
agcaggaatcagtggccttggtgcctgcaaataccttctagagtttggatttaacccaattgtctttgaagttgatgatggtgtnggaggactatggagacataccatggactccaccaagctccaaaacaataaacaaatgttccagtttatggattttccatggccttcttctgtgaaagaagataatccaagtcacaagcaagtgctagattatgttaactcctatgctgaacatttttccctca

SEQ ID NO: 37895 - DNA, 248 bp, Glycine max
  unsure (1)..(248): unsure at all n locations; Clone ID: 701119047H1
aatatattagcctggtctcaattcatgangccaaaaataatttttggcttgcccttggagaaaatggatggtgtggagagatcttattttatggtggaggcacttataaaattatatgcaagtgagaaatatattctncatggtgaatcaacagacagaagatttgagattttatgtttctttcaaggttggagctacaaatgtatcggtattgcgaagtgtgtggcagagtttctggctaagtgaga

SEQ ID NO: 37896 - DNA, 247 bp, Glycine max
  Clone ID: 701119048H1
actgtttctctattcaagtacttccaatttcaataatgcagatcagcagaggagttctctggtctttgttccttggtttcttcactctccgagagcattttgtgcactactgggttgaaaatgtatttggtggagagcaaaggaggtgccataacatgcatgttcttggctctttcttcttggggacatggcctgctcttttgactatgttagaaaggcgtggtcgtcttcctcagcatacctacct

SEQ ID NO: 37897 - DNA, 223 bp, Glycine max
  unsure (1)..(223): unsure at all n locations; Clone ID: 701119049H1
ctagcctaatttgctcctttagcctcactccancctctcttnnacgtcaaatcctaagaaacccatttganatttgaaatctcgttctggctaattccatgttcattgtttactatacctcaccactccaagggtctcataaattncttctgcttcaaactctggctgcagaaaaaggaaactgttggttctagatacaagtgggttccagagtagagtgagg

SEQ ID NO: 37898 - DNA, 253 bp, Glycine max
  unsure (1)..(253): unsure at all n locations; Clone ID: 701119050H1
gttttcattcaatcatcactgatctaagatatgtctacatctgattaagtcagaagtggtgggaaagggtgcnaaggattgatgnaaagccnaanggagaacntgngaanggtngnnttcttgntacagtnaaggntttcattcaagacattngtnagaagatttagggaccngttgggnttgggaaaccnaattgncngnttcccnggggnanacnttcnnccaatnattcttggaaaaggcagacnaattt

SEQ ID NO: 37899 - DNA, 250 bp, Glycine max
  Clone ID: 701119051H1
ggattcttacaaagaccttggtgcaaacaacttaattccaatggaaattgcattaaaaatagccaataaaatcaaacaacatgagagattttctgtgtatattgtcattcctatgtggcctgaaggtgtacctacaagtacagctactcagaggattctcttttggcagttcaaaacaatgcaaatgatgtatgaaacaatttacaaggccctacaggaggctgggcttgacaataagtatgaaccacag

SEQ ID NO: 37900 - DNA, 247 bp, Glycine max
  unsure (1)..(247): unsure at all n locations; Clone ID: 701119053H1
gtcgattcttagtcgattgagttattttctaaacatgtgtttcttacgattctgtgttgaattaaattaatagttcttgtacgtagcataatgttggatttaaaatttcaattttagtgttctgcaagtattttagctcatggtcctccaaaccctagatcgtagcttttaactttgattgaatagtaattatgttttattnntattttttttaccatgtgtatgttatatgatatgatatganggg

SEQ ID NO: 37901 - DNA, 249 bp, Glycine max
  Clone ID: 701119054H1
ggaagcttggggtttgaatcgaatcgaatcgaagcgattcatcgatcgatcgatggctcttgtaggagttgaactgaagcatgcggcggagggcgtaccggaggcgaattgctccgccaagcccaccaagcagggcgagggcctccgccactactattctctcaacatccacgagcatcagctccttcttcgccaaaagactcataacctcaaccgtctcgaggctcagagaaacgacctcaattctag

SEQ ID NO: 37902 - DNA, 252 bp, Glycine max
  Clone ID: 701119055H1
cgaatatgctttcttggaaagttctcctcgtctccgccgccgtcttgttcgcgggcgttagggcctcagagtctctcttccagtcgccgccaccaacctccctcttctttggagtttcttcctcttgtgtttcaagcctccttacctcttcgttgttctcaacgccatcatcatctccatcgtcgcttcttcacggtttcatcactcatcaaaccctcaatctccggagccaactcctccacgtgttgaatc

SEQ ID NO: 37903 - DNA, 243 bp, Glycine max
  Clone ID: 701119057H1
ttatggctcaagggtggcttctgtaaggcgaccatcttacagggattatcctgccccgtggtcctggctacaccgagctccctagaagcacatctcgtgctgcaccaaggagaggctatgtggatgatgggtatggccaaagatttgaaagggctcctcctccacctcctccaccccatctaagttaccgtgaaggacgtcctcgagattatgatgctctgtctggctcaaaacgtccttatg

SEQ ID NO: 37904 - DNA, 208 bp, Glycine max
  unsure (1)..(208): unsure at all n locations; Clone ID: 701119058H1
ggttagacgtttgttcttgtgatcgaanctaagcgaccaaaatgggtgnntcagtgagggacgtgaagtcgaagggcgaggtcgacgaggtggtggcgagtggctctccggttatcctccacttctgggcgtcctggtgcgaanttccaagcacatggaccaactcttctctcacctttccactgatttccccaacgcccgcttctta

SEQ ID NO: 37905 - DNA, 248 bp, Glycine max
  Clone ID: 701119060H1
ggtggggtgacaacgcagagcgtgttcttgagtcaattcaacttctcttggatcttcttgaggcccctgacccttggcacccttgagactttccttggaagaattcctatggtcttcaatgttgtcattctttctccccatggttactttgcccaagataatgtcttgggataccctgacactggtggccaggttgtttacatcttggatcaagttcgtgctttggagaacgagatgctccatcgcat

SEQ ID NO: 37906 - DNA, 239 bp, Glycine max
  Clone ID: 701119061H1
ctgcccatgtgcgtgaagtaaagctcagaaaagaggctgacgatgcactgagagatacagtacaagaacaacaaaagctcttgaatgagagtgaagaaattgctggcgagctacaaatgaccatgagaaatattgccctgctagatagtcgtgctcaagaagcaaaccgtaggcgggatgaagctgcagatgaactatcactaattcaagaatccatctcaaccctgtggcaagaaagg

SEQ ID NO: 37907 - DNA, 248 bp, Glycine max
  Clone ID: 701119062H1
gctcctaccagctaatcctgatattttagagggtgttgaagatcttatacagctcagttatttaaatgagccctccagttcttcacaatcttcagtctagatactctcaggatatgatttacagtaaatcagggccaattttaattgcactcaatccgttcaaagatgttcagatttatggagacgattatatttcagcttataggcagaaacttatggataagcctcatgtttatgctatggcagat

SEQ ID NO: 37908 - DNA, 222 bp, Glycine max
  unsure (1)..(222): unsure at all n locations; Clone ID: 701119065H1
cttattcccacagagactgagaggaccgaatcaccatgctatcaggaccatccantagcaccatcaaacagattgggcatcactatctacttgttcatcttcctcatcagacattgtcgctcccgtaccttccccgggtgaaactcctgttaaactttgtaaggattgctcaatctcccaacaagccatgatgcttccattggcatggaccggacntgctgt

SEQ ID NO: 37909 - DNA, 249 bp, Glycine max
  Clone ID: 701119066H1
attctctcgcatctcaatacccttttgatttgtgaaaggaaagcaaacatgcttgatcaggtccaacaccctacaatcatggacaaggttgctggccagctccatctccgttctggtgaccactggtattaggagttatgaaggagcctactgccaccccacaatgtaccaaagaccctcttttgggaattactcgaatgctgcattgcagtatcctgtgatgccctcatgcaaagctactatggattt

SEQ ID NO: 37910 - DNA, 247 bp, Glycine max
  unsure (1)..(247): unsure at all n locations; Clone ID: 701119067H1
taagtccctccttcctctgccttataattcttgtgacccttttngctggtagcattgaaagtgcaccagcaaacgtgaagccaagccattatgctgcacccttcaataggagtgtttttccttctggttttctatttggaataggctctgcagcttaccagatagaaggagcagcagctatagatggcagaggaccaagtatatgggacacctatactaaacagcaaccagggaagatttgggatca

SEQ ID NO: 37911 - DNA, 249 bp, Glycine max
  Clone ID: 701119068H1
attttggataaccttccagttgctgttcgtagacaaaggagggatggaggtcaatcaacaacatatgaacatggttttcgtgttgggttcaaaggaaactatcaagggagcaaggaggagaagtattttattaataaccacttgagtttcagagtcatgtatcacaaggatcctgaaactggttctgctcgtattgttggatttgaggtcaccccaaacagtataaatcatgaatacaaggagtggaat

SEQ ID NO: 37912 - DNA, 206 bp, Glycine max
  Clone ID: 701119069H1
tagtgcctccttgccagaagttaaaatgggcccaagaaactttcctattcacatctgaatcagtgaacgaggggcaccctgacaagctctgtgaccagatctccgatgctgtgctcgatgcatgcttggagcaggaccctgacagcaaggttgcctgtgaaacctgcaccaagaccaacatggtgatggttttcggagagatcaca

SEQ ID NO: 37913 - DNA, 248 bp, Glycine max
  unsure (1)..(248): unsure at all n locations; Clone ID: 701119070H1
cttccatatgagtattatccagtgatgcatgttcattcttcactgtaacaccctttcctttcatttattgcctggggagtgtgagcaaacgaggcagaaatgaaagtcaccaacaacacaacacaaaagcnaccaattttgctttttctctctctntccctcattttctatatcagtttcctcaccttctcaatttttgaacgagacacagtgaggaaactgaacccttnngtttattcagctaaaaa

SEQ ID NO: 37914 - DNA, 245 bp, Glycine max
  Clone ID: 701119071H1
cttaggccaaccatgtcatcggtggtcagcatgctagaaggaaaaattgttgttgatgaagagttttctggagagacaactgaggtattggatgagaagaaaatggagaaaatgagattgtattaccaagagctgagtaactcaaaggaagaaccatggacagcttcatctacttctgtagcagatcttatcctgtgggcctagattctcttacttggagaagagagattaaagactttggagat

SEQ ID NO: 37915 - DNA, 249 bp, Glycine max
  unsure (1)..(249): unsure at all n locations; Clone ID: 701119072H1
agagggtaccaaggtagaaatcaatctctgggttcagacaaaaacttttcctcaacaaaggtanagcaaatatatgtggctaaacagaccattagtggggcatcaacagtatcatgaggagcaagaaatatcagctggatttgaaaaaaaaaaaaacncaggaaggctttnttatnaatttttggtctggcagaantaaaagttttgattanncttcttctacttgggaggttgattttnagattgatt

SEQ ID NO: 37916 - DNA, 251 bp, Glycine max
  unsure (1)..(251): unsure at all n locations; Clone ID: 701119073H1
caattctcctcctctttcaacgcccctttctcaactcaatccaattttcttctgcttcccttcgaatcccgagatccgcttcccaatctcattaatgggttcattttatcttggtactttttaatgggttatttctcaatgcaaacaatttattcctcaagggtgttctgttttgtcagatcctaggttttgctacatttcttcacagcccaacaatttataaaccaggcgaancataagaatgggtgatg

SEQ ID NO: 37917 - DNA, 247 bp, Glycine max
  unsure (1)..(247): unsure at all n locations; Clone ID: 701119074H1
atcatgagcttcattctgtttccgattctctttgcatttacctttctgtcctcgnccgttnctctctgcttcggatctggtcctcgccaaggttgaccgtcgcattgatctgacttcacagattgtgcgcatcactacttcactaaaggtgcagaatacgggatctgatgttgtgtctgagattttgctgtcctttcctgagaaccaggcaagtaacttggcatacttgaaggcaacacttggtgat

SEQ ID NO: 37918 - DNA, 245 bp, Glycine max
  Clone ID: 701119075H1
ggggtgggccaggtgaataaacacgacgtcgttttccttgtgagttggtttcagtcaaattgaacggaaccaccgtttctctctcacggtgctgccactgtcactcttctctactttctgcttcccagattctctatttttgcgcgtaatcgaatgtggaactttgcatcgaattgcattgctggaactgtgggactaaaaaatgattcaaagcctactcactctgcttcagaatgttctgatga

SEQ ID NO: 37919 - DNA, 248 bp, Glycine max
  unsure (1)..(248): unsure at all n locations; Clone ID: 701119076H1
gcagattttcacatcccaaacaacatgaagggnaggttcatgtttctgtcggtgctcctttgtngccactttttcatgtctccttctctattatcgacggtttagttgccaacggcaactttgagttgggtccaaagccctccgccctaaaaggaacagtggtggtgggcgggagccacttcgatcccagaatgggagatctccggctttgtggagtacataaaatccggccaaaancaaggggacat

SEQ ID NO: 37920 - DNA, 236 bp, Glycine max
  Clone ID: 701119077H1
gcaatgttggcctttgttgggttctggttccaagctatttacactggggaaggacccattgaaaatttgatggcacaccttgctgatcctggtcactgcaacattttctcggctttcacgcgttagtgcaatgtatagtttgaagaaaagaagacggaagacgtgcgtccggaatgaacatagctttatgctgcaccagcaatatccgttatttactttatacatgtactttgctt

SEQ ID NO: 37921 - DNA, 247 bp, Glycine max
  Clone ID: 701119079H1
ctctccgtcaaactttctttaccccgtcctcataacatatttcagatccgaaaaccagatcccgcgaactctgaagatctctattctctttccctcacctttccactcaaattcccctttccactttcccgagaaaattaactttttccgtcaattttccctccacctcttccttcttcctcacaatggctctgatcttcaacaatcgaagaatccctctcgctcttcgcattttccttctgttctc

SEQ ID NO: 37922 - DNA, 239 bp, Glycine max
  unsure (1)..(239): unsure at all n locations; Clone ID: 701119081H1
attctgaacaccatgtttactctcttcttctctcttcttctacattagttcttnttattcattattcattctcagcttcttttcttctggggggcaaaaggggtcacttttcagatccgagattgagtcctttaacccatcatcatcatggagctcctcgggtacctgaatcagggtcacccttctagaggaacaacactgttatttctctttcattggtgtttcgacacttgtggtct

SEQ ID NO: 37923 - DNA, 248 bp, Glycine max
  Clone ID: 701119082H1
atgatgtagttgcaaatatactgtctaaaggtaccaaacttagggattatacaaaaggagttgagaacgatttgcgcaaagttgaattggattcaattcaggattatattaaagaaagtgataatctagtttctcttcacgatcaaattcatgattgtgatagtatcttgtcacagatggaaactcttctaagtggatttcaggctgaaattggttccattagttcagacataaagattctccaagag

SEQ ID NO: 37924 - DNA, 238 bp, Glycine max
  Clone ID: 701119084H1
ggcccctcaaaccactttccccacactcttttagtgtgtcgtattttttcctctcttttctccacaattaggtcttggaccgacccttttgtgtaagtgcaatggccatggctaagcttgtatgtgttctgcttctggcattccttggcatttccatgatcacaactcaagttatggcaacagattctgcctatcacttggatggaaggagttatggacctgggagtctaaagacctc

SEQ ID NO: 37925 - DNA, 219 bp, Glycine max
  unsure (1)..(219): unsure at all n locations; Clone ID: 701119085H1
ctttctattcacatctgaatctgtaaaacgaggnnncaccccgacaagctgtgcgaccagatctctgatgcagtgctcgatgcgtgccttgaacaggaccctgacagcaaggttgcctgtgagacatgcaccaagaccaacatggtcatggtctttggagagatcacaaccaaggccaacgtagactatgagaagattgtccgtgacacatgccgcgat

SEQ ID NO: 37926 - DNA, 248 bp, Glycine max
  Clone ID: 701119086H1
ataaacacaaaacccttcccatcctaattaaggtgaaaatgaaggcatcacccattggcttggttcactttggtggttgtgtttcttgtggctgaagttcaagtttcaatggcagtgacatgcagcccagtgcagctgagtgcatgtgtaagtgcaataacctcttcaacccctccatcaaacctatgctgctccaagatcaaagaacagaaaccatgcctctgccaatacctcaagaaccccaatct

SEQ ID NO: 37927 - DNA, 247 bp, Glycine max
  unsure (1)..(247): unsure at all n locations; Clone ID: 701119087H1
gggccattcccttcaagtccaagtgattcaatcaaacggttcatgcttaatcaagttgggnnnnnnnnnnnnnnnnnnnntcaagccaatgtttgtgggttttggtttcatttcattaagatgatctgtttatctcttttcttctttttaaaatttaaagtctttgtattttgtatgtaaagatgtaaaattatgattattaggtggtgcatgtgtcgcgtcatgggccaatgttatcctctgcttt

SEQ ID NO: 37928 - DNA, 181 bp, Glycine max
  Clone ID: 701119090H1
gtggctccacaactaccgcttcaagaggactattctcgtcggaaagaggggcggatccagtacgcccgtgcccacgtggaagctcatgagctcgagatctccgctccgggcattggcctcccccaaatacccgccgtcgcagaccggtaacaagccccgccaagctccggtctccgccagg

SEQ ID NO: 37929 - DNA, 246 bp, Glycine max
  Clone ID: 701119091H1
gttctgagatatcaagcagaaaaaagaagcaaagaaagatgataatggtggtggttatgacagagatattaggagagtacacagcagtgctcacaagggtcacagaacgcctccttccgcgccacggcataagttttggtggtctaaggaggaaccttcgttttgcttcttccacaacctattcttcagattcaacttcttttctggtttacttttaaatttttaatcatatttgtcagaatagaa

SEQ ID NO: 37930 - DNA, 246 bp, Glycine max
  unsure (1)..(246): unsure at all n locations; Clone ID: 701119092H1
cttgccgtttcatctcgccctanactcgtcgccgttgaagtcatgtcttacaaccaagcctttgttggcttggcaccgtatggaccctattggcgcgagttacgtaaaattgtcacgttcgagtttctctccaatcgaagaatcgaacaacggaaccacattcgtgtctccgaagttcgaacttcgattaaagagctattcgacatttggtcgaatggaaataagaacgagtctaggtatactctg

SEQ ID NO: 37931 - DNA, 245 bp, Glycine max
  Clone ID: 701119093H1
gaaggagaagtttgacaacctatgcaaggtgatcaaggatgttttgggtgacaaggttgagaaggttgtagtctctgaccgtgttgttgattcaccatgctgtctggtgactggagaatacggttggactgcaaacatggaaaggatcatgaaagctcaagccctaagggacaacagcatggcaggatacatgtcaagcaagaagacaatggagatcaaccctgagaacccaattatggaggagc

SEQ ID NO: 37932 - DNA, 226 bp, Glycine max
  unsure (1)..(226): unsure at all n locations; Clone ID: 701119094H1
ggctagctccaacaatgggttctagaagattatcattcatttnagtacttgtgcttgtaacantttcatccatgatcattgactcaagggttgcagaggcacgtaccctgccaaaatcagccttattgccttccaaagttgatatacctactgctgttcctcttccagccttagtgccattgccaccactggcaaatttgcctgttactctccctccagtgcctga

SEQ ID NO: 37933 - DNA, 249 bp, Glycine max
  Clone ID: 701119096H1
aatcaccaccttcaaagtcttctctctcgagaatcatcgaataaaactagggtttccgatcgtcgtcgaggagaatgccgaagaacaagggaaagggaggaaagaaccggaagcgcgggaagaacgaggcggacgacgagaagcgggagcttgtgttcaaggaggacggccaggagtacgcgcaggtgctccggatgctggggaacggccgctgcgaggcgatgtgcatcgacggcaccaagcgcctct

SEQ ID NO: 37934 - DNA, 275 bp, Glycine max
  unsure (1)..(275): unsure at all n locations; Clone ID: 701119101H1
gttaaaatggcccaaganactttcctattcacatctgaatcagtgaacgaggggcaccctgacaagctctgtgaccagatctccgatgctgtgctcgatgcatgcttggagcaggaccctgacagcaaggttgcctgtgaaacctgcaccaagaccaacatggtgatggttttcggagagatcacaaccaaggccaacgtggactatgagaagattgtgcgtgacacatgcaggaacattggttttgtctctgatgatgttggtcttgatgctga

SEQ ID NO: 37935 - DNA, 274 bp, Glycine max
  Clone ID: 701119103H1
cagaagagaacttcaaaattgatgcaatcctcaaaagttcgtcaagtaatcaatggagaaaatgccaccaactccagcaatacagcagaagccaagagcccaagactacaaaagaagtttggtttggagaggcgttctccgccaactagcccatcatcagatttgagcagtaacagaagacaacagaataggcaatcggtggaattgtcttccccaagtacaacacccagacaaaaattcagtgagattagcaatcaaaggagggattttaagc

SEQ ID NO: 37936 - DNA, 269 bp, Glycine max
  unsure (1)..(269): unsure at all n locations; Clone ID: 701119104H1
cttacatgttccaagatcaggaggtgcgcgcantgagctggaacgcactttcattgccattaagcctgatggagtgcagagagggctgatttctgagattatatctcgttttgagcggaaagggtacangcttgtggggattaaagtagtgattccttcaaaggaatttgcccaaaagcactatcacgacctgaaaganagacccttcttcgatgggctgtgtgatttccttagctctggccctgttattgcaatggtgtgggaaggac

SEQ ID NO: 37937 - DNA, 242 bp, Glycine max
  unsure (1)..(242): unsure at all n locations; Clone ID: 701119106H1
gacgaaatgttgcaaggttcttaagtccactantcagcagtaccttnggtatctcttgttggttttggnctttatgagttaggctttcctggggttgctaaatgtgtagagattggactgccagagcttatattactagtatttatttcacagtttgtacctcatgtgctacatgcaggaaaacatgtcttcgatcggttcgctgttttatttacaattgcaattgtatggttatatgctta

SEQ ID NO: 37938 - DNA, 273 bp, Glycine max
  unsure (1)..(273): unsure at all n locations; Clone ID: 701119107H1
ttttgtngcaaagcaaaaaactacgagganccttcctccatacgaatccaangancaagagangagacacagacacaaaggcacacggaacaagcaacncacacaaaaanggtctgtgcctcctcttatatgtaatagatagtttctgaaacacnaganaaanataaaatnaacataaaaggaccacatggattatgaaaacaacagttggatttgggagggggtaaactactacccgcgtgtgtttggtngtctaatggttacagcagcctt

SEQ ID NO: 37939 - DNA, 262 bp, Glycine max
  unsure (1)..(262): unsure at all n locations; Clone ID: 701119108H1
tccctttcttagattctccctcttttctctctgccctccgccatgactgagagataaggagatgtcttcctctgtcaccaatggcgatgattccctcactggtcacatcatatctacaactattggaggcaaaaatggggaacccaaacagactattagttacatggcagaacgggttgtaggaactggatcatttggaattgttttccaggcaaaatgcttggnaactggggaagcagtggctattaaaaaggttttacag

SEQ ID NO: 37940 - DNA, 270 bp, Glycine max
  unsure (1)..(270): unsure at all n locations; Clone ID: 701119110H1
ctcatttcccacaacacaaccttcnctcacgccactccaaaagaacacaatgagcgctgcttcttttctattctcctgctctatgcatgtgggtgtgtctcatcccaaagtggctgcaaaatcctctccatgcggtttgctcaatcagccatggaatcatttaaagtcaaaaacaccatttgggcattcaggagttttggaaaaatctaaactttcacaaaaaggtgatgagattctgtggagggcaggggcccttcaagtggaaagtgc

SEQ ID NO: 37941 - DNA, 269 bp, Glycine max
  Clone ID: 701119111H1
gaaagatggaggggaaggagcaggatgtgtcgttgggagcgaacaagttccccgagagacagccaattgggacggcggcgcagagccaagacgacggcaaggactaccaggagccggcgccggcgccgctggttgacccgacggagtttacgtcatggtcgttttacagagcagggatagcagagtttgtggccacttttctgtttctctacatcactgtcttaaccgttatgggagtcgccggggctaagtctaagtgtagtaccgtt

SEQ ID NO: 37942 - DNA, 267 bp, Glycine max
  unsure (1)..(267): unsure at all n locations; Clone ID: 701119112H1
aaaatgcacatttcaccaaaganaaaatggtggtgaatgataatgatgatattgcttctgcccctggagtggtggcaaggctaatggggctggattcatttccaaaccccaaatgggtagtgcaatgtggcaccccagattcggttcctagaagcaggtcagtgaactttgtggattacttgcttgagtttgatgcaagccatgttagtagccatnggagggtgaagacctcggcatcgttcagagaggttcctagtttggttcaga

SEQ ID NO: 37943 - DNA, 270 bp, Glycine max
  unsure (1)..(270): unsure at all n locations; Clone ID: 701119113H1
ataaactgaactgaattgagtctcaacaacccagttgagtaactaagatcggcgcaagtgaggnacaagcaagtgcttctaaaggactatgttaccggttttcccaaagaatccgacatganatattgtcgaaagtaccataacattgaagcttccacaaggttccaatgatgtcttgctcaaaaatttgtatttgtcttgtgatccgtatatgaggaatctcatgaacaggcccgaaggccctcccaatagtcgtgcttacactcctgg

SEQ ID NO: 37944 - DNA, 216 bp, Glycine max
  unsure (1)..(216): unsure at all n locations; Clone ID: 701119114H1
cngggcgcnggtgctggaaggnagcaatcnacgaaagctgctaaggatcctaacaagccaaagagngctccaagcgttncttcgtttcattacggatttcgttgtttgtacgatctgttncgntcgttcgtttatttntttggnctgcgttgacgttgtntgntttaggccggtcaagacattagaggacactacacaaccgcctgtggatgttcg

SEQ ID NO: 37945 - DNA, 273 bp, Glycine max
  unsure (1)..(273): unsure at all n locations; Clone ID: 701119115H1
cttctctctccacccaaaccctaactcccgaccctgttcccctctccgtatccgtcatgaaaggaggaaagtccaagaccgaatctaagagagccgatcccaaacttgctgtgaataagaagggagccgccaccaaggctaggaaacccgccggcaaggggaaggcagcgaaagaccctaacangccaaagaggcctccaagtgctttcttcgttttcatggaggttttcaggagggtnttcaacaaagacttcctgaaaacaaagcnntttt

SEQ ID NO: 37946 - DNA, 274 bp, Glycine max
  unsure (1)..(274): unsure at all n locations; Clone ID: 701119116H1
gttttgttgcaaagcaaaaaactacgaggagctttcctccatacgantccaangaggagagangagacacagacacaaagganacggaaaaagcaacacacacaaaaaaggtctgtgcctcctcttatatgtaatagatagtttctgaaacacaagacaaanataaaataaaaataaaaggaccacatggattatgaaaacaacagttggatttgggagggggtaaactactacccgcgtgtgtttggtngtctaatggttacagcagccttgc

SEQ ID NO: 37947 - DNA, 271 bp, Glycine max
  Clone ID: 701119118H1
cctaccaaaattttctgttccaaaatcttttgagtatgcacagtccttaattccaactgctcttctcataactggtgtggctatattggaatcagtgggaattgcgaaggcattagcagcaaagaatgggtacgagttggattcaaatcaagagttgttcggtcttggtgtttccaatgttcttggttcatttttttcagcataccccacaacaggatccttttcaaggtcagctgtaaatcatgaaagtggtgcaaaatctggtgtatct

SEQ ID NO: 37948 - DNA, 264 bp, Glycine max
  unsure (1)..(264): unsure at all n locations; Clone ID: 701119121H1
ctcnanccgctgttacntatatgtcacctganagganttcgnnatganagctattcgnatcanggctgatatttggagccttggtcttgcactttttgagtgtgggacaggagaattcccgtatactgcaaatgaaggtcctgtcaatcttatgttgcagatcctggatgatccatcaccatcaccattgannaacnagttttcacctganttctgctctattgtngatgcttgctnanaaaaggntcgngntactaggccaat

SEQ ID NO: 37949 - DNA, 269 bp, Glycine max
  unsure (1)..(269): unsure at all n locations; Clone ID: 701119122H1
ctgtgtgcgagtcaacgggcgagtaaacccgtatagcgcaaggnagctgattggtgggatccccctgtgggttgcaccgccgaccgnccctnatcttctgtgaagggttcgagtgagagcatacctgtcnggacccgaaagatggtgaactatgcctgcancggggcgaaccanaggaaactctngtggaggcccgcancgatactgacgtgcaaatcgttcgtctgacttgggtataggggcgaaagactaatcgaaccgtctagtag

SEQ ID NO: 37950 - DNA, 271 bp, Glycine max
  unsure (1)..(271): unsure at all n locations; Clone ID: 701119124H1
aattatcaaaggtgaaacgaagaagccctaactacgcacgcattcgtgaganaactcaatattcgtcgctcatggcactctcttctcgtctcttttccaaatccaaattgatctatggcagtcaaatacttctacaaaaggagcatgctattccagttcgtcactttgctaaagagtctgcccctcctgcccttaagggagacgagntgctgaagaacatttttgtggaggtgaagaacaanttngagaccgccatnggattttaaagggg

SEQ ID NO: 37951 - DNA, 271 bp, Glycine max
  unsure (1)..(271): unsure at all n locations; Clone ID: 701119125H1
gttcccatctttcagantcagaacttcagctttctccaaatgtggcatcagggcttccattgccgttgagcaacaaacttcccagactaaggttgctctcctcagaattggtaccagaggaaggtaccctacccttaanantaacacctttagcttcttatgagcatttcttttaaagaacaagtctgtgaaaatattgagtcctgaatctcttcaaaactttgccctcattttcaaatttngttttcaatgctagttttatgncngaant

SEQ ID NO: 37952 - DNA, 265 bp, Glycine max
  Clone ID: 701119126H1
agagttcctcagggagtgattctgaagcagacaacgggcactcgtagtagtcagtgggtttttggaactaatggtcatgtagatgaagaaaatgcttttgcttcattggcttcctttgagggcgtggctcgaatacatggacgaggtatgctcatttcatttgatgtattatttttttacgctgtgaatattgtcgcagatggatatgataggctaaatttgtgatacttttcattcggggattgtgaccgttgtttgttggttc

SEQ ID NO: 37953 - DNA, 271 bp, Glycine max
  unsure (1)..(271): unsure at all n locations; Clone ID: 701119129H1
gtttttgangtatagagatggcagagacattcctatttacctcagagtcagtgaacgagggacaccctganaagctctgtgaccaaatctctgatgctgtcctcgacgcttgcctcgnacaggacccagacagcaaggttgcntgcgaaacatgcaccaaaaccaacttggtgcatggtcttcggagaaatcacgaccaaggccaatgttgactacgagaagatagtgcgtgacacctgcaggaacatcggctttgtctcaaacgatgtgg

SEQ ID NO: 37954 - DNA, 269 bp, Glycine max
  unsure (1)..(269): unsure at all n locations; Clone ID: 701119130H1
tatccattgcacctttctcttnctccgatggctaatcccncactcttgttcttcagtctcctcctattatccgccaccgtagccgccgccgaacggatcnacgatgaagacgaccttctgatccgtcaagtggtgccggatgcggaggaccaccacctgctcaacgcggagcaccacttctccgccttcaagacaaagttcggcaagacctacgccacgcaggaggagcacgaccaccgcttccgtatcttcaagaacaatnnctccgg

SEQ ID NO: 37955 - DNA, 276 bp, Glycine max
  unsure (1)..(276): unsure at all n locations; Clone ID: 701119131H1
gaattctcagatttgcgggncgagatgatgcagcagccaggacccgggcatggcacctcccaccatgggccagcagccgcagcngacagtaccagcagcagcctccgcngcagcagcaacaaccctacgtcatncatgccgccgcagcatcaggcncccgcagcctatgtgggccccatccgcccagcctccgctgccgcagcagcctgctagcgcngacgaggtccgaaccctctggatcggggattgcagtactggntggacgagaactatctc

SEQ ID NO: 37956 - DNA, 271 bp, Glycine max
  unsure (1)..(271): unsure at all n locations; Clone ID: 701119132H1
gcagctttacttgtgggcgaagacccaacacagtcatatgcgctcatatgcggtaactgctatatgcataatggtctggctcggaaggaggatttcccagttatcacatactactgcccgcattgtcatgccctgaacaaaccgaagcaatcagatgagcatatctctggtcttattctccaaacacgggggggactcnaaacacagatgatggtgtgacggatgcagttaagaatgctagggttctgcagccgagagtgtaatcacaagc

SEQ ID NO: 37957 - DNA, 270 bp, Glycine max
  Clone ID: 701119133H1
aagctcagttggatgagcagatgaattcttatcgtaaattggtttctaataatgtttctacaaaagctgacgctgcagagagtgatctagagtcttggattgagcgtttactaaaacaactccaacaagtaaacacacagatgcaagcttgggtatcatctggtggttcagaaatggtttctcatactttgactagacaccaagaaattcttcaagatctcacccaggagttttatcgtcttcgctcaagtcttaaagctaagcaagaac

SEQ ID NO: 37958 - DNA, 266 bp, Glycine max
  unsure (1)..(266): unsure at all n locations; Clone ID: 701119135H1
tgaaaattggctaccgttttgcctttatgctgacaacaaatttgctgatagactcaacccttgctattggtctgattattactctgccaaccccaggacaccccataatactaaacttgctccttgggtagccagattttataagcaaacagaaactgtggatgtatagtattcactattgactttattgagctngttttatttgttgataagacattcctatattgtgttgtcttttttacattaaatcaataaataacatgagt

SEQ ID NO: 37959 - DNA, 257 bp, Glycine max
  Clone ID: 701119138H1
agcgagagagcgagggagcatggaggagggaaaattgagagagctgaagcaatcatagagatatgcaagtccaatccctcacttctccacaatccatctctttcattcttcaagacttatcttctcagcctcggtgctcgcatccctccccaacccaaaacggaaccaggtgattttgatgacaagtcagatcctcctttatccgcacaaaatgacttgtagaatctgatatagagttggataatgctgatgttgtt

SEQ ID NO: 37960 - DNA, 225 bp, Glycine max
  unsure (1)..(225): unsure at all n locations; Clone ID: 701119140H1
ctnggnagtagtnaatatcagacncngcacatnnncancnancccancnnngcacatngccacatgataccaaccgnggacatngccaaattanttgccgaaaagggnntgaaggccactataatcaccacaccccacaacgaaccntncatctacaacgccattggaaaatccaaaacnaatggcaacaaaatccacanccaaacaaangcaaaancaactgca

SEQ ID NO: 37961 - DNA, 270 bp, Glycine max
  Clone ID: 701119141H1
ctactactccactcactgacagatctcaattgcatcgctgtccatggctcaccatcgttagcatcaaggcccgccagatcttcgacagtcgtggcaatccaactgtcgaggtggatttgacttgctccgatggtacttttgccagagctgctgttccaagtggtgcatccactgggatttatgaggcccttgaattgagagatggaggatctgactaccttggaaagggtgtatcaaaggctgttgccaatgtgaacaccgtcattggcc

SEQ ID NO: 37962 - DNA, 254 bp, Glycine max
  unsure (1)..(254): unsure at all n locations; Clone ID: 701119142H1
cngctcnagcngctcganctacgagccganatacggctcgancggacttcgangctaacgacnaagattantccccaaaccaagggncnaccggagcaacaaannnagtnacacacacgcacacacgcatcatcgtatcacatttgttttattntttttanagagcgagtgttgtaacanatggtgaagtcgaagagcgtgganaaacctgcggaggnacaacaacgaggtggtgtttcagcgtacagaggngt

SEQ ID NO: 37963 - DNA, 264 bp, Glycine max
  unsure (1)..(264): unsure at all n locations; Clone ID: 701119143H1
gcaagtgaaaaccaaanataaaatggtctcacagacagttgaactcttaaagantgagattcctctggngcaggaatacagtggttttagctgaagatgctgtaaatggnctcgtncttgtggacatcataaatggcttttgcacagttggtgctggaaatctggcnccaagagaatccaatacgcagatttcgggaatgatcagtnatcagcaaggctggctagagtgtnctgtganangatttnccggttatggctnncctg

SEQ ID NO: 37964 - DNA, 268 bp, Glycine max
  unsure (1)..(268): unsure at all n locations; Clone ID: 701119146H1
gttaaatctgtgttctccacgccgattcccaagnnanttggtgaacacaattcgcaatcagacacatttnnagagagnaacttgctgttagaaaaatggaggataataggccttggaacaacaacaacgttagttttccgaatgtgcggagcaatggccttcatgtttcaagttgttggccagtgaattcgggtttgaggcagcctgctcctagggtggtggcggactggctaatggtgtgagacaggatttgaggctgagcaatagc

SEQ ID NO: 37965 - DNA, 268 bp, Glycine max
  unsure (1)..(268): unsure at all n locations; Clone ID: 701119148H1
cgtcatctggcctgccggaggaaccacgccactgcccccaccgcgatgttcatttcgaatttgttaggttttgagatttgaatagagttctgaacgatgactaggggcattttcacaaggaaatttcgtatgaggtacatacaaatttttgcacatgacagtgactgcaacagaggcttgtggatnggtnatnatatncacctgnatctgctcggattntctacctcgcgtacatgggagtttttctttcggtggtgcanatggaaga

SEQ ID NO: 37966 - DNA, 267 bp, Glycine max
  unsure (1)..(267): unsure at all n locations; Clone ID: 701119149H1
gcgcttcaaggcgtctcgtagggctaatccgcctcacgagggtcaccaacggcacgtgcctttggggggccgaggccccctactgctggtcggcaaacggacggcgggcgcacgcgtcgcttctagcncggattctgacttagaggcgttcagtcataatccaacncacggtagcttcgcgccactggcttttcaaccaagcgcgatgaccaattgtgcgaatcaacggttcctctcgtataggttgaattactattgcgacatgtc

SEQ ID NO: 37967 - DNA, 268 bp, Glycine max
  unsure (1)..(268): unsure at all n locations; Clone ID: 701119151H1
cgatgcttgtnttccgtcttggatggacttaagtatgcagattcacacgaatgggtcaagcacganggctcagtacgccaccattggtatcactgaccatgcccaggaccatcttggagaggttgtgtatgtggagctgccagaatcaggtggcacagttacccagaagtctggcttcggagccgttgaaagtgttaaagcaacaagtgacataaactctnnngtctcgggggagattgttgaggttaacaaaaagctcacagagaca

SEQ ID NO: 37968 - DNA, 267 bp, Glycine max
  unsure (1)..(267): unsure at all n locations; Clone ID: 701119152H1
cggaaacccactgctaaataatccaacagcatctttcaatgtgaaaagaaggtgggatgatgatgtggtgtttaagaaccaagcccgtggtgaaaccaaaacagctaagcgattcattaatgacaccatcaggaatgatttccatagaaaattcctgcaaaaatacatgaagtaagtccttgtgccagaagtctgagttgtttggactttggactcaacagaacttattaatttgcagtttgtatctaaatgtatgattcantgttg

SEQ ID NO: 37969 - DNA, 257 bp, Glycine max
  unsure (1)..(257): unsure at all n locations; Clone ID: 701119153H1
ctctgctaccctcttctctctctctcggttgtgagtgcagatttcttgcgcnnnttatcatgggggatagtcagtattcgttttctctcaccacatttagcccttctggaaagcttgttcagattgagcatgctttgacggctgtcgggtctggacaaacgtctttgggaattaaagctgcaaatggagttgtcattgctaccgagaagaaattgccatctatattggttgatgaagcatcagtccagaaanttcag

SEQ ID NO: 37970 - DNA, 267 bp, Glycine max
  unsure (1)..(267): unsure at all n locations; Clone ID: 701119154H1
ctagggaataaaccaaganattatatacgtatacccattanttatgatgaaatcttcttcacatctttctgcaatattcctattgttctttctncttactgccctatccccttcggatggagtttcattctcttcattcctaaagcaattaaaacagaagctggagaagagtcccaccctaaaagatttcctgaaacccaccactataggggatatttattatacgttgaatttcacagaaatcttctcttccgaagagagaagcgc

SEQ ID NO: 37971 - DNA, 265 bp, Glycine max
  unsure (1)..(265): unsure at all n locations; Clone ID: 701119155H1
gcaagtacaagtggctancatacaaagaagtatatgaccaggtgatgaaagttgggaattctatccgcagctgtggttatggagaaggtgtaaaatgtggtatttacggtgctaattctgcagaatggattatgagcatgcaggcttgcaatgctcatggactttattgtgttcctttatatgataccttgggtgctggggctatagagtttattatatgccatgcagaggtctcaattgcatttgcagaagaaaagaagatacc

SEQ ID NO: 37972 - DNA, 268 bp, Glycine max
  unsure (1)..(268): unsure at all n locations; Clone ID: 701119156H1
ctatctatccatttgttttgaaaatggcttccaagagtattgcatgcattgttcttctctccctcaacctccttttctttaccatggttagccccaacaccattgccccttcccctgcgatnnnnnnnnnnnnnnnnnnnngtgagtgtcccgagttgggtctttgcctcgatattttgggtttgggtcaagggtctccatcaaaagattgctgccccatcctccgtggacttattgaggttggtgccattgtatgcatttgcgacaa

SEQ ID NO: 37973 - DNA, 265 bp, Glycine max
  unsure (1)..(265): unsure at all n locations; Clone ID: 701119157H1
ctttgaaatccgccatgaattgtagctacgttaaagactacgagtttgttgcaatttttgatgcagattttcagcctaccccggattttctcaagaaaaccgttcctcattttaaggataatgatgatttggggcttgttcaagcgagatggtcatttgtaaccagggatgagaacctgctaangnggttgcagaacnttaccctgtctttncattttggggnggaccagcaagtcagngggnttcncaaaaatttggggaanng

SEQ ID NO: 37974 - DNA, 268 bp, Glycine max
  unsure (1)..(268): unsure at all n locations; Clone ID: 701119158H1
ccggcattgttggtgcttaaatgcacaggtgagggttccgatcccgntattctggcgaacgcttccgacgtcaaccacttcggttacttccancgttccagcgtcaaagngttcaacgtcttcgtcggncgcaccgtcgcccgtngcacccctcangggccangccaanncgtacaacacggagaantccaagnncacacatnccaacagaaannggcttttncgcgtttggggttttaggtnatccttacccgantggggggngttt

SEQ ID NO: 37975 - DNA, 265 bp, Glycine max
  unsure (1)..(265): unsure at all n locations; Clone ID: 701119160H1
gctactcaagcaaacaaacccattccgcatagacagtgaagnaggctttctctagcagctagagatggcagacggaagagggtccactctcgtgcatctcttggtcgtggttctgtgcttggtcgcatttgggtttgccgttgccgccgagagaagaagaagcgtcggaaccatgcaaaanatagaaggaacaaatganacattttgtagctacagttctgatgttncgactggttatggagtgggtgctttcctgtttcttctt

SEQ ID NO: 37976 - DNA, 267 bp, Glycine max
  unsure (1)..(267): unsure at all n locations; Clone ID: 701119161H1
cgcaactgcacgcactgtaactctctcaccgtttcttccgctttgatggaacagtacgaganggttgagaagataggcgagggaacatacggcgtcgtttacaagggtcgcgaccgctccaccaacgagaccatccncttgaagaagattcgcttggagcaggaggatgagggggttcccagcaccgccattcgcgagatttctctcttgaaaganatgcagcacaggaacattgttaggttgcaggatgtagtacatgatgagang

SEQ ID NO: 37977 - DNA, 268 bp, Glycine max
  unsure (1)..(268): unsure at all n locations; Clone ID: 701119162H1
gcttgccgcagtatcggacactaaatccgcagctatactaccntgatggaggccatggaactcagntttcnactccaagttcntcagaactttactncactttggagtcatcttctgtagctctttacaactccccttcnactgtnagtntctcacccaatggtagccccatatcgcagcaagactctcagtcatatccacctgaccagtatcattcccctgagaatacctatggctctcctatgagtggctcctgcataactgatga

SEQ ID NO: 37978 - DNA, 153 bp, Glycine max
  unsure (1)..(153): unsure at all n locations; Clone ID: 701119163H1
ccananacaatattcttaaccaacaaagacagctacacaagcatcccataacaaccaaaaaccttattttacgccaccaagcttattcaaaatttgaaggacgactganatgaataaaatgagagaagaaatgattctacaggctaagatcca

SEQ ID NO: 37979 - DNA, 268 bp, Glycine max
  unsure (1)..(268): unsure at all n locations; Clone ID: 701119165H1
cttagggttgtttcctgaagaccaaaganttcctcttcctgttctacattgatatatgggcagtgttatatggatatgatgatgacggcatagaagcaacggacatgataactaaattagactccatgaatctagttaatgtcttggttgcaaggnaaaattcaagtgactcagacaattactactacaataaccactttgtcatcctccatgatcttctaagagagcttgcaatctatcaaaacaaccgggaaccaattgaaaagag

SEQ ID NO: 37980 - DNA, 266 bp, Glycine max
  Clone ID: 701119166H1
gctagtccagcgccactgttaggggatcgactgtgtgaaaatggatttgagtgtgttaaaattctccctgccaccaatgatgcacatggaggagtcattgtggacttaaaggagcctttgcactgccgaagtttttgctactttgcttagatcttcacttttacattggaagcaacagggaaaagatggtgtttggatcaagtttcctattgagcttgttaatcttgttgaaactgcagttaaggagggtttttggtaccaccatg

SEQ ID NO: 37981 - DNA, 73 bp, Glycine max
  unsure (1)..(73): unsure at all n locations; Clone ID: 701119168H1
ctcnanccgctacgagcngctcgangccgattcggctcgaganagggtctcgtgtagtgtagtnccannttta

SEQ ID NO: 37982 - DNA, 261 bp, Glycine max
  unsure (1)..(261): unsure at all n locations; Clone ID: 701119169H1
gttttcactgcacgggggctcctatttgtgtcccaacagacccagagttcatggaaatgggttggtttacaatcccttcgctatctgagattgtggagaatctcgcaatttctagttaccagattttccaaatttgagatttttacgcacttagagtaantgcaaganctttaaganagattgggtattgggtatcttgttttccaactcaataagatagtggggaggaaagagatatggctgtaggtngcaaaacnagaa

SEQ ID NO: 37983 - DNA, 202 bp, Glycine max
  unsure (1)..(202): unsure at all n locations; Clone ID: 701119170H1
canttgccttcaatgatgaatnatagtatttggnaannnaaaaaatcagacaaccntaatctaccancaaccaaatganattgccatactcaagccacttagcacaagatgacacttcccccnatatctttttttttcctnnaataantaannggtatatnggtacagggtntttncggcaaantantngnggtttnacnga

SEQ ID NO: 37984 - DNA, 264 bp, Glycine max
  unsure (1)..(264): unsure at all n locations; Clone ID: 701119171H1
ctcaggtccaacaccctacaatcatggacaaggttgctggccagctccatctccgttctggtgtttctggtantaggagtatnaaaggagcctactgccaccccacaatgtaccaaagaccctcttttgggaattactcgaatgctgcattgcagtatcctgtgatgccctcatgcaaagctactatggatttgtctgctgctgcaacaactgcctcccccgtctttgttgctgctccagcagagaaaggccattttcttatag

SEQ ID NO: 37985 - DNA, 264 bp, Glycine max
  unsure (1)..(264): unsure at all n locations; Clone ID: 701119172H1
gctagctatctaggatggtgagtgttgaagagatccgtcaggcacaacgtgcagaaggccctgccactgtcatggctattggcaccgccactcctcccaactgcgtcgatcagagtacctatcctgactattacttccgcatcaccaacagcgngcacatgactgagctcaaagaaaagttcaagcgcatgtgtgataagtcaatgancaagangcgatacatgtncttaaatgaagagatcctgaaggagantccgagtgttt

SEQ ID NO: 37986 - DNA, 223 bp, Glycine max
  unsure (1)..(223): unsure at all n locations; Clone ID: 701119173H1
gtcatnttcctcctccttgcaatattattcactctcacaccccacaaggccaacggtgccacgtgtcnccctgaggaagaagcgggcctgttnggcttcanatccggtatccgatccgacccgtccggcctgctcagtaactggatatcgggtacggactgctgcacatggaccggagtagaatgccactataacagcacccgggtccaaagatattcttaac

SEQ ID NO: 37987 - DNA, 263 bp, Glycine max
  unsure (1)..(263): unsure at all n locations; Clone ID: 701119174H1
ctcctacctcgtccttcttacccaacctcaacctgtttctccgagantcacatccaacgcttctgtcatggaggaagttaacgttgtggaaactaaggatggaactgtctcagtagctgctgcgtttgctggtcatcaggaagccgtgcaggatagagaccacaaatttttaagaaaagctgttgaagaagcatataanggggtagattgcaaagatggaggcccttttggtgctgtnatagttcataatgatgaaatagttg

SEQ ID NO: 37988 - DNA, 260 bp, Glycine max
  unsure (1)..(260): unsure at all n locations; Clone ID: 701119175H1
gacaattaccatctccaaggnttctaccactgtcattgctgatgctgcgacaaaggatgagttgcaagccagggttgctcagttaaagaaggagctgtctcagacagactcagtatatgatactgagaaactggctgagaggatagctaaactgtctggtggagttgcagtcatcaaggttggtgctgctacagagactgagcttgaggatcggaagctccgaatagaggatgccaagaatgcaacttttgctgccattg

SEQ ID NO: 37989 - DNA, 263 bp, Glycine max
  unsure (1)..(263): unsure at all n locations; Clone ID: 701119176H1
gttatggagttgatgagaggcgttagaaatcagttaactgaacttatatctggtctagctgttcaagacatggccccaatgagcttgggtttatctcacagcttatccagatacaaantgaagtttagtgcagagaaggtggataccatgattgtccaggctattggtttactagatgatcttgataaagagttgaatacctatgccatgagggttcgagaatngtatggttggcattttcccgagctnactaaaataataca

SEQ ID NO: 37990 - DNA, 264 bp, Glycine max
  unsure (1)..(264): unsure at all n locations; Clone ID: 701119177H1
cacacctaaccctccaaattcctatctctcttcgaatnnaaatnnncagctctgtcgcgcataggcctggcgggcctggccgtgntgggccaaaacctagccctgaacatcgcggaaaaggggtttcctatctccgtctacaaccgcacagcctcgaaagtgnacgagaccgtagatcgggcccgcaacgagggctccctccctctcacgggccaatacacccctcgcgacttcgttctctccctccagcgccctagatccgtc

SEQ ID NO: 37991 - DNA, 233 bp, Glycine max
  unsure (1)..(233): unsure at all n locations; Clone ID: 701119179H1
gatggtgggaccagtgagacctcagtttgtgctctttggttcttccattgttcagctcagttactctctccaaggttggggcgctattcttgctcatttgtatgctcgcaaggcggatataattctgcgaggntactctggttggaattcaaggcgtgctgtgcaagttctggatnaaattttccctaanaacgccactgagcaaccagatttggtaattgtgtacttnggtg

SEQ ID NO: 37992 - DNA, 259 bp, Glycine max
  unsure (1)..(259): unsure at all n locations; Clone ID: 701119180H1
gnaaaccatttcactgatcccctacccctccccctccctccaacaatgttccgacacccttaaaaaatcaaaacctcaaaaaccaaaaaacatcaaaccatgttttccttccctcacaatgtcttcctanccatccttgtctttccaatcattatttgttgctgctccgcctccttgttgggtcggagcaatgcgacgacaatctacgnggtcctgagcgagcacgggctgcccatgggcctgttcccccagggcgtgg

SEQ ID NO: 37993 - DNA, 249 bp, Glycine max
  unsure (1)..(249): unsure at all n locations; Clone ID: 701119181H1
ggcaatccactcagagagctagacgaattcaacaatgcctcgctatgangataaatacggcaatacccgcctctatgtgggacacttgtcttcgaggactcgttcccgtgatctggagcgtgcctttagcagatatggaagagttcgaggtgtggatatgaagaatgatttcgcttttgttgattttagtgatcctcgagatgctgatgatgcaagatataacctggatggtcgggatgttgatggaag

SEQ ID NO: 37994 - DNA, 167 bp, Glycine max
  unsure (1)..(167): unsure at all n locations; Clone ID: 701119182H1
ctcnanccatacactcccaactcacaaagccatgtctccaggtcctgttgtcgacgcttcccctgaggttgaagcagagcaacaacttccctccgtcgatgacgcaacccagttgaagaaatcccaaccgcaggaggatgatgctcccgttgtcgaggacgtgaggg

SEQ ID NO: 37995 - DNA, 265 bp, Glycine max
  unsure (1)..(265): unsure at all n locations; Clone ID: 701119183H1
gtttncctgaccctgaccctgaaccctgacccgacgaacgacggagaaagaagagagattaaccggggaagggtttagggtttgggagtggaagantcgaatcgaatcgaattgagaatgtctctgacgagcgtgacaatgtcggaggaagtgtggttaanctncgtgactcatgcattgtccactgagaccgaagagattatgggccttcttcttggggacatcaagcattcgaaaaacgggagtgtgactgcattgatatggg

SEQ ID NO: 37996 - DNA, 265 bp, Glycine max
  unsure (1)..(265): unsure at all n locations; Clone ID: 701119184H1
aagaacaaaaccaacatcaacaaccacaagaagaagaagcttgcaaattagaagaatcttcagttganagggaagaacacacaagaacaaagagaggnagaaacgcgaatgaagggagaattagagttgccaccagggttcagatttcaccccactgatgaagaattggtgaatcactacttgtgtaggaagtgcgcgggtcaaccaatcgnggttcccatcntnaanggggccgntttgnncaantttgnnccatggcagctnc

SEQ ID NO: 37997 - DNA, 99 bp, Glycine max
  unsure (1)..(99): unsure at all n locations; Clone ID: 701119186H1
taccccntcacccanctncccaatccgacatcgacgagatcgaggaacctcatcaatgccagcgttcaccaatcagtcccnnacnncnannnacaaaca

SEQ ID NO: 37998 - DNA, 247 bp, Glycine max
  unsure (1)..(247): unsure at all n locations; Clone ID: 701119187H1
cacggacacgggatgtgattatgggatctgtagtcctgtgactccgaccacccncnctccctctatatatctatatccaaatctcccttcaattctcaatctctgaaaccacaattcacaaccgaaacagtttccatctctctcacaaaatgacaacaatatcaaattgctcccttctcttcctcttcctcttcctctccaccctccacatagcttccaccctctcaacccccaccaattcatcaag

SEQ ID NO: 37999 - DNA, 264 bp, Glycine max
  unsure (1)..(264): unsure at all n locations; Clone ID: 701119188H1
gcagtgcctggcgaagnagagaaagacaacaatcatgagcttcattctgtttccgattctcnntgcatttacctttctgtcctcgcccgttcnctctgcttcggatctgatcctcgccaaggttgaccgncgcattgatctgacttcacagattgtgcgcatcactacttcactaaaggtgcagaatacgggatctgatgttgtgtctgagattttgctgtccttncctnagaaccnggcaagtaacttggcatntngaaggct

SEQ ID NO: 38000 - DNA, 265 bp, Glycine max
  unsure (1)..(265): unsure at all n locations; Clone ID: 701119189H1
gnaaaccctaagcaaacccgnggcgancagactgaancagcaggccgctcttcaccccagattccgcgnactcatacgttagaatggctcagtctaatcatcaaatcacgactaagntgcaaaggcgcatttacngccacgccacagacgttgagattcgcccctnnaacgaggnnaaggccgttcaagccgccgtngaccttatcggagaactcttggtcttctcggttgcngganttctcttgatntttagaggtanaaagaa

SEQ ID NO: 38001 - DNA, 262 bp, Glycine max
  unsure (1)..(262): unsure at all n locations; Clone ID: 701119191H1
aattagtgactccctnatgtgttaatccaantgatggtnacagtngatganatttttggtggaaggtccatngcaaaaggaaagangngtctactcngaaaatccnctttcatgcttggatgatctaatctatcaacagggtgaatcttatggattacagactccccncatgggatnccccatgccttatctgatccacagttgaacaagngtggagcaaggtctggttacntctcgcaagatggnnttggtcaatctttct

SEQ ID NO: 38002 - DNA, 244 bp, Glycine max
  unsure (1)..(244): unsure at all n locations; Clone ID: 701119192H1
aaaagggcatcccctatttgaacacctatgacggccgtaccatccgctatccanncccactaatcaaggccaatgacaccatcaagctggaccttgaaagcaacaagatcactgatttcattaaattcgatgtggggaatgttgttatggtcacaggcggaaggaacagaggccgggtcggtgtcatcaagaacagngaaaagcacaagggaagctttnagaccatccatgtccaggatgcact

SEQ ID NO: 38003 - DNA, 262 bp, Glycine max
  Clone ID: 701119193H1
tcggatctagagtcttcagtttctcctcgttgttcttcgctttcctgttttcaatttcgattctttcgttaatttaataagatgtttgggagggcaccgaagaagagcgataatacgaggtactacgaaatcctcggcgtctccaagaacgcttcgcaggatgatctgaagacggcttacaagaaagccgccattaagaatcaccccgacaagggcggtgatcccgagaagtttaaagagctggcgcaagttatgaggttct

SEQ ID NO: 38004 - DNA, 185 bp, Glycine max
  unsure (1)..(185): unsure at all n locations; Clone ID: 701119194H1
canccaaagaagagaacgttcaagaagttcagcttcaggggggtggatctggacgcgcttctggacatgtccactgacgaactcgtgaagatgttcagtgctcgcgcacgcagaaggttccagagaggtctcaccagaaagcccatggccttgattaaaaagctccgcaaagcgaaaagggaagc

SEQ ID NO: 38005 - DNA, 262 bp, Glycine max
  unsure (1)..(262): unsure at all n locations; Clone ID: 701119195H1
ggttagggtcgtggatccggggaggggttattccgaagaaggtggtgatgggtttgccgctatatgggangacgtggcagttacttgaaccgaatgtgcatggaatcggggctccagctagtggaccgggtcctgggtcgaatggtgcaatggccttatttcaagtgttggagtttaacaacgaaacgggtgcaaatgttgtgtgtgacaaggaaacggcgtcggtttattcgtatagtgggagttactgggtcnggtacga

SEQ ID NO: 38006 - DNA, 261 bp, Glycine max
  unsure (1)..(261): unsure at all n locations; Clone ID: 701119196H1
gnntcagggnctcgggtantgagattgatgaagaacaccgtanggcgctgtggttgnccgaggatntggctgttcccnatatttccagggacattggatactaccnggangctatggtgcgtcaagttctggggtccgcanttttaaagagtggtggaatactttantgangggcaatgtatcagggaantttcctattgggagttttaatnctnctttagcttcactggttcaaaacatgttgatgaancanctacaaat

SEQ ID NO: 38007 - DNA, 278 bp, Glycine max
  unsure (1)..(278): unsure at all n locations; Clone ID: 701119201H1
ctttgccttctccttcactaggctccccaagcaacaacaacaactactctttnttctctttcatcgacgatcttcactaagcnctttcactcaaacacacacctcatgattatatcactttctcttgttctcttaccgtagaacattgcatttactcctatctctcactctggatcttcaacttcttcctgattttgctgatttgggggattgagttgganggggaaacatggctgcttcttctgcatctctttctggtgcttctgcttcggatcttc

SEQ ID NO: 38008 - DNA, 274 bp, Glycine max
  unsure (1)..(274): unsure at all n locations; Clone ID: 701119202H1
gcagtcgcaaccctaatcagaagaagcgcanttcaagcgagtgacagccaccagccatgggtcgtatgcacagccgcggtaagggtatatcctcttctgctttgccctacaaaaggacacctcctagctggctcaagatctcttcgcaagatgtcgaagaaaatatctgcaagtttgcgaagaaaggtttgaccccgtctcagattggtgtcattctcagagattctcacggtattgctcaggtcaatagcgtcatggcagcaaaatccttcgc

SEQ ID NO: 38009 - DNA, 276 bp, Glycine max
  unsure (1)..(276): unsure at all n locations; Clone ID: 701119203H1
ctggaggcncttcatgaaagttttgaaagacgacattgagatagttgagtacttgccggtccaatatgcatcattgnncacctcttgtgaaggcccctgtttcctggtcaaaggctagttactacagaggtgagattcttccattgttgaagcgacataaggttgtacagtttactcacacagattcccggctcgccaacaatggccttgcttcctctatgcagaagctgaggtgccgtgccaattaccatgctctcaagtacacagnnnnnnnng

SEQ ID NO: 38010 - DNA, 275 bp, Glycine max
  unsure (1)..(275): unsure at all n locations; Clone ID: 701119204H1
ttcaaacattctcctgtaattagttccgccaaaaagccagcgcgtacgaaaagctgcaccttctgtctgaggtttcagctctgcctctgcaaccatgtcaatccagtaatttctgagggttttctggcactgaacaacatctaggtcgcttgttncagnnacccctagatattgctgagtactacgcgaatggtggtaaagactatgaggctaagggnagatctagacattatatagtgttgcaggagtggctggaagaggataagaaagaaaaa

SEQ ID NO: 38011 - DNA, 275 bp, Glycine max
  unsure (1)..(275): unsure at all n locations; Clone ID: 701119205H1
tcttgaagaagaacaaagaaagattgaagagactgctaagctcctttgctgggagaagaagtctgaganttctgaaattgccatttggcnaaaaactgtagacactgaatcatgtcgtagcagacaagaagattctagtgtaaaattctgtgaatcaacagatgctaatgatgtctggtataaganaatggaggtctgcattactccaagtcctaaagtttatggtgattataagccatttccagagaggctatatgctatccctcctagaattg

SEQ ID NO: 38012 - DNA, 278 bp, Glycine max
  unsure (1)..(278): unsure at all n locations; Clone ID: 701119206H1
cggaatcttggcnctcctagatccnaattntactttngaggncncatcaganaggagtganttgtgtngattatgttacaggtgntcgacaaaccatatctantcactggttctgatgancacactgctaagggangggattatcagaccaaaagtcgtgtccagacccnagaaggtcacacacacaatgtatctgctgtatgcnttcatcctgaacttcctataatcattactggtnctgaggatggcacagtacgcatatggcactccacaactta

SEQ ID NO: 38013 - DNA, 273 bp, Glycine max
  unsure (1)..(273): unsure at all n locations; Clone ID: 701119207H1
tggtgaccatggaaggtatcgaggaggtggatctggtcatgatgattatgganatcgtggtgaccgtggaaggtctccaaggcactcancaccatatcgaggtggtagagattattcaccgaggcactcacccccaccttatggtggaagatctaggagggacaggtccaggtcacttccttattctccatatggtagcccagataggaggtatgctcgtggatctaggtgatgtcttttaagtttgaagatggtaatgaaaaaattatctat

SEQ ID NO: 38014 - DNA, 274 bp, Glycine max
  Clone ID: 701119208H1
gcaaaacccattttactccctcttccacaaaagaacaatatctctattttccaaactacacacatcatttagaaccatgtctttctctaccaaattgcctttggtcctcttattttcatcccttttcatccatgcatctttggctgagatggtgtgtgaggacctgccaaaggaagtgtgtgctttctcagtagcttcatcagggaagaggtgtttgttggagactgagaaggcagccgacggtggcgtcgagtaccaatgccggacatcggaa

SEQ ID NO: 38015 - DNA, 274 bp, Glycine max
  Clone ID: 701119209H1
gttaccggaaggttgcattgctagtatactctctcgcactacgccggcggacgtgtgtaggttttccgtcgtatcaaagattttccgttcggccgctgaatcggacgctgtgtggaaacgttttctcccttccgattaccattccatcatttcccagtctccttcgcctctcaactatccttccaagaaggagctctatctcgctctctcggatcgccctatcatcatcgatcagggtaaaaaggtaggtagcgtgttgtgtgtttcgcatccc

SEQ ID NO: 38016 - DNA, 272 bp, Glycine max
  unsure (1)..(272): unsure at all n locations; Clone ID: 701119210H1
acgaccaggttcaagaagaacaggaagaagagaggtcacgtcagcgccggacacggccgtatcggaaagcaccgcaagcatcccggaggtcgcgntaacgccggtggcatgcatcaccaccgtatcctcttcgacaagtaccatcctggtttcttcgggaaggtaggcatgcgctacttccacaaacttcgcaacaaattctacaatccgatcatcaacatcgacangctgtggtccctcctcccccaggaggccaaagacaaggccaccgc

SEQ ID NO: 38017 - DNA, 253 bp, Glycine max
  unsure (1)..(253): unsure at all n locations; Clone ID: 701119211H1
gagttctgtctggntgcatagcattggttggtagttgtctcaaaaatctcttcttgccctttggccataatcaaaagccaagacactgttcatacagctgcncaattatcaagccaaccttgctcggntccactgcagaatntcaggctattcttatctaggtagactccttataagtgcgcagaagttcaagtgtagagaatgagtcagcctaagattaaacgccgagttggtaaatacnnatgtgnggagg

SEQ ID NO: 38018 - DNA, 270 bp, Glycine max
  Clone ID: 701119212H1
cggaacaatcggaaaggaaaggataaaggtagagaggagagacctattgtggctgtatatgacaagcagcaagacaatactgctgatgagaaaaaagattctaacatggaggaagttcaagctcttgatgaaaagctttatgccctggaaattgtttctgatgtgtctgattctgtggatggggttggtgaagtgcttcagcctgattctgaagacagagatgtgagtcctgtaaattgggatactgatgcatcagaagttcatcctccc

SEQ ID NO: 38019 - DNA, 269 bp, Glycine max
  unsure (1)..(269): unsure at all n locations; Clone ID: 701119216H1
gaagatgggcgtaccctggctgattataatatccagaaggaatccactctgcatttggtgttgaggcttcgtggtggtatgcaaatatttgtgaagactctgacagggaagaccgtaaccttggaggtggaaagctctgataccattgataatgtgaaagcaaagattcaggacaaggagggtattccaccagatcagcagaggcttatttttgctgggaagcaattggaagatggtcgtaccttggcggattacaatatncagaaggg

SEQ ID NO: 38020 - DNA, 277 bp, Glycine max
  unsure (1)..(277): unsure at all n locations; Clone ID: 701119217H1
ctcgcgcttccttcttccacnnancacannanancaaaaanccgatgactttncttctgagaaagagatcgtcatccanccgcgtgccttcgagctcccttcatgaaccggggcaggcttnggcgttcntggaactnctnctnccgccactcgncttgaccctaccccccccaattagggttanctatntcttccattttnntccntagaaaaaaaancccgtntcnnctnctctcgctgccgacgagtcttctnnctctncgaatctntcnggctg

SEQ ID NO: 38021 - DNA, 276 bp, Glycine max
  unsure (1)..(276): unsure at all n locations; Clone ID: 701119218H1
caaaaattaaaaaggggcttgtaatttcagagacaaatattcattcaaacaaaacaacttatgatagtaaaagggtagaattcgaaaaanaaaaattgcagatattacaaagaagaagaaatgctcgattaactcgtaaatcacattcttttttaaaatttttcatgaaaaggatatacagagatatatttctatatatcagttgtattccgaggatcaatatacaactttttcttgaattaacaaaaaaatttttaaataaatccatttacgata

SEQ ID NO: 38022 - DNA, 267 bp, Glycine max
  unsure (1)..(267): unsure at all n locations; Clone ID: 701119219H1
aaaaaaagcttcttccattttccgaaatcgaagcattagggttagggtttnctccgatctgagaaattcgcggcccaatggcggaggaaccggagagcaccgtcaccaacggcgccgccgacgaatcgctgctcgataagatcaccgagaagcttcacggccacgattcttcgtcctcttcatcttccgactccgactccgactccgaaaaancnnttacttcctccgttaaggataaggtttttcgcctcttcggaagggagagac

SEQ ID NO: 38023 - DNA, 274 bp, Glycine max
  unsure (1)..(274): unsure at all n locations; Clone ID: 701119220H1
ttgattgcagttgagagagttgtaatgagtaacgaatacgattatctgttcaagcttctcctaatcggcgactcttccgttggaaaatcctgcttgcttctcagantcgctgatgactcctacgtcgacagctacataagtaccattggagttgatttcaaaatcagaaccgtggagctggaaggaaaaaccgtcaagctgcagatttgggatacagctggacaggagcgattcaggactataacaagcagttactatagaggagcacatggaa

SEQ ID NO: 38024 - DNA, 257 bp, Glycine max
  unsure (1)..(257): unsure at all n locations; Clone ID: 701119221H1
gttcagctgtgcctcaaatcaaactggctcaagtgctntacacactgncatactcattctcctcaacttggcatgctatcaggaatcattttncaggtgttctatggaattgttggaagctggactgcttatctaatcagtgtcctctacatagagtaccgcaccagaaaggaaaaggaaaacgtcagcttcaaaaaccatgtcattcagtggttcncaagtccttgatgggttacttggtccatattggaaagccc

SEQ ID NO: 38025 - DNA, 274 bp, Glycine max
  unsure (1)..(274): unsure at all n locations; Clone ID: 701119223H1
cgcaaatggagtctgttgtngatcatgctgtactgggagcatggcttgaacagatgcagcttgatcatcttgtggctcagcaaaactgaaatgagtttctgctgaccctgaggtagttaacaacagaaatgtttcagtaaataataatcatatatattcgtttatgaattttgttgatggaagaaggttacagtaactaagaaaggaagcagtactaagaaaaagaaccacatcactgagcaaaattcattttgaggtttagtgttgcaaaagt

SEQ ID NO: 38026 - DNA, 273 bp, Glycine max
  unsure (1)..(273): unsure at all n locations; Clone ID: 701119224H1
aagcgaanacagcacagcactgcactcttcgcnacacaacaaaaaaagacaacccagagagcgcgtcttaataaacgctcttctctganaacccccatntcttttcttctttcttcttctctttcgcttcttcgatcttcgatcttcgtcgctgaaaatgagagagtgcatttcaatccacatcggccaggccgggattcaggttggaaacgcctgctgggagctttactgcctcgaacacggcattcagcctgatgggcagatgccaagtga

SEQ ID NO: 38027 - DNA, 270 bp, Glycine max
  unsure (1)..(270): unsure at all n locations; Clone ID: 701119225H1
actttgagggattgattagaaanagggacatggagattctcatcttccaatgatcccttcaaccccacaaattntcccgtttggatttggtgtcacagcttgattctccattgctgcgattccaacatcaacagctaanccaaacannnnnnnnnnnnnnnnnnnnnnnnnnnnnnnnnnncctctctttctctcttgcatctgcattgtcccttttcactgcataaggaggctaattggaggaaccccagaaggaaatttcggattttt

SEQ ID NO: 38028 - DNA, 271 bp, Glycine max
  unsure (1)..(271): unsure at all n locations; Clone ID: 701119228H1
tttgangcgactgatacgacagcgttcaagtctcagagactccttagncgagaaggtccatagtccagttccctcgcagcatttggcncgcctcacccccaaacgcttcttcgatcttcatcagcttggaaataaggaagcaattgagaaggagcgcgctcgacttgcagatgaaatgactaggggatacttcgctgatatggctgagttcaaaaagcatgctggtaagattgctgtagctaataaattgataataccagcaatggtagcc

SEQ ID NO: 38029 - DNA, 267 bp, Glycine max
  unsure (1)..(267): unsure at all n locations; Clone ID: 701119229H1
tttgtttactttccattgattgagcgaaagtttgttttttctgcgatcattttccattgggtggaagaaagtctcaacctttagtcgaaagagcaaggatctgagtgagtgagcgatcatgtgtggtggtgcgattatctccgacttcattccagcgggtcccgccggcggggcgcaggcgtgaccgccgacatcctgtggccgaatttgaggaagcggttctcgaagtcnctgntnnnngatgatttcgaggcagggttcagagaa

SEQ ID NO: 38030 - DNA, 271 bp, Glycine max
  unsure (1)..(271): unsure at all n locations; Clone ID: 701119231H1
cttttgaaggttagaagtgctacaatacaaacaatggcagctactcaggaagatgtgaagcttttgggtattgtgggaagcccanttgtgtgcagggtccagattgcccttaagttgaagggagttgaatacaaatttttggaagaaaatttgggcaacaagagtgatttgcttctcaaatacaaccctgttcacaagaaggttccagtgtttgttcacaatgagaagcccatagcagagtctcttgtgattgttgaatacattgatgagg

SEQ ID NO: 38031 - DNA, 269 bp, Glycine max
  Clone ID: 701119232H1
gttgggctgaaatagcacatgagggtgagacaggcaaagtctccagagctaactttcatgatcgacatgggagggctgtgcttattatgaggccagggatgcagaatacaacatcggctgaagataatatcaggcatttagtctatctgttggaaaatgctatcctgaatctttctgaaggtcaagaacaaatgtcatggttgatagacttcacaggattatcacttagtacaaatatatctgttaaaacatctcgtgatattattcac

SEQ ID NO: 38032 - DNA, 275 bp, Glycine max
  Clone ID: 701119233H1
cttttctcttcgctgttcctcttcagatcaaacgcacacagttaccgctctttaaatcaatctcttctcagaaatgggtgtggctcaaaacattcccgatgcggaggagggaaccttggagattggaatggaatacagaactgtgtctggagttgctgggccattggtcattcttgataaagttaagggacctaagtttcaagagattgttaatattcgcttgggagatggaactactcggcgtggacaagtgctagaagttgatggtgaaaagg

SEQ ID NO: 38033 - DNA, 270 bp, Glycine max
  unsure (1)..(270): unsure at all n locations; Clone ID: 701119234H1
tttgctcggaactactcctccactcatcgtttaaaatgtctgacgtggaagagtttcgttgcttcattggtggccttgcatggtcaacgtctgataganagttaaaggatacatttgaaaagtttgncaagctnattgaggcaaaggtggttgttgacaagttctctgggcgttctcgtggttttggatttgtcacatttgatgacaagaaagcaatggacgaggctattgatgctatgaatgggatagatttagacgggcgaactatta

SEQ ID NO: 38034 - DNA, 147 bp, Glycine max
  unsure (1)..(147): unsure at all n locations; Clone ID: 701119236H1
cggtctggtccaagtgctgcaatatgcaaggcaaagaaatggaagggttgtcgtcttcgtcggcgatcgcgcagaaaacatgggaactcgagaacaacatcatcccgatggacactccgggcggcgccgccatctcctcaanacana

SEQ ID NO: 38035 - DNA, 274 bp, Glycine max
  unsure (1)..(274): unsure at all n locations; Clone ID: 701119237H1
ctcagaaatcaanagcctacttcaagagatatcaagtcaagttcaagagaagaagagagggaaaaaccgattacngtgccaggattcggttgattaatcangacaagaacaaatataacacnccgaaataccgatttgttgttcgctttagcaacaaggacattgttgcacaaataatatctgctagcattgctggcgatattgttcttnctgcagcatatgcacatgagctgccacaatatggtcttgaagtagggcttacaaattatgcngc

SEQ ID NO: 38036 - DNA, 263 bp, Glycine max
  unsure (1)..(263): unsure at all n locations; Clone ID: 701119239H1
tgcagcatcaaaatgagtggtagcaacgatggtnncggcagctggagctctaggtttttgaaggtggctagtgcagctgccgctacanccgccgttgccggcggtttatatgccattctttcatcctcaacctctgctagctctgagatggaagtgccgtttggcagcgcacggcgtgagagcanagaacgtgacgatggtggctccgggtctcatcctcgcgagggtgccaccacggtcagtcgttggaaganacctgagat

SEQ ID NO: 38037 - DNA, 272 bp, Glycine max
  unsure (1)..(272): unsure at all n locations; Clone ID: 701119241H1
ctgaacaatnaggnagatatgatgcaggatataaaggaaatttgtcaagatgttgaccgagaagcactccctctaatgaggagggcagagtttagttattggttgcgaganagtgtttcctatcatgttcaaaatcaaataagctctctaaatgattctgattatctgcagcatatatttgtactcctgactgggcggcaactagatgaagcagtgcagctggctgtgtccaaaggagatgtgaggttggcttgtttgttaagtcaggctgg

SEQ ID NO: 38038 - DNA, 268 bp, Glycine max
  unsure (1)..(268): unsure at all n locations; Clone ID: 701119244H1
ccatcatacatccagcgcctccgttgtaaggtcaactttgaancactgatcttngtttcacatatcaangaattnggaaaggccattgttcatcgtcttcgccaccctacagaagggantgacnatccgctggaggaaactgataagtttggaaaacagcaaactgggaagtttgttgtgttgcatctgcgttttgacaaagatatggcagctcattcagcctgtgattttggtgggggtaaagctgagaaacttgctctagcgaagt

SEQ ID NO: 38039 - DNA, 267 bp, Glycine max
  unsure (1)..(267): unsure at all n locations; Clone ID: 701119247H1
ctgatggtcccaccgtatttgacaagatcatcaataaggaaattcctgctactgtggtctatgaggatcataaggtccttgcctttagggacatagatccacaagctcctacccatattctaatcattcctaaagttagggatgggttaactggtctgtccaaggctgaggagaggcactgtgagattctaggtcgacttttgtgcactgntaagctggttgcaaagcaagaaggtcttgatgatggcttcaggattgtaattaatg

SEQ ID NO: 38040 - DNA, 273 bp, Glycine max
  unsure (1)..(273): unsure at all n locations; Clone ID: 701119249H1
gcggttcgctacgacgcctacgggggaggtnctgccggcctcaagcacgttgaagttgccgttcccagtccaaaggcaaatgaggttttaatcaaactggaagcagttagcattaaccctattgattggaagattcagaagggtcttctccgtcctttatttctccccagaacctttccccacataccttgcactgatgtggctggagaaatagttgagatcggaactcaagtcaaagatttcaaagttggcgaccaagtccttgctaaactc

SEQ ID NO: 38041 - DNA, 271 bp, Glycine max
  unsure (1)..(271): unsure at all n locations; Clone ID: 701119250H1
tgcgtgctagcatagttgttgctgctcagtatggcgggaatcttttcgttggttactgggaggccgggactaagtggattcggatcttcctcaactgctgaacaagttactgaaggaattgatgccagcaatctcactgcaatcatcacaggaggagcgagtggcatagggttggagacagcacgtgttctggcaattcgaaaggnccatgtaataattgctgccaggancatggagtctgcaaaggaagctaaacaactcatacttcagg

SEQ ID NO: 38042 - DNA, 271 bp, Glycine max
  unsure (1)..(271): unsure at all n locations; Clone ID: 701119251H1
gagaggangacaaaagagcantanaaaaagtgtatggngcaaaggttccaagaaatggtancaancaaaggcttggagtctgctcaatctgaaatcaangantnggactnggaaagcacttnctttntgcgccatcttcctgtctctaacatctcagagatccctgatcttgatgangattacaggaaggtaatgaaggantttgccgtngaactggagannctggcggactagttcttgagttgctgtgtgagaatcttgggctagagaa

SEQ ID NO: 38043 - DNA, 273 bp, Glycine max
  unsure (1)..(273): unsure at all n locations; Clone ID: 701119252H1
ctntcattatgtctattgtgtgtgttggggttagtcattgtgggtgatcatgttgcgtatgctcaagactcaccaacagactatgttaatgcacacaacgctgcaagatcacaggttggtgttccaaatatagtttgggataacgcagtcgctgcttttgcacagnactatgctaaccaacgcaaaggtgactgcaaactcgtccactctggtggtgatggaaaatacggggagaatcttgcaggaagcaccggtaacctaagtgggnnagat

SEQ ID NO: 38044 - DNA, 275 bp, Glycine max
  unsure (1)..(275): unsure at all n locations; Clone ID: 701119253H1
cccctgcanaagtgagcgaganagaaggaattaactttctgggagttaaaggtaaatgcttgtggccaattagaatagggtgcttaaatcccaaggaccaaataccaaagtggtcaatgaagacaatanaatgtataacagatgaggattattactttgtatgcgtggagatctttgaaggattaaaaagaattggaaagccgtctatccttctttccatacgcgaaggagcttgcaagcagtacatataatcatggggatgtngcaggcttgct

SEQ ID NO: 38045 - DNA, 271 bp, Glycine max
  Clone ID: 701119255H1
ctgccagtagtcatatgcttgtctcaaagattaagccatgcatgtgtaagtatgaactaattcagactgtgaaactgcgaatggctcattaaatcagttatagtttgtttgatggtatctactactcggataaccgtagtaattctagagctaatacgtgcaacaaaccccgacttctggaagggatgcatttattagataaaaggtcaacacaggctctgcctgttgctttgatgattcatgataactcgtcggatcgcacggcctttgt

SEQ ID NO: 38046 - DNA, 270 bp, Glycine max
  Clone ID: 701119256H1
ttccatggctgggaaagatagaatcctgattttgggatccactggagccattggaagacacatagtctggggaagtgtgaaggcagggaatcccacatttgtgttggtgaggaacacccctggctctaacaacagggtcaatctggtcaaagctgctaatcctgaaaccaaggaagagctcattgaaagcttcaaaaattctggagttaagctgattcagggagatatgaatgatcatgaaagtttggtgaatgcaatcaagcaagttga

SEQ ID NO: 38047 - DNA, 259 bp, Glycine max
  unsure (1)..(259): unsure at all n locations; Clone ID: 701119257H1
tgaggnaatctccttccagagctncgatgatcnctgcaggttgcttggtaatctcctcnatgacattctccagcgngaagttggcaccaacttgcttgacaagatcgaaaggacncgagtccttgctcagagtggttgtaatatgaggcaggcgggtattgtaaacatggcagagatgcttgagaagcagttggcttcggagttatcaaagatgacactagaagnagctttcacccttgctcgtgccttcagcnagtat

SEQ ID NO: 38048 - DNA, 272 bp, Glycine max
  unsure (1)..(272): unsure at all n locations; Clone ID: 701119258H1
cccaacctttgctttgagaaccatctcctnctttctctgtgaaacctgttaccaccacaagatcatcactcaccacctcatccaccacaaccctcttaccatttacttcaacaaactcatctctccccagaactctcaaactcaacacctcttccccacatcctcacctttcactaccccacaagtctttcacttgtagaagcnaggctgagccatcttctgattcagccaaagtccaaganctgagtgtgtatgagatcaatgagagagat

SEQ ID NO: 38049 - DNA, 270 bp, Glycine max
  unsure (1)..(270): unsure at all n locations; Clone ID: 701119259H1
caacattttaagaagccctgggctcatgagcatgancctgttanaaatcttctagatgctgttaataaaattaagccaacagtgttgattggaacatcgggacaaggnagaacttttactaaagaagtgattgaggcaatggcttctattaacaagagacctattattctttctctttccaaccctacgtcacagtcagaatgcactgctgaagaagcttacaagtggagccagggacgtgccatttttgcaagtgggagtccatttccc

SEQ ID NO: 38050 - DNA, 274 bp, Glycine max
  unsure (1)..(274): unsure at all n locations; Clone ID: 701119261H1
cnactngncnntngcctcatnnncntccntnacaatgggcattaaanctaaggcaaatnccacnatgtccttctcttcaacccatctntctctacntatcaccctgtctagctnctctgtngccttctgttaatgccattgtcaaggaagcaatgaggctgcacccagtggcaccaatgttggttccaagactagccagagaggactgcaatcttggagggtatgacatccccaaaggcgacacaagtgcttgtgaatgtgtggactattggga

SEQ ID NO: 38051 - DNA, 268 bp, Glycine max
  unsure (1)..(268): unsure at all n locations; Clone ID: 701119262H1
ccacctccttgttcttcacatcatcctcatcatcttcttcaatcagtngactcttcgttcctccctctattctttcggatggagcccatggacatcgttgggaaggccaaggaagacgcttctcttcctaaagcgacaatgacgaaaattattaaagagatgttgcccccggacgtgcgtgtcgccagagatgcacaggatttattgatcgagtgttgtgtcgagtttataaaccttgtctcgtcagagtccaatgaagtctgtaaca

SEQ ID NO: 38052 - DNA, 268 bp, Glycine max
  unsure (1)..(268): unsure at all n locations; Clone ID: 701119263H1
aggcactgtggcagaagtcttaggagtgtaaaacagagacgcaaaatgaagacgattctatcgtccgagaccatgaatattcccgacggcgtgagcatcaaggttcacgctaaggttatcgangttgagggccctcgtggaaaactcgtgcgagacttccaccatctgaacttggacttccaacttattaccgacgatggcggtaaaaggaagctcaagattgattcttggtttggttctcgtaaaacctccgccgccatccgcaccg

SEQ ID NO: 38053 - DNA, 270 bp, Glycine max
  unsure (1)..(270): unsure at all n locations; Clone ID: 701119264H1
gntggcctcatcgagacctacaagttgaacggccaatncagatggatatcctctcagatgaaccgtgtgaggaacggagagctctaccgtgtcatctgtgacacaaggggtgcctttgtgcagcctgcagtttatgaggcctttgggttgactgtggttgaggccatgacttgtncggttgccaacgtttgccacatgcaatggtggtcctnctgagnatcattgtgcatggaaaatctggttaccacattgatccttaccatggtgacc

SEQ ID NO: 38054 - DNA, 271 bp, Glycine max
  unsure (1)..(271): unsure at all n locations; Clone ID: 701119266H1
caggtcttagaatgctgggatagaganaggaaggaaatggttgccgtaaaaattgtccgtggtattaagaagtatcgagaagcagccatgataganattgaggtgttgcaacagcttggtaaacacgataaaggaggcaatcgtcatgcatgacttgcgcatgattcatactgacctgaagcctgaaaacatactactagtttcaccagagtatgtcaaagttcctgactacaagagttcntctagatcaccaagttcctatttcaagaga

SEQ ID NO: 38055 - DNA, 263 bp, Glycine max
  unsure (1)..(263): unsure at all n locations; Clone ID: 701119267H1
aatggcgcaaccttcctcctcctcgaagcctgttgtccctctcctgaaggaacgagctggacatcgtgatcccgacaatccgaaacctcgacttcctcgagatgtggcggcccttcttcgaaccttaccacctcatcatcgtgcaggacggagaccccaacaggaccatcaatgtccccgaaggcttcgattatgaactctacaaccgcaacgacatcaatcgcatcctcggacccaaagcctcctgcatctcgtttnnggat

SEQ ID NO: 38056 - DNA, 273 bp, Glycine max
  unsure (1)..(273): unsure at all n locations; Clone ID: 701119268H1
caaaaactcaccaaccatttcaacccttacatccaaataagcttccctgagttctcaggggaacgactgaagaagagtgaagcatacacagccatccaaacctacctgagtgcaaactcatcccagagagccaaaaggctcaaagctgaagncgncaatganagccaaacccctcttgtcctcagcatggatgacaacgaagagataactgacgagtttcatggcatcaaactatggtggagtgcaaacaaagtaagcaacaatccacaaaga

SEQ ID NO: 38057 - DNA, 271 bp, Glycine max
  Clone ID: 701119269H1
cacaccctctcgcctccaacacacacctctttcttttctttttcttttaagggtttagcttaaaccaggattttgggcaccgatttctctatgggagaagcaccagcattgcttgttgatgacgtgcaggatggggctctgaatggccttgaattgaaaaacgtaacttgcaaaacaactgctacagttggcgataaggcgtatgtcattggtggagctgatgatggaactttgtccattgaagttcaaatttttgaccgtagtcttggag

SEQ ID NO: 38058 - DNA, 272 bp, Glycine max
  unsure (1)..(272): unsure at all n locations; Clone ID: 701119270H1
gggctcaccagatttgaaggctgcaaaagaggtngctgactatctaggcantgtnccaccatgagtttaccttcactgttcaggatggaatagatgccattgaagatgttatctaccatattgaaacatatgatgtgactacaattagagcaagcacacctatgtttctcatgtctcggaagattaaatcacttggtgtcaaatgggttatctcaggagaaggatctgatgagatctttggagggtatttgtacttccacaaggcacccaac

SEQ ID NO: 38059 - DNA, 261 bp, Glycine max
  unsure (1)..(261): unsure at all n locations; Clone ID: 701119271H1
ataccctttctatcctacttgctacttcccacttccattcttttcttaaccanctaggatggtgagtgttgaagagattcgtaaggcgcaacgtgcagaaggccctgccactgtcatggctattggcaccgccactcctcccaactgcgtggatcagagtacctatcctgactattatttccgcatcaccaacagcgagcacatgaccgagctcaaagaaaaattcaagcgcatgtgtgataagtcgatgattaagaagcg

SEQ ID NO: 38060 - DNA, 230 bp, Glycine max
  unsure (1)..(230): unsure at all n locations; Clone ID: 701119272H1
tttcttcagactcactcctntctttccattccctcactttcacacccacaagtcacacccacttggttccttcctccaccccattatttttttctctntttttgatccanacatgtcctccacacacccaaaaaacccagcaacgacaacaacatccactactctcatcgtgctctcaattatactcctttgttttccgacaaccgcaaaaaccgacaaccctccatgcc

SEQ ID NO: 38061 - DNA, 267 bp, Glycine max
  Clone ID: 701119273H1
gattcagtccgtgtacaactatgaaaccactgaacttgttcacgagaacaataatggcacttatcagtgggttgtcaagcccaaaactgtcaaatatgaatttaaaaccaacacccatgtccctaaactaggggtaatgcttgtggggtgggggggaaacaatggctcaaccctcactggtggtgttattgctaaccgagagggtatttcatgggcaacaaaggacaagattcaacaagccaattactttgggtcgctgacccaggc

SEQ ID NO: 38062 - DNA, 266 bp, Glycine max
  unsure (1)..(266): unsure at all n locations; Clone ID: 701119274H1
cttgaaccaggtggatgaagcttctgacgtgggcaattgcttgagcagtaatcataaaattgatgtgccaattatgaaggtgaagtcatcntttggtgggcccacgcaggctcgtatcttctctgattcgatcctcccttcgtagatctcaatcgaagccctcaatttccgcatcgacatcnanancaacgtcatccaaccgtgcctcaccgcacggatactnctgaaccgcgtcgccgagtacgccaccgccgcggctgctgcta

SEQ ID NO: 38063 - DNA, 268 bp, Glycine max
  unsure (1)..(268): unsure at all n locations; Clone ID: 701119275H1
ctcacactcactgcagatctnaatccatggctaccattgtnatcatcaaggcccgccagatctttggacantcgtggcaatccaaccgtcgaggtggatttgacatgctccgatggtacttttgctagagctgctgttccaagtggtgcatccactgggatttatgaggcccttgaattganagatggaggatctgactaccttggaaagggtgtatcaaaggctgttgacaatgtgaacaccattattgcccctgctttggttggca

SEQ ID NO: 38064 - DNA, 267 bp, Glycine max
  unsure (1)..(267): unsure at all n locations; Clone ID: 701119276H1
ggggtacncagctngtggtgtccctgggggacagttgatgactacnactgangtggagaattttccaggattcccagatggcatangtgnacctgntgctgatggataggatgcgacggcaagctgaacgttggggtgcagaattgtatcaggaagatgttgaagttattgatgtgaaaagtagtccttnnactgtccaaagtagtgaacgtaaggttaanagccatactgtcatttatgctactggagcnactgcnaaacgactna

SEQ ID NO: 38065 - DNA, 267 bp, Glycine max
  unsure (1)..(267): unsure at all n locations; Clone ID: 701119278H1
ctaccatcttctctctctcttncttagtgcctccttgccagangtnaaaatggcccaagaaacttncctatncacatctgantcagtgaacgaggggcaccctgacaagctctgtgaccagatctccgatgctgtgctcgntgcatgcttggagcaggaccctgacagcaaggttgcctgtgaaacctgcaccaagaccaacatggtgatggttttcggagagatcacaaccaaggccaacgtggactatgagaagattgtgcgtga

SEQ ID NO: 38066 - DNA, 265 bp, Glycine max
  unsure (1)..(265): unsure at all n locations; Clone ID: 701119280H1
ccctaactacgcacgcattcgtgaganaactcaatattcgtcgctcatggcactctcttctcgtctcttttccaaatccaaattgatctatggcagtcaaatacttctacaaaaggagcatgctattccagttcgtcactttgctaaagagtctgcccctcctgcccttaagggagacgagatgctgaagaacatttttgtggaggtgaagaacaaatttgagaccgccataggaatattaaagaaggagaaaatcaccattgac

SEQ ID NO: 38067 - DNA, 271 bp, Glycine max
  Clone ID: 701119281H1
ggctcccaagggtttaatctttttggctgtgttatgcttctcagcactgtcactgagtcgttgtcttgcggaggataatggacttgttatgaacttctacaaggaatcatgccctcaggctgaagacatcatcaaagaacaagtcaagcttctctacaagcgccacaagaacactgctttctcctggctcagaaacatcttccatgactgtgctgttcagagttgtgatgcttcactgttgctggactccacaagaaggagcttgtctgag

SEQ ID NO: 38068 - DNA, 270 bp, Glycine max
  Clone ID: 701119282H1
ggatcagcaactatgatatctttctgaccagagattgtttagcatattccaagataaagcctgctgtaaatcagattgaaactcatccatacttccagcgtgattctctagtcaaattttgtcagaagcatgggatttgtgtcactgcacacactccactaggaggtgctgcagcaaatgctgaatggtttggaacagtttcatgtttggatgaccaagttctcaaaggtctggctgaaaaatacaaaaagactgccgcccagatcagcc

SEQ ID NO: 38069 - DNA, 270 bp, Glycine max
  unsure (1)..(270): unsure at all n locations; Clone ID: 701119283H1
cagcgttccttccaaattccaaacccacnataatancctagcttcttgtgaaggctgttagtttgattatagaagttggtatcgataatttgctgtgatgggtggccaaaggagtggttatggtaagcgtccccactctcaatctgaccatgataatgggccaaataaaaggaggaatcatggtgatgatagagagcagtttgtgattgattcggaggataccgtgtatcgttatgtgtgcccgggtcgaaagattggcatgttattggt

SEQ ID NO: 38070 - DNA, 252 bp, Glycine max
  unsure (1)..(252): unsure at all n locations; Clone ID: 701119284H1
ggcgagcttcaacgcatttatggacccggaagaacttaacccataagtcccaaccctttgtanaaaacgtaacttaggatagattctagtgtgcatagtaagatatgtcagtttttaccatttttcctgtgtctttatacggctccgcaacctttagtaatgtgcacctttggatgccttgcttaaaatattcgaagctttataagttagcttatgtacaaatcagtgaaatcccaatcccacacaaatggc

SEQ ID NO: 38071 - DNA, 270 bp, Glycine max
  Clone ID: 701119285H1
ttcgcaccgcaaacaaacagtgagccatggccgtcggaaagaacaagcgcatctccaaagggaaaaagggtggcaagaagaaggcagctgatccctttgccaagaaggattggtatgacattaaggccccttctctttttcaagtgaaaaatgttggcaaaaccctcgtctctcgtacgcagggtaccaagattgcttctgaaggacttaaacatagagtgtttgaggtccccttggctgatcttcaaggggatgaggatcatgcattca

SEQ ID NO: 38072 - DNA, 271 bp, Glycine max
  unsure (1)..(271): unsure at all n locations; Clone ID: 701119286H1
gcgcncgtaaactcactaaaaagccacagtgagtctctctatgagcagaancctgaggaaccccctgctccagtttcatcttcaacaaacaatatgcctgctgggccatctccaacgtctcggtttgagtatgtagaaaatgtccaatcatctgagttgaacactggaggttcacatttgcttagtcatgtgtctccaccaaagtcatcaagcttctttgcagactttggaatggatagtggctttccaaagaaatctgggccaagctcct

SEQ ID NO: 38073 - DNA, 272 bp, Glycine max
  unsure (1)..(272): unsure at all n locations; Clone ID: 701119287H1
ggcgacaacatcaagcacgtcgtcctcgagaatgtgaaagaggcctccctccgcgtccgcttcgcgccaggagaatgtcgccggcnngaagctcccgaagttcgactacaccgccgacgccgacgccacgaaaaacgacctcaccggacttgcacgcggcgggcagcaggtgcagcagtgccgcgccgcgtacataaaggcnntcgaggtgctcgtcgaacttgcgtcccttcaaacatcgtttctgactctggatgaggccatcaagacca

SEQ ID NO: 38074 - DNA, 270 bp, Glycine max
  unsure (1)..(270): unsure at all n locations; Clone ID: 701119288H1
ttaggttctgcacgctctgcttccagcgagtgttctttcttcgtttcaacaccttaatttgcacacgctgcttcttcncgcttgagaaatggcacaagaaacctttctattcacatctgaatctgtaaacgagggtcaccccgacaagctgtgcgaccagatctctgatgcagtgctcgatgcgtgccttgaacaggaccctgacagcaaggttgcctgtgagacatgcaccaagaccaacatggtcatggtctttggagagatcacaac

SEQ ID NO: 38075 - DNA, 265 bp, Glycine max
  unsure (1)..(265): unsure at all n locations; Clone ID: 701119290H1
ttatactctctctctctttgtcgcttggatcactgatctcatctcaattttcagatatgtcgacatctgataagccagaagtggtggaaaggggtagcaaggatgaaaaacacaaggaagatgatcaagaggaggggaagggtggattcattgagaaggngaaggatttcattcatgacattggtgagaagattgaggaagctattgggtttgggaagccaactgctgacgttactgcgattcacattccatcgattaatcttca

SEQ ID NO: 38076 - DNA, 264 bp, Glycine max
  Clone ID: 701119291H1
cagatctcaattgcatcgctgtccatggctaccatcgttagcatcaaggcccgccagatcttcgacagtcgtggcaatccaactgtcgaggtggatttgacttgctccgatggtacttttgccagagctgctgttccaagtggtgcatccactgggatttatgaggcccttgaattgagagatggaggatctgactaccttggacaggtgtatcaaaggctgttgacaatgtgaacaccgtcattggccctgctttgattggca

SEQ ID NO: 38077 - DNA, 268 bp, Glycine max
  unsure (1)..(268): unsure at all n locations; Clone ID: 701119292H1
gggcttctccagcctagnttgttctcagatcttcttcttccatgngaccagtacgagtcaggtggagaagatangcgagggaacatacggcgtcgtttacaaggctcgcgaccgcgccaccaatgagacaatcgctctgaagaagattcgcctcgagcaggaggacgaaggcgttcccagcaccgccattcgcgagatttctcttctcaaagagatgcagcataggaacattgttnaggttgcaggatgtagtgcacatgagangcgt

SEQ ID NO: 38078 - DNA, 271 bp, Glycine max
  unsure (1)..(271): unsure at all n locations; Clone ID: 701119294H1
cagtcctctatattattatcgccaccanccttcccctctaaccacaccacatggatcaattctcacacattattcccacagaaagatcacccagaagagaactccaactccaaggtccacgccctacacctctcagaataaacaaagactctcataaaatcaagaaaccacccttggcaccacaacaaccctcacaccctcatcaacccccaccgcgccaacccataataatctacaccgtttcccccaaggtgattcacaccacaccaag

SEQ ID NO: 38079 - DNA, 266 bp, Glycine max
  Clone ID: 701119296H1
taaaattgacatgattgctctttcttttgttcgaaaaggttctgacctggtggaagtcaggaaagttctgggaaaacatgctaagaacattatgctcatgtctaaggttgaaaaccaagaaggggttgcaaattttgatgaaatccttgcaaattcagatgcatttatggtggcacgtggtgaccttggaatggaaattccaatagagaagatatttctcgcacagaaagtgatgatttacaagtgcaacatccaaggaaaaccag

SEQ ID NO: 38080 - DNA, 289 bp, Glycine max
  unsure (1)..(289): unsure at all n locations; Clone ID: 701119304H1
ctctaaagagtctccgctgaactttttggtttcttgaagatgtcgttactctccgatcttatcaaccttaacctctccgacatcaccgataaggtgatcgccgagtacatatgggttggtggatctggcatggatatgaggagcaaagcaaggactctctcgggactggttaatgacccttccaagcttcccaagnggaactatgatggttccagcactggtcaagctcctggacaagatagtgaagtgatcttatatccacaagcaatttttcgggatccatcaggag

SEQ ID NO: 38081 - DNA, 283 bp, Glycine max
  unsure (1)..(283): unsure at all n locations; Clone ID: 701119305H1
ttattatgagtgatggtaaacaatttctatgcttctgaatctacacctgtttttgagtaactattttcactattatttttcaattgggcctgttaggtaggttttcatgttctggaaatataaccattttntgtatgggttaggttatctcatttagttttactgccacatttttgtatctnccattagggaaagtgcttgaagcatttgtgcttacacacaagcattagctngtgtnaattgacccatgacatagatgattagtggatgacgtatgttgatt

SEQ ID NO: 38082 - DNA, 290 bp, Glycine max
  unsure (1)..(290): unsure at all n locations; Clone ID: 701119306H1
cgagcaggtactgggcagtgtctcttcccgtccacaactcggcatcatctcagctctggaaccaattgcaggaacgaatctccaagcattccttcgacacacctctctacagnattcaacattcccaacctccgcgtcggaaccctagactctctcctctccctcagcgatgacctcgccaagtccaacaatttcgtcgaaggagtcacgcacaagatcaggcgccagattgaggagctcgagagagtttccggcatcgacagcggcgccctcaccgtngatgntgtccc

SEQ ID NO: 38083 - DNA, 285 bp, Glycine max
  unsure (1)..(285): unsure at all n locations; Clone ID: 701119307H1
gcagttgtcggtgccagagatcacgaatgccgtgtttgagcccgcgagcatgatggccaagtgtgatcccaggcatggcaagtacatggantgctgcttgatgtaccgtggtgatgttgttcctaaggacgtgaatgctgctgttgccaccatcaagactaagaggactgttcagtttgttgattggtgtccaactggattcaagtgtggtatcaactaccagcctccttctgttgttcctggtggtgaccttgccaagtgcagcgggctgtatgcatgatcagc

SEQ ID NO: 38084 - DNA, 278 bp, Glycine max
  unsure (1)..(278): unsure at all n locations; Clone ID: 701119308H1
cttttagttagctataatgtgaggcaggacaagtttggtgattanttgctgcttcaatacagttgtcttgtgtgtttgaggtgtgtgagtatatatctaggacttgatagtggttcttttgtaggtatttttntaatttaataatattgttgttttttgtttccaatcaatctggttgaatcagacctatgtgttttctggtagttgagggatagatggaaattgaatagatatattccttacctgtattaagatttaattgggataagataaaagtc

SEQ ID NO: 38085 - DNA, 282 bp, Glycine max
  Clone ID: 701119309H1
gactcattggatcggttgatgttgaggagtctgtgaaaacaggcacaactgttttccagccaggcttgcttgcagaagctcatagaggtgttttatatgttgatgaaattaatcttttggatgagggtatcagtaatttgctccttaccgtattgagtgaaggagtaaatactgttgaaagagaggggatcagtttcaagcacccttgcaggccccttctcatgccacctataacccagaagagggtgctgttcgtgaacatctgctggaccgcatgcgatt

SEQ ID NO: 38086 - DNA, 284 bp, Glycine max
  unsure (1)..(284): unsure at all n locations; Clone ID: 701119310H1
cttttttttgtgaaggcggtggagataagatcaagctacctcctaccttgctttgcagaactgtctgagcagggtacttttgataagagacagggacccttncactttcagttgtcgttagttcatgaagaaagcacttcaagcatccaaactactgataaagtgaaacaggggaggaccacccattctggagttttagaattcactgctgatgaaggttcagtgggtcttcctcctcatgtatggaataatttgttttctgaaggcactccaaaacctcccta

SEQ ID NO: 38087 - DNA, 101 bp, Glycine max
  unsure (1)..(101): unsure at all n locations; Clone ID: 701119311H1
agtcgcagaaatgtcttccttcgatgcttcgccgacgacttgaacgtcaaattctctttcantcggcagccacaaanntgacgaggacacttctctggcaa

SEQ ID NO: 38088 - DNA, 283 bp, Glycine max
  unsure (1)..(283): unsure at all n locations; Clone ID: 701119312H1
aacaccatgttttctncgtctccaccgtttccttcgtcttctacgccttcagttacgatgcttcatgaacaagctgctcctgcagttgcctcatggtcttctagttctgcagctcagcattttcctacttcggttcttttacaagagcagcgtgatgagtataagccctttctgcacgtgcataataaggagacaacactaaatacaaggcagatggatatgacctcagttcatgaaaaaggtaacacaagcaacgctgatcagttagtgcatgactttgtcc

SEQ ID NO: 38089 - DNA, 285 bp, Glycine max
  unsure (1)..(285): unsure at all n locations; Clone ID: 701119313H1
ggtattgtaagtggcagantggccttgctgccacgatccactgagattcagcccttgtcgctttgattcgtctgcaaaggatataattctctttcatctgaattttccctttcaaatctcttcctttgaagttttcgtagttctctgcatcatggagatggaacgcgtcttcgagtttcctngacactcacatggatgcggcgcccgagaaagagagcgagattgggctgggacatccctgaggtccccaaggctcaggtaggattgttttgtggacaagatgtt

SEQ ID NO: 38090 - DNA, 285 bp, Glycine max
  unsure (1)..(285): unsure at all n locations; Clone ID: 701119314H1
gttatggatcgaatcgaacacaagttcgtcaacgttggagatctcaagctccacgttgctgaaataggaagcggtgagaattactatacaccactgcattttcaataagttaaacactgttctnnnnnnnnnnnnnnnnnnnntgtttcttcaggtggaagcgccgttgtattcctgcacggtttcccggagatatggtactcgtggcggcaccagatgattagccctggccgatgccggattcagagctgtctccttcgattacagaggctatggtctttccga

SEQ ID NO: 38091 - DNA, 276 bp, Glycine max
  unsure (1)..(276): unsure at all n locations; Clone ID: 701119315H1
gctaagtctaagtgtagtaccgttgngattcaaggaatcgcttgggccttcggtggcatgatcttcgccctcgtttactgcaccgctggcatctcagggggacacataaacccggcggtgacatttgggctgtttttggcgaggaagttgtcgttgcccagggcgattttctacatcgtgatgcaatgcttgggtgctatttgtggcgctggcgtgntgaagggtttcgaggggaaaacaaaatacggtgcgnngaatggtggtgccactttgtta

SEQ ID NO: 38092 - DNA, 299 bp, Glycine max
  unsure (1)..(299): unsure at all n locations; Clone ID: 701119317H1
tnttaagtcnnanntctgtganttgtnnncnctggncagagantngatatgngacgnacggtacnagactttgaaggannttggttcanggaacttcggantggcaaggttggccaaagacaangagacaggagancttgttgccatcaaatacatagaaaggggaaaaaagattgatgcnaatgttcaaaggganntagttaaccaccgatnctttaaggcatccaaatgttcatcaggttcaaagaggtgaagagtttgtttctaatacttaaactgttctttgagtgtgatttttt

SEQ ID NO: 38093 - DNA, 288 bp, Glycine max
  unsure (1)..(288): unsure at all n locations; Clone ID: 701119318H1
gaaatgttattgatccatataaacagagcattaggaaaacaagaagctttgatcacaaaatatgccaactccttggacactttcattttaacgaatagcaagaaacttcgatcacaaaatactgttttctggcactagaataacagtcaaatttaattatataatacttgggtacactggagatggcttccttgtatcctcctagtgctgcttcttgcagcccttatcctcatgcctcaagggctgctacttactacaaaccantaagaagccaccagtgtacaagcc

SEQ ID NO: 38094 - DNA, 291 bp, Glycine max
  unsure (1)..(291): unsure at all n locations; Clone ID: 701119319H1
cagagccagacaagtacaagatgatcnactttgaagaaaccgagttgcgactcggcctgccactcagtggaatccganacgacgctcaaanacacttgacagtactgggaaaagggttttttcggatactagcgtggatttgaagcttaacctttcctcaacctcanataacgcccctcctcctgcaaagccanccgcaaaggcacaantggtggggtggccaccatgaggtcattcagnaagaacttgtaacacaagttcannggagtaacaacaacgatggcgaanaag

SEQ ID NO: 38095 - DNA, 289 bp, Glycine max
  unsure (1)..(289): unsure at all n locations; Clone ID: 701119320H1
ttttccccaatccttttcgcctttgtctgcgaatggcgtcgttcgatcaggcacctcccggcgatgtcaaatccggtgacaaaatcttcaggaccaagtgcgctcagtgccacacngtcgaaaaaggtgccggtcacaagcaaggacccaatctncatggtttgtttggaaggcaatctggcacaactcccggatattcctactcttcagctaacaagaacatggctgtgacttgggaagaaaagacactatacgattacttgcttaaccccaaaaagtatattccagg

SEQ ID NO: 38096 - DNA, 288 bp, Glycine max
  Clone ID: 701119321H1
ggtgatcctaggaggtggtgttgccggtgccaaccttgcaaaaactatacaacgtcaagccaacgtcacccttattgatccgaaggaatattttgagattccatgggcaagtttgaggggattggttgagccaacttttgctgaaaggatagtgatcaaccatagagagtacttcaaaaagggtaaccttgttgtatccagtgctgtcaacataactgaaactgcagtggtgactgaagatggccagcagattgcctatgactatcttgttattgccactggacacac

SEQ ID NO: 38097 - DNA, 109 bp, Glycine max
  unsure (1)..(109): unsure at all n locations; Clone ID: 701119322H1
gccctaccncctcttcgacggcgnccggcatgcnccacgcgcttcgcntctgcncatggcgaannncccacgctctgcagccgctacgttngnacctancgaatacncc

SEQ ID NO: 38098 - DNA, 285 bp, Glycine max
  unsure (1)..(285): unsure at all n locations; Clone ID: 701119323H1
cttggtcagaatggtgttcgtgacattgaaggaaatgaattacctcgtcttgtctatgtgtctcgtgaganaagacctggatatgatcaccacaaaaaagctggggctatgaatgctttgnggagagtctcagcaataatcaccaatgctccctatgtactgaatgttgattgtgatcactacataaataacagtaaggcccttcgtgaagccatgtgcttcatgatggatcctacatcagggaaaaaaatatgctatgtacagtttcctcaaagattgatggga

SEQ ID NO: 38099 - DNA, 285 bp, Glycine max
  Clone ID: 701119324H1
cgcgggtgaggtagaacccttccactgtggtgactctgcgatgggtgcctacaagtatgtttcagagctatggcgcaagaagcagtctgatgtcatgcgcttcttgcagcgggtgaggtgctgggagtataggcagcaaccttccattgttcgtttgacaaggtctacccgccctgacaaggctcgtcgcttgggcttcaaggctaagcagggctatgtgatttaccgtgttcgtgttaggaggggtggccgaaagagaccagttcccaaaggtattgtttatgg

SEQ ID NO: 38100 - DNA, 265 bp, Glycine max
  unsure (1)..(265): unsure at all n locations; Clone ID: 701119325H1
attcctaatcacctggttaatttacntcacatagagctatagncnatccaacgttaacatnccngaatgttttagtaaggtcagctgcgcgagctctgcttggcggcggtgggcggagtactaccgccagctctcaacggcggcgatcgtggaacagagacaccagcacggtggcggcgcgtttggaagcttccacttgcggaggatgtccactcttccagaggtaaaggatcagcactcagaggagaaaaagaacgaggtcaag

SEQ ID NO: 38101 - DNA, 281 bp, Glycine max
  unsure (1)..(281): unsure at all n locations; Clone ID: 701119326H1
acaaaaagacccgagtggaagaaaatgcggggtagagaccatttccttgtttcagggaggattgcttgggatttcaggagacaatacgatgatgagtcctattggggtagtaagttcaggtttctacccgaatccatgaacatgtccatgttagcagttgaagcaagttcgtggaataatgactatgcaataccctacccaacttctttccacccatcagaggacgnnatgttttccagtggcagagaaaaatcagacatcaaaagcggccatacttgttc

SEQ ID NO: 38102 - DNA, 264 bp, Glycine max
  unsure (1)..(264): unsure at all n locations; Clone ID: 701119327H1
attcatgcatgtnatttagttcataanatgttctaaatcaatacctagaagnagtcttgttcttgaacttttttttgttttctaagtttcctacatgatgcctatgatgaagttgagttgtggtgctgagatgtggctggatttgtgaatcaaataaatcttaagctctcttgaattgtgttattcaagataattgagcataagcaaacacaaattgtagctatccaagccttaagcaacataaacactactcttgatttctag

SEQ ID NO: 38103 - DNA, 282 bp, Glycine max
  unsure (1)..(282): unsure at all n locations; Clone ID: 701119328H1
gccgctcgatgggaattgcgcttcaaggcgtctcgtagggctaatccgcctcacgagggtcaccaacggcacgttncttggggggccgaggccccctactgctngtcggcaancggacggcgggcgcacgcntcgcttctancccggattctgacttagaggcgttcagtcataatccaacgcacggtagcttcgcgccactggcttttcaaccaagcgcgatgaccaattgtgcgaatcaacggttcctctcgtactaggtttnatactattgcgacactg

SEQ ID NO: 38104 - DNA, 85 bp, Glycine max
  unsure (1)..(85): unsure at all n locations; Clone ID: 701119329H1
gaaagtgagggaagcacgagaaagcttgcncgcaattnccacgttnntcttctanntgcaaacactgattttccagtnccatana

SEQ ID NO: 38105 - DNA, 286 bp, Glycine max
  unsure (1)..(286): unsure at all n locations; Clone ID: 701119332H1
gaaaatatgaaggaggtggaagttgaagatggatatgtcttgaaagaagagatccatctcacggtgctaaaaacctctctgttcttcgcgggcgatggcttcagcgtctacgattgcaaagntcaactcgtgttcagagttgactcttatggacccgacactcgcgacatagacgaactcgttctcatggatcctaacggannaaacctcctcaccgttcgtcgaaagcggccgagtttgcatcaacggtgggaaggtttcaaagggagagatggacggtgaaaaa

SEQ ID NO: 38106 - DNA, 295 bp, Glycine max
  unsure (1)..(295): unsure at all n locations; Clone ID: 701119333H1
ttgttcattgagccaacaattttgttagatcctccgttagattacncagataatgtcagaagagatatttgngcccactgcttcctataatcactatggataaaattcaggaaagtattgaatttatcaatgcaaagccaaaacctcttgccatctatgccttcaccaaagatgaaactttcaagagaaatattctatcagaaacatcctcaggangtgtcgtatttnacgacacaatggttcantttttatgtgatacnctaccntttggaggtgttngccagagtggttttgg

SEQ ID NO: 38107 - DNA, 290 bp, Glycine max
  Clone ID: 701119334H1
tgttgatgatgaggccaagttgacccttcacgggcttgtgcagcactacatcaaattgaaagaggaagaaaaaaaccggaagttgaatgatcttcttgatgcactggactttaatcaagttgtgatctttgtgaaaagtgttagcagagcagctgagctggacaaactacttgtggagtgcaactttccatctatatgcattcattctggcatgtcccaggaagaaaggttaaagcgctataaaggtttcaaggaggggcatacaaggattcttgttgcaacagatttgg

SEQ ID NO: 38108 - DNA, 287 bp, Glycine max
  unsure (1)..(287): unsure at all n locations; Clone ID: 701119336H1
gnaccctcttccatggatcatcacaaancagggtncaccagagacagagttttttaccgagtatggagaggcaagtccaatatgcagatccaagaggttgttggaaaaggaagttatgnggttgtgggttctgccattgatactcacacaggtgaaaaggttgcaatcaagaaaatcaatgatgtttttgagcatgtatctgatgccacgcggatccttagaganattaagctctgcggttgcttaggcatcctgatatcgtggaaatnaagcatatagctcctcct

SEQ ID NO: 38109 - DNA, 287 bp, Glycine max
  unsure (1)..(287): unsure at all n locations; Clone ID: 701119337H1
cagaagcatatgtattttctcatttggaaattgcatgtgtataaatgattggntgcttcctgagaccagctgcagtagaacaagctgcccatcattagactaagcaaatttccttattaaaaaaattatgtaacaattggtacagtttttcaccaaagcagcaaganttgtatgtagttcctatcctgtttaaattgtttgtgnaaatgtgacatgactgcttagctctattggaattatgaaaaaacaaaccttgtcagtaatgcatagttgagtttggtaaaata

SEQ ID NO: 38110 - DNA, 282 bp, Glycine max
  unsure (1)..(282): unsure at all n locations; Clone ID: 701119339H1
cagagaaatgagaattcgtcattggctgagtccttctgangcaggtggccctgccaaacgcagaagctccggcagaaattgccaccgcaaacacgtcgaaganggtagtaatagcactcnctttcattctcccacattcccaattctgncgcgttaagatgagtgagaaagagaaaggcaataatagtgagggacagtcgacgttgctgcacggcaagtacgagcttggtcgtgtgctggggcaggaacgttcgccaagtgtaccacgcgcggaacctgaat

SEQ ID NO: 38111 - DNA, 128 bp, Glycine max
  unsure (1)..(128): unsure at all n locations; Clone ID: 701119340H1
ccaaactcttcaagaaaggaaaagtgaaattctaggtttcagaaatttcagttccaatttcaattttcgtntttctcagatccgatttccaatttttcccactcantctcattttgcacacaacatac

SEQ ID NO: 38112 - DNA, 283 bp, Glycine max
  Clone ID: 701119341H1
ctcttgagaacaagttattgttggcagggtttacagaaacacaagttttacaattaactgggatcaaagctaaaaagccttcatggaaaattggttcatcttttgcgctaaagaaggtgataaagagttcacctaaaatgcaaattgattttgattcggatctaattgatgaggatagtctcttgactgaagaagatttaaagaaaccccagctgccacctggtgattgtgaaattgggagcacaagaaaagcctgcaaaaatgcacctgtgggagggctgag

SEQ ID NO: 38113 - DNA, 281 bp, Glycine max
  unsure (1)..(281): unsure at all n locations; Clone ID: 701119342H1
aatccctcatctcattgctgagatctgcaagctggctatggactacgaaccctacgacagtagcggaactgatgatgaccttccaccaacccatcaanntngantttccaggggaggaggaggacgtctcgctgggaatgggagatctgctgttggttcaattccttacccaaggatgtatggtgaaattgatatggagacccaaattcatcagcttgagcaagaagcatacagttcagttctaagagcctttaaagctcaagccgatgccatacttggga

SEQ ID NO: 38114 - DNA, 283 bp, Glycine max
  unsure (1)..(283): unsure at all n locations; Clone ID: 701119343H1
ggcaaaaccacctaccagtgaacagataatggcactgcttgctgacacacagggagcaaaacttcactaagaagcanagtgaagccaaccggcaaaatcggttcctaaaaagacagttgaatgtaacggaggatgcattggtanaattcaaaaatgaacttgcagtcatggagcttgaaattcaggccttggccagattagcagaagaaatagctcaatgtggtattccagaaggttcaaggaagatcaatggaaagtacattcatctcaccttgttgctaga

SEQ ID NO: 38115 - DNA, 285 bp, Glycine max
  unsure (1)..(285): unsure at all n locations; Clone ID: 701119344H1
ggagtcctcaaagatctatgcttacctcttcctttgcatgctcttcctctcctccgcnactcccattactcggttgtggctactgtggcaaaccccccaaaaagcacaagcctggtaaaacaccaaagacacccacagtacccgttgttaagccaccagtcacaatccctcccattgttangccnccagtcacaatccctcccattgttaatccaccagtnangatcgccgccnattgttaatccgnnagtnacaatncnncnatggttaatncgccagtgacag

SEQ ID NO: 38116 - DNA, 282 bp, Glycine max
  unsure (1)..(282): unsure at all n locations; Clone ID: 701119345H1
gggtgtcaagcattgatcaagacgtgtcctccacggctgaatcttcatgcaagagggagagttcaagctcttattcattctctgtcccacaataatgttcctcgtcttctaatatcaaatttttttaagtcctttatagcttctcttgattcactaaggcattgtttcatgaaggatggtatatgattttgttggataaaatgcatgctcaagaaccttatcaaactcaggatattctttatcaaaaanaaaaagngggagnagnaggagnnnngngttctg

SEQ ID NO: 38117 - DNA, 284 bp, Glycine max
  unsure (1)..(284): unsure at all n locations; Clone ID: 701119346H1
ttttctcccccaaatcgtagatctacggttaaattggtgtagtgtggtaagatgggaggaggatttagagtgcttcacttagttaggccatttctctcgtttcttcctgaagttcaaactgctgacaggaaagtgccatttagagagaaggtcatatacactgtgatctctcttttcattttcctggtttgtagtcagctccctctatatgggatacnctcaacancaggtngctgnatccattctattggatgcgggttattctngcttcaaaccgtggaact

SEQ ID NO: 38118 - DNA, 285 bp, Glycine max
  unsure (1)..(285): unsure at all n locations; Clone ID: 701119347H1
ggacctaagtctagctgctaatagactcgcccatcatgccatcaaacttggtggcattggctttggagcctcttttttcggattgtttgctgccattgctgctatttatctgttgattttggatcgtacaaactggaaaacaaatattctcacagcactactcattccatacattttcttcagcttgccttcattaattttcgacgtcttcaggggagagcttggaaaatggattgctgcagttgctgttgtattacgccttttccttccaagacacttcccngt

SEQ ID NO: 38119 - DNA, 277 bp, Glycine max
  unsure (1)..(277): unsure at all n locations; Clone ID: 701119348H1
acgtgattcgctcttctcttcgaataaaccacaaaaccaacaaacgagaagangagtgagagaagatggggttgtcgttcacgaagctgttcagcaggttgtttgcgaagaaggaaatgaggattctganngtaggtctcgatgctgctggtaagacaaccatcttgtacaagctcaagcttggagaaatcgncaccaccatccccaccatcggatttaatgttgagactgtggagtacaagaactcagcttcatgtgtgggatgttggtggncagg

SEQ ID NO: 38120 - DNA, 291 bp, Glycine max
  unsure (1)..(291): unsure at all n locations; Clone ID: 701119349H1
cttgaacataaagctgagaagcatctttcagatatggttgtgtctaaggcattggtggcgaagattgatagacccatgggaatagtttgtttccaaagagctaaggatagcaatgacgttcttaactcatgggcagcaaacttggagaggctgcttgatcttgtggagaagagctgccatcaaatacacaaggagaccatggtgcataaagctgccttgaaggtttaagaagctccatatcatgttaaaagttacagtgaaccccaatcngagatgtgattnnggactgca

SEQ ID NO: 38121 - DNA, 241 bp, Glycine max
  unsure (1)..(241): unsure at all n locations; Clone ID: 701119350H1
gnngccgcaagcnnatgnccggactcnggcggcgacctccggnggcgacctcgccggcatcatttgtnncgatctcctatgancccctcaacctcatcagcgaggatcttcaatcggtctccatctgcntccacgtttttcacgagcnctgtctgcggcaatggtnggagtactcttcgaaagggaagaagcacacttgccccatttgcaagcagggtttcaggggnaggangntngctgg

SEQ ID NO: 38122 - DNA, 288 bp, Glycine max
  unsure (1)..(288): unsure at all n locations; Clone ID: 701119351H1
gggaagttgaagcttaacataaatgattaatttacataattgtagtttngccaaattctcttcattagccaatcaatgtgttcaacgctatgattagtaacatgaagaatgttgaacacatttaattacatattgacagaactgtggaggttgcagatcatttgtcatatccttttgtcagaaggctgcaatccttgccacatcacatccttttgtgtttacttagtatcttaagacttgcaacaatgccaatttccctagatcaatttcttaacctggagagtgaac

SEQ ID NO: 38123 - DNA, 286 bp, Glycine max
  unsure (1)..(286): unsure at all n locations; Clone ID: 701119355H1
ggaattatggtgacgtctcagagtcagaaccctatagagcaaatccaagcgcgcttcaaggagttggagactggcttccgcctctggctctccaagcagtccctccccgtcgaggccgccgtcgtcaccaccaccagcgccgcccagggcgccgctatcggcgcttcatgggcaccctcaccgccgacgcctcctccannananccacccctccgcncaacgcctctctnaacccccaagccatggcctctcttaaacaagtcaggctctagctggagggcctttt

SEQ ID NO: 38124 - DNA, 286 bp, Glycine max
  Clone ID: 701119356H1
gtgaactctctcccttcatctagctcgagtttttttcttgcttccgggagctctgaacttgaccgacgtcgttttcacatcaaaacccttcaacaaaaaaatggcgttcttcttgaaccaaactagtatcgcttcccattttcgatctcactctcagaagactgaagatttggcttcttttcctcgccgtcgattccacgtcgaaccaggggctcgtgaaaaagctctcttggcagaagatgcaactctgaaaccgttcaaatcgtacaagaagagtgtaaaaaag

SEQ ID NO: 38125 - DNA, 282 bp, Glycine max
  unsure (1)..(282): unsure at all n locations; Clone ID: 701119357H1
acagactggcattaaggaggttaagcattctctgtctctctctatatatatttatatanagtcgttttggtcattcttcaaatttttggtttttgtgattttgataggacgaccctttggtgtttggatcttcaagaaagagagacccttgggatttcgtcaccatgagtctcttcggtcttggaaacagaaaccanaanacntttcgtccaaaaanagagtgctccatctggaagtaagggtgctcaacttcaaaaacacatcgntgccacgttgggtant

SEQ ID NO: 38126 - DNA, 280 bp, Glycine max
  unsure (1)..(280): unsure at all n locations; Clone ID: 701119359H1
cacctcaacacattcatacaatgcnccataaagcacaccaacaacaaattacaacttcanatagaacagagcatctctctgctctnctctgttctgttcngnnctgttctgtntctctctcctccccatatattcctcttcttcttcagaactcagaactcagaagggccacttcacttttagnaacccagtnntgcatctgggttattgcctgttgaagtgccaattttgaagataatantnanaacnatatgactgggaaagcagangagaatgcctt

SEQ ID NO: 38127 - DNA, 100 bp, Glycine max
  unsure (1)..(100): unsure at all n locations; Clone ID: 701119360H1
acgacaacnacganatctgcaatggcccacttaatcatacatccnnngaatcctcctccgattcgttcttccccgntggtctcttcctcccncacaacat

SEQ ID NO: 38128 - DNA, 251 bp, Glycine max
  unsure (1)..(251): unsure at all n locations; Clone ID: 701119361H1
cagtcttcncaatcntnntggtagctaatcttctctggtttcttcggtggaantgattaatgggagacngtggggccgaagantaaatctgctgntacaaggactcaaagctttcncncatcanangtaantggtatttttggaggacaacttagaagtttggtgagngctnaaggaaatagagcttctgcaactgttcanccatatctcttgctccatcttgacatctntcctggatgctgttcacacna

SEQ ID NO: 38129 - DNA, 280 bp, Glycine max
  unsure (1)..(280): unsure at all n locations; Clone ID: 701119363H1
cgatcatcacttcacttcactaatacatcatggcagacgagnccccagaacaantatgagagctcngaggttgaggtccaggatcgtggtgtttttgactttctnngtaagaaaaaggatgaagaagacaagcctcatcctcaggaggaggtcatcgccaccgagtttcaaaaagtcactgtctcagaccaaggagagaacaagcacagcctcttagaaaagcttcaccgatctgacagcagctctagctcttcaagtgaggaggaaggagaagatggag

SEQ ID NO: 38130 - DNA, 287 bp, Glycine max
  Clone ID: 701119366H1
ggctgtcaccttctcagatctacacaccgaagagggcatcaaatccctcgatcaattcctttctgggaaaacctatatttctggggatcagttgacaaaggatgatattaaagtgtatgcagctgttgttgaaaagccaggggacacttttcctaatgctgccaagtggtacgatgctgtctcttctcaacttgctccaagctttcctggccacgctcaaggggtaagattcagtggcgctgctgctccagctgaagctgcacctgccaaagcggctgccactgctg

SEQ ID NO: 38131 - DNA, 193 bp, Glycine max
  unsure (1)..(193): unsure at all n locations; Clone ID: 701119367H1
tcttcgtcaaaaccctaaccggtaanacgattacgctagaggtcgagtcctccgncacnatcgnanacnngaaagctaaaatccaagacaaggaaggcattccaccggatcagcagcgtttgatcttcgccggtaaacaactcgaagacggcagaactctcgccgntttacaatatccagaaagaatcgacgc

SEQ ID NO: 38132 - DNA, 286 bp, Glycine max
  unsure (1)..(286): unsure at all n locations; Clone ID: 701119369H1
cngagtgcatcattcctcatttgatcctctcttcccccatgaccttccaaccagtccccactctccttctccttctccctcctcgcgtccgcaaattcccattttgccctcgccggaaagcgcaaggttcacatccccgacgagttggacgacgtgttcgacgacgaggaggacgacgcgtggcgagaatggggcaagaaacccgaaccccctttcccttcctccgatatctccaagctcgatccctcgcagatccagcaggagatgatgaagcgccacgccggac

SEQ ID NO: 38133 - DNA, 115 bp, Glycine max
  unsure (1)..(115): unsure at all n locations; Clone ID: 701119371H1
gatctgttcattccctaccctttaagaatgcacagagtgntgatgatgtcaaaagtgaagaatcaaaggtttcaagaaaaagatccactggcactgagccancacacaacatgcg

SEQ ID NO: 38134 - DNA, 285 bp, Glycine max
  unsure (1)..(285): unsure at all n locations; Clone ID: 701119372H1
caacctactccgattgcatcagctgctaatgagttatataaagttgcaaaatccaatggccttagtgatcaggatttttcagctgtcattgaagcattaaaatccaaatttcagcactcggaaaccaagtgtngattcttatgagagacaagttgaagttgaaaaccgtagtaagctaggtgatatgaatcnaatatagacgtacattgtgaggcttgaccatttaaattcatccctgaattgtagaaatatatttgaatatttttccaatgttgtaaaattttt

SEQ ID NO: 38135 - DNA, 281 bp, Glycine max
  unsure (1)..(281): unsure at all n locations; Clone ID: 701119373H1
ttcctccaactgtgtagctgtagaaaatcataacctttctcaggccagcttacaacangcaagaaagttatttccctggtcaaggaatggtgttggaagggaacttctttgcacgagaggaaggtcaatttgaccggttcaaggccaccatgaacatgaacactcataccccttttgataccaaccatagcaacaataataatatccatttgatgtttaattccccttgtgatttgtcatccttgatttcaaggaggatatacaaggaggagtaggaatgg

SEQ ID NO: 38136 - DNA, 279 bp, Glycine max
  unsure (1)..(279): unsure at all n locations; Clone ID: 701119374H1
ctgtttcgcctccaccagcaccatgttcctgtgggccctcttcttnatcgccctcaccgcttcctatctcagcttgccaaggcttcgtcgattccggcngccgctacctcaccgcctcctggggcgggatccagtgggagaagcaggtccgcacctccgcccagatccaccgtcaaggcggcatgtccgtcctcgtcaccggcgcagggctttcgtcggctcccacgtctccctcgccttaaaacgacgcggagaggcgtcgtcggactcgacaattca

SEQ ID NO: 38137 - DNA, 277 bp, Glycine max
  unsure (1)..(277): unsure at all n locations; Clone ID: 701119375H1
cgcccctgatgatgattaccttagcgttcacataaaaatacttggngattggactcgaagtctgaaagccaaattcacacaggcgtgccagcaacccctcaatggacagagtggactcctaagagctgaatgcttgaaaggagataacagcccaagttcctttccaaaggttctggtggatggtccatatgggncgccaggcaagactacagggagtatgaggtggtgttgctagtggggctggaattggggctaccccaatgataagtatataaag

SEQ ID NO: 38138 - DNA, 278 bp, Glycine max
  unsure (1)..(278): unsure at all n locations; Clone ID: 701119376H1
cagttcaattgatcaactcagatttcagggacctaagtctagctgctaatagactcgcccatcatgccatcaaacttggtggcattggctttggagcctcttttttcggattgtttgctgccattgctgctatttatctgttgattttggatcgtacaaactggaaaacaaatattctcacagcactactcattccatacatnttcttcagcttgccttcattaattttcgacgtcttcaggggagagcttggaaaatggattgctgcagttgctgtt

SEQ ID NO: 38139 - DNA, 282 bp, Glycine max
  unsure (1)..(282): unsure at all n locations; Clone ID: 701119377H1
gcaaaatgttcatttgcttgtcgatcacttggctgattggttagaaggggaaagtgataagaatcttgtctttcataccttacagcaacactggatggttaacatntggtgttattcttgaacancttcaaaagcaggatccaactatcacgggaaggatcaagggatgcatcgtagactctgcacctgttgcataccctgacccatgggtctgggcctctggtttctctgcagcgtttcttaagaaggaacagcgtggctactaanggacgtgtattttct

SEQ ID NO: 38140 - DNA, 286 bp, Glycine max
  unsure (1)..(286): unsure at all n locations; Clone ID: 701119379H1
anctgtctngccgaagcaggaactaaatatggctgacttgttggaatggtcaaagcaagataagaaacgantgcttcatgtcgtctaccgtgttggtgaccttgatcgcacngtcaaattttacacagaatgtttaggaatgaagcttttgaggcaaagagatatcccagaggagaaatatgctaatgctttncttggatttggccctgaagaatcccattttgttgttgaattaacatataattatggggttacctcgtatgacattgggcgatggctttggaca

SEQ ID NO: 38141 - DNA, 291 bp, Glycine max
  unsure (1)..(291): unsure at all n locations; Clone ID: 701119381H1
ctcagattcttccagtgccctcatgacaatttgtccatcaacagaggaacatagtccgaggaacagccaacacatgtatggtagggagttccaatcgatgttggacggactcgacgaggaagggtgtgttgaagaaccggggtatcaatctgagaagaagcgtcgtctaagtgtggatcaagtgaaggcnttggagaagaactttgaggttgaaaacaagcttgaacctgagaggaaggtgaagcttgcccaagaacttnggttgcaacctagacaggtagccgtatngtt

SEQ ID NO: 38142 - DNA, 284 bp, Glycine max
  unsure (1)..(284): unsure at all n locations; Clone ID: 701119382H1
ctcgattcgttccatttcttccaaaatggccaaagacccagttcgcgttctcgtcactggagctgcagggcaaattgggtatgctcttgtccctatgatngctaggggagtgatgttgggtcctgaccagcccgtgatcctccacatgcttgacattcctccggcagcagagtcattgaatggggttannatggaattggtggatgctgcattccctcttcttaaaggtgttgttgccacaactgatgtggttgaggggtncatggggtcaatntgccgggntg

SEQ ID NO: 38143 - DNA, 287 bp, Glycine max
  Clone ID: 701119383H1
ggcattgtttcgctaggaggtccccatatccctcttaaaacaggaagaagggatggtagaaggagcagagccgatgtggtagagcagttcctcccagaccacaatgaatccatttctgcagttcttgacaagtttggtgccatgggaattgacacccccggcgtagttgcattgcttggagcacacagtgttggtcgaacccattgtgtgaagttggtgcaccgtttgtacccagagattgatccagctctgaaccctgaccacgtccctcacattctgaagaagtg

SEQ ID NO: 38144 - DNA, 286 bp, Glycine max
  unsure (1)..(286): unsure at all n locations; Clone ID: 701119384H1
atggaagtcctttagactacactactacagtaccaccaacgatcaatgcaatattcatcaaaatgggtacaagagatgttcatgatnnnnnnnnnnnnnnnnnnnnnnnnnnnnnnnnctcagagttagaggatcaagaatcagcaaaggcanagaaatggaaaaaccattactcatcaaatcacaggattctccttgttggagacggtgacttttcattctctctttgtttggccagagcctttggttctgctcacaacctcgttgccacttctcttgattccta

SEQ ID NO: 38145 - DNA, 282 bp, Glycine max
  Clone ID: 701119385H1
ggattcatgggtcccaactactctatatccacggcttgtgctacttccaattattgcttttatgctgcggcgaaccatattcggagaggggaggctgatttgatgatagccggtgggactgaggctgccattattcctattgggttagggggttttgttgcttgcagagcgctttctcagaggaacgacgaccctaaaaccgcttccaggccatgggataaggaacgtgatggctttgttatgggtgaaggtgctggagttttggtaatggagagcttggag

SEQ ID NO: 38146 - DNA, 283 bp, Glycine max
  unsure (1)..(283): unsure at all n locations; Clone ID: 701119388H1
ccgatcacgccctcgcngccttctccggctacatgcagntcggcgacaccttctccatgctcggccaggtcgacagatccatctcctgctacgaccaaggcctccagatccagatccaagccctcggcgactccgatccccgcgtcggtgaaacttgccgatacttagcggaggcaaatgtgcaagcaatgcagtttgataaagcagaggatctgtgtaagaagacgttggagattcatcgcgcacatagtgaaccagcttcgcttgnggaagctgcagatag

SEQ ID NO: 38147 - DNA, 284 bp, Glycine max
  unsure (1)..(284): unsure at all n locations; Clone ID: 701119389H1
tcgangcgcggacagtagctgctgctttntcccttgtctccagctaactcngntccttcgatnctcattcnccagncagaacagnatgggttgtcnaaggtagcanaggagaaaaaatcnaaggacagaatttactactttcctatggatcagcagccactggtagtngtggtggtactagttacaacactgttcagtctccgccgncgtcaccancactatactnctgctactatnnctaatcnggntcaaacatcagcagcaccaaaccacaatcannagtt

SEQ ID NO: 38148 - DNA, 279 bp, Glycine max
  unsure (1)..(279): unsure at all n locations; Clone ID: 701119390H1
gtgcacccatccacgcaccacaaaattnnataacccaaaaaatacaaaaacaactttgcaatttcgtaggagatagtcaggagcagcacgctaacacagagtgttacagtcacctgtgttcgtcacagtcacagacaatggttccaatcaattcccgtaanttatagattctttgacgctgctcggaactctctatcatcacccaactccgcgatcttcaaatggaaaagaaaggccattataaccgtcatagttctggatggggacttcaccactcgc

SEQ ID NO: 38149 - DNA, 280 bp, Glycine max
  unsure (1)..(280): unsure at all n locations; Clone ID: 701119391H1
gactcctccgcgaaagagtattattcaatattttggttgggttgaatcccggggttgaagcgttgcagacatcacggctatnnctaagagtgtctcgctccctcattcatgtccgatctgtacgacggaggacgggtagttgcgtaactgccgttaacccttcgccgcacggtgggcgtggtgctttgccttctgaaggtggtagcccttcagacttgctcttcctcgctggtggtggttccttctagtttcttcactcttttcattacttttagcctgc

SEQ ID NO: 38150 - DNA, 283 bp, Glycine max
  unsure (1)..(283): unsure at all n locations; Clone ID: 701119393H1
gcaagtnctccagtgtcaagcngtggtcagccttatccaaatggacagatcttacctacctctaatttgaggatcttcacntttgccgagttgaaggctgcgactagaaatttcagagctgatacagtgcttggggagggaggttttggaaaagtttacaagggttggcttgaagaaaaggccacctcaaagactggaagcggancagttattgccgttaaaaaactcaactctgaaagcttacaaggacttgaagagnggcagtccgaagtaaatttnctag

SEQ ID NO: 38151 - DNA, 267 bp, Glycine max
  unsure (1)..(267): unsure at all n locations; Clone ID: 701119395H1
aaaaactaagttcatttcttgtgctttnctttattcctcaaaaacaaacatgacgaacacatgcggcaactgtgactgcgctgacaagactaactgcaccaagggaaacagctatggtgttatagtagagactgagaagagctacatcgagactgttgacatggatgttccagcagctgagcatgatgggaagtgcaagtgtggcactaactgcacttgcacggactgcacttgtggccattaaggaatatgtatgaaaatgtaatt

SEQ ID NO: 38152 - DNA, 265 bp, Glycine max
  unsure (1)..(265): unsure at all n locations; Clone ID: 701119396H1
ctccctttctggctttntctctctanaaactatcatgtcctncaaccgcggctcccgtccttacccatatccaacccccaaaccaccgcngcaggtgggcgncatcgaggctccggcgaacaanncggcnttccgcgccttcatcaacaacctctccggtccctccgacacggcctcgaccagcgcngcccgtngtcggagntcggggaccgcttccggttctcgaagcccgantnttctcngaagaaancctccgngtcganaa

SEQ ID NO: 38153 - DNA, 279 bp, Glycine max
  unsure (1)..(279): unsure at all n locations; Clone ID: 701119401H1
atgaccgaaaccgaagctttggaggatgcgaaggaggtggtggtgttggaggaagaagantgcgcggagaaaatggtgtacatgtggggataccttcccggagcctacgccggagaagtctccgatactgtctccggcgccggtgaatctctccgatcgttcactcgccggagattgcgtggaaggacgtgtgcggcggtggttgcggattcgccatggccatcttcagagaaagggaagctcataaactggggttctgcggacgatgaagggcagagc

SEQ ID NO: 38154 - DNA, 224 bp, Glycine max
  unsure (1)..(224): unsure at all n locations; Clone ID: 701119402H1
gaacaatttccactcgaagcaaagcgnnatcagagatccaaactcagttctccaactctctgatctcaacttcnacttnaggttcaanganctcgccaacgacgattgctgcgccacgcaactcatcganggcgnnggcgagttcaacgtcgccggcctgcgacaactttatnagaanngtcattcgcgnantcnnggggtntcnctatgggngnnnnnnanaa

SEQ ID NO: 38155 - DNA, 275 bp, Glycine max
  unsure (1)..(275): unsure at all n locations; Clone ID: 701119403H1
ctcttgcataaagaatggcatcagcaacaataaggaatgcagttgtcacgggagcaaacaaagggataggatttggaatatgcaagcaattggtttctaatggcatcacagtggtgctaacagcaagggatgagaaaaggggtcttgaagctgttgaaaagctgaaagagtttggtgtgtctgatcaagtggtgtttcatcagcttgatgtgactgcncccaaaaagcttccccccccgaacnnttnncaccnncncttggaaccgcaanttnnc

SEQ ID NO: 38156 - DNA, 281 bp, Glycine max
  unsure (1)..(281): unsure at all n locations; Clone ID: 701119405H1
gggatgtggagttcaacttcaagcacagcagcgattccctccgacgaggaacctagcgaatncctcctcctacgtcctccttctccacctgctctcttcaatttctcttctggaaacccgagaatcgaggagacccgtggcctcatgnatntcttccnggaggnnactgcttnncntantaccncgttggagggaancctntcgttngcgntgtcgnngnccaaaatnanatggacnngngnggnttagnggcnagtggtggtngtncttcnagtnaaaga

SEQ ID NO: 38157 - DNA, 265 bp, Glycine max
  unsure (1)..(265): unsure at all n locations; Clone ID: 701119407H1
tgccaccggccacaaagtcccaggccnagtactcggaagaatactatgttgatgatagtgacagttatgatggaatgtgggatgatgannggaggctagatgagcttcagttcgggttttatgaagggatagaagatgcaggaatgtattggcctccatctccataagaagctatagctgctgcatgcattactngtgatcattgtatgcttttctactctgtaactaatgctctctacttacttttaggggtgctctatgaang

SEQ ID NO: 38158 - DNA, 276 bp, Glycine max
  unsure (1)..(276): unsure at all n locations; Clone ID: 701119408H1
cttccncttattgacgacacnacattcgtttnccntatncaacatggccgaggaagctccaaaccagacaaccacaccaccacctcctcangngtcagtggtgcaagtggaggaagtggtagtaaccgatgttccanagcnaccaggantgccngcaancactgttccagttgaaagtgattcnnaacctgaacccgaggagcncgtgaagnagcccgttgaagaaaccgtcantctncgggactcnantttccaannccantgntgctgggcgac

SEQ ID NO: 38159 - DNA, 276 bp, Glycine max
  unsure (1)..(276): unsure at all n locations; Clone ID: 701119410H1
cacaaataganactcactctttcgaaaaaaccagaatttgaatatgacgttagggtttgagggttatagttataccacaacacttggaaggaagagggtcgtgttattacacaatgaagcttcttctctcaactctaattcggcggtgaatccattgaagagaatgtgcagcggaaaattcacttttgactctgaaaggtctcgccttgaggcccttnctgcttggatgttnctgattagggtgttgtgtggtgtcgatacatgaaganttggnag

SEQ ID NO: 38160 - DNA, 226 bp, Glycine max
  unsure (1)..(226): unsure at all n locations; Clone ID: 701119411H1
gtttctctancctgctnttctncattcttcannntcnaaatttncactcgcacccacactgcgnaattcggagtgtggctggctcctggctgaantctacaggcncaactccntcgagtggagcnttctccggtcntcgatttagccaccagcttnngnnggctcccgagtagccgccgntgcgcaaagacggntannctangngactgggntngtncattcccgg

SEQ ID NO: 38161 - DNA, 265 bp, Glycine max
  unsure (1)..(265): unsure at all n locations; Clone ID: 701119413H1
aggaagtnttatccagtgtggngcatctacagccaatnatggtgtttttccgacncaaaaanaaaccnatgacnaatttcctcttcgaaaatactacgaaaatcgaaaaccaatcgtagactaccgatgatgttcatgatgatattaaagagcaaaggtggcctcttttcatgtgaattttgagtgatccattgattcttncagctcaccatcttatctgcgccaaaaaggaagagggaaaaagaaattganacatgggttggat

SEQ ID NO: 38162 - DNA, 278 bp, Glycine max
  unsure (1)..(278): unsure at all n locations; Clone ID: 701119415H1
aaaaatgagagaaatcatcagcattcacataggtcaggccgggatccaggttggcaactcctgctgggaactctactgcctggaacatggcatccagcccgatggcatgatgccaagtgactcctccttcggtgtagcccacgacgccttcaacaccttcttcagcgaaaccggatcnggnaaanngtaccctngcggcggtnttngtcnatnctngagccccaccgtcatncgnacgaatccgttgtngcaantgaccgtcaacttcttgccacccc

SEQ ID NO: 38163 - DNA, 269 bp, Glycine max
  unsure (1)..(269): unsure at all n locations; Clone ID: 701119416H1
gaggacttccgtaactatgctgacttttgcttcaagacatttggtgatcgggtgaagcactgggtaaccctaaatgaaccatatggctacagcgtgaatggctacagtggtggaaattttgcaccaggtagatgttctaactacgttggaaaatgccctgctggtgattcttccaccgagccctacattgttaaccaccacttaatacttgctcatggagcagcagtnattgctacagnnacaaataccaggcctcatcagaaaggaca

SEQ ID NO: 38164 - DNA, 276 bp, Glycine max
  unsure (1)..(276): unsure at all n locations; Clone ID: 701119417H1
gtccctcctcatttccacgtcagaattttaanaggacacggaagcaacatttgattgcttccactggacgtggatcaaagaatgccacatgctaaatcaaacatgctaacttattgcatcttagttcccacatgataggactatattcgtttggaagtttgtaattctcaagactgaatttaaagaatgctaaaataaaaatgaataataatagaagaaacatngaaaatgtttngaatttgacccacagttggctnanccaaaagtggactngcc

SEQ ID NO: 38165 - DNA, 276 bp, Glycine max
  unsure (1)..(276): unsure at all n locations; Clone ID: 701119418H1
ctttgattttnttctgcaaccttatctactgcaaagctttgatacactgagtctaacttaccctgccacagtttgccttgtttacctgagctctgtttttaactggtctttgatcaaggatggccataaaggcaattgagttgttgaaaggaagnggaacccatgaagagatatnagaagttcttgcaanagtgggcagcatctnggggggntanaagaggacggtgganaacatttgngggtaacacctttaaagggggcatgaccatggaggtt

SEQ ID NO: 38166 - DNA, 281 bp, Glycine max
  unsure (1)..(281): unsure at all n locations; Clone ID: 701119419H1
ttcactgcaccacttctttatataacacatttttntntttaaatttttatnntccatgtttagggtttaaacgttgaatactgcattcatggctttgtcttcaacgtctcatgtaacggttttgccgtgccttctaatgggaagtgctggaggaactgactatggtgnatacacttangagcctcttgaggagccngnctnggcnancnagaacgnnaagnaangacatcacngggnncggggggttttancnnncnannaanagaggcgggcnccnanag

SEQ ID NO: 38167 - DNA, 276 bp, Glycine max
  unsure (1)..(276): unsure at all n locations; Clone ID: 701119420H1
atggctcccaagggtttaacctttctggctgtgttaatatgcgtttcagcactgtacactgagtccttctgttgcgggggaagggcaaaataatggccttgttatgaacttctacaaggaatcatgccctcaggctgaagacatcatcacagaacaagtnaagcttctctacaagcgccacaagaacactggctttctccctggctcagggacatcttccatgactgtgctgttcagagttgtgatgcttcatgttgctggactccacaagaaggg

SEQ ID NO: 38168 - DNA, 114 bp, Glycine max
  unsure (1)..(114): unsure at all n locations; Clone ID: 701119421H1
gaatatggatggggaactacacataatgttatttccgttcccaggtacaggggcacttgatatccaatgagtgntatggcgagagcatttaatggaagaggggtgaggacaacc

SEQ ID NO: 38169 - DNA, 272 bp, Glycine max
  unsure (1)..(272): unsure at all n locations; Clone ID: 701119422H1
atcacttttcactttcgggctatttgctttcttagggcatctctaacaatatggccaaatccactttctttgtctgccttaacctttcattactcttctctctagtcacagccacttactactcaagtttaaccccaacacttttgggttttcgcgaggagaagttcacccacctccacttcttcttccatgatgtcgtgtcgggcccaaagcccagcatggtgtttatccgccgagcccaacgggaaagcgaangangccctccgttcgga

SEQ ID NO: 38170 - DNA, 273 bp, Glycine max
  unsure (1)..(273): unsure at all n locations; Clone ID: 701119423H1
aagaaaacgtttatgttcctgagaagaaatttcactctttcaagaaggtatctcggtccatgggatatggtgagaatgatatcaccttagtatcttttcaatcagtctccaaaggctaccacggggagtgtgggaaacgaggaggttatatggaggtgactgggttttctgcagaagtgagggaacaaatatataaagtggcatctgtcaacctttggctctaatatctctggtcaaattcttgctagctagtcatgagtcctcctnaggttg

SEQ ID NO: 38171 - DNA, 280 bp, Glycine max
  unsure (1)..(280): unsure at all n locations; Clone ID: 701119424H1
cgacacccccccaaaaatgacaggagagacagtnaacccaaaagcttaccctttggccgatgcgcaactncnccaataacaatactggatcttgtgcaacaagctgccaactacaagcaactncaaaaagggtgctaatgaagcgaccaagacattgaacagaggcatctctgagttcgttgtgatggccgcggacactgagcctgcttgagattcttctgccatcttcctctccttagctgaggataagaatgttccctcagtattcgtcccatcaaag

SEQ ID NO: 38172 - DNA, 104 bp, Glycine max
  unsure (1)..(104): unsure at all n locations; Clone ID: 701119425H1
aacgacgacttcgttccggtatgcggcatcattncattacccgtcgtntgaatcatcttncaaaatttcaaaaggcaagattcccancaccaacataacggact

SEQ ID NO: 38173 - DNA, 263 bp, Glycine max
  unsure (1)..(263): unsure at all n locations; Clone ID: 701119426H1
gaaagcacgaatgcctcatcccttgggtgataatagaccacgaaatctacatcagagtaatcacaagtacaatcgcaatgcacgctgccaccaagcaaggaaacgaaccaaatcataatcatcagaccaatggcaatggagttgataatgatgccaagcaagggaatcagaatcaccagcgaaactattcacattcggggataaactgaaaggaagggatcatgaggatcctggagactaaggctaacatnanggaaatgggc

SEQ ID NO: 38174 - DNA, 270 bp, Glycine max
  Clone ID: 701119427H1
ggggcagagtcaattcatcaattaggagttggatgagagaatggaagccacaacagagcagaacaattcaaaggtggtgctgattgattctttgcaatcttgggagttccatgtcaaccaggcctcccaatcagaatagtcctgttgttgttcacttcactgcttcatggtgcatgccatcggtggctatgactcctgtttttgaagaactggcttcaagctatccggatgttctgtttctcactgttgatgttgatgaagtcaaggagg

SEQ ID NO: 38175 - DNA, 267 bp, Glycine max
  unsure (1)..(267): unsure at all n locations; Clone ID: 701119431H1
tacccgcctagcaattgatttggaaaagtccaagcttcaaagatgaggtattcattctctcatcttcaacttatctttgttcaaatttcttagtttgttcgtacgttttattgtgaaagcaatgttgttgattgtttttcgttgatagctgatgtgtacantgcgtggtcttactgtgtatnatgttaatgaaaattgttcggtgaaaattgtgcattggaaaatctatgttttgtgttttctgatctgtattgggtgttggttgtc

SEQ ID NO: 38176 - DNA, 274 bp, Glycine max
  Clone ID: 701119432H1
gcttattctctcgcattccgtggagatctagtgcttcctgctgcaagacctacgctgaaaattagggtttcgattcggaggtagacgaagatgttcggaagggctccgaagaaaagcgacagcaccaggtactacgaaatcctcggcgtttccaagaacgctttcgccggatgacttaaagaaggcttacaagaaagccgccattaagaaccatcctgacaaaggcggggatcccgagaagtttaaagagcttgctcaagcctatgaggttctg

SEQ ID NO: 38177 - DNA, 276 bp, Glycine max
  unsure (1)..(276): unsure at all n locations; Clone ID: 701119434H1
gcctctcagcatctcgcaacattgactggtcaccaaggacctgtttggcaagtggcatgggctcaccctaagtttggttctctacttgcatcatgttcctatgatggtcgtgtcattgtttggaaggagggtaaccagaatgaatggactcaagctcatgtgtttgatgcccaaaannacatnntgnaaaangggtncncngggnccccaccangatggggnttgancggnnctntnggcannnntcnggggacaaanganttttctccnccnang

SEQ ID NO: 38178 - DNA, 269 bp, Glycine max
  unsure (1)..(269): unsure at all n locations; Clone ID: 701119435H1
ggggaacccaaacagactattagttacatggcagaacgggttgtaggaactggatcatttggaattgttttccaggcaaaatgcttggacnactggggaagcagtggctattanaaaggttttacaggacagaagatacaagaatcgcgaactacagttaaatgcgtgttttggatnatccaaatgtggatccnctngngngnatgttncnaccnnctccagtnnggncnnacnaaanngagngggnnnnntccnngncccanagtngg

SEQ ID NO: 38179 - DNA, 218 bp, Glycine max
  unsure (1)..(218): unsure at all n locations; Clone ID: 701119436H1
atcccagnagaggagaaagntggaggggaaggagcaggatgtgtcgttgggagcgaacaanttccccgagagacaggacaattgggacggcggcgcagagccaagacgacggcaggactaccagaagncgncgcnggcccntngnttnacccgncgggntttacgtaaaggtcntttnacatagcanngcaaagnagagtnggganncnaantnnctg

SEQ ID NO: 38180 - DNA, 263 bp, Glycine max
  unsure (1)..(263): unsure at all n locations; Clone ID: 701119438H1
ctctttctctctgttttctggtaattcatcaattgattcaaaatgcagaggctcaaactgcaactagtgctattcctctcaatctcaacttgtcacactgttttctccttcactgatgggttgttgcnaaatgggaacttcgagccanggccnaaagccatnanaaattganggggnccnnnatnacnggccacgatgacatnccgaatnggaaaagnggggggttcgntgangaaagaaantngggacaaaaacggggtgac

SEQ ID NO: 38181 - DNA, 274 bp, Glycine max
  unsure (1)..(274): unsure at all n locations; Clone ID: 701119439H1
ctctctttctctggagtatcctcccctttatttcctcgtcctaccaaactccaaagccgtttccaagtgtaatggattcgagttccattaacagcaacagtnaggagataaccatggagattccaagcttggttcgactttacaaggatggcaccattgaacgcctccaaaactcaccaattgtgccacccacgcttcaagatccaacttcttccaaagacgngcgtcatcttctggtgacccccttcatctctgctcgtcttttcctccaaac

SEQ ID NO: 38182 - DNA, 269 bp, Glycine max
  unsure (1)..(269): unsure at all n locations; Clone ID: 701119440H1
atctgttgagggggtttaatactgaaaatgggacaagtgttaggttgcgtgcaagtggatcagtcaannttggccatcaaggaggttttcgggaagtacgatgatgttctcgaacctggttgccactgtgtttccatggtgtttcggnnagtcgtgtggctggtgctctttcttgcgtgtacaaacagctagatgttcgctgtgaaaccaagactaaggacaatgtctttgtgactgtggttgcttctatccatatcgagcattggcag

SEQ ID NO: 38183 - DNA, 232 bp, Glycine max
  unsure (1)..(232): unsure at all n locations; Clone ID: 701119441H1
gctacactgtgtggactctgtaccctgaagagcataattcctatgttcaggacaaagaattggagaaacctgaacctccaaacgacaaggtcactcctccttctgccagctgctgctcaagaggttgcagatcatgctagtaaaaaggacacagaggagttcacttgacaaaggtcatctactnaaaatctagtatncnttatgaatactcaagagataggtaatatttttt

SEQ ID NO: 38184 - DNA, 260 bp, Glycine max
  unsure (1)..(260): unsure at all n locations; Clone ID: 701119442H1
ctcggttgcagaacagaacaaacttctttnactctntcgcttctgaatcttnaacaatggtgctcgangcgacgatgatctgtatcgacaattctgaatggatgcgtaacggagattactctccttctcgntttcaagctcaagcagacgctgtcaatctcatatgcggtgctaaaacgcagtctnntnccggaaaatacagtgggagttctcacaatggctgggaaaggcgttcgtgttttggttacccctaccagtgg

SEQ ID NO: 38185 - DNA, 265 bp, Glycine max
  unsure (1)..(265): unsure at all n locations; Clone ID: 701119445H1
gtgggatgctaccctgcattcttggtggaacttcctcataatagttcagacattgncgaatttggatgcttggtttcatacaacaatgcagtagtggaatacaacaacatgttgaaagagacattgaggcaaactagagaaagtctttctgatgcttctgtcatttatgtggatgtttacgctgttctgttagagctcttccggcatcccncttgctcatgggctaagtatggtataaaagcatgttgtggatatggagggggng

SEQ ID NO: 38186 - DNA, 267 bp, Glycine max
  unsure (1)..(267): unsure at all n locations; Clone ID: 701119448H1
gggttttcccaaccctcttcncttgttcgaaactaggctaatcaaaaccgaaacaaacgattacaaaaacaagaaaagaagaaaaataatcattcattgctcggtgagaagagagagaggaacggcccgatgaccgggaaggcgaacganagaagcacacggcgaaggaaatcgccgcgaaggtggacgccgccaccactaaccgcggcggcgggaaggccggcctgaaggaccgatccgggttggagaagggcgggcacgcgaaat

SEQ ID NO: 38187 - DNA, 279 bp, Glycine max
  unsure (1)..(279): unsure at all n locations; Clone ID: 701119449H1
caggtacagacggcgtgngctcttcttgtgatttgtgntgcaagcaancaaccaccctnnnnnnnnnnnnnnnnnnntcacacctccataaatctcttttnttcttcantccaacaaaacaaacaaggtttgnatttgcttaactggagacagnttntgtagctggttaccatcccaatanntntaatgattctggagtacactnnctctcttctantggnttctgagttcncntaacagatttggtctnaaatcaagtagganttggangtgngancc

SEQ ID NO: 38188 - DNA, 264 bp, Glycine max
  unsure (1)..(264): unsure at all n locations; Clone ID: 701119450H1
atgtaatctctcctttaccaagttttgtnttactatttgatcggatcggatacggatcttgctttcgccattaattactcatggagatccgtgccgatgcagataccagctccttttcaagtttgttcgcagctgtgtcatatggatttacatcaatggcnatggttttnatcaacaaggctgttctnaggcagtgtgcngaatacaatgnccctccncannnggcaacnagttggnaaccannggattganncatgggganag

SEQ ID NO: 38189 - DNA, 83 bp, Glycine max
  unsure (1)..(83): unsure at all n locations; Clone ID: 701119451H1
agatganaagaaacgtcaacattanctcatcaaatcctcaatgcncaaggaagatnggttatcatgcaatacanacagacang

SEQ ID NO: 38190 - DNA, 244 bp, Glycine max
  unsure (1)..(244): unsure at all n locations; Clone ID: 701119453H1
cttgtatcaaacatgggagntcagtacttttctgttggtggcatgttcctgtttgtcttaacatttgcnnctcggagctgagcccagttccaggtctccttctaccngaaatctttnntagtncgaataagannncaacgcngtggcagcctgaatgncaggncanggggngaaaaatnncnttgtaggnanactgnncatgacnntcgcncgggaaaaannggcacaaagngnactttgctac

SEQ ID NO: 38191 - DNA, 272 bp, Glycine max
  unsure (1)..(272): unsure at all n locations; Clone ID: 701119455H1
ggcggngctgccttgttccgttacggtcttcttctctgaatcatcgtcttaggntttgcagaatttcatttgctcntttgattgctatactgtacaaccattccattctttcgctcgtcncactcgccaagtnaaatcaatcatccagagcttccagcgattcgatatttcagagcaagcaagcactgcaaggcaactgcaatgggtataatcaggagtacatctctttcatgcagggacagcctttggggtttactggctcagaatatcaa

SEQ ID NO: 38192 - DNA, 276 bp, Glycine max
  unsure (1)..(276): unsure at all n locations; Clone ID: 701119456H1
ggggattagggtttaggaagcagcgacaacaatggatttcacagcggagaagaaggantgcagagagcaacaccgaaaatgctcatccaacaactttagattcttcttctcaattggcatcggcacttgattccagcaacaaagaaatctcaagaacgacaagctcgtgaactgcaaagccggtcttgcaccccctgcaagcacaagtttgtcttctggtacacgcgccgaacacctggagttcgaaatnaaacannatanngaggacaactnaag

SEQ ID NO: 38193 - DNA, 268 bp, Glycine max
  unsure (1)..(268): unsure at all n locations; Clone ID: 701119457H1
cgggttctggggcaatttttaccggagacactttgttcagcttatcatgtggcaagctcttagaaggaacccccaaacagatgttattctctcttaaaaggatcatgtctttgcctgatgatacaagtatttactgtggtcatgaatatacatncgagtaattcaaagtttgcctgtctatagaacctgaaaacaaggaacttcaatcctatgctgcccatgtagctaaccttagaaataagggctgcccacgattccaactacggtg

SEQ ID NO: 38194 - DNA, 267 bp, Glycine max
  Clone ID: 701119459H1
ctaccagaatcttacgaagcttacaggaaacagcagcatagatggcattctgggccaatgcaactgttccgcttgtgtttgcctgatatcatcagggccaagataagtgtgtggaagaaattcaacatgatattcctcttcttccttcttagaaagctgatattgccattctattcattcaccttgttttgtataatcctgcctatgacaatgtttgtgccagaggccgagcttcctgcgtgggttgtgtgttacatccctgctgcc

SEQ ID NO: 38195 - DNA, 269 bp, Glycine max
  Clone ID: 701119460H1
ctttcgtataagcagcacccttcaattttaattgggctttgtttccgcatgcctcaaacctccatgcaaatagcactttggtttccgtgagtgtctttgagagagaatcttaaattctacaacggttcagttgtattattatatttaatactatttaatctccaacagtatatatagtagtatatactgacgattctgatgtgggagtgtgagaacagagtagcagagtgtttgtccaaacaaacaaggttgtctctgaagttgtggcg

SEQ ID NO: 38196 - DNA, 266 bp, Glycine max
  unsure (1)..(266): unsure at all n locations; Clone ID: 701119461H1
atggtgagcacctccttcatgaggaagcaacctatgacgaccaagagcctaaagacattccccaacgctctttttggtctgaaaggtggacgaggtggtcgtgtaacttgcatggcctcgtacaaggtgaagctcataaccccagaaggagaagtggagtttgaatgcccagatgatgttttcattgttgacaaggctgaggaagaaggcattgaacttccctactncgtgcagggctggttctgcgtttncatgtgttgggaaaa

SEQ ID NO: 38197 - DNA, 270 bp, Glycine max
  unsure (1)..(270): unsure at all n locations; Clone ID: 701119463H1
actctcaccatcttcatcactacttatntttnccccttcancctaatgaatncacttccctgcatttttattttgactgaaagttnctgaagaagaaagatatgagnctttttcagtcttctcttttacttccttctacatggttgaagcatagccattccccatttcatcaatagctataaaaatataaccccttgtttcagcaacctgcaaacttgtcaaagttgaagtcttcaagcacttagtttctaaagttaactccntaaggtt

SEQ ID NO: 38198 - DNA, 272 bp, Glycine max
  unsure (1)..(272): unsure at all n locations; Clone ID: 701119464H1
ctacttttgggacctagacctggacctggctgggcatccagggcaaaccttttgatctctcagcaatgtctggtctgctcaatgntccaagtatcaaggaattggctgaacagatagcaaaagatccatcgttcaatcagatggctgagcagcttcagaaaacttttcaaggagctccacaagatgctatccctagcttcgataatcaacaatatttttcaaccatgcaacaggttatgcagaatcctaattttatggaccatggctgngcg

SEQ ID NO: 38199 - DNA, 269 bp, Glycine max
  unsure (1)..(269): unsure at all n locations; Clone ID: 701119465H1
gggaagagtttaatatttttgtgctttcctttgcttgctgctatgagaggatgatgatgacaataattgttgcaaaatggtgttagtctacatatgatgacgctgctaatattttccatgctcgaatttccatattcccaaccaatctacatattttctaacactccaatcaccctatctaaccanttttacacaacaattatcatagacaacagagaataagattccagtatctatcataaaaatggagaagagcacaaccaacatca

SEQ ID NO: 38200 - DNA, 219 bp, Glycine max
  unsure (1)..(219): unsure at all n locations; Clone ID: 701119467H1
gttttagtccagtggactttgtttcttgtgcaattgaacctcttgacaatgttggtgtggcttgatggccaaactaagctgattcataggtttgttgttctgtgctattgtgtgggtntcgattaatagaaattactgactncanaatacgcnctgntntnntnatnatgggtgtacnatncncatgnnggnnggnntnntaataagaaaaacnnggnc

SEQ ID NO: 38201 - DNA, 176 bp, Glycine max
  unsure (1)..(176): unsure at all n locations; Clone ID: 701119468H1
gctgcattcaagtccctcacaatggcggaatngtgccttctntccctcccttccctcttctacgccanaaacaatanccnntctctctcaattcccaccaagcccctcaannancatcttccatggctccaantctnggcctntttccntagncgnganaacaacgnnnnagtntt

SEQ ID NO: 38202 - DNA, 269 bp, Glycine max
  unsure (1)..(269): unsure at all n locations; Clone ID: 701119472H1
tctcaatcatatcacacacacaaacatatgctacaaactccacttcttcaacacnaaaatccgattactgtgctccaacacaaaaaaatgaaacctacaatcaccattctcttgtngtctctactacttctcataacttcaccctccttggcaacccgacccgcatccaaccctgnatcaagtcaagcacaacaaaaacaacaaccaaggtggtggtgctggtgctggtgctggcgggttcttggccctggaggagggttcaagcatac

SEQ ID NO: 38203 - DNA, 267 bp, Glycine max
  Clone ID: 701119474H1
gccatggctgccaccaccgccaccgccacgtcatacttttttggcacccgcctcaacaacccgacaaccttaaacaacggaagattccacgcgctcctcaacttcggcaaaaagaaggcggcggcgccgcaaccgaagaaaaaggaagtgaaagtgaaaccctccggcgaccggctggtgtggtttcctaatgcggagccgccggagtggctcgacggaagcatgatcggcgaccgcgggttcgacccgttcggtttcgcgaacccg

SEQ ID NO: 38204 - DNA, 265 bp, Glycine max
  unsure (1)..(265): unsure at all n locations; Clone ID: 701119475H1
cacaactcagtgcaagagcatccgaggngaagagaagagaaaaattaagatggangggaaggancaggatgngncgcngggagcgaacaagttcccgganagacagccgattgggacggcggngcagagccaagacganggcaaggactgccaggagccggcgccggcgccactggttgaacccgacggagtttacgtcgnggtccttntnacagagcaggatagcagatttgtggccattttctgntngntnncanncnangtc

SEQ ID NO: 38205 - DNA, 264 bp, Glycine max
  unsure (1)..(264): unsure at all n locations; Clone ID: 701119478H1
agcagcccatggatctgggtactgtgaagtccaatctctctaagaacgtgtacgccacgcctgcagatttcgcctctgatgtgagattgacgttcaacaatgcactggcttataaccctaagggtcacgacgtgtacaccatggcggaacagcttctggctaggtttggggnactatatcgcccggtncatgagaatttcgangntngnananttcatgaccngcgattctggggaggaattgcaanccagtncgtggagccag

SEQ ID NO: 38206 - DNA, 263 bp, Glycine max
  Clone ID: 701119479H1
gtggcagcagtgacaatgctagcatttgtgttgacaggtggatactatgtccataaggtgccatcttgcatggcttggatcaaatatatatccacaaccttctactgttataggctgctgactagaatccagtatgaggatggcaagaagatatcatatctattgggttgctatcatggtgataagggtggctgcaggtttgttgaagaggatgtggtggggcaaattggcaccctaggatgcattggggtgttgcttttcat

SEQ ID NO: 38207 - DNA, 259 bp, Glycine max
  unsure (1)..(259): unsure at all n locations; Clone ID: 701119480H1
cttctttnttcttatgtgtcggacatggctcagtgtcttcangnggganangntcttcctgactgctatngncttnntgtttatccttctatcacttatacnggnacaacnatgctcatccggggtatgttatggaananttggcaacaanttancgacccctcnaggagttgtggccctctancgatacnngccgacattngcaggatgcngatntaaggtccaagccaggagnctcgaagcactaagaggntccaac

SEQ ID NO: 38208 - DNA, 252 bp, Glycine max
  unsure (1)..(252): unsure at all n locations; Clone ID: 701119481H1
cgaaaatggcgcagaagaagaaaactagggtttccgacgacgaggaaatggaagtgcaacatnatcaaaccagcctttaccaggttcttggcgtggagagaacggcgtctcagcaggaaataaagaaggcgtactacaagttggcgttgcggcttcaccccgataagaaccctggtgatgatgaggaagctaaggagaaattccagcaactgcaaaaagtnatgtcnnnnctcggggataaagaagcccncc

SEQ ID NO: 38209 - DNA, 269 bp, Glycine max
  unsure (1)..(269): unsure at all n locations; Clone ID: 701119484H1
gccataccgaattggacaatttcggggttcgttgaatacataaaatcaggacaaaaacagggtgacatgttactggttgtgcccgagggtgactatgcagttagacttggcaacgaagcttccattaagcagaagctgaanctgattaaggggtcttctactccatcacgttcagtgcagctcgaacctgtgcacaagaggagaagctcaacgtgtgcagtggttccaaccaccganaagggnntgtgggntantccccncnngnnang

SEQ ID NO: 38210 - DNA, 272 bp, Glycine max
  unsure (1)..(272): unsure at all n locations; Clone ID: 701119485H1
gctcccagtactttaattgatttctgaatatgcatcacttaatttgaaggaaagatggtgagcgtagtgagcatccgncaggcacnaagggcagaaggcncagcaaccatccttggccattggaactgcnaacccaccanactgtgttgatccagagcacctatcntgaantantattcagaatgngccaacagtgagacacttgaccgagcttcaangagaattcnagngcatgtgtgaaaatatgnganacnggggagatntatgccnca

SEQ ID NO: 38211 - DNA, 270 bp, Glycine max
  unsure (1)..(270): unsure at all n locations; Clone ID: 701119486H1
gtaagattgaaagtcttctccaaaanctcacatctgtgagtcctgaagaccanagatcagctgctggcgagatcccgccttcttgcaaagcncaacgcagntaaccgcgttgccattgctgaagctggtgcaatacctctccttgttggtcttttgtctgtgcctgactcccgcactcaagaacatgccgtgacagcgctcctgaatctttccatatatgaaaacaacaaaggaagtattgtttcttccaggagcagttccaggtatagt

SEQ ID NO: 38212 - DNA, 266 bp, Glycine max
  Clone ID: 701119488H1
cagcatcagtatgtgttggtcaacacacacacagtttgagttagagttggatggacatggaatggtgcctataagaatcagagaaagagaaaggatccacaacattaggttgaagaggaaaaagttggaggacattccggaggaaaccgagcttcctattgatactaatccagcagagcttgaagaagcgagcctcacttggaaacagatttggaaatactgagccgagccatggatatgggacttgggcactctgcctcggtttc

SEQ ID NO: 38213 - DNA, 265 bp, Glycine max
  Clone ID: 701119489H1
aattcgctcctcagggtaccggaaggcttgcaaaatctaaaaaagttgcaatggcttagtctttcccgcaagctgaatttatcattagtaccgttatgcgtactgcccggtttgagcaatatgcaatatctggatctccgcggttggtctggtataaaagtagaagatgtaaaagggatgactatgcttgaatgttttgcagtaagctttctcgatcaggattactacaaccgttctgtgcaagaaattcaggacactggttatg

SEQ ID NO: 38214 - DNA, 267 bp, Glycine max
  unsure (1)..(267): unsure at all n locations; Clone ID: 701119490H1
cgaacactgcaggaagagagaaaggcgatggacntcggaacctatgaagtgccagaaggagtggacattctaggaagatacgatgcagagtttgcaaaaatcctcacaaaagacgctttgaaattcgttgctgcgctgcaacgtgagttcaggagcgttntccannnttcntngaaganncnaaggaacggncaanagaaatccannaaaggnnacctnncaggggnnnanncnagcancgatnnaantaggnganccngggtggtg

SEQ ID NO: 38215 - DNA, 264 bp, Glycine max
  Clone ID: 701119491H1
gcattgggctacttatgggcgccattattatactcgatatgactatgaaaacgtggatgcaggtgcagcaaaggaactgatggcatatttggtcaagctgcagtcctcactttcagaagtcaatcagattgttaaggggataaggtcagatgtttcgaatgttgtccacggtgatgaatttgagtacaatgatcctgtggatggttccatctcatcacatcagggaatccgatatttgtttgaggatggatcacgattgatttt

SEQ ID NO: 38216 - DNA, 264 bp, Glycine max
  unsure (1)..(264): unsure at all n locations; Clone ID: 701119492H1
ggggtttcgatcccaaattacaaattggtcgccatgaacgcaacctcatactctgctcttccttctacgttccgcagtctccatcatcngaatttctcagcgttttgttctgatatccaaaatcctggctatgttgattgccattcaaattgtaataagtctacatctcaagcgtctttgtttttgtgttccgactccaacagtagangaaatggtgtttttggtagaccactttgtgtgaacccctctggcaggagaaaccta

SEQ ID NO: 38217 - DNA, 264 bp, Glycine max
  Clone ID: 701119493H1
catggcctcaagagcagtgttattgttggctatgtgtgtgcttccggcgatggttgtggccattcgcccagcaaagaaccctttttgcgtgaagggtcgtgtctactgtgacccttgccgtgctggttttgagacctcagctaccacctacattgctggtgctgagattatgttgcaatgcaagagcagggttagcaacgaggttgtgtgacacgaagaaggggtaacaccgactgcaaccggagcatacacaatgtacgtgga

SEQ ID NO: 38218 - DNA, 263 bp, Glycine max
  unsure (1)..(263): unsure at all n locations; Clone ID: 701119494H1
cgaaaganagaggcatggccgagcaaaccttcatcatgatcaagccagatggcgttcaaagaggccttattggcgagattattagcagatttgagaggaagggtttttacttgaaagggttgaaactcgttactgtggaccgtccttttgctganaggcactatgctgatttgtctgaaaancctttcttngggggtttggtggannacatgncnngccccctgttgtcnccatcatgnngggggggaaataagttatnnccc

SEQ ID NO: 38219 - DNA, 266 bp, Glycine max
  unsure (1)..(266): unsure at all n locations; Clone ID: 701119495H1
gggcttctgtgcctcaaccaaaaatctcccttctaaccttattcttcttctcttccttcaccatcattgcgnntgcaattgttcctcaaaacgaaaccttgccaatttgagaactcaggtgaacttggnccctanatngttgagtacggtgcagattacagantgataagcatcttnaactctccattccaagtnggtttctacaacaccaccccaaatgccttcactctagctttgcgngtagggctccaacgctcggaggcagt

SEQ ID NO: 38220 - DNA, 265 bp, Glycine max
  unsure (1)..(265): unsure at all n locations; Clone ID: 701119496H1
catacctcaacgaagaggttaaagagacggcaacactttgctgtncgccttgaccgagcagagcttcgtcttggccctcgattttgccctaaagtactctcagtcacaacagacacnnnnnnnnnnnnnnnnnnnnnnaatggcaccgaagcagaccaaggctgagaagaagatcgcttacgatgcgaantgtgcgacctaatggaggagtacggccagatcctcgttgtgaactccgataacgtgggatcgaaccagtccagaa

SEQ ID NO: 38221 - DNA, 126 bp, Glycine max
  unsure (1)..(126): unsure at all n locations; Clone ID: 701119501H1
cccatggccaccacctccgcattcctcctccttcncctcntcctgctgctccacctcgccatcgccgntcacggcatcggcatcaactacggcacgctcggcgacaacnttcnacagancgtngga

SEQ ID NO: 38222 - DNA, 261 bp, Glycine max
  Clone ID: 701119503H1
gaaattttgaactcaccacacaatagagaatctgaatcaatcgcgatcacagagcgtgtaagcaataagcaaataacaatgttcaacgcttgacattgtggtgttagtaacttaaccaccgttctggaacttgggattattctgatacagcacctccaccgttactactatgggccgtcactcttccagcaaccactctccctcctcctcacgccgccaccggagccaccgcagcagcgtctctccgcctctacgagacaa

SEQ ID NO: 38223 - DNA, 260 bp, Glycine max
  unsure (1)..(260): unsure at all n locations; Clone ID: 701119505H1
atttactcattanatttaattacattatgtgtactgtttactggaaagttgatgttacctaacatacatgaatttccgcgggatgcaacgtatatataattagctttttcacattccgcatcaaaaatctatnctccatatcaaggacaaaatttgatttagcaaagtcatttttctcccactgcttctggtcatatctccactcgttactcctcaggaggatgaacatatgtggtggatttcacctctgaaggcaccat

SEQ ID NO: 38224 - DNA, 259 bp, Glycine max
  Clone ID: 701119506H1
caccaatctcacccatttcaaaaaaaggccgttagtgttactattcgtaaaatggccactcttgttctttaccaattctttctcaaactcttgctcctaatttcagtctttcagctttcctttgctgctaggagactcaaccagctggttcaggaccagtcacagttactccattaccacaacggtcctcttctatacggcaaaatcgccgtgaacctaatctggtatggtcacttcaaaccatcccaaaaggccatca

SEQ ID NO: 38225 - DNA, 255 bp, Glycine max
  Clone ID: 701119507H1
attggaggtcaagttgacgaggctctaaatatgcttgagaagcaatgttgtaattcagcctctgtactcccaataagagtaagggctgctctcttggagcgttttgatcgaaacaactctctcctgcttcttagctgtttttgaggatatattgaagaaggatccaacatgtagtgacaccttagcaaaacttatcaagatgcaccaaaatggagactatagtctgtatctctgctggaaatgatgctttacatt

SEQ ID NO: 38226 - DNA, 250 bp, Glycine max
  unsure (1)..(250): unsure at all n locations; Clone ID: 701119510H1
ctagaatttgcatgcactgttcttcatacaatggcattacgcgagcttatncgtgatggggttattgctgctggtttgtcttgcaaaggtttcatctgatgttaacatagaaaaggagcaagatgaagaatttcgctttcctgttgaccatcttatcgtgagaggcgggaacagaaggctaatgcaggacatagattgtggaggattgtggcaagacaaggtgccagtgcccatcaaggccaaatgtgtg

SEQ ID NO: 38227 - DNA, 257 bp, Glycine max
  Clone ID: 701119511H1
cttgttccttttgaaggttagaagtgctacaatacaaacaatggcagctactcaggaagatgtgaagcttttgggtattgtgggaagcccatttgtgtgcagggtccagattgcccttaagttgaagggagttgaatacaaatttttggaagaaaatttgggcaacaagagtgatttgcttctcaaatacaaccctgttcacaagaaggttccagtgtttgttcacaatgagcagcccatagcagagtcctctgtga

SEQ ID NO: 38228 - DNA, 258 bp, Glycine max
  Clone ID: 701119512H1
gcaaatctcaatcgaatctcagaaaaatgagagaaatcatcagcattcacataggtcaggccgggatccaggtcggaaactcctgctgggaactctactgcctcgaacatggcatccagcccgacggcatgatgccttctgactccaccttcggtgtagcccacgacgccttcaacaccttcttcagcgaaaccggatctggcaagcacgtcccccgtgctgtcttcgtcgacctcgaacccaccgtcatcgacgagg

SEQ ID NO: 38229 - DNA, 258 bp, Glycine max
  Clone ID: 701119513H1
tatctcagcttgttagcactttctttttcttcatttcattatttttctcaaaatgtcaactttcatgttgaaaatcttccttctaatttccatctttcaaatctctttcgccactaggaggttgaatgagttagttcaggaccaaactcagcttcttcgttaccacaatggccctcttctctctggcaaaatctccattaacctcatttggtacggccacttcaaaccttcccagaaggcaatagtctccgatttcat

SEQ ID NO: 38230 - DNA, 257 bp, Glycine max
  unsure (1)..(257): unsure at all n locations; Clone ID: 701119514H1
gccaggaactcttgtntngctncgctcctgcttccncttcggatccatcncgatanccctcacacagaattatntcantttntgtgttcggttcaantctttnggantttgcnagatccgaagcgccanccatttccaagntcgttnaanatggctcagcggcgagtggggncaccggatggtacangggaanagtgaaggcggttccttccggggactgtttggncattgtggcgatctccagcaccaaacctggt

SEQ ID NO: 38231 - DNA, 255 bp, Glycine max
  Clone ID: 701119515H1
ggattcttagatgatttgtctgagacttgcaagatgggtagtccgaatggaagagcaatgtataggacagacgatgaagttccttttgactccgaaataaattttcacccgtcagaatcgagtctgatggatgtacatggatcacattctggagaatctcggactgtccatcatgaaacgttggcgggtatgatttacaggagcatacaagttgtagtctttctaacaaactcaacttgctatgcctttgggcct

SEQ ID NO: 38232 - DNA, 262 bp, Glycine max
  unsure (1)..(262): unsure at all n locations; Clone ID: 701119516H1
aaacccccttcnggaaactcancttcgtgananttcggattcnacnaagaacatngcccattggagagcaacagaagcttctcnaactcttcaattaccgagatgaactcgacggcagcatccttgacccaaacagttctcaggaacgagagctgatgcaaaatgatgtcatcttgtcgttgtagtcctcgacagancgggaaaatagggttccnaagtctacgattcagcaaaggaggacttcgtgggcaagatngtgttc

SEQ ID NO: 38233 - DNA, 260 bp, Glycine max
  Clone ID: 701119517H1
gctccacccgaagtggtggcgcgtatggctgcggctaagcaagagtttgaggcacggcaaagatcttcagttggttcaagggaaacttcaaaagaccctgaacttgaccaattcatggaagcatactatgacatgcttgtgaagtatagagaggaattaacaaggcctattcaagaggctatggatttcatgcgaaggatagaaactcagctaaatatgcttgcaatggacccgtgcggatctctctgatgataatgtga

SEQ ID NO: 38234 - DNA, 261 bp, Glycine max
  Clone ID: 701119518H1
gttgcttggtgatgtccctttctgttctcttcactcttggtcttgcgagagaaagccatgccagagacgaagatttttggcatgctgtttggccaaacactcccattccaagttcattgcgagatcttctaaagcctggccctgcaagtgttgaaatcgatgatcaccctatgcaaattgaagaaacacagtacccgaaaaccttcttctataaagaagaccttccatccaggcaaaacaatgaaagtacaattcagcaag

SEQ ID NO: 38235 - DNA, 200 bp, Glycine max
  Clone ID: 701119519H1
ggcggcacatctgacaatgtcttccgcccggatcgaccggccgaagccgaccttgggtccaaaaagaggggcagtgccccgcttccgattcacggaataagtaaaataacgttaaaagtagtggtatttcactttcgctgtttccagctcccacttatcctacacctctcaagtcatttcacaaagtcggactagagtca

SEQ ID NO: 38236 - DNA, 235 bp, Glycine max
  Clone ID: 701119520H1
ctttcgctgttcatctctcccatactgattgacaaacccaaaccctaaccctaatcacacgaccagcatggtgaagaataaggtccccgattggctcaacagctctatatggtcctcatcatcgccgtcgtcccctccctcctccgccgtcgccagccccttcgaacagccaccgcgtcctccgtctcccgccgtcgtgaccccctttgaaccaccgctccgcgtcctccgtcgc

SEQ ID NO: 38237 - DNA, 254 bp, Glycine max
  unsure (1)..(254): unsure at all n locations; Clone ID: 701119521H1
atcggaannaggattagggtttgtggagatgcaagggcaaggcgttgatgaagtgagcatagaagagttggcgtcgaatctttccctctacaaagatcaactgaaccaggttagagaactcttaaacgatgaccctgcaaattctgaatatgttgacatggagagggaactttccgaggtcattgcctgaccgaggaactcctgcaactgcaaagcagnntgaaatctctgctcctcctaataatgctgctgca

SEQ ID NO: 38238 - DNA, 257 bp, Glycine max
  Clone ID: 701119522H1
attttctattttctcctctccatggcttcagattccaaaaaggatttccctgctgatgacaaagctggaacagaagagagtaaaacatccaaagatgagacttcatctaaagattctccagcagaacaaagagcgacagtacttttggacctagacctggacctgctgggcatccaggcaacccttttgatctctccagcaatgtctggtctgctcaatgatccaagtatcaaggaattggctgaacagatagcaaa

SEQ ID NO: 38239 - DNA, 200 bp, Glycine max
  unsure (1)..(200): unsure at all n locations; Clone ID: 701119523H1
ctcactcacctctgcacttttctgtgattcattcagacttatagaaaacaaaaaaagagcaaacaaaatgttgcggtcacttgcgaganccgcagcgaccaatcatcgatggcatcacaatcacgccacgttctcatctntcggccactcttctaggcccccaaagcccacaccacctttcaaacccgatcccaaaaaac

SEQ ID NO: 38240 - DNA, 223 bp, Glycine max
  Clone ID: 701119524H1
acgccaacgcaaacgcaaacgcgaataagagcgagaacattctcttcagctcaacccttttctttttcgatggctaatcggcacacgattattctaatgcagacctcgcagaacagagcaactaggacgttcatggattatgaatccataactcaggccatggatggcatatgtgcactgtatgaaaggaaactgaaggagttgaatccggctatcagaaatc

SEQ ID NO: 38241 - DNA, 257 bp, Glycine max
  unsure (1)..(257): unsure at all n locations; Clone ID: 701119525H1
cttcggtctcctcctattctccgctgccgtagccaccgtcgaaanaatcgacgatgaagacaaccttctgatccgtcaagtggtgccggatgcggaggaccaccacctgctcaacgcggagcaccacttctccgccttcaagacaaagttcgccaagacctacgccacgcaggaggagcaanaccaccgcttccgtatcttcaagaacaacttgctccgcgccaagtcgcaccagaaattggacccctccgccgtcc

SEQ ID NO: 38242 - DNA, 257 bp, Glycine max
  unsure (1)..(257): unsure at all n locations; Clone ID: 701119526H1
ctttctcagattcttccttcgtggtaaccggtcgaatcatggancccatggacattgttggcaagtccaaaggaagacgcttcgcttcctaaagcaacaatgacaaaaattattaaagagatgttacccccagatgtacgtgttgcaagagatgcccaagatctattgattgagtgttgtgtagagtttataaaccttgtctcgtcagaatccaatgaagtttgtaacagagaggataaacggacaattgcacctga

SEQ ID NO: 38243 - DNA, 121 bp, Glycine max
  unsure (1)..(121): unsure at all n locations; Clone ID: 701119527H1
cacttctcatattatacattagatagtatncaaatcaattcctgatncttgggatcacggccggcttctgattagtgcctccacggccggcttctganctagtccacatcaacatancgag

SEQ ID NO: 38244 - DNA, 258 bp, Glycine max
  unsure (1)..(258): unsure at all n locations; Clone ID: 701119529H1
gttttttcttctcctgcttttcagcccttccaaagaaagggtaaaanctgaacattncatgatttatccttgtaaggcggtgacaaaaaataatatagaaaagaagataccaactagaagtggaaacaaggaaaagcgggtggtgactgtatagtataaaataaaattgtgcccatagaaatagaatagtgacagacacactcgtgaatcgtgatttagcatttaccacaccaaaatcaatctgcggagtcagaaagc

SEQ ID NO: 38245 - DNA, 111 bp, Glycine max
  unsure (1)..(111): unsure at all n locations; Clone ID: 701119530H1
anaaaaaccctcttttntcttttttattaatccctttttcttcggcaaaattatctttttttattacactgctctcgaatttcccgtttngtaccttccacataacatang

SEQ ID NO: 38246 - DNA, 259 bp, Glycine max
  Clone ID: 701119531H1
gtagaaaatggtttcggggtcaggaatctgcgcgaagagggtagttgtggacgcgcggcaccacatgctggggaggctggcatcgatcgtggcgaaggaacttctgaatgggcagaaggtggtggtggtgcgctgcgaggagatttgcatctccggtgggctcgtcaggcagaagatgaagtacttgcgtttcctccgcaagcgcatgaacaccaagccctctccacggccccatccattccgtgcacccggcaagatc

SEQ ID NO: 38247 - DNA, 256 bp, Glycine max
  Clone ID: 701119535H1
gcgaccttgaagagctatggctgtcggaaagaataagaggatttccaagggaaagaagggtggcaagaagaaagccgctgatccctttgccaagaaagactggtacgatatcaaggccccttccctcttccaggtcaagaatattggcaaaaccctcgtctctcgtacccagggaaccaagattgcatccgaaggactcaaacatcgggtttttgaggtctcattggctgatctccaaggggatgaagaccactcc

SEQ ID NO: 38248 - DNA, 257 bp, Glycine max
  unsure (1)..(257): unsure at all n locations; Clone ID: 701119536H1
gagcggtttncgaagtcnctgctggacgatgatttcgaggcagggttcagagaattngaggatgactcggaaatcgaggatgtncgatgatgnnnnnnnnnnnnnnnnnnnnnnnnnnnnnnnnnnnnnnccctttgggttctctcgctccanaaancatnctacnggaaagnctctctctcgtggagcaacaactgtgaaatcctgtgganttcaaangggcaagctgagaatgtgctaagagaaagaggaagaac

SEQ ID NO: 38249 - DNA, 251 bp, Glycine max
  unsure (1)..(251): unsure at all n locations; Clone ID: 701119538H1
ttctctctgcattgcttcangttcttctgaaaagatntctcgnntgtatgttggtaacttggattcacgagtcaccgagagagatctcgaagacgaattccgtgttttcggagttattcggagtgtttgggttgcacgtagaccacctggtnatgctttattgactttgatgatcgcagagatgcacaggatgctatccgtgaattggatggtatgtttagaagaattatgttgttggaatgtaatagaat

SEQ ID NO: 38250 - DNA, 256 bp, Glycine max
  unsure (1)..(256): unsure at all n locations; Clone ID: 701119540H1
atgaagaggaacagaaaaaccacctcttcggcatcaaagatctcggtcacaagactctccttcagagtgatnccactctatcagtatatacttgaaaccagtgtctatccaaganagcacgagtgcttgaaagagatacgcaagatgactgcaaaacacccactgaacatcatggcaacaccagcagacgaaggacaacttctgagcatgcttgttaagctcacgaattcaaagaacgccttggaaattggtgtat

SEQ ID NO: 38251 - DNA, 253 bp, Glycine max
  Clone ID: 701119541H1
aacagcagctgcagcagcaatggctcccaaacgaggtggaaaggctccggctcttgccgctaagaagaagcctgagaaggtcacgaatccgttgttcgagaagcgtccgaagcagttcggaatcggaggggcgttgcctccgaagagagacttgactaggttcgtgaagtggccaaagaatgttcaaattcagaggaagaagaggattctgaagcagaggttgaaggttcccccagctttgaaccagtttacc

SEQ ID NO: 38252 - DNA, 252 bp, Glycine max
  unsure (1)..(252): unsure at all n locations; Clone ID: 701119542H1
tattgagccacttcgaatccgtcgcctcanctgcagatcacatcgngtttcacccgaatgcnctttntggactcgatttagatcgagttcttcataccctgatagtgtgggaggatatacatgaagaacgggataatggaatgcagtgtttgccattccaaattggtttccccctccgccaaaactatatcangggcttatgatcgccacaaaagtagaatatcgtccaagcaacgtggcactcnacgtctt

SEQ ID NO: 38253 - DNA, 252 bp, Glycine max
  unsure (1)..(252): unsure at all n locations; Clone ID: 701119543H1
gcnccagcnactcatacaagttttgcatctttacctggaatgtgggaccgaactctaactgtgaatggattttccaagacatttgcaatgnctggttggcggcttgggtacattgctggtacaaaacattttgttgcagcatgcggaaagattcaaagtcagttcacttncaggtgcaagtagtatatctcagaaagctggagttgctgcataggactaggctatgctggtggggaagctgtttcaaccatg

SEQ ID NO: 38254 - DNA, 252 bp, Glycine max
  Clone ID: 701119544H1
atgggttcttcttcttctatgtggacggtgtgtgtgattttggcatcactggcctctgcagcactctgtgccaacccacgcaggccagtggatgtacaatttggccgaaactacgtgcccacatgggcctttgatcacatcaaatatttcaatggtggttctgacattcagcttcatcttgacaagtacactggtactggcttccagtccaaagggtcttacttgtttggtcacttcagcatgtacataaag

SEQ ID NO: 38255 - DNA, 253 bp, Glycine max
  Clone ID: 701119545H1
tgtagatattgctattacgttcactggtttatatggggagcatccagatgatgcttataacccaaatgctctacctgtaatagaaaagattacaatcaaggatgtggtaggagaaaatatcaaaactgcaggtcttatagagggtatagaaggtgacaattttgtcaacatttgcctatcaaacatcatccttaatgtgacctcaaactatccatggaactgctcctacgttaaaggatattctgacttggtc

SEQ ID NO: 38256 - DNA, 254 bp, Glycine max
  unsure (1)..(254): unsure at all n locations; Clone ID: 701119546H1
atctcttaaccctatctcaaattcattcagattctcccttcccctttttgatttttcttagaaaactcccaacttcgaatcaatatgaagaaagtggtgctaaaggtggaactccatgatgacaaaatcaagaaaaangccatgaaggcagtatctggtatttcaggggtagagtcagtctcagtggacatgaaggaccagaaaatgactataattggggatgttgatcctgtaacagtagttggaaagtttac

SEQ ID NO: 38257 - DNA, 253 bp, Glycine max
  Clone ID: 701119547H1
atggagcactaggcatattgaaagcaggcctaaaagcaaagactgtgaagagggttgtttacacttctagcgcctccaccgtttccttcagcagccttgaagaaaaagatgtggtggatgagagtgtttggagtgatgtggatttgcttaggagtgtgaagccttttagttggtcatatgctgtttcaaaggtgttgtcagagaaggcagttctgaatttggagaacagaatggattggaagttaccactctt

SEQ ID NO: 38258 - DNA, 184 bp, Glycine max
  unsure (1)..(184): unsure at all n locations; Clone ID: 701119548H1
ggggntgaactancttnatatttaggcggantnttnaatttggcacctccctnntttacatcgncacccgcatccaaaagtcactcnattcccatnagaacacaaaacacngcatttcccttagcgtaggaantggaagtcacactttnagcctggcaagtccgttagctcgccttctgntccc

SEQ ID NO: 38259 - DNA, 257 bp, Glycine max
  unsure (1)..(257): unsure at all n locations; Clone ID: 701119549H1
gcgatactgacgtgcaaatcgntcgtcntgacttgggtatangggcgaaagactantcgaaccgtctagtagctggttccctccgaagtttccctcaggatagctggagcccgcgggcgagttctatcgggtaaagccaatgattagaggcatcgggggcgcaacgccctcgacctattctcaaactttaaataggtaggacggtgcggctgctctgttgagccgctccatggaatcgagagctccaagtgggccat

SEQ ID NO: 38260 - DNA, 206 bp, Glycine max
  unsure (1)..(206): unsure at all n locations; Clone ID: 701119550H1
ctgtagtgcacggataattagaatanaataatattcctaattagttaagtttggttgcttagttgatgaaaaaaggaggtagctttatattcaccgcccccctcgggacagattggttattgtttgacatggacggagagagaagcagaatggtgaaggaaaggaggggatctgatatttcctttcgcgttgaattccgaattcca

SEQ ID NO: 38261 - DNA, 252 bp, Glycine max
  Clone ID: 701119553H1
ggaaagtcttacccaactgtgagtgctgattaccagaaggccgttgagaaggcgaagaagaagctcagaggcttcatcgctgagaagagatgcgctcctctaatgctccgtttggcatggcactctgctggaacctttgacaagggcacgaagaccggtggacccttcggaaccatcaagcaccctgccgaactggctcacagcgctaacaacggtcttgacatcgctgttaggcttttggagccactcaag

SEQ ID NO: 38262 - DNA, 255 bp, Glycine max
  unsure (1)..(255): unsure at all n locations; Clone ID: 701119554H1
agttttgnngtttgaatctattagaatagaatcaaaccaaattgaangaagatcgatcgatccgatcgatggctctggtccggagttgaagtgaagcatgcggcggangncgcaccggaggagaattgctccgccaagnccaccaagcagggcgaggncctccgccactactattctcacaacatccacgtagctcagctccttctccgtcaaaagacgcataacctcaaccgtcttgaggctcagagaaacgag

SEQ ID NO: 38263 - DNA, 253 bp, Glycine max
  unsure (1)..(253): unsure at all n locations; Clone ID: 701119555H1
ctttgtggccatggcttcactcacgtgcctccgcccaacccaccntcntcttcatcgcggttcagtgcttctcgccatttcgaaccgctgcttcaaccattcctccttgctgaactggattctctccgtaaaccctcctcgaaccgctcctccacgcgcaatggccaanccctgttcctcacctgcccaagacttagtcgcttctcctggcgattttgaatttgtgctgcctctgaaaattgtggagtatccg

SEQ ID NO: 38264 - DNA, 250 bp, Glycine max
  unsure (1)..(250): unsure at all n locations; Clone ID: 701119557H1
atcctcatcataaataaccaaaaagaactgtacaagatggtttgcgaacctgatgaaactgatttgaacatacacatacctgctgtcatgcttccactagatgcaggtacnaggctggaaaaaatgctgacaactacttcatctgtgtctgtgcagctgtactcgccacttcgaccagctgttgacgtagcagaagtatttctttggatgatggcagttcttaccatattgtgtgcatcatattggtcag

SEQ ID NO: 38265 - DNA, 251 bp, Glycine max
  unsure (1)..(251): unsure at all n locations; Clone ID: 701119559H1
cttagccgccgatctctcagggcttgcatcttctcagctgtgaanatgtacacatcaaggaagaaaatccacaaggataaggatgctgaaccaactgaatttgaatcgtcagttggacaggcattgtttgatctggaaaataccaatcaggagcttaaaagtgatctgaaggatttatacataaactcagccgtgcaagttgatgtttctggaaaccgcaaggctgttgttattcatgtcccttacagatt

SEQ ID NO: 38266 - DNA, 94 bp, Glycine max
  unsure (1)..(94): unsure at all n locations; Clone ID: 701119560H1
gccttgtnnntgattaacgagaatggacaaggaagtggagcttnngntcccttgaaggtgaaatgnnccacccagcacatttcancanccnctg

SEQ ID NO: 38267 - DNA, 256 bp, Glycine max
  unsure (1)..(256): unsure at all n locations; Clone ID: 701119561H1
gcngcagcnngntgagcaggtctcaggaggnnaaggatgtctcacangaagttcgagcacccaaggcacggttcactgggatttcttcccaggaagcntgcngcnccgtgcacgcnggaaaagtgaaggcattccccaaggatgacccatccaaggcacccaagctcactggcattcttgggttacaaggccggtatgactcacattgttagagaggtcgagaagccaggatcaaagcttcacaagaaggnntttg

SEQ ID NO: 38268 - DNA, 94 bp, Glycine max
  unsure (1)..(94): unsure at all n locations; Clone ID: 701119562H1
cacaaatctgctcctttggcatatcttgcaatgaaaacctgagtgtccaccaactgccatctttncagtttccatgcttccacacaacatagcg

SEQ ID NO: 38269 - DNA, 256 bp, Glycine max
  unsure (1)..(256): unsure at all n locations; Clone ID: 701119563H1
aaaaccctaaccggtaaaacgattacgctagaggtcgagtcctccgacacaatcgataacntgaaagctaaaattcaagacaaggaaggcattccaccggatcagcagcgtttgatcttcgccggtaaacaactcgaagacggcagaactctcgccgattacaatatccagaaagaatcgacgctccacctcgtcctccgccttcgcggtgggcatgcaaatcttcgtcaaaaccctaaccggtaaaacgattacg

SEQ ID NO: 38270 - DNA, 144 bp, Glycine max
  unsure (1)..(144): unsure at all n locations; Clone ID: 701119564H1
gctacatcttgagtggcaaggcttggaacaatctccttgaaaacaagactgccttcaccaccaagaaagactatggtaaagaggagagggaagctcaatgggctcttgctcagaggaccctggnatggacttgcaaccaccaga

SEQ ID NO: 38271 - DNA, 255 bp, Glycine max
  Clone ID: 701119565H1
gtatcctttgaggatctcaattgtcaacagcagagctaccccttgtttaatgttaaggatagcgtattaagcagcgatctagattctgaacttgccattatgacatgtatgcatgctggttctgcggaggggccaaataacggaaggaaacctttggtgataacttcagaatttcgcagcaccactggcatccctgttgactgtggtggtgacgagcaaaaaagcaatgttgggttatttcaaaacaattcccag

SEQ ID NO: 38272 - DNA, 251 bp, Glycine max
  Clone ID: 701119566H1
accaaagcaaggcgacttggggtttgtactcctgtgctgtatgctgtggatcctgctttgcacacgttaacatttgaatatgttgagggcccttctgtcaaagatgtgtttcttgaattcaggtcacatgttgtcaataaagagtggctggatgatattgcatcccaaattggtgatgcaattggaaagctacatgatggtggtctattcaggtgatttaacaacatcaaatatgttactgaagagtgata

SEQ ID NO: 38273 - DNA, 250 bp, Glycine max
  unsure (1)..(250): unsure at all n locations; Clone ID: 701119567H1
cttccttgtntgcatnngaaagaagcactganaaattaagtctaatgaaagtggctactgttatagaaagttgtggctggtagtggagctacaatccttgagcttagagggaaattggtggatcagatggagtggttgccgtgtcaattgggaaattatctgatgtcactgaaattcacctatctgaaaacagacttcatggctcttccaacaaccattgtananactaaggcctaacaaagctgatctt

SEQ ID NO: 38274 - DNA, 250 bp, Glycine max
  unsure (1)..(250): unsure at all n locations; Clone ID: 701119568H1
ctttgagttcagcgaggaagtaggttgtggatattgatagaaacaaatgagatccgacgccttccaaacagctaacatttntcgccttcttctcaaggcagtcaagaaacatattgggaaggaagagaacaagagacattttatagaatttgtaacctcagagttccgtaacaaccgaaatttgtctgactgtgtggctatccaacagaaaataaagcttgctcgtgattatacttttctcttaacagtg

SEQ ID NO: 38275 - DNA, 251 bp, Glycine max
  unsure (1)..(251): unsure at all n locations; Clone ID: 701119570H1
cgaacctttcntgtcgtatgtacgaagcnaagtacccggaggtggacatggcggtgatgatacaggtgaagaacatagcggacatgggggcgtacgtgtcgctgctggagtacaacaacatcgagggcatgatcttgttctcggagctctctcgccgtcgtattcggagtgtgagcagcctcatcaaggttggccgcatcgagccggtgcatggtgctccgtgtcgacaaggaaaagggtttacattcgat

SEQ ID NO: 38276 - DNA, 241 bp, Glycine max
  unsure (1)..(241): unsure at all n locations; Clone ID: 701119572H1
gttggtttctcttgttcttttttgtaggtactgaggaagaaagaccaagacttatccgtgtgcttcacttagctcaagagcgtacaattcaggcaaaggccttgaagtcggagtgtgttaaggtttcttaggagttgctgctgtcttgactgaagaaatggaggtatatggcaaatcctatggttgcaggtcctgcaaatgttattntttctgtcaagtattttgggccaagaaggtccga

SEQ ID NO: 38277 - DNA, 248 bp, Glycine max
  unsure (1)..(248): unsure at all n locations; Clone ID: 701119574H1
cttgttgctgtgaggnaggagattcaagacgaaactgatagagagactggacgaaccaaacaaatttctactgttcccattcatcttagtatatactctcccaatgttgttaacttgacactcgttgatcttcctgggcttacgaaagtagctgttgagggtcaaccggatagtattgtgaaagacattgaggatatggttcgctcctacattgagaagccgaactgtataattttggccatttcacc

SEQ ID NO: 38278 - DNA, 97 bp, Glycine max
  unsure (1)..(97): unsure at all n locations; Clone ID: 701119575H1
gctgcgtgtgtgtgtgttcgagagcagagagacaacgaccccagancgctttccacaccnaccatcacganctcncctcanagtcgnntnncacgcc

SEQ ID NO: 38279 - DNA, 100 bp, Glycine max
  unsure (1)..(100): unsure at all n locations; Clone ID: 701119576H1
anttagtnncctattcagaagncgaggnnccngccaatgggtttgaggaagntctgacacgatacagaccaacatnatnccttcccncaaaactcgcngg

SEQ ID NO: 38280 - DNA, 249 bp, Glycine max
  unsure (1)..(249): unsure at all n locations; Clone ID: 701119577H1
agaagaagttagatttgaaattgaaaganaaacaaacttgggatataagaagaatggctagtggaggaggctatggagacgcgaaccagaaggtagattacgtgttcaaggtggtgctaattggtgattcagcggtggggaagtcgcagatacttggcacgcttcgcgagaaacgagttcagtttggattcaaaggccacaatcggcgtcgagttccaaacgcgcactttggtcatcagcacaagagcg

SEQ ID NO: 38281 - DNA, 251 bp, Glycine max
  Clone ID: 701119579H1
gggcaatgagaaggttcaggatcttctcctcctggatgtcacccctctgtctcttggtttggagactgccggtggtgtgatgactgtcctgatccctaggaacactacaattccaacaaagaaggaacaagttttctcaacatactctgacaaccagcctggtgtgcttatccaggtctttgagggtgaaagagcaaggaccagagataacaatttgttgggcaaatttgagctatctggcattcctcctg

SEQ ID NO: 38282 - DNA, 236 bp, Glycine max
  unsure (1)..(236): unsure at all n locations; Clone ID: 701119580H1
tcttccatgactgctatagccttcctgtttatccttctaatcaantatacagnctcaacagatgcacaatccggggtatgttatggaagacttggcaacaacttaccaacccctcaagaagttgtggccctctacaatcaagccaacattcgcaggatgcgaatctacggtccaagcccagaagtcctcgaagcactaagaggttccaacattgagttttgctagacattccaaat

SEQ ID NO: 38283 - DNA, 254 bp, Glycine max
  unsure (1)..(254): unsure at all n locations; Clone ID: 701119581H1
anaccctgcttcgtgaatcttagtgcatcaagatctctgtctctctgcaatcgaaaatgagcaagggaccgggtctcttcaccgatatcggcaaaaaatccaaagatcttttgactaaggactacagctccgatcagaaactcaccgtttcctcctacagcgtctccggagtgaccctcacttcaacatctgtgacgaaaggaggactctcaacaggggatgtggcagcactgtacaagtataagaacactgtt

SEQ ID NO: 38284 - DNA, 248 bp, Glycine max
  Clone ID: 701119583H1
gggggctagagtagttgctgtgaagaatgacttggcgaagttgcaacttacttcccctgtgtgcactagcaagggtgagaagattgcacttagtcgacgtgttgagaagcattggcgtcttatcgggtggggacaaatccaagctggaatcactcttgatgtccctcccgccccccatctgagttgaacactgatcacaagaaacaccagcagctataaaaaactgagatgaatttagatatgtggga

SEQ ID NO: 38285 - DNA, 248 bp, Glycine max
  Clone ID: 701119584H1
atctcttgccaaaagaggttgaaagtgcaagggctgcttatgagagtggcaaagctgcaattccaaacaagatccaagaatgcagatcttacccactgtacaagtttgtgagagaggaattagggactgggttgctaactggagaaaaggtgaggtcaccaggtgaagagtttgacaaattattcacagcaatgtgccaagggaaaattattgatcctcttatggagtgcctggggagtggaatggag

SEQ ID NO: 38286 - DNA, 250 bp, Glycine max
  unsure (1)..(250): unsure at all n locations; Clone ID: 701119585H1
ctttttttctccttgaactcgaatattcactatggcagatgaggangttctgctagatttctggccaagtccatttgggatgagggtcaggattgcacttgctgaaaagggtatcaaatatgagtccaaagaagaggacttgcagaacaagagccctttgctcctcaaaatgaacccggttcacaagaaaatcccggttctcatccacaatgggcaaacccatttgtgaatctctcgttgctgttcagta

SEQ ID NO: 38287 - DNA, 248 bp, Glycine max
  Clone ID: 701119586H1
gcaggaggcatcaccattgccacaatggttaaaggtcgccaaggagaacgtgtaagactctacgtcaggggttcaattcttggatacaagaggtccaagtcaaatcaatacccaagcacctccctaatccagattgagaatgtaaactctaaggaagaagttgcgtggtactgtgggaagcgcatggcttacatctacaaagcgaaggtaaagaagaacggaagccactatcgctgcatttggggtaa

SEQ ID NO: 38288 - DNA, 249 bp, Glycine max
  unsure (1)..(249): unsure at all n locations; Clone ID: 701119587H1
cgcaacctctctctcttcttttcttcagttcggtggagggagggagccgtagcagcggaagtctagcttgggtagcgaatcacaatggcgagaggattaaagaagcatctgaagaggcttaatgccccaaagcattggatgcttgacaaactgggtggtgcatttgctcctaagccctcatctggaccacacaaatcgagggantgcctgccactcatactcattttggcgaaaccggctgaagtatgc

SEQ ID NO: 38289 - DNA, 249 bp, Glycine max
  unsure (1)..(249): unsure at all n locations; Clone ID: 701119588H1
gcctgcgtcttacacgaccaagtattttggttgtgaacttggggcccagtcaaaatttgatgagaagaccggcacttctcacgtcaatggagcacatgatactgttacgcttgctggccttcttgagaacttcattaagaaatatgttcagtgttatggttgtggaaatcctgaaactgagatcataatcactaagaaccaaatgatccagctgaaatgcnctcncttgtggttttgtgtctgatgttg

SEQ ID NO: 38290 - DNA, 247 bp, Glycine max
  Clone ID: 701119590H1
acggattcttggaaaattactccatatggtgggaattctacccactgataaagtgacagaagtacagcggactgatttagttggtgaatttgttgggcacactggtccaaaaacaaggaggaaggtatgctatttactttgaaatccttctcctatttcagaaaccaaattttctgtgttgcttaatgagttcaaactccaaacactgcctacagatcaaggaagcagaggggggaattctttttgt

SEQ ID NO: 38291 - DNA, 225 bp, Glycine max
  unsure (1)..(225): unsure at all n locations; Clone ID: 701119591H1
agaatggttcgggaagtatcagagagttgcattgatagctanttgacggagatggtggcangctattgcaaccgattctacgcaaacaagcctgaactcgccgcacgccggatcgaggccattggatatcaggtcggtcaccagctctctgaaaggtataccatggatcggcctcggttcacggatcatctggaggccatcaagttcatctgcaaggatttctgg

SEQ ID NO: 38292 - DNA, 238 bp, Glycine max
  unsure (1)..(238): unsure at all n locations; Clone ID: 701119592H1
gtgagataccatggacaactacaacagcaatgacttttggaaattcagtgacnagttgaggcttgaatctggtttggccaatctgtctctgaatgattattccatttggagcaacagctacagctccaagaggcctgatcagaggaggaactttgatgtcaagggcagtgatttcaacaactcatcaaagccttttgatgatgatttcaatgatggctggaagatcaccaattccaat

SEQ ID NO: 38293 - DNA, 248 bp, Glycine max
  Clone ID: 701119593H1
aagcaatcccatctgtgtgtttgcacatcggaagggagggctatcaaactctaagatctaatctaatcagccttttgggggtgtttcagacattgcatgcatatgggagcagtggttgtgttggatgctataaaaggccttcactgagtcccacagtggatgtgccatcaaaagggttggcaacacaaagtaacgtagtgagggaaaccgagttcatcagaggatttttggaccaccagcacgcatga

SEQ ID NO: 38294 - DNA, 250 bp, Glycine max
  Clone ID: 701119595H1
gttaggtagcaagcataagtgtctaaccttagaaacatatctgctacatatcgtgtgcattttggaattgtgccactaaaattctattcatctatggctgcctcatcttatgctatgcaatcaatccttgcaaaccctatgatccgcatttccagcgggtctagggagaaccattttggtgttcctgcttatcacatgagaaggaatgttggcctgagagttaggtccatggctgaggaagagcaaccaa

SEQ ID NO: 38295 - DNA, 269 bp, Glycine max
  unsure (1)..(269): unsure at all n locations; Clone ID: 701119601H1
ttcttgagcatatattcagggaagatgcctacttgtctaagctccctgtttccattataaactcttggtatcaacgagaaggttatattaagtcaatggctaacttaattcagaaagagctccagagtttttctgaaccaaaagaggtaatgatatttttcagtgcccatggtgtacctgtncagttacgttgaggaagctggggatccataccgagaccaaatggaggagtgcatctcttgatcatgcaagagttgaaagctagagga

SEQ ID NO: 38296 - DNA, 252 bp, Glycine max
  unsure (1)..(252): unsure at all n locations; Clone ID: 701119602H1
tagtnttngtagcatggccatgccatggcncaggctaccaaaggttccctctccgaatgaaaactggctatggtgagcgttcttcggaggtaaaatgcgcaagttttaggcttgcantggaagcacacaacatccgagcctttaaaaccattcctgaagagtgcgttgaaccaacaaaggactacattaatggcgaacaatttagatcagactctaaaacagttaaccaacaagctttcttttatgctagtg

SEQ ID NO: 38297 - DNA, 263 bp, Glycine max
  Clone ID: 701119605H1
ccaatatcaagctcagaagattccaagaggctgaggatgactgcacagaggccttaaatcttgatgatcgttacataaaagcatactcacgaagagcaacagctagaaaagaacttggaaaaattaaagaatcaatggacgatgctgaatttgcctgaggttggaaccaaacaatcaagaaatcaagaaacagtatgctgatgctaagtcttctatgagaaagatattcttccagaaagcatcaggggttctgagaagcactg

SEQ ID NO: 38298 - DNA, 265 bp, Glycine max
  unsure (1)..(265): unsure at all n locations; Clone ID: 701119606H1
agcctgcaagcttcgccgtttgaaacagtgcctcaaccatggcagaacaaacagagaaggcttttctgaagcaaccaaaagtgtttctatgctctaagaaaggtgggaagggaaagaggcctgggaaaggtgggaatcgcttttggaagtcaattgggcttggattcaagactcccagagatgccattgaaggaacctatattgacaagaagtgcccctncactggcaatgtttccattcggggtcgtatcctagccggtacttg

SEQ ID NO: 38299 - DNA, 266 bp, Glycine max
  unsure (1)..(266): unsure at all n locations; Clone ID: 701119607H1
antaaacgtgatcaanacattacatgcnggcttgancagctccaaacnggtaattcatgctgtttacaattccaatcttcttggagctttcaagcctgcatgtaatgncttgatcacgtttaatgatgggaagaaccggaagcaggttccgtttaaaaaagaaaatggtcaaatggtcacagtcccactnctccaaagtcaagaaaacattggtgggaagattacaatagaaccaatgcaagggaagaagattgatcacatggtgt

SEQ ID NO: 38300 - DNA, 258 bp, Glycine max
  unsure (1)..(258): unsure at all n locations; Clone ID: 701119608H1
cttttagttagctataatgtgaggcaggacaagtttggtgattatntgctgcttcaatacagttgtcttgtgtgtttgaggtgtgtgagtatatatctaggacttganagtggttcttttgtaggtattnntaanaatttaanaatattgttgttttttgtttccaatcaatctggttgaatcagacctatgtgttttctggtagttgagggatagatggaaatttgaatagatatattccgtacctgnataagatta

SEQ ID NO: 38301 - DNA, 267 bp, Glycine max
  Clone ID: 701119609H1
gtgggtggcacacttcttccctacaggcagcgtcagtaagaattaagccaaaataattaattaattcttggcaaaatcacatggccgccgccgcagatgggctcttccggccgatctacgagggctgcatctccgcctacgacaacgacgtcgagcgccgcccctaccacaagaactgcggctgcgctctgcacagcaagttcgaggaggaacagcagagcgtggcacgcacaagttgccgaaatgcaacaacgtgttccttacccc

SEQ ID NO: 38302 - DNA, 255 bp, Glycine max
  Clone ID: 701119610H1
atttgtgagatgttgtgagaatttttaatgatagtttgggtgtgatttttctttgcataattaatgagaaaaaagtgattattattagagagaagagaagaagaaaaaaagggtttaggatggtgttattaggtggtgggaggcttagggaacagtcaccatgtgcatgtgcaattgggagacatgtgcatgtgtggtggtgtcagtttgcttcgagaccatgtgacccatcatacttgcatattggttccctaa

SEQ ID NO: 38303 - DNA, 243 bp, Glycine max
  unsure (1)..(243): unsure at all n locations; Clone ID: 701119613H1
acctttagacgagaaggagacgagcgcggtgttcgagaagctgttcaaattcgtcggaaacaacctgaagaacatcgtggagaacccctcacacgaaggtcctgattcgaaccctggccgctactgcttccgcctccacaagaacaagatcttctacgccagcgagttccctacgttcaaacgcgccaccaacgtncgcgcgccccaacctacgttctaccctcggcacctgcatcggcaaat

SEQ ID NO: 38304 - DNA, 263 bp, Glycine max
  unsure (1)..(263): unsure at all n locations; Clone ID: 701119615H1
gggaagactaaaactaaaaccccactctctttttccgagtcttccagtgaaagaaaggcagcgatggaagaagacttcgacatccccggcggcgaggaaatggatctcggcgaagacgaggttcggcgaggagagggagatcggctctggcggcctcaagaagaagctcctcaaggaaggtcaaggctgggaaacccccgaagtcggtgacgaatccaagttncatacacggggatttgctcgacgggactaattcgattcga

SEQ ID NO: 38305 - DNA, 267 bp, Glycine max
  Clone ID: 701119616H1
gcggttcaggtggagttcctggagtttccagcggtggttacttcaccagcctccggcaagacctatttcctcggcggcgcaggggagagaggattgacgattgagggaagttcataaagttcacaggcataggagtatacttggaggataaggcggtgccatcactcgccgctaagtggaagggtaaaacttcagaggagttagttcacaccctccacttctacagggatatcatttcagggccgtttgaaaagctattagagggtc

SEQ ID NO: 38306 - DNA, 262 bp, Glycine max
  unsure (1)..(262): unsure at all n locations; Clone ID: 701119617H1
agctgctcttcangaaactgcaaagaagagagagatgagatacgatgacataaagaaaattgacaaaggaataagacgacacttccatgatgatatcactgtggttgtaatctatcttgatcaccatgcaggctcctctaagcaaactgctgttggctatacaactgccccagttgatattttttccctaaatgcggatgggatgctggtacagttgcctaagagtgaaattgctcaaaggatcatacactgacattatttg

SEQ ID NO: 38307 - DNA, 262 bp, Glycine max
  Clone ID: 701119619H1
ggcacctgcaacactgtctctgtctctcctcctcctgttctcactcagcatcgccgtaaccgttagatcgagcgactacgactacgattgtgtgtacactgcatacgttagaaccggttcggtgttgaagggcggaacggactctaagatcgggctgaagctgtacgacaagtacggctactacatctacattaaaaacctcgaagcatggggcggcttgatgggcaagggctacgactacttcgagcgcggcaacctcgac

SEQ ID NO: 38308 - DNA, 253 bp, Glycine max
  unsure (1)..(253): unsure at all n locations; Clone ID: 701119620H1
gcaaattttgccgaaaactccaaaaccctcttttagtaaactcgattaacacncaatctcaatcttctacagcttatcctatatctctctcttttcttctcttcccccaacaacaatttcaatcaaaactctctctcaggatggaggcatcgtttgcttttacgtttaaggttgtttgcctaaacggtaaatagtaaaaattagtgattgtnatttttcagctgaaaggtgattaagagaatcagagtttgct

SEQ ID NO: 38309 - DNA, 143 bp, Glycine max
  Clone ID: 701119621H1
gtttaatatctgatatgtggaccattggttcacacgatattaaattacttttttaaaggggagagtccaaaacagtagcttgctactgggcctctcatgtgtcgccctgcgttgcactatagcgtgggcctggcacaccctac

SEQ ID NO: 38310 - DNA, 215 bp, Glycine max
  unsure (1)..(215): unsure at all n locations; Clone ID: 701119622H1
ccttngccgcgctcaagagctccgaccacgagacccacgtcagcttgtggagcttctgcgagaacaagaacgaggttcgttgcgttggaaaactgtgcatggtcgatgttatttgctacctttgcagagaggacaatctcttgtctccttctaaagctctcaaagaaccactttcttcaattctccctaaggatcaatctctcgttgtgcatctt

SEQ ID NO: 38311 - DNA, 263 bp, Glycine max
  Clone ID: 701119623H1
aggggtttgggattggagggattgacgctgcgtctcttcctcttctctttcgatccatccctcattcctaatcctccaatccaaccacctcagcctcacactcacatatacacatatctgaacgcgtatcgtccctcctatggcttcaaagcgcatcctcaaggagctcaaggacttgcagaaagacccaccaacttcttgcagcgctggtccagtagctgaggacatgttccattggcaagcaacaataatgggtcctgctg

SEQ ID NO: 38312 - DNA, 267 bp, Glycine max
  unsure (1)..(267): unsure at all n locations; Clone ID: 701119624H1
cagttgctggcttccgattttaccctccgccantccctttccaaggccancgtactcccttncctacnantcactgcatnctccnctcgtcgtgtntccggcggcggagatcaccctgaggcgggcggtgntnggntccgcgagcatgcgcgtggaggtgtcggagtcggagggagggaagatggtgatngagctggtgggagccttcaacgagttgacngagagaagnaacgnactgtcgangagctcttcgcgtntnctattnaa

SEQ ID NO: 38313 - DNA, 260 bp, Glycine max
  unsure (1)..(260): unsure at all n locations; Clone ID: 701119625H1
aaagagagaagagagagggtgtgtttctgggttttggaaatttcagccaatatcgaaaaacaagaagccccatcaataataatcatcgaaggaatttgaaaggtcgnaacttgagcatctgggatcgcgaaattggggtttttggttaaaagggtattatcttcggaactgattgatggcaaacctgtacgtgaaggcggtgccaccggcggatctgaacaggaacacggagtggtttcacgtaccctggcgtttggacc

SEQ ID NO: 38314 - DNA, 261 bp, Glycine max
  unsure (1)..(261): unsure at all n locations; Clone ID: 701119626H1
ggcaacatggaccaagagaagactcaagtctttcagaattccaagtggaattaatccagcttgcatctncagctcaatggtgattatgtactcaattcctatccaaacattggtaaaactatgacagtgaaagaagcaaacaggtacgccgaagacgcggtgaagaggttcctggaagctgcaaaggctgctcttaaagctggggctaatgagtcagccattgtcacaatgaggcttccctccacaagcagagtngctgag

SEQ ID NO: 38315 - DNA, 256 bp, Glycine max
  Clone ID: 701119627H1
atgggttcgaagaggtatgcgctattgatgtgcggtgaggattcggagtacttggtgaagatgcacggaggcacctatggggtattcatgaagttgctccaagagcaagaggaaaagtgggacctctacaagctcgtccaaggagagttcccggagcagcatgacttgcctctctacgatggctttgtcatcagtggaagctgctatgatgcacatgccaatgacccatggatcctgacctcatgctctcgttatc

SEQ ID NO: 38316 - DNA, 260 bp, Glycine max
  Clone ID: 701119629H1
ctttaatcttgaaactaaacctgaaagcagagaaatgctatcaaggtcatcacttcttgctgaactggcatccaagggtgtgatgtcttgtgtgactcaggaagtgaaggacatttaccatcttttggaacatgagttttatccctctgatcttgcattaaaagcgctgcccttaataactaaaatctctaagttagggggtaagctttctactgcatcatctgttccagaggtgcaattagctcagtatgttccagcac

SEQ ID NO: 38317 - DNA, 265 bp, Glycine max
  unsure (1)..(265): unsure at all n locations; Clone ID: 701119631H1
cgaaggnanacgctgtcgttgcgccaatcgcggcgttgttgttggtggtgctactcgcggcgagtgtggtggtggaggctcaggagaactcggacgtgaagacgctggtgaagcacatgcacgggaagaagtactgcgacaaaggatgggaatgtaagggctggtcaatttactgttgtaacctcactattactgattatttccanannnaccagttccgagaatctcttctccaagcggaactcgccggtggcgcacgccgtcg

SEQ ID NO: 38318 - DNA, 258 bp, Glycine max
  unsure (1)..(258): unsure at all n locations; Clone ID: 701119632H1
ctctgggctggttatccaggggaacttggaggcattgcacttgctncagattatctttggtgaccacaatccaggtccaaggtaaatcatattttgcaacattttacatggattaaagatactaacagttgtaatctcaagaaggactaaagtgaagatttactagtattgtattgatgaagtaacgaacaaagaaacaaaatggcctaatagttcataaattttaaagtttattactgaaatggtgtcacgaataca

SEQ ID NO: 38319 - DNA, 238 bp, Glycine max
  unsure (1)..(238): unsure at all n locations; Clone ID: 701119633H1
atttccatttcctctctctcagtanccaagaatacnaagactatgggaaagtcttacccaaccgtgagacgctgattaccagaaggccgttgagaaggcgaagaagaagctcagaggcttcatcgctgagaagagatgcgctacctactaatgctccgtttggcatggcactctgctggaattacgacgtgagctcgaagaccggtggtcccttncggaaccataaagcacccctccg

SEQ ID NO: 38320 - DNA, 260 bp, Glycine max
  unsure (1)..(260): unsure at all n locations; Clone ID: 701119634H1
gggggcactggctctggtcttggttcccttttgctggaacgtctttcagtggactatggcaagaagtccaagcttggtttcactgtctatccntcaccccaagtntcaacctctgttgttgagccttacaacagtgtcctctccactcantcccttcttgagcacactgatgtggctgtcctgctcgacaacgaagccantnatgacanctgcagacgttcacttgacattgagaggccaaccnacaccaacctnaatcg

SEQ ID NO: 38321 - DNA, 260 bp, Glycine max
  unsure (1)..(260): unsure at all n locations; Clone ID: 701119635H1
gcagatttgagccttgtggtctcattcagttacaagctatgcgctatggatctgtaccaattgttncctcaacaggtggattagttgacactgtcaaagaaggcttcactggatttcagatgggtgccttcaatgttgaatgtgatgctgtggatccggctgatgtggatgctatatcaaagactgtcaaaagggcccttgcagtctatggaactccagcttttacagaaattatcaagaactgcatggctcaagatctt

SEQ ID NO: 38322 - DNA, 260 bp, Glycine max
  unsure (1)..(260): unsure at all n locations; Clone ID: 701119636H1
gcgaaagtgaaataccactacttttaacgttattttacttattccgtgaatcggaagcngggcactgcccctcctttttggacccaaggtcggcttcggccggtcgatccgggcggaagacattgtcaggtggggagtttggctggggcggcacatctgttaaaagataacgcaggtgtcctaagatgagctcaacgagaacagaaatctcgtgtggaacaaaagggtaaaagctcgtttgattctgatttccagtacga

SEQ ID NO: 38323 - DNA, 235 bp, Glycine max
  unsure (1)..(235): unsure at all n locations; Clone ID: 701119637H1
ggttcccatggaggtgatgggtangatgcttggagaatacgtggacgagtacaccgttcgtgtggttgatgtcttcgcaatgccgcagagtggcactggtgttagtgttgaggctgttgatcacgtttttcagactaatatgcttgacatgctcaaacaaactggaagaccagaaatggttgttggttggtaccatcccatcctggatttggctgttggctctctggtgttgaca

SEQ ID NO: 38324 - DNA, 262 bp, Glycine max
  Clone ID: 701119640H1
attttcttctctttaccagcaaagagatgcaaactacacaaatagctcagatatttaaagcaaacctggatttacatgttcttacaatgagtacaagttgatgggcttccatttgaagttgactgcaggctgagacatgctgtcaactttgtacatgagtcatttgcaaataattggaactgggggtaccatggagctaaagtgcccaccaaatggtcagatgcagatgcataatgagtttgatggggctctccctttggtg

SEQ ID NO: 38325 - DNA, 256 bp, Glycine max
  Clone ID: 701119642H1
atccttctctgttctcctagaacttgattacttgaacattccctatgacagatgaggtggttcttactggatttctggccaagtccatttgggatgagggtcaggattgcacttgctgaaaagggtatcgaatatgagtacaaagaagaggacttgaggaacaagagtcctcttctcttacaaatgaacccggttcacaagaagattccggttctcatccacaatggcaaacccattccgaatccctcatgctgtt

SEQ ID NO: 38326 - DNA, 188 bp, Glycine max
  unsure (1)..(188): unsure at all n locations; Clone ID: 701119643H1
caacgctgccattgtcggttcgaaagnttgagaacctaggattgaggtgaagctgcgttctgaatacngaatnctgaccgccaaagtacacagtctttaggatccgaaggacaaccgcacgatccagagatttctatcctttgatcttgctctgataaggacttgtctccttcttccacacaacanac

SEQ ID NO: 38327 - DNA, 256 bp, Glycine max
  unsure (1)..(256): unsure at all n locations; Clone ID: 701119646H1
ctctcagctgtctttttaatcccccttttctcattttcccttttgcaattttcactaacagtcctctnnctatcttagctctcagaaacttcaataacaatgaagaaagttgngttgaaggtggaagtacatgangacaaaatcaagcaaaaagctatgaaggttgtctctggcatttcaggggttgagtcagtttctgtggacatgaaagacaagaaattgaccgtaattggggacatgatccagtaaaagtagc

SEQ ID NO: 38328 - DNA, 238 bp, Glycine max
  unsure (1)..(238): unsure at all n locations; Clone ID: 701119647H1
ctgagataagggactttgatgcaactgatctacggaggcnncttccagctgtagttagcacattatacaaggcaataaattccaatggaggtgtaacatatatacattgcactgctggacttggaagagctccagctgttgcgttggcttatatgttttgggttctgggttataaacttaannnngctcatacactacttcagagcaaaaggtcgtgctttccaaaactggatgccat

SEQ ID NO: 38329 - DNA, 260 bp, Glycine max
  Clone ID: 701119649H1
atttggaagaccccaaacgtttcgcctcgcaccacccatttcgtgcttctcctccttaatggcgtcttcgctggagaagcaattcgacgactttagggttcagttcgaagaatctggaaccttgcgcgaacgaattcgaagcgtcgtttcggagatcgagtcctccactagactcatctatgtcacccttcttctcgttcaccagtctcgccccactcccggtatcatggtgattggaagagtgagacgcagcccgtagt

SEQ ID NO: 38330 - DNA, 259 bp, Glycine max
  unsure (1)..(259): unsure at all n locations; Clone ID: 701119650H1
gaaaaagagaacattgttcaacgaagcaagangcttagcaaccgcatatggcagaggagagctttgatctccgcccggaccttattttctggctctgcttctcactctncancanctncccatgcgatctcgcttcgcttcgccaaagctaatgctccttcttctncacatgtcanntncgcnnttgcacgtgtggacagatattggttttccacacaacanacgancngaattnnaganaacangtgcagaagnnggc

SEQ ID NO: 38331 - DNA, 81 bp, Glycine max
  unsure (1)..(81): unsure at all n locations; Clone ID: 701119651H1
gctccttctctcttagccccaccttncttcaccaggcatccttctcacattgctncaanancnccatccaacacaacatta

SEQ ID NO: 38332 - DNA, 249 bp, Glycine max
  unsure (1)..(249): unsure at all n locations; Clone ID: 701119654H1
atcacattattgcaagctccttatagtaaacaatgtttttgaganattctncncagactaaatnanaaacaaaacgcattnanntnaaatcatnggcatttctgaaannccanaaanataaataaaacctacctaatcatcngtattangataatgtntcctcagcagcatnattngtatnattatatcnacagatggactgatagccagatcatcctagtattanaaaaatccagcagtganacatta

SEQ ID NO: 38333 - DNA, 260 bp, Glycine max
  unsure (1)..(260): unsure at all n locations; Clone ID: 701119655H1
gngggtgtncacttccattcccttgcttttnttaaaattatanataaatattttgaatgtgtaaaanaaagcaagggaatggaagtgcacaccctcattccttgatagaatatgtatatattcactcatacatgttatatagcgacattaccatagaacatnccatgcntagttactataaaaatataaacaagctgcctggctcagaaatcggtactaggaggaggtgctgaaaaggtttcgtgggtcccagaccctgt

SEQ ID NO: 38334 - DNA, 258 bp, Glycine max
  unsure (1)..(258): unsure at all n locations; Clone ID: 701119656H1
caagagaagagatggtggataaacatgcagctattcggggtacctttggcnatcttgaccccgagtatatatcttccggaacattcactaagaaaagtgatgtatacagttttggggtgttgctctttgaaattatagctggcaggaatcctcagcagggtcttatggaatacgttgagcttgtaagatctctttctctcccttcaaaccatattgaggacannngnngtggttgttacttttgggagatatatagtg

SEQ ID NO: 38335 - DNA, 254 bp, Glycine max
  unsure (1)..(254): unsure at all n locations; Clone ID: 701119657H1
aatttctaatctctaatttctctttctccttaattgtgtgtagcttagctaggcaaaatgagcacaaggcgttggccgagacatgtaacagttaggggaaggaagagaagggcgaaagtttgtttggccaataataatgctgtgaaagtgaaacctnccttgcaaaggaagcttagggagctcagggagcagttcctgggagtgaggtaatggacatgcacaatttttnccaaagcattgaacaatacatactg

SEQ ID NO: 38336 - DNA, 253 bp, Glycine max
  Clone ID: 701119658H1
caaatttctagccaacctctagatcttagcatacttggagtaacaaattctgctgattcagggaagcctcctcaaactggtgctcaacaaattgctgtgcatcctggacaggttccccgtggagctcctgcttctgtatgtttcaagactggacttgctcaccttgagcaaaataatctttcagatgcattgtcttgctttgatgaagcttttcttgcctggctaaggaacaatctcgtgaaattgatataaa

SEQ ID NO: 38337 - DNA, 253 bp, Glycine max
  Clone ID: 701119659H1
aaattttctcccccaaatcgtagatctacggttaaattggtgtagtgtggtaagatgggaggaggatttagagtgcttcacttagttaggccatttctctcgtttcttcctgaagttcaaactgctgacaggaaagtgccatttagagagaaggtcatatacactgtgatctctcttttcattttcctggtttgtagtcagctccctctatatgggatacactcaacaacaggtgctgatccattctattgga

SEQ ID NO: 38338 - DNA, 254 bp, Glycine max
  unsure (1)..(254): unsure at all n locations; Clone ID: 701119660H1
gagtgacttagaatgtagctcatgctatgaaatttctgtctgtttatttgtactgggaacttcaattttncaactcatcaaaaccagaaggcttctggccttcctttttgcagtcttgggtgagagataatgattttatttttggtcacgagagtgatgaggaagttttgtttgttagtttgtcttggaggtttgatcattttgatggggcaacaccaaatgtaataatgtagtaaactaaatgaagcttattc

SEQ ID NO: 38339 - DNA, 253 bp, Glycine max
  unsure (1)..(253): unsure at all n locations; Clone ID: 701119661H1
cnantnncnagccaacctctagatcttagcatacttggngtaanaaattctgcnganncagggaagcctccacaaactggtgcgnaacaaattgctgtgcatccngganaggntccccgtggagnncctgcttctgnatgntncaagactggacttnntcaccntgagcaaaataatctttcagatgcattgtcntncttnangaagctntcttgccttggcnaaggaacaatctcgtgaaattgatataanc

SEQ ID NO: 38340 - DNA, 258 bp, Glycine max
  unsure (1)..(258): unsure at all n locations; Clone ID: 701119662H1
cacccattcacctttctcctccactctcatagctttattagctttcctctcactctaattctctacccccaatcaatctcaaaatttncaattcttatttttaagaattgaacattcttcaaatggcatcgtcacnnnnnnnnnnnnnnnnnnnnnnnnnnnntatggtctcaaatccagttccgaacacggaccggtcacgtgacgcgaaacggaggaagaagaaagcgcantgagggcagcaactacggcaagagg

SEQ ID NO: 38341 - DNA, 264 bp, Glycine max
  unsure (1)..(264): unsure at all n locations; Clone ID: 701119663H1
cgcanggaaaaattntngaagnngaaggtttcaagtacataaaggaatgttttgaaaatggcacattgcatctcattgggctactgagtgatggtgganttcactccagacttgatcagttgcagttgtngcttaaaggagttagtgagcgangtgttaaaagagtccgtgtccatattcttacagatggccgtgatgntttggatggctcaagtgtggggtttgtggaaacccttgaaaatgatctgcaaacttgcgcgcaaa

SEQ ID NO: 38342 - DNA, 257 bp, Glycine max
  unsure (1)..(257): unsure at all n locations; Clone ID: 701119665H1
cttaagttcattccttgtgttttgctttcttcctcaaaaccaaacntgtcgaacacatgcggcaactgcgactgcgctgacaagactagctgcaccaagggaaacagctatggtgttattgtagagactgagaagagttacatcgagactgttgtcatggatgttccagcagctgagcatgatgggaagtgcaagtgtggcactaactgcacttgcacggactgcacctgtggccataaggaatatgtatgaaaatg

SEQ ID NO: 38343 - DNA, 247 bp, Glycine max
  Clone ID: 701119666H1
agatctgctccttcctcaccccacaggctgatactagactgtaactttcagaagtcagttgaagagcatgggtcgtggagttagcagtggtggtggtcaaagttccttgggttatctttttggcagtggagaggcccctgccgcaaaaccggcaacaaacaatgccccagcccaacctgaagtgcaggctgtaaataatgcgcctccttcaaaagcatctcctcctactaaaacaatagaccctaac

SEQ ID NO: 38344 - DNA, 255 bp, Glycine max
  unsure (1)..(255): unsure at all n locations; Clone ID: 701119667H1
gaaaaactctgtaaacatgttggtttaccaggacctccttacaggtgatgagcttctctctgactccttccgttacaaggaaattgagaatggaatgctntgggaagttgaggggaagtgggttgttaaaggagcagttgatgtagacattggtgcaaacccttctgctgagggtggaggagaagatgagggagttgatgatgcagctgttaaggttgttgacatgttgacacattcagacttcaggagcaaccc

SEQ ID NO: 38345 - DNA, 254 bp, Glycine max
  Clone ID: 701119670H1
gcgaatcccaccactggatgccagaagaagctcgagatcgacgacgatctgaaactgcgagcattttgggacaagaggatctcacaggaggtcatcggagatgcactcggtgaggaatttaagggctatgtcttcaaaattaccggaggttgtgacaaacaaggatttccaatgaagcagggagtgctgactcctggtcgtgttagacttttgcttcacaggggaactcctgcttccgtggatatggaaggcgt

SEQ ID NO: 38346 - DNA, 201 bp, Glycine max
  unsure (1)..(201): unsure at all n locations; Clone ID: 701119671H1
tccaacaatccaaatccanatccaaaaccctaccaacaccacactcaatcgatcgatggggcagaagtctctgatctacgcgttcgtgtcgcggggaactgtgattctcgcggagtacacggaattcagcggaaacttcaactccatcgccttccagtgccttcagaagctccctgccaccaacaacaagttcacctacaa

SEQ ID NO: 38347 - DNA, 258 bp, Glycine max
  unsure (1)..(258): unsure at all n locations; Clone ID: 701119672H1
gttaccttacctgctccgagcctcttccatgacacgctctggcnnagagctgcagctagcttcgacactgaggttcgtntgnccgatcctgctcccgaaccactgccatggggtgcttcttcgcttgcttcagagcccgcgatanctccgccgctgctaccactgctacggtgccttcttctcgttccagcaaacacaaaccaaacgatgttgcggtctctcgaaatcggttatccactttgtttctatccgaagaga

SEQ ID NO: 38348 - DNA, 255 bp, Glycine max
  Clone ID: 701119674H1
gacgtctcagagtcagaaccctatagagcaaatccaagcgcgcttcaaggagttggagactggcttccgcctctggctctccaagcagtccctccccgtcgaggccgccgtcgtcaccaccaccagcgccgcccagggcgccgctatcggcgccttcatgggcaccctcaccgccgacgcctcctccaccttccccacccctccgcccaacgcctctctgcaacccccaagccatggcctctcttaaacaagctc

SEQ ID NO: 38349 - DNA, 251 bp, Glycine max
  unsure (1)..(251): unsure at all n locations; Clone ID: 701119675H1
tgcaggaggagcagcctcttcaggtggcaaggtgcacaaagattataaacccaaattctgaagatgccaagtatgttatcaatgtgaagcagattgcaaagtttgttgttgggctaggagacaaggtttcccccactgacatagaggaagggatgcgtgttggggttgatagaaataaatatcagatncagattccttgcctccaaaaattgatccaagtgtgaccatgatgactgttgaagagaagccag

SEQ ID NO: 38350 - DNA, 267 bp, Glycine max
  unsure (1)..(267): unsure at all n locations; Clone ID: 701119676H1
gaagagatgggtggaggaaggtgctgaagttccagctgaannagcttcngctctgccancgcctccaacaactggctgnttanccagaatggttgcaactgncatacnactcgngattngcattncangactgaaagtncanctcctattgagggntctaacatncaggaactgcctagnccctgganacnttagtnncagggatggccancaatnaccacccagacggcaaatgcanttncttgggcccggnngttcggtttgggt

SEQ ID NO: 38351 - DNA, 255 bp, Glycine max
  unsure (1)..(255): unsure at all n locations; Clone ID: 701119677H1
cancggtnntgccggtttcattggcacccacaccgtcgttcagcttctcaaagctggcttcagcgtttcaanaatcgacaatttcnataactccgtcatngcnagcagtggaccgcgtccgccaagtggttggccctctgctttctcagaacctccaattcacccagggcgatctccngaatagggatgacttggagaaactcttactccaaaacaacatttgangnccgtgatccactttgctggctgaaagcg

SEQ ID NO: 38352 - DNA, 74 bp, Glycine max
  unsure (1)..(74): unsure at all n locations; Clone ID: 701119678H1
ggaacggtntggtcagtgntgaggcgcggcaaagaagcttgcggtcggtntttacacaagctgagaggaancgc

SEQ ID NO: 38353 - DNA, 269 bp, Glycine max
  unsure (1)..(269): unsure at all n locations; Clone ID: 701119681H1
cttttnngctcgaggcgggtncnccntancgttgggtgcaccttntccctcacgaagganagagaagatgtgcgagtgtgagagtgagagcgaatncgagtgttggaggaggaaaaggagatggcgaaacggcgtcgtatttggacatgtggaagaaggcggtgnnnnnnnnnnnnnnnnnnnnnnncttcaactcaatagcggaccgcgtggcggcaaatactgatgacaacaacgacgacgatctggagaagaagaccagtgagttc

SEQ ID NO: 38354 - DNA, 257 bp, Glycine max
  Clone ID: 701119682H1
gtgaacaagaggatggctacgacggggaagaaggaagggaacaacttgctagggttgccgaatttcacagaattaggaaacgggcgtttcaagtgcttagaaacagggcacgaggtcctctcgaaggacatagcgtcctactcgcacagcaaaaaatgccgtttgggtctcatcgatttcgccttgtccaataacaaaccccctctcaacatgttcaaacaacaccctctactgccgtttcaaagttgatatgtaag

SEQ ID NO: 38355 - DNA, 256 bp, Glycine max
  unsure (1)..(256): unsure at all n locations; Clone ID: 701119683H1
caaaaatctcccttctaaccttattcttcttctcttccttcaccatcattgcgcatgcaattgttcctcaaaangaaaccttgcaaatttgagaactcaggtgaacttggaccctacatcgttgagtacggtgcagattacagaatgataagcatcttcaacttctccattccaagttggtttctacaacaccaccccaaatgccttcactctagctttgcgtgtagggctccaacgctcggagcagctatttcgt

SEQ ID NO: 38356 - DNA, 253 bp, Glycine max
  unsure (1)..(253): unsure at all n locations; Clone ID: 701119684H1
gtccctccttcctctgccttataattcttgtgacccttttncgctggtagcattgaaaagtngcaccagcaaacgtgaagccaagccagtatgctgcaccctcaataggagtgtttttccttctggttttctatttggaataggctctgcagcttaccagatagaaggagcagcagctatagatggcagaggaccaagtatatgggacacctatactaaacagcaaccagggaagatttgggatcatagtgat

SEQ ID NO: 38357 - DNA, 251 bp, Glycine max
  Clone ID: 701119685H1
atttccatccacattggccaggccggcattcaggtcggaaatgcttgctgggagctttattgcctcgagcatgccattcaggctgatgggcagatgccgagtgataagaccataggtggtggtgacgatgttttcaacaccttcttcagcgagaccggtgccggaaagcacgtgcctcgtgcagttttcgtggatctcgagcccactgtcattgatgaaatcagaactggcacataccgccaattgttcca

SEQ ID NO: 38358 - DNA, 257 bp, Glycine max
  unsure (1)..(257): unsure at all n locations; Clone ID: 701119686H1
ggccgcccttttttnttttttttaggataaagaggatttanaattattaaccttaaaaantaaaccacacttcaagttcgccccccatcgatttaaattaaaagaaagtcangncaccacaataagccannncnaatataaaaanggacnggcacttganacncgnaaattatangaattcactaaaacaaaacgaaggnaaaaacaacttcaaaatttcccaantttttccccaatcaaaatcctanttaaanggc

SEQ ID NO: 38359 - DNA, 260 bp, Glycine max
  unsure (1)..(260): unsure at all n locations; Clone ID: 701119687H1
cncangatgctnaagacaaganagacaagaaganaaagganaaganagacaaggatgacaaaactnatgtagagaaggtcaaggggaaagaagacaaagagaagaagaaaaaggaaaaganagtcaaggatgacaaaactgatgctgagaaggttcaaggggaaagangatgatggggaggacaatgaagagaaggaggaaaagancaaaaaaaganaaaganggaaaaggatgacaaaattnatgtagagaaggtcaag

SEQ ID NO: 38360 - DNA, 255 bp, Glycine max
  unsure (1)..(255): unsure at all n locations; Clone ID: 701119688H1
gccaaggtcctgaatctcacagagacagagagaatgagtacggtgggagaagggaaggtgagtagtaatggtcatggatgttgcaaatcagggccaggctatgcttccccactggaagccatttcctggtncccagagagtctctcatttatgtaacctctgtctacacagggaccggaatagagaagccagactatttggcgacagtggatgtggatccaaactctccaacttattccaaagtcatccataggc

SEQ ID NO: 38361 - DNA, 250 bp, Glycine max
  unsure (1)..(250): unsure at all n locations; Clone ID: 701119689H1
atctcttcattagagacgaagacatagcttgaaagtgagacgagaagaaaacagtagaacatgaacatgcaagcggaaccataagagtgttaaaaggcatacttttctttaagatactacaccaccttccaaataacatggagacctcaggggccgttagcttcttacagtattatcctttacatnttgatcaagacaagtagcatcattggaacagtcatgaggttgatctgagcagtgactttcagga

SEQ ID NO: 38362 - DNA, 253 bp, Glycine max
  unsure (1)..(253): unsure at all n locations; Clone ID: 701119690H1
gttcatatatctctctgctcttctcttctcttctacctcncaagtttttgaagtataaagatggcagagacattncctattcacctcggagtcagtgaacgagggacaccctgataagctctgcgaccaaatctccgatgctgtcctcgacgcttgcctcgaacaggacccagacagcaaggttgcctgcgaaacatgcaccaagaccaacttggttcatggtcttcggagagatcaccaccaaggccaacgt

SEQ ID NO: 38363 - DNA, 248 bp, Glycine max
  unsure (1)..(248): unsure at all n locations; Clone ID: 701119691H1
gatggatcttggactgaatggggagcacaatcaaatacacctgttgacactttatgaattcaatacagctaaatttgcatgccaccaaaaagtatctgcaagtgaaggggctgttttcatttgtcaaacattttgaacacaccaatttttgtatgctttactgtttgttgttttggtttagttgtggttgagattctgagaattgcnaatatgttcaaatgtnactaatatnaaatcctatcatgtgg

SEQ ID NO: 38364 - DNA, 252 bp, Glycine max
  Clone ID: 701119694H1
gttgttctgtgtttgtgtttgttttttctctcacctgaaaatgtcttgctgcggtggtaactgtggttgcggaagctcctgcaagtgcggcaacggctgcggaggctgcaagatgtacccagacttgagctacactgagtcaaccaccaccgagaccttggtcatgggagtggcacctgttaaggctcaatttgagggtgctgaaatgggtgtgcccgctgagaacgatggctgcaaatgtggaccaaactg

SEQ ID NO: 38365 - DNA, 254 bp, Glycine max
  Clone ID: 701119695H1
ctgacccagaaagggatcagagaactgtttttgcctaccagatgccgttaaaagcaacagagagagatgtgtatgagttctttcaaaagctggcaaggtgagagatgtccgtctgatcatggataggaactcaagacgatctaaaggagttgggtatattgaattttatgatgcgatgtcagtgccaatggctattgctctctctggccaacttcttcttgggcaactgtaatggtgaaaccttctgaagctga

SEQ ID NO: 38366 - DNA, 257 bp, Glycine max
  Clone ID: 701119696H1
gtcggttcttccttctcaaatattcttgagatccccattttctccgaagcaaagccatggctaagggtcctggtctctactctgacatcggcaagaaagctagggatctgctgttcaaggactaccacagtgaccagaagttcaccatcaccacctactcaccgactggagtggctattacagcatcaggaaccaggaaaagtgaactgtttctggctgatgtcaacacccagttgaagaacaaaaacatcatactg

SEQ ID NO: 38367 - DNA, 131 bp, Glycine max
  unsure (1)..(131): unsure at all n locations; Clone ID: 701119702H1
cgaaaatgagcgganncaggggaagaagaagggagcgagctttgtgatcgattgcgcgaaccggtggaggataaaattatggacattgcttctctggagaagttccttcaggagaggattaaggttggcgg

SEQ ID NO: 38368 - DNA, 174 bp, Glycine max
  Clone ID: 701119703H1
ggcgttcttgtgttctgttgggtatgatgctaatcagattgcggttttcactagagagcctgctgctgaaagtgtttgtgaagggaaagtggggaggactgggaagttggcgagtcccggtgacttgaattacccttctttcgcggtgaagttgggtggggaaggtgatttggt

SEQ ID NO: 38369 - DNA, 193 bp, Glycine max
  Clone ID: 701119705H1
cgaatatcttgttgtttggagcgatccgagaaaaactctgtaaacatgttggtttaccaggacctccttacaggtgatgagcttctctctgactccttccgttacaaggaaattgagaatggaatgctgtgggaagttgaggggaagtgggttgttaaaggagcagttgatgtagacattggtgcaaaccctt

SEQ ID NO: 38370 - DNA, 129 bp, Glycine max
  Clone ID: 701119708H1
ccgtaaccatgtctcagactgttgtcctcaaagttggtatgtcatgtgaaggatgtgttggagcagtgaagagagttctaggaaaattggatggtgtggaatcatatgacattgatttgaaggaacaaa

SEQ ID NO: 38371 - DNA, 263 bp, Glycine max
  Clone ID: 701119709H1
atttaaacaaatcatgagttacattacatagtggtccaatgttacagtgtaggaagctaacattcaaacaacctttcaaataacaaggtaaaagccctacaccacaaaaataattatggtaatggcctatctatgtgctgaacccgagaatgtcagcataagttgtgatcaacgaaaataaaagcatctgcttacaacatttttaaggttacaacaatatttttctccgaaatactttgtttcctaaaggtgcaggctactat

SEQ ID NO: 38372 - DNA, 259 bp, Glycine max
  unsure (1)..(259): unsure at all n locations; Clone ID: 701119711H1
cgaancctttcaccggcattgcaaccatgtcgagaagaaaggttagagagccaaaagaagaaaacgtgactctgggcccagctgttagagatggcgaacatgtctttggcgtcgctcgcatctttgcctccttcaatgataccttcattcatgtcactgatctgtccgggagggaaacacttgtacgcatcacaggtggaatgaaggttaaggctgacagggatgaatcgtctccctatgctnctatgcttgctgcaca

SEQ ID NO: 38373 - DNA, 259 bp, Glycine max
  Clone ID: 701119712H1
gaacgcgaagtcccatcacaacgacatatttatattcggcatagataacaccgtactctctaatatcccatactatgaaaaacatggatatggggtggaggaatttaatgaaaccttatatgatgaatgggttaacaagggcgacgcaccggcattgccagagactcttaaaaattacaacaagctgttgtctcttgggcttcaagattgtattcttgtcaggaagatatcttgacaaaatggccgtaacagaagcaaa

SEQ ID NO: 38374 - DNA, 168 bp, Glycine max
  unsure (1)..(168): unsure at all n locations; Clone ID: 701119713H1
gttagaatggctgctgctattgaaatccccacaatagtgtttccaaactcctctgcccaacagaggatgccagtggttggaatgggatctgcccctgacttcacatgcaagaaagacacaaaggaggctatnattgaggccgtgaaacagggttacagacacttcgac

SEQ ID NO: 38375 - DNA, 149 bp, Glycine max
  unsure (1)..(149): unsure at all n locations; Clone ID: 701119714H1
ccaatttnntccgttttcttctgtaatgctatgctattgctaagatactcgttttggttgcttctcttttattgtatcgtggagaacaaacttgggctgaatacattctatgcgaataggatatagctaagaagtttcttatgacattc

SEQ ID NO: 38376 - DNA, 250 bp, Glycine max
  unsure (1)..(250): unsure at all n locations; Clone ID: 701119717H1
tgttaggcaatacaacatttattacgcatactcaaagtagcttcgaagttccgtatttttattggcatatcatggagaataataatcagtcgttttggcaattcagtgaccagctgaggttacaggcatctaatttggcgaacctttctctaaacgattcgatttggagcaacagttacatctccaagaggcgtgatgaaaggattaatttgnacatcaaagttgggggtgagatcaactcttccagtca

SEQ ID NO: 38377 - DNA, 143 bp, Glycine max
  unsure (1)..(143): unsure at all n locations; Clone ID: 701119718H1
ggtatattcaaggaaaacatattcttcatcacctttgncgcaaaagcccaagttaaataccatagtgcagagactgtttcaacacaatgcttgccaggtgccagagtttcaaagtgacgatgatgcagtttatcaattggaaa

SEQ ID NO: 38378 - DNA, 129 bp, Glycine max
  unsure (1)..(129): unsure at all n locations; Clone ID: 701119719H1
gccagantttacttccaacaactcatctctgagtgtggacttctgcnacagccgcggcgtctaccaccgtgacctcaagccagagaaccttctcctcgacgacgacggcaacctcaaggtcacngactt

SEQ ID NO: 38379 - DNA, 149 bp, Glycine max
  unsure (1)..(149): unsure at all n locations; Clone ID: 701119720H1
gtcctcaactagtacttttacagagaactagaaatattgacaatttgactggacaatatgtctttcttcttggtgcatacagagcactatacattctcaactggatctaccgctactttaccgagcctcactttgtccattggataana

SEQ ID NO: 38380 - DNA, 149 bp, Glycine max
  unsure (1)..(149): unsure at all n locations; Clone ID: 701119721H1
gtgggccccaccctgaaggacgaggtgatgaagatcacgccggtccagaagcagacccgggccgtncagagaacccgtttcaaggccttcgtggtcgtcggcgacaacaacggccacgtgggtctaggcgtgaagtgcagcaaggaagt

SEQ ID NO: 38381 - DNA, 170 bp, Glycine max
  unsure (1)..(170): unsure at all n locations; Clone ID: 701119723H1
gaggaggaggcggagaaacagaagaagcacttagcaatgctggaacgcctttccaaacgcacccaaagccgttcgcaaaancccgattcctcatcatcagaatcctccacttcctccatcctttcacgcttcacccacttaaaatcctcgattgagtcccaactngccca

SEQ ID NO: 38382 - DNA, 258 bp, Glycine max
  unsure (1)..(258): unsure at all n locations; Clone ID: 701119725H1
ataagtttctaaagcacaaaatgctagtntcagttgaattatgtttcaataaattgtcattattagttaatggaaaaaatccatccaatgcaagcctttctcgaattcaagggttaggtttggcttcatgcaatttgaaggagtttccacatnntctccagggnctgcctganctgtcatatctttacatgccaaacaataatgtcaatgcattccccagttggatgtggggaaaaacaagtcttcggggctaatnnt

SEQ ID NO: 38383 - DNA, 245 bp, Glycine max
  unsure (1)..(245): unsure at all n locations; Clone ID: 701119727H1
gtttaaaagaaaagaaggtagagaaggtgttgtgaaaggttaagatcgagnattagggtgaagtgaaggagaagctcttgagaaggcatgncctgtcgggaatgattgtagctgacttgaaagttgaaactgaagatgggagaagcaacagaaagatatgcagttgtgacgggtgcaaataaaggaattggattagagatagttagacagttagcttcagctggaatcaaagtgttgctcacagc

SEQ ID NO: 38384 - DNA, 123 bp, Glycine max
  unsure (1)..(123): unsure at all n locations; Clone ID: 701119728H1
ctggctgctaaaatgagggcaagcacttcctatgcaatttcnaagatttgggcaaatattatgttggcnatagaacaactcataatacttgagacgcgatgagtggactaganagtgactgag

SEQ ID NO: 38385 - DNA, 146 bp, Glycine max
  unsure (1)..(146): unsure at all n locations; Clone ID: 701119729H1
ctaacgtcaccgactcanttgctgtcagcgagtgagtgagtcntttctctgcagcaacaaggtttagccacttccaaacagacgggaaatgggtcgtggggtcagtgctggtggtggtcagagttccttaggttatntctttggca

SEQ ID NO: 38386 - DNA, 268 bp, Glycine max
  unsure (1)..(268): unsure at all n locations; Clone ID: 701119732H1
gggactttgagctgatgcctccaccaggaagtcataanaaggngtatgctaacnccgatggatntngatcnanccatctttnngcttgaggagtctgaaatcgagctctttatttggagattctcaaaagagtggcatccnaaatcaaacanaaggggttcnnanggacanggtntccttcnnntngggcccnnagtgaaatttgggaaaagttgggaaaatccccncaaanaanggcccccgntaggnggggggtcacagggtttac

SEQ ID NO: 38387 - DNA, 176 bp, Glycine max
  unsure (1)..(176): unsure at all n locations; Clone ID: 701119733H1
gcactttccagcaatattgcacctttttgcccatagccatggctgaatcaattttaggtttcacccttttcaaatcacacactcttagttcatgtctacaaacaaaaaagtttcaagtgaaccattcttcaagattgccaaagcngccattcaangtntacccttttnaaanncng

SEQ ID NO: 38388 - DNA, 260 bp, Glycine max
  unsure (1)..(260): unsure at all n locations; Clone ID: 701119734H1
ctaaacgctacgattttaattttctggttttctctttttcaatcggtgcttcctccggcggcgcgtgggagtgtctttggcgcgtgattcctagttccccgcttacctatgctncgctcgacccgcattgtagagttcacgccggaganacggcggaatctaaccggacgatggtgatttcgatctccagggctncgcatnncggaacaanccnnattgncccaggnnanaaaggnggtganacanattngggganaant

SEQ ID NO: 38389 - DNA, 253 bp, Glycine max
  unsure (1)..(253): unsure at all n locations; Clone ID: 701119737H1
ggggatttgagggttgtgtagctctagaagaactgtacttgagccataatggtattgcaaaaatggaagggttgtcatcgttggtcaatcttcgggttttagatgtatcatcaaataagataacttcagtggatgacattgtgaacctgacaaaattggaagatttgtggcttaatgataaccaaatagcatcacttgaaggaattgctgaggcattctctggttcaaagagaggctnccaccatctantaaa

SEQ ID NO: 38390 - DNA, 171 bp, Glycine max
  unsure (1)..(171): unsure at all n locations; Clone ID: 701119738H1
accgtcgcatatttctgtgccaacaaaanaagatggcctcacaggtttgcaaagctgctttccagagccgcgaggttcccttctctcctccttccagagcctcccatggancgtgcgnttggggctgctacggctgtttcattgagctgcaaagtgcctcttttctaggga

SEQ ID NO: 38391 - DNA, 252 bp, Glycine max
  unsure (1)..(252): unsure at all n locations; Clone ID: 701119739H1
gcgatttgaaaatatgcgactttgggcttgcacgaactaatggagttgatggccagtttatgacagagtatgttgtcactcgctggtatcgtgcaccggagctcttgttatgctgtgacaattacggaacctctattgatgtctggtcagtagggtgcatttttgctgagattcttggtagaaagccaatcttccctgggactgagtgtctcanccngcggaaactattaaaggnnttttgnnanncnanat

SEQ ID NO: 38392 - DNA, 172 bp, Glycine max
  unsure (1)..(172): unsure at all n locations; Clone ID: 701119740H1
tccatcacncncgnnttcgggtcaangcgntnaccatntcaagatgctngatagtgtgcgcaaagaggcttttgggaacgacgtcgttgggcgttagggttccggcgangctgtnccacgagaaggttgtggatcactaacnacaacccccggaacnttggatcttagacaa

SEQ ID NO: 38393 - DNA, 254 bp, Glycine max
  unsure (1)..(254): unsure at all n locations; Clone ID: 701119741H1
agggattatccactgtcatacagagggcttcagttaacaatatttctggttctgctgttcttaacttactgcagagccaggcaaaggctatggctggagacaatgctgtcaggatgatgctggagaaaatggcacaatgtgcgagtagtgcttacatgagcatactagaaagatgggtttacgaaggtgtaatagatgatccttacggtganttttcatcgcagaggataaatctcttcaaaaggggagtcccc

SEQ ID NO: 38394 - DNA, 255 bp, Glycine max
  Clone ID: 701119742H1
taattgcacataaatccaattcgagcaagacgattgacctcaacaaaagttaggcatcacaagatagaagacaaacaatgtgaagaagagaagcaagcattagcgagtgagccaaagaagcttaattcttcaaattcatcttcccctaagggactgcgtaggggaaggagtagaactcgacgtgccctccctccatcttcacctttgattattggttcttcttcatcttgatgcccaaactctgatttttttctt

SEQ ID NO: 38395 - DNA, 239 bp, Glycine max
  unsure (1)..(239): unsure at all n locations; Clone ID: 701119743H1
ggaccccgagtgncgggcacgtgtgggaaacgacggtgacaatggttcgttgatgattcctcgtttcaacgcttaccgcgtaaacaaccttcaacctgtgatncaaaagcatcatctccaaaatcccaaacttcatatcatanncggatcggaggctaatctattacgcgctgttctctcgtcttctacaagattttntgttcgatctcaaccaaggttgttccttccacctccgcnag

SEQ ID NO: 38396 - DNA, 252 bp, Glycine max
  Clone ID: 701119744H1
gtttgctcacccctactcttcttccagtctctatctcaatctccatcaaatttaactatggctactgaagaggttttggttgatgaaatcacttaccctaccaagatcactactaccaagcccctatctttgcttggccatggaatcaccgacatggagattcacttcatccatgtgaaattctattcaatcggggtttatttggagccagaagtagtaggccacttggaccagttcaaaggaaaatctgcc

SEQ ID NO: 38397 - DNA, 247 bp, Glycine max
  unsure (1)..(247): unsure at all n locations; Clone ID: 701119746H1
tctttgcattctgtggaagagcttgttgggttctctcagctttcaccttnccaggctcggatccaaagaaaaatctcaactttcttcaacaattcatctccacaatttctgggtagtggctttttttagcaggaatggctcaacgttctaatgttccaatgttaggcaagagtgaagagaatgtttcagatacagctcattctggacaaagcccagaaaggtcacccaggtnnaaagatgantaanc

SEQ ID NO: 38398 - DNA, 234 bp, Glycine max
  unsure (1)..(234): unsure at all n locations; Clone ID: 701119749H1
aatggctgggcttcgtggcggccgtgtggattcaatgcatctccggcaacaactacactttctcaaactactccgacgccctcaaatccctcntgnacctcactnagctgccaactcaacaacctttnngtcgntaaaaggacgttggaaaaagcctttgggcttnngggggggnnnagacntgnnagcggnnccncnantggggantantcncccnaagtnggatcnaggacg

SEQ ID NO: 38399 - DNA, 169 bp, Glycine max
  unsure (1)..(169): unsure at all n locations; Clone ID: 701119750H1
gaaatcttgttcagtctttcaacatatatattgcattcgaaatttggaatttcatctcatttaagatgctgtttgataaacttttcatttataggagaatgaaatgagaagggaaaatgaattgaatttctgttgaaagattaaatcaccttangctctcnaattttat

SEQ ID NO: 38400 - DNA, 255 bp, Glycine max
  unsure (1)..(255): unsure at all n locations; Clone ID: 701119751H1
gaaagatggaggggaaggagcaggatgtgtcgttgggagcgaacaagttccccgagagacagccaattgggacggcggcgcagagccaagacgacggcaaggactaccaggagccggcgccggcgccgctggttgacccgacggagtttacgtcatggtcgttttacagagcngggatagcagnttttgtggccanttttctgtttctctacatcactgtcttaaccgttatgggagtcgccgggnataagtnta

SEQ ID NO: 38401 - DNA, 252 bp, Glycine max
  unsure (1)..(252): unsure at all n locations; Clone ID: 701119754H1
atcttctccgatctcctcaaactctatcngcgcagaaccaagcctctatcaccatggggaagacacatggaatgggagctgcccgcaagctgaagtctcaccgtaggagacaaaggtgggctgacaagtcatacaaaaagtctcatctgggaaatgaatggaagaagcttttgntggttcancccatgnccaagggtattnttcttnaaaagtgggtatnggggntaaccanccnantttgnaatgagaant

SEQ ID NO: 38402 - DNA, 85 bp, Glycine max
  unsure (1)..(85): unsure at all n locations; Clone ID: 701119755H1
gccttatgtgaattcatgnggagcagagttccatcccaatgccttnatanncgattcccgttcncattncncacaccaaacanca

SEQ ID NO: 38403 - DNA, 259 bp, Glycine max
  unsure (1)..(259): unsure at all n locations; Clone ID: 701119756H1
tacgaaatcacttgggatatgcgccatcgcttagactccaaaggccagcgtgaaggnaagctaatcgattacagagttagcgaactangagtcgttgaacttcttgatggcctttgcgaaaagatgcaagattatacactcaagatagatacaaatacctatgaatggttcaaagtggatagctgggataacctcacaacaaataagcagaagctcgggcatattcaaaagatatatctncttattgtggaaggttnct

SEQ ID NO: 38404 - DNA, 252 bp, Glycine max
  unsure (1)..(252): unsure at all n locations; Clone ID: 701119757H1
gttggtttggtctaacaaaatagtttttcatcatgggaaacgcttgtgcaaaaggaaaaccagttgctcatgtttcttcctccaatttctctggaagtaagaagcctgcaagtaagccaaagcagtattcaaattcttctgaacaacgatctgctccancaacttcagaattaaatgttcccaaatccatctccagtaaccttaagtccttcagcttgaatgatctaaaagaggcaataagaattccggcgg

SEQ ID NO: 38405 - DNA, 251 bp, Glycine max
  unsure (1)..(251): unsure at all n locations; Clone ID: 701119758H1
ctatcccatggttttggtccaagtcccaatgtacaacganagagaggtttatcagctatcaatcggttgctgcttggccttcttggccttcagacagaatcatcatacaagttcttgatgattctactaacccaacaatcaaggagctggtgcaaatggaatgtagtagatgggcgagcaaaggggtgaacataaagtacgaggtgagggacaacagagacgggtacaaagcaggggctctgaaagaaggc

SEQ ID NO: 38406 - DNA, 248 bp, Glycine max
  Clone ID: 701119759H1
attagctctttccagttctactggccatgggactaatataattgcaggagtcagtttgggtctggaatctactgctcttcctgtccttgtcatcagtgtgtcaattatctcagctttctggctgggccacacctgtggactagtagatgaaacaggaaacccaactggtggcctgtttggcactgctgtggcaacaatgggaatgcttagtactgctgcctatattcttaccatggatatgtttggcc

SEQ ID NO: 38407 - DNA, 254 bp, Glycine max
  unsure (1)..(254): unsure at all n locations; Clone ID: 701119760H1
cagatctctcagggcttgcatcttctcaggtaagttgtgaagatgtacacatcaaggaagncaatcccacaaggataaggatgctgaaccaactgagtttgaagagtcagttggacaggcattgtttgatctggaaaataccaaccaggagcttaaaagtgatctgaaggatttataccataaactcagctgtgcaagtngatgtttctggganccgcaaggctgtnggtaanncggnncnctaananatgagg

SEQ ID NO: 38408 - DNA, 249 bp, Glycine max
  unsure (1)..(249): unsure at all n locations; Clone ID: 701119761H1
atcggaactctttgactgctccagtggcagttccaagcacaagaagcgcaacaatttgcagacggtggaggtgaaagtgaagatggactgcgaaggatgcgagaggaaagtgaggaaggcggtggaggggatgaaaggcgtgaaccaggtggatgtggagcgtaaggccaacaaagtcactgtggtcggctactcgaggcctctaaggtgtccccccgcatcnttcaccgnacnggnaanannnctttc

SEQ ID NO: 38409 - DNA, 169 bp, Glycine max
  unsure (1)..(169): unsure at all n locations; Clone ID: 701119763H1
gttgcatatttgggcatcaacaatcaacaatcaacaatcaacaatcacaaatagaaactcactctttcgaaaaaaccagaatttgaatatgacgttagggtttgagggttatagttataccacaacacttggaaggaagagggtcgtgttattaccacaatgaagctnc

SEQ ID NO: 38410 - DNA, 212 bp, Glycine max
  unsure (1)..(212): unsure at all n locations; Clone ID: 701119765H1
gcgagtttctcttttctctctctctttcaattttcacatagtcagcgaaaacaaacaaactattggagatttggagcacgaaacacaacacaagcagcagccacctcgtttcattgttttgaattcaactgngaaaaacgacaacggggatnttccaggaaaaccagnntaacgggggnggccnnnnnnggggaccccgttanccaggaaaa

SEQ ID NO: 38411 - DNA, 253 bp, Glycine max
  unsure (1)..(253): unsure at all n locations; Clone ID: 701119766H1
gaaaatgcatcatctacctgacgaatttcttgaagagctgaaaaatggacttcgagttatccttgagggagggaatggctcacagcatagagaggaatttttcattttgcaaaagcttgttcagagtagatctgatttaacagccaagacattgataagngcacatcgtgtacagctagaaatcctngttgcaataaatncgggaatncgggnttttaacccccnggcntcgggttanaaaannccggngtna

SEQ ID NO: 38412 - DNA, 256 bp, Glycine max
  unsure (1)..(256): unsure at all n locations; Clone ID: 701119767H1
gtccctcacaatggcggaatcgtgccttctatccctcccttccctcttctacgccaaaaacaataccctttctctctcaattcccaccaagcccctnaacctccatcttcnatgctcnaactcttcgctctttcccctcaccacnaaaacaaggggcaantnttctctcctcaanttgggggctganacatgggttngggnaaangaaganggggaanaaaanncctggngggaaaacnanggcgncacgggtggg

SEQ ID NO: 38413 - DNA, 247 bp, Glycine max
  unsure (1)..(247): unsure at all n locations; Clone ID: 701119769H1
cacaaccctcccgaattcttgagacgcttcccgaatcctttcacacacacgttgntncctctatatatctaaatcccttcacttcccattcctaaatcctcttncaaaaactatacaacgttgctttngtnttgttttgttttgtctctctctaatcattccaatggccaaagaaggacccaantgggaggggttgcacaaatggagnttgctcatncngggggncccgccccatgaattnaggggg

SEQ ID NO: 38414 - DNA, 251 bp, Glycine max
  unsure (1)..(251): unsure at all n locations; Clone ID: 701119770H1
gggcatcgatcaaaaccacggatatacattggatgcatganatctgggcctgtcctatcccaaaaaggggtaaggtaccatgaacctgagtactggaagtttggagaggctggaaacagatacttccgtcatgccacaggacagttgtatnccatttcaaacgatttggctacatacatattcaattaaccagantgttccttcacaagtatgccancggggntntcccccnaggnnccggtttatnngat

SEQ ID NO: 38415 - DNA, 249 bp, Glycine max
  unsure (1)..(249): unsure at all n locations; Clone ID: 701119771H1
gatctctcagggcttgcatcttctcagttgtgaagatgtacacatcaaggaagaaaatccacaaggataaggatgctgaaccaactgagtttgaagagtcagttggacaggcattgtttgatctggaaaataccaaccaggagcttaaaagtgatctgaaggatttatacataaactcagctgtgcaagttgatgtttctggancccgcaaggnttttgttatccacgcccctaaagntggggggggtc

SEQ ID NO: 38416 - DNA, 120 bp, Glycine max
  unsure (1)..(120): unsure at all n locations; Clone ID: 701119772H1
ggaaacttttggtcatctcatttaccaagaacatcttatgatattgatttagactctgaaagccctaatccaaatgatcaggttaggttctgttgctcangaatccagttgctgattcag

SEQ ID NO: 38417 - DNA, 257 bp, Glycine max
  unsure (1)..(257): unsure at all n locations; Clone ID: 701119774H1
gnaccagttcnaccgcacgaatatcntgtngtttggagcgatccngagnaaaaactctgtaaaccatgttggtttanccagggaccntcnttacaggtggatgagcttctctcctgactccttccgttacaaggaaattgagaancgaatgctgtgggaagttgaggggaagtgggntgttaaaggagcagttgangtagacattggtgcaaacccttctgctgagggtggaggagaagatgagggagttgatgatg

SEQ ID NO: 38418 - DNA, 105 bp, Glycine max
  unsure (1)..(105): unsure at all n locations; Clone ID: 701119775H1
cttcgaagcngctcggagctngcgaaacccgtancggttacgtaaacccgtanggcgatattcagaattgcatcggcacacanntcagtncnncagcnntntacg

SEQ ID NO: 38419 - DNA, 244 bp, Glycine max
  unsure (1)..(244): unsure at all n locations; Clone ID: 701119776H1
gttaggtagcaagcataagtgtctaaccttagaaacatatctgctacatatcgtgtgcattttggaattgtgccactaaaattctattcatctatggctgcctcatcttatgctatgcaatcaatccttgcaaaccctatgatccgcatttccagcgggtctagggagaaccattttggtgnnctgcttatcactgagaaggaatgttggcctgaaaattaggnccagggctnagaaaaaacnc

SEQ ID NO: 38420 - DNA, 269 bp, Glycine max
  unsure (1)..(269): unsure at all n locations; Clone ID: 701119780H1
cttnatgtgggntcttgaggtttaaatttgtccgccagacggttacgaggtgtntnctaccccgatggatgttgatcaacccattgatccaaatgaaccgacatactgtgtttgtccatcaggtatcttttggagatatgatngcttgtgacaatgaaaatngccaaggaggtgaatgggttcnactattcggggcgttgggctaacgcangnnaacaggtttcagggaaaaggggtactnncngttnaanntcccccccaaanaggag

SEQ ID NO: 38421 - DNA, 247 bp, Glycine max
  unsure (1)..(247): unsure at all n locations; Clone ID: 701119781H1
ctcgaggcttttaaagggttgcgtgaaatcgggactggggttttgctgtccgttggaggtgctattttcatcaatgtgtttctcagtcagagtactcgtcccggaaagtttccatctatactttttccaattgaaattaaaaatatccaacgcggcaaacacggcagtgacactggagtctacgatantgaaggaaggtttgtaccttcnaaatttggangaatttttaaaaggcntccacncnccc

SEQ ID NO: 38422 - DNA, 256 bp, Glycine max
  unsure (1)..(256): unsure at all n locations; Clone ID: 701119782H1
attcttggttacactgaagatgatgtggtctccaccgactttgttggtgataacagatcaagtatttttnatgcaaaggctggaattgcattgaataagaattttgtgaagcttgtctcttggtatgacaacgagtggggatacagttcacgtgtcattgacctgcttgnaatcgttgccaagaagtctttnaaatnagggngntccaaaaattnaggggcgggccaaaccngcaattaagtncccncccnaaaaa

SEQ ID NO: 38423 - DNA, 163 bp, Glycine max
  Clone ID: 701119783H1
atgcaatggcattacgcgagcttattgtgatggggttattgctgctggtttgtcttgcaaaggtttcatctgatgttaacatagaaaaggagcaagatgaagaatttcgctttcctgttgaccatcttatcgtgagaggcgggaacagaaggctattccagga

SEQ ID NO: 38424 - DNA, 252 bp, Glycine max
  unsure (1)..(252): unsure at all n locations; Clone ID: 701119785H1
cagattttgtttatggttttnctgagagctcttcaaagaaagctgcggaatactggcttatatggcggtttgaaggggatgccaccctagctgacttgatgcagagtagagactttccatataatgttgaaacattaatttngggtgaggtccaagacttgcccaaaggnttggagagagaaaatagatcnacacaaaacattggggngncagttcttgtttgncantggatgntcctccatacaannggta

SEQ ID NO: 38425 - DNA, 249 bp, Glycine max
  unsure (1)..(249): unsure at all n locations; Clone ID: 701119787H1
ggcactttagccggccaacttttctttggatggcttggtgacaagttgggaaggaaaagggtttatggcttaactcttatgcttatggttctgtgttccattgcctcgggactctcttttggcgacacccctaagggtgtcatggccacactttgtntcttcagattctgggcttggctttgggattggtggtgactaccctctatcagctacaatnaggtcnagantntnccaanaaaangagggggg

SEQ ID NO: 38426 - DNA, 253 bp, Glycine max
  unsure (1)..(253): unsure at all n locations; Clone ID: 701119788H1
attcaagaagcagtgttcctatatggggtggaagacaaagtgttgcagctgcaaactgnnttnaggatgatgangtcctacttgcnagatgcngatngaaagcnagatggnaatgaaaggctaaggaattggatttcanaaatcngagaagctggcntatgnttctgatgntgtcattgagtcanatncnctcagaggagtctcaagangcnaattgactcggngnttgagcctcatcaaaagggaggnttaa

SEQ ID NO: 38427 - DNA, 224 bp, Glycine max
  unsure (1)..(224): unsure at all n locations; Clone ID: 701119790H1
tattatctccatgtgcggtgtttacnaggggaaaccttcnnaatttggtttggtcatggaggagtatgcaaaagaagggatgcatcatataatttcagctttgcttgagttttctgcagcagatgatctggttagtttcaaagatgcggttgaaaaggagggtcatgatattgatggggtagggttttggtatggaaggtgtgttgcntcgaagaaaataggtt

SEQ ID NO: 38428 - DNA, 223 bp, Glycine max
  unsure (1)..(223): unsure at all n locations; Clone ID: 701119792H1
ggacattctaggaagatacgatgcngagtttgcaaaaatcctcacaaaagacgcttacnaaattcgttgctgagctgcaacgtgagttcaggagcgatatcaagcatgcattagagagcagaagagaggcaaagaagaagtacaatgaagggaactcttccggggtttgatcctggccaccagtcacattagagnccaggagtggctgtgtncacctgttncc

SEQ ID NO: 38429 - DNA, 248 bp, Glycine max
  unsure (1)..(248): unsure at all n locations; Clone ID: 701119793H1
atgacatcaaaactctcgctggtggcagcgttgccaacacaattcgcggtctcagtcgcggttttggaatttccaccggaattattggancctatggagatgaccaccaaggccagctttttctcaccaacatgaccttcaactctgtcgacctctcaagactccgtnaaaagaaaggacacactgcacagtgtgtttgcttggtagatggantgggtanccntacangcggccctgtatanaaaatg

SEQ ID NO: 38430 - DNA, 238 bp, Glycine max
  unsure (1)..(238): unsure at all n locations; Clone ID: 701119796H1
agaaaccctattgcacgttttgcaatcgaactcgacaatggccaacagcaacctccctcgaagaatcatcaaggaaacgcagcgtttgctcagtgagccagcacctggtattagtgcctccccctctgaagagaatatgcgatttttaaatgtgatgancctggggccnanccagtccgcnttatgagggggnnttnnnaataaaattttttggaaaaaaaaattncggggggccnaa

SEQ ID NO: 38431 - DNA, 269 bp, Glycine max
  unsure (1)..(269): unsure at all n locations; Clone ID: 701119801H1
cttggggtaggcctggtggtattgctgtgtttgattgttcacggccatcgccgaacaatgcggtcgtcaagctggcgggcagacatgtcccaacaacctatgctgcagccagtacggttggtgtggaaacaccgaggantactgttcccttcctaagaatgccagagcactgttggggagncgcggcggtggcgtggcggcggcggcggtgaaagtgcttctaatgtccggncacatattcatactatgagccagagcaacanggtggg

SEQ ID NO: 38432 - DNA, 269 bp, Glycine max
  unsure (1)..(269): unsure at all n locations; Clone ID: 701119802H1
anaacccaggttgcgcttgttcatggaatttcaatgggtggaggtgcagctttgatggtcccattgaagttctcagttgtaacagaaaaaactgtttttgccactcctgaagcaagttttggatttcatattgattgtggcttctcatactaccactctcgtttaccagggcatttaggagaatacttggcacttactggaggaaggttgagtgggaaggaaatagttgctggctggactggcaacccattttgtccctttgagaaaat

SEQ ID NO: 38433 - DNA, 265 bp, Glycine max
  unsure (1)..(265): unsure at all n locations; Clone ID: 701119803H1
gactgcttatgatatgtaattcgatcactagatggcattatattagtgttggtggaagtatattagcctggtttctttttattttcatatattcagggattacgcactccttangatcgtcaggtgaattccctttctactctgggtgtgttgtgttgaaaaagaaactctggcaatttccttatgacccattaagaatgctgttaacttgagttctgtttcatttctgcaggagaatatttatttgtcatatatgtctgatgag

SEQ ID NO: 38434 - DNA, 267 bp, Glycine max
  unsure (1)..(267): unsure at all n locations; Clone ID: 701119804H1
cagatctgagtggtgactctttcacttctcatcactattattattagngctcattgccattatcatgtcaaggaggccagtnaatccttcgcgtcggctaggtgatggtggaagtataccatttgttgcatctatccagtccaaatctcaaaactctcccctactatctattgggcttgtcattgtgggtgcaatcctcctgattggttattgttacagcaattcaggtggagctagcggtggtataaggatgtaaaacttgaaggt

SEQ ID NO: 38435 - DNA, 268 bp, Glycine max
  unsure (1)..(268): unsure at all n locations; Clone ID: 701119805H1
ggattcatctgaaagcagctccaaggaggaaagcgaagatgaagatgctgataaaagtgaagatgaagaaaaaaagcctaagacaaagacagtgaaggaaacaacttatgagtgggaacttttaaatgatgtgaaagctatatggctgaggaatccaaaagaggttacagaagaagaatacaccaaattctaccacttctcttgccaaggatttcagtgatgagaaaccttagcatggagtcnttcatgctgagggtgatgttgagtt

SEQ ID NO: 38436 - DNA, 269 bp, Glycine max
  unsure (1)..(269): unsure at all n locations; Clone ID: 701119806H1
gctcgagcgacaatggcgacaaaacctcgtttngcttatctctcttccacttttcttcttctntctgttgtaactgtctttacttcggtgtcggcacaagccccagaatccccatcactctacaacaccttccttcaatgcctcaccaaatacacaaataacccctccaacatagtcttcgccaacaccaaccccaagttccccactatcctccaaaactacatccgaaacgcgcgtttcaacacctcctcgacgcgaaaaccattact

SEQ ID NO: 38437 - DNA, 269 bp, Glycine max
  unsure (1)..(269): unsure at all n locations; Clone ID: 701119807H1
angaaatcccttgtngccttctgacccttaccaganagctcaggctagattctgggcngactttgttgacaataaggtacccttctgttcttcaagcttttnatgctttgattgtnacttgtaattcctttaccattgattttgtattatgcatttagcgtttgatgatgtaatttggttgtnnnatncccatgttgctcccnatttnnaactcttacccgtattctagatgtagnatggaatatgaganntgtnnaatcnaagganna

SEQ ID NO: 38438 - DNA, 272 bp, Glycine max
  Clone ID: 701119809H1
gcagcctgcttgattgacacaggcgatgaactccttgtcactgaattaatgtttaatggtacttttaatgaccttgaccatcatcaagttgctgcccttgcaagttgtttcataccaggagataagtcaactgagcagatacaattgagaacagagcttgctaggcctctgcaacagcttcaagatagtgcaagaaggatagctgagatacaacatgaatgccaattggatataaatgtgaatgagtatgtggattcaaccgtaagaccatt

SEQ ID NO: 38439 - DNA, 265 bp, Glycine max
  Clone ID: 701119810H1
atccgagaaaaactctgtaaacatgtcggtttaccaggacctccttacaggtgatgagcttctctctgactccttccgttacaaggaaattgagaatggaatgctgtgggaagttgaggggaagtgggttgttaaaggagcagttgatgtagacattggtgcaaacccttctgctgagggtggaggagaagatgagggagttgatgatgcagctgttaaggttgttgacatgttgacacattcagactcaggagcaacccgcatc

SEQ ID NO: 38440 - DNA, 261 bp, Glycine max
  unsure (1)..(261): unsure at all n locations; Clone ID: 701119811H1
ctcagacatggcatctcaaggtttgtgtccttcgatnaaaaatattcttctattccgactctgaagggaagcgtgtggcagtcaagtantnctcagangatnggccancaaacantgcaaagntagctttgagaagtttgtaatnactaagcctgttnagacaaatgctcgtacggnagctgaggtaacactacttgggaacatatcattantacaaatttgnaccagaccggcatntcttgtcactggtggtgaagatga

SEQ ID NO: 38441 - DNA, 273 bp, Glycine max
  unsure (1)..(273): unsure at all n locations; Clone ID: 701119812H1
tctacccgccgctcgatgggaattgcgcttcaaggcgtctcgtagggctaatccgccttcacgagggtcaccaacggcacgtgcctttggggggccgaggccccctactgctggtcggcaaacggacggcgggcgcacgcgtcgcttctagcccggattctgacttagaggcgttcagtcataatccaacgcacggtagcttcgcgccactganttttcaaccaagcgcgatgaccaattgtgcgaatcaacggttcctctcgtactaggttg

SEQ ID NO: 38442 - DNA, 263 bp, Glycine max
  unsure (1)..(263): unsure at all n locations; Clone ID: 701119813H1
tccttaagctcatcaatgccaagaacaccatggaaattggtgtctacactggntattcacttcttgctcaccgctctcgctcttcctgaagatggaaagatcttggccatggatattaacagggagaattatgaattgggtttgccagtaattaagaaagctggtgttgaccacaaaattgaattcagagaaggtcctgctctcccagttcttgatgaaatggttaaagatgagaagaaccagggagctatgacttcatcttt

SEQ ID NO: 38443 - DNA, 264 bp, Glycine max
  unsure (1)..(264): unsure at all n locations; Clone ID: 701119814H1
ctctcttcaaaatggccgttaccttctcaaatctccacacagaatcaggtctacangtccctcgacgacttcctctctgggaaggtctacgtttctggggatcagttcacaaaggacgacatcaaagtgtatggtgctgttttggagaagccaggtgactcttttcccaatgctgccaagtngtacgaggttgtctcatctcagcttgctgcaacttccccggcaatgctcaaggggtgagatcagtggcaaagctctgctcca

SEQ ID NO: 38444 - DNA, 277 bp, Glycine max
  Clone ID: 701119815H1
gggagctctgccgcctccaacaaaacagagttcagaacacaaacccttcgaaccgaacgtttttgagggttgatagagcacgatggttcagtacaattttaagaagattaccgtggtgccaaatgggaaggatgtggtcgacattatcctctctcgcacccagcgtcagacaccaaccgttgtgcacaaaggatatgcgatttcacggctgcgccaattctacatgcgcaaagtgaagtatactcagcagattttcacgacaagctctccaccataa

SEQ ID NO: 38445 - DNA, 258 bp, Glycine max
  unsure (1)..(258): unsure at all n locations; Clone ID: 701119816H1
ctcgagttggattggacaaagataaantnatatctctcgttagtgtaaatanancaagttgctactaagnaaagtgaactgagctatggttatatgctgaacattttnttcctctggagaaacatcaaatnttgatgatgatatgtggctttcttcaaaagcttactacagtccaattgttncaattntgtggaggcactgagctcgcatctagctacatgcaggaagtccctgcagcctcaagcttttggagcatta

SEQ ID NO: 38446 - DNA, 254 bp, Glycine max
  unsure (1)..(254): unsure at all n locations; Clone ID: 701119817H1
ggtgattggaatggtgctggtgcantacacaaactacagcannaagtccatgagagaaganggtggctatgaagtgatcaaagcagcaattgacaagttggggaagaagcacaaggagcacattgctgcttatggagaaggcaacgaacgtcgtttgacaggacgccacgaaaccgctgacatcaacaccttcntatggggagttgcngaccgnnganttcntnngaannttgnagaacaaccccatcttgctt

SEQ ID NO: 38447 - DNA, 272 bp, Glycine max
  unsure (1)..(272): unsure at all n locations; Clone ID: 701119818H1
ttaggccgtgactgatcatcagangcaatggcgagcaggtactgggcagtgtctcttcccgtccacaactcggcatcatctcagctctggaaccaattgcaggaacgaatctccaagcattccttcgacacacctctctacatattcaacattcccaacctccgcgtcggaaccctagactctctcctctccctcagcgatgacctcgccaagtccaacaatttcgtcgaaggagtcacgcacaagatcaggcgccagattgaggagctcga

SEQ ID NO: 38448 - DNA, 272 bp, Glycine max
  unsure (1)..(272): unsure at all n locations; Clone ID: 701119819H1
ttcggccgaaacccgcaacaatggccgcagcaacgttaacgtatcaganccgnncgtcgtttncaacgccgatcaagatgccaactccaactgcctccgccaccgccaccaaaaaatcccgggagagcgaccgaagacggtgacgaagcgaaggagaataccgatccgcagcaggttgttgagcaagttgaaattgaatatgtaccagagagtgcagagctagatgaagaattcagaaaaatctttgagaatttagttttggctaggttact

SEQ ID NO: 38449 - DNA, 269 bp, Glycine max
  unsure (1)..(269): unsure at all n locations; Clone ID: 701119821H1
actgtgtgtgagggtgtgtcttccataatctctctnaatggaacagttgaagccaagtgctgttaactcttctcctctcactccactcaccttcttggacagagcagccaccgtttacggcgatgtcccttccgttgtttataacgacacaaccttcacgtggtctcagacgcgccgccgatgcctccagctggcctctgccctcgcctccctcggcatcggccgcngccacgtcgtctccgtcgtggcccccaacatccccgccatgt

SEQ ID NO: 38450 - DNA, 271 bp, Glycine max
  unsure (1)..(271): unsure at all n locations; Clone ID: 701119822H1
gncaaaaaggcctataaaggtatatatataccttcttttttttctgatcaggattcaaaccctagatccagttttaattagtttcctagttacattcatagtgtgcaagaatgggaaacagcttaaggtgttgtttggcttgtattcttccatgtggagctctagacttgattcgaatagtccatttgaatggctatgtggaagagattacacgtccaatccacagcaggagaggttctcaaagcaaaccctaaccatgttctaagcaaac

SEQ ID NO: 38451 - DNA, 268 bp, Glycine max
  Clone ID: 701119823H1
taagattacgcgggatagggatcgtgatattagtgaaaaggttgctcttggtatggcctctactaaaccagggactgaggttatgtatgatgagagactgtttaaccaggataagggaattgcgtctgggtttgccaccgatgatcagtacaatgtgtatgagcatgggctgtttactgcccagccaacgctgtccactttgtataggccaaagaagaatcttgatgatgagacttatggaggtgctgatgagcagttggagaagatt

SEQ ID NO: 38452 - DNA, 270 bp, Glycine max
  unsure (1)..(270): unsure at all n locations; Clone ID: 701119824H1
tactactcactcactgcagatctcaattgcatcgctgtccatggntaccatcgttagcatcaaggcccgccagatcttcgacagtcggggcaatccaactgtcgaggtggatttgacttgctccgatggtacttttgccagagctgctgttccaagtggtgcatccactgggatttatgaggcccttgaattgagagatggaggatctgactaccttggaaagggtgtatcaaaggctgttgacaatgtgaacaccgttcatggccctgc

SEQ ID NO: 38453 - DNA, 273 bp, Glycine max
  unsure (1)..(273): unsure at all n locations; Clone ID: 701119825H1
gctatcttcatctagaagcctccttcatgaatccattttaacagtagatttaatgaaatataaaagcagtgtcactgccatttccatcaaaaccatacatnnagatagaatggctgctcctactccagttgctattggcacaaggggcacaattggatctcttgtaaagaaggaaattgaatacttctccatgtttgagttggggaactcacagaggcctcagccacactttgtgaacattgtttctggaagaggctattccacttccaggtc

SEQ ID NO: 38454 - DNA, 254 bp, Glycine max
  unsure (1)..(254): unsure at all n locations; Clone ID: 701119827H1
caaaaatctcccttctaaccttattcttcttctcttccttcaccattcattgcnttgcaattgttcctcaaaacgaaaccttcaaatttgagaactcaggtgaacttggaccctacatcgttgagtacggtgcagattacagaatgataagcatcttcaactctccattccaagttggtttctacaacaccaccccaaatgccttcactctagctttgcgtgtagggctccaagctcggagcagctattcgttg

SEQ ID NO: 38455 - DNA, 273 bp, Glycine max
  unsure (1)..(273): unsure at all n locations; Clone ID: 701119828H1
tantttctacttctattgagtctctctgtcgtggctatccctcagaatttgcttcatacttccattgngtgccggtccatngaggtttgatgataaaccagattatgcttatttgaaaagacttctacgtgaccttttcattcgtgaaggattccagtttgattatgtcttgattggaccattttgaaatatcagcaatcttcaagtgccactgcccctgcccgtgctattggtccggccgctggaccaagttcaggtgtgccaccactggtt

SEQ ID NO: 38456 - DNA, 275 bp, Glycine max
  unsure (1)..(275): unsure at all n locations; Clone ID: 701119830H1
gtgctattcaataattacgacaaaccaacagcgagtgttgtttttgtttggtccaggctggaccagggaatgaatagagatgagaggctttcggttgaaganaactgagttaagcggcgaagcaaaacgcagantcggcggcagaanttgccaccggaagcacgtcganganggtgaaccaaacacaaaattccatccaccacttctcnntnnatcccccaattcaaatctgtgaagaaaatctcaatttctaaattgtaantcttagcannatg

SEQ ID NO: 38457 - DNA, 274 bp, Glycine max
  unsure (1)..(274): unsure at all n locations; Clone ID: 701119832H1
cncatatcttgtctattctagtctttatgcagttatttagtgatgtttatgttcctattccattgctacctcaataacaagctagagacnnnnnnnnnnnnnnnnnnnnnnnnnnnnnnnnnnncagatccattgttagggttgttgaagaacattttctttgtagtttgtagttgtacttattactatatggctgaattcaagtcttctgtatcctcaatcagtctcctctttaaaatgttgccaactttgtgaaaaatgacattctctctaa

SEQ ID NO: 38458 - DNA, 264 bp, Glycine max
  unsure (1)..(264): unsure at all n locations; Clone ID: 701119833H1
aganagctaagatcgagctgtcttcaacgtctcaaactgagatcaacctgccntttcatcactgctgatgcatctggtgcaaagcatctgaacataacattgacaagatcgaagtttgaggctttggtgaatcacttgattgaaaggaccaaggcaccatgtaaaagctgcttgaaggatgctaacatctctatcaaggatgttgatgaggttctcttgttggnnggatgactcgagttcctaaagtccaagaggtggtttcag

SEQ ID NO: 38459 - DNA, 267 bp, Glycine max
  Clone ID: 701119834H1
tttttttgtcagttagttgcgggtcctctcctttcaataatacatttatacagtgtgtctgaagaaatgagagcaactcctatcaatacgttgaatccacgaagaactgcaatggttgtggctgattttctcaaggtctagttttaactattgtaataaataaaaaatctctcggtttctgttcattatttgaaaaaataacaaatgaaattctgtctaactgtttgttgaatccaacgcggcaggaattgtatcaagccctgctga

SEQ ID NO: 38460 - DNA, 242 bp, Glycine max
  unsure (1)..(242): unsure at all n locations; Clone ID: 701119835H1
gttttttacagtgaaagtagctctgtgctgtgtggtggttatgctactaaccctctcagatgcacagctagataactcttttacaaggacacgtgccaagagtgcttctatgtgcgtgaagtgtcagnatgttccaaatctgatccccgcatctgccagtctcataaggcccacttcatgatgttcgtcaggggtgattgatcattctgtgaacgacacgcttagatcggacgacaagtcac

SEQ ID NO: 38461 - DNA, 266 bp, Glycine max
  Clone ID: 701119836H1
tgatgaccaagacaaccttgtgccacctgcaaaagcacaagtagtgggatggccaccggttcgatcatataggaagaatactctacaacaaaagaaagaggaacagggtgaagggtctgggatgtacgtgaaagttagcatggcaggtgcaccttacttaaggaagatagatctaaatgtttacaagagctacccagaacttctcaaggccttgggaaatatgttcaagtgcactttggtgaatattcagaaagggaagggtacaa

SEQ ID NO: 38462 - DNA, 267 bp, Glycine max
  unsure (1)..(267): unsure at all n locations; Clone ID: 701119837H1
ttaacttccaccttccattggaaatttgcaaaacntacagacacttgatttaaggtattgttgttttttgatgaaaataccaaacgtaatttggaagatggtgaacttgagacatctcctcctgtacactccatttgattctccagatagcagccatctacggatggatacattaaccaatctacaaaccctaccgcacattgaggctggaaactggatagtagatggtggtttagcgaatatgatcaacctcaggcaattggggat

SEQ ID NO: 38463 - DNA, 266 bp, Glycine max
  Clone ID: 701119839H1
aaaggcacttaatgaacttgttattcttccaatgagaaggccagagcttttctctcgtgggaatctgttacggccctgtaaaggaatattactttttggtcctcctggcactgggaaaacccttctggccaaggcacttgcaaccgaagctggtgcaaattttatcagcataactggttcgacccttacttcaaagtggtttggagatgctgaaaaactaaccaaagcgcttttctcattgccagcaagcttgctcctgtcatgta

SEQ ID NO: 38464 - DNA, 254 bp, Glycine max
  unsure (1)..(254): unsure at all n locations; Clone ID: 701119840H1
aattctcctctcacccttataaaaacacttcattttaactcccanttttgcattantcacctatctatctatcccntctatcttttctaacatggctgctgggactggactctttgcagagattttggatggagatgcgtacaagtactatgctgatggagtgtggaagaaatctgcttctgggaaaagtgtttccatcatcaaccccactaccannnnnnctcaatacaaagttcaagcttgttcacaagagg

SEQ ID NO: 38465 - DNA, 274 bp, Glycine max
  unsure (1)..(274): unsure at all n locations; Clone ID: 701119844H1
gtaagcgtgtggggtaacacgcccttggcgaacggtggatcccnagatccatgacctgcatgcgngaaggagaagcgccgtcaatgccgnggaatcgagctcanccgcctccgagaacttcacctccntcgccgtcatcgaggccctcggcagcgctctcacgaacaaatactccgagggcatnccgggcaaccgctactacggcggcaatgnaatacatcgaccagatcgaaaacctcngcngctcagcgncctccaagccttcnactnagnc

SEQ ID NO: 38466 - DNA, 219 bp, Glycine max
  Clone ID: 701119845H1
tagtgcctccttgccagaagttaaaatgggcccaagaaactttcctattcacatctgaatcagtgaacgaggggcaccctgacaagctctgtgaccagatctccgatgctgtgctcgatgcatgcttggagcaggaccctgacagcaaggttgcctgtgaaacctgcaccaagaccaacatggtgatggttttcggagagatcacaaccaaggccaacg

SEQ ID NO: 38467 - DNA, 271 bp, Glycine max
  unsure (1)..(271): unsure at all n locations; Clone ID: 701119846H1
gagatgtctctgctctcagatctcatcaaccttaacctntccgataccaccgagaaggtgatcgcagagtacatatggatcggtggatcaggaatggacctgaggagcaaagcaaggactctcccaggaccagttagcgacccttcagagcttcccaagtggaactatgatggttccagcacaggtcaagcttcctggtgaagacagtgaagtgattttatacccacaagccatttcagggatccntcagaaggggtaacatatctggtta

SEQ ID NO: 38468 - DNA, 274 bp, Glycine max
  unsure (1)..(274): unsure at all n locations; Clone ID: 701119847H1
gtccctcctnccctctgccttataattcttgtganccttnnngnngtcagcattnaaagtgcaccagcaaacgtgaagccaagccattatgctgnacccttcaataggagtgtttttccttctggttttctatttggaataggctctgcagcttaccagatagaaggagcagcagctatagatggcagaggaccaagtatatgggacacctatactaaacagcaaccagggaagatttgggatcatagtgatggaagtctagcaattgattttt

SEQ ID NO: 38469 - DNA, 278 bp, Glycine max
  unsure (1)..(278): unsure at all n locations; Clone ID: 701119848H1
gaaaatcanaaatgggagaagagagagaagatcnacagaagctaaagcgattagcggacagattcctnacgactacgacaangactctcgatggcccgattactggaacaacgttctcatccctccccacatggactctcgnnacgacgtcgtttcccacttcaagcgcaagttctaccagcgctacgttgatcctgattttntggtggagccaatgtctgttggtggcagttcatcccagccagtggcgttcatcaactacctcctcatcgtcgccc

SEQ ID NO: 38470 - DNA, 270 bp, Glycine max
  unsure (1)..(270): unsure at all n locations; Clone ID: 701119849H1
atgggaattgcgcttcaaggcgtctcgtagggctaatccgcctcacgagggtcaccaacggcacgtgcctttggngggccgaggccccctactgctggtcggcaaacggacggcgggcgcacgcgtcgcttctagcccggattctgacttagaggcgttcagtcataatccaacgcacggtagatttgcgccactggcttttcaaccaagcgcgatgaccaattgtgcgaatcaacggttcctctcgtactaggttgantactattgcga

SEQ ID NO: 38471 - DNA, 268 bp, Glycine max
  Clone ID: 701119850H1
ctgtttcgctttcaccgaagaataacttgactttcccgaactccacctgagaaaaagatacccttaattcgcaggcgcgtcttgtgttggacaacaaccacaagatgattaacttcgaagaaaccgagttgcgactcggcctccctggcaacgactcagcactcaagggaagtgctgccaagagaggcttctctgaaactgcttctgttgatttgaagctaatctttcttccttgcataacgactctgcctcggattcaccctcatct

SEQ ID NO: 38472 - DNA, 264 bp, Glycine max
  unsure (1)..(264): unsure at all n locations; Clone ID: 701119851H1
gctcgagcataaactaatccagaaaatgagcagcgtcgctggaaaggtggtgtgtgtcaccggcgcttccggttacattgcttcctggatagtcaaattcctcctcaatcgcggctncaccgttaaggccaccgttcgcgacacaagtgatccgaaaaaaataaaccacttggttggcctcgacggtgctaaggagaggctgcacctctacaaggcgaatctctcgaagaaggttccttaactctgtcgttcaaggttgccatg

SEQ ID NO: 38473 - DNA, 265 bp, Glycine max
  Clone ID: 701119852H1
tttaggctccatctaaaaaaaatggctggtttggctagcaatcttcctctaattgttatgataggtctgcaaattcattatgcagcacttgccatattcacaagagccgctctcttagatgggttgagtacaacggtgtttgtagtatacaggcaaggcatagccactttggctttggcgcctatatttttctctcctaagaggagacaatcagtgaaagattcttgggatcaggagcttctttttgatgtttgtgaccgctctt

SEQ ID NO: 38474 - DNA, 270 bp, Glycine max
  unsure (1)..(270): unsure at all n locations; Clone ID: 701119853H1
ttcgngccgtctccccctctgcgtttctgacagtgttactgtgtgtgttttccgcggaaaatncnaaatgggtatcattgancaagatcaaaganattgaagccgagatggctcggacacagaaaaataaagtccacagagtatcatcttgggcagctcaaggctaaaatagcaaaattaaggacacaattattggagcctccaaaaggttctagtggaggtggagaaggatttgaagttacaaaattgcggtcaggacgtgttgcatga

SEQ ID NO: 38475 - DNA, 94 bp, Glycine max
  unsure (1)..(94): unsure at all n locations; Clone ID: 701119854H1
gttttgtggttcttctattatcaatttcattccacgcgcttcacttcccaattgaagaagctttccaacccattgtcctcacacaacactgcnc

SEQ ID NO: 38476 - DNA, 248 bp, Glycine max
  unsure (1)..(248): unsure at all n locations; Clone ID: 701119855H1
catggctatggctatgcaaagcggaatcggagtctccaagatcctcatcatagcangagcaggttacaccggcaccgtcctcatcaaaaacggaaaactctcggatttaatcggcgagcttcagttgctggtgaagggattggaaaaatctggggagcatgctgaaggtgaaggtgaatatgctgatgccatagctgctcaggtgcgtcgcctggcgaatgaagttcggcagctagcatcaaacaggc

SEQ ID NO: 38477 - DNA, 212 bp, Glycine max
  Clone ID: 701119856H1
cagttatggaattctcaaggaccatgttctgttcttctccaccgttccctccaagaactcatcacccttggaacactcttcccttgagttcttctacttccgttttgatgcttcgcgaacaagcttcccctacagttgcctcttggtcttctaatttttcagcacagaattttcctgcctcagttctttacaagagcagcgtgatgaatata

SEQ ID NO: 38478 - DNA, 270 bp, Glycine max
  unsure (1)..(270): unsure at all n locations; Clone ID: 701119858H1
ttcaatccaagcttagatngttttactgttacaccattcctaggtaccatttgcaccantctttcttcttcaatcaatggcagcaacctcaacatccctcttctcctcaaatctccattctctcaactcacaacctttctcttcctcactctccttcttccgaaatgtccattccaccctctctttcccttcttctaaaccctcccgtggcgtngtagccatggctggctctggcaagttctttgttggtggcaattggaagtgnaatgg

SEQ ID NO: 38479 - DNA, 270 bp, Glycine max
  unsure (1)..(270): unsure at all n locations; Clone ID: 701119859H1
gngacttcaaacaccgccatgaganaccccacttgcattaccaggttggggttacaccagagaaagtagaagttccaagaagcttggttgatgaagaaatgcaggagaaactgaaagcgatgccaaaagaaaaccagccaaacactcctgttggacctgatctcaaatggagatacttttggaggatcggtcctcgaccgtcaaatactcgttttcaggaacttaatgctgagccagtaatacctgaaggtttccctgaatggaaagaaa

SEQ ID NO: 38480 - DNA, 261 bp, Glycine max
  unsure (1)..(261): unsure at all n locations; Clone ID: 701119860H1
attcttcaataccatatattctctctctttntctttttctttcttgatttgtnctgtgaaacanttagaagnnggtgttgatgtctgagncattggaanatgttccnccaatgaaaggagggtgtnnnnnnnnnnnnnnnnggttgaacctgaaggctactgagctgaggcttgggttaccagggtgtgagtcaccagagagggagggtgcgtttaggagtgtggnggtgtctggggccaagaggggtttctctgatgcca

SEQ ID NO: 38481 - DNA, 271 bp, Glycine max
  unsure (1)..(271): unsure at all n locations; Clone ID: 701119861H1
tnnaaaaaccaaaaaattgaaatttcttatccgttttggcgaattgaactgcgtgttcaattgggttgttgaattcgaggcagagggaaccgcgggtgtacaaggaatttcgattctgctgttgttagaaacggtgtagtttggtgtgaganaagctggggacttggggtggtcgtaacgacgtcgttgacggagaaggtatggattgtagggtttgcgtggccaccggcggcgatttgtgggtcagagttggcggcggtggcgagattgg

SEQ ID NO: 38482 - DNA, 273 bp, Glycine max
  unsure (1)..(273): unsure at all n locations; Clone ID: 701119863H1
ttatactgctctttgaggcaaatgcttgaggttggttatttccatgccgatcctcatccaggaaaccttgttgcaataaatgatggatctcttgcatattttgactttggaatgatgggggatattccaaggcattaccggattgggcttattcaaatgattgtgcactttgttaatcgtgattctctgagcttnncnaaatgactatctttctttgggattattcctgaagggattgacacacattcannnnctgatgcgctgcaagcatca

SEQ ID NO: 38483 - DNA, 270 bp, Glycine max
  Clone ID: 701119864H1
tcagcttcagttcgtttttgttgatcctgtgaacttatgggctgacggggtggttctgttggatacatggggccagcatgtttgggatgagggttaggattgcattagctgaaaagggtgttgagtatgaatacaaggaagaaaatctcaggaacaagagtccttgctttgcaaatgaacccaattcacaagaaaattccagttctgatccataatggcaaaccatttgtgaatctgcattatagtgcatacatgatgaggtctggaatg

SEQ ID NO: 38484 - DNA, 268 bp, Glycine max
  Clone ID: 701119865H1
ttgcaatggcttcaagtcaggaggaggtgacccttttgggagctactggaagcccatttgtgtgcagggttcatattgccctcaagttgaagggagttcaatacaaatatgtcgaagaaaatttgaggaacaagagtgaactgcttctcaaatccaacccagttcacaagaaggttccagtgtttattcacaatgagaagcccatagcagagtctctgtgattgttgaatacattgatgagacatggaagaacaaccccatcttgcct

SEQ ID NO: 38485 - DNA, 264 bp, Glycine max
  unsure (1)..(264): unsure at all n locations; Clone ID: 701119866H1
tgtgctcaagcttgcctcttttgagctgctttatggaactttttgttgctgtcactgcttctcaaacacacttcaacacagcaacgtcttncgaagaaaatgagttgcccaagaagaaagaagatgtatcaatcactgctaatgtggcatcccaaaagcactttcgacaaattcaacatatatgttaagggggtcttggattaaagttttggaggtagtaaaatgttctgataatgttgttagacttttaaaattttgggtaga

SEQ ID NO: 38486 - DNA, 264 bp, Glycine max
  unsure (1)..(264): unsure at all n locations; Clone ID: 701119867H1
ccaattcggccactctcctctgagaaancctccagcctctcctccaaagtcccctgnngttccgttcggttattcttcgaaccgttgtctgaagtttacaactcaaaacttcaccgaacgcatttcattcaccaattcgtccaagtctcgtatcaatcaatcagcctatccgtcttgcggttggagagatcggaggggagagcagccatggcgcatcgagtagaccacgagtatgactatctgttcaagatcgttttgatcgga

SEQ ID NO: 38487 - DNA, 264 bp, Glycine max
  unsure (1)..(264): unsure at all n locations; Clone ID: 701119868H1
ttacaactatggctagcnatggcagcgaagagttcaggctagtatcaccggcgttcaaaaacggggggaagttaccgaggcactacaccgacgatggtcagggtacgaagaagaacatatcccctccattggagtggtataacctcccggaggggacgaagactcttgccctcgtggtggaggatattgatgcgaccgattctggtgggcccaggtgccatggactcactgggtcgtcgcaaacatcttggccacggtgaaggg

SEQ ID NO: 38488 - DNA, 257 bp, Glycine max
  unsure (1)..(257): unsure at all n locations; Clone ID: 701119870H1
tttcggtgagctggtccgtttcctagacgaaatggtgtaaganttgaaagcatgatgattgattgatgggagcagcgaaccatataatttaatttaatttgtgtccacatgagaacgtcgttacctgcattttctatctcgcaacaccgcgataatggtataaaatagtttcagatacgttgcgttgattgattggtatgaagtgatgacttttttctctctatctcacacatacccatctactcctccctcaggct

SEQ ID NO: 38489 - DNA, 264 bp, Glycine max
  Clone ID: 701119871H1
tgtgtgtgtacgctttctattcctttcattgtttcttttctcttcgttctgaaatttcgtttctctctccaacgctacaatgtcggaagctaagacccaaattgaatccataaggaagtgggtcgtcgagcacaagctccgtactgttgggtgtctgtggctcagtggtatttcgggttcaatcgcttacaattggtctcgacccaatatgaaaactagtgttaagatcatcacgcaaggttgcatgcacaggctcttacgctg

SEQ ID NO: 38490 - DNA, 264 bp, Glycine max
  unsure (1)..(264): unsure at all n locations; Clone ID: 701119872H1
gctgtcactgcagtgcgggtgagggttgagtgtgggcttctgactgaagcatttatgcatcagagaatgctctgcaccaaagtgaangaaaagaatttcaataaaacagcatctgggaatacttctgagaagcaaaaaggtcaatgtaataagtgggtggagtggatggaggtcctggtgactgagatttgttgcctctgtattaggaggaactggtggatcgaatgctagaattgccatggattctgaggaagagaagtatat

SEQ ID NO: 38491 - DNA, 261 bp, Glycine max
  unsure (1)..(261): unsure at all n locations; Clone ID: 701119873H1
ctctcttgcccctgcaaatgcagctattctgctttctgtggtgcagggtggctattatcggaatgtaggaaatgcagcattaatggcatttggcgtgtgtggtttattgctagcanctggttgcatgcatgccctgaagcaatggggnaagcaaccatataacaactggcataaacagtgaatgtatgccccttggcaggcttggtagtggtggatgacctctcttttattgaatgcatgaggagtaaagagagaataact

SEQ ID NO: 38492 - DNA, 267 bp, Glycine max
  unsure (1)..(267): unsure at all n locations; Clone ID: 701119874H1
ctcttagggagctgcttttcactncctcctggtgttcttcaatatctcagtggtgtcatcctctttgaggaaaccctctaccagagcacagctgcaggcaagccctttgtgaatgtcttgaaggaagctggtgtgcttcctggcatcaaggttgacaagggcacagtcgagcttgctggaactaatggagaanccaccactcagggtctagatggccttggtcagcgttgtgccaagtactacgaagctggtgcacgttttgccaaa

SEQ ID NO: 38493 - DNA, 268 bp, Glycine max
  unsure (1)..(268): unsure at all n locations; Clone ID: 701119875H1
gttcatacttcatcctattattactttccctctttgnattccaantggccactgtnggggttgcacagcaaacaccaacaantgtgacaganaatnanacaacgnctgaggtaaccaagattgannanactnccccagancagccagncancgnggttactgncccagaaacagtcaacgaagaagnnnaagnngaagcagcattgagntaatgatgcancagaagttanagaggangggaaggctgagtnnacagatgnanangaag

SEQ ID NO: 38494 - DNA, 267 bp, Glycine max
  unsure (1)..(267): unsure at all n locations; Clone ID: 701119876H1
tncatctctgacccangcaaggggcgaganaatggagccatctgatgcagtgagcagtggtggttttgatgctgtgtccagattcagctaggcttgattcagggtctagtgcttccagggatcctgaagtgnaggaagagtatcagatacaactggctttggagctgagtgcaaaggaggatcctgangccgcgcaaattgaagctgttaagcagatcagtttgggatctgtgaccctggttacacaccagctgaagttgtggccta

SEQ ID NO: 38495 - DNA, 266 bp, Glycine max
  Clone ID: 701119877H1
tagacgctgtcaatctcatatgcggtgctaaaacgcagtctaatccggaaaatacagtgggagttctcacaatggctgggaaaggcgttcgtgttttggttacccctaccagtgatctgggcaagatcttagcctgcatgcatggactagatataggtggtgagatgaacctagctgctggcattcaggtggcacaattggctctaagcatcggcaaaataaaaagcaacagcagaggattatgtcttgctggaagtcctgtccaa

SEQ ID NO: 38496 - DNA, 268 bp, Glycine max
  unsure (1)..(268): unsure at all n locations; Clone ID: 701119878H1
taacaatagcgttagcagaaganagccaaatccgtcttttgactcataagtnaccaaccgcttctttcaatcaactgaaagtctttatgttttcttaaggttactgtctgtctctgttttatatgtggcatgggcatgagatggatctgtattccatcatgtccatggaagaatagttaactactttcctttttggtgatttctaaggttctaatttataatatgggagtggaggagaacacccctaactccattccacctcacaatg

SEQ ID NO: 38497 - DNA, 261 bp, Glycine max
  unsure (1)..(261): unsure at all n locations; Clone ID: 701119879H1
aaaaaagaagagcaattttccctcaccaaagaagaagaagcaaacaatggccgatnaacttaccgatgaacagatctccgagttcaaggaagccttcagcttgttcgacaaggacggcgatggttgcatcacaaccaaggagcttggaactgttatgcgttcattggggcaaaacccaactgaggcagagctccaggacatgatcaatgaatggatgctgatgggaatggtaccatgacttccctgagttcctaaatctct

SEQ ID NO: 38498 - DNA, 172 bp, Glycine max
  unsure (1)..(172): unsure at all n locations; Clone ID: 701119880H1
tganaaatagagatatagagagagaaagtgctgcagaatacacacatacaccacttcttcgagagangtgtgtgaaggaaaataagaactgaaagaaaaattgttttgcaaaggaagatatgaaactttgcaaatttaacagctgagaaagaagatctgtgatttctctctc

SEQ ID NO: 38499 - DNA, 265 bp, Glycine max
  Clone ID: 701119881H1
gttccagaacccttcaaaactctctcttctctctttcttcgatcgcttcgcctgatattctttttggctgagatcaagcaaaaatgagcgtggttggatttgattttggtaatgagagctgcattgttgctgtcgcaagacaaagggggattgacgttgtgctcaacgatgagtcaaagcgtgaaacacctgcaattgtatgcttggtgacaaacagcggttcctgggacagccggggctgcttctactatgatgaacccaaaga

SEQ ID NO: 38500 - DNA, 265 bp, Glycine max
  Clone ID: 701119882H1
attaatgtgagggacccatataaacgacttggaataagcaaggaagcttctgaagatgaaattcaaggagcaaggaacttcctgattcaaaaatatgcaggacacaagccaagtgtggatgctattgagtcagcacatgacaaaataatcatgcaaaagttctatgaacggaaaaacccaaaaattgacattaagaaaaaaatgagggaagtcaatcaatccaaatttgtgcaggctgtcagaggcagatttcaaactccatcta

SEQ ID NO: 38501 - DNA, 264 bp, Glycine max
  Clone ID: 701119884H1
tcttagggagctgcttttcactgctcctggtgttcttcaatatctcagtggtgtcatcctctttgaggaaaccctctaccagagcacagctgcaggcaagccctttgtgaatgtcttgaaggaagctggtgtgcttcctggcatcaaggttgacaagggcacagtcgagcttgctggaactaatggagaaaccaccactcagggtctagatggccttggtcagcgttgtgccaagtactacgaagctggtgcacgttttgccaa

SEQ ID NO: 38502 - DNA, 265 bp, Glycine max
  unsure (1)..(265): unsure at all n locations; Clone ID: 701119885H1
attctctccttcctcttcctnccttcttgnttcatatgcnactgcttgtnatngctgtttgtatcaatccaaggcttcctatttctccaaagcttctgctctttcatgtaattaacaacattcantattatnattatcttcaatttcaggccaagtatagaatgatcatactaatttaattattatgtgaatttgaaattgaattagctggggcangtgggtatggctctttggcactagacncaagtggtggacaccttgcagc

SEQ ID NO: 38503 - DNA, 270 bp, Glycine max
  unsure (1)..(270): unsure at all n locations; Clone ID: 701119886H1
tgctcttgcaaagctatattcaattattgaagccaaagaaaaagagacaagaccaaangcaggtgtggaaggaagaagaaagctctnnaccgatcggtgttcaactttaaacactcaggaagagccacaaaattcttctnntctgcagggtgcaaggtacagcttncgatgggaaattgctggggttctccacctcacaacccaaccccaacaactaccggtaaccttagtacaggtacgacggggacatctcaggcgatcagcagcggt

SEQ ID NO: 38504 - DNA, 239 bp, Glycine max
  unsure (1)..(239): unsure at all n locations; Clone ID: 701119887H1
agattcacccctcttctctctcctccggttaccgtcgtccattcaaatctctccccggttcctctcctccgttcaggttccgataaccttccgatcacactccattcntctgccaccgcgtgaatgcgaatcccaaacctcaccactcgccgcccctcctccgcttaaaaattaacttccggcgaccggaacttcccctcgcgaacntccggcgaccggaggaaccactcgagcttcct

SEQ ID NO: 38505 - DNA, 263 bp, Glycine max
  Clone ID: 701119889H1
cttttcacttggaagttcattcaatacaagcaccgtgccgtgttcgacgtcatgggctattgtgtcacttccagccaaaggtgctgctgaaaccctcaagttcaacatggccttaatcctgttacccgtttgcagaaacaccataacttggctcagaagtaagaccaagttaggcatggctgttccttttgatgacaacatcaactttcacaaggtgatagcttttggcatgcaatggggttgggatacatgcaatgcacatt

SEQ ID NO: 38506 - DNA, 269 bp, Glycine max
  unsure (1)..(269): unsure at all n locations; Clone ID: 701119890H1
ttaaacaatcaccagaggagtcaacacatgtggttaaaaaggattcaagtgaagttacancctctttaccagaaaatactgatgtgaacatatctccaaagtcggtcatgaggaatggtgttgcatgtattggagaagataatgttttaggtgattccaagtccattaaaaaacaagaggatgctgattgttctaatcactctgaaggtttgaatatatctggtcatgaggtgcataatgatttggacactgaaaaatttgacactagt

SEQ ID NO: 38507 - DNA, 267 bp, Glycine max
  unsure (1)..(267): unsure at all n locations; Clone ID: 701119891H1
ttcccagtactttaattgatttctgaatatcatcacttaatttgaaggaaagatggtgagcgtantgagatccgccaggcacaaagggcagaaggcccagcaaccatccttgccattggaactgcaaacccaccaaactgtgttgatcagagcacctatcctgactactacttcagaatcaccaacagtgagcacatgaccgagctcaaagagaaattccagcgcatgtgtgacaagtctatgatcaagaggagatatatgtaccta

SEQ ID NO: 38508 - DNA, 268 bp, Glycine max
  Clone ID: 701119893H1
aatgacaatcaggttgcagcaacttctgatgaaaaatcactcatgtcaagggtcaattctctctgctgtcttctgcagaaggaccctgttacagttcagaattctcattttactgaagataatactgttgaaggacctgatgatggaaaagatgtcaagcctgctgtggaggaatcaaaggacgcttctggaggcaagcaagcactaggcatgtctaggaaagactcgtttagtgatttgcttctccaccttcctagatcgcatctct

SEQ ID NO: 38509 - DNA, 272 bp, Glycine max
  Clone ID: 701119894H1
tgttgctccttcgccacaactctctgccaacatgggtatctccagagattctatgcacaagaggcgtgccactggtggcaagaagaaggcctggaggaaaaagagaaagtatgagcttggtcgccagcctgctaacactaagctgtcaagcaacaagacagttcaggaggatccgtgttagaggtggaaatgtgaaatggagggcattgagattggatactggaaattactcctggggaagtgaagctgtaactcgcaagactcgtgtacta

SEQ ID NO: 38510 - DNA, 275 bp, Glycine max
  Clone ID: 701119895H1
gttccggcaacctcatcggcgaatcggcatgccaacacaatgaatgcggaacctccgctgccgccggcgctcctgcatgtcggtttcctgcctctccgactacgacctcctctgtggcgaggacacctccggagtcctctccggagagtcgccggagtgctcctcatccgacatcggctcctgcaccacttccgccgtcacctccgccgtcgccgacgatgacggaggattgttatccatcgcgagcttcatcgagcacgagcgcaacttcgtcc

SEQ ID NO: 38511 - DNA, 275 bp, Glycine max
  unsure (1)..(275): unsure at all n locations; Clone ID: 701119896H1
gtgcctttnagcaagttgaggattganttgctcaaggatggtgtttctgatcttgtcttgactggtntggggggatcggggaaaagcacgcttgctaagaagatctgttgggaccctcaagttcaaaggaaaagtttgagggaaaacatcttctttgtcaccgtctcaaaaacaccaaacttgaagtacattgtagagacactgtttgaacactgtggttgtccggtgcctaagtttcanagtgacgaagatgcatcaaccgactcggagttctg

SEQ ID NO: 38512 - DNA, 266 bp, Glycine max
  unsure (1)..(266): unsure at all n locations; Clone ID: 701119902H1
atctcaagganataatgctgnatctgagcaaaaaagtggacagcatgatgagcagaggagcttacttctacttgctgaagccagagatccagaaagctttgtgatgttcttcttcttccagcttataatgaagtgggaatgaaatgctactaatctggaattggaaaggctaaggttgaagggaaagagattagataaactgaattanctttgctggaattctgatgtctgttctaaagtaatcttgctgggtaaaaacccaactt

SEQ ID NO: 38513 - DNA, 269 bp, Glycine max
  unsure (1)..(269): unsure at all n locations; Clone ID: 701119903H1
gatgcctatgttggtgatgaagcccaatccaaaagaggtattcttactctcaagtatcccattgagcatggtatagtcagcaactgggatgacatggaaaagatctggcatcacacattttataatgaacttcgtgttgcnccccgaggagcacccagtgcttctcactgaggcccccctcaacccaaaggccaacagagaaaagatgacccaaatcatgtttgagaccttcaatgtgcctgccatgtatgtggccatccaggctgttc

SEQ ID NO: 38514 - DNA, 218 bp, Glycine max
  unsure (1)..(218): unsure at all n locations; Clone ID: 701119904H1
tttttttaattgtaatgtgcaaaattatattatacataattttntttaatactttctcatgtatgtctccgcactaaatatttttttattttaatttctttgtcatgccaccataatactnttaacgacatcaaagatcgacaccgatgggttagatngattcnaagtaggaacatgggttanatcgggatgcaattaggaaagtaggtgatcgctac

SEQ ID NO: 38515 - DNA, 227 bp, Glycine max
  Clone ID: 701119905H1
tagtgcctccttgccagaagttaaaatggcccaagaaactttcctattcacatctgaatcagtgaacgaggggcaccctgacaagctctgtgaccagatctccgatgctgtgctcgatgcatgcttggagcaggaccctgacagcaaggttgcctgtgaaacctgacaccaagaccaacatggtgatggttttcggagagatcacaaccaaggccaacgtggatatg

SEQ ID NO: 38516 - DNA, 265 bp, Glycine max
  unsure (1)..(265): unsure at all n locations; Clone ID: 701119906H1
attagcactggtcatgatgcaattgtgctgaagagtggttgggatgaatatggagttnccctatggcaaaccaacctcaaacgtccacatcaggggtgtttatctacaatcgtcatctggtgctggcctagcgtttggaagtgagatgtctggaggcacatctgatataattgcagagcagctaccatattaccaactcaacttttggcattgaactgaagacaactaggggtagaggtggctacatgaaaaacttttcattctg

SEQ ID NO: 38517 - DNA, 268 bp, Glycine max
  Clone ID: 701119907H1
tacaccctgcttcgtgaatcttagtgcatcaagatctctgtctctctgcaatcgaaaatgagcaagggaccgggtctcttcaccgatatacggcaaaaaatccaaagatcttttgactaaggactacagctccgatcagaaactcaccgtttcctcctacagcgtctccggagtgaccctacacttcaacatctgtgacgaaaggaggactctcaacaggggatgtggcagcactgtacaagtataagaacactgttattgatgttaa

SEQ ID NO: 38518 - DNA, 265 bp, Glycine max
  unsure (1)..(265): unsure at all n locations; Clone ID: 701119908H1
atcacttcttcacttcttcttattgtgagcaaagagtgagagagacatagttggatcattggttgcatcactgctttgtgaggaaggaagaataattaatggggatgatgaatgtgagcattgcggggttggattcccagatggctgcagagagagctgtggatgtgattggtcaagggtatgacctttgcagcgatataaggttctcggctgtaaaaacaggttgatcgnnnnganaannngcacaaagtagagacctgttttt

SEQ ID NO: 38519 - DNA, 253 bp, Glycine max
  unsure (1)..(253): unsure at all n locations; Clone ID: 701119909H1
ctgcaacttcatgccctcaactggtctcactggacatgtcaaattgttcatgtgtcagtgatgaaactctgcgtgnaatagcattgagttgtgctaaccttagttttcttgatgcatcatactgctcaaacatatctttggagntgntagactgncaatgttaacagttttaaagcnccatagctgcgangcatacttctgcctcatggctgcatagctcatagtatatgtggaggnttngagcttacattgc

SEQ ID NO: 38520 - DNA, 261 bp, Glycine max
  unsure (1)..(261): unsure at all n locations; Clone ID: 701119910H1
atccccatctgatgtgcttgctgttgatatgatgtaggcaccgaagttgtctgagggaagctctgaaatgacacggaaggtttccaaaacatcggtgatttcttctgttttgggaaggtcatggccaaagagagggcgctttccactgagttcagacaanagccactcctgcctcttttcctcgggccactctcggtatgatccaatgtctaagtgttttgtgatgcatccataacatcagtgtgnctatctgactctgac

SEQ ID NO: 38521 - DNA, 264 bp, Glycine max
  unsure (1)..(264): unsure at all n locations; Clone ID: 701119911H1
gtggtgaagaacaagagctcaaatcaaatcgaatcganaaaagaaagaaagatcatattcatggcgatggcaagcctggctcgacggaagggttacgccgtcgttttgtacgtcgaggtcgtcgttttgtctgacaagctggaggggattcgcgtccggatctgacgaaaacgacgtcgtcttcatcggcggcggtcccggcggctacgtggccgccatcaaagccgcgcagttcggnctgaaaaccattgcatcgaaaagcgt

SEQ ID NO: 38522 - DNA, 261 bp, Glycine max
  unsure (1)..(261): unsure at all n locations; Clone ID: 701119912H1
caaaggacagggtgaaaccatctcccttgcctgatagctggaaactgcaagaaatatttgctactgggattgtacttggaagttacttggcgctgatgactgtcatattcttctgggcaatgaaagaaaccgatttcttccccgacaaatttggagttagacacttgactcatgatgaaatgatgtnctgctttgtatttacaagtcagtatagtcagccaggcttgatatttgtaacccgttctcgaagctggtccttat

SEQ ID NO: 38523 - DNA, 246 bp, Glycine max
  unsure (1)..(246): unsure at all n locations; Clone ID: 701119914H1
gcatgtctctctgtgcttcactctcctgccacagcttcacaccacacttcccanggcctccgtctcttcttccacctctccactttcccgcaaattttctctcactttccgggaaaaaaacagaaccccaattgcaccacctcacaagctccccttcttctcagcaaggcctgcccccaccagagtagtgttggtgaagtctcaggccacagcacctgcttcttctgaggctgtgaaggtgacacg

SEQ ID NO: 38524 - DNA, 261 bp, Glycine max
  unsure (1)..(261): unsure at all n locations; Clone ID: 701119915H1
cttcgcttcccaatttctttgcttctcatatcatatttagccatntactagaaattaagctatccgattctgagggtttcgtttttnttttcctttcttacgtgctttgcngacagccaatcttgatcatgggtttcaattctgtctatagaagcttncaggagatatttccgcaggttgatcccaggctactgagagctgtggctattgaacacccaaaggatgctgatctagcggctggaatagttattgcagaagtcc

SEQ ID NO: 38525 - DNA, 262 bp, Glycine max
  unsure (1)..(262): unsure at all n locations; Clone ID: 701119916H1
cgacaacaacgaantctgcaatgggcccacttaatcatacaaccggaatcctcctccgattcgttcttgccccggtggtctcttcctccaccctcacacgnntcncttcatccttcgcntccttcattccttcagaccatgtaacagtatcatgttttttttggaggccnaaaacaaggttgagggtcgaagagaggcttgcggcggtgcgttcttgtcgttgagtttgtcctttaacggaactggngcggatcanaggtat

SEQ ID NO: 38526 - DNA, 268 bp, Glycine max
  unsure (1)..(268): unsure at all n locations; Clone ID: 701119917H1
gcnctttccagnaatnttgnaccttnttncncatagccatggctgnntcnnttttnggtttcacccttttcaaatcacacactcttagttcatgtctacaaacaaaanagtttcaagtgaaccattctcaagatgccaaagcagcatttcaaagtactacccttttcaacagaccgtggcangtcttagagggctgngcgannaaagaggatcttgtgcaaagtgatggcttgccagtttggccactgatggcaattntnagtagagc

SEQ ID NO: 38527 - DNA, 265 bp, Glycine max
  Clone ID: 701119922H1
atggcgggtacggtttcgacttgtttcttcttcgtgtttcttctttctctccttcttccttttcagatctccgctgaggaatcctcggagaaggagttcgtactcacattggatcactctaactttcacgacactgtcagcaagcacgatttcatcgtcgtcgagttctacgccccatggtgtggtcactgtaagaagcttgctccggagtatgagaaagctgcttctatcttgagtagtcatgatcctcctattgttttggcta

SEQ ID NO: 38528 - DNA, 262 bp, Glycine max
  unsure (1)..(262): unsure at all n locations; Clone ID: 701119923H1
gttgacgatggcgtttcgggtgcgaancctgacctccgctctctctttcttctctctctcttgtccatcgcttccgccaatgtcttcttcnaagagcgtttcgatggcattacttttccaggatcaaggtttttctttcgtgtctgagcctcgatctgaaaagcttcgatggttcgatttgtgttttgagttggaaatcgagacgggtgggaaaatcgatgggttaaatcagattggaaaaaagatgagaacgtggctgggg

SEQ ID NO: 38529 - DNA, 264 bp, Glycine max
  Clone ID: 701119924H1
ctactactcactcactgcagatctcaattgcatcgctgtccatggctaccatcgttagcatcaaggcccgccagatcttccgacagtcgtggcaatccaactgtcgaggtggatttgacttgctccgatggtacttttgccagagctgctgttccaagtggtgcatccactgggatttatgaggcccttgaattgagagatggaggatctgactaccttggaaagggtgtatcaaaggctgttgacaatgtgaacaccgtcatg

SEQ ID NO: 38530 - DNA, 262 bp, Glycine max
  Clone ID: 701119925H1
attttaaggttgagtgtcctaatgtgaagtacaccgagactgagattcagtccgtgtacaactacgaaaccaccgaacttgttcacgagaacaggaatggcacctatcagtggattgtcaaacccaaatctgtcaaatacgaatttaaaaccaacatccatgttcctaaattaggggtaatgctgtgggttggggtggaaacaacggctcaaccctcaccggtggtgttattgctaaccgagagggctttcatgggctacaa

SEQ ID NO: 38531 - DNA, 264 bp, Glycine max
  unsure (1)..(264): unsure at all n locations; Clone ID: 701119926H1
ttgcatcagcagctgtctctattttcagactcacgcgtgaccagctacaacacactgaaagccaaatccaaagaagatggcaacacaatcagctatagttcttatgagatgttggcgggtcacgtgtggcgaagtgtaagcaaagcaagagcacttcctgatgatcaagaaaccaaattgtacattgcaactgatggaaggtcaaggttgcagcctcctnaccccacccggttatttggcaatgtgattttcacaaccacacct

SEQ ID NO: 38532 - DNA, 261 bp, Glycine max
  Clone ID: 701119927H1
tgtctatcatccgaagcaatctacaatatgctgccttgagtgctctgagaagactccctctggatcctgggaatccagcatttctgcattatgctgtacaagggatttcatttgctgatccagttgctgtgaggcatgcactggaaattgtttctgagatagctacaatggatcctatgctgttgcaatggccttaggaaagcatgtgcagcctggaggggctttacaagatgttctccacttgcagatgttctcgctaga

SEQ ID NO: 38533 - DNA, 258 bp, Glycine max
  unsure (1)..(258): unsure at all n locations; Clone ID: 701119929H1
cgggatatcaagcctcaaaatctattagttaatccacatactcaccaggtnaaaatatgcgactttggaagtgcaaaagtctggtaaaaggcgaaccaaatatatcgtacatatgctctagatattatagagcacctgagcttatatttggagcaactgaatatactacagctattgacgtttggtcagttggtnntgtattgggctgagcttatgctggacagccctgttccccggtgagagtggagttgatcagct

SEQ ID NO: 38534 - DNA, 230 bp, Glycine max
  unsure (1)..(230): unsure at all n locations; Clone ID: 701119930H1
aaaaaaggacattcattcatctatggctacncttattgcaccccagcaaccactctccccaagaagatgctgaagctctcagaaaggcttttgaaggatggggaactgatgagaacactgtcatagtaattttgggtcatagaactgtgtatcagaggcagcaaatcagaagagtttatgaggaaatttaccaggaggatctgtgaagcgcctagagtctgagatcaaag

SEQ ID NO: 38535 - DNA, 102 bp, Glycine max
  unsure (1)..(102): unsure at all n locations; Clone ID: 701119931H1
gatggcttcacgcagggctcgtatcttctactgattncgntcctacccttcgtagatctcaatccgaagccctcaatttccacaacaacatnacgacctncc

SEQ ID NO: 38536 - DNA, 240 bp, Glycine max
  unsure (1)..(240): unsure at all n locations; Clone ID: 701119932H1
gaagatagcagatggaggaaatantccatacatattcagnacaaacaattncntcnnggaggcagacatgggagtttgatcctgaagcaggcagtccagaggaacgggcccaggttgaagcagctcgtcagcatttctaccacaaccgcttcaaggtcaagccctgcgctgacctcctttggcgttttcaggttctcagagaaaataattcaaacaaacaattcctcgtgtgactataga

SEQ ID NO: 38537 - DNA, 269 bp, Glycine max
  unsure (1)..(269): unsure at all n locations; Clone ID: 701119933H1
gagatcccctttttctcctaagaaaagccatggctaagggtcccggtctctactctgacatcggcaagaaagccagggatctgctgttcaaggactaccacagtgaccagaagttcaccatcaccacctactcacccactggagttgctataacagcatcaggaaccaggaaaagtgaactgtttgtggctgatgtcaacacccagttgaagaacaaaaacatcactnnnnnncatcaaagttgatnacagattctaatctcttcacac

SEQ ID NO: 38538 - DNA, 269 bp, Glycine max
  unsure (1)..(269): unsure at all n locations; Clone ID: 701119934H1
cgtgcttcttactgtaaccattattgggaggaacaatttagaaagatacatgttttggagttttctacgagatcggaaaatgatgagtgtcctttacagccggaaccagatgcatgttttgttctcaaagggtgccccagaaagtataatatctagntgtacaagcattctgtgcaatgatgatggttccattgtgtcacttaccgcngatattcgagcagagctggactccaaggttccacagttttggcgggaanagaaacnttaag

SEQ ID NO: 38539 - DNA, 130 bp, Glycine max
  Clone ID: 701119935H1
attttccttctctcaatcattctctgctccttttcactctctggggtcagggccaatcatcgccaagctcatgctctgcaccctttctctccctctaaagattctccatttttctctgcttccacacaag

SEQ ID NO: 38540 - DNA, 266 bp, Glycine max
  Clone ID: 701119936H1
gtgtgagtgagttcattgacaagcctgaaatgacaactatgctgacaaatgagcatggtctgagtttgaacctcaaggagactgagctttgcctcggtttgcctggcgggggctctgaagtggaaactccaagggccactgggaagagagggttctctgagaccgttgatctgaagcttaatcttcagaccaaggaagatctgaatgagaatctgaagaatgtctcaaaggagaagactctccttaaagatcctggctaagccgcc

SEQ ID NO: 38541 - DNA, 266 bp, Glycine max
  Clone ID: 701119937H1
gcataacctaaacctatctttcttctctctctgtgtgtgcgcttcaacggcaaccagaagcagccatggccactgcaaggactgtgaaggatgtttcacctcatgagttcgttaaggcgtactcctctcacctcaagcgatccggcaagatggagctgccagagtggactgatattgtgaaaactgcaagatttaaggagttggctccttatgatcctgactggtactatgtcagagctgcttccatggcaagaaagatcttactt

SEQ ID NO: 38542 - DNA, 237 bp, Glycine max
  unsure (1)..(237): unsure at all n locations; Clone ID: 701119938H1
tgcataccttaggtcttccgaattcgaagttaaantgcaagaannctaaggacaaggctcagatcaacattgtggtggttggtcatgtggaccctgaggaggcaaccaccattaacgagctgaagaagcctgttgtggagaaagaagctccagggcatgccatatgagggcatgcacgtacggcctcggaggggaaccagaaaattatgttaacaaaataatctggaaccctaatgt

SEQ ID NO: 38543 - DNA, 264 bp, Glycine max
  unsure (1)..(264): unsure at all n locations; Clone ID: 701119939H1
gctctccaccacgattccacgacctccacgccancacggtcccagtcggcgccggtgcagtgcggagtcgcgacctacgctacccgtcgtcactcacagtcgctggcgatttgggttgggttgggttgtgagaacgggtaaaatggaggcagaggtggtggaggcagagcttgtgttgccaagctacctcagtttcaagagagttcaaatgtatgagaaatacccaaaaggccaagccagaggcaggcattggaaacatcttaa

SEQ ID NO: 38544 - DNA, 260 bp, Glycine max
  unsure (1)..(260): unsure at all n locations; Clone ID: 701119940H1
atatgcttgtctcaaagattaagccatgcatgtgtaagtatgaactaattcagactgtgaaactggcgaatggctcattaaatcagttatagtttgtttgatggtatctactactcggataaccgtagtaattctagagctaatacgtgcaacaaaccccgacttctggaagggatgcatttattagataaaaggtcaacacaggctctgcctgttgctttgatgattcatgatnatcgtcggatcgcacggccttgtgc

SEQ ID NO: 38545 - DNA, 254 bp, Glycine max
  unsure (1)..(254): unsure at all n locations; Clone ID: 701119942H1
caccaacacccgcaccgaccaacgcnacantggcatcggcgtncgtcaagctcgatgnttcccctatgttccatagncagttatattntctcgnaganacanntgatgagttnacggatcggngccagnaactatataaagggtgcaggangtttatgacagctttgggggnagcatgtantggagaaatancctngctgnttcntagaatatttggtggcggccaantgacccgtcagtgtatgcaatggagg

SEQ ID NO: 38546 - DNA, 260 bp, Glycine max
  Clone ID: 701119945H1
ctcacgggaacaaaccacccaacaagtccaagtccgaggcgaagaagacaacctggattttgtcatccccaccgtgccgttgatccctacagtttcggaagtttgtggggttaaacaaatggatcacataaaatcactttttatttttatattttaaattttctggcaccactcaaagattcagatagcggaaaatctttcggatttgaggaccatgtagggataagtcgatggggttgtaacagagccacgaaaggaga

SEQ ID NO: 38547 - DNA, 255 bp, Glycine max
  Clone ID: 701119946H1
ggcaggtgctctggttcaagtctatacagatggaactgttttagttacccatgggggtgtcgaaatggggcaaggtttgcataccaaagttgcccaaattgctgcttcagctttccatatccctcttagttctgtctttatatcagatactagtactgacaaggttcctaatgcttctccaacagcagcttctgcaagttctgatatgtatggagcagcggttttggatggcagtgagcaaataatggaagcagg

SEQ ID NO: 38548 - DNA, 256 bp, Glycine max
  Clone ID: 701119947H1
gcatctctctgctcttctctgttctgttctgttctgttctgtttctctctcctccccatatattcctcttcttcttcagaactcagaactcagaagggccacttcacttttagaaacccagttttgcatctgggtttttgcctgttgaagtgccaattttgaagataataataaaaacaattatgacttggaaaagcagaggagaatgccttctagaagcgtcatctcgcagagatgggtacgtttctctgctagg

SEQ ID NO: 38549 - DNA, 265 bp, Glycine max
  unsure (1)..(265): unsure at all n locations; Clone ID: 701119948H1
tggccaantancgatgaatgtaggacctaatcnccagagacctctgtngntattgtngaagaagannctgggagctcctttagaaattatgctcaattaatgaaggaaccaagatcaagtgtagnnatgattctgnatatcatanttgcnngagaagactggaatagtnaaacacnanatnntngaactaatgtaggtcaggntcancgtgcgacattnnaagggacaagaggttgatgtnaaagtacaaagcctggnnctcggg

SEQ ID NO: 38550 - DNA, 265 bp, Glycine max
  unsure (1)..(265): unsure at all n locations; Clone ID: 701119949H1
atgagtggtagcaacgatggnagcggcagctggagctctaggtttttgaaggtggctagtgcagctgccgctacanccgccgttgccggcggtttatatgccattctttcatcctcaacctctgctagctctgagatggaagtgccgtttancagcgcacggcgtgagagcaaagaacgtgacgatggtggctccgggtctcatcctcgcgagggtgccaccacggtatgattaagtgaatctttcaaaaattgatacttttttt

SEQ ID NO: 38551 - DNA, 262 bp, Glycine max
  Clone ID: 701119950H1
gctcatctccgttgttgccatcgttgctcttagcttcacagctgaaaaatgcagggaacttgttggggaggaggggtcatctcagagtggaaagtttacgatcttaaattgcttcgatatgggttctggaactgtagcatgtgctgtcaaggaaggtgtgaagctctatttttacaatattaggtctctcatgctgaaagagcaaggagccaagcaattgagtctgccctgttgatgctgttgctcagggatgtccccaacg

SEQ ID NO: 38552 - DNA, 149 bp, Glycine max
  unsure (1)..(149): unsure at all n locations; Clone ID: 701119951H1
atttaatttgctcctanaatattttgtcagaggatgtggcataaaacctgcaatgagatggctttcttcccagcaaatttcatgcncccaaacccctacaccatgatgatcaccatcatcatcnncctgccaccttctctcacctcnat

SEQ ID NO: 38553 - DNA, 264 bp, Glycine max
  Clone ID: 701119952H1
gcctcattacatttttcccaagcttgaagatgttgattactccgacccacctcatggttcatgtaattttggaattccggaggaagatcaagccatttggtcttggccttactgaattttctctatagcatatagagcatgtctctaccttctactctcaagttcttctgtttaaacttgagatcatgtggtagaaaagggtgagttaataataagccaaagaaaaaatggcactctactggtttgttcccaatggtggtttct

SEQ ID NO: 38554 - DNA, 265 bp, Glycine max
  unsure (1)..(265): unsure at all n locations; Clone ID: 701119953H1
tcttgtgcctgactggcagataagtgagtgtgtagcaatctggtggaggccaaatnttgaaaccataatgtatccatactgccctcctcatataacaaaacccaaggagtgcaaaaagcttttccttgttcatttatctgagagggaatactttgcagtgcccaaaaatttaaaacttcttgctgttccattgtttgaactctatgataatgttcagagatacgggccagttatatccactattcctccagcagctatccagatt

SEQ ID NO: 38555 - DNA, 267 bp, Glycine max
  unsure (1)..(267): unsure at all n locations; Clone ID: 701119954H1
ggcgcccatnatatttctctaaacgttgcttaggcatcagcaaacccaagctcggaaagcttttggtgagcctcagcgtaatacagcaannaaggcatcttcgtccgctgcatatttatcaacgagagggcggncatacagggtcagacaaaagagccttgtcagaaggtagctgaaggagaccttccttctcaccactcaacaacttccgtgcaagtatgagttgtcgaaaataagaggattagaggtccagggaccctcaaatcc

SEQ ID NO: 38556 - DNA, 263 bp, Glycine max
  Clone ID: 701119955H1
cttcaaccttgttcttcccttagattaggggcacatatcacatatcattccttccaaatcttctcctgaaaacaaaaccatgatgagaaggcgttcccttgtgactgcatcaccaaaacaagggtccgtcttctttgttggccacgacaacaacccaacaattcatcctcacactcacacccttctgactccatcaccaaaacaagtcacagaaaaccataatcactccaaaaccttcaaacccagttccaatcacaacaggg

SEQ ID NO: 38557 - DNA, 265 bp, Glycine max
  unsure (1)..(265): unsure at all n locations; Clone ID: 701119956H1
ggcttttgtcttnctctacttttcttcttctttctgtgtatcgtatcgtattggagagaagagatggcgacgagggtggtgncggaacagaagccgaagacgangattgtgtgcacgctggggcccgcatcgcgctnctgtcccaatgatcganaagcttctgcgggcgggcatgaacgtggctcgcntcaacttctcccatgggtacncagagtaccaccaggaaacccagaacaacctncngagccgccatggagaacaccgg

SEQ ID NO: 38558 - DNA, 264 bp, Glycine max
  unsure (1)..(264): unsure at all n locations; Clone ID: 701119957H1
gcttcaatccaagcttagnttgttttactgttacaccattcctaggtaccatttgcaccactctttcttacttcaatcaatngcagcaacctcnacatccctcttctcctcaaatctccattctctcaactcacaacctttctcttcctcactctccttcttcngaaatgtccattncaccctctcttncccttncttctaaaccctcccgtggcgttgtagccatggctggntctngcaagttctttgttggtggcaattgga

SEQ ID NO: 38559 - DNA, 259 bp, Glycine max
  unsure (1)..(259): unsure at all n locations; Clone ID: 701119958H1
ccgggatccaggtcggaaactcctgctgggaactctactgcctcgaacatggcatccagcccgacggcatgatgccttctgactccaccttcggtgtagcccacgacgccttcaacaccttcttcagcgaaaccggatctggnaagcacgtcccccgtgctgtcttcgtcgantcgaacccaccgtcatcgacgaggtccgctgcgggactaccgtcaactcttccaccccgaacaactcatctccggcaaggaagacg

SEQ ID NO: 38560 - DNA, 253 bp, Glycine max
  unsure (1)..(253): unsure at all n locations; Clone ID: 701119959H1
caccgccatcgctcttgtctctcacggttcncnctgcggttcttaatctctccgacatctccgatctctcccatgtccctgatcacatcctcctcgacctcttcctgagaatattgaaggctgggaagctgactgagaaagttctgagactttttatagcaactggtaaggatgaagtcctctccatttgttcaggcactcaatatccaacatattttgacccctgtgcttcccaccaggtgttctgaggcaa

SEQ ID NO: 38561 - DNA, 258 bp, Glycine max
  unsure (1)..(258): unsure at all n locations; Clone ID: 701119960H1
caaaatcccagttgggtgagattctaacaccagctgcttgcaccattgtntcttcgctcaaaaacgataatgtcgactcctatgtnctatctgagtccagcctctttgtttatgcctacaagatcatnatcaaaacctgtggtactactaagctattgcttgcaatcccacccatattgaagttcgctgaaatgctttccctaatgttaagtctgtgaattacaccaggggaagtttcatttccccgtgctcagccat

SEQ ID NO: 38562 - DNA, 225 bp, Glycine max
  Clone ID: 701119961H1
gagtattgagcatggaggcgccatctctcaccaaacccaacgacccaacaaaaccttccaacacttccagcacccttagtctggagggggggccgggcgaaggagcccactccgaaaaatgtttgcggtggcgtccatcgccgccggcatacagttcgggtgggctctgcagctgtctctcttaaccccctacgttcagctcttaggagtcccccacgcggcggc

SEQ ID NO: 38563 - DNA, 257 bp, Glycine max
  unsure (1)..(257): unsure at all n locations; Clone ID: 701119964H1
ttcggggtcaggaatctgcgcgaagagggtagttgtggacgcgcggcaccacatgctggggaggctggcatctntcgtggcgaaggaacttctgaatgggcagaaggtggtggtggtgcgctgcgaggagatttgcatctccggtgggctcgtcaggcagaagatgaagtacttgcgtttcctccgcaagcgcatgaacaccaagccctctcacggccccatccatttcctgcacccggcaagatntctggcgcacc

SEQ ID NO: 38564 - DNA, 265 bp, Glycine max
  Clone ID: 701119965H1
gtttgttttgtgctttagataaaagttctgccaaatcaagaggggttttaagatcatagtgtgtgttttgcaacaatggctaagttctttgctgctatgatcttggcactctttgccatttccatacttcaaacagtggtaatggctgctaatgaacaaggaggccacttgtatgacaacaagagcaaatatggaagtggaagtgtcaagagttaccaatgcccatcacaatgctcgaggagatgtagccagacccaataccaca

SEQ ID NO: 38565 - DNA, 264 bp, Glycine max
  unsure (1)..(264): unsure at all n locations; Clone ID: 701119966H1
gtttgggctattggatacctgaagggttcacgtcgggtccgtgataggctatgatgaaggtactattatggtcaaacttggccgagaagaacctgtagccagcatggataacagtgggaaaataatttgggctaagcataatgaaattcaaactgtcaatataaggagtgtaggagcagatgtggagattgctgatggagaaaggttaccatggctgttaaggagttgggcacctgtgctctctatcctncaaagtctaaggcc

SEQ ID NO: 38566 - DNA, 264 bp, Glycine max
  unsure (1)..(264): unsure at all n locations; Clone ID: 701119968H1
gaaatgttgatgcccatggtccagatatccatgggactgtcataattgatgatgaagatgacgaaaatattccacctgcccagattgcaccatcaagatgagcanacacacaagatcttggctgacacttcactcaatagcagtgctaggcctagtgctcctgaatctgagaatttgccagattatagcaatgacatagaagaagaaatgattcgtgcagccattgaggcttctaaacgggaggctgaggaaaattatagaaat

SEQ ID NO: 38567 - DNA, 262 bp, Glycine max
  Clone ID: 701119972H1
atctccacgaagacaaacctctgttctcaactgtgtttctttacctctcacctactttcagaccatacccagattgactaggctgagaagatgcagcagacaccgcctatgattcctatgatgccttcgttcccacctacgaacataaccaccgagcagattcaaaaataccttgatgagaacaagaagctgattctggcaatattgacaatcaaaatcttggaaaacttggcagaatgtgcccagtaccaagcttcagctt

SEQ ID NO: 38568 - DNA, 240 bp, Glycine max
  unsure (1)..(240): unsure at all n locations; Clone ID: 701119973H1
ataagctgtagcggagagccagtcacttgacagtgatagcgntgaggagttgatgcaggtaacangccggcatagacattgtcctcggcgatcttcctcgtcagtcccccggcacgctctatatcactaacaatctctagagaccctgaagcctatcctcttccttgtttatatacccagattgatacaggagaagctgatgatgaccacactgantctgaatccatcatatcccacaag

SEQ ID NO: 38569 - DNA, 258 bp, Glycine max
  unsure (1)..(258): unsure at all n locations; Clone ID: 701119974H1
cgccgtttcgctctcccactcgccagtgnatttgattttgattttgattatatgcgagagtgttgcggaattttcgagaagtttgaatgttcgttcatgcatgagtggttctgaaagtttccttgggaattttcgattgcgatattgacactgtgatggcctcagccgtcgtgaatttcttgaacgcgacgttggattggatgacgttcgcgtcggatggtcctctgcgcgagctgtagttttcggagtccatatcgg

SEQ ID NO: 38570 - DNA, 256 bp, Glycine max
  Clone ID: 701119977H1
gttcccaaattctccccaagagataaaatgtctctaatcccaaacttcttcggtggccggagaaacaatgtgttcgatcctttctcactggacgtgtgggatcccttcaaggattttcctttcccaaatacgctttcttcagcttccttccctgaattttctcgggaaaattcagcattgtgagcacccgtgtggactggaaggagaccccagaggcgcacgtgttcaaggcagatattccaggactgaagaagga

SEQ ID NO: 38571 - DNA, 255 bp, Glycine max
  unsure (1)..(255): unsure at all n locations; Clone ID: 701119978H1
gagagaacaactgttactcacacacgccatgggtatgtaaatgaatggtttttgagcaacagcagttaaaagagaaaagggattcagcgaagatgacatcngttggtgtggcaccaacttcgggtttgagagaagccagtgggcatggagcagcagctgcggatagattgccagaggagatgaacgatatgaaaattagggatgatagagaaatggaagccacagttgttgatggcaacggaacggagacaggac

SEQ ID NO: 38572 - DNA, 257 bp, Glycine max
  Clone ID: 701119980H1
gtagcacatcaaagtcatgggaaaggcttgatgctggtggcatcatttctcacacatttgagctggaggcaaaatcaaagggagtatttgctggtgaaccagctgtcataaagttccgtgttcccacaaaggctgctttgcaggaggcatattcaactcccatattgcctttggatgttcttctgatagacctcccgagaagaagtttgaatggggctaagaggttgctggctaagtatggatctctaatctcggtg

SEQ ID NO: 38573 - DNA, 261 bp, Glycine max
  unsure (1)..(261): unsure at all n locations; Clone ID: 701119982H1
aatttcttcacagctgttgttaatattacatgcttttgaagcaactttggaagagaggctgaaaaagcttattcccaagagcaaggatgagatcctcagcttgtcttggatgactttngccatgcaggcactttgtgagagtcataatgacattaaaaccctcataacagagcttgagcttcctgtacatgattgggatgagaaatggatagatgtgtacttggacattagtgtgaagttactagatatatgcatgcatta

SEQ ID NO: 38574 - DNA, 259 bp, Glycine max
  Clone ID: 701119986H1
attttttcgtgccaatggttcagcagggacaacagggacagcgtcccggtggaaggcgtccaggtgcagttcagcagtcccagcagccagttcctatgatgccacagcagatgcttcctaggggacgtgtctatcgttatcctcctggtaggggtattcctgatgttcctatacctggggttgctggaggtatgttttctgttccatatgatgtgggtgggatgccgctgcgtgatgcatcaatctcccagcaaatacc

SEQ ID NO: 38575 - DNA, 252 bp, Glycine max
  unsure (1)..(252): unsure at all n locations; Clone ID: 701119987H1
aggaaatataactcaaaaccttattcttcagtgtcgcttttaccaaaacgccaaaatncgccctgtagactgtacactgagactggttttaaagcaacgccacttgttccagccatgcctcctcangagacccaacaacctctgttatcggaggagcaagaagagacagcctacgattccttcggagaaggttgtggtggtcggaatcgacgagcagacggcgacttggaggcgccgccgttctcatggcgg

SEQ ID NO: 38576 - DNA, 261 bp, Glycine max
  Clone ID: 701119988H1
agagtctcaaaagattagagatccaggaaggcctagatggctagatgattgcatttgtttgttatacaaacaggcttgaaattaacgctttcccttatctccctggctttttccatctgagtgttgaacagagaagaagggagaagccaatcatgggttccacttcactaccatctttcattcagatgtcatctactacacactccagcttcagtgaaaaactcatcacccctcaaaagaagtttcaaattgggacaccca

SEQ ID NO: 38577 - DNA, 258 bp, Glycine max
  Clone ID: 701119989H1
tctttctctaaaacattaattgaactctccattccttaaattttaccaacgagctagttccgacacagacaaagcattggcaaagactgagttagaggtgactgttgagagcaagaacaaagaactaaagcacctgggatttgtgaggattgctgctattcaaacttttgtgattgtgtcaaatctgtatgagtacgcaaagcagaattctgggcctttgagatccgctgttggaacggttgagaacactgtaaccac

SEQ ID NO: 38578 - DNA, 218 bp, Glycine max
  unsure (1)..(218): unsure at all n locations; Clone ID: 701119990H1
tagtgcctccttgccagaagttaaaatggcccaagaaactttcctattcacatctgaatcagtgaacgaggggcaccctgacaagctctgtgaccagatctccgatgctgtgctcgatgcatgcttggagcaggaccctgacagcaaggttgcctgtgaaacctgcnaccaagaccaacatggtgatggttttcggagagatcacaaccaangccaac

SEQ ID NO: 38579 - DNA, 256 bp, Glycine max
  Clone ID: 701119993H1
gtgcagagcagagagagacgcagccatggggcgaagacccgcgaggtgttataggcaaattaagaacaaaccataccccaagtccacggttttgccgtggtgttcctgatcccaagatcaggatttacgatgttggtatgaagaagaagggtgttgatgaatttccttctgtgtccatctggttagttgggagaaggaaaacgtttctagtgaggccctggaagctgctcgtattgcttgcaacaagtacatggcc

SEQ ID NO: 38580 - DNA, 255 bp, Glycine max
  unsure (1)..(255): unsure at all n locations; Clone ID: 701119994H1
cacacacacacaaaaaaaactcccttgtatattgttgcagctctagctagggnttcgcaagtgccgatccaagaagaacaacgacgatggcgatggctgcagctctgcgtacgcgaaggaaggcgtttganccaaccaatcaacgccctccactacttctctcaattcctccctcatctctacaagaccaagcccctacatggcgcgcgctaccattccactcaagttgtgaggncaccgaatgaagagtgtgag

SEQ ID NO: 38581 - DNA, 141 bp, Glycine max
  unsure (1)..(141): unsure at all n locations; Clone ID: 701119995H1
ctcagttgaaggatgaataatgaagttactgnaacgaactaatgactcagctaacctgttctttgttggttatgatgtgtttcgcctttttgaggatgctctagatatgaacttaatccctaaacgtccatgatcgaattg

SEQ ID NO: 38582 - DNA, 301 bp, Glycine max
  unsure (1)..(301): unsure at all n locations; Clone ID: 701120001H1
gcgaagtcgtaggagatggagaacatgcagagcttctggcaattgggcgatgaactccgtggacactcaaaagcatcggaggatcacaaatggttaatggttgcttcgaaattgggcggaacagacaagattgaagggggagcgtgtgaacaaccttgatctttcaaagggccccattgaaacaaggtcaagggataaatttgggttccaggaagagaacaaatttgattctcttaacttaagcatgttgaanctggactctaaatttactgagaatgtgagcaaaagctcgcttcgaaat

SEQ ID NO: 38583 - DNA, 285 bp, Glycine max
  unsure (1)..(285): unsure at all n locations; Clone ID: 701120002H1
annggnagtnagancccttgnctncncatcccatgaaaaaaaataagaaaggcatgggagagaagcaggtccccataaatattgctgggacaaggatcagtgatggggaatggctctatgcagacactgatggaattctgatctctcgaacagagctgtctgtttgatttcaattcatgaatacttcatgtaaggactatatttatgggcagcacacgacctagtatagtgcagttcggtacttgtgttcttgacccggttccttgcttccacaaattataaccg

SEQ ID NO: 38584 - DNA, 295 bp, Glycine max
  Clone ID: 701120003H1
ataagggagtgggagcagatatcatgcgtgaagaagcagtgggcatctcttttccgctgcgattgcgaatgcttctggcaagctgcactttccctccccctccaacatggcctgttcctttacccaacaactccaagaggagattcattgctttatatattagtcaacacatctttgcctccgatcctccacacgagatccttggccacacctatctcttcttgaaagatcagcttcaaccttctattatgcctcctcatagtggaatattcacggaaccatcattgatcagttc

SEQ ID NO: 38585 - DNA, 293 bp, Glycine max
  unsure (1)..(293): unsure at all n locations; Clone ID: 701120004H1
aagtccaacaacacactgcttctatctcaaacgcacatcgagaaatgagtttgagtaatgggaaaaccgaggcaccattgccaattagtaatggggatgagaagaagccgttcaagatcttcgtagggtatgaccntcgtgaagatcttgcctacgaggtatgtcggcactccatcttgaaaaggtcttcaatccctgttgagatcataccaattaaacagtcagatctgaggaaaagtggnttgtattggcgtgagaggggccagtttgagagcactgagttctccttttca

SEQ ID NO: 38586 - DNA, 291 bp, Glycine max
  Clone ID: 701120005H1
gtggaatatgggctgacactgtgggaggaaaacaggtattgggatttggcgtggtttggtggtctgttgcgacggccctcactcctatagctgccaaacttggattgcctttcctactagttgctcgtgcattcatggggattggtgagggtgttgctatgccagccatgaataatattctgtcaaaatgggttcctgtgtcagagagaagtagatcactagcgctggtctacagtggcatgtatcttggatcagtcactggactggccttttctcccttcctaattcatc

SEQ ID NO: 38587 - DNA, 286 bp, Glycine max
  unsure (1)..(286): unsure at all n locations; Clone ID: 701120006H1
ctaagccctctcttgctcgggattttactctcacgagattagagattgaaganggtgtctgacgcgagcaagaagaaggcttccgcagaagaaggcngcggcaggggccaagagaggnggcaaagcagcagctgcttcgtcganaacgacgtcgtcggagaaggccgccgacaagcttgccaacggaattggggaaattcagacatccggtcgancctgcaccggtgtcctctgctcgcatcctctntccagggatattaggatanaatctctgtccagttanttt

SEQ ID NO: 38588 - DNA, 298 bp, Glycine max
  unsure (1)..(298): unsure at all n locations; Clone ID: 701120008H1
anagacanagtcctatttntntcactatgttcacattgntacttggagtgcttgctcaggacctngtcatccctgtaatatctaccantgccatcattgtgtaccagaacttgcaactctccagncccacatgncaggaacagatttatcannttctctatgttcatnctgctctccagatcatggctctgggantngtgggcacggaagctcaccacgccactctcaacatggaacaccctctcatcatggatctacatnacatggagtggtggaagtcacaatccagcccatcaat

SEQ ID NO: 38589 - DNA, 278 bp, Glycine max
  unsure (1)..(278): unsure at all n locations; Clone ID: 701120009H1
gaacggggcttggcggaatcagacgggaaagaagaccctnttgagcttgactctagtccgactttgtgaaatgacttgagaggtgtaggataagtgggagctggaaacagcgaaagtgaaataccactacttttaacgttattttacttattccgtgaatcggaagcggggcactgcccctctttttggacncaaggtcggcttcggccggtcgatccgggcggaagacattgtcaggtggggagtttggctggggcggcacatctgttaaaagataa

SEQ ID NO: 38590 - DNA, 299 bp, Glycine max
  unsure (1)..(299): unsure at all n locations; Clone ID: 701120010H1
gtaattggtttgagagatgtaattcctccacccttgcgtagagagtttaatgatgtctacatagccactgaactcatggatactgatcttcaccatatcattcgctccaatcanaatctgtcagaggagcactctcaatacttcttgtaccagattcttcgtgggcttaagtatatacattctgcaaacgtaatccatagagatttaaaaccaagcaacctgctggctaaactcaaattgtgacttgaagattattgattttggtcttgcgagaccaactttgggaaagtgacttcatg

SEQ ID NO: 38591 - DNA, 226 bp, Glycine max
  unsure (1)..(226): unsure at all n locations; Clone ID: 701120011H1
cacttntgcattttcttgtgaaaaaaaaaatcctcagaaccaaaatcggttttnttctgtctctgatctctcaaagcttcaaattctccttgtttggtttgtttgtgtgtttggagtatgatgtcgcngccggcngtggtaacggaggaggaggggcggagcaacgtgtcgtcgaccgtggcgtccggttcttcgcaatccttggaccgtttctntnagaatgggg

SEQ ID NO: 38592 - DNA, 299 bp, Glycine max
  unsure (1)..(299): unsure at all n locations; Clone ID: 701120013H1
cttcaacctgaacaggtagctcagctttccgaatttacatccnctgagcttaaggacaccatcctctttgttgtccatggtctccttgctaccctttctcctaagatgcattctaaaccttccaccatctcaganaatacaacagttggagcaacaaatgttgggaatgaggattgtgctgaggttgttgagaactctgctcatcaatttcagcctgttgtttcattaactcgggactatcttgctcgcctgctcttttggtgcatgcttttgggacactatcttagaggccttgagtg

SEQ ID NO: 38593 - DNA, 298 bp, Glycine max
  unsure (1)..(298): unsure at all n locations; Clone ID: 701120015H1
cacccctataagaganttcaagaatttagaatcaattggagttcctttccgaagaggcaaccgatgaggatatactcaagcctatggaacgctgatgattggnccacaaggggtggacgcatcaaaaccgattggtccaaagctcctttcactgcatctacagaaacttcaacgctaacgcttgtgtttggaacagaggaaaatccacatgcaatcaattcaccatcctctaatgcatggctatcacaagagctggatccactgctcagcaaaggctgagctgggtgcagaagattac

SEQ ID NO: 38594 - DNA, 306 bp, Glycine max
  unsure (1)..(306): unsure at all n locations; Clone ID: 701120016H1
ggtganttcaaccgggttttcctcataggagacagttctgggcggnaactcggtgcatgaggtggnncgcgagggccggttcggcggacctaagcccggtccgggtcgcgggggaattccggttcacnccggttttgtncnggtccaaaccngagncggtccgagatgggaaatgcnacagacaccgtttttaacgttggacatgctggacaagttcttagcttggcgcttcctgttgggggccaccaaggaccacccctttacgtgcccgatgggtgangcggcaccgcaantcgaagggctgaa

SEQ ID NO: 38595 - DNA, 296 bp, Glycine max
  unsure (1)..(296): unsure at all n locations; Clone ID: 701120017H1
ttcaacttgtgagggggatcaaaacattcctagattggaatatggcanaacttggttgttctagtcgtaggaaagcaattgaggagctccttagagggcgtgattgtgccaaacaacttaggagtgtcatcaatgggagttgtgaagatggatcatcaacaaccccatcatttgctgaacaacttgtgaaggaggtgctcatgtccttcaccaactccctctcgttcttgaagaacaaccccacttctnaaatcccatgatgtttccaatgttcaagtttgtgaatctcccaagtc

SEQ ID NO: 38596 - DNA, 291 bp, Glycine max
  unsure (1)..(291): unsure at all n locations; Clone ID: 701120019H1
ggcctttnntccttctttggttctggttcttgctctgtgtcctgctgttttntgctcttattcgtaacacttcggctattctgttcgtcgcttagacgagtctcacagatggggagagatggaaatggggaacacaacgatcgctttcactccattcaccagtacgagaccgatgatctgaccggtgcggttcataaccctcgatcttgtcgagaatgggtggttttgtttactctgacgttgatgctgcttataagtgtgcggtggagaatggagctgtggcggttatnt

SEQ ID NO: 38597 - DNA, 292 bp, Glycine max
  unsure (1)..(292): unsure at all n locations; Clone ID: 701120020H1
gctgaatctcagtggatcgtggcagcaaggccactctgccccggtngctccttccttccttcgccatggcgttctacgtggctctcgcgtcgtttatnagctggatccaactcaacgacgctcctcgccctgcgttttgcttcctcttccagatccttctcctcttccttcagggaagaaagagatacctttggacccattcaagttccctccgacaaattatggggagcacaaactcaaagatcgttgcagaacttcgacatcggtgggccccgcgaacgcatgcccgaac

SEQ ID NO: 38598 - DNA, 293 bp, Glycine max
  unsure (1)..(293): unsure at all n locations; Clone ID: 701120021H1
agttgagctagtgtcattngagaaagagaaggagtcctgggatctgaacactgnagagaaacttgaagctgctggtaagaagaaagaagagggaaatgtcttgtttaaagctagtaaatatgcaagagcttccaaaagatatgaaaaggccgtgaagtacatagaatatgattcctcctttggtaaggaggagaaaaagcaggccaagaccttgaaggttgcctgcaatctgaacaatgctgcttgcaagttgaagttaaaagactncaaagaagcagaganattgtgtactt

SEQ ID NO: 38599 - DNA, 291 bp, Glycine max
  unsure (1)..(291): unsure at all n locations; Clone ID: 701120022H1
gccagtagtcatatgcttgtntcaaagattaagccatgcatgtgtaagtatgaactaattcagactgtgaaactgcgaatggctcattnnaatcagttatagtttgtttgatggtatctactantcggataaccgtagtnattctagagctaatacgtgcaacaaaccccgacttctggaagggatgcatttattagataaaaggtcaacacaggctctgcctgttgctttgatgattcatgataactcgtcggatcgcacggcctttgtgccggcgacgcatcattcaaa

SEQ ID NO: 38600 - DNA, 290 bp, Glycine max
  unsure (1)..(290): unsure at all n locations; Clone ID: 701120023H1
gcaaaagctcaatcccttgcgttaatggtggattgtnagatttaattcgattttggaaacaacttatgcgatcccccaatccgctgtgaacagatcgagggcgtggcctgtttgatttgaactgaatttcggnttgaaggatctcattttcttggagcattaaagcagaaatttctagcgctatggggtttccagcagcagcggtggccaaatgaccaaacccctttcttancctcnntttcancagaagacaagtcataatatgcggcctccgtccagctacaagcgcg

SEQ ID NO: 38601 - DNA, 295 bp, Glycine max
  unsure (1)..(295): unsure at all n locations; Clone ID: 701120024H1
tntggctggatcgaagatcattgaagtggacaacaatgtaagggaggatcgtgctctcttaaatggtgcacaganactacttgggcattttgatagctgttggtgaggcagttgcatatgttctttctggaatgtatggtagtgtgggtcaacttggagtgggaaatgccatcctcacaaatnctccagctatgttttggcgggtattattgtgatgtgtttggatgagctccttcaaaaaggctatggcttgggatctggatttctctgttcattgcnactaatgtatgtgaag

SEQ ID NO: 38602 - DNA, 295 bp, Glycine max
  unsure (1)..(295): unsure at all n locations; Clone ID: 701120025H1
aaaaagcaanacagagagaacaactgttactcacacacgccatgggtaaatgaatggtttttgagcaacagcagttaaaagagaaaagggattcagcgaagatgacatcngttggtgtggcaccaacttcgggtttgagagaagccagtgggcatggagcagcagctgcggatagattgccagaggagatgaacgatatgaaaattagggatgatagagaaatgnntgccacagttgttgatggcaacggaacggagacaggacatatcattgtgactaccattgggggtagaat

SEQ ID NO: 38603 - DNA, 288 bp, Glycine max
  unsure (1)..(288): unsure at all n locations; Clone ID: 701120027H1
ctctctcacacccttcatttacacacaacggaatntagggntttctgctancacttttgctttttnttcnggctttcttnctctgtgcnattntaatcttgatggtnncttctagtaatgcntatnggccaccttcacctggctactggnnaagttccaaattcaggtccatgagtttttacaaagggtttagaaacctctggggccctcagcaccaaagcctagaccaaaatgcatgncaatctggcntgatagaacctcaggagtggntcagtcagtaaggccatt

SEQ ID NO: 38604 - DNA, 298 bp, Glycine max
  unsure (1)..(298): unsure at all n locations; Clone ID: 701120028H1
gagagctcttcctccctttctcanagcaatggccgccgcagcacgccctctcgtcaccgtgcaggccctcgacggtgacatggcaaccgatgcctccgccaccgttcccatccctgacgtcatgaaggcntctntccgccccgacatcgtnaatttcgtacactcgaacatctccaagaacagccgccagccatacgccgtcagtangtcgcgctggtcaccagacctccgccgaatcctggggtaccggccgagccgtctcccgtatcccccgtgttnncggcggcggaacccancg

SEQ ID NO: 38605 - DNA, 299 bp, Glycine max
  unsure (1)..(299): unsure at all n locations; Clone ID: 701120029H1
gngcaccgtnagcagtaactcgtgganttgctagcaatggcgaggatcaaggtttacgagctgaggcagaagacgaaggctgatctgttgaatcagctgaaggacctcaaggccgagcttgccttgcttcgtgttgctaaggtcaccggcggtgcacctagcaagctctctaagatcaaggtggtgaggttgaacattgcccaggttttgacggtgatttctcagaagnagaaggccgcgttgagggatgcctacaagnacaangaagtacttgcctctcgatctccgccctaagaaga

SEQ ID NO: 38606 - DNA, 311 bp, Glycine max
  unsure (1)..(311): unsure at all n locations; Clone ID: 701120030H1
gnacgatctcggtgacgagntcgggcgggcaaaccgggggattgtagtgcggaggcctgganctggnggaagcgcatctgngagcgtcgcgcgataagctgncgannctgttcagctgtaatggagcgggttctgagngnncgaccctctnnactcttcaaaaggatattctgaatcatgttgagtacaccgtggnccaggtcacgctttagctttgacnattttnaagcgtatcaggctttgtcacacagtgtaggataccggttnattgnnacgctggcatgatactcatgtttacgtnaagngatcaa

SEQ ID NO: 38607 - DNA, 302 bp, Glycine max
  unsure (1)..(302): unsure at all n locations; Clone ID: 701120031H1
cgagcgcttacataaacaacatatcggaatcatcgttcattcagagtcagcatcgctatctccaanacaaaagtactaccgttttttcgtcttctccattttcttcatcagcatagcgacacaaacgcacaacaagcaccgttgactttttccaattttccaatttcctcggtgattctatcatctccgtnacaatcgcgcgccaaacgctgaatcgatcggtgcnaccgtgccaccactcagaaattggttaaagtggtttggacacgtataaagaccaacttctcagctttgggactgtg

SEQ ID NO: 38608 - DNA, 294 bp, Glycine max
  unsure (1)..(294): unsure at all n locations; Clone ID: 701120033H1
ctgatttttatctccaagatcacgaagctgtggcaagcaaagganatgatacaacagataaagaggtagagtaccccattttgtatgaaaaccaagtcaacaatgaattggaagacaaaagtgatagattcagccgaaagagtgttgatacaaccgaaagcggacacaccagtgatcctggaattggcatggctgattcctgggcttctccaaagttcaagagatacttatccaaccttganaagtttnatgagcatgggaagattactcgtcacttgccagcggttcaaagtc

SEQ ID NO: 38609 - DNA, 289 bp, Glycine max
  unsure (1)..(289): unsure at all n locations; Clone ID: 701120034H1
tttgaatgtctcagcttctgtatctggtgttcgtcttgctggagnaatgaactatgctgaagccctcctgcatagatttggaatacttggacctgatggagctcctgggattggtctctgtaaagggttggaaaacttacaaaaaggaccattgtcaaaactttttaaggcaactcctctcattgttgataattcagaagatgttggaagtggaagagaagggaaagaaactggttttcctcaactgaaaaagcctggtgatgtggatgtaactgtagattgagagact

SEQ ID NO: 38610 - DNA, 290 bp, Glycine max
  unsure (1)..(290): unsure at all n locations; Clone ID: 701120037H1
gatncntttgggcnaagaacatctcaatatagaggtgtaacaaggcataggtggactggtagatatgaagctcatctatgggacancatctgcaagaaagagggcnnangaatganaggaaggcaagtttatgctagggggttatgntatggaagaaaaagcagcaagagcttatgatntggnngcnctcaagtattggggaccctcctctcatgtnaatttcccattgganaattatcaaaacgancttgaggaaatgaagaacatgacgagacaagaatatgttgctc

SEQ ID NO: 38611 - DNA, 288 bp, Glycine max
  unsure (1)..(288): unsure at all n locations; Clone ID: 701120039H1
tcgagcngattccccagaaatctcaacacagttaaacatcatcaatcaaatatttttggnaaataccacaacagttttnagctctgtacaacgttggatttggatcagttttcgtgagagaatatttgagcatagaaacatggtagctgaagcagaggttgcgtgtcaacaaaacgtgggtgtgttggatgtgaagcattttccaaataagggaagcgatgttcaccagatcggagacgcagatgctaattcgcctccgtgttttgaccgagttcgtgncantgagtc

SEQ ID NO: 38612 - DNA, 237 bp, Glycine max
  unsure (1)..(237): unsure at all n locations; Clone ID: 701120040H1
gttganagtagcaaagatgtttcctttcgtgcaaaagggncanaagatanaggggactatggtngntatgcagaagaatgtgttggatatcaacngcatcaccagtgttggagggatcgttgaccaaggcttaggcttcataggcngtgcngtcgatncacttacttttgcagccaccataatctccatccagttgattagtgctaccaaggctnatggtgggaaaggagannttgg

SEQ ID NO: 38613 - DNA, 291 bp, Glycine max
  unsure (1)..(291): unsure at all n locations; Clone ID: 701120042H1
agaaaagagaggaattggatctggaggagaagattaaacagcatgagcaggaggtttctnctacgatgaatgcttttcacatcatttcgctctnggaggggttcgatttgtcgcngttgttcgaggaaaagaagagagaagagaaagagttacggtttgcgaccacgcgcnccgcgagcagcgtgatttcgagattggaagatttggcgaaggcggtgaaattcgacgtgaagaagagcgagactaaggtgaggttgcanggtnancaaaagggcgaaaaggtnactcgtt

SEQ ID NO: 38614 - DNA, 289 bp, Glycine max
  unsure (1)..(289): unsure at all n locations; Clone ID: 701120043H1
attagatagaaaaataganattccattgnnanatgaacaatcaaggatggaaattntcaagattcatgctgctgggattgctaagcacggtgaaatngattatgaagctgttgtgaagcttgnggagggctttaatggagctgatnttcgaaatgtgtgnacggaagctggaatggcagcattcgtgcagaacgtgattatgtgatccatggaagattttatgaaggntgttaganaactgagtggtgcanagaactcggatccatgctcactacagtgctgatntggc

SEQ ID NO: 38615 - DNA, 211 bp, Glycine max
  unsure (1)..(211): unsure at all n locations; Clone ID: 701120044H1
gatatcccagggtggttccagtggaaagctagctttcagtttaaaacanaagtcanagctggtgccannccctgttaggttgagnnnnnnnnnnnnnnnnnnnnnaacagaagntgggtntgtttnaaacgatgnaccactagaacggnaaagttaggcnangaggaaggcattggcnaatcatnagacancttgatgttgcacctcattc

SEQ ID NO: 38616 - DNA, 296 bp, Glycine max
  unsure (1)..(296): unsure at all n locations; Clone ID: 701120046H1
atattttagtcataaaatgaattgaattgcgatcgttaaacatgggaaccactttataattggatggaaattatccttagcagataattntnnaattttgaatttgtagtganaganaaaaatgggaaaantatagaaggtgacagncgcagaagagagatctgggagnagcagaagtgaagatgatgtccgggaaatntacgtcgattgangcgcagnagcttcagggatctgttnctggcngttcnagttnacgncccganaccgtcaatttcgcagatcaaatctnnagacat

SEQ ID NO: 38617 - DNA, 291 bp, Glycine max
  unsure (1)..(291): unsure at all n locations; Clone ID: 701120049H1
ctgtgagtgcaatggccttccagaggtggctgagtattggaanctagtgatcaagatcaatgattatcagaagagccgatttgtgaaccgtgttgttgcatcaatgttcaacacagtttcaaacaaaaagattgctattctgggatttgccttcaaganagacactggtgacacaagggagactcctgccattgatgtatgccaggggctactaggtgataaggccaacctgagcatatacgacccgcaagtaaccgaggaccagatccagagggatctatccatgaacaa

SEQ ID NO: 38618 - DNA, 287 bp, Glycine max
  unsure (1)..(287): unsure at all n locations; Clone ID: 701120050H1
tcgaacttgcgtcccttcaaacatcgtttntgactctggatgaggccatcaagaccacgaatcgtagggttaacgctctggaaaacgtggtgaagcngcggttggagaacacgattagttacatcaagggagagctggacgagctggagagggaggatttcttcaggctgaagaagattcaggggtataagaagagggagattgagaggcagatgctgcagcagaacaactccaagcttgacactantctccctttgcgcaaaggtctttcctacattctgctcaca

SEQ ID NO: 38619 - DNA, 290 bp, Glycine max
  unsure (1)..(290): unsure at all n locations; Clone ID: 701120052H1
ggctccctgagagagctcgtcgcggcggttgcagaagaagattgcaagatgaagttcaacatcgcgantcccaccactggatgccagaagaagctcgagatcgacgacgatctgaaactggcgagcattttgggacaagaggatctcacaggaggtcatcggagatgcactcggtgaggaatttaagggctatgtcttcaaaattaccggaggttgtgacaaacaaggatttccaatgaagcagggagtgctgactcctggtcgtgttagacttttgcttcanaggggaa

SEQ ID NO: 38620 - DNA, 286 bp, Glycine max
  unsure (1)..(286): unsure at all n locations; Clone ID: 701120053H1
cttctacctttgatgcatatntacntccaggtgtgaggcagatanacacccattgaaagatttaaattgctacnctctgaggnttgcccnaagaactttgtcatctttgatcagncagatcnacaaagcaggatcatgttccatcctgcaatgacctacanatttgacagtcctagcttacatgctcatgctactggttctcaagattttgagaagaacaaagtcaatcaaatggnaagagattgtcatcngcttttgaagaagatcctnatgacntgatgnatng

SEQ ID NO: 38621 - DNA, 54 bp, Glycine max
  unsure (1)..(54): unsure at all n locations; Clone ID: 701120054H1
ctggggnntcttagtgtaactnctggggntaatcctgtgtctcgtaaganaggg

SEQ ID NO: 38622 - DNA, 289 bp, Glycine max
  unsure (1)..(289): unsure at all n locations; Clone ID: 701120055H1
agaattggccgtttggtagccagagtggctctgcagagagacgatgttgaactcgttgccgttaacgaccctttcatcaccaccgattacatgacatacatgtttaaatacgacagtgttcatggacactggaagcatcacgatgtcaccgttaaggacgagaagacccttctcttcggtgacaagccagtcactatttttggacacagaaaccctgaagagatcccatgggggtcaactggagctgacatcattgttgagtccaccggagttttnaccgataaggaca

SEQ ID NO: 38623 - DNA, 293 bp, Glycine max
  unsure (1)..(293): unsure at all n locations; Clone ID: 701120057H1
acaagtagaagaggctagctacatgcggaagcgacttgatgatgaagattcttcatatanagcctcaacttcaacgacttcagttactgatgtgaatacaaaatcagaagcagcaactaagaagtcagctgcagcaattgcagctgaggttgcagataagctaacagcttctacgtnatcgcagttaatcatgacttctgttctctcaacatttgcagcggaagagggcaaaaagtgcttgtctaacttctgagaccatgtcaaaacctgagaagtcaatacctntatcaggt

SEQ ID NO: 38624 - DNA, 290 bp, Glycine max
  unsure (1)..(290): unsure at all n locations; Clone ID: 701120058H1
aacccaataagtatttctcatttttatggctcttgccctgaagtcaagttgcttattgcaattgaagaaacctgaggctggtttcaatgtttgtttttcatctaagaaagctataatctccgtgaaaagatacactccggtggccgctatcaggatcatngacgcagtgggactctctgcaacattcaccagattgaaaaaagaaggaaaagtggctttcatcccatatatcactgctggtgatcctgacctttcaacnactgcagaagcactgaaattgcttgattcat

SEQ ID NO: 38625 - DNA, 295 bp, Glycine max
  unsure (1)..(295): unsure at all n locations; Clone ID: 701120060H1
gcggctcgcngcgagcntgctcaagtgtggcagaggaaaggtttggnttgaccccaatgaagtcaacganatctccatgggccaattctcgccagaacataaggaagctggttaaggatgggtttatcatcagggaagcccaccaagattcactctcgctcacgtgctcgtcgantgaaggaagccaagaggaaaggacgtcactctggatacggtaagcgtaagggtacaagggaggcaaggcttcccactagaattctatggatgaggagaatgcgtgtgctcagacgttgct

SEQ ID NO: 38626 - DNA, 296 bp, Glycine max
  unsure (1)..(296): unsure at all n locations; Clone ID: 701120062H1
attcttcaccaaaacttcgcaaagaaacactacacatccatggcaactgctggcgtgcaagaagttcgtgttccccctctaacttccacctctgagccaccttctctctttgacggaaccaccaggttgtacatcagttatatttgtccctatgcgcaggtgtttggatcactcggaactataagggactacaagacaagatcaaactggttcntattgacctacaaaacaggcctgcttggtataaggagaaagtctaccctgaaaacaaggtgccatcattggagcacaatgga

SEQ ID NO: 38627 - DNA, 106 bp, Glycine max
  unsure (1)..(106): unsure at all n locations; Clone ID: 701120063H1
gcagaanaacttntcaccatggtttcttccgacanggatccacgagaggatgtccttcaagcctggtacatggatgatagtgatgaagatcaaagactcccccacc

SEQ ID NO: 38628 - DNA, 283 bp, Glycine max
  unsure (1)..(283): unsure at all n locations; Clone ID: 701120066H1
aaagtctagtaaagaaacatgagcnagaaagagtaacatggggtgtttatagtgaagaaatgagaaggatatgccatatagcagggcctatggtggnagtggtttcttcanaatatttgttgnaagttgtctcaactatgatagttggtcatttgggtgaactctatctctctagcgccgcccttgcnatttctctatcaggggtcactggtttcagtcttcttatgngatggctagtggactggaaacaatttgtggacaggcttatggaggccaacaatat

SEQ ID NO: 38629 - DNA, 285 bp, Glycine max
  unsure (1)..(285): unsure at all n locations; Clone ID: 701120068H1
ggctgaaggnagggcntcagatccctactttgtatngatngggttgnctttctaaacaacnccntcacntcnttaagngggggngatcgatccttgntttgtggntntgcttgcattngcaagatcatatatattcattcatatacncnnttacatatcaagatcncntnngttttggtgttcttgntctcntnaacaacatggagggtcaggacgagaagtacatctcatctgaggagctgaaggagcacancnagtcaggggatttggtngatttcaatcnna

SEQ ID NO: 38630 - DNA, 176 bp, Glycine max
  unsure (1)..(176): unsure at all n locations; Clone ID: 701120069H1
gagaatatgaagttgtttgtnttctttgttgctgcagtagtnttggtagcatggccatgccatggcgcaggctaccaaaggttccctctccgaatgaaaactggctatggtgagcgttcttcggaggtaaaatgcgcaagttttaggcttgctgtggaagcacacaacatccgagc

SEQ ID NO: 38631 - DNA, 285 bp, Glycine max
  unsure (1)..(285): unsure at all n locations; Clone ID: 701120070H1
tgcatgcttgggagcaggaccctgacagcaaggttgcctgtgaaacctgcaccaagaccaacatggtgatggttttcggagtcnatcacaaccaaggccaacgtggactatgagaagattgtgcgtgacacatgcacgaacattggttttgtctctgatgatgttggtcttgatgctgncaactgcaaggtcctcgtcaacattgagcaacagagtcctgatattgctcaaggtgtgcacggccacctcacaaagaggcctgaggagattggtgctggtgaccaa

SEQ ID NO: 38632 - DNA, 285 bp, Glycine max
  unsure (1)..(285): unsure at all n locations; Clone ID: 701120071H1
aatngcggccataacccgcctcctaantcgcacctcttcnctctnttccgtggcgcgtggattctcatctcacgcatcgccgcngcgcaaggaggagaggaatgtccagtgggtgttcctgggttgcnccggcgtcggaaaaggcacctacgccagtcgcctctgcaacntcctcggcgtccctcacatcgccaccggcgatctcgtccgcnacgagctcgcctccaacggccccctttcttcccagctatcagaaattgttaatcaaggaaaattggtgtcaga

SEQ ID NO: 38633 - DNA, 286 bp, Glycine max
  unsure (1)..(286): unsure at all n locations; Clone ID: 701120072H1
tgtgtttgtgtttgttttttctctcacctgaaaatgtcttgctgcggtggtaactgtggttgcggannctcctgcaagtgcggcaacggctgcggaggctgcaagatgtacccagacttgagctacactgagtcaaccaccaccgagaccttggtcatgggagtggcacctgttaaggctcaatttgagggtgctgaaatgggtgtgcccgctgagaacgatggctgcaaatgtggaccaaactgctcctgcaacccctgnacttgcaagtgaggtgttgggagag

SEQ ID NO: 38634 - DNA, 140 bp, Glycine max
  unsure (1)..(140): unsure at all n locations; Clone ID: 701120075H1
gctgtcgccaagtcttaacntagcatcactngctttctaagggatcagagagaagttgaaattgaaantgaaacgnggcagcgtcttcgctttgctgntgcttgctgntgagtcgtgcgtggatctacctttgaagncct

SEQ ID NO: 38635 - DNA, 291 bp, Glycine max
  unsure (1)..(291): unsure at all n locations; Clone ID: 701120078H1
ggggagaaaactgcagctgctaacaacaattcagtgagaggntttgaagtaattgatgctatcaagtctgaggtcgagaaaatatgccctggtgtggtctcatgtgctgatatcttggacattgcttctcgtgactctgttgttcttcttggagggccattttggaaagttagacttggaagaagggattccagaactgccanctttactgctgctancactggtgttattccacctcccacatctaacctcaccaaccttatcacaaggtttcgagatcaaggnctctct

SEQ ID NO: 38636 - DNA, 297 bp, Glycine max
  unsure (1)..(297): unsure at all n locations; Clone ID: 701120079H1
agaacaacaataataatctcaagcaccaagctaaattatcagtgtcacacggaaccctcatgttttgtaaaaanaaaaatgacccagtagggaacatngagaggccangactttgattacagtaaatctcatctcacgttgncatgcaccatgtcagctataactcttatttccaatcggcagctncttcccatggcaataaaatgtagaaactagaacctcgtgcnagaaattttggaaggaatacaacatccatttgtgactctcantggctgacagggtgttggtagaagatgt

SEQ ID NO: 38637 - DNA, 282 bp, Glycine max
  unsure (1)..(282): unsure at all n locations; Clone ID: 701120082H1
tgataaggtgatcatagagcatattataaganagtgaaaactaatggaggttggnctcaagaaggagaacatggggtttgaggaaactgagttaaggcttggactgcctggaaacggaggcactgaagaagtgntcatcaggaagaggggtttntntgagactgaaactggtcatgaagatgagtctgccaccantgtggatttgatgcttaatcnttcttctaaggaggcngcaaccactgctgctgntgntgcagatccnnctgataagcacaagacttt

SEQ ID NO: 38638 - DNA, 275 bp, Glycine max
  unsure (1)..(275): unsure at all n locations; Clone ID: 701120083H1
gcaccccccaaaaaataagaagatatacataaaaataaaacacaccctctacgtgtccacacttctctgatcacaacacacccgcttaattagatctctatatataaaccccttcaggcactccactatgacgggcaaaganatttttcataagatgaaggaaaaagttttgggatcatctgatcccgattcaggtaaaggaaagagcaagatgaagaagcacataactcatggcttcacttggtaaaggaagatcaggtctgncatggaagact

SEQ ID NO: 38639 - DNA, 283 bp, Glycine max
  Clone ID: 701120084H1
gtaagcttttctttgcattttgggtgatcatccatctataccctttcctcaaaggtctcatggggcgccaaaacagaacaccgaccattgtggtggtgtggtccattcttcttgcatccattttctcactcttgtgggttagaattgatccattcaccacaagggtcactggtcctgatgttgaggagtgtggcattaactgctagaagaccaaaagacaggtttaatgtattgtgttttgggttgtaattatagttattgttttgtagctgttatattttgg

SEQ ID NO: 38640 - DNA, 283 bp, Glycine max
  unsure (1)..(283): unsure at all n locations; Clone ID: 701120085H1
gggcactgtactggcacctgggatcagatagaggaattgagtgcagaatggctnccttttatgcaggtttcccagagacagtgcctcttcgaactgtncaataggcaatgttcatctggacttcaggnggtttctgacgtagctgnttatataaaagctgggttctatgaaattgggattggggntggnttggagtctatgacagtagatcgtgtgaataggcttcgcangcattaacccaaaggtaggaacctttgcagagcccgggattgtnttcttccaa

SEQ ID NO: 38641 - DNA, 279 bp, Glycine max
  unsure (1)..(279): unsure at all n locations; Clone ID: 701120086H1
aaaacatcgaaagagagaggcatggccgagcaaaccttcatcatgatcaagccagatggcgttcaaagaggccttattggcgagattattagcagatttgagaggaagggtttttacttgaaagggttgaaactcgttactgtggaccgtccttttgctgagaagcactatgctgatttgtctgcaaagcctttcttagtggtttggnggattacatgtctctggcnctgttgttgccatgatctgggagggtaagaatgttgttacaactggccgaaa

SEQ ID NO: 38642 - DNA, 281 bp, Glycine max
  unsure (1)..(281): unsure at all n locations; Clone ID: 701120087H1
aaaaagagagagtggaaaanatggcgcggttgatcacagtggtgtggtgcgcggtggcggtgctattatgcgccgcggccggtgcgtcgtgggtggaggagncggcgaacccgatacgaatggtgtctggcgtggaggcgaggtggttcgggtgatcggggagtgccggcgtgcgttgaagtttgcnaggttcgtgagcaggttcgggaagagttaccaaagcgangaagagatgaatgagaggtacgagatattctcgcagattctcagttcatccgctc

SEQ ID NO: 38643 - DNA, 287 bp, Glycine max
  unsure (1)..(287): unsure at all n locations; Clone ID: 701120089H1
agttaatcgtcttcttctctgcatccatcagatccaaagtttctcgcgatacgagggagcaatgtcagaggctaaggttcaggatttgaagaaggaagangaggttgctgatgattctcctaagaacgagttgacagtgganaatctgtggatgatctgaaagattcggntaacgataaaagcgatggaaacgccatgccctcatcccatcaggaggaagcagctgttaagaaaaagtatggaggggtgttgccaaagaagctccactagtatccaaggatcatgga

SEQ ID NO: 38644 - DNA, 296 bp, Glycine max
  unsure (1)..(296): unsure at all n locations; Clone ID: 701120093H1
ttgcatgctacctggggcctggnagctaggaaaaattaagataaagcgttttgctngatggtgagatatatgtccagctgnaaganagtgtcatggggtgtgatgtgtttnttgtgcagnccacatgtcctcctgcanatgnagnatcttatggagcttctcataatgattgatgcctgcaggaggggcttcagccagaaatattactgctgtcattccatattttgggatatgccagagctgataggaaagacncnaaggacgtggatccattgctgccaagcntgtagcaaatt

SEQ ID NO: 38645 - DNA, 204 bp, Glycine max
  unsure (1)..(204): unsure at all n locations; Clone ID: 701120096H1
agaaaatcctcacccattttcttcgtagccaaacactctgaaattctcagttatgtcgtgggcaagcgtatgtggatgatcacctactgtgtgaaatcgaaggtaaccaccttcactcacggccgctatcatcggccaagacggaagcgtttgggctcagagcaccactttccctcagttnaacctgaggaaataactgccatc

SEQ ID NO: 38646 - DNA, 282 bp, Glycine max
  Clone ID: 701120103H1
ccgctcgcttttctgcaaaatcatctaaatccgtttctgatcctgaatcatcagtttttcccttgaaagatgggaggtggcaaggacaaacacaatgaagaagagaaaggagttttctcacatctggctcatggagtagctcaagctgctcatggttaccctccaggggcataccctccacctcctggggcataccctccttaccaagggtacccacctgctcatggctaccctccacaaggtggctatcctccggctggttatccccctgctggctatcct

SEQ ID NO: 38647 - DNA, 244 bp, Glycine max
  unsure (1)..(244): unsure at all n locations; Clone ID: 701120104H1
agcattctacgtcgttgtttcgatacaaaatgctgggttcacgtttctgcgtccgcaccgtatccggcgtgggctccgccgcagcggatcacacgaatgccgcctccaccgcccgctccgttccgagctccgtcgccgtcgacttctcgccgctccacctctcaccgctccggtcccgccgccgcagatccatcctcattcctgcgatcctcccgccgtagatccagtccggcgactctcanga

SEQ ID NO: 38648 - DNA, 278 bp, Glycine max
  Clone ID: 701120105H1
atgggacctgctgtctttgagcagatacaacttaatattggaaatcctgataagtctattatattacggtcttccagctcaagggttgagtttcctggatatcgggcagtttttacggacattgttactgaagctgttcaagataaagacagtgatgaattcagccgtgatcaaacatttggagtactaaattccttgaagacaggggatccatacatgtggttcagactgaacctaatcagcaccatacacaaccaccaccacgggtactctgaagc

SEQ ID NO: 38649 - DNA, 278 bp, Glycine max
  Clone ID: 701120106H1
cgatggtgttctacttcaaagcgcgccctgaagccggcgatttcaccatcttcatgggcctcgacaagttcgagaacgaggaactcatcaaatacggttttcccgaagacatctggttccatgttgataaaatgtcttcagcccatgtctatgtcaggctgcacaaaggccagactctcgatgacctgagtgaggctttactggaagattgtgctcagcttgtcaaagcaaattcaattcaaggaaataaagtgaacaatgttgatgttgtttacact

SEQ ID NO: 38650 - DNA, 277 bp, Glycine max
  Clone ID: 701120107H1
ggaagatcttcctgggaaagaggtaaacgtgctgaagggtcacgagggtggcgtgttagccgcgaggttcaacggcgatggcaattatgttctgagttgcggcaaagaccgtaccatacgcctttggaatcctcaccgtggcatccatatcaagacctataaatcccacgctcgcgaagtccgcgatgtccacgtcacacaggacaactccaagctatgttccctgtggtggagatcgacaaatattttattgggacgttgcaatggacgtgtattt

SEQ ID NO: 38651 - DNA, 279 bp, Glycine max
  Clone ID: 701120108H1
gcggcattgatgcaggacgatgatgatattgcagagatgagggaagaagatgaaaacaaattcttcagctcttacaagggcacaactgattcccagtttattgtggacaaaaagaattcaaataacttgcaacaagatgagttcacatcacaagtaggtagtaatgacataccaaagagtgagaaaagaaatggatcagttgctgaagcaacaccatctactttagagaatgatgtgggaacaagcaaagttaaaactcaatcagtgaacttggtaaac

SEQ ID NO: 38652 - DNA, 277 bp, Glycine max
  unsure (1)..(277): unsure at all n locations; Clone ID: 701120109H1
tctttccttccctctttttccgaatctgaatcgaaatggcttcggagactgagacgtttgcttttcaggccgagatcaaccagctacctcagtctaatcatcaacaccttctacagcaacaaggaganaantcttcgtgagctcatcagcaatgcctctgatgctttggacaagattcgatttgagagtcttacagacaagagcaagcttgatgctcagccagagttgttcattcacatattcctgacaagaccaacaacacattgtctatcatgac

SEQ ID NO: 38653 - DNA, 188 bp, Glycine max
  Clone ID: 701120110H1
tgtttgtgggcttctgcagttctcgtattcgctgatgaacactccttatgtcttactcaaaatgccacactgcagctatcccgtggcttgcccgtgggaaattctcctggttccaagcctggtgctactgtgattgtcgaaagagttcatatacatggactgtcaaggtttagaaacttggggaaatt

SEQ ID NO: 38654 - DNA, 277 bp, Glycine max
  unsure (1)..(277): unsure at all n locations; Clone ID: 701120111H1
gcgagagagaaagctcttcttgttctgatgtcggatcatcttccgcgagaagtggtaaccgacatcctctcccggttaccggcgaaatccctactccgattccggtcaacctcaaagtcatggaagtcactaatcgacagccagcacttcaactcggtccatctcagcagatccctgngctnnnnctccaacaccaccctcatcctccgcctcgactctgatctataccagacaaatttcccaaccctagaccctcccctttttcttaaccaccctc

SEQ ID NO: 38655 - DNA, 203 bp, Glycine max
  unsure (1)..(203): unsure at all n locations; Clone ID: 701120112H1
cttgaagaagcaatctttgcaatgcctgagaacaaccagaggacctataacgtcagctgntgaccttttgactctggattatggtgctgagagtgagtacagaatgttcccaggtgaagaaatcactattgctaaagggtacttgagcataattgagtccttggcttctgtgttgccacctggttttgtccattaggtaggag

SEQ ID NO: 38656 - DNA, 274 bp, Glycine max
  Clone ID: 701120113H1
ctcagccatgtcggtggttccttgcaattgcaaccacaccacagagaaagataaccttagtggtgaaagtgagagctttcacaagttttttgagtgctggatttctgagcaaaaacaacatctgaaggaccttttagctgctgaatcaacccagctaattagtgatgaggagcttcaggcactgaatgataaggtggttgagcattatgagtactactacaaggccaagtcaaggtgtgcaaagcaagatgtattggccatgctgtccccaaca

SEQ ID NO: 38657 - DNA, 276 bp, Glycine max
  unsure (1)..(276): unsure at all n locations; Clone ID: 701120114H1
gaaggctaaagggagatgagaagaaggccaggaattggaggtttgcagacgcatgccgctgcaagggatcaattccgtttgctgggtgaaaatgtcgcaaagatcagaaccgatttgatgaaggagcagcttgccacctttcgctctcagctcgaagatttcnctcgcaaacacaagaatgacatccgcaaganccctgcattcagatcacagtttcatgaaatgtgtgctaaagttggagtagaccccttggcctcaaacaagggtttctggtca

SEQ ID NO: 38658 - DNA, 277 bp, Glycine max
  unsure (1)..(277): unsure at all n locations; Clone ID: 701120115H1
gtaagccgccatggtgaagtactcaagggagcctgacaatccaaccaagtcttgcaaggctagaggcgccgaccttagggttcattttaagaacactagggaaactgcctttgcaatcaggaagttgcccttggttaaagctaaaaggtacttggaagatgttcttgcgcacaagcaggccattccattcagacgtttctgtcgtggtgttggaaggacagctcaagcaaagaatagacatccnatggccaaggaaggtggcctgtcaagncagcaa

SEQ ID NO: 38659 - DNA, 278 bp, Glycine max
  Clone ID: 701120116H1
gcttagacgcatctcctgttatgcatgaccgtaattggattggcgttgcgttttgtgcaatattcgtcgtacctcatgaaacactcttagcaatgggtttttcaaattcaaaagggccaaggcatttgtttggtgatattcgagtggatttttatggagatgtagatctagaacttgttttagacaaatcagatcacatgtgcctattctttcttaaacgacatgacatcatgcagatttccatctcaagcacagatatcttggcagatgggtttcga

SEQ ID NO: 38660 - DNA, 283 bp, Glycine max
  unsure (1)..(283): unsure at all n locations; Clone ID: 701120117H1
gtaaaaaatttcctttaggttgaaacttggagtgccggctcaggatattanggatgaatggaaatggtactcagactgagtattggggcgaaagttcgggttcaacttcccatagcagtcagcaggatgtggaggatgacaggatgattgctcttgtgctgtcagaagagtatgccaaattagatggagcagttggtcggcgccttaccaacttggaacctgttcctgttgaatgtgtatggtttatgtgaggtcaagtatctggagatggaaattgtcattc

SEQ ID NO: 38661 - DNA, 282 bp, Glycine max
  Clone ID: 701120118H1
agccatggggcggagacctgcgaggtgttataggcaaattaagaacaagccataccccaagtcacgtttctgccgtggtgttcctgatcccaagatcaggatttatgatgttggtatgaagaagaagggtgttgatgagtttcctttctgtgtccatctggttagttgggagaaggaaaatgtttcaagtgaggccctggaagctgctcgcattgcttgcaacaagtacatggccaaatttgctggaaaggatgctttccacttgagagtcagggtgcaccc

SEQ ID NO: 38662 - DNA, 278 bp, Glycine max
  Clone ID: 701120119H1
atcattctgtcaaaccacccatgttgcagaggggggtgctcaggaccaactgcatagactgcttggatcgcactaatgttgcacaatatgcatatgggttggctgctcttggccaccagctccatgctctgggagttattgaccacccaaaaattgatcttgatgaccctgtagcagatgatttgatggggttttatgagcggatgggtgatacactcgcacatcagtatggtggttctgctgctcacaacaagattttctctgagaggaggggccat

SEQ ID NO: 38663 - DNA, 159 bp, Glycine max
  Clone ID: 701120120H1
ctgcttgatgttaagtgttctcctgtaaatgtttattatgcacggaatcgcgagggaatgacgagggtaaaaaaatactgataaaattgagatcactacgaaaggtaatggcagggaattggattgaggccattgaaggttttaatttattcatttgtt

SEQ ID NO: 38664 - DNA, 275 bp, Glycine max
  unsure (1)..(275): unsure at all n locations; Clone ID: 701120121H1
gcatgcgtttggtgatcaatatcgggctactgacactgtaattaaaggagctggaaagctgaagctggtgtttgttccagaaggccaaggtgaggaaactgaattcgaggtttttaacttcactggtgaagggggtgtttcattggctatgtacaatactgatgagtctattcgttcttttgccgaggcttctatggcaactgctttagagaaaaagtggccactttatcttagcaccaaaaatacantctcaagaaatatgatggaagattcaa

SEQ ID NO: 38665 - DNA, 275 bp, Glycine max
  Clone ID: 701120122H1
ggtgattggagctgtgcagggcatgatgactggacttgtatgcatcaccccaggggcagggcttgtgcaatcatgggctgctatagtgatgggaatattatctgggagcattccatgggtgactatgatgattttgcataaaaagtcaactttgctacagaaggtagatgacacccttggtgtgtttcacacacatgctgtggctggccttttgggtggtctcctcacaggtctattagcagaaccagccctttgtagacttctattgccagtaa

SEQ ID NO: 38666 - DNA, 279 bp, Glycine max
  Clone ID: 701120123H1
aaaaaatgaagaagggtttctcccttgtgctgctgattcttctgatccagtacaacaacgttgtcaacgcctacaacaacaaaaactgtgtcacagaggattgcctcatcggcaacaaggatttggaatcagagttctactttggatcccatgtggccagaatgctctacgatgtgagccaatctgtgagtggcaaaacaggcaataaaaataacaaagctgttaattgtccaaataagcaaggctaccgaagctgcttgccttccaaaaacggtggtg

SEQ ID NO: 38667 - DNA, 199 bp, Glycine max
  Clone ID: 701120125H1
gaaaaagcaatccactcagagagctagaagaattcaacgatgcctcgctatgatgataaatacggcaatacccgcctctatgtggggcacttatcttcgaggactcgttcccgggatctggagcgtgccttcagcagatatggaagagttcggggtgtggatatgaagaatgatttcgcctttgttgattttagtgatc

SEQ ID NO: 38668 - DNA, 272 bp, Glycine max
  Clone ID: 701120127H1
gctcattggaaagaggtcatttatttcaatgtcttatgaagaacataagcgccttaggcgtttgacatcctcttcaatcaatggcatggaagcactgtccctctacttgacatatattgaaaaaaatgtgaaatcttccttggagaaatgggccaacatgggacaaattgagttcttaactgagatcaggaagcttactttcaaaatcatatgcatattttccttagctcagagagtgaacatgttaaggaggctttggagagggatacaca

SEQ ID NO: 38669 - DNA, 210 bp, Glycine max
  unsure (1)..(210): unsure at all n locations; Clone ID: 701120128H1
agntgctccatttctcatcctcttcgtcgccagccacttgttcttctgatggcattctccaagannnnnnnnnnnnnnnnnnnnnttcttcttctgtgagcgcggtggtggacgggttttctacggtcaccgactgtgacgggtgcggggtcacattcacagacagaacgcagcagcaggaggaggagctctctcttctggcaattcttg

SEQ ID NO: 38670 - DNA, 165 bp, Glycine max
  unsure (1)..(165): unsure at all n locations; Clone ID: 701120129H1
accagccacagattctctcttctctattcagtaaacggctgttttgtatacgagctgtcccagtctcagcctatacatcccaaaacatcaaaacaactggttgggctccttgtatggcttcttcctcagttggtagaagngcctacatattcnacacaanntgng

SEQ ID NO: 38671 - DNA, 240 bp, Glycine max
  Clone ID: 701120130H1
gagaaagaaaagaatggcaaagttaataaaattcctttgagttgaacacaggggccaagattccttctgttgggttaggcacttggcaagctgagcctggtgttgtagccaaagctgtcaccacagccattctggttggatacaggcatattgattgtgctcaagcgtataacaatcaagcagagattggttctgctcttaagaagctttttgatgatggtgtggtgaagcgtgaggact

SEQ ID NO: 38672 - DNA, 278 bp, Glycine max
  unsure (1)..(278): unsure at all n locations; Clone ID: 701120132H1
aaaacctacagagtcatgacaacaatgaaatatatgaaaaggttgttaaaattcttgaaacatattggttggaagaagaagatgagacactaccttcaggaaatggtgctcaacctggtttcaatttcggaaacaatgagcttcccgtcccatctggtggattcaacttcagctgaagactttncntaaaaggggcntnttggnncgantaggggtttgtnccgggtgggcgtgtgtgttgggataaacgtctggagagtcaaccattgcaccttgtg

SEQ ID NO: 38673 - DNA, 280 bp, Glycine max
  Clone ID: 701120134H1
gcaaagctcccaagatacaaagactggtcactcctcttacgctccaaagaaagcgggcaagaattgctgataagaagaagaggattgccaaggcaaaatctgaggcagcagagtaccagaaactccttgcctccaggttgaaggagcagagagaccgccgcagtgagagtttggccaagaggagatccaagctttccagtgctgctaaggcagcagctgtataagctgctttcgatagagagatatggtgaagtttaatcatcatatgtatttttgttgt

SEQ ID NO: 38674 - DNA, 257 bp, Glycine max
  unsure (1)..(257): unsure at all n locations; Clone ID: 701120135H1
ctctgggatctcgtctcgatcgancgatctcgaacatgancactggggagcttctcaacatcgaacctctcgaactcaagttcccctttgagctgaagaagcagatctcatgttctcttcaattgtccaataagaccgatagctatgtggccttcaaggtgaaaacaaccaatccgnagaagtattgtgttcgtccgaacactggtattgtcacgccacgatctacgtgtgatgttatcgttaccatgcaagcgcat

SEQ ID NO: 38675 - DNA, 278 bp, Glycine max
  Clone ID: 701120136H1
ggaaaaagggtggcaagaagaaggcagctgatccctttgccaagaaggattggtatgacattaaggccccttactctttttcaagtgaaaaatgttggcaaaaccctcgtctctcgtacgcagggtaccaagattgcttctgaaggacttaaacatagagtgtttgaggtctccttggctgatcttcaaggggatgaggatcatgcattcaagaagattaggttgagagctgaagatgtgcaagggaagaatgtcctgacaatttctggggaatggat

SEQ ID NO: 38676 - DNA, 246 bp, Glycine max
  unsure (1)..(246): unsure at all n locations; Clone ID: 701120137H1
agatgggnaaggaaaaggttcanatcagtattgtggtcattggccatgtcgactctgggnaatccactaccactggtcacntgatttacaagcttggaggcattgacaagcgtgttattgagaggtttgagaaggaagctgctgagatgaacaagaggtctttcaagtatgcctgggtgctggacaaacttaaggctgagcgtgaaagaggaatcaccattgatattgctttgtggaagttgaaat

SEQ ID NO: 38677 - DNA, 277 bp, Glycine max
  unsure (1)..(277): unsure at all n locations; Clone ID: 701120139H1
gcgacatggcgttcaacgccggcggngagccataacctggttccccggccacatggccgccgctacacgtgccatccgccaccgcctcaaactcgctgacctcgtcatcgaagttcgcgacgctcgcattcccctctcctccgccaacgcngacctcnagccacacctctccgctaaacgacgcgtcgtcgcactcaataaaaaagacctcgccaaccctaacatcatgcntaaatggacgcattattttgagangtgtaatcagaattgcgtttgg

SEQ ID NO: 38678 - DNA, 191 bp, Glycine max
  Clone ID: 701120140H1
gttgatagttctgagtgcatagaggtgcctgacagcagaacagaattcaacccttggcaatatgataatttggatgctgaataataagcatccttgtagaattctttctattctttgaactatcattttgttattaagtttgcaatgtatctgattggaatgcttgaaatttggttttgtttttgggtaaa

SEQ ID NO: 38679 - DNA, 152 bp, Glycine max
  Clone ID: 701120141H1
gtttggtttgtcatgtttaaaagaaaagaaggtagagaaggtgttgtgaaaggttaagatcgagaaattagggtgaagtgaaggagaagctcttgagaaggcatgttctgtcgggaatgattgtagctgacttgaaagttgaaactgaagat

SEQ ID NO: 38680 - DNA, 273 bp, Glycine max
  unsure (1)..(273): unsure at all n locations; Clone ID: 701120142H1
agccacaatttcaacgccacaccaaaaattccactgcaccaccaccctccccatttgtacttttcttctgcattctctttccactcccctgcattctgcacacaatctagctttacgtgcttctgggcaaccgcataaggttaaactgttaagcatatcattgaaatccttttgggattggaacttgatatgatcatntgtattggggagtaagaccttgttacttttgcaatgctaaattttaataggatcagaagtcagcccaggacaacc

SEQ ID NO: 38681 - DNA, 269 bp, Glycine max
  Clone ID: 701120143H1
cacaaatctgggtatagtggagtagtagggtttttgcgtttgagagagaagaagcatgagcaggagtttgggaattccggtgaagctgctccacgaggcttcggggcacgtggtgacggtggagctcaagagcggagaactctacagaggaagcatgatcgagtgcgaggacaactggaactgtcaactcgagagcatcacctacactgccaaggatggcaaaacatcgcaacttgagcagtgtttattcgaggcagcaaatcaggttt

SEQ ID NO: 38682 - DNA, 172 bp, Glycine max
  unsure (1)..(172): unsure at all n locations; Clone ID: 701120144H1
gcnaccgnngcagcgaccgtggcggttncggacgcggctttngtgggcnanggcncggaggtgacancgnccgaggccggcnccgaggtcnccnccgcgaagaanangagaaatggntcccagtgaccaaactnggccgcctggtgaaggagngaagaatccnaagccntga

SEQ ID NO: 38683 - DNA, 271 bp, Glycine max
  Clone ID: 701120145H1
agtggcttgtattggcgtgagaggggccagtttgagagcactgagttctccttttcaagattcttgacaccttgccttgccaattaccaaggttgggcaatgtttgtggattgtgatttcctctacttggctgacatcaaggaattgaaaaacttgattgaggacaagtatgcaatcatgtgtgttcagcatgactatgctccaaaggagaccactaagatggatggggcagtgcaaactgtgtacccaagaaagaattggtcttcaatgg

SEQ ID NO: 38684 - DNA, 271 bp, Glycine max
  Clone ID: 701120146H1
caacagtcctgcctcacttgttggctcccctgcaaacccttggtcaaagtggggttctcctattgggaaagctgattggtcagtaaatggagactcccttggtcgtcagatgcgaagatcatcctcgtttgagcgcaagaacaatggggaagagcctgatctctcttgggtccaatctctggtgaaggagtccccacctgagatgatcaaagagaagtttgcatctcctatgcctactgcatctgctgatggaccgattcaattcccaatt

SEQ ID NO: 38685 - DNA, 276 bp, Glycine max
  unsure (1)..(276): unsure at all n locations; Clone ID: 701120147H1
tattttcatttaactgaggtacactatatataatcaatgtgcagaaaattacattagcttttgtctccggtatggagtgtagatgggcatgcaaggcaagatcagaaagcataatcatcaggaggccaaaagaacagtgataggaaactctcatccttcgacccagctgtatcaggtaaaaaatatgatggggagggaaataatcagtaaattacagacgacctnggcaaaatccctccccagcgcctcaagctcatttagaaatgcaagatgtgt

SEQ ID NO: 38686 - DNA, 191 bp, Glycine max
  unsure (1)..(191): unsure at all n locations; Clone ID: 701120148H1
acgacaacaatgggtggtggcgggcncngaggcngatcacgcactcagagaaaacacttccgccagagcagagaganccgtgtggaagcgttccaaatcggatcccgatccttcttcaaccgnnaacaatcccgcgtggactcccttcgccactgagaacgccgcttttgatttctactacaaagagcagg

SEQ ID NO: 38687 - DNA, 271 bp, Glycine max
  unsure (1)..(271): unsure at all n locations; Clone ID: 701120149H1
ctccgcaccagtttcaccgcacgaatatcttgttgtttggagcgatccganaaaaactctgtaaacatgttggtttaccaggacctccttacaggtgatgagcttctctctgactccttccgttacaaggaaattgagaatggaatgctgtgggaagttgaggggaagtgggttgttaaaggagcagttgatgtagacattggtgcaaacccttctgctgagggtggaggagaagatgagggagttgatgatgcagctgttaagttgttga

SEQ ID NO: 38688 - DNA, 92 bp, Glycine max
  unsure (1)..(92): unsure at all n locations; Clone ID: 701120150H1
cnattccgccaacgaggccagtacanatcanatactatctgcttcttcgtcatggncaccggacaactattactcccgcactacacangctt

SEQ ID NO: 38689 - DNA, 266 bp, Glycine max
  unsure (1)..(266): unsure at all n locations; Clone ID: 701120153H1
cttggctgtggtgttggctttgctaatcaggccgtgccagtgttcctctcngagatagcaccttgcaagaatacgaggagcattgaatatattgttccagctcaatgtcacaattggcattctatttgctaaccttgtcaactatggcaccaacaaaatcaaaggtgggtggggttggaggctatctcttgggttggctggtatcccagcagttctgctaactttgggagccttgttcgtggtggacacccccaacagtttgattg

SEQ ID NO: 38690 - DNA, 276 bp, Glycine max
  unsure (1)..(276): unsure at all n locations; Clone ID: 701120155H1
tattttctcattcgtcgtcgacancgtaanttaccattatagtccgttcgtgcttcctctgttcttcttcttnttgttgtgttgttctgttctctttctctctcttcaagcatcaccgccatgttcttcgaatcccgatccctcctcttcccgctccttttctctctcttcctttcttccgccttcgcttcagactcagatcacaagtatcaacacgatgaaccagttaacctttgggtgaacaaagttggtccttataacaatccacacaacata

SEQ ID NO: 38691 - DNA, 278 bp, Glycine max
  Clone ID: 701120156H1
attacaaagtattttcaaggaatcatctattctacactcgaagattaatgaaagcaatggctattactacaccttccaattcttcaattctcctctccctttctctattgctcatctccctctccctcgctgagtcgcaatctttcatcggagtaaactacggccaggtcgccgacaaccttccggcgccggaggacacggccaacctcctcaaatccacaaccatcggaaaagtccgtctctacggtgccgatccgccatcatcaagggcctcggcc

SEQ ID NO: 38692 - DNA, 139 bp, Glycine max
  Clone ID: 701120157H1
gccagaatccgggtcggacccaggtcgtgggctcctattcgggcatcggcagcgagctcggagagaggggagatagtattggagcagaagccgaagaaggatgacaagaagaagctgcagaagggaatcgcagagtttt

SEQ ID NO: 38693 - DNA, 119 bp, Glycine max
  unsure (1)..(119): unsure at all n locations; Clone ID: 701120158H1
cagagagaaagagaaatgggagaacgaaaaggaatcccaattgctnctggggctcttggcgatgctcctcttcttcattgcttcttcctcttcctctcacctcgttcgtncttccgatg

SEQ ID NO: 38694 - DNA, 271 bp, Glycine max
  Clone ID: 701120159H1
gggtcaccgaaaatcatcctcatcttgtccttcctgctttgcgcaaatcacttaaaactcttcaactagagtacttggacctgtatctcatccactggcccctgagttctcagccagggaagttctcatttccaattgaagtagaagatctcttgccttttgacgtgaagggtgtgtgggaatccatggaagagtgccagaaacttggcctcaccaaagccatggagtcagcaacttctctgtcaagaagcttcagaatctgctctctgtt

SEQ ID NO: 38695 - DNA, 270 bp, Glycine max
  unsure (1)..(270): unsure at all n locations; Clone ID: 701120160H1
atccgctccgagagctagaagaaatcaacgatgcctcgctatgatgataantntggtaatacccgcctctatgttggacggttgtcttcgaggactcgttcccgtgacctggagcgtgtcttcagcagatatggaagagttcgaggcgtagatatgaagaatgatttcgcctttgttgaatttagtgatcctcgagatgctgatgatgctagatacaacctggatngtcgtgatgttgaaggaagtcgtattatggtggaatngccaagg

SEQ ID NO: 38696 - DNA, 271 bp, Glycine max
  unsure (1)..(271): unsure at all n locations; Clone ID: 701120161H1
ggcgtgttgctgcttacatttataagaaagctggaagatggaagcagtccattgctttgtcaaaaaaagacaatctttacaaggactgtatggaaacttgctctcaatctggtgaccgtgaactctcggaggatttgcttgtttactttattgagcaggagaagncagaatgttttgcatcttgcctctttgtctgttatgatataatacggccagatgttgctcttgagctagcttggatgaacaatatgattgattttgcttcccatac

SEQ ID NO: 38697 - DNA, 254 bp, Glycine max
  unsure (1)..(254): unsure at all n locations; Clone ID: 701120162H1
cggnntcgagctcaagaaagancnctcgggtgtttgtagggcttgcttttctgctgatnctgtaaatacgcatgttgattttgtaagggagtacaaacaggattttgaacgtgatcttgatccagaaagcactgctactttcccatccactttgtctcaactgactgagcggttgaaacactggaaaaatgttcttcaaagcaatgttgaggataggtttccagcagtattaaagttggaagangaaagcaagg

SEQ ID NO: 38698 - DNA, 180 bp, Glycine max
  unsure (1)..(180): unsure at all n locations; Clone ID: 701120163H1
gcgaaatgcgatacttggtgtgcattgcagaatcccgtgaaccatcgagtctttgaacgcaagttgcgcccgaagccattaggccgagggcacgcctgcctgggtgtcacacatcgtttccccaacgcaaacatgtnacaatgttgctgcgcggggtgtatgctgacctcccgcgagcac

SEQ ID NO: 38699 - DNA, 277 bp, Glycine max
  Clone ID: 701120164H1
cgagaaatgagtttgagtaatgggaaaaccgaggcaccattgccaattagtaatggggatgagaagaagccgttcaagatcttcgtagggtatgaccctcgtgaagatcttgcctacgaggtatgtcggcactccatcttgaaaaggtcttcaatccctgttgagatcataccaattaaacagtcagatctgaggaaaagtggctgtattggcgtgagaggggccagtttgagagcactgagttctccttttcaagattcttgacaccttgccttgc

SEQ ID NO: 38700 - DNA, 284 bp, Glycine max
  unsure (1)..(284): unsure at all n locations; Clone ID: 701120165H1
gacaaaacctcgtttggcttatctctcttccacttttcttctnctnaaagttgtaactgtctttacttcggtgtcggcacaagccccagaatccccatcactctacaacaccttccttcaatgcctcaccaaatacacaaataacccctccaacatagtcttcgccaacaccaaccccaagttccccactatcctccaaanctacatccgaaacgcgcgtttcaacacctcctcgacgcgaaaaccattactcatcgtcactccccagcaagantcacacgtcc

SEQ ID NO: 38701 - DNA, 279 bp, Glycine max
  Clone ID: 701120166H1
ccgtcacaatgcagctagctgtggcggccaacgctgtcgtttcaccgtcgccgttccgacctcatccccttctccggtcatccttctccggcgtctccgttaagctcactccccaatccataacgttttcacgcttgaagcccctcaccgtcttcgccgccaccaagaaggccgtcgctgtcctcaaggggacctccgccgtcgaaggcgtcgccactctcatccaagaagacgatggcccgacgacagtttctgttagcatcactggccttatccggg

SEQ ID NO: 38702 - DNA, 274 bp, Glycine max
  unsure (1)..(274): unsure at all n locations; Clone ID: 701120167H1
cctccctttctggctttctctctctaaaactatcatgtcctccaccgcggctcccgtccttcccatatccaacccccaaaccaccgccgcangcgggcggccatcgaggctccggcgancaacccggccttccgcgccttcatcaacaacctctccgcgtccctccgacacggcctcgaccagcgcngcccgtggtcggagctcggggacnctccggttctcgaagnccgagtccttctccgaagccaccctccgcgtccgcaagaactttctt

SEQ ID NO: 38703 - DNA, 241 bp, Glycine max
  unsure (1)..(241): unsure at all n locations; Clone ID: 701120168H1
gtggttttggctatggatgaagatcaaatagaaggttgtgtgagtgggtacctcaagcagaaagggtttacgcaaaacgatgaccaacttcaactcaccaacaccgattcatctcttcaacccgacactctcagccgcgcccaattggagagaggttntgctagataccatgatgggtatggnagacttaagatcatggggcatacaggtcacttggactcatacnagcatgagctgctgc

SEQ ID NO: 38704 - DNA, 272 bp, Glycine max
  unsure (1)..(272): unsure at all n locations; Clone ID: 701120169H1
attgtgagcagataaacatcaatagtgtatactctatagtctatagtttgtttccatggcaanaacaactnnacatagcnattgtttcnagtcctggttacacccacctggtcccaataattgagttcagcaagcgacttatcaaacatcaccaaaattttcatgtcacttgcatagttccctcacttgggccaccnccagaatcctccaaagcctaccttaaaactcttcctcaaacatagaacnncaaanattctccntttagaaaganc

SEQ ID NO: 38705 - DNA, 272 bp, Glycine max
  unsure (1)..(272): unsure at all n locations; Clone ID: 701120170H1
tttctttctcttctctncctgnaaattcaaaaccnaatctcaatctttnccttncgttccatttccttcatttganattgaccanacccacgcagatcccaaattnccaantcgtaaattatnngccttttttcccattccgaggaaagaagccaatccacgaccgatcnaatgcggctttgaatcgcgtgccgtnctcnttncctgggaacatctttttgctttnnganttcgatatntggagcagntgggtcgatgagtancatgtgaca

SEQ ID NO: 38706 - DNA, 179 bp, Glycine max
  unsure (1)..(179): unsure at all n locations; Clone ID: 701120171H1
atttctaactaattgtgcttatccttnattgagagaaaaaatggccaaatcacncaaattctttgagttgaacacaggggccaagattccttctcttgggttagggacttggcaagctgaacctggtgttgtagctgaagctctcaccacagccattcaggttggatacaggcatattg

SEQ ID NO: 38707 - DNA, 276 bp, Glycine max
  unsure (1)..(276): unsure at all n locations; Clone ID: 701120172H1
gngcccgtactgttcggcggcgcaggggcgttgcgccaccacgagtagcgggcgttcgatcacggaatgcacgtncttgcgggcgcgtggtggaagagcgacagtcgcatccccaccacgtgntccacgtgcgcgcccaggncaaccctctgtgtctggtcacatcggatctcgctctccccgcgctcaatcaaaacaacgaggaggaggaccctttcgagcccacgggcttcatcaccgccttctccacctgggccctcgagcccagcccactct

SEQ ID NO: 38708 - DNA, 185 bp, Glycine max
  unsure (1)..(185): unsure at all n locations; Clone ID: 701120173H1
gggatacttagtccagaacagctccaattcttcaactctcaaggttatcttgtgattgaatctttcgcaagtngcgatgagattgagtccatgatgcagaggatggagcagttggtggatgagtttnanccttcttccaccgcctctattttntncaccaaganccagcaaaagttgactgatgg

SEQ ID NO: 38709 - DNA, 206 bp, Glycine max
  unsure (1)..(206): unsure at all n locations; Clone ID: 701120174H1
aaaagcacaacacaagacactgaactcgcactcactgggttttcaaccatggatgcgatacggaagcagctcgatgtgttgatgggagccaaccgtaacggcgacgtccgtgaagtcaatcgcaagtactacgatcgcgacgtctgtcgtctctacctcgtcggtctctgccctcacgaactcttccagttaacgaaaatggatnt

SEQ ID NO: 38710 - DNA, 269 bp, Glycine max
  Clone ID: 701120175H1
atctgttcctccctatgatgttccattttctggaggatcagcatatcactacaactatggtagtcgcctttctgctgggagtccttatagaccgttgcatttatctggaccaacaccctacactggtggaccagtgatgggaaatggtgggatatatggaatgccccaactgttggatcgatatggcctgggcgtgcctattggacctgggacaatgggtgctaggccaggatttttccatgatgacaagtcacagaaaaaagatgcaa

SEQ ID NO: 38711 - DNA, 252 bp, Glycine max
  unsure (1)..(252): unsure at all n locations; Clone ID: 701120176H1
gaaacttccccctccagttctccagtttgttgaggtgtcatanggttataancctgataatctcatctacaagaacattgactttggggttgatttagactctagggttgcactggttggacccaatggtgctgggaagagtacactactgaagctaatgacaggtgacttgatgcctagtgacggcatggtaaggcgtcataatcatcttcgaattgcacaatatcaccagcatttggcagaaaagctaga

SEQ ID NO: 38712 - DNA, 269 bp, Glycine max
  unsure (1)..(269): unsure at all n locations; Clone ID: 701120177H1
gtggattccaggaaggtattcctatagatcctaagagaaaagccaacatgaagaagagggatctatctattgctaagatttctgatgctgaactagaagttgaggttgagaaactgaagcaacaggttttggaagctaaggaatcttctcctgttcctccaaantagatctggatgagatgctaaagcaactgacaagggaggttgatctagaatactctgaggcagttaaagccacgggcttgacagacagtttgttgaaactaaggg

SEQ ID NO: 38713 - DNA, 182 bp, Glycine max
  unsure (1)..(182): unsure at all n locations; Clone ID: 701120178H1
ctttaacngcatgcttctgttgantgccaaaagaaacttgtantggactggacttccagctagcaatcttgaaactgcaactgcaaaagggaatcatgatgcttataaggctgcttggaagttattgaagggtgctgatggtgttcttgttcctggagggtttggggatagaggagtgcaag

SEQ ID NO: 38714 - DNA, 248 bp, Glycine max
  unsure (1)..(248): unsure at all n locations; Clone ID: 701120180H1
gcgcttctctcactcactcactcttcttctancaccttcacntggttttctttctncgaactcgaacgcagatgcgtgagattcttcacatccagggaggnccaatgcgggaaccagatcggagccaagttctgggaggtggtgtgcgcggagacgggatcgattcaacggggaggtaccaaggggacaacgagttgcaactcgagcgagtcaacgtctactacaatgaagcgagttgcggaaggttt

SEQ ID NO: 38715 - DNA, 276 bp, Glycine max
  Clone ID: 701120181H1
aacacaactccactcttagctgccattggtttttcttcttccatttctcttcctttctaagcttttttcgattacccatttggagattctgtcctaatggctcttgctccttccaaagtttcctccttttccgggttttctcccaaacccagtgttggggatgctctgaaaaacccaacttgctctgtttctctgagctttgcgaatgtgaaacttggaagcagaaaccttagggtttgtgcctcaactgtgcctctctcagggtgatttcgaacc

SEQ ID NO: 38716 - DNA, 278 bp, Glycine max
  Clone ID: 701120182H1
gcaagcgaccatggcggatggaagcaacgggggagttctaatgctggaagccccaccgtcttacggtaggcctaccggttctaacgcggaaataatcgacgcattgccttacattgatgacgactacgcagaccccagagtcaaacttgaggttgaccgtctcgtggaggatgagatgcgtcgcagcaccaagaagcccaccgatttcctcaaagatttccctcctcttcccaactccaatttccagcagaattacccaatgattgcgagagagtacg

SEQ ID NO: 38717 - DNA, 276 bp, Glycine max
  Clone ID: 701120183H1
ggttccttcacatgtcttgatgggcatccagcatagtactacttttgcttcattatctccacttggtgaagcatgctcaagaaaagacttgactgccatacaagaagttctggaaagtattggctataaagatgacgaaggagtggcaaatgagttatcatttcacatgtggactgatcaaatgcaggacacattaaattgcaagaaaaagggagatgttgctttccggcagaaagattttagactggcaattgagtgctactcgcagttcataga

SEQ ID NO: 38718 - DNA, 274 bp, Glycine max
  Clone ID: 701120184H1
gtgtcatttacgcttctcttctctgcagcaactatgcctaaccctaaggtcttcttcgacatgaccatcggcggtcaatctgctggccgcatcgtgatggagctctacgccgacgtcactccccgcaccgccgagaacttccgcgcgctttgcaccggcgagaagggcgtagggcggaggggcaagcccctccactacaagggctcgtccttccaccgcgtgatcccgagtttcatgtgtcagggtggcgacttcaccgccggaaacggaacgg

SEQ ID NO: 38719 - DNA, 274 bp, Glycine max
  unsure (1)..(274): unsure at all n locations; Clone ID: 701120185H1
ctgcacgctctgcttccagcgagtgttctttcttcgtttcaacaccttaatttgcanacgctgcttcttctggcttgagaaatggcacaagaaacctttctattcacatctgaatctgtaaacgagggtcaccccgacaagctgtgcgaccagatctctgatgcagtgctcgatgcgtgccttgaacaggaccctgacagcaaggttgcctgtgagacatgcaccaagaccaacatggtcatggtcttggagagatcacaaccagggccaacgt

SEQ ID NO: 38720 - DNA, 151 bp, Glycine max
  unsure (1)..(151): unsure at all n locations; Clone ID: 701120186H1
gtgccccatgtgttggcagcctatcagtctcaaagatccaacaagccaagaattacttgaggcagtggaaagagagcgaaactttaggttcaatccatctagaaatgccanaatatttnatccatccnaccactgggggattttgnnttac

SEQ ID NO: 38721 - DNA, 270 bp, Glycine max
  Clone ID: 701120187H1
attagggctactaaaagtcatggttgtgcaagggaaaaggttggtgatccgggatttcaagaccagtgatccttatgtagtactcaaactagggaatcagactgcaaagaccaaggtaattaatagctgcttgaatcctgtttggaatgaagagctgaatttcactctgacagaaccattgggagttctgaatttggaagtgtttgacaaagatcttttgaaggctgatgacaagatgggaatgctttcttgaaccttcaaccaatagtc

SEQ ID NO: 38722 - DNA, 272 bp, Glycine max
  unsure (1)..(272): unsure at all n locations; Clone ID: 701120188H1
gttatactctctctctctttgtcgcttggatcactgatctcatctcnattttcagatatgtcgacatctgataagccagaagtggtggaaaggggtagcaaggatgaaaaacacaaggaagatgatcaagaggaggggaagggtggattcattgagaaggtgaaggatttcattcatgacattggtgagaagattgaggaagctattgggtttgggaagccaactgctgacgttactgcgatcacattccatcgataatctcacaaggcaga

SEQ ID NO: 38723 - DNA, 173 bp, Glycine max
  Clone ID: 701120189H1
gtttttgaggaggcgaatggagtggaggatgaggccgaacctcaacaaccttcatcttgtgcagcagcagcacttgatgagttgcataaagagaaaaatgagaatggagaagaaaccctcgtgcctcccaatcccaatcttgacgatggcttctatgaaatcgaaacaatacg

SEQ ID NO: 38724 - DNA, 268 bp, Glycine max
  Clone ID: 701120191H1
gaagatggcaggaaagaaaatcccagatgtgttgctgaattcaggacacaaaatgccagttataggcatgggaacttcagtggagaatcgtccatcaaatgagacccttgcttctatctatgttgaagccattgaggtgggttaccgtcattttgacactgctgcagtgtatggaacagaggaagccataggcctagccgtggccaaagccatagacaaaggccttataaagagtagagatgaattttcatcattcaaagccttggaa

SEQ ID NO: 38725 - DNA, 273 bp, Glycine max
  unsure (1)..(273): unsure at all n locations; Clone ID: 701120192H1
ctagccgcagcacgaggagcagcctcaggaggagaaggatgtctcacaggaagttcgagcacccaaggcacggttacactgggatttcttcccaggaagcgtgctgctcgtcacaggggaaaagtgaaggcattccccaaggatgacccatccaaggcacccaagctcactgcattcttgggttacaaggccggtatgacttcacattgttagagagtcgagnaagccaggatccaaagttcacaagnaaggaaattgtgagcctgttacaat

SEQ ID NO: 38726 - DNA, 272 bp, Glycine max
  unsure (1)..(272): unsure at all n locations; Clone ID: 701120194H1
ctttatcacacccaattcagatcccatctatattgcttatcatnctgaggaatggggagttccagttcatgatgacaagatgctgtttgaacttttagttttgagcggtgctcaagttggatctgattggacctcaaccttgaagaaacgcctagatttcagggctgcattttcagaatttgatgcagaaaccgtggctaacttgactgataagcaaatgatgtctattagttctgaatatggcatgacataagcagagtccgaggagttgt

SEQ ID NO: 38727 - DNA, 276 bp, Glycine max
  unsure (1)..(276): unsure at all n locations; Clone ID: 701120195H1
ccctcctccacttcatccaaatctttctcattttctctcccaaatcacactctcaattacaataacacacactcaacttganaattttccccaaaaatcccaagagctcgcgccatggtttccccggaaaacagcaattggctgttcgattacccgttgatcgacgacgacgttattcccgtcggcgactcctccttcgccgtctccgcttccaccttctcctggcccccacctcccgccaatgtcagtgtcgaaattgatgcttcgcttggggat

SEQ ID NO: 38728 - DNA, 186 bp, Glycine max
  unsure (1)..(186): unsure at all n locations; Clone ID: 701120196H1
anggattctggcacttaattnttttgaaaaccactgcagaagaattganagaacactcatttgagaggaactataatagcctcattatctttatcctttagtactacactaccatgaggtgtttccagtacttgtnattggntctttgatatttttccaatccaattgaatngggaagccnngagg

SEQ ID NO: 38729 - DNA, 287 bp, Glycine max
  unsure (1)..(287): unsure at all n locations; Clone ID: 701120201H1
ttcttcaccgattcagtatcttgtgtctcgatggggtacagatnttaatacactaggttcctatagctatgatgcagttgggaaaccacatgacctgtatgagaggctacgggtccctgtagataatttattctttgcaggggaagcaacaagtatgttgtatacggggtctgtgcatggtgcatactctactggaatgatggctgctgaggactgcaggatgcgtgtcctggagcgttatggggagctagatttggtcccgccggtaatgggagaggatgctcatg

SEQ ID NO: 38730 - DNA, 286 bp, Glycine max
  unsure (1)..(286): unsure at all n locations; Clone ID: 701120202H1
gcatcttcataatcacgtgtcaaaattcttggccaacagctttcttgttaattcctcttncttggttaaacatttggtaccggggttattttcttgcttcatctcgcgagttaactcgtctggattcaattatcaaaagcaccagtgattcaccatttctctganagcatttccggggtcatgacaattcgcgcattcagaaagcagaaggnattttgcggagaaaacttaaacgggtgaatgctaatttgagaatggattccacaacttcagttccaatgcgtng

SEQ ID NO: 38731 - DNA, 283 bp, Glycine max
  Clone ID: 701120203H1
ggagggtgcagatgttgttataattcctgctggtgtgcccagaaagcctggaatgactcgtgatgatctttttaacatcaatgctggcattgttaagacactgtgtactgctattgctaagtactgccctcatgcccttgttaacatgataagcaatcctgtgaactccactgttcctattgctgctgaagttttcaagaaggcaggaacgtatgatgagaagagattgtttggtgttaccacccttgatgttgttagggcaaaaatttctatgctgggaaag

SEQ ID NO: 38732 - DNA, 283 bp, Glycine max
  unsure (1)..(283): unsure at all n locations; Clone ID: 701120204H1
gnatcacacaccgtttccaccacgatccaattatggaggttgagattgatggctctgttactgtcgtcacagtaggaaatactgctatgggtgaggtcagtagcatagctgatgacaacagagaaggtggaagttctgttgaaccaaatgacaaacaagatcaacatgataacatgactcaagattcctctggagggatcactatcccaactgcaattcccacagtatcagttgtttcagttgaagagccctatgtgggtcaggagtttgggtcagaagcagc

SEQ ID NO: 38733 - DNA, 298 bp, Glycine max
  unsure (1)..(298): unsure at all n locations; Clone ID: 701120205H1
tanagcactgncaatgtctttccatattgctgctagttggaatgttatcgtcccattacagttngcacaattcccataggagttttgctaatnggantcatcngtaaataatcctacccatccaaggcaagaagttgtggacttgtataaaacaaatgggataggtagaatgcgtatntattntcccngntgaagaagcactcccaagcccttagaggttcaggcattgagttgattatggacgtggctanggaaccccttccatccantgacagacccnatgctgctacagattggg

SEQ ID NO: 38734 - DNA, 274 bp, Glycine max
  Clone ID: 701120206H1
caaatggagcaggagatgcttttgttggaggatttctttcacaattggttaagcataagcccattgaagaatgcattagagctgggtgttatgcagccaatgttatcatccaaaggcctggctgcacatacccaccgacgcctgattttcattgagtgattcctctttttctgttactgctatgaatttttttcttttatcatgagaaggattttaatagccacactctaatggtgtggggttttttaaccccccggctagggaaaacagcgtg

SEQ ID NO: 38735 - DNA, 277 bp, Glycine max
  unsure (1)..(277): unsure at all n locations; Clone ID: 701120208H1
gnttcttcctccatagtccatttccttcgtctgagatataccgaacccttcctgttagggatgaacttcttagagctcttctgaattctgactttattgggtttcatacttttgatnatgccaggcatttcctctcctgttgcagcagaatgcttgggatttcttaccaatccaagcgtggctacattngccttgagtactatggaagaacagtaagcataagattcttcctgttggtatcatataggtcagctccaatctgtcagagtcatcccga

SEQ ID NO: 38736 - DNA, 283 bp, Glycine max
  unsure (1)..(283): unsure at all n locations; Clone ID: 701120209H1
ttgttgttgtcttgtctccagagctgaaatggcnagnngggttgtnattnttggagcaggaatacantggccttggtgcctgcaaataccttctagagtttggntttaacccaattgtctttgaanttgatgatggtgttggaggactatggagacataccatggactccaccaagntnccaaaacaatanacanatgttccagtttatggattttcctggccttcttctgtgnaaagaagataatccaantgcacaagcaagtgctagattntgntaancta

SEQ ID NO: 38737 - DNA, 274 bp, Glycine max
  unsure (1)..(274): unsure at all n locations; Clone ID: 701120210H1
cgancngccgcccttttttttttaagccgaaaacnattttntnggnctttantggnagaacgaatgncgngtttanagttggnaaaaacaagataaaaatggnaaatagaaaatagaaaaaagtatttnggtccaccttccgtnttcaatcgccgtngtcttcctccancgtgttagggtttccactttgcagagtttcaatttactcncattatcacatcgnaatcctccgtgtttcngntttganaacccgcaaaanctangaaatacccga

SEQ ID NO: 38738 - DNA, 282 bp, Glycine max
  unsure (1)..(282): unsure at all n locations; Clone ID: 701120211H1
tggnccctccggctcctccgatggaggggtaggagtgaattggctctgcatgagccctaagcgagatcacaaccccgaaaactatgacgaccttcaatacgagttcaatcctaatctcttcgcctctctcgagcactatttgcctcctcatatgctcaacctctcacgcgatgttaagcttcactacatcaggaacattcttcttcgctattgcctgagatgaccgcaatgggtgccctttttttaattaattcaantttcattttttttatccccctgtna

SEQ ID NO: 38739 - DNA, 291 bp, Glycine max
  Clone ID: 701120212H1
cgagcttctcggatttgacatccagcgatggcaagttcaatacgggtgacatactgttgttgacactttgtgttgtacctcgtagctttagttcatgcacagcaacaaataggcttcataagcattgattgcgggagtagtccaccaaataatgagtacacagatgacataactaaaataaggtacaccactgatggagcctatatacaaactggggttaataagaatatctcctctgagtatgcatacccaaagaatccgaatctgccataccatctcagatctcagaag

SEQ ID NO: 38740 - DNA, 289 bp, Glycine max
  unsure (1)..(289): unsure at all n locations; Clone ID: 701120214H1
ggtgattggagctgtncagggcntgatgactggacttgtatgcatcaccccangggcaangcttgtgcaatcatgggctnctatagtgatgggnatattatctgggagcattccatgggtgactctgatgnttttgcataaaaagtcaactttgctacagaaggtagatgacacccntggtgtntttcacacacatgctgtggctggccttttgggtggtctccncacaggtctattagcagaaccagccctntgtagattctattgccagtaacaattcaaggggtgc

SEQ ID NO: 38741 - DNA, 291 bp, Glycine max
  unsure (1)..(291): unsure at all n locations; Clone ID: 701120215H1
gtctcccccttagcattttcaatcctttttttgtccttcaccatagaactcttcattggcattgcttcagcagcacaagaaccagtgcttgatacctcaggccagangctgagaacaggtgtcaagtactacattctaccagtcttcagaggcagaggtggaggcctaacagtttcaagcagtggcaacaacacatgccccctctttgtggtgcaagagaagcttgaagtctcaaagggcaccccagttaccttcacaccctgnatgccgaaagtggtgtcntctaacctc

SEQ ID NO: 38742 - DNA, 295 bp, Glycine max
  unsure (1)..(295): unsure at all n locations; Clone ID: 701120216H1
cgagtttcacagcagcaatggtgtacgtcaagggctcaganatcaaaagcctacttcaagagatctcaagtcaagttcaagagaagaagagagggaaaaaccgattaccgtgccaggattcggtnnattaatcaggacaagaacaaatataacactccgaaataccgatttgttgttcgctttagcaacaaggacattgttgcacaaataatatctgctagcattgctggcgatattgttcttgctgcagcatatgcacatgagctgccacgatatggtcttgaagtagggntac

SEQ ID NO: 38743 - DNA, 261 bp, Glycine max
  unsure (1)..(261): unsure at all n locations; Clone ID: 701120218H1
gcggaagtgcgaagaaattgaantngagcatgttgctcttcttctgcacgcaggagganncaaaatgagaaaaagaaaggtacaagtgagtgataatagtcaacctgtaagagagatgttgaggtggacggatgagatggacaaccgtgtactaaatgcaatggttgaagaagctcgagcaggtaataggatagatggaagttggacaccacaagctttacacaaaantgtccaaacctgagagttcngattaacggtgtt

SEQ ID NO: 38744 - DNA, 280 bp, Glycine max
  unsure (1)..(280): unsure at all n locations; Clone ID: 701120219H1
ggtagatccatatgggnntaantttttagatgctaaacttagtgatgatgatagcaacacaatttggaaacttgatttggaaaggactggattatcttctgcagaatttggattgcaattccatgtgatagatagaggagatataataattgcaaagtttaccaatgatgggatgccgagttcaagttcgtatgaagagattagaggcccaatgtcttctggaaaagggggagtttctggtgttcaggctgaaatgcagagcagtgttatcctttgagct

SEQ ID NO: 38745 - DNA, 278 bp, Glycine max
  Clone ID: 701120220H1
aattaagatggaggggaaggagcaggatgtgtcgctgggagcgaacaagttcccggagagacagccgattgggacggcggcgcagagccaagacgacggcaaggactaccaggagccggcgccggcgccactggttgacccgacggagtttacgtcatggtccttttacagagcagggatagcagagtttgtggccacttttctgtttctatacatcatgtcttaaccgtcatgggagtcgccggggctaagtctaagtgcattaccgttgggattca

SEQ ID NO: 38746 - DNA, 281 bp, Glycine max
  unsure (1)..(281): unsure at all n locations; Clone ID: 701120221H1
gcaacgccctcgacctattctcaaactttaaataggtaggacggtgcggctgctctgttgagccgcnccatggaatcgagagctccaagtgggccatttttggtaagcagaactggcgatgcgggatgaaccggaagctgggttacggtgcccaactgcgcgctaacctagaccccacaaagggtgttggtcgattaagacagcaggacggtggtcatggaagtcgaaatccgctaaggagtgtgtaacaactccacctgccgatcaattagccccgaaaa

SEQ ID NO: 38747 - DNA, 274 bp, Glycine max
  unsure (1)..(274): unsure at all n locations; Clone ID: 701120222H1
ctgcctgcaaattttcttccccncaatcgtntattnccncaggtggtgttcctgttcccccccaagcacccctgagattcgttcgcaaaaagcttaataagaacaaaaaataaaaataatattcttcgttattatttcatttcaatttcgttttcgttttcgtttactgttttgatttgatcttccaatggcgtccgatggcttaccgacaagaacacgtgttcagaaagctcaggcgaagtctgaaaataagctgtgtttcgatgcaagcgag

SEQ ID NO: 38748 - DNA, 274 bp, Glycine max
  unsure (1)..(274): unsure at all n locations; Clone ID: 701120223H1
ggagggtacggcaacatgttgagaaaatatggcttatccgttgataacgtcatcgacgcgcaaattgttgatgtgaaaggaaatcttctaaacagaaaaacaatgggggaagatctgttctgggctattagaggaggtggtggagcgagttttggtgtcattttgtcgtttactattaaactcnttccggtgccggaaacggttaccgttttccgcgttgagaagactcttgaaacgaatgtcatgccatgaccttgtcgtgcgtggcacangt

SEQ ID NO: 38749 - DNA, 280 bp, Glycine max
  unsure (1)..(280): unsure at all n locations; Clone ID: 701120224H1
ggattatttaggccgtgaatgtccagagcctttaaaggaaattcttgttctgtgtgagaatcgttgtgtactttttgataacaagactaaggatgaagggaagcgctttggacaagttcaacaacttctctcttttgtaaacatggttttatctcgtaatggtggacgaccttatacagatgagttatttactcaactgaagaagggagcaatggagctgcataaccaacaaagagaggttgattctttaaaaggatattccaaaggagaganttggcgt

SEQ ID NO: 38750 - DNA, 275 bp, Glycine max
  unsure (1)..(275): unsure at all n locations; Clone ID: 701120225H1
aaagattangccatgcatgtgtaagtatgaactaattcagactgtgaaactgcgaatggctcattaaatcagttatagtttgtttgatggtatctactactcggataaccgtagtaattctagagctaatacgtgcaacaaaccccgacttctggaagggatgcatttattagataaaaggtcaacacaggctctgcctgttgctttgatgattcatgataatcgtcggatcgcaggcctttgtgccggcgagcatcttcnanttctgcctatca

SEQ ID NO: 38751 - DNA, 287 bp, Glycine max
  unsure (1)..(287): unsure at all n locations; Clone ID: 701120226H1
ttctagacaatcaaaatctcgaaacttaactttgaatgaggattctgttaatcattcaacaaaagcttctgtgtccanaatttcatctccggctctaagttccttggcttcaaagtctatatcctacaaagaagttgctctagcaccaccaggaactgttttaaagccattgttggaaaaggctgagatggaccaggttaatgctgaagatgagatatgtggccatatagctgtaacatcaataaatgaaggtacctgcccaagttccataataatacagtttctcc

SEQ ID NO: 38752 - DNA, 284 bp, Glycine max
  unsure (1)..(284): unsure at all n locations; Clone ID: 701120228H1
tccactttcaaactctgcccgctcaatttgctttatctttccgagattatatacacttttattgaaactgttgggattcaagtctgaaacaaaatcttaagaagtttgcggcagtgatgccatcatcttttagtatggattcgcaacagctcttcagtttcgaattatcttacatgtcatctttacccaccgttccatcgcttcttggatccttgaaatatgacacaggaaatcacctaattcacccttctccattattttgatctgacatcttcggcntgagt

SEQ ID NO: 38753 - DNA, 280 bp, Glycine max
  unsure (1)..(280): unsure at all n locations; Clone ID: 701120230H1
ggaagcccttctcttcatcacatagatacttnncnctatcgcaccaagtaanccttattattccaatccaccctcgccantccttcgatccgaatcatcttttccgcccacacacaagttnggtttttttgatataattgataatgggtgatagcagtgttccatctgggtctccaaatgcaaaattcagatcttgttgacagagattggnggtttccaacaagcgtcgtcgttggaaaccatgtgcaaagtttccagattcatgtctcttggtaagaga

SEQ ID NO: 38754 - DNA, 288 bp, Glycine max
  unsure (1)..(288): unsure at all n locations; Clone ID: 701120231H1
cgacaaagcagagttggcacctcttgaggaccttgttgaatctattgttcagttatagtgctgttggtgttttctttccctgatttttaggagagattaaacattggaaatgttggctatacatttttgataaagatttttcatttagcaagtattttacaaggggtccaaaagggtgctttgattcgcatctgtgatctcaacgtcgcatcttttatctcaacgatgaagcgtccactgtcaccaacagcgancggcgtgaacgttgaggacgggagatgaagaaga

SEQ ID NO: 38755 - DNA, 292 bp, Glycine max
  Clone ID: 701120232H1
gagattctttgtttgctaccttctctcggaaaaatggttacgttcaggtttcaccagtaccaggtggttgggagggctcttcccacggaagcagatcagcaccccaagatctaccgaatgaagctctgggccaccaacgaggttcgcgccaagtccaagttctggtattttctgaggaaactgaaaaaggtgaagaagagcaatggccaagtgcttgccatcaacgagatttttgagaagaacccaaccaaattaagaatatggtatatggttgcggttcagataggatggt

SEQ ID NO: 38756 - DNA, 280 bp, Glycine max
  unsure (1)..(280): unsure at all n locations; Clone ID: 701120235H1
tttcatttccgcttcaagttacctatgaggctctgggttggttcgccttcgtttcctggtccatcagtttctatcctacaagtcatcttgaattttcgcaggaagagtgtggttggactcaacttcgatttcgtggtgctaaatctgaccaagcacagttcctatctcatatacaacgcttctctctacttcnnctctgctattacagatgcagtactttgagaaatacggttatggagagatgatacctgttgctgcantgatgttgcttctcgatcca

SEQ ID NO: 38757 - DNA, 277 bp, Glycine max
  unsure (1)..(277): unsure at all n locations; Clone ID: 701120236H1
gagggagagtgttgacgctccatcaagatgggtatttctagggattccatgcacaanannaaacncaanaagtggcaagaagaaggcatggagaaagaagagaaagtatgtncttgggcgtcaggccgcaaacaccaagttatcaagcaacaaaactataccggaggattcgtgttcgaggtggcatgttaaatggagggcattgaggttggataccggcattactcatggggtagtgaagcattatcgcaagactcgtattctagatgttgtttac

SEQ ID NO: 38758 - DNA, 279 bp, Glycine max
  unsure (1)..(279): unsure at all n locations; Clone ID: 701120237H1
gtaaaaacnacaaatcataatcagtcatagcttcggcgacttctcgatattattttttctgacaganccaccgacagtgccggngnnnacccgnggcggtttgagaatggccgacaagtacaacctnaagaaccccgccgtganncggatcctccaggaggttanggagatgcagtccaacccttccgacgatttcatgagnntccctctagangaaaatatatntgagtggccatttncgattagagggcctcgtgatacgganttgagggtggtatt

SEQ ID NO: 38759 - DNA, 276 bp, Glycine max
  Clone ID: 701120238H1
taagatcttatggattatgtgaaggaaagatgtgagataggtgaagctttggatattggtgaggcttcctttacaactgtgcttaattccatatcaaacactttcttctcaatggatttggcttattacacttctgataagtctcaagagttcaaggacatcgtttggggtatcatggaagaagctgggaggcctaatgttgtggactttttcccaatctttcgcctgcttgatccacaaggtgtgcggagaagaatgaatggttattttggaaag

SEQ ID NO: 38760 - DNA, 273 bp, Glycine max
  unsure (1)..(273): unsure at all n locations; Clone ID: 701120239H1
tnttgctcctatagccggcgctcaacaacatggcggacaaggcagtcaccatccgaaccagaaagttcatgacaaacaggcttctctccagaaagcaattcatcgttgatgtccttcatccagggagggctaatgtttccaaggctgaactgaaggagaaattgggcagaatgtatgacgtgaaagacactaacactgtatttgtctcaagtttcgaactcattttggtggtggcaagtccatgggtttggtttgatctatgatccgttgaga

SEQ ID NO: 38761 - DNA, 282 bp, Glycine max
  Clone ID: 701120240H1
cagatcctagtctgctagcagcacaaggtcctgcaacagcttggcaaaatcctacaggctgcacctatgtaccctggcagtgcccctgcttatcatactcaagttcctggcggacaagtgccagcatgggatccaaacctgcaggcagttagaccgagttatgtatcagcacctggtactttttcatgttcaatctggtgcagctcctaccaatgccagcctatgcgccaccgcagctatgcctgctgcttcctcacctacatgcacaaagcaagcccctgg

SEQ ID NO: 38762 - DNA, 281 bp, Glycine max
  unsure (1)..(281): unsure at all n locations; Clone ID: 701120241H1
ttagaaattaaagatatatcattccacaacacaaattaaagttagtgagacgtacccttattatggccaaagaaggtcttggacttgaaatcactgagctaaggttgggtctacctgatgcggagcatcaagtaagtgtagtcaataagaaaaatgagaagaagagggcattctcggaaattgatgatggtgttggagatgaaaatagctcctccgncggangcgaccggaaaatggagacgaataagagtcngtggtggggtggcctccggtgtnctctt

SEQ ID NO: 38763 - DNA, 281 bp, Glycine max
  Clone ID: 701120242H1
tttgcaagcaatggactccttcaattccttcttcgattcaacaaaccgatggaattacgatactctacaaaaacttccgtcaaatttctccggtcgttcagaatcacctcaagcaggtttattttactctgtgtttcgccgtggttgctgcggctgttggggcttaccttcatgtcctcttgaacattgggggttttcttactacagtggcatgcgtgggaagcagtgtttggttatctcgacacctccttttgaagagagggaaagagtgatttgttgat

SEQ ID NO: 38764 - DNA, 288 bp, Glycine max
  unsure (1)..(288): unsure at all n locations; Clone ID: 701120244H1
gctgcaatggcttcaagtcaggaggaggtgacccttttgggagctactggaagcccatttgtgtgcagggttcatattgccctacaagttgaagggagttcaatacaaatatgtcgaagaaaatttgaggaacaagagtgaactgcttctacaaatccaacccagttcacaagaaggttccagtgtttattcacaatgagaagcccatagcagagtctcttgtgattgttgaatacntgatgagactggaagaacaaccccatcttgccttctgatccttaccaaaga

SEQ ID NO: 38765 - DNA, 287 bp, Glycine max
  unsure (1)..(287): unsure at all n locations; Clone ID: 701120245H1
catacctcaacgaagaggttaaagagacggcaacactttgctgtccgccttgaccgagcagagcttcgtcttggccctcgattttgccctaaagtactctcagtcacaacagacacnnnnnnnnnnnnnnnnnnnnnnaatggcaccgaagcagaccaaggctgagaagaagatcgcttacgatgcgaantgtgcgacctaatggaggagtacggccagatcctcgttgtgaatccgataacgtgggatcgaaccagctccagaagcgnnngcnagggtctccgtgg

SEQ ID NO: 38766 - DNA, 293 bp, Glycine max
  unsure (1)..(293): unsure at all n locations; Clone ID: 701120246H1
ggcacggancagtttcttctgtattgcaaactgatttancagtnngaacatgtnttgctgtcagataaaacacaatatagaganngaacaaaataatcagcttagaaatcaagttgctcaacttttacggttagagcaggatcaganattgcagatacaagagcaagattcaaccatccaaagtttgcaggctaaaattcagaactcttgaaactccaantcaatgaagntattaaatctagtgaatctaggtcaactttgtctccganncagagtttgctgatcaatccatt

SEQ ID NO: 38767 - DNA, 289 bp, Glycine max
  unsure (1)..(289): unsure at all n locations; Clone ID: 701120247H1
ctgagacataccatagagactgtgattcaattaatatattatatggtgtttctcttcaattcccatggagcctaagacncaacctacaagcgaatagtcctccaccaaaaccttgggancaagcgggttcctcttctggtccagcacctttcaaacctccgtcanctggcaacacaagtgatgtagttgaggcttcagggactgcaaaacctggggaaattgtttctagttctgataggagtgcagctgtcaacaggaatatcttgggaggctgttccctccangccag

SEQ ID NO: 38768 - DNA, 288 bp, Glycine max
  unsure (1)..(288): unsure at all n locations; Clone ID: 701120248H1
gaaccgtggaaacttcaaccgggcaacaagtacttcttcaccagaaaccactccaccatcgtcgccttcgccatcggcaaaaagtatgtttctggaaatggattccacataatcggggcnngnacggatagtccttgtctcaaactcaagcctgtcaccaaggttgttaaggctgggattttggaggttggtgtccaaacctatggaggaggctgtggcccacatggtttgatcgagattgaccgtggcggggaggtcttgtgcaggnaganaatgccgggtctgttt

SEQ ID NO: 38769 - DNA, 272 bp, Glycine max
  unsure (1)..(272): unsure at all n locations; Clone ID: 701120249H1
gtttctttcacgtnattngcttnacgactccaatgccttcanatttngatggtngagtnaagnttacacatangaggtttngtgtccgggctctagagatatatcggttgatncaaatgatacctctttagctctcntntgcggccaggntctcccancacactcatanaaatnatcctcntttngnnagggctaaatnctccganacatatggtatntaggtgatgatcaattgttgtgacttnagaaacggacctgatttgagtggctga

SEQ ID NO: 38770 - DNA, 280 bp, Glycine max
  unsure (1)..(280): unsure at all n locations; Clone ID: 701120250H1
ttcaaatccgtcttttgactcataagtnaccaaccgcttctttcaatcaactgaaagtctttatgttttcttaaggttactgtactgtctctgttttatatgtggcatgggcatgagatggatctgtattccatcatgtccatggaagaatagttaactactttccttttttggtgatttctaaggttctaatttataatatgggagtggaggagaacacccctaaactccattccacctacacaatgccagaagaacaaagcncaacaaaatcaacagc

SEQ ID NO: 38771 - DNA, 278 bp, Glycine max
  unsure (1)..(278): unsure at all n locations; Clone ID: 701120251H1
ggatatcccaacatcncaagnttacgtgaatttttcattgccaaataccaagaaaattctccaagttttaaacttgcccagaggaactttgttgaaagtatggccggatattccctggtttgctacctcctgcaggtgaaggataggcataatgggaacctcttaatggatgaagaaggccatattatacatattgattttggctcatgcttctaattcacccggtggtgttaattttganagtgcacctttcaaattaacccgagaattcttgaggt

SEQ ID NO: 38772 - DNA, 279 bp, Glycine max
  Clone ID: 701120252H1
cttcgttgcttggtgatgtccctttctgttctcttcactcttggtcttgcgagagaaagccatgccagagacgaagatttttggcatgctgtttggccaaacactcccattccaagttcattgcgagatcttctaaagcctggccctgcaagtgttgaaatcgatgatcaccctatgcaaattgaagaaacacagtacccgtaaaccttcttctataaagaagaccttcatccaggcaaaacaatgaaagtacaattcagcaagcctccctttcaacaa

SEQ ID NO: 38773 - DNA, 274 bp, Glycine max
  unsure (1)..(274): unsure at all n locations; Clone ID: 701120253H1
tttctattctaagattttgagaatgtctagctgtgggtgtggaagcngctgcaactgtggcagcaactgcggttgcaacaagtactcttttgacttgagttacgttgagaagacaaccacagagactctagttttgggtgntgggcctgtgaaggcccaattggagggtgctgaaatggnngttgcatctgagaacggtggctgcaactgtggatcaanctgcacctgtgacccagcaatgcaatnaggtcaagatgtataaccttgaagcaga

SEQ ID NO: 38774 - DNA, 275 bp, Glycine max
  unsure (1)..(275): unsure at all n locations; Clone ID: 701120254H1
tnccctcataaaananacctaccaatggctcncgcaaaggcaganaagaagcccgcggagaagaagccggcagagaaggccccagcggagaagaagccgaanggnagaagaagatatcgaaggaaggaggaagcgagnnnnnnnnnnnnnnnnnnnnnnnnagcgttgagacctacaagatctacatcttcaaggtgttgaagcagtgcaccccgacatcgggatctccagcaaggctatggggatcatgaaccgtttcataaacgactcttcga

SEQ ID NO: 38775 - DNA, 273 bp, Glycine max
  unsure (1)..(273): unsure at all n locations; Clone ID: 701120255H1
gggaaaaaganaaataaaatgggttccgataataccaacttggagttcttgaaggagatcggtttgggctcctccaacattggttcttacattaatggccaatggaaagccactggttcttctgtcacttctgttaatccttctaacaatcagagcatagctcaagtgactgaagcgactttgcaagattatgaggagggattgcaancttgcagtgaagcagccaagacatggatgactattccggcaccgaagagaggtgagatgtgagac

SEQ ID NO: 38776 - DNA, 277 bp, Glycine max
  unsure (1)..(277): unsure at all n locations; Clone ID: 701120256H1
gcaagcnaggnggtggncgccataggcaacnctacctttgntgantcggancnacagcntctaccgccgattccaaattctcggcaagtncgagttcttaaaccccgnaggcagcgtcaatgancgtgtngctgttcatattattcaagaggntnnactantgctctatatctatttattcantcatcactnctcngttaatngntgnntggggatggctgaccattcangctagtagacactccancagncccnanctgatgcacntanangagnt

SEQ ID NO: 38777 - DNA, 275 bp, Glycine max
  Clone ID: 701120257H1
gaggctttgaaacggatggagagctggaatctattcagtgacacatatgaggagttccaaaattacacagttgcacgtgattcttttcttgcacatctaggtgcaacactgtggggatcgatgagacatattgtgtcaccttcggttgttgatggtgccttccatattacgagaagatatccttcagttgtttttcatgacccaggagaaagttggggcacattaaacagttcctgtggatatggaggctataatggatgggtttccccatgatg

SEQ ID NO: 38778 - DNA, 292 bp, Glycine max
  unsure (1)..(292): unsure at all n locations; Clone ID: 701120258H1
atgngaaggagcnctttggctttggttcncncnattactgnncctctttgcagggaaccccnccacgttagataccgatancctccgatcatcgttacaaggacggagactccncaacctctttacnccaacaaagtcggnnnacnttcacaacccncntgaaacgtaatcgnncatttnacctgccatncagtgtaacaggtcatgaggaagataagactgatgccctcggtgaggtgttaaatggcgatcgangnnntatgctantanatggaattagnttccagaagga

SEQ ID NO: 38779 - DNA, 240 bp, Glycine max
  Clone ID: 701120259H1
atctgtgacgagcatcatggcctcgagagcagtgctattgttggctatgtgtgtgcttccggccatggttgtggccattcgcccagcaaagaaccctttttgcgtgaagggtcgcgtctactgtgacccttgccgtgctggttttgagacctcagcaaccacctacatgccggtgctgagattatgttgcaatgcaagagcagggttagcaagaggttgtgtacaccaagaaggggtaca

SEQ ID NO: 38780 - DNA, 270 bp, Glycine max
  unsure (1)..(270): unsure at all n locations; Clone ID: 701120260H1
gttaaacatcatcaatacaaatatntttggaaaataccacanacagttttcagctctgtacanacgttggatttggatcagttttcgtgaganaatatttgagcatagaaacatggtagctgaagcagaggttgcgtgtcaacaaaacgtgggtgtgttggatgtgaagcattttccaaataagggaagcgatgttcaccagatcggagacgcagatgctaattacgcctccgtgttttgaccgagttcgtgccatgagtcggtctccgc

SEQ ID NO: 38781 - DNA, 243 bp, Glycine max
  unsure (1)..(243): unsure at all n locations; Clone ID: 701120261H1
tagtgcctccntgccagaagttaaaatggcccaagaaactttcctattcacatctgaatcagtgaacgaggggcaccctgacaagctctgtgaccagatctccgatgctgtgctcgatgcatgcttggagcaggaccctgacagcaaggttgcctgtgaaacctgcaccaagaccaacatggtgatggttttcggagaggtcacaaccaaggccaacgtggatatganaagattgtgcgtgac

SEQ ID NO: 38782 - DNA, 288 bp, Glycine max
  unsure (1)..(288): unsure at all n locations; Clone ID: 701120262H1
gttcccatatttttctctcttgtcgtggacctcaactttgtaggctcgccttagaaaaaaccttcttttctttttggtgggggtgagagttgctancttattcctggtttcatcaacaagacactancatctttgttgtttttagtttcagaattccttatactcacacacnnaaattctggtacaccatgatttttccaagattttgtacgaatctaaaaggtatggcttttatagattctcaagtttatcttgatcacacaggtaaaagattctgaaaatctgtgc

SEQ ID NO: 38783 - DNA, 288 bp, Glycine max
  Clone ID: 701120263H1
cttttacatcagatacataaaggaattcctataataggagctggtgctgggacaggtatatctgccaagtttgaagaagctggaggggttgatctaatagtattgtacaattcagggcgcttccgaatggctggaagaggttcattagctggattattaccttttgctgatgctaatgctgttgttctcgacatggccaatgaagttttgccagtggtaaagaaggttccagttcttgctggtgtatgtgcaatgatcccttccgtcgaatggattacttccttaaac

SEQ ID NO: 38784 - DNA, 292 bp, Glycine max
  unsure (1)..(292): unsure at all n locations; Clone ID: 701120264H1
cctaatctaatcccacaagcctattagtctcattcaatcgaagaancnagcgagactgtgtctctactcccagngccatgcnaccaccctgttcctccnccatcgccctctccagagaggattcttttttcgttttcgtcgctttctccgtcgattccaccagccatgactgtcaacacccacgccgctcctaatatcaatcccaagggcctcctctgcaatgccgccgccggtgcttccgctggggttattgctgctacattgnangnctcttgatgtcatcaaaactagg

SEQ ID NO: 38785 - DNA, 289 bp, Glycine max
  unsure (1)..(289): unsure at all n locations; Clone ID: 701120265H1
ttcggctcnnacttctnntgntgttctgtgtntgtgtttgttttttctctcacctnganaatgtcttgctgcggtggtaactgtggttgcggaagtcctgcaagtgcggcaacggctgcggaggctgcaagatgtacccagacttgagctacactgagtcaaccaccaccgagaccttggtcatgggagtggcacctgttaaggctcaatttgagggtgctgaaatgggtgtgcccgctgagaacgatngctgcnaatgtggancanatgctcctgcnaacctgcattg

SEQ ID NO: 38786 - DNA, 272 bp, Glycine max
  unsure (1)..(272): unsure at all n locations; Clone ID: 701120266H1
gntggcagtgcttttgggcctttcancttttttcncaatggcaganacttcaatcactactctttggccttggaaggttcgtgagttggctgaaaaggtgtctgaaaacggtgtcttcagactactccgaagtgatgttactcggttccttaccacaatacttattggcacaacggtggtcaatattggggcaactgctcttgtcatgaancagcaatgctatgtttggtgaagctggtgtcgtgcagcnacaggagtgatgatgttgncnt

SEQ ID NO: 38787 - DNA, 273 bp, Glycine max
  Clone ID: 701120267H1
tcaacctttcaaaaaaagagtcattccgtattatgatgatttgtgcataatttatggccatgcagttgctgatgggagatacagcctttcgtgttttgatgtagattttgaatacgaagaaaaagatttggatgacaagactatgactagtaaaggagtggatgatcaaactcccccagcagttgttaatcaaggtagaattgactggtctccaatgatggaccaattttttgttgaattatggtggaccaggtgtgtaaagggaacaagttg

SEQ ID NO: 38788 - DNA, 284 bp, Glycine max
  unsure (1)..(284): unsure at all n locations; Clone ID: 701120268H1
gctcgccaaatcgaagaagaagactacaagaanaaccagtccacgtacctcnccgccntcncccgacgtacnaagangcncccgacaacgcccccttacnactcctccgaggatgncctcttcggcgaantngacaaagctttngctactcaagcgcaaagnattcgtctacccaaggccttataccaacccaataccccccangcaggaccaataccccgtcgacgccgtcggagagctccaaccggacgagctcggcgattggaggacttcgaacgttcccc

SEQ ID NO: 38789 - DNA, 254 bp, Glycine max
  unsure (1)..(254): unsure at all n locations; Clone ID: 701120269H1
gtgctgccaaattatagtaactcantttctctatctgaanntgaagaagttctgaagaagcatgtgtggaggtgctatcatctcagacttcattggtgtgaagcgtggccgcaacctcgccgcgcaggaactgtggtccgagcttgaccctttctctgacctccttggcttcgatnnnnnnnnnnnnnnnnnnnnncaaccaccccttccagacaaaaaagatggataacacagtgtttgtatgtggcagtggt

SEQ ID NO: 38790 - DNA, 276 bp, Glycine max
  unsure (1)..(276): unsure at all n locations; Clone ID: 701120270H1
ggcgtcgtggtgcggtgctcggagcttnccagattccggcgatggaagacagcgcactgcgcaaccgtgcttcattggccgccggagtagggtgtttgtcggtggccggcacctccttctggcgctcctcttcgtcaccgaagcgctctttgccattcacatgcttgagcatttcttccgatactcgtattaaggaaagtgttcaaactgaaggtgncacctgcggctttgggaccatattctacaagcaatcaaatccaacaaccttatttttgt

SEQ ID NO: 38791 - DNA, 272 bp, Glycine max
  unsure (1)..(272): unsure at all n locations; Clone ID: 701120271H1
gttttagaagtccacatttttcagatttgattcgcgttcctcttctctcttctcatcatcaatggcgacccccattcctcnnnnnnnnnnnnnnnnnnnnnnnnnnnnnaaggtcgattacttgaaccttccatgtccgattcccttcgaagagctccatcgcgaantatgatgtctttgaagccagatctttttgagggcatgcgttttgatttcaccaagatgctcaatcagaagttctccctcaatcacagcgtgttgatgggactnac

SEQ ID NO: 38792 - DNA, 275 bp, Glycine max
  unsure (1)..(275): unsure at all n locations; Clone ID: 701120273H1
gtgttatgcagccaatgttatcatccaaaggcctggctgcataactcccagctctnatgcattcttcaatgggcttatgcttaaccaattgtganagaaatcctccaacnnangcatctcctgctccatttgtgtcaataatttctctttaggtaacggtatcacggggtaaattttcacttttccatcctcggcaacgcaaacaggatctgcaccttnggtgataacgtaatcctttatgtgtttccgatgcctttggcaactgagaaatcttc

SEQ ID NO: 38793 - DNA, 273 bp, Glycine max
  unsure (1)..(273): unsure at all n locations; Clone ID: 701120274H1
gtaaggtacctctatattggggaattactgctgatggctacgtagcatttgccgatgatgcagaattgcttaaaggtgcttgtggcaagtcacttgcttctttccctcaaggatgtttctactctacagctgttggaggattgatgtgctatgagaatcctaaaaataagattactgcagttcctgctaatgaggnggaaatctggggagcgatttcaaggtgggaggggcagcagttgtcgtagccagacanagatttccttctgctggtga

SEQ ID NO: 38794 - DNA, 282 bp, Glycine max
  unsure (1)..(282): unsure at all n locations; Clone ID: 701120276H1
acctttcactccacgaaatcantaacangtgctaagaagctccgtgtctctattctacaaacatgtagcaccaaacccaagttggcatccaagttttataacactaatactgcatataatattattataatatacataacaacagttattgatattgttgtgattgtgtgtgattttggtgtcgtccctttttcttatgtttaaggttgtacggagtttatgtgttgattcaattcgtcgataagaaaccttagtttgatatttgattggttctgtggagag

SEQ ID NO: 38795 - DNA, 283 bp, Glycine max
  unsure (1)..(283): unsure at all n locations; Clone ID: 701120277H1
gttctccaaaacttggaaacctaagaagacaggcacgataactggccctgttgtttttggaggttagtattttctctccatnctcattttctttgagtaaattacacttgcaatccctgaattttcatgagattgcacaaactccccatgttttttaaggattacagctacctcccttgaaagggggatacggtatcatgtttttcaaacaatgaaggtggttagtgtaatagtttttaaacaataagggagttagtgtagaggtagaaaaaataggaaggtt

SEQ ID NO: 38796 - DNA, 283 bp, Glycine max
  unsure (1)..(283): unsure at all n locations; Clone ID: 701120278H1
gggaggcaaggcttcccaccaagatactctggatgagaaggatgcgtgtgctcagacggttgcttcgtaagtacagggaatcaaagaaaattgacaagcacatgtaccatgatatgtacatgaaggtgaaaggtaatgttttcaagaacaagagagtcttgatggagagcattcacaagtctaaggctgagaaggcaagagagaagactttgtctgatcatttgaggctaagcgtgcaaagaacaaggctagcaggaaaggaaantgctcggagggaggagcg

SEQ ID NO: 38797 - DNA, 281 bp, Glycine max
  unsure (1)..(281): unsure at all n locations; Clone ID: 701120279H1
ggctaatccgcctcacgagggtcaccaacggcacgtgcctttggggggccgaggcccctactgctggtncggcaaacggacggcgggcgcacgcgtcgcttctagcccggattctgacttagaggattcagtcataatccaacgcacggtagcttcgcgccactggcttttcaaccaagcgcgatgaccaattgtgcgaatcaacggttcctctcgtactaggttgaattactatgcgacatgtcatcagtagggtaaaataacctgtctcagacggtcta

SEQ ID NO: 38798 - DNA, 288 bp, Glycine max
  unsure (1)..(288): unsure at all n locations; Clone ID: 701120280H1
cgtaaacaagaaaggtaaaggtaagtctgtagatagtagggggagtaactccagagagaaattagcaaataactttttaagcactgtacatcagctacaggcaaattataaatcttnggaagagaaagcggaggtgctatcaaggggtgattaccgcagtgaaggaggcaaattaaaaattgagcagcggattgatatgaattctggtagtcaacctacgatgaancttggtgggnagactgaaacatccaacgacagtttatctaatccaagtaaagacgatggggg

SEQ ID NO: 38799 - DNA, 270 bp, Glycine max
  unsure (1)..(270): unsure at all n locations; Clone ID: 701120281H1
cacaagttgcccttaggtggggactgcaaacaggtcatagtgtgctgcctaagagcactaatgagtccagaatcaagggaaactttgatgtgtttgactggtctattccagaagaagtgatggataagttctctgaaattaagcaggatagactaattaagggcatttttttgttgacgagacctatggtgcctttaagaccgttgaagagctttgggatggtgaatctgagcatttgctcatagagtgtgaccangcatgctctccagc

SEQ ID NO: 38800 - DNA, 256 bp, Glycine max
  unsure (1)..(256): unsure at all n locations; Clone ID: 701120282H1
gacggattaaggagtacagacagaannttgaattggagntattgaacatctgtaatgatgantntgagantnattgatgagcacctnatcccntcggctgcagctggtgantccactgtgttttactataanntgaaaggagcttattatcgatatcttgntgaatttangtcaggcnatganaagaaggaanctnctgatcatctntgaaagcactgagtctgnnaccggngcagcagaggctnctttacctccc

SEQ ID NO: 38801 - DNA, 273 bp, Glycine max
  unsure (1)..(273): unsure at all n locations; Clone ID: 701120284H1
tttctattctaagattttgagaatgtctagctgtgggtgtggaagcngctgcaactgtggcagcaactgcggttgcaacaagtactcttttgacttgagttacgttgagaagacaaccacagagactctagttttgggtgttgggcctgtgaaggcccaattggagggtgctgaaatgggtgttgcatctgagaacggtggctgcaatgtggatcaagctgcacctgtgacccatgcaactgcaagtaaggtccagatgtataaccttgaagc

SEQ ID NO: 38802 - DNA, 271 bp, Glycine max
  unsure (1)..(271): unsure at all n locations; Clone ID: 701120285H1
gttgtggagtcatacctgctcganancncacaagtntatgcttaatacacttncntatntattgtgtcatgtnncatncganctanaaacatattcnnttttttaataacggtgtgcaaccaaatatagggttgtntagaatggttgcaaagacttgaattccttaataagtcctnttgtatgaacagccaanaatggctagtggtttgccaaaaatatntgtactttggtngtgaaaggagttgaagngngnnntgannnaccatanagg

SEQ ID NO: 38803 - DNA, 271 bp, Glycine max
  unsure (1)..(271): unsure at all n locations; Clone ID: 701120286H1
cttttgttgttctgtgtttgtgtttgttttttctctcacctgaanatgtcttgctgcggtggtaactgtggttgcggaagctcctgcaagtgcggcaacggctgcggaggctgcaagatgtacccagacttgagctacactgagtcaaccaccaccgagaccttggtcatgggagtggcacctgttaaggctcaatttgagggtgctgaaatgggtgtgcccgctgagaacgatggctgcaaatgtggaccaaactgctnctgcaaccctg

SEQ ID NO: 38804 - DNA, 275 bp, Glycine max
  unsure (1)..(275): unsure at all n locations; Clone ID: 701120287H1
cagaaggtgaaattttttcagcagaggatgctgacagtgcagagactgaaggagctgcaaganaaaaggaaggagccttttacatatggacaggcaaagaggttgcagacatacttggngcnccatgctgctcttttcgaggagcactattacatcaagcaatcaggtaactgtaacctatactggnatgagtgatcctcacgatgattcaagggaaagaatgtcctgattgagagacaggnnccttcagaatggcatcaaaatatggcatgncc

SEQ ID NO: 38805 - DNA, 276 bp, Glycine max
  unsure (1)..(276): unsure at all n locations; Clone ID: 701120288H1
tnaagtgcaggaaactatcaactcatgagaaactggcacttaagaaaaatttaagcagactgaatggtggcaatctcctacaaggcaatgagcataattcatgagattgacccaaccttccaacatgatgctccacaggtcgaccttgaccttgatcgtcagagtgacttcatactgtggaaactaaacctttttaccaaagaagcatggaagatccaagacaaagctgctgctgaggagatggctgttaaccacaacgttaacatgaggaccaga

SEQ ID NO: 38806 - DNA, 270 bp, Glycine max
  unsure (1)..(270): unsure at all n locations; Clone ID: 701120289H1
tnggcctagcagctttgatatcctacaaggtcattcaaaagccacaatgcttttgatagcaaacaatgctgcccaagggattttatcctctttcttcttcaaatatgcagatacaattttgaagaagtactcatcaacagtagcaacantcttcaccggtatagcatctgctgtactatttggacatactttaacaatgaattcgtattggcnttctatggtgtntatctcatgcaccattctttcgccatttcaaaagttaaagtgcgc

SEQ ID NO: 38807 - DNA, 55 bp, Glycine max
  unsure (1)..(55): unsure at all n locations; Clone ID: 701120291H1
anaaagacatgtcttgctccgtcganngcntccaattcgccantgatctcttnca

SEQ ID NO: 38808 - DNA, 288 bp, Glycine max
  unsure (1)..(288): unsure at all n locations; Clone ID: 701120292H1
tttaacaaatttcatttcacccccttaatatttgcacatatctgcangcaatggttattcttagagaaattgggctaccttatttctgatgggaaggcatctcagaatgatggtgagggcagaggagcaggtatcaaaaccaggggagtttagtcaccaagagaatgagtcaaagggcagcatagatagtgagaattatcttgagagggatgaggtcaaaatggtgatggctaaacttggatttttttncactacagaaagtggnggnngnnnnnngagaatcatggt

SEQ ID NO: 38809 - DNA, 285 bp, Glycine max
  unsure (1)..(285): unsure at all n locations; Clone ID: 701120293H1
gcggactgagtggtgtgtcgcgttgttgacattagaatttgatcgatttggggttggggcggaagaaagtggaaacgacnccgttggaaggtgggaagaagatgagttcgcagcaaatgcaaatgcaaattcaaatccaaaacagtggtggtggcagtggnnnnnnnnnnnnnnnnnnnnnnccagtgagcgaggttttctggactctacgtcgacaaagccgacaaaaattctccaaaatccagagaccttcccttttaccaacgcagcaggcatgatattact

SEQ ID NO: 38810 - DNA, 102 bp, Glycine max
  unsure (1)..(102): unsure at all n locations; Clone ID: 701120294H1
gcaggnttgtgttctgttctgcnttgcattctccgccatacatcgtcancntcangcaagcggctgattacnccnaaccngcgaacngctcccntggnccnc

SEQ ID NO: 38811 - DNA, 286 bp, Glycine max
  unsure (1)..(286): unsure at all n locations; Clone ID: 701120296H1
tttcaaagacactatttgttnggaacttgccatttagtgttgagnnngctgacgtggaagggttcttcaaggatgccgganaagttgttgatgttcgttttgctacagatgatactgggaagtttaaaggatttggacatgttgagtttgcaacagcagaggctgcccaaaatgctcttgggttgaatggacaacaattgtttaatcgtgaactccggcttgatttagctcgggaaaggggtgcatatacccccaacagcagcaatggaacaactcntcccagaaa

SEQ ID NO: 38812 - DNA, 280 bp, Glycine max
  Clone ID: 701120301H1
gtttctttatgcacttgcttcattatttcactatgtttgaattatgaggtttagaaatatacttttcttacaatgagacctgcagaaattacggggcttgtcttctagattgcataaattatgcctgcatctctgtatgtggaagatgttggtttcagtttatgatgttgcaggaattatcagaacatcttggaatccagctgctaaatgagcggttaaatgatccaacaatcctagaatcttttgaatccatatttccaaaagataatccaaaaaacac

SEQ ID NO: 38813 - DNA, 276 bp, Glycine max
  Clone ID: 701120302H1
gcggggaacaagttccggatgtcgctgggtctgccggtggcggcgacggtgaactgcgccgacaatacgggggcgaagaacctctacatcatatcggtgaaagggatcaaagggcgtttgaaccgtctcccctcggcttgcgttggcgacatggtgatggccaccgtgaagaaggggaaacccgatctgaggaagaaggttttgccagctgtcattgttcgccagcgcaagccatggcgccgaaaggacggcgtctacatgtatttcgaagataat

SEQ ID NO: 38814 - DNA, 276 bp, Glycine max
  unsure (1)..(276): unsure at all n locations; Clone ID: 701120303H1
ctgaagacttgaaaggtacctgaatctaaaaaagctgttgccaaggctagtggatcagcaaaacaagtcaaggttgttgaaccaaaaaaaagataacgaggaggactctnnnnnnnnnnnnnnnnnnnnnnnntttggatcttctgatgaagagatggaggatgctgatagtgacagtgatgatgagagnnnnnnnnnnnnnnnnnnnnnnnngacccctcccaagaaggtggatctgggaaagaagagacccaatgagtctgcatcaaaaactcc

SEQ ID NO: 38815 - DNA, 258 bp, Glycine max
  unsure (1)..(258): unsure at all n locations; Clone ID: 701120304H1
ctcgttttacagagacacgtgtcccaaggttcactccattgntcgcgaagangtgangaacgtttccaagaaagatccccgcatgcttgccagtctcattagacttcactttcatgactgttttgttcaaggatgtgacgcatcagttttgttgaacaacactgccaccatagagagtgagcaacaagctctgccaaacaacaactactctaagaggtttggatgttgtgaacgacatcaagacagcagttgaacagg

SEQ ID NO: 38816 - DNA, 271 bp, Glycine max
  unsure (1)..(271): unsure at all n locations; Clone ID: 701120306H1
ccgcnnnngggaggatagatatgcaanatanaggncttctatgaacgcccaagtaacaatgtgtgangaaantaaagtagatatgttgaagtanaattcgtatcatcaagagagnaacacanacttgttgcgttgagtgtgtgatcagcttcaagccaagaagcaacnatccctttgagatatngggtggacantgaacaanagcgtgtagttntggcagaagcaagtggagactttgttgatgttctctttagtttcctgacccctccat

SEQ ID NO: 38817 - DNA, 273 bp, Glycine max
  unsure (1)..(273): unsure at all n locations; Clone ID: 701120307H1
agaggtcatagacacaacacaagacatgtntgttgttgagtcaggtgaacacaacaacatcagaggagtacctactcatggtggacgctatgttcagtacaatatctatggcaatctctttgaagtttccagaaagtatgtccctcctattcgccctgtgggtagaggcgcttatggtattgtttgcgctgctgtaaatgcagagacaggtgaggaagttgccattaagaagattggcaatgcatttgataacagaatagatgccaaaaggac

SEQ ID NO: 38818 - DNA, 273 bp, Glycine max
  unsure (1)..(273): unsure at all n locations; Clone ID: 701120308H1
accccctatatatctttctgtagatgaaggtttagtactgtcagctcttttgactgctggtagaacctataattctgatctgctagtggcatcatgggctgttttggaccgctcattgcgtaaaaagaaagttcctaatccagagtcctatcttggaaagatatacgcgcttgcgtcattgnggaatctacaaaaggcttttggtactctaaatgaatatgaggcagcttatggagactctggtcaagaagctgaagactgttctgcccattt

SEQ ID NO: 38819 - DNA, 275 bp, Glycine max
  unsure (1)..(275): unsure at all n locations; Clone ID: 701120309H1
ggagatggttaaggtaactatagttggaagggtaagcgatggantgcctctagcacaaggactgagatacatgaatgaagagtatgganatctttcatgttacaggcaacaagcagagttcatactccgagaattttcaaggggagcattaacagctcccaagatgactattcatattgataatttctgcttcaagtatccttccctttttaattttnttnctcttcttttaatttctttcaaattaagttttggttcttttaacgatgaagttg

SEQ ID NO: 38820 - DNA, 271 bp, Glycine max
  Clone ID: 701120310H1
ccttctctgtctctgtttgttcttctcactttatattctctctctgtgtatatctcttcactcttattattccttctcttctcaacgacgatggaggacccatcagcagcaacaacgttgttgctgaacagcgaatattcgaggctgttcgtcgaggacacggacttgtacaatcgcattgtgttgggaaccctcttgccgcacttcgtgtggggcccactcccgcacttcctccagacgtggcttcgcaattacctcggcggcgtcctcc

SEQ ID NO: 38821 - DNA, 272 bp, Glycine max
  unsure (1)..(272): unsure at all n locations; Clone ID: 701120311H1
cgctcgagggatcttcttcagccacaacaaggagannaaagtattgtagatggaatgagaacaatagctctgaaacttgtatttggagcattccacaatcagatattcgncnaggacactagcagtgcattttacatatcctttctatgtgaggacacgtgttactgataaatgcaatgatggtaccctgcttctgcaggtaatacttcactctgaagttaaggctacactggccattatgatgcctggcttgatcttcaagatggatttgt

SEQ ID NO: 38822 - DNA, 274 bp, Glycine max
  unsure (1)..(274): unsure at all n locations; Clone ID: 701120312H1
ggnttggtttggttccccagcagattctgaantctgatncccatagtaccantccatgccagangnggncgnccgagtggagataagaactgcactgggaatggaggggctcgcgaaggaagatagtggtggaagtgggagcaagggtggngctgcttcatttgnngggctttatgaggtgggagaagttctgcccaagatgnttttgnagggngcnactggttgaagcagatgattccacncgacagacgagnngcacgcnncnnagaagncg

SEQ ID NO: 38823 - DNA, 273 bp, Glycine max
  Clone ID: 701120313H1
atcaccctgaagagttcggacggtgaggccttcgaggtggaggaggcggtggcgctggagtcgcagacgattcaagcacatgattcgaggacgactgcgccgacagtggaatccctctccccaatgtcaccagcaagattctggcgaaggttatcgagtactgcaagaagcacgttgaggcgaacagtgctgatgagaagcccagtgaggatgtgctcaaggcttgggacgtggatttcgtcaacgttgatcaggccactctcttcgatctca

SEQ ID NO: 38824 - DNA, 271 bp, Glycine max
  Clone ID: 701120314H1
ggacccgaacctcgttatgcgcaacacaataaaaggcgacaccgagcgcatagcacgctactactacctgccctcagcaccagccgaaagcgaagaaagagctttcgatccctgtaaccgcgttcgacgatttagggtttttttcggagacaatggcggatgaatcggagcacacggcggcgccggcgagcggtgaatcgctgcttgacaagattgccgagaagattcacggccaccacgactcttcctcttcctccgattccgattcgga

SEQ ID NO: 38825 - DNA, 206 bp, Glycine max
  unsure (1)..(206): unsure at all n locations; Clone ID: 701120315H1
gatgtttggttcaaagaaaactcctctgagagatgctaaacctanctctgttgaccatgcccataacccctttgattctgatgnagatacaanagataacaagtataattctctaagaagactttgaccaacaccaacccctttgatgatgatcatgttantgccactggncactcttcatcatcttcttatggccttncgtntac

SEQ ID NO: 38826 - DNA, 276 bp, Glycine max
  Clone ID: 701120316H1
cttgatgggtttagtgtttggaaagattagcgttgagacagcaaaatatgaagtgatcaaatccacaagcgagtacgaaattcgcaagtatgcaccctcagtagtggctgaagtcacatatgacccatcacagttcaaggggaacaaagatggtggctttatgattttggccaattacattggtgctgtggggaagccccagaacaccaagcctgaaaagattgccatgactgcaccggttataacaaaggacagtgttggtggggatggtgagac

SEQ ID NO: 38827 - DNA, 277 bp, Glycine max
  Clone ID: 701120317H1
atttctttccccatcagcgaaaagacagaacaagctctgttgactttttccattttccaattttctcggtgattctatcagcctccgacacaatcgcgcgccaaacgttgaatcggtgccaccactcaggtcagccaccaactccccctcctcattgttttctccaaatttccttcattccttttcttccgttcattccgttctttttcgaatctacattctttcataatccatttgctaattatatgaaaatctcctatcgatttcgaatctgaat

SEQ ID NO: 38828 - DNA, 51 bp, Glycine max
  unsure (1)..(51): unsure at all n locations; Clone ID: 701120318H1
ggccgcccttttttttttnttttnaattngnaaatatggancaagggcana

SEQ ID NO: 38829 - DNA, 272 bp, Glycine max
  unsure (1)..(272): unsure at all n locations; Clone ID: 701120321H1
gtcaaattccacatttactggtaggncaaaaccttttgttttcaaaggcaatcgggagcagttcaaattcgtggagtctcggttaacttacggaactattggtgggaggttcaagaaaggagaaaacccgtttgttgaggaggcatatcagcgggtggcattggatcaactccttaagatagctggtattactgatgatgacttgttgattatgtctgatgttgacgagattccgagtgctcacactattaacctcttgaggtggtgtgatg

SEQ ID NO: 38830 - DNA, 273 bp, Glycine max
  unsure (1)..(273): unsure at all n locations; Clone ID: 701120322H1
cagaatcctcaaagcagctattagggtttctgtttcttcctcatctatggaggagnacgcttcccatgtgggtcgctccctcgtgaagcagctggcatgctgcaagagaaccaccagagacaaatccctccgcctcctcctcaaatcatggctcccgtcgcagtcccaacccctctccgacgacgacgccaagaagctctggaagggtctcttctactgcatgtggcactccgacaagcccctcgtccaatccgatctcgtcgatcgcctctc

SEQ ID NO: 38831 - DNA, 272 bp, Glycine max
  unsure (1)..(272): unsure at all n locations; Clone ID: 701120323H1
cacccccaccttctcaatttcttagccttctgctttgtattacatcttctgtttcaggnttcatntgattgattcttttcttcaattctggtttgtagttgtntatatctgactcatgtttctanatccangaacagcanatgattttcagtgtcttttccttttccganggaggaaaaagaagntaagaanannaagcntggtgtgagactttgagngtcaatggttggttgagttctcaatttgcgtgtggcagtttgtnggaacccatc

SEQ ID NO: 38832 - DNA, 274 bp, Glycine max
  Clone ID: 701120324H1
cttgagtgctgtggacgacctaaattactaggccaacagaaactaacctataatgggttagacatgggattttcctcatacgatagttattggagagaaatcagaaaaatttgtgttgtccatgtccttagctccaaacgtgtccaaagctttacctcaataagacattttgaggtcaagcagatgataaaaaaaatatctaggcatgcctcatcttcaaaagttacaaatttaaatgaagtgcttatatctcttattagtactattgtatgta

SEQ ID NO: 38833 - DNA, 272 bp, Glycine max
  Clone ID: 701120325H1
atggacaggactggggcaggaaggaaccagagataatatgtcgacatatcgatcatgtcaatatgcttggtctcaataaaactgcacttagacttcggtttttgataaattggcttgttacctcattactgcaactgaagttgcctgcttctgatgggtgtgaaaaagcaagtcttgtccaaatctatggtccaaaaatcaaatatgaaagaggtgcagctgtggctttcaatgtgagagacagaagtagggggctaatcaatccagagatt

SEQ ID NO: 38834 - DNA, 270 bp, Glycine max
  Clone ID: 701120326H1
ctctaatctatctctttttcttcttatttaaaatttcatcttcaattcaattctctttctgtcaccgttcctcattcgcatggagaacgacactgccgccgccgttaacaataacaccaccgccaccgccaccgctaaagcaggttctggaggagtgaaatcgaacaaccataacctagaagaggagcattccaatttgaatggcgaggagcacatggcagaacaagtggaggcagaagaagaggaagatcgagaagccgatgatggtga

SEQ ID NO: 38835 - DNA, 269 bp, Glycine max
  Clone ID: 701120327H1
agctcaccgacgaacagatctctgagttcaaggaagcctttagcctcttcgacaaggacggcgatggttgtattaccaccaaggaacttgggactgtgatgcggtcgcttgggcagaacccaactgaggctgagctgcaggacatgataaatgaggttgatgctgatgggaatggtaccattgatttcccagaattcctcaatctcatggcgcgcaagatgaaagacactgattcagaggaagagctgaaggaggctttccgtgtgttt

SEQ ID NO: 38836 - DNA, 268 bp, Glycine max
  Clone ID: 701120329H1
gatttttggggtttattcacctgataaatttatttccatttggttttgcgagagtaatatttaaactgttttctgtaaaaaaatcctggtggaaatttgttggaagtgtttacctataaataaatttcattcttagctggatggttttgccccaatcctccaacagccgaagcagtgggagttgcgtgtaattcattttttattttttctaattgtttgtgaaattgtgacattagtattcagggtaaacaaatcatttgaataatgc

SEQ ID NO: 38837 - DNA, 149 bp, Glycine max
  unsure (1)..(149): unsure at all n locations; Clone ID: 701120330H1
aaaaccctanccctaacccccgagtctggnagcctctncaanggcgtaccagacacccgatcaagattcaagctccgattccgaagngccccancttcgcctctacnanccatacaaggnccncgangtccccatttcggcaacctcta

SEQ ID NO: 38838 - DNA, 273 bp, Glycine max
  Clone ID: 701120331H1
ctagttctattacttgtagtagtgtagtatatttaagcctctgccaattgagttaaaagagttgattgcaattatgaaactttacctgagtgagtggtaaagccgcaagaactgccccataaggtggcgctattctgctattttatctcttttccctcgtttcggaaggaaaaaacgagataagcacgctgcttaggaaggagttacaaggaaccttcccttatttgctgcccctttaagctatccctctcagttataaatccgcaagagtaa

SEQ ID NO: 38839 - DNA, 277 bp, Glycine max
  unsure (1)..(277): unsure at all n locations; Clone ID: 701120332H1
gaaaaactctgggcataggtggagaggttaatcacttgcggaaggagcctatggatatagccatgaatgcaagaggtaactattgtagctctcctggctcttctgatgctgctactgaacatgagattttgctcaanagtgaagaaacaagaggagaatcagttgaaactttgaactcttgtgagttgagctgcagcaaccattgccttggatttatgcataataatatgctgccagataccaatctaagaccaaatcctgaggcatctattgcaaa

SEQ ID NO: 38840 - DNA, 275 bp, Glycine max
  Clone ID: 701120333H1
aggacattcattcatctatggctacccttattgctcccagcaaccactctccccaagaagatgctgaagctctcagaaaggcttttgaaggatggggaactgatgagaacactgtcatagtaattttgggtcatagaactgtgtatcagaggcagcaaatcagaagagtttatgaggaaatttaccaggaggatcttgtgaagcgcctagagtctgagatcaaaggagactttgagaaagccgtgtaccgatggatactggaacctgcagatcgt

SEQ ID NO: 38841 - DNA, 56 bp, Glycine max
  Clone ID: 701120334H1
ttatacaggcattatacagcactagactaaatttccctatatggtatttgaagtca

SEQ ID NO: 38842 - DNA, 223 bp, Glycine max
  unsure (1)..(223): unsure at all n locations; Clone ID: 701120336H1
ccgggatcatccacaagattgaggagaccctccatgtgggagggcacaagaaagaggagcacanaggaganncaccatggtgagcacaaaggtgaacacaaaggagaacaccatggtgagcacaaaggtgnacacaaaggagaacaacaccatggggagcacaaggagggacttgtggataagatcaaggacaagatccatggtgatggccatgacaagggtg

SEQ ID NO: 38843 - DNA, 62 bp, Glycine max
  Clone ID: 701120337H1
cttgctcttgtgttgtatctccttctctcttacgcgtcttcatttccacacaacatacgagt

SEQ ID NO: 38844 - DNA, 272 bp, Glycine max
  unsure (1)..(272): unsure at all n locations; Clone ID: 701120338H1
anaaataataaagaaaacaaaacaagaagaaggaaacgcgcaacgcaacacaaaaaaccacacnttcaantgcatnnctctcnctnnctcacaatnnccacnaacccgggcagacgcgnncganatncgnngtnccaatgagcgatcacntggnggagtncgttgaccgtctcgcgcgcccngnccccgnnganccggnggcgcagacggcgcaggtgccnnccgaaccagctccacctccggccgccgtggatgccgacgccgccgggagc

SEQ ID NO: 38845 - DNA, 270 bp, Glycine max
  Clone ID: 701120339H1
gttgtgatcttcctcttcctcgtacacaggtgagggactgaaaggtagcaatggcgaccaggaacttggaaaagatggcatccattgatgcacagcttaggcaattggctcctgccaaagtgagtgaggatgacaaactgattgagtatgatgctcttctgctggatcggttccttgatatccttcaagatttacatggggaggatctgaaggaaacagttcaagaagtgtatgaactttcagctgagtatgaaggaaagcatgaccctt

SEQ ID NO: 38846 - DNA, 270 bp, Glycine max
  Clone ID: 701120340H1
gtactacaggtattgtgcttgattctggtgatggtgtgagccacacggtgcccatatatgaagggtatgctcttcctcatgcaattcttcggttggaccttgctggccgtgatttaacagagtacttggtgaaaatccttaccgagagaggatactccttcagcacctctgccgaaaaggaaattgtccgtgatgtgaaggagaaattggcatacgtggcccttgatttcgaacaagaaatggagactactaagagtagttctgcagtgg

SEQ ID NO: 38847 - DNA, 270 bp, Glycine max
  Clone ID: 701120341H1
ctacaagtgaagtcagtgtttccttgacattggatccatcaaagctatggagcagagagctaattcagcaggaacttgaccatgttgtagaagaactcgagaaaatcgctgtggtgaatctcctgcagaatagatccatcatctctctcattggaaatgttcagagatcatcactaatattggagaaggttctgtattatgctccctttatttaaattagttcatatcctaactttcacttatgtataaagatttactgaatttattaca

SEQ ID NO: 38848 - DNA, 268 bp, Glycine max
  unsure (1)..(268): unsure at all n locations; Clone ID: 701120342H1
gctccctccccgtttcgcgattcaactcctcctgggtccacttcaagctcatggactccatggagaaaggtccctcccctgttaancccganaacgtttccgataatagtgataacgataacgaggatgatgacgatgatcaagatctgtaccaggagatcaaccacaacggccacatcaggagcttgaacaagatgtataggaatggctttccgggttctggtgccggttccggtgctggtgggtttaggattcgaattcctactgg

SEQ ID NO: 38849 - DNA, 266 bp, Glycine max
  unsure (1)..(266): unsure at all n locations; Clone ID: 701120343H1
atcctccatggcctccaccaaggaacgcganaactttgtctacaccgccaagctcgccgaacaagccgaacgctatgaagaaatggtggaagcaatgaagaatgtggcgaactgaacgtggaattgacggtcgaggagcggaaccttctgtcggtagggtacaagaacgtggtgggtgctcgtagggcttcgtggaggattctatcgtcgattgaacagaaagaagaagctaaagggaacgatgtgagtgtgaagaggataaagga

SEQ ID NO: 38850 - DNA, 267 bp, Glycine max
  unsure (1)..(267): unsure at all n locations; Clone ID: 701120344H1
gttagaaaccctcatcgtcaaagcacgcgttttttttaatctctctctctcaacaaatatttgtgggtagattcaattcaccatgtcgagctcatcggagtactctgaattttccggccagaaaccggcgaggtcgccggagaaatcgagcttctctcagacttgcagtctgttgagtcaatacatcaaggagaagggtagcttcggagatcttaccctcggaatgacatcatgtggtacgactcctnaaaactccgaaaatttcct

SEQ ID NO: 38851 - DNA, 271 bp, Glycine max
  Clone ID: 701120347H1
gctaaaactgcacagatgacaatcttttatggtggacaagttgttgtctttgatgattttcctgctgacaaagcaagtgagatcatgtcctatgccaccaaagggatcccccaaagccagaacaattctgttttcacctacacacagagccagccttcatttcctgctaatttggtcagaacttctgctgattcaagtgctccaattattcctagtgtgaacattaccaactccattcatgaacaccctcaagcatcatccagacctgttg

SEQ ID NO: 38852 - DNA, 271 bp, Glycine max
  unsure (1)..(271): unsure at all n locations; Clone ID: 701120348H1
tnntttctcagcgcgtaaagcatggctttgttggtgganataaccacgagtggtcgcgagtacaaggtcaaggacctttcccangccgacttcggccgcctcgagatcgagctggccgangttganatgcccggcctcatggcctgtcggaccgagttcggcccctcccagcccttcaagggggcccgcatcaccggctccctccacatgaccatccagaccgccgttntcattgagaccctcaccgcccttngngccgaggnccgctggt

SEQ ID NO: 38853 - DNA, 273 bp, Glycine max
  Clone ID: 701120349H1
tattttcttctctcatggcttcagattccaaaaaggatttccctgctgatgacaaagctggaacagcagagaataaagcatccaaagatgaaacgtcatctaaagattctccagcagcacaaagagctactacagctacttctggacctgcaactggttttccaggcaacccttttgatttctctgcaatgtctggcctgctcaatgatccaagtatcaaggaattggctgaacagatagcaaaagatccatcattcaaccagatggctgagc

SEQ ID NO: 38854 - DNA, 268 bp, Glycine max
  unsure (1)..(268): unsure at all n locations; Clone ID: 701120350H1
accattcgcaccaacgttgctggnactttaacattggctgatgtcagcagagagcatggaatcttgatgataaattatgctactgggtgcatatttnagtatgacaaagctcatccagagggttctggcattggctttaaggaggaagacaaacccaacttcattggttctttctattccaaaactaaggctatggtcgaagagctcttgaaagaatatgacaatgtgtgcaccctcagggttcgcatgccaattcatctgacttgag

SEQ ID NO: 38855 - DNA, 270 bp, Glycine max
  unsure (1)..(270): unsure at all n locations; Clone ID: 701120352H1
attgtgtgtgagacagaatggagagtagcgaggaagaagaagatttcccttccattgagagcatcattccccaatgccaaggttgactctctctatcagtctcagaccgaaaaggggnntaggaagctttgctgcgagctcctagatttgaaagatgctgtggagaacttgtgcggcaatatgcactccaagttcttggctttcttgaggatatctgaagaggccgtggaagtaaagcatgaattgattgagctgcaaaagcatatctca

SEQ ID NO: 38856 - DNA, 271 bp, Glycine max
  unsure (1)..(271): unsure at all n locations; Clone ID: 701120353H1
ggtaaacagaagcacacactacacagttaccaaaatcaggttcaaacgcacagatctgggagaagnnnnnnnnnnnnnnnnnnnnnnnggacaggatcagaaccagagatcgctgatctacgcgttcgtgtctcgcggcacggtgattctcgccgagtacactgaattcagtggcaacttcaacacaatcgcgttccngtgcctccagaagctccctgcctccaacaacaagttcacctacaactgtgacggccacaccttcaactacctt

SEQ ID NO: 38857 - DNA, 269 bp, Glycine max
  Clone ID: 701120354H1
cctcactgcaaagaacctcagcaagcatataagaaactagatctttggagattgcctgaaattcttgttgttcatttgaagaggttctcatacagccgctacttcaagaacaagctggaaacatttgttgatttcccaattaatgatctggacttatcaacatatgtagcccacgggaatagccagtcttccaaccgctatgtgttatatgcaattagttgtcattatggagggttaggaggaggtcactatacagcatttgtccgtta

SEQ ID NO: 38858 - DNA, 268 bp, Glycine max
  unsure (1)..(268): unsure at all n locations; Clone ID: 701120355H1
gtgcctgtgggacgggttgagactggtgtcttgaagcctggaatggtggtgacttttgcaccaactggactgacaaccgaagttaagtctgtggaaatgcaccatgaagctctcacagaggctcttcccggtgataatgttggattcaatgttaagaatgttgctgttaaggatctnnagcgtggttatgttgcctcgaactcaaaggatgatcctgccaaggaggctgctaacttcactgcccaggttatcatcatgaaccatcctg

SEQ ID NO: 38859 - DNA, 269 bp, Glycine max
  Clone ID: 701120356H1
actggcttctaacgcctcctggtactcctctttttccttctttggaaatggaaagtcgaaagactgttatgagtcagcttggtactccaaccacacgtcctgtagcattaaaatccaggttggcaaatcatcaatcagagcctgctgggaggactaatttagtatctaaacaacctacttcctctcctgggttgagctcttcaagtggtgggattaggaggccttcatcatcagggggtccaggatcacgacctgcaacacctactgga

SEQ ID NO: 38860 - DNA, 270 bp, Glycine max
  unsure (1)..(270): unsure at all n locations; Clone ID: 701120357H1
tgccactctcctctcttgttgtacacttgttccttttggtttgcagaaaggaacatggaagctgtgtgtgcttttncctgttggcacacttcacatcccaacagcacatgaaacatcaaactcctttaggaaatccatattnttgagcaaccaagtggcttcaccagtttcattggtttttctcaggggcagttcaaaatccaagcttttaactgccttgtcaccccctccattgacagaatccagtaaccaacctgaggctgagccaga

SEQ ID NO: 38861 - DNA, 267 bp, Glycine max
  unsure (1)..(267): unsure at all n locations; Clone ID: 701120358H1
cttctctttgtgttcctaaaaaacacacagcacaagtagacaaanacaaaggaacaaattgcaagttgagaaaattaacatggaaaacagtgacatttcctctgccccactttctcactcccccactaattcctcttcttcctcaccaacaccaccttcacctcctactgttgtgatgagtccttgtgctgcatgcaagattttgaggagaagatgtgctgagaaatgtgtcttggcaccttattttcctccaactgaacctgccaa

SEQ ID NO: 38862 - DNA, 265 bp, Glycine max
  unsure (1)..(265): unsure at all n locations; Clone ID: 701120359H1
gggaacatgagttggcggtcggtgaggggaagccgtaagaggaaganggatttcgaactggacctcaaccgtgatccgccgctggttcgannnnnnnnnnnnnnnnnnnnnnnnnnnnnnnnnnnnnnnnnnnnnnnnnnnnnnnnnnnnnnnnnagaacctcaaactcccattgtcgatgtcgacgccattgacgacgatgttgttgaaagctcgcctaggtctttcgctcaggctaagagcaatgctgatgagaggaggagag

SEQ ID NO: 38863 - DNA, 265 bp, Glycine max
  unsure (1)..(265): unsure at all n locations; Clone ID: 701120360H1
gccgtattctttctatatatcagatgaggagctcctcgtgccacttgaaacatacttgttgaaaaacaaagcctcggtggagaaggcattgcctatagtttgtcaacctcaagctattttccggattcgtcctgtgaatcgctgtacggcaactatttctggtcatgctgaagctgtactaagtgttgccttcagtcctgatgggcgacaactggcaagtggttctngtgatactgctgttcgattttgggacttgaccactcag

SEQ ID NO: 38864 - DNA, 268 bp, Glycine max
  Clone ID: 701120362H1
atggctgcttcaccccaatcctccgctccaactgtgtcgcctggtgatgttaacatcgacaaagatggtgtatttcaattgattcaagctcatcaggaaaaagctgctagacttccaccagttgaggagattcgaactgtccttgatcgtagcgtgcgcgggatgctctctacattctcaaagaagtttgatggttatccatcagggtctatggttgactttgcatgtgattcaaatggatatcctatattagcagtgagcgacttgg

SEQ ID NO: 38865 - DNA, 263 bp, Glycine max
  unsure (1)..(263): unsure at all n locations; Clone ID: 701120363H1
atccgatcngtcgtannagcnatncantcntctnctttccaagcngtttntccatctcgccggtggagcttctcaggtggtgggttcgttgctatcagntcnccggtgcttcgaatactgtgctcgaagttgtggtnccttactctaagatgtctctcattcagttactcggaaagattccatcccaattttgtggccaacagactgctgaagatatggctttattggcgtataatcgcgctcttaagctctccaagccagga

SEQ ID NO: 38866 - DNA, 118 bp, Glycine max
  unsure (1)..(118): unsure at all n locations; Clone ID: 701120364H1
accaccanctcccctcttcctntcacctgtcgtttgtntacnctccctttacgtcaccgnnttgattgcnaaacgcaaccctccacaccataanccnacaanacaacaacaccctnta

SEQ ID NO: 38867 - DNA, 271 bp, Glycine max
  unsure (1)..(271): unsure at all n locations; Clone ID: 701120365H1
atgattttngtgttggtgagtcttggatatgtcatgtgatagtccaaccaaaccaaacaacaaacaaaagaacagcacccttctgactcaaaggtagcaacttgagacagtttctcaggtttgaacatcaaagagcacacaagggtccaattggattcctaagcagagagatggggttccaagaaaacgggaatggggaaatggggttgtctggaatccccttgggagtaaagaacaagtacaagaggatgaactctgagcttcctgagga

SEQ ID NO: 38868 - DNA, 264 bp, Glycine max
  unsure (1)..(264): unsure at all n locations; Clone ID: 701120368H1
gaaattacctggccatgatgagtcatataatcctcctctagagtacattccancccacgnananncngnttctatcaattgatgtntgaggaagaccgccccaagtnnatnccgnaaaggtnngcatctatgaggagcattcctgcatatgagaatgctatgaaagactgctttgaacggtgtntggatttgtacttgtgccctcgagttcggaaaaaacgcctcaanantgatcctgaatcttaaagccaaagctccaagtcg

SEQ ID NO: 38869 - DNA, 267 bp, Glycine max
  unsure (1)..(267): unsure at all n locations; Clone ID: 701120369H1
cttcggttgcngctcctcccgcgagcacgcccccgtcgcgctggnancctccggcgcggnngcagtggtcgcggagtcgtacgctaggatcttctttcggaactccgtggccaccggcgaggtntatncgctagagtcggagggacgcctctgcgaggagtgcaccaccggcgatgtggtgacgattgagctcggagagagccgcttgatcaatcacaccaccggaaaggagtatcgcttgaaaccgatcggcgacgcgggtccagt

SEQ ID NO: 38870 - DNA, 267 bp, Glycine max
  unsure (1)..(267): unsure at all n locations; Clone ID: 701120370H1
ggggccagccaaagtcaaagattacccacttgatcttctgcaccactagcggtgtggacatgcctggtgctgattaccaactgcaccaaacaattgggccntcgcccttaaatgaagaggtacatgatgtaccaacaaggttgctttgcaggtggcacggttcttcgtttggccaaggatttggctgagaacaacaagggtgcacgtgtgcttgttgtctgctctgagatcactgcagtcacattccgtgggccaagtgacactcac

SEQ ID NO: 38871 - DNA, 267 bp, Glycine max
  Clone ID: 701120371H1
gctgattggtaatatgcagacatatctccaatcaactactgttcgcttagaagagtggagggtgaaaagaactgatacagagcaatggatgcatcacaggcaactacctccagagctaagagaatctgtgcgtaaatatgaccaatacaaatggctggctacacgaggagtagatgaagaagctcttctcaaaggacttcccgtggatcttcgtagagacatcaagcgccacctctgtctcgatctagttcgaggagtgccattatt

SEQ ID NO: 38872 - DNA, 267 bp, Glycine max
  unsure (1)..(267): unsure at all n locations; Clone ID: 701120372H1
gataaaacaaaatattagcggtgttgatcgatttgcaaatctcagagtaaaaccttgtgctgcgattnnnnnnnnnnnnnnnnnnnnncagatggcgtttcaggaaaagcaaaacaggtttaagaggcagccagagaagagtgcctctgcttcacaatatggaagaactccagctcccatcaaattctctaacgatactgaaagacttcagcatgttaatagcatacgcaaagcccctgttggggctcagatgaagcgtgttattga

SEQ ID NO: 38873 - DNA, 268 bp, Glycine max
  unsure (1)..(268): unsure at all n locations; Clone ID: 701120373H1
gggaggacgtgccgttgccggcnctctttgagcaagcccgcaagatccacaactcagccaccgccaccgcctccgccgccgaccaggttgtgaagaaggggtgcgaggctctgcatagatgcgaggacatggtcaataacctaggtttgttctctcccaacgagaccaaagaagatatcagcaccaccaatctcaagtacattctggtgccattttatcttgcggagttgacagaaaaattagcacaggatgacaggatacatattct

SEQ ID NO: 38874 - DNA, 264 bp, Glycine max
  Clone ID: 701120374H1
gcagcagcaacaacaaacaaactctttctggattcagtttttgatgtgaaaatggcagtgactcttacatcaacactctttctggctttgctatttgctgcttcagcttttgctgctcttcagcctagagtacctgaagcttacctccaaaatgggaactttgaggagcagccaaaccctaaatacctgaagaaaacaaagctctttggtaaatacgctttgcctaaatgggagatcaatggtctggttgagtatgtctctggg

SEQ ID NO: 38875 - DNA, 265 bp, Glycine max
  unsure (1)..(265): unsure at all n locations; Clone ID: 701120375H1
aaaaccaattgcatcactctcgtccgttaccgccgctgccctagaccaccgcaagcnacgtcgcacaccgccttcatcccgttagggcaaaaatgagtcgaggaagtggaggtggatacgatcgtcacatcactattttctcccctgaaggacgtctctttcaagtggagtatgctttcaaggctgtgaaggctgcaggaatcacctcgattggtgtccgaggaaaggattcaatttgtgtcgttactcagaagaaggttccgga

SEQ ID NO: 38876 - DNA, 263 bp, Glycine max
  unsure (1)..(263): unsure at all n locations; Clone ID: 701120376H1
gaaaatggncagtggagaagcagttgttgaggcctggcaccggtcccaagccaattcccggtcagaacgtcaccgttcactgcactggtttcgggaagaacggtgacctttctcagaaattctggagcaccaaggatcctggccaggaccctttcactttcaaaatcggccaaggttctgttatcaaaggatgggatgaaggtgtgcttggcatgcaaattggtgaagttgctcgtctccggtgctctccggattatgctatg

SEQ ID NO: 38877 - DNA, 268 bp, Glycine max
  unsure (1)..(268): unsure at all n locations; Clone ID: 701120379H1
ggcggtgacacttgtatgtggaaganantagcacctnctcttactccnctttagntannctcccgaancgcagctgcgccacgcgtttctctggccncgcngtgnttgctacnactccgttcgcnncatccatgtgctgntgtatgggttgaacgaggaagataataaattgcttcgggaatggagtnngacagcaattccgatctgagcggggacgaagaggaggaagggttcgtcttcaacgangccgacnacgctggccctctcc

SEQ ID NO: 38878 - DNA, 270 bp, Glycine max
  unsure (1)..(270): unsure at all n locations; Clone ID: 701120380H1
ctcgagccttctgaagnatcagtgtatgtaatgcttgtatatcttgtcttatgtttcatcactagaaagatagattattgttattatttaactgttggactgtgatgttttggatacagggagaagacaaaaccnaaatcattgagaaaaggacccattgataaagttcaaggagaaggagaatcttccttaagtaccaacacagacgattccaaacctcaaagggtgnggacacttccaaattatggattcagttttaagtgtggtgaa

SEQ ID NO: 38879 - DNA, 266 bp, Glycine max
  Clone ID: 701120381H1
gttgattgagaggctgatttatgctgagggtgctgaaaatggcttggagttcacaattgtgaggccttttaactggattggacctcgaatggatttcattcctggcattgatggtccaagtgagggtgttcctcgggttcttgcatgctttagcaataatcttctcagaggagagcccctcaagcttgtggacggtggccagtcccagagaacctttgtttacattaaagatgctattgaagctgtctgctgatgatgaaaaccct

SEQ ID NO: 38880 - DNA, 266 bp, Glycine max
  Clone ID: 701120382H1
ctctactctactgcttcaccttctgctctagaaaattcagtggtgatacatggcttcggctactctctctgtagccaaaccagcccttcaggcaaatgggaaaggcttctctgaattctctggcctccgcagctcatcaggcttccttcccttttctagaaaatcttcagaggatttccattctgtcattgccttccagacctatgcagttggaagcagtggaggatacaagaagggtgtgacagaagcaaaactgaaggttgcca

SEQ ID NO: 38881 - DNA, 266 bp, Glycine max
  Clone ID: 701120383H1
ctcccccccattctcctatcctatccacaacacttctctagctatcattgctcttcagctctcttctttccaatacctcgttcaatagctccaaggttctgagttgcaagctaacatgggtgagatagctttaccaaatggcattagcaatggcaatattaatggagtcaatggacaaagccattctcttaatggttacaggaagagttgttggtatgaagaagagattgaagaggacttaagatggtgctttgctctcaatagta

SEQ ID NO: 38882 - DNA, 266 bp, Glycine max
  Clone ID: 701120384H1
gcagatctctcagggcttgcatcttctcagttgtgaagatgtacacatcaaggaagaaaatccacaaggataaggatgctgaaccaactgagtttgaagagtcagttggacaggcattgtttgatctggaaaataccaaccaggagcttaaaagtgatctgaaggatttatacataaactcagctgtgcaagttgatgtttctgggaaccgcaaggctgttgttattcatgtcccttacagattaaggaaaggtttccgtaagatt

SEQ ID NO: 38883 - DNA, 95 bp, Glycine max
  unsure (1)..(95): unsure at all n locations; Clone ID: 701120385H1
gcgaaacgcagtgtntagcattgttcctcaacaaaaaaaaaanaaaangangaaaaaagncncanttgtgtatcntnccngctctactanctggg

SEQ ID NO: 38884 - DNA, 227 bp, Glycine max
  unsure (1)..(227): unsure at all n locations; Clone ID: 701120386H1
tngattccggcagccgctacctctcngcctcctggggcgggatccagtggnanaancaggtccgcacgtgccgcccagatccaccgtcaaggcggcatgtccgncctcgtcacnggtgctgccgncntcgtcggctcccangtctccctcgcgttanaacnacgcggagacggnntngncggnctcgncaactncaacgnctactacnntccgtctctgnnanaagc

SEQ ID NO: 38885 - DNA, 268 bp, Glycine max
  unsure (1)..(268): unsure at all n locations; Clone ID: 701120387H1
caccaccgttctcttttctcttctcactgaattntcagatctactttttctcctcagtggagtaataatattgattgattcacgcagctatagccatttcagatctaatattctatatatctntctcnnnntctctattctcncnctncgatggnttccacggnngangcngnaaaagccaggagtgacgngccggncgcggcagccggtggtgggatccttcgcngncgtcgtcccccgacaacgccgctaatcggagcgattcctc

SEQ ID NO: 38886 - DNA, 127 bp, Glycine max
  Clone ID: 701120388H1
gtaggtcatgtacatgtacaccagattgctgaaagcttttcccaggagcaaaatgaaagttccctgcaaccttatttacttccaagaaaccatacacattgcatccttcaccttcttcatccttgat

SEQ ID NO: 38887 - DNA, 265 bp, Glycine max
  unsure (1)..(265): unsure at all n locations; Clone ID: 701120389H1
tcccatttcacccctcgtctttccttgtttccggtgagggccaaccacaacatatgttaaacaaggaacaacctccaaaacataacatcctacgccaaacaaaactttgacctccttcagatctataccctnnnnnnnnnnnnnnntctatttncaaattctacatcatgggcacggaggttctacggccacaagattgtttcacccaacgcatcggtgttccaccgcctggcttttcccggcgaagaacctatggtacccacca

SEQ ID NO: 38888 - DNA, 263 bp, Glycine max
  unsure (1)..(263): unsure at all n locations; Clone ID: 701120390H1
tgnatcatgtcggggaagaggccccgnccaatgatcggaaagttgtcggagttgttggtctcgagaggccgcacggtggcacttttggacaccactggaagcccaagaggcccattagacatgaagatgatgcaatcaccaagaggcttaaaaaattatgatcttggtggcgttggtcttggaattgtggtggctcttgataaatccaataacgaggttgctgcacgtgaagttttgcccaaacacaccgtttgcacctccaa

SEQ ID NO: 38889 - DNA, 262 bp, Glycine max
  unsure (1)..(262): unsure at all n locations; Clone ID: 701120391H1
aagataccttctttcagcctcccttcaacacccttttgnnccttntattcttcaaagtctcatagcaaagctcgaagacctgagaagaacaaagggttgattaaattctgtgtggttgttgttggaggttgaaacacaagttgccaccccaagtgtgtgttaatcttaaatttcacaagcaagttgcttttttggagtatnatattgtatnaccaaatatttttgtgttttaggactagatanatgcttctggtggcaattt

SEQ ID NO: 38890 - DNA, 265 bp, Glycine max
  Clone ID: 701120394H1
gccggtcgtcgccgacactgttgcttcactctgttcctcttcgtgcgaagtactaggatcagatggctttgcgaggggtttggcaacttaacaagctgattgtcagttattgcaactggggcggaagtagcagaggtataagggcatttatggagtctcatttgccagcatttaaggagaagaatcctcaattagaggtggttactgaactcatccgtggtcagcatccacatctgaagggttattacaagaacaagaatcagcg

SEQ ID NO: 38891 - DNA, 267 bp, Glycine max
  Clone ID: 701120395H1
ctaaattctctgtctacttcaccaagcacttttggttgcagctttggttaatttccaatatggtgtttcctctcctatctatctttgctttactcaatcttgcagtggtggcaacccatgcagaaaccttgccccctgaagtttactggaagtcgaagcttcccaccactccaatgccgaaagccattacagatatccttcacccagatttggcagaagacaaaagcacctctgtggccgtaggaaaggggggcgtaaacgttaacg

SEQ ID NO: 38892 - DNA, 272 bp, Glycine max
  unsure (1)..(272): unsure at all n locations; Clone ID: 701120396H1
cttacctcttcctttgcatgctcttcctctcctccgccactcccannctcggttgtggctactgtgggcaaaccccccaaaaagcacaagcctggtaaaacaccaaagacacccacagtacccgttgttnagccaccagtcacaatccctcccattgttaagccaccagtcacaatccctcccattgttaatccaccagtcacaatccctcccattgttaatccaccagtcacaatccctcccattgttaatccaccagtgacagttccacc

SEQ ID NO: 38893 - DNA, 267 bp, Glycine max
  Clone ID: 701120402H1
ctctctatgttgacgctagctagggtttctcttcctgctttgtaaatttcatcacgagtctctcatatttttaaaatgggactattctcccatcaattcgtttcacgaaattcaaatgtgtagtaggatacccagtgggttgttcttcaatcaaatgcaaactcgcggctagactcgctctaactcgtgattttatacagagttagccaattttccatcaaacacccaaaaatgtccaaaacgtcaccgtttcgctagggtttgttt

SEQ ID NO: 38894 - DNA, 269 bp, Glycine max
  unsure (1)..(269): unsure at all n locations; Clone ID: 701120403H1
ctttgtatccttcctagtgctgcttcttgcagcccttatccacatgcctcaagggcttgctacttactacaaaccaattaagaggccaccagtgtacaagcctccagtgtacaagccaccagtgtacaaaccaccggtttannagccaaaaccaccggtttncaagccgaaaccaccggtttacaagccaccatataagaagccaccatacaagaaaccaccttatggaaagtaccctccagtagaggacaacacccatgcctaaagca

SEQ ID NO: 38895 - DNA, 266 bp, Glycine max
  unsure (1)..(266): unsure at all n locations; Clone ID: 701120405H1
ggatctctatctacgaaggagcggaataaaacccttntctctgtgattaagagaatggcttcagatcggaaacttcacacttttgaggaggtggcaaagcacaaccagaccaaggattgctggctcatcatttctggcaaggtgtatgatgtcacccctttcatggaggatcatcccggaggtgatgaggttttgttatctgcaacagggaaagatgcaaccaatgactttgaagatgtggggcacagtgattctgctagagatat

SEQ ID NO: 38896 - DNA, 266 bp, Glycine max
  unsure (1)..(266): unsure at all n locations; Clone ID: 701120406H1
cacgtaccttaatttcgcaaaatcaaccaaagacagagaaanaatccaaagagtaaaaggaacagaagagaaagcttgangctatggggancaccatggganggtgtaanannnccaaggtgatganggtggatggnganacgttcaagctgaagactccagcgagagcaaacgacgtcgtaaaggactaccccggtcacgttttgctggactccgaagcggtgaaactttcgggcttcgggccaaacccttggagccgtaccagg

SEQ ID NO: 38897 - DNA, 265 bp, Glycine max
  unsure (1)..(265): unsure at all n locations; Clone ID: 701120407H1
tctcccatcaagctcgcttaaatttgngatctgatatcattgaggttgacttggaganaaatgttcagatccatgttggtccaatgagatacaggattgaagatcagctgaagcaggagttgactccggcaccagtattccctcttatagttgcatttctagttgttgcactttttcttagcatgccaagattgaaggatttgtatcaagccacggtagacatacccaccccaggacncactgcggcttcaagaaaagacgtgaa

SEQ ID NO: 38898 - DNA, 266 bp, Glycine max
  unsure (1)..(266): unsure at all n locations; Clone ID: 701120408H1
cttagtaggtcttatgatgaacatgaggagcaacatggatgacaaaacttgtncgctgcactttgcagcaaactagataatggttctaggagaaagctgtatattgttgatgcacggcctaggaaaaatgcattggctaatggtgccatgggaggtggttcagaatcatcatcaaactattttcaatctgagatagtcttttggggatagacaacatccatgcgatgagagagagctttgttcggctccgagaatacatggacact

SEQ ID NO: 38899 - DNA, 249 bp, Glycine max
  unsure (1)..(249): unsure at all n locations; Clone ID: 701120409H1
cgaggagcagccttcaggaggtacnaggatgtctcacaanccagttcgagcacccaaggacacggttcactgggatttcttcccaggaagcgtgctgctcgtcacaggggaaaagtgaaggcattccccaaggatgacccatccaaggcacccaagctcactgcattcttgggttacaaggccggtatgactcacattgttagagaggtcgagaagccaggatcaaagcttcacaagaaggaaattgtg

SEQ ID NO: 38900 - DNA, 257 bp, Glycine max
  Clone ID: 701120410H1
caacaacagacactacctcactgcttccgtttacggatttcaatcgcttcgactcgcagctcccatggcaaaagctacttccggaaccgtcaatcctcacagccgtaccggagttcggattgtcgtcgccggagaccagggcaccggaaaatctagcctcatcatcacggccgccgccgaaaactttccggtgaatgtaccaccggtgttgcctcccacgcggttgcctgaagatctgtatccggatcgcgtgccta

SEQ ID NO: 38901 - DNA, 263 bp, Glycine max
  unsure (1)..(263): unsure at all n locations; Clone ID: 701120411H1
gtgagaggggtgctaagatcaccttggctgagtcactgcctaaggtgcagctcacaaggattgatacttgagtgggtgcatgtggtgggggaagggtgggctagtcccttgaaagggttcangagggaggatgagtatcttcagagtttgcatttcaattcccttagggtcaaggatggttctgtggtgaacatgtcccttcccattgttttggccattgatgatgagaccaaagagagaattggatcctcttcccatgtggg

SEQ ID NO: 38902 - DNA, 206 bp, Glycine max
  unsure (1)..(206): unsure at all n locations; Clone ID: 701120412H1
aaacccaatcgaagaaaaataaaatgttgttccacaatccaccacatancgactgaaaaaaaaaaactcagtttgtgggtttattatactttgattgattaattaattattagttattagttagttggttaatcaatggaagagtgtcacacggtnttcggaaagtacgagatggggaggcttctcggcaaggggacgtttgccaa

SEQ ID NO: 38903 - DNA, 265 bp, Glycine max
  unsure (1)..(265): unsure at all n locations; Clone ID: 701120413H1
cacaccacnacgcctccacgngccttattcnanncacccctaantngngtaaacngcgcactaccacnccactaccctccccgccatcngcgccatcaccctcacccaggacgaccncaagagactcgccgccgacaaggccgtggagtccgtcaagagcggcatggtcctcggcctaggcaccggctccactgctgccttcgtcgtcgccaagcttggcgcccttctcgcctccggccaactctccgacatcgtcggtgtcccc

SEQ ID NO: 38904 - DNA, 170 bp, Glycine max
  Clone ID: 701120415H1
cttgggtaggcctggtggtattgctgtgtttgattgtcacggccatcgccgaacaatgcggtacgtcaagctggcgggcagacatgtcccaacaacctatgctgcagccagtacggttggtgtggaaacaccgaagaatactgttccccttctaagaactgccagagcaa

SEQ ID NO: 38905 - DNA, 263 bp, Glycine max
  Clone ID: 701120416H1
ctgagacggggtcattctcagagattctcacggtattgctcaggtcaatagcgtcactggcagcaaaatccttcgcatcctcaaagctcacggacttgcgcctgaaattccagaggacctgtaccatttgattaagaaggcagtttcaattaggaagcatcttgagaggaacaggaaggacaaggactccaagttcaggttgattcttgttgagagcagaatccaccgacttgctcgctattacaagaagactaagaagctcc

SEQ ID NO: 38906 - DNA, 269 bp, Glycine max
  unsure (1)..(269): unsure at all n locations; Clone ID: 701120417H1
gcaagcctngagctcattgtgccacacttaanaaattatatgcagcagagaagaaacttttcaaggcattaaaggaggagggaattgttgcattggagtttgacaggaagtccatgttattgcgtaaacaagaggatgagaatcttgacgtggtcaagattgacaaaactcgatcaagtgttgataagttggagtccgatttaataagcctaaggcagtgcatcagtgacacaacttcatcaattttggaatgatagatgaggagcttt

SEQ ID NO: 38907 - DNA, 268 bp, Glycine max
  Clone ID: 701120419H1
gatgtatttaacaagaactatgacttcccaaagcctaatttgaatccacttgtcaagttactagcaactggccttgcaggctatgaaggagaaaagtggagcaagcacagaagaataatcaaccctgctttcaatttagaaaaattgaagatcatgttaccattgttcctccaaagttgcaatgatctggttagcaaatgggaaggaatgttgtcttcagagggatcatgtgaaatggatgcatggcctttccttcagaatctgacta

SEQ ID NO: 38908 - DNA, 267 bp, Glycine max
  unsure (1)..(267): unsure at all n locations; Clone ID: 701120420H1
cttgccgctaagaagaagcctgagaaggtcacgaatccgttnttcgagaagcgtccgaagcagttcggaatcggaggggcgttgcctccgaagagagacttgactaggttcgtgaagtggncaaagaatgttcaaattcagaggaagaagaggattctgaagcagaggttgnaggttcccccagctttgaaccagtttaccaaaactcttgacaaaaacctagcaacaagtctgttcaagttgcttctgaagtacaggcccgaggac

SEQ ID NO: 38909 - DNA, 266 bp, Glycine max
  unsure (1)..(266): unsure at all n locations; Clone ID: 701120421H1
gctcaatctgctgcaaaacagaattntgatgaaatgtccatgcaggacaacattgacaaggattagtaccgcctcaattccttctcctgtctgcaancaagttatgcctgatcatgttgccccgaggggattgtttgattttcctaagaccggagttaaaacagcttctgcagaaacaagttctcttaggtctgggtgtagcaaggatgatgctggaaactgctctcaaactacttccatatatgggtctaagcttagttcatggg

SEQ ID NO: 38910 - DNA, 266 bp, Glycine max
  Clone ID: 701120422H1
gcagatgtggatcccagaggctgcgccgcactggatcattccctcaaatccctagaccgccggatctctccctacgtctcctccgaccgcacaatctgggccgacgccgccgattctgctgccttcctcgacgccgtggacgagctcgtcgccgtcgtcgccgagtggaaccacctcgcctccgacaagtccgtcgccgcctgcctcgtccgcgccgaggacatgctccagcacgccatgttccgcctcgaggacgagttccgctc

SEQ ID NO: 38911 - DNA, 265 bp, Glycine max
  unsure (1)..(265): unsure at all n locations; Clone ID: 701120423H1
caaactaacaaataccgcaccaaacaaaaantaaaaaacgaaatcaaacggaatttaattactaattccaagtttccaacccttaaaataaantatttaaatcgcttagcgcaacaattcacagcttgtgcttttatgttgtttccctaacaaaaattaaataaatagaagcatctttctgttcttttatttcaccgccattcatttcattgacgtatagggcttgcgtatcatnnngntgttcttcttcctttctctgcttgca

SEQ ID NO: 38912 - DNA, 267 bp, Glycine max
  unsure (1)..(267): unsure at all n locations; Clone ID: 701120424H1
gggaaccccataaagcccatcaccatttgcatgattggcgccggtggcttcattgggtcccacctctgcgagaagctcatgtcggagacccctcacagtgtcctcgccttggatgtctacaatgacaagatcaaacacctcttggaaccccacacgctcccttgggcctctcgcatccagttccatcgcctcaacatcangcacgattcccgtctcgaaggcctcatcaaaatgtcagatctgactattaatctggctgccatttgc

SEQ ID NO: 38913 - DNA, 266 bp, Glycine max
  Clone ID: 701120425H1
gcagctgctgttattcgcaccgcaaacaaacagtgagccatggccgtcggaaagaacaagcgcatctccaaagggaaaaagggtggcaagaagaaggcagctgatccctttgccaagaaggattggtatgacattaaggccccttctctttttcaagtgaaaaatgttggcaaaaccctcgtctctcgtacgcagggtaccaagattgcttctgaaggacttaaacatagagtgtttgaggtctccttggctgatcttcaagggga

SEQ ID NO: 38914 - DNA, 267 bp, Glycine max
  unsure (1)..(267): unsure at all n locations; Clone ID: 701120426H1
gcgacctatacccggcngtcngggcaaggnccaanccccgatgagtaggagggcgcggcggtcgctgcaaaacccanggcgcganccgnnncggancngatcntcggtgcagatcttggtggtagtagcaaatattcaaatgagaactttgaaggccgaagaggggaaaggttccatgtgaacggcacttnccacatgggttagtcgatcctaagggacggnggaagcccgtctgatanacgctctntncgcntactccgaaaggga

SEQ ID NO: 38915 - DNA, 241 bp, Glycine max
  unsure (1)..(241): unsure at all n locations; Clone ID: 701120427H1
gcggaaaccggaatatctcagttctctgatcagatccatccgacgtcgtttcagtgataatggctccgttcagcggcgatgagacggcaccgtttttcggcttccttggagccgcagctgccctcgtcttctcctgtatgggagctgcctatggcacagcgancagtggcgttggcgtggcttcgatgggtgtgatgagaccagagctggtgatgaagtctattgtccctgttgttatggc

SEQ ID NO: 38916 - DNA, 259 bp, Glycine max
  unsure (1)..(259): unsure at all n locations; Clone ID: 701120429H1
ggaagatgagggctgtgaccgttttcctgtgggtatgcgtgttcttgctgtggatgacgacccaatttgcctgnaggtgttagagaatctccttcgcaaatgccagtatcatgttactacaactaatcaggcagttgaagcgctgaaaatgttgagggaaaacagaaataagtttgaccttgttatcagcgatgtgaatatgcctgacattgatggatttaagctccttgagttggtgggacttgaaatggacctacct

SEQ ID NO: 38917 - DNA, 261 bp, Glycine max
  Clone ID: 701120430H1
cacgagactcatacattgtgctgccaattatagtaactctctatttctctttccatctctcaagttctgaagaagaaacatgtgtggaggtgctatcatctcagacttcattggtgtgaagcgtggccgcaacctcgccgcgcaggaactatggtctgagcttgaccctttctctgacttccttggcttcgataccaccaattccaaaaaccaaccacccctgcagaaaattccagacaaaaaagtggtgtcatcatgtga

SEQ ID NO: 38918 - DNA, 261 bp, Glycine max
  Clone ID: 701120431H1
tcacgatctgaggaagacaccaatcttctctccacgcccttcttgggtaaccgtctgaagtgcagcaatggcagatggattgcattcgcagcatccatcggtagttcagaagttatctggacagtcttatcttgtgtccaggcttgctcctaatcactccagaaactgttctaccactggtagttacttcaatggaggtttgcagtcttcaggtttggttccagtcacggcacacgcgccggctgagaaaggggtgtctgg

SEQ ID NO: 38919 - DNA, 257 bp, Glycine max
  unsure (1)..(257): unsure at all n locations; Clone ID: 701120432H1
gtttagaatggctgctgctattgaaatccccacaatagtgtttccaaactacctctgcccaacagaggatgccagtggttggaatgggatctgcccctgacttcacatgcaaganagacacaaaggaggctatcattgaggccgtgaaacagggttacagacacttcgacactgctgctgcttatggctctgaacaggctctcggtgaagctctcaaggaagctatccatcttggcctcgtctcccgccaagacctc

SEQ ID NO: 38920 - DNA, 264 bp, Glycine max
  Clone ID: 701120433H1
tttgtgctgccggtaacttgaaccaagactttcagcttacgtggggagatggtcgtgctaaaatactcaacaacgaaaatcttctcactctctcccttgacaaggcctctggctctggcttccaatccaaaaacgaatacttatatggcaagattgacatgcagctcaagctcgttcctggaaactctgctggcactgtcaccgcctattatctgtcttcaaaaggatcaacatgggatgagatgacttcgagttcttggggaa

SEQ ID NO: 38921 - DNA, 255 bp, Glycine max
  Clone ID: 701120434H1
gtaagtatgaactaattcagactgtgaaactgcgaatggctcattaaatcagttatagtttgtttgatggtatctgctactcggataaccgtagtaattctagagctaatacgtgcaacaaaccccgacttctggaagggatgcatttattagataaaaggtcaacacaggctctgcctgttgctttgatgattcatgataactcgtcggatcgcacggcctttgtgccggcgacgcatcattcaaatttctgcc

SEQ ID NO: 38922 - DNA, 267 bp, Glycine max
  unsure (1)..(267): unsure at all n locations; Clone ID: 701120435H1
attgaaccctaanggctgctctcttgaggaggttngcgagcgccactcngatcccatccaattccncncacaccaatcnngagnntcccttcacngccatcgcngccatttncggcggagtctccttccttttctaccatncctctcccaacttcgctgcattcacaagangccagaacaagtggaaagtaaaaacatcgcactcgttccggataaatgggtcgagtttaagttgcaggatactgctagggttagtcacaataccca

SEQ ID NO: 38923 - DNA, 262 bp, Glycine max
  Clone ID: 701120436H1
ctttatagtttactattgaaagatgggtttgaaaatggcaatactgatcctaggcctgctggccatgttccttttggtctcctcagaggtggcatccgcgaattcaaaagaggtgacaaatggagttgaagatgccaaatatcctggtggaggctatggtgggggttacccaggcaatggcggtggtggctatcctggccgtggtggtggctaccctggtcgtggtggtggctatccaggtcgcggtggtggttaccctggt

SEQ ID NO: 38924 - DNA, 262 bp, Glycine max
  unsure (1)..(262): unsure at all n locations; Clone ID: 701120438H1
ctctcctctctctctctctacaaatccttctttcttctcttcgctgctcactgtagcgtanccatggctttcagagttggaggagcgggaggaggaaatgcctcttctggcatgggtgttgctgagcatagcgtaagcacgttcctggaattgcagaggaagaaagttcatcgctatgtgatttttaaaattgacgagaaaaagaaagaggttgttgttgaaaaaactggaggccctgctgagagctatgatgatttcactg

SEQ ID NO: 38925 - DNA, 265 bp, Glycine max
  unsure (1)..(265): unsure at all n locations; Clone ID: 701120439H1
ggcggatccntcttnggttctcagnatanncggttcatctgctcttgaatntggcagangcattgaaaagacttggctcgtcatatttgggtgcagaggatncacactgatggcaagcaagatgaatcttcatcaagtttcagacagggagatgggnaggataatattgttcctaagagnttccctgtttgtgatgatcgtcattcagagttgattccctgcttagatagacaccttatctatcaaatgaggatgaagctggacc

SEQ ID NO: 38926 - DNA, 151 bp, Glycine max
  unsure (1)..(151): unsure at all n locations; Clone ID: 701120440H1
gngcaactgtacgaggnactgatgctgaggtacttgggttcagcctcctcatgttcaggagctcaactnnataannctcttccatgcttngntcccantcnctaaacactanacatacactctccttnantatanntntgtattgntccnc

SEQ ID NO: 38927 - DNA, 262 bp, Glycine max
  Clone ID: 701120441H1
gcttcatttaacatcattcctagcagcactggagctgccaaggctgttggaaaagtcctccctgctttgaatggaaaattgactggtatggcattccgtgttcccactgtggatgtctctgttgttgacctcacagtgaggctggagaaggaagcctcctacgatgaaattaaaaatgctatcaaggaggaatcagagggcaagttgaagggaattcttggttacactgaagatgatgtggtctccaccgactttgtgggcg

SEQ ID NO: 38928 - DNA, 260 bp, Glycine max
  unsure (1)..(260): unsure at all n locations; Clone ID: 701120442H1
ctgccttgtgctcacaattttcatgtcgaatgcattgatgagtggcttaggttgaatgtgaaatgtcctcggtgccgttgctcagttttcccanaccttgatcttagtgcactgtccaatctccgtgctgagcctgaacaatcttctgccagtgttgtgacaacaaccagatatgtgagaggccaaccatctagtcaaagttaccggctaagattgcagggtcttctgcgtccagtccgtgctgaaattgcaggaccagt

SEQ ID NO: 38929 - DNA, 261 bp, Glycine max
  unsure (1)..(261): unsure at all n locations; Clone ID: 701120443H1
gggcctctatgggcctcaaagaagggcccattttcttctttgctattgggctggcccactacatagtcatgtttgtgaccctctaccagagacttccaacaaatgagacacttcncaaaagaactccatcctgtgttctttctgtttgttgcagcaccaagtgttgcttccatggcttgggccaacattcagggttccttcgattatggatctcggattgcctatttcatgccctctttctttatttctcatggctgtccg

SEQ ID NO: 38930 - DNA, 257 bp, Glycine max
  Clone ID: 701120444H1
ttcttgttctttctacatctgaaattaacagtatcccgttacagttaaagttaccgggggagggaacgatcggtgactggctgtgttagggcttttgaatcctcttctgctaaacccatgagttggtgtgatagcgttcaggaaccacggattctcgtcgcacccgatcctggtactgatggaaatggtctgggacagatgatatcgctccgccatcccaaatctggaaatgcaacacaatatctgtttgtaaatgg

SEQ ID NO: 38931 - DNA, 259 bp, Glycine max
  unsure (1)..(259): unsure at all n locations; Clone ID: 701120445H1
tccttgttttcttcgttgctacaattttggtagcatggcaangccatgcgtaacgatatgttccctctccgaatgaacactggctatggtgcccgtactccggaggtgaacatgcgcaagttggaggcttgctgtggacgcacacaacatctttggctttgagaccattcctgaagagtgcgttgaagcaacaaaggaatacatccatggcgaacaatatagatcagactccaaaacagttaaccaacaagcttacttt

SEQ ID NO: 38932 - DNA, 256 bp, Glycine max
  Clone ID: 701120446H1
gttcttgttctttctacatctgaaattaacagtatcccgttacagttaaagttaccgggggagggaacgatcggtgactggctgtgttagggcttttgaatcctcttctgctaaacccatgagttggtgtgatagcgttcaggaaccacggattctcgtcgcacccgatcctggtactgatggaaatggtctgggacagatgatatcgctccgccatcccaaatctggaaatgcaacacaatatctgtttgtaaat

SEQ ID NO: 38933 - DNA, 248 bp, Glycine max
  unsure (1)..(248): unsure at all n locations; Clone ID: 701120447H1
ctgtgaatctgacacttttaattggttcaggaatatccatcanttttttatcaattgaagaattggaatagagaggtttttgactnttgaaaaatgaatcctccttataaaagannttgatgcgtagatgctagaaggggttgagcttaataattttcttgaactggaatatataaaagattaggagtatgaacaaagtgccagtgtggaaaggagnccattagtattagaaatccaaagccaatggt

SEQ ID NO: 38934 - DNA, 260 bp, Glycine max
  Clone ID: 701120448H1
ggcacttctccaatctcaacaactttcgtgtagtgcactgttttgctatagtaacccattaattaaaccgacctacgtagtagccatgaagagaggcagagaagagagtaagttagacatggctaattgcttgatgctattgacgaaagttggagagagtgaaaccaattacccaatatcaaagggtagtgatattggtgatttcaagtgcaagacttgcaatagaaggttctcttcttttcaagcccttggtggccata

SEQ ID NO: 38935 - DNA, 265 bp, Glycine max
  Clone ID: 701120450H1
cttgggcagatcatgttcatcatatctatccttgggcctctgctttgcactacgcaaataccccagaggccctctgcagttacaaaaacagcagggattgtgtagattacaaaaaaggaattaaggggcgatgtgttgtggctgcgattaacaattacacaacgcagctccttgaatatggcagtgacactaaatctagatataacctcacgcaatctctattcttcctttcacattttatgggggacatccatcagcctctaca

SEQ ID NO: 38936 - DNA, 263 bp, Glycine max
  unsure (1)..(263): unsure at all n locations; Clone ID: 701120452H1
ttctctctgtgtatttccctacctctcccttnaagatgcagatcttcgtcaagaccctcaccggcaagaccatcacccttgaggtggaaagctctgacaccatcgacaacgtcaaggccaagatccaggacaaggaaggaatccccccggaccagcaacgtctcattttcgccggaaagcaacttgaggacggccgtacccttgctgactacaacattcagaaggagagtactcttcacctcgtcctccgtctccgtggtggc

SEQ ID NO: 38937 - DNA, 262 bp, Glycine max
  unsure (1)..(262): unsure at all n locations; Clone ID: 701120453H1
gtttctctcaaggatgctgccaactccactgatgaatcagtgtttcatccgcttccaactttgtttcggttgctgggtttaaacccttttaagaaggcggagttaactcctggtgatttctattccaacaaacgtcctctcngtcaaagggtcccattaccacgtaccaagtctgagcatccttctcaaaatggtcaggagaatgacaatgaggattccatttctgaaattgatgttgagaacattgttggtgttggatcga

SEQ ID NO: 38938 - DNA, 262 bp, Glycine max
  unsure (1)..(262): unsure at all n locations; Clone ID: 701120456H1
catatatcnaagggagcaaaatttntnatgatggcggtttggtagagaagatggttttcantgngcgtggaccattggagagtnttggcgangatgncattagtgctcccctttatgaaggaagtgtttgtggtgaagaacttctgacatggtgtcttgagcatcctttagcaagcaaaggttgtggaaaagcaaggattccaaggcaaaagttggtnagtaanccggacagtaggctgcttaacgaatgtggaggcntttc

SEQ ID NO: 38939 - DNA, 262 bp, Glycine max
  Clone ID: 701120457H1
gctcagtattactaattgccacaaactctctgcactgccgcaagaaattggaaagttggagaatttggaactcctaaggctcagttcctgtactgatttggaagggttaccagattctattggaaggctttcaaagctacgacttcttgatatctcaaattgcataagccttcctaatttgccagaggactttggtaatctgtctaatctacaaaatctctacatgacaagttgtgcaaggtgtgaagtgccaccctcaatc

SEQ ID NO: 38940 - DNA, 263 bp, Glycine max
  unsure (1)..(263): unsure at all n locations; Clone ID: 701120458H1
caaagttccgctgcaaagcagggtgcgtcactccactatccagccatgcaagtcctgcaaacctcttatctacttcacttncccnaaacccctaaacccttccccttctcatttccacnaccgtcttccgcnacgccctccgccnttcttccaccgccgccccctcagcattcccaaatccttcagctccgacgagttcccggtggacgagaccttcctggagaacttcggccccaaggacaaagaaaccgaggacgaagccc

SEQ ID NO: 38941 - DNA, 117 bp, Glycine max
  unsure (1)..(117): unsure at all n locations; Clone ID: 701120459H1
cgcgagccggtntagatctcaaaantgctngcnncatacaccatacantacctgtagatacnttacacnantttggtacactgtanacnacccancnataccacccaccangacgtg

SEQ ID NO: 38942 - DNA, 53 bp, Glycine max
  unsure (1)..(53): unsure at all n locations; Clone ID: 701120461H1
gcacaaggngcgtnctggatncgagggtccctggacctcnaatcctcntantt

SEQ ID NO: 38943 - DNA, 260 bp, Glycine max
  unsure (1)..(260): unsure at all n locations; Clone ID: 701120464H1
taggaagagagacaaggagagagaccatggggacaaggntatgaagnnagantccngagagagacagagatcgcaatacgtgaccaagaaagggacagaagggaccgtgggagtgaggctgagcaggaacagcgaacagaagtagatctgataggcttcgaactgatctggatgacaaagacagagaggcaagtcgtgacagggagtatagagatagagaaagaagtcnggataaggttacaaagacagagaaagggtgt

SEQ ID NO: 38944 - DNA, 264 bp, Glycine max
  unsure (1)..(264): unsure at all n locations; Clone ID: 701120465H1
caccgttgcgcccacacaccttccctttgtttccattttccattttctcattctcacttccaaaactcctccattcattcctcgcatttccatcttncaaagctctttctctcaaaggtttttctttttctttctccattaacaattatntttactcattcttttcatgtttcctgactccatgaaaacaaaagaacaccaataaaaattgtttttttaatcaattgttttgtgtaatttaccatttactgcgatgccgtgagg

SEQ ID NO: 38945 - DNA, 257 bp, Glycine max
  Clone ID: 701120466H1
gccaatttgttaggtcatactatgctactattacaacttttttcagaggatttggttaatgttagaacaaacagttaatttatactgagtaaaaatgaaaaaaagtagaggtgcattgcatctagtgttaatttcaattaatttattttgtaattcctaacattaaatcaattgttgatgttagtatagaacaaatctattttcagaataacctaaaacaaaatcatcataatcgttagaaacaccacacttggagt

SEQ ID NO: 38946 - DNA, 262 bp, Glycine max
  unsure (1)..(262): unsure at all n locations; Clone ID: 701120467H1
ctgaatcgtgcgtgttttgcgattctgacttgtttttcatttanacttnttgggcctttgaaagcttaaaaacctangacgcccaanactcaaaacaaggcagaaccgctcaactgcgccgtgaaactcttcttctcattcacattcagttgcgcgaanaccatcaggctctgcaaatgccaatggtggatntggagggcacagaaggttacataccttccacagagtatgtggaagacagcaacgaaacactcattaactt

SEQ ID NO: 38947 - DNA, 256 bp, Glycine max
  unsure (1)..(256): unsure at all n locations; Clone ID: 701120468H1
tgacttgttcgttcccaatgaaagaaaagatgttattacttccacagcttgttgggctgctatgttgggattgctgttggattggggtttgnaatgggtccaattcaacttcttaagctttatggtgttccctatgttatattcgttatgtggttggatttggtgacttatttgcaccatcatggccatgaagacaaattaccttggtaccgtggaaaggaatggagctacctcaggggtggtctaactactcttg

SEQ ID NO: 38948 - DNA, 261 bp, Glycine max
  unsure (1)..(261): unsure at all n locations; Clone ID: 701120469H1
cccttcccttcgactccacggcnccagatcccgangagtttgggaaaccctaattcattcctctttgcttctatctctattaccctaacaccagtgatggcaggtttgnctccagaaggatcgcagtttgatgctcggcaatatgactctaagatgaatgaattgctttccgctgatggacaagaatttttcacttcatatgatgaagtctatgatagttttgatgcgnngggccttcaagaaaatcttctcagaggnnna

SEQ ID NO: 38949 - DNA, 259 bp, Glycine max
  unsure (1)..(259): unsure at all n locations; Clone ID: 701120470H1
ccttcatcntgtctcaattttngtggcntcagnaaagttaaagttaatcaagtcagagattctgacaactgcatgcctgctgcatccatggggccctcctatagtagggaagataatagtacaatttcagtaggtgctggctanaataagaatgatggcgacaatatttcattgggtcctacttataacaatggntatgacaacaccattgctatggggagcagaattagtaagactgatgacaatcttctttcaatgg

SEQ ID NO: 38950 - DNA, 259 bp, Glycine max
  unsure (1)..(259): unsure at all n locations; Clone ID: 701120472H1
ctccgcaccagtttcaccgcacgaatatcttgttgtttggagcnatccgagaaaaactctgtaaacatgttggtttaccaggacctccttacaggtgatgagcttctctctgactccttccgttacaaggaaattgagaatggaatgctgtgggaagttgaggggaagtgggttgttaaaggagcagttgatgtagacattggtgcaaacccttctgctgagggtggaggagaagatgagggagttgatgatgcagctg

SEQ ID NO: 38951 - DNA, 261 bp, Glycine max
  Clone ID: 701120473H1
ggagcgaggtttcttcatgcaacatttttgttgttaagggtaacgttatttcaactaccagctattaaagggacaatcctacctggcattactcgcaaaagtataattgatgttgctcgaagccaagggttccaggttgaggagcgattagtgtcagtggatgaattgctagatgctgacgaggtcttctgcacgggaacagctgtggttgtatcacctgttggcagtattacttatcttgacaagagggtagcatatggg

SEQ ID NO: 38952 - DNA, 256 bp, Glycine max
  unsure (1)..(256): unsure at all n locations; Clone ID: 701120474H1
ggcaaagaggactctctcttccactgctcaaaccaccntagagattgattccttgtacgagggtattgacttctacacaaccatnancgcggcccgttttgaagagctaaacatggatttattcaggaagtgcatggagcccgtggagaagtgtttgcgggatgccaagatggataagagnaccgtccatgatgttgttcttgttggtggttctactaggattcccaaggttcaacagttgttgcaggacttcttc

SEQ ID NO: 38953 - DNA, 254 bp, Glycine max
  Clone ID: 701120477H1
gcttctgcagcccccgcgccgccagagaactcgctctgtcgataatctatgcagcgtgcttggaggggatggacccggttcggctcttcgagaaacggatgaatgcccgacgagaagctgggtataaatttaatgaggaaaagttgttggagtataatcatatgagttttggagggtcgcctgttactgttggatcggatgaagaagcaaatgagcttctgcggcacattgaagaagagtctgccattgaagca

SEQ ID NO: 38954 - DNA, 235 bp, Glycine max
  unsure (1)..(235): unsure at all n locations; Clone ID: 701120478H1
aattccaactcttacaagctttncaccaatctttcacaanngcttgttcaaggcgaaacagcttataggatgaagagcaaaatcttgaaggcactaccaaaagcagttgcagcagtcaccgtgacatttcaaaaccatccattcagcccaggcagggatcacaaatcaaagcctatcgtatctatgattccccatgaagctagaagaaaaacccacgatagaggcaataacggct

SEQ ID NO: 38955 - DNA, 254 bp, Glycine max
  Clone ID: 701120479H1
gcatctgtgtgagtttacgggccttgacgttgaaatggagatcaagaagcattactttgaggttatggatttagtacgatagattgtttgttgcaatgtttgacagtttgaaccagaattgtaagaaggatctggaagctgtggggtctcagtacccatttgaacctttaaagtatctgcggaagacactacggcttacatatgaagaagggattcagatgctcaaggatgttggagtagaaattgaaccttat

SEQ ID NO: 38956 - DNA, 255 bp, Glycine max
  unsure (1)..(255): unsure at all n locations; Clone ID: 701120480H1
ggacaccacagatttacacaaatgtgtggcatacatacgtgacctcaccccaaatgttgatggatcagaagtgagttgaatacttggttatagtatttattttctgattttcttttggagagtggagatagcggagtgaactgatgtcaattttaactgtggactcaaataattttggaataattgaaatgaattaagtctggtgccatacctgctttaatccctttttgacagtnnagaatgttatcatgctat

SEQ ID NO: 38957 - DNA, 261 bp, Glycine max
  unsure (1)..(261): unsure at all n locations; Clone ID: 701120482H1
caggcggtgggacccaccgggttacccgttgataacaggcgcgtggatttcaacatcatttctggcacgtccatgttcgtgccctcacgtgagcggcttagccgcgctgatcaagtcggctcaccctgattggagcccagccgcggtccgatcggctcttataacaacggcttacacagtttacaaaaccggtgagnagctgcaagacagcgcaacgggaaagccctccacgccgttcgatcacggttccggacacgtgga

SEQ ID NO: 38958 - DNA, 260 bp, Glycine max
  Clone ID: 701120483H1
ttcatgccctcaaacccaaccccaagtcccacatccaggagaattggaggatcctcgatttcttctcccaccatcccgaaagccttcacatgttctccttcttattcgacgacgttggtatccctcaagattacaggcatatggatggcttcggtgtcaacacctacacccttatcaacaaggccggcaaagcactctatgtcaaatttcattggaagaccacctctggcgaaaagtctcttttggacgacgaggccatc

SEQ ID NO: 38959 - DNA, 259 bp, Glycine max
  unsure (1)..(259): unsure at all n locations; Clone ID: 701120485H1
cnttcatatcatatcaattagatttgttttcagagtttgctagtgagataccatggacaactacaacagcaatgacttttggnaattcagtgaccagttgaggcttgaatctggtttggccaatctgtctctgaatgattattccatttggagcaacagctacagctccaagaggcctgatcagaggaggaactttgatgtcaagggcagtgatttcaacaactcatcaaagccttttgatgatgatttcaatgatggc

SEQ ID NO: 38960 - DNA, 258 bp, Glycine max
  unsure (1)..(258): unsure at all n locations; Clone ID: 701120487H1
cccagagctccttcgcctcatcgatagtttcaagtctcgttttgacaatggtgagggttagtgtgttgaatgatgctctgaagagcatgtacaacgccgagangcgcgggaagcgccaggtcatgattaggccatcctccaaggtcatcataaaattcctattggtcatgcagaagcacgggtacattggtgagttcgagtatgttgatgaccacagggctgggaaaatcgtggttgaattgaatgggcggctgaata

SEQ ID NO: 38961 - DNA, 258 bp, Glycine max
  unsure (1)..(258): unsure at all n locations; Clone ID: 701120488H1
ctctctctacaaaacttagctctgtttttaattattccttgcattctcttgtattaagatggaagcaactaccatcaccaatgggancccaaacggttcnttttgcttntccactactaagggaagtagtgatccgttaaactggggagcggcggcngaggcgatgaaggggagccacctggacgaggtgaagcgcatggtggccgagtaccgcaagccggtnntccnnntcngcggaaagacnctcaccatcgctca

SEQ ID NO: 38962 - DNA, 257 bp, Glycine max
  Clone ID: 701120489H1
ttaattcttcgtgttcttgtgatctttctgttggagtatttacaacactcctttgtaagtttaactaaagaggctaattaattttcaattggaccacagcagatggctgaggagggtcacagggttactctaaatgtttatgacttgagccaaggtcttgcacggcagctttcaatgtcctttttggggaaagctattgaaggcatatggcacacaggagttgttgtttatggtaatgagtattactttggtggggg

SEQ ID NO: 38963 - DNA, 256 bp, Glycine max
  Clone ID: 701120490H1
ttttgcatcagcaggagctggggctttggttgaaacccatcaaggactggtctgctgtgatagatctgaaaactcaactaagttatttcaagaaagtcagcaagatattgagtcaggaactaggagatgcggaaaccacaactctgctggccaaggcagtgtacttgattaacattggaagcaatgattatttagtctctctgacagaaaattcgagtgtctttactgctgagaaatatgtcgacatggtagttgg

SEQ ID NO: 38964 - DNA, 261 bp, Glycine max
  unsure (1)..(261): unsure at all n locations; Clone ID: 701120491H1
cagagcgcaacaatattgaagcagaacgaaaaccaaaagcaattcctcgcaaagaagctccncacaaaaccatacgccatcagtacactactcctgctcctcctactcaaaacagacagagagaaagcaattttgacccggatagatttgcttcagccagaaaacggcttcaagagaactagcaagatgctgcaaatgccaaanagcngggaacgattcaagtgatggatctccatgagttaccaaaacccaagantgcct

SEQ ID NO: 38965 - DNA, 147 bp, Glycine max
  unsure (1)..(147): unsure at all n locations; Clone ID: 701120492H1
gcaagantanagatttccaacntacctggaggngcaagaanattttgagaaagccgcgaaattctgttacggcgttaacttcnagancaccgttcncaacntggnngcnctgcactncnccgccgtgttcctccanatnaccgacgt

SEQ ID NO: 38966 - DNA, 256 bp, Glycine max
  unsure (1)..(256): unsure at all n locations; Clone ID: 701120493H1
gttctgctgcatctccaaccctgggaacagcatctccacactcatttccaaattatcaagcactaatgnaattaacacaaccaaaaaaatttagaaacagaagaaacatatcaataacttaagtcacatacattctgacaccaaaaaaaaggaaaggaacttgagccacattctgtccctggtggactcaagaagagtctttcataggacagttaaaattatagcttgcaaaaaggtttcactagcaaacattgca

SEQ ID NO: 38967 - DNA, 257 bp, Glycine max
  unsure (1)..(257): unsure at all n locations; Clone ID: 701120494H1
ctcaaaattcccctccacactcattctcccancnnttttccctttctctctctcattctcttctccatacgcgcgtaagaaacacattttagttgctactaatgggaactgttgaagctgcaaacaaggatgcaaatggaagtctcctagagaaaaatccttcagttgtttttgtgttaggtggcccaggaagtggaaagggtacccaatgtgcaaatattgtccaaaattttgggtatactcatctcagcgctggt

SEQ ID NO: 38968 - DNA, 256 bp, Glycine max
  Clone ID: 701120495H1
agaatatgggggatttctcaaacctgaaatagtggaggacttccgtaactatgctgacttttgcttcaagacatttggtgatcgggtgaagcactgggtaaccctaaatgaaccatatggctacagcgtgaatggctacagtggtggaaattttgcaccaggtagatgttctaactacgttggaaaatgccctgctggtgattcttccaccgagccctacattgttaaccaccacttaatacttgctcatggagca

SEQ ID NO: 38969 - DNA, 197 bp, Glycine max
  unsure (1)..(197): unsure at all n locations; Clone ID: 701120496H1
tttagggttttgttttgctgctgcctccgttccccccttctcataaacaacgcgttttctcttctgcttcgtatctattctttgcttttngttttggttgattcaaggccttcacagcattcgttgcggcattttaatcgatttatccaagcaggactgaatgaactaatggagtctaaaggtgggaaaaagaagtc

SEQ ID NO: 38970 - DNA, 275 bp, Glycine max
  Clone ID: 701120501H1
gactgcctttgtatgctttcaagaaggtggacaaggtttgtggaaatgaattgcctttgcttggatgcaaggagcagcaccctgtggcctttctggactcgcttgttcttggagagtgggaagatcgcatgcagagagggcttttccgctatgacgttacagcctgtgaaaccaaggtgattcctggggagtatggtttcattgctcagctgaatgagggtcgccacctcaagaagagaccaactgagtttcgtgttgataaggtcctccagccc

SEQ ID NO: 38971 - DNA, 274 bp, Glycine max
  unsure (1)..(274): unsure at all n locations; Clone ID: 701120502H1
ctttagtttctccaattttctttctcaattctcaacaatggncactacaacacaacttcacttaccccctggattcagattccatccaacagatnaaancaatcgtcatccactacctttgtcgcaaatgcgcttcgcaacatatcgcggttcccataatcgccgaaattgatctgtacaagtacgacccttgggaccttccaggaatggctttgtacggagagaaagagtggtattttttcacgccgagggaccgcaagtacccgaacggttt

SEQ ID NO: 38972 - DNA, 271 bp, Glycine max
  unsure (1)..(271): unsure at all n locations; Clone ID: 701120503H1
ggccaatcctcccccaacccacaagagggttggcacacaacaaggaccaagaggataaggaactctgccttggacttcaacaccatctttggatgatgcaaacctcttgtgggttgggggaggattggtctactaggagactcagtaggcataataataaggtgattcctccaagctgtggagagttggtgttgtngtcacagtgctcagagaactcaaagtgcaggtggtgcaccagtgaggaccttgatgacatgtgcttctctaaatc

SEQ ID NO: 38973 - DNA, 270 bp, Glycine max
  unsure (1)..(270): unsure at all n locations; Clone ID: 701120504H1
cactgatttatgtagatagataaccataaccataccatagcttacaaattaagctccgctcactctctttctctctagaatccatggcagccattggtctgaatggcgtaaaggttgggacgacgtcgtctcaggcgtaccttgaaggcaaggcagtgaaggagacgagagcgttgatggctgaactgtgtcgccatttctacacccttggatancgaacaggacaggtggcagcatctccatgaaggtccacgatgacnccatccncag

SEQ ID NO: 38974 - DNA, 272 bp, Glycine max
  Clone ID: 701120506H1
atgggtgaaatcagaagagggtgaagaaaaagtgggctcaatagtatgttcaaatgtagatgactccagtttcgatggttgcaacctgtatgatgattttttttcaacaggtttcatgcagcttgatcatgtgaaaactttaagcctaagggacaataatttcacattccttcctgaatgcctcaaagaattgcaatttttaacaagacttgatgtgagtggctgcttgcgtcttcaggaaattagaggggttccaccaaacttaaaagtct

SEQ ID NO: 38975 - DNA, 239 bp, Glycine max
  unsure (1)..(239): unsure at all n locations; Clone ID: 701120507H1
agctccttaannaccaccagctaatggtgtacaganntcaacttgtctnttctgggangtagaaaccttctagtgtttccagttggagccacctccgtgtgctgtgctgtttgcaatgctgtcacagcagtgccacctcctgctaaatcacaaatatggtgtgtgacaggcacagaaatggcccagttagtatgtggaggttgccatactttactcatgtacatccggggcgcgacaag

SEQ ID NO: 38976 - DNA, 271 bp, Glycine max
  unsure (1)..(271): unsure at all n locations; Clone ID: 701120508H1
tgaagtctgctatgtgtgcagtggtggttgtagcacttcttcttctggcggaggtggggcccatggctnnggctgtgacatgcaccccaacagagttgagtccgtgtcttccagcaatcacttccggtgctaaaccttccaatgcttgttgcacgaagctgaagcagcaaaaaccatgcttatgtggctactcaaaaacgctagcttgaagcagtatgttaactctcctaatggccgaaaaaccgttgcttcttgtgggattccctttcca

SEQ ID NO: 38977 - DNA, 269 bp, Glycine max
  unsure (1)..(269): unsure at all n locations; Clone ID: 701120509H1
ctcaagagcagtgttattgttggctatgtgtgtgcttccggcgatggttgtggccattcgcccagcaaagaaccctttttgcgtgaagggtcgtgtctactgtgacccttgccgtgctggttttgagacctcagctaccacctacattgctggtgctgagattatgttgcaatgcaagagcagggttagcaacgaggttgtgtacacgaagaaggggtacaccgatcaaacggagcntacaccatgtacgtgatgaggttccgcnctcc

SEQ ID NO: 38978 - DNA, 275 bp, Glycine max
  Clone ID: 701120510H1
gcgaaaatggcggtgattttttcaagtgcaataccaggaggggcagcaccagcagcaatcgagcaagtgcagtgcttcgggcggaagaagacggcggtggcagtgacctactgcaagcgcggccgaggcctcattaagatcaacggctgcccgatcgagctggtggagccggagatcctccgcttcaaggccttcgagccaatcctcctccttcggttcgccaccgcttcgccggcgtggacatgcgcatccgcgtgaagggcggcggtcacacc

SEQ ID NO: 38979 - DNA, 275 bp, Glycine max
  unsure (1)..(275): unsure at all n locations; Clone ID: 701120511H1
gggagacgccaaacgccgcgctctagcctccatcaaatccctcatttatcaaccttccgttagaaacaagaaggccacattcgctctcatttgtcaaaccctaaaacatcttcccattatcanggatgtcttggaagctgcttctattctcaacaccaagtggaagaggcaacgagaattgatttatatcattgtctatgatatccttttaggccaggcggtttcactagttggtgatgctgagaagtaccttatgcgccaccaagatgccctgc

SEQ ID NO: 38980 - DNA, 273 bp, Glycine max
  unsure (1)..(273): unsure at all n locations; Clone ID: 701120512H1
ctgataactctatcggcacaagaaacaaaaagtttcggttaggagttaaatttctgcaatctacttccgttagcgttaggtttagggaaggcagaagtgaagccttcagggttaaggataaacgnggagagccgtacaagaaacgcgaccgtccctcgttgaatgatgaggtatggtgtctgaagaatataagaagaaacggtgatcttcacaaggatctttgaagaataaaataaaaactgtcaaggatctttgcgctgaacacaatcggtt

SEQ ID NO: 38981 - DNA, 270 bp, Glycine max
  unsure (1)..(270): unsure at all n locations; Clone ID: 701120513H1
attgattnngngaaactttgttntttctgcgatcattttccattgggtggaagaaantctcaacctttagtcgaaagagcaancatctgagtgagtgagcgatcatgtgtggtggtgcgattatctccgacttcattccagcgggtcccgccggcggggcgcacgcgtgaccgccgacatccatggccgaatttgaggaagcggttctcgaagtcgctgctggacgatgatttcgaggcagggttcagagaatcgaggatgactcggaaa

SEQ ID NO: 38982 - DNA, 275 bp, Glycine max
  unsure (1)..(275): unsure at all n locations; Clone ID: 701120514H1
gtttgttggatcaagctggagaagagtatggcttcaaacagcagggaactctagcagtcccttgtccggcctcaagaatgctggattagccaagtagtctaactcaacaacaaaccttttgatttctccatcttttattgcancaacagcaaaataccctttactaacaacatcttcgggcacaacattcgttgtagtttccacttgattttcattgaagtagttgagtcccttatatatcgaacatggctaagtatcattcaagtgggaaaagc

SEQ ID NO: 38983 - DNA, 274 bp, Glycine max
  Clone ID: 701120515H1
attatcagtgagctgtgtgtcgctctggatcggctgctgattctcagattgtctctgactatgtgcgctacttccttcaccaacacacgatacaacttggacaacctgcgacagttaaagttgctgcaaaccttgtccggcttctcgcatataacaataagaatttcttacagaccgggttaattgttggtggttgggataaatatgaaggtggacaaatttatggagttcctctgggtggaacaatagtacagcaaccttttgctatcggagg

SEQ ID NO: 38984 - DNA, 276 bp, Glycine max
  Clone ID: 701120516H1
aataatttgtaaaaactatggctagcgatggcagcgaagagtttaggctagtgtcaccggcgttcagcaacgaggggaagttacctcggaactacactgacgagggccagggtgcgaagaagaacatatcccctccgttggagtggtacaacctgccggaggggaccaagaccctcgccctcgtcgtggaggatatcgatggatccgattcagatgggcccatcatgccatggacccactgggtcgtcgcaaacatcccggccacggtgaagggcc

SEQ ID NO: 38985 - DNA, 275 bp, Glycine max
  unsure (1)..(275): unsure at all n locations; Clone ID: 701120517H1
aagcaaaacaacattaccagggattctttnacaccagatgaagttcatatttttggctatgcaaggacaaaaatctctgatgntcaaattgagaaaccggttgcgcggctatcttgttccaaagaaaggtgcttccccccaacagttggagnatgtagagaagtttttacagcctgatcaaatatgtaagcggctcttatgattctgaggatggcttccgcctgttggataaagagattcagagcatgaatatttgaaaaacagtgttgagggtt

SEQ ID NO: 38986 - DNA, 271 bp, Glycine max
  Clone ID: 701120519H1
agggtctttgcttgattttggagatgtctctgctctcagatctcatcaaccttaacctctccgataccaccgagaaggtgatcgcagagtacatatggatcggtggatcaggaatggacctgaggagcaaagcaaggactctcccaggaccagttagcgacccttcagagcttcccaagtggaactatgatggttccagcacaggtcaagctcctggtgaagacagtgaagtgattttatacccacaagccattttcagggatccattcag

SEQ ID NO: 38987 - DNA, 272 bp, Glycine max
  unsure (1)..(272): unsure at all n locations; Clone ID: 701120521H1
aaagtccctgaaaagtcctagaagtgctgtttgcaaaactgccattatgacanctgcagacattttcagtgcatataatgatcgtatactagattcattggaccctctcctagtacaacttcttctcaaggcttcacaagacaaacgctttgtatgtgaggcagctgaaaaagccttgatagcaatgactacttggatttcccctatttctttattgccaaaattgcaaccatgccttaagaataagaatcctcgtatccgtgcaaaggcat

SEQ ID NO: 38988 - DNA, 271 bp, Glycine max
  unsure (1)..(271): unsure at all n locations; Clone ID: 701120522H1
atngaatgnatgnnggcnaagcttatacttatnnnaganagntagaaatnnnnngngannaacagagggcactttgtntctaagtancnaggaancttcagctgccatgttncatcgctggagcaancctcatcaacaggntcagggangcagcgagctttatgcgaanccangagtaaagagctgaagggtgttatcggaccccttatntggacgcatttgantattncacggatgcatgttttaagagacattggaagctcgaaactgg

SEQ ID NO: 38989 - DNA, 276 bp, Glycine max
  unsure (1)..(276): unsure at all n locations; Clone ID: 701120523H1
gggagctatagccataaggagaaaaactttcaaagaggtgaaagcaaaagagttcttcttttccttttttatatatacttgggtgctaagctgtgtgagttcattgacaagcctgaaatggcaactatgctgacaaaggagcatggtctgaacctcaaggagaccgagctttgcctcggtttgcggngtgggggannnnnnnnnnnnnnnnnnnnnnaagtggaaaactccaaagggccactgggaagagaagggttctcctgagatgttgatccg

SEQ ID NO: 38990 - DNA, 156 bp, Glycine max
  unsure (1)..(156): unsure at all n locations; Clone ID: 701120524H1
ttggaaccctaatatgcaaattaacttatcatcaaggntagtacagatacaaagtcctggactcaatcccatcttcaattcccatcttagcnacttctcaaaccctcttatcatcacaagtnacagcngcaaagaaagtactagtaaccattctct

SEQ ID NO: 38991 - DNA, 272 bp, Glycine max
  Clone ID: 701120525H1
cagaggctgaaaacatacaaggccaaattggttgtgttcccaagacgggcacacaaggttaaggctggtgattctactcccgaggagcttgcaaatgcaacacaagtccagggtgctttcttgcctattgtgagggagaagccaactgttgaacttgtaaaggttacagatgacatgaaggcatttaaagctattacaagcttcgtcttgaacgcacaaacaaacgccatcatggtgccagactgaagaaggctgctgaagcagaaaaggga

SEQ ID NO: 38992 - DNA, 270 bp, Glycine max
  unsure (1)..(270): unsure at all n locations; Clone ID: 701120526H1
gaagctgctcacagttccagaaccccttctggaatttcaaaaactagtccttcatctgttccttccaacttatctatttcgtcatatagtgaagcaagtgattnctcaaatcttccaacaccaaggtctgagggcgaaatcttgtcttccccaaatcttaaggcctttaccttcaatgagctaaagaatgccaccaggaactttcgcccggacagtcttcttggtgaagggggattggttatgtttacaaggggtggatgatgaacacac

SEQ ID NO: 38993 - DNA, 273 bp, Glycine max
  unsure (1)..(273): unsure at all n locations; Clone ID: 701120527H1
aacagatggcagaccactagatcatactgagattacaaganatgatctgtgttgtgcagatgaggaaatagagttgagcactgacaacattaaggagcaaagatttatggctacctcttctgccgtagacattcctgttgagcaactcaaaacaagttgtagaaagctagataatacggagattacaagaaatgatctgtgttgtgcaggtgatgtttctgatttaagcttagacacagtaagagacggtcatttaaagatttcacaattctc

SEQ ID NO: 38994 - DNA, 272 bp, Glycine max
  Clone ID: 701120528H1
cgcccataaattctctgtttacggggcgaaaatgacagtattcttagccacgaggctcgtgttgcggagatccccgccgcttctctggcggcgcagcttttctcgggcggcggtagaggccgaaaaggacactgttgccgtgccgtcgcttccgttgttcgattactctccgcctccgtatgcggggcccaccgctgacgagattctggcaaagcgcagggagtatctgagtcttccatcttgcattctacaagaatcccgtgaacatagtg

SEQ ID NO: 38995 - DNA, 276 bp, Glycine max
  unsure (1)..(276): unsure at all n locations; Clone ID: 701120529H1
acttctgctacccactctcttcttccaagtccaancacgcttcntctcnnacagtcatgggcaaggtcaagatcggaatcaacggatttggaagaattggnccgtttggttgccagantcgctctgcaaagagacgatgtggagctcgttgccgttaacgaccctttcattaccaccgattacatgacatacatgtttaaatacgacagtgttcacggacactggaagcatcacgatgtcaccgttaaggacgagaagacccttctcttcggtgac

SEQ ID NO: 38996 - DNA, 185 bp, Glycine max
  unsure (1)..(185): unsure at all n locations; Clone ID: 701120530H1
cntgatgangacaactgtgattcctgcttcttcagtcatnccaantggtggcctttcnggntcncagaaacaccagaatngtgcngtanatgntgataatnaaaccagtacatctactacgnnagtagcaaaaganaagtcncccannaacnttcatgggggatgtgtctgctagntngnttgat

SEQ ID NO: 38997 - DNA, 274 bp, Glycine max
  Clone ID: 701120531H1
atgggttcaacaggtgagactcagattactccaacccatgtatctgatgaagaggcaaaccttttcgccatgcaactagccagtgcctcagtactccctatggttctcaaatcagctcttgagcttgatctgttggaaatcatagccaaggctggccctggtgttcacctttccccctccgacattgcttctcggctcccaacacacaaccctgatgcacccgttatgttggaccgtatattgcgcctcttggcttgctacaatatcctctctt

SEQ ID NO: 38998 - DNA, 274 bp, Glycine max
  unsure (1)..(274): unsure at all n locations; Clone ID: 701120533H1
taccctttncctgaaccagcaccangnntctcntngtcctntctncgnngccgtcttcaccagctatccgccgttcgatcaccctcaccgcaacggagcatngctgttggagaccanacnacgccgcttntggattccttcaaaangggggttngggagtgacgaaccagaagganaaagagttgtngttggnggataggggnantggggactagnaggntntggncaccctngggtccnnccaatngaattcctttaaaaaggccccnccccc

SEQ ID NO: 38999 - DNA, 270 bp, Glycine max
  unsure (1)..(270): unsure at all n locations; Clone ID: 701120534H1
gttctttgttggcgaatactcactcacgcgtttgtagttgcaggctctaatcagatcccaaatgatcaactttgtgcttctcattagtcgccaaggnnaggtgagattgacaaaatggtactcaccttattctcagaaagaaaggngtaaggtaatccgtgagctcagtggaatgattctttcccgtgcgcccaagcaatgtaattttgtggaatggcgaggacataaagttgtttataaaaggtatgctagtctctatttctgcangtg

SEQ ID NO: 39000 - DNA, 268 bp, Glycine max
  unsure (1)..(268): unsure at all n locations; Clone ID: 701120535H1
ggtctttgtgttgggttaccaaagcctccngcncccgagttgcgcgtgtagcaactcgggatccgctgtttcttcttctccggcngcngcggcgaaagagactaatccttcgccgctgcctcatgttgcttccaattctgganannattctgcggtgactctggagctgccagggaagttggagagccttagaggaaggcattgagaaggtgatttatagatgccggtttatggctattctgggagtatttgggtcttaactggatca

SEQ ID NO: 39001 - DNA, 269 bp, Glycine max
  unsure (1)..(269): unsure at all n locations; Clone ID: 701120536H1
gtattgggagctctcgttgtttcggagttagggaccttacgcagccatggccactgctacgaatgccgccgccgccccaccacgccagctctcccagaaggaagctgacatccagatgatgttggccgccgacgtccaccttngcaccaagaactgcgacttccaaatggaacgttacatcttcaagcgccgcaacgacgggatttacattattnncctgggaagacgtgggagaagcttcagctagcagctagggttntagttgcaat

SEQ ID NO: 39002 - DNA, 270 bp, Glycine max
  unsure (1)..(270): unsure at all n locations; Clone ID: 701120538H1
aaagatgctacagcaaagcacaaaaacagacaagaagccgcagatgctacaatctcattcatgtcatgtcttcataacagcaatctacaaaagttcattctcacacttcatcaaccaatgtaactcctctttgcttggacattctcttacctgctccaccgagcaagggttgctttttatttatgtgctaagaaacacaagcttaaagtagataaacttaagttaattgagctctgtggtacatctgagtctgagttttctagtgtttnt

SEQ ID NO: 39003 - DNA, 271 bp, Glycine max
  unsure (1)..(271): unsure at all n locations; Clone ID: 701120539H1
ggagctccaggtactcgctccgactctcccgcttcagatcntcatcctgttcttccttttcgctgatcgttttttgagccgacggcgctgattcgttcgcncggaatctngctcggcgtcggcgtgtaagnccatctgtgaattccctgggcaagatggcnttggggnaatatgctagagtagatggtaagaagatcgtcgaattggngttcaacggtgactgttgtcatgtttgtaggctcgtgctnggttggggtttggnaggatgaca

SEQ ID NO: 39004 - DNA, 269 bp, Glycine max
  unsure (1)..(269): unsure at all n locations; Clone ID: 701120540H1
aaacaagtggttttgccccgtgttcatggattagcacttaaaacaacagttgcgacggttagagtcaatgcgctgttgtgcctaggagacatggttaatcaacttgataaacatgctgtcttggacatcttgcaaactattcaacgctgtactgctgttgancgctcccctccaacccttatncgtaccctaggggttgcaaattctattttcaagcagcaaaatagaagagaacgaggagtggctgtgactgattctggaacgccaga

SEQ ID NO: 39005 - DNA, 274 bp, Glycine max
  unsure (1)..(274): unsure at all n locations; Clone ID: 701120541H1
gggcactgtttctgttcttcattctcttctctctcagctatgcctccgaacaaatcttccccgctcatatacggtagcatatttggtggtggcggtggtggccgctctcgcgaaccaaaatacaagattgaatttcatcccgaagattccccttttcaccctgatgatgatcaggaatctatagtcatgccagataaaaccggacagaaatatatgtgttacttacctaaagtgggaaagggaaaaagtgggaagcctggttatncnacacaat

SEQ ID NO: 39006 - DNA, 273 bp, Glycine max
  unsure (1)..(273): unsure at all n locations; Clone ID: 701120545H1
attncnctctgnnacctncttcancgnatcaatngnnttggacggngtactcctnggcatntgcaacncnctccncnaaatagcanaantcgtcgacgacgctttcttgcaaaaatacggtancaagttgaacgatgcgantctcgctgaggataagcacaaacctatgtatgaagaattggctaacaatcctaatgtggagtacattgctggaggtgctactcagaattcaatcagggttgctcagnggatgcttcaagcaccaggtgccac

SEQ ID NO: 39007 - DNA, 271 bp, Glycine max
  Clone ID: 701120546H1
ggggtctcacatggggttgttgctcttcttttgttcttccatgctttttgctgccttcgctgctgcctcctccagaaacttgcccataataccctttgatgaaggctacgcgcccttgtttggggacagcaacttggtcatccatagggatggcaaatcggttcatctttcactcgatgagagaacaggttcaggatttgtgtcgcatgatctttaccttcacggatatttcagcgctctattaagttgccttctgactacactgcaggag

SEQ ID NO: 39008 - DNA, 273 bp, Glycine max
  unsure (1)..(273): unsure at all n locations; Clone ID: 701120547H1
gttccgtcgtaganaacggtggtgtagtgtggtggaagggtatttccgtaaatatgcgtaaaagctgatggtgaatgaaggaaacaacacagcacaaaggctttgcaattncnctctcccgagtttctacctcatcacaatattgtgaagaagaaattgggagagtgttatcattgcatcgcggggaattgagggtagcggtccgaattacctttaaagtttaggtccttaaattttgtattttacttcttcttacgtatttgccaatgattt

SEQ ID NO: 39009 - DNA, 273 bp, Glycine max
  unsure (1)..(273): unsure at all n locations; Clone ID: 701120548H1
gtttggggaganattagaattcttggtgctttaaaacacccttgcatagtggaaatgtacggacaccaaatttcatgtcaatggtctgtctcagctgatggtaatcctgaacaccgtgtattaagatctgcaatttttatggagtatgtggaagggggctccttaaaaaattatctggagaagctgtcagaagctggtgaaaagcatgttcctgtggagttggcttgcatatcgccaaagatgtctcatgtgcttgtcagagctgcactcaaa

SEQ ID NO: 39010 - DNA, 270 bp, Glycine max
  unsure (1)..(270): unsure at all n locations; Clone ID: 701120552H1
gcgttcgctcactctctactcaacttcaattantcaaatccctcactttctctctcttgtcttcaaatctcaattctattttggaaaatcagaatcaaagacagttaaaaatacagaacaaacatctcactcaacatcaacacttcagatctacgtttccactctcacaacaactcaaaaagaaagaaaaaccgattctacagcgacaacaaggnacgaaagaacgatcgatttctcgaagcgccntntcaatngcgcgtgcacccttca

SEQ ID NO: 39011 - DNA, 271 bp, Glycine max
  unsure (1)..(271): unsure at all n locations; Clone ID: 701120553H1
cttttctatttaattcctaaaatcccattcttcttcgctcatncctctgcactgccatcatccccaacttcctcacaaggttacaagtactaaagagttgtgccaccatgtcggacgatgaaagggaggagaaagagttggatctctcttctgccgaagttgtcaccaaatacaaaaccgctgctgagatcgttaacaaggccttgaagctagttatttcagaatgtaaaccaaaggcgaagattgtggatatttgtgagaaaggggattc

SEQ ID NO: 39012 - DNA, 269 bp, Glycine max
  Clone ID: 701120554H1
gtagggtgcaatattcaaccaaaatcggaggaaatgaaattggtgttcgacaagtttgacaccaacaaagatggcaagattacccttgaagagtacaaagcagctatgaggacaatggggtggggaatcgaaggcactgaggctgatgagtctttcaggtcatggactctgatggagatggcttcattgacttcaaagagttcatggacatgttcaacgtggaggagacggtgaaagagacggagatcaagagtgcttttcaagtgttt

SEQ ID NO: 39013 - DNA, 271 bp, Glycine max
  unsure (1)..(271): unsure at all n locations; Clone ID: 701120555H1
gtaagatcctcgctttaattgttagtgtcaggccaaaaaatcagaatggcattgtgtcaaatggagangcatcaaataaagaagccatttaccactattgatgatgttttgataggattggtaaaatggctttgtgatcagttgaagaaaccttctcatcctattcgtggagtcccgactgcnctcaattgcctagcaacactacttaaggaacctgtggttaggtcttcctntgttccgggctgatggggtcaagttacttgtacccttg

SEQ ID NO: 39014 - DNA, 250 bp, Glycine max
  unsure (1)..(250): unsure at all n locations; Clone ID: 701120556H1
ctagaacgatcacggttgangcanattgctcnctccctanatgagatgagananaagatngcctncaaaanttcatcttcaacctctccatgtgctcaacttcgcgacgcataccacaattgcttcaacaggtggtacgccgagaaattcatgaagggtnananagaaaacaagaatgcgtttccgagtgggaaanatacagagctgtctttctgaacatttggaagataagcatctgattcgtttctta

SEQ ID NO: 39015 - DNA, 268 bp, Glycine max
  Clone ID: 701120557H1
atcaaagcccacagatagacctgttccaaatgcaactttacaagttactggtgctgttggttggcggagagaagggctgtgtacaaaaagaatgaggtcttcctggatattgtggaaagtgtaaatcttctaatgtcttcaaaaggtagtgttctgcgttgtgatgtcactgggaagattctcatgaagtgctttctttctggaatgcctgatttaaagttgggtttgaatgacaagatggtctgagaaagaagcacaactaaatccc

SEQ ID NO: 39016 - DNA, 271 bp, Glycine max
  Clone ID: 701120559H1
cagtttttggtgttccatttttcttcctccatctttatcttaaacataacttgaactctccattccttaaattttagctacgagctagttccgacacagacaaagcaatggcaaagaccgaggttgcttggcataatttatatacagtatttggtttttcttaaaattcctctttgattgttcttttattttttctctctcttttcccatggaggtggagagtgtaatttattgaactaaaaaagtaactgtgattcaactttatgcctgc

SEQ ID NO: 39017 - DNA, 261 bp, Glycine max
  unsure (1)..(261): unsure at all n locations; Clone ID: 701120560H1
gnagaccaagaccntattaggtttgaagccaatattttgtgaatatatatattaggctgctactaacaagctttggctcacgggtatgctagttgctagctatgggggaattcaagcactttgtaattgttaagttcaaggaaggtgtggcagttgacgacctcactaaagggatggaaaagttggtctcagagattcatgctgtcaagtccttgaatggggacaggacttgaaagcctagatgtgttgagacaaggattc

SEQ ID NO: 39018 - DNA, 272 bp, Glycine max
  unsure (1)..(272): unsure at all n locations; Clone ID: 701120561H1
ctaggaaacgctatctatggctttttacggaggcgcgaaacgcgtttgtgtatccataaggcactattgttcgaattcagcgtcagagaaggtgaatctgataaagcagctgagagagagaacaagcgcactatgaaggncgtgaaagcggctctggtggattcgaattgggacatagaggaagctcagaaggaactgaggaaaagaggcaaagttttggcgtccaagaaatcctctcgaactgcctcccaaggcctcctcgctctcgccca

SEQ ID NO: 39019 - DNA, 272 bp, Glycine max
  unsure (1)..(272): unsure at all n locations; Clone ID: 701120562H1
gcaaccccaggacctggtcccaaggaaaattgggggcaacttcacttcccctccatcccttacaacacacatggtggaagaagttcaaagatggaaaccaatgttaattctggaattggtaatccatctttgaaaaggatggttgtaactgaagatcgtccttcattatggaatggcatgtctcctaatttctttcccaatggggaaagagcagagagaatcggcattgatcctcaaaaggactccccaattgggcgtggcnaacacatggc

SEQ ID NO: 39020 - DNA, 272 bp, Glycine max
  Clone ID: 701120563H1
cgcttctcgaaccctactttcttccgcggtgattgcatttgaattcctgtaatggcgattgataatatttttaaaaatgaagctagtgaagaaaaaggagagcgtgccagaatggcttcttttgttggagccatggctattgctgacttagtgaagacaaccttggggccaaagggaatggataaaattttgcagtcaacaggtagaggacgtgaagttactgtcacgaatgatggcgctacaatcttgaagtccctccatattgataaccc

SEQ ID NO: 39021 - DNA, 243 bp, Glycine max
  unsure (1)..(243): unsure at all n locations; Clone ID: 701120564H1
gcannctgtttaaacaagggattggtttgaaactngctggtgtcttctncncntgaattcattgccatatttggaagtgtggattttgcccagagcagcagatccatataattgttctcagattcaagtgaacgtctctggagggaagtctgttcttattttgcccagtcattagataatatgtataggtggagtttggttattcatttgaaacttacttttgctggaatttaatcaagtaaa

SEQ ID NO: 39022 - DNA, 269 bp, Glycine max
  unsure (1)..(269): unsure at all n locations; Clone ID: 701120566H1
gngcccctctctctgcgactctgcttcggttcttccttcagttcaccagctgcagacaatggcagacaagaagcggaaggagaggaatgaaggcaaccgccaaagaccgaagtcgaagaagaagcggccaaacactcaacagaaggagaggggcccttgtttgccctcatctttgcaaaaacagcttgactgtttaaaccctaccacttcctttgacagcattgattctgacgactacaatgacaatgatgtacacgagtacaaggaag

SEQ ID NO: 39023 - DNA, 265 bp, Glycine max
  Clone ID: 701120567H1
tctcactctctattccaagtctttttttgagccttagcttagctatagctttcccatttccattttcttgagcctttcttagccttgtcactcatccattatcatttataacttttttttttcatcaccccacaaacatggcctctaggagggtgtctttgagagttcaagctaaggtggtgaaggatgctcgttccgtcgtagagacggtggtgtagtgtggtggaagggtatttccgtaaatatgcgtaaaagctgatggtga

SEQ ID NO: 39024 - DNA, 267 bp, Glycine max
  unsure (1)..(267): unsure at all n locations; Clone ID: 701120570H1
aaaagaggaagatagatcaagatctcccttgcgtttgtctcagttgaagaaattcaagagcagaacgagactaactcaacggtatcagacgtttcagggtttcagcacttccatttttttttttttccggatttnagttggaagaagatcaaagnggttcctagttgcttggattgttccccngggtggtggagnctttgtgnattttnaaaatnttgncaattcaaaatgccaanggnganangggatnggtctttgtcacatnaa

SEQ ID NO: 39025 - DNA, 262 bp, Glycine max
  unsure (1)..(262): unsure at all n locations; Clone ID: 701120572H1
ctcagccacagccacaacacacaaacacaaacccttcgttcctctctacgttcccttcttcaattcgatcaaacacagaatagtacttttttattatgatggccgtggcccgaaaggaaatggaccggatcaagggcccgtggagcccggaggaggacgaggctcttcagaagctcgtnaacgnaatgggcccagaaactggtcctcatcagcagtccattcggggcggtctgggaatctgcaggntcganggtgcaccatt

SEQ ID NO: 39026 - DNA, 271 bp, Glycine max
  unsure (1)..(271): unsure at all n locations; Clone ID: 701120574H1
ggaaatctggcccttgccaganaatttatccgccagtgctggcggaggtcttcnctttccacatggaanngaaatnnanaatncgaagtttgttgancatnacgcatttttgcagtacaggtgacantacaaccatttgcnctgatggnncctcatacngangagtngcctcagnanatacatatngatcagaangagtttngcanacgaaggcataagaagcagaaggagnaggatattgctatntgtggatgcanatatgangncnang

SEQ ID NO: 39027 - DNA, 270 bp, Glycine max
  unsure (1)..(270): unsure at all n locations; Clone ID: 701120575H1
ccgaaaaccaaatcccagacaacatgactaaggtgttcagagattcctttgcgaggtgggcccaagcttcggggactttgagtctcacggagacaacctacgacaacgccgacatccnggtagggttctacaacttcactgccttgagaattgaagtggaggtgtatggtggcagccttatatttttgcaaccggattctagtaagaaaggggtggtacttatggacggtaacatgggctggttacttccaagtgaaaacgccacactgt

SEQ ID NO: 39028 - DNA, 258 bp, Glycine max
  unsure (1)..(258): unsure at all n locations; Clone ID: 701120576H1
cttggcaatgcagtgaactcaatgagcagtggcaatgatgttgtgaaactgaacaagcctggcacacgttactttgcatgtggtacaatgggccattgcgatcaaggcatgaaggtgaagatcacaacagtgtctggctctgagacctcttcccnnnnnnnnnnnnnnnnnnnnnnnnnnnnnnnnncttcggcctcacaatgtctcgtttatctgtgctcattgttggatgttgatgcctctcttcttaactaggtt

SEQ ID NO: 39029 - DNA, 268 bp, Glycine max
  unsure (1)..(268): unsure at all n locations; Clone ID: 701120577H1
tgttcatagggacatcaaggccaataatgtgttgctggataaagatctcaaccccaagatatctgattttggattggcaangcttaatgatgaggacaaaacccatttgagcaccagaatagctggcacttatgggtacattgctcctgagtatgcaatgcatggttatttgacggacaaagcagatgtttatagttttggaatgttgcattggaaattgttagtgggatgagcaacaccattagccagcctacggaagaatgtttct

SEQ ID NO: 39030 - DNA, 270 bp, Glycine max
  Clone ID: 701120578H1
tcgtgcttgcgtcgtttcctataagcgctttcgtggcaccgttggttgattacgtgacgtctcctggtgtcgccgaagcggttctgtattcgccggacacgaaggttccgagaacgggggaagttgctctcaggagagccatccctgccaatgccaacatgaaggctatacaggacactcttgaagatatattttacctgttgaggattccgcagagaaaaccttatggaacaatggaggggaatgtgaagaaagctttgaagatagcag

SEQ ID NO: 39031 - DNA, 272 bp, Glycine max
  Clone ID: 701120579H1
aagaatgaggcaatcaaggatgttggtgagcgcaatccaagaggcaatggtgaataagctgaaggaaaaagacgaagagattcagcgtatggagaagctgaattgggcccttcaagaaagagtcaaaagcatgtgcatggagaaccaaatttggagggaattggcacaaacgaacgaagccacagccaactacctaagaagcaatttggaacaagtcttggcacatgtcggcgaggaacgcgccaccgcggccgaggtggccgatgatgctc

SEQ ID NO: 39032 - DNA, 272 bp, Glycine max
  unsure (1)..(272): unsure at all n locations; Clone ID: 701120580H1
gttcttcttcttttgttgttctgtgntnncntttgtnttttctctcacctgaaaatgtcttgctgcggtggtancnctggttgcggaagctcctgcaagtgcggcaacggctgcggaggctgcaagatgtacccagacttgagctacactgagtcaaccaccaccgagaccttggtcatgggagtggcacctgttaaggctcaatttgagggtgctgaaatgggtgtgcccgctgagaacgatggctgcaaatgtggaccaaactgctcctg

SEQ ID NO: 39033 - DNA, 266 bp, Glycine max
  unsure (1)..(266): unsure at all n locations; Clone ID: 701120581H1
acactgcacagatctgagtggtgactctttcacttctcancactattattattaggtctgaaggctcattgccattangatgtcaaggaggccnctaaatccttcgcgtcggctaggtgatggtggaagtataccatttgttgcatctatccagtccaaatctcaaaactctcccctacnatctattgggcttgtcattgtgggtgcaatcctcctgattggttattgttacagcaattcaggngnagtagcgggggaataagggt

SEQ ID NO: 39034 - DNA, 268 bp, Glycine max
  unsure (1)..(268): unsure at all n locations; Clone ID: 701120583H1
gcattcttcacttcaatcccacaatgtctataacgcacagcctcaccacttcactcnnnnnnnnnnnnnnnnnnntcttagctccctcttccttcaattccagaggacaggtttcgttgcctgtgaagagcgtgagcatttgcaaatgcgttgccacacccgaagctgagaccgcctacaagacaggggtcactcgcaatccaaatatggggncactcaagctggctatctctttcctgagattgctagaagaaggtctgcaccactt

SEQ ID NO: 39035 - DNA, 266 bp, Glycine max
  unsure (1)..(266): unsure at all n locations; Clone ID: 701120584H1
ggccgcccttttttttgtcgtttccttttaatcaacatttcttcatttaggtttttgtggccataatgtgatgatcacttggccatcatcaccttaacgaactcctcgtagtttatttggccatcgccatcaacatcggcctcgcgaatcatctcatcaacctcttcatcgncgagcttctccccgaggttggtcatcacatggcggagtcagcagcagagatgaacccattctggtccttgtcgaaaacccggaatgcctctttt

SEQ ID NO: 39036 - DNA, 268 bp, Glycine max
  unsure (1)..(268): unsure at all n locations; Clone ID: 701120585H1
ctaagatggatgatcctatccaccttgagacgtttaaccatgattgcttcagggagcttctagtgaacaccgctgagttgaacaanatacgctctcaggatctagactttttccttgtgcttgatttagagggtagggttgagattcttgagtttccagttctaatgattagtgcgaaaacattggcaagttgaagacattttccacaggtttgtgaggccctcaaaaatgagtgaacgaagaataaatgaatatgttgaaggaaaat

SEQ ID NO: 39037 - DNA, 266 bp, Glycine max
  unsure (1)..(266): unsure at all n locations; Clone ID: 701120586H1
taccatggacaactacaacngcaatgacttttggaaattcagtgaccagttgaggcttgaatctggtttggccaatctgtctctgaatgattattccatttggagcaacagctacagctccaagaggcctgatcagaggaggaactttgatgtcaagggcagtgatttcaacaactcatcaaagccttttgatgatgatttcaatgatggctggaagatcaccaattccatggaccccttttctctatgcctcacaacaacaanag

SEQ ID NO: 39038 - DNA, 265 bp, Glycine max
  unsure (1)..(265): unsure at all n locations; Clone ID: 701120588H1
aggtgaatgtgaacactgaacaacaaagatgggtgccgtgacctcttcaatggcggccaagctggcgttcttccctccttctccgccgtcctacaaggtgctgaaggaggaggccacggggctgctgctgatggacccgttcccgcaccgcgagaacgtggaggtctgaggttcccgaancgccgcggtaccgagatcgtgggcatncagtgcggcaacccatggccnaattccacctgtctaatcgcaaggtaacgcggcgaaa

SEQ ID NO: 39039 - DNA, 268 bp, Glycine max
  unsure (1)..(268): unsure at all n locations; Clone ID: 701120589H1
gttcactttcactttaccaactcctaacaatttctctctnnttccttcttcaccgcatcaatggngnnngacggcgttctcctcggcatgtgcaaccctctcctcgacatctctgccgtcgtcgacgacgctttcttgcaaaaatacggtatcaagttgaacgatgcgattctcgctgaggataagcacaaacctatgtatgaagaattggctaacaatcctaatgtggagtacatgctggaggtgctattcagnattcaatcagggt

SEQ ID NO: 39040 - DNA, 269 bp, Glycine max
  unsure (1)..(269): unsure at all n locations; Clone ID: 701120590H1
gattcattcttacantattgctcaattttatctgaattttgaaacaccttctgaatggcnntttcaagagttgcattgttaatatgcacggtaattgggtattttgtgattgcctctgcgggcaatttntaccaagattttnatatcactggggagatgggcgtgctaagatactcaacaatggcgagcttctcactctgtctcttgacaaagcctctggctcgggtttccaatccnagaacgaatnccttttngtaaaattgatatgc

SEQ ID NO: 39041 - DNA, 270 bp, Glycine max
  unsure (1)..(270): unsure at all n locations; Clone ID: 701120591H1
ggtgttgttactgctgctcttttctcttttcttttctctttagttctctcttcccctnnnnnnnnnnnnnnnnnnnnnnnnngagcctgtttaagcttttcttccattaacatattatcataatgtgtggtattcttgctgttcttggttgttctgatgactctcgagccaaaagggtccgcgtgcttgagctctctcgcagattgaagcaccgtggccctgactggagtgggctccatcaacatggtgactgctttttggcacatcaac

SEQ ID NO: 39042 - DNA, 274 bp, Glycine max
  unsure (1)..(274): unsure at all n locations; Clone ID: 701120592H1
attcgcacngcaaacaaacnggngagccatggccgtcggaaagaacaagcgcatctgccaaagggnaaaagggtggcaagaagaaggcagctgatccctttgccaagaaggattggtatgacattaaggccccttctctttttcaagtgaaaaatgttggcaaaaccctcgtctctcgtacgcagggtaccaagattgcttctgaaggacttaaacatagagtgtttgaggtctccttggctgatcttcaaggggatgaggatcatgcattcaa

SEQ ID NO: 39043 - DNA, 224 bp, Glycine max
  unsure (1)..(224): unsure at all n locations; Clone ID: 701120593H1
agagagcgcgtcttaataaacgctcttctctgaaaacccccatttcttttcttctttcntcttctctttcgcttcttcgatcttcgatcttcgtcgctgaaaatgagagagtgcatttcaatccacannggatangagangaaanaaagntgganacgccngcngggancttnggngccnngangcacggganncngccnggtgngcagnngcnaagtgannag

SEQ ID NO: 39044 - DNA, 271 bp, Glycine max
  Clone ID: 701120594H1
aaacgcccctctctctcctccaatggccgaccagctcaccgacgaccagatcgccgagttcaaggaggccttcagcctcttcgacaaggacggcgatggttgtattactactaaggaacttgggactgtgatgcggtcactagggcaaaacccaactgaggcagaactgcaggatatgattaatgaggttgatgctgatggcaatggaaccatcgacttcccagagttcctcaacctgatggctcgcaagatgaaagacaccgactccgag

SEQ ID NO: 39045 - DNA, 272 bp, Glycine max
  Clone ID: 701120595H1
ccgcaacccattttgcatctaacccttttgtcattaataatctctctgaccactctttccttggtcgatgccgccgatcccacatttggcttcacccctcttggattatctagtagctcaaacttgcaaatccaaaagccttacgacgttgcagtcaacgagcgctacagcttttcaaatggagtgcacagattttgggtatactccacggacaagcctcatatgcaaggcagcaatacgaagccacgaactgagattcgtatcgctggata

SEQ ID NO: 39046 - DNA, 292 bp, Glycine max
  unsure (1)..(292): unsure at all n locations; Clone ID: 701120602H1
ctaatcctgtacatgtggtctgctatttccgatacttgagattttttccatctgggcgattcctttacaagaattcatctcagaaggtcaaggatgtggcaaagtgcatgaatttccgttcatctaaagcagactgtgtttttggtggccactacacattgtcagatgacaaggttgtcttatttttgtcaaattatgtagttgagtatctgcatctccgctttaatnnntattgnnaatctgagtagacatctctttctggcaaatgtatgcataatattatattctcata

SEQ ID NO: 39047 - DNA, 294 bp, Glycine max
  Clone ID: 701120603H1
cttgtgattacaaaaatcagaatttggccgttcgagttgaagaatcaagcaagaagcctgattacttggcaattaaatttttgtatcaagggggacaaacagagatagtagccgttgatgtggctcaggttgggtcttcaaactggagcttcatgagcagaaaccacggggcagtatgggacacaagcagggtaccccaaggcgcattgcaatttaggttagtggtaacggcaggtatgatggcaagtggatttgggcaaagaaggtcctacctgctgattggaaaaatggact

SEQ ID NO: 39048 - DNA, 288 bp, Glycine max
  Clone ID: 701120604H1
tgttgagggtggttccttctctgcaaaggactaccatgatcctcctccagcaccgttgattgatgctgaggaactcacacagtggtccttctacagggctttgattgctgagttcattgccacaatgctcttcctttacatcacagtgctcactgtgattggttacaagagccagagtgatgtaaaggctgggggtgatgtgtgtggtggagttggcattcttggcattgcttgggccttggtggcatgatcttcatctggtgtactgcactgctggaatctcagggg

SEQ ID NO: 39049 - DNA, 290 bp, Glycine max
  unsure (1)..(290): unsure at all n locations; Clone ID: 701120605H1
gtaagggcggtgcagtgcttcaaacccctttttctcttctcatttcctttcatcactctcttgcttcttttcttcttctcgcaattttccattttcacacttttagcgtaanaacatcttttaatggcgtcccaaatccgtgagtggtctggaatcaatacattcgcacctgctacccagactaagttgcttgaactcttgggaaatcttaaacaagagaatgtgaactccttgactatacttgtgatgggaaaaggnggtgttggaaaatcttcaatgtgaatccatca

SEQ ID NO: 39050 - DNA, 287 bp, Glycine max
  Clone ID: 701120607H1
ggaatctgttgttccatggaagaaagactcagactcagtgcattcgctcctacagtctgatcccaatggtgatagagcactcttcccgaggtgagagggcatacgacatcttctcgcgccttctgaaggagcgcattatctgcatcaacggacccatctccgacgacactgcccacgtcgtcgttgcgcagtcctcttcctcgaatccgaaaatccttccaaacccatcaacatgtacctcaattcccccggtggcgccgtcaccgcaggcttgctatttatgatac

SEQ ID NO: 39051 - DNA, 285 bp, Glycine max
  unsure (1)..(285): unsure at all n locations; Clone ID: 701120608H1
gcagggntctnttctgctttgcattctccgccatcatcatgcaancgcttcactctcccaccctccgcgcttctcccttggaccctcttcgtggccccaacaatgccgccgccaaccgccgctcctccagcgccaagcgcgtgttcttcgtctccgccacggtggcgccgaaggtgtccgccccgcagcgacagaaggaccccaagaagcgcgttgtgatcaccggaatgggcctcgcgtcggtnctgtggccgacgtggagggttatacgagaagtcctcgccg

SEQ ID NO: 39052 - DNA, 283 bp, Glycine max
  unsure (1)..(283): unsure at all n locations; Clone ID: 701120609H1
agagtctctctctctgtangaacacgcaaaagaccattgattgtccgagagaacgcaagcactgacatcagtactccatatatttgctactctgcatgaacataacatnccatacttaagttttgctggttgtgtgtgtgttttttgttcttggtcganccttgtactgattaacgagaatggacaaggaagtggagctggttccctgaaggtgaaatggccacccagcacatttcacaaccacagaagcgcaaggtggtcttgttaccatgccttcatcatg

SEQ ID NO: 39053 - DNA, 286 bp, Glycine max
  Clone ID: 701120610H1
cagaagcctaagcctcaaacatggcgagagggttaaagaaacacctgaagaggctcaatgctccaaaacattggatgcttgacaagcttggtggtgcctttgcacccaagccatcatctggaccccacaagtcccgggagtgtcttcctctgatcctcatcctacgaaacaggctaaagtatgctctaacatatagagaagttattgccatcttgatgcagcgccatgttcttgttgatggcaaggttaggacagacaagacataccctgctggtttcatggatgt

SEQ ID NO: 39054 - DNA, 285 bp, Glycine max
  Clone ID: 701120611H1
gcacacccccacttcaccaatttagctcctttttcataaaaatccttgctttccctgttgggtctgtttcattttcatcttctggttttggatcatctagcaccagacagacatggctcttgagtctgctcctgcttcagctgacatcagaggagttcacactcatggtggacgctatgttcagtacaatatctatggaaacctctttgaggtctctaggaagtatgttcctcctattcgccctgtgggaagaggagcatatggtattgtttgtgctgctgtaaa

SEQ ID NO: 39055 - DNA, 285 bp, Glycine max
  unsure (1)..(285): unsure at all n locations; Clone ID: 701120612H1
ggggtttcaacctgagtttttcactgttttatttgccatccctcgaatggccgggtacttggcacattggcgagantccttggatgatncctgatacaaanattatgagacctcaacaggttatttcctttccttaaatcatttctctggttatatcatgatcttgcatattggcataatcattcttggttaatgtgtgctgatatgcttgtacgtatgatgtgctgatattcttagttgtatcggtgaggctgaatatatctttagcaatgggaaatatttgta

SEQ ID NO: 39056 - DNA, 285 bp, Glycine max
  unsure (1)..(285): unsure at all n locations; Clone ID: 701120613H1
acgggaggtccgtgagangtggatgcacgccagcnccgtcgtcggggagcggatctacgcgatggcaganccgcggtggcatcgcctacgagcctagcagcggcgcgtgggagancgtgggggtagaattggaccacgggtggagggggagggcgtgcgtggtggaagggattttgtactganacgattattnngggaaaatcaaagggttcgatgtggggcgcggggtgtgggagganttnaaggggttggagaagggtttgcccangtttctgtgtggggcta

SEQ ID NO: 39057 - DNA, 287 bp, Glycine max
  Clone ID: 701120614H1
gaaatggagaactttccagttgttgacatgggaaacctgaataatgaagagagatcagcaaccatggagataatcaaagatgcctgtgagaactggggtttctttgagttggtgaaccatgggatatccatagagttgatgatggacaccgtggagaggatgacaaaagagcactacaaaaagtgtatggagcaaaggttccaagaaatggtagcaagcaaaggcttggagtctgctcaatctgaaatcaatgatttggactgggaaagcactttctttttgcgcca

SEQ ID NO: 39058 - DNA, 287 bp, Glycine max
  Clone ID: 701120615H1
gtagttattctctttcttcttttttagccacccctctcttgaaaaatctagatctcgttcttccttgatctacgttacgcttttagtgaccggatctgtatggatctgaaccagatctacacgccgatggtggttttggcctggtctttcatagatctgatgcatggaggctcagatctactgtacagaggtgtgcgattcatgttcgtctctcttttggaatctgtttcgtagaaagtcgtttggtcttccatgtcgcatggctcttgaggtattttttttgcaga

SEQ ID NO: 39059 - DNA, 293 bp, Glycine max
  unsure (1)..(293): unsure at all n locations; Clone ID: 701120616H1
cgcaaacaaaacaaaccacacgcgcatgaaaagcagtaattaatactactaattcatttcctcaacatanaaaaaanagngtttcgcggaatatactttncctttccttctgttctggttaatttcgtttttccgtttcggagatggattcggaggatttccgatccattctggagagtnccggcgtcgacgtttgggccttcatggacgccgccatcgcggtggcttccgtcgaccancccgacgagttaaagcgccggagagacagaatcgtggagcgcctttangcgatt

SEQ ID NO: 39060 - DNA, 241 bp, Glycine max
  unsure (1)..(241): unsure at all n locations; Clone ID: 701120617H1
ggatatcaaacacccttttcatcgttaaaactctcagttccctcnttccctatcaaaatcctttcccacaanactactcncnccagtccaagannccctttttcaatttggtttcaacagnnnnnnnnnnnnnnnnnnnnnnnnnnnnnnnnnnnngcatgtttnccttgaatcattcttcngatttgtacnatgtttccccngagnnctcatcttcctnggacacatcctcgcgggcttg

SEQ ID NO: 39061 - DNA, 289 bp, Glycine max
  unsure (1)..(289): unsure at all n locations; Clone ID: 701120618H1
attctctccattgccatcacaaaccctacgcttcggttatctaatccaaatcccagatccaaatccaaatccaagacgatgtcgtatcgaccttccgccaacgccaggaccggaggttcgtcggaaccgctacaaggtcgccgtggacgccgatgaaggtcgccgtcgccgagaggataccatggtggagatccgaaagagccgtanggaagagagtttgcagaagaagagacgcgagggtctccaatcgcagcagattccttcgtcattcatctatgtaatagagaag

SEQ ID NO: 39062 - DNA, 293 bp, Glycine max
  unsure (1)..(293): unsure at all n locations; Clone ID: 701120619H1
ggtttctcatgtgggaagagagaaattgatgttggctcctggacttataagtgccttggcttccactctagacactggtgagcccatagagcaggagcaagctgcttcttgtctcctaattttgtgtaacaggagtgaggaatgttgtgagatggtcctgcaagaaggggttanacctgcattggtgtcaatatcggtgaatgggacctcgagaggaagagagaaggctcagaagctcttgatggtcttccgagagcagcgacaacaagnccatcacctgttaagactgatca

SEQ ID NO: 39063 - DNA, 291 bp, Glycine max
  Clone ID: 701120620H1
ggaggaatatgtggaaattcctagtgattctgggattacattcaatgaacaaccattaatgaaagcattgcagattgctgaaaaggctagggatgctattcttagcgggaaatttgatcaggtacgcgtcaaccttccaaatggtgacatggtggggcatacaggtgacattgaagcaacagttgtggcatgcaaggcagctgatgctgctgtgaagatgattcttgatgcaatagagcaagtgggtggaatttatgttgtcacagctgaccacgggaatgctgaggatat

SEQ ID NO: 39064 - DNA, 288 bp, Glycine max
  unsure (1)..(288): unsure at all n locations; Clone ID: 701120621H1
gttggagcctagagtggaggagagagatgggttctgggttttgaaggaagagtacaggggaggcatcagncctcaggaaaaagtgaagcttgagaaagaccccatgaagctctttatggaaggtgggattgaggacttggctaagatgtcccttgaggaaattgagagctccaagcacaccaaggatgatattgatgttagactcaagtggcttggccttttcataggaganagcagcatatggtagatttatgatgaggctgaagctccaaatggggtgacaacaag

SEQ ID NO: 39065 - DNA, 288 bp, Glycine max
  Clone ID: 701120622H1
gctttatttgtttatgcctgattacagactagctcaaagactatcagcaagctggcacatccaaatgctccccttggatatgggttgtgtttcctgaaccttgcttttgatggatttaccaatgcaactcaggattctttaaaagcaaggtatccaaaaacaagtgcttgggatattatgctgggcatgaatttatggggaaccatatacaatatgatttacatgtttggatggccccgtgccagtggatttgaggcagttcgcttttgccagcagcatccagaggca

SEQ ID NO: 39066 - DNA, 285 bp, Glycine max
  unsure (1)..(285): unsure at all n locations; Clone ID: 701120623H1
gaaagatcggcgatgactgcctccaaggatcgcgagaacttcgtctacatcgccaaactcgccgagcaggccgagcgttacgaagagatggtggaatcaatgaagaacgttgcgaatctcgacgttgaactgacggtggaggagcggaatttgctttctgttgggtacaagaatgtgattggtgctcgcagaggttcctggaggatccnctcttccattgagcagaaggaagaaacaaaagggaacgagttgaatgcgaanggattaaggagtacagacagaagt

SEQ ID NO: 39067 - DNA, 280 bp, Glycine max
  unsure (1)..(280): unsure at all n locations; Clone ID: 701120624H1
tatggctgacttgttggaatggtcaaagcaagataagaaacgaatgcttcatgtcgtctaccgtgttggtgaccttgatcgcaccatcaaattttacacagaatgtttaggaatgaagctttgaggcaaagagatatcccagaggagaaatatgctaatgctttcttggatttggccctgaanaatcccattttgttgttgaattaacatataattatggggttacctcgtatgacattggcgatggcttggacatttgcaatgcaactcagacattata

SEQ ID NO: 39068 - DNA, 264 bp, Glycine max
  unsure (1)..(264): unsure at all n locations; Clone ID: 701120625H1
ctagacgatcacggttgacgccanttgctccctccctcactgagatgagagagaagatangcctccaaaacttcatcttcaacctctccatgtgctcaacttcgcgacgcataccacaattgcttcaacaggtggtacgccgagaaattcatgaagggtcactgggacaaacaagaatgcgtttccgagtggcannaatacagagcctgtctttctgnacatttggaagatangcntctgnttcgtntcttacaagctgaggcg

SEQ ID NO: 39069 - DNA, 284 bp, Glycine max
  Clone ID: 701120626H1
tttgcttcttgaggccaacaggctcctgagggcgggtggctactttgtctgggcagcacagcctgtttacaaacatgaagagacccttcaagaacaatggacagaaatggagaacctgacagctagcatttgttgggaacttgtacgaaaggagggctatattgctatatggcggaaacctttggacaatagctgctaccttggtcgagacattgatgcgcatcctccattatgtgagtccaatgatgatcccgataatgtttggtatgttggtcttaaggcat

SEQ ID NO: 39070 - DNA, 282 bp, Glycine max
  Clone ID: 701120627H1
cttcactttctctcgtttcaatcgaaaaaaatcatgggcagaaaattcttcgtcggtggcaactggaaatgcaatgggaccactgaggaggtgaagaagattgttactactttaaatgaagctaaagtccctggagaagatgttgtagaagttgttgtgagccctccttttgtgttccttccttttgtaaaaagtttgctgcgccctgatttccatgtctcggcccaaaattgttgggttcgcaaaggtggtgcttatactggagagttagtgctgaaatgc

SEQ ID NO: 39071 - DNA, 284 bp, Glycine max
  Clone ID: 701120628H1
gttggacttgcaagttgcaacagagacagaaaaaaggactcaatcacgaagcagaagaaacccaataagtatttctcatttttatggctcttgccctgaagtcaagttgcttattgcaattgaagaaacctgaggctggtttcaatgtttgtttttcatctaagaaagctataatctccgtgaaaagatacactccggtggccgctatcaggatcatggacgcatgggactctctgcaacattcaccagattgaaaaaagaaggaaaagtggcttcatcccata

SEQ ID NO: 39072 - DNA, 288 bp, Glycine max
  unsure (1)..(288): unsure at all n locations; Clone ID: 701120629H1
aagaagttggcggtggtgagtttgagcatctccctgaaggttgcatagcgaatatagtttcgttcaccacttcctccagatgcctgcgttctctcnttggtctcttcctccttcagatctgcctcagtaaccgacttcgtatgggaaaggttcctcccctccgattatcaggctatcatttcccaatcttccaagccctccactctcaccaattactcttccaagaaggacctctacctccacctatgccataaccccctcctcatagacgctggtaaaaagagcttt

SEQ ID NO: 39073 - DNA, 290 bp, Glycine max
  unsure (1)..(290): unsure at all n locations; Clone ID: 701120631H1
gcgggtctctattcttatccgttaaaactcaactgcaactgcagcagngaaaccagcaaaacgtgttcttccatgctcaacgtagcanaacgcgaagaagcactaccagattccactcatccaaacgcnnnttagttcttccgcctttccaaatgcgtccgcgtttcgccgcggcgccgtgtgccaggtcgcnagcaccgacttcgaatccgccgccaaagccggagaggntcgtctctctaaggtgccggtgcgtaatataaggaacttctgcatcattgcgcatattg

SEQ ID NO: 39074 - DNA, 294 bp, Glycine max
  unsure (1)..(294): unsure at all n locations; Clone ID: 701120635H1
gggaattactgatgaagatgctgcaaaggttgttgatggtttggctctcaaagtggctgatagaaataagtcgattgaacaagtgaagaatttgtataaactttttgttgattgtgactgcacccttttggaaatcaatcccattgcggagacagctgataaccaattggtnnntgctgatgctaagttgaattttgacgataatgctgcatatcgccagaaagagatatttgctctccgtgatacaacacaagaggaccctcgagaggtgactgctgcaaaggcagacttaaa

SEQ ID NO: 39075 - DNA, 289 bp, Glycine max
  unsure (1)..(289): unsure at all n locations; Clone ID: 701120636H1
gnnacacactcgtgtgtgtctgggacttgaagactggtgagaaggttcacactctcaagggccatcagctgcaggtcactggcattgcctttgatgatggggatgttgtctcctcttctgttgattgtaccttaaaacggtggaggaatggacaatctgtagagtcgtgggaggctcataaggcaccggtccaaactgtcataaagctgccctcaggagagcttgttacaggttcaagtgacatactttaaagctttggagaggaaaaacttgcttgcacaccttcaag

SEQ ID NO: 39076 - DNA, 121 bp, Glycine max
  unsure (1)..(121): unsure at all n locations; Clone ID: 701120638H1
ctgggttgcagaatgataagcaacgtattcctaaagccgcaagtggttgggcttcttccctcaaaattggtcttccctcacagaagcaaagcttcttcttccctttcccttnccacacaac

SEQ ID NO: 39077 - DNA, 282 bp, Glycine max
  Clone ID: 701120639H1
attgccttccaaagttgatatacctactgctgttcctcttccagccttagtgccattgccaccactggcaaatttgcctgttactctccctccagtgcctgaactacctgcagtacctaaagtaccaattcctgaagtaatagttaataacgccaaaataatcccttgagtacctatgatctatccagtcactactacttattttgtcacttgctaaattaacttgttgttgccatcccagggtggttctggttctgttgggattaattctgtcatcaatac

SEQ ID NO: 39078 - DNA, 283 bp, Glycine max
  Clone ID: 701120642H1
cagatggtcgtaattgtgcattaacaatagatggggtgccaggcaatcagaattctccaacttagagacttcacaagtgtcattagtcttttgtgtgtgcttgccatcatctatctccaacttctgattttcaagctcatcagtaacaaaagattcgttggtttcatctcgagttattacctcttttaccgaaggtataaactcccttccatgcttcggttcagatcaacattgggcatgtggatgagaatggcgtctacaatggccattctccacttttgcc

SEQ ID NO: 39079 - DNA, 282 bp, Glycine max
  unsure (1)..(282): unsure at all n locations; Clone ID: 701120643H1
gatcnttncgnctctctgtncagggctcaaatataacaaaacattaaggttcaataccttaactntccttcatatcctgcaaacngatgcacanatatgtgccnnntctatagtattcacnatatcataataatttgnatcgcatctgcantganantnangcagaatgcaatagtntncaagacaaaatccgggntcnaaggggacanagccgnggcacanaagccatggcggcgcctccgtgnnggggnanatcccatnccgatgagggggtnttnaaga

SEQ ID NO: 39080 - DNA, 281 bp, Glycine max
  unsure (1)..(281): unsure at all n locations; Clone ID: 701120644H1
ctatccttncagtgtgtttattgtctggcttgcgctcgttgggtttggaagaagtgtttgtacactgcaggctatgagagtgaaaattggggcctggctacggcacaagaatttgagcctgtgcctcggatctgtcggctgatcttagctgtctatgaagacgatattcgtaaccctcaatgggctcctcaaggaggttatggcataatccggattgggttatctgcgtaaggactatgacgataaccaaggtcgtgttactccgtacatgatatacctga

SEQ ID NO: 39081 - DNA, 284 bp, Glycine max
  unsure (1)..(284): unsure at all n locations; Clone ID: 701120645H1
aatcaatatggctgtgaggtccctaaggaaagaggccagggcctggttcaatgaaaacagcagtggtgatgtagattcagggngtagtgatgtgtatgcaaaagcttctgcttggtaccatgttacttatcatccaagttactggggttgctataatgaaggcatgaatagggatcattatctaagtttctcatggtgtgtttaccctcttcttgtccaaatcaagaaagagaaactcagcattagaaggtcctctttggaatacagtttcagtgggttgcgtt

SEQ ID NO: 39082 - DNA, 286 bp, Glycine max
  Clone ID: 701120646H1
ggaagaatactggcattgaccagggataaggacctttctttaaagaatgttagacatttcatattggatgaatgcgacaagatgctggaatcattggatatgaggaaagatgttcaagacattttcaagatgactccccatgataagcaagttatgatgttctcagcaacactcagcaaggaaattcgcccagtctgcaagaaatttatgcaagatcctatggaaatttatgttgatgatgaggccaagttgacacttcacgggctgtgcagcactacatcaaatt

SEQ ID NO: 39083 - DNA, 289 bp, Glycine max
  Clone ID: 701120647H1
gtgatgggagaacacaacacaacagagaagaaaggggccaaaagacaaatcagaaaccgaaaaggaattgaacaaaacaaaatcgttcacaaacacaaaggcaccaaccaacctcttcgaattcgcgttttcttctctcttcgcctccatttggactgttgatttggcatatttattacagagatttgctgttgctttttcctacttcacggtgacatttggggcaaatccaaactattgcattgaatcattttacaaggaggaactgcctaatgatctagtgagagtg

SEQ ID NO: 39084 - DNA, 289 bp, Glycine max
  unsure (1)..(289): unsure at all n locations; Clone ID: 701120648H1
gcggaattcagatctagcgtttgcactttgcacaatgcgagttctataggatcgtanggttataccgattagtgttactaaaacaacgtttttgtgatatcgagaaaaaagaaaaataaaaagtgatgtcgaggagaccggggaatcctatagaaggttcggtgacagtggcggtggactgttctcgaaatctaggtcgccaccggttttgtctattgcgctcgtagttgtgggaggtttgtttctcgttggctatgtgtatagaggctcaggtggaattggaaaccgt

SEQ ID NO: 39085 - DNA, 295 bp, Glycine max
  unsure (1)..(295): unsure at all n locations; Clone ID: 701120649H1
ttttggtgttccatttttcttcctccatctttatcttaaacataacttgaactctccattccttaaattttagctacgagntagttccgacacagacaaagcantggcaaagaccgagttagaggtgactgttgagagcaagaacaaagacctcaagcacctggggtttgtgaggattgctgctattcaaacatttgtgattgtgtcaaatctgtatgagtacgcaaagcagaattctgggccttgagatccgttgtaggaaggttgagaacactgtaaccaccatctcggtcct

SEQ ID NO: 39086 - DNA, 284 bp, Glycine max
  unsure (1)..(284): unsure at all n locations; Clone ID: 701120650H1
gagaagtctatgtttcatgctggtgcaacctggcgtctgtgtggacggatancaccaaaagcatcacagttatctccttgaaaaaagagaccaaagtttatggttgttnttctttattagccaaagtttatgattgttagatgttccgatgttgttgagctgaaatcttacatttgtttgtcactggagccttgtcctctgaataaaatcaaatataggtgtaaacctatgcaaattttgttgttcgaatgaaactcaaaaaananaaaanagggggnnnggac

SEQ ID NO: 39087 - DNA, 287 bp, Glycine max
  unsure (1)..(287): unsure at all n locations; Clone ID: 701120652H1
gccaatcgatcttgctctcttctacgcttttcgaattccttccattccattatggacgcagattagattcacgttcacattcacttctcttcgtttgcttcaaccactctgctctgctctgctctactctgagatccgatcgcattttcattcagaaaggaaactcgtgtgacngatttatgcgctaattgcaattgcactgcgagcgtccctgtgccgaatcggaagatgggatagtgtttaccaaatgttttcctctcttttcggtaacaaggaagctcgaatcc

SEQ ID NO: 39088 - DNA, 287 bp, Glycine max
  Clone ID: 701120653H1
gcgggtgaggtagaacccttccacggtggtgactgcgcgatgggtgcctacaagtatgtttcagagctatggcgcaagaagcagtctgatgtcatgcgcttcttgcagcgggtgaggtgctgggagtataggcagcaaccttccattgttcgcttgacaaggtcgacccgccctgacaaggctcgtcgcttgggcttcaaggctaagcagggctatgtgatataccgtgttcgtgttaggaggggtggccgaaagaggccagttcccaaaggtatgtttatgggaag

SEQ ID NO: 39089 - DNA, 286 bp, Glycine max
  Clone ID: 701120654H1
ccgaatctgacaatggagtcaacgtggttggagttgttggaccaggaaaggaaacaataactcgtaaggtttatgaggtaattgccccaagttttcctgctcattgctttcttcctgatgtgggagaaaaaattagggaacatgggccggaatatctccaaaacatgcttgggccttatatgcttggaaattcccaggaaggagtgccatttataaggcatgagaaggttcttgcagttttggattgcattgactctctggattcgttgaaagctgctcttggact

SEQ ID NO: 39090 - DNA, 284 bp, Glycine max
  Clone ID: 701120656H1
gtcttcatcgccgaagatcaagatcctcctccaataactcattatctagtaattctccaagtccaagatcccccatgtcaaacaatggagagatcactgggctaatggaggcttttcgtcactttgataatgatggagatgggaaaatctcggcctatgagctaaggtcatattttgggtccattggggatcacatgtctcatgaggaggctgaaggggtcatccatgacctagattccgatggggacaacttgttggacttcaaggattcaccaagctcatga

SEQ ID NO: 39091 - DNA, 281 bp, Glycine max
  Clone ID: 701120657H1
caaaatggtcatggttctagccgtagtcctcatgatactgggaagactagccctgaaaatggacttggctccggaagtcctgatgaaaaagggaatcccagcccttacaatggttatggagggagcccaaataatatgcctgatcccagggacagtcccaactatggcggtcctgaaagtcccatgcatgaaagataccgcagccagtcaccccctgcagaagaatgattgcagtctttgatgaagaagccggaaggccaatgttgtagttctgtttcatg

SEQ ID NO: 39092 - DNA, 283 bp, Glycine max
  Clone ID: 701120658H1
cagggtaggaagatttgtgatgggtggaagttctattggtgatgactgggagctcacttcctcatctaacgagggtcggacagtggtcttagttggacgaactggcaatggcaagagtgcaacaggtaataccattcttggaaggaaggtcttcaagtcaagggctagctcctctgctgtatccacctcatgtgaattgcagacaacagaattaaacgacggacaaattgttaatgttattgacaccccaggattatttgatttgtctgtcggatctgagttt

SEQ ID NO: 39093 - DNA, 283 bp, Glycine max
  Clone ID: 701120659H1
ctcactcactgcagatctcaattgcatcgctgtccatggctaccatcgttagcatcaaggcccgccagatcttcgacagtcgtggcaatccaactgtcgaggtggatttgacttgctccgatggtacttttgccagagctgctgttccaagtggtgcatccactgggatttatgaggcccttgaattgagagatggaggatctgactaccttggaaagggtgtatcaaaggctgttgacaatgtgaacaccgtcattggccctgctttgattggcaaggaccc

SEQ ID NO: 39094 - DNA, 284 bp, Glycine max
  unsure (1)..(284): unsure at all n locations; Clone ID: 701120660H1
gttaccttcctctctctaacctgcaatttaacaactccttcgtttcttctttcttttttctaaaacctcaaaaccaaaaacacaacacaactttcgtaangtgtctctcccttcttcccctcctctctccggttccctaattctgccctcactgcacccaattccaattcccctcacccccaattcggggaattagggtttcgccccattcattcatcgatgcaccaccaccatcgtcgctagggtttgcttcgatggcggaattggaggangagcggatngga

SEQ ID NO: 39095 - DNA, 267 bp, Glycine max
  unsure (1)..(267): unsure at all n locations; Clone ID: 701120661H1
aatttaaaatgacacgaatttcattgacaagtcaaattcagactgcagtagacttctaaacaacaagctcatatnncaactctatataacaattattacagatacgtttgaagtttcaaaaccaaacacagcaacaatactattaagctgttatatctactaactagattcatcaccacctaataaaagaaanctaaagagtagtgtcgatgcaaaatggccaaatcagcttgggttgttctactcaaccttaacactgatcacgtc

SEQ ID NO: 39096 - DNA, 286 bp, Glycine max
  unsure (1)..(286): unsure at all n locations; Clone ID: 701120663H1
atgggatatggtgagaatgatatcaccttagtatcttttcaatcagtctccaaaggctatcacggggagtgtgggaaacgaggaggttatatggaggtgactgggttttctgcagaagtgagggaanaaatatataaagtggcatctgtcaacctttgctctaatatctctggtcaaattcttgcaagcttggtcatgagtccacccaaggttggagatgagtcctatgactcatcatggctgagaaggagaatattttggcgtccctgccaggcgtgcaaagaca

SEQ ID NO: 39097 - DNA, 294 bp, Glycine max
  unsure (1)..(294): unsure at all n locations; Clone ID: 701120664H1
ggagccaccanccatggcntcnnngnttttngtntgttgagtngaaactttaganaaagtgnatagtgntatnnnangcaaagggtgtagcggttcntagcgtatcaatcaatattttcgagcgttgganctggggacttcgatggggtgaanaaactggtggacgaagtnnanaangaagaagggtcatcgctctctgatgtgatgtctcttcagaacgatgctgnagagactgcgctatacatcgctgcagagaataatctgcaaganatgttcagctcttgctcagcatct

SEQ ID NO: 39098 - DNA, 236 bp, Glycine max
  unsure (1)..(236): unsure at all n locations; Clone ID: 701120665H1
actgcctggcttccctaggttttcttctcagttctcacttcgcttttcgcgccacctcttcagtcttcattcttctcacttcaagaatcacgacccaaccgtgcaaaccttttcaggtgtgtaaatggggttatctgccaaganatctagaaaaagaggaaaaagtgacagtgattcagatgactacgataatatggagtatgaagaggtggaggatgattatgatgacgatggtg

SEQ ID NO: 39099 - DNA, 293 bp, Glycine max
  unsure (1)..(293): unsure at all n locations; Clone ID: 701120666H1
ggattaatcactataattgactatgaatatgccagttataatcccattgcatatgacctcgcaaatcatttttgtgaaatggtggcagattaccacagtgacacacctcatgttctngactacacgaagtatccaggactagaggaacgtcaaagatttatccgcaactatctgagttctgaaggcaataaaccaagcaatgctaaagtgaaccagttagcgannnnngcagnnnaaatacactcttgcaaaccatctatttgggggtgtggggattatttcgagttatgtga

SEQ ID NO: 39100 - DNA, 55 bp, Glycine max
  unsure (1)..(55): unsure at all n locations; Clone ID: 701120667H1
ctttgatctccaattttnttcagaaacccaagaatcaagtcaaatttgggtttca

SEQ ID NO: 39101 - DNA, 288 bp, Glycine max
  unsure (1)..(288): unsure at all n locations; Clone ID: 701120668H1
aaagaaccgtgcgctgggcagcaccaagaaaaaccccaggtgcgcanccgacggcaacgaactcttgcggttccactgcaccaccttaacgtgcgcactgggtgcacgtggctcttcctccctctgcgcctccgtacccggctgcagcgtctgcaccatcatcaggcacggtttccaaggcgggtgcggcggcggtggagaccacgcgagggcgaagggcgtgagaaccaccgccagcagcggtcgggcccacgactctgtggtgtgcggtgacgccacgcgcaggcc

SEQ ID NO: 39102 - DNA, 288 bp, Glycine max
  unsure (1)..(288): unsure at all n locations; Clone ID: 701120669H1
aaaagacggtgtttgggtttcacagacagacacacactcggttctgccttcacacaanattnntngccgtaccctttttctcctaagaaaagccatggctaagggtcccggtnctctactctgacatcggcngaaagccagggatctgctgttcnangactaccacagtgaccagaagttcaccatcaccacctactcacncnntggagttgctataacagcatcaggaaccaggaaaagtggnctgtttgtgggnnggngtnannncncattgaagnncaaaancat

SEQ ID NO: 39103 - DNA, 284 bp, Glycine max
  unsure (1)..(284): unsure at all n locations; Clone ID: 701120670H1
atgaaggnctcccccttagcattttcaatccttttnttgtccttcaccataganctcttcattggcatngcttcancagcacaagaaccagtgnttganacctcaggccagaagctgagancaggngacnagtactacattctaccagtcttcagaggcagaggtggaggcctaacagtttcaagcagtggcaacancacatgcnccctctttgtggtgcaagagaagctnaagtctcaaagggcacnccagttnccttcanaccctanaagccgcaagtggtg

SEQ ID NO: 39104 - DNA, 286 bp, Glycine max
  Clone ID: 701120671H1
atgaaggtctcccccttagcattttcaatcctttttttgtccttcaccatagaactcttcattggcattgcttcagcagcacaagaaccagtgcttgacacctcaggccagaagctgagaacaggtgtcaagtactacattctaccagtcttcagaggcagaggtggaggcctaacagtttcaagcagtggcaacaacacatgccccctctttgtggtgcaagagaagcttgaagtctcaaagggcaccccagttaccttcacaccctacaatgccgagagtggtg

SEQ ID NO: 39105 - DNA, 279 bp, Glycine max
  unsure (1)..(279): unsure at all n locations; Clone ID: 701120672H1
ctccgtntctcgccaaacaaacacaaaatggctgccttcagcggagacgaaaccgcacctttctttggttcctacggagccgccgctgccctcgttttttcctgtatgggagcggcgtacggaaccgcgaagagcggngtcggggttgcgtcgatgggcgtgatgaggccggagctggngnacgaaatcgatcgtgccggttgtgatggctggtgtgttgggnatcnacggnttgatcatgcggttatcataagtacgggcataaccctaagccaaatc

SEQ ID NO: 39106 - DNA, 281 bp, Glycine max
  unsure (1)..(281): unsure at all n locations; Clone ID: 701120674H1
gagaaattgtattgcatgatttgaaatttcagttagtggattctcaagtcttggtacataaaactctcaggtaaagacgtgaaataggttatcatgcagctttgagagttcatgcgtgtttggaaacacgttccctacccaacaaatcatgtcaaatgggttaaagacgtgaaagctagaactaggaacttctattcagatgtgagantccatgttcgtgatgtatgaccaaacacgctattcatccctttggttttttaaatgctattctaggagccagt

SEQ ID NO: 39107 - DNA, 281 bp, Glycine max
  Clone ID: 701120675H1
ccggcgacgcatcattcaaatttctgccctatcaactttcgatggtaggatagtggcctaccatggtggtgacgggtgacggagaattagggttcgattccggagagggagcctgagaaacggctaccacatccaaggaaggcagcaggcgcgcaaattacccaatcctgacacggggaggtagtgacaataaataacaataccgggctcattgagtctggtaattggaatgagtacaatctaaatcccttaacgaggatccattggagggcaagtctggt

SEQ ID NO: 39108 - DNA, 282 bp, Glycine max
  Clone ID: 701120676H1
cacgtttgaagatatactcaacagtgttgattgaatttgaattaagccgttggatcatggagatttttctggcaaagatattggaggtagctcttgatatagcagtaataatatattttggtagtaagaaagaaagaacaagagctgcacttatcagggcaaaaagttatataagacagtgtagaattaaaaatgttgtctttgtgtagaatctttagttgcaatgcaccaacatgcacaaatgagggcctttttaggattgtgttgctccctttaatgcga

SEQ ID NO: 39109 - DNA, 276 bp, Glycine max
  Clone ID: 701120677H1
aaggttgcgaatgcaggccactgggtttcttgctcggattgccctttgctcttttggctttgattttatctcttgtgggtgcagttatctgggtgcttggatctatattgagttgcttgtgcccatgttgcatttgctgcgctggattggctaatttggcagtgagtcttgtaaagcttccagtaaaagttcttagatggttcactcgtcaaattccttgctagagcataatctttcccctttttgatctttgtagcaatacttgggtcctgtatg

SEQ ID NO: 39110 - DNA, 283 bp, Glycine max
  unsure (1)..(283): unsure at all n locations; Clone ID: 701120678H1
agaccatccctgaagaatgcagtccaaatcatcatgagtccaacagtagtagccaggtcatatggcaagacaacatctatcctgatgatatgacttatgaggaactactggacctgggggaggcagttgggactcaaagccgaggtctttcccaagaacttattgatatgcttccaacctcaaagtacaaatttgatagtttattcaagagaannnnttctgggaaaaggtgtgtaatttgtcagatgacatacagaagaggtgaccagcaaatgaantgcca

SEQ ID NO: 39111 - DNA, 286 bp, Glycine max
  unsure (1)..(286): unsure at all n locations; Clone ID: 701120679H1
gggattctcgccattgacatctacttccctcccgcttgcgttcagcaggaagcattggagactcatgatggtgccagtaaagggaagtataccattggacttggccaagactgcatgtcattctnaaccgaagtagaagatgtcatctcaatgagtttgacagtggttacttctcttcttgagaagtatgggattgatcctaaacaaatcggtcgtctggaagttggaagcgagaccgtgatagacaaaagcaaatccatcaagacattcctgatgcagatcttcg

SEQ ID NO: 39112 - DNA, 288 bp, Glycine max
  unsure (1)..(288): unsure at all n locations; Clone ID: 701120680H1
gccatcacaattgaaagggnccgtagtgactggccacgatgccattccgaattggacgatttcggggtgcgttgaatacataaaatcaggacaanaacanggtgacatgttactagttgtgctcganggtgactatggcagttagacttggcaatgaagcttccattaagcagaagctgaagctnattaaggggtccttctacnccatcaccttcagtgccgctcgaacctgtgcacaagaggagaagctcaangtgtcagtggttccaaccactgagaagagggatg

SEQ ID NO: 39113 - DNA, 262 bp, Glycine max
  unsure (1)..(262): unsure at all n locations; Clone ID: 701120681H1
atatgcttagcttctggccacggtaaanntanangnaatattcttctngnatgttntttgcagataatgtgtnctctctgttgnntgnttgtttcagtatatgcagtggcattttcatttagagtgcatntgatttgctaacaaatgaaggactagacaatacaaatttccaaaaaatttaaaatacccccaatntagttaagccagcaagcacaatgctccantcgggttgtacccaatgngantcttactccatctctag

SEQ ID NO: 39114 - DNA, 291 bp, Glycine max
  Clone ID: 701120682H1
ggcgaactgttcccgctgctgttccggccattgtcttcttgtctggtgggcagagcgaggaggaggcaaccctcaacctcaacgccatgaacaagtcccagggaaagaagccgtggtccctttctttctcttttggaagggcacttcagcaaagcactctcaaggcatggggtgggaaagatgaaaacattaagaaggctcaggatgctttatttgccaggtgcaatgcaaactcacatgcaatttgggaattacaaaggtgatgctacccttgctgagggtgctccgatt

SEQ ID NO: 39115 - DNA, 289 bp, Glycine max
  unsure (1)..(289): unsure at all n locations; Clone ID: 701120683H1
gcagcttcatctgtttttctgcatcggcgtgaacaatggcgacgtacgctgcgatgaagcccaataagcctggcttggaggagtcccaagaacagatccacaagataaggatcaccctttcctccaagcacgtcaaaaatctcgagaaggtttgtggggacttggttcgtggtgcaaaggataagaggctcagggttaagggacctgtcaggatgcccactaaggttcttcacatcactaccaggaagtccccctgtggtgaaggtnccaacacatgggacagtttgna

SEQ ID NO: 39116 - DNA, 285 bp, Glycine max
  Clone ID: 701120685H1
gcagggcgtcagcaaccaacccctctcaaactatttttctatttcgctgaagttgctccgccaaaggccacatattggtctggcactgatggaggccaaattttttcgctttctcaagattgtgggtgttggatacaaagctagagctgaagctgcgggtcgtctattgtatctcaaattggggtacagtcatgaggtggaattaactgttcctcctgctgtccgtgttttctgcttcaaaaacaatgtaattgctgtactggaatagacaagcaaagggtgcac

SEQ ID NO: 39117 - DNA, 267 bp, Glycine max
  unsure (1)..(267): unsure at all n locations; Clone ID: 701120686H1
aagaagttgtcctacatctcagttccttctcagntcatcaantccatctcatcttcttctcttcaatctctgcttgaatctcccaagaagtgtgcnagacantccanatncttcacctttgncaagtgcntaaggccaanantcntcnttttnactcnnttnntncttgctnncttngcnatgcncaagtttggtctcaatctttacaccccttttcctccattanccatgtgnaacctcagtagacccntnnnnatnnaatcttgg

SEQ ID NO: 39118 - DNA, 252 bp, Glycine max
  unsure (1)..(252): unsure at all n locations; Clone ID: 701120688H1
ctgactacgttttgctctacgcctctccctctctctcaaaaatcgttctcttcgattttagggttttgttttgctgctgcctccgttccccccttctcataaacaacgcgttttctctctgcttcgtatctattctttgcttttggttttggntgattcaaggccttcacagcattcgttgcggcattttaatcgatttatccaagcaggactgaatgaactaatggagtctaaaggtgggaaaaagaagtc

SEQ ID NO: 39119 - DNA, 282 bp, Glycine max
  unsure (1)..(282): unsure at all n locations; Clone ID: 701120689H1
ctttactgtgtgtgaaaaaaatggccacactcacacttttatcaactctgtctctgcgcnnnnnnnnnnnnnnnnnnnnnnnnnnnnnnnnactctcttcttctttttcttctccctcctcctttgcctttttttgtagcttccccttgcgctctgccacttcatcattgaaggtacaaacaattcagaagaagaagcgcgtggtgaaggcagtggaagaagatacccagcaagaactcaacgctgctgatgactctgaacaaccatcaacctccgaagcac

SEQ ID NO: 39120 - DNA, 280 bp, Glycine max
  unsure (1)..(280): unsure at all n locations; Clone ID: 701120690H1
caacaacaaattacaacttcaaataaaacagagcatctctctgctcttctctgttctgttctgttctgttctgtttctctctcctccccatatattcctcttcttcttcagaactcagaactcagaagggccacttcacttttaganacccagttttgcatctgggtttttgcctgttgaagtgccaattttgaagataataataaaaacaattatgacttggaaaagcagaggagaattgcctctagaggcgtcatctcgcagagatgggtatgtttct

SEQ ID NO: 39121 - DNA, 281 bp, Glycine max
  Clone ID: 701120691H1
gactcattgttcttctcccaggttatttagaaaagcaaaatggtgaagatttgctgcattggtgctggagatgtggggggtcctactatggcagtcattgcacttaagtgcccatccattgaagttgctgttgttgatatctctaaatcccgcattgcagcctggaacagtgaccagcttcctatctatgaacctggccttgatggtgttgtgaagcaatgccgtggcaagaacctcttcttcagcactgatgttgaaaagcatgtctttgaggctgacaa

SEQ ID NO: 39122 - DNA, 281 bp, Glycine max
  Clone ID: 701120692H1
gtcagtttcgtgggtgagaggcaagtgcgtcggtaagggcgcgtttggggttgtcaacgtggcggtttcgaaaagagataatcgcgttttcgcggtgaagtccgtggattgcggaagggggctttctggtcaggtggaggcgttggagaacgagattgggattctgaaacgagttacctcgccgcacgtggtggcttatatcggcgacgatgtcacgtgcgagggaacggcgtcgttcaggaaccttcatttggagtacatgccagtggcaccgtcgctga

SEQ ID NO: 39123 - DNA, 282 bp, Glycine max
  unsure (1)..(282): unsure at all n locations; Clone ID: 701120693H1
gaacctttgtactttctctgcggtcgcgtgtctcacaccacaaacacactgaaagtacaattttcttgtagttacaaaactcaaacacacggacacacacacttcttctttatgtctatggctggtgagcaaggtgatagatgttcctccatcaccataccccttttggatgatgaaaaagtgcaccaagtgantggttcagaagaggctttggtggccanaattgtgatctacacacagctcatgtgggtaacacctcctttntcaggacctgttccatct

SEQ ID NO: 39124 - DNA, 284 bp, Glycine max
  unsure (1)..(284): unsure at all n locations; Clone ID: 701120694H1
agaaatcattccgaaggnagcnngatgcacaatggggtgttccttcctattcttatccacgctttatacagtttcttcaatttgcttgttatagcagagatgtgctatcaggtttagttatatctattggtgggttgcaagattctttgaagagggtatcactcttggcactgttagagtatctagaaggggttgaatatgaagaccctagtacaagaacatctagggtatacatgctatctgctgacatcctgtgggttctccaacaatacaagaaatctgac

SEQ ID NO: 39125 - DNA, 288 bp, Glycine max
  unsure (1)..(288): unsure at all n locations; Clone ID: 701120695H1
cagaagcctaagcctcaaacatggcganagggttaaagaaacacctgaagaggctcaatgctccaaaacattggatgcttgacaagcttggtggtgcctttgcacccaagccatcatctggaccccacaagtcccgggagtgtcttcctctgatcctcatcctacgaaacaggctaaagtatgctctaacatatagagaagttattgccatcttgatgcagcgccatgttcttgttgatggcaaggttaggacagacaagacataccctgctggtttcatggatgttg

SEQ ID NO: 39126 - DNA, 288 bp, Glycine max
  unsure (1)..(288): unsure at all n locations; Clone ID: 701120696H1
acagaancgaagaggcgcagcgtnagcagtaactcgtggaattgctagcaatggcgaggatcaaggtttacgagctgaggcagaagacgaaggctgatctgttgaatcagctgaaggacctcaagnccgagcttgccttgcttcgtgttgctaaggtcaccggcggtgcacctaacaagctctctaagatcaaggtggtgaggttgaacattgcccaggttttgacggtgattctcagnagcagaagccgcgttgaggatgcctacaagaacaagaagtacttgcctc

SEQ ID NO: 39127 - DNA, 296 bp, Glycine max
  unsure (1)..(296): unsure at all n locations; Clone ID: 701120701H1
gccgcatcaacaataatttctcaaacagcgtcgtttaagttaaagaaacccattagactaggcagatcattatggctgtacattccgaatcagcttcatcanagaagaaatcaagcaatggagtgaatgagttgctgacttttaatgctgagaatatgcaaagcaacatgaaaattatctattacagccgaacatttttatctataattggtggcgttgttgctggaattttgggatttacaggcttgaaaggatttgtgttttatttacttctcatggcactacttcacttgggc

SEQ ID NO: 39128 - DNA, 297 bp, Glycine max
  unsure (1)..(297): unsure at all n locations; Clone ID: 701120702H1
gaggagaggtcgcaaacgcaaaaatggtgaagtttctganaccaaacaaggccgtcattgtccttcagggacgctacgccggcaagaaagccgtgatcgttcgaaccttcgacgaaggaactcgcgagcgcccctacggccactgtttggtggcggggataaagaagtaccctgcgaaggtgatcaagaaggactcggcgaagaagacggcgaagaagtcgcgcgtgaaggcgttcgtgaagctcgttcaactnaccagcacctcatgcccacgcgctacacgcttgactggacttg

SEQ ID NO: 39129 - DNA, 291 bp, Glycine max
  unsure (1)..(291): unsure at all n locations; Clone ID: 701120704H1
ctttgatcgtataattagcttagctcnctttgtcaactaagcgntgtgatgatggccatggaaggacaacaaccacaatcatgcatcagaaaatgggagagaatcagaggattatggagaagaagggagagaaaagggtcctcatcctcttgctcaagctggaactggctctttccctggaggcttcattggganactaggttgcaagcagccataaccaacctcaataaccaaattagtattttgcaggaagagttgaaaaaagttgaaacattggtgaatcctccaccg

SEQ ID NO: 39130 - DNA, 290 bp, Glycine max
  Clone ID: 701120705H1
cgaactttcagcaatggtaccagaatattggctaacggaaggtgggcagagtgctactggtgcattattggatcatataattgaaaaccatgctgcttctgcacgccttgcaaatcaagctgctacccaaaagatttcattgtttgagcttctgaacaagatgttggaaacaatgatagttgagctgaacctatcctttattgctgccttgactgaagatgtacatgttcttcctgacttccatgggaataggtcacccattgcagatccaaaagcaaaaggagtcatct

SEQ ID NO: 39131 - DNA, 291 bp, Glycine max
  unsure (1)..(291): unsure at all n locations; Clone ID: 701120706H1
ggaagagggaggaaaagcccccaaaatggtcacggttctagccgtagtcctcgtgatactgggaagactagccctgaaaatggnccatggctctggaagtcctgatgaaaaagggaatcccagcccttacaatggttatggagggagcccaaatactgtgcctgatcccagggacagtcccaactatggtggtcctgaaagtcccatgcatgaaagataccacagccagtcaccccctgcagaagaatgattgcagtctttgatgaagaagccggaagggccaactgattg

SEQ ID NO: 39132 - DNA, 288 bp, Glycine max
  unsure (1)..(288): unsure at all n locations; Clone ID: 701120707H1
atggaatgaatgaaggcaaagcttatacttatagaagagagatagaaattggttgtgnaaaacagaagcactttgnttctaagtanaaggaatcttcagctgccatgtttcatcgctggagcaattctcatcaacaggatcagggaagcagcgagctttatgctgaatccaagattaaagagctgaagggtgttatcggaccctatctggacgcatttgacgtattgcactgatgcatgttttaagagatatttggaagctcgaaactggaacgtagacaagtccaag

SEQ ID NO: 39133 - DNA, 289 bp, Glycine max
  unsure (1)..(289): unsure at all n locations; Clone ID: 701120708H1
gcaaaatttcacaaagcacaaganatcctcaccgccggcgcaaccatctgaaaccggcgtttgcaactggaagcaccggtgctgttaatttttaggttcagctcatcactagcataatttgtgaattataaggtttagaattgtggcatcatgggaagcgaggatgcgaaagatccgttcaaaggggtggattggaaggccgttggtggcgagatgcagcaaaatccgagtgctaaaccagcattgaagaaacgattaccanaganagttagggaaattcctgaattct

SEQ ID NO: 39134 - DNA, 289 bp, Glycine max
  unsure (1)..(289): unsure at all n locations; Clone ID: 701120710H1
gtttgctcacccctactcttcttccagtctctatctcaatctccatcaaatttaactatggctactgaagancttttggttgatgaaatcacttaccctaccaagatcactactaccaagcccctatctttgcttggccatggaatcaccgacatggagattcacttcatccatgtnaaattctattcaatcggggtttatttggagccagaagtagtaggccacttggaccagttcaaaggaaaatctgcaaaggagctggaagataatgaagagttcttcaatgctc

SEQ ID NO: 39135 - DNA, 287 bp, Glycine max
  Clone ID: 701120711H1
ctctaaaacattaattgaactctccattccttaaattttaccaacgagctagttccgacacagacaaagcaatggcaaagactgagttagaggtgactgttgagagcaagaacaaagaactaaagcacctgggatttgtgaggattgctgctattcaaacttttgtgattgtgtcaaatctgtatgagtacgcaaagcagaattctgggccttgagatccgctgttggaacggttgagaacactgtaaccaccgttcttggtcctgtctgcaacaaattcaaggact

SEQ ID NO: 39136 - DNA, 286 bp, Glycine max
  unsure (1)..(286): unsure at all n locations; Clone ID: 701120712H1
gcagtaccggagcagaacggtgttcgaagacgcgagtcctgagttggtgagggatttcttttgggatgatgagttcaggttgaagtgggatgacatgcttatacatgcttccaccatacaagagnctngnctcactggaacaatgatggtgcactgggtgcgcaagtgacagagagtatataattgggaggcgaatttgggacgcaggacgaatttatactgtgtcactaagggagtaccttgcccctccatgccaaggcataataaacctaaacgagttgattat

SEQ ID NO: 39137 - DNA, 288 bp, Glycine max
  Clone ID: 701120713H1
gccagtagtcatatgcttgtctcaaagattaagccatgcatgtgtaagtatgaactaattcagactgtgaaactgcgaatggctcattaaatcagttatagtttgtttgatggtatctactactcggataaccgtagtaattctagagctaatacgtgcaacaaaccccgacttctggaagggatgcatttattagataaaaggtcaacacaggctctgcctgttgctttgatgattcatgataactcgtcggatcgcacggcctttgtgccggcgacgcatcattca

SEQ ID NO: 39138 - DNA, 288 bp, Glycine max
  unsure (1)..(288): unsure at all n locations; Clone ID: 701120714H1
atgaactaccttccaacttagacagtcagngatctaatggagtacgagaggatagagaaagctggaataatttcccccagtaaactgaggatgaagttattaggacctctccatcataggaagaaagatggatccaacagtaactcatccagaacttccccttcaaggattgaggatgctgaatttgtgaatagcttacttggctcaaaaaatgacaaccttgatgatgaagttacatctccaagcttggatgttctgtcattaaagccgtcgagtgatgctgtgctg

SEQ ID NO: 39139 - DNA, 288 bp, Glycine max
  unsure (1)..(288): unsure at all n locations; Clone ID: 701120715H1
agcaaaatgggatccgtaacctcggganaaggattggctctgagggctgggcacgggggtcccagtcccgaacccgtcggctgtcggtggactgctcgagctgcttccgcggcgagagcgggtcgtcgcgtgccggtcgggggacggattgggaacgggcnttcggggcctcttccccgggcgtcgaacagtcaactcagaactggtacggacaaggggaatccgactgtttaattaaaacaaagcattgcgatggtccctgcanatgttgacgcaatgtgatttctg

SEQ ID NO: 39140 - DNA, 279 bp, Glycine max
  unsure (1)..(279): unsure at all n locations; Clone ID: 701120716H1
tttttaagtcagagagtctttgttgagacgaaaaacanaaaccatgttcatantcaacaatacggagagatctagaaagtggaggggcgaacaagaacatcaacaacataagctacagtgccgctcccacttcctatgtttacgatccggaagttcattggacatcgtggctcgtgccgctgtttgtggcggttaacgttgtggtgttcttgtggtcatgtatgtcaacgattgccccaggaaaaatctcggctttgaaggggattgtntcgccaggtt

SEQ ID NO: 39141 - DNA, 294 bp, Glycine max
  unsure (1)..(294): unsure at all n locations; Clone ID: 701120717H1
ctctaattngccgagccagaagccaatttattggagcttgtngngaatggcgtcgaagccgaatgacaaatgcaacaaaggnctcgctgacagctnncatgttgttgagccctgangangctcatntcttcgatcttcttcgtgtgctgtattcccgtaacttgggacaccgaaaattcgtggacagcaatgctgagggttctatgagggaagcttccgcaacagatggctancttcgtntctttggtgctccagaagcttctgttgttcatcgctaagccactttcgttcttc

SEQ ID NO: 39142 - DNA, 292 bp, Glycine max
  unsure (1)..(292): unsure at all n locations; Clone ID: 701120718H1
gaggtggtggtgatcataatcccttgggttctggaggaaatgatggagaaaggcatggagtggaagaatattacaagaaaatggttagggaaaatcctggggatcctttgtttctgaggaattatgccaattttttgtatcagtgcaaacaagaccgtgaaggagcagaggagtattattcccgtgccatacttgcagacccaaatgatggagaggttctatcacagtatgggaagttagtttgggaactacatcacaaccaagaacgtgcctncagctattttgaaagagc

SEQ ID NO: 39143 - DNA, 184 bp, Glycine max
  unsure (1)..(184): unsure at all n locations; Clone ID: 701120719H1
agangcttcagaggatgttcgcgggtgcaggtggagcgctgggccatcccccaccggattcccccaccctcgattcctccgagcaggtctacatctcctccctcgcccttctcaaaatgctcaaacacggaagagctggggtacccatggaagtgatgggtctgatgttgggggagttcgtgga

SEQ ID NO: 39144 - DNA, 290 bp, Glycine max
  unsure (1)..(290): unsure at all n locations; Clone ID: 701120720H1
ctcacctcttcttgctcttccataagataccgtgatgatgtgcaagaagtgtgtcctcttaatgaatctcattggactgatctagagtattgcaaacgctataagctgtggtatncatatgcaaagacaatagcagaaagagaggcttggaggattgcaaaagaaaatggcatggatctagtggtggttaatccctcttttgttgttggtcctctgcttgcaccacaaccaactagcacactgctctgatactaagcattgtcaaaggttaggatcacgtgatatgcgct

SEQ ID NO: 39145 - DNA, 287 bp, Glycine max
  unsure (1)..(287): unsure at all n locations; Clone ID: 701120721H1
gaaaatggtttcggggtcagggatctgtgccaagagggtaattgtggacgcacgacaccacatgctggggaggctggcatcgatcgtggcgaaagancttctgaatgggcagaaggtggtggtggtacgctgcgaggagatttgcatctccggtgggctcgtcaggcagaagatgaagtacttgcgtttcctccgcaagcgcatgaacaccaagccctctcacggccccatccatttccgtgcacccggcaagatcttctggcgcaccgttcgtgggatgataccac

SEQ ID NO: 39146 - DNA, 289 bp, Glycine max
  unsure (1)..(289): unsure at all n locations; Clone ID: 701120722H1
ccttgatctcaagaggggtggaaatggcaggttcttgaagactgctgcatatggacactttggcagagatgaccctgacttcacatgggaagtggtgaagccactcaagggggagaaggtacctgcttaactaaaaggggttccaacactcttggcaagggacttttgcactactactggcttcttattatctgattgctaaaattttctctatgtttccttccctcntactcaattctgttttttttttncngtatttttttatgaatttcccccttttttttgtgta

SEQ ID NO: 39147 - DNA, 287 bp, Glycine max
  Clone ID: 701120724H1
ctttttttattttgtgatatcttttgttgaggaggtggattgactttaaggatttagttaagggagacagtttagaggacaaaattttgtagggtaggtaacaagaagggagaaaagttggattagttttgtttctatcatttgtgggtttgagatggatctaagagtgccaaggatgaggatactgaagttgatcttgaaagtgggttggttttgacagatgatgagtcaaaggatgtctctactgaaggtaacagaaaacaaggaaagatattacttaataagat

SEQ ID NO: 39148 - DNA, 285 bp, Glycine max
  unsure (1)..(285): unsure at all n locations; Clone ID: 701120725H1
aaaatactnaaatctataaatttntttcacaatttacgatgattgatgatgtccttggaatcatggtcatccttttttgtttccgaggtttttctgtttcagttgttctntttttttttggaaaaatttctnccanggtcaggtaattnnaaatctgtngacnctatttnaattttnantnatcctttttgaaanggaattgtatttnctacggatttncncgggaataaaagggtggtcaaatatgcttgtttttcaacagtgagatttnatttnantttnaaa

SEQ ID NO: 39149 - DNA, 287 bp, Glycine max
  Clone ID: 701120726H1
gctcctgctcgtgttggtttggttgctccaattgatgtcgttgttcctcctggcaacacagggctcgatccctctcagacctctttcttccaggtgcttaacattcctaccaagattaacaagggtactgtggaaatcattacacctgtggaactcattaggaagggagacaaggttggatcttctgaagctgcattgcttgccaagctaggcataaggcccttctcatatgggctgtggttctctctgtttatgataatggttcagtgttcagccctgaggttctt

SEQ ID NO: 39150 - DNA, 288 bp, Glycine max
  unsure (1)..(288): unsure at all n locations; Clone ID: 701120727H1
gaaacagtgtgatgaaaatgaaggtccttgttttcttcgttnctacaattttggtagcatggcaatgccatgcgtacgatatgttccctctccgaatgaacactggctatggtgcccgtactccggaggtgaaatgcgcaagttggaggcttgctgtggaagcacacaacatctttggctttgagaccattcctgaagagtgcgttgaagcaacaaaggaatacatccatggcgaacaatatagatcagactccaaaacagttaaccaacaagcttacttttatgcca

SEQ ID NO: 39151 - DNA, 182 bp, Glycine max
  Clone ID: 701120728H1
caagttttgctacttttctcttcttaaccatagttcacatattatatcatcacatatcatagtgatatcatatcacaatgtgtggcatacttgctgtgcttggttgctctgattcatctcaagccaaaagggtccgcgtccttgagctttctcgcagattgaagcaccgtggtcctgactgg

SEQ ID NO: 39152 - DNA, 289 bp, Glycine max
  unsure (1)..(289): unsure at all n locations; Clone ID: 701120729H1
caactacaacagcaatgacttttggaanttcagtgaccagttgaggcttgaatctggtttggccaatctgtctctgaatgattattccatttggagcaacagctacagctccaagaggcctgatcagaggaggaactttgatgtcaagggcagtgatttcaacaactcatcaaagccttttgatgatgatttcaatgatggctggaagatcaccaattccaatggaccccttttctctatgcctcacaacaacaacatccacactcttgaagttggaggcttcaacaag

SEQ ID NO: 39153 - DNA, 289 bp, Glycine max
  Clone ID: 701120730H1
gggatcgaagccggggagcggaggtgcggcgtcggcgcagaacgaagccatagaccggcgagagcgtctccggcgactggctctggagaccatagacttggcgaaggatccctatttcatgcgcaaccacctcggaagctacgaatgcaaactctgtctcactctccacaacaacgagggtaactacttggcccacactcagggcaagcgccaccaaaccaacttggccaaacgtgccgctcgcgaggccaaggacgcccccgcccagccccaaccccacaagcgcaaa

SEQ ID NO: 39154 - DNA, 287 bp, Glycine max
  unsure (1)..(287): unsure at all n locations; Clone ID: 701120731H1
ctctctctctcccttttcttgaaacttccctctttcctttaaggattccctcctaatttggtgggattatccctcatcagcattgccattccctgtttcactcaccacattgaagacatggaaaagcttattcgcatgttccctttgctccttgttcttcttctgtgccccaattttgcttttgctggccatgactacggccaagctcttagcaagagccttctgttctttgaagctcagagatctggttaccttccccacaaccanntnntccanagganancaca

SEQ ID NO: 39155 - DNA, 102 bp, Glycine max
  unsure (1)..(102): unsure at all n locations; Clone ID: 701120732H1
ggaaatttggggattttttagggtnngggtttgatatacgtntctcttcgattcttaattgcttattgagaggactgtgcntgtgcttgtcaatcacatggc

SEQ ID NO: 39156 - DNA, 293 bp, Glycine max
  unsure (1)..(293): unsure at all n locations; Clone ID: 701120733H1
gcgatctctgcgttttcccctattttttctgaatctaacaacaaacatccctcaggcaacaatcatcactattaataagncttccttccttcancctctcccaagccaaaganaggaacaagaacaagaacaacaaagtaacgtgaaagagagagagatggaggcgattgttccagtggtggatttccagaggctttcagaggaagaggagcgcaagaagctgagaaaaacatgtgagaaaccagggtgtttcagaatcatcaaccactcattccactaacactcatggtgac

SEQ ID NO: 39157 - DNA, 287 bp, Glycine max
  Clone ID: 701120734H1
aaaattctgaatcctcagagcatcttgttggactttcggatgatgttggtgctggcttcatatctggtcatagtactcaacctgccacttcttctgagttgaatgtggacaggtctgttgatttgccgcctcaggatgaaattgggaacttgggggtctcaaaagtgatcagggctgatcagaaaagattcttctttgatcttgggagcaataataggggtcattcttaagaatatctgaggttgcgggttctgatagatcctccattatctcccctgtcaggctcc

SEQ ID NO: 39158 - DNA, 291 bp, Glycine max
  unsure (1)..(291): unsure at all n locations; Clone ID: 701120735H1
gcttaaccnttcctcaacctcaaatagtnccttcttctgacctggctaaagagaagaacatcactgctgctgcacctcctgctaacgacccagcaaagccacctgcaaaggcacaagtngtggggtggccaccagtgaggtctttcagaaagaacattgttcaaaggagtaacaacaatgagggcgaaaaagccgncacaagtagtagcaacaatgtgaacacgggancagctttcgtgaaggtgagcatggatggtgctccttatttacgcaaggtggatttgaagttgt

SEQ ID NO: 39159 - DNA, 229 bp, Glycine max
  unsure (1)..(229): unsure at all n locations; Clone ID: 701120736H1
aagatggtgcgctgctgtcggtgcttcgcctgagtctcattccgtttgcncccactatcacaggttgtgctgaggttaactggtctgaagatattcagagnttatcagagacaaatggtatatggatcaggtttganccctgacantataataatgngagacatcattggcaantgacacacctttgagcnttgtatnttcnctatgagctcaacagataccnaggata

SEQ ID NO: 39160 - DNA, 290 bp, Glycine max
  Clone ID: 701120737H1
cttgctaccaacactgagcttaaccgagcttcgcaaagatgaatcgggaaaagttaatgaagatggccggttcggttagaactggaggaaagggtactgtgagaagaaagaagaaggctgtccacaagacaacaaccacagatgacaaaaggcttcagagcaccctgaagagaataggggtgaatgccatccctgctattgaagaggtcaatatctttaaggatgacgtagttatccagtttctaaatcccaaagttcaagcatccattgctgctaatacttgggttgtc

SEQ ID NO: 39161 - DNA, 288 bp, Glycine max
  unsure (1)..(288): unsure at all n locations; Clone ID: 701120738H1
gttggaatcccaaattcatttctgtttctcattctcaattcttcttctattctcattctgatttgccacacacgcaganagntcnaaaatagtgggacttgattcactggaggtggagaaagatggctanncaacgcagctgcttgtgctgagagagcaactagtgatatgctcattggtccagactgggcaatcaacatagacttgtgtgatatcattaatatggaccctgggcaagccaaggatgctttgaagatactcaagaagcgtttgggcagtaaaaatcca

SEQ ID NO: 39162 - DNA, 285 bp, Glycine max
  unsure (1)..(285): unsure at all n locations; Clone ID: 701120740H1
gctccccaaggaaagaagcagagngtttcttttgaaatcagctagaaaagatgtcaggtgaagaggtagctgttgcagctgaggcacctgctgcttcaattccaggtgagccaatggacatcatgactgctctacagcttgtgctgagaaaatctctggcctatggtggtcttgcacgaggtcttcatgaaggtgctaaggtgatcgagaagcatgctgcacagctctgcgttctagcagaagattgtgaccaacctgattatgtgaaatggtgaaggctcttgt

SEQ ID NO: 39163 - DNA, 290 bp, Glycine max
  unsure (1)..(290): unsure at all n locations; Clone ID: 701120741H1
cgaatcccttgttgcttctctaagccaacacaagaaaaataaagaaaccctcactttagtttacttccattgcatccacattcacattcttcagctcgccggtgacacatccattatttccgccatgtcctccaattccgagcaaccttagattntcgtcaacctctctcacctttttcccttatttcaacagaaaaagagannnagtgattttnttttatttttttttatataaaaaaacgatacgatatgtacgttgtgcctccaccccagcgtctggatccgggttc

SEQ ID NO: 39164 - DNA, 288 bp, Glycine max
  Clone ID: 701120743H1
cgcctagccattgatttggaaaagtccaacttcaaggatgagtaagcttcagagtgatgctctaagagaagctatctcaggaatcatggctgattccaaggaaaagaacaggaaatttgtggagaccattgaactccaaattgggttgaaaaattatgatccccagaaggacaagcgtttcagtggctctgttaagttgcctcatattcctcgccccaagatgaagatttgtatgcttggagatgcccagcacgttgaggaggctgagaagataggattggactacat

SEQ ID NO: 39165 - DNA, 288 bp, Glycine max
  unsure (1)..(288): unsure at all n locations; Clone ID: 701120744H1
cncgagccnnngaaaaccctaaganctgaagngaagtccgancttgncccntnnctnctntacgnccntgtgccgncacctcatatcnaccttcanccaccgcagatgatgatcatgtgtacgacactaccggcgataagcttcantacggngncaantatttcgtgttgccagtgataagaggaaanggcggtggaatacaagtagcaaaagcnggaaacgaaacttgccctctgactgtggtgcaanctgggcaacgagctctctgaggggttaccgataaagatg

SEQ ID NO: 39166 - DNA, 284 bp, Glycine max
  Clone ID: 701120745H1
gtagtcatatgcttgtctcaaagattaagccatgcatgtgtaagtatgaactaattcagactgtgaaactgcgaatggctcattaaatcagttatagtttgtttgatggtatctactactcggataaccgtagtaattctagagctaatacgtgcaacaaaccccgacttctggaagggatgcatttattagataaaaggtcaacacaggctctgctgttgctttgatgattcattgataactcgtcggatcgcacggctttgtgccggcgacgatcattcaaa

SEQ ID NO: 39167 - DNA, 288 bp, Glycine max
  unsure (1)..(288): unsure at all n locations; Clone ID: 701120746H1
acactgcgattttcttcgaaatgattctcattctcacccttgtcttcaagaccccactgagaaaactcgtcatcgtttccctcgatcgtgtgaagcgcggtcgcggccccgtggtggtttccaccgtgggcgccacattggtggtggttctcgcgtcgagcctctacagcatggccaagatccagcaacgcaccctcgaggccggcatagtcaaccccaccgaccaagtcctcatganccaagcacatgctcgaggcttctctcatggggtttgtactgttcctctct

SEQ ID NO: 39168 - DNA, 285 bp, Glycine max
  unsure (1)..(285): unsure at all n locations; Clone ID: 701120748H1
gcagaagcagaagcagaagcgcgtgtaaccctaattagggtttggaagccgatttgagattcacctttcgcgtaatcacagcgctggatccgtaccgtgttcctccgtctacggaagcnccttttgctcggtccttcgctgaacacggaagcatgtacggtccccgaggggcaatgttgggaagcgggggggtttcagacgggtacgaggttggctcaaagagacaaagaatgatggaatccaatccatacttcgcagtgagcagcggaacaggcaattacctta

SEQ ID NO: 39169 - DNA, 293 bp, Glycine max
  unsure (1)..(293): unsure at all n locations; Clone ID: 701120749H1
ggaaaagcctcctctccctcgcaatcatcgccattgtccgtcgccgccgtcggaggacagtctccagcggcgtcgcccaccacttctccctccggctgccaccaccactccctttgcatccccagccacagccccttctaagccaaaatcaccggcgccagttgcttctnccacgtcatcatctccaccagcttcgtcccccaatgctgcaaccgcaaccccacccgcttcatctcccacagtagcatctcctccgtctaaagtgccgctccagtccggtggctacactcccg

SEQ ID NO: 39170 - DNA, 287 bp, Glycine max
  unsure (1)..(287): unsure at all n locations; Clone ID: 701120750H1
cggctcgccgcgagcntgctcaagtgtggcagaggaaaggtttggcttgaccccaatgaagtcaacgaaatctccatggccaattctcgccaaaacataagncantggttaaggatgggtttatcatcaggaagcccaccaagattcactctcgctcacgtgctcgtcgaatgaaggantccngnggaaaggacgtcactctggatacggtaagcgtaagggtacaagggaggcaaggcttcccactaaaattctatggatgaggagatgcgtgtntcagaccgttg

SEQ ID NO: 39171 - DNA, 289 bp, Glycine max
  unsure (1)..(289): unsure at all n locations; Clone ID: 701120752H1
gatttacatatagctagtatcattttacatgaaattcaaacagcaataactcaacaagacacaagttgttnaacannntatccttngaataagtctattttgaagcagaaagactttcatagcgggctttgaagtaggcaaanagtgggtctctaggaggaaggacttcgtgcacaaaagggtggttaaggaattcttggctccatttgtagagtataggaaatttctcactggtgaataactgcaaccctgctatttcctgaaaattgggntccaaaatgctatgaag

SEQ ID NO: 39172 - DNA, 286 bp, Glycine max
  Clone ID: 701120753H1
gcgcagggaacacaagcacgggtgtggagtggcacgtgcgacctccaaaccctaagaaccccatcgtcttcttcgatgtcaccatcggtaacattcccgccggtcgaatcaagatggaactcttcgccgatattgcccccaaaactgccgagaatttcaggcagttctgcactggggagtacaggaaagcaggactgcctgttggttacaagggttgtcaatttcatagagttattaaggatttcatgattcaggcgggtgattttgtaaagggagatggtagtgg

SEQ ID NO: 39173 - DNA, 287 bp, Glycine max
  unsure (1)..(287): unsure at all n locations; Clone ID: 701120754H1
ctcaccactccctccactctctttctctagtcctgttatttctcagcgcgtaaagcatggctttgttggtggagaaaaccacgagtggtcgcgagtacaaggtcaaggacctttcccaggccgacttcggccgcctcgagatcgagctggccgaggttgagatgcccggcctcatggcctgtcggaccgagttcggcccctcccagcccttcaagggggcccgcatcaccggctccctccacatgaccatccagancgccgttctcattgagaccctcaccgccctt

SEQ ID NO: 39174 - DNA, 286 bp, Glycine max
  Clone ID: 701120755H1
atgagtgtggtcaccatgcattcagtgactaccagctgcttgatgatattgttggccttatcctccactccgctctcctagtcccgtacttttcatggaaatacagccatcgccgtcaccactccaacacaggttctcttgagcgagatgaagtatttgtgccaaagcagaagtccagtatcatgtggtactctaaataccttaacaatccaccaggcagagtcctcactcttgccgtcaccctcacgcttggttggcccttgtacttggcttttaatgtttctgg

SEQ ID NO: 39175 - DNA, 284 bp, Glycine max
  unsure (1)..(284): unsure at all n locations; Clone ID: 701120756H1
agttggtgttgtgtcttgcgaaagaggaaaaacgtagaaagaagcaagcaaggaagcgtgctagctgggtttgtttctgttgtgaattgcgatccttaaacctttctctctcactcantcaatcaaattcaaatggacattgatttcaaagaataccagttgcgctgcgagcttcgcggccacgaagacgacgttcgcggaatatgcgtgtgcggcagcaagggtatagcgacttcgtcaagggaccggaccgttagttgtggtcttggacgacaaccgcagtt

SEQ ID NO: 39176 - DNA, 275 bp, Glycine max
  unsure (1)..(275): unsure at all n locations; Clone ID: 701120757H1
ggaacgtgacaatggtggcgacgaacgtgaaggcagaaaccatgtctctgatggncaagcgcaggccttggaggctgagatgaactccatcatcgcccgcctctcccagcccggcgctcctggcctctccggaaatctcgtcgactctgagggttttccccgttccgatatcgacatccccgttgttcgagccgaacgacgtcgcctggcagagctgcgcagtgaccacaacgaataactgagaaaataacctaaatattcagattctccattcg

SEQ ID NO: 39177 - DNA, 285 bp, Glycine max
  Clone ID: 701120758H1
ccggcattttcaaataccacccgaggctcgtaatatctccgtggaattgaaccactttttggtcaattctggcaatggaagcgccttgcaggccggcgaagggagcgtggcggccgaggagagaatggaggaggtgccaaaggcgtgtgacaatgtcaatggtgtggcagaggatgagacttcacagaagaaggaggatgtagaaaagggtagtggcaatgatggggacttttttgattgtaacatctgtttggacctggctagggatcctgttgtaacttgttg

SEQ ID NO: 39178 - DNA, 179 bp, Glycine max
  Clone ID: 701120760H1
gtttgtttgcggaacaacgagtttcgaaatcccgtggagaacgtaacattctttggtttctggatttgaagatgaaggccacaaaggaattgagccagcatgtggaggaaaatgaggtcacggtcttggttgatgaggaggaggacgaagaatacgagtccgaggatgaagtagtagac

SEQ ID NO: 39179 - DNA, 287 bp, Glycine max
  unsure (1)..(287): unsure at all n locations; Clone ID: 701120761H1
ctcttctccacncaaaatagnaaagggttcgacgaatancgttccaggttgcagcgcngtntaccaacangtgctcaagntccagcntccaccgancattcggtgnagcccgcacctcgagaacaccgctagtttcatcggcaccgtcgcccgcgaaccgacgngcgttaactcaacaaccggtaaattcggagtttacaccgtgcttaaggttccaaaatccaaccaatcaaatagctcctttttccggtattattgttttggctgggaaattttgaccgaaagga

SEQ ID NO: 39180 - DNA, 264 bp, Glycine max
  unsure (1)..(264): unsure at all n locations; Clone ID: 701120763H1
attttttataatacctgctgttacngttgtcggtttcaactacttccaagtgattccaacngcaatggaacaattttatatggatttgcctcagtcggtggttggccgagcaaagcaagccaacaatggtaatttgagtctgctaagggaacaaattcaagattacctgctctcagatggtgaagatgaaacataggactacttttttacattgaggctctatgttgaagggataaatactggttgtgtcgaattaatttacag

SEQ ID NO: 39181 - DNA, 283 bp, Glycine max
  unsure (1)..(283): unsure at all n locations; Clone ID: 701120764H1
gtgatggcatcattgccacctacccttctcatccatctcttcgtgtgcccttcatagacatggccaagttggtcaacgctgacacacatcaaaaagaagagcttcgtaagcttcatcttgcttgcaaagactggggtgtctttcagctggtaaatcatggactttcaancacatcccttaagaatatggggaatcaagttaaaagattttttgaacttcctttacaagagaagaagagatgggcacagagaccaggaatcttgaaggctatggccaagcattg

SEQ ID NO: 39182 - DNA, 287 bp, Glycine max
  Clone ID: 701120766H1
atgtcttcagtttctatccagatgaacgattttgcaatggatttgaagaagtgttgagtcagtatagggaaattgttcctaatattcgacttgcaggtcctacttcatttgcaccaattgttgaaatggccatgacaatagttgagcagagtggaggccagtaccatgttttggtgatagttgcagacggccaggtaacaagaagcattgacactgagcgtgggaggctaagtccacaggagcagaggactgtggatgccattgttgaggccagtaaatttcctctt

SEQ ID NO: 39183 - DNA, 285 bp, Glycine max
  unsure (1)..(285): unsure at all n locations; Clone ID: 701120767H1
attgcattcggacgcttggatgattctttcagtttaacctcaatcaaggcctatattgctgagttccattcaaccttgctctntgtttttgccggtgttggttcagccatagcctatggtaagttgacatcagatgcagcacttgatcctgctgggttactggcagttgntatttgccacggttttgcactctttgttgcagtttctgttggtgccaacatctctggtggccatgtcaaccctgctgtgacttttggattggctcttggtggccacatcaccatc

SEQ ID NO: 39184 - DNA, 284 bp, Glycine max
  Clone ID: 701120772H1
aaactcccagatggacgtgaagttgccgtgaagcgcttatacgagcacaactggaagcgagtagaacagttcataaacgaagttaagatcctcacacgtttgcgtcacaaaaatcttgtgtcactctacggctgcacttcacggcacagccgtgaactcctacttgtgtatgaatacatttcaaacggcactgtagcgtgtcatctccatggtggattagcgaacctggctccctaccatggtctacacgaatgaaaattgccgtagagactgctagtgcattg

SEQ ID NO: 39185 - DNA, 285 bp, Glycine max
  unsure (1)..(285): unsure at all n locations; Clone ID: 701120773H1
acccaactaaccctaattcaacttttccgatctgatcacttcgagtaaaaattccaaatgagtcgggcacnggatgcaaaccaatcattcttcccttttggaaatccttttaggatgatatcacctaaaagccctaaaatttcttcacagctgttgttaattctacatgcttttgaagcaactttggaagagaggctgaaaaagcttattcccaagagcaaggatgagatcctcagcttgtcttggatgactttggctatgcagtcactttgtgagagccataat

SEQ ID NO: 39186 - DNA, 283 bp, Glycine max
  unsure (1)..(283): unsure at all n locations; Clone ID: 701120774H1
gntaggnttaccttcgnnctcncccgcccacaccctctactcctccttctccttcacccttcctttcccggcaaaactccacttcttcaaggctcagtggtatcaacatccctcctgctctcactatcccaaacccttcatcatggcctaccatgtctgatgatttgatgagnccaaccatttggttgtnggctcttctacttcttcatcttccttaccctactatgctaacggagggncagatccaattgatgacttccaacttcaagaccagctttctttc

SEQ ID NO: 39187 - DNA, 283 bp, Glycine max
  unsure (1)..(283): unsure at all n locations; Clone ID: 701120775H1
accacctgctaagaagaaaagaaacctaccagggaatccaggtatcttttctctaattaacaactatctcagtttcgtaactattttnttttttcatttaaatatataaaaacatttttgtttcccctttttctttttttatttttatccccatgataattactagactaacattgtaattgagaatttgatcgcttgatgttgcacatgatatagaaacattttattggtagttacagtcagacctactctcctaaagcttaagctattaggtaatgtcacc

SEQ ID NO: 39188 - DNA, 284 bp, Glycine max
  Clone ID: 701120776H1
agtgtatgctatggtgagctttgaatggaaagtggagaagttcttttggttcttctttgtcagcttcttctctttcttgtacttcacatattatggaatgatgactgtgtccatcacaccaaaccaccaagtggcatcaatctttgcagcagcattctatggactctttaatctcttctctggtttctttatcccaagaccgaaaattcctaaatggtgggtgtggtattactggatttgtccagtggcatggacagtgtatggattaattgtctctcaatata

SEQ ID NO: 39189 - DNA, 284 bp, Glycine max
  unsure (1)..(284): unsure at all n locations; Clone ID: 701120777H1
aatcacccttgaggtggagagttcagataccatagataatgtaaagtccaaaattcaagacaaggaagggatcccaccagaccagcaacgtctcatttttgctggcaagcagcttgaggatggacgtacacttgctgattacaacattcaaaaggagtccactctacacttggtgntccgtctccgtggtggaatgcaaatctttgttaagaccttgaccggaaagacaatcacccttgaggtcgagagctctgacaccattgacaatgttaaggctaagattc

SEQ ID NO: 39190 - DNA, 285 bp, Glycine max
  unsure (1)..(285): unsure at all n locations; Clone ID: 701120778H1
gcagatgcntcgggaaatgccccaggccgcatcgaagttggtggtaaacctcctgaagtgaaggaaaaattacctattcaaaagatcaaaaggaagtgctantggtngtaatttgaatatgtggattacagggaanaataatgancctggtaaaataccangagaatctgctaatgggattcattccanaagtggtnagagtgcaagtnacggaactagtgaaggaagtgatgagaactcccagantgattctcaattganatcaagggagaggcaggactcttt

SEQ ID NO: 39191 - DNA, 284 bp, Glycine max
  unsure (1)..(284): unsure at all n locations; Clone ID: 701120779H1
gggtggtctcaggggcggaagnaaccttgcttcttgggtcgtcgccggaaccctagcttacttcctctggatcaaaccctcccaagacctcaagcgtgaacagcaggagaaggccgctcttgccgccgccgagtctgatccttatcgttacgttnngactcgtaaacccattcccgatcctcaggttacgggtttgatatatggaaacaagaacaaggacaaaccaaccaaaccagaggattgattcattcattagcattcatgtggccttgttgccttacttc

SEQ ID NO: 39192 - DNA, 283 bp, Glycine max
  unsure (1)..(283): unsure at all n locations; Clone ID: 701120780H1
ggggctgggaggatatcattgtcaagcaagatcagtccgatgagaacccaccagagatgaaaatatctcttccatccatgccttctctgtatatcatctcatttctatttagagcctgtgaagaagttcatagagttggaggtcatgtacttgacaagaagattttggntaaacttgcatcaaggctactggaaaaggttactggaatctttgaggactttctttccactgcagagagtggtnctcatcaagtgtcagaaaaaggagtcttgcaggttttgtt

SEQ ID NO: 39193 - DNA, 279 bp, Glycine max
  unsure (1)..(279): unsure at all n locations; Clone ID: 701120781H1
gacgacggcaacctcaaggtcaccgacttcagcctcagcactttctccgancncctccggcacgacggcctgctgcacactacgtgcggcacgccggcctatgtcgcgcccgaggtgattgggaaaagaggctacgacggcgccaaggccgatatttggtcttgtggcgtaatcctctacgtacttcttgctggttttttacccttccaggatgacaacctggtggccttgtacaagaaaatttaccgcggtgacttcaagtgtccgccgtggttctcc

SEQ ID NO: 39194 - DNA, 267 bp, Glycine max
  unsure (1)..(267): unsure at all n locations; Clone ID: 701120782H1
ctatttgcctaacaagcccttggaccgaagatcctacattacttgagaagagcaaagaagacngcttttctagaatggangaatgcaagaagagaggaagtgtccgagtatcagaaacagattggggagcagtatcttgccaatgttgagaaggaattggagagatggcagaatgcaaggnacgcaaggaaagttaacaatgaccagaatttacaggagacaatggacaaagagttggatactcataggctggagcatggtcccaag

SEQ ID NO: 39195 - DNA, 176 bp, Glycine max
  unsure (1)..(176): unsure at all n locations; Clone ID: 701120783H1
cttttaccngaatcatcgccngtatgttaaaagccgaaacgatgaacagctgagggattctggaaaagcaaactccgtaagtggttgtgagcctganaataatgcaaatggaaaggcaattttaccttgtggtcttatagctggagctgttcaatgatacatacagctccccacnc

SEQ ID NO: 39196 - DNA, 286 bp, Glycine max
  unsure (1)..(286): unsure at all n locations; Clone ID: 701120784H1
gcggacgtcacggcgaacttgcaagcagcaaccaccgcatccaccccttacgcgctcnccaccaatctccctctcctctccgctttcctctccttcgctctcgcacagttcctcaagatcttcacctcctggtataaggaaaagagatgggattctaaaangntgcttgantngggtggaatnctctcnttacattctgcnacannntcggctctggctgttgctataggtctccaagaaggggcaggatcaactngcttttgcagttgccgtggtcttggcgtgt

SEQ ID NO: 39197 - DNA, 54 bp, Glycine max
  unsure (1)..(54): unsure at all n locations; Clone ID: 701120785H1
agaaatccntcatgttcangctggtcaatgngganaccaaattgtgagncaagt

SEQ ID NO: 39198 - DNA, 266 bp, Glycine max
  unsure (1)..(266): unsure at all n locations; Clone ID: 701120786H1
tcgnnccgctccttttttnatntanntcgnagaaacgcnancccttcanaacaagggcctcannagccccaacctttctcanaactngcancactattgtcggtntagttttccaggatggtgtcattncttggtngctgatactanggcaactgaaggacctatagtggctgataaanactgtnngnaanttcattatatggcacccancatatattgctgtggagcaggcacagctgctgatacagnggctgtaacagacangg

SEQ ID NO: 39199 - DNA, 173 bp, Glycine max
  Clone ID: 701120787H1
gtggctgtgcattttgtgctgctgtaaatgtgctttatggagtcatttatttagacgatagtgatacaatataaatgggaaattgtccgcttcaagtaaagcgttttgttactttcccactattcaatggttgtgcggttttattcgtgttgatgtcaaaaaaaaaaaaaagg

SEQ ID NO: 39200 - DNA, 282 bp, Glycine max
  unsure (1)..(282): unsure at all n locations; Clone ID: 701120788H1
tggactgacatgctacaatggaggaaggagtttggtgctgatactattgtgcaggattttgagttcaaggagttagatgaagtcgtgaagtattatccacatggccatcatgncgntcgacaaggagggaaggcctgtttatattgaaagacttggaaaggtcgatcctaacaaacttatgcaagttacaactttggatagatatgtgaagtaccatgtgcaggagtttgagaaagctttgcaatcaagtttcctgcttgctctattgctgccaagaggcac

SEQ ID NO: 39201 - DNA, 283 bp, Glycine max
  Clone ID: 701120789H1
gccatattgaatttccctttggagattggagagtcagaggaatcagtctcaagctgcatcaaggttggtgtgaagagggaaagagaggaagagagtaaaagcaacaactatgagaaaagtgagtttaacaacaataataatagtaataagcatgtgaagaaagaagagtgttctcccaaagctgtttgccctttgactccatcatgttggaaaggctttgggacactgatgttatgggaactatctttagtgtgcctcctttgtcaccactatctccactaat

SEQ ID NO: 39202 - DNA, 281 bp, Glycine max
  unsure (1)..(281): unsure at all n locations; Clone ID: 701120791H1
cttctacgcggtgttcggcgntttgggagcggttgctgcagtgacggagctgagcaagagcaacaaggaccgaatcaacacctcttccgcattcaattccttctgcaacaactacctcatcncctattccctcatgatggctggagattggctacaaggtccatatgtctactacctttacagtacatatggatatgggaaggnagacataggacatctcttcattgctggttttgggtctccatgctctttggaacaattgtcggatctctagctgacaa

SEQ ID NO: 39203 - DNA, 283 bp, Glycine max
  unsure (1)..(283): unsure at all n locations; Clone ID: 701120792H1
tgtgagcctttctttcaggttcttaacttgatcagtgtgcagtgtccaaatcataagggtanttgcaaattgcaatggctaagcatgatgttgagggtggttccttctctgcaaaggactaccatgatcctcctccagcaccgttgattgatgctgaggaactcacacagtggtccttctacagggctttgattgctgagttcattgccacaatgctcttcctttacatcacagtgctcactgtgattggttacaagagccagagtgatgtaaaggctggggg

SEQ ID NO: 39204 - DNA, 265 bp, Glycine max
  unsure (1)..(265): unsure at all n locations; Clone ID: 701120793H1
ctcntttgcatattcaatgctattcancaaaaaaattagttatccttccattantttggtaattattttacttggcaatcacatgaactagttgaaggattcgagaggttctagataaaatggaaagtgagaatttgatatgtggccttttatttttgtgacaaagcaaatgtttgggtttagagaatacatttgaaaggtttctcctatgtaaggtcgaccttggaatcaggtgcgagcagctactccaaggtttgtaagggta

SEQ ID NO: 39205 - DNA, 283 bp, Glycine max
  unsure (1)..(283): unsure at all n locations; Clone ID: 701120794H1
gtatatacgtaactagaaggnacacggatcaattttcatcctctgttaaggaggcaaaggaaaaaggtttgaacttgtagccatcaccgctgtagaatttattctgaaattctacccagtgaagacgcaaggcgtgaagaaaagcgctgagagtntccatcattagtagtataaaggcagttgcaaaggcaaaaacagctagccccactaaccgaatgacaagattgtcatacccccaagcaagtaacaggactttctcataaaaaacggtggaaagttctga

SEQ ID NO: 39206 - DNA, 281 bp, Glycine max
  Clone ID: 701120795H1
ggcgtacaagagcgttagtagtttcagactggacaagacgttttatttttggaagggactcaagtagcatctgagggaactcaacatcttccagagtcttttgcattggcaatgtggcagagctcgttgatcataaatttcatataggaaaattttgtttcaattccatttattctttgaataaggaagctaggtgatgttcgaactcgaacagctgaggcatgctcgccatttagagtcgtggcatagttggtttccgagttttgcagattaagtttgtt

SEQ ID NO: 39207 - DNA, 282 bp, Glycine max
  unsure (1)..(282): unsure at all n locations; Clone ID: 701120796H1
ctgagtattggatacgctatgttttgtgtatggaagccagtggacgcatggatcttgcaaataatgtncttgctcgggcaacccaannctttgtnaggggccaaccagngatacctattttttgtncncggttcaagggancaacntgnnntntngntngggncananctgnatatnaanntttgggaactgnaantctcccggnttcttggagngaattntccaaaatggcccatatgggatancgcctgggaaaaatggnggtgccttctcttntntgaa

SEQ ID NO: 39208 - DNA, 296 bp, Glycine max
  Clone ID: 701120801H1
ctgctctttgaagaaagaagggtctttgcttgattttggagatgtctctgctctcagatctcatcaaccttaaccttctccgataccaccgagaaggtgatcgcagagtacatatggatcggtggatcaggaatggacctgaggagcaaagcaaggactctcccaggaccagttagcgacccttcagagcttcccaagtggaactatgatggttccagcacaggtcaagctcctggtgaagacagtgaagtgattttatacccacaagccattttcagggatccattcagaagggg

SEQ ID NO: 39209 - DNA, 292 bp, Glycine max
  unsure (1)..(292): unsure at all n locations; Clone ID: 701120802H1
gccataggttactactcttcgccttttcctttgcaattgttaccaaacaattcttgcttagcccttacaagcaagcattaacaacaatgaagaaagtagtgttaaaggtgggcttacatgatgatagaatcaagcgaaaagntatgagaacagcatctggtctttcaggggttgaatcagtttctattgacatgaaagacgaganaatgaccttattaggnnacattgatccagtgaatgcagtgtgcaagctacgaaagtgttgtcaaactgaaatagttacagttggtcc

SEQ ID NO: 39210 - DNA, 288 bp, Glycine max; identical to SEQ ID NO: 39065
  Clone ID: 701120804H1

SEQ ID NO: 39211 - DNA, 290 bp, Glycine max
  unsure (1)..(290): unsure at all n locations; Clone ID: 701120805H1
gaaactccaaacnaacatccctcnagacnaccttaggaatctcgatcgccgnaaaaacctatgcagccccgnacacacacactctgcattccaacttgtttaaatcatgnctctcgnttcacccttctctctcaataaatcttttggcctatgaaatcagattcttcgccaccgccacagtcataataaagttttatttttccaaataaagggaatggcgactcctgttgagcctcctaacgggatcagaactgaagggaagcattattattccatgtggcanacccngt

SEQ ID NO: 39212 - DNA, 287 bp, Glycine max
  Clone ID: 701120806H1
ctggaaatgcctccctagaagaggttgtgatggccttgagatgcggagcacatgtcaatggcaatctctacactggaattaatacgaagcacatctttctgacgagcaggatggtcgaagagtacactggtttgcagttacagccacacaaggctcttgtgggagctaatgccttcgcccatgaaagtggcatacatcaggatggaatgctaaaacacaaaggtacatatgaaataatatcacctgaggacattggacttgaaagaaccaatgaagctggtattgta

SEQ ID NO: 39213 - DNA, 274 bp, Glycine max
  unsure (1)..(274): unsure at all n locations; Clone ID: 701120807H1
ggctgggcacgggggtcccagtcccgaacccgtcggctgtcggtngactgctcgagctgcttccgcggcgagagcgggtcgtcgcgtgccggtcgggggacggattgggaacnggcccttcggggcctcttccccgggcgtcgaacagtcaactcagaactggtacggacaaggggaatccgactgtttaattaaaacaaagcattgcgatggtccctgcggatgttgacgcaatgtgatttctgcccagtgctctgaatgtcaaagtgaagaa

SEQ ID NO: 39214 - DNA, 285 bp, Glycine max
  unsure (1)..(285): unsure at all n locations; Clone ID: 701120808H1
cgaaccctcgatcactctcacgcgctcctatattcgctcctccaccgtcgctctctcgaacaaccacaacaccatcttcatcacatggcaaacgcagcntctggtatggcagtccatgatgactgnaagttgnngtttntgganctgnaggcaaaaaggnnacaccgtttcatagtnttnaagattnaggancagcaggagcaggtcattgtggagaaggtggtgngcctgnncatggctatgaagntttcactgcnagccttcctgctgacgggtnncgttatg

SEQ ID NO: 39215 - DNA, 287 bp, Glycine max
  Clone ID: 701120809H1
gaggattccctcagaaaggcatttcttttggctgattcagctttggccgatgattgcagcgtgaatagttcatcaggcactacggcccttactgctttgatatttggaaggcttctaatggtggccaatgctggcgactgccgagcagttctctgtcgcaaaggagaggccattgacatgtctgaagatcacaggcctatttatctatcagagcggaggcgagttgaagaattgggtggctacatagaagatggttatctgaatggggttttatcagttactcgagc

SEQ ID NO: 39216 - DNA, 288 bp, Glycine max
  unsure (1)..(288): unsure at all n locations; Clone ID: 701120810H1
caacagtgttaggcccaaaagagagaaaacgggatggatactcatcataggtcaaagttggtggctaattgataagaagcgtacatgtgcttctttatgttatgttgagatatggcttgccatttccgtaatttgatcgagtaatcatggtcatttctttagcatagagttgataaatatcatcaagacagaactagtttagtgttttacgagtaagtnaagataagatgaagaagatggtggttgcaatgatgcttatatttcttctaatttctacgcaaatggaga

SEQ ID NO: 39217 - DNA, 288 bp, Glycine max
  unsure (1)..(288): unsure at all n locations; Clone ID: 701120811H1
gagcaagtccatcaaatgcttcgcgagtggaaggccgagctcaatgagccctcgcctgcttcttcgttgcagcaaggtggcagnnttgggtcattctccaccgatatctgtcggattttgcagctttgtgaggaggaagatgatgcctctagtccattagctgctcctaagcctgaacctaatgatcagactctgcaggctgggggtaaggtcatgttccaagagggccaacagcaacattatttcccattggttgatgagtgcaaacactccacctcaagtgttcaa

SEQ ID NO: 39218 - DNA, 266 bp, Glycine max
  unsure (1)..(266): unsure at all n locations; Clone ID: 701120812H1
ctcacttccttgtcttcctctcactcaccctttgaaatnnntctcacttctattttagantctcaattcgttattgtttttggttcacttggttcatattcnagcccaattttggtgtctcacttattggttttccaattgaagtgattaaaaagttgattttgggaaatgggtatgtgaagtttggttttttgatttctgggtcttgaaattgaggtaaaaaagttgtcaaattggagagaaaatcggggtttttttattgtggt

SEQ ID NO: 39219 - DNA, 136 bp, Glycine max
  unsure (1)..(136): unsure at all n locations; Clone ID: 701120813H1
tagcctgtaagatatatatatagatatttcatatatatcctatggtccgtgagttncccttgttctgtaccaaccctttcttccacacaacatacnantttancnnccncacnnngtcnncatatcnnatacgcna

SEQ ID NO: 39220 - DNA, 294 bp, Glycine max
  unsure (1)..(294): unsure at all n locations; Clone ID: 701120814H1
ggcacattaccagatggacaagatattgcagtcaaaaggctttcacaaacatctacacaaggattaacagaatttaagaatgaagttatattttgttctaaacttcaacatcganatcttgttaaagttcttggttgttgcatcaatgagcaggagaaattactcatctatgagtacatgccgaacaaaagcctagacttctttctttttgnttcntctcaaagcaaacttttagattggtccaagcgattgaacatnataaatggaattgctcgaggactnctttatcttcac

SEQ ID NO: 39221 - DNA, 293 bp, Glycine max
  Clone ID: 701120815H1
tcatcgttcaacatattctcaccatctcagtcatgggcctgctatcttgttttaggtctaccgtcctgagaaaatgttccaaaggaagctctggcatgtcaagattcctgtatacgaacaattttcaacgaaacttgatttcgtctggtggcaatgaatcgtattatgggtattttaacaggagatcatacacttcactttatatgggaactggaactgtgggtgggattacaagtgctagaatcagggtgccaaatgtaggatgtgaaggattcatgtgctcaagtcatctg

SEQ ID NO: 39222 - DNA, 288 bp, Glycine max
  unsure (1)..(288): unsure at all n locations; Clone ID: 701120817H1
aacagtgttaggcccaaaagagagaaaacgggatggatactcatcataggtcaaagttggtggctaattgataagaagcgtacatgtgcttctttatgttatgttgagatatggcttgccatttccgtaatttgatcgagtaatcatggtcatttctttagcatagagttgataaatatcatcaagacagaactagtttagtgttttacgagtaagttaagataagatgaagaagatggtggttgcaatgatgctatattcttctatttctacgcaaatggagatnaa

SEQ ID NO: 39223 - DNA, 288 bp, Glycine max
  unsure (1)..(288): unsure at all n locations; Clone ID: 701120818H1
gcttgctctggcttcggaagaacaaggagagtcagttaacaatgttggaaataaagttttggggtccaaaggaagtaatgcttcggtacaccagttttcaggtgcaaatagcaccagcaccatgtatacagatgaatttgnctcttctgtggcaatgctaaatattgcgatcgtttggttccatcttcatgactatgtgaagacattgtcagttttggaacctctctttcnaaatattgaacccatagntgagcagacaacagctctacatatttgcctctgctgctg

SEQ ID NO: 39224 - DNA, 288 bp, Glycine max
  Clone ID: 701120819H1
gccgattttaaaagatgagtaagcttcagagtgatgctttgcgtgaagccatttcaggaatcatggccgattccaaggagaagaatcgcaaatttgtggagaccatcgaactccaaatcgggttgaaaaactacgatccacagaaggacaagcgtttcagtggctctgtcaagctgccccacatccctcgccccaagatgaaaatttgcatgcttggtgatgctcagcatgttgaagaggcggagaagataggactggactggatggatgtggaagccctgaagaagc

SEQ ID NO: 39225 - DNA, 238 bp, Glycine max
  Clone ID: 701120820H1
tagtgcctccttgccagaagttaaaatggcccaagaaactttcctattcacatctgaatcagtgaacgaggggcaccctgacaagctctgtgaccagatctccgatgctgtgctcgatgcatgcttggagcaggaccctgacagcaaggttgcctgtgaaacctgcaccaagaccaacatggtgatggttttcggagagatcacaaccaaggccaacgtggactatgagaagattgtg

SEQ ID NO: 39226 - DNA, 276 bp, Glycine max
  unsure (1)..(276): unsure at all n locations; Clone ID: 701120821H1
ctgatganccanatcgtggaattgnagttcgcgtcgaantcgctgcngcggcnatcgcgtgnagtgtcgangaggnngagtnnatcggacaagctgatgttgnaganggcggtctaaanangctgcatggtcnggatcgcgnatctangcggccnnggcgatccgttgtcgccacgtngcagatgaactacntccgggttgnctcgcgcntggnngcccgtcgtggaccgcctcggncgcggtngtgngggntcaggtctgtgcngcaattagtng

SEQ ID NO: 39227 - DNA, 267 bp, Glycine max
  unsure (1)..(267): unsure at all n locations; Clone ID: 701120822H1
gtaaggaagtgtctcaatctgcantcagcgagtgcatctactgaagttaagtccagtaatcgtggttcacttgttcaggctactatatccacattattcaagaaagtggaagaaaagaaaactccaagaagttcgaggaaatctccatcttcaaaaccttctggccagaagtcacagcctgctggttcaaaaagaaagactgntctggttgaatttctttttttattttttatttcctgaatctgtttttccttcaagtgggaatga

SEQ ID NO: 39228 - DNA, 288 bp, Glycine max
  unsure (1)..(288): unsure at all n locations; Clone ID: 701120823H1
atggtgtcttctgcnttacctatgatttgagggctggagaagagacaagatcctggnagaaattnattancatngcagttntacatgtgctgctggaatgattgcaaatcatnctncttttccaagcntgcntctggtgaagtntttngnccngatcaacctattgntctcanattattgggatcanaaaggtcaatncaagctcttgaaggtgttgcaanggattggaggantctttgtntccttgttganggaagttagnattggnatngntcctatggaagtgtg

SEQ ID NO: 39229 - DNA, 237 bp, Glycine max
  Clone ID: 701120825H1
gatctgttttgtttcaggagccacccgctgcctgcagttttcttttgcggttggagtggaaggccattctcgcaacgtttgagttcagcagatccagaatttttcagaaaacaggtttaggagaatgaagaatacggaacgaattgccaatttggcttagcaggtttaaccttagcgcctcttgttgtgaaagtagatccgaattaaatgttattttgactgcttccctcactgtgt

SEQ ID NO: 39230 - DNA, 289 bp, Glycine max
  unsure (1)..(289): unsure at all n locations; Clone ID: 701120826H1
gcagcaagcaaggcaaggcgtgtgtccgagcagagcaggagtgaaggagaaaaggacccttgtccgtccagtccttattctcttttctcctccctccctcacgcaaccgccaattcctgaaccctaagcgccatggctgtcgtttcgcgaagtgcgacgacctatacgcgccactacttaatacgacacgagtttgataggaaaacgaaaacctgcgttgccaataatagtttgtgttactctgctaagaaggctcctccaccgcagaggatgttggtggccgtagant

SEQ ID NO: 39231 - DNA, 287 bp, Glycine max
  unsure (1)..(287): unsure at all n locations; Clone ID: 701120827H1
tgcgtttcagcactgtcactgagtccttctgttgcgggggaagggcaaaataatggccttgttatgaacttctacaaggaatcatgccctcaggctgaagacatcatcacagaacaagtcaagcttctctacaagcgccacaagaacactgctttctcctggctcaggaacatcttccatgactgtgctgttcagagttgtgatgctcactgttgctggactccacaagaaggagcttgtctgagaaggaaacagatagaagcttgggttgagaanttcaggtacat

SEQ ID NO: 39232 - DNA, 288 bp, Glycine max
  Clone ID: 701120828H1
gccgcatcaacaataatttctcaaacagcgtcgtttaagttaaagaaacccattagactaggcagatcattatggctgtacattccgaatcagcttcatcagagaagaaatcaagcaatggagtgaatgagttgctgacttttaatgctgagaatatgcaaagcaacatgaaaattatctattacagccgaacatttttatctataattggtggcgttgttgctggaattttgggattacaggcttgaaaggattgtgttttatttacttctcaggcacttacttcac

SEQ ID NO: 39233 - DNA, 293 bp, Glycine max
  unsure (1)..(293): unsure at all n locations; Clone ID: 701120829H1
ggaaaaacctcggtagagttgagggtttagcggcagcatagagaatagagatagagcgaattgaaactctctaatggcactctacacccatctcatcnnnnnnnnnnnnnnnnnnnnncttcattcaccttcgcctctatgtcttccaaagcctctcttcccttcttttactttgacagtgggcaattcaacctcccacaccaccagtctcgncgttcgctcctcttattccgaaatgggctcttcccctgagcccatcaatttcaggaagccagggattccgtccatgtctc

SEQ ID NO: 39234 - DNA, 292 bp, Glycine max
  Clone ID: 701120830H1
gcttgcacgaccacagttgcgaagaccatgactgttcctctaactggtctctctacaaacacatcgacctctccaaggtaactgctttgaatgaggcaaatccaggaagtgttaagtcagttttcaaagcttgggaagagcgtctggattcttctggggttcacttggaaagcaatgagggtgatcctgagttacttgtcttcattccattacttcagatgtcaagattaagagcatatccatagttggtggagctgatggaacaagtccttccaagatgagagtgttcatc

SEQ ID NO: 39235 - DNA, 293 bp, Glycine max
  unsure (1)..(293): unsure at all n locations; Clone ID: 701120831H1
atcctatcatcttgtggctttgatgtctagagcattggaanatgattacntagggttggcagagaatccgtcaatggacggaagctctgacaaactgtcttctgaggatggtaaaacctcatcactgaacttgaaggagacagagctgaggcttggcctccctggttgcgagtctccagagagaaaatcaggttctgcantctgtctttttggcaaagagttgcagaacaataacaatgtttgctcagttgtaagccctttgaaggctgggnctaagangggnntctctgatg

SEQ ID NO: 39236 - DNA, 293 bp, Glycine max
  Clone ID: 701120832H1
tcaaatgataaggtgttagtaagagatgttcaaccgtctttatctgacaaagaccaaatagagaaagcacagcgcagtaaatttgtacagggacttttgatgtctactatccttgatcctgacttctgattgagacgattaaggacatcagttgctacttgctagtttcaattcgatgggtaaaaacaaaggagaaaaatagtattttcaaccttgaaaatgattcatagtcataggatcaatgtttctggtgtatgcagagatacacctagtatagaggaagtagtctatat

SEQ ID NO: 39237 - DNA, 290 bp, Glycine max
  unsure (1)..(290): unsure at all n locations; Clone ID: 701120833H1
attcccaatggatgtgtggcatgtgggtcacttgttacatatccctgcagcactctttcagaacttctatcagcttagagttactaaagcttctggtccatcagagacattgntgatttcagatgagcatatttgtnatcaagtaaagagagtggatttctgtcacgtagatcaccagttcttagttaacctatttgaagtgtgttgtgaactattgtataccactattatgcatcgtccaagtgagtgcaaacagtgtgttgctcatcttgaagctctgttgctgttct

SEQ ID NO: 39238 - DNA, 191 bp, Glycine max
  unsure (1)..(191): unsure at all n locations; Clone ID: 701120834H1
aaccctacncccttcagattcgggccaagatggcatcacttcatgctaatgtgacatcagtngtttgcaagagtngcaaccatgcttctcaatcganattcacaagctnttcattcttgcctggntttgatgntgttggtcgtgcttcaaatgcttggaagaaagaacttgtcccatcttccattccttgg

SEQ ID NO: 39239 - DNA, 284 bp, Glycine max
  unsure (1)..(284): unsure at all n locations; Clone ID: 701120835H1
cttagcagccaacacctatgccttttcttccaggagattctccttgaagcaccaaaagaacagtaagagaaggttttctttgttcactgttagacctgattctgatgactctgactgcaatgaggaagagtgtgccccggataaggaagtagggaaggtcagtgtggaatggttagctggggagaagacaaaagtagtgggcacattcccacctcgtcgtaagccgggttggactggctatgttgagaaggacatgctgggcagacaaacattattcantgagc

SEQ ID NO: 39240 - DNA, 287 bp, Glycine max
  unsure (1)..(287): unsure at all n locations; Clone ID: 701120836H1
gaattttgaaggtggctcagcncttgcgtcatgntcttgngcgtgtntgtcagattgatggtagtagtatgagagatatgcaccggaattctactggtagtactaacactaataagatatcatcatcggcaataaggctgccctcacctcaacantctctaagacgcttgggattgtgttcccagatagctacgggggagcactcttctcctatcgtcttccctgaaaaacgtggcaaagtcaaggcgacttccaggaagaccagtgtcncccccactnccattcgt

SEQ ID NO: 39241 - DNA, 286 bp, Glycine max
  Clone ID: 701120837H1
tctcccccaagaaattcaacagagttttgattaacttgaaattgttcaacaagaaatggagaattcattgggaaagtacggaaaagagcttaatctcgaggctacagagttgaggttggggttgcctggaagcgatgagcctgagaaacgttctgctgttagaagcaacaagagatcttcaccagaagcaagtgaagaagagtgcataagcaagggcaacatgaattcttctgatggttctgatatcacaagtgatgaccaagacaacgttgtgccacctgcaaag

SEQ ID NO: 39242 - DNA, 276 bp, Glycine max
  unsure (1)..(276): unsure at all n locations; Clone ID: 701120838H1
ggcctcaagagcagtgttattgttggctatgtgtgtgcttccggcgatggntgtggccattcgcccagcaaagaaccctttttgcgtgaagggtcgtgtctactgtgacccttgccgtgctggttttgagacctcagctaccacctacattgctggtgctgagattatgttgcaatgcaagagcagggttagcaacgaggttgtgtacacgaagaaggggtacaccgactcaaccggagcatacacaatgtacgtggatgaggatcacgcagatca

SEQ ID NO: 39243 - DNA, 101 bp, Glycine max
  Clone ID: 701120839H1
ggatgctgatgggagtaaaccggcacaagatagttgtaaagttcaacatttctgtgattagaatgatggccaaatgtgcatttgattatgtattctgtgtc

SEQ ID NO: 39244 - DNA, 275 bp, Glycine max
  unsure (1)..(275): unsure at all n locations; Clone ID: 701120840H1
gaatccattgaagagaatgtgcagcggaaaattcacttttgactctgaaaggtntcgccttgaggcccttcctcttgatgttctgattagggtgttgtgtggtgtcgatcatgaagatttggagcaacttgttcgtgtctcaaaaactgttagagaagcggctgagattgctaggagaatgcattttgagtatagcactccaaagaagnnaacttttgctcttcctaaaccgtttgatatagagggtgctggtgggtttgaggaaatgatactcc

SEQ ID NO: 39245 - DNA, 279 bp, Glycine max
  unsure (1)..(279): unsure at all n locations; Clone ID: 701120841H1
aattcgcagtgtatgangagcgcttcggagctatttcactccagaaggcaacgattgggacgaagtgctctcgatctagggctcgacaccgaactcaacgccgccgattctctccgccgccactaccacctccgccgcctccgtcaccacccggagcgtgcatctgatagaattgatgggaggtatcggcggtctttcgcaagcgagagcgttgattctgaagaaaatgtgagaagtagtcttagaggaagtgacagtgagagactacccgtgggtgtt

SEQ ID NO: 39246 - DNA, 284 bp, Glycine max
  Clone ID: 701120842H1
gtaacttcaacaaacggcagcttcttcaattcaaaacaaaactctctggggtgttggtgttggtgagggatctgaggcaaaggtgttgatgatatgggagcgtgtgtttcaactccacaagggtgcgtgggagggaggttgagctcttccaagaagaaaaccagaaagagaaggagagagggactcagaagaagagttacttctcggttgtgtaaggaatcatcggagaaagttgatgtggcaggttgcctgattgttccttgctaaccccatttccaagcagg

SEQ ID NO: 39247 - DNA, 289 bp, Glycine max
  unsure (1)..(289): unsure at all n locations; Clone ID: 701120843H1
tctgcacccaccattactcanccactgccactcttcantcacnctantggctntcanncttctcagatcctcacnccgtagnnncngncgnntccctcgntcnnttcctttctgggaaaacctatntctctggggatcaattgacaaaggatgatntcagagtgtatgcagctgttgtggaaaagccaggagactcttgtcctaatgctgctaagtggtacgntgccgtctcttctcancttgctccaagcttccctgggcagctcnaggggtaagattcagtggcgtg

SEQ ID NO: 39248 - DNA, 284 bp, Glycine max
  unsure (1)..(284): unsure at all n locations; Clone ID: 701120844H1
cggatganaagtgnagagttcaaggtcattgagaccgatcctggggagnttgtgttgntgctccagacactgaantttnctgtganggggagcctttgaaaagagaggatgaagnaagggcggacgaagttgggtatgatgatgtgggtggtgtcaggaaacaaatggctcagattcgtgagttggttgngcttccattgangcatccacagctttttaaatcaattggtgtgnagcctcccaagggaattttactnatggacccccaggtctgggaagacnta

SEQ ID NO: 39249 - DNA, 87 bp, Glycine max
  unsure (1)..(87): unsure at all n locations; Clone ID: 701120845H1
gcctacacgtatcagagagantgagagaagagagagaatatttctgttcgtgcanatcagatagatagatggctccggagctccaca

SEQ ID NO: 39250 - DNA, 291 bp, Glycine max
  unsure (1)..(291): unsure at all n locations; Clone ID: 701120846H1
agaagataggagagctagactgcaggctcagtttgctccaaatgcgacctgttggaatgccaccatctgntggtcctcgtgtgccaatgtatcccccaagtggtccaggtattggtcaacaattattttatagccaaggccctcctgctatcattccttcccagcctggatttggctatcaacaacaacttatgcctggtatgaggccaggtgcagctcctgtgccgaattttttcgtgccaatggttcagcagggacaacagggacagcgtccggtggaaggcgtccaag

SEQ ID NO: 39251 - DNA, 291 bp, Glycine max
  unsure (1)..(291): unsure at all n locations; Clone ID: 701120847H1
atggaagctaagactaagccttggctggacctatctcttcttctattggctgcatattgcatgcaacaatgtgtccatggacaatcgcagcnaacaccttgcatgttcatctttggaggctatttatctgacaatggaaataacaacaaccttcgaacatattcaaaatccaattacagaccatatggcatcnncttcccagcaggcacaactggtagatttaccaatggactaacgcaagctgacataattgctgagcttttgggattacggaacgcatcccacccaatg

SEQ ID NO: 39252 - DNA, 271 bp, Glycine max
  unsure (1)..(271): unsure at all n locations; Clone ID: 701120848H1
attcttctttcagcaactcatanctggggtcagctattncncatgctatgcaagtatgtcatcgggacttgaagcttgaaaacactttgctggatggaagcccggcacctcgtttaaagatatgcgattttgggtactccaagtcttcagtgcttcatttaanaaccagagtcaactgtgggaactcctgcatatattgctccagaagtattgctgaaacaagagtatgatggcaagcttgcagatgtctggtcatgtggagtaaccttat

SEQ ID NO: 39253 - DNA, 247 bp, Glycine max
  unsure (1)..(247): unsure at all n locations; Clone ID: 701120849H1
tgactgcantccactgcaganctcaattnacantcgntgtccatangntaccatcgttagcancnangcncgccagatcttcgacagtcgtggcaatccnactgtcgaggtggatttgacttgctccgatggtacttttgccagagctgctgttccaagtggtgntccactgggatttatgaggcncttgaattgngagatggaggantgactacttggaaaggtgtatgcnaaggngttgacatta

SEQ ID NO: 39254 - DNA, 285 bp, Glycine max
  unsure (1)..(285): unsure at all n locations; Clone ID: 701120851H1
aaggttcagtgttgccaacatcaccttcagggggaagcacagattccttaggtgcaagcagatcaactccttcagtttctggaataaatacctctaattttgcttctcgaagtggctatgctttattggatccaacatgggctgcacaggacaatacctccacagccattgggaatgtggtggccttgcttcattccttcttcagtaaccttccacaagaatggcttgaagggaccaatgttnttatcaagcaacttcggccagtaactcagtcgcanggtgagg

SEQ ID NO: 39255 - DNA, 286 bp, Glycine max
  unsure (1)..(286): unsure at all n locations; Clone ID: 701120853H1
aaggacctggtttcttctctgagatcggcaagagaggcagagatatcctcacgaaggattacaattccgatcaaagattcaccatctcctcctccaccaactccggtctnaaccctgaagtcaacactggtgaagagtagaggactttcctctggtgatgtggctgcagaatttaagtataagaacaaggcggttaatgtcaaagttgatactgaatcaaatgtgttgacgacattcactgtctctgatgttgtgccatccgcgaaaaccatgcttctattcgtct

SEQ ID NO: 39256 - DNA, 285 bp, Glycine max
  unsure (1)..(285): unsure at all n locations; Clone ID: 701120854H1
gatgtttttagttccaagatttttactctccacagtccacactgttgtgttgtgcttcttctgggaaggttctggggtgcaactgtcctacggatcccctgccccccaagacaagtccaacaagtttctaaaattagatagagtccacagatatcattgggattggataagtttctagaaatggaaagttccaagaacaatagagtggagaagagagggtatgagctagttgaggagggtgatgatgtacagcaccatcttacacagacaaagaaaccanaacta

SEQ ID NO: 39257 - DNA, 285 bp, Glycine max
  unsure (1)..(285): unsure at all n locations; Clone ID: 701120855H1
gcgcaatcgtcttctgcttcaaggaaggagagcttgttattctctatcaacaaggaaaatgtcaggtgaagaggttgttgttgcagctgagccagctgctgccatcccaggcgagcctatggatatcatgactgccttgcaacttgtgctcagaaaatctctggcttatggtggtcttgcacgaggccttcacgaaggggcaaaagtgattgagaagcatgctgcacaacnctgtgttctagcagaagactgtgaccagcctgactatgttaaactggttaaggc

SEQ ID NO: 39258 - DNA, 286 bp, Glycine max
  unsure (1)..(286): unsure at all n locations; Clone ID: 701120856H1
gcggtgcggcgatcctagcactctcttctgcagctttcgccgacagcttcattcaccatggctgagcaaaccgagaaggcnttttttgaaacaaccaaaagtgtttctcagctcgaagaaaactgggaagggaaagagacccggaaagggtgggaaccgcttttggaaatccattgggcttggatttaagactcccagggaagccatcgaaggaacctacattgacaagaagtgccccttcactggcaatgtttccatccgtggccgtatcttggctggaacatgt

SEQ ID NO: 39259 - DNA, 285 bp, Glycine max
  Clone ID: 701120859H1
catccctccttccctctccctctcaacttcattttcctttcaaatagtaacactagagaacaaaagctctagctagaactgataatgtatatacaagccatcattcagaacaattagtgcatcctctttcatctgaagaacttgtttagtttgctcctaaaatatttgtctgaggatgtggtgcagaaatccttacccttccttctttattaaagcttatagcatctgcaatcataatttcttattccttcaaagtggcgatcacactatcatcagctgattttg

SEQ ID NO: 39260 - DNA, 277 bp, Glycine max
  unsure (1)..(277): unsure at all n locations; Clone ID: 701120860H1
gcgactcctcgagacaccaggggttcaccaggggccagcctgtttcgacgctcnaggtgcgaantcatagaatccgctggcttcccctactgcatcancagtggcttctccatcgccgcttccaggttggctctgcccgacaccggcttcatctcctacggcgaaatgctggagcagggccaactcatcacccaagccgtttccatcccgtcattggcgacgcgacaacggtacggcaatgcatgaactcaannaacgtcaannttnatnangnggt

SEQ ID NO: 39261 - DNA, 288 bp, Glycine max
  Clone ID: 701120861H1
gcaaaatgcggggtcgtgttcccctgtttctggcgttagcaccttggcagcggcgacgacggtgtcgtgcggcggtttggcggggacttttcttcctctggaacgggccattcctctgaaccagcaagtggagctggaggcgctgagagctcgcgacagagcacgccacggtcgaatcttgcaaggtgtcgttggtggcgtcgtcgacttctccgtccaaggaacctccgatccttacttcgttgggtacgggttgtatttaccaaagtgaagttgggatctcctgcg

SEQ ID NO: 39262 - DNA, 289 bp, Glycine max
  unsure (1)..(289): unsure at all n locations; Clone ID: 701120862H1
gctcactgtgattggttacaagagccagagtgatgtaaangctgggggtgatgtgtgtggtggagttggcattcttggcattgcttgggcctttggtggcatgatcttcattctggtgtactgcactgctggaatctcagggggtcacataaacccagcagtgacatttgggctcttcttggctcgcaaggtgtctttgattagagcaataatgtacatggtggctcagtgcttgggagccatatgtggagttgggttggttaaggccttccaaaaggcttactacaac

SEQ ID NO: 39263 - DNA, 293 bp, Glycine max
  unsure (1)..(293): unsure at all n locations; Clone ID: 701120863H1
anccccttcgcttcctactcctccnccttttccaagttntcnttcngtctcntggtttgggcgaaatgggtcgctntgcagcagcngcggcagcttctctganatggtcancgacgttgctctngttgttattgggcctagtagtagggaccanagcgacgtcgtacaggaggaacgcgtacncgacgntgatgtacgttggggcgcccagggnctacgaattctacgttgccgttcgcgtccttctanantctctctccannctacatncgncngcctncgcggnggcnntc

SEQ ID NO: 39264 - DNA, 280 bp, Glycine max
  unsure (1)..(280): unsure at all n locations; Clone ID: 701120865H1
gcaaaatctaccaatctcaaacagtgcnaaaacactgcgaaatattttcaaccgcnaaataaataacattaaatttccaaaattgncataatcanccatagctgaacagaagaagtcagtaaccatcgtcgtgagcggagatccatantnatacagttacaaattgcnataacacactcattgtggttatcgaaatttgatcgcagcgtcgagaagaatgggaagtttgggagcgattctgnaacatccagntgantttnccctctgctggagctggnaa

SEQ ID NO: 39265 - DNA, 287 bp, Glycine max
  unsure (1)..(287): unsure at all n locations; Clone ID: 701120866H1
cttgatctcatctagaaagacaaatgaagccatcgagatccttaagctcatgtcttccacattcttgattgcactttgccaagcaattgacttgaggcatttagaggagaatttgaaaaactcggtcaagaacaccgtgagccaagtttccaaaaggattcttaccacaggtgtcaatggagaactccatccttcaagattttgtgagaaggatctncctaaaagtggttgatagggagtatatattttcctacattgatgacccctgcagtgctacatacccatga

SEQ ID NO: 39266 - DNA, 285 bp, Glycine max
  unsure (1)..(285): unsure at all n locations; Clone ID: 701120867H1
aacccccaaacccanaccttcattatctcanttntcacactcccatntctnnnnttctcttatttattaggattacacacatcatcacaataacgtcaatttccccgaaganaaaaaaccctaanaaatttgctcctntggatccatccangggcacaccncggatctncgattntctagatcactctcaagttctcatcttttncgtttntggcgcagtgggtcgttgttaaatanatggnttctgatctgggnttgattnagttgggggttctgggtttgnga

SEQ ID NO: 39267 - DNA, 208 bp, Glycine max
  unsure (1)..(208): unsure at all n locations; Clone ID: 701120868H1
gttgcagctagaaggnnctcttctctctcntcctcctctccgtggnggcccaaccacgccgcttccgcttatgtctctcgaaacgcagtcgttgatgaccgcagatccgntccttcctcccatcccctttttcncttcagaggttttgctantgagtccctgatccacccaatagaaaacaaaatattcctgagattcctgcaatgtt

SEQ ID NO: 39268 - DNA, 281 bp, Glycine max
  unsure (1)..(281): unsure at all n locations; Clone ID: 701120871H1
caaatacgcattatattactagttttaatttgttttgtcgtttgcttctttctttgattaatgatgactagctttaaggttncatgtgtggttncgatgatgtgcatggttgtngccatgagtgttacacccatggcacaggccgcaatcacgtgcgggcaggtcgccggcgacgtgtctccgtgcctcagttatcttcgaagcggcggaaaaccatcggacgcctgctgcaacggatgaagtcactcagcggtgcggnaaagaccaccgccgaccgccag

SEQ ID NO: 39269 - DNA, 285 bp, Glycine max
  unsure (1)..(285): unsure at all n locations; Clone ID: 701120872H1
gcccgtggcatggntctgccgtcngagcctcaccgncgtcgncgccacaaccacaaccanatctccaccttcctccaatccaccgcntncaacttcgcctctctcttcaatnccccaaancctccctccctgantctcccgcacncgnccacctccgtctccctnactctcttcttcgcgantccgctctccggttcntccaccgtggactcagccacttccaagcccgnccatccncnagcaaantcggtccgcatcgngcggnttggtggcaatnganaaagc

SEQ ID NO: 39270 - DNA, 284 bp, Glycine max
  Clone ID: 701120873H1
tgagttgtaaatctcttaacagtgtctttgattctcacattaaaaaaaataataatatatatctaattatttgtgtatatttttatccgatatcatccttaactaagtatgcatatttaattttacataaaataattataataaaagttgggataaaaattttaattatataaaaattacaatttatttttatcacttagttgatgaactatttactcaggagcaaatatataagtcggttcctaaaaatggcaatttacaaggtcatatacagttattaaatg

SEQ ID NO: 39271 - DNA, 266 bp, Glycine max
  unsure (1)..(266): unsure at all n locations; Clone ID: 701120874H1
attccccttatctttctctcttcanctctccccgcccaaaccctaactccctaccctatacncgctttctctcatccatcatgaaaggaggaaagtccaagaccgaatctaagagagccgatgccaaacttgctgtgaataagaagggcgccgccaccaagactaggaaacccgccggaaaggggaaggcagcgaaagatcctaacaagccaaagaggcctccaagtgctttcttcgttttcatggaggattcaggaaggtgttca

SEQ ID NO: 39272 - DNA, 288 bp, Glycine max
  unsure (1)..(288): unsure at all n locations; Clone ID: 701120876H1
cgaattggaacaccacacacacagtgctgncngtgtaattcccaaaataaataaacgaacaagaaccctaattttcattgcaattgtgttggtagggagtgtagggcagattgcgtagaatcggaagatggaagaggaagagcacgaggtgtacggaggagagatccctgacgagggagagatggaaggagacattgacatgtccgccgccgacgatgaagccgccgtcgacgatgacgccgccgtcaaggagctcgacgagatgaagcgccgattgaaggaaatgga

SEQ ID NO: 39273 - DNA, 263 bp, Glycine max
  unsure (1)..(263): unsure at all n locations; Clone ID: 701120877H1
annattgtaacactattcaagnttaacaacnccagnttacataagaaaangntacnccttntttatanggncananaganctccttttgttcaaagaaatctttattttnccagaaaaagcttagncctaggnagaagttgctcataacnggaantgangcttaatcccanantctctcatccataacntcaaanaagcaggccnnacngggttcnngtttgaagcaattgangtnttatcantggggttgcatttanaactg

SEQ ID NO: 39274 - DNA, 242 bp, Glycine max
  unsure (1)..(242): unsure at all n locations; Clone ID: 701120878H1
aacttagattgtnttactgttancaccattcctaggtaccatntgcaccannctttctccntcttcttcaatcantggcagnaacctcaacatnantcttctnctcnaatctccattntctcaacnctcaanntttctcttcctcactntccttcttcngnaatgtccattncaccctctcnttccctncctcttntaaaccctcacgtggagttgttgcnatggntggntctggcaanntc

SEQ ID NO: 39275 - DNA, 289 bp, Glycine max
  unsure (1)..(289): unsure at all n locations; Clone ID: 701120879H1
gaaaattctatttgttctgcngctgatttgattagctcttgtatggagtgtggaatccataatacaattccatgtcttctattatctttcggatcccacgggtggtaagggaacactgtgcacttctttggatgcattttgtctgaaaatggtaaacgaaattaaggtttacagcacttgttgaactagagtctagaaaaaatagagatgagcaggcataaaatgcatatcaaattggaacaaaattatgtttttttttgtctgctagcttatcatggaaggggtagaa

SEQ ID NO: 39276 - DNA, 290 bp, Glycine max
  Clone ID: 701120880H1
gctctccactgaactgagtctgaagaggaaaacatttaactaactgcaatggctgcacgtgtggctgcaaggtacggatctagaaggctatttagcagtggttctggaaaaatactgagcgaggaggaaaaggctgcagaaaatgcttactttaagaaagctgagcaagagaagttggagaagcttgctcgcaagggtcctcaacccgaagcaggctcggggggttcagtaactgatgccaaacctagtagctcaggacatgctggaacaacagccgacagagtttcaat

SEQ ID NO: 39277 - DNA, 284 bp, Glycine max
  Clone ID: 701120882H1
gtatacctatttgatttgcctcattagatcgggttggctacgaatttttttcgaaacccttctcttttctcaattgggtttccatctttgattggatttcattgccatggctccaaaggatcccaagcaagttgctgctgcttctggtggtgggggtggtttttttgcttctattgcttccagtttgtccaattttggcagtgccatgtccaaatccgttaatggtttggtgggctacgaggggctggaggttataatccagaaggaggaactgaagatgctga

SEQ ID NO: 39278 - DNA, 285 bp, Glycine max
  Clone ID: 701120883H1
atctacgccagcttttagtggggttggtgaccgcattcaggcatgttggtgatgagatcaatccaaaattggcacaatctgaggctgaaattcttcatgatgctgtaaaagagaagaagggtagctatgaagagaccattagggtcttgactacaaggagcaggacccaacttgttgcaactttcaaccgctacagagagatccatggcacttccatctctaagaaattggtggatgaaggatctgatgagtttcagagggcattgtacactgccattcgtgcca

SEQ ID NO: 39279 - DNA, 286 bp, Glycine max
  unsure (1)..(286): unsure at all n locations; Clone ID: 701120884H1
cttcccctncaccgcgtcgncccgcctcntcnctggntcgancagncctcccgctgtgcttgnattggatantgcaaccttagagctatatgntctgnggttgatgtgttacgtataatcttgttncngtnctgagcgtatggaggggtgatacctgattganctgggntgttgcgtagnaatctnntgctgatngantatgcnnatctggnatgagntcaacggtcatattccttgnttgnaccgtgaactgtgcnttntncnttagtgctggagagaaggnnca

SEQ ID NO: 39280 - DNA, 284 bp, Glycine max
  unsure (1)..(284): unsure at all n locations; Clone ID: 701120885H1
aaaaaattgaatattcacttgagaaaacaaaggattcaagcctacctcccatcataaatgccattgaaatttacagagtaataaacttccagcaatcagatacacaccnaggagatgttgacgcgattgcaaccatcaagtcagtttatgggatgacaagagattggcaaggtgatccatgctcccctgtagcctacttgtggaatggtttgaattgtacttaccgcggaaatgagaacccgagaatcacaactttgaatttatcttcaagcgaattgtcagga

SEQ ID NO: 39281 - DNA, 279 bp, Glycine max
  unsure (1)..(279): unsure at all n locations; Clone ID: 701120886H1
tttttggttctgtgtagctttnngagctggatccttgaattcttcacttgacaagtttttntttctgggtttgcttgatcttcccaaagggtccagctcctgcgttctgctaaggattgctcacaccaaaaatcattgctttttagttgattctgtttcccttttgtttggttgattgagatgtgganagatccgggagtttcagctgattcttctatgaaatccgccccgaatgcaccgatgttcccgttactcgatttaagatcaaggctggcaaaa

SEQ ID NO: 39282 - DNA, 279 bp, Glycine max
  Clone ID: 701120887H1
gtttactcatcgtatcatagtaaacaaagttaagagttcaccaggatcactggttcatctatcatagcactgaggttatgaagttttctgaagctgtaacaagacgactttccaataaatgtgttcaatgctattctacactttgtttcttttgtctcaattcttagtttaggttccttttcctttcctttttggtgctgcagttgttctacagggccactagagcaagattcatttaagtgtgtctactcattgttacattagtaagaaaacataatt

SEQ ID NO: 39283 - DNA, 288 bp, Glycine max
  unsure (1)..(288): unsure at all n locations; Clone ID: 701120888H1
cccgncgatgnggtatgnagcgagaggtagcacccngntcttctctatncaccgagccanctgctcnagcagcaacaaccannacccgagaatccccctcaagaatacgaagaagtccgaagaggaagttgaggaagaagaggtagaggaagangtcnnnnnnnnnnnnnnnnnnnnnnnnnnnnnnnnnnnnnnnnnnnnnnnnnnnnnnnnagaagangangaagnagacgacgtcgtcaaacaacagcagcagcnacagcangacgagacgacttcccgatatcg

SEQ ID NO: 39284 - DNA, 283 bp, Glycine max
  unsure (1)..(283): unsure at all n locations; Clone ID: 701120889H1
gttttgcagaggtttcggtgggataggtgggatcttgcgttaccagcttgatatgcgatcatttgatgatttttctgatgatggaggcgtgtatgatgattctgaatagcaatcactgaaaaacttcctaccactggtgcaggaaaggggagccaagatacctgcaccaatatgggaggtggaggtggttgcannnnnnnnnnnnnnnnnnnnnnnatgtctgtctctggtgttgcagagagtgtttgattgtgaatcgagatgctctgcccccaaggtgctc

SEQ ID NO: 39285 - DNA, 286 bp, Glycine max
  Clone ID: 701120890H1
accgtcttaccctctaaacccaccccaaatgaaaaactcttctccttgatcgaacaaattaagcttcgcactcacgcgccactcctctacgtgtacaagccacaccccgatcacgatgcatcaacctttgttaacaccttgaggcactctcttagccaagctttgaccatctattaccctcttgcgggtaggttgagttcgatcgaaggtggaaaatgggagcttcattgcaatgccaagggagcacaactcttggaagccattgcaaagatttaaacttggatga

SEQ ID NO: 39286 - DNA, 288 bp, Glycine max
  unsure (1)..(288): unsure at all n locations; Clone ID: 701120893H1
tttttgtgtgtcgcttcttcgtaggtgcagctgcaatggtgaagggacgccaaggagaacgtgtcagactctacgtgaggngtacaatccttggatacaaaaggtccaagtcaaaccagtatccaaatacatccctgatccaaattgagggtgtgaatgccaaagaagaagtagcatggtatgctggcaagaaaatggcctatatctacaaggctaaggtgaagaagaatggaagccattaccgctgcatatggggcaaggttacaaggcctcatggtaacagtggta

SEQ ID NO: 39287 - DNA, 290 bp, Glycine max
  Clone ID: 701120894H1
aaaaacctgcatgaaatcatcttcaatcataattaacaccatccaagaattggaaagtgaagttctcaatgcccttatggctcagaacccaaatatatataacattggtccacttcaattgttaggaaggcattttcctgataaagacaagggcttcaaggtgagtgggtcaaatctttggaaaaatgactcaaaatgtatccaatggctagaccaatgggaaccttcctcagtcatatatgtgaattatggaagtattactgtgatgtccgaggatcatttgaaagaat

SEQ ID NO: 39288 - DNA, 291 bp, Glycine max
  Clone ID: 701120895H1
ctttaagtggcatagccaatacttaaacaatagcatgagttaaattcagatgagataggggcatagagcaggaacataaaaacttaaatgtctgccccttcaccatttctgagcttttacttcatttttggcatatgtaaatgaaagagcagaaataatacaaagtttgatatgaattaacaagtcaatactcaatactaggtccaaaagattaatagaagaaaaactcaatacatagatttggcctagcagtccaaaaacatactaacaggtactgctgatgtgcagcta

SEQ ID NO: 39289 - DNA, 290 bp, Glycine max
  Clone ID: 701120896H1
ggaccctaccaaggttgacagaagtggtgcctatatcgtgaggcaggctgcaaagagtgttgtggcaaatggccttgccagaaggtgcattgtccaagtttcctatgccattggtgtccctgagcccttgtcagtgtttgtggacacttatggaactgggaagattcctgacaaggagattcttcaaattgtgaaggagaatttcgacttcagacctggaatgatcaccattaacttggaccttaagaggggtggccataggttcctcaagacagctgcttatggacact

SEQ ID NO: 39290 - DNA, 283 bp, Glycine max
  Clone ID: 701120901H1
gttcccaccatcaagtacttaactggtcatggagccaaagtgatcctttctagccacttgggacgtcctaaaggtgtaacacctaaatacagtttgaagcctcttgtgccaaggctgtctcaacttctcggaattgaggttacgatggcaaatgactctattggggaggaagttgagaagttggttgcacaacttccagaaggtggtgttttgcttctagagaatgtgaggttctataaggaggaagagaagaatgaccctgagtttgcaaagaagttggctt

SEQ ID NO: 39291 - DNA, 278 bp, Glycine max
  unsure (1)..(278): unsure at all n locations; Clone ID: 701120902H1
ctccgtaccagtttcactgcataaatttgagagaaaactctgcaaacatgttggtttatcaggacctccttacaggtgatnagcttctntcggactccttccgttacaatgaaattgagaatggaatgctgtgggaagttgaggggaagtgggttgttaagggagcagttgatgttgacattggtgcaaacccttctgctgagggtggagaagatgagggagtcgatgacgcagctgttaaggttgttgacattgttgatacattcagacttcaggag

SEQ ID NO: 39292 - DNA, 276 bp, Glycine max
  unsure (1)..(276): unsure at all n locations; Clone ID: 701120905H1
atttcttctagccatggacgnnaanctcatacagcggttagaatcggnggtgttgcgcttggagtcgctatccnccggactcccacccctccgcttnannatccggcggcgctcacgctancgatgcggcgctcgatccctccgtngtcgacttcgncgatctgatcgaccagtacgtacggtagggtttccggcgntgcagaggttatcggnggacaggtcntgggtgtcaccaanctggtgcaggaagctntnaatgnncagagagagcttttg

SEQ ID NO: 39293 - DNA, 273 bp, Glycine max
  unsure (1)..(273): unsure at all n locations; Clone ID: 701120906H1
gctttttggagggttgacatggangaacggtatgagccattgaaggancttggtgctgggaattttggtgtggcaaggttggcancagnctaganaactggagagcttgttgcggtcaaatacatagagacgggcaaanagattgntgnnnatgntcagnggganntaattanccaccgntctttaaggcatccanatatnntcaggtntaaagnggtgctaccganncctacacatttanctatcgtcttggagtatgcttcaggtggtgna

SEQ ID NO: 39294 - DNA, 198 bp, Glycine max
  unsure (1)..(198): unsure at all n locations; Clone ID: 701120907H1
gttcgncggggaacaagttccggatgtcgctgggtctgccggtggcggcgacggtgaactgcgcacgacaatacgggggcnaagaacctctacatcatatcggtgaaagggatcaaaggncgtttgaaccgtctcccctcggcttgcgttggcgacatggtgatnnncaccgtgaaganggggaaacccgatctgang

SEQ ID NO: 39295 - DNA, 270 bp, Glycine max
  Clone ID: 701120908H1
cgagtataggcatgatggacagtgcctactttgtcggcaggaaccagattctgacctggatcaacaacaggctccacctcaatctctcacgcattgaggaggctgcatctggggctgtgcaatgccagatgatggatatgacgtttccaggggttgttccaatgcacaaggtgaactttgatgcaaagactgagtatgatatgatccagaattacaaaattctgcaggacgtgttcaataagctgaaaattgacaaacatgttgaagtta

SEQ ID NO: 39296 - DNA, 269 bp, Glycine max
  unsure (1)..(269): unsure at all n locations; Clone ID: 701120909H1
gccgaaaataaaccagatgttcaattttggtgacaatcttgagggctactacagncctatagatcaggtggaacagaaaccactggttaaccagtatgttaaccgtgccccgtttgctggaaatggagttcaagtctcacctgttactccatctgctgatgttactgcttacttcagctctgagcattcgagcagctcgtttgattattctgacctcggatggggtgaacaagtccccaagacacccgagatctcatccatgctttctg

SEQ ID NO: 39297 - DNA, 269 bp, Glycine max
  unsure (1)..(269): unsure at all n locations; Clone ID: 701120910H1
tttacagttcagtctcttgttaaagcaaaatggtcttagaagagtgtgtagtgcatgatgtgaggctatcctcagttgggccaggccgggccaccaggtcggaggtgttccacagcccgggtggcttggacttggccatgaagcttcactatctcagggtggtgtacttctttgctagtgaggctgcacaagacctaaccatcatgaaaattaaggaggccatgttcactttgctcaaccattacttcatcacatgtggcngcttccgg

SEQ ID NO: 39298 - DNA, 268 bp, Glycine max
  unsure (1)..(268): unsure at all n locations; Clone ID: 701120911H1
ctcccttactctctctcatattatgtttttttnttcgncaaacattttgnaaacgnaataatcgagtaatgcctagttttgtntttatattantattattantatttgaacttaatatgggcgtaaaaataaattagantttnatataaattatgantttttattattatnaaacngaccttagttagtgcagcttatttnttttaagtgcaaattttanctgtgtttagtttaattttgatgcttattattagtaaaacaaaattgt

SEQ ID NO: 39299 - DNA, 272 bp, Glycine max
  Clone ID: 701120912H1
gactgctatagccttcctgtttatccttctaatcacttatacaggcacaacagatgcacaatccggggtatgttatggaagacttggcaacaacttaccaacccctcaagaagttgtggccctctacaatcaagccaacattcgcaggatgcgaatctacggtccaagcccagaagtcctcgaagcactaagaggttccaacattgagcttttgctagacattccaaatgacaacctcagaaacctagcatctagccaagacaatgcaaaca

SEQ ID NO: 39300 - DNA, 273 bp, Glycine max
  unsure (1)..(273): unsure at all n locations; Clone ID: 701120913H1
tctctctctaaccatcgtatctgcaacttcaactaacttttatgaagccgaagggtncagtgaatcgaccccccacaccagatgtggccgaaaatgcccctgaaagggaacccacgcttcaagagctcatcaacatcaagttgatcgagaccggagagaaggagcgtctcatggagctgttgagggaaaggcttgttgattgcggttggaaggatgaaatgaaaactctctgcagagccgttgtgaagaagaaagggaggaataatgttactg

SEQ ID NO: 39301 - DNA, 272 bp, Glycine max
  Clone ID: 701120914H1
gcaagttctgctacactcttgaaagaggccatccatgtaattagttgtggttatgaagataagacagaatgggggaaagaggttgggtggatatatggctcagttaccgaagatattttaacaggtttcaagatgcattgtcatggttggagatctgtatactgcatgccaaaaaggcctgcttttaaaggttcagctcctataaatctctcggatcgtctgcatcaagttcttcggtgggctcttggatctgttgagatctttttcagtag

SEQ ID NO: 39302 - DNA, 275 bp, Glycine max
  Clone ID: 701120915H1
aatttctcccagattcgctttgtcgtgtctcgagcatccttgatgtccagggaaatccatatttgtccttttttctgcgtactttcatcgaattattgcttgttagctctataccaacttcttatatatcccatcctccacatctacgcctgaatcatcgtccaactattagttcctctctctgcgttcatatcgcaacatgcttcccttttcaactctctttcaaaccccgttaaccaccgagtattggtacaaccaccccacaacaacacttc

SEQ ID NO: 39303 - DNA, 279 bp, Glycine max
  unsure (1)..(279): unsure at all n locations; Clone ID: 701120916H1
caaacacaccacagcaccaaactagttggctcaattctctttgaatggctttggaggctttgaattcaccaacagcagccaccactcccttccgtggttaccaagaagaggaggaggaggttgaccttcacctacgcgagccttgggccaagagaaaacgctccaaacgacctcgttttgagtncggaggaagagtacttggctctttgcctcatcatgcttgcacaaagcggtaacaacaacaacacccaattaccgtcttcgtcacagtcacacaaa

SEQ ID NO: 39304 - DNA, 265 bp, Glycine max
  unsure (1)..(265): unsure at all n locations; Clone ID: 701120917H1
ccatcatcatgtctaccgcatcgcaacccaaggccaagaaaacggcgtcgtccaagaagcccctctcccaccctcccttcgccgtggtactttcccaaaatactctccttcaaaatcaattctcttagtttatttcttttccaattgtatttaatttgattattctgtagatgatagcagaggcgattncnagtctgaaagagagaacggttcgagccaataggggataacnntatnnntcgaagggaagcacaaggagttgcnt

SEQ ID NO: 39305 - DNA, 245 bp, Glycine max
  unsure (1)..(245): unsure at all n locations; Clone ID: 701120919H1
gaacaagcctcagntaagccaaagccatgnntaagcataacaatgttataccccaacggatcacttccgtaagcactggcagaactatgtgaanacctggttcaatcagccagcacggaagacaagaagacggttggctcgtcagaagaaagctgtgaagattttccccagacctacagctggacctcttagacccattgtacatggtcaaactttgaaatacaacatgaaagtgagagctggaa

SEQ ID NO: 39306 - DNA, 272 bp, Glycine max
  unsure (1)..(272): unsure at all n locations; Clone ID: 701120920H1
aaccaaaccgacgtcgctctgagcatcacaaagctcctgttgtcgaaaaacgctcgggacagtaacctcgtgtactcgccgctgtcgttgcacgttgttctgagcatcatcgcttctggctccaagggccccacactcgatcagcttntctcnttcctccgatccaagtccaccgaccatctcaactncttcgcctctcagctcgtngccgtcgtgctctccgacgccgctcccgccggcgggcctcgcctctccttcgccgacgggtgtgg

SEQ ID NO: 39307 - DNA, 270 bp, Glycine max
  unsure (1)..(270): unsure at all n locations; Clone ID: 701120921H1
gggacaatgactatgtggtcgttagttactgccactggtttttggttggatgatgctgttgggagtttcattgcctcacttctcattcttaacgattccttttgagttgagttcagataccagaaaaccgaagtgaagggagtgagagatgacagtactgtctccttctctttctctgccaaagttgcattcttcttttctttgttgccctctaaaatccangctatnannatcagctacaantagattcaccaaaancccacttcttnt

SEQ ID NO: 39308 - DNA, 269 bp, Glycine max
  unsure (1)..(269): unsure at all n locations; Clone ID: 701120922H1
cttttcccccaaaactaacagacccctcttcttcttctctctcngtaatctcaatcgtgcatgggtcgtcttcnctgattcgataataaaaatctcagattcattcttcgttttctgttacgatggagttgatttcacgtctaccagaggacgtagcccgagactgcttaattaggattccctacgagcaattcccagcggttgcttccgtctgcaaaggctggaacacggagattcactcgccggactttcaccggcgtagaagaacc

SEQ ID NO: 39309 - DNA, 270 bp, Glycine max
  Clone ID: 701120923H1
tcttcgtggtcctctccttcccgcgtttcctccctcaaggcctcgcacttcctccagaagcccctcattgtcgcttccacttcctccggttcttctccacttcctcttctccgattcctccgtcgcaacgctcgagtcccgaggtctccattcccgagggcgcgctgcattccgttcccgcttcttgcgttgacctattggacggtggcgtcgagtgcgtgaccgttggggaagatgggaaggtcaacttggttggtattggggattcca

SEQ ID NO: 39310 - DNA, 249 bp, Glycine max
  unsure (1)..(249): unsure at all n locations; Clone ID: 701120925H1
attcattctcaggtaacttggtgtttgtcttcagggattccgcaagattganacagncaagtgggagtttttcaacgaagctttccagcgagggaagaagcacttgctgaagaacatccaaaggcgcaggtcatctcaatcccagccggttggtagctatattggaatcggatcttctaccgaggcaggggggtcagaggttgagattgagatagaaaggcttaggaaagaaaagactatgctgatgga

SEQ ID NO: 39311 - DNA, 267 bp, Glycine max
  Clone ID: 701120926H1
gccggggataagactctaaattggttgaaatcaaagaatgttgtggtgaagctagagcaatcagttgacatgaacgcattcacagatggacagaagatataccaaacttcaaatggagagaccattgaggcagattgtcatttcttatgtatagggaaaccacttgcttcagcatggcttaaggaaactgtgttgaagaatgacttggatggtcaaggtaggatcaaggtagatgaaagattgagggtcaagggccggaacaacatt

SEQ ID NO: 39312 - DNA, 267 bp, Glycine max
  Clone ID: 701120927H1
ggagatggaagaagagggttctcagcagccacagttggtgcttgccgagaagctattccttctccgacaacccgttcaagacattgacaaggttcgctacaaggaggatgttttcactcacatcaaggaaaacgagatggtccctttgtacgagaccctagtcgccgattccgtgttggacttggatcgtgcccttttggacttcatgcgcgctaaaattgaagacgagctcaccaagctcgacgaaaagattgctgatgctgagga

SEQ ID NO: 39313 - DNA, 269 bp, Glycine max
  unsure (1)..(269): unsure at all n locations; Clone ID: 701120928H1
gcttgttcatgagcaaggttaacaagcctccaatttctttgtcaaggttaattaagtatacaaaggggaaggaggataaaattgctntaatagtggggactgtaactgatgatatcagagtatatgaagttccagcattgaaaattacagcactcaagtttactgagagagcacgtgcaagaatagaaaaggctggtggtgaatgcttgacatttgatgagcttgcccttagggctcctttgggacagaatacggtccttcttagaggc

SEQ ID NO: 39314 - DNA, 270 bp, Glycine max
  Clone ID: 701120929H1
attgcttcgcctttggctctaaagtgactagcaaatcacgtgtcctcattctcgtcgagagtatgttttctctctctgttcagacttcagagtacgcttcctctctcacggtgggtttcattatgccataccactgaagaacgaagtttatctctctcttgtgacttgtgagcaattcaaattgcggagaacagaacctacacactgcattggaagatacaagaatatcatcagtttctcctattcattaactccagttactcactgaag

SEQ ID NO: 39315 - DNA, 273 bp, Glycine max
  unsure (1)..(273): unsure at all n locations; Clone ID: 701120930H1
gggcattcaagggctatttccttctcggcctcgttactcttgttcttgttaaatcttccaaagttacatgcgaannnagaatcagttaatacagtttcacccattattgacatttcactcaatcggaagagtttcccagaagggttcatatttggggcgggatcttcctcgtaccagttcgaaggggcagcaaaggaaggtggtagaggaccaagtgtatgggataccttcacccataattatccaggaaagatcatggatagaagcaacgga

SEQ ID NO: 39316 - DNA, 280 bp, Glycine max
  unsure (1)..(280): unsure at all n locations; Clone ID: 701120931H1
acacactgncaggtgcgccaancctcgaactaccctaaacgacgccgcattcnaatttccgccaccgancgcatttgacccttccaagncccgacggttcccgagtggtgatggcgncaaacgcacgaagacacaccgaaaganaccgttcacannnnnnnnnnnnnnnnnnnnnnnagcttcgaagagctcggcgtggacgctcgtctccttcgcgccctaatcaagaaaagaatcgagaaacctactccaattcagcgcgtcgcgatttccacncatt

SEQ ID NO: 39317 - DNA, 254 bp, Glycine max
  Clone ID: 701120932H1
atggcgaatctagcacacttctccaagagagccctaagaagcgcacacgcgctcgcaaggcaccacgtgcagccgcagctgctggcagcggaacgcgcttttgcgacggaggcggcgaaatcgatatccccgtcggcggatcgcgtgaagtgggactaccgagggcagaggaagataatcccgttagggcagtggctccccaaagtggccgtggatgcttacgtagcacccaacgtggtcctcgccggccaagt

SEQ ID NO: 39318 - DNA, 277 bp, Glycine max
  unsure (1)..(277): unsure at all n locations; Clone ID: 701120933H1
gcaaattcaaaggaggatctctcttgcgtnttctctaggttttcgctatggcgtcgaagcgaattttgaaggagcttaaggatttgcagaaggatcctccaacatcttgcagtgccggtcctgttgttgctgaagatatgttccattggcaagctacaattatgggtcctccagacagtccctatgcaggaggtgttttnctagtgaccatcattccctccagattatccctttaaggccaaccaagggtgccttcagggacaaaaggtttccaccc

SEQ ID NO: 39319 - DNA, 53 bp, Glycine max
  unsure (1)..(53): unsure at all n locations; Clone ID: 701120934H1
atcccccaaaaccaaacctttctnacccggaaaagattcnattgttccagaca

SEQ ID NO: 39320 - DNA, 271 bp, Glycine max
  unsure (1)..(271): unsure at all n locations; Clone ID: 701120935H1
tgtttgttaaactctcacacagacaagtcacaacaacaantttctnttgttccaatggcatcagcaacnccccttttgaaagatgagctggacatcgtgatcccaacgatcaggaacctggatttcttggagatgtggaggccattctttgagcctaccatctcnttattgtgcaagatggagacccttcaaagatcatcaaggtccctgaaggctttgactatgagctctncaaccgcaatgacatcaacaggatcctttngccccaagg

SEQ ID NO: 39321 - DNA, 269 bp, Glycine max
  unsure (1)..(269): unsure at all n locations; Clone ID: 701120937H1
gcttccattgtgctcactcatctcttacaacgaaaccctcttcatcttgttctatctgtgacgagcatcatggcctcaagagcagtgttattgttggctatgtgtgtgcttccngcgatggttgtggccattcgcccagcaaagaaccctttttgcgtgaagggtcgtgtctactgtgacccttgccgtgctggttttgagacctcagctaccacctacattgctggtgctgagattatgttgcaatgcaagagcagggttagcaacga

SEQ ID NO: 39322 - DNA, 268 bp, Glycine max
  unsure (1)..(268): unsure at all n locations; Clone ID: 701120938H1
atgataacgggacactgacttcagtgaatggtaactacaagtcagaagagtcaagtgaaaatgcaggagnnnatgataacccaggatggatatcagtggaaaaagtgggaagtggaaagtattaagcaaacttggcttggagtggtggttctaaatgatatcaaagaatatagctgagtatagatttgttattcaatcttgaatcagaagggtgtcactcaaggctactatcatttcttgtcactatagtgtagatttatttcaagag

SEQ ID NO: 39323 - DNA, 265 bp, Glycine max
  Clone ID: 701120939H1
cacagactaccttccttgatgttgcacaagtcaagaaggttaaggctcgttttggtggcagaggctagggtttcttatgaatcaactcatacctagtgtttgttttagtgataatcgtcagcaattaataaacttgtgcatttgggtgtgttttgctttcattttaagtttgattccaaacttatgatttgagggtttgaagtttgacgatgtataaataaaaattttagagtttagtttgagtgcatcattgatttcaagaaag

SEQ ID NO: 39324 - DNA, 265 bp, Glycine max
  Clone ID: 701120940H1
ctcactttctcgctcgccaaacgcccctctctctcctccaatggccgaccagctcaccgacgaccagatcgccgagttcaaggaggccttcagcctcttcgacaaggacggcgatggttgtattactactaaggaacttgggactgtgatgcggtcactagggcaaaacccaactgaggcagaactgcaggatatgattaatgaggttgatgctgatggcaatggaaccatcgacttcccagagttcctcaacctgatggctcgc

SEQ ID NO: 39325 - DNA, 265 bp, Glycine max
  Clone ID: 701120942H1
atatcaattagatttgttttcagagtttgctagtgagataccatggacaactacaacagcaatgacttttggaaattcagtgaccagttgaggcttgaatctggtttggccaatctgtctctgaatgattattccatttggagcaacagctacagctccaagaggcctgatcagaggaggaactttgatgtcaagggcagtgatttcaacaactcatcaaagccttttgatgatgatttcaatgatggctggaagatcaccaatt

SEQ ID NO: 39326 - DNA, 265 bp, Glycine max
  Clone ID: 701120943H1
gcagtttacaactttggggactcaaactcagacactggaggcatatcagcttcatttgtgccaattcctgcaccttatggcgagggcttctttcacaagccttctggaagggactgtgatggccgtctcattgtagatttcatagctgagaagctaaacttgccatacttaagtgcttatctgaattcccttggaaccaattaccggcatggggcaaattttgccactgggggatccaccattaggaagcagaatgaaaccatat

SEQ ID NO: 39327 - DNA, 266 bp, Glycine max
  Clone ID: 701120945H1
gggagccgtagcagcggaagctctagcttgggtagcgaatcacaatggcgagaggattaaagaagcatctgaagaggcttaatgccccaaagcattggatgcttgacaaactgggtggtgcatttgctcctaagccctcatctggaccacacaaatcgagggactgcctgccactcatactcattttgcgaaaccggctgaagtatgctctaacataccgtgaagtcattgctattctgatgcagcgacatgtcttgttgatggca

SEQ ID NO: 39328 - DNA, 267 bp, Glycine max
  Clone ID: 701120946H1
attttatacaagatccccaatttctctctttttgctcagtttctgttgtattttctcaattacaacatcgtattctgcaaattcaaaccgggtcttggttttctgaaagatgggaggtggcaaggacaagcatcatgatgaatctgacaaaggaattttttcacaccttgctcatggggtagctggtgcagcacatggtggacatgggtacccacctggggcttacccaccaccacctggggcataccctccacaacaaggatatcc

SEQ ID NO: 39329 - DNA, 272 bp, Glycine max
  unsure (1)..(272): unsure at all n locations; Clone ID: 701120948H1
attcagaggcctgaaacccagagancacgctgcactcaaggactgcgccgaggaaatcagcgacaggtttgaccgcctcagccggtcgctgaaggagctcaagctatgtaaggttaagggtgaggacttcacgtggcacattagcaacgtggagacatgggtcagttctgctttgaccgatgagagcacttgcggcgatggattctccgggaaggcgctgaatgggaagatcaaggactctattagggctaggatgctcaatgttgctcagg

SEQ ID NO: 39330 - DNA, 270 bp, Glycine max
  unsure (1)..(270): unsure at all n locations; Clone ID: 701120950H1
aagagccttcaacgctgatttttgtagaatattggaccgacaaatagttaccagcttccaccctgtctctctgcnattgagaaagggactcacgttctctgttcannnnnnnnnnnnnnnnnnnnnnnnnnnnnnnnnnnnnnatccatgtgcatnccttgtctcatattaggcttcgagttcagaggtcgcccccttcatagcttagaagcaacttccgcaacgttttctccttgatttcttcagctctagttctctctcccaagcttt

SEQ ID NO: 39331 - DNA, 111 bp, Glycine max
  unsure (1)..(111): unsure at all n locations; Clone ID: 701120951H1
atcttcaatcggagacaaanctagctcgaacgancgaatagantagtgtgctacgaaaaatgtggnngtgnatcgcacgtggtntccgtggacctgcttccacaanaatac

SEQ ID NO: 39332 - DNA, 265 bp, Glycine max
  unsure (1)..(265): unsure at all n locations; Clone ID: 701120952H1
cctctcttgnnnaatcnagatctcgntctnccttgatctacgtnangctttnagtgaccggatctgnatggatctgaaccagntctanacgccgatggtggttttggcctggtctttcatagatctgatgcatggangctcagatctactgtacanagatactgtngatnatcgatganangaacgcagntccagcngcttcngcttgntcgatcactncagacgcttgtatcggattattcatggttgnttcataagcagcatg

SEQ ID NO: 39333 - DNA, 267 bp, Glycine max
  unsure (1)..(267): unsure at all n locations; Clone ID: 701120953H1
ttcttctctcattattcaccatctcttccaaaantgaagttccaagattatgagcctccctctagcccaaaacacatgatcccaaaagtgaccttactagcaatcttggtcatactaatatttgccgtaacccctttatggtaccctttgttgagttactcttcacacttgaacatcaataagaatattccatcatcatcttcatcatatgatcaaaggcaagaagaaaacttgccctcaacatatgtggagaagtgtgacattttc

SEQ ID NO: 39334 - DNA, 266 bp, Glycine max
  unsure (1)..(266): unsure at all n locations; Clone ID: 701120954H1
gtttgcttcctggcgatcccttgcaaccctagtcttcgaattgccccatatcacaaaccacattaaaaaaagactncccacgtattctnnnnnnnnnnnnnnnnnnnnnnnnnnnnnnnnnnnnntcacagtgcnaatggcggatncaatcgcgaaggntctgatngcgtntgcgctctnagcttcnctcttgntgtgtncgcacgcttcctcngacgttcccttcatcgttgctcacaagaaggcctccctnaacagactcaagt

SEQ ID NO: 39335 - DNA, 157 bp, Glycine max
  Clone ID: 701120955H1
gtggctgtgcattttgtgctgctgtaaatgtgctttatggagtcatttatttagacgatagtgatacaatataaatgggaaattgtccgcttcaagtaaagcgttttgttactttcccactattcaatggttgtgcggttttattcgtgttgatgtc

SEQ ID NO: 39336 - DNA, 264 bp, Glycine max
  Clone ID: 701120956H1
attgaaatgcatgccaagacagactcggaggtaacaagcctggatgcgtcgtccagcacaaggtctcctcggcgagcagtgtactacgttcagagcccttcccacgatggggagaaaacgacgacgtcgttgcactccacccctgttctcagccccatgggttcccctcctcactctcactcctcctccagccgcttctccgcttcacgccaccgcaataaccataataataaatcttggaagggcatcgacgtcatcgaagaa

SEQ ID NO: 39337 - DNA, 262 bp, Glycine max
  Clone ID: 701120957H1
aacccctctcttttcttttcttcagttcggtggaaggagccgtagcagcagcggaagctctagcttgggcagcgaatcacaatggcgagaggattgaagaagcatttgaagaggcttaatgccccaaagcattggatgcttgacaaactgggtggtgcatttgctcctaagccctcatctggaccacacaaatccagggaatgcctgccactcatactcattttgcgaaaccggctgaagtatgctctgacataccgtgaag

SEQ ID NO: 39338 - DNA, 73 bp, Glycine max
  Clone ID: 701120958H1
ctcgcatcagtgcagaggcacctgcagagttgagattgtgctctttccagattcttcgtagattccacaccaa

SEQ ID NO: 39339 - DNA, 265 bp, Glycine max
  Clone ID: 701120959H1
cgccaaacgcccctctctctcctccaatggccgaccagctcaccgacgaccagatcgccgagttcaaggaggccttcagcctcttcgacaaggacggcgatggttgtattactactaaggaacttgggactgtgatgcggtcactagggcaaaacccaactgaggcagaactgcaggatatgattaatgaggttgatgctgatggcaatggaaccatcgacttcccagagttcctcaacctgatggctcgcaagatgaaagacac

SEQ ID NO: 39340 - DNA, 266 bp, Glycine max
  unsure (1)..(266): unsure at all n locations; Clone ID: 701120960H1
gcagcctcaggaggagaaggatgtctcacaggaagttcgagcacccaangcacggttcactgggatttcttcccaggaagcgtgctgctcgtcacaggggaaaagtgaaggcattccccaaggatgacccatccaaggcacccaagctcactgcattcttgggttacaaggccggtatgactcacattgttagagaggtcgagaagccaggatcaaagcttcacaagaaggaaacttgtgagcctgttacaattattgagacccct

SEQ ID NO: 39341 - DNA, 265 bp, Glycine max
  unsure (1)..(265): unsure at all n locations; Clone ID: 701120961H1
atatggatggggaactacacataatgttatttccgttcccaggtcaggggcacttgataccaatgagtgatatggcgagagcatttaatggaagaggggtgaggacaaccatagtgaccactccactcaacgtagccacnattcgtggaacaataggaaaagagacagagacagatatagaaatcctgacggtgaaattccctagtgcagaggctggtttacctgagggatgcgaaaatacagagtcaatcccctcccctgactt

SEQ ID NO: 39342 - DNA, 268 bp, Glycine max
  unsure (1)..(268): unsure at all n locations; Clone ID: 701120962H1
ctctgtctctacaaaacttagctcttcattnttaattattccttgcattctcttgagttcagatggaagcaactaatggccaccaaaatggttcgttttgcttgtccagtactaagggaagtgatccgttaaactggggagcggcggcggaggcgatgaaggggagccacctggacgaggtgaagcgcatggtgtccgagtaccggaagccggtggtccggctcggcggcgagacgctcaccatcgcccaggtggccgccgtggctgg

SEQ ID NO: 39343 - DNA, 268 bp, Glycine max
  Clone ID: 701120963H1
atcaaattaagggtgatcctgttattcaagtttgccatttgcttcaacttttccatttatcattttctgtcagaaaaagtcaccctctgattgtttttgccttccttgtacaggcattttttaaaattaatcaccttccaagggattcatttttattgcagacaagctttgtcttgctaaaaggatttgctttgatgatctcagaaacagtaactcatttttcccaggagggaggatttatggacatgaagtttcaggatgtaggagg

SEQ ID NO: 39344 - DNA, 271 bp, Glycine max
  unsure (1)..(271): unsure at all n locations; Clone ID: 701120964H1
gctggctgcacccggctcagtatcggacacgcctctgcaaagatggcaccagttgcaatcgaagggtgtgtttttttgctcacactgcagaggagcttcgtccgctgtatgtgtccactggatctgctgccccttcgccccgttcatctgcttcaggtcctaatgtcatggacatggctgctgccatgancctttttccgggatcgccttcatcgggctcttccatgtcgccgtcccactttgggcagccaatgtccccatctgcaaatgg

SEQ ID NO: 39345 - DNA, 269 bp, Glycine max
  Clone ID: 701120965H1
caaacttctaaatctcttctgccatggtccgaggatctaaagatcgttggaagatgcatagattccatagcttctaaaactagtgtggacccagcatacatcacttggtcttacacttgtaataggaaattaaccgaacctgataaaattgtagaggacaagatgacatttctagagaaaattgagtctgttcctaagggatggtggggtgaagacatatgtgagctggacatggatctttacaacgagtaatggttgctgtgagatca

SEQ ID NO: 39346 - DNA, 267 bp, Glycine max
  unsure (1)..(267): unsure at all n locations; Clone ID: 701120966H1
ggggtattgagattgagattcaagtaatggggaagagcaaggttcttgtggtggggggaactgggtacatngggaggtcgatagtgagggcaagcctggcactgggccatgagacctatgtggttcagaggccagagttgagcctccagatagagaagctgcagaggctcctctccttcaagaagcaaggtgctcatctcattgaggcctctttcaatgatcacaagagccttgttgatgctgtgaagcaggttgatgttgtcatca

SEQ ID NO: 39347 - DNA, 267 bp, Glycine max
  unsure (1)..(267): unsure at all n locations; Clone ID: 701120967H1
atgaattcgtaagatcgaagcaatagcctttttctctgccgccactggtttcgatcccacacccacaaacgcanaccctccatcctttgaatgctcttgcgttttcctttcactacctcattcctaactcacacacacacaacgggtgatatcaatgtcgactcctgctaggaagaggctcatgagagatttcaagaggctgcaacaagacccgcctgcaggaatcagcggggcacctcaggataacaacataatgctgtggaacgc

SEQ ID NO: 39348 - DNA, 265 bp, Glycine max
  unsure (1)..(265): unsure at all n locations; Clone ID: 701120968H1
cagacacttccttttctgtgttcaacagtttcttcccacattaaataccaactgtgtattgtactacaaatgttaactatgttcttcttctttttttgttctcatctccacaccatgtcctaatctttctacaccacatcgttcnccatttttggctttacaaaactaccgtgtctggtaaagggttcgttaacatttccagtgaaaaaagttgttagctaaaagaagaccaagtttttagtgttgtagaaggaagagaagagtt

SEQ ID NO: 39349 - DNA, 266 bp, Glycine max
  unsure (1)..(266): unsure at all n locations; Clone ID: 701120969H1
atttcaatgtccggcttttgngacgaggcattacagtgtgtggaggaactaaaagctccagcttattaccctgagtttgtcaaggaagctatttcccttgctctagataaaagtccgccatgcgctgaacctgttgccaatctttttgaatatctgttcattaagaagattctttcagccagagacatagggactgggtgcatgttatttgcttctctgctggatgatatcggcatagatttacctanagcaccanataattttgg

SEQ ID NO: 39350 - DNA, 251 bp, Glycine max
  unsure (1)..(251): unsure at all n locations; Clone ID: 701120971H1
cttttatcgaacaagagacatgatagtaacgaatttgggtgctaaaccacttgtaattcagttaccaattggttcanaggataactttaagggagttatagaccttgttaggaataaggctatagtttggtctggagaagagctgggtgccaagtttgatattgtagatgttccagaagatcttcaagagcaggctcaggaataccgagcccagatgatagaaaccatagttgagttcgatgaccaggcta

SEQ ID NO: 39351 - DNA, 260 bp, Glycine max
  unsure (1)..(260): unsure at all n locations; Clone ID: 701120972H1
tcaactattaatgctctggttggtaaaaaaaggacaggtgtcacctctactccagggaagacaaagcatttccaaacgttaattatttccaacaaactgaccgtttgtnactgtcctggattagtttttccatctttctcaagctcaaggtataggatgattgcttgtggagtgttgcctatagataggatgactgaacacagggaggctgtccaagttgtagctgataaagttccaagacatgtcattgaggagattta

SEQ ID NO: 39352 - DNA, 261 bp, Glycine max
  unsure (1)..(261): unsure at all n locations; Clone ID: 701120973H1
agcagcctcaggaggagaaggatgtctcacaggaagttcgagcacccaangcacggttcactgggatttcttcccaggaagcgtgctgctcgtcacaggggaaaagtgaaggcattccccaaggatgacccatccaaggcacccaagctcactgcattcttgggttacaaggccggtatgactcacattgttagagaggtcgagaagccaggatcaaagcttcacaagaaggaaacttgtgagcctgttacaattattgag

SEQ ID NO: 39353 - DNA, 263 bp, Glycine max
  Clone ID: 701120974H1
tgaagggtggcacggttcagattagctggcacgacggcaaacccgtcttaaccctgcgatttccaccctcactccgccaaatctcgccaccgccggcgccgatttcgacatcaaggtctctctctcgcttcgcattcgcttagattagggaaaatcgttcgctcgatttcattcgtcttcttgtgttttcagttttggcaaataaaaccagcggggtcaccgaagaagcttcccgtggtttcctatcttagtaacctctctta

SEQ ID NO: 39354 - DNA, 261 bp, Glycine max
  unsure (1)..(261): unsure at all n locations; Clone ID: 701120975H1
aaaaaaagacaacccagagancgcgtcttaataaacgctcttctctgaaaacccccatttcttttcttctttcttcttctctttcgcttcttcgatcttcgatcttcgtcgctgaaaatgagagagtgcatttcaatccacatcggccaggccgtcnattcaggttggaaacgcctgctgggagctttactgcctcgaacacggcattcagcctgatgggcagatgccaagtgacaagaccgttggtggaggtgatgatgc

SEQ ID NO: 39355 - DNA, 262 bp, Glycine max
  unsure (1)..(262): unsure at all n locations; Clone ID: 701120977H1
gcttcttctctcgcattccgtggagatctagtgctgccaaacctcgctgaaaattagggtttcgtttcggaggtagacgaagatgttcggaagggcaccgaagaaaagcgacagcaccaggtactacgaaatcctcggcgtttcgaagaacgcttcgtcggatgatttaaagaaggcttacaaganagccgccattaagaaccaccctgacaaaggcggtgatcctgagaagttcaaagagcttgctcaagcctatgaggtt

SEQ ID NO: 39356 - DNA, 267 bp, Glycine max
  Clone ID: 701120979H1
aagaagatcaccctgaagagttcggacggtgaggccttcgaggtggaggaggcggtggcgctggagtcgcagacgattcaagcacatgatcgaggacgactgcgccgacagtggaatccctctccccaatgtcaccagcaagattctggcgaaggttatcgagtactgcaagaagcacgttgaggcgaacagtgctgatgagaagcccagtgaggatgtgctcaaggcttgggacgtggatttcgtcaacgttgatcaggccactct

SEQ ID NO: 39357 - DNA, 267 bp, Glycine max
  Clone ID: 701120980H1
gagatacactaagttatcctcataaatacactctaattaggtggcaagataagtgtctaaccttagtaacattgccacatattgtgttcattttggaattgtgccactaaaattctattcaattcatctatggctgcctcttcttatgctatgcaatcaatcctggcaaaccctttgatccgcatttccagcgggtctagggtgaaccaatttggcgttcctgctttgcacatgagaaggaatgttggcctgagagttaggtccatg

SEQ ID NO: 39358 - DNA, 266 bp, Glycine max
  unsure (1)..(266): unsure at all n locations; Clone ID: 701120981H1
aaactttaatgtggacaacgttcgtgttgcaaagctcttgggagggggcttgcataacagtactgtagttcgaggattggttctgaaaagtgatgctgtcgggactataaagcaagcagaaaaggcgaaggttgctgtgtttgctagtggtgttgatacatctgcaactgagactaaaggaactgtcctcatacatacagctgngcagctagaaaattattcaaaaactgaannnnntttagtagaggagctcatcaaggcagtag

SEQ ID NO: 39359 - DNA, 250 bp, Glycine max
  unsure (1)..(250): unsure at all n locations; Clone ID: 701120983H1
atccacncganncacncncnnananagtgcgattcattncaccaatggatcgcaanggcgttctctcnnntngcattcatntgcattgtagtcgcngnncgtcggaggacagtctcccgccgcagcgccgtcaaacactccggcaactcccgcngccgcaactccngcccaagcaccttccacagtaccgaaatnanaagctcccgttgcttctcccaaatcatntncacnagctgcaacccctgcatct

SEQ ID NO: 39360 - DNA, 263 bp, Glycine max
  unsure (1)..(263): unsure at all n locations; Clone ID: 701120985H1
accacacattcaattttanacctctgggcgtggctagcttcaacctttaacattaacatggccattccctacccccatttcatcgccaccgagaaagccgccatggacgccggcctcctccacccctcctccccctccgtcatcctcacccaagacgatttgaagaaaatcgccgcctacaaggccgtcgagtacgtggagtccggcatgatcctcggcctcggcaccggctccaccgccaagcatgccgtcgaccgcatcgg

SEQ ID NO: 39361 - DNA, 261 bp, Glycine max
  Clone ID: 701120986H1
caatttcatttcagatagcttcttgactcgttactgactcactcaatggctgaccgagttcaccccagccactcgccttccgtttccgcggattcacaaccgccatcgcctcaagactcctccgtcgttccgaaaccgccgtcgccaccgtcaccggagaagccagtgcctccgcctggaacctacgtcatcaagatccccaaggaccaagtctaccgcgtccctccgccggagaacgctcgccgctacgaccaatacgct

SEQ ID NO: 39362 - DNA, 250 bp, Glycine max
  unsure (1)..(250): unsure at all n locations; Clone ID: 701120987H1
aaaaaaccaaaaatactacaaatttttttcagtttctccgccgccgcacaaccaccacctcctccgttcggatctccggcggacctactatccctactactactctactctatttacacggaagaacaaaaaactatnnnnnnnnnnnnnnnnnnnccccaaagcggctcggttagggtttagttttgtaccatttcgtgtaatctaatttttcatccgtaaaaatctaattttgaggcggcgagatggc

SEQ ID NO: 39363 - DNA, 257 bp, Glycine max
  unsure (1)..(257): unsure at all n locations; Clone ID: 701120989H1
gttaggttctgcacgctctgcttccagcgagtgttctttcttcgtttcaacaccttaatttgcanacgctgcttcttcngcttgagaaatggcacaagaaacctttctattcacatctgaatctgtaaacgagggtcaccccgacaagctgtgcgaccagatctctgatgcagtgctcgatgcgtgccttgaacaggaccctgacagcaaggttgcctgtgagacatgcaccaagaccaacatggtcatggtctttg

SEQ ID NO: 39364 - DNA, 258 bp, Glycine max
  unsure (1)..(258): unsure at all n locations; Clone ID: 701120990H1
ggtcaatcctcacactcaccagctnaagatttgtgactttgggagtgcaaaagtcttggtcaaaggggaaccaaacatatcttacatctgctctaggtactatagagcacctgaacttatatttggtgcaactgagtacaccacggccattgatatttggtcagctggttgtgtacttggtgaactaatgcttggccagcctctattccctggtgagagtggagtagatcagcttgttgaaattatcaaggttttagg

SEQ ID NO: 39365 - DNA, 258 bp, Glycine max
  Clone ID: 701120991H1
aagctctctatttggctttacagtcatcacagacactaaaggagaggaatattttacatacaaatggaatagccctgaaaaagtgaggtttcagataacttgggatgggtttgagaagaagttcgtgttggatgcagatgggaaacaatggaataggacacagtttgagccttttgatgactgtgagaagtataacttttgtggtagttttgcagtgtgtgatacgggtaattctcctttttgtagttgcaaggaagg

SEQ ID NO: 39366 - DNA, 252 bp, Glycine max
  Clone ID: 701120992H1
tgagacaacacctatattgccagggattcctagaatacacaagctggagattgacgggaatgggatttcataccaatctctatgctgttcgtggcatttacagtggtgggaaggaaggcaaaagtagagttcaatggcttagatcaatggttggaagtcctgaccttatctctataccaggagaaactggcagaatgtatgaagcgaatgttgatgatgttggctataggctggtggccatctatactcctg

SEQ ID NO: 39367 - DNA, 260 bp, Glycine max
  unsure (1)..(260): unsure at all n locations; Clone ID: 701120993H1
gtgggcaatgggtgctataatggctgagcttttctctcttcgtcctcttttcccaggtgccagtgaagcggatgagatttacaaaatatgtggtgtgataggcaatccaacctttgaatcatgggcggatggactcaaacttgcaagggatattaactaccagtttccacagcttgccggtgtnccatctttctgctttaattccgtctgctagtgatgatgcaatcagccttattacatcactttgctcctgggatccc

SEQ ID NO: 39368 - DNA, 139 bp, Glycine max
  unsure (1)..(139): unsure at all n locations; Clone ID: 701120994H1
aggcttcaagtattaaagctaaatatcattaaacncctttcaaagtnttaagacataactgtcctagctcctgngaatcagaactcaaattattggcaaggtctttatcataccaagnctaatgttccaactatcaact

SEQ ID NO: 39369 - DNA, 264 bp, Glycine max
  Clone ID: 701120995H1
agaagttcctgcgaaaattccttctcagcaagtgcctagcttcacatcctcttgggcagttgatgacttgttggaattaacagactttgaatcaccagacaaagttcagaagcaatcccttgagtttggagaacttgaatggctagcagatgtaggcctttttggtgaacagtttcctcatgaagctttagcggcggctgaagttcctcagcttccaatgactagcagtgttggctcacacaaagcccccaaatccttgttgtc

SEQ ID NO: 39370 - DNA, 268 bp, Glycine max
  unsure (1)..(268): unsure at all n locations; Clone ID: 701120996H1
gattaatatctctaaactataactccattagcctctctcagtctcaaacatatatactttncactagctaggcatggttgagcttcggttaagcataagggctctgcaattgccaacactattgattctgtgtttcttcctcattttggggaatttctcacaaagctgaggccanaattagacatcacaaatgggaggtaaagtatgagtttaggtcccctgattgctttaagaagctggttattacaatcaatggcaaaactccagg

SEQ ID NO: 39371 - DNA, 214 bp, Glycine max
  Clone ID: 701121001H1
agagttctacttctagagtctcctccttccactcgtcgccgcgctggcagctctacttcaacgagatcaaagataccgataagctcgttgtgatagatttctcggcgtcgtggtgcggtccttgcaaattcatagagccagcgattcacgccatggccgacaagttcaacgacgttgacttcgtcaagatcgacgtcgacgaattacctgatgt

SEQ ID NO: 39372 - DNA, 253 bp, Glycine max
  unsure (1)..(253): unsure at all n locations; Clone ID: 701121002H1
gcctctttctcactctctaatctatttgtgaactaggttttggttgcagagacatgggagaaaggattccgtgtgggagtggcatgtatttccccttccctcctccgccatctcccattcgcccttcttcttctncttcagatcgcgataggtatttggccgaactactcgctgagaggcaaaagttggtaccctttctccaagttcttccacaatctaccaaactnctaacccaagaaatcagacgcatgtc

SEQ ID NO: 39373 - DNA, 279 bp, Glycine max
  unsure (1)..(279): unsure at all n locations; Clone ID: 701121003H1
atatatttttagccaaaataaaaagggggaagttgtatgtgtatcccttccttccggtctgaaacaaaaggaaaggatgaagcaatcaaaggatccgttcgaagcagcgttcgaggaatcgccgccagaatccccaacggctacggagacagaggcagagacgcaaaaccctactcctcctcnncncnnnatcantcctccttcttctttttctggtgttgctgtagtagcactgaatccacaacaacctcagaatcagaaagtgaagaacaaagacaa

SEQ ID NO: 39374 - DNA, 87 bp, Glycine max
  unsure (1)..(87): unsure at all n locations; Clone ID: 701121004H1
cgaaaaccctnaccccacanccccctctacacannctgcactctttttccnttgtntgataattgcgggcttgcctccntnctttgc

SEQ ID NO: 39375 - DNA, 72 bp, Glycine max
  unsure (1)..(72): unsure at all n locations; Clone ID: 701121006H1
aacaaagtggatgcacgaacgagaggtagaaannnaatgttaatcaaantgcaactccttcctcatggagtt

SEQ ID NO: 39376 - DNA, 272 bp, Glycine max
  Clone ID: 701121007H1
aaggcctataacgggaacctgatttctcatcttagatcattggttgggacacctttgatgcctgggaagtctgtggacacttacatttttgcactctatgatgaggatctcaaacaaggcccaggatctgagcgtgcatttggtatgttcaaaactgatcgcaccgtgtcgtacgacgttggattaaccaagtctagccagcagactccatcaaccagtccaacaatccagcacctaaaatgctggatggtgtatacccaaagctggagttt

SEQ ID NO: 39377 - DNA, 276 bp, Glycine max
  Clone ID: 701121008H1
gtttgcttctcctgctggtcaatcttggccatcctctgcatctcagagtgttgcggctgttacatctgtgcagtcggctggggtgcaatcatctggtgctgcatcaactgatacggtgactaatgctactaaccagcaatccttatctgattggcaagagcacacttctgctgatgggagaagatattattacaacaagaggacaaggcaatcaagttgggaaaaacctttagaattgatgtcacctatagagagagctgatgcatcaactgtttg

SEQ ID NO: 39378 - DNA, 273 bp, Glycine max
  unsure (1)..(273): unsure at all n locations; Clone ID: 701121009H1
ggaacttgaaaccttgcagtgtttacagacactaacagagcncacatctgttgtgatgtctgttctctgctgggaccaattccttttatcttgttcattggataaaacagtgaaggtatggtatgctactgaaagcggnaacttggaagtgacatatactcacaacgaagaaaatgtatttgttaatttaattactttttcccctggatagttgtttcattttaatatgatattgcttgtccaggtgaatgngttttccccataatgtggtgg

SEQ ID NO: 39379 - DNA, 278 bp, Glycine max
  Clone ID: 701121010H1
attgaatatgtctccgtcgttggatcttcctcccaagggtgggcttcagttttgatctatgccgaagaaacgcaatgcttcaaaacaagggcctcaaagccccaacctttctcaaaactggcaccactattgtcggtttagttttccaggatggtgtcattcttggtgctgatactagggcaactgaaggacctatagtggctgataaaaatgtgagaaattcattatatggcacccaacatatattgctgtggagcaggcacagctgctgatacaga

SEQ ID NO: 39380 - DNA, 280 bp, Glycine max
  unsure (1)..(280): unsure at all n locations; Clone ID: 701121011H1
gtgaaagttgaagaaacaatggcgtatgctaatgctgcttcaactagcccaacaacatcttcaaacctctccccgcaacccatggaanggttgcacgaggtgggtccccctccgtttctcaccaaaaccttcgacgtggtggaagacccatccaccaacgacatcgtttccgtggagcagatcccgcaacagtttcgtcgtttgggactctcacaagttctctaccaccatcctgcctcgctacttcaagcacaacaatttctncagcttcgtacgacaa

SEQ ID NO: 39381 - DNA, 98 bp, Glycine max
  unsure (1)..(98): unsure at all n locations; Clone ID: 701121012H1
agcntcctcagagaggccattgctctctcttacaaaacaacaaagaacnttctcnctctctccctccctccctctcttgctacttcatcattctctnt

SEQ ID NO: 39382 - DNA, 279 bp, Glycine max
  unsure (1)..(279): unsure at all n locations; Clone ID: 701121013H1
tctgaaacccaagcaagctctttccctcgtttnttaagagagagaaagtagagagagagacacacacaactcccacaattgctttgcctaaccttaatttcaggacacttcgaagctnccaggaccaattgttgttgttcttccctttttgtgctttttgattcagagatttttggttttcgttttttttttcacaaggagaaagttcggtgtctttaagttgaataacttgttgggacatatttgatttggcgctttncttttggtgcttgcctcatg

SEQ ID NO: 39383 - DNA, 283 bp, Glycine max
  Clone ID: 701121014H1
caacaatggtgccgcaacccattttgcatctaacccttttgtcattaataatctctctgaccactctttccttggtcgatgccgccgatcccacatttggcttcacccctcttggattatctagtagctcaaacttgcaaatccaaaagccttacgacgttgcagtcaacgagcgctacagcttttcaaatggagtgcacagattttgggtatactccacggacaagcctcatatgcaaggcagcaatacgaagccacgaactgagattcgtatcgctggata

SEQ ID NO: 39384 - DNA, 172 bp, Glycine max
  Clone ID: 701121015H1
cttgatgaacgaaggggtcaagtctgcaatttgaaggatttgtcttcgcaccgcagtggatgttaatatgaccgtgttggataagttgacggatttcaaatgtactgacccgttctttgctgtatataaggcataaattcttgacactaggaatctaaagcaaattttcgtc

SEQ ID NO: 39385 - DNA, 175 bp, Glycine max
  Clone ID: 701121016H1
ggcatgtgttagaaagccttacaccattatttgcacctaggtacctatgtaatattctgtgtatataagaaagcacaatggttgtgacgaacttttttcctttttcttttataaacatttttttttctcgttttctttatgaacacaccaagtactcgtagatggtgattgagga

SEQ ID NO: 39386 - DNA, 275 bp, Glycine max
  Clone ID: 701121018H1
ggcctcaagagcagtgttattgttggctatgtgtgtgcttccggcgatggttgtggccattcgcccagcaaagaaccctttttgcgtgaagggtcgtgtctactgtgacccttgccgtgctggttttgagacctcagctaccacctacattgctggtgctgagattatgttgcaatgcaagagcagggttagcaacgaggttgtgtacacgaagaaggggtacaccgactcaaccggagcatacacaatgtacgtggatgaggatcacgcagatc

SEQ ID NO: 39387 - DNA, 276 bp, Glycine max
  Clone ID: 701121019H1
agcaccttcagtgtttattggcctgatatctggattagtgtttacaatgctcgtacgaccaatgaagcaaaggtatcattataatgttgctgatgtgcggctggcccaacacattgataaaggaaatgaagatggtttatttatcagcagtgtggcttcttgttctaatctttgggcactcattatggatgctggcactggtttcaccgcacaagtttatgaactgtctccccacttccttcacaaggaatggattatggaacagtgggagaagaa

SEQ ID NO: 39388 - DNA, 278 bp, Glycine max
  unsure (1)..(278): unsure at all n locations; Clone ID: 701121020H1
ggcgcgagtggatctggacgggaaccccatgaaggcacttacgatctgcatgatcggcgctggcggcttcataggctcgcatctctgcgagaanctcatgtccgaaacccctcacaccgtcctcgccctcgacgtctacaacgacaagatcaaacacctcctcgaaccctccgattccccctgggccggccgcatcaccttccaccgcctncaacatcanacacgactctcgcctcgaaggcctcatcaagatggcagatctcactattaatctggct

SEQ ID NO: 39389 - DNA, 273 bp, Glycine max
  Clone ID: 701121021H1
gggaaaagttgcctccttctgcgtttctccgatggttctttcaccactagtttcatcacaactataggcattgattttaagataagaaccattgagcttgatggcaaacggatcaagctccaaatttgggatactgcagggcaggagcggtttcggacaattacaactgcttactaccgtggtgctatgggcatattgctagtctatgatgttacagatgaagcatcatttaacaatatcaggaattggattcgcaatattgagcaactgctt

SEQ ID NO: 39390 - DNA, 274 bp, Glycine max
  unsure (1)..(274): unsure at all n locations; Clone ID: 701121022H1
gggagcactcaacctaaccattcaagttgtgaaaccacatcgcaaganaattcacaagcgatggatccgaagctgaaagaggtttctcagctcttcgatcgcttcaaggcttcgtttctccggaacgacttcgataactgttccaatctcctttctcagctaaaggtgttacttacaggtttcagaagcctgccaccgttgtttgcagatacacctaatgcagttcatgaattaacaatagcaagggatatatatgagcatgctgttgtcctta

SEQ ID NO: 39391 - DNA, 112 bp, Glycine max
  Clone ID: 701121023H1
accttctttgctctgaaaggtcctcttagactatcgatttacactgatagagcagtttgtgttgatgattgtggccaattttatccagttagtaaaggtgcaattgatggat

SEQ ID NO: 39392 - DNA, 276 bp, Glycine max
  Clone ID: 701121024H1
gacgccccagatcagatcctctctcttcaattcaacttcaagccaagccaagcaacatggctcaacaacaggaggacgaaatggagtatgttgctgatgataatgaaatggcggaagtagaagatgacatgtatttccgtggtagagtgtttggtgattcagagtccgaatcagatgacgatgatgaatatgactccatggaaaatcggatgacagatacctctgctgcagaagccaggaaaggaaaggatatccaaggtattccttgggatagac

SEQ ID NO: 39393 - DNA, 275 bp, Glycine max
  Clone ID: 701121025H1
gtgggtggagaggatctgatagaacagataaaagcaggattcatggagtttgataaactaattgcttctccagatatgatgcctaaggttgctagcctagggaagattctgggaccaagaggactgatgccaaacccaaaagctggcactgtaacacccaatattccccaggctatagcagaattcaagcagggaaaagttgaatacagggcagacaaaactggatcgtgcattaccttttggaaaagctgactttccagaagaggatcttcttg

SEQ ID NO: 39394 - DNA, 277 bp, Glycine max
  unsure (1)..(277): unsure at all n locations; Clone ID: 701121026H1
aagctcatggtcacagatctttcgtgccatcaagagttaccgaacccaaccatgaaacaacaacctaggatgcancccgtgtnccgatttgtgggcttgagtttgctattggacaagctttgggagggcacatgagaaagcatagaactgctattaatgatggcttgttgtgtggtaaaccttcttcttcgttgtccatcttgaaggaatcatcgaaagatggtgatcaaaagttgaatttgcgcttggacttgaacttgacgccattggaggagga

SEQ ID NO: 39395 - DNA, 277 bp, Glycine max
  Clone ID: 701121028H1
ctggctctgttccgtcgatgacgatggcgtttagggtgcgaaaccctgacctccgctttctcattcttctctctctcttgtccatcacttccgccaaggtcttcttcgaggagcgtttcgatgacggatggggaaatcgttgggttaaatcagattggaaaaaagatgagaacctggctggggagtggaaccacacctctggccaatggaatggagacgctaacgacaaaggtattcaaaccagtgaggattacagattctacgctatttcagctca

SEQ ID NO: 39396 - DNA, 280 bp, Glycine max
  unsure (1)..(280): unsure at all n locations; Clone ID: 701121029H1
ggagcttccatttcatagccggcggtgaagatagatagttagcagacttggctgaccctgagcaggaggaataagaataagatgcctccttatgattgtatgtttctgtttaagccccatataaggaangaagctgtcatggatttagttgtgagggtgggaaagcatgtgtgcagaagaaatggggttgtcactgatatcaagagtctcggaaaagttcagttgggctatggtgtgaaaaagctagatggcagatattatcaggcctactgatgccaaa

SEQ ID NO: 39397 - DNA, 281 bp, Glycine max
  unsure (1)..(281): unsure at all n locations; Clone ID: 701121030H1
cactctgcatattgaaatcggctataactataagagcaaatcgtaactttctctgggtcatgcatgctgaagggaacacagacccttatcatcccttgaaacctctcttcaaaaaataggctcttgcccagtgacaggctgatagcagagccaggtgctaaaaaggtcgaagatgtatatgaacccaatccaaatgaaataaacgccattctgtgttcgggcantggaattgtcaccccagntacgcanttgnattttttcccaccaagaagtgaggantt

SEQ ID NO: 39398 - DNA, 282 bp, Glycine max
  unsure (1)..(282): unsure at all n locations; Clone ID: 701121031H1
gggattcccttagtaacggcgagcgaaccgggaaaagcccaccatgaaaatcggtcgccctcgggtcccgaattgtagtcgggttgtttgggaatgcngccccaatcgggcggtaaattccgtctcttcggcgccgactggggctcgatcgacctctccatcaacactgaccccaactccgacgaagacgccgtcagcgccgtcaacagtaacgaccacgccaacgccggcaacagcaaacgcaagctcgaggacgattcgacgcttcacggcgtcgaaggc

SEQ ID NO: 39399 - DNA, 284 bp, Glycine max
  unsure (1)..(284): unsure at all n locations; Clone ID: 701121032H1
ctcttcttgtttctcctgnaatcaacgacacccccccaaaaatgacaggagagacagtgaacccaaaagcttaccctttggccgatgcgcaactcgcaataacaatactggatcttgtgcaacaagctgccaactacaagcaactcaaaaagggtgctaatgaagcgaccaagacactgaacagaggcatctctgagttcgttgtgatggccgcggacatgagcctcttgagattcttctccatcttcctctcctagctgaggataagatgttccctatgtntc

SEQ ID NO: 39400 - DNA, 281 bp, Glycine max
  unsure (1)..(281): unsure at all n locations; Clone ID: 701121033H1
ctcaaccattgcgtctgtttgatcaaagtcaaaacacacccaaaaagaccaccattncgcaataacacaacacagcacaaacccctttatnncttctctccctttcaacacaacacaanannnnaaangnnttntcanacangagccagttccttnngcgcgcggtattngngtctgtntcctcggtgcaacattacgtacccacacacactatatnggccaataggggatcgagancnacaaacagcatcatcccagtgacgacgacgatcacattttaa

SEQ ID NO: 39401 - DNA, 253 bp, Glycine max
  unsure (1)..(253): unsure at all n locations; Clone ID: 701121034H1
cggacattttacaaactgcaaannaaggctttgtttaangaatctctcaagaggacatnatgaagtcatcaaggatgtcagttgaaactggcccttatgtttttcattatattatagaaggacgggtctgttacttgacaatgtgtgatcgtgcataccctaagaaactagcctttcaatatcttgaagagctcaggaagagtttgagcgtgttaatgggtctcaaattgaaatgctgcagaccttatgcctt

SEQ ID NO: 39402 - DNA, 273 bp, Glycine max
  unsure (1)..(273): unsure at all n locations; Clone ID: 701121035H1
gtctttaatcgagtcgaattggatcttgtgatttacttagccgacttcacttagtgcagtgggatncagagttaagacatttgttgttgtagtatttattggtttttgggtgggtttataatatattaccagggttaacataagaacatttattcatagttgaacttgtgttgtgctactncncntggttggtcagagaatgtctaggcctctgcaaagaggtgtgtcaggtggggttagggtccctgagagtggccatgatgacttgtggga

SEQ ID NO: 39403 - DNA, 274 bp, Glycine max
  unsure (1)..(274): unsure at all n locations; Clone ID: 701121036H1
gggaggttcaccactggcagagttgaggagttcattcatgccaaaacactctcagctgcggacctccgtgaccctgaaatatctgctttgatagcatctaagatgagggantttcacaatcttcatatgcctggtgcaaagaaggctcagctttggcagagaatgaggaagtggcttagtcatgccaaaagtttgtgctcccctaaagaaaaccaagattttggcctngaccatctagatgctgaaataaatatgcttgtggagttgttatctc

SEQ ID NO: 39404 - DNA, 270 bp, Glycine max
  unsure (1)..(270): unsure at all n locations; Clone ID: 701121038H1
gccacagcccatggagaacattccagagtcttcatcgagagggacgaaacgccggcgagacgaagattccgatgccggaaacacctcctcactcgaagacgatnttacattcaccgacacgctggtcgcgcttcgaatcatgcgagctcagtttccccacgttcacaagtggtgtggtgatgcttgtttccagagttcggttgagcctttatattgaagtcacagttgtacatattgtgaaggacagaaccacagtgggatagggattag

SEQ ID NO: 39405 - DNA, 272 bp, Glycine max
  unsure (1)..(272): unsure at all n locations; Clone ID: 701121039H1
gcggccgtaaganaaataattgaggtcaatagaaataaaatcttgtcgccatctcttctctcttttcgccggggaattgcttacaagctttttgttggagctagcttcttgacactaggattgtccttctacaccacagagaatgcattatcagaggcattctccaattacgggcaagttattgaagccaaaattgtaacagatagggtgtcagacagatctaagggatttgggtttgtcacctttgcttctcaagacgaggctgagaatgc

SEQ ID NO: 39406 - DNA, 270 bp, Glycine max
  Clone ID: 701121040H1
gggagcttgaacatgttaaggagatcattaagtggggtactgattattttctcaagagtttcaatagtactgctgacaccatcaccacccttgctgctcaggttgggcttggagatacttccggtggtgacagtccgaatgaccactattgctggatgcgcccagaggacatggactatgaccgccctgtgactgaatgccatagttgttctgatcttgcagctgagatggctgctgccttggcatctgcttccatgttttcaaggacaa

SEQ ID NO: 39407 - DNA, 275 bp, Glycine max
  unsure (1)..(275): unsure at all n locations; Clone ID: 701121041H1
atgagtgtggtcaccatgcattcagtgactacnagctgcttgatgatattgttggccttatcctccactccgctactcctagtcccgtacttttcatggaaatacagccatcgccgtcaccactccaacacaggttctcttgagcgagatgaagtatttgtgccaaagcagaagtccagtatcatgtggtactctaaataccttaacaatccaccaggcagagtcctcactcttgccgtcaccctcacgcttggttggcccttgtattggctttt

SEQ ID NO: 39408 - DNA, 274 bp, Glycine max
  unsure (1)..(274): unsure at all n locations; Clone ID: 701121042H1
tctctctcccctccgccatggctgaggataaggagatgtctacctctgtcatcaatgggaatgattccctaantggacacatcatatctacaactattggaggcaaaaatggggaacccaaacagactattagttacatggcagaacgggttgtaggaactggatcatttggaattgttttccaggcnnaatgcttggaaactggggaggcagtggccattaanaaggttttacaagacagacgatacaagaatcgtgaatacattaatgcgtg

SEQ ID NO: 39409 - DNA, 272 bp, Glycine max
  Clone ID: 701121043H1
gggaatatggggcatgtcttgataacttacaatgcttctgccaaactccttgctgtctcatggttttttgagggaagaaatagttctagttctgcgcctgaagcttctctttcacaccagattgacctcggggaaattctaccagagtgggtcactgttgggttttcgggtgggaacgggaattccaaagggaaaaatgttattcatcctgggaattcagttcaaatatggatctaaaatccatcgtaatccagaggtaataaacaaaggga

SEQ ID NO: 39410 - DNA, 254 bp, Glycine max
  unsure (1)..(254): unsure at all n locations; Clone ID: 701121045H1
atggccgtgatttgggaggannagaccctctatgaanncttgctcaaccccaaaaagtatattccaggaacgaagatggtatttcctggtcttaagaaacctcaggaacgtgcagatcttattgcatatcttaaagaatctactgcttaatgattaaattttcatacagttatgcactttgcttcaaagttctggagatttagttttcagacatttaattctgtggtgcagtaaatactgtatcaacaaataaa

SEQ ID NO: 39411 - DNA, 278 bp, Glycine max
  unsure (1)..(278): unsure at all n locations; Clone ID: 701121046H1
atggcagcntctttatgcatcctcagggtctttatataagtttgaaagagaagggaaagatccgtgaagtactaaggaattggcctgagaagaacattcaagtcatagttgtaactgatggagaacggatcctgggtcttggggatcttggttgtcaggggatgggaataccagtgggaaaactttctttatatacagcacttggaggagtccgcccttcagcttgtttacccatacaattgatgtgggcacaaacaatgagaagctgctgaatgatg

SEQ ID NO: 39412 - DNA, 279 bp, Glycine max
  unsure (1)..(279): unsure at all n locations; Clone ID: 701121047H1
cagaacaacaatggcgacacttaaggttcctcagcctcttccccccgttgcagatgattgtgagcagctccgaaaagccttctcaggttggggaactaacgaggagctgattgtatcgatcttggctcataggaatgctgctcagaggaagcttatcagagaaacttatgcccagacctatggagaagatctcctcaaggccttggacaaagaactcacgagtgattttgagaggctggttcatctttggacattgattctgctgaacgtgatgcnttt

SEQ ID NO: 39413 - DNA, 281 bp, Glycine max
  Clone ID: 701121048H1
gcagaaaaatcccctgaactacactcaggtgtctgtcttggcagatgacattctaaagaatgtggagtatgacgcattaaggattgttttcaacaaatttcattctgttgtacaatttttgccaacagttgcaactgtactgtctcctgaggttattgagagagaggctgaatcaggaggaaagcttggggaattggattcatatgagattgaaggtggcgagacaaaagctgaaattcttcagaatctggctgagttccagttttcttgtgtcatgtaca

SEQ ID NO: 39414 - DNA, 272 bp, Glycine max
  unsure (1)..(272): unsure at all n locations; Clone ID: 701121049H1
aaactgcagaagcgcctctccgcaagcgtgctcaagtgcggcagaggaaaggtttggcttgaccccaatgaagtcaacgaaatctccatggccaattctcggcaaaacatcaggaagttggttaaggatgggtttatcatcaggaagccaaccaagattcactcccgctcacgtgctcgtaggatgaaggaggcaaagaggaagggccgccactccggttatggtaaacgtaagggtacatgntaggcaagcttccccaccagatactctgg

SEQ ID NO: 39415 - DNA, 272 bp, Glycine max
  Clone ID: 701121050H1
caatcatccaactttgatgaaaattctgatgtggggtatcacccttcttcaccttccaatactcctgctttttccccaatgagtagagattcttttgcatattgcccaacatggacaagctcagagtctgagactgtagacgagagcagctatgccagtgaaccttcaccttctcggtggagggctaaacaggatgttctttcaaagctaggaatgaagctgcgtgagcattcaaaggatgataaacttgatggctgtgttgattcagccga

SEQ ID NO: 39416 - DNA, 272 bp, Glycine max
  Clone ID: 701121051H1
ggcgttacaaaatcattggaggtattgctcgaggtcttctctacctccatgaagattctagactgcgtattatacatcgtgacctcaaagcaagcaacattctcttggatgaagagatgcatcctaagatatctgattttgggatggcaagattggttcacatggatcagactcaggaaaatacaagtagaattgttgggacctatggatatatggcacctgagtatgcaatatatggtccattttcagcaaaatcagatgtttttagtttt

SEQ ID NO: 39417 - DNA, 269 bp, Glycine max
  unsure (1)..(269): unsure at all n locations; Clone ID: 701121053H1
atctttctttctcttcctgcagaagctatccgtgttacttgttcccaagtctccaacaagcaaagtacatggttgatttggaaatccaggtccccagcgcattcgacccgtttgccgaggcgagagaatcagatgcccccggggcaaaggagtatgtgcacatacgaattcagcagaggaatggaaagaagagtctgacaacagtgcaagggctgaagaaggagttcagctaagagaagatcctccaggactcnagaaggattctgtgc

SEQ ID NO: 39418 - DNA, 268 bp, Glycine max
  unsure (1)..(268): unsure at all n locations; Clone ID: 701121054H1
ctaatgccattcctataagaggtgtatatggacctctcatatctgctatcactgtgacctcaaactttaaantttatggacatgggttctccactggaacaattgttggaattgtggttggggcatgtgtgattgtcatattgatactctttgctctttggaagatgggtttcctttgtcggaaagatcaaacagaccaagaacttctaggtctgaaaacaggttatttcagtttaagacaaattaaagctgctactaataactttga

SEQ ID NO: 39419 - DNA, 269 bp, Glycine max
  Clone ID: 701121055H1
aaccctagagaggaggaagagagagcgtgcaagttccggccaccaccgaccatgacattcaagcgcaggaatggaggtcgcaacaaacacggccgcggccacgtcaaattcatccggtgctccaactgtggcaaatgctgtcccaaggacaaggccatcaagaggtttctggtgaggaacattgttgaacaggctgcagtcagagatgtgcaggaagcttgtgtctatgaacaatatactcttccgaaactctatgtgaagatgcatac

SEQ ID NO: 39420 - DNA, 264 bp, Glycine max
  unsure (1)..(264): unsure at all n locations; Clone ID: 701121056H1
gctcgccggcatcgtctccngtcccggcggacctctcccggcggtccctgcgaacctacaactggngtggacccgtttgggagaaacgantccgggcatccgcccaggtccggtcccgaaacgggttcgccgtgttggtcaccggcgccgcngttttgtaggcacccacgtctccnnngcgcttaagcgcgngntgacggggagtttggacttgacaattcaatgactattatgacccttcattaagcgtgcagccagggctct

SEQ ID NO: 39421 - DNA, 274 bp, Glycine max
  unsure (1)..(274): unsure at all n locations; Clone ID: 701121057H1
gttcacactcaaacaaacaggggttanaacttggaagcagaagaaaacgagaganagagagtnactgangaaaattgaagatgaacgaagatggcgtaacctctgcnaatctcaatccctctcttcccaaaccaccctcttctcctccaactcctgctgccagctctgcgggggcgtcgtcgccggcntttccggcgaacgcggccaacggagatgctagccggcgcgacaaatcgagcgcngnttcgcacgcggttctcggttcgntgctgct

SEQ ID NO: 39422 - DNA, 272 bp, Glycine max
  Clone ID: 701121058H1
aaaccccgacttctggaagggatgcatttattagataaaaggtcaacacaggctctgcctgttgctttgatgattcatgataactcgtcggatcgcacggcctttgtgccggcgacgcatcattcaaatttctgccctatcaactttcgatggtaggatagtggcctaccatggtggtgacgggtgacggagaattagggttcgattccggagagggagcctgagaaacggctaccacatccaaggaaggcagcaggcgcgcaaattaccca

SEQ ID NO: 39423 - DNA, 273 bp, Glycine max
  unsure (1)..(273): unsure at all n locations; Clone ID: 701121060H1
gctaaaagaggtttctcagctcttcnatcgctttaaggcttcgtttatcaggaacgactttgatacctgttccaatctcctttctcagctaaaggtgttacttacaggtttcagaagccttccaccgttgtttgcagatacacctaatgcagttcatgaattaacaatagcaagggatatatacgagcatgctgttgtccttagtgtgaaaaatgaggatcaagatgcttttgaaagggattcttccagttgaagccttattatacagatgcc

SEQ ID NO: 39424 - DNA, 122 bp, Glycine max
  unsure (1)..(122): unsure at all n locations; Clone ID: 701121061H1
atttgggtacagagtgaggnagcagtgagcaaaaganaagctgaaaacagcgcaccagttctgagctgagctagctagggtttcctctctccctcgtcttctcacttccacacaacatanga

SEQ ID NO: 39425 - DNA, 278 bp, Glycine max
  unsure (1)..(278): unsure at all n locations; Clone ID: 701121062H1
gcaaagcngatgaaggttgatgtagatgaataccttaagacaaggcaacagagttcgccgtttttatctgaactgaaggataagctgcttctctcacccaatgaagcagcttctgctgggactcgatataatgtgccgttaattaactcacttgtgctatatgttggaatgcaggcaatccatcagcttcagggacgaactccccatactcaaacatcagcaaatgctttccccttagccgtnttttctgttggtgctgcattggatattttccagac

SEQ ID NO: 39426 - DNA, 279 bp, Glycine max
  unsure (1)..(279): unsure at all n locations; Clone ID: 701121063H1
agcgattcatcgatcgatcgatggctcttgtaggagttgaactgaagcatgcggcggagggcgtaccggaggcgaattgctccgccaagcccaccaagcagggcgagggcctccgccactactattctctcaacatccacgngnctcagctccttcttcgccaaaagactcataacctcaaccgtctcgaggctcagagaaacgacctcaattctagggtgaggatgctgcgcgaagattacagcttctgcaggaacccggctcttatgtcggtgaatt

SEQ ID NO: 39427 - DNA, 278 bp, Glycine max
  unsure (1)..(278): unsure at all n locations; Clone ID: 701121065H1
ggntcgannnccccttctgaagtcatccccgngtcacccgaagatgatccaaagattgaggagcatttgcnacatttacgtggggtgcagccatttggtgagaactctgttggtatgtggtctangcccacgtttagnnngcaaaacgaagatagtgtgtactattggaccttctaccaatacgagggantgatttggaagctggctgaggctggcatgaatgttgctcggttgaatatgtctcaggagaccatgcttctcatcagaaagttatgact

SEQ ID NO: 39428 - DNA, 267 bp, Glycine max
  unsure (1)..(267): unsure at all n locations; Clone ID: 701121067H1
gggtggcattacttggatgaacctatatgattccctcagttaccaaatgtgagaggtgtcctctttgaggtatgcttctcacttaggctaccttcacctgatgtttggacgggtaccagaatccttttcagccctaagtgtttctgaagaatctgttcttattgctttcagcatactctaaatgatgaaaattatggcaaaaaattacaatatagttgtttatgctataaganatttataatggaattgtccatnaagaacgactgt

SEQ ID NO: 39429 - DNA, 269 bp, Glycine max
  unsure (1)..(269): unsure at all n locations; Clone ID: 701121068H1
gcaatttgatgcggcgcggggtttagacttgagtgtgcattctgagaggagagaagagaagatggggaagaagacgaagaaacccggcaaaggcaaagagaaaaccgagagaaaaaccgcgagagccgaagagaagaaagctcgcagggaaaccaagaagctctctcccgaagacgacatcgacgccattttgttgagcttcaaaaagaggaagctaagaagaaggatgtccaagtcgacgacnacgttcccgcgccttctcctcgctc

SEQ ID NO: 39430 - DNA, 267 bp, Glycine max
  unsure (1)..(267): unsure at all n locations; Clone ID: 701121069H1
agagtagcttggtctctttcgtttgaaacgacgagtttaattacacgcacggcgnnnnnnnnnnnnnnnnnnnnnnnngatagttgctaccgtgcgagagagnttggaagcgtgtggcactggcattcctttccggagcggagaagatgaccatcgacttggattcgatcgctcgccgagtcgaggttgataatcgcattcccatccgctattactatcggattgccgataacctcctcaagcaggcaatatctaccgggaggagca

SEQ ID NO: 39431 - DNA, 269 bp, Glycine max
  unsure (1)..(269): unsure at all n locations; Clone ID: 701121071H1
atccacacaatgcttcttnnaccaccatgccctcaccactccaaccagagctncatcacagcgcttagttgtgagcaccaaaccaaaccacattgtttgcaaggcacaaaagcaggttgtccaagagggtgaggacactactaacattgtctctcgcaggttggccctcactgttctcattggtgctgctgctgttggctctaaggttgcacctgctgatgctgcctatggagaagctgccaatgtgtttggnaagccaaagacaaaca

SEQ ID NO: 39432 - DNA, 270 bp, Glycine max
  unsure (1)..(270): unsure at all n locations; Clone ID: 701121072H1
gaaaagctcttccatgactgctatngccttcctgtttatccttctaatcacttatacaggcacaacagatgcacaatccggggtatgttatggaagacttggcaacaacttaccaacccctcaagaagttgtggccctctacaatcaagccaacattcgcaggatgcgaatctacggtccaagcccagaagtcctcgaagcactaagaggttccaacattgagcttttgctagacattccaaatgacaacctcagaaacctagcatctag

SEQ ID NO: 39433 - DNA, 270 bp, Glycine max
  Clone ID: 701121073H1
gtgtacactgcatacgttagaaccggttcggtgttgaagggcggaacggactctaaagatcgggctgaagctgtacgacaagtacggctactacatctacattaaaaacctcgaagcatggggcggcttgatgggcaagggctacgactacttcgagcgcggcaacctcgacatcttcagcggaaggggaccctgtcttgacggacccgtctgtgccgttaacgttacttctgacggatcgggttctcaccacggctggtaccttaatac

SEQ ID NO: 39434 - DNA, 271 bp, Glycine max
  unsure (1)..(271): unsure at all n locations; Clone ID: 701121075H1
gctgtgacttgttttgagttcaatcaaatcgcattggtatctgaaatcaggaaagatggttagcgtantgagatcaggcaggcacaaagggcagaaggcccagcaaccatccttgccattggaactgcaaacccaccaaaccgtgttgatcagagcacctatcctgattactacttcagaatcaccaacagtgaccacatgacnganaannnnaaaaaaatttcagcgcatgtgtgacaagtctatgatcaagacgagatatatgtaccta

SEQ ID NO: 39435 - DNA, 269 bp, Glycine max
  unsure (1)..(269): unsure at all n locations; Clone ID: 701121076H1
ctgtcactgaactcaaaaatgaactgtcttcggaatctttctcgattctctgttttgcccttcgaaacacctgttacgcgccaccgcaaganccttcccctttccctgggtttcgtcaacaattctcgtcaatatccaactatggccctcaaggctgcctcaggttctataccaagtgcagacacaagtagtgccgataaggaggaaganaagtctgagacatatagtcataacatgacagnagccatgggtgtgttttgattataggc

SEQ ID NO: 39436 - DNA, 272 bp, Glycine max
  unsure (1)..(272): unsure at all n locations; Clone ID: 701121077H1
gtttttgaagtatagagatggcagagacattcctatttccctcagagtcagtgaacgagggacaccctgacaagctctgtgaccaaatctctgatgctgtcctcgacgcttgcctcgaacaggacccagacagcaaggttgcctgcgaaacatgcaccaaaaccaacttggtcatggtcttcggagaaatcacgaccaaggccatgttgactacgagaagatagtgcgtgacacctgccggaacatcggctttgtctcnaacgatgtgggat

SEQ ID NO: 39437 - DNA, 275 bp, Glycine max
  Clone ID: 701121078H1
tggggcttcaatgacctgtgctggttgccagggtactggcatgaaggtgtctattaggcaccttggtccttctatgattcagcaaatgcagcatccttgcaatgagtgtaagggtactggagagacaatcaatgacagagacaggtgccaacagtgcaagggagagaaggttgttcaggagaagaaagtacttgaagttgttgtggagaagggaatgcagaatggacagaagattacattccctggtgaagctgatgaagcctgatacatcacag

SEQ ID NO: 39438 - DNA, 279 bp, Glycine max
  Clone ID: 701121079H1
gggcgagctctgggactttatgtttggctggtttgctaatcccattacatttggtgactatcctgagagtatgagatctttagttggttctagactccccacattcaccaaagctcaatctgaaagtctcaaaggttcatatgattttcttggtataaattattacacctcaaatttcgtggaatatgctccaccaaccaccactaacaagacctatttcactgatatgctagccaaactttcttcgaccaggaatggtgtacccattggcacaccgac

SEQ ID NO: 39439 - DNA, 279 bp, Glycine max
  unsure (1)..(279): unsure at all n locations; Clone ID: 701121080H1
aacaatgaacgacttgttctccggttccttctcccgcttccgcagcgaccagtcctncccggaccgccaccacgacatcgagatgggcgccaccgcctccagcggcggtcgcggcggcgaggtgaaccttgacaagttcttcgaggacgtggaaggcgtgaaggaggaactaaaggagttggaaggtttggctcagagtctaaggagcagccacgagcagagcaagacgctgcacaacgcgaaggcggtgagggacctgcgcgcgcgcatggacggcga

SEQ ID NO: 39440 - DNA, 130 bp, Glycine max
  unsure (1)..(130): unsure at all n locations; Clone ID: 701121083H1
gccttcatggatagagtgacaaganagagatgcaatttctangggttctttggcatctacanaagaagcctccaagatcatactttcatggaggagaatcttcacccaaatcacctcancactaatcctc

SEQ ID NO: 39441 - DNA, 265 bp, Glycine max
  Clone ID: 701121084H1
cttgatttgtgctgtgaaacagttagaagtggtgttgatgtctgaggcattggaagatgttccttcaatgaaaggagggtgtgaagaagacgaagaagggttgaacctgaaggctactgagctgaggcttgggttaccagggtgtgagtcaccagagagggagggtgcgtttaggagtgtggtggtgtctggggccaagaggggtttctctgatgccatgatgaaaactggaatggtggatctgaaaaagatgctgccttgtttt

SEQ ID NO: 39442 - DNA, 266 bp, Glycine max
  unsure (1)..(266): unsure at all n locations; Clone ID: 701121085H1
ggttcagcaagatatccgaaggggtccctggacagaacaggaggactacaaattggtgtattttgttggcatgttcggagatcgtagatgggactttatagcaaaggtatcaggtttgaaggtggagggagactgtaaataaaataggtttgaatagaacaggtaaganttgcagattacggtgggttaattacctccaccccgatctcaaacgagggaagctcacaccccaagaacaacacctcgtcatggaccttcattccaaa

SEQ ID NO: 39443 - DNA, 266 bp, Glycine max
  unsure (1)..(266): unsure at all n locations; Clone ID: 701121086H1
gctccgctccaacacagggcncaaatnanggagntccttcacgtgcagggagggcaatgcgggaaccagatcggttccaagttctgggaagtggtgtgcgacgagcacggcatagatccgacggggaagtacgtcggaaactcagatctgcaactcgagcgcgtgaacgtctactacaatgaagcctcgtgcgggcgcttcgtgccacgcgcggtgctgatggacctggagcccggaaccatggacancgtgcggaccgggccgta

SEQ ID NO: 39444 - DNA, 257 bp, Glycine max
  unsure (1)..(257): unsure at all n locations; Clone ID: 701121087H1
ctttatgcaaganatgcttgaaactgcatcaatattaaagggagctactgacaagtccttgataatcattgatgagttgggacgtgggacatcaacttatgatggatttggtttagcttgggccattgtgagcatattgttgaagtaatcaaagcacctactttgtttgccacccactttcacgaattgactgcatagcccttgaaaagtaagcangatcacagaagcaattgttggtgtggcaaatatcagttagt

SEQ ID NO: 39445 - DNA, 268 bp, Glycine max
  Clone ID: 701121088H1
gatgcttccaaggggacgtgtctatcgttaccctcctggccgcaacatgcaagatgtcccacttcaagttgcagctggtggaatgctgtcggtcccttatgacatgggaggtctgccaatgcgcgatgctgtgggacagccaatgcccattcaagctttggctacagccctcgcaaatgctccaccagaacagcagaggactatgctcggtgaagctttatacccacttgtggatcagctggaacatgattctgctgcaaaggttaca

SEQ ID NO: 39446 - DNA, 269 bp, Glycine max
  Clone ID: 701121089H1
gccagccctggggataatgggtaattgtctagattcttcagctaaagtagaagcagctcacagttccagaaccccttctggaatttcaaaaactagtccttcatctgttccttccaacttatctattctgtcatatagtgaagcaagtgatttctcaaatcttcccacaccgaggtccgagggtgaaatcttgtcttccccaaatcttaaggcctttacctttaacgagctaaagaatgccaccaggaatttcgccccgacagccttct

SEQ ID NO: 39447 - DNA, 266 bp, Glycine max
  unsure (1)..(266): unsure at all n locations; Clone ID: 701121090H1
tctagaaaaaagttttgaactttgatgcacggaaagccttcatgcccgaccatgacatgtaccattttgatcacatggacgaagacgatttttttgacgaaattgatgaccaaaaccatggtaggggtgttggggatgctgctcttgatgaatatgagatgcttactaaggtgactgatacaacagctgctcaagcaaganagggaaaggacntcagggaattccatgggaaagtttgaacatatctagggagaggtatagattga

SEQ ID NO: 39448 - DNA, 268 bp, Glycine max
  unsure (1)..(268): unsure at all n locations; Clone ID: 701121091H1
ctcnanccgctccaacacaaaaaaatgaaacctacaatcaccattctcttgttgtctctactacttctcataacttcaccctccttggcaacccnacccncatccaaccctgatcaagtcaagcacaacaaaaacaacaaccaaggtggtggtgctggtgctggtgctggcgggttctttggccctggaggagggttcagcatacccggttttggaaacgggtttggaaatggcatctaggaggaggatacggatccgggtatggagg

SEQ ID NO: 39449 - DNA, 272 bp, Glycine max
  unsure (1)..(272): unsure at all n locations; Clone ID: 701121092H1
ttccacncacaccncaacannnctctctctagatctctgtttcttcttnttctccaaccttcgtttcaccacanacacttacatnacttngtcgaaatgggctccaccaattgagaccccaaacaaggtttccagctatcaacagtccccaaaccctcgtcttaacgagaggattctttcatccatttccaggagacacgttgctggcacacccgtggcacgatcttgagataggacccgaagctccaaagatcttccactgtgtggtcgaa

SEQ ID NO: 39450 - DNA, 271 bp, Glycine max
  Clone ID: 701121093H1
gttagaagtgctacaatacaaacaatggcagctactcaggaagatgtgaagcttttgggtattgtgggaagcccatttgtgtgcagggtccagattgcccttaagttgaagggagttgactacaaatttttggaagaaaatttgggcaacaagagtgatttgcttctcaaatacaaccctgttcacaagaaggttccagtgtttgttcacaatgagcagcccatagcagagtctcttgtgattgttgaatacattgatgagactggaagaa

SEQ ID NO: 39451 - DNA, 271 bp, Glycine max
  unsure (1)..(271): unsure at all n locations; Clone ID: 701121094H1
gttcaacatgtctacaccagnagaatantgccggtctctaccacctgtgagcaaggcctatggagtggcctgtttaatgactactgctgcattttatctgcaattctatgatgcatggaacatagcacttgattatggctcagtgtttaaacgccttcaagtttggaggcttatcacaaatttcttctttcttggcccgttttcatttccattgcaatccgtctgataataatagcaaaatatggtgtttcatggaaagagggccctttga

SEQ ID NO: 39452 - DNA, 272 bp, Glycine max
  unsure (1)..(272): unsure at all n locations; Clone ID: 701121095H1
tgtccttactagggctgctgcacttgggacgaggagctgccaccactgggttcaagcggttctagctctaaactgaagctgccaaagacaggaaagctgggctttcggaatctcttaatccataatgaagagagtgctaacaaccctanttttttggccagagcccatgagcnnnnnnnnnnnnnnnnnnnnnnnnnnnnnttagtttncngnccnttttgctttncttcctttnattctttatgtaagtttagtatcagtttatngggttc

SEQ ID NO: 39453 - DNA, 251 bp, Glycine max
  unsure (1)..(251): unsure at all n locations; Clone ID: 701121102H1
gcctctttctcactctctantctatttgtgaactaggttttggttgcagagacatgggagaaaggattccgtgtgggagtggcatgtntttccccttccctcctccgccatctccattcgccnnnnnnnnnnnnnnnnagatcgcgataggtatttggncgnactactccgtgagaggcaaaagttggtaccctttctccagttcttccacaatctnccagnctgcaaacccaggaaatcagacgcatgtc

SEQ ID NO: 39454 - DNA, 281 bp, Glycine max
  Clone ID: 701121103H1
gcaaacttggggatacagctatagcgtagttggtggagttgggttgccagacacagtggagaagatcacattcgaatgcaaattggctgctggcgccaacggagggtctgctgggagctaactgtcaaataccaaaccaaaggagatgctcagcccaacccagacgacctcaaaattggcaaagtcaagtctgatgctctttcaaggccgttgaggctaccttttggccaatcctcattacaactgatccaattcgatcttcagtattcagtgatctgcaa

SEQ ID NO: 39455 - DNA, 283 bp, Glycine max
  unsure (1)..(283): unsure at all n locations; Clone ID: 701121104H1
gatcatcgagatttccgacacgcacngccgcnanccggaggggagaatgcngtccttctncgccggancaggangcgctgctgctgatccacgagcggattcttcgagagcnacgctgccttcggggtggcggaggaggacgaggagtacggcggaaggggcngcggaanggaccgcatcgcgacgaggctggtggtgtcgcggatgcatgtggggtgtttgttggggaaaggagggaagattattgaacaaatgaggatggaaacaaagacgcaaattagga

SEQ ID NO: 39456 - DNA, 282 bp, Glycine max
  unsure (1)..(282): unsure at all n locations; Clone ID: 701121105H1
gtctctctctgaattgactagcttaaatggctggtcctaggattgcccatgctaccttgaaaggtccgagtgtggttaaggagatcataattggaataacacttgggcttagntgcggtggtgtgtggaagatgcaccactggaatgaacagaggaaaaccaggaccttctacgatttactggaaaagggtgagattactgttgttgcagaggaacagtgaaaatgttcttgttttgttgcctatgctctccatttataggcttttttttcccgtgttatat

SEQ ID NO: 39457 - DNA, 281 bp, Glycine max
  Clone ID: 701121107H1
gtttgctaccttctcccagaaatggttacgttcaggtttcaccagtaccaggtggtcgggagggctctcccaacggaagcagatcagcatccgaagatctaccgaatgaagctctggccaccaacgaggttcgcgccaagtctaagttctggtattttttgaggaagctgaagaaggtgaagaagagcaatggtcaagttcttgctatcaacgagatttttgagaagaacccaaccaagattaagaactacgggatatggttgcggtatcagagtaggact

SEQ ID NO: 39458 - DNA, 282 bp, Glycine max
  unsure (1)..(282): unsure at all n locations; Clone ID: 701121108H1
aatnagccttcatttatttccccctcaaatccgaatngtttctcttgatggtcagggatattgcaccaaggctttcaatatgctcttanattgtnaacctcttgccttcatcttttccatttagtattgcaaaacattattgcagctgtctcattgatacattgactgctactcagagttattgaggggcaaaaatgagtacacatagtacgttggatattgttgtaaatgatatacttcgagtggtcacaccagtacaagaagattgggagatacgatttg

SEQ ID NO: 39459 - DNA, 281 bp, Glycine max
  unsure (1)..(281): unsure at all n locations; Clone ID: 701121109H1
attttccgtgtctcatcaaaccctggttatgatcggtcaaacgcaaagtttgttcttatttcgccgatcgaacctcgatctggttcttagggatgattttcgttggaggtttcggggnaccggtgattatcgtacgtgatctttctgcggtggatgttgatggtctcgtgtcgaaagactcgaatcagagtaattaacgccagattcgctgtgtaatttagaatttattggtaaaataatcctttaggagtttatatttatatggttattcgatattcgat

SEQ ID NO: 39460 - DNA, 283 bp, Glycine max
  Clone ID: 701121110H1
gctgctgctattgaaatccccacaatagtgtttccaaactcctctgcccaacagaggatgccagtggttggaatgggatctgcccctgacttcacatgcaagaaagacacaaaggaggctatcattgaggccgtgaaacagggttacagacacttcgacactgctgctgcttatggctctgaacaggctctcggtgaagctctcaaggaagctatccatcttggcctcgtctcccgccaagacctctttgtcacttccaagctttgggtcaccgaaaatcatc

SEQ ID NO: 39461 - DNA, 283 bp, Glycine max
  unsure (1)..(283): unsure at all n locations; Clone ID: 701121111H1
ggaacatacctaagagtttgcgaganagacagaganagatgaagtggagtncgaaccaagtctcatagctganagtttagcgatcggaattctgccaccgttcttcttcatctcaccacaaccttaacctcatattagcacaaaattagtttgcttctatgagccaactgtcgtgttttctcagcttcataatggtctgaagggtctatgtgagaggattgtttcttcaaaatgctcntctanaagctccaccgagactgtagataatncacaggtgcncgtt

SEQ ID NO: 39462 - DNA, 285 bp, Glycine max
  unsure (1)..(285): unsure at all n locations; Clone ID: 701121112H1
gcagaataaccctcaaactccgtttcactctgagagaaagtgctgcagaaaacacacccaaacagagagaggaagaggtgtgtgagggatagactaagaattgaaagaaaaaacgttgcaaaggaagaaaccttgcaaatttaacaccagaaaagaagatctntgatttctctttcttttttctttttgtttgcataggaaaaaaacacacacccttcatctgagcctgantttgtatcattgagaattttcaaaaaggattgtcncttcagagacacagatctg

SEQ ID NO: 39463 - DNA, 283 bp, Glycine max
  unsure (1)..(283): unsure at all n locations; Clone ID: 701121113H1
caagttctgctacactcttgaaagangccatccatgtaattagttgtggttatgaagataagacagaatgggggaaagaggttgggtggatatatggctcagttaccgaagatatttaacaggtttcaagatgcattgtcatggttggagatctgtatactgcatgccaaaaaggcctgcttntaaaggttcagctcctataaatctctcggatcgtctgcatcaagttcttcggtgggctcttggatctgttgagatctttttcagtaggcattgtcccata

SEQ ID NO: 39464 - DNA, 285 bp, Glycine max
  Clone ID: 701121114H1
gttcggttcaacgccgtgtattcgtccccgctggatcgggcgcggtccacggcggtgtcggtgtgcaaggaagtcaatttttcagaggaacaaattcaatccacagatgctcttgcgagattagtcaagggaattgggaaggctgccttcgatcagaaatatatactcccgaaattcagggcttaattgacaggttccagccagattttactgcaccttctggtgaatcacttagacaagtagaattccggatgattcacttcttaaatggaactgtcctgcatt

SEQ ID NO: 39465 - DNA, 285 bp, Glycine max
  unsure (1)..(285): unsure at all n locations; Clone ID: 701121115H1
aacatatatatagcaagcatggcagtcacactctacgaccttagctcttcctctgggttgaanaaacttgatgagtaccttctcccacgcagttacatcaccgggtaccaagctacaaggatgatcttactgtttatgcagctttgccaactgctccatcagatgaatatggaaatgtttccaggtggtacaagcacattgatgctttgttgagaatctctggtgttactggcgagggatctggtgttattgttgagggatctctagttgcagagcctgttgcaa

SEQ ID NO: 39466 - DNA, 288 bp, Glycine max
  unsure (1)..(288): unsure at all n locations; Clone ID: 701121116H1
atcacaaatagaaactcactctttcgaaaaaaccagaatttgaatatgacgttagggtttganggttatagttataccacaacacttggaaggaagagggtcgtgttattacacaataagcttcttctctcaactctaattcggcggtgaatccattgaagagaatgtgcagcggaaaattcacttttgactctgaaaggtctcgccttgaggcccttcctcttgatnnntctgattagggtgttgtgtggtgtcgatcatgaagatttggagcaacttgttcgtgtc

SEQ ID NO: 39467 - DNA, 261 bp, Glycine max
  unsure (1)..(261): unsure at all n locations; Clone ID: 701121118H1
gagaaagaaaagaatggcaaagttaataaaattctttgagttgaacacaggggccaagattccttctgttgggttaggcacttggcaagctgagcctggtgttgtagccaaagctgtnaccacagccattctggttggatacagggcatattgattgtgctcaagccgtataacaatcaagcagagattggttctggctcttaagaagcttttgatgatggtgtggtgaagcgtgaggacttatggatcacctccaaactc

SEQ ID NO: 39468 - DNA, 283 bp, Glycine max
  Clone ID: 701121119H1
tttggaactattgagatagattgggactctcacccagtgactctgaaattcaaagtcagggacaaggatagtgtcacagttacaggggttgatgtttcattaacggaattacaaccatcaaattcagagattttagacagggtaaaagcagagcataataattcaaagcattgcacccttgaagttagtctgccatggattgtaagatatcgcctggcaatcttgttcttttccaccttatttggtaagtcacttctaagttccacttgctagtgatcctttg

SEQ ID NO: 39469 - DNA, 265 bp, Glycine max
  unsure (1)..(265): unsure at all n locations; Clone ID: 701121120H1
cngtccccattgtncgcttccgcaacgaaataactctaccgtgccctacgataagaggtttctcagagcaggagcaatgtcttccccttatctacctgccnaactgactcacttgctctcgcaactgaggccaaagacccatctgaggccatctccattctttatcgggtgcttgatgatccttcttcttcaccagatgctctgcgtatgaaagagcaagcaatcacaaacctcactaagcttctcactgatgagataggggaga

SEQ ID NO: 39470 - DNA, 281 bp, Glycine max
  Clone ID: 701121121H1
aatcggaggagcatactcaaacagagaccatccatggacggtgattcctcttggagtgctcgtctctcttccgcttccaggcgctaccaatccgctcttcaatctcgatcagacatttcatgggttttgatgaaaatgatggggacgatgatataagggaggagtttctctgcccattttgttctgagtattttgatatcgttggattatgctgccacattgacgaagagcatccaatggaggcaagaaatggggtatgtcctgtttgtgcgttgagggtg

SEQ ID NO: 39471 - DNA, 280 bp, Glycine max
  Clone ID: 701121122H1
ctttttgttctcatttctcagttattgtttaataattgtaccatcacactttcaattatgctttgtcagcttcatttattttagtttagctattcaaattccttaatgctattttagatatttttcggccttttgttggatatagagaagtgagacttgtgagcaaagaatccaaacatcgtggtggagatcctctaatcctttgttttgtggattttgctaatccggcctgtgcagcaactgctctgagtgcattgcaaggttataaagttgatgaact

SEQ ID NO: 39472 - DNA, 281 bp, Glycine max
  unsure (1)..(281): unsure at all n locations; Clone ID: 701121123H1
ggctcgntncacactactaatacagctttctggagatgncntcaactgtctcttacatgcttctacttccccttctagtgatggttgcntttgcnggggacttaaacaaagacttgacatcacatggggagatggccgctccaagatactaaaccatggagagtnactcactctttcattggacaaagcatctggctcaggttttcaatcaaagaatgagtatctctttgggaagattgacatgcagctcaagcttgtccctggaaactctgctggcaccg

SEQ ID NO: 39473 - DNA, 94 bp, Glycine max
  unsure (1)..(94): unsure at all n locations; Clone ID: 701121124H1
ttctcttttttntnttttagagtnccgnagtattctgaggactctgacactctgaggtctgtcggttcagtattcagtgtccactngggctatg

SEQ ID NO: 39474 - DNA, 271 bp, Glycine max
  unsure (1)..(271): unsure at all n locations; Clone ID: 701121125H1
cgccggtccagaagcagacccgggccgggcagaggacccggttcaaggccttactcgtcgtcggagacaacaacggccacgtcgggctgggcgtgaagtgcagcaagnatggcgacagctattcgtggcgcgattattctggcgaactgtctgttatccccgtgaggaggggntactgggggaacaagatcgggaagccccacaccgtcccgtgcaaggttacggggaagtgcggctccgttaccgttaggatggttcccgcgccgagagg

SEQ ID NO: 39475 - DNA, 280 bp, Glycine max
  unsure (1)..(280): unsure at all n locations; Clone ID: 701121126H1
aagaactgagtgtgtatgagatcaatgagaganatcgtggaagccctgcttatcttagattgagccagaaaactgtcaattcccttggtgatctagtccccttcagcaacaaggatgttactttttggtctttgtttaatactacctgcaaattttatgagccttgttcattttacatatgaacttttattagtagtgaaagcataactttttgtattttcttttttcattcaccttattatatttaatttaaaattccagtcttgggtttaagctaaaa

SEQ ID NO: 39476 - DNA, 284 bp, Glycine max
  Clone ID: 701121127H1
gcagaatttagttcatggagatgctatggtcactaaaaatcccattggaagtgatcaatgtctcaggattacagagctgaaacgggttcttggaaattctgattttagaaactgcaattgaagcagaattcagttcatggagatgctgtggtcaccaaaaatacacttggaagtgatcgtcagttgaaaagtgtcaagattacagagcccaaatgtgttactggaaactctgattctaaacattgcaaagcgttgcataattgggttcatggagatgctatggt

SEQ ID NO: 39477 - DNA, 285 bp, Glycine max
  Clone ID: 701121128H1
tcagaacttatctttggctacctttcttttcatatataggaattattaaagaaaatcatcacctttcaattttgcagtaagataaattctcagttgtgattgatggtcgttcaactcttcaacacggcaatcataatggatgaaaaggtggaaactcttaaagctgagttacaacgagtgagagaggagaacaacactctaagactgatgcttgaagttctaaacagcaagtgcacaaagcttgagatccatcttcaagagataaacaaggcacaacacaagggc

SEQ ID NO: 39478 - DNA, 287 bp, Glycine max
  Clone ID: 701121130H1
gaaccctcgatcactctcacgcgctcctatattcgctcctccaccgtcgctctctcgaacaaccacaacaccatcttcatcacatggcaaacgcagcatctggtatggcagtccatgtgactgcaagttgaggtttttggagctgaaggcaaaaaggacacaccgtttcatagtttttaagattgaggagcagcagaagcaggtcattgtggagaagcttggtgagcctgcccagggctatgaagatttcactgccagccttcctgctgacgagtgccgttatgctg

SEQ ID NO: 39479 - DNA, 287 bp, Glycine max
  Clone ID: 701121131H1
aaaatttctcatcgacgatgggcgaataccttacaacgcgcccttcgcgccaccatggcccggccgttctccaccggcgcattggccgaaattaagcgaggcgagatcggaatggttttggaattcctgaagaacaccttcgtaggagggttctaatttactctcctgctagaactgcatctcaacaaggatctggaaaggttggaagatggaagatcaacttcttatcaacccaaaagtgggaaaatccactgatgggctggacatccactggggacccctactct

SEQ ID NO: 39480 - DNA, 290 bp, Glycine max
  Clone ID: 701121132H1
gtttgctaccttctcccagaaatggttacgttcaggtttcaccagtaccaggtggtcgggagggctctcccaacggaagcagatcagcatccgaagatctaccgaatgaagctctgggccaccaacgaggttcgcgccaagtctaagttctggtattttttgaggaagctgaagaaggtgaagaagagcaatggtcaagttcttgctatcaacgagatttttgagaagaacccaaccaagattaagaactacgggatatggttgcggtatcagagtaggactggttacca

SEQ ID NO: 39481 - DNA, 222 bp, Glycine max
  unsure (1)..(222): unsure at all n locations; Clone ID: 701121133H1
aaacaagtctctatcagcacttggtgatgttatttctgcccttgcatccaaatcagcccacatacncttacaggatcntcaaagctcacccntntnntccagagctcgtaggaggtgttgtcnaactttantgtttgtccagntaagtccaagtgccgcagacttagcggagacactttgttcnctgnattttgcggcacgtgtacgaggnntggntagtgc

SEQ ID NO: 39482 - DNA, 283 bp, Glycine max
  unsure (1)..(283): unsure at all n locations; Clone ID: 701121134H1
tcctgccagtagtcatatgcttgtntcaaagattaagccatgcatgtgtaagtatgaactaattcagactgtgaaactggcgaatggctcattaaatcagttatagtttgtttgaggtatctactactcggataaccgtagtaattctagagctaatacgtgcaacaaaccccgacttctggaagggatgcatttattagataaaaggtcaacacaggctctgcntgttggctttgatgattcatgataactcgtcggatcgcacggcctttgtgccggcgac

SEQ ID NO: 39483 - DNA, 272 bp, Glycine max
  unsure (1)..(272): unsure at all n locations; Clone ID: 701121136H1
cttgtnttcttcgttgctacaattttngtagcatggcaatgccatgcgtacganatgttccctctccgaatgaacactggctatggtgcccgtactccggaggtgaaatgcgcaaantggaggcttgctgtggaagcacacaacatctttggctttgagaccattcctgaagagtgcgttgaagcaacaaaggaatacatccatggcgaacaatntagatcagactccanaacagttaaccaacaagcttacttttatgccagagacctcga

SEQ ID NO: 39484 - DNA, 282 bp, Glycine max
  unsure (1)..(282): unsure at all n locations; Clone ID: 701121138H1
ctgggctttggaagataggatgggtactgtgagcacagctctaacaganaaaacactatcagaatgcctaaagaaaagtttctaccagtccccaccctctgaaaatgcagctgagagttgcaatgaacataaggatgataccaantgcagcatttggccaggtatttttctctcgttttgaaccttccatcgcagtcagggtgtcattaagcaccatcatgantcaaagcttattgtccatgatggattgatgatctacctgctttctgcagcatttgattg

SEQ ID NO: 39485 - DNA, 275 bp, Glycine max
  unsure (1)..(275): unsure at all n locations; Clone ID: 701121139H1
catgcgtcatggttatgtcccttacagattgctntttatggtaaaagctttaaccattcagctagagatgcatgggagttatttcagtcaactggggttgaagcacttgtggcgtatgattgttctggtgctgttcttctaatgggcactgtttttggtgggctgattactggaacttgctctggtgtttgggcatgggttaaatggaaagacagagttattatgattggatacacaaccatgctgatggggatggtactggttggatggccatg

SEQ ID NO: 39486 - DNA, 279 bp, Glycine max
  unsure (1)..(279): unsure at all n locations; Clone ID: 701121140H1
gttaaagagacggcaacactttgctgtccgccttgaccgagcagagcttcgtcttggccctcgattttgccctaaagtactctcagtcacaacagacacnnnnnnnnnnnnnnnnnnnnnnaatggcaccgaagcagaccaaggctgagaagaagatcgcttacgatgcgaantgtgcgacctaatggaggagtacggccagatcctcgttgtgaactccgataacgtgggatcgaaccagctccagaacattcgcaagggtctccgtggcgactccgt

SEQ ID NO: 39487 - DNA, 282 bp, Glycine max
  unsure (1)..(282): unsure at all n locations; Clone ID: 701121141H1
aacggcgatcgcngggtctcgcngcctgancgccgattacctgtggccggatttgaagaagcggaagtntgacttggacgttgacttcgaggctgatttcagggattttaaagacgnatctgatatnnnnnnnnnnnnnnnnnnnnnnnnnntcaagccctttgctttcgccgcctcttctcntctgtctacggcagcgaaatctgtggcattccaaggtcgggctgagatatctggcaaatagaaagaggaagaatcagtataggggaatccgtcaacgcc

SEQ ID NO: 39488 - DNA, 282 bp, Glycine max
  unsure (1)..(282): unsure at all n locations; Clone ID: 701121143H1
ctgccagtagtcatatgcttgtntcaaagattaagccatgcatgtntaagtatgaactnnttcagactgtgaaactggcgaatggctcattnaatcagttntagtttgtttgatgtatctactactcggataaccgtagtaattctagagctaatacgtgcaacaaaccccgacttctggaagggatgcatttattagataaaaggtcaacacaggctctgcctgttgctttgatgattcatgataactcgtcggatcgcacggcctttgtgccggcgacgc

SEQ ID NO: 39489 - DNA, 283 bp, Glycine max
  Clone ID: 701121144H1
gctcaagcttgcctcttttgagctgctttatggaactttttgttgctgtcactgcttctcaaacacacttcaacacagcaacgtcttccgaagaaaatgagttgcccaagaagaagaagatgtatcaatcactgctaatgtggcatcccaaaagcactttcgacaaattcaacatatatgttaagggggtcttggattaaagttttggaggtagtaaaatgttctgataatgttgttagactttttaaaattttgggtagaaatttccgttagccataagttt

SEQ ID NO: 39490 - DNA, 283 bp, Glycine max
  unsure (1)..(283): unsure at all n locations; Clone ID: 701121145H1
ctccacccccctcgatcgnttcaccctcctcatcccctactgcttagacttcatcaaatgggatgttatatacgacgcggaatctccgaacaccgcccccgacgttatctttagcccgaagacgacgatttccacccctttcacatgtttccttcctcctcggaacccgctaataactgtttgtntgnttggaactacaaanaccccacgctatctcntaaccctaattnagnanttgatggatcantatgtgctttatcagaggaagncgtcggagaagttg

SEQ ID NO: 39491 - DNA, 217 bp, Glycine max
  unsure (1)..(217): unsure at all n locations; Clone ID: 701121146H1
tactcttccttgctncactcctcatattatctttttctgaggaaacactaatcatggaggggtctcacatggggttgttgctcttcttttgttcttccatgctttttgctgccttcgctgctgcctcctccagaaacttgcccataataccctttgatgaaggctacgcgcccttgtttggggacagcaacttggtcatccatagggatggcaaatc

SEQ ID NO: 39492 - DNA, 264 bp, Glycine max
  unsure (1)..(264): unsure at all n locations; Clone ID: 701121147H1
gaaaatttgccccaagatggttacaacaagagacttcttagacggggacttggacttggagtnntaggaaggaggctcttgattggatttggaagaaggcaaaagttggagtatgcaactgttagctgtagcatgtttgtcaattgctgccaaaatggaggagattaaagtgcctccttgtgtagatttacangtattgtagaatcttactacccaagattgtcaaatatacttttgggttggcatctacatttccctgatttt

SEQ ID NO: 39493 - DNA, 285 bp, Glycine max
  unsure (1)..(285): unsure at all n locations; Clone ID: 701121148H1
gagaatatgaagttgtttgttttctttgttgctgcagtagttttggtagcatgggccatgccatggngcaggctaccaaaggttccctctccgaatgaaaactggctatggtgagcgtcttcggaggtaaaatgcgcaagttttaggcttgctgtggaagcacacaacatccgagcaattnaaaccattcctgaagagtgcgttgaaccaacaaaggactacattaatggcgaacaatttagatcagnctctaaaacagttaaccaacaagctttcttttatgct

SEQ ID NO: 39494 - DNA, 284 bp, Glycine max
  unsure (1)..(284): unsure at all n locations; Clone ID: 701121149H1
agccatggttctcaaaaccgaactatgccgattcagcggtgccaagatctacccagggaaaggcatcagatttgttcgtggtgattctcaggttttcctgtttgctaactcgaatgtaagaggtatttccacaacaggttgaagccatcaaagctcnacctggantgcantgtacagaaagccaacacaagangggccntgctcaagaagctgtggaagaaaagaagactgctgccaaaaagccttactccaggtccattgtcggtgccatttggaagttatcc

SEQ ID NO: 39495 - DNA, 280 bp, Glycine max
  unsure (1)..(280): unsure at all n locations; Clone ID: 701121150H1
gctggattatgttcagtctgtggtgaagaaagttttgggactggttctgaccatattcgtgagaaagatggaatctgggcagttttggcctggctatctatacttgcatatagaataaagatnaacttgaagacaagcttgtcactgttgaagacatagttcgccagcattgggctacttatgggcgccattattatactcgatatgactatgaaaatgtggatgcaggtgcagnaaaggaactgatggcatatttggtcaagctgcagtcctcactttc

SEQ ID NO: 39496 - DNA, 280 bp, Glycine max
  unsure (1)..(280): unsure at all n locations; Clone ID: 701121151H1
gtccctccttcctctgccttatanttcttgtgacccttttngtcggtagcattgaaagtgcaccagcaaacgtgaagccaagccattatggctgcacccttcaataggagtgttttccttctggttttctatttggaataggctctgcagcttnccagatagaaggagcagcagctatagatggcagaggaccaagtatatgggncacctatactaaacagcaaccagggaagatttgggatcatagtgatggaagtctagcantgntttttntcaccgg

SEQ ID NO: 39497 - DNA, 283 bp, Glycine max
  unsure (1)..(283): unsure at all n locations; Clone ID: 701121152H1
aaaagttgttcgagatgggcacgtacgaagcaaactgctcgtaagtccacaggaggaaaggcacctaggaancagctcgcaaccaaggctgcacgtaagtntgcaccaactactggtggtgtgaaaaagccacatcgttatcgtcctggtaccgttgctcttcgtgagattagganataccagaagagtaccgagcttttgatcaggaagctccccttccagaggctggttcgtgaaattgctcaggacttcaagactgatctgcgtttccagagccatgctg

SEQ ID NO: 39498 - DNA, 281 bp, Glycine max
  unsure (1)..(281): unsure at all n locations; Clone ID: 701121153H1
acactacaccgatatttccaccaaacccgtttgcacntgttgtttgcgaataaatggcgactaagaggagcgtgggaacgttgaaggagggtgatttgaaggggaagagggtattcgtgagggtcgatctgaacgtgcctttggatgacaaccttaacatcaccgatgacactagagtccgtgctgctgttcccaccatcaagtacttgactggttatggtgctaaagtgatcctttctagccatttgggacgtccaaaaggtgtaacacctaaatacagt

SEQ ID NO: 39499 - DNA, 278 bp, Glycine max
  unsure (1)..(278): unsure at all n locations; Clone ID: 701121154H1
aggatgtnaagtttgtnttgtggacagaaacagtgnagntatggagantagcattccctatggcactgtctgcactgtttcagtttctcacantctcctcagcttccatctangctggccatatnggagacattgaactctcttctatctctgtttaccaaggtgtcatcagngccctctatntttacttgttgtnnggtatgtcatctgcattggttacactatgtggccaagcttatggagcagggcagnttcnntcagcatgtatttatgttcaa

SEQ ID NO: 39500 - DNA, 279 bp, Glycine max
  Clone ID: 701121155H1
gtgagttattcagaacccagggatttggcgaaagtgaagcgatgagcagtgataggaatattggggttgccttggacttttccaaaggaagcaaaatcgctctcaaatgggctatgacaatcttctccgcaacggtgacatactctacatcgtccacatcaagccttccggaggaagtgaattccgaaatcttctctggtccaccactggttcacctctgattccgttgtcggagtttcgtgagaaggaggtgatgcatcactatgaggtggatactga

SEQ ID NO: 39501 - DNA, 282 bp, Glycine max
  unsure (1)..(282): unsure at all n locations; Clone ID: 701121156H1
aagctcttccatgactgctatagccttcctgtttatccttctaatcacttatacaggcacaacagatgcacaatccggggtatgttatggaagacttggcaacaacttaccaaccctcaagaagttgtggccncctacaatcaagccaacattcgcaggatgnngaatctacggtccaagcccagaagtcctcgaagcactaagaggttccaacattgagcttttgctagacattccaaatgacaacctcagaaacctagcatctagccaagacaatgcaaa

SEQ ID NO: 39502 - DNA, 252 bp, Glycine max
  unsure (1)..(252): unsure at all n locations; Clone ID: 701121157H1
cttcccttctccaacatgncaaacgacagcgttctacngtcttttcttcttcactaccctcttcacatgccttctctctgctacttccangatgaccatattttcctaccgagtcaactccatgacgatgactcagtgagttgcactgcaaccgacccaagccttaactacaagccggtgatcggaatcctgacccaccccggcgacggtgcctctggccggctcagcaagccaccggggtttcttacatcg

SEQ ID NO: 39503 - DNA, 282 bp, Glycine max
  unsure (1)..(282): unsure at all n locations; Clone ID: 701121158H1
ggagcccgngggcnagttctatcgggtaaagccaatgattagaggcatcgggggcgcaacgccctcgacctattctcaaactttaaatnggtaggacggtgcggctgctctgttagccgcgccatggaatcgagagctccaagtgggccatttttggtaagcagaactggcgatgcgggatgaaccggaagctgggttacggtgcccaactggcgcgctaacctagaccccacaaagggtgttggtcgattaagacagcaggacggtggtcatggaagtcga

SEQ ID NO: 39504 - DNA, 282 bp, Glycine max
  unsure (1)..(282): unsure at all n locations; Clone ID: 701121159H1
ctcgaggnnatcttggaagggggtgtagcattcaacagggttcattccatgcactcatntgnnancncncagcagttgatcctaggttcantgatgttttcaacaaagctatgttaaccttactactatagtcatgaagagggttcttgagttttacgaagggtttaagaacattaataggcttgtggatgttggtggtggtcttgggatcantctcaatctnntcacttctaantntccacatgttcaaggtgttaattttgacttgccacacaacatagc

SEQ ID NO: 39505 - DNA, 281 bp, Glycine max
  unsure (1)..(281): unsure at all n locations; Clone ID: 701121160H1
ctaaaagagntctttttctgctctttgaagaaagaagggtctttgcttggttttggagatgtntctgctctcagatctcgtcancctnagcctcnccnatgcnnctgaganggtntcncgagtacatntggatcggtggatcaggnntggacctgaggagcagagcaaggactctcccaggaccagttagcgacccttcngagcttcccaagtggaactatggtggttccagcacaggtcaagctcctggtgaagacagtgaagtgattttntacccacna

SEQ ID NO: 39506 - DNA, 286 bp, Glycine max
  unsure (1)..(286): unsure at all n locations; Clone ID: 701121161H1
gggaagcanaatcagcgtgatggcgagaaactgggtggttcgatccttggngcttcgtcacgcaatgaagaatagggttctcacactctccttcaaccgaattcttncctcactcncatcaaanaccctctctcttagnnnnnnnnnnnnnnnnnnnnnnnnnntntcagctctccctcctcccctccttccaccactctcgctccntctcctccgcctcagctccttccgacgttgtccttgttaattccgaggaagagttcaacaatatccttaccaaagtccg

SEQ ID NO: 39507 - DNA, 286 bp, Glycine max
  unsure (1)..(286): unsure at all n locations; Clone ID: 701121162H1
gtgatttgggagtttggagcgactgaactaatcattaatttgcactcgctgtttcagcttcatcacccttcttttgcatcatttatatctcttgagaaatggcacaagaaacctttctattcacatctgaatctgtaaacgagggtcaccccgacangctgttcnancagatctctgatgcagtacttgatgcgtgccttgaacaggaccctgacagcaaggttgcctgtgagacatgcaccaagaccaacatggtcatggtcttcggagagatcacaaccaaggc

SEQ ID NO: 39508 - DNA, 286 bp, Glycine max
  unsure (1)..(286): unsure at all n locations; Clone ID: 701121163H1
aggacaccaaaccaacaccaccatcgatccaaatccaatccaatgggttcggttcccgcagaactgagcttggatttaagacccactttcatccccaaaaccatcaccgatttctccgccacctctccgacaacaacaacccccccgccaccctccacgatttcctcgcccgcctcgaagacgagctccgcaagatccacgccttcaaacgcgaactccccctctcnatgctcctcttaaacgacgcaatttcagttctgaaggcggaatcgcagaaatgcagggt

SEQ ID NO: 39509 - DNA, 288 bp, Glycine max
  Clone ID: 701121164H1
gaagccacttgagagaaaatggcggtgcctctgctctcaaagaagatcgtgaagaagagggtaaagaagttcaagagggcctcagagtgacaggaaaatttccgtcaagactaactggcgcagaccaaagggtatcgattctcgtgttaggagaaagttcaagggatgcactttgatgccaaacattggttatggttcagacaagaagacccgccactatctccctaatggtttcaagaaatttgttgttcacaatgtgaaggattggaactgctcatgatgcacaac

SEQ ID NO: 39510 - DNA, 279 bp, Glycine max
  unsure (1)..(279): unsure at all n locations; Clone ID: 701121166H1
gtccttgttttcttcgttgctacaattttggtagcatggcaatgccatgcgtacgatatgttccctctccgaatgaacactggctatggtgcccgtactccggaggtgaaatgcgcaagttggaggcttgctgtggaagcacacaacatctttgggctttgagaccattcctgaagagtgcgttgaagcaacaaaggaatacatccatggcgaacatatngatcagactccaaaacagttaaccaacaagttacttttatgccagagacctcgaagtcc

SEQ ID NO: 39511 - DNA, 285 bp, Glycine max
  unsure (1)..(285): unsure at all n locations; Clone ID: 701121167H1
cccaggttntcgattgggcccantcggcccggcccggtggctgctacttagatctccccacngacgtcttgctctngaagnntctccgcgtccgnagcagnganantcttgtcgnagcagganataaccgttcgattnccnatcctagacccgantcctcctcttttcanttcaaagnattgnncaagcggtttctcttctcnggnacgcggaggaggccgttgntangtgttcgganaaggagcggcgtatgcacgtgcggagcnngttttggnggagctggtg

SEQ ID NO: 39512 - DNA, 278 bp, Glycine max
  Clone ID: 701121168H1
aatgaaggtccttgttttcttcgttgctacaattttggtagcatggcaatgccatgcgtacgatatgttccctctccgaatgaacactggctatggtgcccgtactccggagtgaaatgcgcaagttggaggcttgctgtggaagcacacaacatctttggctttgagaccattcctgaagagtgcgttgaagcaacaaaggaatacatccatggcgaacaatatagatcagactccaaaacagttaaccaacaagcttacttttatgccagagacct

SEQ ID NO: 39513 - DNA, 274 bp, Glycine max
  unsure (1)..(274): unsure at all n locations; Clone ID: 701121170H1
tttctcttcctcctcactcaaacttcccntctctacgccgttcctnccaaatggatgcancaatggagttttggggtgttgaggttaaggttggtcagaccgtgacagttacccaatggatcctgtggattcatacatacacatatctcaggttgcgctcggagaggcgaaaaaggagaaacctaatgagtctgtggttttgtattgaaagttggtgaacagaagattgtcttgggaaccctttctagggatggcattcctcatctatcgttgg

SEQ ID NO: 39514 - DNA, 276 bp, Glycine max
  unsure (1)..(276): unsure at all n locations; Clone ID: 701121172H1
gttatcttgagaaacattattcccattgctatatattatggctagcatgaaggttacatgggtggttgtgatcatgtgcatggccgtggtgggtgcaccgatgatggcgcagccatgacatgcaatgatgnaacggtgaacatggcacagtgcctatcctacctgatgcagggaggaacaccttcaacactttgctgcagcggagtcaagaacattcttggctctgctgtcaccaccgttgacaaacaaactgtgtgcaatgtcncaaggcggatg

SEQ ID NO: 39515 - DNA, 110 bp, Glycine max
  unsure (1)..(110): unsure at all n locations; Clone ID: 701121173H1
agaaattgagctctttgagggccaatctcttctgtacatgcagctatatgggcacctaagacctatgtgtcttaagtgggctgttcaactaggtattccacacancatac

SEQ ID NO: 39516 - DNA, 285 bp, Glycine max
  unsure (1)..(285): unsure at all n locations; Clone ID: 701121174H1
gtttgtnnattctctcacctgaaaatgtnttgntgnggnggtaactgtggttgcggaagctccctgcntctgcggcancngctgcggangctgcaagatgtacccaganttgagctagcactgagtcaaccaccaccgagaccttggtcatggnagtggcacctgttaaggctcaatttgagggtgctgaaatgggtgtggcccgctgcanaacgatggctgcagatgtggaccaaactgctcctgcaacccctgcacttgcaagtgnaggtgttgggagagcaa

SEQ ID NO: 39517 - DNA, 281 bp, Glycine max
  unsure (1)..(281): unsure at all n locations; Clone ID: 701121175H1
caaagnaaagctcatccttgagttganaaatggcagcagcttcttccatgggntctctcatccccatccttggntggcaagtnccgtgaagctgggcncatcagccccagaagtggaagggtgagcatgaggaagaccgtcaccaagcaggtctcctcaggaagcccatggtacggcccagaccgagtcaanaacttgggcccattctctggcnagcccccgtcctacntaaccggtgagttcccaggcgatacggctgggacactgctgggctttncgca

SEQ ID NO: 39518 - DNA, 282 bp, Glycine max
  unsure (1)..(282): unsure at all n locations; Clone ID: 701121176H1
aaccaacctaccttttgcaatctcaattcaatggcgtcctctctcattgcgaacgctttcctctcctcttcnntcctctccaggtccctccttcgccccgccgcttccgcttccaccgctctttcaacaccaacgccatgcgccagtatgacaaccgcgccgacgaccacagcaccgacatcgatcgtcactccgaacgctctttccctagcactgcgcgccgcgacgatatcttctcagatgtgttggatccattttttccgactcggagtttgagccagt

SEQ ID NO: 39519 - DNA, 281 bp, Glycine max
  unsure (1)..(281): unsure at all n locations; Clone ID: 701121177H1
atcgnacatggctaagtatcattcaagtgggaaaagctcttccatgantgctatagccttcctgtttntcnttctaatcacttatacaggnacaacagatgcacaatccgggtatgttatggaagacttggcaacaacttaccaacccctcaagaagttgtggccctctacaatcaagccaacattcgcaggatgcgantctacggtccaagcccagaagtcctcgaagcactaagaggttccaacattgagcttttgctagacattccaaatgacaacct

SEQ ID NO: 39520 - DNA, 282 bp, Glycine max
  Clone ID: 701121178H1
gttaggttctgcacgctctgcttccagcgagtgttctttcttcgtttcaacaccttaatttgcacacgctgcttcttcagcttgagaaatggcacaagaaacctttctattcaatctgaatctgtaaacgagggtcaccccgacaagctgtgcgaccagatctctgatgcagtgctcgatgcgtgccttgaacaggaccctgacagcaaggttgcctgtgagacatgcaccaagaccaacatggtcatggtctttggagagatcacaaccaaggccaacgta

SEQ ID NO: 39521 - DNA, 291 bp, Glycine max
  unsure (1)..(291): unsure at all n locations; Clone ID: 701121179H1
gggctactacttcactttcatcctttgctccagaaaattaactagctaggatggtgagtgttgaagagatttcgtaaaggngcaacgtgcagaaggccctgccactgtcatgggctattggcaccgccactcctcccaactgcgtgganacagagtacctatcctgnctattatttncgnatcaccaacagcgngcacatgaccgagctcaaagaaaaattcaaacgcatgtgtgataagtcgatgattaagnaagcgatacatgtncttnaacgagaggtcctgaaggag

SEQ ID NO: 39522 - DNA, 285 bp, Glycine max
  unsure (1)..(285): unsure at all n locations; Clone ID: 701121180H1
gctgtctttaaggtcaacaacagattataacacatacctcacaatggtttttccaaaaccctcttctgatntctgacctctttctttattccaactttgcttctcgctatgccaggactctcttcccaggttcagcatgccagaaaactccatgccaaaggaggctgcgtaccagaacatacacgatgagttgcagcttgatgcaattccaaagctgaacttggcttcctttgtgaccacttccatggaagaagagtgcaacaagctcatcatggaatccatcaa

SEQ ID NO: 39523 - DNA, 287 bp, Glycine max
  unsure (1)..(287): unsure at all n locations; Clone ID: 701121181H1
caanaatgaacttgaatgatctcatgaaggntactgataacttcggnnaanngcaatattattgggactggaagatcaggaactgtttacaaagctgtccttcatgatnngcaatcactcatggttaagagatacaggaatctcaacattcngaggaaaggtttntgtctgggatgaattntactaggtntgtcnaaacatccntnacttggttccgcttttnaggtttttgcgtggcnaaaaaaggaggaggtttttggccnntaaaaatatgncnaaatggttcc

SEQ ID NO: 39524 - DNA, 216 bp, Glycine max
  Clone ID: 701121183H1
cgggtaccaagctacaaaggatgatcttactgtttatgcagctttgccaactgctccatcagatgaatatggaaatgtttccaggtggtacaagcacattgatgctttgttggaatctctggtgttactggcgagggatctggtgttattgttgagggatctctagttgcagagcctgttgcaactccccctgctgcagacacaaaggctgctgtt

SEQ ID NO: 39525 - DNA, 275 bp, Glycine max
  unsure (1)..(275): unsure at all n locations; Clone ID: 701121184H1
ctagagggttgatcagccaaggagatgttgttctagtggtctcagatgttgctccaacacgtgccactcctatggctttccagtctattcaggtgaagactattatctaacacgcaaggctgcaaaaatattgaaggacacgtgtctgtgtattttataggcttgggataggatagtattgtattattggtttcttgtctttttttttnattggtttcttgtcctatgtaaaacaacaaagtttataaattccaaatggtaganctctagcaagt

SEQ ID NO: 39526 - DNA, 282 bp, Glycine max
  unsure (1)..(282): unsure at all n locations; Clone ID: 701121185H1
gnggccagtccttccacttctccccctccatcacccggtaagtcccctagcgaggncacgcgcntgccacgaggagatggccgtcgntctcatcgaggccaagcccggcaacaaaatcctgggacgtgggctggcggcgtgggcnggncccatgcgggccatcgcggcccactcccgcgcgaacgtggtgggcatcaccatcaacgagtaccaggtcaatcgagcaaggntgcacaacaagaaggtgggttggactctctctgcgaggtcgtgtgtgggaat

SEQ ID NO: 39527 - DNA, 278 bp, Glycine max
  unsure (1)..(278): unsure at all n locations; Clone ID: 701121186H1
attcatctgttacttgtgttcctgtcatcatccacttncctttcgaccgtgttcngctccgaggaggaacaattctatgccanagaaattctcggagcagcacagaagganaggaatggttagtttcagtaaggagaaagattcacgancacccagaacttgntttccaagaatacgaaaccagttctcttatacgcagtgaactcgacaagcttggnatatcttacacatacccagttgcnaaaaccggcatagtggctcatcttgggntctggttc

SEQ ID NO: 39528 - DNA, 275 bp, Glycine max
  unsure (1)..(275): unsure at all n locations; Clone ID: 701121187H1
atttctctatgggagaagcancagcattgcttgttgatgacgtgcaggatggggctctgaatggccttgaattgaaaaacgtaacttgcaaaacaactgctacagttggcataaggcgtatgtcattggtggagctgatgatggaactttgtccattgaagttcaaatttttgaccgtagtcttggagaatgggttcgtcccactgtgcggggcaccaaacctgtgtcgtgcaatggcctctcagctgtgcctttggaagaccgaatactgattc

SEQ ID NO: 39529 - DNA, 279 bp, Glycine max
  unsure (1)..(279): unsure at all n locations; Clone ID: 701121188H1
atacttgtcatatggcccttaagatgaacacttttcttctatttcttctcttgattctcattcccttatcttcatgtttggntgaaggcttcagggcaaacaagcatccaactcatggcttactctataaggatggtatcaaggtgaactcgaggaagcttcttgtccatgattttgtgttggattatgatgaggcaggacccaacccaaggcacacaaagaaacctggcaagggcccttgaatagctttacacctaataatgaaataantaacatact

SEQ ID NO: 39530 - DNA, 280 bp, Glycine max
  Clone ID: 701121190H1
atgactacccaataagggtattcaagaacagcaatgacttgggagtgaagttcccatttaaccaaccaatgaagatatacaacagtttgtggaatgctgatgactgggccacaaggggtggtttggagaaaacagattggtccaaagcccccttcgtagcctcctacaagggcttccacattgatggttgtgaggcctcagtgaatgccaagttctgtgacacacaaggcaagaggtggtgggatcaaccagagttccgtgaccttgatgctgctcagtg

SEQ ID NO: 39531 - DNA, 279 bp, Glycine max
  unsure (1)..(279): unsure at all n locations; Clone ID: 701121191H1
agcgtcggttccttttggttctcttggttctctatgtnacagtggagttctacgtagaagaagatggtagtggtgggtttgtgagaacaagaggagtgcagnttatgntgatgggagcncctactatgctaatggctttaatgcctattggctaatgtatcttgcntctgatccttntcagagaaacaaagtctcatcagtgtttcaacaggcttcaaatcatggcctcaacattgccagaacttgggcnttcagtgatggtggatatcaaccactaca

SEQ ID NO: 39532 - DNA, 240 bp, Glycine max
  unsure (1)..(240): unsure at all n locations; Clone ID: 701121192H1
tcaactcgcttttcttccaaccaggacatggcagcagatgaagatatgtcagctttgaagtctaagctgagccaatcaaatgaaacttggaagaaggagatggaaagaagccaatctcaagtggatgtattgcaggcaaggataatggaggtaaaggcacaaatacaaggctcagaggaagatgcgaaaaaggagttagaggttctatggcgnagagtcaagactacttctaccctgttg

SEQ ID NO: 39533 - DNA, 282 bp, Glycine max
  unsure (1)..(282): unsure at all n locations; Clone ID: 701121193H1
ttttcttcccttctttcnagaacaacaccacaanacaaacagagnaaaaaaagctccaccaatgggcgggttacagagccgacgacgactacgactacctcttcaaggtggtctgatcggcgattccggcgtgggcaagtccaacctcctctctcgcttcaccaagaacgagttcaacttggagtccaagtccaccattggcgtcgagttcgccacccgcaccttgaacgtcgattccaaagtcatcaaggcccagatctgggacaccgcaggccaagaaag

SEQ ID NO: 39534 - DNA, 276 bp, Glycine max
  unsure (1)..(276): unsure at all n locations; Clone ID: 701121194H1
tcgagcngtgcgcaccggcctctatagcgagcttgaaccatcttcagcttcagctactttgaactaacaaagcgccccacgttctgagacaaacccagtatgctatctgccagggggatcagaaagtttcgatttttcattgattgtgtataactgcacaaagaaggtagtgaagcaatgcgtagagcgatcgcgtttctcgttcacccacgattcctcctctcttccttgttctctcaatttctcatttcacatttctggttctacaaccaccaa

SEQ ID NO: 39535 - DNA, 286 bp, Glycine max
  Clone ID: 701121196H1
ttgtcaaccctttgagagttagaatggctgctgctattgaaatccccacaatagtgtttccaaactcctctggcccaacagaggatgccagtggttggaatgggatctgcccctgacttcacatgcaagaaagacacaaaggaggctatcattgaggccgtgaaacagggttacagacacttcgacactgctgctgcttatggctctgaacaggctctcggtgaagctctcaaggaagctatccatcttggcctcgtctcccgccaagacctctttgtcacttcca

SEQ ID NO: 39536 - DNA, 99 bp, Glycine max
  unsure (1)..(99): unsure at all n locations; Clone ID: 701121201H1
cntcatntcnttgctgagntctgcaagctggctatggactgacgaaccctnacgacagtagcggaantggntgatgaccttnccacacancctacnnat

SEQ ID NO: 39537 - DNA, 298 bp, Glycine max
  unsure (1)..(298): unsure at all n locations; Clone ID: 701121203H1
gctccctgctgctttaaaaaggttgcagtttgataagcagctttcaatggaaaatataaggaaacttnttacagaagctgatgggtatcagcctcatctaatagctccagaacaaggntaccgncgtctanttgnatcttctctaatanctattaggggccnncctgaggcagctgttgatgcngttcactccctgttaaaggacttggttcacaaagctatgagtgagactttggacttgaagcagtatcctggtctccgggttgaggttggggctgcagctgttgattcnctcgga

SEQ ID NO: 39538 - DNA, 293 bp, Glycine max
  unsure (1)..(293): unsure at all n locations; Clone ID: 701121205H1
gcgggtacggtttcganttgtttcttcttcgtgtttnttctttctctccttcttccttttcagatctccgctgaggaatcctcggagaaggagttcgtactcacattggatcantctaantttcacgacactgtcagcaagcacgatttcatcgtcgtcgagttctacgccccatggtgtggtcactgtaagaagcttgctccggagtatgagaaagctgcttctatcttgagtagtcatgntcctcctattgttttggctaaagtagatgccaatgaggagaagaacaaaga

SEQ ID NO: 39539 - DNA, 117 bp, Glycine max
  unsure (1)..(117): unsure at all n locations; Clone ID: 701121206H1
gctgtgaacaggaagctaacagcantgagtnnnttnctgntggaggaaancgacagnttgcagaagcaggtgtgcacacntcgtctntganaacagctttttccacacancntacga

SEQ ID NO: 39540 - DNA, 55 bp, Glycine max
  unsure (1)..(55): unsure at all n locations; Clone ID: 701121209H1
tcgancgctacganccgctccgagccgatttggtgaaatcnctacagnntntcaa

SEQ ID NO: 39541 - DNA, 234 bp, Glycine max
  unsure (1)..(234): unsure at all n locations; Clone ID: 701121211H1
ataatgcactagtagtaactcattcatcattccgtttccagttcaagaacttgtngtactcttttatcctacncactcctcccttcttatcctgcncatctttcaccnanatcctccccntcncatcttcactttccaccatttcantngnccngaatcatgagttgtttcanctgtnncnaanaggatganctccacaatgntgctgaaatttgangaccatacgttgtanat

SEQ ID NO: 39542 - DNA, 168 bp, Glycine max
  unsure (1)..(168): unsure at all n locations; Clone ID: 701121212H1
agaggcttcagttcagactcgggaccctgcccttcttccaagatnaagtgtttttgttttcattntnnnantaaattanaaatntcttttaaaaaanttgcagtggcagcacacacatttttgtgtttcnaaantggaacctaatgacaaccaactcacctctttctt

SEQ ID NO: 39543 - DNA, 282 bp, Glycine max
  unsure (1)..(282): unsure at all n locations; Clone ID: 701121213H1
aaagaaaacccagaaaaactctgaagaagagttcgttgctttctgcttcactgcgaagatgaacggaggcccatctggtttcacaaatgctcccgtcacaagggctttcatcatcacttcggcgcttttcacaatcttctttgggatccaaggccgtttcagcactctggggttgtcgtatcaggatatttttggaaagcttcgcctttggangttgatcattccatattttccttctngtcaacacnngnttgatgtttggattgtnncctnnaaattnct

SEQ ID NO: 39544 - DNA, 275 bp, Glycine max
  unsure (1)..(275): unsure at all n locations; Clone ID: 701121214H1
cttcgaacaaggagccccgaaacccaaacccnaatctgattcgcttacgattatggcgtctganancgcttcnncgatcgagttccgcggccgattcgtacnttgggagcttgataagcttgacctctnngagtgagatcagatacgaaggtattctctacaacntcaacacngaagagtccagtnttggcctcagaaacgtgcggtcttttggaacagaaggaaggaaaaaggatggcccacaaatccctcccanggacaaggttatggtttnt

SEQ ID NO: 39545 - DNA, 171 bp, Glycine max
  unsure (1)..(171): unsure at all n locations; Clone ID: 701121215H1
ttnatgaacgaaggggtcaagtctgcantttgaaggattngtcttcgcaccgcagtggatgttantntgaccgtgttggataagttnacggntttcaaatgtactgacccgttctttgctgtatatnaggcatnaattcttgacactaggantctnaagcanattttcgtc

SEQ ID NO: 39546 - DNA, 224 bp, Glycine max
  unsure (1)..(224): unsure at all n locations; Clone ID: 701121216H1
ctggcgagttcccaggtgactacggctgggacactgctgggctttcggccgacccagaaaccttcgccagaaaccgtgagctcgaagtgatcnactccaggtgggccntgctcggggccttgggctgcgtcttccccgaactattgtcccgcaacggggtcaagtttggagaagctgtgtggttcaaggccgggtcccagatcttnagngagggtgggctggat

SEQ ID NO: 39547 - DNA, 293 bp, Glycine max
  unsure (1)..(293): unsure at all n locations; Clone ID: 701121217H1
caaaatgtaaacttgtgaaaatgtgtggtgtttctgtttgtnggtctctcggaatgtgcatgtacacgacggaaagcgtggtggcgagtctcgaaaatggcgtgtttaagaatggggacccattgagttcagtgagtcccattctaaatcaatgggtggaaanaacgcagagaattcaccaaacttcagtcganatctcgcttaccgctcantcaatctngcngnttnaaacangcctcnanngttgaatgnntnagcatgaaagganctatgattgtcncngggancnttnc

SEQ ID NO: 39548 - DNA, 296 bp, Glycine max
  unsure (1)..(296): unsure at all n locations; Clone ID: 701121218H1
gttcccgaaacagctgaaaccgagtccgaggttgtttcaaaaccaagcggtgacgacaacgttcctgaatccggttctttcaaggaggaaagcaccattgtttccgacctacctgaaaccgagaaaaaggctctgcaagaactcaaacaactcnttcaagaagcgctcaacaaccacgagttntccgaggtacctacaactaaccctcccaaagntgaaaaacccgaacacaaggaagaacagaaacccgtggaggaagaaaagaaggaacatgctgctgactggcagaagagaca

SEQ ID NO: 39549 - DNA, 291 bp, Glycine max
  unsure (1)..(291): unsure at all n locations; Clone ID: 701121219H1
gtttatcgtgaggagantatgaagttgtttgttttctttgttgctgcagtagttttggtagcatggccatgccatggcgcaggctaccaaaggttccctctccgaatgaaaactggctatggtgagcgttcttcggaggtaaaatgcgcaagttttaggcttgctgtggaagcacacaacatccgagcncntaaaaccattcctgaagagtgcgttgaaccaacaaaggactacattaatggcgaacatttagatcagactctaaaacattnaccaacaagctttctttta

SEQ ID NO: 39550 - DNA, 291 bp, Glycine max
  Clone ID: 701121221H1
gtatggggtaacgtccgtttgtggaaggcggagagacatggaagacgccgtttcggtccgtccatcgttttgccaggaaaatttatctcaagatgataagaaagagtttcatttcttcgctgtcttcgacggccacggatgctcacatgtggcgactatgtgtaaggagaggttacacgaaatagtgaaggaagagattcacaaagcgaaggagaatttggaatgggaatcaacgatgaagaagtgtttcgcgcgcatggacgaagaggttctcaggtggagccagaacaa

SEQ ID NO: 39551 - DNA, 291 bp, Glycine max
  unsure (1)..(291): unsure at all n locations; Clone ID: 701121222H1
aacccccttgttgagagctattcagcaaccaaaggccttagctacaactaaagctaggagagtanttccattgctgttgctgttnttagttcnttttcacaaaatggaagananccaccaagaggaaacacactagtctgntccntgaactantccaaggaaaggaactaacaaagcagcttagtnaccacctggtttcatcttctccantgtcccntcaaaccatganttgtttgttgagnaaatncttttgtcttntgagaaagcactcaccatgctgaactggggctc

SEQ ID NO: 39552 - DNA, 234 bp, Glycine max
  unsure (1)..(234): unsure at all n locations; Clone ID: 701121223H1
gagactttgttgatcggggttacaatagtcttgaagtattcaccatccttttacttctaaaagctagatnacccagctnatnttacccttctacgtggaaaccatgaaagtagacaactaacgcaggtctatggattttntgntgaatgccagaggaagtntgggaatgctaatgcttggcgatnttnnacngntgtttttgactatcttactcttctgcaattntngatggnc

SEQ ID NO: 39553 - DNA, 237 bp, Glycine max
  unsure (1)..(237): unsure at all n locations; Clone ID: 701121224H1
ccaagacgagcttcaccttgcgccgaagggccacagatggttgaaaccgntntggatgccgaaactgttgcaaatgtggttccaccaaaggagactccncnacagtgttcccntctnttntcnttcctcacactcacaccctnctcttantgagaggnttntttcntccatgaccagaagntctgttgctgcacacccgtggcacgaccttgagatagggcctggtgctccaacgat

SEQ ID NO: 39554 - DNA, 283 bp, Glycine max
  unsure (1)..(283): unsure at all n locations; Clone ID: 701121225H1
gggtgacntcaagtttactagatagaagagaagantcttaaaattccanttccatatantnnaaacttcagcgtccttantnaantaggcantttggaaaacacttgaaaatggaaggacaaactaaaaacggcccagtacntccacaatcntaacaaacatgnntgcctaaantctcagtaccaaagagatnttngcaacaaacaccttctcccttcaaaaagntatggaggagaattcnttctnattngcggtanntnttttgccnggcccncnntggggg

SEQ ID NO: 39555 - DNA, 283 bp, Glycine max
  unsure (1)..(283): unsure at all n locations; Clone ID: 701121226H1
aatctctggagatncacgtcgtgctttggagatatgcagacgtgcagccgaaatagcagattatcgtgttaagaagctantttctaatcctgattgtgttactgcaggaaancggacttgttggaatggtagatgttgaggcagccattcaagaaatgttccaagcacctcntattcnnntgatgaaaagctgttccagagttggcaaaattttcctgaccgctatggtgcacgagctttntaattcaggaatgggggaaaccacttttgaaaagttggcaat

SEQ ID NO: 39556 - DNA, 281 bp, Glycine max
  unsure (1)..(281): unsure at all n locations; Clone ID: 701121227H1
ttgaaatccccacaatagtgtttccaaactcctctgcccaacagaggatgccagtggttggantgggatctgcccctgacttcacatgcaagaaagacacaaaggaggctatcnttgaggccgtgaaacagggttacagacacttcgacactgctgctgcttatggctctgaacaggctctcggtgaagctctcaaggaagctatccatcttggcctcgtctcccgccaagacctctttgtcnattcnnagctttgggtccccgaaaatcncccacntttt

SEQ ID NO: 39557 - DNA, 189 bp, Glycine max
  unsure (1)..(189): unsure at all n locations; Clone ID: 701121228H1
aaaaancccgcaagtcnctccttcgccacgcacgacgtcttcatcgtcnnaggcgntgtcaaacgacgcgaaacttcttggcgaantcttcgntgtggttgctttcactcacgtgatgcacctcgcggcgcaggctggggttcgctacgccntggagantccccactcgtacgtananagcaanatcnc

SEQ ID NO: 39558 - DNA, 282 bp, Glycine max
  unsure (1)..(282): unsure at all n locations; Clone ID: 701121229H1
gttacaggcacaattttcacaagcgaggcctgttgcaataacccctaatgtttcacctcgaatgccactataccctctaggggctcctgggataggacaacaattgctgtatgggcaagcagctccaagcatgatacctcaagctgcatttggttaccagcagcattttgttcctggaatgaggccaggtggtgctccaaacttctatgttccactggttcagcagggtcaacaggggcagcgtccaggaggacaacgaggagcaggtcctatgcaacagnt

SEQ ID NO: 39559 - DNA, 282 bp, Glycine max
  unsure (1)..(282): unsure at all n locations; Clone ID: 701121230H1
caaacaacccaccanttntaagttgccgtttcccttctcacttgctcgcggaattggaggaacccttcgttcgtgtcttgcggcattgaaccctgaacacatgactcagaagcaaagagacagagtcccagattccatggaaacccagtacnggnagagtganaaagacgagtcttcttctgtttatagttcctcagangatgangaggnggaagagntgggagaaggagctggntnatgtngctttgggggtttgcagaaatccnnccnnatgggaaattt

SEQ ID NO: 39560 - DNA, 162 bp, Glycine max
  unsure (1)..(162): unsure at all n locations; Clone ID: 701121231H1
caccgtttcacntntcttaaactgcacaancctggaantcctctacntntcccgcaacgacttntccggcgagnttccgccggagntntcctccctccgcntcntcctcngcctagacatntccgacaacancntccgangtccgatcgcccagagattttg

SEQ ID NO: 39561 - DNA, 246 bp, Glycine max
  unsure (1)..(246): unsure at all n locations; Clone ID: 701121233H1
ggcagactctgtcttccaaagtgaaaaaaaggtaaaaacgattatgttctactagtcgcctgtttgnatcactgttttacttantgttttngcntntnaccangacnanttaaaaccatatgtgcatccaatctactaaaataaagccattggttactcnattnagttnntcntngtgcacctagatgcttgacatgcntatgacntgttaattnccngttactntntagtnttnctgtattngta

SEQ ID NO: 39562 - DNA, 294 bp, Glycine max
  unsure (1)..(294): unsure at all n locations; Clone ID: 701121234H1
gcgggtcgtcgcgtgccggtcgggggacggattgggaacgggcccttcggggccaancccttttcccgaggttacggatccattttgccgacttcccttgcctacattgttccntcgaccagaggctgttcaccttggagacctgatgcggttatgagtacgaccgggcgtgggaggcactcggtcctccggattttcaagggccgccgggggcgcaccngacaccacgcgacgtgcggtnntcttccagccgctggacnctacttccggctgagngtttcnagggtgggcagt

SEQ ID NO: 39563 - DNA, 285 bp, Glycine max
  Clone ID: 701121236H1
gccagaaagggattgatgaaaattgggctgctgcattagaacataatcctgaagcttttgctagagtggtcatgttgtatgttgatatggaggttaatggtgtcccattgaaggcatttgtggatagtggagctcagtctaccattatatcaaaaagctgtgctgagcgtctggattgttgagactttagatcagcgttacagaggaattgctcatggagttggccaatcagaaatattgggtcgtatacatgtagctccaatcaagatgggagtatattttacc

SEQ ID NO: 39564 - DNA, 139 bp, Glycine max
  unsure (1)..(139): unsure at all n locations; Clone ID: 701121237H1
ctgtaaancnncacagcatggntcngttggattggcngattgatgnagataccgnttgangaagtaaagatgctgagcgatcagaggnaggnncagttctgtatgaacttctgtctggttgtctatcaaatttaggtga

SEQ ID NO: 39565 - DNA, 189 bp, Glycine max
  unsure (1)..(189): unsure at all n locations; Clone ID: 701121238H1
agatcgtgaagaaaaacaactcctttttggtcaagcagttcggaaggnngacccagagcgtcganttcagcagagagagcaacaatctctacaacctcaattcgtncaagtactctggtttggcaaacaagaaaactgttacggtacagcctgagggtaaagatcaggctgtgttgttggctacaacaa

SEQ ID NO: 39566 - DNA, 84 bp, Glycine max
  unsure (1)..(84): unsure at all n locations; Clone ID: 701121240H1
cgtttggttggtttgtaaccccgctacttgggttatgtttgnttgtntattatcctagagaantaaannttttaaattatcagt

SEQ ID NO: 39567 - DNA, 226 bp, Glycine max
  unsure (1)..(226): unsure at all n locations; Clone ID: 701121241H1
gggccgaagccccnnnntgctggtcancaaacggacggcnggcgcacncgtcgctncctagcccggnttntgnnttagaggcgttcagtcntaatccaacgcacggtagcttcgcgccantggcttttcaaccaagcgcgatgaccaattgtgcgantcaacggttcctntcgtactaggttgaattactnttgcgacnctgtcatcatngggtaaaactanctnt

SEQ ID NO: 39568 - DNA, 276 bp, Glycine max
  unsure (1)..(276): unsure at all n locations; Clone ID: 701121244H1
gtagaaggatgggtgcgattgggaaatggttacatcagaagcagtacggcaatacgaacgtctccgttaagaagaaagaccggncgcncgtggaaaacgcgctgtacattctgcgctgtccattgcggggttagcctctgcggtggctgctgtggcggcaacagaggaccctcgcggtggctctcgttctaaattggacgttgctctcgcttcggccacgcaactnttggcctcttattgcgttaaaatgggcggnggtgnctgncgnagnncgga

SEQ ID NO: 39569 - DNA, 275 bp, Glycine max
  unsure (1)..(275): unsure at all n locations; Clone ID: 701121245H1
cacactcnttcggtgctccgaatctcagattctagggttagggttcccaatttntccaccgatcagaaaatgagttcaactggtggttntaccaagggcggaaggggcaagcccaaagcctccaaatccgtttcaagatcgnagaaagctggtctccaattccccgttggaanaatcgtcgattccttaaggctggggaaatncgcngagctgttgtgctggtgctccatatagctctcggcggtgttngaatntgtggtgntgaggttttggat

SEQ ID NO: 39570 - DNA, 193 bp, Glycine max
  unsure (1)..(193): unsure at all n locations; Clone ID: 701121247H1
gggtacgcttcagtcttggagaagagcctacggtgccatcaaggataccaccaaagtgggtcttgcccatgtncaatagcgnttacgcggatttggacgttgccatagtcaaagccacgaaccacgtcgagtgtccccccaaagagaggcacctcagaaagattctgtttgccacgtctgctgtgagactagg

SEQ ID NO: 39571 - DNA, 181 bp, Glycine max
  unsure (1)..(181): unsure at all n locations; Clone ID: 701121249H1
gtaatctcgtacgacaacncccacgccgccacgttcgngcanananngaacctgntgtcnatgtacnagcagtggctagtaaagcacggcaaggtgtacaacgcgctcggagataaggngaagaggttcnagatcttcnaggacacctgcnnttctcgacgaccacaactcnnaagaggac

SEQ ID NO: 39572 - DNA, 285 bp, Glycine max
  unsure (1)..(285): unsure at all n locations; Clone ID: 701121251H1
ggactatccaaaaatacgagaaagaggctaaggacaaaagtcgagaaagctggtatatggctatatantggacacaaatgaggaagagagggtaaagggaaaaacagttgaagttggaagagcacattttgagactgaaactacgaggtttactattttggatgcacctggtcacaaaagttatgttcccaacatgattagtggtgcatctcaagctgatattggggtgttggttatttctgctcggaagggagatttgaaactggatacgagagagtggacnaa

SEQ ID NO: 39573 - DNA, 288 bp, Glycine max
  unsure (1)..(288): unsure at all n locations; Clone ID: 701121253H1
cacactcattcggtgctccgaatctcagattctagggttagggttcccaatttctccaccgatacagaaaatgagttcaactggtggttctaccaagggcggaangggcaagcccaaancctccaaatccntttcaaacatccncagaaagctggtctccaattccccgttggaagaatcgctcgattccttaaggctgggaaatacgccgancgttttggtgctggtgcncctntnnacctctctgnnatgctngaatatctcgtgctgagnttttggaatgggtgg

SEQ ID NO: 39574 - DNA, 299 bp, Glycine max
  unsure (1)..(299): unsure at all n locations; Clone ID: 701121254H1
gtttntcgtgaggagaatatgaagttgtttgtnttctttgttgctgcagtagttttggtagcatggccatgccatggcgcaggctaccaaaggttccctctccgaatgaaaactggctatggtgagcgttcttcggaggtaaaatgcgcaagttttagggcttgctgtggaagcacacaanatcngatntcttnaanaaccattccctgaanaattgccttggaaaccancaagagggctgccattaattggncgnannatttgagatcggnctctaaaaccntttnnnngnnaagttt

SEQ ID NO: 39575 - DNA, 218 bp, Glycine max
  unsure (1)..(218): unsure at all n locations; Clone ID: 701121256H1
gtttntcgtgaggagnntatgaagttgtttgttttctttgttgctgcagtagttttggtagcatggccatgccatggcgcaggctaccaaaggttccctctccgantgnnnactngntntnncgagcgttcttcggnggtaaantgcgcnngttttaggnttgctgtggaagcncacaacatccgagcnnntaaaaccnttcctgaagagtgcgttga

SEQ ID NO: 39576 - DNA, 277 bp, Glycine max
  unsure (1)..(277): unsure at all n locations; Clone ID: 701121257H1
cgancngccgccaatgatgntgntctgaggaaccgtgtttgtctcntgtctcatctcatccatgaagagaaggagaagaagggatccaaaatcagaagaaagttacgatttttcgagatgggtctgtccaaggagantctgaaaggtctcatactagctttggtgtcaagtgggttcattggggcaagttttntcattaagaagcaaggcctagaagagctgcagcagtttctggtgtcagggctggtgttggtggtatattntctcttggngccat

SEQ ID NO: 39577 - DNA, 277 bp, Glycine max
  unsure (1)..(277): unsure at all n locations; Clone ID: 701121258H1
atgaaantgaaggtccttgttttcttcgtcgctacaattttggtagcatggcaatgccatgcgtaacgatatgttccctctccgaatgaacactggctatggtgcccgtactccggaggtgaaatgcgcaagttggaggcttgctgtggaagcacacaacatctttggctttgagaccattcctgaagagtgcgttgaagcaacaaaggnatacatccatggcgaacatntagntcagatccaaaacagttanccaacaagcttgcttttatgccng

SEQ ID NO: 39578 - DNA, 211 bp, Glycine max
  unsure (1)..(211): unsure at all n locations; Clone ID: 701121259H1
agggtttcaaaagatggagaacatgcagagcttctggcaattgggcgatgaactccgtggacactcaaaagcatcggaggatcacaaatggttaatggttgcttcgaaattggcggaacagacaagnttgaagggggagcgtgtgaacaacctgatcttcaaagggccccattgaaacaaggtcaagggataantttgggttccaggaaga

SEQ ID NO: 39579 - DNA, 207 bp, Glycine max
  unsure (1)..(207): unsure at all n locations; Clone ID: 701121261H1
tntaggtctggtctccaancacgtttaggtttaagcttgagcgatttcgggcctttatnantccannttgctcaccagnnggagntganttctnctcagattagaaccaacccagaagtcgacantcagtaccttacggagttgctggcagnncatcangagttttgtcccttcatggaagcccttnccntattnagtcgtctcttg

SEQ ID NO: 39580 - DNA, 202 bp, Glycine max
  unsure (1)..(202): unsure at all n locations; Clone ID: 701121262H1
cttntggaactattgagatagattgggactctcacccagtgactctgnaattcaaagtcanggacaaggatagtgtcacagntacaggggttgatgtttcnttaacggnnttacaaccatcaaattcagagattttngacagggtaaaagcagagcntnataattcnaagcattgcaccnttgaagttntcngccatggatt

SEQ ID NO: 39581 - DNA, 203 bp, Glycine max
  unsure (1)..(203): unsure at all n locations; Clone ID: 701121263H1
aaaantggaagctactagacntgtgctcagcgagtatggtaacatgtcaagtgcntgtgtgctnttncatcttggatcaantgaggaataantcaatagaaaatggacttggcacaaccggtgaaggccttgactggggtgtgctatttggtttcggccctggactcaccgttgagactgttgngctccgnagtgtcnctgtc

SEQ ID NO: 39582 - DNA, 279 bp, Glycine max
  unsure (1)..(279): unsure at all n locations; Clone ID: 701121264H1
gcagacttcacctgggaagttgtgaagccactcaagtcagagaagcctcaagcttaagagtgttgttaagttaatcactacccttcagtggntgtcttgctgggtgtggatgaataatttgcgtgtttcatgnnnnnnnnnnnnnnnnnnnnnttcnntgtctaatgccatctcatcnatnnctaaactgntcgntttntttttnctccntatactcncaatttgttgtttggcnatgnaatgtcactgtgttgatgcatggaattttatccaaangaa

SEQ ID NO: 39583 - DNA, 293 bp, Glycine max
  unsure (1)..(293): unsure at all n locations; Clone ID: 701121265H1
ctgtagactgtagcaaacaccatgaccaccaaggttccaaaatccgtatacgactttgttgtcaaggatgctaagggagatgttgtagatctctccttttacaagggaaaagtccttctgattgtcaatgttgcttctcaatgatatccttaatctgtgctgtgtttgttacttcttctttttttttccctgattgtgcctctaattantttaaagccttgatnttttcatcttttctattcttttcagtaactactctcacagctaatgttataaatgttgagaaaatttac

SEQ ID NO: 39584 - DNA, 284 bp, Glycine max
  unsure (1)..(284): unsure at all n locations; Clone ID: 701121266H1
gaaacncaaganaaatatannaagntcgatcgagatctccctcgcgtttgtctcngttnaagaaattnnaaagcagnactagagtanctcaacggtctcagaattttcagggttttcagtncngcnatnttgttncttncnnagttgnttggaagaagatcgangagnttctagttgnntgnagttgtgncctcttggtggtggagactgttatntgtttaaatattggacaantcgganatgncnaaggagatangggnagatcttgtccgttgaagtggcag

SEQ ID NO: 39585 - DNA, 284 bp, Glycine max
  unsure (1)..(284): unsure at all n locations; Clone ID: 701121267H1
caaaantcacttnttntgaacacacgaaaagacatggaccggatcaaaggcccatggagcccggaggaggacgaggctctgcagaagctggtggagaaacacgggcccaggaactggtccctcatcagcaagtccatcccgggccgctccngcaagtcctgcaggctccgctggtgcaaccagtgtccccccaggtggagcaccgggccttcacccacgaagaggacgacaccttntncgggcccatgccgcttcggcaacaantgggccacgtagcccgcctc

SEQ ID NO: 39586 - DNA, 103 bp, Glycine max
  unsure (1)..(103): unsure at all n locations; Clone ID: 701121268H1
tgcagntctccnatnnatggctaccattgttagcatcaaaacgcgccagcntctttgacantnntggcagtccaaccgtncgagtgtgtgtttgagcntgctc

SEQ ID NO: 39587 - DNA, 204 bp, Glycine max
  unsure (1)..(204): unsure at all n locations; Clone ID: 701121271H1
gccacctcnaanttntcaattgttctctctntctncctagccttntttctagtgctactcaccaaggcaaactcaaccaacaccgtttctttcaccgtcagcaagttttccccacgccaacanaaccttatnttccaaggagatgctgctatctcaccctccggggtgttacgactcaccnaggttgagggtntnggttgcnag

SEQ ID NO: 39588 - DNA, 281 bp, Glycine max
  unsure (1)..(281): unsure at all n locations; Clone ID: 701121272H1
agccatggttctcaaaaccgaactatgccgnttcagcggtgccaagatctacccagggaaaggcntcagatttgttcgtggtgattctcaggttttcctgtttgctaactcgaaatgtaagangtatttccacaacaggttgaagccntcaaagctcacctggactgcaatgtacagaaagcaacacaagaaggacnttgctcaagaagctgtgaagaaaagaagacgtgctngccaaaaaccttnctccngggncnttttcggnggccntttggaagttt

SEQ ID NO: 39589 - DNA, 275 bp, Glycine max
  unsure (1)..(275): unsure at all n locations; Clone ID: 701121276H1
gtggagcacaaggttgtggcaaataacaaantggaaagatactccatagcatntttcctatgtccttcttacagtactgtcataaacggctgcaaaggaccttctgtttntaggaagttcacgtttggagantacagacaccannttcaagaagntgtcaagaaaataggacacaaaattggactntcaagncttctantttnngatncatgcgcacattgggatnnagcttnaacatcattcngcatgggggcctgatntgcctnttgggcctt

SEQ ID NO: 39590 - DNA, 274 bp, Glycine max
  unsure (1)..(274): unsure at all n locations; Clone ID: 701121277H1
gtgcaatacntctccttgttggtcttttgtctgtgcctgactcccgcactcaagaacatgccgtgacagcgctcctgaatctttccatntatganaacaacaaaggnagtattgtttcttcaggagcagttccaggtntagttcatgtgctgaagaagggaancatggaggctcgggaaaatgcagcagcaacanttttcagcctttcagtnntagntgaaaacaaggttacnnttggatcttnggagccataccaccactagtgacatgctaa

SEQ ID NO: 39591 - DNA, 120 bp, Glycine max
  unsure (1)..(120): unsure at all n locations; Clone ID: 701121279H1
caaanaccaangtgagtngaggaantgatgaagccatcgatgctcagatctnttcantgcttccgccaccctcnnngcctcccacntntcncggcgtgggtacnnctccgagccgtggcg

SEQ ID NO: 39592 - DNA, 278 bp, Glycine max
  unsure (1)..(278): unsure at all n locations; Clone ID: 701121280H1
gtagtccttttggagactccantgtctgctatcaatntggantggcttntgcttcantttctatggcggttggagctgtttatatatggacttntgtctacaacatantgagagtttccgcaagtgtagtcccanaagntgattntagaactagctccttcagactggaggcttcagnngagttcctagaattcataccagaggaagnatcctcagaacctgaaaatcnaccaaaggacagcatggatgnttncactctctggntncttcnattgntt

SEQ ID NO: 39593 - DNA, 280 bp, Glycine max
  unsure (1)..(280): unsure at all n locations; Clone ID: 701121281H1
cacagttantcttgtgaattagcgagntttgaagcnagtnanggctgcgaatgaagagaatcgantntttgttggaggtttatcctgggacgttacggagcgtcaactcgagcatgcctttgctcgttacggcaaaattctcgaatgccagttgtagaagcatgggcaacagacgtgccatcttntntnctgncnatgcattgaatgtagctgnattgctcaagaaatgaaagcatgatctccataatggnatgctgtgaatgcctgtcttgcatctgtc

SEQ ID NO: 39594 - DNA, 148 bp, Glycine max
  unsure (1)..(148): unsure at all n locations; Clone ID: 701121282H1
aatctgtcanntatgcggtgatnctgttggattaactgctactggtgntgtgtttgttgcttgncaacgagtgtggctttccctgtgtgtcgtccttnttatgnatatgancngaatgatgggaaccagtcttgtncacacaacantc

SEQ ID NO: 39595 - DNA, 282 bp, Glycine max
  unsure (1)..(282): unsure at all n locations; Clone ID: 701121284H1
gctctgttccgtcgntgacgatggcgtttagggtgcgnaaccctgacctccgctttctcattcttctctctctcttgtcnatnacttccgccaagntcttcttcnggnagcgtttcgatgacggatggggaaatcgttgggttaaatcagattggaaaaaagatgagaacctggctggggagtggaaccacacctctggccaatggaatggagacgctaacgacaaaggtnttcaaaccagtgaggattacagattctacnctatttcagctcagtaccctg

SEQ ID NO: 39596 - DNA, 130 bp, Glycine max
  unsure (1)..(130): unsure at all n locations; Clone ID: 701121285H1
aaaaaatgggcgtttctcgttctcaaaagcctcatgttgtttgtgtgccattcccagcacaaggccacgtgaacccttttatgcaactaagcaaactccttctttgnanccggtttncacacannanttt

SEQ ID NO: 39597 - DNA, 226 bp, Glycine max
  unsure (1)..(226): unsure at all n locations; Clone ID: 701121286H1
ctgaaacacagacatggagcatgtgcagcnttgctgantctttcgtctgctgagcctcttgtntggccatcatctttgaagatantcagtgagcttaatccagacgccaaagagttattagagcgggccctgatggatgcaaacagggaaagggagaaaaacntattgaaagggngtgattnctctcttccatctccatcacattctgtgggtagatgacaatatc

SEQ ID NO: 39598 - DNA, 190 bp, Glycine max
  unsure (1)..(190): unsure at all n locations; Clone ID: 701121287H1
ctgagaganctcgtcgcggcggttgcagaagaagattgcaagatgnagttcaacatcgcgaatcccaccactggatgccagaagaagctcgagntcgacnacgatctganactgcgagcattttgggacaagaggatctcacaggaggtcatcggagatgcactcggtgaggaatttnnaggctatgtct

SEQ ID NO: 39599 - DNA, 156 bp, Glycine max
  unsure (1)..(156): unsure at all n locations; Clone ID: 701121288H1
accctcctgngccgcaacatgcaagatgtcccacttnaagttgcagctggtggantnctgtnggtcccttatgacatgggangtctgccnatgcncgatgntgtggnacatccaatgcccattcaagctttggctacagccctcgcaantnctcca

SEQ ID NO: 39600 - DNA, 277 bp, Glycine max
  unsure (1)..(277): unsure at all n locations; Clone ID: 701121289H1
caaggattngcagaaggaccctcctacttcctgcagcgcagtncccgtggcggaggacatgtttcactggcaggcaacaatcatgggacctcctgatagcccatataccggtggtgtattcctantttcaattcattttcctcctgattatccattcaaaccaccaaaggttgcatttaggactaaggtnttccacccaaacatcaacnttaatggangtatatgccttgannttctaaaagancaatggagcccagcactaaccatttctanggtc

SEQ ID NO: 39601 - DNA, 199 bp, Glycine max
  unsure (1)..(199): unsure at all n locations; Clone ID: 701121290H1
ggagtctnagaagcaaaggntaggatctnagtgtctggtggatgaggcaacaaggcctgtngcaggaaaacctggacaagctaccatgaccggtcttcctcccattagtgcagtnccggttggaacagatgagtaaagctgtncgatggcttgtgattgaattgcagcatggctctggagctggttctgtaattcagct

SEQ ID NO: 39602 - DNA, 107 bp, Glycine max
  unsure (1)..(107): unsure at all n locations; Clone ID: 701121291H1
ggcagaggcagagagaaacagagagagaaaggagtaacaantagttgnttntttcaaagacantgaacantnaagatggaaaacccgtacatccacacaacntacnt

SEQ ID NO: 39603 - DNA, 110 bp, Glycine max
  unsure (1)..(110): unsure at all n locations; Clone ID: 701121292H1
gctcgntggngaattggcgcttcanggcgtctcgtagggctaatccgcctgcacgatggtcaccaacngcacgtagnncttggnnggccgaggccccctaactgctggtt

SEQ ID NO: 39604 - DNA, 245 bp, Glycine max
  unsure (1)..(245): unsure at all n locations; Clone ID: 701121293H1
tgttangcantacaacatttattacgcatactcaaagtagcttcgaagttcgtatttttattggcatatcatggagaataataatcagtcgttttggcaattcagtgaccagctgaggttacaggcatctnatttggcgaaccntctctaaacgattnganttggagcaacngttnnatctccaagaagcgtcangaaagcttaattttgncntcagaggtggnggtangatcagcccttcgant

SEQ ID NO: 39605 - DNA, 277 bp, Glycine max
  unsure (1)..(277): unsure at all n locations; Clone ID: 701121296H1
tgnantnaanaagtcnttatanttcttcataggtagantctgattgtgtnttcccccaacccctcaattngncttactttttttaanttgctttgtcntagatgcatgaattaacatctggactcatttaaggaccctgttttttaggggaagaaccanattttgtttgttgtaacttaagtttccnattccctagcaagataggttnctgcnantatgatagtttgaaggcatttnctctttttggtaaatntaattatttttaccccaagcntaa

SEQ ID NO: 39606 - DNA, 290 bp, Glycine max
  unsure (1)..(290): unsure at all n locations; Clone ID: 701121304H1
gcccggcactgcaacccatcccaccaagattgtagctntttatatttccccgaagcttgtaatgattgatcttgctaaagatcttctccaagccantcccanctcctatgcattggtcattagcatggagaatatcacgttgaattggtattttggaaacgatcggtcaaagcttgtctctaattgtttatttcgtatgggaggagctgcagttctgctctccaataaaagctcggatagaagaagatccaaataccgattggtcaccacggttcgcactcataagggtg

SEQ ID NO: 39607 - DNA, 291 bp, Glycine max
  unsure (1)..(291): unsure at all n locations; Clone ID: 701121305H1
cttacttcgagtcttcgactttcctcctccgaccatctcgccggaatttcccgcngcggcgctccttgtcgccgcagcttctctctctactgaaaccctagagagagaaaattcaaaaaccattctctactctgaaattcataaaccctgaaattcaaaaaccctaattcccctgtcaagctcgtagcacagtcacagccatgtatggcggtgatgaagtatcagctatagtagttgacttgggttcacacacttgtaaagctggttatgctggtgaagatgctcccaagg

SEQ ID NO: 39608 - DNA, 288 bp, Glycine max
  unsure (1)..(288): unsure at all n locations; Clone ID: 701121307H1
atacaactctgagtatttattaaagtcatcagtgatctcagcnctatcagaaattgccttaaagcccagtgacagtgatcttggtgcacttcagcaactcttggttgatcaacccaatctccaaactgaggaagttcaatttgtatttgatgtgatatttgctgaagaactgagttgatgatcctctctactatggatgttgacttgggaccaggggatgcctgaacttttatacatcaagggagcctttgatctcccagggacgattgttgatgcagaatgagttaa

SEQ ID NO: 39609 - DNA, 290 bp, Glycine max
  unsure (1)..(290): unsure at all n locations; Clone ID: 701121308H1
agaacctttgctttcntttcctagggccggtgtcagnccagtacngtggnttnaattacttaatgctttagatcagcangggttgcctttgctctctcctgtgaaggttcatttacaganctgcaacnantgttctcgagaattttgctctcccattaactatagaagacatatacgcatacagcatcgattgaaaaagcttgataaggattctgataaaaatagggatcttttaggggcatattgggataagctctccgtagaagnggcaaaggaagttgtgtcattcc

SEQ ID NO: 39610 - DNA, 284 bp, Glycine max
  unsure (1)..(284): unsure at all n locations; Clone ID: 701121309H1
gaaaattgttaggtacgactccggctcggacagtgactccaacaaacggaacgattattgtagtactttctcaggagtcgtttaacgctaaacggcattacctcctcaaccggtgaacggcagaagaaattaacgcgaganaaccgaaatccgcactttaccgcaccctgcgactccgcgtgggtttggcgaaaccttctagaattttcttccatggaggttatcagagttctaacggcggcgatcacggtggcggttctcgcggcggcgcttccggcggacgc

SEQ ID NO: 39611 - DNA, 288 bp, Glycine max
  unsure (1)..(288): unsure at all n locations; Clone ID: 701121310H1
agaaattagaaatatttattcattgtcaccaaatcttgttccctgcaaganaaagaaagaagggagagaagaagttgttgggttgagttggattggatttctaatctaatctatacctttcttttttcctatgcttttaaggcacaaacccttctttcttccctcttctnnnnnnnnnnnnnnnnnnnnnnntgcctttacccttagggaaggaagaaggaacaactatactactattatccttattattgttattattgtaattaatctttttancatagttatgtt

SEQ ID NO: 39612 - DNA, 287 bp, Glycine max
  Clone ID: 701121311H1
gttaaagagttgaaatcttcaactaatctgctgtctgttgttgaggcctggcttcgcgctgaaacaaagcttgaaaagaagaaccctgtccaaaagacttctgttgccagttctcctttcttttcatctagacacatggcatactatagatagtgtttttgacacagatttcttatgaaaataatttgggtggcaaatacaagtaattcatctttcatgcttgtcaagtttgtggttgcttatattttcaacatttgttttggagtagttatacgtttaaacaagca

SEQ ID NO: 39613 - DNA, 288 bp, Glycine max
  Clone ID: 701121312H1
ggaaggcaaagcttcaaaacttgcaaaaagggtgattgcttgtctcgatgtgagaacaaatgataagggggaccttgttgtaaccaaaggagaccagtatgatgtaagagaacatacaaaagagaatgaggtaagaaatcttggcaagccagttgatcttgctggacagtactataaagatggagctgatgaggtcagctttctaaatattactggatttcgcgactttcctctggtgatttaccgatgctgcaggtattgcgatacacatcagaaaatgtttttgta

SEQ ID NO: 39614 - DNA, 290 bp, Glycine max
  unsure (1)..(290): unsure at all n locations; Clone ID: 701121315H1
tatgatnaaatnntcttcacatctttctgcnntattcctattgttctttctccttactgccctatcncnctgcggatggagtttcatnctcttcattcctaaagcaatnnaaacagnagcnggagnagagtcccaccctaaaagatttccngaaacccaccactataggggatatttattatacgttgaatttcacagaaatcttctcncngaagagagaagcgcaccaccggtgtctctcatcaaagattacttatcaaactacggctacattgaatcctctgggccat

SEQ ID NO: 39615 - DNA, 292 bp, Glycine max
  unsure (1)..(292): unsure at all n locations; Clone ID: 701121316H1
gttgtttaaagtaagaganaagaaagaagcaaatggcaaactttccagttgttgacatggggaancttaacaccgaagagagacctgcagccatggagattataaaagatgcctgtgagaactggggtttctttgagttggtgaaccatgggatatccattgagcttatggacacagtggagaagctcacaaaagagcattacaagaagactatggagcaaaggttcaaagaaatggtgaccagcaaaggtcttgagtcagttcagtcagaaatcaatgacttggactggga

SEQ ID NO: 39616 - DNA, 273 bp, Glycine max
  unsure (1)..(273): unsure at all n locations; Clone ID: 701121317H1
gtaaaaatctctcccanatgtcaacatgttgcgaactcgaaaaatattatgtggcatgactgtccaattcagaaacaagatagacagcagctgcttcagcaaaaaggctgtgttatatggctaactggcctcagtggttcaggaaaaagcactattgcatgtgctttgagtcgaagcttgcactccaaaggaaaactgtcttacatccttgatggtgacaatattcggcatggtctaaaccaagatcttagtttcagagcagaagatcgttct

SEQ ID NO: 39617 - DNA, 294 bp, Glycine max
  unsure (1)..(294): unsure at all n locations; Clone ID: 701121318H1
atacactcncaactcacaaanaccatgtctccaggtccttaangtcgacgcttcccctgaggttgaagcagagcaacaactttccctccgtcgatgacgcaacccagttgaagaaatcccaaccgcaggaggntgatgctcccgttgtcgaggacgtgagggnnnnnnnnnnnnnnnnnnnnnnnnnnnnnnnnnnnnnnnnnnnnnnnnnnnacaaggaagacgatgctctaggtggtgctgagggttcaaagcagagcagaagtgagaagaagagtcgaaaagcangttgaa

SEQ ID NO: 39618 - DNA, 281 bp, Glycine max
  unsure (1)..(281): unsure at all n locations; Clone ID: 701121320H1
ctttgaacattggcaagcttgcaatgaaaggcaganaccccctgttccttcactgcactcccaaggcatgtattgaactattacaacgaagtgntgtaagtattaagggaaagaaagccgttgtggttggtagaagcaacatagttggattaccagcttcattgctgcttttgaaagcagatgccacagttactattattcattcncacacaagtcagccngaaagtatcatacgtgaagcagatattgttattgcagcagcaggacagccgatgatgatc

SEQ ID NO: 39619 - DNA, 287 bp, Glycine max
  Clone ID: 701121321H1
ttcactccacttgtcaagagcttctagcattgtgatgttgattgcatatgtagtctacattgtctttcaactgtggacacacaggcagttatttgaagccgaagatgagggtgaggatggtgaggacggtgaagaagaacaagctgtgattggattatggagtggcattgcttggttggtagggatgactgtgttcattgctgtgttgtctgaatatgtggtggatacaattgaggatgcatcagattcgtggggtttgtctgtgagctttctcagcataatcttgc

SEQ ID NO: 39620 - DNA, 285 bp, Glycine max
  Clone ID: 701121323H1
ggagaagaaggatcctactggagccaaggtcaccaaggctgcccagaagaagaagtgaatcgtgcggtttggttcatcaggggatgtcgtttcttatggttacaataaatgttggtttcttgcccttgtgtcttcgtttctaggtagcttgtttttcggacatagtttgaagtctccaccatcatctcgcaacttttgttcccagaattgggttcttgatcgacggtggcaagactcctttatcatctgttttaatgtgttgtgtttgtgagaacccctgataca

SEQ ID NO: 39621 - DNA, 291 bp, Glycine max
  unsure (1)..(291): unsure at all n locations; Clone ID: 701121324H1
gattaaagangggctccgatctatgttccggggttgcgcatgcctgtgttccccccgatcatccattncaccaacagggtgggcgcttctacttctggaggcagagccatgcaattgtgcttcgtgaataaactgcctatagaatttttcnccacgttcaatatcnnctgaggacggtggtccagttcaaattgagctgcgtnatgctggatcgcaacaacgcgtagngacggnccaagtttctaacagaatgttcagatcnntgtctanntngtgntancggtaaggacc

SEQ ID NO: 39622 - DNA, 291 bp, Glycine max
  unsure (1)..(291): unsure at all n locations; Clone ID: 701121325H1
ctccctttcattttctctgcatctgtactctccanaatgccgtccttagaggaggagctcttcccttcaaccccangcaagttcaagatcgagcgggcccaccacatgaaccgccagctctaccgctgcttcgcctccaccagcaccatgttcctgtgggccctctttttaatcgccctcaccgcttcatatctcagcttccaaggcttcgttgattccggcagccgctacctctccgcctcctggggcgggatccagtgggagaagcaggtccgcacctccgcccagatc

SEQ ID NO: 39623 - DNA, 215 bp, Glycine max
  unsure (1)..(215): unsure at all n locations; Clone ID: 701121326H1
gcgggtttcgcggcgcggcggaagaagaagaagactcatctggaaccctttgggccgacagcgtgnnnnnnnnnnnnnnnnnnnnnnnnnnnnnnnncaagtaccagaagctcaggaagcgcatgaggagacagacgtagaaggtcagggaacagaaaaagcattcaactttatcaattcagttttctttttagtgaaactgtaatgttgtcgtc

SEQ ID NO: 39624 - DNA, 269 bp, Glycine max
  unsure (1)..(269): unsure at all n locations; Clone ID: 701121327H1
gttcaacttgtgagggggatcaaacacattcctagattggaatanggcaaaacttggttgttctagtcgtaggaaagcaattgaggagctccttagagggcgtgattgtgccaaacaacttaggacntacatcaatgggagttgtgaagatggatcatcaacaaccccatcatttgctgaacaacttgtgaaggaggtgctcatgtccttcaccaactccctctcgttcttgaagaacaaccccacttctgaatcccatgatgtttcca

SEQ ID NO: 39625 - DNA, 222 bp, Glycine max
  Clone ID: 701121328H1
gtcgcttcaacaatcagcaagaatcccctgtatcatatcctccagcactgtatgttagtgccccaccacctatgggttatccttccaaaggtgatcctacagctgtagggtacccccaacaaagagttccagaagaaaccacaagcaggggtgatggattttggaagggatgttgtgctgctttatgctgctgctgggtcctggattgttgcttctgattga

SEQ ID NO: 39626 - DNA, 237 bp, Glycine max
  Clone ID: 701121330H1
taattcggatccaaatccaaatccaaatccagttcaaagaagatgcaatacaagaacctggggcgatctggcctgaaggtgagccagctctcctacggcgcgtgggtgagcttcgggaaccagctggacgtgaaggaggcgaaggccctcctacagtgctgccgcgaccacggcgtcaacttcttcgacaacgccgaggtctacgccaacggccgcgccgaggaaatcatgggccag

SEQ ID NO: 39627 - DNA, 102 bp, Glycine max
  unsure (1)..(102): unsure at all n locations; Clone ID: 701121331H1
tccaagtgcagagtcaattctgcagtgtctcacttcncaaaattccttgcacccttttggccttgttttcccattgcagaaaatatgattncagttccacag

SEQ ID NO: 39628 - DNA, 288 bp, Glycine max
  Clone ID: 701121333H1
acttgatccagacaaaatttatctttttgattctggagcccagtatctagatggaacaacagatattacacgaacagttcattttggtaaaccttcgactcacgaaaaagcgtgttatacagcagtcctaaagggtcacattgctcttggaaatgctagatttcccaatgggacaaatgggcattctcttgatattctgcccgaattccttgtggaaggatggtcttgattatcgacatggtactggtcaggaattgggtcctatctgaatgttcatgaaggacctca

SEQ ID NO: 39629 - DNA, 278 bp, Glycine max
  unsure (1)..(278): unsure at all n locations; Clone ID: 701121335H1
aatttcggaaagatcggcgatggctgcctccaaggatcgcgagancttcgtcanacatcgccaagctcgccgaacaggccgagcgatacgaagagatggtggaatcaatgaagaacgttgcgaatctcgacgttgaactgactgtggaggagcggaatttactttctgttgggtacaagaatgtgattggtgctcggagagcatcgtggaggatcctgtcttccattgagcaaaaggaagaaacaaaagggaacgagttgaatgcgaacggattaagg

SEQ ID NO: 39630 - DNA, 290 bp, Glycine max
  unsure (1)..(290): unsure at all n locations; Clone ID: 701121336H1
cttggntcnttgcctcatcatgcttgcacaaagcggtaacnacaanancagccnantaccgtgcttcgtganagtcgcacanaggagngtngggggncgntgaaactatnagncaggtgcaccgtntggaacanggntnttccttcttaccaagcantcggtggacacaaggccagccaccgcaaggncncgtcggaatccnacaccaccgcntccgnngtcgccgtntctgcganagccaacgacagcnantcngcttcgnccgtcggcggcggaagatgnacgagtgt

SEQ ID NO: 39631 - DNA, 257 bp, Glycine max
  unsure (1)..(257): unsure at all n locations; Clone ID: 701121340H1
aactatctctaccgagagtgcctccgcaaccatgcagctcagcctcggtagctacgctaccgacggctgtggggagttcaccctggacgtggacagcgtctncgtccccctccctccagtgcgcacctgcggctgccatcgcaacttccaccgcaagtcacgtgccccgcggtggaaggagggttgcaggccgtgactggagggagtggggacatgatggagtactccgggggcggagacgtgggaagaataacgga

SEQ ID NO: 39632 - DNA, 288 bp, Glycine max
  unsure (1)..(288): unsure at all n locations; Clone ID: 701121343H1
gtgatccgcaaccctatcctcttcccttccacctctcaccaccccnaccaaaaccacacattcctcactctccgcttctnctcaaaccttacgctcttctctccgctccaaatcccgattcgccgtttcctgctcccaatcggaannnnnnnnnnnnnnnnnnnnnnnntctcggcggcgtcctccgtacatccccaacctcattccggacccttcctatgtccgcattttcgacacgactctccgctaggcgagcagtccccgggcgcctccatgacctcgaaggag

SEQ ID NO: 39633 - DNA, 288 bp, Glycine max
  unsure (1)..(288): unsure at all n locations; Clone ID: 701121344H1
ggaaggangacctcagtgaagtaaaaagaagaaattgaaaagggaagaaaggaaaaagaagaagtanaagagggcaacattagagttaataaaaaattgaatgttgtaggaagaaaaacaggattactactcaaataaaaagaagcaggataactcatctagaatcagagatgggtggcaaaaggacactcacaggagtcatattgcagattctttcccaaataatgcattttcagatcgatataatcctcacaatctcttgggatctgtgaggatgatatctcctcg

SEQ ID NO: 39634 - DNA, 289 bp, Glycine max
  unsure (1)..(289): unsure at all n locations; Clone ID: 701121345H1
taactccctaccctattccgctttctctcatccatcatgaaaggaggaaagtccaagaccgaatctaagagagccgatgccaaacttgctgtgaataagaagggcgccgccaccaagactaggaaacccgccggaaagggnncaggcagcgaaagatcctaacaagccaaagaggcctccanctgctttcttcgttttcatggaggaattcaggaaggtgttcaacaaggaacatcccgacaacaaagcagtgtctgctgtgggcaaagctgctggancaaaatggaag

SEQ ID NO: 39635 - DNA, 287 bp, Glycine max
  unsure (1)..(287): unsure at all n locations; Clone ID: 701121346H1
ggggacaactgatgcttattgtgtagcgaaatatgggcagaagtgggtgcggacaaggacaatcattgacagctttgcaccccggtggaatgagcagtatacttgggaggtttttgatccttgcactgtcattacaattggtgtatttgataactgtcatttgcatggtggtgataagcctggaggctcaaaagattccaaaattgggaaggtaagaattcgtctttccacccttnnnnntnatcgtgtttatacacattcctatccacttctagttcttaatccaa

SEQ ID NO: 39636 - DNA, 285 bp, Glycine max
  unsure (1)..(285): unsure at all n locations; Clone ID: 701121347H1
gtgaaatncntgangcacccagttttgcntcatctcaaccntcnccnatgtgnnggaaanggtnaggannaaccctttgcaggntcctgaaagatangcgangcngtcaagaagagttggaganagtcaaccanatgcctcaccntcatctgaggtncctgtcattgatttagcactgctnacagatggnancncagaggagnngtngaaattggacgtagcatgcaaagagtggggctcngcngggagtanatcatggtgttcaagaacacctngcagngaatg

SEQ ID NO: 39637 - DNA, 289 bp, Glycine max
  unsure (1)..(289): unsure at all n locations; Clone ID: 701121348H1
ctgtaaaggaggtgtctttgctggatgacggaagccagggcaaacagagccttttccaacttcagcaggaaatatctcttttgagtcagttccgacacgacaacatagacccgatatcttggcactgacaaggatgatgataagctgtatatcttcctcgagcttgtaacaaaaggatcattggcaagtctctatcaaaagtaccgtttaagggactctcaagtttctgcatacacacgacagnttttaagtggctgaagtatcttcatgatcgtaatgtggttcacag

SEQ ID NO: 39638 - DNA, 290 bp, Glycine max
  Clone ID: 701121349H1
ctgattcccctccccagacgccgtagagtcagagagagagattcactgaaacagagcgcagaagaaaatacataaactaatccagaaaatgagcagcggcgctggaaaggtggtgtgtgtcaccggcgcttccggttacattgcttcctggatagtcaaattcctcctcaatcgcggctacaccgttaaggccaccgttcgcgacacaagtgatccgaaaaaaataaaccacttggttggcctcgacggtgctaaggagaggctgcacctctacaaggcgaatctctcga

SEQ ID NO: 39639 - DNA, 288 bp, Glycine max
  unsure (1)..(288): unsure at all n locations; Clone ID: 701121350H1
attgagaattctctctcttttctctttctcttcccaactttccttccttgggatcattctgcttctttgctatggaagactcagattcagttgctacgctgatagattccacaanntctaagatgcnggnagnngcaaaaggcatntgctgaacttgaaagttaccgagctgttactctgaacttgaaatggaaagaactcgaggaacattttcatggtctggagaaatccttgaagaggcgctttcatgaattggaagaccaggaaaaagagtttgagaacnaaaca

SEQ ID NO: 39640 - DNA, 116 bp, Glycine max
  Clone ID: 701121352H1
gttttggggtttgaatctatagaatagaatcaaaccaaattgaaagaagatcgatcgatcgatcgatggctctggtcggagttgaagtgaagcatgcggcggagggcgcaccggag

SEQ ID NO: 39641 - DNA, 286 bp, Glycine max
  unsure (1)..(286): unsure at all n locations; Clone ID: 701121353H1
gcccttctcgtcctctcaattctctcagtccaaggggctgcaaattttctggttcttttcgacagattttgagtncattgtttgaaatggcatcggtatctagtcagccacagttccgttacactcagccgctgtcaaaggtgcttcatttgaggaacttgccgtgggagtgcacagaggaggaactgattgagctgggaagccgtttggcaaagttgttaacacaaaatgcaatgttggggcaaatagaaatcaagctttattgaatttgcagatttgaatcaag

SEQ ID NO: 39642 - DNA, 140 bp, Glycine max
  Clone ID: 701121355H1
aaaaacatctgtcctaagggctctctcacatttgtttttttatttaatttttttaaagatttatcccttgtatttatcttggttaatttccaagttatttttgtgagcgtcacagtttacaacaaaaatggaagtagaaa

SEQ ID NO: 39643 - DNA, 287 bp, Glycine max
  Clone ID: 701121356H1
tgctgttttaaatacctctaaaggttctataataatagaactgtacaaggaaagtgctcctgaagttgttgatgaattcattgacttatgtcaaaaagggcacttcaaggggatgctttttcacaaagtaattaagcactacgtgattcaggctggggataaccaaggacaaggagctactgaagactggaacttgagaggaaagcaacatacaattactagtatgaaacatgaagcattcatgcttggaacttccaagggcaaacaccacaacaagggtttgatct

SEQ ID NO: 39644 - DNA, 236 bp, Glycine max
  Clone ID: 701121357H1
gatttcgaagatggctgaagcagaggatgccgtacgacgccgtaatgcggtcgccgagtatcgaaagaaacttctccagcacaaggaattggaatccagagtccgatccgtcagggagaatttgcgagcttcaaagaaagagttcaataaaacagaagatgatttgaagtctcttcaaagtgttgggcagatcattggcgaattctcaggcctcttgacaacgaacgccttattgt

SEQ ID NO: 39645 - DNA, 284 bp, Glycine max
  Clone ID: 701121358H1
gtgactttcattccattaccttctcagcaacttaacatggttgggttcaactcagttcctaattggcttctcattcttaaggaagagaagttttttactcgctgtttgattcatcactctgtaaagaagaacgagaagaacattttctgcttagattgctgcacaagcatttgcctccactgcttgccctttcaccgctctcacgtccttttgcagataagaagatacatgtacaatgacgtattacgccttggtgatgctcagacatgttgaatgttccctgt

SEQ ID NO: 39646 - DNA, 220 bp, Glycine max
  Clone ID: 701121359H1
ggtgaagaggctgagggtgttgaagagttctgatcttcctgcttttacacttggtagtaagcaagactagttacaccacttgacttgacaatgagaaatgaaggatgaagcagcagcttgaggtcttcttccatgctaaaaattgatgactaagagtgtttttatttgacattttggttccttgaacattgaagattaggcaatgaaatgttcagtctat

SEQ ID NO: 39647 - DNA, 259 bp, Glycine max
  unsure (1)..(259): unsure at all n locations; Clone ID: 701121360H1
gggaaatcttttanngcaagttaaagagcanngctgattanatagctctgctaacgctcagaaanggtgtggaaggagaatccaagggaattattttcagaaattttggattggtttcagcagagttttcacaagcactttgaagagttatggttacaaatgcttaatgaagtgcttatggagaaacaagaaagccctcttcataaaagttctaaaaaaaagaaaggaaaatataaaccactatgaaggaaaagaatgc

SEQ ID NO: 39648 - DNA, 193 bp, Glycine max
  Clone ID: 701121361H1
aatgtttctgcaactgctgcaaaaaaccttcacacacttcccttgcacatcaatggcgcaagggaaggtttcactttcacccttgggaacaacaccagcaccaacaccaacaccaacaccaacaccctccctcaccttcacatgaaccccctcactctttcagctgacaataccaagaaaacttacagtttgg

SEQ ID NO: 39649 - DNA, 286 bp, Glycine max
  unsure (1)..(286): unsure at all n locations; Clone ID: 701121362H1
ctgaagcatggggtgtggagccatatgacatagaggatgctgataggaactgcaaggctctagtgcagaaaggnntngtacgtgttgcagataaaaattccctttaccatacagggcaaagtcttttctcatgttatagtgtcagatgctttggattacctgtctccaaaatatttgaacaaatctcttcccgagctagcaagggtatctgctgatggtattattatttttgcaggctacccaggtcaacggagagctaaaatagcacaattatccaaatttggcc

SEQ ID NO: 39650 - DNA, 283 bp, Glycine max
  unsure (1)..(283): unsure at all n locations; Clone ID: 701121366H1
gaaaaagcnaccacttgatcggtctctnnaacnccctaacattcctgctgtcgattccgatcctaggaggcgnnatatggctgagcagcagggcgaacaacaccgactgcctcaagttcctgcagtggccgctcancatcatcggcgtcagatcatngtcgtgtccctggcggggttcgccggcgcgtgttaccgcaacaccttcctcatgnggnccnnactngtcgtcatgttcncggtcantgccgttctgatcgggntcatcatantcgcctacgtngtc

SEQ ID NO: 39651 - DNA, 286 bp, Glycine max
  unsure (1)..(286): unsure at all n locations; Clone ID: 701121367H1
ctacaactaaccctcccaaagatgaaaaacccgaacacaaggaagaacagaaacccgtgnaggaagaaaagaaggaacatgctgctgacgtggcagaagagacagaaaaagaagctgcagaagttacggtaaccgaaactgaggttgttgaagagaaagtggcggtttctgcttctgctgacgaggatggagcgaaaaccgttgaagccatcgaagaaagcgttgtgtctgtgacagtgactgtctccgaggaaccaaaggtggaagctgtttcactttctgcttc

SEQ ID NO: 39652 - DNA, 283 bp, Glycine max
  unsure (1)..(283): unsure at all n locations; Clone ID: 701121368H1
gtttcctttctgtttcttttttcttcttccttcttcctttcttcgttgttgttgttgctgcgattctctagatcttgaacagtgttttcgtgttcggtgagatggaagaaaggaagcaatcgcgttatgtgaagttgactaaagatcagacacctctcgaagatattacccctggcgaactcaatcagccaattcaggttcctcagttggatnttcgtaagtgccctgaatgtagacagccgctacctgaaagctatgctcctcctgctgatgaacctggatg

SEQ ID NO: 39653 - DNA, 281 bp, Glycine max
  unsure (1)..(281): unsure at all n locations; Clone ID: 701121370H1
ggagcngnttgtgcttcaactcttgccagaaatgggntttctgttactctctttgagtcagctagaggccctggtggacgcatgtnccaaagaagagagagnnctgaagantggacggagctgcattttgaccatggtgctccntttttctcggttagcaagtctgaagttttacatctggttcaagagtgggaatcaaggggtctcgtagctgaatggaaagagaagtttgcctcgtttgatttccacacnacntacgattnattnganncangtatanc

SEQ ID NO: 39654 - DNA, 281 bp, Glycine max
  unsure (1)..(281): unsure at all n locations; Clone ID: 701121374H1
attttcttaacaaggaacagtagaaatggaagttcaggaggtaatgtactggtgatagtggttgcagtagtcagttcagtgattgttttggtggttggaatagctattgtggtttatatccgcaaacacagatanttcaaatgaanntgcgaggttcaaatgatgcagnanagttagccaagagccttcaccacaatagcttgntcttcaagtattctacactggagaaggttgctaattccttgatgnagctataagctggacaaggaggatttggaacc

SEQ ID NO: 39655 - DNA, 284 bp, Glycine max
  Clone ID: 701121376H1
gaaaaatcaaatcaacatgctgagagtgggcgcaaagagggttttggaaacgacgttgtttggggttagggttccggcgaggctgtaccacgagagggttgtggatcactacgacaacccccggaacgttggatcgtttgacaagaacgacccgagcgtggggacgggtttggtgggggccccggcgtgcggcgatgtgatgaagctccagattaaggtcgacgacaaaaccggaaaaatcgtcgatgctcgattcaaaactttcggctgtggctccgccattg

SEQ ID NO: 39656 - DNA, 218 bp, Glycine max
  unsure (1)..(218): unsure at all n locations; Clone ID: 701121381H1
gtcgcttcaacaatcagcaagaatcccctgtatcatatcctccagcactgtatgttagtgccccaccacctatgggttatccttccaaaggtgatcctacagctgtagggtacccccaacaaanagttccagaagaaaccacaagcaggggtgatggattttggaagggatgttgtgctgctttatgctgctgctgggtcctggattgttgcttctga

SEQ ID NO: 39657 - DNA, 119 bp, Glycine max
  unsure (1)..(119): unsure at all n locations; Clone ID: 701121382H1
gttcaacttgtgagggggatcaanaacattcctcagattggactncggcaaaacttggttgacctagtcgtaggaaagcaattgaggagctccttagagggcgtnattgtgccacacaa

SEQ ID NO: 39658 - DNA, 96 bp, Glycine max
  unsure (1)..(96): unsure at all n locations; Clone ID: 701121383H1
ctcttcccatgcaaccccaggaangttcaagatcgagcggtcccaccacatgaaccgctacactncatcggctgtgtcggccttccacacaaccat

SEQ ID NO: 39659 - DNA, 288 bp, Glycine max
  unsure (1)..(288): unsure at all n locations; Clone ID: 701121385H1
ctacaatancnaacaatggcanctanagnaggaagangtgaagctttngggtattgtgggaagcccatttgtgntgcagggtccagattgcccttaagttgaagggagttgaatacaaatttttggaagaaaatncgggcaacaagagtgatttgcttctcaaatacaaccctgttcacaagaaggttacactgtttgttcacaatgagcagcccatagcagancctcttgtgattgttgaatacattgatgagacatggaagaacaaccccatcttaccttctgatc

SEQ ID NO: 39660 - DNA, 283 bp, Glycine max
  unsure (1)..(283): unsure at all n locations; Clone ID: 701121388H1
agacactgcacagatctgagtggtgactgaaggaatctagcttctttcatttctcatcactattcttaggtctganggctcattgccattatcatgtcaaggaggccagtaaatccttcgcgtcggttaggtgatggtggaagtataccatttgctgcatctatccggtctaaatctcaaaactctcccctactatctattgggcttgtcattgtgggtgcaatccttctgattggttattgttacagcaattcaggtggagctagcggtggtataaggatgt

SEQ ID NO: 39661 - DNA, 269 bp, Glycine max
  unsure (1)..(269): unsure at all n locations; Clone ID: 701121389H1
ttnactaattaatnttcanttcaatgntgaagaaagaaaatnccacngtcngaacaattntntcaanttcaaangcaaaanggcttcanccntttgngaagtaatgantntccanaaacngccttnttcanaattgctcaacaactgangaaantgngccaacagantnttcaagatttctcatgcctcagagggntttccaggngccacatgntttcaaaggggncctggaaaagtcccatctccctcngttnattccacctttnaac

SEQ ID NO: 39662 - DNA, 198 bp, Glycine max
  unsure (1)..(198): unsure at all n locations; Clone ID: 701121390H1
caattctccaccctctcattgaanacgaaaacaaccaaacaaaaaaaatcaatcattttattttatttttctacgaaaatggttgatttacattggaaatcaaagatgcctagttccaaaacaccaaaactctctctctccgacaacaagtccttancctctttgcaactacccttccacacaacatanannnngaag

SEQ ID NO: 39663 - DNA, 287 bp, Glycine max
  unsure (1)..(287): unsure at all n locations; Clone ID: 701121391H1
ggcgggcaagagagtttgtttcttctctcttcaatggaaggcggcgaacaggttctcccttcggccaccaccgtcnccgccgccggctatccccaacgtctcctcctccttccgctcgctcatcctgtcggtgcttccgatatcgctgctgctgcctcggacgacgttgttgcggaacctgaaattcacgcgctgatttcagacgaagagcacgatcacgatcacgatcacgatcacgatcacgagcatgagcatgagcatgaccatgacctcgagcacgatcagag

SEQ ID NO: 39664 - DNA, 282 bp, Glycine max
  unsure (1)..(282): unsure at all n locations; Clone ID: 701121393H1
gtgaaatggatgaagcacccagttttgcttcatctctaccagtccccaatgttcaagaaatggtaaggaataaccctnnnnggttcctgaaagatntgcganancgtcaagaagagttggagaaagtcaaccatatncctcacctttcatctgaggtccctgtcattgatttagcactgctttcaaatggaaacaaagaggagttgttgaaattggacgtancatgcaaanagtggggctctttcantagtaaatcaggtgttcaagaacacctgcaganaa

SEQ ID NO: 39665 - DNA, 296 bp, Glycine max
  unsure (1)..(296): unsure at all n locations; Clone ID: 701121395H1
attgcttggtgcttgtagcatacatggtgattctgagatggggtaaaatatgctggcaaatccaactgtttttgggctaacacccagacagccccggctcccttaccgttttgatggccgancntatattcctagtgaagggaaanggaaggagagagcacgttcccattaagaaaatgaaaganatgggggtancaaaagaagtgggtataagctgggttgagattgaaaagaangtcattagtttcgtagtaggggacaaatgcatcctcaagctgatgctatattctggcttt

SEQ ID NO: 39666 - DNA, 280 bp, Glycine max
  unsure (1)..(280): unsure at all n locations; Clone ID: 701121401H1
cttgaaagcaaggcagcagaagaaatagtggtctgggaatcttacactgttggttgtttctaaggaaattaattaaagggtatagtgggcaaatgagtggtgatcataacagttctgtttccatggttgggaagaagaaaaagaatggctctcttcggtcattttcagnctgctgatggcttagactggttcctcatgatttttggtctctttggggccattggtgatgggcataggcaccccttggtgttgtttatcaccagcaaaatatgaacaatat

SEQ ID NO: 39667 - DNA, 272 bp, Glycine max
  unsure (1)..(272): unsure at all n locations; Clone ID: 701121402H1
aaaaaataagagaagganaatggggtggttctannccaaaaaagangagtantcgaaggatacacaangccagancatgancactgcngnttctccttctccaantttccatttggttgtgatatttggcattgtctttagcttattgtggctctcaaattacacagccatttaccttcagtttctcctcatgctgtctcccatacttgggattctctgnaganttcatattcaactacttgtggtggaaggctcaactttagtttcacacg

SEQ ID NO: 39668 - DNA, 279 bp, Glycine max
  Clone ID: 701121403H1
gcaaaacccattttactccctcttccacaaaagaacaatatctctattttccaaactacacacatcatttagaaccatgtctttctctaccaaattgcctttggtcctcttattttcatcccttttcatccatgcatctttggctgagatggtgtgtgaggacctgccaaaggaagtgtgtgctttctcagtagcttcatcagggaagaggtgtttgttggagactgagaaggcagccgacggtggcgtcgagtaccaatgccggacatcggaagtggt

SEQ ID NO: 39669 - DNA, 361 bp, Glycine max
  unsure (1)..(361): unsure at all n locations; Clone ID: 701121404H1
cccaaatctgtcaaatacgaatttaaaaccaacatccatgttcctaanattaggggtaatgctggnnggttggggnggaaacnacggctcagactcctccacncggtgtgtgttatgagctaaccctgagcaggggcatttacatgggtctaacaaagggancaagnttgcatacaaagnccaattgacttngggggctacccctncagcccnaagtcntgccaggctcattcccgaagttngcgggtnccttttcncagnnggagnagcggacaattctcatgggcnccccatntncaaaggagacctggctntacncaaattgggtttcnaaacccctggantcggaacaattnggtnc

SEQ ID NO: 39670 - DNA, 278 bp, Glycine max
  unsure (1)..(278): unsure at all n locations; Clone ID: 701121405H1
gngcttcacggcgtctcgtatggctaatccgcctcacgagggtcacnaacggcactggcctttggggggccgangccccctaactgctggtcggnaanctgacggnnggcgcacgcgtcgcttctagnccggattctgacttanaggcgttcagtcatnatccaacanncggtagcttcgcgccactggcttttcaaccaagcgcgatgacnaattgtgcgaatcaacggttcctctcgtactaggtngaattactattgcgacnctgtcatcagtng

SEQ ID NO: 39671 - DNA, 298 bp, Glycine max
  unsure (1)..(298): unsure at all n locations; Clone ID: 701121406H1
caaggcctatcttcgtaaagccaccgcttgtatcaaactccaagaataccacaccgccaaggtagcgcttcaaaacggtgccgcttttgcccaagacgattcaagattncgccaacttgattcaacaatgtgatcgctgcattggcagagggaatcaagtgggccttactaggcaccttgtcttncccatttggaggcaatagannatcaatggggatggactaaagaagaagctgaagggagaacagtttggctttncccaaaaagaatgaaagccacactnaaacaggaccaaaat

SEQ ID NO: 39672 - DNA, 275 bp, Glycine max
  unsure (1)..(275): unsure at all n locations; Clone ID: 701121407H1
ggggtgctcagattgactaaatctgatttccgagagccagtaaatattggaagcgatgagatggtcagcatgaatgagatggctgagatcantcttggctttgagaacaagaatattcctattcaccacattcctggccccgagggtgtccgaggtcgtaattcagacaatacacttataaaagaaaaacttggttgggctccaactatgaggttgaaggatggactgaggatcacatacttctggattaaggagcagatcgagaaggagaaggc

SEQ ID NO: 39673 - DNA, 112 bp, Glycine max
  unsure (1)..(112): unsure at all n locations; Clone ID: 701121408H1
gcaaaatctcaatttcctctacctaaccatcatttcccngcactctcatcnacntcnantgnatatnagacnagngcacaaacctnannctcagacattgcagcactnaaag

SEQ ID NO: 39674 - DNA, 276 bp, Glycine max
  unsure (1)..(276): unsure at all n locations; Clone ID: 701121410H1
cttagaagagggccttggactcttgaagaggataatttgctctcccaatatatttctagtcatggangaagggcgatggaatttgctagctaaacgttcaggattaaagcgaactgggaaaagttgcagattaaggtggctaaattntctaaagccagatgtaaaacggggaaatttaaccccacaagagcaacttataatcctcgaactccactcaaagtgggganncaggtggtcaaaaattgcacaaaatttgccaggcagaacagacaatga

SEQ ID NO: 39675 - DNA, 278 bp, Glycine max
  unsure (1)..(278): unsure at all n locations; Clone ID: 701121411H1
gatgctccgtgttggtgctaccaaggctcaagcggagaggagggttcctttgttnaatgctgcnctgtcttcactctctgctctcccttttcccctttcatgtcttcaatcaccgcctctccttcagggtctccaaaaaccctactttttgatttccatcccaaccctttttnttttcctactgggaattngatattcaattttagcctcttggatttccaacctctcttctcctcaccaanacgagttncctcaaagatgtttgtgtttgggtcatt

SEQ ID NO: 39676 - DNA, 259 bp, Glycine max
  unsure (1)..(259): unsure at all n locations; Clone ID: 701121414H1
ctttatagtagttttatccttggcagagncttaggtgttttgtnctaagttatacttttaagtttctgccgatttcatgtagccgtaactttcaaaactaggttcttgatcggcggtggtcaattttcattgctgtttgtttttgatgagtactgttttttgttttgatggtaagaagagtctgagatatttcgaattcacaagcagctatagggttttagtccatttccttgctgctgagggatgttttaagttgcat

SEQ ID NO: 39677 - DNA, 284 bp, Glycine max
  Clone ID: 701121416H1
ctctcaccggcatctcgctggtggcgctgcaattcaaggccttgactgaagaaaaatctcttgctgtcatggcggaacaagagagccagcctcttacagttactctcccctctcatattcattttcctcatcttcgcaatcgacaaggccatcaaggcacagacctcgacctcctcctcctacaagagcgtcactgaccctcccatggaaccttctccccccatcactccctgcgaggacaagttcttcatcaaactcccctgctacgattcgtctggagcggc

SEQ ID NO: 39678 - DNA, 279 bp, Glycine max
  unsure (1)..(279): unsure at all n locations; Clone ID: 701121417H1
atgaagttgtntgtnttctttgttgctgcagtagttttggtagcatggccatgccatggcgcnngctaccaaaggttccctctccgaatgaaaactggctatggtgngcgttcttcggangtnaaatgcgcaagttttaggcttgctntggaagcacacaacataccgagcntttnnaaccattcctgaagagtgcgttgaaccaanaaaggactacnttaatggcgaacaattnagatcagactcnaanacagttnaccaacaagctttctttatgct

SEQ ID NO: 39679 - DNA, 277 bp, Glycine max
  unsure (1)..(277): unsure at all n locations; Clone ID: 701121418H1
gatgagtgtgaatgacaaccaaactggttcgaaatatatgggtaaccaatatttctataatgattcagtagtggttgtaatgaaaggtcaatacatggagctccagaggatattaactatttttacaaccattgatttatcanataatatgtttgaaggagaacttctgaaagtccttggcgaattgcattctctcaaagggctaacctttcgcacaatgcaatcactggtaccattccacgatccttggtaatttaagantttccgnatggttggt

SEQ ID NO: 39680 - DNA, 278 bp, Glycine max
  unsure (1)..(278): unsure at all n locations; Clone ID: 701121419H1
atgaagttgtttgttttctttgttgctgcagtagttttggtagcatggccatgccatggcgcaggctaccaaaggttccctctccgaatgaaaactggctatggtgagcgttcttcggaggtaaaatgcgcaagttttaggcttgctgtggaagcacacaacatccgagcnnttaaaaccattcctgaagagtgcgttgaaccaacaaaggactncattaatggcgaacaattagatcagactctaaaacagttaaccaacaagctttcttttatgct

SEQ ID NO: 39681 - DNA, 302 bp, Glycine max
  unsure (1)..(302): unsure at all n locations; Clone ID: 701121420H1
gttggcctcaagaaggagaacatggggtttgaggaaactgagttaaggcttggactgcctggaaacggaggcactgaagaagtgctcatcaggaagaggggtttctctgagactgaaactggtcatgaagatgagtctgccaacnattgtggatttgatgcntaaatcctttccttcntagggnaggcggcaaacccacttgctggntgcntggctgcaggantccnancntgttaagccaccaggactttgccntaaaggagaggacccnttntgccaggcangntctngttaaggcttcc

SEQ ID NO: 39682 - DNA, 279 bp, Glycine max
  unsure (1)..(279): unsure at all n locations; Clone ID: 701121421H1
ttgtctcttctcttcccctgctcaacgtttttcttctcccttcccccacccacctnccactgcttttcatttctattctcttcccaaacagaacgaccatcggaacaaacggcattttgtcaaacagttacgaggggacaaaacaaaacaatgagcagcgttttgcaagggaaacgcaagcgccaggacttggcttcaaggctctcggcctcaatgaataatgaggagggtcgtgtctacaacatcattcgcgggaggaaggagatggggatatggcaa

SEQ ID NO: 39683 - DNA, 275 bp, Glycine max
  Clone ID: 701121422H1
ttaaattaacaacacagataacataattccttcacactgatcactcgtttcataaaaggatctctaactagataaaataagaggcaaacaaagaaacccatagtagaatgggtaacccttattctcaaacacaaagtggttaattaacaacacgagtagaaagatgatagatctatcatcttctatcaaagcactcttaattaattttttaaaattaacaatgtttggtgcagaagcatctgcgacggaagccaggcagtgtcctccagtgaaag

SEQ ID NO: 39684 - DNA, 276 bp, Glycine max
  unsure (1)..(276): unsure at all n locations; Clone ID: 701121424H1
gaaaggaatacctttaaaatggaatgcagttgcaaaggtgacctgagattggtgcatgaagaatgtttagttaaatggtttagcacaaaaggagataagaaatgtgatgtatgtaggctagaggttcagaatttacctgtaactttgcttcgtgtgactagctctgttcaaagagaaaacagacagctggcaaggttcagcagancctacatccagagtcaataagcgctggcaagactttgtggtgctgtcctgatcagcacaatatgctacttt

SEQ ID NO: 39685 - DNA, 274 bp, Glycine max
  unsure (1)..(274): unsure at all n locations; Clone ID: 701121425H1
gttgtgagctataagctagtttatcgtgaggagaatatgaagttgtttgttttctttgtngctcgcagtagttttggtagcatggccatgccatggcgcaggctancaaaggttccctctccgaatganaactggctatggtgagcgttcttcggaggtaaaatgcgcaagttttaggcttgctgtggaagcacacaacatccgagccttaaaaccattcctgaagngtgcgtanaaccaacaaaggactacattaatggcgaacaatttagac

SEQ ID NO: 39686 - DNA, 273 bp, Glycine max
  unsure (1)..(273): unsure at all n locations; Clone ID: 701121426H1
ctaaacggtngttccatgagagtgtgatgatagtgntagctacgaggtgataagagtgganaanatggtatccccatgcttgctcaagataccacgtctgtntgatcctggggtggttacagtatcatcggatttggggacataatcttaccaggacttatagtggcatttcactaaggtatgattggttggcaaagaagaaccttcgggctggatacttctgtgggcaatgtctgcctatggtttaggtctcctcatccacatatgtgtctt

SEQ ID NO: 39687 - DNA, 278 bp, Glycine max
  unsure (1)..(278): unsure at all n locations; Clone ID: 701121429H1
gcgatcgcgaatcaatcggagttcaatagaagggcctccaaaatcggctacgggattcaccaaacgtctcagangctcgccaaactcgccaaattagcgaaaaggacttcggtttttgatgaccctactatggaaatccaagagcttacgggggttattaagcaggatatcactgctctgaactctgctgttgtggatcttcagttggtgtgtagctctaggaatgagactggaaatgtttctgccgatacctctagccattcgagcacggtggtcga

SEQ ID NO: 39688 - DNA, 281 bp, Glycine max
  Clone ID: 701121430H1
ctcttcccatcaaccccaggaaagttcaagatcgagcggtcccaccacatgaaccgccaacttctatcgctgtttcgcctccaccagcaccatgttcctgtgggccctcttcttaatcgccctcaccgcttcctatctcagcttccaaggcttcgtcgattccggcagccgctacctcaccgcctcctggggcgggatccagtgggagaagcaggtccgcacctccgcccagatccaccgtcaaggcggcatgtccgtcctcgtcaccggcgcaggctttc

SEQ ID NO: 39689 - DNA, 162 bp, Glycine max
  unsure (1)..(162): unsure at all n locations; Clone ID: 701121431H1
cntggnccgagatgttcatnggantcttcatannnttgtncagcngcnggaaaatggtatgagagnanntcgatgaacatntcgggccatggnccttagnatcaccacaaacntaaagatancctccctgagaaatcaaattccacagacntgcagctttat

SEQ ID NO: 39690 - DNA, 283 bp, Glycine max
  unsure (1)..(283): unsure at all n locations; Clone ID: 701121432H1
acacagcacccttcacacactgcacagtngnancctttcnagnttctactatctgcntcntcttcttcaattagggttttccccttctccgagatcagcgccaacatcatgaacatgaatatcttcaagaagaaaacctcacccaaagaggctctgcggtcaagtangagggaaatggctgntgcaaccagaggaattgaaagagagatagcatcacttcagatggaggaaaaaaaatggtggcagagannaanagagaagcaaaaacaggnatggggncccc

SEQ ID NO: 39691 - DNA, 138 bp, Glycine max
  unsure (1)..(138): unsure at all n locations; Clone ID: 701121433H1
ggaaaagcgtgtggtgtcttcttctccggtggatcctcaggcctgtaatttgggattagccactcatgaatcaaaatcaatccattanatcaaaatacctttctcactgttaacttcatcaacaatacctaatttttt

SEQ ID NO: 39692 - DNA, 276 bp, Glycine max
  unsure (1)..(276): unsure at all n locations; Clone ID: 701121434H1
ggtcggtgaaatagagactcaaaaccaaatagtttattgctattattatttggcctgttttttcagtgtcaaattgcattattgaaataatcaaatgcactanccacactccatcacccccatatataccccttctcctctcatactaattaacacactcatccaaacaaccttctttcnttttctgtgagcctttctttcaggttcttaacttgatcagtgtgcagtgtccaaatcataagggtagttgcaaattgcaatggctaagcatgatgt

SEQ ID NO: 39693 - DNA, 253 bp, Glycine max
  Clone ID: 701121436H1
gtcgagttgaatcggtgagtcagtgaccgagttgaaccatgttcggacgaagagcaccatttcgaatccaaggccgatgccggagcctccaagacctatcctcagcaggccggaaccatccgcaaaaacggctacatcgtcatcaagggtcgtccctgcaaggttgttgaagtttctacttccaagactggtaagcacggccatgctaagtgtcactttgttgggattgatattttcactgccaagaagcttg

SEQ ID NO: 39694 - DNA, 274 bp, Glycine max
  Clone ID: 701121437H1
gccggatcggcgttcgctgtgtctccgtcgccggaagcgcttcctctgccgtctttttcgacgaagatgcaggcctcggcggcggttgatgactccgccacgcgagatctgaggcgtctgctccggctcgaatgaaaacgagtcgggttgctgtcccggatttggatcgggtcggaccccgacaaatgatccatattacagtctctctttctcaccttattattatccagaatattctctttctcgtcttctctccgtaaccgttaactttaag

SEQ ID NO: 39695 - DNA, 273 bp, Glycine max
  unsure (1)..(273): unsure at all n locations; Clone ID: 701121438H1
ctccgccagcccccctcatcgacttggccgagattaagctctggnccttctacagagccctcatcgccgagtttatcgccacactcctcttcctctacgtcaccgtcgccaccgtcattggccacaaaaaacagaccggaccatgtgacggcgttggccttctcggcatcgcatgggccttcggtggcatgatctttgtcctcgtctactgcaccgccggcatttctggtggacacatcaaccctgcggtgacttttggcctgttcctggccc

SEQ ID NO: 39696 - DNA, 278 bp, Glycine max
  unsure (1)..(278): unsure at all n locations; Clone ID: 701121439H1
ggcccntgntcagcancaatattgaatgtcaaagttancanttnctgccagatccagaggatgccaatnnaaactgtgaggtgaattcnggatgcatggtgaaagtaatacngctatcatccccaggtgttgtatatgannnccgtnggctttccnacggaaggcaataagcaatcaaagtagcactgtggangatgttgctacaantagcttgtcctctgactctctgggccttgtngagncaatacnnactactcctgcatcagctgctgaaagtg

SEQ ID NO: 39697 - DNA, 277 bp, Glycine max
  unsure (1)..(277): unsure at all n locations; Clone ID: 701121440H1
agtgagancatgattcatgaaggcactaggatagctcccgacccagttcgattttctcatggcaaaagcntcanagctaccagnattaaccaagtttctacagggaagaaccccgaaggctggatcttcaagcatgggagcttaaaacaaaatcaggcaatcaactaacaactgttcctagttcctcgatcgagtcatgttgcntcaggttacctgttgcaaacatgaataccatctgccgtgtattattgaatggtcaaaaagaagcaaagagtgc

SEQ ID NO: 39698 - DNA, 273 bp, Glycine max
  unsure (1)..(273): unsure at all n locations; Clone ID: 701121441H1
gnaccatgttctgcatttatgcttcttttctcttcatagttcttttcaagtcattgctcacgtcattctcttccaaacactaganatagnccactccctcccggttccattggttggtctttacattagagaaacctttcaaatgtgttcccaaataaaaaggttcatatcatttctttcacttgcaaacatacacatgcaattccattattcatttcttgtaaagttgctattggttgtccatgtgatgctcttttgcatattcaacgctac

SEQ ID NO: 39699 - DNA, 272 bp, Glycine max
  unsure (1)..(272): unsure at all n locations; Clone ID: 701121442H1
ccttcncnggnctctctgcgacaccagatgntggagacgacggcgaangaanacgctgtcgttgncgccaatcgcggcgttgttgttggtggtgctacncgcggcgagtgtggtggtggaggctcaggagaactcggacgtgaagacgctggtgaagcacatgcacgggaagaagtactgcgacaaaggatgggaatgtaagggctggtcaatttactgtngtaaccncactattactgattntnccagacncgatcagtncggnnnctcnt

SEQ ID NO: 39700 - DNA, 274 bp, Glycine max
  unsure (1)..(274): unsure at all n locations; Clone ID: 701121443H1
ancnacctntntttcttctctctcaacaacttcanccggnttcctcntcnatcangtctcacntnaaggggcaagtacnatgntgagcttatcgccaatgctgcgtacattggcactcctggaaagggtattcttgctgctgatgngtcaacagggacaattggcaagcgtttggccagncatcagtgtagagaacattgaatccaacaggngnnctcttagggagcnggctttnactgctcctggnnatctcantnnnnnnntngtgtcgtcc

SEQ ID NO: 39701 - DNA, 273 bp, Glycine max
  unsure (1)..(273): unsure at all n locations; Clone ID: 701121444H1
gagcatantgtcagggatcattcacaagattggggagacccttncatgtgggagggcacaagaaggaggaggagcataagggtgancaccatgctggagaatacaaaggggagcaccatggtgaacacagtagtgagtacaaaggagagcatcatggtgaacacaaagctggagagtaccatggtgagcacaagccagagcacaaagaggggttcctagacaaagtcaaggacaagatccatggtgagggcggcgccgccgagggcnagaaga

SEQ ID NO: 39702 - DNA, 262 bp, Glycine max
  unsure (1)..(262): unsure at all n locations; Clone ID: 701121445H1
gcccttcatgagatcaatcttctttcatccattgctgaccgtgatccgtccagattccanatttgtnattcaancannttgaccactttaagcacactggtccaaatggacagcatctttgcatggttctgagtttcttggcgatagttgcttcgcctgatcagatataaccgttataaaggtctnccattgaataaagttagngagatttgcaagtgtgtgttgattggtttggattacttacatactgatctggtatgnt

SEQ ID NO: 39703 - DNA, 279 bp, Glycine max
  Clone ID: 701121447H1
cttgaaagcatcgttagacaagccgttactaataagttccaacaaacctttgtcaccgtcccagccacccttcgcctattctttcacgattgctttgtccagggttgtgatgcttccgttttgattgcatccaccggaaataaccaggcagaaaaggatcacccagacaacctgtctttggcgggtgatgggtttgacacagtgatcaaagcaaaggctgcagtagatgccgtccctcagtgcagaaacaaagtctcgtgtgcagatattctggccttg

SEQ ID NO: 39704 - DNA, 273 bp, Glycine max
  unsure (1)..(273): unsure at all n locations; Clone ID: 701121449H1
gcaatggtgtacgtcaaggctcagaaatcaaaagcctacttcaagagatatcaagtcaagttcaagagaagaagagagggaaaaaccgattaccgtgccaggattcggttgattaatcaggacaagaacaaatatnacactccgaaataccgatttgttgttcgctttagcaacaaggacattgttgcacaaataatatctgctagcatgctggcgatattgttcttgctgcagcatatgcacatgagctgccacaatatggtctgaagtagg

SEQ ID NO: 39705 - DNA, 275 bp, Glycine max
  unsure (1)..(275): unsure at all n locations; Clone ID: 701121450H1
ggannagnccaccttnngtggnacttgganctgcagtgtaggttcanattgnttcaggnaatggnnactgggtcccnctttagtactcantccttgaaatccgttttgggtttcaaccagagccannttaccctgcttggtgttgccaatgatattngtgaaaatgntggcattctgtcccggtctcgcctgnaacaagttcgtccttggctcattcncttcatcggtggctcttnttgcgttgccnnggttttggggtnctcgggcttgctatt

SEQ ID NO: 39706 - DNA, 275 bp, Glycine max
  unsure (1)..(275): unsure at all n locations; Clone ID: 701121451H1
caaggctttagagacaagagatgtagatgaaatggttctggcanactggaagtctccaaggaaccatgggtagcatgtcagtgcttaaagaccgtgagatgttattttgcaatgattcaggttggaagttatgtctctaagtggatcactgtaaagaatcccagtcaacattcagttgtgatgcagcttatcttaaattcaggaganatanttaatgagtgtaggggtttagatgatttatttacacccntcttcatctagtgacttggttctag

SEQ ID NO: 39707 - DNA, 243 bp, Glycine max
  unsure (1)..(243): unsure at all n locations; Clone ID: 701121452H1
gggaaatcttttancgcaagttaaagagcantgctgattnctagctctgctatanctcagaaangtgtggaaggagaatccaagggaattattttcagaaattttggattggtttcagcagagttttcacaagcactttgaagagttatggttacaaatgcttaatgaagtgcttatggagaaacaagaaagccctcttcataaaagttctaaaaaaaaganaggnaaatataaaccactatg

SEQ ID NO: 39708 - DNA, 269 bp, Glycine max
  unsure (1)..(269): unsure at all n locations; Clone ID: 701121454H1
ctcganncnatttanttggcagtcatggattattcatacatggattaacactcntnggatctcaacatnngtactccatagggtncacgaagaacttcccaaaaagcangtggaaaacaattttttcncattggatttggaggtgaagaaatcttctgtaaaacaagagtcagcaggtgccttggcggangaactgaagcgggtgagtgcagaaaacaagaagttaaccgaaatgctcacagagatgtgtgagaactacaacacttgcg

SEQ ID NO: 39709 - DNA, 273 bp, Glycine max
  unsure (1)..(273): unsure at all n locations; Clone ID: 701121455H1
attttactccctcttccacaaaagaacantatagcctattttccaaactacacacatcannntagannncatgtcnttctctaccaaattgcctttggtcctcttattttcatcccttttcatccatgcatctttggctgagatggtgtgtgaggacctgccaaaggaagtgtgtgctttctcagtagcttcatcagggaagaggtgtttgttggagactgagaaggcagccgacggtggcgtcgagtaccaatgccggacatcggaagtggt

SEQ ID NO: 39710 - DNA, 268 bp, Glycine max
  unsure (1)..(268): unsure at all n locations; Clone ID: 701121456H1
tggtatgatatgattactgtcttgtcgggtccgataggaactttagccaatcagntttttgaatccaggaagctttcacaaccaaccttttccgatctttctctcaaaccggctcgcatttccagaaaaaccctgagcttgaagatggcccaagttgctcaaaacccttctcagcagcagaaagtcataataactaacaagtatggcattaaactagtgggcatttgcatgaatctggaaccaaagagattgttatcctatgccatgg

SEQ ID NO: 39711 - DNA, 269 bp, Glycine max
  unsure (1)..(269): unsure at all n locations; Clone ID: 701121457H1
gactgttatgtttaaattgtagtcatggtggtgtttttggctgtgaatttgctcatatgtgctaattatgtgttcttgtttgatgttactctacagaagttaaaatggcccaagaaactttcctattcacatctgaatcagtgaacgaggggcaccctgacaagctctgtgaccagatctccgatgctgtgctncgatgcatgcttggagcaggaccctgacagcaangttgcctgtgaaacctgcaccaagaccaacatggtgatggt

SEQ ID NO: 39712 - DNA, 276 bp, Glycine max
  Clone ID: 701121463H1
atttgttggaggagaagagatggtttggccaattaggtccagaataagttctcttctctgttctaaggcacctttagttggttcatacatctatgactcatgtgggtgcttacgcttttctgctccaaccagctcctccataacaaggcattggccaaaaattatggattgggtacaaatggaccgttgccgtgcagcagcatcgttaccttcgatcaaagagaaacaaccagaaagtcatagtaatcgtgtcagactcggtcaagaaatcaaagg

SEQ ID NO: 39713 - DNA, 103 bp, Glycine max
  unsure (1)..(103): unsure at all n locations; Clone ID: 701121464H1
cggctcnaaganagctntcaagtntnnaacaacagacatnccnaaaactgtttcatagcgtcctcctggggnctatccttggcacctggtgangngtatcanc

SEQ ID NO: 39714 - DNA, 266 bp, Glycine max
  unsure (1)..(266): unsure at all n locations; Clone ID: 701121465H1
ggccgctcgcgcttccgacgacgaccgcggttacaaagaaggaaaacttggattcgagtctgtttgnnnaaggcaggtacaaattctgggcgttaggngccatcttgcttctggcgttctggtccatgttcaccggtaccgtctcgctccgctngtccggcactctcaattccctttccaacgacatcgacacttcccatccacgacggacctagatgttcttgaaatggaggagagggagaaggttgtgaggcacatgtgggatg

SEQ ID NO: 39715 - DNA, 189 bp, Glycine max
  unsure (1)..(189): unsure at all n locations; Clone ID: 701121467H1
aattgatcnactcagatttcngggacctaagtctagctgctaatagactcgcccatcatgccatcaaacttggtngcattngctttggagcctcttttttncggattgtntgctgccattgctgctatttatctgttgnttttggatcgtncaaactggaaaacaaatattctcncagcactactcatt

SEQ ID NO: 39716 - DNA, 271 bp, Glycine max
  unsure (1)..(271): unsure at all n locations; Clone ID: 701121468H1
gagcgatccgagaaaaactctgtaaacatgttggtttaccaggacctccttacaggtgatgatntcnctctctgactccttccgttacaaggaaattgncgaatggaatgctgtgggaagttgaggggaagtgggttgttaaaggagcagttgatgtagacattggtgcaaacccttctgctgagggtggaggagaagatgagggagttgatgatgcagctgttaaggttgttgacattgttgacacattcagacttcaggagcaacccgc

SEQ ID NO: 39717 - DNA, 237 bp, Glycine max
  unsure (1)..(237): unsure at all n locations; Clone ID: 701121470H1
gggggagatctgattcgggagggtngttgagggnacttcacgtggttttcgcagtggtctcagcgttnggcgtgtgtggccctgctctttactggcgnttcaagaacgccatcactctccgcaacaacaacaacanactctcttgcccttcctgcctctgtgactgccctccccctctctcgctcttccaacttgctcctgggctggcgaatctctctgtctcagattgtggaagta

SEQ ID NO: 39718 - DNA, 271 bp, Glycine max
  unsure (1)..(271): unsure at all n locations; Clone ID: 701121471H1
gcacctncctccctcatgctcgtccacnctcaagacctntctccctctnttcgctccttantctcacaggnncatttctagaannancanntntntctatnctctccttttgaagccctncaaatggctnccacatagagnccanatggnaggagttgcnatgcnctcgtcgntgctttgtctgcagaggtccaagtgcccgaaactttcgacgacacggaggagganganggtgctgatggntccancgccaccaacaccgtncncnaca

SEQ ID NO: 39719 - DNA, 107 bp, Glycine max
  unsure (1)..(107): unsure at all n locations; Clone ID: 701121472H1
cacctagntaggnctcaattctttggttacttaatagtagttccttttnaactatctntcttcaatggctgagctcagcctcagcctcagcntcttcttccagaatg

SEQ ID NO: 39720 - DNA, 270 bp, Glycine max
  unsure (1)..(270): unsure at all n locations; Clone ID: 701121473H1
gcgaaattgcgatttcatgtncatagagaggaaaagaggagangcggggcgganagagaacgaatggcagatcagagcgagcattcgaaaacggcgttgcctccggaggaccaggaccgtcccgttcgggtatacgcggatggcatctacgntctcttccactttggccacgcccgctcccttgagcaagccaagaaatcgtttccgaatacatacttgcttgttgggtgttgcaacgatcaagtcacccacaaatacaaagggcaaaac

SEQ ID NO: 39721 - DNA, 267 bp, Glycine max
  unsure (1)..(267): unsure at all n locations; Clone ID: 701121474H1
aagcaatgcaatcatgatcacaagcaccatcactgttgtgcttttcagcacagtggtgtttggtctgttgactaagccactcataaggcttttactgccccatactccacatcataaagaatcnagcatcacgataatcacagatccatctactccaagtccaaaatcagtcactatcccacttcttgggagtgcccaagaatctgaagttgatattgatggccatgatatccatcgtccaagcagtattcgtgccttgcttacgac

SEQ ID NO: 39722 - DNA, 271 bp, Glycine max
  unsure (1)..(271): unsure at all n locations; Clone ID: 701121480H1
gtgggcngtcncctaggcgccgtagtttgtcacctcgtggacgtagctacagcaggtcanctccttatcgtgggcgtgaggaggtcccatatgctaatgggtaggtttcttctgtctggaattatgttgacctttaattatattattatttggtcaaatatgttttatttatcaaggttattttttaactctgggatggacctgatttttcaatatgcatttattctggtatgttgtaaaatgttttgctaattttttgtttgaaaaanct

SEQ ID NO: 39723 - DNA, 269 bp, Glycine max
  unsure (1)..(269): unsure at all n locations; Clone ID: 701121481H1
ggcacatataaggaagaancccgggatggcgagcgtgaaggacatgccggttctccaggacggtccaccgccgggcgggttcgctccggtccggttcgcccggcgcatcccgaacaagggccccagcgccgttgccatcttcctcaccaccttcggcgctttctcttggggcatgtaccaggtcggccagggcaacaagatccgaaggccctgaaggaagaaaaatannctgcccgccgatccatactgcccgtgctacaggctgaaga

SEQ ID NO: 39724 - DNA, 270 bp, Glycine max
  unsure (1)..(270): unsure at all n locations; Clone ID: 701121484H1
ttatggttatggaggtctcagcatacatttgcaacaacaacttcatcttctcttcttctacgtggccataacacnaaaatcntctgcttctttctcatcacctatgcttgtcaaatccatggccactcccaagcctcttccctcagtctctagaactgtaggctctagaaagaactcaactgtgttcccacttggggaacaacctaggagcagccccgcgacagccacgcctcccataaagcttttgacaaggatggagcagctgaagct

SEQ ID NO: 39725 - DNA, 263 bp, Glycine max
  unsure (1)..(263): unsure at all n locations; Clone ID: 701121485H1
cgatcctctgtcctctcgaagctttcatcgttcaacatattctcaccatnncattcatnggcctgctatctngttttaggtctaccgtcctgagaaaatgttccaaaggaagctctggcntgtcaagattcctgtatacgaacaattttcaacgaaacttgatttcgtctggtggcaatgaatcgtattatgggtattttaacaggagatcatacacttcactttatatgggaactggaactgtgggtgggntacaagtgcta

SEQ ID NO: 39726 - DNA, 264 bp, Glycine max
  Clone ID: 701121489H1
gagagattgggatggcttcgacgaagaagatcacactgaagagttcggacggcgaggccttcgaggtggaggaggcggtggcggtggagtcccagacgatcaagcacatgatcgaggacaactgcgccgacagcggaattcctctccccaatgttaccagcaagattctggccaaggttatcgagtattgcaagaagcacgttgaggccaattgcgctgatgagaagcccagtgaggatgaactcaaggcttgggacgctgatt

SEQ ID NO: 39727 - DNA, 266 bp, Glycine max
  unsure (1)..(266): unsure at all n locations; Clone ID: 701121490H1
ggaaaaagaaaaatnnaatgggttccgataataccaacttggagttcttgaaggagatcggtttggggctcctccaacattggttcttacattaatggccaatggaaagccactggttcttctgtcacttctgttaatccttctaacaatcagagcatagctcaagtgactgaagcgactttgcaagattatncaggagggattgcaagcttgcagtgaagcagccaagacatggatgactattccggcaccgaagagaggtgaga

SEQ ID NO: 39728 - DNA, 264 bp, Glycine max
  unsure (1)..(264): unsure at all n locations; Clone ID: 701121491H1
gggacatcaggaactctatccactttatttgatgttggaggggtgcncggtggaattctagctggccacatttctgatcacttagaggctagagccattactgcagcaagtttcatgtactgtgcaatccccgctctcttcttctatcgaagttatgggcacgtttctttgattgtaaatggagcattgatgtttgtcactggcatgtttgtgaacggaccttatgctcttataactactgcagtttcagctgacctgggaaca

SEQ ID NO: 39729 - DNA, 272 bp, Glycine max
  unsure (1)..(272): unsure at all n locations; Clone ID: 701121492H1
cgangttnaaaannccntaacccttngcgantnaagccctagangacactacaacacttcgncaatntgcggtggttgngcananccctgacatcgccggcnagtcgacngttccgnccaanangttcncacccaanacgttgtggncatgcnnagccgtngccancatcgtcanaagctctttatgccccgttngcctcgacaagatgctcgtcgacgacattggngacgtcactatcancaacgncggtgccacgattntcaagatgctt

SEQ ID NO: 39730 - DNA, 266 bp, Glycine max
  unsure (1)..(266): unsure at all n locations; Clone ID: 701121493H1
ccaagttcagcttccaatacaaggggacaanggggttgctcaatcgcctcctgttgttcttcctccaagaaattatacaagtaatggttttcttagagtttcctgcaatgggggcttgaatcaaatgcgtgctgcgatttgtgatatggtaacagttgctcggtttttgaatctcacattggttgttccagagcttgataagacatcattctgggcagaccctagcaattttgaggacatttttgatgtgaagcatttcatgattc

SEQ ID NO: 39731 - DNA, 268 bp, Glycine max
  Clone ID: 701121494H1
ccgacctactgctgaagaggctttggctgatccttacttcaagggactggcaaaagttgagagggaaccatcctgccaacctatcacgaaaatggaatttgaatttgaaagacgaagagtcacaaaggaagaaattcgagagctgattttccgtgagattctagagtatcatcctcaactattgaaagactacatgaatggaacagagagaactaattttcttatccaagtgctgttgatcattccgaaagcagtttgctcatcttga

SEQ ID NO: 39732 - DNA, 244 bp, Glycine max
  unsure (1)..(244): unsure at all n locations; Clone ID: 701121495H1
cacaaggatggagctttctcaacttggttttctggatgagctacttgctccaagaaaagacactaacttggagtaatgctttgtcaactgggttgaatgagttactgactaccctagtggttggagctttgaactcttttggatggagaaccaaggtttcaggctcactttggaatnccctncatttggctggcattttnccactaccactaaggaccacgaccattntgaaatggcnncttaa

SEQ ID NO: 39733 - DNA, 281 bp, Glycine max
  unsure (1)..(281): unsure at all n locations; Clone ID: 701121501H1
gctgtgacttgttttgagttcaatcaaatcgcattggtatctgaaatcaggaaagatggttagcgtantgagcatcaggcaggcacaaagggcagaaggcccagcaaccatccttgccattggaactgcaaacccaccaaaccgtgttgatcagagcacctatcctgattactacttcagaatcaccaacagtgaccacatgaccgagctcaaagagaaatttcagcgcatgtgtgacaagtctatgatcaagacgagatatatgtacctaaacgaagaga

SEQ ID NO: 39734 - DNA, 280 bp, Glycine max
  unsure (1)..(280): unsure at all n locations; Clone ID: 701121502H1
gttactcctttttcgttttgagtttcaatcaagccatcatcatgtctaccgcatcgcaacccaagggccaagaaaacggcgtcgtccaagaagcccctctcccaccctcccttcgccgtgatgatagcagaggcgattgcnagtctgaaagagagaaccggttcgagccaatacgcgataaccaaatacatcgaagggaagcacaaggngttgcctgcaacctacaagaagcttgtcctcgttcatctcaagaaatctgttgctgctggcaagcttgtta

SEQ ID NO: 39735 - DNA, 285 bp, Glycine max
  unsure (1)..(285): unsure at all n locations; Clone ID: 701121507H1
attngcngangcatcctcccatnnatcaancggttacatcanangtnagatcagacaaagcanaagaatccgcagaaaccctcacttnccaggagacagagcagcagcaccgnaacccgaagcttcaggttcgggcttcgcctccaggttcggaccttgcttcgacttcttccccgacctggcacccttactcgttcttncccttgcttctgcattgtctgatcttacctttgatgtaaccgagccgcaatgggaggatgcttcagcacattttaatttgcaaaa

SEQ ID NO: 39736 - DNA, 250 bp, Glycine max
  unsure (1)..(250): unsure at all n locations; Clone ID: 701121508H1
caggncancagagtgtggtgtgtgngtgtgtctctctngntctctgcntngtgngtaattnaatgagancancaatgacgcttcaancacagnggcggtggctgnggcnatagtgtgcanntctgcctttagcatcactgtggtggctgaagatccatacaggttcttcaagtggaatgttanatncggagacatttanccactnggtgnangccanccaggtnntttgattcnctcttcnactnacatc

SEQ ID NO: 39737 - DNA, 279 bp, Glycine max
  unsure (1)..(279): unsure at all n locations; Clone ID: 701121509H1
gtgaaatcgaaagantcccacagaattgtacgangtattgttcanttttttgtctcnactgtcgtgctccaacttggtaaactagaagttcatttattgttttcatncttcaatgggggatgctgagaatgcccttccacacaacanaanannnaaaanagaagggagcncactcgagacacncccattgatnangcggaagangcccccgngctgagactggcactttcaagagagccatgannnnngntcnggcaaccaganggagcnncacaantc

SEQ ID NO: 39738 - DNA, 277 bp, Glycine max
  Clone ID: 701121510H1
cgggagggaagaattcttgtggcttgcttaaggagattcatcagattgagaaatgtgctagagtgatgaatgatttgggctgattctgtccacttcccattgacggaggggaaagaacgagaggttagacagatagtgcaggaggtttcacaagtctgtgatgctttgaaaggtggactagaccctttggagcgccaagtgagggatgtcttccatagaattgtgcgcaccgaacagaagggctgactcacttggcaggccaagcaatgctgagtaa

SEQ ID NO: 39739 - DNA, 280 bp, Glycine max
  unsure (1)..(280): unsure at all n locations; Clone ID: 701121511H1
ggctccatcnccctccacacaacataaaanaggaaaaaaaancagatgctgncaacaccantnnctgngtaaangnaanccaacaanagctacattagtgctaatgaccccttgaactgngntgcggcnncngangcnanggctnggagncacctcgacgangtcaancgcatgcnagaggagnaccgnacgcccgtcgtacaagctcngtggagagacccngaccatctcgcannacgcggcgatcgcggcccacgaccacggggtgaantggagctgg

SEQ ID NO: 39740 - DNA, 268 bp, Glycine max
  unsure (1)..(268): unsure at all n locations; Clone ID: 701121513H1
gattattgtgctnnttattnttgttgagaaaganacgaatggcgangttaatacaaangcgctgagtngaacacnggggccaagattccttctgtngggttaggcactnggcaagctgagcctggtgttgtagccaaagctgntcaccacagccattgctggntggntaannggcgngnagatngagcnncaagcgtatnacaatcaagcagagatnggttcngctcntaagaagcnnntgntgggcgtgtggtgaagcgtgaggact

SEQ ID NO: 39741 - DNA, 273 bp, Glycine max
  unsure (1)..(273): unsure at all n locations; Clone ID: 701121514H1
acaagacatgtctgttgttgagtcaggtgaacacaacaacatcagaggagtacctactcatggtggacgctatgttcagtacaatatctatggcaatctctttgaagtttccanaaagtatgtccctcctattcgccctgtgggtagaggcgcttatggtattgtttgcgctgctgtaaatgcagagacaggtgaggaagttgccattaagaagattggcaatgcatttgataacagaatagatgccaaaaggaccttacgagaattaaactt

SEQ ID NO: 39742 - DNA, 274 bp, Glycine max
  unsure (1)..(274): unsure at all n locations; Clone ID: 701121515H1
tttatactatacctacattttgataattttctttgtagttganagccatggctacccgtggaaagcttgaggttgacattgatctcaagtccaacgcagacaagtactggcaaacccttaggaattctactgaaatattccctaaggccttcccacatgattacaaaagcattgaggttcttgagggtgatggcaagtctcctggttctatccgccacataagttatggtgaaggttcaccacttgtgaaatcatcctttgagaagattgaggc

SEQ ID NO: 39743 - DNA, 274 bp, Glycine max
  Clone ID: 701121516H1
cgagcatcatggcctcaagagcagtgttattgttggctatgtgtgtgcttccggcgatggttgtggccattcgcccagcaaagaaccctttttgcgtgaagggtcgtgtctactgtgacccttgccgtgctggttttgagacctcagctaccacctacattgctggtgctgagattatgttgcaatgcaagagcagggttagcaacgaggttgtgtacacgaagaaggggtacaccgactcaaccggagcatacacaatgtacgtggatcagga

SEQ ID NO: 39744 - DNA, 278 bp, Glycine max
  Clone ID: 701121517H1
gggatcgatgacatatattgtctcttcttggggagcttgaacaacttgtccctactcaacaagcaatatggattgtcaaagagtactgatgaggccatgtttgttattgaagcttacaagacactccttgacaacttgatctgcagggtatggacccccagatattcgtgaaaaccctaaccgggaagaccatcacccttgaggtggagtcaagcgacaccattgacaatgtcaaagccaagattcaggacaaagaagggattcctccggatcagcag

SEQ ID NO: 39745 - DNA, 277 bp, Glycine max
  unsure (1)..(277): unsure at all n locations; Clone ID: 701121521H1
cacaaaagcccaaccctctctctcgctgttggtctctcctatttggcattcgcagatcgattacgaagtaatttcactgaatctattgaagatgtttctcacaaggactgagtatgaccgaggngtcaacaccttttctcctgaaggccgtttatttcaggttgaatatgcaatcgaagccatcaagctgggatcaactgcaattgggttgaagacgaaagagggtgttgtcctgcagttgaaaagcgcatcacttcgccgcttctggagccaagta

SEQ ID NO: 39746 - DNA, 279 bp, Glycine max
  unsure (1)..(279): unsure at all n locations; Clone ID: 701121526H1
gacacatcacnantgtttactgtgaggaggagtgaggcagagctgatagctccggcgaagccaacccctcgtgaagtgaagctactctcagacatagatgaccaagatgggttacgtttccaaattccggtnatacagttctatcgccacgacccatcaatggcngggaaagaccctgtcgatgtgataagaaaggctgtggccaaaacgcttgtgttttactatccttttgcaggtaggcttagggaaggacttggtcggaaactgatggtggattgt

SEQ ID NO: 39747 - DNA, 261 bp, Glycine max
  unsure (1)..(261): unsure at all n locations; Clone ID: 701121527H1
tgctgcttctgctgagtcgtgcgtggntctacctttgaaccctnaacttattanctgattncctgatctcagttagaaatctgtggatatggcgacggggaagtcatctcgctccagaagcgcagtgtccagtgccaaggacaacggtcctaagctcgaagaaggtctcaatncccttcaagtctgataaattcgatgccgagtcctatgtccagtccaattgctccctcaacgataaggaaattaagcaattgtgcacat

SEQ ID NO: 39748 - DNA, 275 bp, Glycine max
  Clone ID: 701121528H1
aatgataccatcactgtctcatcttcttctcataaccctctttctccatggctcttgctggctctgtggttgagcttcaagcctcttcagtaaagaagaaaactgcagtttccagaagttggattctgctggaccactatggcaaaggcactgttcttgatgcggataagtatgctatcatgcgcctggttcaaattcacgccagagatcttcggattctcgaccctctcttatcgtatccttccaccattttgggcagagagaaagtcattgtt

SEQ ID NO: 39749 - DNA, 274 bp, Glycine max
  unsure (1)..(274): unsure at all n locations; Clone ID: 701121529H1
attaaaggttggnnnntngngnanncntacaccngaangcagntnnactacnaaccaacctttaattgagtatcttnttcaanaatgtntagtaatattatattacctcaagattataaattaaaganccaagcaatatatagttgagtattgtngatggattagtgttgtgggctagatagaagatgatttagcccccttttaattatatttgatttgatttatatntagcaagcatttgcagatgatgctggctattttatatgctatgcct

SEQ ID NO: 39750 - DNA, 265 bp, Glycine max
  unsure (1)..(265): unsure at all n locations; Clone ID: 701121531H1
atcaaccacaaacaatcccancctcatgaccagattttctggttcggggatttgaattatcgtatcaatatgttggatgctgaggttagaaaattggttgctctaaagaagtgggatgagttgaagaattatgatcagctaagcaaagaattgcgtatggggcatgtatttgatggatggaaagaggggttgataaacttcccacccacttacaagtatgaaattaactctgatagatatgttggtgagaggccaaaagaagggg

SEQ ID NO: 39751 - DNA, 276 bp, Glycine max
  unsure (1)..(276): unsure at all n locations; Clone ID: 701121532H1
caacgcaccctttcatctcttccctttcacncattctttgatcncctttttctncacgccaacttctctcttctgggnttcttcattttcagaatctcattatcacctcactgtgattatctnctaattccaaattggtgtttggttgctgagaaactccaagaaaaanaaaaatacagcttttccgggnattgatganccncngtnnantcagaaaacttttctcttttgtgtgtagagtctagtacctcagactgcatgacccacttctgantt

SEQ ID NO: 39752 - DNA, 276 bp, Glycine max
  unsure (1)..(276): unsure at all n locations; Clone ID: 701121536H1
aaaattttctggcgaagatgtgtctgcacagaaccaagtgaaggcatctgttcaacgaaaaatacgacancgtattgctgaagagtatccgggccttgaacctgttttggatgatatacttcccaagaagtcccctcttatagttgctaaatgtcagaaccatctcaatctggttcttgtgaacaacgtgcctttgtttttcagtgtccgtgatggaccatacatgcccaccttgcgacttctccatcaatatccanntataatgaaaaagttaca

SEQ ID NO: 39753 - DNA, 276 bp, Glycine max
  unsure (1)..(276): unsure at all n locations; Clone ID: 701121537H1
aaatggnntcgctgaaactgcagaagcggctggccgcangcgcncntcaagtgtggcagaggaaaggtgtngcttgaccccaatgaagtcaacgaaatctccatggccaattctcggcaaaacatcaggncnttggttaaggatgggtttatcatcaggaagccaaccaagattcactcacgctcgcgtgctcgtaggatgaaggaggcaaagaagaagggccggcactctggttattgtaagagaaagggtacaagggaggcgaggctcccacca

SEQ ID NO: 39754 - DNA, 239 bp, Glycine max
  unsure (1)..(239): unsure at all n locations; Clone ID: 701121538H1
atcacgaaactcaagaagatngagaaagcgatcaacagacagaagattttgcttcatcatctcaacccttcatcatccacacancanaaaaaananaaaacnctccatgcttcagcatgtgtggcgggggatagcgctgcntatcanaggacatcgacattcggggacgatgttgtgatcgtggctgcntatcggactgctcattgcaaagcnaaacgaggtggtttcaaagacatctt

SEQ ID NO: 39755 - DNA, 279 bp, Glycine max
  unsure (1)..(279): unsure at all n locations; Clone ID: 701121539H1
gnatccccncncatatggancacntcangcttcgcnacattcnctctcagtncggcganantcaaagaananatnctcgcnccctcaagattcnacngnnccaagngnncgnnaagaggtcacgnggatcccgagaccaagcatattcagaaggatgggtcgaattcggtaataaaagtgttgctaagagggttgccaatatgttaaatggngaacaaatagggggtaagaagaggncatcantcnactatgaccnttggaatattaagtantaagtaa

SEQ ID NO: 39756 - DNA, 278 bp, Glycine max
  Clone ID: 701121540H1
ggaggtccccatatccctcttaagactggaagaagggatggtagaaggagcagagctgatgtggttgagcagttcctcccagaccacaatgagtccatttctgcagttcttgacaagtttggtgccatgggaattgacacccctggcgtcgttgcactgcttggagcacacagtgttggtcgaacccattgtgtgaagttggtgcaccgtttgtacccagagattgatccagctctgaaccctgaccacgtccctcacattctgaagaagtgccctga

SEQ ID NO: 39757 - DNA, 278 bp, Glycine max
  unsure (1)..(278): unsure at all n locations; Clone ID: 701121541H1
tggagccctacaacagcggttgaaacctgaggggaagggtaaatggtgaaccctaatttggnctttttgccgtaatngacggaganacgctctancaagagagatccgagaccggaancggngcnaccgccgacancgttgaagacgagnnagccctggagaccagtgcagttgtctgcgagctttcggacncgatccaagcacagatctacgatntgctttgccaacggtgtagtggcctctggcaaagttgttggcggcatcttccttncnggaga

SEQ ID NO: 39758 - DNA, 273 bp, Glycine max
  unsure (1)..(273): unsure at all n locations; Clone ID: 701121545H1
gcttgctttgaaggtcaatagtncagctttcaatggggatatgtatcagctaaaaggtttaattcgagcaggagctgatcccaacaaggcagattatgatggaaggtcacctttgcatcttgcagcatctagaggatatgaagatatcacaattttccttattcaagaacgtgtagatgtcaatattatagataacttcgggaacacacccttacttgaagcagttaagaatggacatgatcgggttgctnctttacttgttaaagaaggggc

SEQ ID NO: 39759 - DNA, 266 bp, Glycine max
  Clone ID: 701121548H1
cttcttctcctagatctagaacttgttgtgaactgaacaacatatatattctacagctcctttgaacttatccttcactgatcagattcaggatcttttgtctcttaccctttgaaggaccctgccccttatagtgttgttgatttcagagaaatggaaaacatcaaagatccatcaatttaccgcaatccagtcatattgcagagcgaggacttaaccaagtatattctggaaactgctgtttaccctagagaacctgcgcctct

SEQ ID NO: 39760 - DNA, 247 bp, Glycine max
  unsure (1)..(247): unsure at all n locations; Clone ID: 701121549H1
atttgcctagaaagcagcgnagaaagttggaagcagctangagaactgctggangaaagaagtcaaagagttcattcaaaagcaagtcaaggtacaagcgcaagtagtctgaggctaataatcctgtcataaatatgtgcatggaaggaccataaatctccaaaatgcgtgtccttataccatatggaggtgattaaatggagctccactgtganttcagctagtgntgtgggtctttgggtggcca

SEQ ID NO: 39761 - DNA, 277 bp, Glycine max
  unsure (1)..(277): unsure at all n locations; Clone ID: 701121550H1
gcgcagagcgtnatccattgacgaagatggtgcagcgtctcacctaccgcaagaggcacagctatgccaccaaatccaaccaacacagggtcgtcaaaacccctggtgggaagctcgtttatcagaccaccaagaagagggccagcgggcccaagtgccccgtcactggcaagaggattcaggggattccacacttgaggcctgcagagtacaagagatcaaggttacccagaaaccgtaggactgtcaaccgtgcatatggcggagttttgtctgg

SEQ ID NO: 39762 - DNA, 276 bp, Glycine max
  unsure (1)..(276): unsure at all n locations; Clone ID: 701121552H1
gtaattttctgtgtcgcttcgtggttcattcttctcgttcttgtgntctgttctattttggagtacttacaacactcctttgcaagtttaattaattaaagaggctaatcaattttcaattggactgcagcagatggctgaggagggttgcagggttactctaaatgtttatgacttgagccaaggactagcacggcancctttcaatgtcctttttggggaaagctattgaaggcatatggcacacaggagttgtggtttatggtaatgagtata

SEQ ID NO: 39763 - DNA, 256 bp, Glycine max
  unsure (1)..(256): unsure at all n locations; Clone ID: 701121553H1
gctgctctctgcatccaaacccgtcaacctttgctcattatgccataaataaatcaattntaacagtaagtaaagcaaacccctttgtcttcatnttgtntcttccttaggactttcttancccccgtggtcccagtgtaaagtacctaatgttcatacgattnatttagctataaaaaatttcaacttgctgcactaatacagaatctgtgctgtatgcaaagaaagaaggaattgtcttcagattagcagacaa

SEQ ID NO: 39764 - DNA, 275 bp, Glycine max
  unsure (1)..(275): unsure at all n locations; Clone ID: 701121554H1
ctgagaaatgtcggattcttctcgggagnagaangnttacatggcgaaattggcggacnggccgagcgttacgaggagatggttnagtgcanggagaaggtagcaaagacngtggaggttgangagttgacggtggaggagagaaatcttctctcngtggcatacaanaacgtgattggtncnaggngggcngcgnggaggancatatcctccanngagcagaaggannagagcaggggcaatgaggaccatgtggccagaaganaggagnacng

SEQ ID NO: 39765 - DNA, 278 bp, Glycine max
  unsure (1)..(278): unsure at all n locations; Clone ID: 701121555H1
cgctacccttggctgcaagcttaagcctaagcctganacataccatagagaaagtgattcaattaatatattatatggtgtttctcttcaattcccatggagcctaagacacaacctcaagcgaatagtcctccaccaaaaccttgggaacaagcgggttcctcttctggtccagcacctttcaaacctccgtcagctggcaacacaagtgatgtagttgaggcttcagggactgcaaaacctggggaaattgtttctagttctgatangagtgcagc

SEQ ID NO: 39766 - DNA, 270 bp, Glycine max
  unsure (1)..(270): unsure at all n locations; Clone ID: 701121556H1
attccccgtcacttgtgccaatggggaatgggcaatagttcaaggactttccantgatgagttctcaaggaagaagttggacttgactgcagaagagcnttctgaggagaaggcattggcttactcatgcctaaattagacaccattgctttttgtctactgtccttgttagtaggttcccatgttttgcctatagaagtgtagcttcaattttgaataatgctccttctaagatacaaaggaactatcactggagaagagtctgttttt

SEQ ID NO: 39767 - DNA, 208 bp, Glycine max
  Clone ID: 701121559H1
aaatcacctattccggcaacctcaacactacctacccctaaatcaaatgtccttttctatctcttcttcgattctcctcacaccccaaacatcttaaccttccagttcaacatcttactcccaaccatgcttgtgtttcgattgaagcctggcagttacaaggaaacagcgaccctcgcactttcccacttcaggcacttggtcttca

SEQ ID NO: 39768 - DNA, 273 bp, Glycine max
  unsure (1)..(273): unsure at all n locations; Clone ID: 701121561H1
gcgacggggcattgtaagtggcagantggccttgctgccacgatccactgagattcaggattggntcngggtctganaaactcanagattgagtgttgtcatcagcttgatctctngnttaaccacggganaggagttaaataacagcacnacatcttgtttaaaaacatgttataacatttttgtggaattttttcattatgctcnatttgagttcttgatagtnagttaactttcttctaaaattnattcnattgtatgtccatattttgt

SEQ ID NO: 39769 - DNA, 271 bp, Glycine max
  unsure (1)..(271): unsure at all n locations; Clone ID: 701121562H1
cgatattttacacaccatttttgagacacatatggacatggttgggtctaacgccagtnacaaagaaaaggtttacctcgctgttggatgctggctatagttgtatcttgatacctggtggagtgcaagaagcatttctcattgagcatggttctgagattgcctttcttaaatcaaggagaggatttgtccgcatagcaatggagaagggaaaacccctggttccagttttctgctttggtcagtcaaatgtctataagtggtggaaacc

SEQ ID NO: 39770 - DNA, 272 bp, Glycine max
  unsure (1)..(272): unsure at all n locations; Clone ID: 701121563H1
ggacattttcagacatgggggtacacttatattatacagaggcagaaattataatccnaaaaagaggcctgtaattcctgtcatgttgtggaagccccatgaacctgtatatcccagactgattaagacaacaattgatggcttaagtattaaggaaacaaaagaaatgcggaagagaggactatctgttcctgctttacacaaaacttgccaaaaatggttattatgcttttttggtacccatggtcagagatgctttcctctcctgcgaa

SEQ ID NO: 39771 - DNA, 273 bp, Glycine max
  unsure (1)..(273): unsure at all n locations; Clone ID: 701121564H1
attnctntngatggttctnatgtcaattacagacatttggctatantntgtnataccatgacttatcgagggcatntgatgggcaattacacgtcatggtatcannccgaaatgatactgggccaatgatgagatgctcatttgaagaaacagttgatattctgcttgatgccgcagtatatgctgagactgattacttgaggggagtcactgaaaacancaatgttaggtcaacttgcccccattggcactggcgaatgtgcctgtatctta

SEQ ID NO: 39772 - DNA, 276 bp, Glycine max
  unsure (1)..(276): unsure at all n locations; Clone ID: 701121566H1
gtgggagtcccatcgcaatagacaatagtagctgttgctgtgcagtncttcagtcactatgatttcaagtggtctgnnactgaagcacttccgcaatgttgattcgcnccttcnattttcccaaatccanaccnccaattttactcccatgctgnccaaccatctcttctccatgctccattcgtttnaattcgcattncncataccggnggaccanagttcccctaaaatgtgcaccactcncctcntcagatnctctgccanctgatctntncg

SEQ ID NO: 39773 - DNA, 273 bp, Glycine max
  unsure (1)..(273): unsure at all n locations; Clone ID: 701121569H1
gaaatccttccatgttcaagcgcggtcaatgtggaaaccaaattggaggcaagtnttgggaggtgangtgtgatgaacatgggattgangccactggnaattacgtaggnaactttcatctncaacttgagagggttaacgtgtactacaatgaagcaagtggnggacngnatgttcctcgagctgtgctatggaccttgaaccagggaccatggatagcntgngttctggtcctttggaaaaatattcagacccgataacttcgtgtncggc

SEQ ID NO: 39774 - DNA, 272 bp, Glycine max
  unsure (1)..(272): unsure at all n locations; Clone ID: 701121570H1
tgggatttacaggctttggtatatttttctcattccttggccttatcttcttctttgacaagggattgctagcaatgggaaatattctcnntgtgtctggagtatccctgaccattggactgaaatccnccatgcagttcttcntgaaacgtagtaatttcaagggaacaatttcatttgggattggattctttattcttatcttggggtggcctattctgggcatgattgtggagtcttatgggttcatgtactcttcagtggtttctggc

SEQ ID NO: 39775 - DNA, 274 bp, Glycine max
  unsure (1)..(274): unsure at all n locations; Clone ID: 701121571H1
gcatgtccatcagcgttgaacaaaactaanagcagcaaaatgnncacacccttgttccatnaattcnaaaannttancntcncnctcttcaacgagaaaattaagatcgctagattaactctaacagatgtcacccctgcagaactgatgacagaagaggcaacaagtggaaatccatgggncccagatgccagaactctcagatcaatttcaagggatgctttnagctagangattatnngaggattgtggaganctgcataaaaggtttcta

SEQ ID NO: 39776 - DNA, 277 bp, Glycine max
  Clone ID: 701121572H1
tctgctcgtagggtttctccacctagagggaaatggctcccaaaccgcctagtacgggtctgtttgttggactgaacaagggtcacgtcgtcaccaagaaggaattgcctccacgcccctcagatcgtaaggggaaaacaagcaagagggtgcactttgtgaggaacctcataagagaggtagccggttttgcaccctatgaaaagcgtataactgagttgctgaaggttgggaaggataagagggcactgaaggttgcaaagagaaagctcggaac

SEQ ID NO: 39777 - DNA, 136 bp, Glycine max
  unsure (1)..(136): unsure at all n locations; Clone ID: 701121573H1
ggaggattgtctctcttcagtgacacttgagttcataccatcaattttcttctgaaattcccttacttgttcaagttcccaaagncacttcattggagaataaaggagccaatgaagtgtctttttgtcaagcttt

SEQ ID NO: 39778 - DNA, 241 bp, Glycine max
  unsure (1)..(241): unsure at all n locations; Clone ID: 701121576H1
gtcttctgcttcaaggaaggagagcntgttattcacgatcaccaaggaaaatgtcaggtgangaggttgntgttgcagctgagccagctgctgccatcccaggcgagcctatggatatcatgactgccttgcaacttgtgctcagaaaatctctggcttatggtggtcttgcacgaggccttcacgaaggggcaaaagtgattgagaagcatgctgcacaactctgtgttctagcagaaga

SEQ ID NO: 39779 - DNA, 262 bp, Glycine max
  unsure (1)..(262): unsure at all n locations; Clone ID: 701121578H1
gtttagttggaagatggaggcagtggaatcaatagcggttccggaaccggacgnagacgatccttcatcgacgcttctggatctctcgagttaccagctccacgaccttgactcggtcgagttgccacccagcctcaccgagttggacctcaccgcgaatcgcttgtccacgctggacccgcgcatagggaacctctcccatctcaagaagctctccctccgccaaaacctcatcaccgacgccgccgttctccctctctct

SEQ ID NO: 39780 - DNA, 270 bp, Glycine max
  unsure (1)..(270): unsure at all n locations; Clone ID: 701121579H1
ggggaagggaacagggagttttggtaagagaaggaacncgactcacactctctgtgtgaggtgtggccgccgcagcttccatctccagaagagtcgttgcgccgcttgtgctttccccgccgcacgcactaggaaatataactggagcgtcaaggcaatccgcagaaagaccaccggaactggcaggatgaggtacttgcgtaacgtgcctcgccgattcaagagtggcttcagagaaggtaccgaagctgcacctaggaagaagggagc

SEQ ID NO: 39781 - DNA, 268 bp, Glycine max
  unsure (1)..(268): unsure at all n locations; Clone ID: 701121580H1
acggcttgcagctgaattgggagataatgttccatctttgcctgcaggaaaagtgccttctctcgtgatgcctccatcacctgtcangtgtggaagtgattggcctcttctcagggtcatgcgaggcatgtttgatggggtgcttgacaatacaggtcggggagttgctgatgaagaagagtatgaggctgctnatggtgattggggtgaggagctgacatagttgatgcagatggcttacaaaatggngatgttacngcnattttgg

SEQ ID NO: 39782 - DNA, 273 bp, Glycine max
  Clone ID: 701121581H1
ctcgccgctcgatgggaattgcgcttcaaggcgtctcgtagggctaatccgcctcacgagggtcaccaacggcacgtgcctttggggggccgaggcccctactgctggtcggcaaacggacggcgggcgcacgcgtcgcttctagcccggattctgacttagaggcgttcagtcataatccaacgcacggtagcttcgcgccactggcttttcaaccaagcgcgatgaccaattgtgcgaatcaacggttcctctcgtactaggttgaattac

SEQ ID NO: 39783 - DNA, 268 bp, Glycine max
  unsure (1)..(268): unsure at all n locations; Clone ID: 701121583H1
ctgtatcctctgacttaatttactacaaacaggcanccaaggctcaaggnattantattgtttccanccatgggaatttgtttgagcacccaaattgaagctgggctgaattcaaagcatgtgagtgtcgatgcaaaaganctcagcagtccaagcagtaaaattacaaaagatctcagcaatccnnttagcaataaaatnccagaagatctcanncacaccaattagcantaanattacagaagannnnnnnacacnattagcantg

SEQ ID NO: 39784 - DNA, 253 bp, Glycine max
  unsure (1)..(253): unsure at all n locations; Clone ID: 701121586H1
cgtgtgggcaattgaggntgngcactaacactaacactcccaaacacgacgatatcnacgccattttcaaacaaaagcgnttcttcgaacgcaggtcagaaaaaccctcaagtccatcgtcctccctcaaatcccaccaagtaacaccgttcaagacatagtttgggagtccgtggttcagtcagtcgcagntgtgcgcgacataagtgcgtgtcttcgcgagtcgacnttcaaaatttgcaagtttgcacat

SEQ ID NO: 39785 - DNA, 275 bp, Glycine max
  unsure (1)..(275): unsure at all n locations; Clone ID: 701121588H1
gtgtgagtnagacggagagtgctaagcaatcgtcttctcttctcggagctggctttgnttatcgattctctctcctactcgtttctctaattccaaggtttgtaaaaganggcagatgccgaggatattcaaccccttgtttgcgacaatggaactggaatggtcaaggcaggatttgctggtgacgatgctcctagggctgtcttcccagtattgttggccgacctcgacatactggtgttatggttgggatgggtcaaaaggatgcctatgtt

SEQ ID NO: 39786 - DNA, 275 bp, Glycine max
  unsure (1)..(275): unsure at all n locations; Clone ID: 701121589H1
ttaatctttgtgaaaaataatgttcatcgngaattttaaggttgagtgtcctaatgtgaagtacaccgagactgagattcagtccgtgtacaactacgaaaccaccgaacttgttcacgagaacaggaatggcacctatcagtggattgtcaaacccaaatctgtcaaatacgaatttaaaaccaacatccatgttcctaaattaggggtaatgcttgtgggttggggtggaaacaacggctcaaccctcaccggtggtgttattgctaaccgag

SEQ ID NO: 39787 - DNA, 265 bp, Glycine max
  unsure (1)..(265): unsure at all n locations; Clone ID: 701121590H1
gttagaactgtgctagggttttacgaaaccaccgaagttgcagaaagaagaaganaaatggtggctgacaggagcaagaagccgaaggtctccgacaagggcgaaaacctcgatgaatccgacggagaactcgtcctctccatcgagaagttgcaggagatccaagacgagcttgaaaagatcaacgaggaagccagtgacaaagttctggaaatagagcagaagtacaatgagatacggaagcccgtttatgntaagcgcatga

SEQ ID NO: 39788 - DNA, 270 bp, Glycine max
  unsure (1)..(270): unsure at all n locations; Clone ID: 701121592H1
aggggtgttggtggagataagtggtacttgtatagctgcttacaagactgtaaatattggtgctgtttaatacacgagactagttctctttcgatggtcccttttgagtgaaaaaccttgtcttctcagctttctttggagagatcttaaagacattgactaacaacaataaagtggatcaatcaaaagacttacntcttcttcnaacaacaataagatctcangcnnnnnnantcatgaagagnntganaagctcagattcttccagtg

SEQ ID NO: 39789 - DNA, 270 bp, Glycine max
  unsure (1)..(270): unsure at all n locations; Clone ID: 701121593H1
cgaagattcactcaaggagctactgtcttggttgggcaagaggcttgatttccatccatatttctcantcttaccccttgtcagaggccaaccttgccttttctgccatcaaagataggaaagttattgggaaggtgatgattgtttttgatgagaaacctacaagatctaagctctgatcctgccaaaattatgctatatggttgaataattgttatattagcaaccaagagatgttagtttacggaaacaaaataaaaggagcaataa

SEQ ID NO: 39790 - DNA, 270 bp, Glycine max
  Clone ID: 701121594H1
gccgcagcagcctcaggaggagaataaggatgtctcacaggaagttcgagcacccaaggcacgggtcactgggatttctccccaggaagcgtgctgctcgtcacaggggaaaagtgaaggcattccccaaggatgacccatccaaggcacccaagctcactgcattcttgggttacaaggctggtatgactcacattgttagagaggtcgagaagccaggatcaaagcttcacaagaaggaaacatgtgagcctgttacaattattgaga

SEQ ID NO: 39791 - DNA, 253 bp, Glycine max
  unsure (1)..(253): unsure at all n locations; Clone ID: 701121595H1
ctcttccaattcattgcttccaagacntccctctcacaacctacgcttggggacgtcggcactgangagcggccaagctgccaaatctttagctgcaatatacaagaatgtgatagccacagatgctagtgacaaacaacttgaatttgcagccaagctcccaaatgtgagataccaacacaccccttcaaccatgtcgacggccgagcttgaacaaatggtggcatctaagggaaccatagaccttgtgacc

SEQ ID NO: 39792 - DNA, 271 bp, Glycine max
  unsure (1)..(271): unsure at all n locations; Clone ID: 701121596H1
agcaactcctataccaaagnttattcctcaaacaaaaacttcnaatgcggattcaaatttatcagaatttcctatntatctttctcataattgcacaaacaaaaccttcnatgccaacaacagtgctttccaaacacacctcaccagantcttatttaacctagcttctaatgccacaaccgggaataagttttataaggctgatgtggctaacacagtgtttggnctctcttgtgccgagaccaagaggatcttccttcagggctttgtg

SEQ ID NO: 39793 - DNA, 284 bp, Glycine max
  unsure (1)..(284): unsure at all n locations; Clone ID: 701121601H1
gttttgnangtntgaatctatagaatagaatcaaaccaaattgaaagaagatcgatcgatcgatccgatggctctggtccggagttgaagtgaagcatgcggcggagngcgcaccggaggagaattgctccgccaagcccnccaancagggcgagggcctccgccactactnttctcacaacatccacgagcatcagctccttctccgtcaaaagacgcataanctcanccgtcttgaggctcagagaaacgagctcaattccagggtgangatgctgcgcgaa

SEQ ID NO: 39794 - DNA, 276 bp, Glycine max
  unsure (1)..(276): unsure at all n locations; Clone ID: 701121602H1
gtatgagaagaagtgggtcatcggaactgaagtgaagtgatgcgcggcaacatttgggaaacaaaatggttgacagtgagcataaccctaacactcaccgccgtttccatctctgcgtacgtattaaagagaaaatggaatcatctgaactccaaaaattgaggagcttgaggcatctctcaagtcttctcagacaattgcgcctccgaaagacaaggccgaattagagctcaacaggccttgagaaaagaagtaacacagtncgcaacctattct

SEQ ID NO: 39795 - DNA, 264 bp, Glycine max
  Clone ID: 701121604H1
aaaaagcctcattaccaatacaatcatacgcttgctacaatattagtggaatatgcttctgcggtatacttgtcagatttaactgaactttttacttggacgtgctctaggtgtaatggctgaccaagggatttgaaatgatagagttagttgttgacgtcgagcattgcttacaggcatttgttggagtggccgatgatcctgtgccatatcattgcattcagaggaacaaatgaacacagcttacagaattggatgaagatt

SEQ ID NO: 39796 - DNA, 259 bp, Glycine max
  unsure (1)..(259): unsure at all n locations; Clone ID: 701121605H1
cagagtntccatatcattgaactcanatgnagancttnatgtttcaagagntgaaagggtgccanaaagctcactgccacngatatgctttagaganggcagccctcctctgccanatgctttaaacacttctctgaaggattcagctgtcaaaggaataaatggtcntnatgttgagcagtgntttcctatggagaaaaatatcactatgagattgacaaatgagcngatatcnccaggtgctnggtacattggtctt

SEQ ID NO: 39797 - DNA, 200 bp, Glycine max
  unsure (1)..(200): unsure at all n locations; Clone ID: 701121607H1
gtatgcatttcgttgagaaagagtgtttcagatcccgaaccgcatcgtacggtaccanaagtacgagttacggttatagttattggtagtagcgttangtggatcagatcagaattgtgatcgtggatcgaagcaatgttcaaattcttgaaagaggtggtgagtggatctggcacgggcctcaaagatcttccacacaa

SEQ ID NO: 39798 - DNA, 268 bp, Glycine max
  unsure (1)..(268): unsure at all n locations; Clone ID: 701121608H1
cttctctctccccgcccaaaccctaactccctaccctattccgctttctctcatccatcatgaaaggnggaaagtccaagaccgaatctaagagagccgatgccaaacttgctgtgaataagaagggcgccgccaccaagactaggaaacccgccggaaaggggaaggcagcgaaagatcctaacaagccaaagaggcctccaagtgctttcttcgttttcatggaggaattcaggaaggtgttcaacaaggaacatcccgacaacaa

SEQ ID NO: 39799 - DNA, 266 bp, Glycine max
  unsure (1)..(266): unsure at all n locations; Clone ID: 701121609H1
gttattgtagacaataatcctttcagctttgtattgcaaccggtgaatggaattccgtggcattccattttctgctgggcaaccacatgacacccagcttctagatgtcattcttccacttctcaagcaactttctgagcagaatgatgtaaganctttcctctatgaaaagntccacatgcctgattggttccagaaacaagggattccagcttccagttggactttgtaggattaaactagtttgccattaagctctctgtttt

SEQ ID NO: 39800 - DNA, 263 bp, Glycine max
  unsure (1)..(263): unsure at all n locations; Clone ID: 701121611H1
cccattctccagaaactctacaccgaaatcgaganccgataagatcgaaatcgacggccacctcatgaacgacatcattctagggttctccaaagccggtgatcctacacgcgccatgcggtttctagcnatggctcagagcaacggactgaaccctaaaccctcgacgcttgtcgcggttatcttggcgcttgggaattcgngaaggacgcacgaggctgaagcgctgtttgaggagattannnnnnacgggtcggaaccga

SEQ ID NO: 39801 - DNA, 259 bp, Glycine max
  unsure (1)..(259): unsure at all n locations; Clone ID: 701121612H1
gccgctncttagtcaatggggcagcaggttcggcatctactaaaaaaagagagaatccacttgagataaccacgcctctgctaggcagcgtgtggaatggccaagagcggaccttttnggatatataatcaaaagagtggngttacgggaacagccgtctgatggnnaactactttcacgttcggttcagagagccctttatttttcgtcgagaattctcgntcccttcgtgtgaatccccagcggcgaattcaaaact

SEQ ID NO: 39802 - DNA, 262 bp, Glycine max
  unsure (1)..(262): unsure at all n locations; Clone ID: 701121613H1
atggcttgcaggcaattgtgggcttcaagagctgcctcttacctgaggatctctgtgtttcacagaggcttttctaatgttgttaaagatttgaagtatgctgattctcatgagtgggtgaaagttgatgaaaattctgcaaccgtcggcataactgatcatgcccaagatnntttaggtgatgtggtatatgttgaattgccagaagtgggagcagctgtaacacaaggaggtagttttggtgcagttgaaagtgtgaagg

SEQ ID NO: 39803 - DNA, 258 bp, Glycine max
  Clone ID: 701121616H1
ggaaattctggttatggtcgtggtgattactttctagttggtcatgacttcccaagctacatggatactcaagcaaaagttgatgaagtgtatcgtgataggaaaaaatggctaaaaatgtccatcctaagcactgctgggagtggaaagttcagcagtgaccgaacaattgctcaatatgccaaggaaatttggaacatagaagagtgccgcgtgccataatttctgctggatgtgtctcttgcactcaagttactg

SEQ ID NO: 39804 - DNA, 277 bp, Glycine max
  unsure (1)..(277): unsure at all n locations; Clone ID: 701121617H1
acaggctgtggtattgacccaagtaaatgggaatctgtgtttganagctttgagcaagctgatccatcaactactagactgcatggaggcactggtcttggtctttgcatcgtccgaaccttggttaataagatgggtggagaaatcaaggttgtcaaaaaggagggctcaggaacactgatgagattatgcttgcgtctcagtgcacctgtggatgccacagaacaacattgtcaagtagattttgctaacaagggcttggtggtgcttcttgcac

SEQ ID NO: 39805 - DNA, 274 bp, Glycine max
  unsure (1)..(274): unsure at all n locations; Clone ID: 701121618H1
gttaggtcactcttccagatggcgngtacaaagnaaactgntcgcaagtccaccggcggcaaggctccccggaagcagctggcgacgaaggccgctcggaagtctgctccggcgannggcggagtgaagaagccgcacaggttcaggcctggaacagtggcccancacnagatcagaaagtaccagaagagcacggagcttctgatccgaaagcttccgtttcagcgtttggttcgtgaaatcgctcaggatttcaaaaggatctgaggtttca

SEQ ID NO: 39806 - DNA, 134 bp, Glycine max
  unsure (1)..(134): unsure at all n locations; Clone ID: 701121621H1
atggcattggatatgattgatgttgttcccaggacgaggatggaagaagaaaatatagcaatacaagaagcagcttccgctgggttaaagagcntggagcatctcattcgtctcctttctccttcttcttctcc

SEQ ID NO: 39807 - DNA, 266 bp, Glycine max
  unsure (1)..(266): unsure at all n locations; Clone ID: 701121622H1
agagtgtctaatcgaagatagaagaagagatggctaaatctccagaaactgaacttcccgtcgaagctttcngttgggctgcttcagacacttctggcacccttgcaccttttcatttctccagaagagaaaatggcgttgatgacgtcactctcaagattctcttctgcggggtttgccactcggatctccacactntnaanaaccacnnggtttcaccacttaccctgtcgttcctgggcatgaaattgttggtgttgtgacaa

SEQ ID NO: 39808 - DNA, 268 bp, Glycine max
  unsure (1)..(268): unsure at all n locations; Clone ID: 701121623H1
cttgccggnaaggatgcgtcgcacacatattgtcgtacatttgtactcctgaagacatagtcaggctctccctcgtttccaaggccttttattctgcagctgattacgacactgtgtgggatcgttttataccctctgatttctcctctaccatttctccactttcttcctctaantctaagaaggatctctatttcactctctccgaccgtcccaccatcatcgaccattgtagaaaggtacgtacattnttnctccttgcatgtag

SEQ ID NO: 39809 - DNA, 265 bp, Glycine max
  unsure (1)..(265): unsure at all n locations; Clone ID: 701121624H1
gcctactgcagctgccattgcatatggtcttgataagaaggccacgagtgttggtgagaagaatgtgttgatttttgaccttggtggtgggacatttgatgtgnccttactcaccattgaggagggtatctttgaggtgaaagccactgctggtgacacccatcttggaggtgaagattttgataacaggatggtgaaccactttgttcaagagttcaagagaaagaacaagaaggacattagtggaaaccccagagcacttaga

SEQ ID NO: 39810 - DNA, 241 bp, Glycine max
  unsure (1)..(241): unsure at all n locations; Clone ID: 701121625H1
ccctttgggtnctctcgctccaacaacaaggctgcntgntaagcctctctctcgtggagcaacaactgngaaatctgtggaatcaaaggngcaagctgagaagtgtgccaagagaaagaggaagaaccagtatcgcggaatcngccagcgtccatggggaaagtgggctgctgagattcgcgacccaagaaagggggttcgtgtttggngngaatttcagcactgctgaagaagctgcaag

SEQ ID NO: 39811 - DNA, 265 bp, Glycine max
  unsure (1)..(265): unsure at all n locations; Clone ID: 701121626H1
ttgaattcanaaaacntnagtntcttccntgtnttntnctntctacctcananaccanacatnncgantcccatgnggcaactaccgactgcgctgaacaagactagctgnaccangggaancanctatggtgttattgtagagactgagaagagttacatcgagactgttgtcatggatgttccagcagctgagcatgatgggangtgcaagtgtngcactaactgcacttgcacggactgcacctgtggccataaggatatgt

SEQ ID NO: 39812 - DNA, 56 bp, Glycine max
  unsure (1)..(56): unsure at all n locations; Clone ID: 701121627H1
ctctagccncangtccanctgncatttnatataggaagcatgtaaatttgcgnagt

SEQ ID NO: 39813 - DNA, 245 bp, Glycine max
  unsure (1)..(245): unsure at all n locations; Clone ID: 701121630H1
gaggaccccaaccagaggtcaagnnngaaaanagaatgctgccagtggagagaattcagaatctggagctgcaggccaaggagcaggtgaagggaaaaaggctctgtaccactgcaattattgtaataaagatataacaggaaaaatccgtattaagtgtgccatgtgcccagattttgacttgtgtatagagtgcttttctgttggagctgaggtgacacctcataaaagcagccacccttaca

SEQ ID NO: 39814 - DNA, 268 bp, Glycine max
  Clone ID: 701121632H1
tgttagtcatcctactgatcgtgtgtttggtcagcaccaatggcaagcactgagaacaaagctagcgacatggagaggaaacattgcaaatgttatcagtaccattcaggccaacaaaataacggaggatgggtctcaggcagcccaaggtttggtagttaggtgagaggacgtttccaactgaagcaattttcttaagcatatagattttatcccggtgaagttttttttaatctaaaacagagaaggaaaaaattttactccccaa

SEQ ID NO: 39815 - DNA, 230 bp, Glycine max
  unsure (1)..(230): unsure at all n locations; Clone ID: 701121634H1
gttgcttttcatannatccaaatcaccaaanacttttctanttatttttctgcncataatcgactgattgtcacatcacacagttggtgtatatgtcatgtaaattatgtccttgagtcatgactatcagantgttgaacnaatctcctttccgatgtgtacataattgacatatccattcgtaagacgactatctaatgttatggttgtcccnataatataaattanac

SEQ ID NO: 39816 - DNA, 126 bp, Glycine max
  unsure (1)..(126): unsure at all n locations; Clone ID: 701121635H1
ggagccttttgcactttcctctgtggtgttcttccctttagtgtgtcanttttcttttttangttnttctcttctgtcatctctgtactcaaacaaatcntgggaaatattttaaattttaatttt

SEQ ID NO: 39817 - DNA, 270 bp, Glycine max
  unsure (1)..(270): unsure at all n locations; Clone ID: 701121636H1
cntctccactctcggcttcttcntcgttgcgctttnncccaaaaccanttgcatcactctcgtccgttcaccgccgctgccctagaccaccgcaagcnacgtcncacaccgccttcatccgttanggcngaaatgagtcgannaantggaggtggatacgatcgtcacatcactatantaaacccctnaaggacgtctctttcaagtggannatnctttcaaggctgtgaaagctgcaggaatcacctcgattggtgtccgaggaganga

SEQ ID NO: 39818 - DNA, 266 bp, Glycine max
  unsure (1)..(266): unsure at all n locations; Clone ID: 701121638H1
aaaattgatcatcacaataacatggcttcagattttaatctatccccttcggatgcacatcccgagactatngatttcctttcacttgcatggtgtaactttgctgtgcaagctctgcagcctgagccacaacatggatcagttgttctacttgataataactctatgaagcaattagagcctagtagccccaacgctcctccttcgatggaaaagagtgatagaatggatggtgcagatttcgggtcattcccagcatggaagtc

SEQ ID NO: 39819 - DNA, 264 bp, Glycine max
  unsure (1)..(264): unsure at all n locations; Clone ID: 701121639H1
cnctctctcttttctctgtgtgtgtgcgtggattggtgaattggagattgaagaagatnangcaggctggacccggcggcatggcccaacaagcgaaccagcaatangcacagcaacagcaanaacaacaanaanaagcctacatgatgatgccgccgcagcctcancccccncagntttgggccccatcggnccagctccgncgcctatnggtagtccnccgcnacncancanngcncatgangnccgtagnctctngatgng

SEQ ID NO: 39820 - DNA, 233 bp, Glycine max
  unsure (1)..(233): unsure at all n locations; Clone ID: 701121640H1
gggggagatctgattcgggagggtngttgagggantgtcacgtggttttcgcagtggtctcagcgttncgcgtgtgtggccctgctctttactggcgnttcaagaacgccatcactctccgcnacaacaacaacaaactctcttgcccttcctgcctctgtgactgccctccccctctctcgctcttccaacttgctcctgggctggcgaatctctctgtctcagattgtgga

SEQ ID NO: 39821 - DNA, 261 bp, Glycine max
  unsure (1)..(261): unsure at all n locations; Clone ID: 701121641H1
aagcttcactgntctaaagccaactgtgtttnnccagactgnactgctatggcagctaagctccgtgcaatgaatcntaatgctggagngcaagttcattctcatcaacncgaagcannacatcttgttccatctngactgcaaggnncaccccanaaggtcnncactgtctttctatgcagctnactgcnnantactttgcccnganacctgangacnnggnagcttncaaatgaaaannagntcatgntccnaaacttt

SEQ ID NO: 39822 - DNA, 261 bp, Glycine max
  unsure (1)..(261): unsure at all n locations; Clone ID: 701121642H1
gctacacccctttgagaatctacttaagaagtcaatctanaaccctngcctctcacatacncnngtctncctgnacanncctccttcacgtccncatnacntactatcannctctnngcntaagcttngnatcaaangcttgccntaggcgctgnttggacnaatttcaacctcgncgtntcgnancgnctctacattgggtctccggcgtatacaagaaaacatggcccggtgtttcgtgaagggcgtcttcancngttg

SEQ ID NO: 39823 - DNA, 259 bp, Glycine max
  unsure (1)..(259): unsure at all n locations; Clone ID: 701121644H1
agggtaccnacagagcctcaagnttntcccttaacggaatgactgctcttgtgaccggtggaactcgtgncnattgngcatgccatagtggaggacttatgtgggtttggtgccactgtccacacttgttccagaaaccaagctgaattggataagtgtttgacagaatggcgtacaaaggttttttggtttctgggtctgtgtgtcatgtctcatctcaaccccacagagagaagttcattcangaagtcacttccat

SEQ ID NO: 39824 - DNA, 262 bp, Glycine max
  unsure (1)..(262): unsure at all n locations; Clone ID: 701121646H1
catccctcttgatttgaaggttgttttgtgcttatagataaaagttctgccaaatcaagaggggttttcagatcatannnnnnnnnnnnnnnntaaacaatggctaagttctttgctgctatgatcttggcnctcattgccatttccatgcttcaaacagtggttatggctgctaatgagcaaggaggccacttgtatgacaacaagagcaaatatggaagtgggagtgtcaagagataccaatgcccatcacaatgctcgg

SEQ ID NO: 39825 - DNA, 265 bp, Glycine max
  unsure (1)..(265): unsure at all n locations; Clone ID: 701121648H1
gccgtgccttacaacaacaataacattttgggtgttggtggagttggtctcaatggaggcttcaacaaaggaatttactccaagcctggttttgccaatcttaacaacaatattaacctgaatatcaatcctaagggacacaagttcaaggatgaagatgagcttttcacccatccaaaccttccaaganannnnnnnnnnnnnnnnnnnngcatgggggcaacaccaataacgatgataacagcaaggattccaaggctgctgg

SEQ ID NO: 39826 - DNA, 261 bp, Glycine max
  unsure (1)..(261): unsure at all n locations; Clone ID: 701121656H1
ctttctctctctgtttggtttggcctcttnctgnaagaagccagccacactattacgcttctgtggaaccatcgatcccactcaatgggcctttgcaagttccacatcggttgagctttgtgncaggtggcttagtgttatccttaattattcttgtgacgcactagtttgtatgatcatattttctcggattgtttaggaggtctagtttaattgactgaccaggatggatgaattattataaatctaaccttcacttca

SEQ ID NO: 39827 - DNA, 258 bp, Glycine max
  unsure (1)..(258): unsure at all n locations; Clone ID: 701121657H1
cacagttctcaagctcaccttgacngcgtcttatgaactcnggncncgntataaatgannacccctgttactgatgatgttcctgtaaatgcanatattaagggtggnactgtaaattcttggaggagagataatcaggcttataacgaggaaggtgtgaggtcaggcatagagaaatggcaggganattcccagccttatccaaatgccggtattccacacaacatagtnnnnggganatggantcnggtgaggaat

SEQ ID NO: 39828 - DNA, 246 bp, Glycine max
  unsure (1)..(246): unsure at all n locations; Clone ID: 701121658H1
atttcacagtgcggagatcctcnctccatngatcgccggaaaagcaacgagacaacnaagtcntnnanaacctcaaccgtcgaattgccaccaccaatactcagtcctcagaagcccttatantcaacgcattatgcncgcttggctggccttcgccttctggattgcgaacactgtctactcnctcgaactcgttacnnancctnctctcacactcttcttcatctngattacngangtcnccat

SEQ ID NO: 39829 - DNA, 260 bp, Glycine max
  unsure (1)..(260): unsure at all n locations; Clone ID: 701121659H1
attttctagggtttatacaattttcgatggcttcttcacatgttgagtaccgttgctttgtncggtgggctcgcttgggccactgacgaccaagctctcgagagagccttctctcagtacggcgaaatcgttgaaacgaagattatcaacgatcgtgagactggaagatccaggggttttggatttgtgaccttcgcctcggancagtccatgaaagacgccatcgaagggatgaacggccaaaaccttgacggccgtaa

SEQ ID NO: 39830 - DNA, 259 bp, Glycine max
  unsure (1)..(259): unsure at all n locations; Clone ID: 701121660H1
gaggtttctcttcactcatccttcgccctaactgcgtatccctaccaccgttctanacaggacctacaaacatanaaaatagatgggattgtcgaatacttctgaggatttgtcatcagagatggaggttgatgcctttagacgcctttttccacatcnnnancnagnaantcatctngcancnatataaggccagatggtanaccacttggaaaagctanagaaacaagtatttttcttggtgctgttgcgtctgnaa

SEQ ID NO: 39831 - DNA, 63 bp, Glycine max
  unsure (1)..(63): unsure at all n locations; Clone ID: 701121661H1
ctcangcnctctgcaaccttaanctangtgcactgtgatgtgngtnnccttgggtacatgcgg

SEQ ID NO: 39832 - DNA, 71 bp, Glycine max
  unsure (1)..(71): unsure at all n locations; Clone ID: 701121663H1
gnnctanaagtntttcctntgctatttanttcgnnaaatcccattcttgttcgctcattcctctggactgc

SEQ ID NO: 39833 - DNA, 271 bp, Glycine max
  unsure (1)..(271): unsure at all n locations; Clone ID: 701121665H1
ggnagacttggcaacaacttaccaacccctcaagaagttgtggccctctacaatcangccaacattcgcagtnncccgaatctacggtccaagcccagaagtcctcgaagcntaanagnttccaacattgagctttgcnngacattncnncgacaacctcnntccncctagcatntanccaaganantgcgancaaatgggtgcaanacaanatcgnnaatatgccaanaatgtcagattcagatacgttncagtgggaatgnatganncc

SEQ ID NO: 39834 - DNA, 269 bp, Glycine max
  unsure (1)..(269): unsure at all n locations; Clone ID: 701121667H1
gtccttccaagatgagagtantcatcaatcganaaggaattgacttncccagatgcgcantgncatgcaggctattgcaggantgggatacggttgagaatatgcaaggagtattggaataccagacaagatattctaaatttcaaagcgtggcaaatattaccttgcacttncctgagaancatggtggngacactactaaaatacactatattggcttaaaggcgaacaactcaggngaaaagggangnngttgccacnatnaagta

SEQ ID NO: 39835 - DNA, 265 bp, Glycine max
  unsure (1)..(265): unsure at all n locations; Clone ID: 701121668H1
agaatatgaagttgtttgtnttntttgtngctgcagtagttttggtagcatggccatgccatggcgcaggctaccaaaggttccctctncgaatgaaaactggctatggtgancgttcttnggaggtaaaatgcgcaagttttaggcttgntgtggaagcacacaacatangantnaaannaannattcntgaagagtgngttgaancagcaaaggactacattaatggcgaacaatttagatcagantctaaaanaggtaanca

SEQ ID NO: 39836 - DNA, 265 bp, Glycine max
  Clone ID: 701121669H1
gaaagatagtgagtgaagtaactgaagagaagaaaaaatgccgtgcctcaaccttcagcaccaacgtgtccctcgaaggcgtcgacacctcttccatcctcgccgaagccacctcctccgtcgccagcataatcggcaaacccgaaggctatgtgatgattgtactgaaaggatcagtacccatagcttttggtgggaatgagcagccagcagcttatggagaattggtttccattggtggtctaaccctagtgtaaacaaggaa

SEQ ID NO: 39837 - DNA, 263 bp, Glycine max
  unsure (1)..(263): unsure at all n locations; Clone ID: 701121670H1
tgaccccangagtgtgtccttcntcatgtgcaaggncanttgcnccagacaattttgactgtgcaaanntgtggaganggagttgcacccttggtgggtctatatttganactngtacctttcctaatattgngccgtggattctgtcccctaataanacatttcttttggtatttgattaccagcggtgaanttggtcatcatccatctgacagtggacacctagggacngtatagttggctcgtgcatgttgtaggnttat

SEQ ID NO: 39838 - DNA, 209 bp, Glycine max
  unsure (1)..(209): unsure at all n locations; Clone ID: 701121671H1
atgngtgacgttcagatccacaagaccaaactctgcatcatcggaagcggtccctccgcccacacagccgccgtctacgccgctcgagccgagctgaagccgatcctcttcgagggctggatggccaacgacatcgcccccggcggccagctcaccaccaccaccgacgtcgagaacttccccgggttccccgacggcatcctcggcgg

SEQ ID NO: 39839 - DNA, 263 bp, Glycine max
  Clone ID: 701121672H1
atttatgatacccctgctgctgtgcctcctactaggcttttcaaagccatgacgttagatttaccataacctcttcccaaagcttgtggatagcatccacagcattgttttcacacaaggaaatggtggtccgggcaccatcaagaaaatcagcaccattgaaggtggcaaaaccaagtatgtgctgcacagagttgatgcaattgatgaggctaactttgtatataacttcagcataattgagggcactgccttggttgaca

SEQ ID NO: 39840 - DNA, 242 bp, Glycine max
  unsure (1)..(242): unsure at all n locations; Clone ID: 701121679H1
gccgcttcagacggaggcggnggttggtgatgacgggaagcttcatgtgacggtgaggaagtcggcgagttcncggtcggagattttctctaggcgctctcatgcgcnccaactcggtgtcgttgactccgaggccntcgaatttgaccaatgcggagatttactcgctgcagagctcgaggaacccgactccgagaggctcgagttttaaccacacggatttttactccatggtgaatggt

SEQ ID NO: 39841 - DNA, 264 bp, Glycine max
  unsure (1)..(264): unsure at all n locations; Clone ID: 701121680H1
gcatctctgccctttggagatgatgtgcgacatggcagaaatttcaatcacgttaatttaagcaaaaggtttgatggtgataatcatgccanacaagatacttttnactgggatggacacaaggaagaagcaaatagaagatccggctaccataataactaccacctggatcacgagactgcatcaatggcagcacttttccaaggacgagccgttgnccccaatgcaattnnttgcacgcgtccctgctgccatactatattg

SEQ ID NO: 39842 - DNA, 270 bp, Glycine max
  Clone ID: 701121681H1
ggagagaactctttgcgtgacaatagtactccaactacattttctgctagctcagattcaaaatgagttccagtttgcttctgtgaatgcatctttgctcagcatatcatgcttgaaggctaactgtttgctcaggcatgacatgatgaggaatatatgctcgaggcagttgttggattccaataaataaaaaaaagaatctgagacacctgtgtcctagagctaaaaactttttctttgtgtatatattatataagccgagaaccgtag

SEQ ID NO: 39843 - DNA, 260 bp, Glycine max
  unsure (1)..(260): unsure at all n locations; Clone ID: 701121683H1
gatgatggggccaacaatggtggcagaagcaagancttgtgagtctcagagcnaccgtttcaaggggccatgtttgagtgacaccaactgtggctctgtttgccgaaccgaacgtttcactggaggacactgccgtggcttccgtcgcagatgcttctgcaccaaacattgtnaaattttaaaaaattaattaagagtgctttgatagaagatgatagatnctatcatctttctactacgtgttgttaattaaccacttt

SEQ ID NO: 39844 - DNA, 260 bp, Glycine max
  unsure (1)..(260): unsure at all n locations; Clone ID: 701121684H1
cggatgcanaccaaccagaggaaaaccattcaagccctgagttgctacttgcacaagttatggcagcttgcaaaaagtatgaggtgaaggtttcaggtcaaaattcttctgagtctggtgttccaggtggttttgaacaaataaagaagaatctatctggagataatgtattggatttgttcacatatcatagaatgggagcatcttctttctccagagcatttccttgttcaccgagtttgtccggagcctaagcaacc

SEQ ID NO: 39845 - DNA, 263 bp, Glycine max
  unsure (1)..(263): unsure at all n locations; Clone ID: 701121685H1
gccctagcacccttcagcccactattgtttctgcctcgtgggaccgcaccgttaaggtttggaacctgncaaactgcaagttgaggaacacgcttgctggacacaatggttatgtgaacactgttgctgtttcccctgatggctctctgtgtgccagtggtggcaaagatggggttattcttctgtgggatttggctgagggtaagcgtctttactccctcgatgctggttctatcatacatgcgctctgcttcagccccaac

SEQ ID NO: 39846 - DNA, 259 bp, Glycine max
  unsure (1)..(259): unsure at all n locations; Clone ID: 701121686H1
gtttggncaatctgtctctgaatgattattccatttggagcaacagctcacagctccaagaggcctgnccagaggaggaactttgatgtcaagggcagtgatttcaacaacttcatcaaagccttttgatgatgatttcaatgatggctggaagatcaccaattccaatggaccccttttctctatgccacacaacatangacaactcannnnnngtngnngttcaaganggaggaantattccannantaanannnnt

SEQ ID NO: 39847 - DNA, 265 bp, Glycine max
  unsure (1)..(265): unsure at all n locations; Clone ID: 701121687H1
ctcttctccgccacttctnaatctattgaatcaacaatcatgtcgnacgaagagcaccatttcgagtccaaggccgacgccggagcctccaaaacctaccctcagcaagccggtncccatccgcaagaacggctacatcgtcatcaaaggccgcccctgcaaggttgtggaagtttcgacttccaaaactggaaagcacggtcacgctaagtgtcactttgttggaattgatattttcactgccaagaaacttgaggatattgtg

SEQ ID NO: 39848 - DNA, 259 bp, Glycine max
  unsure (1)..(259): unsure at all n locations; Clone ID: 701121689H1
gcaagtntnaggcttgctgtggaagcacacaacatccgagnacntaaaaccattcctgaagagtgcgttgaaccaacaaaggactacattaatggcgaacaanttagatcagactctaaaacagntaaccaacaagctttcttttatgctagtgaacgcgaagtccatcacaacgacatatntatattcggcatagataacaccgtactctctaatatcccatactagncgaaacatggatatggggtggaggaattta

SEQ ID NO: 39849 - DNA, 150 bp, Glycine max
  unsure (1)..(150): unsure at all n locations; Clone ID: 701121692H1
gaccctcatggtcacagactccaagcccatcattccccggcgcggcctcgtcgtcggcaactactgtcatgacgtcctccaccgcgacggcgagagccgtcgccgagaccctcggcggngccgcctccttcatctccgttatnctcgatg

SEQ ID NO: 39850 - DNA, 262 bp, Glycine max
  unsure (1)..(262): unsure at all n locations; Clone ID: 701121694H1
ctgaaacatcttcatcatctacgaacgaccataaattttctctctttccctttccctntctctgtcnnnnnnnnnnnnnnnnnnnttctgtgagaggcatagaggaagatgaaggaaagcagtgatgggtttgtgagagcggatcagattgatctgaagagcatagatgaacagttggagaggcacctcagcaaggtgttgaccatagaaaagaaaaagngctctgaaggggaagaagatgctgatcatgttcatcttcatg

SEQ ID NO: 39851 - DNA, 267 bp, Glycine max
  unsure (1)..(267): unsure at all n locations; Clone ID: 701121696H1
gtgganatctagtgcttctgctgcaagacctcgctgaaaattagggtttcgattcggaggtagacgaagatgttcggaagggctccgaagaaaagcgacagcaccaggtactacgaaatcctcggcgtttccaagaacgcttcgccggatgacttaaagaaggcttacaaganagccgccattaagaaccatcctgacnaaggcggggatcccgagaagtttaaagagcttgctcaagcctatnaggtttctgagtgaccctgagna

SEQ ID NO: 39852 - DNA, 244 bp, Glycine max
  unsure (1)..(244): unsure at all n locations; Clone ID: 701121702H1
caatgactggacaattgaatgctaagagtgangtatacaattttggcgttgtccntctggaacttctgactggaaggaaacccgttgatcatacactaccacgtggacaacagagtctggttacttgggctacaccaaaactcagtgaggataaagtcaggcagtgtgttgatacaagactaggaggagaatacccacccaaagctgttgctaagatggccgctgttgctgcatgtgtgtgcaa

SEQ ID NO: 39853 - DNA, 266 bp, Glycine max
  Clone ID: 701121704H1
attcaaatggataaacaagaagtggagagaaggttttcatgtgacttcaatggctactgctggaagtcgttggggtgttgttatgtcacgaaatgctggattcagtgatcaggttgttgaacttgattttctctatcctagtgagggaatccacagacgatgggataatggttataggattacagcaacggctgctacatgggatcaatctgctcttatacttagcattcctaggcgcagccaggagatgaaacccaggaaactct

SEQ ID NO: 39854 - DNA, 263 bp, Glycine max
  unsure (1)..(263): unsure at all n locations; Clone ID: 701121705H1
ggcgcctcaccgcaactgcaaatgaggttgaagtcctctttcatcggagatcgtctcttacgctgttcaacttcaaggcancaacctcttcctnaactattccgttacaaccctggaaccaagcatgtttcgatgcagttatctagaacactttctggcttgaccaatctcttttttaatagangaaatttggatgaatngcctaacagcaagcgtaaacgtctgagactgggaaagtttctccgcggcgacagggccgaaga

SEQ ID NO: 39855 - DNA, 264 bp, Glycine max
  unsure (1)..(264): unsure at all n locations; Clone ID: 701121706H1
accacaatcatggaagttgatancaggtttctgaacactggcctcctccttgtggccacaatctttgtggtcaagctcatctcagcctgacatagtgcncaaatccagaaagagggtacccccaattgtgaaggggtggcccttaattggaggactcatccgtttcctcaaaggtccaatctttatgctccgtgacgagtaccctaagcttggaagtgtcttcatctcaaacttcttccacaagaacatcagnaggtcattggg

SEQ ID NO: 39856 - DNA, 257 bp, Glycine max
  unsure (1)..(257): unsure at all n locations; Clone ID: 701121712H1
ganaacctccaaatgaatagaaaatccattagaggaagcacatttgtgacggttcaatccgacactagcagcgacacaagtgctgctaccaaagtggattcagagggtggaagttacccttcgtggaatgagaaggttgtgatggacgtgccattgntgcaangttcataaccgttgaagtgaagtgcaaaacgtcatcatcagggtctaacagtgttgggcgtggcacaaattccggtttctgatttnttggaggg

SEQ ID NO: 39857 - DNA, 257 bp, Glycine max
  unsure (1)..(257): unsure at all n locations; Clone ID: 701121713H1
ctctaagtctaaggggtgccctgagatcactttgagcaatggtgaaggctgtggcagttcttggcagcagcgagggtgtcactggaactattttcttcactcaggagggaaatggtccanccacngtaactggatctcttgctggtcttaagcctggtctccatggcttccatgtccatgccttnggggacactaccaatggttgcctgtcaactggagcgcatttcaatcctaataacaacgagcangtgcccctg

SEQ ID NO: 39858 - DNA, 265 bp, Glycine max
  unsure (1)..(265): unsure at all n locations; Clone ID: 701121714H1
cagggcttctcgagaaaagggtaaccacttttcctccaaagattccacttttctgaagnctntcgnctttcctttcgtcctttactgtccctcggggttcnnccctcagctcagactcagaagaagaacctcacaccgcaaagctcaaacaccccacccccaagtggtcaaaatgtcaacaanggccaatgtaccaacaacaagaacaacctcctcnatgatcagngnggacanancaatcancaanagggncccnngggccctg

SEQ ID NO: 39859 - DNA, 269 bp, Glycine max
  unsure (1)..(269): unsure at all n locations; Clone ID: 701121717H1
atngttgngtcttgtgtgatgatctgatgatgnagcacctggaattagtgcgtccccttcggaagcgaatatgcggtatttcaatgtgatgatccttggcccaactcagtcgccttatgaagggggagttttcaagttggaatgatttttgccagaagaatatccaatggctgctccaaaggttaggtttctgacaaaannnnatnatccaaacattgntaagcttggcaggntatgtcttgacattctgaaagataagggngnnctgc

SEQ ID NO: 39860 - DNA, 265 bp, Glycine max
  Clone ID: 701121720H1
gagagatggccaccgttccagggcagctcgtgtgggagatcgtcaagaaaaacaattccttcttggtcaagcagtttggaaggggcacccagagcgtcgaattcagcagagagagcaacaatctctacaacctcaattcgttcaagtactctggtttggcaaacaagaaaactgttactgttcagcctgagggcaaagatcaggctgtgttgttggctacaaccaagacaaagaagcaaaacaagcccgctgcattctccacaaa

SEQ ID NO: 39861 - DNA, 64 bp, Glycine max
  unsure (1)..(64): unsure at all n locations; Clone ID: 701121721H1
ctcanaatnaacactgtgcngtgcgngtagncgngattcaatctgaatntgaatggaagctatc

SEQ ID NO: 39862 - DNA, 120 bp, Glycine max
  unsure (1)..(120): unsure at all n locations; Clone ID: 701121722H1
ccaacttctctattgttctctccgnctccctagccttctnnnnngtgcncacntaccaaggcacactcgaccgataccgtttcnttcaccttcancaagttcaacccagnccanacnana

SEQ ID NO: 39863 - DNA, 260 bp, Glycine max
  unsure (1)..(260): unsure at all n locations; Clone ID: 701121723H1
gtcctccttagacctggacggattgaccggaagattgaatttccaaaccctaatgaagagtctacggctggatattttgaaaatccattcaagaagantgnatttaatgcgtggcattgatctgaagangattgccganangatgaatggagcatctggtgctgaacttaaggctgtttgcaccgangctggaatgtttgcattnagggtncggngggtncccgtncctcaggaggnttttganatgccngtggccaagt

SEQ ID NO: 39864 - DNA, 253 bp, Glycine max
  Clone ID: 701121724H1
gtttagaggaggtcataatcagtataaccaattgcaggtagggtcctaaacaaattcaagccatagattttttcttctcttcctcaagtcgctgcaactcagccaatctttctgcccaatccctttcccttgcaactgcagccattttacgttctaccctctgaatatttttcttccgattggcctcttgcagctgagctttccttttcttcctttccgccaatataaaggcacggcgttgcctcatgcgttt

SEQ ID NO: 39865 - DNA, 257 bp, Glycine max
  unsure (1)..(257): unsure at all n locations; Clone ID: 701121725H1
tctctctttccgatcagatcggacgccctgtgtctgaattccaatacacagcacanantttcgattcctttctttctctcaacgttncaatnccccaattttcatcaattcgaatttnatttttntacactgtttccgttcccaattttggcgatctgggaaattccttgnattagggttaaggttgtngtattcgggtncatggcgacggnganggcanttagagggtgnagantgngatnngngaattttncnnc

SEQ ID NO: 39866 - DNA, 260 bp, Glycine max
  unsure (1)..(260): unsure at all n locations; Clone ID: 701121726H1
gcagccatggggcgaagacccgcgangtgttatagagcaaattaagaacaaaccataccccaanctcacggttttgccgtggtgttcctgatcccaagatcaggatttacgatgtnggtatgncgnagaagggtgttgatgaatttcctttctgtgtccatctggttagttgggagaagggaaacgtttctagtgaggccctggaagctgctcgtnttgcttgcaacaagtacatggccaaatttnctggaaggatgctt

SEQ ID NO: 39867 - DNA, 258 bp, Glycine max
  Clone ID: 701121727H1
cttctctccattgaccatgtctgctactttcaaataccaacctacgggacttcacggttggggcgcgccgagatcttcttctagaaatctcgcaaggttcttctcaatgcgattcgcgtgcaactctcgccaccataaaatattgcatgcttccgtttctcacccttcatcactctccatttctcacgactcatctaccgagactgagagtactttgatattgattcgtcatggggagtctttgtggaatgagaagaa

SEQ ID NO: 39868 - DNA, 257 bp, Glycine max
  unsure (1)..(257): unsure at all n locations; Clone ID: 701121728H1
gctatgggactgnttntaatgcttcctttgctgatattntccacatggctgtcaaagnnaaagattggggaaatattccgtaagtntgntagcagagcagacacatttctncgatgctgctagatggcaccgttgcttgaaatgcgccttcacccgaaagagcagantatttggctgcataatatgtgggacgcaaactactggtagagcagcttcatagttgttgcctatcagctgtattctgttagctatgcttt

SEQ ID NO: 39869 - DNA, 259 bp, Glycine max
  unsure (1)..(259): unsure at all n locations; Clone ID: 701121729H1
ggaacaccagatctatttcagagaacttatccagagaatgaagtcaagtctagtggtcttaatattcatcaagatacttgtgaagaggagttaaaaataccacaaaagacaggtctcattgcagatccaggggaatgcattggattttctcccaataaccttgaagcttcagcggttaaaagctttcaggctgaaacttattttcttcngggtgcactggaagngtngngggacttgtaacntggaaagaacacggaag

SEQ ID NO: 39870 - DNA, 238 bp, Glycine max
  unsure (1)..(238): unsure at all n locations; Clone ID: 701121732H1
atcggtgtncacttgatctcatcataatcgtcagcgtccnattgangncagatgccgatcagaancatcgccgtcggaaggcctgnagaggcgaatcaccccgacacgttgaaggcggcnttggctnagttcatctcaacctgcatctacgtgttngccggctcaggccncgncatngnctanaanangctcannnccnnnggngctgcnacccatgccggnntgaatcngggcntcc

SEQ ID NO: 39871 - DNA, 269 bp, Glycine max
  unsure (1)..(269): unsure at all n locations; Clone ID: 701121733H1
gatggctttagggttggagctgagtggaaataaatttgtttggtctgtgcnctcacctgtncaccaaagttggcactggcaactatttcacagcaggtgaggaagggggaatcagaactactcntgagtctaataatgaaccatcttttcctgatgaggttctaccgcataccaaccaatggaattgtgatcacagattgggcacnccnttggatatttgaagcacccatctattggtggtttgcgtctcatggggggggactcnctaa

SEQ ID NO: 39872 - DNA, 262 bp, Glycine max
  unsure (1)..(262): unsure at all n locations; Clone ID: 701121737H1
ggaagcttctttttctgatcttttacgtgtcaatataaattcccttcaaagaaataagctttccactctttttcaatcantcaccaatggctccttctttcacttacgtcaaaatcttctcttctctcgtcgcagaggattctccaacgctctcaccagacgcgggtacgctgttgcatcacaaagtgcaacaaagggaggagtggcctcaatgagcggcaagatggcaccaaagtcaggggaagataacaaagggtgtcta

SEQ ID NO: 39873 - DNA, 139 bp, Glycine max
  unsure (1)..(139): unsure at all n locations; Clone ID: 701121739H1
aacaagtggcattgagaagaacagaaacatcatcaacacaaacacaacaaacnaacanccaaagaggaatacctcaacggaacttccnngtntggaattcagtgtcngtntcactccttaccacacaacataagaaanc

SEQ ID NO: 39874 - DNA, 257 bp, Glycine max
  unsure (1)..(257): unsure at all n locations; Clone ID: 701121740H1
caactccatcaatgcctagaccaatttcatgttgcttcccttgagaacacattttaggcctatcttcgggacaaatttcagaatattgattagtcagagatatgcatccatcatcatgaggatcaaagatctgcttaactttaattggaagctgaagaaagaaatttcagcgatgaagatgatcaatcatccaaacgtngtcaaatttacgaggtgttgngcagncannncaggttcnnntggggcnagggggtaag

SEQ ID NO: 39875 - DNA, 239 bp, Glycine max
  unsure (1)..(239): unsure at all n locations; Clone ID: 701121741H1
cctttactgaagcttatcaaagannggcaaaaaagncgngcaagagaacgccgcaagagcaattgggcttctcggccgtgaccctgagagcgtggaactcatgatccacgctggtgtttgctctgtcttcgccaaagtcctcaaagaaggtcccatgaaagtgcaagccgtggtggcttgggccgtgtcggaattagctgcgaaataccctacatgccaagatcttttcgtcagcataa

SEQ ID NO: 39876 - DNA, 258 bp, Glycine max
  unsure (1)..(258): unsure at all n locations; Clone ID: 701121744H1
anattagaggcttaagtggtaaganagnnttctnggatgnagatganattcaaaagttttcctacttaagggcagtgataanagagacacttagattgcncttaccagncaccactacttataccaagagnaacagntaaaaaatgcatgtnagatgaccacganttccagccaagacattantntatgtgaatgcttgggcaattcatagagatcctaaggcttggaaagatcccgaagagttataccngngnggnt

SEQ ID NO: 39877 - DNA, 253 bp, Glycine max
  unsure (1)..(253): unsure at all n locations; Clone ID: 701121745H1
tcgagccntgcggtggctcctcctcctcccttgtcggcggntgctgctaatgtggtggatcancctcatttgctggcggcgaatgctgataataattatctggnggcncctcctcctcctcncttgcaggctatngtngatggggcctatntntcaancgacgaccttganatggaactgattggannggtataattgacagtgatacnttgccatcattgaactttcattacggggatgtantagccagcng

SEQ ID NO: 39878 - DNA, 253 bp, Glycine max
  unsure (1)..(253): unsure at all n locations; Clone ID: 701121747H1
gttataattgatgttgaacctaaggaattgggaatcccaacaaaagcatattatgctgttgaagaggttaaagagaatgccactcaaaaaagtcaaaaggtgtttgtgcatgtgccatcagagattgctgctcatgaagttgaggaaataggagtggaacacttgcttagagatgtgaaggatacaaccattagcacccttgccacagntgtaagtgcaaaactcacagccttgaagggtttggatgcaagac

SEQ ID NO: 39879 - DNA, 144 bp, Glycine max
  Clone ID: 701121748H1
ttcgtttgagtaagaatgtaggatttagcatttgtttgacaaccttacagaattttattctctgcttcgagtctcgaatttttacctgtgtataatgtactactactggttctcactcgttatagcaattcaattttgtagtgc

SEQ ID NO: 39880 - DNA, 270 bp, Glycine max
  unsure (1)..(270): unsure at all n locations; Clone ID: 701121750H1
gtatcgttctnaatggcatggatcanatnttgctgttcaaagttttaacagttcaggatttccaagatgatcaattganagagtttctaagagaggttgncaataatgaaacgagtangtcatccaaatgtggtgttgttcatgggtncagttactaaacgtccccatctatctatagtaacagantatttgcctaggggcagtttatttcgcctaatacataagcnagcntctggtgagattctagatccaaggagaagatacggntgg

SEQ ID NO: 39881 - DNA, 261 bp, Glycine max
  Clone ID: 701121753H1
atatcatccttgatttttccaaaaattctaagatggcagtaatgattctgagatacttcaatgtgattggatcagacccagagggcgaattgggtgaggctccaagacctgaacttcgtgaacatggccgaatttctggtgcctgctttgatgcagctcgtggtattacaactggcttaaaggttagaggaactgactacaagacaccggatggaacatgcatacgagactacattgatgtaactgatttggtgatgctca

SEQ ID NO: 39882 - DNA, 261 bp, Glycine max
  unsure (1)..(261): unsure at all n locations; Clone ID: 701121756H1
aaaccgagggtgttgaccaaggagaataggcatggccgttctgcacacagcatgtcctgcacgtctttgcgcaagaagtctagccgaactcttgtctccaagcttccatgtgccacactcagaagcatccttttaaatttgcaagaggttattcttggtaccaagctttccattctcatccctggcnattccngnngccatcatggcggantgctatgnttngggaagncctgggatttntanatggnnccancggggccc

SEQ ID NO: 39883 - DNA, 257 bp, Glycine max
  unsure (1)..(257): unsure at all n locations; Clone ID: 701121758H1
tttatcacagaggaattaacatatatatancaagcatggnagtcacactctacgaccttagctcttcctctgggttgaagaaacttgatgagtaccttctcccacgcagttacatcactcggtaccaagctacaaaggatgatcttactgtttatgcagctttgccaactgctccatcagatgaatatggaaatgtttccaggtggtacaagcacattgatgctttgttgagaatctctggtgttactggcgaggga

SEQ ID NO: 39884 - DNA, 130 bp, Glycine max
  unsure (1)..(130): unsure at all n locations; Clone ID: 701121759H1
ttcgggnnaaggatgtcaantgcatcggcaattatctttgggncagtattttggngnatggggaanttcnacagacttccaacnanaagntcagcgtgngatcacttcangtgtagcagtnataancaac

SEQ ID NO: 39885 - DNA, 168 bp, Glycine max
  unsure (1)..(168): unsure at all n locations; Clone ID: 701121760H1
ggaatatggatggggaactacacataatgttatntngttcccaggtcangggcacttgatancaatgagtgatatggcganagcatttaatggaagangggtgaggacaaccatagaaaccaanccacacaacatacgatatcnaanannnanaannannaannaana

SEQ ID NO: 39886 - DNA, 245 bp, Glycine max
  unsure (1)..(245): unsure at all n locations; Clone ID: 701121761H1
ccaacaggtatgtgggaacttttaccaaacatgcacacattcccgtagattgncttctggtttttttatggatggcaaattctacgtgattggtggaatgtcaagtacaactgtttcattaagttgtggagaggagtatgatctcaagacaaggagttggcggaaaatagaggggatgtatccatatgttaacgtgggtgttcaggcacctcccacngggggcgttggggaaanacggcnnannc

SEQ ID NO: 39887 - DNA, 260 bp, Glycine max
  unsure (1)..(260): unsure at all n locations; Clone ID: 701121762H1
attatcaaagaaaatgggctctcattgggttgctcttgatgggttttctcacaatgttctcctctgctcatgcctatggtggagggtggactaatgctcatgccaccttctatggagggagtgatgcatctgggacaatgggtggggcatgtgggnctgggaatctctacagccaagggtatggaacaaacactgctgctctaagcactgcactgttcaacaatggcttnngctgtggctcttgctatgagataggtgtg

SEQ ID NO: 39888 - DNA, 261 bp, Glycine max
  unsure (1)..(261): unsure at all n locations; Clone ID: 701121763H1
gtagccggtaangtttacctgctactgccggtgaatagggtcaattcgaaggcttcagagtttgagntnatcttgcggaaaaacagagtggccacacaaagaggacgaggggtaataatatggcgaaggtttcaccctctgtgtgtccgaggtttgggaaccaagtacgatggaatcccgttttggatcctatctttgaataatagaatcgccctcatctctcaaccaatttgtcttcctcctgcacttcacattgacact

SEQ ID NO: 39889 - DNA, 265 bp, Glycine max
  unsure (1)..(265): unsure at all n locations; Clone ID: 701121764H1
gaaccactgcccctacagcttgngatcagggcccgccccgtttcggagagacccggatccggatccggatccggatccgccttctctattttgagtgcacttgcttgagtcgctggtgttttgttttacgtgatttcagtgtatttattaatattgagaaacagatccgnatcctagcttgagttgtcccagatcaccttagtacttgaataataatcggtgatctggatganagtactactatgaataatgactcatgctagtc

SEQ ID NO: 39890 - DNA, 270 bp, Glycine max
  unsure (1)..(270): unsure at all n locations; Clone ID: 701121765H1
tttccgtgctcaaagtcaaaatgtgatggctatcaaccttgacaatgtatatatccacagaatntatcactctaatgaggaggcttcagatgcatatcggttgattgggaagtggctagcagaaaccagatctagcaactcaagaacaattttggagaagtatttgaaaccagcagtctctattgctgaggatgtgaatgctacagctaagaatgccttgcaaaggaaatgtcaggctcattttcatcttgcacactatgcgatgctcta

SEQ ID NO: 39891 - DNA, 266 bp, Glycine max
  unsure (1)..(266): unsure at all n locations; Clone ID: 701121767H1
atgaccgagctcaaagagaaattccagcgcatgacgtgacncgtctatgatcaagaggagatatatgtacctaaacgaagagatcttgaaagagaatccaaacatgtgtgcttacatggcaccttctttggatgctaggcaagacatggtggtggtagaggtaccaaagctagggaaagaggctgcagtaaaggccataaaggagtggggccagccaaagtcaaagattacccantgatcttctgcaccaccagtgggttgacatg

SEQ ID NO: 39892 - DNA, 99 bp, Glycine max
  unsure (1)..(99): unsure at all n locations; Clone ID: 701121772H1
cgcccctctctctcctccaatgngccgaccancntcaccgacgancagatcgcngagttcaaggnggcnnncagnntcttcgacaaggacggcgatggt

SEQ ID NO: 39893 - DNA, 256 bp, Glycine max
  unsure (1)..(256): unsure at all n locations; Clone ID: 701121773H1
angaagatgaganggtgaaanacangcatcaanattnnacagtaacatacnatananatggcgcaggctaccaaaggttncctctccgaatgaaaactgaaantngtgagcgtnnttcggaggtaaaatgcgcaagttttaggcttgctgtggaagcacacaacatccgaagcntttaaaaccattcctgaagagtgcgttgaancaacaaaggactacatnaatggcgaacatttagatcagatctaaacagtna

SEQ ID NO: 39894 - DNA, 255 bp, Glycine max
  Clone ID: 701121774H1
aatttttagctctcattttcatttttttgcaattcctccacacacaccatccaattcccgtctttgatattttaatcacagagagagaagagggtttgtttctgggttttggaaatttcagcccccatcaaagaagaagccccataatcttcgaatcgaaggcatttgattgaaaggtcgaaactttagcatctgggatcgcgcaattggggttttttttggttaaaagggtatcttcggaattcaggcaaaact

SEQ ID NO: 39895 - DNA, 228 bp, Glycine max
  unsure (1)..(228): unsure at all n locations; Clone ID: 701121777H1
caaatggtccgactacaagaaggtgcctannantcaccanntgatggtgaacaaattgttgactcttcagacataattgataagttgatcaaaaggatacatccagattatgacctaaatgctgaagaagagaagaagtggcgacagtgggtggataatcacttggtgcatgtcttgtcaccgaatatatatcggaatgttcctgaagctcttgaatcattgattaca

SEQ ID NO: 39896 - DNA, 261 bp, Glycine max
  Clone ID: 701121780H1
cggtgctccgctgaatacggttgtggcccctgcgctccgctgcaattttacactcaaaaggacctcatgtctaacatagaggagaacaaagatctgggacagatggacgtggatgcatctgatgagtcagctaacatgccatcaccccaaaagcaggaggagtctgtaaagaaaaagtatggaggaatgctgcccaaaaagccaccatcatatctaaggaccatgaacgtgcttacttcgattctgcggattggcacttgg

SEQ ID NO: 39897 - DNA, 265 bp, Glycine max
  unsure (1)..(265): unsure at all n locations; Clone ID: 701121781H1
gcggcaccctccgaagacggagatacacccactcactcaccaccactttcccagaaaataatcaccgcctacaatttctcggaatttattttgcgtnttggtgcctttgtngttcggattttcaggtgagggagctcgtgtcgtgtgtcgnttagggttaaaaatggggtttaagtgggtgcactgatgtcattgttgtggcttgtgattcgtcaacttgcagaaatcgaggcaatggctgcatctaagaaactgaaacaagaga

SEQ ID NO: 39898 - DNA, 265 bp, Glycine max
  Clone ID: 701121783H1
ctcgctgctaggattattgttgccattgagaacccacaggatatcattgttcagtctgccaggccttatggtcagagggcagttcttaagtttgctcaatacactggtgctcatgcaattgccggaaggcacactcctggaacattcactaatcagatgcagcaatcctacaatgagcctcgtcttctgattctaactgatccaagaacagatcatcagcctatcaaggagggtgctcttggaaatattccaactatgctttttg

SEQ ID NO: 39899 - DNA, 262 bp, Glycine max
  unsure (1)..(262): unsure at all n locations; Clone ID: 701121784H1
acacgccgtggcgtcggaattgaatgcgcgcgtgcgcacgtgtcgaacgctacaacaattttcttctccaattcaatactagtactataanntagacgattagacggtttggcttccctcaaggctccctttccggccaccccatttctctcttccagacccagaacctctnttcttccatcccaagccagttttcgtaaaagaagctcctttttatccttttctgttcatgcccaggtggagtctgatgatgttcagctgt

SEQ ID NO: 39900 - DNA, 115 bp, Glycine max
  unsure (1)..(115): unsure at all n locations; Clone ID: 701121785H1
ggcggaacctctctcaaacaccgancctctcttcttccaaaaccctggacccaaccancggtcacgatnccanacaacatacganncncnagggcngcggntgaaaaggnnggna

SEQ ID NO: 39901 - DNA, 213 bp, Glycine max
  unsure (1)..(213): unsure at all n locations; Clone ID: 701121786H1
agcttccaaggaggtgaaagaatctcaagatcaacccaacagttctgacacaaacaatgggcccgatttggccacaggcaccgaaaatntggaggaggatacatctactgttgatgtgaaagagcgtctcaagaaagttgcttctacaaagaagaagaagtctagtaaagaaatggatgctgctgcaagagctgctgctcaagagctgctgca

SEQ ID NO: 39902 - DNA, 258 bp, Glycine max
  unsure (1)..(258): unsure at all n locations; Clone ID: 701121788H1
cgtctttggagttatggaggagcaattcatacttagagttccacncaacatacnaccngngatagagcgtcttctgaatgaaaacaatgcttcttcatctgaanacaagtcactagatttgtcatttagagaggatggaagaagtggtacgtttatnattgggaatgaacaattcccancntcatattggagcnccccggangtagnngancnccnanagacatnannanaaanacncnaaaanaagnccncngntng

SEQ ID NO: 39903 - DNA, 256 bp, Glycine max
  unsure (1)..(256): unsure at all n locations; Clone ID: 701121789H1
accgtatcttacttcctcaatctgttaaagtnnaacaaacgcctacacnttctcatctcactcnccaacaaatcaactttatccgtactcttgttatctataaggttttcaacttttactcccttcttttttctttccgcatttctctntctcngnctcattttgtgcttaggatcccgcnattctcgtncctcaacaaactnccaggaatgccagtgcagggtggcattaatatcaaacggagtttagatgntgt

SEQ ID NO: 39904 - DNA, 264 bp, Glycine max
  unsure (1)..(264): unsure at all n locations; Clone ID: 701121796H1
caaaggagtatgttcaacctgggatgaagaatgctantcccttagaaaaaagtcccgnctgttggctgngcacccattttnttaaggcatcngaatttcaagctancagttgatcattcaattccnattattannggtggnacctggtactggtcttgnacctttcagggggnnttttacaggnaagatttgcgcncaaaggggntggntacanttggccctgnaaaactcttctggggaagnaagaaanccccgatgnntttt

SEQ ID NO: 39905 - DNA, 270 bp, Glycine max
  unsure (1)..(270): unsure at all n locations; Clone ID: 701121801H1
gagaatatgaagttgtttgttttctttgttgctgcagtagttttggtagcatggccatgccatggcgcaggctaccaaaggttccctctccgaatgaaaactggctatggtgagcgttcttcggaggtaaaatgcgcaagttttaggcttgctgtggaagcacacaacatccgagcntttaaaaccattcctgaagagtgcgttgaaccaacaaaggactacattaatggcgaacaatttagatcagactctaaaacagttaaccaacaa

SEQ ID NO: 39906 - DNA, 143 bp, Glycine max
  unsure (1)..(143): unsure at all n locations; Clone ID: 701121803H1
gcacgcattcgtgaganaactcaatnttacgtacgctacatggcactactacttactacgtactacttttaccaaattccaaattgatncnntggacagtcaaatacttnctaacaaaaggagcatgnctattaccagttcgt

SEQ ID NO: 39907 - DNA, 264 bp, Glycine max
  unsure (1)..(264): unsure at all n locations; Clone ID: 701121804H1
ggggacacangntccatngcatgaaatgaatgcctataacatccatgatactagcaatcggaangacctgaacccaaaatttgntcntcaggtgtatcganattttgctaccacaggtgatttggnatttggagtggatgtntngcctgctgtccgtgctgcaatggagtacatggaacaatttgataganatggggatgtncntatngagaatgatgggtnccctgatcaaacntacnntacatggacagnccatggtgtgac

SEQ ID NO: 39908 - DNA, 262 bp, Glycine max
  unsure (1)..(262): unsure at all n locations; Clone ID: 701121806H1
tcttgactggaggtactgtaatcagagaagaggttggccttactttggacaaagctgggaaagaggttctcggatatgcctccaaggtgggtctcaccaaggatacaaccacaattgttggtgatggaagtacccaggaagcagtgaacaagagagttgcacagattaggaacctaattgnggctgctgagcaagagtatgagaaagaaaagctgaatgagaganttgctaaattatctggtggtgtggctgtcatacaggt

SEQ ID NO: 39909 - DNA, 265 bp, Glycine max
  unsure (1)..(265): unsure at all n locations; Clone ID: 701121808H1
gttgtgtctgagataccatcttccacnntaaataaanttncctagtctgcaatctgcgagcgcttgctttgaaaaggatatgtttgatgctnggctgagagatcagtgtgcttttagtaaattgaaggaatcactggaccaagaaactgctgagctgacagctcagaaggaantgaatacttcccataaccgtcggtttngcttcagcttaagtcgaattggaagaagtttcagcttcaaagaggggcctacgcttccacacaat

SEQ ID NO: 39910 - DNA, 263 bp, Glycine max
  unsure (1)..(263): unsure at all n locations; Clone ID: 701121809H1
caggtactaggcttgctgcttcctatgtaaacttttacattgcaaataaagctatcattgcaccacaatttggagataaaaagtgggatgatgaagctgtccgagtcctatctaaggccttccctcatcatgaagttgtgggaattgaaggtgccagggagattgttttggccggtggaaatatacattgcattactcagcaacaaccagccatttgagcggcggcactctcgatattcgttgataggtgttgtantgttgct

SEQ ID NO: 39911 - DNA, 263 bp, Glycine max
  unsure (1)..(263): unsure at all n locations; Clone ID: 701121812H1
ctcaatcctcattctggtcggttctctttctggggttttagatctctttgttctgtgcacttcaagtacgctgcttgcgtcagtggtgtttcagtgtcctccttttcatggcattttgactacccttttgccaggctagtgtgagtgatggatccaattaacattttacctgctgatggggttgaagtggttcaccaaaatggtgttcatgatgaaccttcnaattctggagaggatggtggcgtttcatatgatttagaccc

SEQ ID NO: 39912 - DNA, 120 bp, Glycine max
  unsure (1)..(120): unsure at all n locations; Clone ID: 701121814H1
ctnnttntnntcaaatctatctnttcttacaagttgaaaatggggctgtctttcaccangttgttcagccgactgnttgccaagannagagatgcgtatactgatggngggnctcgangc

SEQ ID NO: 39913 - DNA, 248 bp, Glycine max
  unsure (1)..(248): unsure at all n locations; Clone ID: 701121816H1
ctatatccctgtgataaactgantcctcttggctctnaccctngtgcttgtctgcactatatctagcattgacgagattggaaatgcctatggcattgctgagcttggggtgatgatgatncaccactattttagcaacccttgtcatgnnnttatatggcnnntgcacatcatcattgtgctgagttttgtggtagtctcttgggattggaattaactttttttcatctgtcctgtggagtgtgact

SEQ ID NO: 39914 - DNA, 271 bp, Glycine max
  unsure (1)..(271): unsure at all n locations; Clone ID: 701121817H1
ggaaaattagcctcacaaaagcaaagatcaaacaaaccaaggacgagaacacgatgttgcttgaacttgcacttggtttattggttttggctctgtttctgcacttgcgtcccacacccactgcaanagccaaaagcacttcgccatctcccaaacccaccaagcccaaagcctcgtcttcccttcataggacaccttcatctcttaaaagacaaacttctccactacgcactcatngacctctccaaaaaacatggtcccttattctctc

SEQ ID NO: 39915 - DNA, 256 bp, Glycine max
  unsure (1)..(256): unsure at all n locations; Clone ID: 701121818H1
atgggttcttcttcttctatgtggacggtgtgtgtgattttggcatcactggcctctgcagcactctgtnccaacccacgcaggccagtggatgtacaatttggccgaaactacgtgcccacatgggcctttgatcacatcaaatatttcaatggtggttctgacattcagcttcatcttgacaagtacactggtactggcttccagtccaaagggtcttacttgtttggtcacttcagcatgtacataaagatgg

SEQ ID NO: 39916 - DNA, 261 bp, Glycine max
  unsure (1)..(261): unsure at all n locations; Clone ID: 701121821H1
cgaagatggncgcgagcgatcgcacagtgttgcaattctcttcatcatcttctncttgcgcagagcttgtccgcgaaggtccaccctctggtcatcttcaacatctgtgattgctacgttcgacgccctgaccaagccgatcgtgtcatcggaaccctactcggctccgtccttcccgatggaaccgtcgatatccgcaattcctatgctgttcngcgcaacanannaccncaaaaaanaannannnanngaaggannacc

SEQ ID NO: 39917 - DNA, 261 bp, Glycine max
  unsure (1)..(261): unsure at all n locations; Clone ID: 701121822H1
ataagaccttaattgagtccttattctcggtctagtagtggggtttgggtaatatgcaccagatcattgatttaaatcttgttattgtaaaaaaagaaaatggaaaaaaaaaagtctgaatttctcacttctagttctagnnnnnnnnnnnnnnnnnnnnnatgatgtatggttgaataaatgtgatttggtgtttgtactttgtagagttaattagtgacttctgtgtctgttctctnaattctaattccaaacaagagt

SEQ ID NO: 39918 - DNA, 264 bp, Glycine max
  unsure (1)..(264): unsure at all n locations; Clone ID: 701121823H1
gcgtaaccnnagtacgtaccaaaccatngcattgacaagtcaattgagaaaccttcttgcagctctagaggctgaggaagcagcccaaaaatccaaaggtaaagtgaacacatacaccaaccatggcgatgggtttcagaacatcactggcactaagaccaacagtggtgcatattctggtgatggtaacactcatncacgccaccaacaactacggtngtggtcctgctataaatnatagtggcaatttccagggacatggca

SEQ ID NO: 39919 - DNA, 103 bp, Glycine max
  unsure (1)..(103): unsure at all n locations; Clone ID: 701121825H1
ctcgatccgcactctgcagangctccacgtacttccacacaacntannaaannaaaatatcanntacacgcatatnnattgagatatctcnccaaanctgatt

SEQ ID NO: 39920 - DNA, 265 bp, Glycine max
  unsure (1)..(265): unsure at all n locations; Clone ID: 701121826H1
gggcactgcccctcnttttggncccaaggtcggcttcggccggtncgatccgggcggaagacattgtcaggtggggagtttggctggggcggcacatctgttaaaagataacgcaggtgtcctaagatgagctcaacgagaacagaaatctcgtgtggaacaaaagggtaaaagctcgtttgattctgatttccagtacgaatacgaaccgtgaaagcgtggcctatcgatcctttagnccntcggaatttgaagctagaggtgt

SEQ ID NO: 39921 - DNA, 263 bp, Glycine max
  unsure (1)..(263): unsure at all n locations; Clone ID: 701121827H1
gtgacttcatgcaagancatgntctcgatgatgaacaatgtgaaagacgagggggacantttggaggacctacagaggatgttcgtggatatggtggggggagatcatggccatggaatcggcgttgacttgaaccaagatcgaacggctggaaagcgaggacgagtatatggatcgaagggcaacgcgcccaagcgcagcaactctcgcattagtgcgccgtactgaatccatcttgtnattttctttacacttggatgatt

SEQ ID NO: 39922 - DNA, 221 bp, Glycine max
  unsure (1)..(221): unsure at all n locations; Clone ID: 701121828H1
cctacttcgcctgtttcatttggcccgttgtttctcacaagccacactctttcattgantccataaactctctaaagcccaattctttattaatttactnaatctcaatgtttcatcatctggagttcttcttttgagggctttagcagattccattccttgagtctcatgctggatatgccaatccttgtatcctcatttctgatatccttgtttgcatg

SEQ ID NO: 39923 - DNA, 271 bp, Glycine max
  unsure (1)..(271): unsure at all n locations; Clone ID: 701121831H1
ggaacaatagggtatgtagctccagaagtatggantagaaattttggcggagtttcacacaaatctngtgtngacagctacggaatgatgctactagaaatggtgggagggagaaataatattaatgcggaagcaagtcacacaagtgagatatacttcccagattggatctacaaaaggctagancagggtggagatttgagacctaatggggngatggcaacggaagaaaatgagatagtaaagagaatgactgtagtgggtttatggt

SEQ ID NO: 39924 - DNA, 269 bp, Glycine max
  unsure (1)..(269): unsure at all n locations; Clone ID: 701121832H1
gaaatggcggattcttctcgggaggagaacgtttacatggcgaaattggcggacaggccgagcgttacgaggagatggttgagttcatggagaaggttgcaaagactgtggaggttgaggagttgacggtggaggagaggaatctcctctctgtggcttacaagaacgtgattggtgcgaggagggcttcgtggaggatcatatcctccattgagcagaaggaggagancagggcatgaggaccacgtggccattataaaggagtanng

SEQ ID NO: 39925 - DNA, 267 bp, Glycine max
  unsure (1)..(267): unsure at all n locations; Clone ID: 701121833H1
cgggtcacactttgcagtagcctagttttcaacttctatgcagcttcatgccccactgcagagttcattgtgagaaacacagtcagnnnnnnnnnnnnnnnnnnnnnnnnaattcctgggaagctccttcgcttggtttttcatgattgctttgtggaggaatgtggattcttcagttcttgtgctttctttgcatgatggaaaattcaaatgggtttgaagatggtgatcaataattacttcatgatatgtagggatgtgatgcat

SEQ ID NO: 39926 - DNA, 261 bp, Glycine max
  unsure (1)..(261): unsure at all n locations; Clone ID: 701121838H1
cacgcaccgaatcaacaatantttctcaaacagcgttgtaaaanacacacattagactaggcagataactatggctgtacattctgattcggcttcatccgagaagaaatcaagcaatggagtgaatgagttgctgacttttaatgctgagaacatgcaaagcaacatgaaaattatctattacagccgaacatttttntctataattggtggagttgttgctggtattttgggatttacaggcttgaaaggatttgtgtt

SEQ ID NO: 39927 - DNA, 262 bp, Glycine max
  unsure (1)..(262): unsure at all n locations; Clone ID: 701121839H1
catctctntgcnctaancgacaccgttttngtcttctcctcaagtcatgggccacactcnagagcctctgcttcagaggaactgcctttcccgtttgcccctccaatgtcnccaacaatagnaactccaggagctngtattggaggcctgcacnagcagccgtgaagcccaatttccntctcccaatgcgcagttttgagttaaaaaataggncttctccagaggacataaaggctctgagattgataactgccattaaaac

SEQ ID NO: 39928 - DNA, 262 bp, Glycine max
  unsure (1)..(262): unsure at all n locations; Clone ID: 701121841H1
agaaaagaatggcaaagttaataaaattctttgagttgaacacaggggcngagattccttctgtngggttaggcacttggcaagctgagcctggtgttgtagccaaagctgtcaccacagccatnctggttggatacaggcatattgattgtgctcaagcgtataacantcangcagagattggttctgctcttaagnagctttttgntgatggtgtggtgaagcgtgaggacttatggatcacctccaaactctggtgttc

SEQ ID NO: 39929 - DNA, 262 bp, Glycine max
  unsure (1)..(262): unsure at all n locations; Clone ID: 701121843H1
agcgttccttccaaattccaaacccaccataatatnctagcttcttgtgaaggctgttagtttgatcctagaagttggtatcgataatttgctgtgatgggtggccaaaggagtggttatggtaagcgtccccactctcaatctgaccatgataatgggccaaataaaaggaggaatcatggtgntgatagagagcagtttgtgattgattcggaggataccgtgtatcgttatgtgtgcccgggtcgaaagattggcatgt

SEQ ID NO: 39930 - DNA, 268 bp, Glycine max
  unsure (1)..(268): unsure at all n locations; Clone ID: 701121846H1
ttcatatcatatcaattantctttgtcttcagagtttnctagtganataccatggaacaactacaacagcaatgacttttggaaattcagtgaccagttgaggcttgaatctggtttggccaatctgtctctgaatgattatnccatttggagcaacagcnnacagctccaagaggcctgatcataggaggaactttgatgtcaanggcagtgattcaacaactcatcanagccttttgatgatgatttcnatgatggccggaagatc

SEQ ID NO: 39931 - DNA, 266 bp, Glycine max
  Clone ID: 701121850H1
taatgccattggaggtgagatccaattccagactgaagttgagatgatcagcttagccgtccatcggaatcttcttctccctgtatgggttctgcatgacagctacagagaggctcttggtttatccctacatgtcaaatggcagtgttgcttcccgtctaaaagccaagccagctttggactgggctacaaggaagagaatagctttaggagctggaagaggcttgctatatttgcatgaacagtgtgacccaaagattattcac

SEQ ID NO: 39932 - DNA, 265 bp, Glycine max
  Clone ID: 701121851H1
gcaaaatctagggtttgttcgttcgctcgttcgcaacaatggcgctgaggagattctacaacgagatcaaggggaagagggtgagcgaggtccctgatgcacgtgaagccgatgctgtccctgagctacatcaagaaagcgattcagagaggcttcgacaattaccatgccaagtacattgaaaccagttcccctgatcccatcttccatgtctgctacggcggcatgatcttctcctacctcgtcgctctcccccacgagcgcc

SEQ ID NO: 39933 - DNA, 83 bp, Glycine max
  unsure (1)..(83): unsure at all n locations; Clone ID: 701121854H1
ggactttgtttaatcacgtggaccgttagagttggtgaactacttacttttaccacaacaacataacaaccnngcaaaaaaaa

SEQ ID NO: 39934 - DNA, 124 bp, Glycine max
  unsure (1)..(124): unsure at all n locations; Clone ID: 701121856H1
aaaaatcgccatcggaaaccnacaatgcntcctttgactttgtggctggtgctgccttttgctcgtgttgctagcggcggcaacnacgtctccaacacgcgccacgacggtcgcctcgtcgttc

SEQ ID NO: 39935 - DNA, 260 bp, Glycine max
  unsure (1)..(260): unsure at all n locations; Clone ID: 701121857H1
gnttgatccattgcttganngtcagtatccaataagaggtttgtacnaannctcttattggatactgaccttcaagcaatggatcaaccatctcncagaatcttttacggtttttgaataaaggctttgcccatgcaactagaanttgttcttagcaggttttgtattgtacgatcgcctcctgcctgtgatgatctccaaaagaacaactccaaagctataaatatcagacttgaacgtcantgacccgtcatgcataa

SEQ ID NO: 39936 - DNA, 213 bp, Glycine max
  unsure (1)..(213): unsure at all n locations; Clone ID: 701121861H1
atttaanttccntgatctaataanatcnttgcttttaattgtactacncatgaagannccntgncagttcggatacactaggtgcnctcatgacgatttgtccacacaacataataaactcaaaananataccaaactnacanatatcatcatgattacnanntnaacaanaatcnanattataatattnnnccaattcaatcnaatctcaaa

SEQ ID NO: 39937 - DNA, 268 bp, Glycine max
  unsure (1)..(268): unsure at all n locations; Clone ID: 701121863H1
gtaattcccatgtggncattgnnttaatgcgtgggngacacactttgttgaatntacactagtgctgtgtatatntgtttcagattcatggtcgctcatntantttttgttgtagtagtaaaatgacagantgggaagtnccaacagcagagtagagccagctgacttttgcaaattgntaaatctcacttatccatccacccttgatgattattgacttggggtttgtactcatatttttgtagttgtgaggaattttaatttggaa

SEQ ID NO: 39938 - DNA, 269 bp, Glycine max
  unsure (1)..(269): unsure at all n locations; Clone ID: 701121864H1
ctccgcaccagtttcaccgcacgaatatcttgttgtttggagcgatccgagaaaaactctgtaaacatgttggtttaccaggacctccttacaggtgatgagcttctctctgactccttccgttacaaggaaattgagaatggaatgctgtgggaagttgaggggaagtgggttgttaaaggagcagttgatgtagacattggtgcaaacccttctgctganggtggagganaanatgagggattgatgatncncctgtaaggtttttg

SEQ ID NO: 39939 - DNA, 264 bp, Glycine max
  unsure (1)..(264): unsure at all n locations; Clone ID: 701121867H1
tattcatcatggattaacacttccttggatctcaacatttnatctccatagggttcacgaagaacttcccgtaagtataaacgtacatatagcgtcnaagatcttctgtggaatgtttccctcagaataataattaattctttcttgtgtcctgattnnnnnnnnnnnnnnnnnnnnnngtgtgttcatttcagaaaaagcaggtggaaaacaattttttctcattggatttggaggtgaagaantcttctgtnaaacaagagt

SEQ ID NO: 39940 - DNA, 262 bp, Glycine max
  unsure (1)..(262): unsure at all n locations; Clone ID: 701121868H1
caacaagacacgcgcttagcgagaatcgcctctgcaatccgagtcatccccgactttcctaagccaggaattttgtttcaggacataaccacgctgcttctnaacacaaaggctttcaaagacaccattgacttgtttgtngagaggtacagagatcaaaacatcaatgttgtcgcaggagttgaagctagaggctttatatttggtccacccattgcattagctattggagcaaaatttgtccccatgaggaaacccaata

SEQ ID NO: 39941 - DNA, 259 bp, Glycine max
  unsure (1)..(259): unsure at all n locations; Clone ID: 701121870H1
caatgccaccatctctgcgccgcatatgcatgccacctgccttcagttgcttgagaagaatttgcnacctggaatgcgtgttcttgacgttggctccggaacgggatacctgacagcatgctttgccttgatggttggaccccaaggccgtgctattggtgtggaacatattcctgagttggtttctttttcaatcgagaatattcaaaaaagtgctgcagctcaaccattgaaagatggttccctttctgtgcatgct

SEQ ID NO: 39942 - DNA, 261 bp, Glycine max
  Clone ID: 701121871H1
catctctctgctctaaacgacaccgttttagtcttctcctcaagtcatggccacactcaagagcctctgcttcagaggaactgcctttcccgtttgcccctccaatgtcaccaacaatagaaactccaggagctcatattggaggcctgcacaagcagccgtgaagcccaatttccatctcccaatgcgcagttttgagttaaaaaataggacttctccagaggacataaaggctctgagattgataactgccattaaaac

SEQ ID NO: 39943 - DNA, 262 bp, Glycine max
  unsure (1)..(262): unsure at all n locations; Clone ID: 701121873H1
atgaagttgtttgnttnctttgntgcngcagtagtnttngtagcatnncccatnncatggcgcaggctaccaaaggttccctctccgaatganaactggctatggtgagcgtncttcggaggtaaaatgcgcaagttttaggcttgctgtggaagcacacaacatccgancctttaaaaccattcctgaagagtgcgttnaaccaacaaaggactacattaatggcgaacaatttagatcagactctaaaacagttaaccaa

SEQ ID NO: 39944 - DNA, 240 bp, Glycine max
  unsure (1)..(240): unsure at all n locations; Clone ID: 701121874H1
atcaactatccttcttaattctanntcttcactgattccagatacgatcaagtttccntatcntttgcncctaattgcgtttaccctatacacactttnccagttattcaccaaaaccaacaaataacaaatttcaggttgttggagaaattgttctgttggggggatacgatgtcgatggagaaggaagcttcaagctccacacctacgcgcaanccgtcgngcactgcatgcttcgat

SEQ ID NO: 39945 - DNA, 262 bp, Glycine max
  unsure (1)..(262): unsure at all n locations; Clone ID: 701121875H1
cttccgtangcccctagatccggagatgaagannccccaggaagnagaagangccgaagccggcncagaagaaggtacttgaggagaacaacaaaggtgttgttgttgctgggaatgaaaacgaagaagaaganaagagaaaacgcancgttttggaggcactggttgaggctttctccttgtcttcaatcagggaagcttccntggcctatgagattgcagggggagatcccgacaggcttcggagatcctgaggaagggt

SEQ ID NO: 39946 - DNA, 266 bp, Glycine max
  unsure (1)..(266): unsure at all n locations; Clone ID: 701121878H1
ctctgctctttgccttctntgacacatttggtgccttgtagagcgtgttttggcaggaaggtggtatggcgaaggacgttgaggttgctgagcgtggctccttctctgggaaggactaccaggaccctccaccagcaccactcattgatgctgaggagctcacaaagtggtccttttacagggctctcattgctgaattcattgccactttgctcttcctctacattactgtgctcacagtcatagggtacaatcaccagactgac

SEQ ID NO: 39947 - DNA, 255 bp, Glycine max
  unsure (1)..(255): unsure at all n locations; Clone ID: 701121879H1
atcttcgtagggtatgaccctcgcgaagatcttgcctatnaggtatgtcacnncaccancttgaaaaggtcttcaatccctgttgagatcataccaattaancagtcanatctgangaaaagtggtttgtattggcgtgagangggccagtttgagagcactgagttctcctttcnagattctgaccccttgccttgccaattaccaangttgggcaatgtttgtggactgtgatttcctctattgggctgatnt

SEQ ID NO: 39948 - DNA, 270 bp, Glycine max
  unsure (1)..(270): unsure at all n locations; Clone ID: 701121880H1
cncgaccccgattgcaagcaatnnacgcccccaattccttcttcgattcaagancaccgatggacttnccgatactactacaaaaacttccgtcanatttctccggnccntncagaatcacctnaagcaggtttattttactctgtgtnttnccgtngttgcngcngntntcnnngctaccntnnnngcctcttgaacantgggggttttcttactacagtggcatgcagggaagcaattntggttactctccacacctcctttngatcg

SEQ ID NO: 39949 - DNA, 264 bp, Glycine max
  unsure (1)..(264): unsure at all n locations; Clone ID: 701121881H1
cttctctgtcacatggaacatgataacataattaanattaaagncataattcggccagcggagagggagaacttcaatgacgtgtatatcgtgtacgagttgatggacaccgatctgcatcagattatacagtctaatcaggctctcaccgatgaacattgccagtactttttatatcaactcttgcgagggttgaagtacattcactctgcaaatgttttgcaccgagatctaaaaccaagcaatttacttctgaacgcaaac

SEQ ID NO: 39950 - DNA, 261 bp, Glycine max
  unsure (1)..(261): unsure at all n locations; Clone ID: 701121884H1
gcaatggcttcaagtcacgaagaggttacccttttgggagcaattgcaagcgcatttgcttgcagggtgaagattgccctcaagttgaagggagttaaatacaaatatgtggaagannatttgaggaacaagagtgaactgcttctcaaatccaacccagttcacaagaagattccagtgtttattcacaatgagaagcccatagcagaatcccttgtgattgttgagtacattgatgagacatggaagaacaaccccatt

SEQ ID NO: 39951 - DNA, 258 bp, Glycine max
  unsure (1)..(258): unsure at all n locations; Clone ID: 701121885H1
gtatcatncaagtgggaaaancncttccatgactgctataacnnncctgncnatcctnctaatcacttatacaggcacaacananncacnaatccggngtatgttatggaanacttggcaacaacttaccaacccctcaanaacttgtngcccnctacaatcaanccaacattcgcannnnacgaatcnacggtccaagcccagaagtcctcgaancactaagangttccaacatcagcttntgctagacanccaaat

SEQ ID NO: 39952 - DNA, 240 bp, Glycine max
  unsure (1)..(240): unsure at all n locations; Clone ID: 701121886H1
caaaggagtggaattggacaacatcattcgcaaaattgatgctgattgtantttggttggaattgtgaatggcatggatgttcaggagtggaatccaaccactgacaaatatatagctgtcaaatatgatgtttcaacagtattggaagcaaaggctcttctgaaagaagccctccaagcagaagttggattgccagtccgacagaaatattcctctcattggtttcatggtaggctgaa

SEQ ID NO: 39953 - DNA, 263 bp, Glycine max
  unsure (1)..(263): unsure at all n locations; Clone ID: 701121887H1
ggcttccaccgcggctatnaaangaaanccttggaaaccccgttaacctcagatgcgcaaccaggtantgctccataatccaacnaaacagaacancttcaagaccgtcgcacttttctccaagaagaagcnanctccanctccaaagaaaaagcctgcngntgtatcccccgccaatgaggaactcgccaagtggtatggtcanaanttaaagatcttcttgnctganggtctcttggaccgatctgagatccccgagtatt

SEQ ID NO: 39954 - DNA, 88 bp, Glycine max
  unsure (1)..(88): unsure at all n locations; Clone ID: 701121888H1
cagaangtcactagagatgacccttcncctagggcttacttcnagtgtncanatgccncnagcngtccagtagganagaaggnagatt

SEQ ID NO: 39955 - DNA, 261 bp, Glycine max
  unsure (1)..(261): unsure at all n locations; Clone ID: 701121890H1
attttccattgatgangtcaagctacctccttggttggacgggatgtgcttggcanaatatcnctccaaatctagaagaatatcttgggaaacaggtcttagaggctgtttcattaattgaagttagaaggcacttcattgaagcattatccagtccgttaggaaggccagttgaagctgatnctgtcttttgcaggaaggcaacttttcttgctgcatctggtgttttctcattcctggtacacctcctaattccaactc

SEQ ID NO: 39956 - DNA, 249 bp, Glycine max
  unsure (1)..(249): unsure at all n locations; Clone ID: 701121893H1
gcccggtacttgtcacagtgctaacnatgacaaggancatanattgtgaggaggaattatacttcattttattaagaaataccagagatatgaaaagcngcattcaaatattccttcacacatatcaccttgtttccgtgttaaggaaggagatcatgttattattggccaatgcaggccaatctcaaagacagtgaggttcaatgtgttgaaagtgatccccgctggatcctctagcggtgcaaagaa

SEQ ID NO: 39957 - DNA, 125 bp, Glycine max
  unsure (1)..(125): unsure at all n locations; Clone ID: 701121894H1
gaggcaatggcgagcaggtactggtgcagtgtctcttcccgtccacaactcggcatcatnctcatntctggaaccaattgcaggaacgaatctccaagcattccttcgacacaccncnctactgg

SEQ ID NO: 39958 - DNA, 267 bp, Glycine max
  unsure (1)..(267): unsure at all n locations; Clone ID: 701121895H1
cttcacccattcatncgtggngttgttactgcngctcttttctcttttcttttctctttagttctctncttcccctttctctttctntntcttcttcttctgagcttgtttaagcttttcttccattaacatattatcatccatgtgtggtattcttgcngttctggttgtnctgatgactctcgagccaaaagggtccgcgtgcttgagcactcncgcagatgaagcaccgtggccctgactggagtgggctccatcaacatggng

SEQ ID NO: 39959 - DNA, 268 bp, Glycine max
  unsure (1)..(268): unsure at all n locations; Clone ID: 701121896H1
ttgcatttgcaggaacaggaaccaccccagaggcttttactggaatcagtttcggagggagaaggatccaaagtctcttctgttgtcgggggttgtaaacaggaagatatcagttcagccaggagtgatattttggattcagatagtccacattacaccgatggagttaactccgcactgctagagcatggtgattcttcttatgtgtttgagcatgatcnatcggatatgtcacaagatgaagaagataacctcagcaaaagtctct

SEQ ID NO: 39960 - DNA, 280 bp, Glycine max
  Clone ID: 701122001H1
ggctatctcagcttgttagcactttctttttcttcatttcattatttttctcaaaatgtcaactttcatgttgaaaatcttccttctaatttccatctttcaaatctctttcgccactaggaggttgaatgagttagttcaggaccaaactcagcttcttcgttaccacaatggccctcttctctctggcaaaatctccattaacctcatttggtacggccacttcaaaccttcccagaaggcaatagtctccgatttcatcacctcgctgtcaccctca

SEQ ID NO: 39961 - DNA, 272 bp, Glycine max
  unsure (1)..(272): unsure at all n locations; Clone ID: 701122004H1
atttgggcacaccttctctgtcaagactaagcagttcttttctttctacatcattgacaagntnggcacactncctgaagcacttccttcagtggcaaagcctntgatacaagacacagaagatgagcagcatnagagacgtagctctcacaccttgcttcctcctcttccttctagaaggtcttctttgattaagaaggattccaaggttattcatcatgaagttccctctggccactgctcttttggacaagctgtgcttaatggcataa

SEQ ID NO: 39962 - DNA, 266 bp, Glycine max
  unsure (1)..(266): unsure at all n locations; Clone ID: 701122005H1
gccgctcgcgattcatacttggtgttgttactgctgctcttttctcttttcttttctctttagttctctcttcccctnnnnnnnnnnnnnnnnnnnnnnnnngagcttgtttaagcttttcttccattaacatattatcanaatgtgtggtattcttgctgttctggttgttctgatgactctcgagccaaaagggtccgcgtgcttgagctctctcgcagattgaagcaccgtggccctgactggagtgggctccatcaacatgg

SEQ ID NO: 39963 - DNA, 256 bp, Glycine max
  unsure (1)..(256): unsure at all n locations; Clone ID: 701122006H1
cgacggagtacgccgctggtgcgctgctctcgctgtgctcggagtcggagcantgccagcgcgaggcggtggcggcgggcgtgctgactcagcttctgcttctcatgcagagcgattgcacggagagagcgaagaggaaggcgcagatgctgctgaagcttcttcgggattcgtggccgcaagattccgtcggaaactctgacgatttgcatgcagtcaggtcgttgtggttcccttttgaccgattttatttttg

SEQ ID NO: 39964 - DNA, 266 bp, Glycine max
  unsure (1)..(266): unsure at all n locations; Clone ID: 701122007H1
ctaccacctgtgagcaagacntatggagtggcctgtttgatgaccacttctgcatattatctgcaactctatgatgcaaggaacatagcacttgattatggcccagtgtttaaaagccttcaagtttggaggcttatcacaaatttcttctttcttggctcattttcattaccatttgcagtccgtctgataatgatagcaaaatatggtgtttcattggaaagagggccctttgacaagagaactgcagattatgtttggatgtt

SEQ ID NO: 39965 - DNA, 268 bp, Glycine max
  unsure (1)..(268): unsure at all n locations; Clone ID: 701122008H1
gccctcgactcacatccttgtncgattccgcgaacgagtcgagtnaatcgggttggtaagatctattctgtttcttcgtcatggcaaccggacaactattctcgcgtactacacaggctttgttttacaactacaagcaacttcccatccagcggatgcttgattttgacttcctttgcggcagggaaacaccatcagttgctggaataattaaccctggttctgagggatttcaaaaacttttttttggtcaggaggaaattgccat

SEQ ID NO: 39966 - DNA, 268 bp, Glycine max
  unsure (1)..(268): unsure at all n locations; Clone ID: 701122010H1
ctcaggagtcgttncacacannntangactnntaancgctangngncattacctcngcaaccggtgaacggcagaagncngtanngcgngaannccgatnttcgcactttaccgcacccagcgactccgcgtggttttggcgaaaacnttagaacattcttccatggaggttatcagggttctagcggcggcgatcgtggtagcggtgcttgcggcggctcttccgncggacgcggcgacgacaaccgagtattcgcgccgtgcacgg

SEQ ID NO: 39967 - DNA, 172 bp, Glycine max
  unsure (1)..(172): unsure at all n locations; Clone ID: 701122011H1
atgcncaaataggtaattcgagcaaggcgcaaccnccaaagagggtgaccacaaccttgattcaatgccnntcccctttcttgctccaacaaattagggttnnngttttcccaacattgtccacgcattccctaattnctctttntttcttttcttttccacacaacatang

SEQ ID NO: 39968 - DNA, 271 bp, Glycine max
  Clone ID: 701122014H1
aaggggtaaggtaccatgaacctgagtactggaagtttggagaggctggaaacagatacttccgtcatgccacaggacagttgtatgccatttcaaacgatttggctacatacatatcaattaaccagaatgttcttcacaagtatgccaacgaggatgtgtcactaggatcctggtttattggacttgatgtggagcatatagatgatcgaagactttgttgtggcactcctcctgattgtgagtggaaggcccaagcagggaacatttg

SEQ ID NO: 39969 - DNA, 273 bp, Glycine max
  unsure (1)..(273): unsure at all n locations; Clone ID: 701122015H1
agctagtgttggngttgtggaggccttgaaagaccaaggcatatgcaggtggaatcatgctttaagatcagcttcaacaccatctcaaaaaccatgttggctcattctctcaggctaacaagctttcttcttctgctatgatctccacaacactaaaacatgagaaggcaaagcaatcagaggagtccttcagaactgtcatgtacttaagctgctggggccccaactagatatcataagtccaataagaaaatattctttctcttttaattt

SEQ ID NO: 39970 - DNA, 265 bp, Glycine max
  unsure (1)..(265): unsure at all n locations; Clone ID: 701122016H1
ggtgtttgatatcgacctgcagaaacagttgaggccttacatggaatctatggttccactccncggaatctacnnnnccgatttcattgctgccaaccaaggagaccgtgccaacaacgtgatcaagggcacaaaganagaacaagttcaacaaatcatcaaaganattaaggagtttaaggaaagcactaaggttgacaaggtggttgtcctgtggacagccaacacagagaggtacagcaacctagttgtgggactaaacgac

SEQ ID NO: 39971 - DNA, 271 bp, Glycine max
  unsure (1)..(271): unsure at all n locations; Clone ID: 701122017H1
gnnaatgacgtcgtggtgaatgaattattcgaaacctttcatcttccataatcccgcaaggtaaacgacggtgacgattggtgggtggcgccgtacgcctcatcccatccatcgccatcggcaccttccttaaacgacatcgcgtccatcaccccttttctcttcctcacagtcacagcanacggtagcttcccaaaaaagagtgccaatggcatcttcttcagactcatgggtgaaggaatataatgaagcactgaaattgctgatgata

SEQ ID NO: 39972 - DNA, 125 bp, Glycine max
  unsure (1)..(125): unsure at all n locations; Clone ID: 701122020H1
atgtagacnanttaccacctagtgggacaaggctattgttggtggtgttgggttttaaataaacttgattcaaaaacatggacatgaataccactgtacccaaatttaaggagttgtgagagaaa

SEQ ID NO: 39973 - DNA, 265 bp, Glycine max
  unsure (1)..(265): unsure at all n locations; Clone ID: 701122023H1
gccctccttagacctggacggattgaccggaagattgaatttccaaaccctaatgaagantctcggctggatattttgaaaatccattcaagaagaatgaatttaatgcgtggcattgatctgaagaagattgccgagaagatgaatggagcatctggtgctgaacttaaggctgtttgcaccgaagctggaatgtttgcattgagggagcggagggtacacgtgactcaggaggattttgagatggctgtggccaaggtgatga

SEQ ID NO: 39974 - DNA, 268 bp, Glycine max
  unsure (1)..(268): unsure at all n locations; Clone ID: 701122024H1
gaaagatgtctgcgatcatagtgtgcgggaagagatcagcgctgttccaagaccttcctcccaagaggatccgnnnnnnnnnnnnnnnnnnnnncgttcacctctctcctcctccttcttccctcctccaccacctcgccgcccttttccctgacatggaccaccaccttctcgagaaagctctccaagattgcggcaacgacatcgactccgctatcagaagcttaaaccagctccgactaggagcaccaccgcctccttctcttga

SEQ ID NO: 39975 - DNA, 108 bp, Glycine max
  unsure (1)..(108): unsure at all n locations; Clone ID: 701122026H1
ttttgaacnnaatgacaatgcttcagaaaatggctgnnccttatggagtactccttaccctgttagatatgggcggacaagacctgaggatccatcacntgagactag

SEQ ID NO: 39976 - DNA, 94 bp, Glycine max
  unsure (1)..(94): unsure at all n locations; Clone ID: 701122029H1
atcaaaaanaaaggtccaagtcccagcattaccttcagttaccacagtattgatggtgaacaaggattccctggtgatctccacacaacatang

SEQ ID NO: 39977 - DNA, 200 bp, Glycine max
  unsure (1)..(200): unsure at all n locations; Clone ID: 701122031H1
cacccctaggttttctccctcttcatctctcccnatttctcgcatcanagtnnctggncnntgataagattgnatcatggggaacgcccncagattcctctncagccattgctgcaagcccacagcagctggtgatttccgcancacctggaccacacggngtttccnctngcnacggttgngttccaacacttgccnng

SEQ ID NO: 39978 - DNA, 271 bp, Glycine max
  Clone ID: 701122032H1
gtggcttgacgccttgcacattattaagtgggaagaaatctcacaatcatgtgactaagaaagtcttgatatcagttttaccccttagtttggccattctgatgcttgcattatttgttttcggagtctggtatcatttacgccaaaattcaaagaaaaaacaagaccaggctacagatttactatctcccaggagtccaagcttattgttgccaatgtggagttttggtggtaaaatgatgtttgagaatattattgaagccacagaata

SEQ ID NO: 39979 - DNA, 267 bp, Glycine max
  unsure (1)..(267): unsure at all n locations; Clone ID: 701122033H1
aaaaaaacagcgccctagatttgctcttctttgcttcggaanaaagagaaaaacaaataacaatgggcgttcgcttctttcctcggcagagttctcttcgcttccgtcttcatactctctgcttaccaagaatttaacgaatttggagttgatgggggacctggcagcaaaagcactcagacctaagtttgatgcctttacacatcgantgcattctcaagttggcttcaattcctgagatgatctgaaattttaatgctggggcta

SEQ ID NO: 39980 - DNA, 216 bp, Glycine max
  unsure (1)..(216): unsure at all n locations; Clone ID: 701122034H1
aaaaaattctctcttttctctgagtcgcagcttttacgttttcctaattctttgtccttagcatcancatctccatggncaacaccaaacacctcacatttactttcaccatcgttctaacgctcctcttctcattcgccacagcaaaatcccnaacggctttgggtgtccagaaggagaagctcagccaccttcacttcttcttccacncaanag

SEQ ID NO: 39981 - DNA, 264 bp, Glycine max
  unsure (1)..(264): unsure at all n locations; Clone ID: 701122036H1
actctctcctttacttctcttcctactcttctccctagtccaaggactcacccccaaatgtgacacccaagaccatggctcaacccttgaagttttccatgtgttcagcccatgttccccatttangccatcaaagccactctcatgggcagagagtgtcctccagctgcaggccaaggaccaagccaggctacagttcctggctagcatggtggctgggaggtcaattgtgcccattgcctcaggaaggcaaattattcaaag

SEQ ID NO: 39982 - DNA, 138 bp, Glycine max
  unsure (1)..(138): unsure at all n locations; Clone ID: 701122039H1
tgatgccnaaagatggaaaattgaaggtnaaaatgagggtatgtcagcccctggaagtagaacagtgtnagaacctagagttgtagttcagacaaccagtgacattgatatccttgatgatggctataggtggagaaa

SEQ ID NO: 39983 - DNA, 267 bp, Glycine max
  unsure (1)..(267): unsure at all n locations; Clone ID: 701122040H1
gaanactcctangttnaaaggttctgttacaaangggaanggtctcatcgctaatcctccaaatggccttanaactgangtgacagccagtcgattacaggtggccatcantaaaacacnaannagtagaaggttcttccaatggacggtttgaagcagttcaggagaaacttaatgagttgctggatggagatggtggaataagcaaaagaaaagatgccaccaaagggtacttgaagcttttgtttctcantgtggcatcangag

SEQ ID NO: 39984 - DNA, 263 bp, Glycine max
  unsure (1)..(263): unsure at all n locations; Clone ID: 701122041H1
gtatgaaggtgttggattcgtgtttagcgaatatcaattggcgcctcaaaccttcttccaagcgtcgcttacaattagatgttctngctctcattacaagaatgagagcngttgtaatggtagactacggtggaatcatgcctcagctccagcaccacctctcttccctcctccaactcgcactaagggattccccctctattttcgagcacatacgagttatggttatacaagacatgatttacttaatacacataaccgaa

SEQ ID NO: 39985 - DNA, 264 bp, Glycine max
  unsure (1)..(264): unsure at all n locations; Clone ID: 701122042H1
attataattgacaatgtggcncatattcaagattggtctccatnnacttaaggtcaaggcttagcattatcccacaagaccctgccttgtttgaagnccactgttagaggaaacctggatccactacagaaatactctgacattgaagtgtgggaggctctagataaatgtcagctaggtcacctagtaagggccaaggaagagaagctggattccccggtggttgaaaatggtgataactggagtgtgggccaaaggcaatta

SEQ ID NO: 39986 - DNA, 262 bp, Glycine max
  unsure (1)..(262): unsure at all n locations; Clone ID: 701122043H1
ctttgcttttgcgtggcctatatatatataaaactaanttccccanaacccaatcatatatcatttcatttctttttttctcgtccatcccgtaaccatgtctcagactnttgtcctcaaagttggtatgtcatgtgaaggatgtgttggagcagtgaagagagttttaggaaaattggatggtgtggaatcatatgacattgatttgaaggaacagaaggtggtagtgaagggaaatgtccagccagacacagttcttgcg

SEQ ID NO: 39987 - DNA, 271 bp, Glycine max
  unsure (1)..(271): unsure at all n locations; Clone ID: 701122045H1
gcagtnccnnacctctcctcgccaagatgccagncgntngtcaagacnctcaccggaaagcnccatcncccttgaggtgganagctgctgncaccatngncnacgtcaaggnccaagatccaggacaaggaaggaattcccccggatcagcancgncncatcttcgccggaaagcagctcgaggacggccgtaccctcgccgactacaacntccagaaggngtcaacccttcacctggtncttcgtctccgtggtggcntgcagatctcgt

SEQ ID NO: 39988 - DNA, 269 bp, Glycine max
  unsure (1)..(269): unsure at all n locations; Clone ID: 701122046H1
gccattttgaactttacatcnanttnagannagggactcagagcaaccctcagatgnccagaagtggaccacaggagcttgttcagcaggtattgagtggaggttggagagaagacatcagagttgctggagaaaatgcncttccaaggtatgatgccacagcttacaaccaaatncannctncnatgcaagaccgcaagtgtcaacaacaatggccctnnnnaactaagcntgttcggagtaacataccttcgtctatcagatgatct

SEQ ID NO: 39989 - DNA, 246 bp, Glycine max
  unsure (1)..(246): unsure at all n locations; Clone ID: 701122048H1
gttactgtctgttcaagctaccaactctctntctctttcatagtgcctccttgcntangtgctgccactctctctttctctctcttcatncttctgttgggttggttgtggagtgttgttttctgttgtgcacgtgttgtcattttttaccctcgccacagatctgaagtgttcaagtttggattttgtgcttctggaagttaaaatggcccaagaaactttcctattcacatctgaatcagtgaa

SEQ ID NO: 39990 - DNA, 256 bp, Glycine max
  unsure (1)..(256): unsure at all n locations; Clone ID: 701122049H1
aaaccacatcttccaatggcatctggacaattttnctttaaaaccggtgtcattannnatgcagcatttttagctctgagttttggatttacttggattaccggctcttggccattgatttgtaatcttgtagtaatcgcttcatcgtggacggcttattcaatcgatgtgcccctactgagatggaagagatacccatttgtcgcagcaatgtgcatgatttctacttgggctcttgcattgccaatttcatatt

SEQ ID NO: 39991 - DNA, 263 bp, Glycine max
  Clone ID: 701122051H1
gctcgacctagttagaactgtgctagggttttacgaaaccaccgaagttgcagaaagaagaagaaaaatggtggctgacaggagcaagaagccgaaggtctccgacaagggcgaaaacctcgatgaaatcgacggagaactcgtcctctccatcgagaagttgcaggagatccaagacgagcttgaaaagatcaacgaggaagccagtgacaaagttctggaaatagagcagaagtacaatgagatacggaagcccgtttatg

SEQ ID NO: 39992 - DNA, 259 bp, Glycine max
  unsure (1)..(259): unsure at all n locations; Clone ID: 701122053H1
cgcagatcgcagcaaaccagactaaactccgacgatgcctcccgtcgctcctcnatccggtgatgccatattccgccaacgtcgaacgcgtcaatgcggagtgtttactttgacgtatggcgcaattgtgcgtcaattgcttacggatctggaagaggctgaggaggttaacaagcagcttgatcaaatgggttacaatattggaatccgtttgattgatgagtttttagccaagtctaatgtctccagatgcaacgat

SEQ ID NO: 39993 - DNA, 260 bp, Glycine max
  unsure (1)..(260): unsure at all n locations; Clone ID: 701122054H1
cttgcntcttgagaagagtgaagccacagagcttgcatgtnctctatgcaggggtcaggtgaaaggttggactgttgtggaacctgttcgggactatctgaattccaaagaaaagaggctgcatgcaggatgactgcttgtatgttgggagctataaggagttgaagaagcatgtgcgggcagagcatccgtcggcacggccacggatggtggatcctgctgatgaacagaaatggagatggctcgagtgggagcgtgaa

SEQ ID NO: 39994 - DNA, 259 bp, Glycine max
  unsure (1)..(259): unsure at all n locations; Clone ID: 701122055H1
ganaccgagggngttgaccaaggagaatnggcatggccgttctgcacacagcatgtcctccacgtctttgcgcaagaagtctagccgaactcttgtctccaagcttccatngagncacactcagaagcatccttttaaatttgcaagnngttattcttggtaccaagctttccattctcatccctgccattccagctgccatcatgccgagtgctatggcttggnagaccttggntttttatattgagcttacttggac

SEQ ID NO: 39995 - DNA, 263 bp, Glycine max
  unsure (1)..(263): unsure at all n locations; Clone ID: 701122056H1
cagcaagancagaaatggaagcagcatcggccacaattctgctactgatactaatanttgctctgatatgctcatggaaggttctgaactggttatggctgagaccaaagagactagaaaaactgctaagagagcaaggttttcgtggcaatccatacacccttttctttggagactccaaggagtttctcaagatgagaaaggaagccgtatccaaacccatgaccctctctgatgacatagtgccacgtgtctctgcctat

SEQ ID NO: 39996 - DNA, 259 bp, Glycine max
  unsure (1)..(259): unsure at all n locations; Clone ID: 701122058H1
acttgtcctgatgngttatgtaacnccagtaatggcagcagnaactgcncttctttntcttgcattagatccatgggatgaattccgagaaaacaagtactttgataattcattgcatattactcgaagttgcttgctgatgcttcttgntggcacacttgncttttttatggtactaacagagtatgttctggtctcagtaactagtgctgtcacagtcacaatagctggggtcgttaaggtngctgtcaccatattg

SEQ ID NO: 39997 - DNA, 262 bp, Glycine max
  unsure (1)..(262): unsure at all n locations; Clone ID: 701122060H1
agttgaccctggaaattagtgataatanatggcctaatgnngctgagcttccttttctttnnagatacaacaaaatgagcatgcttaatcttgtggcaancctggtgaagacaggagtgcatggaagaatatattcttcaggcgatggaaggccattaccaggctctataactgtcagtggaataaattacacagttagagctggaaatacttttggtgactatcatcgcatactcgccccaagagataaatatgaagtagt

SEQ ID NO: 39998 - DNA, 266 bp, Glycine max
  unsure (1)..(266): unsure at all n locations; Clone ID: 701122061H1
aaaaacttctccagcggagtccacgccttcaattcaangcaaagatgtgcantttggagaagagaggcagcatattcatcctaacactcacnggcgatggcgagcaccgtctcaacccaacactcctcnaatccatccaatcctccctcagccgcgtccgccaagaagccaccgcctcctccgccctcgtcaccaccgcgcacggcaaattcttctccaacggcttacgacatcgcctgggcccgatcctccgatgaggtcaaaga

SEQ ID NO: 39999 - DNA, 266 bp, Glycine max
  unsure (1)..(266): unsure at all n locations; Clone ID: 701122064H1
gggggccantcaaggttnttcaagacttatttccagaacctggaaggcttcaatttatntatgctgacttgggagatccaatatctgttaataaaatatnnttggagaataaatttgatgccgtgatgcactttgctgctgttgcatatgtgggagaaagcactggtgatcctcttaagtattatcacaatattacatcaaacaccttgttggtattggagtctatggctaaacatgatgtgaagacattgatatattccagtaca

SEQ ID NO: 40000 - DNA, 263 bp, Glycine max
  Clone ID: 701122065H1
tggagctgccaaggctgttgggaaagtccttcctgctttgaatggaaaattgactggtatggcattccgtgttcccaccgtggatgtctctgttgttgacctcacggtgaggctggagaaggaagcctcatatgatgaaattaaaaatgctatcaaggaggaatcagagggcaagttgaagggaattcttggttacactgaagatgatgtggtctccaccgactttgttggtgataacagatcaagtatttttgatgcaaagg

SEQ ID NO: 40001 - DNA, 261 bp, Glycine max
  unsure (1)..(261): unsure at all n locations; Clone ID: 701122067H1
cttacaacaaatagggtgcctctatagtcggggaaagctccctagttgaagataggaatagacttcgtcagtgttgaaatcacgagaaattgatggctgctccaccggcaagagctcgngcgganncacgattatctcataaaacttctcttgattggcgatagtggtgttggaaagagttgccttcttctacgattctctgatggttctttcacaactagtttcatcacaaccataggagaanattttaagataagaacc

SEQ ID NO: 40002 - DNA, 256 bp, Glycine max
  unsure (1)..(256): unsure at all n locations; Clone ID: 701122069H1
aatgccacctgaggccctggancattacaaggaagttcatgaataagccagngagaatcctggtaaagcgtgatgaattgacgcttgagggtatcaagcagttttatgtgaatgttgataaggaagattggaaactggagacattatgcgacctttatgagactttggctatcactcagagtgtcatctttgtgaacaccaggcgcaaggtggactggctcactgacaagatgcgaacaatgaccatacagtctca

SEQ ID NO: 40003 - DNA, 257 bp, Glycine max
  Clone ID: 701122070H1
gaagcttttcagtgctcgggacatggcccaaaagacagtcataggacaggatcaaattgtgtatagtactgacaaggacttacttgagcaagagtatgaagctcgcgaatgggataaaaagtttcgggagctagagaggtctgattaagggtcaactattaatctgttatacagggcgttgagctctcattttgccatcattgacaactttagcacagcatctaggctgccttctgtgaaagcattgggtagccctg

SEQ ID NO: 40004 - DNA, 257 bp, Glycine max
  unsure (1)..(257): unsure at all n locations; Clone ID: 701122073H1
anccttcctccgnttaccaaaagaagttagcaaggagnncaaaatacaatttgtggaccaagtgatggatttggtagagttagataatctcaaggatgctatagtggggcttccangagttactgggttntcaaccgaacaacgaaagaggctgaccatcgctgttgagcttgttgctaatccttcaattattttcatggatgaacccacttctggtcttgatgcaagagcagcagctattgttatgaggactgtga

SEQ ID NO: 40005 - DNA, 258 bp, Glycine max
  unsure (1)..(258): unsure at all n locations; Clone ID: 701122074H1
gctggagttgttacaggcaccaggattatcatttttnttgccagagcaatatgcacaacaatatccacggctttcagggagaggaactgttgcgttcaccattgagaaaggagatggttcaacattttctccagttgggggagagcanaaaaatactgccaccattcaggttgttattgatggatactcagctccactaactgcagggaattttgcaaaactggtgatggatggagcctataatggcacaaagctcaa

SEQ ID NO: 40006 - DNA, 118 bp, Glycine max
  unsure (1)..(118): unsure at all n locations; Clone ID: 701122076H1
atttttggtgcgtaatatatatctgggttttgtttagaacccaaaattcagatttgcttgncttatatcgataacattatattgttattatgtattttttattacactatgacttgtt

SEQ ID NO: 40007 - DNA, 262 bp, Glycine max
  unsure (1)..(262): unsure at all n locations; Clone ID: 701122078H1
agaaaattcaactcaatgaggcactgctgaagaagaggttcaaccatcatgctgctgtggctcatgatgcagatcagaaaccccacatgtgcgatgctgtgatggatctcttgcatgagattcactctccagtctccaaaatgcaagctggatgccagatctcaaaccagtgctagcaaggtatgggatttcttcaattcatgtgaaagttccatttggcaaggaaattgaaacnagtccttgacaacctacgatatcttgt

SEQ ID NO: 40008 - DNA, 77 bp, Glycine max
  unsure (1)..(77): unsure at all n locations; Clone ID: 701122079H1
atgcaaagacaaagccattcgtgcctcatacctccattttcatcacacccattncatncncgcacanaacatagcga

SEQ ID NO: 40009 - DNA, 264 bp, Glycine max
  unsure (1)..(264): unsure at all n locations; Clone ID: 701122080H1
gcgcgagtnaccggagcggcgaagatagagtcagattcggaagcggaagaaggcgtcgacctcggcggcggagaaggagaaccggaataagcataagaannnnnnnnnnnnnnnnnnnnnnnnnaagggtggtggcggtattgaggttagggcttcgcacatattgataaagcacgaaggttctagaaggaaggcctcgtggaaggatcctgaaggtcgcatcatcaagagcacaaccagagaaaacgcggtttctcagctcaa

SEQ ID NO: 40010 - DNA, 259 bp, Glycine max
  Clone ID: 701122081H1
agaaggcctccttcagctaccttctgacaaggcacttttgtctgaccctgtgttccgccctcttgttgagaaatatgcatcggacgaagatgccttcttcgctgattacgctgaggctcaccaaaagctttctgagcttgggtttgctgaagcctaagcaacgttttggggattgttggagaggcacggtgcccataatatttctctcataaattctatggtcatggtttctaatgcgccactgtgggttcctcaaatt

SEQ ID NO: 40011 - DNA, 69 bp, Glycine max
  unsure (1)..(69): unsure at all n locations; Clone ID: 701122082H1
cggtccgnttagggcatttctgggannttaaatcatcaatttctcacccaatcaattnnnncacaacat

SEQ ID NO: 40012 - DNA, 246 bp, Glycine max
  unsure (1)..(246): unsure at all n locations; Clone ID: 701122084H1
aaaaaattaggcgtctaaagggccaaagcttagaaagttgaagctttttttgtnngaggtgaaagtgaaatggttggcaaggataatctgagggctgaggacttgaacttgtgctttaagaagcttatgatggtggccgggagtgggaacagtgagaaaggggtgaacttgaaggttggggtgatcaccgagtggaaggatattcctgtggagcttctgatgcaaattctgtcccttgtggatgat

SEQ ID NO: 40013 - DNA, 254 bp, Glycine max
  Clone ID: 701122086H1
agaaggcctccttcagctaccttctgacaaggcacttttgtctgaccctgtgttccgccctcttgttgagaaatatgcatcggacgaagatgccttcttcgctgattacgctgaggctcaccaaaagctttctgagcttgggtttgctgaagcctaagcaacgttttggggattgttggagaggcacggtgcccataatatttctctcataaattctatggtcatggtttctaatgcgccactgtgggttcctc

SEQ ID NO: 40014 - DNA, 246 bp, Glycine max
  Clone ID: 701122087H1
gtcgctttataacactcaacctaagatgcagaacgaggaaggacagatcaccgagctttacattcctaggaagtgctctgccacaaaccgattgattaccgctaaggaccatgcttcggttcaggttaacattgggcatgtggatgagaatggcgtctacaatggccatttctccacttttgctctctgcggcttcatacgtgctcagggtgatgctgacagtgccctagatcgcttgtggcagaa

SEQ ID NO: 40015 - DNA, 170 bp, Glycine max
  Clone ID: 701122088H1
gacaaccccaaaacttgtattgtctcaagcaaccatggcaatggcaacccaagcctctctcttaaccccacccctctccggtctcaaagccagcgaccgcgcctccgtgccatggaagcaaaactccagcctctccttctccagcccgaagcccctcaagttctccagaa

SEQ ID NO: 40016 - DNA, 66 bp, Glycine max
  unsure (1)..(66): unsure at all n locations; Clone ID: 701122089H1
ggttccctttngcagtntgagatttgagaattgactctgagaatcgagaaaatngncggtttaana

SEQ ID NO: 40017 - DNA, 264 bp, Glycine max
  unsure (1)..(264): unsure at all n locations; Clone ID: 701122096H1
gcaatggtgtacgtcaaggctcanaanatcanaagcctacttcaagagatntcaagtcaagttcaagagaagaagagagggaaaaaccgattaccgtgccaggattcggttgattaatcaggacaagaacaaatataacactccgaaataccgatttgttgttcgctttagcaacaaggacattgttgcacaaataatatctgctagcattgctggcgatattgttcttgctgcagcatatgcacatgagctgccacaatatgg

SEQ ID NO: 40018 - DNA, 273 bp, Glycine max
  unsure (1)..(273): unsure at all n locations; Clone ID: 701122101H1
gggcacattaccagatggacaagatattgcagtcaaaaggctttcacaaacatctacacanggattaacagaatttaagaatgaagttatattttgttctaaacttcaacatcgaaatcttgttaaagttcttggttgttgcatcaatgagcaggagaattactcatctatgagtacatggccgaaccaaagcctagaccttcttcttttgnttctctcaaagccaacttttagattggncaagcgatgaacataataatgggattgctcggg

SEQ ID NO: 40019 - DNA, 266 bp, Glycine max
  unsure (1)..(266): unsure at all n locations; Clone ID: 701122102H1
agaccggcgaggtgttaccggcagataaagaacaaaccgtacccgaaatcccgtttctgccgcggcgtgccggacnccgaagatccgaatctacgacgtgggaatgaagaagaaaggcgtggacgagttcccgttctgcgtgcacctggtctcgtgggagaaggagaacgtctccagcgaggctttggaggcggcgcgcatccgcatgcaacaagtacatggccaattcgccggaaaagatgccttccacctgcgcgtganggtgc

SEQ ID NO: 40020 - DNA, 95 bp, Glycine max
  unsure (1)..(95): unsure at all n locations; Clone ID: 701122104H1
ganatttntcagctagtgctccaaaatnaganagtccnncattctcagagcagataaagtttcgaaatggtnccattgaagcttgttgctccttc

SEQ ID NO: 40021 - DNA, 270 bp, Glycine max
  unsure (1)..(270): unsure at all n locations; Clone ID: 701122105H1
caaagattaagccatgcatgtgtaantatgaactaattcagactgtgaaacttncgaatggctcattaaatcagttatagtttgtttgatggtatctgctactcggataaccgtagtaattctagagctaatacgtgcaacaaaccccgacttctggaagggatgcatttattagataaaaggtcaacacaggctctgcctgttgctttgatgattcatgataactcgtcggatcgcacggatttgtgccggcgacgcatcattcaaatt

SEQ ID NO: 40022 - DNA, 270 bp, Glycine max
  unsure (1)..(270): unsure at all n locations; Clone ID: 701122107H1
cacccgtggtgatggaaaaggtggagaatcaatctntggtgataagtttgccgatgaaaactttaagctgaagcatactgggccaggatacttatccatggcaaattctggggaagacaccaacggctcccagttcttcataacaacagttaaaaccagctggctggatggacaccatgtcgtattcggcaaggtactttccggtatggacgttttgtacaagattgaagcagaaggaagtgaaaatggctcgccaaanaacaaggntgt

SEQ ID NO: 40023 - DNA, 262 bp, Glycine max
  unsure (1)..(262): unsure at all n locations; Clone ID: 701122109H1
gtttcttattccttctagacgcttccattgatcggcgatttctgatacatggcgnagcatcacgaacacgaggaagtgaagggtgagtccttgttggagaagatttctgggaagatccacgaccacgattcctcgtcttcgtcggattccgacaacgacaaaaccagcgccactgattccttcaagtctaatgttttcaggcttttcggcagagaaaagcccattcatcatgttcttggcggtggaaaancggntgatgttt

SEQ ID NO: 40024 - DNA, 82 bp, Glycine max
  unsure (1)..(82): unsure at all n locations; Clone ID: 701122110H1
cttcttctnctctctctctctgctgagcactgtttgtgtttcagcnaccccccatttttcattcttcccncacancntcngg

SEQ ID NO: 40025 - DNA, 270 bp, Glycine max
  unsure (1)..(270): unsure at all n locations; Clone ID: 701122114H1
tacatccttcaggtgtcaagaagatgggtgagttgcacttggccattagattctcctgttcctcaatggttgacttgntgcangcagtatttcaagcctcacttgccaaaaatgcactataagaggccacttaacttaatggaacaggaaaagctgcgacaccaagcggtcaatgttgttgctgctcgacttagtagggcggaacccccgcttagaaaggaggtagttgaatacatgtgtgacacngnttctcatctctggagtatgagg

SEQ ID NO: 40026 - DNA, 271 bp, Glycine max
  unsure (1)..(271): unsure at all n locations; Clone ID: 701122117H1
cacgtccatanccaccagaccatggatntagtatntgnatctccatcctctataccttccntccttcaccctcttgggnttgtgaatcagcaccacattcacctgagcnntttgtgaggattccaaagcatggnttcccntgcagnatccactgctgctgcttcccttggcatgtcagaaatgctggaaaccccatcaaccctcngtggngncacaaggccagntncattgnntctagccngntcnttnagacngtggntctttctcnaaa

SEQ ID NO: 40027 - DNA, 224 bp, Glycine max
  unsure (1)..(224): unsure at all n locations; Clone ID: 701122119H1
gcagaggtngtttcatctcattgtcttgttgtagcagagtgctctcaatccagccccacacaactttntgcaanngaacctcagattctgaatttngggtgcatgcatacagaagganatgcaagatcagagcgccgtgctgtgatgagtttnaagtagcangcaatgagcagaatcgagagnancgggacgcagagtcagcagaatacagtacgtctaggaga

SEQ ID NO: 40028 - DNA, 272 bp, Glycine max
  unsure (1)..(272): unsure at all n locations; Clone ID: 701122120H1
gttccgccatgaccaaacgcgganactctngccgnggtctcctacatgtcctgcgccgttctgttggtgatgttcnataaagcagcgctttcgtcttatanctttccgtccgctaatgtnatcacacttcttcagatgncnangttcgtgttgctttctctatttattgagatgcnggaggatgatttctttctcaacaggcgaacccttacatatatcngagaactcatccanatttgtatcattgaagacttngaagcacactcttnctc

SEQ ID NO: 40029 - DNA, 271 bp, Glycine max
  Clone ID: 701122121H1
ctggccactcttcatcatcttcttatggcctttcgtctacccatcgaaataggtataagaacgatttccgcgacttcaggggggttggagagtcaatctgtgcaggaattggagaactatgctgtttacaaggctgaagagacgacaaattcagtgaacagttgtttaaagatagctgaggaaatgagagaggatgctaccaagactttggtgatgctgcaccaacagggtgagcagattacaaggagtcaccatgttgctgctgatattg

SEQ ID NO: 40030 - DNA, 268 bp, Glycine max
  unsure (1)..(268): unsure at all n locations; Clone ID: 701122123H1
gcantgcttttattcgcaccgcaaacagtgagccatggncgtcggaaagaacaagcgcatctccaaggggaagaagggtggcaagaagaaggnagctgatccctttgccaagaaggattggtatgncattaaggctccttctgtttttcaagtgaaaaatgttggcaaaaccctcgtctctcgtactcagggtaccaagattgcttctgaaggacttcaagcatagagtgtttgaggtctcctggctgatcttcaaggggatgaggnt

SEQ ID NO: 40031 - DNA, 261 bp, Glycine max
  unsure (1)..(261): unsure at all n locations; Clone ID: 701122124H1
cttttcaatacctattgacttcngcttgtgtgttcatcnagaataacaataataatattagtatttggcatttgatttgaatcgattnagatctaagnagaagaataaggatggtgctgccactgctgnagctgggaacgctggccgtgaaaaccctaagcnaacccgtggcgagcagactgaagcagcaggngctcttcaccccagattccgcgnactctcgtanaatggtcagtctatcatcnatcacgctagatgcaa

SEQ ID NO: 40032 - DNA, 272 bp, Glycine max
  unsure (1)..(272): unsure at all n locations; Clone ID: 701122125H1
ctttctccnacctccaaggcacttgtcctnnattgcatgctccttctgccnnatttgcgtctttggcttttggacgtgatttctccattgtgggctattcatcggaggacttaaaatccatggataagctcatcgaactcttcgantcntggatgtcaaggcatggcaagatttacgagancattgaggagaagctcttaggttcgagattttcaaggataacctaaagcacatagatgagagaaacaangtggtcnagcaactactggctt

SEQ ID NO: 40033 - DNA, 190 bp, Glycine max
  unsure (1)..(190): unsure at all n locations; Clone ID: 701122126H1
atttgaaaggtttgagaaatgaanaatcagttattgggtgagaaaagtaatcgtgatatacgacgagctccaagctttagtggncccattaatgcttccnaaccgagcttcagcnaatagtttntcagccccaatcaantcttctggaggattcagagnttccttggatgataagtctaaggctaatcta

SEQ ID NO: 40034 - DNA, 265 bp, Glycine max
  unsure (1)..(265): unsure at all n locations; Clone ID: 701122129H1
cttcgacggttcgggccgcggtggatgccagancggtgactgcangggtgtcctcgactgcaaagcttacggtgcgcctcccaacaccctggctgaatacggcctgaacgggttcaacaatttggacttcttcgacatctccctcgtcgacggttttaacgtgcccatggactttagtccaacctcgaatggatncacacntggcataanctgcactgcggacattaacggacagtgcctagtgagctaaanactcaaggagntt

SEQ ID NO: 40035 - DNA, 270 bp, Glycine max
  unsure (1)..(270): unsure at all n locations; Clone ID: 701122130H1
aaanaaccactctacaaaactctccagtaattctgaaaattttattttcttttggtgaaattaacagctctgtgattgatcaatggcgacaaaggaaggcaaagccataggcatcgatctcggcacgacctacagctgcgtgggcgtgtggcaaaacgaccgcgtcgagatcatccccaacgaccaaggcaaccgaaccactccctcttatgtagccttcaccgacaccgagaggntcatcggagacgcggcgaagaaccaagtcgccat

SEQ ID NO: 40036 - DNA, 180 bp, Glycine max
  unsure (1)..(180): unsure at all n locations; Clone ID: 701122131H1
gttccagcgttgagaannacntagttnncgaaccaaaaccctnngntctggaaaaatggaatcgagcgttctggaatggntggncgtggagataattggngtgatgagcnccgtctcggtccnnatgttcctgtggtcctnctggtgtnctccctctcctcgccgtncngcaccgnnanc

SEQ ID NO: 40037 - DNA, 271 bp, Glycine max
  unsure (1)..(271): unsure at all n locations; Clone ID: 701122132H1
atcaatcaaatgatagcagatgtggacaaggatggaagtggagcaattgattatgacgaatttgagtacatgatgacagccaaaataggagaaagggacactaaagaggagctcatgaaagctttccntattattgatcatgataaaaatggaaagatatccgcattagacatcaagcgcattgcaaaagagncaggtcaanatttcnctgacagagagattcaggagatggttgaggaagcagaccagatatgatcgagaggttagtgcg

SEQ ID NO: 40038 - DNA, 252 bp, Glycine max
  unsure (1)..(252): unsure at all n locations; Clone ID: 701122137H1
ccgaattctatgtggagctgtgggttttcttggttcaaatttgttcgtgaggaggatctacagaaacatcaagtgcgattaaggttttctgagtcagacctgagcacttccataggtttgttgctgaagacaataaatttttggaggaagcctctggtcatgtgtggggaacctaacaatgtttacaggtagaatccacagggttttganaatgaggatgnattatttttctatattggggaanccctgata

SEQ ID NO: 40039 - DNA, 269 bp, Glycine max
  unsure (1)..(269): unsure at all n locations; Clone ID: 701122140H1
gacnggacnaattcaagttcatggnngaacnggcccctccccatgaacaattcatananggngttnccattcgcgangtcgcngttactcaaggtggtggncagagttgccaccatgtncgactttatctgccagatataaagccngaanacagccagaaactaccanttgtcctccatttncacngagnntggtattnaataantnaaccggactggttcatgtactaccaagtctacacccggttcgnccggtcnantanggtccat

SEQ ID NO: 40040 - DNA, 227 bp, Glycine max
  unsure (1)..(227): unsure at all n locations; Clone ID: 701122141H1
caaggtttgtgttgtgttgggtgagattttattctaacatcgtttcatcaaatggctttatgtctggagttcagcgtctgcttcgccgcactccacttgttcattcccactatgctctattcgtctcagctcaactctcacttccccaaactttcgtagcggcttgagatgcacagagaaaactaagagcattcgcttggactgtgantantgtatgtaactctgag

SEQ ID NO: 40041 - DNA, 270 bp, Glycine max
  unsure (1)..(270): unsure at all n locations; Clone ID: 701122142H1
ggngcctcacngcaactgcanatgnggttnanntcntctttcatcggagatcgtctcttacgctgttcaacttcaaggnatcaacctcttcctcaactattccgttannaccctggannccaagcatgtttcgatgcagttatctagaacactttctgggcttgaccaatctcttttttaatagaagaaatttggntgaattgcctaacagcaagcgtaaacgtctgagacctgggaaagttctccgnggcgacaggtgccgaagaatat

SEQ ID NO: 40042 - DNA, 267 bp, Glycine max
  unsure (1)..(267): unsure at all n locations; Clone ID: 701122143H1
ttttctatttaattcctaaaatcccattcttnttcgctcattcctctgcactgccatcatcncccaacttcctcacaangttacaanccataaagagttgtgncaccatgtcggacgatgaaagggaggagaaagagttggatntctcttctgcngaagttgtcacnaaatacaaaaccgctgctgagatcgttaacaaggccttgaagctagttatttcagaatgtaaacnaaaggngaagattgnggatattgtganaaagggga

SEQ ID NO: 40043 - DNA, 272 bp, Glycine max
  unsure (1)..(272): unsure at all n locations; Clone ID: 701122147H1
cgacacttgatggtttttgcgtttaacctaagaaaatcgcccaagacgacacanagtatccaanggaagttcccactaaccagaggaacgagtgttgaagcagagtagcagaagagggttaatgggagaagatccacagaagctgaagcgactagcggacggattcctacgactacgacaacnactcctcgatggcntggttactggaaagtgttctnattgcctcccccangtggcntnncggggggncgtcgtttncananntcagagng

SEQ ID NO: 40044 - DNA, 273 bp, Glycine max
  unsure (1)..(273): unsure at all n locations; Clone ID: 701122149H1
tatggaaggagaaaatggaaagaagctgaaaatattgtgcctccatggattcagaacaagtgggagttttcttaaaaagcaaatcagcaaatgggatccttctatattcactcaatttgntatggttttcccagatggtaaataccctgcaggagggaagtctgacatagaaggcatcttccctccaccttactttgagtggtttcaattcgaaaaggtagaaatactntatcctcctatcttttcatttcnagatttggctgactatgtagt

SEQ ID NO: 40045 - DNA, 265 bp, Glycine max
  unsure (1)..(265): unsure at all n locations; Clone ID: 701122151H1
aactgggttcatcgaaaggtgcgagcttgcagatgagcgtgatgttgagtctgttaaagaaagggtgaaaatntcttcgttgttgtntatagattggttcagaagggttacactaatgtgatgggtaatattatggatgaggaagctgctgagaagcagagaaagaaggctgctttgcaagctcttgaagcacagaaagagaaagccatgaagctgctgctgagttgaataaggtcttgagagtaatagtactcaatgtctccaa

SEQ ID NO: 40046 - DNA, 255 bp, Glycine max
  unsure (1)..(255): unsure at all n locations; Clone ID: 701122152H1
ggaggtggggagggtaaagctatgtacatagatgctgagggcacatttaggcctcagcgactcttacagatagcagataggtttggattgaatggtgttgatgtattggaaaatgttgcttatgctagagcatacaatactgatcatcaatcacggnttctgcttgaagcagcttcaatgatggtggaaactaggtttgctgtaatgatatagatagtgctactgccctctataggacanatttttctggaaggg

SEQ ID NO: 40047 - DNA, 267 bp, Glycine max
  unsure (1)..(267): unsure at all n locations; Clone ID: 701122154H1
atccctcttgatttgtagtttgttttgtgctttagataaaagttctgccaaatcaagaggggttttaagatcatagtgtgtgttttgcaacaatggctaagttctttgctgctatgatcttggcactctttgccatttccatacttcaaacagtggtaatggctgctaatgaacaaggaggccacttgtatgacaacaagagcnaatatggaagtggaagtgtcaagagttnccaatgcccatcacaatgctcgaggagatgtagcc

SEQ ID NO: 40048 - DNA, 224 bp, Glycine max
  unsure (1)..(224): unsure at all n locations; Clone ID: 701122156H1
atcctcagtcatgtattcanaattgtccatgtcantantgatttcttatgtttatctcgcaaattttaccggatttcccgnnttaacanaaaaaaaaaanagaaagaattaangananagagnnngnncatgaaaaaatacnangagctcttantgccnattcccntgcagcgcattaaatgnaggcaggncatgtggatgctgtngttcntcgngnaatcggg

SEQ ID NO: 40049 - DNA, 266 bp, Glycine max
  Clone ID: 701122157H1
tgttgttgtaactcgttcttcttcttttgttgttctgtgtttgtgtttgttttttctctcacctgaaaatgtcttgctgcggtggtaactgtggttgcggaagctcctgcaagtgcggcaacggctgcggaggctgcaagatgtacccagacttgagctacactgagtcaaccaccaccgagaccttggtcatgggagtggcacctgttaaggctcaatttgagggtgctgaaatgggtgtgcccgctgagaacgatggctgcaaa

SEQ ID NO: 40050 - DNA, 265 bp, Glycine max
  unsure (1)..(265): unsure at all n locations; Clone ID: 701122160H1
gtgacactcaccttgatagtcttgtgggccaagcattgtttggagatggagctgctgcagtcattgttggttctgacccaattccacaagttgagaagcctgntgtatgagcttgtttggactgcacaaacaattgctccagacagtgaaggtgctattgatggacaccttcgtgaagttggactcacatttcacctcctcaaggatgttcccgggattgtctcaaagaacattgataaggcatttttgaggtttcaacccattg

SEQ ID NO: 40051 - DNA, 268 bp, Glycine max
  unsure (1)..(268): unsure at all n locations; Clone ID: 701122161H1
ctaatttcagaaaatattcttttgtgtttcctcttatcaaccatgcagtctacntcanagtacattactgggactttgagntctgcacttccggaaaatattgactaaacttatccattctcgctattttgagaacatggtgtattacaaaatatcacatgttgatggtcgtataactantccggaacaaagaattgccagtgatgtgccaaggttctgttcagagtngagtgagattgtncaggatgatctanctngcggtcactga

SEQ ID NO: 40052 - DNA, 274 bp, Glycine max
  unsure (1)..(274): unsure at all n locations; Clone ID: 701122163H1
ggctagctactccttaattactnattagtttcattctttggtgcaagntagcttccnttagttgnttcatnnngttataacaatggtgagtgttgaangnaatccgtaaggcaaaacgtgcagaagggccctganaccgtnatggccatcgggactgncactcctnccaaactgagtngatnagagtncttgtncctngctnttatttccgcatcgccaanagtgngcaantgnntnagctcnangagaanttcaagcncatttgtanaagtcg

SEQ ID NO: 40053 - DNA, 269 bp, Glycine max
  unsure (1)..(269): unsure at all n locations; Clone ID: 701122164H1
attagncaagaaaagctaagtacaaatagcagtggangttctaacgctatctantttaggcctanctatcatggttgcacaatatagctcctgcncagaaagtgatgtcagtggctaatagctataccantatgntgaggaattcacaattcattatcatctgctgangataagcctaacaacatntgctgaaattggagagaaccaagtgtcngaatcagcctcaggnatagagaatgaagtaattaaccaaagccctcctcccgtgg

SEQ ID NO: 40054 - DNA, 274 bp, Glycine max
  unsure (1)..(274): unsure at all n locations; Clone ID: 701122165H1
ccatggctaagggtcccggtctctactctgacatcggcaagaaagccagggatctgctgttcaaggactaccacagtgaccagaagttcaccatcaccacctactcacccactggagttgctataacagcatcaggaaccaggaaaagtgaactgtttgtgngctgatgtcnacacccagttgaagaacnaaaaacatcactactgatatcaaaagttggatacngttctatctcttcacnnctatcactggttaatgacctgctcctggtcng

SEQ ID NO: 40055 - DNA, 268 bp, Glycine max
  unsure (1)..(268): unsure at all n locations; Clone ID: 701122166H1
gctaaatcgaatcgaatcgantctccgaagatngcngcgagcgatcgcacagtgttgcaattctcttcatcatcttctttcgtcgcagagcttgtccgcgaaggtccaccctctggtcatcttcaacatctgtgattgctacgttcgacgccctgaccaagccgatncgtgtcatcggaaccctatcggctccgtcttcccgatggaaccgtcgatatccgcaattctatgctgttcccacacaantaaaaaanngaaaagtnncgca

SEQ ID NO: 40056 - DNA, 354 bp, Glycine max
  unsure (1)..(354): unsure at all n locations; Clone ID: 701122167H1
gacccntcttctgaaacctcnnatattaatcctagttcggagtcggaggaggatcacttgaactacgantgttttcaacaacaacgacgactncntcggaggaaaccgccgcatcgcttttggcaagtggaacttncaaagaacggttctttccgaaccagtcgaacgggattcaagtcggcgattttntnganacgnaangaaccaaaccatnggtaacttcttctgccttggaaaanttttccaaccaaatttggnctncccattantccgannncctncggcaccgtnacaattcnggncctttncggaattggaatnnnaaaactnggttntttnncaaggtttgnccnc

SEQ ID NO: 40057 - DNA, 267 bp, Glycine max
  unsure (1)..(267): unsure at all n locations; Clone ID: 701122168H1
aacaccatagtgaaatggcttccaaggctgcacttctcttgtgtttcaatgngctcttcttcaccgtggttagctccacatatgtgccatgcaacccaccccccaaaactccaaaacacccacctgtcccaaagccaccttccccaaagcaagcaagttgccccaaagacactattaagtttggtgtgtgtgctgatgtgttaggtttgatcaacgtgcaacttgggaagccacccaaagaccccatgctgcaactcattgagggtc

SEQ ID NO: 40058 - DNA, 258 bp, Glycine max
  unsure (1)..(258): unsure at all n locations; Clone ID: 701122172H1
cgcaggtgaaaatgagcggaacggtgaagaaagtaaccgatgtagcattcaaggtgggaaggaacatcgattgggatggaatggcgaanttctcgtctccgatgaggctcgcagggagttctccaatctccgtcgcgctttcgaacgaggttaactcccaactcgaaaccaagttcagccaggaacctcaacccatagactgggattactntagaaaaggaattggcactcgcttggtggatatgtacanngagcatt

SEQ ID NO: 40059 - DNA, 267 bp, Glycine max
  unsure (1)..(267): unsure at all n locations; Clone ID: 701122173H1
atgccncntnaacatccannggngtcccaagaaagaacagggcaanaacagaacagaaacanagatgggttgcaatngctccaaggctgagccacnnccgttggaaaacaccntgcntcatcatcntcatgcngacgttgcagagttccanaaacccaaancccncnaannngacgtagtgctacaggttccaggatgcanagtncanctgatggaccaagggngaggccctcgaactcgcacaggtcacttcacgatcatgaggac

SEQ ID NO: 40060 - DNA, 262 bp, Glycine max
  unsure (1)..(262): unsure at all n locations; Clone ID: 701122176H1
gttccggcaagatggagcttcctgagtggactgatattgtaaaaacagcaaaatttaaggaattggctccatatgatcctgactggtattatgttagggctgcctcaatggcaagaaagatttatttgagaggcggtcttggtgttggggctttccagangatctatggtggaagcaaganaaatggaagccgtcccccacatttctgcaagagcagtggggctattgcaagacacattctgcaacantgcaaaacatgagc

SEQ ID NO: 40061 - DNA, 264 bp, Glycine max
  unsure (1)..(264): unsure at all n locations; Clone ID: 701122177H1
atagagggcaagatccttcgcctcaagcaacaatatactttatgttctgcttctcntcaagacatcattgctcgttttgagagaagatcaggagcaaatgttaattgggaagagtttcccgagaaggttgcagtgcagatgaatgatactcacccaacgttgtgcatcccagagctcatgagaattttnatngatgtaaagggcttaaattggaaggatgctggaatattncacaaaggatgtagcatatancaaccacactgt

SEQ ID NO: 40062 - DNA, 265 bp, Glycine max
  unsure (1)..(265): unsure at all n locations; Clone ID: 701122178H1
gtagcngtcgcactctgtgttttcagngccgtctccgatctccgacaatggcgacccaaatgagcaagaagagaaagttcgtagctgatggagtgttcttcgctgaactgaacgaggttctgacaagagagttggccgaggacggttactccggcgtggaagttagggttacgccgatgcgcaccgaaatcataattagagccaccagaacccaagctgttctcggtgagaagggaagganaataagggaacttacctctgtggt

SEQ ID NO: 40063 - DNA, 128 bp, Glycine max
  Clone ID: 701122179H1
aaccgtagtaattctagagctaatacgtgcaacaaaccccgacttctggaagggatgcatttattagataaaaggctagttctagatcgcgagcggcactactgtgttttttcttttttttttcgtaa

SEQ ID NO: 40064 - DNA, 263 bp, Glycine max
  unsure (1)..(263): unsure at all n locations; Clone ID: 701122187H1
gtttcaatntcgttacacatctcaaaacgcancagcagcncactcgncttaaaatgcaagccgtttcactctcacctttgtcgtctagggnttcttccgacgagttcgctggaaagttcgaacacgatttcgtggctaagctcaaaatcaacgaaaacgaaaacgangagaagcataacgaagatgaggtagaagaagaggaagagtttagcttcgttctcacgattccgatggatcgccgatctngccgaagacgcgttcga

SEQ ID NO: 40065 - DNA, 266 bp, Glycine max
  unsure (1)..(266): unsure at all n locations; Clone ID: 701122188H1
gctggatatggtactgctctgggtgtcatccgtnncacttcatagtgccggagttctaaaaagggcttattgcacagaaacacgcccatttaatcaaggatctagacttactgcctttgagttggtgcatgaaaaaataccaggaactcttattgccgattctgctgcagctgcattaatgaaggcaggacatgtggatgctgttgttgttggggcagatcgggttgcatcaaatggtgacacagccaacaaaattggaacctaca

SEQ ID NO: 40066 - DNA, 73 bp, Glycine max
  unsure (1)..(73): unsure at all n locations; Clone ID: 701122190H1
aggagcggcagtttcccantggaacccctccgactgaagaccaactaccgctgcgtccccgctntgcagcagt

SEQ ID NO: 40067 - DNA, 267 bp, Glycine max
  Clone ID: 701122201H1
atgcgctcctctaatgctccgtttggcatggcactctgctggaacctttgacaagggcacgaagaccggtggacccttcggaaccatcaagcaccctgccgaactggctcacagcgctaacaacggtcttgacatcgctgttaggcttttggagccactcaaggcggagttccctattttgagctacgccgatttctaccagttggctggcgttgttgccgttgaggtcacgggtggacctgaattccattccaccctggaagagag

SEQ ID NO: 40068 - DNA, 272 bp, Glycine max
  unsure (1)..(272): unsure at all n locations; Clone ID: 701122202H1
gaaatgcttatttatctgcactatacaattgttgtctatagttattctctgtttctcccaagaagctcttgtgttgaagtaaaaatntgtgtaatcttcctctgttgctagaagttggactggcttgctttcgatgtccccattccttgtgttaaactgacaatcattctaagggcatgcncttgtnatttcggttcaggntgggccanctaaaaattcntttttaaatttanggtttaggcnttggganttcgggnggccgaganaattnt

SEQ ID NO: 40069 - DNA, 234 bp, Glycine max
  unsure (1)..(234): unsure at all n locations; Clone ID: 701122203H1
gattcgatcgatttcnattgntgaattcatcccancgtggagccttcaaatttgtagttgaacaacgatggtgctgccgctatttgctgctttcattctcttttntgcttttattccgaatggattgttagcagtnccttccaccgtccccgcattctcttggtcatcacattatgaactggcctctgaaaatggattgaaggaatctgtaaattacgaggtnatttcccaaaa

SEQ ID NO: 40070 - DNA, 264 bp, Glycine max
  unsure (1)..(264): unsure at all n locations; Clone ID: 701122204H1
ggatccagagtcataacttacttctagcagagacagangggtcttacacagtgcaacagaactacactagcttagatattcatgttggacaatcttattcttttctgttaagcacggntcaaaatgcaagtacagattactacattgtagcaagtgccaggtttgtgaatgaatcacgttggcaaagagttactggagttgctatcttgcgctatacaaattccaaggggaaggcacgtggtcctctcccacctgctcctgatg

SEQ ID NO: 40071 - DNA, 262 bp, Glycine max
  Clone ID: 701122206H1
ccactcccttctggaacacaccgacgtggctgttctcttggacaacgaagccatctacgacatctgtaggagatctctcgacatcgagaggcccacctacaccaacctcaacaggctcatttcccagatcatttcgtcgctaaccacttccttgaggtttgatggcgctatcaatgtggatatcactgagtttcagaccaaccttgtgccataccccaggatccacttcatgctttcttcttatgctccggttatctctgcc

SEQ ID NO: 40072 - DNA, 262 bp, Glycine max
  unsure (1)..(262): unsure at all n locations; Clone ID: 701122208H1
atgnccaanacattacttcncatgggtttnnctattgatcaacatcctcatnttttcagctactgggagcacattgactacaaaaggcaacnannaggaaatcannagtatcatggtgattggnagagncnagacgcagcccgtagtttcgatgcttacttntatgcactggcttgaaacaggangccntctcgagcacaaagaggctgngganaaacttgggtaanagggtatggcatcagatcanaagggttnncanggc

SEQ ID NO: 40073 - DNA, 261 bp, Glycine max
  unsure (1)..(261): unsure at all n locations; Clone ID: 701122210H1
atctctatctacgaaggagcggaataaaacccttctctctgtgattaagagaatggcttcagatgcggaaacttcacacttttnaggaggtggcaaagcacaaccagaccaaggattgctggctcatcatttctggcaaggtgtatgatgtcacccctttcatggaggatcatcccggaggtgatgaggttttgttatctgcaacagggaaagatgcaaccaatgactttgaagatgtggggcacagtgattctgctagag

SEQ ID NO: 40074 - DNA, 260 bp, Glycine max
  unsure (1)..(260): unsure at all n locations; Clone ID: 701122211H1
gcaattatcatgggcaaggtcaagatcggaatcaacggatttggaagaattggccgtttggtagccagagtggctctgcagagagacgatgttgaactcgttgccgttaacgaccctttcatcaccaccgattacatgacatacatgtttaaatacgacagtgttcatggacactggaagcatcacgatgtcaccgttaaggacgagaagacccttctcttcggtgacaagccngtcactaatttttggncanaaanccc

SEQ ID NO: 40075 - DNA, 258 bp, Glycine max
  unsure (1)..(258): unsure at all n locations; Clone ID: 701122212H1
ganggnanccatgtncctntatganngatcgtggtggtgnccgcctttnttntgtccngttcccccagaggttgaagnnnttgatccctctnatagatatgctanccataatactgtcttcnttgatgtcaatatgcgagcccttgatggactccaaggnccagtctatgtgggaactggatgccttttcagacgggttgcactttatggtttaacccaccgngttctaaanagcnccacanaggnagctgtanttgc

SEQ ID NO: 40076 - DNA, 260 bp, Glycine max
  Clone ID: 701122213H1
cggaagggcaccaccaggagtggagcctgcggcttaatttgactcaacacggggaaacttaccaggtccagacatagtaaggattgacagactgagagctctttcttgattctatgggtggtggtgcatggccgttcttagttggtggagcgatttgtctggttaattccgttaacgaacgagacctcagcctgctaaatagctatgtggaggtaaccctccacggccagcttcttagagggactatggccgcttaggcc

SEQ ID NO: 40077 - DNA, 265 bp, Glycine max
  unsure (1)..(265): unsure at all n locations; Clone ID: 701122216H1
cttcgttatccttctttttttctccttgaactcgaatattcactatggcagatgaggtggttctgctagatttctggccaagtccatttgggatgagggtcaggattgcacttgctgaaaagggtatcaaatatgagtccaaagaagaggacttgcagaacaagagccctttgctcctcaaaatgaacccggtncacaagaaaatcccggttctcatccacaatgggcaaacccatttgtgaatctctcgttgcttgttcagtac

SEQ ID NO: 40078 - DNA, 271 bp, Glycine max
  unsure (1)..(271): unsure at all n locations; Clone ID: 701122217H1
ctggactgtaccttctgtacaagggcacgcaaacacaccaatgcctcatgcatcgcaccttgtcccaaagcctgccaatgaggctaaatccagtgttgttttacatccttctacagtagacataaaaccaagtggaagaagtgagcttcctgaggatctattcatgnnaaaatattcaccgttccntgctccnttccccaggttggcaattgggtccaccacttagcatggggntcncaatttcantncaanntgggnggcccnntgccna

SEQ ID NO: 40079 - DNA, 268 bp, Glycine max
  unsure (1)..(268): unsure at all n locations; Clone ID: 701122218H1
ggtgtacccattggcacaccgactcctctgagctggctctttatctatccggagggaatttataagctcatgacatacataagggacaactacaataatccaccagtgtacattaccgaaaatggcgttgcggaatcaaagaatgactcacttgcaatcaatgaagcccgaaaggatggtattcgaattagataccatgatggccatctcaaatccctgcttcatgcggtcaaagatagagttattgtgaagggntactntatatggg

SEQ ID NO: 40080 - DNA, 264 bp, Glycine max
  unsure (1)..(264): unsure at all n locations; Clone ID: 701122219H1
cactactctctttgctctttgttttctccactatggctgcacaacgaaanttccaagactacttgcctgtgatggccaacaagcttggtggggatggcctaattgatgaactgtgcaatgggttcaatctgttgaaggattctgataaaggggtcatcacctttgagagcctcaagaggaactctgccttgtttggccttcagggtcttagtgatgaagatcttcggtccatggttttggaaggtgactttgatggtgatggtg

SEQ ID NO: 40081 - DNA, 266 bp, Glycine max
  unsure (1)..(266): unsure at all n locations; Clone ID: 701122221H1
ctgccagtagtcatatgcttgtctcaaagattaagccatgcatgtgtaagtatgaactaattcagactgtgaaactgcgaatggctcattaaatcagttatagtttgtttgatggtatctactactcggataaccgtagtaattctagagctaatacgtgcaacaaaccccgacttctggaagggatgcatttattagataaaaggtcancacnggctctgctgttgncttggggattnccngganaccccgtgggntccgcnggg

SEQ ID NO: 40082 - DNA, 262 bp, Glycine max
  Clone ID: 701122222H1
ctagggtttgttcgttggttcgcaacaatggcgatgaggagattctacaacgagatcaaggggaagagggtgagcgaggttccggagcacgtgaagccgatgctgtcgctgaactacatcaagaaggcgattcagagaggcttcgataattaccatgccaagtacattgaaaccagctcccccgatcccatcttccatgtctgctacggcggcatgatcttctcctacctcgttgctctcccccacgagcgccgccacctcc

SEQ ID NO: 40083 - DNA, 243 bp, Glycine max
  unsure (1)..(243): unsure at all n locations; Clone ID: 701122225H1
gcggacannccccaaagatcnccttccccagtncccaagaaangagcntcnccatccccntctgtgctacctnccannaancaagcnccacttctnctccgatgcctctctggacangcctgatctnggnccnttccttntcaagctggnccgcgncaccattgcctctggcgatggccccggccaaggtccncgaacncgncaatncnggtccccggagttngacgggggccggnntcaagg

SEQ ID NO: 40084 - DNA, 261 bp, Glycine max
  unsure (1)..(261): unsure at all n locations; Clone ID: 701122227H1
ccagaacanagtttngttttataggaaccctcccattcatccaatttatcgatccacgtccatccccgtctttcttctcctattcctctctctctctcttgttcttctttttttcccccaaaaaagtgagagaagaacaaagggaattgaaggaagagattganaaaaaaggggggatacccagataattaattcggtgaaatttcggattttgattagtgggtgtttctcttttcgtgtttttattaccttcagtggtgg

SEQ ID NO: 40085 - DNA, 260 bp, Glycine max
  unsure (1)..(260): unsure at all n locations; Clone ID: 701122228H1
ctgccagtagtcatatgcttgtctcaaagattaagccatgcatgtgtaagtatgaactaattcagactgtgaaactgcgaatggctcattaaatcagttatagtttgtttgntggtatctactactcggataaccgtagtaattctagagctaatacgtgcaacaaaccccgacttctggaagggatgcatttattagataaaaggtcaacacaggctctgcctgttgctttgatgattcatgataactcgtcggatcgc

SEQ ID NO: 40086 - DNA, 264 bp, Glycine max
  unsure (1)..(264): unsure at all n locations; Clone ID: 701122229H1
caaagccctaccaccttcagataaaatttgctatcctcgttctgggtcaagtccaattactgaaccacaaccactcttttctgggcccatagttccattgcctactatagaagagggaattgaagagaaaccaatcacaccccagaatggagctatcatccaaacaaaaaccgaagagaagcctcagtccacaagatagtggcaaagatcaccctaaagangtagaagacaacaactttgacactgagagtgagggaagtgatg

SEQ ID NO: 40087 - DNA, 259 bp, Glycine max
  unsure (1)..(259): unsure at all n locations; Clone ID: 701122231H1
gcgacgccctagttcatttttcttctccgttctcttctctctctgttcttcactcactctcattcattcaccatgacgaaacaacatgccaattgntctccttacgataacaacggaggatcatgtgttgcgattgctggagcagattactgcgttatcgccgcagatacgagantntccancggtnacaanatccacantcgngnttncnnnaaaatcccncaggggnnaaaaagtggngnngnccncngnngcnaaa

SEQ ID NO: 40088 - DNA, 266 bp, Glycine max
  unsure (1)..(266): unsure at all n locations; Clone ID: 701122232H1
gcagcacgnggagcagcctcaggagganaaggatgtctcacaggaagttcgagcacccaangcacggttcactgggatttcttcccaggaagcgtgctnctcgtcacangggaaaagtgaaggcattccccaaggatgacccatccaaggcacccaagctncactgcattcttgggttacanggncgggtataattcccntttttaaagagtnnggaancngnggnaantttnnncaaaanggaaantggtgaggtctttnctttt

SEQ ID NO: 40089 - DNA, 263 bp, Glycine max
  unsure (1)..(263): unsure at all n locations; Clone ID: 701122233H1
aaccaaccttagcctagagaaaattaacaagctagtttgcttgtttttcagtgaacttcaaggaatacactttatctcttgagatacgtactaagattcatttaagaaattgatatattcccataattaatnngaaagaagatggaagtggtggtacaaagtcctagtagtccaaacatggatactttcgatttnggtggcaacatgggtccgatcttccaagggttcctncttcccnaaaaggnttgggaattncgcctang

SEQ ID NO: 40090 - DNA, 278 bp, Glycine max
  unsure (1)..(278): unsure at all n locations; Clone ID: 701122234H1
actctttcatttgcaacatcaaaatgagtgaagatggcattgactacggcggaattgtgacggcggttatagcagctgctgcggtggtcaccatagtcagatgtttatttgctgccatggttgccatagccagatgttatnatgccgcaatgntgnccnntagtcgngaaagtttatntgggcaancctangnggncaacaanggnccntcggagangccccaaacnaanttgcgggngnnnnaaaaantggggngggggnacanttggggaaattgc

SEQ ID NO: 40091 - DNA, 260 bp, Glycine max
  unsure (1)..(260): unsure at all n locations; Clone ID: 701122235H1
gcgagtttcaacccgggcagagcctcaacggccatccgaagaagctctcgagcaagaaagtttctggcaacaagcggctctggccgtcaaattccgcgaaggatttgaaacggtcgcattcggaggctgggaacttgatgaagtgttgctcccaggttttgcagaagctgatgaaacacaaacatgggtgggtcttcaacgcccccgtcgatatagtcggattgaaatccacgattatgcgatataatcagcagccangg

SEQ ID NO: 40092 - DNA, 250 bp, Glycine max
  Clone ID: 701122239H1
cgtgtttgttgttgtgtgtgttttccgcggaaaatcaaaatgggtatcattgaaaagatcaaagaaattgaagccgagatggctcggacccagaaaaacaaagccacagagtatcatctcgggcagctcaaggcaaaaatagcaaaactgaggacacaattattggagcctccaaaaggttctagtggaggtggagaaggatttgaggttgcaaaatttggtcatggacgtgttgcactgattggattcc

SEQ ID NO: 40093 - DNA, 259 bp, Glycine max
  unsure (1)..(259): unsure at all n locations; Clone ID: 701122240H1
cttcttttgttgttctgtgtttgtgtttgttttntctctcacctnaaaatgtcttgctgcggtggtaactgtggttgcggaagctcctgcaagtgcggcgccggctgcggaggctgcaagatgtacccagacttgagctacactgagtcaaccaccaccgagaccttggtcatgggagtggcacctgttaaggctcaatttgagggtgctgaaatgggtgtgcccgctgagaacgatggctgcaaatgtggaccaaact

SEQ ID NO: 40094 - DNA, 257 bp, Glycine max
  unsure (1)..(257): unsure at all n locations; Clone ID: 701122241H1
tttgttacttgtggtgcaacctatgtgcccatctatcgaggacaaaaggatgtctcttgcccttactgcacttcccgttttgtgccaagccaagagggacagctatgtactgtgtgtgatcttgcagtggtcggggcagatgcttctggattgctgtgttcaccttcccagatacgttgattctgctgctagaccagaaacattttttcccccaatttgtttcagaagatccctgaaacagaggcatggnaccaatt

SEQ ID NO: 40095 - DNA, 259 bp, Glycine max
  unsure (1)..(259): unsure at all n locations; Clone ID: 701122244H1
aaanaggagacgaagcaatggcgccgaagaagccccgaaccacgtcgaggaaccctgatttggtcaggggaattggcaaatattcgaggtcgcagatgtaccacaagangggcatctgggccatcaaggccaaaaacggcggtgttttgcccctccacgatcccaagcccaaacccgaggccccggcccagaagccgcccaagttctacccggccgatgacgtgaagaagcccctngttnaacaagcacaagcccaagc

SEQ ID NO: 40096 - DNA, 75 bp, Glycine max
  unsure (1)..(75): unsure at all n locations; Clone ID: 701122247H1
atatactttagagccactgtaatgtaaaagcttcgaatccatttatgttggctcacctgaaacancttaattncc

SEQ ID NO: 40097 - DNA, 261 bp, Glycine max
  unsure (1)..(261): unsure at all n locations; Clone ID: 701122248H1
cgagaatgcccgaaactcctcgcagtgtgactctatgctcattggtgacaatgcagctgcaaatacctatccttaacattcagcaagaatcgaacatgaagctagtacgtccaaaattggtgaagatcaattgttttattttcagcaaaggggaatagactatgaaaaagcaatggctgctatgatctctggattttgccgtgatgtctttaatgagctnccctgatgaatttggttctgaggtgaaccaactcagagctg

SEQ ID NO: 40098 - DNA, 274 bp, Glycine max
  unsure (1)..(274): unsure at all n locations; Clone ID: 701122249H1
ccccttatctttctctcttctctctccccgcccaaaccctaactccctaccctattccgctntctctcatccatcatgaaaggangaaagtccaagaccgaatctaagagagccgatgccaaacttgctgtgaataagaagggcgcggcaacnaangactnggaaaccccgcgggaaaggggaanggcaggnnaantttctnangggnccanagggggnccccangtggttntgtggttttgagggggnnttgggggggggttcnaaanagaag

SEQ ID NO: 40099 - DNA, 263 bp, Glycine max
  unsure (1)..(263): unsure at all n locations; Clone ID: 701122251H1
ctctgagnncagcctccagcctctcctccaaagtcccctgcggttcgttcggttattcttcgaaccgttgtctgangtttanaactcaaaacttcaccgaacgcatttcattcaccaattcgtccaagtctcgtatnantcaatcagcctatccgtcttgcggttggaganatcggaggggagagcagccatggcgcntcgagtanaccacgagtatgactatctgttcaagatcgttttgatcggagactcaggtgtatgcg

SEQ ID NO: 40100 - DNA, 126 bp, Glycine max
  Clone ID: 701122253H1
cttcgctgacaactctctaccttccctctttttccgaatctgaatagaaatggcttcggagactgagacgttcgcttttcaggccgagatcaaccagctcctcagtctaataatcaacaccttcca

SEQ ID NO: 40101 - DNA, 259 bp, Glycine max
  unsure (1)..(259): unsure at all n locations; Clone ID: 701122255H1
gattggaagaagtaggaaatcatgggtgggatagtttcctcccattttattctgaatacaggtgatgataggatgagagaaagtacttagtgncattataatcagagaaaagggttatacactgtgagtgtaaatatttttacatagtcatccaattacaacctatcatggatacagctggccaggaaagatttagaagtcttattccaagctacattagggactcatctgtagctgttattgtatatgaggttgcagc

SEQ ID NO: 40102 - DNA, 259 bp, Glycine max
  unsure (1)..(259): unsure at all n locations; Clone ID: 701122256H1
atatttactgatattggcgcatttctttgagaaagttactaattcctagatagaggcaaaaatgttgggaattttcaaggagaagttggttaaagcacccaaagagctgaacagtccagcttcgttgaattcatgcactaagcctaagctaagtcacgaaatccttcaggatttcatgtcctgcaattcctccaatgctttctcaatgtgctttgggaatgaggctttgctagcctattccccttcaannnngccnccc

SEQ ID NO: 40103 - DNA, 257 bp, Glycine max
  unsure (1)..(257): unsure at all n locations; Clone ID: 701122257H1
cacatttttatatatggtcaatacatatattattgtcccaacagcagatgactattctatgagccttggggccgcgccaacagtttgtgggattgtgattggggcaatggctgttgcacaagtgttttcatcagtgtattttagtgcatggtcaaacaagtcatactttaggcctcttgtattcagtagcatagttctttttcttggaatatcttgtaagccattggcnaatngatgtnagtncaatatgnatcnct

SEQ ID NO: 40104 - DNA, 261 bp, Glycine max
  unsure (1)..(261): unsure at all n locations; Clone ID: 701122261H1
atcgagcttgcaacttcacccaagtcctnaaacaaccttttaaacctcatcaaacatgtctctgattccatcattgctaagcaacagaaacatcatggaccccttctccaccaacatctgggcaacctctgactccgacatcgaggtttccgccttcgtgaacgcacgtgtggactggaaggaaaccccggagtcgcatgtgttcaaggcggacttgccggggctgaagaaggaggaggtgaaggtggagntggaggaagg

SEQ ID NO: 40105 - DNA, 258 bp, Glycine max
  unsure (1)..(258): unsure at all n locations; Clone ID: 701122262H1
gggatgcttgtcggtgatgtcccatgggagatgtttgttgaatcatgcaagcgtttacgcatgcatgaaaggaaaggaggctattggtcttggtcttgcaccaagagccatggcaaaatgcaagaacaggagctagactagtcgcacaattcatgacctgccccatcctttgtaattgtggtgcccagttggcttagtaactaaagtaaggataagctgcngcagacacggatggacattgcgggtgttgaataattt

SEQ ID NO: 40106 - DNA, 265 bp, Glycine max
  unsure (1)..(265): unsure at all n locations; Clone ID: 701122265H1
gatcctccatggcctccaccaaggaacgtgaaaacttcgtctacgtcgccaagctcgccgaacaagccgaacgctatgaagaaatggtggaagcaatgaagaatgtggcgaactaaacgtggaattgacggtagaggagcggaaccttctgtcggttgggtacaagaacgtggtgggtgctcgtagggcttcgtggaggattctttcctcgattgaacagnnaggaggaagctaaagggaacgatgtgagcntnnagnaggnnna

SEQ ID NO: 40107 - DNA, 263 bp, Glycine max
  unsure (1)..(263): unsure at all n locations; Clone ID: 701122266H1
atatatatatattgcaatagggctccttatttagtgtccgaaaatctctcccttagtcataccaacaaagcaacaagcactacaaattcgctgtctcagtcccttcgttgccaactattttgcgtaggattttccttcttcacaacctcgtantaccattcgttaagttcctccttgtntggtcccaaaaatctgagaaccctctttcaatttcncttcctcaactcnatcattcancantgtccantannaatggtntgata

SEQ ID NO: 40108 - DNA, 256 bp, Glycine max
  unsure (1)..(256): unsure at all n locations; Clone ID: 701122269H1
gttaggtntctccagcgtcaggccntccaaacgcnccgtttcgngcagaggaangtcctgtacgaggataactcctncgatttcgtgttctccagagacctagacaangnttctgtcccagcattgctggtgagccgaggttgancgtgtccttaagccacgtggcattggngcnntcttgtaggnaccactagttctcancccaatgatttgataanagcagccacacccgtttcctctttgttaangtctncca

SEQ ID NO: 40109 - DNA, 261 bp, Glycine max
  unsure (1)..(261): unsure at all n locations; Clone ID: 701122271H1
ggcaagatcctatggaaatttatgttgatgatgaggccaagttgacccttcacgggcttgtgcagcactacatcaaattgaaagaggaagaannnaaccggaagttgaatgatcttcttgatgcactggactttaatcaagttgtgatctttgtgaaaagtgttagcagagcagctgagctggacaaactacttgtggagtgncaactttccatctatatgcattcattctgggcatgtcccnggnagagaggtnaacgcc

SEQ ID NO: 40110 - DNA, 82 bp, Glycine max
  unsure (1)..(82): unsure at all n locations; Clone ID: 701122272H1
aagaangantaacatggggtntntancagtgaangaaatgagaaggatatgnccatatagcagggcctatggtggcagtggt

SEQ ID NO: 40111 - DNA, 256 bp, Glycine max
  unsure (1)..(256): unsure at all n locations; Clone ID: 701122273H1
gtcctgctccaggttgtgaatatgcagttacttttgatgctggcagtggaaattatgatgtatcttgcctctgttcatatagcttttgctggaattgcacagaggaggctcaccgtccagttgactgtggcactgtttcaaagtggattttgaaaaatagtgctgaatctgaaaacatgaactggatacttgctaactcaaaaccatgtcccaagtgcaagcgaccaattgaaaaanaccaagggtgcatgcatat

SEQ ID NO: 40112 - DNA, 255 bp, Glycine max
  unsure (1)..(255): unsure at all n locations; Clone ID: 701122274H1
aaaagggggagtttcttattccttctagacgcttccattgatcggcgatttctgatacatggcggagcatcacgaacacgaggaagtgaagggtgagtccttgttggagaagatttctgggaagatccacgaccacgattcctcgtcttcgtcggattccgacaacgacaaaaccagcgccactgattccttcaagtctaatgttttcaggcttttcggcagagaaaagcccattcnatcagttcttggcggtgg

SEQ ID NO: 40113 - DNA, 256 bp, Glycine max
  unsure (1)..(256): unsure at all n locations; Clone ID: 701122276H1
atcagttacttgaaaaagcaggctatgttcaaacacacggctacatatggatccctcctaccttgtagagtaatctaatgtaataacatgaggaatctttagttgctaatgaatacacaataagcttgagaggcttcccttggaaccactcctcatgaatgtgtaatcaagcatttgaactatgagagtgtttgacacggtttgtgtaactgatttgcctttaaatgnnaaataaatggaaaatgaagtctatttc

SEQ ID NO: 40114 - DNA, 257 bp, Glycine max
  unsure (1)..(257): unsure at all n locations; Clone ID: 701122277H1
ggaagttcgagcacccaangcacggttcactgggatttcttcccaggaagcgtgctgctcgtcacaggggaaaagtgaaggcattccccaaggatgacccatccaaggcacccaagctcactgcattcttgggttacaaggccggtatgactcacattgttagagagtcgagaagccaggntcaaagctncncaagggggaaanttttgaaccttttannanttntttgggncctncnnaagggttttttnggnttg

SEQ ID NO: 40115 - DNA, 257 bp, Glycine max
  Clone ID: 701122279H1
cttccctgtataggcgtaccatgaagctcatggatgtttcaggcagaaggcagttgttacttactacaatccccgtgctgattgggtcatcccattattttggtcattggaagcctggtaaattttggcaatgtcgcccatgcagcaatctcaacagtatgcgttgtggtttatttctgctgctttgtgatgggttatggaccaattccaaacatcctttgctcagagattttccccactagggtgcgtggcctctg

SEQ ID NO: 40116 - DNA, 80 bp, Glycine max
  unsure (1)..(80): unsure at all n locations; Clone ID: 701122281H1
gcttcctcccatggcttatccacnattgcaccattcaccaccatgttggccatggcgattanctgccatttcccaaaacc

SEQ ID NO: 40117 - DNA, 261 bp, Glycine max
  unsure (1)..(261): unsure at all n locations; Clone ID: 701122283H1
gcatggtcngggtgacataatatgtataggtgacattagagaaaataaagctctctatgagttacgtcctccttctattgtgtccatcaagtctactgatgaaaattgcatggaaaagagcacagatgttagcaatggatcttgagtcaaggtagtgggaaagctttgaaacaatggctcttcatcttctgaattctatcccctagtatctgcagtgcatntttcattccaagctctcatcangtttcatgggctangaga

SEQ ID NO: 40118 - DNA, 257 bp, Glycine max
  unsure (1)..(257): unsure at all n locations; Clone ID: 701122285H1
attgtganaggtagccacgatgtggtcctaattgattgtgaataatgnataatttgtatttcaacctgggttggactagccctttgttttgctttgacccctgggttagagagctgcgagggcgcattttagtggtncacaaatatttgcattagatgacagagatgatcatatacaatgcaatccttctggtgacataatggtgattgttctaagacatcaaaatttcaaaaacttgcctgctaaaagacacaggg

SEQ ID NO: 40119 - DNA, 200 bp, Glycine max
  unsure (1)..(200): unsure at all n locations; Clone ID: 701122288H1
gagtgaaggtgttcgtggcaactcagatcgggattcactcgattgattgcggttgcgattacgggtgcaccatcatctatggtgcgcccgcccgcggctgatcattgatttagctgtagtggcgttgtttcactgctgtcatctgacgcganangngngnantatcctngaaggggntnaccnnctttttttnncggggg

SEQ ID NO: 40120 - DNA, 291 bp, Glycine max
  unsure (1)..(291): unsure at all n locations; Clone ID: 701122289H1
ancgctatcatatcatatcatctctnaccntttcanatcagatnccccantaacttaaagtaacantgnagccattaagattcntactacaggctcatcaacccattnnnngattgcttcttnttttttccttcctggttttcgaatgcttncaggaaccacggattggcataagtttctngcagattngtcttggctgttcatatggggngatgnnanctngcnacattgtgccatttngncaaggtnncaantggntggggggcaggnatgtggtttgagggattnncg

SEQ ID NO: 40121 - DNA, 247 bp, Glycine max
  unsure (1)..(247): unsure at all n locations; Clone ID: 701122290H1
aaaaaatgaaagaccttaaaaaatacagagaaatgtgggagcatcaaaacgttngtttctacgatgggcttcagggagcacaataaaaaagaggacttcaaggcaaatgtgacaaggctagagttggcaagtgtgtgggacgagatcatggaaaagctaagaagttaccaactcccagatgagtttganggcaacaaagaatgggtagatcttggatcaaggtttcgacaactaatggagcctctag

SEQ ID NO: 40122 - DNA, 257 bp, Glycine max
  unsure (1)..(257): unsure at all n locations; Clone ID: 701122291H1
ctacacatccatggcaactgctggcgtgcaagaagttcgtgttccccctctaacttccacctcctgagccacctngctctctttgacggaaccaccaggttgtacatcagttatatttgtccctatgcgcaggtgtttggatcactcggaactataagggactacaagacaagattaaactggttcctattgacctacaaaacaggcctgtcttggtataaggngaangtctaccctgaaaacanggtgcnatcatt

SEQ ID NO: 40123 - DNA, 260 bp, Glycine max
  unsure (1)..(260): unsure at all n locations; Clone ID: 701122292H1
cgattacaacggcggcgacggtctccggctgccgataaaggtcttcgtcgaacacgcggatgtttctcncgtacgccgtcggaggcgacgaacgccggcggaaggaacatncctgcgagtggaatccgaaagcggcggtgaagagcaactcgacgggattctcgaagctgtggaggttccgagacgtgaagctgcggagcaacagcgacggaaaanacgcgtnngtgttcttgaaccangcgccggcggnaaagggngng

SEQ ID NO: 40124 - DNA, 259 bp, Glycine max
  unsure (1)..(259): unsure at all n locations; Clone ID: 701122294H1
cgcgatctcgttctgttctgtacctgcacccagccgcagcagcaagtgatcgaagcgaaaagagagtaatcagcagagaaattcatcgtcgtagttatgggtaaagttcacggatcacttgcacgtgccggtaaggttagaggccaaaccccaaaagtggccnnnnnnnnnnnnnnnnnnnnnccacgtggccgcgctcacaagaggtncncagtataancgcngattcgtcaccgccgtggtgggattcggcaagang

SEQ ID NO: 40125 - DNA, 256 bp, Glycine max
  unsure (1)..(256): unsure at all n locations; Clone ID: 701122295H1
ataccatttcattcattcttacatattgcttaattttatctncaattttganacaccttctgaatggctttttccaagagttgcattgttaatatgcacggtaattgggtattttgtgantgcctcctgcgggcaatttttaccaagattttgatatcacttggggagatgggcgtgctaagatactcaacaatggcgagcttctcactctgtctcttgacaaagcctctggctcgggtttccaatccaagaacga

SEQ ID NO: 40126 - DNA, 262 bp, Glycine max
  unsure (1)..(262): unsure at all n locations; Clone ID: 701122296H1
taccactctcagtccaagggactgcgtatttggtgattccgttcaacaggtttagcantattatctgaaatggcatcggtgtctagtcagcaacagttccgttacacgcagccaccgtcaaaggttcttcatttgagaaatttgccgtgggagtgtacngaggaggaactaattgancttgggaagccatttgggaatnttttgaccacagnttgcaactttgnagcanntcgtaanccgnggnttnnnnggntttngganc

SEQ ID NO: 40127 - DNA, 281 bp, Glycine max
  unsure (1)..(281): unsure at all n locations; Clone ID: 701122302H1
ggtgaagattttttttgagggaaccaaggtggggattcagccatcgccggtggttgctgcgtttagctcaagaggtcccaactcgatcacgccacagatcctgaagccagatctcatcnnggccaggtgtcaacatcctagcggggtggtctaaagccgtggggcccaccgggttgccggttgataacaggcgcgtggatttcaanntcatcttnggnactcaaggtgggnccnacagnangggtttagcgtntaaaaaaaggggcnccccttttggnncc

SEQ ID NO: 40128 - DNA, 287 bp, Glycine max
  unsure (1)..(287): unsure at all n locations; Clone ID: 701122303H1
gcccaaaacagaagcactttcccatgaacctgggcatcagcatnttctcttcccttgttgactatcaagccctttcaagtttcatcctcaatcaaaatcgtgaacgtggagcgtgggaatcgagagccaacggaacgcgatttcgattttggatttcttnangaattgcaaaatggagaggagaggtggaatggangaaaaggcttgggatgnatttaggagcctttgtgcganccgnttgngtnaaattcccccnnangggaacngggggggtnccgnnnnancct

SEQ ID NO: 40129 - DNA, 281 bp, Glycine max
  unsure (1)..(281): unsure at all n locations; Clone ID: 701122304H1
gttgcattgccccttcatcacatcatcaacaangttcactggtaaatggtgcgtaattttcttctcattgcaagattaactgcatcgttcacacaccacagaagtaccccaatccaattgggttctctgctgcaacacaaacacaatgcttcaatttttttcttcaattccttcacttcaggaatctcttctgattctgaatcagatgatgaaaaccaccancaaggtgacactttacggngtcttacctcatcaactctggggggtgtcccaaaaggggc

SEQ ID NO: 40130 - DNA, 276 bp, Glycine max
  unsure (1)..(276): unsure at all n locations; Clone ID: 701122307H1
ttagatccaggtccaaagttggaagtgctttgttttgaannnaaagcttaagctcaaggngtggcataaggnggtttatgggaatttatcctttgggataaggactgtggtagatgagttagatgacgtggaggtaagactttgtgaagagcaaccagttgattgtgatcagnggaancttctatcctctganttttggaggtgtgcctganttagggagagtatgctggcccaaaantccagggctaagtggntcaaagagggtancnccanctc

SEQ ID NO: 40131 - DNA, 284 bp, Glycine max
  unsure (1)..(284): unsure at all n locations; Clone ID: 701122309H1
ggattttgagagtttcctggactttgttctggctttagaaaacaaagacaccccagaaggcttgacttacttgtttcgatgccttgatcttcaagggaggggttacctcactacagctgatgttcactcccttttcagagatgtacaccataaatggattgagggtggnaactacgaactttgtatcgaagatgtaagggatgaaatctgggatatggttaagccagcngatccactcaagataacatggcagacctactggcctgcaaacagggtgtaactgt

SEQ ID NO: 40132 - DNA, 289 bp, Glycine max
  unsure (1)..(289): unsure at all n locations; Clone ID: 701122313H1
agaaaatgggagtggagaagcagttgttgangcctggcaccggtcccaagccaattcccggtcagaacgtcaccgttcactgcactggtttcgggaagaacggtgacctttctcagaaattctggagcaccaaggatcctggccaggaccctttcactttcaaaatcggccaaggttctgttatcaaaggatgggatgaaggtgtgcttggcatgcaaattggtgaagttgctcgtctccggtgctctccggattatgcttatggtgctggtggtttccttcttggggg

SEQ ID NO: 40133 - DNA, 291 bp, Glycine max
  unsure (1)..(291): unsure at all n locations; Clone ID: 701122314H1
gcttgagaaggagcccaaatttttgaagaatggtgatgcaggtatggttaagatgattccaaccangcccatggtggttgaaactttctctgagtatcctccccttggtcgttttgctgtgagggacatgcgtcaaactgtggctgtcggagtcatcaagagtgttgagaagaaagaccccaccggagccaaggtcaccaaggtnnnctgccaagaagaagtgattgcatttgggcaattttgctagcacatgtgatcatcatcgtggttactccnttatagtagtttnac

SEQ ID NO: 40134 - DNA, 266 bp, Glycine max
  unsure (1)..(266): unsure at all n locations; Clone ID: 701122316H1
caggactcttatgccattcgaagctttgagagaggannatctgcccnaaatgctantcattttgcttgggagatagttccggttgaancttccactggaagaggncgggcttccaaaattgttgataaagatgaaggcctggggaagtttgatgctgcaaagttaaggaagcttagaccaagctttaaagaggtcgggggttctgtgactgctggcaatgcttctagcataagtgatggtgctgctgcatagtgctagtgagcgaa

SEQ ID NO: 40135 - DNA, 276 bp, Glycine max
  unsure (1)..(276): unsure at all n locations; Clone ID: 701122319H1
ctttaatttgcactagcaagggggttggttttatttctgtttgcttgcaacaatggctgtgggctaataagttactttctgtnttgatcattgccctcattgccatttccatgcttcaaacngtggttatggcatctcatggacatggaggccaccactacaatgacaagaaaaaatatggacctggcagtctcaaaagcttccaatgcccatcacaatgctcaaggaggtgtgggcaagacccagtacnacaagccctgcnagttttctgtcagg

SEQ ID NO: 40136 - DNA, 282 bp, Glycine max
  unsure (1)..(282): unsure at all n locations; Clone ID: 701122320H1
gcaatggatgcagcttttggaatggaatatttgnactcaaaaaacattgtgcatttcgacttgaaatgtgacnctttgcttgtaaacttgaaagatcctttacgaccaatatgcaaggttggtgattttggcttatcaaaaattaaacgaaataccttggttactggtggtgtgcgtgggactctaccttggatggcaccagaacttctgaatggcagcagcaacaaggtctctgaaaaggttgatgtgttctcctttggcatagtattatggganattctg

SEQ ID NO: 40137 - DNA, 107 bp, Glycine max
  unsure (1)..(107): unsure at all n locations; Clone ID: 701122322H1
gtggacgcagcctccgccggcgggcattaccgccattgaagctgcattcaagctttttttcactcgttgccagcacanccatcannaacnncaaaangtgnnncntg

SEQ ID NO: 40138 - DNA, 279 bp, Glycine max
  unsure (1)..(279): unsure at all n locations; Clone ID: 701122323H1
gcgacgccctagttcatttttcttctccgtnctcttctctctctgttcttcactcactctcattcattcaccatgacgaaacaacatgccaantggtctccttacgataacaacggaggatcatgtgttgcgattgctggagcagatnactgcgtnatcgccgcagntacgagaatgtccacnggtnacaanatcctnantcgggataactccaaaatctcccaacgggctgaaaatgtgtgatggcttcatctggctttcagcngatgtcaaagcttt

SEQ ID NO: 40139 - DNA, 277 bp, Glycine max
  unsure (1)..(277): unsure at all n locations; Clone ID: 701122324H1
gcacattcatttgtaaagggtctcacagcgtaacagacttgaactacccttcaatcacattaccaaatcttggcctaaaacccgtaaccattactcgcacagtcacaaatgttggaccaccagccacatacactgcaaatgtccactcgcctgctggatataccattgtcgttgtgccaagatccttgactttcacgaaaattggggaaaagaagaattccaagttattgtgcggcaggcagtgtaatacgnggccaagtnccatttcggggtttnc

SEQ ID NO: 40140 - DNA, 281 bp, Glycine max
  unsure (1)..(281): unsure at all n locations; Clone ID: 701122326H1
ctgtgacgagcatcatggcctcaagagcagtgttattgttggctatgtgtgtgcttccggcgatggttgtggccattcgcccagcaaagaaccctttttgcgtgaagggtcgtgtctactgtgacccttgccgtgctggttttganacctcagctaccacctacattgctggtgctgagattatgttgcaatgcaagagcagggttagcaacgaggttgtgtacacgaagaaggggtacaccgactcaaccggagcatacacaatgtacgtggatgaggat

SEQ ID NO: 40141 - DNA, 111 bp, Glycine max
  unsure (1)..(111): unsure at all n locations; Clone ID: 701122327H1
gtcgaaggngcgaggtcgacgaggtggtggcgagtggctctccggttatccttccaacttnctgggcgtcctggtggcgaanntcccaagcaacatggcaccaaagccttc

SEQ ID NO: 40142 - DNA, 279 bp, Glycine max
  unsure (1)..(279): unsure at all n locations; Clone ID: 701122328H1
tgnnaggntgctcctnctnganctgctctctganctcggacatgaaaacgaagaaagcgcntggnggtctcttcgttttcatgtccgagttcagagngcngttcaagaaggagctcctaacaacaaatccgtcgctgttgtcggcaaagctggtggtgaaaaatggaaatcgngatcanctgctggaaaaggcccnntcgtgnnacngtgngagnagcancgggntnngngcacnctattcggntaacataagcantggngggaaanantccgggnngc

SEQ ID NO: 40143 - DNA, 109 bp, Glycine max
  unsure (1)..(109): unsure at all n locations; Clone ID: 701122334H1
tnnnaggnngcncctnctngaacngctctctnaactccgganatgaaaacgaagaaagcgcttggaggtctcttccgttttcangtccgcgttcagaggagtcagttct

SEQ ID NO: 40144 - DNA, 284 bp, Glycine max
  unsure (1)..(284): unsure at all n locations; Clone ID: 701122335H1
gagagcgttgttgagtccccagtgaagaggcagagagatgatggtgaagaaaatggtgtctctgtttccatggacgtggagggtggcaaagaccctcttagtaacggtttatcatctgtgattcctnggtggttctctgaaatcagtgcaatgtggcctggagaggctcactccttaaaggtggaaaagattttgtttccaaggaaagtcagattaccaaatgtcntggnncttcaatcttcaaanttntgncaaggtccttnttnggnatggngnaaatcccc

SEQ ID NO: 40145 - DNA, 280 bp, Glycine max
  unsure (1)..(280): unsure at all n locations; Clone ID: 701122336H1
caacaaccaaccacaagtcaatcgaatgaattcttcaagactccggactctctttctgtccggagggaatccttgtttctcaatcaatcatgcctcaactggataaattcacttattttacacaatttttctggttatgccttttcttctttacttnttatattttcatatgcaatgatggagatggagtacttgggatcagcagaattctaaaactacgcaaccaactggtttcaaaccgggggaacaaaatcaggagcaacgaccccaagagtttgga

SEQ ID NO: 40146 - DNA, 278 bp, Glycine max
  unsure (1)..(278): unsure at all n locations; Clone ID: 701122338H1
cacgactaggagatggcaaagtcgaagaaccacaccgctcacaaccagtcctacaaggcccataagaatgncatcaaaaagccaaagaggcatcgncacacttccaccaaagggatggatccaaagtttctgaggaaccagaggtacgcgaggnagcataacaagaagagcggtgaaacagccaccgaagaagagtaaagtgccactctcaaatgggcctattaggatttgatttgttatttaagccccatatgttttgtgtcgaatctatctttagt

SEQ ID NO: 40147 - DNA, 131 bp, Glycine max
  unsure (1)..(131): unsure at all n locations; Clone ID: 701122341H1
actgagacaganncncatggtggagaagaggnagatnatcnacaatgtgangtgcctttngncagcncccagatggaactccttttggtgctcctatgtacctacctcagaacgctggtcctcaacacctc

SEQ ID NO: 40148 - DNA, 291 bp, Glycine max
  unsure (1)..(291): unsure at all n locations; Clone ID: 701122347H1
gtcttgtttccattgatggcccaaggccacatgatccccatgatggacatcgcaaagatattggtgcaccgcaatgttattgtgactgtggtcacaacgccacataacgcagctcgtttcacaccaatctttgatcgttatattgagtctggctttcctgtaagattggttcaacttcaattcccatgtgaagaagctggagtaccaaaaggatgcgagantctcgatatgataccttcacttgccacggccacnagtttcttcaaagcagcaaaccttctacaacaaccg

SEQ ID NO: 40149 - DNA, 282 bp, Glycine max
  unsure (1)..(282): unsure at all n locations; Clone ID: 701122349H1
cacgctcgtcttcacgatccagcgattccgctctccgacgagtctgcgtaaggtgaagaatcacgaggccagccgccggtgaagaatcgcgcgattcgtctggaaatcgcgattcaagctcgattcatctccgttatagagattcaaccacgattcaggaacaaaaacaagacaacttccgattcgtttcagtagcagctagaatcgtatcgaatcgtgcgacantatcgtganccatngaaggnganaaaacantctccccnggnatcctgggtgnttnnc

SEQ ID NO: 40150 - DNA, 284 bp, Glycine max
  unsure (1)..(284): unsure at all n locations; Clone ID: 701122350H1
gcttgctgtgctgatattgcaaaatacatagcagaggttgatcagaaaaacctggaaaagccctgacttctcagtnttgtttatggccatgtacattccattttttgtggctgtgctacatggatctctcttaagtcagcttagttgcancatgcatantagttgatcgacagtttgcttcgttcgggtagttattggtagaatgcataagaaccccangattnacatgttgagtttaagatccgttgaatgcacgggttcccnccataaaanaattggggatt

SEQ ID NO: 40151 - DNA, 220 bp, Glycine max
  unsure (1)..(220): unsure at all n locations; Clone ID: 701122352H1
acctctctntctctccaccaaaaagaaaagangaaaaagcgagaatntcacanacacattagtcaggcaagancatncnaacngaaannatggaaacacancancaaccccaaaagaacaaagaaaacgatgtgcaaaagataactgaagaangagtagcaatagcagngccancnncaccatccacttcnccttgnnacgaatncnccnacanaatcnc

SEQ ID NO: 40152 - DNA, 264 bp, Glycine max
  unsure (1)..(264): unsure at all n locations; Clone ID: 701122354H1
gcttgctgtgctgatattgcaaaatacatagcagagganccncagaaaaacctggaaaagccctgacttctcagtttnnaccaatgngatgtacatnccattttttgtggctgtgctacatggatctctcttaagtcagcttagttgcattatgcatattagttgatcgacagtttgcttcgttcgggtagttattggtagaatgcataagaaccccatgattnacagtggagtttaaganctgtnnaaatgcacgatncccnc

SEQ ID NO: 40153 - DNA, 266 bp, Glycine max
  unsure (1)..(266): unsure at all n locations; Clone ID: 701122355H1
aattcatactttggtttacntttgtggtgtctctggctgctgggattctccaaatttgcttccaaaagcccgccactgatggtgttggagtgtgtttcattgcttttgcaattgggaatggcttatatgcttgttgggtaagtcatagaattaagttttgttgtaaggtattgagtttgtctcttcaacctgtctccaaattccctgatctgagcaaacccacttattatgtgcttggggctgncattcttgtggaatctctatgg

SEQ ID NO: 40154 - DNA, 274 bp, Glycine max
  unsure (1)..(274): unsure at all n locations; Clone ID: 701122356H1
gtgnccttcttcgtttctcgcaaagnntaagtnatcntggntanggnaaaggttcacatcancattgtcgtcattggncatgtcgactctgggangtcgnctaccacnggncacntgctctacnagcttggaggnattgncaagcgtgtgattgagaggttcgngacggaggctgccgaganngaccagaggtcatctgtntgcctgggtgctcgacaagctcactgctgagcgtnanagtggattaccatnaagnngncaagtggaatttgaa

SEQ ID NO: 40155 - DNA, 283 bp, Glycine max
  unsure (1)..(283): unsure at all n locations; Clone ID: 701122357H1
ggtganacggcggcaacggggaagtcggttggtttgggtttgggatgtgacccagtggtgggatccttggcttgttcgaagaagagagaatacagagtcaccaatcgccttcaagagggaaagcgccctctatacgccgtcattttcaacttcatcgactcccgctacttcaacgttttcgccactgttggcggcaatagggttactgtttatcaatgtctcgaaggaggagttattgctgttttgcaatcttatgtagacgaagataaggatgantcttttt

SEQ ID NO: 40156 - DNA, 287 bp, Glycine max
  unsure (1)..(287): unsure at all n locations; Clone ID: 701122358H1
attcgccgnccgaagaattcaaagtcccgccccagaccagcgctatcatcaccaatggcaatgtcttccttaaacatggttcagaattgcgcctgattccgcgcgatagggttgnngccttttagatgttacagatgtgtctgactggagttggtgccttttagatgttacagatgtctgactggatattgacccttctcgctagatacatgaactgtagcttcatatgtagtaatcaataaataccattgttactgatttcatatattgatattgagatcaaaggg

SEQ ID NO: 40157 - DNA, 289 bp, Glycine max
  unsure (1)..(289): unsure at all n locations; Clone ID: 701122362H1
gggagcacttacctggagaagaatcgagtcaatcaacagaccacaaaaatatcaatgacttgcaagagagaggatatatggagtatggntgtcagcattaccggagaagatgccgtatcagggcnccagnttgcaatgagatttttgattgccgccattgggctaatgaggcaaaaaatgatatcaacattgatcagaagcatagacatgatattccangacaccaagtnaancaggtgatttgttcatttgtgggactgaacaagaggttcagcaaaactgtataant

SEQ ID NO: 40158 - DNA, 128 bp, Glycine max
  unsure (1)..(128): unsure at all n locations; Clone ID: 701122365H1
atggctccncaagggtttaacctntctggctgtgntaatatgcgtttcagcactgtcactgantnncncctnttgcgngggaagggcaaaataatggccntgttatgaacttctacanggaatcatgc

SEQ ID NO: 40159 - DNA, 132 bp, Glycine max
  unsure (1)..(132): unsure at all n locations; Clone ID: 701122369H1
aacatggagccaaggttggcttatcttcatcagtagtgcctgtgaaagattttacatctcaaaggaatcaaagacttcctcagccacttccacacaacatangaacnnaananangcggnnnnnncgcgnng

SEQ ID NO: 40160 - DNA, 94 bp, Glycine max
  unsure (1)..(94): unsure at all n locations; Clone ID: 701122370H1
agggaacaggaagaaaagannaagaaatatacagcccaacaacaccagtngccaacacaactacngaagangaaaaancngncacaananacga

SEQ ID NO: 40161 - DNA, 275 bp, Glycine max
  unsure (1)..(275): unsure at all n locations; Clone ID: 701122371H1
attagccaagaaaagctaagtacaaatagcagtggaanttctaacgctatctaatttaggcctacctatcatggttgcacaatatagctcctgcacagaaagtgatgtcagtggctaatagctataccaatatgatgagaaattcacaattcattatcatctgctgaagaataagcctaacaacatatgctgaaattggagagaaccaagtgtctgaatcagcctcaggaatagaganatgaagtaaataaccaaaagcctcctcccaatagtgg

SEQ ID NO: 40162 - DNA, 284 bp, Glycine max
  unsure (1)..(284): unsure at all n locations; Clone ID: 701122375H1
gaaagttgcccatctgttttgactgagcttttggagtatgtggctagatttactgagcattcggacttcttgtgcaagcataggaatgaattgatacttnatggcagcgacgtaaatggaaggcgggtgaaccanaggctatagtgctaaagtgcaaacactgacaagttctctgtacaaccctctactccttgttgcatttaaaaatttccgtgagagccacagatagagggagatgataagcatttataggattagtggcaatttctaattttttttagctc

SEQ ID NO: 40163 - DNA, 283 bp, Glycine max
  unsure (1)..(283): unsure at all n locations; Clone ID: 701122376H1
gaattattgagctgaacaaaagacaatgggattgtgggaagcttttctcaattggcttcgcagcctttttttcaagcaggaaatggagttatctctaataggacttcagaatgctgggaagacttcccttgtaaatgtagttgctaccggtggatatagtgaggacatgattccaactgtgggattcaatatgaggaaagtgacaaaagggatgttacaataaagttatgggatcttggagggcaacctaggttccgcagcatgtgggancgttactgtcgtg

SEQ ID NO: 40164 - DNA, 294 bp, Glycine max
  unsure (1)..(294): unsure at all n locations; Clone ID: 701122379H1
ccgcncctnttttgttgttccttcttctcgttcgtcgcgctgtgatctctctctgcaaccatgtccgtcgagaaagagagagagacccaggtttacttggccaagcttgccgagcaggccgagagatacgaagaaatggttgagtgtatgaagaaagtagcaaaacttgatcttgatctgactgtggaagaaaggaaccttctctcagtgggatacaaaaatgtgattggtgcagaagggcctcttggcgcataatgtcctcaattgagcagaaggaagagtctaagggaatgt

SEQ ID NO: 40165 - DNA, 101 bp, Glycine max
  unsure (1)..(101): unsure at all n locations; Clone ID: 701122381H1
cacaaaagcaaagatcaaacaaaccaaggacgagaacacgatgttgcttgaacttggcacttggtttattggttttggctnctgtttctggcacttgcgtt

SEQ ID NO: 40166 - DNA, 277 bp, Glycine max
  unsure (1)..(277): unsure at all n locations; Clone ID: 701122384H1
gctggatgcagcaatgaaaatgatggatntcatgacaacaacatctatggtgagaacaggananagaagcaaggggcccaagtggatgaagaagaaagcgatgattcgatggcttcggatgcttcctccggtccagttcattaccaccatgcctatactcacaggcaaagtagtcatggcaccgcagcctctaagaaagataaacaagatcatggaagcaaattttcttctaagaagaatgcaaacaaacaggagaagaaacgtgttgacagcagaa

SEQ ID NO: 40167 - DNA, 257 bp, Glycine max
  unsure (1)..(257): unsure at all n locations; Clone ID: 701122388H1
cggcatagataacaccgtactctctaatatcccatactatgaaaaacatggatatggggtggaggaatttaatgaaaccttatatgatgaatgggttaacaagggcgacgcaccggcattgccagagactcttaaaaattacaacaagctgttgtctcttggcttcaagattgtattcttgtcaggaagatatcttgacaaaatggccgtaacagaagcaaacctaaagaaggctggcttccacacaaaaagnnnng

SEQ ID NO: 40168 - DNA, 279 bp, Glycine max
  unsure (1)..(279): unsure at all n locations; Clone ID: 701122389H1
agtggcttgtgttgtgtgactgagggccaaaggcaaaacatggaggtggatcagatgcagagagagtgcttggactacaccaaatccttattcttggagggcttcttggatggtcaatttcttcaanctcagcagctacaggatgagaacaacccggactttgtagttgaagtggtctcctcttctntgaagattctgagagacttctcaatgaccttacctntgctctaaatcagaaaagnattgacttcaaaaaagttgatgcncatgttcaccagc

SEQ ID NO: 40169 - DNA, 285 bp, Glycine max
  unsure (1)..(285): unsure at all n locations; Clone ID: 701122390H1
cttgtnttcttcgttgcnacaattttggtagcatggcaatgccatgcgtacgatatgttccctctccgaatgaatnctggctatggtgcccgtactccggaggtgaactgcgcaagttggaggcttgcngtggaagcacacaacatctttggctttgagaccattcctgaagagtgcgttgaagcaacaaaggaatacatccatggcgaacaatatagatcagactccaaaacagttaaccaacaagcttacttttatgccagagacctcgaagtccatcccang

SEQ ID NO: 40170 - DNA, 111 bp, Glycine max
  unsure (1)..(111): unsure at all n locations; Clone ID: 701122391H1
gggaaggatggagaagcaagcaaggcctttgttgagttaccncctgaactgtgctctatagtcatgtcaccgaagaaagatagtatcatttataccnnctcannnanncca

SEQ ID NO: 40171 - DNA, 292 bp, Glycine max
  unsure (1)..(292): unsure at all n locations; Clone ID: 701122394H1
gtttgggaaggttagtcaggattattcaactgaggaaattggtgattgggaatttgatgagcttgaaagagaattgagcaagtagttaggttgaatcttatttctgagtaattaatgcttgcngtngtatttttatgattaagtgcaagtntcatataaattnntaagccatatagatcggctgttgatgaagctataatttggatcagattccnttgaattngtgaacattaccaagcatgatttctttattctgtaaattcacgagttgcaaaaaaaaaaggnncangnc

SEQ ID NO: 40172 - DNA, 259 bp, Glycine max
  Clone ID: 701122403H1
catgcaccaagccattccctaccgaacctccatcctgaccggaacatgtgacatggcacacgccggaggaatcaaagaattcaacctcgccaatccatccaacgttgccgcaatggtttcggagagcgcagtggtaatcattgggaaacgggggtgctgcatgtgccacgtggtcaaaaggttgttgcaaggtctgggagtgaaccctcccgtgtacgaggtcgacgaggaccacgaagccgccgttgctcgccacctg

SEQ ID NO: 40173 - DNA, 272 bp, Glycine max
  unsure (1)..(272): unsure at all n locations; Clone ID: 701122404H1
atccattggaggttcacctgctggatttccccaacattgttattaaaggaagtgaactgcaacttcctttccaggcatgtttgaaaattgaganatttggggatcttatattgaaggccacagaaccccaaatggttttgttcaatatctatgatgactggctgaagagtatttcttcatacactgcattctccaggctgattctgattctgcgtgcactccatgtgaataatgaaaaggcaaaaatgttgctgaagcctgataaaactatc

SEQ ID NO: 40174 - DNA, 273 bp, Glycine max
  unsure (1)..(273): unsure at all n locations; Clone ID: 701122405H1
tggagtctttgggctttcagttgtnttcttttagttatttatcattccttcttagcagtgaattcgaaggggacttagatgtgctgtattttattttttttcaacttctagcaaatgagtttgaataaattgaagctagaaagaaaggttttcttggtaaaatggaggttggggattagtaaaaacccaaatgggaaaagaacatgagaaaagaacagaagaaaaacaaagtttactgcatagttattgtttatttgcctgttcagatttcgc

SEQ ID NO: 40175 - DNA, 267 bp, Glycine max
  unsure (1)..(267): unsure at all n locations; Clone ID: 701122407H1
gtttgggaaggttagtcaggattattcaactgaggaaattggtgattgggaatttgatgagcttgaaagagaattgagcaagtagttaggttgaatcttatttctgagtaattaatgcttgctgttgtatttttatgattaagtgcaagtatcatataaatttgtnagccatatagatcggctgttgatgaagctataatttggatcagattccttgaatttgtgaacattaccaagcatgatttcctattctgtaaattaacgagt

SEQ ID NO: 40176 - DNA, 267 bp, Glycine max
  unsure (1)..(267): unsure at all n locations; Clone ID: 701122410H1
caaatggcactcattcaaatatctcagtacaaactcttttaattaatgctgttgcatttcaagtaatgttatattgttatctacaaaatgatttttcgcgcattcatttttttaattaaactcatgttgccatcttagtcgtttggacttgttatggcagtagtagttttctcttggttatgattttctgcatgtatcataatgcattgtctcaatcaacatgttattttattgtcaggccattctccaccctagacaaaacngagt

SEQ ID NO: 40177 - DNA, 266 bp, Glycine max
  unsure (1)..(266): unsure at all n locations; Clone ID: 701122411H1
atgaatatgactgtggtctttttgtattgtacttcattgaacgtttcatggaggaggcacctgaaagactgaaaaggaaagatttagatatgtttggaaggcgatggttcanacctcaagaggcgtccaatttgagagtgaaaatccttaaattgcttttagaaaaattacagaattcaataacggataattgtaactcggaatcttctccttcgtcatctgctggccctgcaactgattgtgttgagactgccagggatctgtta

SEQ ID NO: 40178 - DNA, 269 bp, Glycine max
  unsure (1)..(269): unsure at all n locations; Clone ID: 701122413H1
gcacttcgttgcttggtgatgtccctttctgttctcttcactcttggtcttgcgagagaaagccatgccagagacgaagatttttggcatgctgtttggccaaacactcccattccaagttcattgcgagatccttctaaagcctggccctgcaagtgttgaaatcgatgatcaccctatgcaaattgaagaaacacagtacccgaaaacctctnnnntaaagaagaccttcatccaggcaaaacaatgaaagtacaattcagcaagcc

SEQ ID NO: 40179 - DNA, 271 bp, Glycine max
  unsure (1)..(271): unsure at all n locations; Clone ID: 701122414H1
ggaaattngagtagaagtaccgattggacgggaggagcagtgacggaggtcaacttcgctctaaccttttccttccgttcactcgccgccttgctcatcctcgccgtcacagtcacctcaaccgatcatgttctagacttctctctctcaggacagctggagatgattcaacaaagtatagcttctaaattttgtgagtatagtctgggcaattgtaaaatggacttggcctaatcgtgataaacaactgactggnactgtgaagaagaca

SEQ ID NO: 40180 - DNA, 272 bp, Glycine max
  unsure (1)..(272): unsure at all n locations; Clone ID: 701122415H1
tattaagacacgagacaagatggaaactccgagaagagacgaaaatccacatgacatttttnccccctcacactttcccctgtttactccacgccgcttccttgttccttcataaacacaacacttccttcttacattcggcantcaaaccatgcagcgcacggcggcggcgacagaggaaccacggcggagtccggcgacgcgtcggcggcggagggggagaaggtgttcaagggaagtgaggtgttcggtgatacgtcaccaaattattt

SEQ ID NO: 40181 - DNA, 274 bp, Glycine max
  unsure (1)..(274): unsure at all n locations; Clone ID: 701122416H1
gaaagaacaaaagtcaaaagttcaatttagggtaacaaaatggaaaatcaagcctcatcatcgatgcagttcctcatcctcgaanaagttcagttcttgaaggtgaacgacgattccctcttgcagtgggaactcgtcgacgtcgttgacgccgaagaggagatagatggctttggttcttcggattcttccgtttcttggttcgaatccgattcttctccctgcgatgccccaattgaagaaattcgacaccttcttcttcatcccgatgttg

SEQ ID NO: 40182 - DNA, 260 bp, Glycine max
  unsure (1)..(260): unsure at all n locations; Clone ID: 701122418H1
agctacccctatcacaacaataaccctattaggcaaaaacncctcatgggagaggaaaaanagcagcctnagaatgaaaccgagaagaagcccgaggaggccgccgcagcccccaagaaagacgacggnncccatccctgtccgtttacaagctcgacttgcattgcgagggatgcgtcaagaagatcaaacgcacatgtcgccacttccaaggtgtggaaaccgttaaggcagatctatcgtcgaacaaagtgatgtta

SEQ ID NO: 40183 - DNA, 275 bp, Glycine max
  unsure (1)..(275): unsure at all n locations; Clone ID: 701122419H1
cttgacactgttgcgtttggctaaaatgccggatgttcagncccttgttaacgatttttctgaatcagcttaagaaacggttctcaggccacagcgaantcacagcagagttgctccggtctgtgatttcacagcagcgagtgccacacacaaaccaagcncacagctctgattaatgcagtgagggctgtgggggagcagcttattgctgctaatcctgttgagctagctgtcggaaatatcgtgaggcgtgttttgcacattataagggaaga

SEQ ID NO: 40184 - DNA, 271 bp, Glycine max
  unsure (1)..(271): unsure at all n locations; Clone ID: 701122421H1
ggaatatcacagcgacgctcaggaaaaactgcnaaactgtgaaaaaaccactgcgatcaatggcaacgatcaaggccgtgaaatctcgccagatcntcgacagccgtggaaatncaaccgtcgaagttgacgttattctcagcgatggaagcttccacagagcngncgtntgcaagcggtgnttcancaggtgtttatgaggctttggaattaagggatggaggctcagactacctcgggaaaggtgttctcaaggctgtggagaatgtta

SEQ ID NO: 40185 - DNA, 267 bp, Glycine max
  Clone ID: 701122422H1
ggaagccttcagcctcttcgacaaggacggggatggttgtattaccaccaaggaacttgggaccgtgatgcggtcacttggccagaacccaactgaggcagagctgcaggacatgataaatgaggttgatgctgatgggaatggtaccattgatttcccagaattcctgaatctcatggctcgcaagatgaaagacactgattcagaggaggagctgaaggaggcttccgcgtgtttgacaaggatcagaatggcttcatctctgca

SEQ ID NO: 40186 - DNA, 249 bp, Glycine max
  unsure (1)..(249): unsure at all n locations; Clone ID: 701122424H1
cgtctgcgagctgcaacctactcgagatgccattcaagttntcctancagangctgcaaagttggatgcactggctttatctcacgcccttgagctgaagctccaatctccaatttggcaggttcgcatganagctgtttgtgtccttgaggccatccttagaaagaaggacgatgatcatttttcaccagtggattcttactcaccgaaaataaagatgtngtgctgagatgttctgnatctccccaa

SEQ ID NO: 40187 - DNA, 272 bp, Glycine max
  unsure (1)..(272): unsure at all n locations; Clone ID: 701122425H1
gctcgcagtcacccaagaggcgaatccttaccattgctcgagatgggtgaagaagtgaaggccgtggttccagagtcnnttttgaacncncagaagagagaggaggaatgggcgttggccaagaagcaanacctcgaggctgcgaagaagaagagagccgaganccgcaaatcatctacaacagagctaagcagtacgctaaggagtacgattcaccaggagaaggaattgattccggttgaaacgcgagggccaagctgaaaggtggattt

SEQ ID NO: 40188 - DNA, 268 bp, Glycine max
  unsure (1)..(268): unsure at all n locations; Clone ID: 701122428H1
ctttgatctcnggtaccctttttnttttctnaacagagagagagagananaatctttcgaagttacgtntnnntgtgttgtnctgcccagtcaccgatggcagcaccacctncgagggcacgtgccgattacgattacctcatcaagcttcttcttattggcgatanggtgtgggaaanagttgtnctgcttnngcgattttnctgatggttcctcacaaccagttttatcaccaccattggcattgattttaagataagaaccattg

SEQ ID NO: 40189 - DNA, 268 bp, Glycine max
  unsure (1)..(268): unsure at all n locations; Clone ID: 701122430H1
gggaaagancgcgtgagagtggcgcgcgtgtggaagacgaggcaggggcagcacttcgttgtggagtggcgcgtgggcatcactctcttctcagactgcgtcaactcgtatctccgcgatgacaactctgacatcgttgctactgataccatgaaaaacacagtgtatgcaaaagcaaagaaatgctcagacatactctctgctgaggactttgctattttgcntgctaagcactttgtatcattttacaagaaggttactggtgcta

SEQ ID NO: 40190 - DNA, 272 bp, Glycine max
  unsure (1)..(272): unsure at all n locations; Clone ID: 701122431H1
gcttcccgggagctctgaacttgaccgacgccattttcacatcaaaacgcttcaactaaaaaaatggcgttcttgtggaacaaaactagtatcgcttcccattttcgatctcactctcagaagactgagggtttggcttnttttccgcgccgtcgattccacgtcgaacccggggctcgtgaaaaagctctcttggcagaagatgcaacgctgaaaccgttcaaatcatataagaagagtgtcaaacagctcagaaaaattgggatgctctg

SEQ ID NO: 40191 - DNA, 274 bp, Glycine max
  unsure (1)..(274): unsure at all n locations; Clone ID: 701122435H1
aatcccaatacactcccaactcacaaagccatgtctccangtcctgttgtcgacgcttcccctgaggttgaagcagagcaacaacttccctccgtcgatgacgcaacccagttgaagaaatcccaaccgcaggaggatgatgctcccgttgtcgaggacgtgagggnnnnnnnnnnnnnnnnnnnnnnnnnnnnnnnnnnnnnnnnnnnnnnnnnnnacaaggaagacgatgcttctaggtggtgctgagggttcaaagcagagcagaagtgag

SEQ ID NO: 40192 - DNA, 269 bp, Glycine max
  Clone ID: 701122436H1
agagtctctctctcctcctcctgttctcactctgcatcgccgcaaccgttagatcgagcgacaggactacgattgtgtgtacacggcctacgttagaaccggttcggtgttgaaggggggaacggactcgaagatcgggctgaagctgtacgacaagtacggctactacatctacattaaaaacatcgaagcatggggcggcttgatgggcaagggctacagctacttcgagcgcggcaacctcgacatcttcagcggaaggggaccct

SEQ ID NO: 40193 - DNA, 267 bp, Glycine max
  unsure (1)..(267): unsure at all n locations; Clone ID: 701122439H1
ataccaagtgtcaaggcactgaccatctacaggtcaggaaccttttctattgatgttcagtatgntgacgtgagtggtttgcaaacacctgcaaagatcagcacatatactattggccctttccaatctacaaaaaatgaaaaagcaaaagttaaagtgaaagttcggttgaatgtgcatggaattatatctgtcgaatctgcaactctactggaagaggaagaagaaattgaggttccagtttacaaagaacctgcaggagaaaat

SEQ ID NO: 40194 - DNA, 144 bp, Glycine max
  unsure (1)..(144): unsure at all n locations; Clone ID: 701122441H1
tttgctangtgnanaagaggagaggaaccgcgccaaccctctctttcttctanttcttcaatnccntttataacctttatagntgcattcttaatcgttgggaaaaatgtttcatcgaganttttaaggtaganagtcctaatg

SEQ ID NO: 40195 - DNA, 263 bp, Glycine max
  unsure (1)..(263): unsure at all n locations; Clone ID: 701122442H1
gncttcgcccttatgtgaagatgnacntgatgtaccaacaaggttngcnttgcaggtggcacggntcttcntttggcnaanganttggctgagaagaacaagggtgcacgtgtgcntgttgtctgctctgagatcactgcagtcacatnccntgggccaagtgacactcacctngatagtcttgtgggccaagcattgtttggagatggagctgctgcagttcatgttggntctgncccaattccacaagttgagaagtgnag

SEQ ID NO: 40196 - DNA, 265 bp, Glycine max
  Clone ID: 701122443H1
attggcgcttcatcaagatgggtatttctagggattccatgcacaagaggcgtgccactggtggcaagaaaaaggcttggagaaagaagagaaagtatgagcttgggcgtcaggcagcaaacaccaagttatcaagcaacaagacaatcaggaggattcgtgttagaggtggcaatgttaaatggagggcattgaggctggatactggcaattactcatggggtagtgaagcagttactcgcaagactcgtattctagatgttgt

SEQ ID NO: 40197 - DNA, 266 bp, Glycine max
  unsure (1)..(266): unsure at all n locations; Clone ID: 701122446H1
gtgaggtgtgantgttctgcacgcaccgaatcaacaataatttctcaaacagcgttgtaaaagaaacacattagactaggcagataactatggctgtacattctgattcggcttcatccgagaagaaatcaagcaatggagtgaatgagttgctgacttttaatgctgagaacatgcaaagcaacatgaaaattntctattacagccgaacatttttatctanaattggtggagttgttgctggtattnttnggattacaggcttg

SEQ ID NO: 40198 - DNA, 275 bp, Glycine max
  unsure (1)..(275): unsure at all n locations; Clone ID: 701122449H1
gctcaatcaaaaaggggtatactcaccttgaagtatcctatagagcatggcatagtcaacaactgggatgatatggagaagatttggcatcacacattntacaatgacgntcgtgttgcccctgaagaacaccctgtacttcttaccgaggcacccctcaatcccaaggccaacagagagaagatgacccaaattatgtttganactttcaatgtgcctgccatgtatgttgcattcangctgtcttgtctctgtatgccatggaagaactacag

SEQ ID NO: 40199 - DNA, 271 bp, Glycine max
  unsure (1)..(271): unsure at all n locations; Clone ID: 701122451H1
ctttctctgtctctcgctcttatcgaagaagcagcagaaaatgggtttcgcgatgcaatgctcaagctatggcacttgtatttctatttgtgtccctcatcgattcccccaaacccctgctatnttttcacgttccagcttatcactggaaccgattcaagagtgcgcgaaagaatcagaggatgatggttctttgtagcgtggacgaccggagcaacaacctaggttcccagaggaaaaggtttctgtcgctcattgctgttgcactttc

SEQ ID NO: 40200 - DNA, 267 bp, Glycine max
  unsure (1)..(267): unsure at all n locations; Clone ID: 701122454H1
aaacgacagtgaccaaaacagaaaaacgacatnacccagagancgacgatgccggangaaacgacgtcgatcgactacgtgatggangctgcatctgggccccacttctccggcctganactcgacggccgggtcccgtcctccgccaccgncgcgtcctgccactcccgattcaaccctaaccctcgattcccttcccaatcaacccttcgtcataggagtttctggaggtactgcctcgggcaaaaccaccgtctgcgatatgat

SEQ ID NO: 40201 - DNA, 267 bp, Glycine max
  unsure (1)..(267): unsure at all n locations; Clone ID: 701122455H1
gggagataaaagtgcagaagctcgtcctcaatatctctgttggcgagagtggagaaangtctcaccagagccgccaaggtgttggaacaacttagtggccaaaccccagtgttttccaaagcaaggtacactgttcgttcctttgggattagaagaaatgagaagattgcatgctatgtcantgtcagaggtgacaaggcaatgcaacttttggagagtggtttgaaggtgaaggaatatgaacttctcagaaggaacttcagtgat

SEQ ID NO: 40202 - DNA, 268 bp, Glycine max
  unsure (1)..(268): unsure at all n locations; Clone ID: 701122456H1
cccgccgctcgatgggaattgcgcttcaaggcgtctcgtagggctaatccgcctcacgagggtcaccaacggcacgtnncctttggggggccgaggccccctacctgctggtcggcaaacggacggcgggcgcacgcgtcgcttctagcccggattctgacttagaggcgttcagtcataatccaacgcacggtagcttcgcgccactggcttttcaaccaagcgcgatgaccaattgtgcgaatcaacggttcctctcgtactaggt

SEQ ID NO: 40203 - DNA, 264 bp, Glycine max
  unsure (1)..(264): unsure at all n locations; Clone ID: 701122458H1
cgccgctccgccaccttccaaaaagcaacgctgcctcagccctgacatcatcactgaagaannnnnnnnnnnnnnntcacattccaccactggatccaccggcgaaagcggcggaggaaacgacgaactcgacctgaaacaaattgaatggtttctaggtttggagaatgagctgcctgttagcaacaacattggtgctgagtgggacaacatggatgacctgtggatgctggacnacgtcgttgtgcccaaccgtcacttaat

SEQ ID NO: 40204 - DNA, 242 bp, Glycine max
  unsure (1)..(242): unsure at all n locations; Clone ID: 701122462H1
gtttggttganaggaatnaattaacttgtataaaacaatgnaggagagtgtaggaaacccttggcgtcttcaatctgtgaatcatatctccctcatatgcagatcagtggaanaatcaatggatttctatnagaacgttcttggattttacnccatcaggaggcctggntctttagattttgatggggcatggctattcggctacggaattggaattcattgctagaagcagagaaccctga

SEQ ID NO: 40205 - DNA, 271 bp, Glycine max
  unsure (1)..(271): unsure at all n locations; Clone ID: 701122463H1
gcagngnagtactgtcccacnagaagttgntacncatnaaggancnccgtattcacatatgatgttnccttcacggaaagtnatatgcaaatgggcatcacggtgggacacatatctnttaatgaatgatnntcananccactggttctccatcattaactctactnatgattggtcttttcctgtcnggaatggtnncaattatcatgatgagancgcttttcagagacattgccaattataatcagctagaaacccaaggtgaggccca

SEQ ID NO: 40206 - DNA, 276 bp, Glycine max
  unsure (1)..(276): unsure at all n locations; Clone ID: 701122465H1
ggagattgtaaaattactacncgtagatctagggtatttcatnacaccattttcatnnnacaccattntattggtggcaatttagaaaccttacccctcatatggntttccaattctagtagcttgggaattgaaaaatcgctactacgggaattcattcattgagtgtcatccacgtattcgtttccgttctagatngcaaccttcctcgtactccgtnnnnncgtcgttcgtgtgtggaaagtgggaaaagataacaccccaatncgaagcccc

SEQ ID NO: 40207 - DNA, 266 bp, Glycine max
  unsure (1)..(266): unsure at all n locations; Clone ID: 701122468H1
gctctannnganatctccaagagcaatgtngttgacgatatangncaacancnacnccatcctctatnagnncggtgaacatccagaccatgtggttgtcattaagtacgtgccttatttaggggacancaaganggccatggatgantacacttctgagntattcatgggtngaaagaacacaattgtgttgcacaacacatgtgaggattcacgtnagctgctcctattatctggacttggtcctnnctgctganctcagcatt

SEQ ID NO: 40208 - DNA, 265 bp, Glycine max
  Clone ID: 701122470H1
cttgatccttctttttctccttgaactcaaacatggcagatgaggtggttctgctagatttctggccaagtccatttgggatgagggtcaggattgcacttgctgaaaagggtatcaaatatgagtacaaagaagaggacttgaggaacaagagtcctcttctcctccaaatgaacccggttcacaagaagattccggttctcatccacaatggcaaacccatttgtgaatccctcattgctgttcagtacattgaggaggtttg

SEQ ID NO: 40209 - DNA, 265 bp, Glycine max
  unsure (1)..(265): unsure at all n locations; Clone ID: 701122471H1
atagagtncataacaaatatacaatcnatgtctcaaccacaaaagcaccaccaanagcacatgngaagatgaagnaccattggtntttgatgcctcacttctcaggcaccaactcaacctaccaaaacagtncatttggcctgatgaggaaaagccatgcatgaatgtgcctgagcttggtgtccctctcattgacttgggggggttcctctctggtgaccctgtngcaacaatggaggctgcaaggatagttggtgaggcatgc

SEQ ID NO: 40210 - DNA, 264 bp, Glycine max
  Clone ID: 701122472H1
gtcagtgaggaggttgccaagtacaaggttggagctcctgctcgtgttggtttggttgccccaattgatgttgttgttcctcctggcaacacagggctcgatccctcccagacctctttcttccaggtgctcaacattcctaccaagattaacaagggtactgttgaaatcattacccctgtggagctcattaagaagggagacaaggttggatcttctgaagctgcattgcttgccaagctagggataaggcccttctcgtat

SEQ ID NO: 40211 - DNA, 264 bp, Glycine max
  unsure (1)..(264): unsure at all n locations; Clone ID: 701122473H1
caancttataacacacactctctcctctctctctctgcaatggctggaatggttcccctgtgcattgcatcagtggtcactctttttgtngnaacaagtgctannattcctggggttntcaatgntggtgcatggcagggtgcccacgccactttcnacggtggaaatnatgcctctggaacaatgggtggggcatgtgggtangggaacntatacagccaagggtatggcgtgaacaccgcggccttgagcanggcgctgttc

SEQ ID NO: 40212 - DNA, 241 bp, Glycine max
  unsure (1)..(241): unsure at all n locations; Clone ID: 701122474H1
tgcgtctcatccctctccgtctacncctccagcatccaacaggaccctcaccaactggttcagacagcactctccctctccctgaaccgcacccaagccaccaaaaccttcgtggctaactgcaacaaattcagaggcctganacccagagagcacgctgcactcaaggactgcgccgaggaaatcagcgacaggttggaccgcctcagccggtcgctgaaggagctcaagctatgnaagg

SEQ ID NO: 40213 - DNA, 262 bp, Glycine max
  unsure (1)..(262): unsure at all n locations; Clone ID: 701122475H1
agcgagtgagtgagtcgtttctctgcagcaacaaggtttanccactccaaacagacgggaaatgggtcgtggggtcagtgctggtggtggtcagagttccttaggttatctctttggcagtggggtgcctgccagcagtgcaaacagtcagcctgcaaatggtgctcgcactcaaaatgctagtgctccncgcaccaccagtcgataagcaaagtccagcaccagcaccagcaccagcacctgcatcatcaccaattgataa

SEQ ID NO: 40214 - DNA, 127 bp, Glycine max
  unsure (1)..(127): unsure at all n locations; Clone ID: 701122478H1
gctagctactccttaattactanttagtntcattctttggtgcaagctagcttcattagttgattcatangattataacaatggtgagtgttgangcaatccgtaaggcncaacgtgcaganngccc

SEQ ID NO: 40215 - DNA, 268 bp, Glycine max
  Clone ID: 701122480H1
caaatacccaatgaatattgtctctgatgctccatcttgtggctatccccggggtattgcaccaaggtgcaggtgccaagctgtgcatataatttcgttgttgtcacgtgtatagtatattttagccaactcaggcttctaatattggtttgttgcccgggttaattcatttttacccctcaagtttcatcaacacgaggggtttttttaagaagccatgtcactattgatgtgagtcatgtgataaatggcggtcataggtaaaggc

SEQ ID NO: 40216 - DNA, 100 bp, Glycine max
  unsure (1)..(100): unsure at all n locations; Clone ID: 701122481H1
ccttctactatgtctatgcctaactnttcctttgttttnggtngtccttcttcaaataccgtaaaaccttcaaggatccaccacttccacacaacnnagg

SEQ ID NO: 40217 - DNA, 269 bp, Glycine max
  unsure (1)..(269): unsure at all n locations; Clone ID: 701122482H1
agaatccgaggcgaagagaanagaaaaattaagatggaggggaaggagcaggatgtntcgctgggagcgaacaanttcccggagagacagccgattgggacggcggcgcagagccaagacgacggcaaggactaccaggagccggcgccggcgccactggttgacccgacggagtttacgtcatggtcctttacagagcagggatagcagagtttgtggccacttttctgtttctatacatcactgtcttaaccgtcatgggagtcgcc

SEQ ID NO: 40218 - DNA, 140 bp, Glycine max
  unsure (1)..(140): unsure at all n locations; Clone ID: 701122483H1
gttgcctgtagtctgaacctctctgttttaaggngaacaatctaaattatgattacgatgttcaaagatgttaagcttttgttgtttatctgttatacgaaataagagattaactgctatagttactattcagtagttgg

SEQ ID NO: 40219 - DNA, 264 bp, Glycine max
  unsure (1)..(264): unsure at all n locations; Clone ID: 701122484H1
aaaaaggccgttagtgntactattcgtaaaatngccactcttgncctttaccaattctttctcaaactcttgctcctaatntcagtctttcagcttncctttgctgctaggagactcaaccanctggttcaggaccagtcanagttactccattaccacaacggtcctcttctatacggcaaaatcgccgtgaacctaatctggtatngtcacttcaaaccatcccaaaaggccatcatnaccgatttcgttacctcactgtca

SEQ ID NO: 40220 - DNA, 227 bp, Glycine max
  unsure (1)..(227): unsure at all n locations; Clone ID: 701122486H1
gattnggcagnaantagtggcacaagctcnttccaatacngtnatgaagnggaaagttgnnttgttgtatgtgttttatggcccccatggcactggaaaaacttcctgtgctcgcatatntgccagagctctgaactgtanttcttcagaacacccaaaaccttgtggtttttgcaatattncgtacacatgatatgggcaagagtagaaatataaggggagttggt

SEQ ID NO: 40221 - DNA, 220 bp, Glycine max
  unsure (1)..(220): unsure at all n locations; Clone ID: 701122489H1
gttttcntggtgtctctgtcgantcttcttcnnnattttaannccttaggaagtttagttttctctcttggcttctccggttggagtttccggcgaccttgtcggagattttgttgttnatttttcacaccacttgtgaaactctcaagaaaaagaaaaaggatgtttcttgttgattggttctatggaattttggcgacccttggcctgtggcaaaagg

SEQ ID NO: 40222 - DNA, 261 bp, Glycine max
  Clone ID: 701122490H1
tctttttactgcttaaccgttcggctatctcatatatgaacaacaacatgttaggaatgaagagacggagagatgataatgaagggtccttggatttggcaaaatgtcttatgctgttttcttgtccaatagaaagcaacaagacacaacagaaaagttttggttctgtggaatttgagtgcaagacgtgcaaccgcaagttctcttcttttcaagcactgggagggcacagggcaagccacaagaggcagaagctggagg

SEQ ID NO: 40223 - DNA, 238 bp, Glycine max
  unsure (1)..(238): unsure at all n locations; Clone ID: 701122493H1
atnggacgttttaagttggttgatanggaagttttctccggagcggaacatcaattgtgctnccagatgatgttgggnaaatatattttctgaacacaggtcaaggcgagtcccagaaagatgcaaaatatgatcagttttttcttggtgattatcgaccccttattcaggatactcagggatatgttctgatcaggagactcaacttccacacaacatacgacntgncatgagtgtg

SEQ ID NO: 40224 - DNA, 271 bp, Glycine max
  unsure (1)..(271): unsure at all n locations; Clone ID: 701122494H1
gntggctncaagggaaaaggtgaaattnntngaggaannncaaaaagaatttgagcttgcagatgaataatgtgtnctgcagagaatnanggcatgtcacgaacacctaattgaaatgganaattttgnnggctctttgnaagnnagcatgnccatngcagtnaatacgggcagagantgcagaagncanangntncnacngttaactggagaccngcttggaacttactgaagaggtgagttttcttaaagggagtgccagttactgcag

SEQ ID NO: 40225 - DNA, 271 bp, Glycine max
  unsure (1)..(271): unsure at all n locations; Clone ID: 701122496H1
caaatacccaatgaatattgtctctgatgctccatcttgtggctatccccggggtattgcaccaaggtgcaggtgccaagctgtgcatataatttcgttgttgtcacgtgtatagtatattttagccaactcaggcttctaatattggtttgttgcccgggttaattcatttttncccctcaagtttcatcaacacgaggggtttttttaagaagccatgtcactattgatgtgagtcatgtgataaatggcggtcataggtaaaggctgg

SEQ ID NO: 40226 - DNA, 153 bp, Glycine max
  unsure (1)..(153): unsure at all n locations; Clone ID: 701122501H1
gtatagccctaatattcctacagatactaataanatttacatttacgatcgaatagatctcattactaatactatactattactaaattaagaatagaatagaaagaatttgtaaatttctatcggaacatattaatattcgatagaataata

SEQ ID NO: 40227 - DNA, 278 bp, Glycine max
  Clone ID: 701122503H1
ggggagaagatttagtgttgtggccatggcggagtctgagaagagtactgtgcttgttacgggagccggtggtcgcacaggacaaatagtttacaaaaaattaaaagagaggccaaaccaatatgtggctagaggtctggttagaacagatgaaagcaaacagaacattggtgctgcagatgacgtttttgttggggatataagacatgctgaaagtattgttcctgcaattcaaggtatagatgctctcataatcctcacaagtgctgttccacaga

SEQ ID NO: 40228 - DNA, 270 bp, Glycine max
  unsure (1)..(270): unsure at all n locations; Clone ID: 701122505H1
tattattttaacatcacacaagttttgnaaaatatttgctttatttgttgtatattaaatgtaccnnnnnnnnnnnnnnnggctcatcagaaaggacaaattggngtcaccatagtgactttcttctttgaaccaaaatctaatagtgatgctgatcgcaaggcagcaaggcgagctctggactttatgtttggctggtttgctaatcccattacatttggtgactatcctgagagtatgagatctttagttggttctagactccccaca

SEQ ID NO: 40229 - DNA, 278 bp, Glycine max
  Clone ID: 701122506H1
attcccaaaccaaagacaccacaattcactttccctttttaacattaaaatgatgaaaactcgggccttactagttctcatgttattggtgaacttagtttttttcaggggctcagaagcccgtccattgagtatcattgagacggaaaaatcagtcactggaggggaagtggtggatttctttgattggttatctcttggagcaatgaaggattctgggccaagtccaggtgtgggtcacaagttcaccaatagtgaaacccttggtgggataagga

SEQ ID NO: 40230 - DNA, 154 bp, Glycine max
  Clone ID: 701122508H1
agcatccccagcgacgaatgaatgggcaattgcggaagcagagaggaatctgccgtagtttccaaggctcaagttgttcagcagcttcaccatgcgacgtcgttgggcgccagtgccaggaccgacaagaagcacgctcacaggcacaatctca

SEQ ID NO: 40231 - DNA, 280 bp, Glycine max
  Clone ID: 701122509H1
ggagctggttaactgatattattattaatatttaacaatgcagatttattttgggagatgcgagtctgtgtaaatattttttattctatctcgtggtatgttatggtatggtatttgggtaaagactgaagagaagaagtgaaggatctcttttttggggagtttgtcttggaaattcatcaacatcgctctattgatttgggaaattgaaagtatccgaagccttttgtacagttagcttactattgttgttattacaaggtgacaaccttactgcctc

SEQ ID NO: 40232 - DNA, 278 bp, Glycine max
  unsure (1)..(278): unsure at all n locations; Clone ID: 701122511H1
atatgctacaaactccacttcttcaacacaaaaatccgantgttgtgctccaacacaaaaaaatgaaacctacaatcaccattctcttgttgtctctactacttctcataacttcaccctccttggcaacccgacccgcatccaaccctgatcaagtcaagcacaacaaaaacaacaaccaaggtggtggtgctggtgctggtgctggcgggttctttggccctggaggagggttcagcatacccggttttggaaacgggtttggaaatggcatcata

SEQ ID NO: 40233 - DNA, 150 bp, Glycine max
  Clone ID: 701122512H1
cgcaaattttgtttaataaattttctagatgggatattgtcccaaaaaccgtttttaaatttcatcatgatggaaattttacatttgagaatgatttatttgagtggcagggataagtggctgtcacttggaattccaatttaatgattt

SEQ ID NO: 40234 - DNA, 277 bp, Glycine max
  unsure (1)..(277): unsure at all n locations; Clone ID: 701122513H1
ctttaatgcagtcttgcttgactttgctgactgtgcttttgaggaacactaaaatttctctcacctcagatcaaataagtttattaattcatcttcctatatttcttgatcttgaaaaaaatccatcgttggtggccctgtcacttctaaagggaattgtcagtcgcaagatggtggtacctgaaatatatgatcttgttactacggttgctgaactgatggtgacaagtcaaatggaacccgttcgcaaaaaatgcagtaanattctgttgcagtt

SEQ ID NO: 40235 - DNA, 279 bp, Glycine max
  unsure (1)..(279): unsure at all n locations; Clone ID: 701122515H1
gctgctgctttttcccttgtctccagctacctccgttcctcgatctcattcaccagacagaacagaatgggttgtcaaggtagcaaggagaaaaaatcaaagacagaatttactacttcctatggatcagcagccactggtagtggtggtggtactagttacaacactgttnnnnnnnnnnnnnnnnnnnnnnnnnnnnnnnnnnnnnnnnnnnnnnnnnnncaggttcaaacatcagcagcacccaaaccacaatcaaaagcttctcctacagtgcag

SEQ ID NO: 40236 - DNA, 95 bp, Glycine max
  unsure (1)..(95): unsure at all n locations; Clone ID: 701122516H1
cttatttngccgatcgannctcgatcnccganataagancaaacnntgcgtttgaccgatcataaccagggtttgatgagacacggaaaatgcgc

SEQ ID NO: 40237 - DNA, 100 bp, Glycine max
  unsure (1)..(100): unsure at all n locations; Clone ID: 701122518H1
cgnagtccnantatgacggtgtgcgtgcgcaaacccnaaccnagtnntnctatatcngcaccanctatnccctgaaccctgtnaccatcttccacacaag

SEQ ID NO: 40238 - DNA, 277 bp, Glycine max
  Clone ID: 701122519H1
gcccctgcgctccgctgcaattttacactcaaaaggacctcatgtctaacatagaggagaacaaagatctgggacagatggacgtggatgcatctgatgagtcagctaacatgccatcaccccaaaagcaggaggagtctgtaaagaaaaagtatggaggaatgctgcccaaaaagccaccactcatatctaaggaccatgaacgtgcttacttcgattctgcggattgggcacttggaaagcaaggcggagagaagcctaagggaccacttgaggc

SEQ ID NO: 40239 - DNA, 151 bp, Glycine max
  unsure (1)..(151): unsure at all n locations; Clone ID: 701122520H1
ggctggacccggcggcatggcccaacaagcgaaccagcaatacgcacagcaacagcaacaacaancgacaacaagnctacatgatgatgccgccgcagcctcagccccctcagatgtgggccccatcggcccagcctccgtcccaatcggt

SEQ ID NO: 40240 - DNA, 276 bp, Glycine max
  Clone ID: 701122521H1
ccaaatgcaccctgaatatgttatgcatataacttgagtttattgaatatttctctctctctaaatttgccagtaattagctattgttgaggagattcgagcaattttaaatagttcagtatgatgattaaactagaatctggtgattcaatatctatctcatcattatttagataattgtttgttgtgtttttctttcttggtagttttgttgcatcaaacaaaccagcagatgggaaacgttttattcgatcccttgggaaggtagtcttttgt

SEQ ID NO: 40241 - DNA, 278 bp, Glycine max
  Clone ID: 701122522H1
agactccaatgtctgctatcaatatggaatggcttatgcttcactttctatggcggttggagctgtttatatatggacttatgtctataacataatgagagtttccgcaagtgtagtaccaaaagatgcttatagaactagctccttcagactggaggcttcaggagagttcctagaattcttaccagaggaagaatcctcagaacctgaaaatccatcaaaggacaacatggatgattacacacttctgctttcttcaattgaatctgaggagaatg

SEQ ID NO: 40242 - DNA, 255 bp, Glycine max
  unsure (1)..(255): unsure at all n locations; Clone ID: 701122528H1
gcaagttcccaagactagatntaacgtggtgagatgtnacctagctgctggcattcaggtggcacaattggctcttaagcatcggcaaantaaaaagcaacagcagaggattattgtctttgctggaagtcctgtcaagcatgaaaagaagatgctggagatgatagggagaaagttganaaagaatagtgttgcacttgatattgttaattttggtgaagaagatgaggggaagacagagaagctggaagcact

SEQ ID NO: 40243 - DNA, 255 bp, Glycine max
  unsure (1)..(255): unsure at all n locations; Clone ID: 701122530H1
gngaaagcctgttatccaacacaaacttagcanccatgattacngaaactgagaaaaggatnnagcagaagacaccagatgaactgctanaagtattaaggggtccatgttttctcagacaagaaggttggtggtcatatgaattttgctatcaaaagaagttgaggcaactacatctggaggatgataaggttgtccaggagtttgtcttgggagtgtatgatccggaggctacagctgcatttaacgaaaatc

SEQ ID NO: 40244 - DNA, 280 bp, Glycine max
  unsure (1)..(280): unsure at all n locations; Clone ID: 701122533H1
aacgntaccgtagcaaaattccnccttattccccatctgtgnatantttanttttataccttttggaatgtcgaagttcgataacattgaccaataancatttctctatagatgggagaaatccgggttccctccntggatattactangngtttcattnntccatcttaantgcttnannttataattctatctcacacntggctctctcnnnnntgtntccncttctncnngccacctttcttttcatgcaaantctggnanatacttcnnatgttca

SEQ ID NO: 40245 - DNA, 256 bp, Glycine max
  unsure (1)..(256): unsure at all n locations; Clone ID: 701122534H1
gcggaagctcctgcaagtgcggcaacngctgcggaggctgcaanatgtacccagacttgagctacactgagtcaaccaccaccgagaccttggtcatgggagtggcacctgttaaggctcaatttgagggtgctgaaatgggtgtgcccgctgagaacgatggctgcaaatgtggaccaaactgctcctgcaacccctgcacttgcaagtgaggtgttgggagagcaagcttcaagcagagatagcccttaattag

SEQ ID NO: 40246 - DNA, 274 bp, Glycine max
  Clone ID: 701122535H1
gcagcatcttgtaccagcaactcgcgttcaaagccggcacctccatctacacgcgcttcatcggcctctgcggcggcgaaaacggcgtcgttcccgaaacagttctcgcccttactccccaacagcttcggcagattggggtttcggggcggaaggccagttaccttcacgatttggccaggaagtaccagaacgggatactctccgattccgccattgtgaacatggatgacaagtcgctcttcaccatgcttaccatggtcaatggcattgg

SEQ ID NO: 40247 - DNA, 271 bp, Glycine max
  Clone ID: 701122536H1
actaaatatggctgacttgttggaatggtcaaagcaagataagaaacgaatgcttcatgtcgtctaccgtgttggtgaccttgatcgcaccatcaaattttacacagaatgtttaggaatgaagcttttgaggcaaagagatatcccagaggagaaatatgctaatgcttttcttggatttggccctgaagaatcccattttgttgttgaattaacatataattatggggttacctcgtatgacattggcgatggctttggacatttgcaa

SEQ ID NO: 40248 - DNA, 276 bp, Glycine max
  unsure (1)..(276): unsure at all n locations; Clone ID: 701122537H1
aaactcaaacagatcgaaaatccataatgttgtnncgtaaggaacaataaaaatctcccatttgtgttntcttctcttcacgcacaccaacaaaacnctctctctcatcggaatctccaaaaagaatggacaacaaaacgcagcagtccgagagtaagcaaaacgacaacgacgaggaagttgcgccaaaacgacaagaccctaacccgtcgtctggcgggtggggcttttcaccgctctcgtttctctccgatcttcagaaggccgccgctgttg

SEQ ID NO: 40249 - DNA, 274 bp, Glycine max
  unsure (1)..(274): unsure at all n locations; Clone ID: 701122540H1
atttgataatattaagaggaaccaggatagataggtaggttctagcctttctgttatcattttcgaaacaaaccaaattgaaactgtttgagttttgtttagaaggctgttatgaatgaaactttgaagcttagaaaagcggttaggtagctaggtttcagtttcagatctggtagagagcttcatcatgaagccattgacggcggagcaaaccggtgaatcagcgccgacggattgcagagatccattccganncctttctgaccaagacgta

SEQ ID NO: 40250 - DNA, 278 bp, Glycine max
  unsure (1)..(278): unsure at all n locations; Clone ID: 701122542H1
aacggctnacaagagncctgaagggaagccagagcttcaggcaacgcctttcttctctctactctctcntccactcccattctcatcncnggacattcgcacncgacgagacatggcccggcctccgcaaccacgaaatttctctcctccgactcttcgaaaccgtctgcgatgattgccacgtcgaaatcaacgaaaccggtaccaaattaaagtacaaaccgggaactattatgggtggcagacaacacagtccacacgattgcggcggnacacgg

SEQ ID NO: 40251 - DNA, 145 bp, Glycine max
  unsure (1)..(145): unsure at all n locations; Clone ID: 701122543H1
ctaacctcaaagagagttcagtatttatacaantanaagttttttctttttttatttctggttttcgttttggaatggctgggatttgctgtggagttgttggagaagccgccgagacttcttctcccatcgaacccacctcacg

SEQ ID NO: 40252 - DNA, 143 bp, Glycine max
  unsure (1)..(143): unsure at all n locations; Clone ID: 701122544H1
gggacattgagttcactgataattcatgctggattcgngcnggnagttccgagtggcggtgagggtggcaccggggactaatcaaggtggtgttcggattcgtgaagccatatctgaggcgtttgctgtcaaggatcaccgtg

SEQ ID NO: 40253 - DNA, 270 bp, Glycine max
  unsure (1)..(270): unsure at all n locations; Clone ID: 701122546H1
atttagccaaaaccactatttaattttgttccttattctcactgtgtggacattccacgtcatgtctcgcangttgtctgaggtctgcacttccgagagacatgagnagtggatggcacagtatggtaagctttacacggatgctgctgagaaggaaaaacgtttccaaatattcaaaaacaatgtgcagttcncngagtctttcaatgctgctggggacaaacctttcaacctaagcattaatcaatttgctgaccttcataatgaaga

SEQ ID NO: 40254 - DNA, 273 bp, Glycine max
  unsure (1)..(273): unsure at all n locations; Clone ID: 701122547H1
ctagggtttggaagaagctgatcggagaagatggtgcagcgtctcacctaccgcaagcnccacagctatgccaccaaattccaaccagcacagagtcgtcaagactcccggtggcaagcttgtttatcagaccacgaagaagagggccagcggacccaagtgccctgtcactggaaagaggattcaagggattccacatttaaggccaacagaatataagagatcaaggttacccaaaaaccgaagactgtgaaccgtgcatatggtggtgtg

SEQ ID NO: 40255 - DNA, 272 bp, Glycine max
  unsure (1)..(272): unsure at all n locations; Clone ID: 701122548H1
antcgacaccatggcnagnnggcnacaagtccattttctncaccttcttattatgctcttgggtggcngcagnagtngcccaagaggtagcaattgcaaaatccgaaagtgaagcattaggggaaccggaattagannaaagagaaacactganatcatcatnnnnnnnnnnnnnnnnnnnnnntaccctgctccttctccttcnccatcttcccctgcatantgcccacctcctccaccaanaccactgagccggtnacgaaagcgcgtcg

SEQ ID NO: 40256 - DNA, 275 bp, Glycine max
  Clone ID: 701122549H1
agcacaaccaacacctccacagcctctcctacctcccggagccatggccgccgccgacttcctccgccgctccatcgcaccagttgtcgcagagggagacggacatccagatgatgctcgccgccgacgttcacctcggcaccaaaaactgcgactttcagatggaacgctacgtcttcaagcgcagaaccgatggtatttacataattaaccttggcaagacatgggagaagctccagctcgctgctaggattattgttgccattgagaaccca

SEQ ID NO: 40257 - DNA, 272 bp, Glycine max
  Clone ID: 701122551H1
ggtttctccaccaagagggaaatggctcccaaaccgcctagtacgggtctgtttgttggactgaacaagggacatgtcgtcaccaagaaggaattgcccccacgcccctcggatcgtaaggggaaaacaagcaagagggtgcactttgtgaggaacctcataagagaggttgctggttttgcaccctatgaaaagcgtataactgagttgctgaaggttgggaaggataagagggcacttaaggttgcaaagagaaagcttggaacccacaa

SEQ ID NO: 40258 - DNA, 270 bp, Glycine max
  Clone ID: 701122552H1
ggagtctgacatgtgtgcgagtcaacgggcgagtaaacccgtaaggcgcaaggaagctgattggtgggatccccctgtgggttgcaccgccgaccgaccctgatcttctgtgaagggttcgagtgagagcatacctgtcgggacccgaaagatggtgaactatgcctgagcggggcgaacagaggaaactctggtggaggcccgcagcgatactgacgtgcaaatcgttcgtctgacttgggtataggggcgaaagactaatcgaaccgt

SEQ ID NO: 40259 - DNA, 272 bp, Glycine max
  Clone ID: 701122554H1
ctttaatgctgctccagaagaatggtttaagaaagaagaatccttctatttctgttgttgctacactgtttggagatggggaagatgttgcatggcttgagaaaaatcaattggttgactgggcagaagaaaatttggatgcaagattaggaaatgaaacctttgatgattctcagcagagagcaattgcaatgggtttgaataaaaagagacctgtattggttatccaaggccctcctggtacagcaagactggtttgctcaagcaactta

SEQ ID NO: 40260 - DNA, 273 bp, Glycine max
  unsure (1)..(273): unsure at all n locations; Clone ID: 701122555H1
gaaatgaacaattttgggttattggtggtgtttcggcccatctttttgccgtgttccaaggtttactcaaagtgcttgctggaattgacactaacttcaccgttacctcaaaggcatcagatgaggatggagacttcgcagaactctacttgttcaaatggacaacccttctcatcccacccacgacacttctcancataaacctggtgggggttgttgcaggcatctcctatgcctacaacagtggttaccaatcatggggtcccctctttg

SEQ ID NO: 40261 - DNA, 274 bp, Glycine max
  unsure (1)..(274): unsure at all n locations; Clone ID: 701122556H1
aatggttctttctgtatcccttatgcaactcgggtgtgtctctcttcttcacaataatccctcntcatcacctgtgacccttantcccaaatccctctttccttgtggaatttccctcaaactgaaagggtnggtgttttggtgtaaaagtagttcagtgtgtgnnnnnnnnnnnnnnnnnnnnnnnnnngttgggagtatcagtgtcaatgcctctttggttgaggctccagttttgtgggctggaaggctcttcatcttctatgccctcctc

SEQ ID NO: 40262 - DNA, 271 bp, Glycine max
  unsure (1)..(271): unsure at all n locations; Clone ID: 701122557H1
aaaaatggtgctagaacaagcagtatcatcatcaagcaccttgaggaacgttttcaccaatcccaaaaccctaatttcaaaaccccaattccaagtcgccgcttccccttcatggaaaccacagcagccgcgctgggaagggtggctggggataaacttgaagtgctccatgnnnnnnnnnnnnnnnnnnnnnnnataccctaagccctcggagattccgtggcagaaggaactctgcaactccgtcaacctcatcggcaacgtcgccgcc

SEQ ID NO: 40263 - DNA, 268 bp, Glycine max
  Clone ID: 701122558H1
cgttttctgcgtcatctccgattccccgacaatggccacccaaatgagcaagaagagaaagttcgtagctgatggagtgttcttcgctgaactgaacgaggttctgacaagggagttagccgaggacggatactccggcgtggaagttagggttacgccgatgcgcaccgaaatcatcatcagagccaccagaacccaagccgttctcggtgagaagggaaggagaatcagggaacttacctcggtggttcagaagaggttcaagttt

SEQ ID NO: 40264 - DNA, 269 bp, Glycine max
  Clone ID: 701122559H1
aaggatgcctatgtaggtgatgaagcccagtcaaaaagaggtattcttactttgaagtacccaattgagcatggtatagttagtaactgggatgacatggaaaagatctggcatcacacattttacaatgaattgcgtgttgctcctgaggagcacccagtgcttctgactgaggctccactcaacccaaaggccaacagagaaaaaatgacccaaatcatgtttgagaccttcaatgtgcctgccatgtatgtggccatccaagctgt

SEQ ID NO: 40265 - DNA, 275 bp, Glycine max
  unsure (1)..(275): unsure at all n locations; Clone ID: 701122560H1
gaatgctgctaggcctaatccacaagggtcatncccattatgggaagattactcctannaaaagtaattaagntggccaattcagnnacctttgatcaatngaaagctnccgttatgctgttaacagtgtctcatatgttaaccctgacacccctctcaancttgctgattacttcaacattcccggagtcttcagtgtgaatttactccaaaactctccctcaaacggtccaggatacataggcacctcagtgttgcaaacttctctccatgat

SEQ ID NO: 40266 - DNA, 269 bp, Glycine max
  Clone ID: 701122562H1
gtgtacatggcctagagatggccctggatgaaatatcacatgatttggcagtttcaggtggcagggtttccaatattgatgccacagaagacacttgttgcaagctacctggtactgactttttgagttctaaattctggaagaagacagaaggtcgttattccacatcaaggttctctttaggaagcataccatcaacagatgctgtgcatattgcaaccaataaagatggaaaaagagaaatattaactgcaaataacaatagattg

SEQ ID NO: 40267 - DNA, 270 bp, Glycine max
  unsure (1)..(270): unsure at all n locations; Clone ID: 701122563H1
caagccntacacattgaagcgaattcgtgancctgactaccatgtgaagttgaggccacatttgtccaaagactacatggaatcaaacaagccagcagctgagcttgtgaaactcaaccctacaagtgattatgctcctggtctggaggatacccttattttgacaatgaagggtattgctgctggcatgcaaaacactggttaagaagctgcatgcctgtgttgnttcctatacaagtaacttaactttggatacacncattttaacct

SEQ ID NO: 40268 - DNA, 271 bp, Glycine max
  unsure (1)..(271): unsure at all n locations; Clone ID: 701122564H1
ctcttgaaaagggctcaggcagaggctgaaggcaaaactgttgaagctaagaagcctattgttgtgaagtatggtctcaaccatgttacctacctcatcgagcagaacaaagcacagctcgttgtgattgctcacgatgtggacccaattgaattggttgtctggcttcctgctttgtgcaggaagatggaaattccgtactgtattgtgaagggaaaggcccgcttnggaacggttgtccacaagaaaactgcatccgttttgtgtttga

SEQ ID NO: 40269 - DNA, 143 bp, Glycine max
  Clone ID: 701122567H1
gtgaaaatcagggttacagaccagtgtaatgcttatccatcagtccacaataagagctgggcatggataggaacagtatttttgtcgtgatgataaaaaaatttggagggaatcttactttgttctccttgatgagtaattac

SEQ ID NO: 40270 - DNA, 270 bp, Glycine max
  Clone ID: 701122568H1
gcagccaaacactctctctctgtctctcgaaaattctcagtttgcagagaaaatctgaatcatgtcgtggcaagcgtatgtcgacgatcaccttctgtgtgacatcgaaggtaaccacctcactcacgctgctatcatcggccaagacggcagcgtttgggctcagagtaccgacttccctcagttcaaacctgaggagataactgccatcatgaatgactttaatgagcctggatcacttgctccaactggattgtatctcggtggcac

SEQ ID NO: 40271 - DNA, 192 bp, Glycine max
  Clone ID: 701122569H1
gtgaaaatcagggttacagaccagtgtaatgcttatccatcagtccacaataagagctgggcatggataggaacagtatttttgtcgtgatgataaaaaaatttggagggaatcttactttgttctccttgatgagtaattacattacattgtcatcctttctaattttaaaatgtttttcttgtgagacat

SEQ ID NO: 40272 - DNA, 271 bp, Glycine max
  Clone ID: 701122570H1
ggcgcggaggaatgccaccgcagctccatggagctcctggaagagcttggattccccaaaggggtgatgccattgaaggaccttgtggagtgcggccgggttcgcgaaacggggttcatttggatgaagcagaaggcgccaagccagcacttcttcgaggcaaccaagaccctcgtgagctacgcggcggaggtcaccgcctatgtggaaaagttcaagatgaagaagatgaatggcatcaagagcaagcaagtgttcatttgggtgccaa

SEQ ID NO: 40273 - DNA, 274 bp, Glycine max
  unsure (1)..(274): unsure at all n locations; Clone ID: 701122571H1
ctntacaagtctttccttttcnatnncaattcctaaaatcccattcttcttcgctcantcctctgcactngccatcatccccaacttnctnacaaggttacaaggactaaagagttgtgccaccatgtcggacgatgaaagggaggagaaagagttggatctctcttctgccgaagttgtcaccaaatacaaaaccgcngctgagatcgttaacaaggccttgaagctagttatttcagaatgtaaaccaaaggcgaagattgtggatatttgt

SEQ ID NO: 40274 - DNA, 263 bp, Glycine max
  unsure (1)..(263): unsure at all n locations; Clone ID: 701122572H1
ctctcttcctatccccttcatccanatcacaacactcanccntccctcgtttcaaaaaaagggccgttattgttgttaccatccaaaaaatggccggtcttgttgtttcttcccaatgctttctcaaactcttgcttgtagtttcagtctttcatgtttcctttgctgctaggaggttgaatgagnnggttcaggaccagtctcagttgctacattaccacaatggtcctcttctatacggcaaaatcgccgtcaacctcatt

SEQ ID NO: 40275 - DNA, 267 bp, Glycine max
  Clone ID: 701122573H1
ggatgtcgatactgagggattaagggaatatatgagcaagtttggtgagctggaagattgcattgtcatgaaggagcggtcaactggacggtctcgtggttttggatatgttacatttgcttcagtggatgatgctaaggaagtactatcaagtgaacatattattggtaataggacgctggaagtcaaagtggcaacaccaaaggaggaaatgagggcaccagtcaaaaaagttactagaatatttgttgccaggatccacaatca

SEQ ID NO: 40276 - DNA, 248 bp, Glycine max
  Clone ID: 701122574H1
attcacattctgatcttgaattgaattcatctccaactccatggctccggcgatgaggatcgttttcggtcttctcacttttgtcaccgtcggaatgattataggcgctctctctcaattggccatcatacgaagattggaagactcttacggcaccgattctttgccatttagaagattgcgtggactcgacactgatcgtcaccttcaattgccaagaggtgttcctttttggaataatgacaagg

SEQ ID NO: 40277 - DNA, 267 bp, Glycine max
  Clone ID: 701122575H1
cagcatcatggctccaattgcagtgggagatgtcattccagacggcattttggcttacttggatgaagaaaacaaaccccaaactgtctctattcactctctcgccgccggcaagaaagtcatcatctttggggttcccggtgccttcactcctacatgcagcttgaagcacgtgcctggcttcattgagagagcagaagagctgaaaggaaagggtgtggacgaaataatctgtatcagcgtgaatgatccctttgtgatgaactc

SEQ ID NO: 40278 - DNA, 267 bp, Glycine max
  unsure (1)..(267): unsure at all n locations; Clone ID: 701122576H1
gttgaannnaaaaatggaaacaatgttgcctccgaaccaagcagaggaagcaatagtcacaacaagccttaacgagacagagagtgaagttggtatgagggaagaagagaaggagttgcaacaacaagatcactccatgttcaacatcaagagcttcctctggcatggaggctctgtttgggacgcatggttcagctgtgcttcaaatcaagtggctcaagtgctgttgacactgccctattctttctctcaactgggcatgntatc

SEQ ID NO: 40279 - DNA, 265 bp, Glycine max
  Clone ID: 701122577H1
ggaccctcgtgtaacacttactgttggtgatggagttgcatttttgaaggatgttccagaaggaacttacgatgcagttatagtggattcatctgaccctattggtcctgctcaagagctgtttgaaaagcccttttttgcgtccgttgcaaaggctctccgtccaggaggtgttgtgtgtactcaagcagaaagtatatggcttcatatgcacatcattgaggacattgtggctaattgtcgccaaatattcaaaggttctgtc

SEQ ID NO: 40280 - DNA, 95 bp, Glycine max
  unsure (1)..(95): unsure at all n locations; Clone ID: 701122578H1
ctctacaagtcctttccttttnctatttaattccctgaaaatcccattncttccttcggctcattcctgctgnactggccatcattccnccaact

SEQ ID NO: 40281 - DNA, 223 bp, Glycine max
  Clone ID: 701122579H1
ccggggatcatccacaagattgaggagaccctccatgtgggagggcacaagaaagaggagcacaaaggagaacaccatggtgagcacaaaggtgaacacaaaggagaacaccatggtgagcacaaaggtgaacacaaaggagaacaacaccatggggagcacaaggagggacttgtggataagatcaaggacaagatccatggtgatggccatgacaagggtg

SEQ ID NO: 40282 - DNA, 267 bp, Glycine max
  unsure (1)..(267): unsure at all n locations; Clone ID: 701122580H1
gtcttaagacctgctntcatatatggcaagaggagagtggatggttttgagcttcctttggatttggtaggggagccagcagaaaaaattctacgagcagtagagaacttcaccaaacctctaagctctcttcctgcatctgatctactcttggctccacctgttagtgttgacgatgttgcgttggctgttatcaatggtgtcacagatgatgactctttggtatttttacaattgaccagatcaaggaagctgncaataaagtac

SEQ ID NO: 40283 - DNA, 269 bp, Glycine max
  unsure (1)..(269): unsure at all n locations; Clone ID: 701122581H1
atggcgtcgtttcttcaatcgtttctggatccgaagaagaactggttcgccgctcagcacatgaaatccctctccaaacgcctccgcaaatatgggctccgatacgacgatttgtacgatccttactacgatctggatgtgaaggaggcgctgaatcggcttccgaaagangtggtggacgctcgccacgcgcgtcttaaacgcgccatcgatctttccatgaagcacgagtacctccctgacaatctgcagtcaatgcaaacaccatt

SEQ ID NO: 40284 - DNA, 266 bp, Glycine max
  unsure (1)..(266): unsure at all n locations; Clone ID: 701122582H1
gtcttaataaacgctcttctctgaaaaacctgatttcttctcttcttctcttctctttcgtttcgatcttcnntctctgaaaatgagagagtgcatttcaatccacatcggtcangccggtattcaggtcggaaacgcctgctgggagctctactgcctcgaacacggcattcagcctgatgggcagatgccaagtgataagactgttggtggaggtgatgatgctttcaacaccttcttcagtgaaatggggctggaaagcacgt

SEQ ID NO: 40285 - DNA, 270 bp, Glycine max
  unsure (1)..(270): unsure at all n locations; Clone ID: 701122583H1
caagtctttccttttctatttaattcctaaaatcccattcttcttcgctcattcctctgcactgccatcatccccaacttcctcacaaggttanancnnactaaagagttgtgccaccatgtcggacgatgaaagggaggagaaagagttggatctctcttctgccgaagttgtcaccaaatacaaaacgctggctgagatcgttanacaaggccttgaagctagttatttcagaatgtaaaccaaaggcgaagattgtggatatttgtg

SEQ ID NO: 40286 - DNA, 50 bp, Glycine max
  unsure (1)..(50): unsure at all n locations; Clone ID: 701122584H1
anaaatattcatatttngntagtantaantanagaaaaaattggtacaga

SEQ ID NO: 40287 - DNA, 268 bp, Glycine max
  unsure (1)..(268): unsure at all n locations; Clone ID: 701122585H1
atcactctcaataaatgtgccatttatggtnngatttctcctggaggagtgagaattggtactcctgcaatgacatctagaggctgtttagaggaagattttgaaaccatagctgattttcttcgtagggcagctcagattaccagcattgtgcaaagagaacatgggaaatcatgcaaagatttcctcaagggtcttcagaataacaaagatatttctgagctcagaaatcgggttgagacattcagttcccagtttgcaatgccag

SEQ ID NO: 40288 - DNA, 269 bp, Glycine max
  Clone ID: 701122586H1
ggtccagatagaagcaaacttgttcgtgatttgaatgatcttgctggggaaggaaatattgagagtatgctctcagttgagatgggtttgagggaacttgccaacttaaaggttgaggatgctgttgtgctcgcattagcccaacacagacgaccaaattcagttcggcagtctgttttagattccaaatcacatggtgatgccaaatattcagaagcatttgaattaagtgaagaggaagcagaagatgttcttttcaaagaggcatg

SEQ ID NO: 40289 - DNA, 273 bp, Glycine max
  unsure (1)..(273): unsure at all n locations; Clone ID: 701122587H1
atcacaatncgagtacggaaggttaggncccctctgatcctggtggctcctcgcgcctcaaccctccgagatcttccgggaggaaaaacattgtgtttctgtcactctttgctgtcttattaatagccgcgtccgctgttactgcagttgccgtccgctctcgcactaaaaataccggngggnagcggaactaggnccggcnagttcacacaggccattncancgcacgtncngacngaaacgcttnangancctgtgcatganatcattacg

SEQ ID NO: 40290 - DNA, 87 bp, Glycine max
  unsure (1)..(87): unsure at all n locations; Clone ID: 701122588H1
cggcgcggcattcgcattcaatggctgggtgattcgagacttcgggaggcacttccattactncaacttcttcccacacaacataaa

SEQ ID NO: 40291 - DNA, 258 bp, Glycine max
  Clone ID: 701122589H1
cttgcctattgcacattcttcatcacttcattcaacatttctctctcccttagctagtttttaccaatggctgctgcggttagtgctgcagtctcttttccatccaccaagtctacctctctcccaagcaggacctccatcattaccccagagagagttgtattcaagaaggcttcattgcaatacagagatgtttgtagcagtggaagggtagtttccatcagagctcaagtcaccactgaggctccagccaaggtt

SEQ ID NO: 40292 - DNA, 266 bp, Glycine max
  Clone ID: 701122590H1
gcataacctaaacttacccttcttctctctgtgtgtgtgcgcatcaaacgcaaccagaagcagccatggccactgcaagaactgtgaaggacgtttctcctcatgagttcgtcaaagcttactcttctcacctcaagcgatctggcaagatggagctgccagagtggactgatattgtgaaaactgcaagatttaaggagttggctccttatgatcctgactggtactatgtcagagctgcttccatggcaagaaagatctacttg

SEQ ID NO: 40293 - DNA, 264 bp, Glycine max
  unsure (1)..(264): unsure at all n locations; Clone ID: 701122591H1
gcttctgtntcntaagatactttnctnttggtaacttttgtgtttcaaaatctgagggtttttnttttctcttttttnntncttttctgacagacaagatagcagggaaaaaatcaaacatatacttcagnaattagttccagatttgnacaananttatggnggcagcttcctcatccactccatttttgggaatcagagaagaaagccctnagattacaacacaccatcaaccctccanagtttctcnaacnanagggcctc

SEQ ID NO: 40294 - DNA, 213 bp, Glycine max
  Clone ID: 701122592H1
acacttctttctctgtcttactgttcactctgctgtgtaccaaaaccaaaaccactcacaaggtgccactaatctgtcaggttatttcaagataccatttttctggtgtttggttcccgagaaactgtttacaatatagaatcatggaacagtagaaggccaccaaatcatttcaatttttttcttcaatctgtgtcagcacccttgttttgc

SEQ ID NO: 40295 - DNA, 264 bp, Glycine max
  unsure (1)..(264): unsure at all n locations; Clone ID: 701122593H1
attttatctaggtccatcgtcgatagaagatacgagaaaccaaaggcaatgtttttgtgggattggttttatgggattctagcgtcgctcgggctgtggcagaaggaggccaagatcttattcttgggcctcgataacgctggcaaaactaccttgcttcacatgctcaaagatgagagattagtccngcatcagcctacccagtatcctacatcggaggagttgagtattgggaagatcaagtttaaagcttttgatctaggg

SEQ ID NO: 40296 - DNA, 265 bp, Glycine max
  unsure (1)..(265): unsure at all n locations; Clone ID: 701122594H1
attttgatactgtngtccgcagttctgttcttgtggtccaatgcccatantttcatccacaaatctccacctcgcattccggaatttcatcttccagaggagccattcctncaagttgcgtctgcattgagaattgaagtcaaccggggatttgctgttttgcatagtattggctctggaanggacttnaagaaattcctagtggttattgctagcgtatggattctgtcaattgtggggaactggtgcaatttcttgaccctgt

SEQ ID NO: 40297 - DNA, 163 bp, Glycine max
  unsure (1)..(163): unsure at all n locations; Clone ID: 701122602H1
gtgtgatcatgtctttctcacattccccttcttcatcatctnaagctcatagtcctcagagtaaccctttaatccccgcaaactggctgtctagaacttggcaaacgaatgcaggcaaagcacttgtcacaactgtgatcaacgaggacattggtcttattac

SEQ ID NO: 40298 - DNA, 292 bp, Glycine max
  Clone ID: 701122604H1
ctttgattccaagtttctttggtggcagaaggagcaatgttttggatcctttctccctcgatgtgtgggacccttttaaggattttccttttcccacttctctttctgctgaaaattcagcgtttgtgagcacacgagtggattggaaggagacaccagaagcacacgtgttcaaggctgatattccagggctgaagaaggaggaagtgaagctggagattcaagatgacagaattcttcagataagtggagagaggaacgttgagaaggaagacaagaacgacacgtggca

SEQ ID NO: 40299 - DNA, 292 bp, Glycine max
  unsure (1)..(292): unsure at all n locations; Clone ID: 701122605H1
gggaggaggagggtgtaggtttggttgatttgattgttgtgcatccatcnttaagctagtggcgatcggatccagctacagcatagagatcnnnnnnnnnnnnnnnnnnnatgttgggtgttataaggcacaagagtattcgccctgccttctccgcaatcagacacttgtcttctgcagctaaagagattactgtcagggaggctctgaactccgcactcgatgaggaaatgtcagctgatcctaaagtgttcttgatgggtgaagaggttggggaatatcagggtgcata

SEQ ID NO: 40300 - DNA, 290 bp, Glycine max
  Clone ID: 701122607H1
ggaagatgaacttgagatggatggaagcggtgctgccgctgggaatcatagcgggaatgctctgcgtcatgggaaacgctcagtattacattcacaaatccgcgcatggcagacctaagcacatcgggaacgatatgtgggacgtggccattgaacgaagggacaagacgcttgtcgagcaagcctctccctccaattaacatcgttgttttgccaatgacattgtgaagaaaataaactgctcacctggatttacgactgtgttctagggaagcaggttaatcacaaga

SEQ ID NO: 40301 - DNA, 293 bp, Glycine max
  unsure (1)..(293): unsure at all n locations; Clone ID: 701122608H1
cttgggantccctaatgattanatcaaccaaagtgatcgaacttcaaaatcctaaaagccatggcccaatcccatggatccatcctcactcgatcngtgtggtcctccaatctggaatcggagttcgacttaatccgatctgtcatcgactccttccctctcatctcgatggnacaccgagttccccggcgtcgtcgtgcgcccncatgcttgcnacccctccttccgccatcgccaacccgncgcgcactacgccgtgcttaaagccaacgtggatcgcctccacctgatcc

SEQ ID NO: 40302 - DNA, 293 bp, Glycine max
  unsure (1)..(293): unsure at all n locations; Clone ID: 701122609H1
gggcacctaagantanagatcnngaatcccancttcnatcaaataagcgancacggttantagcggcagagaaaggagatggaatcggcgggggnnggctggagaaggcgttggtggagttntgctccaagattgaaactggcttgggtttaggtttggaccaagacatcatcaaaggcctcgtgtcttactgtgaccttgccgancccacgagatgccaaagagtaccttgacaatataatcggtcaggatgcagggaaaactgtgattgaagaatatttacgacggagagg

SEQ ID NO: 40303 - DNA, 290 bp, Glycine max
  unsure (1)..(290): unsure at all n locations; Clone ID: 701122610H1
attcacaancttaaacctttctnnctngtaaactttattgattgattctgagantagaactaagagggtatagacatggctagcncaattgnagcttctttnttggttcngcttctggctttccccactgnatttggantctgaccatgaagttggtgacactantggatnggccctcggagttaattacaacacctgggcctctgggaaaacttcacagttggtgacactttggtgttcaagtatgactccactcatcaagttgatgaggttgatgagagtggatacaa

SEQ ID NO: 40304 - DNA, 283 bp, Glycine max
  unsure (1)..(283): unsure at all n locations; Clone ID: 701122611H1
cgagcttgctgttccaactgctccccaagtctcgtaggctcgtcagaantacgctgatgagtgtgaatctgcgattaacgagcagataaatgtggaatacaatgcttcctacgtgtaccactccttgtttgcatactttgacagggacaacgtggctctcaagggatttgccaagttcttcaaggaatctagtgaggaagaaagagagcacgctgaaaagctcatgaaatatcagaacactcgcgggggaagagttgtacttcaccccatcaagaatgtcccc

SEQ ID NO: 40305 - DNA, 295 bp, Glycine max
  unsure (1)..(295): unsure at all n locations; Clone ID: 701122612H1
cctcccggtacctgtattgtatcagaaggaacgtgatatcatgatgctgtaaagagagagagatatgagataattncacaattcctcctttatcttgtttcatagcagtgaagaaaaaaacanagaaagcatgggcgtggacttctacaagattcttcaggtagatagaagcgccaaagatgaggatctcaagaaagcatatcgaaggctagccatgaagtggcaccctgataagaaccctaacaacaagagagaggctgaagctaattcaagcaaatcttctgaagcttatgat

SEQ ID NO: 40306 - DNA, 296 bp, Glycine max
  unsure (1)..(296): unsure at all n locations; Clone ID: 701122613H1
gccgctcgatgggaattgcgcttcnaggcgtctcgtagggctaatccgcctcacgagggtcaccaacggcacgtnccctttggngggccgaggccccctactgctggtcggnaaacggacggcgggcgcacgcgtcgcttctagcccggattctgacttagaggcgttcagtcataatccaacgcacggtagcttaccgccactggcttttcaaccaagcgcgatgaccaattgtgcgaatcaacggttcctctcgtactaggttgaaatactattgcgcacactgtcatcagtag

SEQ ID NO: 40307 - DNA, 293 bp, Glycine max
  unsure (1)..(293): unsure at all n locations; Clone ID: 701122614H1
gtgaaattnatgttcgagcttgctacactgccatttctgttgcaagtnttttgaacattttggatgatgagctnatccagaatgttggagactacattataagctgtcaaacatatgagggtggcattgctggtgagcctggttctgaggctcatggtgggtacaccttttgtggattagctacaatgattctgattggtgaggttaatcacttggatctgcctcgattagttgactgggtggtattccgacaaggtaaggaatgtggattccaggggagaacaaataaactg

SEQ ID NO: 40308 - DNA, 291 bp, Glycine max
  unsure (1)..(291): unsure at all n locations; Clone ID: 701122615H1
ccaaacagtgtcggtgcagctcggggaggaagaaggggaagaggcagaggcagttatcaagcagatgctccgagagggcgttttggtggtaggagcatgggaaggggaggtaatcaggatagttcagactacaccagactaagaggcgatggttatcttcagcgtggttcccgatgaggaaaatgtggcataaacgcatgcactaagatgccatcaagggtttatacaattagcgaatctgtgcttggcgtgggtatttttactacagaacntttcttctgtggtttcaca

SEQ ID NO: 40309 - DNA, 289 bp, Glycine max
  Clone ID: 701122618H1
gagaggcttatggaaggagtaccgcacccaatacccagaactgtcgaagaggttttcaccgattttaagggcagacgcgctggtttgattaaggccctcactactgacgttgaaaagttttaccagcagtgcgatcccgagaaggagaatttgtgtctatatgggtttccaaatgaaacatgggaagtgaatttgcctgttgaggaagtgcctcctgaacttcctgagccagcataggtataaactttgccagggacggcatgcaagagaaggactggctatcatggtt

SEQ ID NO: 40310 - DNA, 290 bp, Glycine max
  Clone ID: 701122619H1
gttggtttaccaggacctccttacaggtgatgagcttctctctgactccttccgttacaaggaaattgagaatggaatgctgtgggaagttgaggggaagtgggttgttaaaggagcagttgatgtagacattggtgcaaacccttctgctgagggtggaggagaagatgagggagttgatgatgcagctgttaaggttgttgacattgttgacacattcagacttcaggagcaacccgcattcgataagaagcagtttgttaccttcatgaagaggtttatcaagaatt

SEQ ID NO: 40311 - DNA, 247 bp, Glycine max
  unsure (1)..(247): unsure at all n locations; Clone ID: 701122620H1
gtncttcctttctgcctctctcagtcacacaccttctcgatgaccaacgacaacatcgccgtgacagatctcacttctgccctcaatgaagataatcgcgccgacctagtcaatgctctcaagagcaagattcagagtctggctggggcgcattctgatgttctagagactctatccccgaatgtcaggaagcgtgttgaatctcttagagaaattcaggttaaacatgatgaatagaggcagactt

SEQ ID NO: 40312 - DNA, 287 bp, Glycine max
  unsure (1)..(287): unsure at all n locations; Clone ID: 701122622H1
ggccaaagctgataaacaaacaagactcagtctcacgaggtggagtgcggattggaaaagtgctactgttctatatgagcaggcagctaatgggtttagagttgccaaggactatgagaatgccaaaatagcatatgagaaagcttcgaaaggacaagagatgctttcttccccttgggatgcagctaagcacatggaatctgctgctgctctagcgaaggatctaagacactggcaagaagttgtggacttctatcgaaggcatctgaantgtatatggagtgtgg

SEQ ID NO: 40313 - DNA, 156 bp, Glycine max
  unsure (1)..(156): unsure at all n locations; Clone ID: 701122623H1
gccctttttnttnttttttaggnaccttttcatcttcacnacttatnggntcctcctcnttgcnaatagttaactttnnaccctttcctcttcctcnacccanaatctcaaaatccgagaaaatatnctngttttatngatcaatatgaagngnng

SEQ ID NO: 40314 - DNA, 287 bp, Glycine max
  unsure (1)..(287): unsure at all n locations; Clone ID: 701122626H1
aaacatccctcttgatttgaaggttgttttgtgcttatagataaaagttctgccaaatcaagaggggttttcagatcatannnnnnnnnnnnnnnntaaacaatggctaagttctttgctgctatgatcttggcactcattgccatttccatgcttcaaacagtggttatggctgctaatgagcaaggaggccacttgtatgacaacaagagcaaatatggaagtgggagtgtcaagagataccaatgcccatcacaatgctcgaggagatgtagccagacccaata

SEQ ID NO: 40315 - DNA, 288 bp, Glycine max
  unsure (1)..(288): unsure at all n locations; Clone ID: 701122627H1
gacgactgcgccgacagtggaatccctctccccaatgtcaccagcaagattctggcgaaggttatcgagtactgcaagaagcacgttgaggcgaacagtgctgatgagaancccagtgaggatgtgctcaaggcttgggacgtggatttcgtcaacgttgatgcaggccactctcttcgatctcantctggctgcaaactacttgaacatcaagagcctttggaccttacttgccagacagtagcagacatgatcaagggaaagactcctgaggaaattcgcaagaca

SEQ ID NO: 40316 - DNA, 295 bp, Glycine max
  unsure (1)..(295): unsure at all n locations; Clone ID: 701122631H1
gcagcatcgctattctcttcattccatggctttgcccaaccagcaaaccgtggattaccctagtttcaaactncgttatcgtcggcgatggtggcacaggaaagacaanctttgtgaaaaggcatctcaccggagaattcgagaagaaatatgagccaaccatcggtgtggaggttcacccattggattttttcacaaactgtggaaagattcgattttactgctgggatactgctggacaggagaaatttggtggcctcagagnatggatactatatccatggacaatgtgcta

SEQ ID NO: 40317 - DNA, 288 bp, Glycine max
  Clone ID: 701122635H1
gctctgctctcatctcattcatattcatttcaatggcaactcaaggtcaagtcattacctggcaaagctgcggtggcctgggaacccaacaagcccttaaccgtccaagacgttcaggttgctccgcctcaggccggcgaggtccgtgtccaaatcctcttcaccgctctctgccacaccgatgcttacacttggggcggcaaggatcccgaagtctcttcccctgtattctcggccacgaagctgcagggattgtggagagtgttggagaaggtgttactaatgttc

SEQ ID NO: 40318 - DNA, 286 bp, Glycine max
  unsure (1)..(286): unsure at all n locations; Clone ID: 701122637H1
ggaaattgagttaacttctggttgtttccaggaacatgtttnaaacctgtagcttcggtttgtagaaggattgatgggggtcctgctgggnctagtattctagagcgcatatatgaaggagtgaatgtctactacaattatactggagaagctaaatgttttgaactggatgatgatcctcatggcatgagcggttgggaatggcaggcttgcactgaaatggttatgccaatgtctagcagccaggagtccagcatgtttcccccatatgagtataattacactc

SEQ ID NO: 40319 - DNA, 285 bp, Glycine max
  unsure (1)..(285): unsure at all n locations; Clone ID: 701122638H1
ctaccacatccaaggaaggnagcaggcgcgcaaattacccaatcctgacacggggaggtagtgacaataaataacaataccgggctcattgagtctggtaattggaatgagtacaatctaaatcccttaacgaggatccattggagggcaagtctggtgccagcagccgcggtaattccagctccaatagcgtatatttaagttgttgcagttaaaaagctcgtagttggaccttgggttgggtcgatcggtccgcctccggtgtgcaccggtcggctcgtccct

SEQ ID NO: 40320 - DNA, 155 bp, Glycine max
  unsure (1)..(155): unsure at all n locations; Clone ID: 701122639H1
attcatcgccaaaccccaacctttcctatctcctcattcaatcccctcccatttctctctcacccccaaaaccaagaaagcgaatcgattccgattcctctcaatggctgcggnacccaaggaatcgccttccaacaaccccggtctanaaacaa

SEQ ID NO: 40321 - DNA, 287 bp, Glycine max
  unsure (1)..(287): unsure at all n locations; Clone ID: 701122641H1
ctcccccgacgnctactactacgacgacggcggcggcggantncancggtggtcccttgccggagggcgtgaggagggagattctggagcnagggtttccgnatgatggctataactacttgaatcacttgagggaaatcaaaaacaccggcgctngtgctgctttctttcacaaccccaagttcangcttcaacacctccctcgcgatgttaaggcatatgatgcttcgagattgcaaatttctgaggcggatggagaggctgtggagaacactatatacagtgtt

SEQ ID NO: 40322 - DNA, 279 bp, Glycine max
  Clone ID: 701122642H1
actaattgtgcttatccttattgagagaaaaaatggccaaatcaatcaaattctttgagttgaacacaggggccaagattcctctcttgggttagggacttggcaagctgaacctggtgttgtagctgaagctctcaccacagccattcaggttggatacaggcatattgactgtgctagtgcgtataagaatcaagcagagattggttctgctctaagaagctttttgatgatggtgtggtgaagcgtgaggactatggatcactccaaactctggtg

SEQ ID NO: 40323 - DNA, 290 bp, Glycine max
  unsure (1)..(290): unsure at all n locations; Clone ID: 701122643H1
ctcacccttcaccttgggattgggttaatcctgcctatggtgatggcttcaaaggactcactgctaagagatcctcctctggcagacctcctgagcaggaaaggaagaaaggtgtgccatggactgaagaagaacacaagttgtttcttctggggctgaagaagtatgnccaaaggtgattggaggaacatatcgcgcaattatgtgatcactcggacgccaactncaagttgctagccatgctncagaagtacttcataaggcaactatcaggaggcaaggacaagagg

SEQ ID NO: 40324 - DNA, 286 bp, Glycine max
  unsure (1)..(286): unsure at all n locations; Clone ID: 701122644H1
ccaattttctagggtttatacaattttcgatggcttcttcagantgncancaccgntgctttgtcggtgggctcgcttgggccactgacgnccaagctctcgagaganccttctctcagtacggcgaaatcgttgaaacgaagattatcaacgatcgtgagactggaagatccaggggttttggatttgtgaccttcgcctcggagcagtccatgaaagacgccatcgaagggatgaacggccaaaaccttgacggccgtaacatcactgttaacgaagctcagtc

SEQ ID NO: 40325 - DNA, 289 bp, Glycine max
  unsure (1)..(289): unsure at all n locations; Clone ID: 701122645H1
aaacatggnaactcaaatganccaagnagagaaagtttgtggcggatggagtgttcttcgccgaactgaacgaggttctgacacgtgagttggcggaggacggttactccggcgtggaggttagggttacgccgatgcgcaccgagattatcatcagagccaccagaacccaagccgttctcggtgagaagggaaggagaattagggaacttacctcagtggtgcagaagaggttcaaatttcccgagaacagtgtcgancnttatgctgagaaggtcaacaacagagg

SEQ ID NO: 40326 - DNA, 194 bp, Glycine max
  unsure (1)..(194): unsure at all n locations; Clone ID: 701122647H1
cnagcctacacattgnancgaatncgtnatcctgantaccatgtnaagttgaggncanattngtccnnagactacatggantcanacaagccagcanctgagcttgtgaaantcaaccctacaagtgattatgctcctggnctggaggatacccttatnntgacantgnanggtattgctgcnggcatgcaaaa

SEQ ID NO: 40327 - DNA, 293 bp, Glycine max
  unsure (1)..(293): unsure at all n locations; Clone ID: 701122648H1
gtacgtggaaggcattttgatcctatcgctcgcgcgaaaccaaatctctttgtttctcttaattccnttatagtagcaagtnaagttgaagttgcaggtgtgtgtctcatggcgtctgttattcctcgatgccttcctcccccaattccaattgcacaccgacgaaaggcnccaggtggtgaaatcgtgtcaccaannngagagctctgcttcggctcacacagaccactcctcaaatccaaaggaactccgagtaacagtttccaggcgtaattgtctctcatgtttgtgtc

SEQ ID NO: 40328 - DNA, 285 bp, Glycine max
  Clone ID: 701122650H1
attcaaatatgtggataggatagatgttgtatgttggttcattaacaacctttaattaattctcttagactttactcacttattatttttctgttttctgttattttgttatagcatgtaatagttaagtagttttaagttggttaggttagttagatttgaaatagtgcttctatttcttcttgcatagcctaggtacaagactataatcatgagaaagtgatttctaggggttctaaaaagtatgctgaagatcttgaaagtggtttcgcgtcagatgttgaa

SEQ ID NO: 40329 - DNA, 284 bp, Glycine max
  unsure (1)..(284): unsure at all n locations; Clone ID: 701122652H1
ctctttggtttgctcaaccgatctccgcagcaatggtgaacgttccgaagacaaagaagacctactgcaagagcaaggngtgcaggaagcacacgctccacaaggtcacccaatacaagaagggcaaggacagcatcgccgctcagggaaaacgccgttatgaccgcaaacagtccggttacggtggccagaccaagcccgttttccacaaaaaggcgaaaaccaccaagaaattgtgttgaggctccagtgccaaggatgcaagctgtctcgcagcacgctat

SEQ ID NO: 40330 - DNA, 286 bp, Glycine max
  unsure (1)..(286): unsure at all n locations; Clone ID: 701122653H1
ctttggattgtttacctnccattcagctctgataagggagaagaacagttttgtagtgttgaccatgncacatgataatgtgantnggttccaggaattgagatttgatgnaatagatactgctgagtgtgattttgcaagggttcaagtttctcctcttcctgatgtaccaactgaattgacaaataacacagtggtggaagggacgtgtgcatccccagttcagtttgaatcacaagtagttatgctaaatattggtggcagaaatcagcttacaactgtgtgt

SEQ ID NO: 40331 - DNA, 283 bp, Glycine max
  Clone ID: 701122654H1
ggagaaaaagagcactgtgcaagaagatgctggatccaagccacaatggaatgagagctttcttttcactgtctctgacagtgcatctgaacttaatctaaagataatggataaagacaactttagtcaagatgattgtcttggcgtggcaaccattcatctggatccagtgtttgaagcgggtagtattccagaaactgcttacaaggttgtgaaggacgaagaatattgtggagagattaaggtggctctcacttttactgttgagaaaaatgaggagcag

SEQ ID NO: 40332 - DNA, 69 bp, Glycine max
  unsure (1)..(69): unsure at all n locations; Clone ID: 701122656H1
ggntatnccggaatctccgattccggcaancacatnncctccnccaagaaaaaccanaagaagctccnt

SEQ ID NO: 40333 - DNA, 285 bp, Glycine max
  unsure (1)..(285): unsure at all n locations; Clone ID: 701122657H1
atactgttccctgttgactgaacctatcccatctctctcatcctttgttgtcatctctgagaaaaggggtttctcttcttgtttcatttatttttcttttttccaccactttctaaggntcnccttggaactggtttaatttgaagacacttattccatttgacattataggnccgtgttcgaatacttcatcctccagtcatgacttgtttcccattctcatttggtaagaaagcacgatttgtggcaaaacatgatccagatattgatgaagtccagccaata

SEQ ID NO: 40334 - DNA, 254 bp, Glycine max
  unsure (1)..(254): unsure at all n locations; Clone ID: 701122659H1
tctctctacgctttancgttcgagatccctcangngatccactaactgaagnagaaatggggttgacattcaccaagcttttcagccggcttttcgccaagaaggaaatgcgaattctgatggtgggtctcgatgcagctggtaagaccaccatcctgtacaagctcaaacttggagagatcgttaccacaattcccaccattgggttcaangtggagactgtggaatacaagaacattagtttcactgtctgg

SEQ ID NO: 40335 - DNA, 286 bp, Glycine max
  unsure (1)..(286): unsure at all n locations; Clone ID: 701122660H1
cttgcaccctcttancaataacatgagncagagnanngcnttgacggaaaggaaaaccaaatcaaacccaacccaccttgtccgatctgccaccaggtntggttgttgtgatttgaatggaggcaagtggaggtggcggnggcggtgcttcaccgtctgcaccagtgaagcaatatctgcacgatttctcgaagctgtttcagtactatctggataaatccactccacattccacgnacagnnagacngcaanantnntgatagcatccatctacgttttacgcgt

SEQ ID NO: 40336 - DNA, 284 bp, Glycine max
  Clone ID: 701122662H1
cttgaggatacctactatccgaacctgataaaagttttctatgcaaacttaaccatattggacaatggtgacttgtgttctgaggtttgtaaagtgaagattcgagtcaaaccacgcgattggttggctatagctaatttgaagtatgaggggcaaaagtttcaactttccaaacttcctgacaacattgggttccatcgtggtcaggcatggatgcgatggtcagacctgatttgcagggacgcaactgtaaaaatactggtagtttgacaattgaagataga

SEQ ID NO: 40337 - DNA, 289 bp, Glycine max
  unsure (1)..(289): unsure at all n locations; Clone ID: 701122663H1
gaaaaaaacaccacctttctttttccgactaaaggttcgccggaaaatgcctctatcctcctcttcctcctccgccgtagactccgccgtctccggcgagatcatgctctttggcgttagagtcgtggtggactccatgcggaagagtgtgagtatgaacaacctctcgcagtacgagcttcntcncgacgctgnnngagccaaagacgacgccgcaggatacgcctccgccgatgatgcagcntccgccaactccgacaagaaccgcgaccgcaagcgagggattcca

SEQ ID NO: 40338 - DNA, 281 bp, Glycine max
  Clone ID: 701122666H1
ggatactggttctgctggttaaaataacaaaatctgaatgaggggtatcaaataaattgatgagttggggaattggccttaattgcgcccttaccatcgtatggaagaggaagggagctccctggaggaaggtatatgagttttatccatggagatggacttagtgatgtagtaattacaggtgagaatgggacaattgatgggcaaggagatgtgtggtggaacatgtggaggcagagaacacttcaatttacaagaccaaacctgtagaatttgtgaat

SEQ ID NO: 40339 - DNA, 282 bp, Glycine max
  unsure (1)..(282): unsure at all n locations; Clone ID: 701122667H1
cgtgaacgtccacatcgcttatggtgcgtgcatcaccatacagttcgtcaccaacgtgatcatccatgggttgcatattcatgactgcaaggtgactgggaacgccatggttcggagctctccttcgcattatggttggaggacccttgctgatggagatgggatctccatctntngctcgantcatatttngnttnatcataactgctgtngaattgcgctgatgggcttgtggatgctgttatggggtccactgctattactattnncaacaactacttc

SEQ ID NO: 40340 - DNA, 286 bp, Glycine max
  unsure (1)..(286): unsure at all n locations; Clone ID: 701122669H1
ggccaggcnagcccnatcaaccancacacntctcctacnctcacgctacnccttgctgcncttcncgcgacnttngcaagtnctnaaaagtataaagatggcagagacatncctantnaccncagagtcggtgaacgaggganaccctgacaagctctgcgaccaaatctccgatgctgtcctcgacgcttgcctcgagcaggacccagacagcaaagttgcctgcgaaacatgcaccaaaaccaacttggtcatggtcttcggagaaatcacgaccaaggccaac

SEQ ID NO: 40341 - DNA, 281 bp, Glycine max
  unsure (1)..(281): unsure at all n locations; Clone ID: 701122671H1
gnaaattatgatacccattaagatgagaccgtacctacgtgcaatattcctattattccttatncttccctcggcgagatgngtcgcggctagaattgataggaagacgataacaatgttntggggcaaggntaaagatgcgncgataaaaactttcngcagtcgtgatgagcggaagaaactgagggagtattacgngaaattcagggaattcatggatcgngtagaacnaangncgnnccctcncccaccgccaatgtaccgtttacnaccaaagtccc

SEQ ID NO: 40342 - DNA, 280 bp, Glycine max
  unsure (1)..(280): unsure at all n locations; Clone ID: 701122673H1
ggncaccatggangcgtccggtccgggccgtacgggcagatcttcangcccgacaactttgtgttcgggcagtccggggcaggaaacaactgggccaaggggcactacactgagggtgctgaactcattgattctgttctcgatgtggtgcgcaaggaggctgagaactgcgattgcttgcaaggttttcaagtgtgccattccctgggaggaggaactggatcaggaatgggtaccttgttgatttctaagatcagggaagagtacccagataggatga

SEQ ID NO: 40343 - DNA, 281 bp, Glycine max
  unsure (1)..(281): unsure at all n locations; Clone ID: 701122674H1
ctctctcttagggtttcttctcccgccaatttcccctctcccccattcaattccaaaccctaacctcacttccacccttgccggaaccgcaccttcgattcgacctagggtttcacagtttcactccgagcacgcacncacgaacttcacgatgccgtcgctactctccccgggcaaaatccactgcctcgaggtggagaatttcaagtcctacaagggcttccaagtgatcggtcccttctacgacttcaccgccatccttggccccaacggcgccggca

SEQ ID NO: 40344 - DNA, 256 bp, Glycine max
  unsure (1)..(256): unsure at all n locations; Clone ID: 701122678H1
gaaagatcccgtcgtcgcaggcgcagagtagancagcacagacngagggaaaacngcaccgccgccgtagaagtnaacaaccatggtgcacgtctccttttacaggaactatgggaagacattcaagaagccgcgtcgtccgtacgagaaggagcgtctcgacgcggagttgaagctggttggtgagtacgggcttcggtgcaagagagagctgtggagggtgcagtacgcgctcagccgcatccgcaacaacgcg

SEQ ID NO: 40345 - DNA, 286 bp, Glycine max
  unsure (1)..(286): unsure at all n locations; Clone ID: 701122679H1
ggagcagnntcaggaggagaaggatgtctcacaggaanttcgagcacccaaggncacggttcactgggattacntcccaggaagcgtgctgntccgtcacaggggaaaagtgaaggcattccccaaggatgacccatccaaggcacccaagctcactgcattcttgggttacaaggccggtatgactcacattgttagagaggtccgagaagccaggatcaaagcttcacaagaaggaaacttgtgagcctgttacattattgagacccctccaatggttatgttg

SEQ ID NO: 40346 - DNA, 275 bp, Glycine max
  unsure (1)..(275): unsure at all n locations; Clone ID: 701122680H1
cctaaagagtctccgctgaactttttggtttcttgaagatgtcnttactctccgatcttatcaaccttaacctctccgacatcaccgataaggtgatcgccgagtacatatgggttggtggatctggcatggatatgaggagcaaagcaaggactctctcgggactggttaatgacccttccaagcttcccaagtggaatatgatggttccagcactggtcaagctcctggacaagatagtgaagtgatcttatatccacaagcaattttcggga

SEQ ID NO: 40347 - DNA, 283 bp, Glycine max
  unsure (1)..(283): unsure at all n locations; Clone ID: 701122681H1
gagatggctcggacacagnnaaataaagccacagagtntcatcttgggcagctcaaggctaaaatagcaaaattaaggacacaattattggagcctccaaaacatacattcttagaagagagaacaatgacaaatgcctagccagaggcgattggtggctttcctctgtctatgatctcggtttccccagtcttggaattcttttaagaaggttctagtggaggtggagaaggatttgaagttacaaaattcggtcatggacgtgttgcactgattggatttc

SEQ ID NO: 40348 - DNA, 281 bp, Glycine max
  unsure (1)..(281): unsure at all n locations; Clone ID: 701122683H1
gaaaacggcactgcagccgtagaaggaaaaccgaccatggtgcacgtctccttttacaggaactatggtaagacgtttaagangccccgccgtccgttcgagaaggagcgtctagacgcggagtgaagctggtgggggagtacgggctgcggtgcaagagggagctgtggagggtgcagtacgcgctcagccgcatccgcaacaacgcgcggaatctccttaccctcgacgagaagaacccgcgccggatcttcgagggcgaggctcttctccgcagaatg

SEQ ID NO: 40349 - DNA, 280 bp, Glycine max
  Clone ID: 701122684H1
aacaaggcaagctattctaaatcacaccatctaaccagtctgagggcctggtatccaaaacccctctagagaaaaggtttatacctctgagaagtacttccaaacagtttgtatcactcataggcatgtaaagcttctatttagaatgtttttgagttactatgctcctcatgactgttagtcaactccctttttttcatttctgggaccttttttttgcttttcactgagattccatttccgagtcctctttgaatttgttttggacacaaagtataaa

SEQ ID NO: 40350 - DNA, 279 bp, Glycine max
  Clone ID: 701122686H1
gcaagctcatcctagagttttaaaaatggcagcagcctcctccatggctctctcttccccatccttggctggcaaggccgtgaagctgggcccatcagcccccgaagtcgggagggtcagcatgaggaagaccgtcaccaagcaggcctcctccggaagcccatggtacggcccagaccgcgtcaagtacttgggcccattctctggcgagcccccgtcctacctcactggcgagttcccaggtgactacggctgggacactgctgggctttcggccga

SEQ ID NO: 40351 - DNA, 284 bp, Glycine max
  unsure (1)..(284): unsure at all n locations; Clone ID: 701122688H1
gtttggtttgtggaataattggtgacttgaatcgttgaatgagatattattgagtttgattcagaaatgaacaaagacgaacnccgataggaacgaaaagaaagcgcaagatattaagctttgggganttttcatcttcggattaatcggcgccaccgtcactgctttctccctgtccaggtcgcaggcaaaaggaggcagcttctttccgaacagcatttcaagaagaagcatgggaagaggtacaataagcgatgcaagangagtatgaggaggngatggac

SEQ ID NO: 40352 - DNA, 295 bp, Glycine max
  unsure (1)..(295): unsure at all n locations; Clone ID: 701122689H1
annnatnagcttgagncnaaacccancggtncacattatcttcttnnttctttctccaatggnacaagnancgtccacncnggtntcttcgangganctnngtcaccgggatattttcancaccgacgaatccatcggccgctcctacaccgccgacntccccgacgagtgcctcgccggaatcttccagtttntaagctccgtcgancggaaaacctgctccgccgtgtgtcggcggtggctgcgcgtggacggcgagaaacggcagcgcctctncctgaaacgcgaaggcgag

SEQ ID NO: 40353 - DNA, 279 bp, Glycine max
  unsure (1)..(279): unsure at all n locations; Clone ID: 701122690H1
agtattcagctctgaggatgctgcaattctcttccaccattttcccaacaacnttaaaatttttctcaatccaatttggaaaaagactcttacaaaaagttcatagcttttcatatggagctttcaagtaattagcacgtgaaagatttttccttttaaggaaattctaccaggcaaattaaatttaactgtgttggcctagaggtgaagttattaacatttgttttnangcttggaaattgttgcttgttcaatcacaacaatggctttagctcctac

SEQ ID NO: 40354 - DNA, 279 bp, Glycine max
  unsure (1)..(279): unsure at all n locations; Clone ID: 701122691H1
gtatacctatttgatttgcctcattagatcgggttggctacgaatttttttcgaaacccttntcttttntcaattgggtttccatctttgattggattnccattgccatggctccaaaggatcccaagcaagttgctgctgcttctggtggtgggggtggtttttttgcttctnttgcttccagtttgtccaattttggcagtgccatgtccaaatccgttaatggtttggtgggctacgaggggctggaggttattaatccagaaggaggaactgaag

SEQ ID NO: 40355 - DNA, 264 bp, Glycine max
  unsure (1)..(264): unsure at all n locations; Clone ID: 701122692H1
attacaacgtcttctggttctttgaagaagaacccttctctttgcgcgtgtccnnttctcttctccaatcctcctccatccccactgtgtgatctgatcctaaaccctatagccatgactaccatggaggttaagctatggaatgacaagcgcgagagagaaatgtatgacaactttggggagctttatgccattatcaaagccgctgagaggcttgagaaggctcatgttagagatataatctcaccccaggaatatgagtta

SEQ ID NO: 40356 - DNA, 94 bp, Glycine max
  Clone ID: 701122694H1
ataaaagatgtctctgcgtgtggcggcagttaatttgctaaaaaaacttcgctttcctggcttcccatgtcttccctggcttccacaacaaaca

SEQ ID NO: 40357 - DNA, 282 bp, Glycine max
  unsure (1)..(282): unsure at all n locations; Clone ID: 701122695H1
gttcctccatcgcgaaattagggttcgctcacttgtcttcaatttcccaaattcaccctgcaccatccttgaatcctccaattgacacgccttttggatccatttttctccgtgaggccgtgacgcatcgcgattttgttttgggaacccgcgaaactgaatcagatagtgcggcacggaaactagganttagagcaatggcagaagatctggtgctggatactgcaatcagagactgggtgctgatccctctctctgtggttatggttctcatggggtgct

SEQ ID NO: 40358 - DNA, 287 bp, Glycine max
  unsure (1)..(287): unsure at all n locations; Clone ID: 701122701H1
gcaatggngtacgtcaaggnnnagaaatcaaaagcctacttcaagagatatcaagtcaagttcaagagaagaagagagggaaaaaccgattaccgtnccaggattcggttgattaatcaggacaagaacaaatataacactccgaaataccgatttgtggttcgctttagcaacaaggacattgttgcacaaataatatctgctagcattgccggcgatttagttcttgctacagcatattcacatgagctgccacgatatggtcttgaagtaggacttacaaatta

SEQ ID NO: 40359 - DNA, 283 bp, Glycine max
  unsure (1)..(283): unsure at all n locations; Clone ID: 701122703H1
aganaggagggtgtgtttctggtttttggaaatttcagcccccatcgaaaaacaagaagccccaacgatagtaatcatcgaaggaatttgaaaggtcgaaacttgagcatctgggatcgcgaaattggggattncggttaaaagggtataatcttcggaactgattgatggcaaaactgtacgtgaaggcggtgccaccggcggatctgaacaggaacacggattggttcacgtaccctggcgtttggaccagttacatcctcatccttttcttttcttggat

SEQ ID NO: 40360 - DNA, 281 bp, Glycine max
  unsure (1)..(281): unsure at all n locations; Clone ID: 701122705H1
ccaggccctacaagacaagaacttcgatccttcgacaatcgaagatctaatgaagctgttcgannatcgagtcctacaaggcatgggcagcagctgagcttgagcaagagaaagaggtggaagaagcagaggctggcatggaagaagctgaggagtaccttgactcagtgatggagagtgccatggatgagtttagacgctttgaagaggagctagagaggatgtcaaagaatgaaatggaaggctggttcaaactgctgagagagccagaaaaatgggaa

SEQ ID NO: 40361 - DNA, 138 bp, Glycine max
  unsure (1)..(138): unsure at all n locations; Clone ID: 701122706H1
ccacaatctttctttcttactctcaacacttcaacnaagaatatctcangatgcatgtgatgtgatcaaacaagaataacaacttctttaactgttttctcaaaaatgttctcaaagctacactcacaatactcnnna

SEQ ID NO: 40362 - DNA, 282 bp, Glycine max
  Clone ID: 701122707H1
aatctgcatcatggaaggtgttattctgagaagggtcattccttcggataacagttgcctcttcaatgctgttggctatgttatggatcatgacaaaaagaaagctgctgagttgagacaggttatagcagcaacagtagcaagtgatccacagaaatattgtgaagcatttcttgggaagccaaacacagagtattgtaactggattcttgactcagagaagtggggaggtgcaattgaactttcaatattagcagattattatggacgtgaaattgcagc

SEQ ID NO: 40363 - DNA, 282 bp, Glycine max
  Clone ID: 701122709H1
tcgaaaccatgtggcggagactcttctcttcttcaaacctcaaatccctacacacagcactctctccttctcgtccccgactcgccgcccctctcctcacccgccacgtgaccgctcattcaggtgcttcttccgtcaaaaggagggttgaagatgtcgtgccaattgctaccggccacgagcgtgaggagattcaggctgatcttgagggaagggatattcttgaaataaaccatcccgtcggcccttttggcacaaaggaagcacctgctgttgttaaat

SEQ ID NO: 40364 - DNA, 227 bp, Glycine max
  unsure (1)..(227): unsure at all n locations; Clone ID: 701122710H1
ctttgctgtcagaaagaagcaaacaactctctctctctcactaccaccaccctttatttctctntcacacacaggtaggtattctgccaaagatataaaggagcccgaagaggacactgtaaaagctttttacaaacttggtctttacacatccaacacaaccaacganntaaattagccaccacagtcacgcacgctaagccaaacctaatagtaatagtagcaag

SEQ ID NO: 40365 - DNA, 280 bp, Glycine max
  unsure (1)..(280): unsure at all n locations; Clone ID: 701122712H1
gttccttttgaaggttagaagtgctacaatacaaacaatggcagctactncaggaagatgtgaagcttttgggtattgtgggaagcccatttgtgtgcagggtccagattgcccttaagttgaagggagttgaatacaaatttttggaagaaaatttgggcaacaagagtgatttgcttctcaaatacaaccctgttcacaagaaggttccagtgtttgttcacaatgagcagcccatagcagagtctcttgtgattgttgaatacattgatgagacatg

SEQ ID NO: 40366 - DNA, 279 bp, Glycine max
  unsure (1)..(279): unsure at all n locations; Clone ID: 701122714H1
attcggagacctngcaaganttcatcaatggctgtcaaagtttatattgtgtactactccatgtatgggcatgttgagaaactagcagaagaaataaagaaaggggctcctctgtggaaggtgttgaggccaagttatggcaggtacctgagacactgctggatgaggtgcttggtaagatgagtgcaccacccaagagtgacgtaccagtcattacccccaatgaactatccgaggctgatggctttgtattcggcttcccaacaaggtttggaatga

SEQ ID NO: 40367 - DNA, 129 bp, Glycine max
  unsure (1)..(129): unsure at all n locations; Clone ID: 701122715H1
cttacgtgggaagatcgcaaccgtgaggctgccatcgccaccgctgatactccttatacaggccgaccgtgttgcttcacatgttaattgtngctgtatgtacggacactccgattccttgtacagtgg

SEQ ID NO: 40368 - DNA, 272 bp, Glycine max
  unsure (1)..(272): unsure at all n locations; Clone ID: 701122716H1
gcttttcacaaaggaggttcacagtggatggaactataaggcttcggaccaggctcattcccctcaaaagtacttccttcatttgtttatacttcaaacttcaaaccacaagatcataggtgtagctacgtacctagctagcttctctcttatttgaaggatctctctacacacacgttatgtgtgtggttgagaacttgagaggttncctgcaaaggtgaggttgagaaggatggtgtctgggcnccaggtcatggaggaagaagagagtt

SEQ ID NO: 40369 - DNA, 196 bp, Glycine max
  unsure (1)..(196): unsure at all n locations; Clone ID: 701122718H1
tntgaccaatcccaaacnncaaaacaanaaataaanatggagggggatctgaagcagaagctgttgagaagaagnnnnnnnnnnnnnnnnnnnnnnnnnnnnnngttatcattggccaagagggtgtggaatgagnngcaaggttatgtggatagtggcggcaccagccatattcacaaggttttccacacaacat

SEQ ID NO: 40370 - DNA, 280 bp, Glycine max
  unsure (1)..(280): unsure at all n locations; Clone ID: 701122719H1
gttggcataagnncatagcttgtgcnngtgnnngctcacganaagcgtgntcggatctaagtatattacagtatattacttaccaataatgggtttnaattgcggtcgtagttgcgttgccttagttagaaaaccnttatattgtgggaaaatgtggctgatgcggccacagttgcggttgcggngantcanaataccttaaacgtttcgngatccctatttanaaccatgtgaataaaccatagttgcaagagnnncaatnatgcctctnttcctgctt

SEQ ID NO: 40371 - DNA, 281 bp, Glycine max
  Clone ID: 701122720H1
gcgaattgtgaagccgctggtaaagttcaaatctcgactctgaccacttcttctgatacgatcgttacgtctatcagattctcgtttcttcatttgttgcatcgtgaaatagcaccaaatatgaggggaagaagctgcagttacagcccatcaccttcacctccaaggcgttacagccgaagaaggcacagccttagccctaggggccgatatagaggatgtgatagggatttgccaacaagtcttctggttcgaaacctcaacagagattgcaggccaga

SEQ ID NO: 40372 - DNA, 97 bp, Glycine max
  unsure (1)..(97): unsure at all n locations; Clone ID: 701122721H1
gctactaagtgagactatgatggtctataggnntccagtttcattattctcgtatcaaccnntggccattgngagatgntgtttcccanacacacat

SEQ ID NO: 40373 - DNA, 97 bp, Glycine max
  unsure (1)..(97): unsure at all n locations; Clone ID: 701122722H1
atattgatcatattgaagaaattgtccagtggatgggttggaaaccatttaagattngactacacaagtgattacttcccacaccaatcntcagcga

SEQ ID NO: 40374 - DNA, 278 bp, Glycine max
  Clone ID: 701122725H1
cttgcccacagtgagaatgaagatgttgcgaacgacaatactgcaattcgctgcgttgcaggttttgtttattctgttgggtgttggtgccgattacataccgccttcgagatttgatggcttcgtctacgggaaggggaacttgaatttgttggatacggttttgatagaagcgttttatgacccagtgtgcccagatagcagggattcctggcctccactcaaacaagctcttcatcactacgcttctcgggtttcgctccttcttcacctcctcc

SEQ ID NO: 40375 - DNA, 278 bp, Glycine max
  Clone ID: 701122726H1
gctccatccggcagtgatccagttgcaattgacttcacggggatgggaaaaggtgaggcttgggtgaatgggcaaagcatcggacgatactggcctacatatgtggcttcagatgctggttgcacggactcatgcaattatagaggaccttacagtgcatccaaatgtcgcaggaattgtggaaagccatcacagacactgtaagtgttggatatcataaaagagaagagctgaaaaatgaagataatcttgagtttatgatgtcactaagacactta

SEQ ID NO: 40376 - DNA, 274 bp, Glycine max
  Clone ID: 701122728H1
gggaattgtgggtctggggctctggtaaaagtggaagacttgggttaggaagttctgttaaccaagtggagccatcttgcattgattccttggaggcttttcaaattttacaggccgtgtctgggtttgatcataatctggttctggttgcgggctgatttcgcttcaacaaataccttgctttgggggggaaaggaaaggaaaaacagaaaagagtctcttaagtttgaacttcaagttggactgctggagtgaagtctatctctgactataa

SEQ ID NO: 40377 - DNA, 277 bp, Glycine max
  Clone ID: 701122729H1
agaaagcaagctcatcctagagttttaaaaatggcagcagcctcctccatggctctctcttccccatccttggctggcaaggccgtgaagctgggcccatcagcccccgaagtcgggagggtcagcatgaggaagaccgtcaccaagcaggcctcctccggaagcccatggtacggcccagaccgcgtcaagtacttgggcccattctctggcgagcccccgtcctacctcactggcgagttcccaggtgactacggctgggacatgctgggctttc

SEQ ID NO: 40378 - DNA, 281 bp, Glycine max
  Clone ID: 701122731H1
aaaccatggacgtgggtcagatgcagagacagtggatcgactacaccaaatccctcttcctcgagggcttcctggatggtcagtttctgcaacttcagcagcttcaggatgagaacaaccctgactttgtggtcgaagttgtctctctcttctttgaagattctgaaaggctctcaaagatctcacctttgccctagatcagaatggcgttgacttcaaaaaagttgatgctcatgtggcaccagtttaaaggtagcagttcaagcatagtgcacaaaggt

SEQ ID NO: 40379 - DNA, 270 bp, Glycine max
  unsure (1)..(270): unsure at all n locations; Clone ID: 701122734H1
gttaggagacctgagttgagtgtttcaaagacacttcaccaattatttgattcatgcagagaagctttcaaaggccctgggactgttccttcaacacaagatnnnannnnattgactcacatacttgataacatgaagccagaagatgtggggctaagtagagatctgcagttcttcaagcctggaaatattgtcaaagaanccaaagggtcacttatacaaccgtgtacaagtgtgacaatttctcactctgcatctttttcatacctg

SEQ ID NO: 40380 - DNA, 96 bp, Glycine max
  unsure (1)..(96): unsure at all n locations; Clone ID: 701122735H1
aattccccacctgacagaaaactatggtgcaacaagaactccacctgagaagcaggcaccaatgtgtactgtacnctcatttccacacaacatang

SEQ ID NO: 40381 - DNA, 277 bp, Glycine max
  Clone ID: 701122736H1
agcagatcctccatggcctccaccaaggaacgtgaaaacttcgtctacgtcgccaagctcgccgaacaagccgaacgctatgaagaaatggtggaagcaatgaagaatgtggcgaactaaacgtggaattgacggtagaggagcggaaccttctgtcggttgggtacaagaacgtggtgggtgctcgtagggcttcgtggaggattctttcctcgattgaacagaaagaagaagctaaagggaacgatgtgagcgtgaagaggataaaggagtatag

SEQ ID NO: 40382 - DNA, 278 bp, Glycine max
  unsure (1)..(278): unsure at all n locations; Clone ID: 701122739H1
gtacaggagtaccattccccagatggcaatggnggagatttcttccttttagtgccatctacatagagctgtactacatttttgccagtgtatggggccacagaatttatacgatctacagcatactcttcattgtcttcattattctgttgattgtcactgccntcatcactgtggctttgacatacttccaacttgctgctgaggatcatgaatggtggtggaggtctttcctttgtggtggatcaactggcttgttcatctacggctattgcttg

SEQ ID NO: 40383 - DNA, 275 bp, Glycine max
  unsure (1)..(275): unsure at all n locations; Clone ID: 701122740H1
caangcccttgtttcactttttccaatccgcnanggnggcagcgaccgccttgctccgctctctccgcngccgcgaccntccatcgtcttctnnctccgcntnttgtnngnttacgagtggnacaaagaggacatatgtagggaacaagtgggcangtttgtctcggccgttcagttcnaagnggctggtaatgatgtcatnagaattgatctgggtactaccannnnatgngangntgttatggagggnaagaatcccaaagtnatgagaanac

SEQ ID NO: 40384 - DNA, 277 bp, Glycine max
  Clone ID: 701122741H1
gcaaatctttgttttttgtttctgttttgtgttgtgtaatttccccctagccaccaccaatggccaacaaagagatggaagttgtgaagggtttggatttgcaaaggtacatggggcgttggtatgagatagcctctttcccttcaaggaatcagcccaaggatggtgagaacaccagagccacatacactcttaggaatgatggtactgtgcaagtgctcaacgagacttggagtaatggcaagagagggtacatacaaggaactgcttataaggt

SEQ ID NO: 40385 - DNA, 255 bp, Glycine max
  unsure (1)..(255): unsure at all n locations; Clone ID: 701122743H1
gggaaatctcggtggagctcgaataggaattgtagccaaaccttctgctgaatttgttgctggaatacttgggatttggcttagtggaggtgttgctnntccgcttgcaaccagctancccagaagtcnganctcttgtatgtgattaataattcggatgtatctgcaatactgagtactgaggancatactgaaataatgcaaagcgtancaataanagctcttctcagttttttcatcttccacacaacatac

SEQ ID NO: 40386 - DNA, 273 bp, Glycine max
  unsure (1)..(273): unsure at all n locations; Clone ID: 701122744H1
ctcttttttcatttgcagcatcaaaatgagtggtagcaacgatngtagcggcagtggagctctaggtttttgaaggtggctagtgcagctgccgctacanccgccgttgccggcggtttatatgccattctttcatcctcaacctctgctagctctgagatggaagtgccgtttggcagcgcacggcgtgagagcaaagaacgtgacgatggtggctccgggtctcatcctcgcgagggtgccaccacggtcagtcgttggaagaaacctgag

SEQ ID NO: 40387 - DNA, 277 bp, Glycine max
  Clone ID: 701122747H1
ggctgttgggaaagtccttcctgctttgaatggaaaattgactggtatggcattccgtgttcccaccgtggatgtctctgttgttgacctcacggtgaggctggagaaggaagcctcatatgatgaaattaaaaatgctatcaaggaggaatcagagggcaagttgaagggaattcttggttacactgaagatgatgtggtctccaccgactttgttggtgataacagatcaagtatttttgatgcaaaggctggaattgcattgaataagaatttg

SEQ ID NO: 40388 - DNA, 267 bp, Glycine max
  unsure (1)..(267): unsure at all n locations; Clone ID: 701122748H1
cttcgttatccttctttttttctacttgaactcgaatatncactatggcagatgaggtanttctgctagatttctgggccaagtccatttgggatgagggtcaggattgcacttgctgaaaagggtatcaaatatgagtccaaagaagaggacttgcagaacaagagcccttgctcctcaaaatgaacccggttcacaagaaaatccggttctcatccacaatggcaaacccattgtggatctctcgttgtgttcatacattgaggg

SEQ ID NO: 40389 - DNA, 275 bp, Glycine max
  Clone ID: 701122751H1
gggttagtgtgttgaatgatgctcttaagagcatgtacaatgctgagaaacgggggaagcgccaggtcatgattaggccatcctcaaaagtgattataaaattccttttggtgatgcaaaagcatgggtacattggagagtttgagtacgttgatgatcacagagctggaaaaattgttgttgaattgaatggtagactgaacaaatgtggggttattagtccgcgttttgatgttggtgtcaaagagattgaaggttggactgctaggctgctc

SEQ ID NO: 40390 - DNA, 277 bp, Glycine max
  Clone ID: 701122752H1
ccaagtgaaagtgagaaaaaataaaaatcaaagagcataatgtcagggatcattcacaagattggggagaccctttcatgtgggagggcacaagaaggaggaggagcataagggtgagcaccatgctggagaatacaaaggggagcaccatggtgaacacagtagtgagtacaaaggagagcatcatggtgaacacaaagctggagagtaccatggtgagcacaagccagagcacaaagaggggttcctagacaaagtcaaggacaagatccatggt

SEQ ID NO: 40391 - DNA, 87 bp, Glycine max
  unsure (1)..(87): unsure at all n locations; Clone ID: 701122753H1
cataaccaaacacaccacatggaaattcagccaaattcccgtttttccacccaagaggactagnngtcacntccacacaacanagcg

SEQ ID NO: 40392 - DNA, 275 bp, Glycine max
  unsure (1)..(275): unsure at all n locations; Clone ID: 701122754H1
gcgacatcnggctagggattgcagtggaggcggtgntggggacaggtacggaggaggtggtngtggtggcagatatggaggcggcggtnngcgggaggtannnnnnnnnnnnnnnnnnnnnnnnnnnnnnnnnnnnnnnctacagctgtggagagtctgggcattttgccagagattgcccatcaagtgctcgttgaatttactgttagggttgtttatgttttgcggattgttttaagtttttactttaatatgtcttagggattttaatggtt

SEQ ID NO: 40393 - DNA, 255 bp, Glycine max
  unsure (1)..(255): unsure at all n locations; Clone ID: 701122755H1
ggcaaatgtgggctgctggatggacaaacagccatgtctcaaattggaccccaattcatatggtggctagctgctcaaagtgtattctatcatctatacaatcaagtgtcatacatgtctctggatcagatctctcctttgacgtttagcattggaaacaccatgaaacgtatatctgtcattgtgtcttccattattatcttccacacancanagnnnnnaacnatgctcttggtgccgncatgctatccttgg

SEQ ID NO: 40394 - DNA, 277 bp, Glycine max
  Clone ID: 701122756H1
cctccatcagcccttgaccgtctagcatctctgcatattgattacccaatgttgtttgaactccgtaatgatgctgccgagcgggtttctcattgtggggttctggagttcattgctgaggaaggcatgatatacatgccatactggatgatggagaacatgcttttacaagagggggacattgttaaagtgaaaaatgtgacacttccaaaggggacatatgttaagttacagcctcacacaaaagacttcttggatatttccaatccaaaagcta

SEQ ID NO: 40395 - DNA, 273 bp, Glycine max
  unsure (1)..(273): unsure at all n locations; Clone ID: 701122758H1
ataaaaaatnggtgggggaggagctatgaggtcggcggcgaagatagccggaattggcgtgtccaaggcggcgctccggccttcggcgctccctacggagcagacggtccgcaacgctcgcgaccaacggcggtctccggagtgtcgtcgcagtcggcgaaatccgcggaggtggcgccgntgcacacggcagctgcctgggacgattgggacttcgccgaggatggcganttngtcgtgccgaggatggtgttcggttctgtccccactctc

SEQ ID NO: 40396 - DNA, 272 bp, Glycine max
  unsure (1)..(272): unsure at all n locations; Clone ID: 701122759H1
attgacctcaactttctcgacaagaggctctctgtcggtgttctctcccttccctttggtgtcgtgtcttccaaatggcgaangtttgattcctctgttcaatcgggttttggtggagaaaatcgtgcctccatcgaagaccaccgctggcattttgttacccgagaaatccaccaagctgaattccggaaaagttattgctgttggccctggctttcacagtaaggatgggaagctaattcctgtggctgtaaaggaaggtgacactgttc

SEQ ID NO: 40397 - DNA, 272 bp, Glycine max
  Clone ID: 701122760H1
ccagtggttgatactgctaaatttcctgatagccttagaaacatgttcaatagcttccaattcaaggagaacttaatctattttcagcaacttctcggggaaggagtctttaacatctctttgttgggggcaaaacctgaagaatggaagacattagaaaggcttgcattatctaatctgtcaaagtcgaaatgggtagaacactataattttcttaagaaatgtgaaaacaaatctggaaaatctattggtttgggttctactgctatgga

SEQ ID NO: 40398 - DNA, 273 bp, Glycine max
  Clone ID: 701122761H1
aacgtctcctccgctgccttggtgggagacaacgcttcggccacgaccactttgccaattgactcaggtcgatacaatcctcagtttctaatcttcatttttctcagattttagattttccaatgcgtttgaatcccttttcgatcattttcagatgctagaatcggagaggttaaaagggtcaccaaggagaccaatgtatcagtcaaaataaacttggatggttctggggtggctgatagtagtactggaattcccttcctcgatcatatg

SEQ ID NO: 40399 - DNA, 191 bp, Glycine max
  unsure (1)..(191): unsure at all n locations; Clone ID: 701122763H1
ggagcactctcttcaaggnagntttcttgaattacgnatctctttgctcagcaatttctggatgcactgcagttttccatcntgngngccctgnaccctcaattattgntcccagcccgcaggtagaaacgatnnaagcctgctgtgaaaggaaccacnaanaactggtatggttntncaaggcagaggna

SEQ ID NO: 40400 - DNA, 275 bp, Glycine max
  unsure (1)..(275): unsure at all n locations; Clone ID: 701122765H1
ggggcttgaaccaaccccttgttttattcgtagtcattgagctgtggcattgtttgtgtgtattagcagtgtttggttcgtactatgaagaggactatgccatggagtgatgacgatgagtcatcgtcttcacattcagattctgaatgtgatagtgaaactggagggggaaattccaaaggtaaatctagaaagcagacaactaagaaaagtggtctaattgactttgaagctctgaagcgacacggttatagaggtggaccttcagtnntaaa

SEQ ID NO: 40401 - DNA, 166 bp, Glycine max
  unsure (1)..(166): unsure at all n locations; Clone ID: 701122767H1
aaaggggttagggtttgttcttgtgatcgaagctaagcgaanaaaatgggtggatcagtgagggacgtgaagtcgaagggcgaggtcgacgaggtggtggcgagtggctctccggttatcctctncttctgngcgtcctggtgcgaactttccaagcacatggacc

SEQ ID NO: 40402 - DNA, 276 bp, Glycine max
  unsure (1)..(276): unsure at all n locations; Clone ID: 701122768H1
tanggngcaggngcttgctgaatcgangttaattgctctcacccactctcagcttctgcttctaaatctntcnctgcaacggttctgtgaaatcaaaatccgcggcagttcagcattctagggtgatantttcatggatggagatggtagcagtgaaagcccaatcgaaactaagnnaagccaagtcanaaacccctcgaaaacctnaagaaaccattctgaagcaaaaatcccctgccgaattcttcgcaganaataagatnntgcaggatttgt

SEQ ID NO: 40403 - DNA, 167 bp, Glycine max
  unsure (1)..(167): unsure at all n locations; Clone ID: 701122769H1
agagatggcaaatgaacnacccgncaaagcntttngttgggctgcttcagacacttctngcaccctngccccttttcatttctccagaagggaaaatggcgtcgatgacgtcactctcaagantctcttctgcggggtttgccactctgatctccacacaacanang

SEQ ID NO: 40404 - DNA, 273 bp, Glycine max
  Clone ID: 701122770H1
aaagatcaaaattcctcctaagataccacatactgttgcagatttgactggagagctaatgcgtttagcaataggtaggatatatcagatggtgaacttgagtttgctgagaagatatgcagatttgtgcgtgatatatatacagggagcttacacttgtagtgccacatctggatgtcagttctgatatgaaaacaaagatggatatgatgctccaaagtgtcatgaaaatagagaatgcttgctttggtgttcatgtgaaagggtcagagt

SEQ ID NO: 40405 - DNA, 273 bp, Glycine max
  Clone ID: 701122771H1
ctttttggggaaagctattgaaggcatatggcacacaggagttgtggtttatggtaatgagtattactttggtggtggcatacaacattctcctgctggattaacaccatatggaactccacttagagtggtagacttaggtgtgacacatgttcccaaggatgttttcgaaatgtatttacaggaaatcagtccgcgatacctgcctgaaacatatagtctgcttactcacaattgcaacaacttcagcaatgaggttgctcaatttttggt

SEQ ID NO: 40406 - DNA, 182 bp, Glycine max
  unsure (1)..(182): unsure at all n locations; Clone ID: 701122772H1
atttagaccatcctttatcttccatgatgcaaatgggnncntgtttatnggacncccatncanctgaaggnngaatggatggtnnnngcaaattggcccgggtgtgaatgagggctacaggttctaatatattttaactgggatccttagatggtcctctggagtcccaatttgtattgttc

SEQ ID NO: 40407 - DNA, 272 bp, Glycine max
  unsure (1)..(272): unsure at all n locations; Clone ID: 701122773H1
gcacccattgtcaagcttggngatgcctcaatggcatctccattcactgctaagcatgcatctgttgctcccaccactgatataattcgtcaaggtaggagtaccctagtgacaaccctccagatgtttaaaattctgggtctcaattgtcttgctactgcatatgtgttgagtgttatgtatctagatggtgtcaagctaggtgacatacaagccacaataagtggtgtcttcactgctgcatttttcctctttatctcacatgcacgccc

SEQ ID NO: 40408 - DNA, 253 bp, Glycine max
  Clone ID: 701122774H1
caggcgcagttacctgttctgttattgagtcaaagggtgtgagtgagtgtgagcaagatgggttctttggcaaagaagggactcaacaattacgtcaaacagctccagcaacaccctttgagaaccaaggtaatcactgcaggggtactatcagcgatcagcgatgttgtgtctcagaaacttactgggatacagaaacttcaactcaaacgtcttcttttcaaagtgattttcggagctgcttatcttggac

SEQ ID NO: 40409 - DNA, 271 bp, Glycine max
  unsure (1)..(271): unsure at all n locations; Clone ID: 701122775H1
aacttcacctagtattttcgtttctgaacccaattaattaagcacacaaggaccataacatacctatannctcaatatcacaagtcttatggaggcagngcgngacaagtacaagatgatcaactttgaagaaaccgagttacgactcggcctgccactcagtggaaacgagacgctcaaaaacacttgcagcactgggaagagggttttttcggatactgccgtggatttgaagctaacctttcctcaacctcaaatagtgcttcttctg

SEQ ID NO: 40410 - DNA, 272 bp, Glycine max
  unsure (1)..(272): unsure at all n locations; Clone ID: 701122776H1
aaatggtncagaangcgaagggtaggaaggaggaggtggttaccagagagtacaccattaacctccacaagcgcctccatgncctgcacatttaagaagaaagctcctaaagctattaaggagataaggaaatttgcccaaaaggccatggggaccaatgatgtgagggtggatgtgaagttgaacaagtttgtctggagccagggaatcaggagtgttccaaggaggattagggtaagaattgctcgcaagaggaatgacgatgaagatgc

SEQ ID NO: 40411 - DNA, 275 bp, Glycine max
  Clone ID: 701122779H1
gcctgcaatcatggtcaagggaaaagatgaattttctaaccattttacatcatcttttgatggaaatgcaagcttattgattgacaaggcacaacaggaaaaggctaatagtcatatgcagcctattggtggaccaaagctctctagctcaagcaagaaaagaacaagagttggtaacaaccaaaagtcaaggccaagagatagacagctgatcatggacaggatgaaggagttgagagaacttgtcccagaaggtggtaggtgtagtattgaca

SEQ ID NO: 40412 - DNA, 285 bp, Glycine max
  Clone ID: 701122780H1
ctccgtaccagtttcactgcataaatttgagagaaaactctgcaaacatgttggtttatcaggacctccttacaggtgatgagcttctctcggactccttccgttacaatgaaattgagaatggaatgctgtgggaagttgaggggaagtgggttgttaagggagcagttgatgttgacattggtgcaaacccttctgctgagggtggagaagatgagggagtcgatgacgcagctgttaaggtgttgacatgttgatacattcagacttcaggagcaaccgctt

SEQ ID NO: 40413 - DNA, 272 bp, Glycine max
  unsure (1)..(272): unsure at all n locations; Clone ID: 701122781H1
aaggcgtgcacgtgangccttcaagaatattnagcttggaattgatcatatatnntttaagactccatgtnatngaataaanatggaagantcntatgagaagaactcaaagggcctagnaatcttctgcaanagttggcttccgagtgcatctnagncaaaagcagcagtgtgttactgtcatggntatggagacacttgntcctttttctttganggnattgctagaaagctggcatcatctggatatgcagtttttgccatggattatc

SEQ ID NO: 40414 - DNA, 65 bp, Glycine max
  unsure (1)..(65): unsure at all n locations; Clone ID: 701122783H1
gcaaggattatctaatcatactttctctccttctttccacanaacanacgagccccngnnctncg

SEQ ID NO: 40415 - DNA, 273 bp, Glycine max
  Clone ID: 701122784H1
aaaagattaaaagaatttattatatgcaaaatcaatatcaatacaacatacagaaacaacctatttcatgtcgacgcagtagccataaccaattgttctgtacattaaattacaagcacaacaacagcatctgctgtttacccaacaaatggtgacatgcactgacaagtgaacctttacaaacacaactctctctcaaaagtttctcaaatccttcccatgacctttatactaacatagctgactaaacaacaaaaagagaaccctagtgca

SEQ ID NO: 40416 - DNA, 271 bp, Glycine max
  unsure (1)..(271): unsure at all n locations; Clone ID: 701122787H1
gcctccctctctcgtctctgtggctgtgatttacagcaacagcagcattgcccatgtctccttcattcctttccctctcttgtttcctccgccccttctcaataagaataactaaccnnnnnnnnnnnnnnnnnnnnntctcattcacacataaatctcaatgtctctctccgtaccaaagttggctcggcctcttcctctccatcatcacagttcttatggcagcctcaccatgtctttccacacattcactnntntgnanggatccact

SEQ ID NO: 40417 - DNA, 273 bp, Glycine max
  unsure (1)..(273): unsure at all n locations; Clone ID: 701122788H1
atgaaaatgaaggtccttgttttcttcgttgctacaattttngtagcatggcaatgccatgcgtacgatatgttccctctctgaatgaacactggctatggtgcccgtactccggaggtgaaatgcgcaagttggangcttgctgtggaagcacacaacatctttggctttgagaccattcctgaagagtgcgttgaagcaacaaaggaatacatccatggcgaacaatatagatcagactccaaaacagttaaccaacaagcttacttttat

SEQ ID NO: 40418 - DNA, 268 bp, Glycine max
  Clone ID: 701122789H1
tctcatccgaatctggattgcttctgtagtgggagcactgctgtgactatagtgaagcagggttcaaatctgttcatgggctatatcggggattctcgagcaatcatgggatccaaggatagcaatgactccatggtggctattcagttgactgttgatttaaagcctgatttgccaagggaagcagagagaattaagaagtgcagaggtagggtatttgctttgcaagatgagcctgaagtgcctagggtgtggttgccttttgatg

SEQ ID NO: 40419 - DNA, 262 bp, Glycine max
  unsure (1)..(262): unsure at all n locations; Clone ID: 701122790H1
aattttttttttttttgcaaatttggagagactattttatttnaaagtacatacctgctaattgctaactccagtgccaaaattgnaattctgatatngactacaagccacaaggaccttcataagtgctgcagttgcncattctttattctacaattttactgctgtctgaagttgtcccattttaggaagactntgtgcttatagtatnccatttatagngaaatgcaatcaggngaaaagncctggggtattgaaaggg

SEQ ID NO: 40420 - DNA, 268 bp, Glycine max
  unsure (1)..(268): unsure at all n locations; Clone ID: 701122792H1
cttcaacttnnacccattcatacgtggngttgttactgctgctcttttctcttttcttttctctttagttctctcttcccctnnnnnnnnnnnnnnnnnnnnnnnnngagcttgtttaagcttttcttccattaacatattatcataatgtgtggtattcntgcngtnacttggtngttctgatgactctcgagccaaaagggtccgcgtgcntganctctctcgcagattgaagcaccgtggccctgactggagtgggctccatcaa

SEQ ID NO: 40421 - DNA, 272 bp, Glycine max
  unsure (1)..(272): unsure at all n locations; Clone ID: 701122793H1
atcacgaggcgacnacatcgacatggagggtctcatcaacggctaccatcanccgttgctctcggagctgatggtggcgatcgggaagaacaacaacacgggaganacgaccgtagtagaagctcctgggctgaagtcgtctcccaggatcaacaagatcaccctcttcctcatcaccaacanaangaggaacagtgccaagattatagttacagacacaggccccataagctcaatctcattcacttctcctctacctctaatgaacaata

SEQ ID NO: 40422 - DNA, 271 bp, Glycine max
  unsure (1)..(271): unsure at all n locations; Clone ID: 701122794H1
caacacgatcactatttctgcnacgatggtggcacattcgagttcttggggcagggcactcgtggccatctcgccctataccttctctgccatcggnatcgccgtcgctatcggcgtctccgttctcggcgccgcctgggggatctacatcaccggtagtagcttgatcggcgctgcaatcaggncctcctcgaatcacttccaaaaatctcattaggttgtgtgtaggaataattggaagcagctgtgcattgtctgatgcccagaactc

SEQ ID NO: 40423 - DNA, 277 bp, Glycine max
  unsure (1)..(277): unsure at all n locations; Clone ID: 701122795H1
gntttgactcatggattctgatcgccccagaaaaccttccaaaaatttagttcactctcgcttcttccttttcggcttctattgctgggattgggagttcttaaccgctctcctcctttttagttgttccccttaatcttgttccttcatatttttatttttttttcttattagatcagattgaacaaaagggttgctcttattttttaatcttgggggaataatagaaatagaaataagaaaagattagtgaggttgaaatgttgcaacaacgatc

SEQ ID NO: 40424 - DNA, 288 bp, Glycine max
  unsure (1)..(288): unsure at all n locations; Clone ID: 701122796H1
gganaggaagcaaggtgcgatngnaacttgacaaaagaactgganntattatggttgatcgtatacttncactcatcagacgtttatccgcacaactatgggggcattccacgtaccanttgtgnaggacggtgatcccatggatgtcntgggnattatgcaggagccagttctnccgggtgctttcttcgggccaagcnanaaggcccangccangattganccggggggngaagnaggcnagagaatgccggccgtgccgtgatccgngnanaggnantacaaaga

SEQ ID NO: 40425 - DNA, 295 bp, Glycine max
  unsure (1)..(295): unsure at all n locations; Clone ID: 701122801H1
ataaaaatcaaagagcataatgtcagggatcattcacaagattggggagacccttcatgtntcgagggcacaagaaggaggaggagcataagggtgagcaccatgctggagaatacaaaggggagcaccatggtgaacacagtagtgagtacaaaggagagcatcatggtgaacacaaagctggagagtaccatggtgagcacaagccagagcacaaagaggggttcctagacaaagtcaaggacaagattccatggtganggcggcgccgccgagggcgagaagaagaagaagg

SEQ ID NO: 40426 - DNA, 285 bp, Glycine max
  unsure (1)..(285): unsure at all n locations; Clone ID: 701122802H1
gccaccagccatgggtcgtatgcacagccgcggtaagggtatatcctcttctgctttgccctacaaaaggacacctcctagctggctcaagatcncttcgcaagatgtcgaagaaaatatctgcaagtttgcgaagaaaggtttgaccccgtctcagattggtgtcattctcagagattctcacggtattgctcaggtcaatagcgtcactggcagcaaaatccttcgcatcctcaaagctcacggacttgcgcctgaaattccagaggacctgtaccattgatt

SEQ ID NO: 40427 - DNA, 266 bp, Glycine max
  unsure (1)..(266): unsure at all n locations; Clone ID: 701122804H1
cggntcnagcggntcnattgcagttggggaagggtctacttgaacaagagtgtanttgcagacncacagatatattaatagtcttgtagatctgttggctttttcaggatgggcaagtgcaagggttgtggaaagttaggaagaatgaggccaagtcatatgagcgcgtatgaattttctctgatgctggcncctgttgtttctgtttgggatgcnagttcgcaaaatgaggtactctacaganctgagtgggtgtagtggttcac

SEQ ID NO: 40428 - DNA, 273 bp, Glycine max
  unsure (1)..(273): unsure at all n locations; Clone ID: 701122805H1
accgtctcctacaacgccctccgctcttccatcttctaccgccaaaactaanatctnccgagtctcagctacgctcccttcaggcaggacaccaggtcccagaccacactcaatgcnaccctcaccgccgcnggcacctaacctcgagnccaaantgatcgacaatntcaacgccgagaggaacggcnaggtcggtctcttcgangttcaggtcgtcgnnggccagctctttccgtccggctcgtggaggttcaggaagagggttctcaagtt

SEQ ID NO: 40429 - DNA, 274 bp, Glycine max
  unsure (1)..(274): unsure at all n locations; Clone ID: 701122808H1
tcctctttcttgccggcngtggttcttcttattaggattctgnagtagtattagncattaacataaccatngnaganagnanctttctaaagttctcnattagaggnttctgttccttttttgttcttcttctttngnanttgttnngtttggtnagggctaacntgttgagcnttaagangggtcctactgtggttcaaattatcaaaaagaagagacacgggaggcngctgtgcccgttgatgttggcgtaactncctcaaaagtggtgcnt

SEQ ID NO: 40430 - DNA, 278 bp, Glycine max
  unsure (1)..(278): unsure at all n locations; Clone ID: 701122809H1
tnaaaagatgtctcgcgtgtatgttggtaacttggattcacgagtcaccgagagagatctcgaagacgaattccgcgttttcggagttattcggagtgtttgggttgcacgtagaccacctggtnatgcttttattgactttgatgaccgcagagacgcacaggatgctatccgtgaattggatggcaagaatggttggagggttgagctttctcacaactctagaggtggaggtggtggtcgtggtggtcgctctggtggttctgattgaaatgtta

SEQ ID NO: 40431 - DNA, 130 bp, Glycine max
  unsure (1)..(130): unsure at all n locations; Clone ID: 701122810H1
angctntcaaacacactctgctgttttccnaaaccctaatttctngaaaggtagggttttgcagagcctcgtcctcctctcacggtttcttctttttatcttctncacctttcttcttccacacaacata

SEQ ID NO: 40432 - DNA, 281 bp, Glycine max
  unsure (1)..(281): unsure at all n locations; Clone ID: 701122812H1
aatcctgccaacacctacatncgacctgaatattggaattgctttatggcttgctgctggtggtgatggatggntatctgatgcaaatacatatgataatgatggcaatcatgtacgaattaaatataagtcaaatgcgaagattctccttgttggttctggtgccgatgagcagtgtgctgggtatgggagacatagaacaagttatagacgtggaagttggctggggttacatgaggaaatgagactcgacatgcaaagaatttggagaagaaatttag

SEQ ID NO: 40433 - DNA, 273 bp, Glycine max
  unsure (1)..(273): unsure at all n locations; Clone ID: 701122813H1
gcatttttgaggtgccgctgtcatgtttgggcgtggtggaccaaggaggagtantaactccaaatattatgatattctcgggatttccaaaaatgccagtnaancatgaaatcaagaaggcctatagaaaggcggctatgaagaaccatccagataagggaggagatcctgaaaagtttaaggagttaggtcaagcatatgaagttttaagtgatcctgagaagaaagaactgtatgaccagtatggtgaagatgccctaaagaagggatggg

SEQ ID NO: 40434 - DNA, 286 bp, Glycine max
  unsure (1)..(286): unsure at all n locations; Clone ID: 701122814H1
cgcaaacgcaaacgcaaacgcaaacgcagagcgtgatccattgacgaagatggtgcagcgtctcacctaccgcaagcngcacagctatgccaccaagtccaaccaacacagggtcgtcaaaacccctggtgggaagctcgtttatcagactaccaagaagagggccagcggacccaagtgccccgtcactggcaagaggattcaggggattccacacttgaggcctgcngagtacaagaggtcaaggttacccagaaaccgtaggactgtcaaccgtgcatatggt

SEQ ID NO: 40435 - DNA, 284 bp, Glycine max
  unsure (1)..(284): unsure at all n locations; Clone ID: 701122815H1
ggaggcgcagagtagagcagcagagaagagagaaaacggcactgcagccgtagaaggaaaaccgaccatggtgcacgtctccttttacaggaactatggtaagacgtttaagangccccgccgtccgtacgagaaggagcgtctagacgcggactgaagctggtgggggagtacgggctgcggtgcaagagggagctgtggagggtgcagtacgcgctcagccgcatccgcaacaacgcgcggaatctccttaccctcgacgagaagaacccgcgccggatttc

SEQ ID NO: 40436 - DNA, 246 bp, Glycine max
  unsure (1)..(246): unsure at all n locations; Clone ID: 701122817H1
gagtccttcttctncttcgtccngccaacatgagcnctcncgttcagggtttctccaagtcantggccatgancattctctctgagatcggtgacaaaacgttttttgcagctgcgatactggctatgcgacaccctagacgcctagtcttatcaggttgcttatcggctttgatgtgatgaccatctctctgctctgttggctgggcagctccaaatctgatctctcgcacaggactcatcacat

SEQ ID NO: 40437 - DNA, 278 bp, Glycine max
  unsure (1)..(278): unsure at all n locations; Clone ID: 701122818H1
ggaggagaggcttccataatggtaaccaagnnngacangccatcaaagtacggcgnggttgtgatggaagagagcacagggcaggttgatancantgtngaaaaaccgaaattgtttgttggnaacaaaatgcaatgctggaatttacctgctgaacccctctgttatggatcgaattgaactgaggncnacttctatcgngaaagaggngnttccaaagattgcttccgagaaaaagctatatgcaatggtctncgccagntttggatggacatgga

SEQ ID NO: 40438 - DNA, 278 bp, Glycine max
  unsure (1)..(278): unsure at all n locations; Clone ID: 701122820H1
ggaaaagctcttccatgactgctatanccttcctgtttatccttctaatcacttatacaggncacaacagatgcacaatcccggggtatgttatggaagacttggcaacaacttaccaacccctcaagaagttgtggccctctacaatcaagccaacattcgcaggatgcgaatctacggtccaagcccagaagtcctcgaagcactaagaggttccaacattgagcttttgctagacattccaaatgacaacctcagnaacctagcatctagccaag

SEQ ID NO: 40439 - DNA, 272 bp, Glycine max
  unsure (1)..(272): unsure at all n locations; Clone ID: 701122822H1
ctgagttgcaagctaacatgggtgagatagctttaccaaatggcattagcaatggcaatattaatggagtcaatggacaaagccattctcttantggttacaggaagagttgttggtatgaagaagagattgaagaggacttaagatggtgcttncntctcaatagtatattgcatacaggagctagccagtaccaagacattgcattgttggacacaaagcccttggaaaggcttggtaattgatggaaagcttcagagtgcagagacaga

SEQ ID NO: 40440 - DNA, 275 bp, Glycine max
  unsure (1)..(275): unsure at all n locations; Clone ID: 701122823H1
gtgggggagggggcagagactgatatatggtatggtcgtctctgagtctgaagatctgtgagttaattgcttttgcnnnnnnnnnnnnnnnnnnnnnnnnntgacggttgtggngattcgatgggggccaccgttcactcgccgctagtcacttatgcttccgtcatatctctgcttacactnctgtcctccgtttgtcatacttctatggtacaccatgactcttggctgacggatctgtttccgagacattccattatttaaggcagaatggg

SEQ ID NO: 40441 - DNA, 90 bp, Glycine max
  unsure (1)..(90): unsure at all n locations; Clone ID: 701122825H1
atggcgtccaacgattccgattcgcagatgnagattcgtacatggcgatgctggttacatancttgaagacgttccacacaacatagnga

SEQ ID NO: 40442 - DNA, 277 bp, Glycine max
  Clone ID: 701122826H1
ccaggagatcccttcacttcaactggagtacctaaccaactttattgccgaattatctctcttggagtacagtatgttgagttatcctccatcactgatagctgcttctgtaattttccttgccagatttatacttttcccttcaaagaaaccatggaattctacattgcagcattacacgctctaccggccttctgacttgtgtgcatgtgtaaaagatctccatcgtctttgttgcagcagccatgattctaatttacctgcaatcagagataaa

SEQ ID NO: 40443 - DNA, 280 bp, Glycine max
  Clone ID: 701122829H1
cgatttcaccatcttcctcttctgtctcccccaaagacaaatgcggctaatgtggccgaaattgtggtcatgccgattccaaaaaccttgatgtcgcgattaggatggattggcaagggcaaaagctggcggagcaactgatgcagataatgctgcttgcatttgctgtgattgcatttgtaggtggatatgtcatggcttctttccaaatgatgattctcatatatgctgggggtgtggttttcaccaccttgctcactgtccccaattggcccctttt

SEQ ID NO: 40444 - DNA, 284 bp, Glycine max
  Clone ID: 701122833H1
atgactgatgtgccttttggtgttctactctctggaggtttggactcttctttggttgcatccatcacttctcgttacttggccaacacaaaggctgctgagcagtggggatcaaagttacattcattctgtgtaggccttgagggctcaccagatttgaaggctgcaaaagaggttgctgactatctaggcactgtccaccatgagtttaccttcactgttcaggatggaatagatgccattgaagatgttatctaccatattgaaacatatgatgtgactac

SEQ ID NO: 40445 - DNA, 280 bp, Glycine max
  Clone ID: 701122834H1
ggacgactgcgccgacagtggaatccctctccccaatgtcaccagcaagattctggcgaaggttatcgagtactgcaagaagcacgttgaggcgaacagtgctgatgagaagcccagtgaggatgtgctcaaggcttgggacgtggatttcgtcaacgttgatcaggccactctcttcgatctcattctggctgcaaactacttgaacatcaagagccttttggaccttacttgccagacagtagcagacatgatcaagggaaagactcctgaggaaatt

SEQ ID NO: 40446 - DNA, 248 bp, Glycine max
  unsure (1)..(248): unsure at all n locations; Clone ID: 701122835H1
gttcaaaccggagcaaaaaaacttgttacnctggtttcanaccgacaaggatccacgagaggaagtncttcaagcatggtacatggatgatagtgatgaatcatcaaagactcccccaccacaaagaacccaaggagtttgtctcgttggaccaacttgctgaacttggagtccttagctggaaattagatgctgataaccatgaaaatgatccagagctgaaaaagattcgtgaagagcgtggctac

SEQ ID NO: 40447 - DNA, 274 bp, Glycine max
  Clone ID: 701122836H1
ctcttgtcaaaagtgctatcgttcaggttgatgctgctccattcaaacagtggtatcttcagcactatggtgttgagattggtaggaaaaagaagacagctgccaagaaggaaactgcagaggagggtggtgatgctgctgcagctgcagaagaagccaaaaagagtaaccatgtgcagagaaaattggagaagcgccagaaagatcgaaagcttgatgctcacattgaggagcagtttggtggtgggcgtttgcttgcttgcatttcctctag

SEQ ID NO: 40448 - DNA, 272 bp, Glycine max
  unsure (1)..(272): unsure at all n locations; Clone ID: 701122838H1
caatgtgtggcttgtccattggaaaatggactacttggttggagcaacaattgcactgccaaggctgtgacatcatgcaaggctagtgatttccactactacaaaattgaaggagttgagcattacatgagcaaatacactacaggggatagnctgagtgagagtacttgtggaaacaaatgcaccaaggattgcaagtgtgtgggttatttctaccacaaggagaattcaaggtgttgggtagctatgatcttcaaacccttactagaggg

SEQ ID NO: 40449 - DNA, 273 bp, Glycine max
  unsure (1)..(273): unsure at all n locations; Clone ID: 701122840H1
ccgnaagcgcaaganaagagctttcgatcnctgtaancgggttcgnacgnnttagggatctncttcggagacaattgcggatgaanccggaggcacaacggcggcgccggcnaacggtgaattcgctgcttncacaagattgccgagaagattcacgggccaccacgantcttcctctncctccgattncgattcggagaaaaaggaaacttcgtcaattnaggaaaaagtttccgcctcttgggaaggagaagccatttcatccgtcncggg

SEQ ID NO: 40450 - DNA, 275 bp, Glycine max
  unsure (1)..(275): unsure at all n locations; Clone ID: 701122841H1
gattaagccatgcatgtgtaagtatgaacgattttgaagaacgaggtatgctgtggatgtctacacacgaggttcagggtaatttggttggtgggccttaaaatgtgagagtttggcaggttttttctctcctaataatgatgaatcaaacatgtatgagtgaggggaagccacaatcattcttattgtacccgtctttttttttttcctattcatcttttgtttttcaaacattcagtatacaaattcggttgncttttcctttgtacagtttg

SEQ ID NO: 40451 - DNA, 66 bp, Glycine max
  unsure (1)..(66): unsure at all n locations; Clone ID: 701122843H1
aattccccacctgacagaaaactatggtgcatcanngaganncacctgagaagcaggcaccaatgt

SEQ ID NO: 40452 - DNA, 275 bp, Glycine max
  unsure (1)..(275): unsure at all n locations; Clone ID: 701122844H1
gaaatttcnaatctgcaaatatattactcgatgaggagcttcaatcctcacctgtctgactgcggtttagctgctttgacaccaaacactgagngacaggtatcaactcagatggtcggttcattcggttatagtgctcctgagtttgcattatcaggagtatacactgtaaaaagtgatgtttacagctttggggtggttatgctggaactattgactggtcggaagccacttgacagtttgcgggttcgatcggatcagtcactgtgaggtgg

SEQ ID NO: 40453 - DNA, 278 bp, Glycine max
  Clone ID: 701122846H1
cctagcagttcaatagatggtaagacatctgaaacaagcatggagtttggaaatggtgaattcagctcagaggagctaaagaaaataaaggagaacgataaacttgctgaaattgccatggccgatcctaagcgtgctaaaaggattttggctaatcgtctatcagctgctcgctcaaaagagaggaagatgcggtacatttctgaattagagctcaaagtacaaacacttcagacagagacaaccacttgtctactcagtttaccaattacagatgg

SEQ ID NO: 40454 - DNA, 282 bp, Glycine max
  Clone ID: 701122847H1
gctatatattatggctagcatgaaggttacatgggtggttgtgatcatgtgcatggccgtggtgggtgcaccgatgatggcgcaagccatgacatgcaatgatgtgacggtgaacatggcacagtgcctatcctacctgatgcagggaggaacaccttcaacactttgctgcagcggagtcaagaacattcttggctctgctgttcaccaccgttgacaaacaaactgtgtgcaactgtctcaaggcggatgctgctaggtacaacatcaatgaccagtatg

SEQ ID NO: 40455 - DNA, 144 bp, Glycine max
  unsure (1)..(144): unsure at all n locations; Clone ID: 701122848H1
gttagggtgagttgcaggcagtgtcatctctcctttgacgacaagatgagcatcccaattccccatcggcagttattcatagacggagactggaaagtccccgtcctcaagaatcggattcccatcntcaacccttccacacaa

SEQ ID NO: 40456 - DNA, 271 bp, Glycine max
  Clone ID: 701122851H1
ccaattttctagggtttatacaattttcgatggcttcttcagatgttgagtaccgttgctttgtcggtgggctcgcttgggccactgacgaccaagctctcgagagagccttctctcagtacggcgaaatcgttgaaacgaagattatcaacgatcgtgagactggaagatccaggggttttggatttgtgaccttcgcctcggagcagtccatgaaagacgccatcgaagggatgaacggccaaaaccttgacggccgtaacatcactgt

SEQ ID NO: 40457 - DNA, 83 bp, Glycine max
  unsure (1)..(83): unsure at all n locations; Clone ID: 701122852H1
attgagcancgcctcttttctgcttngaaatctacactgccaatcaaaacnataatactcctttccacacaacatannacana

SEQ ID NO: 40458 - DNA, 79 bp, Glycine max
  unsure (1)..(79): unsure at all n locations; Clone ID: 701122854H1
cggagnnaatccaaacggcgtcgccgatnnngcggcggttccgacgcatggcggacagtncattcnncacaacataana

SEQ ID NO: 40459 - DNA, 269 bp, Glycine max
  unsure (1)..(269): unsure at all n locations; Clone ID: 701122855H1
aggggaangagcaggatgtgtcgttgggagcgaacaagttccccgagagacagccaattgggacggcggcgcagagccaagacgacggcaaggactaccaggagccggcgccggcgccgctggttgacccgacggagtttacgtcatggtcgttttacagagcagggatagcagagtttgtggccacttttctgtttctctacatcactgtcttaaccgttatgggagtcgccggggctaagtctaagtgtagtaccgttgggattcaa

SEQ ID NO: 40460 - DNA, 243 bp, Glycine max
  unsure (1)..(243): unsure at all n locations; Clone ID: 701122856H1
ggatcagcncatccaagctaaggtctatcttncccttccagttgtaaaatccanncccatccctcantcgggagcttcgattacgggtaaaagaagtttcacgaacacttggggaagcaatcaaagattctnctttacctaggaatgcaaatgagagaatgagggcatggagcagacactgatgaanggnaagcaagctcaagatgangtgctgctgttgtgaagaagcttagggcatgctcc

SEQ ID NO: 40461 - DNA, 273 bp, Glycine max
  unsure (1)..(273): unsure at all n locations; Clone ID: 701122857H1
cttttattcgcaccgcaaacagtgagccatggccgtcggaaagaanaagcgcatctccaaggggaagaagggtggcaagaagaanccagctgatccctttgccaagaaggattggtatgacattaaggctccttctgtttttcaagtgaaaaatgttggcaaaaccctcgtctctcgtactcagggtaccaagattgcttctgaaggactcaagcatagagtgtttgaggtctcctggctgatcttcaaggggatgaggatcatgcattcaag

SEQ ID NO: 40462 - DNA, 274 bp, Glycine max
  unsure (1)..(274): unsure at all n locations; Clone ID: 701122860H1
cgactctggattccgacgtgcctatggttcccgccggcnagccctcgagcagcgccggtcctttcttccaagaagcccaagcgcttcgagatcaagaagtggaacgccgtcgctctctgggcttgggacatcgttgtcgataactgtgctatctgccggaaccacatcatggatctctgcatcgagtnccaagccaaccaggctagcgccactagcgaggaatgcactgtggcatggggagtctgtaaccatgcttttcattccatgcattagt

SEQ ID NO: 40463 - DNA, 282 bp, Glycine max
  unsure (1)..(282): unsure at all n locations; Clone ID: 701122864H1
gaaaaaatgggttcttcttcttctatgtgtnacggtgtgtgtgattttggcatcactggcctctgcagcactctgtgccaacccacgcaggccagtggatgtacaatttggccgaaactacgtgcccacatgggcctttgatcacatcaaatatttcaatggtggttctgacatcagcttcatcttgacaagtacactggtactggctncccagtccaaagggtctactgtntggtcattcagcagtacataaaganggntcctgggagattcggctggcac

SEQ ID NO: 40464 - DNA, 273 bp, Glycine max
  Clone ID: 701122866H1
attttttttgggaaggaaaacttcctgcttgtctgctctccttctactcacagatctgcattttcacatctgatcactggtcactcacctcatcatctcccaacattgacatttccatcagaatgttgttagtgggatcatcaatccatttattaagccatgcctagcttctctgaaaataggggatcaatgaaattctgtcaagtcatgccattctatttctgaaatcacttgtgctgtctgaatggagaagcagcttggcagtctcagata

SEQ ID NO: 40465 - DNA, 262 bp, Glycine max
  unsure (1)..(262): unsure at all n locations; Clone ID: 701122867H1
ataatggacaacttcaaaattcagatggtaacaaagatctaaaaattggtaaagttacggatccggatctcaaccctggaagctggtcgtgtttacacaaacgcttacccattactagtcctacatccttcaggtgtcaagaagatgggtgagttgcacttggccattagattctcctgttcctcaatggttganttgntgcaacagtatttcaagcctcacttgccaaaaatgcactataagaggccacttaacttaatgg

SEQ ID NO: 40466 - DNA, 248 bp, Glycine max
  unsure (1)..(248): unsure at all n locations; Clone ID: 701122868H1
ctcttcccgaattcatcactgttacnaaacccaccaacgtantccaatcctgcacccaaaatcatccctagaagaagaagctccacaagaccctttcatctcacactcgccaaagcagagggaaaccttgactcagattcaccctcaacttcctcttcttctccttctccttttgccactgaccaaacggttttcgtgactggcgaggatgttccatggagggtgtcatccagttcgagaaacccacc

SEQ ID NO: 40467 - DNA, 157 bp, Glycine max
  unsure (1)..(157): unsure at all n locations; Clone ID: 701122869H1
aaaacaangaagctccattagcaccatcaaccccaaaaacctcaaactaagccccaaacgcttctttcgtaaaaaggaaccatctttagtctcacgctccgacccgccttctttcggatccggatcctcctccgttgactcttccacacaacatang

SEQ ID NO: 40468 - DNA, 152 bp, Glycine max
  unsure (1)..(152): unsure at all n locations; Clone ID: 701122870H1
gaatttcacnaagttcataaaantggactataaacagtagtggagagagggagagaaaccaaagaaagaagattgacccatggcttcatcaatgangntcctcaaggctgctctctcgttcttttcttttctgcttccacacaacatacgnt

SEQ ID NO: 40469 - DNA, 88 bp, Glycine max
  unsure (1)..(88): unsure at all n locations; Clone ID: 701122871H1
ggtgaaggnagaaagctgttccaacagttaattgatgnnggtgagctactgccacactaaaggncgtcttcccacaacaacataacga

SEQ ID NO: 40470 - DNA, 79 bp, Glycine max
  unsure (1)..(79): unsure at all n locations; Clone ID: 701122872H1
gaagggatggtgagtagtaatggncatggatgttgncaaatcagggccaggcgatgcttccccactggaagccanttcc

SEQ ID NO: 40471 - DNA, 270 bp, Glycine max
  Clone ID: 701122874H1
cttgagtcagttcaatcagaaatcaatgacttggactgggaaagcacctttttcctgcgccatcttccagtctccaacgtttcagacaactcagatcttgatgaagaatacaggaagacaatgaagaaatttgcactggaattggagaaacttgcagagcagcttctggacttgctgtgcgagaatctcgggctggagaaagggtacctgaagaaggtgttctatggatcaaagggtccaaattttgggactaaagtgagcaactaccct

SEQ ID NO: 40472 - DNA, 90 bp, Glycine max
  unsure (1)..(90): unsure at all n locations; Clone ID: 701122875H1
gctcgctaaacctttctctcacataacacaagganncataaananggaacatattcacttcatttcagttacttccacacaacatagcgg

SEQ ID NO: 40473 - DNA, 274 bp, Glycine max
  Clone ID: 701122876H1
ctgcaatgggcttcaagtcaggaggaggtgacccttttgggagctactggaagcccatttgtgtgcagggttcatattgccctcaagttgaagggagttcaatacaaatatgtcgaagaaaatttgaggaacaagagtgaactgcttctcaaatccaacccagttcacaagaaggttccagtgtttattcacaatgagaagcccatagcagagtctcttgtgattgttgaatacattgatgagacatggaagaacaaccccatcttgccttctg

SEQ ID NO: 40474 - DNA, 273 bp, Glycine max
  Clone ID: 701122877H1
gttttctcggttcaaatttctgtcaagagcagtgcacgaggaacaagagggtgagcatgatggggagagaaacaggtaccctttaacagaagcaagtttgtgcacgtccctaacgctaacagtttggagaaaatcccttgtgattagttgtaaaggattcactgtgatagattcatatggaaaccttgtgtatcgggtggacaattacatcatgcaccctaacgaactcattcttatggacgcttcaggaaactctcttctcaccatgcgccg

SEQ ID NO: 40475 - DNA, 83 bp, Glycine max
  unsure (1)..(83): unsure at all n locations; Clone ID: 701122881H1
ttgctcntgcttgantgcattcattcagtcccaatatgatggnattgggaagccaacggacggtncttccaccancntntngt

SEQ ID NO: 40476 - DNA, 265 bp, Glycine max
  Clone ID: 701122883H1
gtgagaatgaagatgttgcgaacgacaatactgcaattcgctgcgttgcacgttttgtttatttctgttgggtgttggtgccgattacataccgccttcgagatttgatggcttcgtctacgggaaggggaacttgaatttgttggatacggttttgatagaagcgttttatgacccagtgtgcccagatagcagggattcctggcctccactcaaacaagctcttcatcactacgcttctcgggtttcgctcctcttcacctcc

SEQ ID NO: 40477 - DNA, 263 bp, Glycine max
  unsure (1)..(263): unsure at all n locations; Clone ID: 701122884H1
gatctcattccctacgctgttctcctccaaaaagaagtacgtcttctatcctcttttcttgaacttcactcgtctacgtcatctcacagcnttgcttagtcttgggngntctttttctntgtcatttaatttgatgcaacaattgaagatgaagaagcatctctttgctctttccatctctgttgcaactnacaggncaaaaatagccacatcaaatctctaattaattggagcaacccaccattattcctatctggaatttc

SEQ ID NO: 40478 - DNA, 266 bp, Glycine max
  unsure (1)..(266): unsure at all n locations; Clone ID: 701122886H1
tgcatagacacaaattagaangagatgaccaacttttcaaggccttccaatattttgataaagacaacagtgggtttattacaagagatgaattggaatcagccatgaaagaatatggtatgggtgatgatgcaacaatcaaggaaatcatatctgaagttgatacaattatatctgaagtggatacagatcatgatggtagaatcaactatgaagaattctctgcgatgatgaagagtgggaaccaacaacaaggcaagctattc

SEQ ID NO: 40479 - DNA, 267 bp, Glycine max
  unsure (1)..(267): unsure at all n locations; Clone ID: 701122887H1
tgcatagacacaaattagaaagagatgaccaacttttcaaggccttccaatattttgataaagacaacagtgggtttattacaagagatgaattggaatcagccatgaaagaatatggtatgggtgatgatgcaacaatcaaggaaatcatatctgaagttgatacaattatatctgaagtggatacagatcatgatggtagaatcaactatgaagaattctctgcgatgatgaagagtgggaaccaacaacaaggcnagctattct

SEQ ID NO: 40480 - DNA, 274 bp, Glycine max
  unsure (1)..(274): unsure at all n locations; Clone ID: 701122888H1
cgcagntccctanctctcctttcangatgcagatcttcgncaagaccctcaccggtaagancatcacccttgaggtggncagctctgacaccatcgacaacgtcaaggccaanatccagngcaaggaaggaatncccccgnatcaggcaacgntcttatnttcgccgggaagcnanttgaggacggncgngacctcgccgactacaacnnccagaaagagttcaactcngcaccttggngctncgtcttcggggnggggtttcaatcttcgtcc

SEQ ID NO: 40481 - DNA, 277 bp, Glycine max
  unsure (1)..(277): unsure at all n locations; Clone ID: 701122889H1
ctcgagccttcaagttctcattatcaaggtgttttgatnntgttaanggggnttaatactgaacaatgggacaantgntangttgccgtgcaagtggatcagtcaagtttggccancaangangtnctcgggaagtacgatgatgatctcgaanctngttgccantgtgttccatggtgtttcgggcatcgtgtggctggtgnnctttctttngcgtggtcaaacagctaaganggttcgctggtggaaccaagactaaaggaccaatgnctttgtc

SEQ ID NO: 40482 - DNA, 265 bp, Glycine max
  unsure (1)..(265): unsure at all n locations; Clone ID: 701122890H1
cttcaaagagcgtcagcagttctagtgaagatgacaatgaacttagnagagggccttggactctggaagaggataacttgctctcccaatatatttttaatcatggggaanggcgatggaatttgctggctaaacgttcaggattaaagagaactgggaaaagttgcagattaaggtggctaaattatctaaagccagatgtaaaacggggaaatttaaccccacaagagcnacttataattctgnactccactcaaagtgggga

SEQ ID NO: 40483 - DNA, 273 bp, Glycine max
  unsure (1)..(273): unsure at all n locations; Clone ID: 701122891H1
gncaccccnacaaaagggtgnttgcgtttcnttctgtgatctccaaccatgaagcgtccactcacaccttcagaagcgcggcatgaancactaacaaganagccaaggcgatggaaaatgacgaagacgtggaggggctggggngtttcgacgnacaaccttctgttncgaggtgttgaagcacgtggangcgcggacgctggcgatggcgggatgcgtgaacaaacagtggcacaaaactgcgcaanccgagaggctctgggaatganctgc

SEQ ID NO: 40484 - DNA, 182 bp, Glycine max
  unsure (1)..(182): unsure at all n locations; Clone ID: 701122892H1
ttcgctcgcagtcacccaagaggcgagtccttaccattgctcgagatgggtgaagaagtgaaggcngtggttccngagtgctgttttgaanaagcngaagatcanaggatncatgggcgttggccagnaagtagacctnncngctactaagaagganagagtccggaagccgcacnctcnnc

SEQ ID NO: 40485 - DNA, 98 bp, Glycine max
  unsure (1)..(98): unsure at all n locations; Clone ID: 701122893H1
ggnngncagtaacagtccctgtcaatnantnttacttgggttgggcggtgaatgagaatgacccacccaatcaatatcncacttgcttattgctgctg

SEQ ID NO: 40486 - DNA, 275 bp, Glycine max
  unsure (1)..(275): unsure at all n locations; Clone ID: 701122894H1
caaagataaaaagcacaacacaagacactgaactcgcactcactgggttttcaaccatngatgcgatacncncagcagctcgatgtgttgatgngagccaaccgtaacggcgacgtccgtgaagtcaatcgcaagtactacgatcgcnacgtctgtcgtctctacctccgtcggtctctgccctcacnaactcttccncttaacgaaaatggatatgggcccttgcnctaaggtccactccttgcagctccggaaagagtatccttcgagatcta

SEQ ID NO: 40487 - DNA, 274 bp, Glycine max
  unsure (1)..(274): unsure at all n locations; Clone ID: 701122895H1
canaccgtggattaccctagtttcaaactcgttatcgtcggcgatggtggcacaggaaagacaacctttgtgaaaaggcatctcaccggagaattcgagaagaaatatgagccaaccatcggtgtggaagttcacccattggattttttcacaaactgtggaaagattcgattttactgctgggatactgctggacaggagaaatttggtggcctcagagatggatactatatccatggacaatgtgctattatcagtttgatgttactgcccg

SEQ ID NO: 40488 - DNA, 277 bp, Glycine max
  unsure (1)..(277): unsure at all n locations; Clone ID: 701122896H1
atttggggtaaggtcaccaggcctcatggtaacagtggtatagttcgtgctaagttcaagtccaatctgccgcccagatcaatgggagcaagggttagagtcttcatgtatccaagcaatatatgagtgatatgaatggaataatcaatggaaataaaagtattatacttcagttatgatggggccgtggtagaaagtgatgaataatgcaggttctcangactcgtgagtcgtggagcttgttttgtcagggtattgataggaattatattatgtt

SEQ ID NO: 40489 - DNA, 279 bp, Glycine max
  unsure (1)..(279): unsure at all n locations; Clone ID: 701122901H1
tttcctggtagtggngtcaattggcagaaggctgaaacatgtcagaaacttaagaggctggaactcaagctcagaggcggaatctttctgaaacaggccaaaagtgctccatggtggagatttaaacgcagaaagaaactcggagaccagaatttatctgaaatacgctataaaatgcatgacaggtgattatttctgtagaaaacttggagctagaatttgtttgaaacatgctggaaaaaatgcacagtggaggatatcaaaatcttgagagaaaca

SEQ ID NO: 40490 - DNA, 276 bp, Glycine max
  unsure (1)..(276): unsure at all n locations; Clone ID: 701122902H1
atctcatcaactttcagttatgtgttcttcttattcatctaatgttgatgtctttgacactggcaagtacaccgccaagctgctaagggttgaatctgaatcagaatcatatacacacaacaacaatttnccaccaccaccaaagtntatcttgattgccactcctcttgaaggtggagatttccctcttctgctgtttctgcatggctatcttctttacaattcattttactcccagctaatacaacatgttgcttctcatggtttcattgtcat

SEQ ID NO: 40491 - DNA, 277 bp, Glycine max
  unsure (1)..(277): unsure at all n locations; Clone ID: 701122903H1
aacacaatcgaaaaaaaaaaagcttccgattctaaaaccagaacaacaaaaaagtaaaacacacacgtacattttaaaacatttcnnnnnnnnnnnnnnnnnnnnnaagagcgagtgttgtaacaaatggtgaagccgaagagcgtggagaaacccgcagaggaacaacaacaacgaagtgtttncatcgtacagaggagtacggaagaggaagtgggggaagtacgtgtcggaaattaggttacccaacagccgtcaaaggatttggttgggttcc

SEQ ID NO: 40492 - DNA, 251 bp, Glycine max
  Clone ID: 701122904H1
tcacaattcagcagcatttgagagtatcaacatgcagaacccgaagaggtttgctgcacaattgctaccagactttgtggcctaaataagacattgaagaggggatagatcatagttggtgacattggttatatgggtctctcatattttcttctaatccatgtgcttgtttcttgggagtagtgataaaatctagtgtaaagaaagaaggaattttactctagtataggtttataccttgcatagaacca

SEQ ID NO: 40493 - DNA, 272 bp, Glycine max
  Clone ID: 701122905H1
attactcagcactgccactcttcaatcacactaatggctgtcaccttctcagatcctcacaccgaagagggcatcaaatccctcgatcaattcctttctgggaaaacctatatctctggggatcaattgacaaaggatgatatcaaagtgtatgcagctgttgtggaaaagccaggagactcttttcctaatgctgctaagtggtacgatgccgtctcttctcaacttgctccaagcttccctgggcacgctcaaggggtaagattcagtgg

SEQ ID NO: 40494 - DNA, 273 bp, Glycine max
  Clone ID: 701122907H1
ggtgacccttttgggagttgtgggaagcccatttctacacagggttcagattgctctcaagttgaagggagttgaatacaaatatttggaagacgatttgaacaacaagagtgatttgctcctcaagtataacccagtttacaaaatgattccagtgcttgttcacaatgagaagcccatttcagagtcccttgtgattgttgagtacattgatgacacatggaaaaacaatcccatcttgccttctgatccctaccaaagagccttggctcg

SEQ ID NO: 40495 - DNA, 264 bp, Glycine max
  unsure (1)..(264): unsure at all n locations; Clone ID: 701122908H1
cgcttgcctcgaacaggacccagacagcaaggttgcctgcgaaacatgcacnaaaaccaacttggtcatggncttcggagaaatcacgaccaaggccaatgttgactacgagaagatagtgcgtgtacaccctgagcaatatcagggctctgctgctcaatgttgacgaggaccttgcagttgtcggcatccagtcccacatcgtttgagacaaagccgatgttcccgaatatcttgttgtttggagcgatccgagaaaaactc

SEQ ID NO: 40496 - DNA, 272 bp, Glycine max
  Clone ID: 701122909H1
caagaaggccggtattgttggaaaatacggcacccgatatggtgctagtttaaggaaacaaatcaagaagatggaagttagtcagcacagtaaattcttctgcgagttctgtggaaagtatgctgttaagaggaaggctgtgggtatttggggctgcaaagattgtggaaaagtgaaggctggaggtgctacacattgaacactgccagtgctgtcactgtccggagcaccattcggaggctgagagagcagactgagagttgaaagcattt

SEQ ID NO: 40497 - DNA, 280 bp, Glycine max
  unsure (1)..(280): unsure at all n locations; Clone ID: 701122910H1
aatggctccaaagaaaggtgcgaaaggtggagttgtagcagcaaagaagaaggttcaggagaaggtaacgaaccctttgttcgagaagcgtccgaagcagttcgggatcggaggcgcgctgccgccgaagcgggatcctgacgcgcttncgtgaagtggccgaagaacgtccaaatccaacgcaagaagcgcatccttcaagcagaggcttcaaggtccctccggctctcaaccagttcaccaaaaccctcgacaaaantctcgcaacaaatctttttaa

SEQ ID NO: 40498 - DNA, 278 bp, Glycine max
  unsure (1)..(278): unsure at all n locations; Clone ID: 701122912H1
gttgccatgaggtttcaccagtaccaggtggtgggaagggctcttccttancgaatccgatgagcatnntaagatctaccgcatgaaactctgggcnaccaacgaggtccgtgccncatccaagttctggtattttttnagaaaattgaagaaggttaagaaaagcaatggacaagtgctagccatcaatgagatttttgagaagaatcctaccaagattaagaattatggaatttggctgcgttatcagagccgcactggttatcacaatatgtaca

SEQ ID NO: 40499 - DNA, 282 bp, Glycine max
  Clone ID: 701122914H1
ccaccctccacatagcttccaccctctcaacccccaccaacttcatgcaagtcctcctgcagcaccacccagtacccagccctctgcatccagtccctctccgtctacgcctccaccatccagcaagacccccacgagctcgtccagacagccctctccctctccctcaaccacaccgaggccaccaaaaccttcgtcgcaaaatgcaacaaattcagaggcctcaaaccgagagaatacgctgccttgaaggactgcgctgaagaaatcagtgacagcgtc

SEQ ID NO: 40500 - DNA, 278 bp, Glycine max
  unsure (1)..(278): unsure at all n locations; Clone ID: 701122915H1
ggacgacacgggaagagtttgttgctgaaaggacatgtggtttttgtggtattagcgcttaccaatctgtngtctttctgggaagaccgttgccaacaagggaaagtggaaaacaggttccggaaaattatgaacctcgcttcaattggagcatttgccttgatggccttgagtttgtcgcggcaacttcaaattggattcgatgctggcgtctccaacttcttggttggatgcttcttggtgacgttgatgaagatgaacctaagttagctccactt

SEQ ID NO: 40501 - DNA, 261 bp, Glycine max
  unsure (1)..(261): unsure at all n locations; Clone ID: 701122916H1
ctcgagcggtgctccttcttccncctctgtttcgatttanccacttccaaggataagactccttatnnagttatanttctcggctggtccaaagccattttttagttcctggtggaatagcntttcaactatggcgctctatggaaccaccttatccttcaatggaatttcttctactaccaaggagtttaatatcttaccatgctcattcaccagtagctttcggaagctacatcatgtttgtctaccttcctttactcc

SEQ ID NO: 40502 - DNA, 277 bp, Glycine max
  unsure (1)..(277): unsure at all n locations; Clone ID: 701122917H1
gaagtgttctcctaattcagtgagtgaggttctgaattctttaacttgaanatgatggcatcatttgcagggactactcagaagtgcaaagcatgtgagaagactgtntatttggtggatcagctcactgctgacaacangatctatcacaaatcatgtttcagatgctaccactgcaagggtacccttaagttgagtaactattgttcctttgagggtgtgttatactgtaagcctcatttgatcaactctttaagaagactggcagcttggacaa

SEQ ID NO: 40503 - DNA, 273 bp, Glycine max
  unsure (1)..(273): unsure at all n locations; Clone ID: 701122918H1
caaaaacatcgaaaganagaggcatggccgaggcaaaccttcatcatgatcaagccagatggcgttcaaagaggccttattggcgagattattagcagatttgagaggaagggtttttacttgaaagggttgaaactcgttactgtggaccgtccttttgctgagaagcactatgctgatttgtctgcaaagcctttctttagtggtttggtggatacattgtctctggccctgttgttgccagatctgggagggtaagaatgttgttacaac

SEQ ID NO: 40504 - DNA, 270 bp, Glycine max
  unsure (1)..(270): unsure at all n locations; Clone ID: 701122920H1
cctaggcctgctggccatgttccttttggtctcctcagaggtngcatccgcgaattcaaaagaggtgacaaatggagttgaagatgccaaatatcctggtggaggctatggtgggggttacccaggcaatggcggtggtggctatcctggccgtggtggtggctaccctggtcgtggtggtggctatccaggtcgcggtggtggttaccctggtcgtggtggcggctatccaggccgtggaggagggtatgtcgctatggctgttgcggt

SEQ ID NO: 40505 - DNA, 235 bp, Glycine max
  Clone ID: 701122921H1
ataccattaagaaacaacacatctatctcagtccccaaaccaagaaaccctaaattaaattcatgtgctcctccaggtctaccagtgctgcaccaacaagaccttgttacttggaacaaggccacggcttggcttccttaaaacacatggatgcgtgtcataatcgtgccaacaactttgtctctaggtccatgaccatgggttacggcacttcctaccacagaactagtttatg

SEQ ID NO: 40506 - DNA, 275 bp, Glycine max
  unsure (1)..(275): unsure at all n locations; Clone ID: 701122925H1
gtttgtnttctttgttgctgcagtagttttggtagcatggccatgccatggcgcaggctaccaaaggttccctctccgaatgaaaactgtcctatggtgagcgttcttcggaggtaaaatgcgcaagttttaggcttgctgtggaancacacaacatccgagcnattaaaaccattcctgaagagtgcgttgaaccaacaaaggactacattaatggcgaacaatttagatcagactctaaaacagttaaccagcaagctttcttttatgctagt

SEQ ID NO: 40507 - DNA, 275 bp, Glycine max
  unsure (1)..(275): unsure at all n locations; Clone ID: 701122927H1
atangggngtaaattactttatgattcacacgttttttatttntcacagcaaaggcattcggtgagctgtgtcattttcttaaattattgtaacattttattcctctcaatatnngaaaangattngtaataaaatggtgtnatatgtcagcattgacaactgactattctagaaatattattacaacactgccaaaaaggatatattattagaaatattattacaacactgccaaanaagaaaaaanaattngctggtngtgttcattncaccc

SEQ ID NO: 40508 - DNA, 275 bp, Glycine max
  unsure (1)..(275): unsure at all n locations; Clone ID: 701122928H1
gccggtttcttcgacggacctgagtcaccgggatattttcancaccgacgaaacntctcggccgtgactacaccgccgacatccccgacgagtgcctcgccggaatcttccagtttctaagctccgtcgaccggaaaacctgctccgccgtgtgtcggcggtggctgcgcgtggacggcgaganccgccagcgcctctccctgaacgcgaagcgagcctggttgacttcgttccgtcgctcttctcgcggtttgatcggtcagaagctcgccctg

SEQ ID NO: 40509 - DNA, 279 bp, Glycine max
  unsure (1)..(279): unsure at all n locations; Clone ID: 701122929H1
atggtcttcggagagatcacaaccaaggccaacgtagactatgaaaagattgtnccgcgacacatgccgcgaaattggattcatctctgatgatgttggtcttgatgctgacaaatgcaaggtgttggtcaacattgagcaacagagcccggatatcgcccagggtgtgcacggccacttgcaccaagcgcccagaggaggttggtgctggtgaccagggtcacatgtttgggtatgccaccgatgaaacccccgagtacatgcccctcagccatgtcc

SEQ ID NO: 40510 - DNA, 278 bp, Glycine max
  Clone ID: 701122930H1
gttagttgggagaaggaaaacgtttctagtgaggccctggaagctgctcgtattgcttgcaacaagtacatggccaaatttgctggaaaggatgctttccacttgagagtcagggtgcacccattccatgttcttaggatcaacaagatgctttcgtgtgccggagctgataggctccaaactggaatgagaggtgcttttggaaagccacagggtacttgtgctagagtggctattggacaggtcctctttctgtccgctgcaaggacagcaacagc

SEQ ID NO: 40511 - DNA, 274 bp, Glycine max
  unsure (1)..(274): unsure at all n locations; Clone ID: 701122931H1
ctttaagaaggaaaatgtggatatctctttaaggntaaagcaagatgaagcacaacacattcaagttacagaatgaacattcatcttgtttagttacaatacaacaacttgaatctcaagtagagagattagatgaaaggctanaggtgcaggaagaggaattttcagcatctctggtctgtatcaaggaacttgaaaatgaagtcaagtctttggagaaagaactgaaactacaggcagatcaatttgaagaagatctccatgctatgcaatg

SEQ ID NO: 40512 - DNA, 283 bp, Glycine max
  Clone ID: 701122932H1
gacccccttaatactcttcacattcctctgtggttgagcacagccaaactcaaagaagaaagaagaaaatccagcgaaagtaaaaccagcatccgaaaaagatgagcagcatcggaacaggttacgatctctccgtcaccactttctcccccgatggccgtgttttccagatcgagtatgctgccaaagccgtcgataacagcgggactgttattgggatcaagtgcaaagatggggttgtgttgggcgttgagaagcttattccgtcgaaaatgatgcttcc

SEQ ID NO: 40513 - DNA, 272 bp, Glycine max
  unsure (1)..(272): unsure at all n locations; Clone ID: 701122934H1
gntttctanttcgcggaccaaatnaaaatcatgggtttgcttcctgatgttttctagatcaatgatcagttgtctcatgtttatgacataggttactttatacaactttctgatttcgacttgngggaaatgcaagaactcgaatnaggctattcagattttggaagagatgaaatgcatggaagtaaagccaaatatacaaacatacatctgnttgctaaatgcttgtgctgctgatggacgcatagaccgagtgtatgcaattgttcgtg

SEQ ID NO: 40514 - DNA, 252 bp, Glycine max
  unsure (1)..(252): unsure at all n locations; Clone ID: 701122935H1
tgccaatactcaggtgcattttgaaacaacaggtcctgagatatgggaanatacaaatggacaagncgacatatttgttatgggaataggtagtggaggcacagtctctggggttggacaatatcttaaatccaaaaatcctaatgttaagatatatggagtggagccaagtgaaagcaatgtgctgaatggtggtaaacctggtcctcatcatataactggcaatggggttggattcaaaccagactattg

SEQ ID NO: 40515 - DNA, 267 bp, Glycine max
  unsure (1)..(267): unsure at all n locations; Clone ID: 701122936H1
ggangcannactgctctgcatatggcagcattaaatnggcatgttgaaagtgtacagttactcttggactgggagctctgtgtccgaggttactgtggaggatggaactaccattgacttaattggttctggaagcactccactccattatgctgcntgtggtggaaatcaacaatgttgtcaactgttgattgccaagggtgccaatctgactgctgagaatgcaaatggatggacccccttgatggttgctcgttcttggcatag

SEQ ID NO: 40516 - DNA, 270 bp, Glycine max
  Clone ID: 701122937H1
ccacagtccctcttcgaacgaccccttcgatttcaatcgtgcaaggatttccccctatctcagcgctccttcttctcccaagcgttttggccaattttattacctaagcgccccctcaagcccttctaaagattttgatcttgcggctcacgatgatgatgccttcgcctttttcgttactggggaatccaagagccctcgatccgcggcagagcttttcgacggcggcaaaatcaagccgctgagcgaggatgattcctcggagtctgg

SEQ ID NO: 40517 - DNA, 272 bp, Glycine max
  unsure (1)..(272): unsure at all n locations; Clone ID: 701122938H1
aaaatctagggtttgttcgttcgctcgttcgcaacaatggcgctgaggagattctacaacgagatcaaggggaagagggtgagcgaggtccctgagcacgtgaagccgatgctgtccctgagctacatcaagaaagcgattcagagaggcttcgacaattaccatgccaagtacattgaaaccagttcccctgatcccatcttccatgtctgnttncggcggcatgatcttctcctacctcgtcgctctcacccacgagcgccgccacctcc

SEQ ID NO: 40518 - DNA, 272 bp, Glycine max
  Clone ID: 701122939H1
gaaaattcatccaacattttctaggcagccaaacacttcccaccatgaacagatccgctctcctcgctgcctccgtcgccgccgcgtcggccaccgctgcttccctttcctcctccgcaaaactctctctccaggacggtggggctcagagagaccacggcggatcctcgccggcggcgagttcggcgtcaacggagaagttcgcgccgcggttcgacgggttgcggttcattgaaacgctgattactgcgcacagatgaacgcgcggtgtt

SEQ ID NO: 40519 - DNA, 271 bp, Glycine max
  unsure (1)..(271): unsure at all n locations; Clone ID: 701122940H1
gataacctctccctcttnccctctcatattcttcgcttttttccgaatagccataggtcaaaataatctgtgaacgactgcacctgacaaaatggctcaagccaaatatactagaatagataataataataagcgaccgtcgagttactgttcaacagtgactattgtcgtgtttgtagctctttgcttgtttgggatttggatgatgacatcgtcatctgttacgcccgtgcaaaatgtagatgtgtctcaagagaataacaatgaggtg

SEQ ID NO: 40520 - DNA, 273 bp, Glycine max
  Clone ID: 701122941H1
cccttaatttctatctccaatccctcagcaaaacgcagcaaatgggtcggcttaatctcctacttgtgtggtcactctcattaacactgtccctttattatctacacccaatctctgctcagctcagtccaaaccactatgctaaaacatgccccaatcttgaaagcatcgttagacaggccgttaccaagaagttccaacaaacctttgtcaccgtcccagccacccttcgtctcttctttcatgattgctttgtgcagggttgtgatgctt

SEQ ID NO: 40521 - DNA, 272 bp, Glycine max
  Clone ID: 701122942H1
caagatctctctctctgtaatcgaaaatgagcaagggaccgggtctctttaccgatatcggcaaaaaatccaaagatcttttgactaaggactacaactccgatcagaaactcaccatttcctcatacagcatctccggagtggccctcacttcaacatctgtcaagaaaggaggactctccactggggatgtggcagcactgtacaagtataagaacactattattgatgttaaactggacaccgcatcaactatctccacaaccctcaca

SEQ ID NO: 40522 - DNA, 275 bp, Glycine max
  unsure (1)..(275): unsure at all n locations; Clone ID: 701122944H1
agggtccatggtcgccggaagangacgtcattctgagccgtctggtnagcaagttcggcgcgagaaattggancctcatncgcgcgcgggannnagcggaagatccggcaagtcgngccggctccggtggtgcaaccngctcgatcccgcagtcaagcgcanacccttcaccgatgaggaggaccagatgacagttgctgctcntgcatccatgggaacaaatgggcagccattgccaggcttctaccaggaagaacagataatgcgattaagac

SEQ ID NO: 40523 - DNA, 279 bp, Glycine max
  unsure (1)..(279): unsure at all n locations; Clone ID: 701122945H1
gtttttgaagtatagagatggcagagncattcctatttacctcagantcngtgaacgaggnacnccctgncangctgctggtgaccaaatctctgatgcngtcctcgacgcttgcctcgaacaggacncanacancanggttgcctggngaancatgcaccaaaaccaacttggtccatggtcttcggagaaatcacgaccaaggccnatgttgactacgagaagatagtgcgtgncacctgcagagcntcggctttgtnctcaaacgatgtgggatgg

SEQ ID NO: 40524 - DNA, 272 bp, Glycine max
  unsure (1)..(272): unsure at all n locations; Clone ID: 701122946H1
acactaccnacctgctttgcatgaatgaagtttggagattggatcggatagctaaggatgntgnacttcacaaaaaattgattcaggcaaaaatngtaactgtagaagatttccnacgtcttcttgttcgtgagccacagaagttaagaagtatacttggtagtggaatgtccaatagaatgtgggagaatactgtggagcatgccaagactgtgtctgggtggcaagctctttgtgatactacntgatgaaaccaanattctggcntatgt

SEQ ID NO: 40525 - DNA, 278 bp, Glycine max
  unsure (1)..(278): unsure at all n locations; Clone ID: 701122947H1
ccctaatcgagatcttctccgagctcatgngccgccgcgacggctgctccaaggggaaaggggnntccatgncacttttataggaaggaaggtggcttctacggtggccatggaatcgttggggcgcaggttccgcttgggtgtggnttggcttttgctcagaagtattgtaaagatgagaatnttacgttttctatgtacggtgatggtgctgccaatcagggccagttgttcgangcgcttaacatttccgctctttgggatctcccctccatttt

SEQ ID NO: 40526 - DNA, 280 bp, Glycine max
  unsure (1)..(280): unsure at all n locations; Clone ID: 701122948H1
ctaaattcacaatgacaatgtggtgaaaaacgctcggatttgaagatggacatggacgtggaagaagcttctgcacctaaagagagaaagcccgttttggtgatcttggtgggcgctccagggagcgggaagtccaccttctgcgaagaagttatgggttcctnctactcgcccttgggttcgcgtatgccaggcacggaagcatgttctggtgttggcacgaaccggaggtcttgattgccttgcagatgtccaaaaggagcaccttcattattgaaca

SEQ ID NO: 40527 - DNA, 273 bp, Glycine max
  Clone ID: 701122949H1
acagaacctgctgaggctgttaagagagcatatagtataactgattctactattttagacaaatcaggtgaattgggtagagggggttcaactgcggttacagcaatattgatcaactgttacaagctactagtggccaatattggggattcccgggctgtcttatgtaagaatggcgtacaaaacaactatcggtggatcatgaaccaagcatagaaagtgaagatataaaaaacagaggtggttttgtgtcaaacttcccaggggatgtgc

SEQ ID NO: 40528 - DNA, 269 bp, Glycine max
  unsure (1)..(269): unsure at all n locations; Clone ID: 701122951H1
gtttgttgtgagctataagctagtttatcgtgaggagaatatgaagttgtttgttttctttgttgctgcagtagttttggtagcatggccatgccatggcgcaggctaccaaaggttccctctccgaatgaaaactggctatggtgagcgttcttcggaggtaaaatgcgcaagttttaggcttgctgtggaagcacacaacatccgagcntttaaaaccattcctgaagagtgcgttgaaccaacaaagactacattaatggcgaaca

SEQ ID NO: 40529 - DNA, 269 bp, Glycine max
  unsure (1)..(269): unsure at all n locations; Clone ID: 701122955H1
caaatccataactttctgggnatcaaacgatgatgatgtttgaagatatgggtttttgtggggatttggatatgttttctgcnccccttggagaaggggacattaccacncggcanactgaccnaagaggtganagttgaggangattatagtgatgaagaaattgatgtagacgagctcgagaggaggatgtggagggacaaaatgcgtctgaagcgattgaaggagcanataaacctaaggaaggaatgatgctgtgaagcagaggc

SEQ ID NO: 40530 - DNA, 275 bp, Glycine max
  unsure (1)..(275): unsure at all n locations; Clone ID: 701122957H1
gcacaattggtcatcgcgcttggttgaaaagccagtggcgcgaantaaccgtgcgttggattatgactgaacgcntctaagtcagaatccgggctagaagngacgcgtgcgcccgnccgtcccgtttgccgaccagcagtagggggcctcgganccncaaaggcacgtgccgtnggtgaacctcgtgaggcggattagccctacgagangccttgaagcgcaattcccatcgagcggcgggtaagaatcctttgcagacgaatcaaagcgacaag

SEQ ID NO: 40531 - DNA, 274 bp, Glycine max
  Clone ID: 701122958H1
caccaatctcacacttgccacttataatagtcctcttgttatcattttctttagcaaattcagcctcactacaagaaagttttgtccaatgtctcaacctgaattcggacagaacatttccattttactcatcaatttacactccaagcaacccttccttcaccagcatccttgactcctccgcacagaatctaaggcttttggtgccttcagcgccaaaacccgagttcatattcacaccctcccgtgattcccatgttcaagcagcagtgat

SEQ ID NO: 40532 - DNA, 274 bp, Glycine max
  unsure (1)..(274): unsure at all n locations; Clone ID: 701122959H1
gttacctgaaagcaagtaccctgtagttcgattatccgaaatacctgctaagcagttggaaaatgataaatctgagcagaaaaaaattgttattagacctaggcctaataaaaacagtntgaatgatgctaacggagttgggaggaaaggaaaccctttaagaagtgtggaagaaaggaaggaggaatatgaccgggcacgggcacgtatctttagtagccctagaagctctgaatcaggtgatacctcatccgtggttccaatggatgggaga

SEQ ID NO: 40533 - DNA, 275 bp, Glycine max
  unsure (1)..(275): unsure at all n locations; Clone ID: 701122960H1
tgcacaactccaccactgtgcaatggccgacgaggaacctgttgatcagaagagatatcttgaagagtcttgcaaaccaaaatgtgtaaaaccattactagaataccaggcgtgcattaaaaggatacatggtgatgaatctgggcagaaacactgcactggacaatattttgattattggtcttgtattgacaaatgtgttgcaccgaagctattcnccaaactgaagtaaatcgggaaggatttgatggctatcattgcattctgttctgttt

SEQ ID NO: 40534 - DNA, 275 bp, Glycine max
  unsure (1)..(275): unsure at all n locations; Clone ID: 701122961H1
atatcaatatcaattatcttcttcctctttaagtcaaaccataactattccatttctttccaccccacagtttcnnaantctgggtgttgagtttcattttctccatttttntttatctccctnggatgtgttattttcaatccaaaagaccatgcaaaaaactatatttgagaatctgaaagagtgactaggtggtcnatctgatcttgtgaagtttgtgtttgtgtgaaaggtgtgaggcttattattcagaagagtttgtgtgtgttcacat

SEQ ID NO: 40535 - DNA, 277 bp, Glycine max
  unsure (1)..(277): unsure at all n locations; Clone ID: 701122962H1
gtacacatgaagcatagctatgcaagaagtctagcccattttgctgcaaaccttggtcctgttgtttgtaagattgctgcaagtaaaatcagaggtgtgttgccagctggacatgaatttngtcctggatgggtaagtgaagacgacgggtcatcacagaggcaacacttcccagttcgtgatgagggtagaacttcagaccatcctgtaccagaggattatagaagtagattttcttctccatctggatcgtttccccttgcaaatagatcaggct

SEQ ID NO: 40536 - DNA, 277 bp, Glycine max
  unsure (1)..(277): unsure at all n locations; Clone ID: 701122963H1
tctaactcaaattnttatanatctttttatattgtctttgattcatacagataataaaaaaaaggttgttgatggtctgatgtaatggggtttatanagctgtnttctgttgcctctttcccggttatcaaggtcttattgattnctgcacttggcttgtttcttgcactggataacatatcaatattgggagaagatgcaaggaagaaagtgaatcagcttgtgttttatgtgtttaatccatcgctggtgggtagcaatctggccaaaaccatta

SEQ ID NO: 40537 - DNA, 284 bp, Glycine max
  unsure (1)..(284): unsure at all n locations; Clone ID: 701122964H1
atcaatgtcccctggtggtaccttgccttttctaggatgatcagtcccttcttcacacagaggaccangnnntaaatttgtttttgctggncntccaanatctggctgatancccttttcagatatataggctccggagctggtcccggttcaatacggtggtcttagcagagaggctgaacaggaattcacctctgcttacccngttacggagtttactattanacccgctaccaaacattctgttgagttccctgtttctnagagaagccatcttgtgtggg

SEQ ID NO: 40538 - DNA, 274 bp, Glycine max
  unsure (1)..(274): unsure at all n locations; Clone ID: 701122965H1
gttcacaatttnaaaatggctaggggactaaagaagcatttgaaaaggctcaatgctcctaagcattggatgcttganaaactgggtggtgcatttgcgcctaaaccctcatctggaccacacaaatcgagggaactgcctccccctcattcttattctgcgaaaccggctgaagtatgntctgacataccgtgaagtcattgctattctgatgcagcgccatgttcttgttgatggcaaagtcaggactgacaagacttaccctgctggtttc

SEQ ID NO: 40539 - DNA, 270 bp, Glycine max
  unsure (1)..(270): unsure at all n locations; Clone ID: 701122966H1
gggagagcgagcgtgagangnagatcttcgatttagggttttcaatttcgtattcagcaaggcggcgagtgtgagatttttagagagagagaggtgaggacgctgagtgctctgctgagagattccataaccccaagaggaagangaggaggagaaggtggatagattttttttcctttttttttgtgctgtttatttatcctcagagcggtggatagggattttcactctgcagcgttccgttccattgtgatttgttgaagtttctga

SEQ ID NO: 40540 - DNA, 267 bp, Glycine max
  unsure (1)..(267): unsure at all n locations; Clone ID: 701122969H1
atttcattggcatcgaagcgatttctctgcaccaatgccgcttcggctcctctcccccctcctccttccgccgcttctcccagccgctggaacttcctcaaatacgccgtcntcggngctctcaccggangcactgcctttnccggttacgcctctgtacgcttacagtttggaagaagtagaagagaaaacgaggtcgtttcgtgaatcggccaaatacgctgctggtgatggagccactgctctcgataaatttcaaggtttgct

SEQ ID NO: 40541 - DNA, 270 bp, Glycine max
  unsure (1)..(270): unsure at all n locations; Clone ID: 701122971H1
gcgatttncttggagaagaggttaggttgttgggtgttantgttaaatatataaagaacagaacagtcgccaacgttaacattannaancatcctcaaaatatgcgcactcgctctgcttcccgctgcttcatctgcttcgttcttcactctctttctcgcttagccttcactttcttctctctgtttcttctttcttctgccagcgatgccgacttttactgccatggcactggataggttgatagagcccggagcttctaagccagtt

SEQ ID NO: 40542 - DNA, 269 bp, Glycine max
  unsure (1)..(269): unsure at all n locations; Clone ID: 701122972H1
ctattctattctgcactctgcactcactcactcactcagtcatntttcaaccgcccactcccactggcatcaacaagcattctcttcatacaaatccactatccatccaaggagcttcttcagcactggtgccagtggatttgaatgaaggcactgttgatgcaaaggaaagtgtgcaaaatggagaaatgctacaagtgcaatccatcttccgncnctcccagaaactggaagatgatctacgtatgntagggacaaaaattaagcag

SEQ ID NO: 40543 - DNA, 266 bp, Glycine max
  unsure (1)..(266): unsure at all n locations; Clone ID: 701122973H1
ctgactgaacataaacttggtaaaaaggtgtttgtcaatgcggttggtttcttgcgtgtccggcgaagtggtttanctgctagcngcagccaatttattgatttgctggatgatacacgaattcatcctgaatcttatattcttgcacaagagttggccaaagatgtgtatgaagaagatggcacannnnnnnnnnnnnnnnnnnnnnnnncactggagatggccagagagcagtgagagaccgacctagttatttgaaaaacctg

SEQ ID NO: 40544 - DNA, 270 bp, Glycine max
  Clone ID: 701122974H1
atggaggcagtgatggctatacttggaggtggtgcacatgttggtgttcttcttcaggggaaaaaagttagagatgacaatagaacacttgtgcagactggtatatcttgcaatgaaaatttggataccctgagtttcatgttggagcccacttcactacgagcttcctccaactatttgtgttggtgatcctcttctcaatgtgaaacatcccagcctacatggcccacagaaactcctgtcttagattcaggagttactgataccttg

SEQ ID NO: 40545 - DNA, 251 bp, Glycine max
  unsure (1)..(251): unsure at all n locations; Clone ID: 701122975H1
gcagncgcctatccctgtctccnnngcccaaacttcnacccagatgagccgnnccgcanccgagtgggtctnccaangcttcctccaggaagcttncgcctccgcaccctctcctccgtcttcttcctcngccgccgacgtcgtattcgtcgagatcgaagatcaacctaaacccgcncctccccctccgacaaacggcgcngttctccccaatgcnnctggtcccgtcnncttgactncgacgaatacca

SEQ ID NO: 40546 - DNA, 272 bp, Glycine max
  unsure (1)..(272): unsure at all n locations; Clone ID: 701122976H1
gttgaattgaacaatgtcagagcaaatattgaagtttctgaagcagggaattgctctgttggccctgggcatgaatcttcatccttaactgaagtcttcaaaaatgattttgccgcatcactgtctcgcgtggataaaaccaatgatcttgttgattctatccacacaaatatntaggncattccaaatgctgagaatttgaatacaatccctattctagaggatgactttgtggaggatcaaagtggtaanaatggagtaggtgctatgaa

SEQ ID NO: 40547 - DNA, 278 bp, Glycine max
  unsure (1)..(278): unsure at all n locations; Clone ID: 701122977H1
atctagcaaagttgatcccttccagcatctcaaactcgtccccaattccgacggcacgatcactgcgccagcgtgatgacccacccatctcaccctcactgcaatcccacncttcccgtcctcacccaagacgcnancatcaaccgatcaaacaacaccttcgcncgcatattcctacnccgcgaagacctcgattcctccccctcnnacaanctccctntcgtcgtttanttccacggnggcggcttcgtcntctncagcgccgcctctganttctt

SEQ ID NO: 40548 - DNA, 259 bp, Glycine max
  unsure (1)..(259): unsure at all n locations; Clone ID: 701122978H1
agatccatgtaatttttatttcagattcaggtaaggcataaatgtnncaaaanaaaaatctggaagtaaccaatttaagtaccttgcnatatcttaatgagtttaagaactaatctatacaaaaagaatacntggtatggagcctgtgacatgagcgaggttcagatgcatcttaagantatatatattttagctccgtgcaatcatgttttgcaggtaagctcacgtatttctnctatgctgtactcatgctataaag

SEQ ID NO: 40549 - DNA, 277 bp, Glycine max
  unsure (1)..(277): unsure at all n locations; Clone ID: 701122979H1
atcttctcaaaccatcttgcaggtgtgtctttcattgtatgttctactgctgggtaattggaaggctaaccaggagctgcttcattcctcaattattcttcaancctttctaagaagttcatattcttcagttttctctagtgtcatcaccaaaatcagggaatgctgaaagatgtgcttgatagttaagaattccttcactgaggctaatgagtccgtgcctccatctgagctagccttgttcaaccttgatgacattggatgtttagtccactgc

SEQ ID NO: 40550 - DNA, 286 bp, Glycine max
  unsure (1)..(286): unsure at all n locations; Clone ID: 701122980H1
gttagagcagagtgaggcatcatcagaatctgaatctcacatggngcgaacagacgctaggtnaagcacaanccctnnnnnnncccgatgctgccaacggccnactnccgaactaaacaatgtccctcagcacgacaacctccccagctacgaaaatccccctccgtncccgcaagatccggaaggtgctctccggacccctccacctccgaagcncccatcaaanccgccaaacctgttggacgcaanaccacctccaaggttgctccgcctcgagccctgactg

SEQ ID NO: 40551 - DNA, 272 bp, Glycine max
  unsure (1)..(272): unsure at all n locations; Clone ID: 701122981H1
agagtttgtttcttctctcttcaatggaaggcggcgaacaggttctcccttcggccaccaccgtcgccgccgcnggctatcncaacgtctctcctcctccgctcgctgatcctgtcggtgcttccgatcctcgctgctgctgcnccggacgacgttgttgcggaacctgaaattcacgcgctgatttcagacgaagagcacgatcacgatcacgatcacgatcacgatcacgagcatgagcatgagcatgaccatgacctcgagcacgatca

SEQ ID NO: 40552 - DNA, 268 bp, Glycine max
  Clone ID: 701122982H1
tcttgttctatctgtgacgagcatcatggcctcaagagcagtgttattgttggctatgtgtgtgcttccggcgatggttgtggccattcgcccagcaaagaaccctttttgcgtgaagggtcgtgtctactgtgacccttgccgtgctggttttgagacctcagctaccacctacattgctggtgctgagattatgttgcaatgcaagagcagggttagcaacgaggttgtgtacacgaagaaggggtacaccgactcaaccggagca

SEQ ID NO: 40553 - DNA, 268 bp, Glycine max
  unsure (1)..(268): unsure at all n locations; Clone ID: 701122983H1
gaatatgaagttgtttgttttctttgttgctgcagtagttttggtagcatggccatgccatggcgcaggctaccaaaggttccctctccgaatgaaaactggctatggtgagcgttcttcggaggtaaaatgcgcaagttttaggcttgctgtggaagcacacaacatccgagcntttaaaaccattcctgaagagtgcgttgaaccaacaaaggactacattaatggcgaacaatttagatcagactctaaaacagttaaccaacaa

SEQ ID NO: 40554 - DNA, 268 bp, Glycine max
  unsure (1)..(268): unsure at all n locations; Clone ID: 701122984H1
gtacaattcttcgttcgttctctgcagttatatcctttttgagcttcaatggcggacgctgaaaccttcgctttccaggctgagatcaaccagcttctaagtctcatcatcaacacattctacagcaacaaggagattttcttgcgtgaactcatcagcaatgcttctgatgctttggataagattcgattcgagagcttaaccgacaagagcaagctcgatgctcagccagagctcttcattcgtcntgtgcctgacaaggataaca

SEQ ID NO: 40555 - DNA, 269 bp, Glycine max
  unsure (1)..(269): unsure at all n locations; Clone ID: 701122985H1
accgatctcgcgccaaatacaaattcgttacaaccctacccagggttccggcgagcatggccgacggtccggcgagtccaggcggcggtagccacgagagcggcgagcacagccctcgctctaacgtgcgcgngcaggacaggtacctccccatcgctaacataagccgcatcatgaagaaggcactacctgcgaacggtaaaatcgccaaggacgccaaagagaccgttcaggaatgcgtatccgacttcatcagtttcatcaccagc

SEQ ID NO: 40556 - DNA, 269 bp, Glycine max
  unsure (1)..(269): unsure at all n locations; Clone ID: 701122986H1
ggttcttcccctcctaaagcagcacaaagtgatgtatttcactcataccgattccaggcttgataacaatgacattccacgttccatacagaaactaagntcgccgtgtaaattacagagcattgaaatattcagctccaattgaagaacttggaaacacactggtatctagaatgcaacagaatggaaatccttatcttgcccttcatctgagatatgagaaggatatgcttgcatttacaggctgcatcacaatttgactgcagaag

SEQ ID NO: 40557 - DNA, 269 bp, Glycine max
  Clone ID: 701122987H1
cgcacggcctttgtgccggcgacgcatcattcaaatttctgccctatcaactttcgatggtaggatagtggcctaccatggtggtgacgggtgacggagaattagggttcgattccggagtgggagcctgagaaacggctaccacatccaaggaaggcagcaggcgcgcaaattacccaatcctgacacggggaggtagtgacaataaataacaataccgggctcattgagtctggtaattggaatgagtacaatctaaatcccttaac

SEQ ID NO: 40558 - DNA, 270 bp, Glycine max
  Clone ID: 701122988H1
ctgcaccctactttaactgatgtaatagtattcacatctactccagacaaagtgaacaacaaatactacctgggacctgctccacttgaagacatggctaggcaaatagcaactgcatatggcccttgcggaaacaacagggattacattttccttctagaaaaggccatgtatgatattggccatgaggatgacttagtgatagagcttgccaatgaagtgaggaaagtacttggaatgggaaatgtagtaccaaaggagaagaaactg

SEQ ID NO: 40559 - DNA, 270 bp, Glycine max
  unsure (1)..(270): unsure at all n locations; Clone ID: 701122989H1
gcccgngccagagcttgtgagcgctggcgctgaggattccgagaagtcgcatgtcagtgatgtcacggaggttcgccacgttgccatggctgaggcaaacgccggttgttgnncttccgttttgaaacggaagcgtggccgtccggccaagggaagccgcgttccgaaagggatgactccgccgtcgaggcagaaaaaggaagaagaggatgtttgcttcatatgcttcgacggtggaagccttgttctctgtgatcgccgtggatgccc

SEQ ID NO: 40560 - DNA, 265 bp, Glycine max
  unsure (1)..(265): unsure at all n locations; Clone ID: 701122990H1
attggccgatggtgtgcaggggttgctccagattggggagcttgctgaggctgtcagtnattttctggaaggactctgctctgaggggttttcagtccttcattaggtttggtccagtgntgcttctgcttataatgtggagctgctttctagtctgacttcgatgtattgtttggtttacgtgcttgttagcatgggtgttgctggagtagctgtccaatacttgggttatactcctgggnttttcattgtgggacttttgcca

SEQ ID NO: 40561 - DNA, 261 bp, Glycine max
  unsure (1)..(261): unsure at all n locations; Clone ID: 701122991H1
gttgccgaacattccagaaggctcaaagatatgannacacgtctcgctcacgaaaccaccaaagccacgcaaactgctcaagacttgtccaatttgcgcaggntcagacaagcctttgtagctttgaatgtgtggcaaccagaggttgtccggggtaggcaaaaacaaatggtagagcaaagtgttgtgcctgctgaatgtcggatacatgcgcttgagaangattcaagctttgtaagcaacagattctgggattggaga

SEQ ID NO: 40562 - DNA, 274 bp, Glycine max
  Clone ID: 701122993H1
gaattagttatcttgagaaacattattcccattgctatatattatggctagcatgaaggttacatgggtggttgtgatcatgtgcatggccgtggtgggtgcaccgatgatggcgcaagccatggacatgcaatgatgtgacggtgaacatggcacagtgcctatcctacctgatgcagggaggaacaccttcaacactttgctgcagcggagtcaagaacattcttggctctgctgtcaccaccgttgacaaacaaactgtgtgcaatgtctc

SEQ ID NO: 40563 - DNA, 279 bp, Glycine max
  unsure (1)..(279): unsure at all n locations; Clone ID: 701122995H1
caatgaccctcacgggcttgctccgcgacgtcnccgccaaattcccttcccgcnncgccatctccgtcgccggaaaattacgacctcactccactcccgcctccatcaactggttgaatccgccgccgcccgcttagtcgccgccggaatcaaacccggcgacgtcatcgctctcaccttccccaataccgtcgagtttgttgtcttgtttctagccgtcattcgagtgcgcgccacagccgcgccgttaaacgcggcttacacagccgaagagtttga

SEQ ID NO: 40564 - DNA, 277 bp, Glycine max
  Clone ID: 701122996H1
gttagaagtgctacaatacaaacaatggcagctactcaggaagatgtgaagcttttgggtattgtgggaagcccatttgtgtgcagggtccagattgcccttaagttgaagggagttgaatacaaatttttggaagaaaatttgggcaacaagagtgatttgcttctcaaatacaaccctgttcacaagaaggttccagtgtttgttcacaatgagcagcccatagcagagtctctgtgattgttgaatacattgatgagactggaagaacaacccc

SEQ ID NO: 40565 - DNA, 251 bp, Glycine max
  unsure (1)..(251): unsure at all n locations; Clone ID: 701123004H1
gctggggtacccatggnagtgatgggtctgatgttgggggagttcgtngatgagtacaccgttcgcgttgtggatgtgtttgcgatgcctcanagtgggaccggtgtcagcgttgaagctgttgatcatgtttttcagactaatatgcttgatatgttgangcaaactggaaggccggagatggttgtggggtggtatcactcgcatcctggatttgggtgttggctttctggagtggacattaatacgcc

SEQ ID NO: 40566 - DNA, 264 bp, Glycine max
  Clone ID: 701123005H1
gggagatcgtcaagaaaaacaattccttcttggtcaagcagtttggaaggggcacccagagcgtcgaattcagcagagagagcaacaatctctacaacctcaattcgttcaagtactctggtttggcaaacaagaaaactgttactgttcagcctgagggcaaagatcaggctgtgttgttggctacaaccaagacaaagaagcaaaacaagcccgctgcattgctccacaaatctgtgatgaagaaggagttcaggaggatgg

SEQ ID NO: 40567 - DNA, 263 bp, Glycine max
  unsure (1)..(263): unsure at all n locations; Clone ID: 701123007H1
gtttaataggtcaagtattaaggtatagttggttgagttaatgaggaactgaaaataaggagataaaaatactcgagacatataatgtgaacagaagtaacagctgactaatccttgtacccgcaaatattaagtcaagtaatgtcttgaactagtagaatcagcacagtaatcaaagtanaccaaaataatgagattctttgatctttaggcttacactgtcatgatgctactgctacctgaatcagagacctttggagctt

SEQ ID NO: 40568 - DNA, 263 bp, Glycine max
  unsure (1)..(263): unsure at all n locations; Clone ID: 701123008H1
gtctcaattaaacctttgttttggtctgaattgaaaagggttgtgaattaatagtgatgtttatctctagatcaattctctttgtgtttgtgttctcagcttgcttgcttctatttccagccaatggaattcgntcatttgccacaacaaatggttatgaaactgaggttgaagaagttgatccttttgtgcaattcagagaggccccagaatacagaaaccagcaaaagtgcactctaattgacacaaccaatgttcaattt

SEQ ID NO: 40569 - DNA, 253 bp, Glycine max
  unsure (1)..(253): unsure at all n locations; Clone ID: 701123009H1
gangaaagangggtctttgcttgantntggagatgtntctgctctcagatctcatcaaccttnacctnnncgatnccaccgagaaggtgatcgncagagtnccatatgggatcggtggagacannnaatggaccctngaggagncaaaggcaangaactgcttcccaggnaaccagttgagtcgatcccttgcagcatgnnntgccncanagtcgnggaanctcantgncatcgngttttcccaagtcancaa

SEQ ID NO: 40570 - DNA, 264 bp, Glycine max
  Clone ID: 701123010H1
cccaagtaccctcgcattagcgcgcctccaagaaataagcttgatcattatcagatcctgaaataccctctgaccactgaatccgccatgaagaagattgaggacaacaacactttggttttcattgtcgacctgcgtgccgacaagaagaagatcaaggatgccgtgaagaaaatgtatgacatccaggccaagaaagttaacaccttgatcaggcctgatggaaccaagaaggcttatgtccggttgacccctgattacgat

SEQ ID NO: 40571 - DNA, 261 bp, Glycine max
  Clone ID: 701123012H1
cccacaaatagtcaaacaaggggatgatggtaactctggatccagtgctgtttgtgatgtaatatgcttgcaggctctctcaaagagaattcattatggaaaatatgtagctgaggcaaaataccaagctagtccagattcatataaagatgccattatagcacaggacaaggacaagttgatggaattgctaacatatcctgaagttgaagaggcaattaagaggagagttgacatgaagaccaagacttatgggcaaga

SEQ ID NO: 40572 - DNA, 257 bp, Glycine max
  unsure (1)..(257): unsure at all n locations; Clone ID: 701123013H1
tcattttccgatggcttctgcagatgttgagtaccgttgctttgtcggtgggctcgcttgggccactgacgaccatgccctcgagaganccttctctcagtacggcgaaatcgttgaaacgaagattatcaacgatcgtgagactggcagatccaggggttttggatttgtgaccttcgcctcggagcagtccatgaaagatgcgatcggagcgatgaatggacagaacttggacggccgtaacatcactgtcaatg

SEQ ID NO: 40573 - DNA, 83 bp, Glycine max
  unsure (1)..(83): unsure at all n locations; Clone ID: 701123015H1
gtggctagctaagctaagctaaaactaaactctttcagtttgttttaggcttacagctgtcttctgcttcttttgctttttnc

SEQ ID NO: 40574 - DNA, 267 bp, Glycine max
  Clone ID: 701123017H1
caagcctcaggtaagccaaaaccatggttaagcataacaatgttatcccaaacggacacttccgtaagcactggcagaactatgtgaagacttggttcaatcagccagcacggaagacaaggagacgattggctcgtcagaagaaagctgtgaagatattccccagacctacggctggacctctcaggcccattgtacatggtcaaactttgaaatacaacatgaaagtgagaggtggaaggggattttctcttgaagaactcaagg

SEQ ID NO: 40575 - DNA, 259 bp, Glycine max
  Clone ID: 701123018H1
ctcaagcgatctggcaagatggagctgccagagtggactgatattgtgaaaactgcaagatttaaggagttggctccttatgatcctgactggtactatgtcagagctgcttccatggcaagaaagatctacttgagaggaggacttggtgttggtgccttcagaggatttatggtgggagcaagaggaatggtagccgccctcctcatttctgcaagagcagtggtgctgttgctcgtcacattctcaacagttgcag

SEQ ID NO: 40576 - DNA, 265 bp, Glycine max
  unsure (1)..(265): unsure at all n locations; Clone ID: 701123019H1
ctcnagcnntacaaccagagatgncagcatccaaagaaggttttnggttaggctgctcgggactgcatctgngcttctctccccntncnncttctccagnnnagaaacggnggagaaagatttggnattcaaagtggcaatacngtgnaatatgaccactcagatctacatanngtaaagaacgagtggngcaacanaacntatcctcngggnccagggcacgngattgcnggtgtggtaacagaagttaggggcnaggtccatt

SEQ ID NO: 40577 - DNA, 264 bp, Glycine max
  unsure (1)..(264): unsure at all n locations; Clone ID: 701123020H1
attttagttgtcaacaccacccatttttaaagctttgaagcatcatcatcgctgtgttctagttagcttccaataactaatggtacttttgacagagaaacttgcaaaacgttacttcaacttcaagctggagantcgccaccatgccattacacatcctcaaccagaggagttatcatcttcacttcttgcgtttaaatcctatgtgtccaaatcaattgaccaattagcatttggatttgaaacctggatcagagaccttgt

SEQ ID NO: 40578 - DNA, 262 bp, Glycine max
  Clone ID: 701123021H1
gcttcagttgatgctactaagaaagttatatccggtaatcttgatgatttgatgccaccaccggagagacccatcttcagcttcaattccaagcaagagttaagcaagtggcatttgtattctgattctgaatttggaggtttgtcctctgcgtctctgcagataactgagtcggaaaatggagcaacttctggaatcttctccgggaacctttctctggatgtctctgaaggctctaaatggaacatcactcgaagtggct

SEQ ID NO: 40579 - DNA, 259 bp, Glycine max
  unsure (1)..(259): unsure at all n locations; Clone ID: 701123022H1
tgagagtggtgcagcattctgggcctgntgtccatttccgtatcgtgatggcactgattgtctcacagatagttttgatgggactcctcaccaccaagaaagctgcttcatcaactccttttctcattgtgctcccaatactaaccatatggttccataggtactgcaaaggccgttttgaatctgcatttgttaaatttcccttacaggtatgtcaattgtcttttgtgattagtaattcttgaacagtttgcattga

SEQ ID NO: 40580 - DNA, 263 bp, Glycine max
  Clone ID: 701123023H1
gtgctgcaatggcttcaagtcaggaggaggtgacccttttgggagctactggaagcccatttgtgtgcagggttcatattgccctcaagttgaagggagttcaatacaaatatgtcgaagaaaatttgaggaacaagagtgaactgcttctcaaatccaacccagttcacaagaaggttccagtgtttattcacaatgagaagcccatagcagagtctcttgtgattgttgaatacattgatgagacatggaagaacaacccc

SEQ ID NO: 40581 - DNA, 88 bp, Glycine max
  unsure (1)..(88): unsure at all n locations; Clone ID: 701123024H1
ctcgcntgctaacgtacancgnntgcagttgtctggtgcagcgagtagagtgngtcgtcgtactgctgncagcaacaaggtttngcca

SEQ ID NO: 40582 - DNA, 262 bp, Glycine max
  unsure (1)..(262): unsure at all n locations; Clone ID: 701123025H1
atgggttctgngttggcacaacgagttggcattaatgaagttgcagaaagcatgatggccttcaataccaattacaaggatacaggtctttttggtgtttatgctgttgctnacaaagattgtttggatgacttaagctatgcaataatgtacgagacaaccaagttggcttatcgggtttcagaagatgatgtcacacgtgcttgtaatcagttgaaatcttcactcctgctccacatagatggaacaagtccagtagcng

SEQ ID NO: 40583 - DNA, 265 bp, Glycine max
  unsure (1)..(265): unsure at all n locations; Clone ID: 701123030H1
ccgaaggancntttcangatgaagttcancattgcgaatcccaccaccggttgtcagncagaagctggagatcgatgatgacctgaagctgcgagcatnttnggacaagaggatctcacaataggttgttggtgatgctctgggtgaggaattcaaaggttatgtcttcaaaattactggaggttgcgacaagcaaggatttccaatgaagcaaggagtgttgacccctggtcgtgttcgcctcttgctgcatagaggaactcct

SEQ ID NO: 40584 - DNA, 266 bp, Glycine max
  unsure (1)..(266): unsure at all n locations; Clone ID: 701123031H1
ggacagttaaaattatagcttgcaaaaagggttcactagcaaacattgcaatggcctcaacctncttctgctctcactatatcctcttcttccacccttcttgatggcaaggctccaagacagtcaccagctgcttcccctcaatgtgtgagcctcccccctccccctttgcactctcagaaccgttcatggaagaccactgcttattgtcgcaaggttgctcganaagttatggcaatggccacaggagaggcaccagctgaagt

SEQ ID NO: 40585 - DNA, 267 bp, Glycine max
  unsure (1)..(267): unsure at all n locations; Clone ID: 701123032H1
ggcttcctcantgatctcttccccaactgttaccactgtccaaccgtgccgatgccggcntggttgctaccattcgctgggcntcangtccatggcttgnttccccaccaggaagaccaacnatgacattacctccnntgctagcaacggtggaagactgcaatgcatgcnggtntggccaccagttgggcaagangnagtttgagactcntcctacctgccagaccttgntgatgcncaattggcaaaggaagtagagtaccttct

SEQ ID NO: 40586 - DNA, 263 bp, Glycine max
  unsure (1)..(263): unsure at all n locations; Clone ID: 701123034H1
agaaaaccctagttcgcttgcagtcacacaagaggccantnntgattcatagctgcgagatgggtgaagaagtgaaggtagttgttccagaatcagtgttgaagaancgcaagagggaggaggaatgggcgttggccaagaatcaagaactcgatgctgccaagaagaagagagccgagagccgcaaactcatctacaacagagctaagcagtacgctaaggagtacgatcaccaggagaaggaattgattcggttgaaacgc

SEQ ID NO: 40587 - DNA, 261 bp, Glycine max
  unsure (1)..(261): unsure at all n locations; Clone ID: 701123035H1
gcccctcccagcccttcaagggggcccgcatcaccggctccctccacatgaccatccaganccgccgttctcattgagaccctcaccgcccttggcgccgaggtccgctggtgctcctgcaacatcttctccacccaggaccacgccgccgccgctattgcccgcgacagtgccgccgtcttcgcctggaagggtgagaccctccaggagtactggtggtgcaccgagcgcgccctcgactggggccccggtggtggaccc

SEQ ID NO: 40588 - DNA, 259 bp, Glycine max
  Clone ID: 701123036H1
ctttgtttcataggctcctttttgattacgaaaatgtggaagagaacgggttttgaagaagaagcagttcaattgatcaactcagatttcagggacctaagtctagctgctaatagactcgcccatcatgccatcaaacttggtggcattggctttggagcctcttttttcggattgtttgctgccattgctgctatttatctgttgattttggatcgtacaaactggaaaacaaatattctcacagcactactcattc

SEQ ID NO: 40589 - DNA, 259 bp, Glycine max
  Clone ID: 701123037H1
aaggaagatggttctaaaggtgatcaacttgctctggacgtaaagagtttaaatttgaaagaggaggcttctcaggatagaaaagataatggtaatcgggcacagacattcagttttaatgaacttgaagctgcgacgggaagttttaggttggattgttttttgggtgaaggaggcttggcaaggtttacaagggacacttggagagaataaaccaggttgtagctataaagcaacttgaccctaacggacttcaagg

SEQ ID NO: 40590 - DNA, 259 bp, Glycine max
  Clone ID: 701123038H1
cagagttgaggctgggtcttcccggatcccaatcgcctgaaagggagccggatcttttctctttaagcccagcaaagcttgatgagaagccactgttccctttgcttcctactaaagacgggatttgcttgtcggcgcaaaaaactgttgtttctggcaacaaaagaggttttgctgataccatggatgggttttctcaggggaagttcgctggtaatacagggatgaacgcaatgctatcacctaggccttctggagc

SEQ ID NO: 40591 - DNA, 259 bp, Glycine max
  Clone ID: 701123039H1
cccagattcaaccagttaaacttggaacccaaggctttgaggtttcaaaattgggattcggatgtatgggccttactggagcgtacaatgaccctctccaagaacaggatggcatatctgttatcaagtatgcgttcagtaagggaatcacattttttgatactgcggatgtttatggagccaatgctaatgaacttttggttggaaaggcttgaagcagctgcccagagaaaagattcagatagccacaaaatttggt

SEQ ID NO: 40592 - DNA, 242 bp, Glycine max
  unsure (1)..(242): unsure at all n locations; Clone ID: 701123040H1
gnccaacctgcacactcttcaacncgatcnccacagaanatggcaaagaatgtggggatccttgccattgacatctacttccctcccgcttgcgttcagcaggaagcattggagactcatgatggtgccagtaaagggaagtataccattggtcttggacaagattgcatgtcattctgtaccgaagtagaagatgtcatctcaatgagtttgacagtggttacttctcttcttgagaaata

SEQ ID NO: 40593 - DNA, 260 bp, Glycine max
  unsure (1)..(260): unsure at all n locations; Clone ID: 701123041H1
gcacggtgggcgtggtgctttgccttctgaaggtggtagcccttcagacntgctcttcttagctggtggtggttctgctgtcttctagcttcttcttaactcttttttctttttnctacttttaagctaccttgttttcaaaataacaaaaacnaacacttncttacttcntaagatcaccttttcttcatcttctacttntccttcactaanatgatgctcaaaatcaagagggttcccactgtngttncccaattcca

SEQ ID NO: 40594 - DNA, 258 bp, Glycine max
  unsure (1)..(258): unsure at all n locations; Clone ID: 701123042H1
ttccagcgtttgantcgatgccgcaactccaaagatacgaactttactccattttagaagacgggtctaaacaactgcgttcaantcttcccaattttggattctcgtgtaactgaaactgaaactgcttctgcttcggaagcttctttctttgggggcaacaatgatgaacaaaactcttctcctcacttatttctacttgttcatctacattttgctttcttctggagtcatttgtacaacaaggttgtcactccg

SEQ ID NO: 40595 - DNA, 261 bp, Glycine max
  unsure (1)..(261): unsure at all n locations; Clone ID: 701123043H1
anangcgtcttaataaacgctcttctctgaaaaacctgatttcttctcttcttctgcttctgctttcntttcgatcttcgatctctgaaaatgagagagtgcatttcaatccacatcggtcaggccggtattcaggtcggaaacgcctgctgggagctctactgcctcgaacacggcattcagcctgatgggcagatgccaagtgataagactgttggtggaggtgatgatgctttcaacaccttcttcagtgaaatgggg

SEQ ID NO: 40596 - DNA, 250 bp, Glycine max
  unsure (1)..(250): unsure at all n locations; Clone ID: 701123044H1
gttattctggaacagcaattatctcaaggatcaagccactttcagtnngatatggtctaggtataccagatcatgatagtgagggtagacttgtaactgctgagtttgatacattttatttgatatgtggatacgtccctaattctggagatggcttgaaaagattgtcttacagggtgactgaatgggatccatctctcagcaattatttgaaagagctggagaagtcaaaacctgtaattttgactgg

SEQ ID NO: 40597 - DNA, 260 bp, Glycine max
  Clone ID: 701123046H1
tgcttctttgttccataggttcgtaccttacattgctgctattgacacaagggtgtgttgttttgtttttatcatcattgagaactaattaaggtacgtgtaaatgggtaagaagcttgatgctctccttggtagaaccttcaaggctgcaaagttcaaggctattgttaaccttgccatctcgcgccttgccgttctcaagaaccagcgccaggctcgccttagacaggcccgttctgatatccttgaactcctccaaa

SEQ ID NO: 40598 - DNA, 260 bp, Glycine max
  unsure (1)..(260): unsure at all n locations; Clone ID: 701123047H1
gttcctgtgaggactttagctcttgttgctttgcttgttgccattaatgcaatggtgtgtgaaagtagagtggtaagaaaggaccttggtttgncaccttggtggggtgggaattggggtgggtgctggggttggattaggccttggtggtgcaggttctggtgcaggtgctggctcaggctctggctctggttcttcatcttattcaagttctggctcttcttcttcatcagggtcaggatctggagcaggttctgaag

SEQ ID NO: 40599 - DNA, 260 bp, Glycine max
  Clone ID: 701123048H1
ctcgagcgattaagttaagatcttccactgctggttatcacctttgttccagtcccagaggactattgtagtgccatcacgaacacctccagaattcttgtcaccgtgaaaagcatccacattaagatgaacattgttgaccatccttatagctctgtggccatctcctaagtcacggctttcagtccatagaatagactcatcaagatagtcgggcttgtaaggtatcagccgaacaggatgagtggcacgatggagtg

SEQ ID NO: 40600 - DNA, 265 bp, Glycine max
  unsure (1)..(265): unsure at all n locations; Clone ID: 701123049H1
cttnacttgacttgtctctgtctgtccatatataacattctattcgtacttcattttacattctcactccctcaaacagtcaaactttcatctttctcattcacttaacccaagtgtaaaaatggcagcattgaatatgtccactgtgagacttccaagagcttccttgtctggaacgacaccagctaggagatcttgtgctctcatcaagaatccatcatctttgaggtctgtgaagaacgtgtctaaagtatttggattgaaa

SEQ ID NO: 40601 - DNA, 258 bp, Glycine max
  Clone ID: 701123050H1
gggagccacagctatgcagagccaagttgtgtgcaatggttgtaggagccttctgctttacccaagaggggcaaccaatgtttgttgtgcattgtgcaacacaattacctctgttcctccccctgggatggaaatgtctcaactttattgtggagggtgtaggacattgctaatgtacacacgtggagctacaagtgtgagatgttcctgctgtcacactgtaaaccttgttccaccagcatctaatcaagtagctca

SEQ ID NO: 40602 - DNA, 259 bp, Glycine max
  Clone ID: 701123051H1
caagggtccaaattttgggacaaaagtgagcaactaccctccttgtcccacccctgatctgatcaagggactaagagctcacactgatgctggtggcataattctactcttccaagatgacaaggtgagtggcttgcagctcctcaaggatgaccagtggatcgatgtcccaccaatgcgtcactccattgtaatcaaccttggtgaccacttgaggtcataaccaatggcaagtacaagagtgtgatgcaccgagtga

SEQ ID NO: 40603 - DNA, 262 bp, Glycine max
  unsure (1)..(262): unsure at all n locations; Clone ID: 701123053H1
attttccagtcatttcaaggngtccattgcaaacgtcgctgacattggaccaggggcgaaggagagctactgaggtttacatgccagaaaacatgtcagagaatatttattcggatgaaggaaggtatttaatccccagacaagatccattgatccccaggcaagatccattgatccccacgcaagatccattgatccccaggcaagatcctttgatccccaggcaagatccattggtccccaggcaagatcctttggctgc

SEQ ID NO: 40604 - DNA, 263 bp, Glycine max
  unsure (1)..(263): unsure at all n locations; Clone ID: 701123054H1
agagagttcgacgcggcggttgcggaagaagattgcaagatgaagttcaacatcgcgagtccccaccactggatgccagaagaagctcgagatcgacgacgatcagaaactacgagcattttgggacaagaggatctcacaggaggtcagcggagatgcacttggtgaggaatttaagggctatgtcttcaaaattactggaggttgtgacaaacaaggattcccgatgaaacagggagtgcttactcctggtcgtgttngnc

SEQ ID NO: 40605 - DNA, 245 bp, Glycine max
  unsure (1)..(245): unsure at all n locations; Clone ID: 701123055H1
atggcacggcccctggttgctcagtgagaaaacacgttgagcgagctncacatgacatncaaagctgtgatcacaacttatgaagggaaacacaaccatgatgtacctgctgcacgtggtagcggaaactattacatgaacagaaattctctgaacagcagcataccagcacctataagaccctcggcagtgaattgttattctaactcatcaagtttcacaaactctctctataatantactag

SEQ ID NO: 40606 - DNA, 262 bp, Glycine max
  Clone ID: 701123056H1
ccctgatatcgcccagggtgtgcacggtcacttcaccaagcgcccagaggaggttggtgctggtgaccagggtcacatgtttggctatgccactgatgaaacccctgagtacatgcccctcagccatgtccttgcaaccaaactcggtgctcgcctcaccgaggttaggaaaaatggtacctgtgcttggctgaggccagatggcaagacacaagtaactgttgagtactacaatgacaatggtgccatggttccagttcgt

SEQ ID NO: 40607 - DNA, 225 bp, Glycine max
  unsure (1)..(225): unsure at all n locations; Clone ID: 701123057H1
attctactctcatactctcaanactctctacgctctttgnttnctccactanggctgcacaacgaaacttccaagactacttgcctgtgatggccaacaagcttggtggggatggcctaattgatgaactgtgcaatgggttcaatctgttgaaggattctgataaaggggtcatcacctttgagagcctcaagaggaactctgccttgtttggccttcagggtc

SEQ ID NO: 40608 - DNA, 261 bp, Glycine max
  unsure (1)..(261): unsure at all n locations; Clone ID: 701123058H1
ggaggctcacccctacgtcccacgcgatttgcacttacccggctacgctccctgcttcctttccatgtccaacattcttncccgtcttcgcctcctcctcattgctcatcgtcactctcgtctggatcttctctggacgctttaagaaaaccaaagttgatagagtgctgatgtgctggtgggccttcacaggtctcacacacattattcttgagggttattttgttttctctcctgagtttttcaaggataaaactggct

SEQ ID NO: 40609 - DNA, 259 bp, Glycine max
  Clone ID: 701123059H1
ggcgaatcggccgccggtggatctcgtcatggtgatcgacgtccgaggtagtgtcaccggtgaagagctttggatgctgaaacgttcgatgcaggttgttatctcgtcgctcggctccgccgaccgtctctccgtcgtcgcattctcaggcggatcgaagcggctatttccgctgcggaggatgacccgctgcggccagacagcggcgcggcgagtcgtcgacgcgctggcctccgttgagctccgccgagaaggaatt

SEQ ID NO: 40610 - DNA, 261 bp, Glycine max
  unsure (1)..(261): unsure at all n locations; Clone ID: 701123060H1
aatccccaatcctcctatttaatttggtgtccctaaatcaccatgccaacttcactttccaaattccatgcttcanttcaaanttaacaaaaattaaaacacacccatcatcacttttcaacactgattcttcaanttcttggatctgactctgctctccacagttaccaaagctacgttctttggtgctaagttcaagatccaatggcggttgctacaagaggagctagaggtggatctagttttcgaagcttgttctcg

SEQ ID NO: 40611 - DNA, 241 bp, Glycine max
  unsure (1)..(241): unsure at all n locations; Clone ID: 701123061H1
caaagaccccactcaaccaccaancctctcctcgttcacgctacccctttctgctcttcttctacctttcaagttttaaaagtataaagatggcagagacattcctatttacctcagagtcggtgaacgagggacaccctgacaagctctgcgaccaaatctccgatgctgtcctcgacgcttgcctcgagcaggacccagacagcaaagttgcctgcgaaacatgcaccaaaaccaattg

SEQ ID NO: 40612 - DNA, 261 bp, Glycine max
  unsure (1)..(261): unsure at all n locations; Clone ID: 701123062H1
gctccctcagaagcgaagaannagccacagagaactngnctcctactctcacccgcaagaaaaaaatggcacctcanntcgttggatacccccgtatgngtcccaagagggagctcaagttcgctctcgagtcttctgggatggcaagagcagcgccgaggatttgcagaaggtgtcttctgatctcaggggcatccatctggaagcagatggctgatgctgggatcaagtacatccccagcancactttctctcactatg

SEQ ID NO: 40613 - DNA, 263 bp, Glycine max
  Clone ID: 701123063H1
gacggaggagaactcgactgaagctgcctctgcgacgccgtttcgattcagcctcagacatttctgttgcagtcatggtgcaagaaaatggcaagaggaagaaaccaaacattctggtgactggcacaccggggacaggaaagacaactgtgtgcactgctctagctgaagccacccagctctgtcacatcaatgtcggagaattagtcaaagaaaagaacttgcatgatggatgggatgatgagcttgattgttaccttctt

SEQ ID NO: 40614 - DNA, 258 bp, Glycine max
  unsure (1)..(258): unsure at all n locations; Clone ID: 701123064H1
attcttgacaaaatggccgtaacagaagcaaacctaaagaaggctggcttccacacatgggagcagtncaattctcaaggatccacatcttatcactccaaatgcactttcatacaaatcagcaatgagagagaatctgttgaggcagggatacagaattgttggaatcattggagaccaatggagcgatctgcttggagaccacagaggcgaaagcagggacctttaagcttcctaatcccatgnactacntgagta

SEQ ID NO: 40615 - DNA, 260 bp, Glycine max
  unsure (1)..(260): unsure at all n locations; Clone ID: 701123065H1
cacccatatctctcagccttcgaaatttctancctttccttcggggaactgctccgttcctgaaaccatcatctgggtcgcacannnnnnnnnnnnnnnnnnnnnnnntctccgatggcttcggcggccatattctcgtcgctacggcggcgcngtntccgtcgctggagggnttctggtgccggtcgacctctccgacgtggcgctgctggagactcttatctcngtcgcnagcgacgtcgcgtcctgnntctccggcc

SEQ ID NO: 40616 - DNA, 257 bp, Glycine max
  unsure (1)..(257): unsure at all n locations; Clone ID: 701123067H1
gagaccctttgtgacagcctgtatcctctccatcgtctgatagattcttcattttttttccatttctcgcggcaagatctcacactctgcacctagggttagggttttggttcttgcggcatggcgacttcttcgagttcttcgagctggcgcgagggcatgtcctccgacaacataaagggantgtgcctcgctctctcttctagcttcttcatcggcgccagcttcattgtcaaaaagaagggtttgaagaaggc

SEQ ID NO: 40617 - DNA, 251 bp, Glycine max
  unsure (1)..(251): unsure at all n locations; Clone ID: 701123068H1
cccgccgctcgatgggaattgcgcttcaaggnntctcgtagggctaanccgcctcacgagggtcaccaacggcacgtgcctttggggggccgaggccccctaactgctggtcggcaaacggacggcgggcgcacgcgtcgcttctagcccggattctgacttagaggcgttcagtcataatccaacgcacggtagcttcgcgccactggcttttcaaccaagcgcgatgaccaattgtgcgaatcaacggt

SEQ ID NO: 40618 - DNA, 167 bp, Glycine max
  unsure (1)..(167): unsure at all n locations; Clone ID: 701123069H1
gttnagtcgntcggcgcaacncanatgtgatgggaagcaatggattgctgcaaccttnnngtnttgcttgcaaagcctcntaccaaccacactcctnaccacaaccatancnaaanccagctggtgtntgcnganacggngccattggacganaccctaggccantc

SEQ ID NO: 40619 - DNA, 258 bp, Glycine max
  Clone ID: 701123070H1
gactgcctccatacctagttctgatgtgctaaagctcgaaaacaagcattcaccagaggaacaaatcactgaggacatgagcaccgatgatgggttgatttccccagctctaacagggagggaatgtgtgccgttagtgggtagctcggaaggaggcttgcctaatactccctgcaagttggaaacacttaaggatggacctggaaagaataaaagatctaagtccagtggcaaagatcaagaaaatgtatccgggaa

SEQ ID NO: 40620 - DNA, 259 bp, Glycine max
  Clone ID: 701123071H1
atgggtgccgtgacctcttcaatggcggccaagctggcgttcttccctccttctccgccgtcctacaaggtgctgaaggaggaggccacggggctgctgctgatggacccgttcccgcaccgcgagaacgtggaggtcctgaggttcccgaaccgccgcggtaccgagatcgtggccattcacgtgcggcaccccatggccaaatccaccctgctctactcgcacggtaacgccgccgacattggccagatgtacgagc

SEQ ID NO: 40621 - DNA, 259 bp, Glycine max
  unsure (1)..(259): unsure at all n locations; Clone ID: 701123074H1
gggggaanctatcagttgangattnccnctctctgnttcgcaaggnactctnttgttaaanaactncaaataattattatgaaggttaaaagttattggggaaccttgaaatattttagcaaatttttatcttagtctccctaaatccttttgttaattgtttaaatctattagaagggtaatgcaaaactgaacaaatgaattaaacaggaatccagcagaaactaaaggaaaaatcctctntaacacccttctatat

SEQ ID NO: 40622 - DNA, 258 bp, Glycine max
  unsure (1)..(258): unsure at all n locations; Clone ID: 701123075H1
gtntaatctggaactccgacttgattgatactattgaattnnaaaatcttttgataaatgcatgcatcacaatgtactctgctgaagctaggaaagagagtagaggagctcatgcccgtgaagacttcaaggttagagatgatgggaactggatgaaacacactgtgggattctgggagaacgagaaggtccggttggactacangccggtgcatttgaatgtattggatnatgaggttgaatcnttccctcccaagg

SEQ ID NO: 40623 - DNA, 258 bp, Glycine max
  unsure (1)..(258): unsure at all n locations; Clone ID: 701123076H1
cagggagaagcttctcacatcccttcgtcaacacctctccgactcttctcgttctctccatggcttcgtcctnccttcaaggtggcgaggagcaaacgcgttacgacaccgatcacttggagctcttcaggcaagagagttacttcgcttacttgtttggagtcatagagcctggattctatgcagctattgacgttgcaactgggaattctatcctatttgctcctaggttaccttctgagtatgctgtttggttgg

SEQ ID NO: 40624 - DNA, 259 bp, Glycine max
  Clone ID: 701123078H1
gaggagaatgccgaagaacaagggaaagggaggaaagaaccggaagcgcgggaagaacgaggcggacgacgagaagcgggagcttgtgttcaaggaggacggccaggagtacgcgcaggtgctccggatgctggggaacggccgctgcgaggcgatgtgcatcgacggcaccaagcgcctctgccacatccgcggcaagatgcacaagaaggtctggatcgccgccggcgacatcatcctcgtcggcctccgcgactac

SEQ ID NO: 40625 - DNA, 261 bp, Glycine max
  unsure (1)..(261): unsure at all n locations; Clone ID: 701123080H1
aacctctctcagagtttgctcacccctactcttcttccagtctctatctcaatctccatcaaatttaactatggctactgaagaggttttggttgatgaaatcacttaccctaccaagatcactactaccaagcccctatctttgcttggccatggaatcaccgacatggagattcacttcatccatgtgaaattctattcaatcggggtttatttggagccagaagtagtaggccacttggaccagttcaaaggaanatc

SEQ ID NO: 40626 - DNA, 240 bp, Glycine max
  unsure (1)..(240): unsure at all n locations; Clone ID: 701123081H1
gangattctcccatctgcttactcactgatctccantcccattccatggcttccactgaatcatcccctttcaagaaaattcagattcaaagggatgacactacatttgacgcatatgtggttggaaaagaggatgctcctggaattgttgtgattcaggagtggtggggtgtggattacgaaattaagaaccatgccgtgaagatttctcagcttggtagtgggtttaaagctcttatt

SEQ ID NO: 40627 - DNA, 257 bp, Glycine max
  unsure (1)..(257): unsure at all n locations; Clone ID: 701123082H1
attatatatctagctcttcattttctcttgtncaatcaaggttatgctttaaaattctgaaactcacagtttcaggcaaattttagtctaaagatctgtgcgttgacccttggcaggttcagcttttggaggggttggagttgttcttccacataagccattgattcattccaagtttctctttnctctctctcaagttcaaaattttgttgtttttctttctgtctctttggtggacttgtggaatgctggggtca

SEQ ID NO: 40628 - DNA, 258 bp, Glycine max
  unsure (1)..(258): unsure at all n locations; Clone ID: 701123085H1
gtaaaatttgagcaagagattgaatgtggtggaggttacatcaagcttctctctggatttgttaatcaaaagaagtttggtggggatacaccatatattttaatgtttggaccagatttatgtggcacggatacaaagaagctccatgtgatactctcctaccacggtcaaaattaccccataaagaaggacctgcaatgtgaaactgacaggttaactcacttctacacattcattctcangccagatnncacatac

SEQ ID NO: 40629 - DNA, 241 bp, Glycine max
  unsure (1)..(241): unsure at all n locations; Clone ID: 701123086H1
cgagaatctccggttcnggcacnccacattccctcntccaagaaaaaccacannannntcctcctctccctcttggccacnctcctcgtggcggcttcnctggtggccattgttgtcggagtaaaaaataaaaactccgacaactctgccaccagcacccccctctccctctcccaccactcacacacgatcgtgaagagcgcgtgcagctccacattctaccccgaantctgcnactccg

SEQ ID NO: 40630 - DNA, 258 bp, Glycine max
  Clone ID: 701123087H1
ggtggatcagatgacgacgtggtgattgtagctgcatatcgtactgccatctgcaaagcaaagcgtgggggctttaaggatacccttccagatgacctgcttgccacagttctgaaggctgtaatagagaaaacaaatgtgaacccagcagaagttggagacattgttgtgggcactgtactggcacctggatcagatagaggaattgagtgcagaatggctgccttttatgcaggtttcccagagacagtgcctctt

SEQ ID NO: 40631 - DNA, 262 bp, Glycine max
  unsure (1)..(262): unsure at all n locations; Clone ID: 701123088H1
cttttccctccctttctcaggaaaattcccccgattttctcgagaaagtgaaacgnaattatgagctttcaggacatcgaggccgggcgccccttcggttcgaggcgcgggttgntgaatgggaagcaagaccccacgcaagcggtggctgccggcatattccagatcaacactgccgtctccaccttccagagactcgttcaacaccctcggaacccccaaagacaccctcgacctccgcgaaaagctccacaagacaaga

SEQ ID NO: 40632 - DNA, 259 bp, Glycine max
  unsure (1)..(259): unsure at all n locations; Clone ID: 701123089H1
tggcgcctcccattcccaaagttctcatggtcgcagagaancccagcatcgctactctctattgcttctgttctctctcacgctcagatgtttacgagaaggggaagcactgaagttcatgaatttgatggcaagtttcttggatcgcctgcacattttagagtaacatcagttattgggcatgtattcagggttggggcagtttatggtgcaaaccatgctatttggtcttgctgcacgttacttgttacacctgtat

SEQ ID NO: 40633 - DNA, 260 bp, Glycine max
  unsure (1)..(260): unsure at all n locations; Clone ID: 701123090H1
gcagtcgcaaccctaancagaagaagcgcagttcaangcgagtgacagccaccagccatgggtngtatgcacagccgcggtaagggtatatcctcttctgctttgccctacaaaaggacacctcctagctggctcaagatctcttcgcaagatgtcgaagaaaatatctgcaagtttggcgaagaaaggtttgaccccgtctcagattggtgtcattctcagagattctcacggtattgctcaggtcaatagcgtcatgg

SEQ ID NO: 40634 - DNA, 249 bp, Glycine max
  unsure (1)..(249): unsure at all n locations; Clone ID: 701123092H1
ctgtgacttgttttgagttcaatcaaatcgcattggtatctgaaatcnggaaagatggttagcgtantgannatcaggcaggcacaaagggcagaaggcccagcaaccatccttgccattggaactgcaaacccaccaaaccgtgttgatcagagcacctatcctgattactacttcagaatcaccaacagtgaccacatgaccgagctcaaagagaaatttcagcgcatgtgtgacaagtctatgtcc

SEQ ID NO: 40635 - DNA, 259 bp, Glycine max
  unsure (1)..(259): unsure at all n locations; Clone ID: 701123093H1
aaaccttctcttacccttntctcaagtttcaagagatttcatcatggctccaaagaaggacaaggctccaccaccttcctccaagcccgccaaatctggcggtggcnnnnnnnnnnnnnnnnnnnnnnnnnnnggaaagcaaaaggagaaggtgaacaatatggtgctgtttgatcagggcacctatgacaagctcctttctgaagctcccaaatacaagctcatcactccttccattctctctgatcgtttgaggatt

SEQ ID NO: 40636 - DNA, 261 bp, Glycine max
  unsure (1)..(261): unsure at all n locations; Clone ID: 701123094H1
cttctacattaatctttccatcagacatcagttttccatgatattctgcactcttgtattctgagctgaacaaattctgttcttctctcgtancgtgaagtaaacaataagcacataaaccttcgtggacatggcaacaacagccttgtccacgaccagtgtgctttgcaggaggaaacctcagcacatgcatattatcctaccctcttcacagacactccaaaatggaactctaagaactgatgtaactgcttcagcctc

SEQ ID NO: 40637 - DNA, 260 bp, Glycine max
  unsure (1)..(260): unsure at all n locations; Clone ID: 701123095H1
cttaaacnccgtcgttttcaaactcttttttnccccttcgcntctctgtctttgtaaccgaaaggggggaaaatataattaacaccgatttcgcnaccaattcttcttctgcgttgaattgggacaacgagaaattggatctcagtttttggcaggaaataaaaattgcatttgagtgtaaaataacagagtatagtgantggccttgttcttgatactgtgctaaatttgttggatggcggagaaatcatgcatcaagc

SEQ ID NO: 40638 - DNA, 262 bp, Glycine max
  Clone ID: 701123096H1
atcgcggttcccatcatcaaagaggtcgatttgtacaagtttgatccatggcagcttccagaaattggctactacggcgagaaagaatggtacttcttttctcctcgggatcggaaatacccgaacggttcacggccgaaccgtgccgccggaagcggctattggaaagccaccggcgccgataagggatcggaaaaccgaaagcgctagggatcaagaaagctctggttttttacgccggaaaagcccccaaaggagtgaa

SEQ ID NO: 40639 - DNA, 258 bp, Glycine max
  unsure (1)..(258): unsure at all n locations; Clone ID: 701123101H1
ganaggtgcatttcaacactctagctttctagctggggctgctacaacagctgcaggaagattagtggctcaacaaggtgtacttgaggctatttggccatatagtggtcactatcaccctacagaagagaactttaaagaattcataagctttcttgacgagcacatgtggatcctttccnaatgnncaggaatgggncccaaanggccgagncccctccnattnggggggccattntttttgggnnntaaannccc

SEQ ID NO: 40640 - DNA, 239 bp, Glycine max
  unsure (1)..(239): unsure at all n locations; Clone ID: 701123102H1
aatttcgtggtgctaaatctgaccaagcacagntcctatctcancntacaacanttctactctancttcagctctgctattcagangcagtactttgagaaatacggttntggagagtntcatttgtntcagatgatacctgttnctncaaatgatgttgcnttcncgatccaagnngnacanntganggcatttacattgtnccagtttgcaatctatgacncgngggagncagaaag

SEQ ID NO: 40641 - DNA, 250 bp, Glycine max
  Clone ID: 701123103H1
tggacccgtatgtactgttacaatacaaaggtcaagagcgcaagagcagtgtaattcatgagggcggcagaaatcccatatggaatgagaaatttgtattcagagtggaataccctggatcaggtgatcaatacaagctcaaccttagaatcatggacaaggatgtattttctgcagatgactttgtcggccaggctacaatctatgtgaaggatttattggcggaaggagcagagaacggatcagctgt

SEQ ID NO: 40642 - DNA, 200 bp, Glycine max
  unsure (1)..(200): unsure at all n locations; Clone ID: 701123106H1
tgaagcnatcgatgctcagatctctccactaccgccgccacncncggcgcctctcatctcttccgccgtgggtacgcntncgagccggtgccggagcgcaaggtagccgttctcggcgccgccggcggggatcgggcagcctctctcccttctcatgaagctcaatncncncgtttcgagcctctccctttacgatatcg

SEQ ID NO: 40643 - DNA, 164 bp, Glycine max
  unsure (1)..(164): unsure at all n locations; Clone ID: 701123107H1
gtgaagcttgtggaataaagcctgaacaagtggaagngactgatgctgctcttcttgccctaattgnnnattactgccgagaatcaggggtcaggantcttcaaaagcacatagaganaatttaccgaaagatagcgctacaacttgtgaggcaaggggagatg

SEQ ID NO: 40644 - DNA, 252 bp, Glycine max
  Clone ID: 701123109H1
ctctctcacaaaatgacaacaatatcaaattgctcccttctccttcctcttcctcttcctctccaccctccacatagcttccaccctctcaacccccaccaacttcatcaagtcctcctgcagcaccacccagtacccagccctctgcatccagtccctctccgtctacgcctccaccatccagcaagacccccacgagctcgtccagacagccctctccctctccctcaaccacaccgaggccaccaaaac

SEQ ID NO: 40645 - DNA, 198 bp, Glycine max
  Clone ID: 701123110H1
aagtccttgaagtgctgctctagtttgaggcacaatgagattggagaaatgctggttttgctcttcaaccatataccctggacatggaatccagtttgttcgtaatgatgcaaagatttttcggttttgtagatctaaatgccacaagaactttaaaatgaagagaaatcctcgtaaggtaaaatggaccaaggcata

SEQ ID NO: 40646 - DNA, 248 bp, Glycine max
  unsure (1)..(248): unsure at all n locations; Clone ID: 701123112H1
catcaatcagcatcaccaccgctccaacacaggggaaaatgagggagatccttcangttcagggagggcaatgcgggaaccagatcggttcgaagttctgggaagtggtgtgcgacgagcacggcatagatccgacggggaagtacgtcggaaactcagatctacaactcgagcgcgtgaacgtgtactacaacgaagcttcctgcgggcggtttgtcccacgcgcatgctgatggacctggagcccg

SEQ ID NO: 40647 - DNA, 249 bp, Glycine max
  unsure (1)..(249): unsure at all n locations; Clone ID: 701123113H1
ctgatgntngaggacattcaacctcttgttgttgataatggaactggaatggtcaaggctggttttgcaggtgatgatgctcctagggccgtgttccccagcattattgggagaccacgccatactggtgtaatggttgggatgnntcagaaggatgcttacgtgggtgatgaagcccaatcaaaaaggggtatactcaccttgaagtatcctatagagcatggcatagtcagcaactgggacgntatg

SEQ ID NO: 40648 - DNA, 150 bp, Glycine max
  unsure (1)..(150): unsure at all n locations; Clone ID: 701123114H1
ccccaatccaatccattccaattnccattgttttcttttctctnccatccatggattctctncanttccacacaacataaaaaancaaaanaacngcancacngatcncanattcacgttttcacnccaancctccttccacacaacana

SEQ ID NO: 40649 - DNA, 254 bp, Glycine max
  Clone ID: 701123116H1
agaaaccctaaattgaagagaagagtgaagattgagagttagggtttaagcgaaatcagatcagagaagaaggcatcatcatgtttccaggaatgttcatgcgcaagccagacaaagctgcagcactgaagcagctgaaatctcacgcggccatgttcggggcatgggttgttgttattcgagtcaccccttacgttcttcactttctcagcaccgagaaagaggaacttaagctcgagctttagcttctcact

SEQ ID NO: 40650 - DNA, 245 bp, Glycine max
  unsure (1)..(245): unsure at all n locations; Clone ID: 701123117H1
cttcagcgtagcaaacatgatcattcccgagaagaaccgtaaagagatctgcanatacctnttccaagagggagtttgctttgcgaagaaggacttcaatctggcgaagacccggagattgatgtgccgaatctgcaggtgataaagctgatgcagagcttcaaatccagagagtacgtgagggaaacatttgcgtggatgcactattactggttcctcaccaacgatggaattgagttccttag

SEQ ID NO: 40651 - DNA, 250 bp, Glycine max
  Clone ID: 701123119H1
gccaatcccaagtggatgtattgcaaaaagaacttacagagttaaagtcttgcaatcaggcttcagatggaaatgcaaaaaaggagttggaggttctttggcgaagagtcaagactgcttctacattgttgacttacttaaaatcaaaagctaggctcatggctgttcctcatctagcccatacatcttgtggcatcaaacaattagagggggtaggctttgttgacaaaaatgggataccattatctgg

SEQ ID NO: 40652 - DNA, 249 bp, Glycine max
  Clone ID: 701123120H1
gttgtcagtcctagtgatatgatggatggtcgggtaggagcactgcgtgcagctctggatgctgaaggctttcagcatgtttctataatgtcctatacagcaaagtatgcaagttctttttatggtccatttagagaggcactagactcaaacccccggtttggagacaagaaaacttatcagatgaacccagctaattacagagaggctctgactgagatgcgggaggatgaatctgaaggagctgac

SEQ ID NO: 40653 - DNA, 251 bp, Glycine max
  Clone ID: 701123121H1
ctttttaggtagagtatagttcatattttatgaagtggatattcgtctgaattagtagatgcaagtggcaagtggtggtcccccattacacatataagcatgccttgcacggttgtattgacacatgatcaaggtagtgggctggtgggttggtcctttgcctatctctggaccttgcatttaactcctagaagaaaatatcatcaaaatctaagattcagtgccctcaatatttatgtgaaattggtttt

SEQ ID NO: 40654 - DNA, 247 bp, Glycine max
  Clone ID: 701123122H1
ccaccatgttgctgccattgtggctgctgcattttatgcaatttggaatctcttctcaggatttatcgtcgtaagacctaaaatgcccgtgtggtggagatggtactattgggcatgtcctgtggcttggaccttgtatggattgattgcatctcagtttggagatataactgaaagaatgccgggtgaagataacaagatggtgaaagaattcatagaagactattttggtttcaaacatgacttc

SEQ ID NO: 40655 - DNA, 137 bp, Glycine max
  unsure (1)..(137): unsure at all n locations; Clone ID: 701123123H1
cnnnngannnagtagtcatcaacaacctgcagtcactgtaaattttnnnggttangatttatcnctctacaaatgcatangcaatacgcaanacaattngcaaagcatttcggatccagagggaganaccctttgtg

SEQ ID NO: 40656 - DNA, 249 bp, Glycine max
  unsure (1)..(249): unsure at all n locations; Clone ID: 701123124H1
gagggggtcagagtgagaaagagaaagagagaattcgtaaaccctaatttcggaaagatcggcgatgactgcctccaaggatcgcgagancttcgtctacatcgccaaactcgccgagcaggccgagcgttacgaagagatggtggaatcaatgaagaacgttgcgaatctcgacgttgaactgacggtggaggagcggaatttgctttctgttgggtacaagaatgtgattggtgctcgcagacgtcc

SEQ ID NO: 40657 - DNA, 249 bp, Glycine max
  unsure (1)..(249): unsure at all n locations; Clone ID: 701123126H1
ggggaagaagaagatggtgtccttgaagcttcagaagcncctcgccgctagcgtcctaaagtgcggcaagggcaaggtctggcttgatccaaatgaagtcaatgaaatctccatggccaattctcgacaaaacataaggnanttggttaaggatgggtttattatcaggaagccgactaagattcactctcgctcccgtgctcgtcgaatgaaggaggccaagagaaaggggcgtcactctggttatgg

SEQ ID NO: 40658 - DNA, 98 bp, Glycine max
  unsure (1)..(98): unsure at all n locations; Clone ID: 701123127H1
ggagaaacccacaccctattattccnttgattcattacatttcatttctgagtgctncgnggccgagctagctacctagcacccggcgcccaagtnca

SEQ ID NO: 40659 - DNA, 249 bp, Glycine max
  unsure (1)..(249): unsure at all n locations; Clone ID: 701123128H1
gtgctgttgcggcaagaagtacacttcagggacgcaatatttatgatggttgctgtcagctggacattcagttctcaaaccttgatgaattacaagtgaactacaataatgaccgttcaagggacttcacaaacccaaatctccctacagagcagaaaggaagaccttcacaacctggatatggtgatgcaggaaatatgtatgctgctcaaggttctggagccagggcanttggnttnccncagnggg

SEQ ID NO: 40660 - DNA, 251 bp, Glycine max
  unsure (1)..(251): unsure at all n locations; Clone ID: 701123129H1
ggcgtctcgtagggctaatccgcctcacgagggtcaccaacggcacgtgnctttggggggccgaggccccctactgctggtcggcaaacggacggcgggcgcacgcgtcgcttntagcccggattctgacttagaggcgttcagnnataatccaacgcacggtagcttcgcgccactggcttttcaaccaagcgcgatgaccaattgtgcgaatcaacggttcctctcgtactaggttgaattactattgg

SEQ ID NO: 40661 - DNA, 251 bp, Glycine max
  unsure (1)..(251): unsure at all n locations; Clone ID: 701123130H1
ggttcatcaaatacacaaaagggtatctaaagaacacaacattggagattatggagctagaaccaaagaaaggaccggttcatgatcaatacgatgatcttgttggnnnnnnnnnnnnnnnnnnnnnnnnnnnnnnnnnnnctgtttctggaatttcaagtgggtcatcattggaatctgattcttttgaagaagtaacatcctctgcctcctcttcttcatcatcagcagctgatgatcaacttgtagtt

SEQ ID NO: 40662 - DNA, 249 bp, Glycine max
  unsure (1)..(249): unsure at all n locations; Clone ID: 701123131H1
ttttatttacaacaacaatggcttctgtgcctcaaccaaaaatctcccttctaaccttattcttcttctcttccttcaccatcattgcgcatgcaattgttcctcaaaacgaaaccttcaaatttgagaactcaggtgaacttggaccctacatcgttgagtacggtgcagattacagaatgataagcatcttcaactctccattccaagttggtttctacaacaccaccccaanngcttnatctagnt

SEQ ID NO: 40663 - DNA, 193 bp, Glycine max
  unsure (1)..(193): unsure at all n locations; Clone ID: 701123132H1
attcaataattacganaaaccaacagcgagtgttgtntttntttngtcnaggctgnannatggaatgcactagagatgngaggctttcggttgaagagaactgagttaagcggcgaannaaacgcataatcggcggnagaaattgccaccggaagcacgtcgaagagggtgaaccaancacaaattccatnca

SEQ ID NO: 40664 - DNA, 243 bp, Glycine max
  unsure (1)..(243): unsure at all n locations; Clone ID: 701123134H1
gngaagctccaaagttcaaaggctttccgggatgcaanagcaagtacttagccnctacagagggtttctgcgtgcagcacgttccaaatcggaggaagaacggtgcaagatagagtcaattatatcgcaagagtttcggcgtaatgcggaggatgtagatcgcaaaaattttctctacattgagtacttacttcgccgtggcaacaaacaacttgatcagcttaaaaaccctggtactacagg

SEQ ID NO: 40665 - DNA, 248 bp, Glycine max
  unsure (1)..(248): unsure at all n locations; Clone ID: 701123135H1
ctttctccaatggcttcttctgcttccttaatcaactcgttgacttgctcttcgcctgcacccactgcagcactgtttcgccttcacccgcaccaccgccaccgctaccgccacgtcactgagacaattcaacagccaccgtccgcncccactcaccacgaggatctcctcgtcgccttccaccgttgtctgcaaagctgtctccgttaagccccaaaccgaaaccgaagtctcaacattgctnacga

SEQ ID NO: 40666 - DNA, 249 bp, Glycine max
  unsure (1)..(249): unsure at all n locations; Clone ID: 701123136H1
gtaaagcatggctttgttggtggagaaaaccacgagtggtcgcgagtacaaggtcaaggacctttcccaggccgacttcggccgcctcgagatcgagctggccgaggttgagatgcccggcctcatggcctgtcggaccgagttcggcccctcccagcccttcaagggggcccgcatcaccggctccctccacatnacannnnacngaaaaatgctcattgagacccttcaccgccnntgggggcgngg

SEQ ID NO: 40667 - DNA, 248 bp, Glycine max
  unsure (1)..(248): unsure at all n locations; Clone ID: 701123137H1
gtgaantgngcaagttggaggcttgctgtggaagcacacaacntctttggntttgagaccattcctgaagagtgcgttgaagcaacaaaggaatacatccatggcgaacaatatagatcagactccaaaacagttaaccaacaagcttacttttatgccagagacctcgaagtccatcccaaggacacatttgtgttcagtatagatggcaccgtactctctaatattccatacnacaaaanaanacc

SEQ ID NO: 40668 - DNA, 246 bp, Glycine max
  Clone ID: 701123138H1
gagtcttcagtttctcctcgttgttcttcgctttcctgttttcaatttcgattctttcgttaatttaataagatgtttgggagggcaccgaagaagagcgataatacgaggtactacgaaatcctcggcgtctccaagaacgcttcgcaggatgatctgaagaaggcttacaagaaagccgccattaagaatcaccccgacaagggcggtgatcccgagaagtttaaagagctggcgcaagttatg

SEQ ID NO: 40669 - DNA, 247 bp, Glycine max
  Clone ID: 701123140H1
taacactccttgtgtagtggtgacatcaaaatttggttggagtgctaacatggagagaatcatgcagtctcaaactttgtcagatgctagcaagcaagcatacatgcgcggcaagagggttcttgagatcaatcctaggcaccctattatcaaggagctccgagagagagtagtaaagaaccctgaggatgagggtgtgaagcatacagcacagctgatgtaccagactgcactctttgaaagcggc

SEQ ID NO: 40670 - DNA, 246 bp, Glycine max
  unsure (1)..(246): unsure at all n locations; Clone ID: 701123141H1
gctctgtctgatctcggcgtgattctcacgtgacatgggttttggaacctgacgagtgcatgtatgcgtgtgtgtggtagtgaaggcgtgttttgagttttcgncgtcggcgaagagagaatcatgttctggagggaccgtgagagggagaacaaggagttgaacggtggggtcctttgtggccaggtcagagtcctcgttgttggtgattcaggtgttgggaagacttctttagttaacctgatt

SEQ ID NO: 40671 - DNA, 238 bp, Glycine max
  unsure (1)..(238): unsure at all n locations; Clone ID: 701123142H1
cttcaacaatgctcaaaattttgatggctctgctccttttgtntctatctttncaagcatatggacaatttgnggaatggtgcatagcagatgagcagaccccagatgacgagttacagagggccatggagtgggcttgtggaaagggtggagcagattgcagcaagatacnagtgaatcaacnctgttaccttccaaanaccttgaaggaccatgcctctnatgctttcaacaacna

SEQ ID NO: 40672 - DNA, 108 bp, Glycine max
  unsure (1)..(108): unsure at all n locations; Clone ID: 701123145H1
acttttttgttgtattccttttttaattgctactgagtttatacaaccanacacagcntgaaattctatagtctctgaccaacaactacaatggtccaagaaaaaaaa

SEQ ID NO: 40673 - DNA, 249 bp, Glycine max
  unsure (1)..(249): unsure at all n locations; Clone ID: 701123146H1
tctctcagacatggcatctcaaggtttgtgtccttcgataaaaaatattcttcttttggactctgaagggaagcgtgtggncgtcaagtattactcagatgactggccaacaaacaatgcaaagttagcttttgagaagtttgtatttacncagactgttaagacaaatgctcgtacagaagctgaggtaacactacttgagaacaatatcattatttacaaatttgtacaagacctgcatttttttgt

SEQ ID NO: 40674 - DNA, 249 bp, Glycine max
  unsure (1)..(249): unsure at all n locations; Clone ID: 701123147H1
acacctctttccatnaanncagtnaaaccagaagtttccttgtcttcagatgattacaacaccaaacacacccntaagcttaacaacactcaggcatggatcatatacacctcctctccaatctacttgaaccatgttccttctgaggttacatccaagccattttctggcatcattcgtatagcggctttgcctgattctgattccaagtatgtggaaactcttgacaagttcagttcttgttaccct

SEQ ID NO: 40675 - DNA, 250 bp, Glycine max
  Clone ID: 701123148H1
gtgtaagtatgaactaattcagactgtgaaactgcgaatggctcattaaatcagttatagtttgtttgatggtatctactactcggataaccgtagtaattctagagctaatacgtgcaacaaaccccgacttctggaagggatgcatttattagataaaaggtcaacacaggctctgcctgttgctttgatgattcatgataactcgtcggatcgcacggcctttgtgccggcgacgcatcattcaaat

SEQ ID NO: 40676 - DNA, 82 bp, Glycine max
  unsure (1)..(82): unsure at all n locations; Clone ID: 701123149H1
gnacggagtcgatantgangtgcaaatcgttcgtctgacttnggtanangggctatagantaatccgaaccgnntagtagct

SEQ ID NO: 40677 - DNA, 249 bp, Glycine max
  unsure (1)..(249): unsure at all n locations; Clone ID: 701123150H1
aaggtttactattttngatgcacctggtcacaaaagctatgttcctaacatgattagtggtgcatctcaagcanntattggagtgttggttatttctgctcggaagggagagtttgaaactggancacgagagaggtggacaaactcgtgaacatgtccagcttgcaaaaacgctgggtgtgtctaagcttcttgttgtcgtcaataaaatggatgagcctacagtgcaatggtcgaaagaaaggtatg

SEQ ID NO: 40678 - DNA, 228 bp, Glycine max
  unsure (1)..(228): unsure at all n locations; Clone ID: 701123151H1
atacaagggaagatttccatttcancaagaaaaagattctacnctcagagattatngctgggnaaataatggactctccagacttttcagatctaggcgagtcctatcatattcatatgcatttgcattttatatgtttggagatgagctttttaaggatgaaatgacagacgctcaaagggaaataaaacagaacttatttgaggatcaacagcaacagcttgaagc

SEQ ID NO: 40679 - DNA, 246 bp, Glycine max
  Clone ID: 701123152H1
cctatttgtcgtaagctgtcgtactttgtcattccaagtgtcatttggtactcaacaactgaagaaaaacaagaaatcattaacaactacaaggcaaagctcaagtcaattgattgcaagcactttgactttggggaaggaaactgcccttttggaactagttgtttctacaagcatgcatttcaagatggccgtctggagcaggtagttttgcgacatctaggggctgcagagggtgatactgta

SEQ ID NO: 40680 - DNA, 248 bp, Glycine max
  Clone ID: 701123153H1
aggagccttgcttcatacatggctgaggaagatatcttgataggaattttgtatccatcccttgatagccgtacaaaaaaaatttggatctcctctatgcaatgctagacacggaggatcattgttgttaatccaaaagtgtttaaatatgaaagtccttggggttgacttgttgaagcatggtatctcagacccatccttgatgacttcttaatcacagagctctagttctgggcttgagaaagata

SEQ ID NO: 40681 - DNA, 246 bp, Glycine max
  Clone ID: 701123154H1
tcacaaccaaggccaacgtagactatgaaaagattgtccgcgacacatgccgcgaaattggattcatctctgatgatgttggtcttgatgctgacaaatgcaaggtgttggtcaacattgagcaacagagcccggatatcgcccagggtgtgcacggccacttcaccaagcgcccagaggaggttggtgctggtgaccagggtcacatgtttgggtatgccaccgatgaaacccccgagtacatgc

SEQ ID NO: 40682 - DNA, 206 bp, Glycine max
  unsure (1)..(206): unsure at all n locations; Clone ID: 701123155H1
gaatttctttcctaatcatcaagggggcattttatagaaggaaaaaaattcgtgtccaggaatcataattcatgagaaattgagaaccataaatcctgtgaatctaagattctnnggaatgactaaaatctgcgtagttggtcataaatattttgggaatatttatacatgtntcccaatttaaccttccnggccnctgcnctggg

SEQ ID NO: 40683 - DNA, 227 bp, Glycine max
  unsure (1)..(227): unsure at all n locations; Clone ID: 701123156H1
ggggtgttggtggagataagtggancttgtatagctgcttancaagactgtaaatattggtgctgtttaatacacgagactagttctctttcgatggtcccttttgagtgaaaaaccttgtcttctcagctttctttggagagatcttaaagacattgactaacaacaataaagtggatcaatcaaaagacttacttcttcttctaacaacaataagatcncatctt

SEQ ID NO: 40684 - DNA, 247 bp, Glycine max
  unsure (1)..(247): unsure at all n locations; Clone ID: 701123157H1
accaactcctggacttgctgntcaatatcacaccataacnngctatcngaagctctgctctctgacttgcttgcatactctctctgttncttctgttcacaaagatttgtaaatttatattnntcataccatatatactatataatatattgtatgctccacttgtttgaagctgtgttgcatattctggatcctatcatcttgtggctttgatgtctagagcatggaacatgattacatagggttg

SEQ ID NO: 40685 - DNA, 245 bp, Glycine max
  Clone ID: 701123158H1
gtggataggatcaatctagaatcctgggatggagcagctaagaattctgcaaagcaagaacctaaccctcttttagctgttttgaaagtttttgttgatgcttttgtgaaattttggtcagggtgaagatattaatgtttgtttctttctcttctgttgtgttgtctatgtatggtgatggtggagttgattttttgtacctaacagaataattttgatttagccttgatcatttaatgagctcg

SEQ ID NO: 40686 - DNA, 97 bp, Glycine max
  unsure (1)..(97): unsure at all n locations; Clone ID: 701123159H1
gacccctctcatggcatcttcttctggtagtttagacacctnctggcaagtgcaaactcctttcaccaacttcacctntcnccaacacaacatanng

SEQ ID NO: 40687 - DNA, 82 bp, Glycine max
  unsure (1)..(82): unsure at all n locations; Clone ID: 701123161H1
gcttcaaccgtttgccttgaatngtncatatcatncctgggaagaaggntcaaagntngtnatctgntctcaactntcagcc

SEQ ID NO: 40688 - DNA, 251 bp, Glycine max
  unsure (1)..(251): unsure at all n locations; Clone ID: 701123162H1
gtgaggggaacgatgatanaaaacctcactctcactcgcagatcttcactcacccaaaaccaacctactccaaggaagtcccctaatcagaaccagagatggacaccaaacccaccgagatcagcagcggcaagatgttcggaggttacaacaagagattcaagcatttcagccttaccctgggatgctccatgaacttccacatctacttccctccatctccttctccctctcacaaattccctgtgctg

SEQ ID NO: 40689 - DNA, 249 bp, Glycine max
  Clone ID: 701123163H1
ctaaggtttctgattttggactgtcgaaaactggtccaacattggataatacccatgtaagtactgtggtaaagggtagttttgggtacttggatccagaatacttcaggaggcagcaactgactgacaaatctgatgtttactcgtttggtgtggttctctttgaggtattgtgcgctcgaccagcattgaaccccacccttgctaaggagcaagtgagtctggctgagtgggcagctcattgctacc

SEQ ID NO: 40690 - DNA, 226 bp, Glycine max
  unsure (1)..(226): unsure at all n locations; Clone ID: 701123166H1
ggtttgcaacttcatcccatccatccagaaacagaacttggtggttgcattgaatcggagagggtaggtaggtgggaagacgtgtcntgttttgtagnnnnnnnnnnnnnnnnnnnnnnnnttcccggcgcatgtgccggattagacgccaactgcttccataattcacctcctccaaccaaccaacacaagatttccctctggattggatggnggaagcatgtgg

SEQ ID NO: 40691 - DNA, 244 bp, Glycine max
  Clone ID: 701123168H1
caccactgcaacatttgctgcagccgccacaaatactgtccctgccattactttcatcatggctgttttaattaggatggaaagcatttccataaaacgtgtgcatggattggccaagattttggggtccgttctaagccttgctggggcaataacatttgctttagttaaaggacctcacctgggtttcatgaaatggtatctcgaaaatcagaaccatagttctcaccctttaacaatgtgc

SEQ ID NO: 40692 - DNA, 245 bp, Glycine max
  Clone ID: 701123169H1
cgattaccccagcttcaagcttgtcatcgtcggcgacggtggcacaggaaagacaaccttcgtgaagaggcatctcactggtgaattcgagaagaaatatgaaccgaccattggtgtggaggttcatccgttggattttttcacgaactgtggaaagattcgcttctattgttgggatactgctgggcaagagaagtttggtggcctcagagatggatattatatccatgggcaatgtgcgggca

SEQ ID NO: 40693 - DNA, 86 bp, Glycine max
  unsure (1)..(86): unsure at all n locations; Clone ID: 701123172H1
ggggtcttancaaaatcgtatcatgttancttgtcaatgcactgccgacnaancctgtcancttcnagcaggatcatgnnnaaaac

SEQ ID NO: 40694 - DNA, 237 bp, Glycine max
  unsure (1)..(237): unsure at all n locations; Clone ID: 701123174H1
ctcacgttgcctcgttcacatgaaactcctctcgccctccgtgttctcgctctctctctgaatcactcatccttataataaataaataatttctcgaagaaggagaaagaggttttcattgttgtggttgttnnnnnnnnnnnnnnnnnnnnnnnnnnntggagtccacagaatcttcatactcgtcttctcccgagggaccgaggaagcacgctgcatcgcctcctccgaaatcgc

SEQ ID NO: 40695 - DNA, 236 bp, Glycine max
  unsure (1)..(236): unsure at all n locations; Clone ID: 701123175H1
atgggcaacttcgacgaagctgagacccttttggttgaagctcttaacaaggatgccagggatccagaaactctagccaatctagttgtatgctgtcttcanctcggcaaaccatctaacaaatcattcagccagctgaaactttctcacccagagcatgtattggtcaaacgggtatcatcagctgaagaaagttttgatagagcgctacaatcatntcctcatgagtgtcgatg

SEQ ID NO: 40696 - DNA, 85 bp, Glycine max
  unsure (1)..(85): unsure at all n locations; Clone ID: 701123178H1
ccaaacttttgggaaagtattttgaaaggncatttggaagcaacagttgaanggtacaagaaaaggttaagganccagaaagatg

SEQ ID NO: 40697 - DNA, 228 bp, Glycine max
  unsure (1)..(228): unsure at all n locations; Clone ID: 701123179H1
gaaannttcaagtccaacgacactancttcgtgcaggggtgagtgctactagtttgntgaaagagcatcttttttcaacctcttgatttcatgagtcactattttgattgaacaagagatgagatttatgcccctttccagattaattttccgtctccctcgtcattatacacatgggcctttgcaatctcgtgccttacagactgattctgttcttaaagatcctca

SEQ ID NO: 40698 - DNA, 248 bp, Glycine max
  unsure (1)..(248): unsure at all n locations; Clone ID: 701123180H1
taatcccctcttgcctcgagacccttatgagagagccctggctcgtttctggtctaagaccttagatgacaagatcttgcctgctatatggaatgcttgctggagtgatgagaatggacgtgaganagcagtggaggaagccttggaagcattgaaaatcctgcaggaagcactgaaagacaagaaattttttggaggagagagcataggattggtagacnttgctgccaatttcattgggtattggg

SEQ ID NO: 40699 - DNA, 249 bp, Glycine max
  Clone ID: 701123181H1
ctttactcctcttcaatcagttgcatattctttgctattccaatggccactgttgaggttgtgtcagccaaggttgccctcccagaggacacaaaagaggcatcattgaaggttgacgaggagaagaacacagaagaagttgttgagactccaacaccagaaactgtggtcactgagcaaaccaaggaggaaagtactgaggccccacgacctgcagcttcagaagacaagccctcggttgaagttcag

SEQ ID NO: 40700 - DNA, 247 bp, Glycine max
  unsure (1)..(247): unsure at all n locations; Clone ID: 701123183H1
gccccactcaaccaccacacntctcctcgttcacgctacccctttctgctcttcttctacctttcaagttttaaaagtataaagatggcagagacattcctatttacctcagagtcggtgaacgagggacaccctgacaagctctgcgaccaaatctccgatgctgtcctcgacgcttgcctcgagcaggacccagacagnnaagttgcctgcgaaacatgcaccaaaaccaacttggtcatggtct

SEQ ID NO: 40701 - DNA, 247 bp, Glycine max
  Clone ID: 701123184H1
gtgcccgcacaagttgaagtcgaccacgctccctgaaccgtaggagaaacccgacaaaccgcgcgggatcgaagtactcgtaacaaccggtgccggaacaagacccgttcgtttcgatgtcttggagcctgttgcacagggacacgcatcccgtggtgtagttccttccctttgaatcgattcccaccactactcccagcgtgtcgcacccgattacagtaaacttgtttcggttcgaagagacttg

SEQ ID NO: 40702 - DNA, 246 bp, Glycine max
  unsure (1)..(246): unsure at all n locations; Clone ID: 701123186H1
gttttggtagcatggccatgccatggcgcaggctaccaaaggttccctctccgaatgaaaactggctatggtgagcgttcttcggaggtaaaatgcgcaagttttaggcttgctgtggaagcacacaacatccgagcntttaaaaccattcctgaagagtgcgttgaaccaacaaaggactacattaatggcgaacaatttagatcagactctaaaacagttaaccaacaagctttcttttatgct

SEQ ID NO: 40703 - DNA, 111 bp, Glycine max
  unsure (1)..(111): unsure at all n locations; Clone ID: 701123187H1
ctacccgccgctcgatgggaattgcgcttcaaggcgactcgtagggctaatccgcctcacgagggtcaccaacggcacgtncctttggggggccgnggccccccaaaggcg

SEQ ID NO: 40704 - DNA, 243 bp, Glycine max
  unsure (1)..(243): unsure at all n locations; Clone ID: 701123188H1
cggnaatacacttggcccttctaattctcagccatcaactccatcaactcatactcctggtgatggagttgctatggcgggtaacttgcagaatgttgctggtatatccaaaggtttgatcatgtatggtactgatggagtgggcggtcttgcatcttcgacaaatcagctggatgacatggaacattttggagatgttggctcctagaggataatgtggaatcattctctcacaggatgatg

SEQ ID NO: 40705 - DNA, 245 bp, Glycine max
  Clone ID: 701123189H1
gggaagtgggttgttaaaggagcagttgatgtagacattggtgcaaacccttctgctgagggtggaggagaagatgagggagttgatgatgcagctgttaaggttgttgacattgttgacacattcagacttcaggagcaacccgcattcgataagaagcagtttgttaccttcatgaagaggtttatcaagaatttgactcccaagctcgatgcagagcaacaggagttgtttaagaagcacat

SEQ ID NO: 40706 - DNA, 246 bp, Glycine max
  unsure (1)..(246): unsure at all n locations; Clone ID: 701123190H1
ggaagattcagtgttgcagtagagtcttttctcaggacaggacaagttcccactttgcaggagggcaatatgaatgagaacatattcagttttccatggaaagataggcctgttgtccttggatcaagaatcaaggaagcattccaagaccctagtgcatattttgccatagagcccttgtttgatagggagagatatatggtnnngtataacccctcaaaacacaaggtttatgctgtgctccag

SEQ ID NO: 40707 - DNA, 244 bp, Glycine max
  unsure (1)..(244): unsure at all n locations; Clone ID: 701123191H1
caagactggtaaagaaggttgggtttctcttggagggatacttctttgtatcactggaactgaagctatgtttgcggatcttggtcatttcntgctttgtcaataaggcttgcgtttgcgtttgttatatacccgtgtttggtggtacagtacatgggtcaagctgctttcttgtctaaaaacctcggctctgttgctaacagtttttatgactcaatacctgaccctgtgttttggcctgttt

SEQ ID NO: 40708 - DNA, 244 bp, Glycine max
  Clone ID: 701123192H1
cccagtttcaccgcacgaatatcttgttgtttggagcgatccgagaaaaactctgtaaacatgttggtttaccaggacctccttacaggtgatgagcttctctctgactccttccgttacaaggaaattgagaatggaatgctgtgggaagttgaggggaagtgggttgttaaaggagcagttgatgtagacattggtgcaaacccttctgctgagggtggaggagaagatgagggagttgatg

SEQ ID NO: 40709 - DNA, 248 bp, Glycine max
  unsure (1)..(248): unsure at all n locations; Clone ID: 701123194H1
ctggaagagagcgatgcataatccattgttaacancaaacaaggacacgcaagacaaaagcncgaaantcataggtatacacagctatctcttgagcttcttagcaaagagaattttgagcagaaacttggtggtggtgttggaagnggaacaatacatcgtccctttggtattccggcaaacccagaatccactgttggcttggatacaccgttgtgtaagctgtgttgggatgaacaagtcaaggg

SEQ ID NO: 40710 - DNA, 253 bp, Glycine max
  unsure (1)..(253): unsure at all n locations; Clone ID: 701123195H1
gaacaccctctctcacattctccttcctcctctttctcgcnancctgcaccccantggatgcngctcacaccgacttcgcaggttcagcctgcctcaaagtttcccctagccacttcgccggctcggtcaccgaagtncatcgctgccatacgtcaactcgcttcgatcctctcacgcttcggctctcccttggccaacttccgcctnagcacggcnnncgccgattgcntggaantggttggacntcncccc

SEQ ID NO: 40711 - DNA, 244 bp, Glycine max
  unsure (1)..(244): unsure at all n locations; Clone ID: 701123196H1
ggnngtttggactcttcantggttgcagccgntcacggntcnctacctnagcaggcacaaatgcngccaagcantggggaaccnaattacacnctttctntgtaggccttgagggtgcacctgacctaaaggcagnaaaggangtangcagactacataggaactgnacatcatgaatttcacnacactgttcaggatggcatggnatgccttgaggatgtgatctatcanntggaaacatatg

SEQ ID NO: 40712 - DNA, 287 bp, Glycine max
  Clone ID: 701123201H1
gttgggttctctcagctttcacctttccaggctcggatccaaagaaaaatctcaactttcttcaacaattcatctccacaatttctgggtagtggctttttttagcaggaatggctcaacgttctaatgttccaatgttaggcaagagtgaagagaatgtttcagatacagctcattctgacaaagcccagaaaggtcagccaggttcaaagatgattaatccaaatgacaccaaggaaaattcagatgtagtttcttctgctggcctaccccattcaaaacccaga

SEQ ID NO: 40713 - DNA, 283 bp, Glycine max
  unsure (1)..(283): unsure at all n locations; Clone ID: 701123202H1
aaaaatggctggtttggctagcaatcttcntctaattgttatgataggtctgcaaattcattatgcagcacttgccatattcacaagagccgctctcttagntgggttgagtacaacggtgtttgtagtatacaggcaaggcatagccactttggctttggcgcctatatttttctctcctaagaggagacaatcagtgaaagattctttgggattcaggagcttctatttgatgtttnagaccgctcttgttggagtcacggcaaatcagaatgcatacttc

SEQ ID NO: 40714 - DNA, 280 bp, Glycine max
  Clone ID: 701123203H1
gggaccacgtgccttccccttggaatttgtatagcgcaagatagcaactccagtaactctttgccaacgtgattcattcacaaacctggcacttgctacaatgtagtaatctgtacttgcattttgatccgtgcttaacagaaaagaataagattgtccaacatgaatatctaagctagtgtagttctgttgcactgtgtaagacccctctgtctctgctagaagtaagttatgactctggatcctgaaattcagacttgttgatactccaacatatgta

SEQ ID NO: 40715 - DNA, 276 bp, Glycine max
  unsure (1)..(276): unsure at all n locations; Clone ID: 701123204H1
gggtgattggacatcacaactgaaagctgtttttgctaaggcatgtcaaccagcaagtggtgaccagagtggtcttctacgagctgatatgttacaaggcaacaacataccaaggatgccaaagctcgtgatcgatggtccttatggagctccagcacaagactacaanaactacgaagtnctccttctcgtgggactaggaattggtgccacccctttgattagtattctcaaagatgtgctaaacaacatgaaacaacngaagnctagcagngg

SEQ ID NO: 40716 - DNA, 275 bp, Glycine max
  unsure (1)..(275): unsure at all n locations; Clone ID: 701123205H1
cttgcgagtnaacacaagttacaacaatggctttctttggtagaaactgggaatttgttacgacagacagcgagcaggcaggttagttcaaaattgcgttcgcccccttcattttttcaggctatacgctgtatgtcatctgcccncagcacaaaactgtttattggaggtgtttcatattctactgacgagcaaagcttgagggaagctttttcaaaatntggtgaagttgttgatncnnggntaattatggatcgtgaantggttgatccaga

SEQ ID NO: 40717 - DNA, 275 bp, Glycine max
  unsure (1)..(275): unsure at all n locations; Clone ID: 701123206H1
ggtgacccttttgggagttgtgggaagcccatttctacacagggttcagantgctctcaagttgaagggagttgaatacaaatatttggaagacgatttgaacaacaagagtgatttgctcctcaagtataacccagtttacaaaatgattccagtgcttgttcacaatgagaagcccatttcagagtcccttgtgattgttgagtacattgatgacacatggaaaaacaatcccatcttgcctctgatccctaccaaagagccttggctcgttt

SEQ ID NO: 40718 - DNA, 50 bp, Glycine max
  unsure (1)..(50): unsure at all n locations; Clone ID: 701123207H1
ctaaaaacttgcagattttcacattccacacaacatncnannnngttcat

SEQ ID NO: 40719 - DNA, 246 bp, Glycine max
  unsure (1)..(246): unsure at all n locations; Clone ID: 701123209H1
gtcaatgacagtangagtgttgcttggagantgggtggcacngagatggtgatggcaaaagaacttgatgnnttggctaagaaaactcctggaaagaagtctcttgctattgaggcattctcccgtgcactcttggctattccaacgatcattgctgataatgctggtttggacagtgctgagttgattctcaactccgggcagagcatcagaaggagggctgtacttctggaattgatgttattt

SEQ ID NO: 40720 - DNA, 280 bp, Glycine max
  Clone ID: 701123211H1
gttgccatgaggtttcaccagtaccaggtggtgggaagggctcttcctaccgaatccgatgagcatcctaagatctaccgcatgaaactctgggccaccaacgaggtccgtgccaaatccaagttctggtattttttgagaaaattgaagaaggttaagaaaagcaatggacaagtgctagccatcaatgagatttttgagaagaatcctaccaagattaagaattatggaatttggctgcgttatcagagccgcactggttatcacaatatgtacaagg

SEQ ID NO: 40721 - DNA, 281 bp, Glycine max
  unsure (1)..(281): unsure at all n locations; Clone ID: 701123212H1
gttcgatctcaaccaaggttgttccttccaccgccatgagtttcatcttcggaaagcgaaaaacacccgcagagcttctgcgggaaaataagaggatgctggacaaatcaatcagagaaattgagcgcgagcgncaaggcttgcaaacgcaagagaagaaattgattgcggncataaagaaaagtgccaaacagggccagatgggagctgttagagttatggcaaaagatcttgttagaacaaggcatcaggttgagaaattttataagctaaaatctcag

SEQ ID NO: 40722 - DNA, 281 bp, Glycine max
  unsure (1)..(281): unsure at all n locations; Clone ID: 701123213H1
ctggcttantgacattggaggatttgcaaggaaagtgaaaaatactaatctgtcaacagatgatcaaataaaggactgtggaacatatcttgaatgccagaaatgtcattnntcatattgataacaatgatgtttctcatgagtggcctggctttcctgtgggtgtgaagtttgatccttctgatnttgagcttttagagcatttagcagcaaagtgttgtattggagacagagagccacacatgtttattcacgagttcatcccaactctagaaggagag

SEQ ID NO: 40723 - DNA, 286 bp, Glycine max
  unsure (1)..(286): unsure at all n locations; Clone ID: 701123215H1
gtagtttcaatggacatggtgaaagtgnacaaacaagttgtactcagtagaatatgcagagaataataccccagaaaaggagaaacgtaaaaagtccagtaataagaagtctccgaagcctccaagacctccgcgagctccatcgttggatgctgctgaccaaaagctaatcagggagatcactgaacttgccatgttaaagcgtgcgaggatagagcgaatgaaagccttgaagaagatgaaagttgctaaggcatcatcatcttccagtagcagcatgcttgct

SEQ ID NO: 40724 - DNA, 283 bp, Glycine max
  unsure (1)..(283): unsure at all n locations; Clone ID: 701123217H1
gcttcttttcttctggggggcaaaaggggtcacttttcagatccgagattgagctcctttacccatcatcatcatggagctcctcgggtacctgaatcagggtcacccttctagaggaacaacacttgttattactctttcattggtgctttcgacacttgtgtccttcnccactttcacacatgannngnnggggtctgcgnttccggaantgaatcctataaaacctaggcatcacgtcttctcaggagtgccgtgcaacatgaaactctacatcanagtt

SEQ ID NO: 40725 - DNA, 282 bp, Glycine max
  unsure (1)..(282): unsure at all n locations; Clone ID: 701123218H1
atctgctcggatggaatctggaagtggcaatggtgatncgtgaggtacagcgtactatgctggaacttctcaatcagttggatggatttgaagcttcaaacaagatcaaggttttgatggccacaaatcggattgatatcctggatcaagccctccttagacctggacggattgaccggaagattgaatttccaaaccctaatgaagagtctcggctggatattttgaaaatccattcaagaagaatgaatttaatgcgtggcattgatctgaagaagattg

SEQ ID NO: 40726 - DNA, 278 bp, Glycine max
  Clone ID: 701123219H1
gctagctgtgacttgttttgagttcaatcaaatcgcattggtatctgaaatcaggaaagatggttagcgtagtgagatcaggcaggcacaaagggcagaaggcccagcaaccatccttgccattggaactgcaaacccaccaaaccgtgttgatcagagcacctatcctgattactacttcagaatcaccaacagtgaccacatgaccgagctcaaagagaaatttcagcgcatgtgtgacaagtctatgatcaagacgagatatatgtacctaaacg

SEQ ID NO: 40727 - DNA, 277 bp, Glycine max
  unsure (1)..(277): unsure at all n locations; Clone ID: 701123220H1
gttactgtctgttcaagctaccatcnntctctctctttcttagtgcctccttgccagaagttaaaatggcccaagaaactttcctattcacatctgaatcagtgaacgagggncaccctgacaagctctgtgaccagatctccgatgctgtgctcgatgcatgcttggagcaggaccctgacagcaaggttgcctgtgaaacctgcaccaagaccaacatggtgatggttttcggagagatcacaaccaaggccaacgtggactatgagaagattgt

SEQ ID NO: 40728 - DNA, 137 bp, Glycine max
  unsure (1)..(137): unsure at all n locations; Clone ID: 701123221H1
ggagatcgtcgaagttgggacgcagcggcngaaggaaatcgttgtngttattctcttacaggtttgcnaggacagcgtngcgnntcgcnccatggtcgntcgcgaaggtgcgattcctcctttggtcgctttgtctt

SEQ ID NO: 40729 - DNA, 154 bp, Glycine max
  unsure (1)..(154): unsure at all n locations; Clone ID: 701123222H1
cccgtgtgtccttcaccttnttcttgctctgcaactnctaaacccagaatccccattccgcnacgctcttctttcccttctccattattacacaaccgtttcttctcccaaaacgcagcgttttcccttcgcaactctctccgcacttccacnt

SEQ ID NO: 40730 - DNA, 278 bp, Glycine max
  Clone ID: 701123223H1
cctaatcgtgagaagaaaggaaagggaaaagaggaaaatggtgtgcataaggaaggcgacggtgaaggaccttctggcgatgcaggcgtgcaacctgttctgcctccctgagaactaccagatgaagtactacctctatcacatcctctcctggccccagctcctctacgtcgccgaagactacaacggccgcatcgtcggctacgtcctcgccaagatggaggaagaaaccaccgactgccacggccacatcacctccctcgccgtcctccgcaacc

SEQ ID NO: 40731 - DNA, 276 bp, Glycine max
  unsure (1)..(276): unsure at all n locations; Clone ID: 701123224H1
cttcactttcactcacaatcacgagnatgcccggtgtgcaaggctctcgtggaggaggagaaattggttcccttgtatgggagaggaaagtcgtccactgatccgagatcaaaatctattccgggcgttaacatcccacatcgtccggctgggcagaggcctgaaactgctcctccacctgaaacaaatcattttcatcaacatgggtttggatttatgggtggcttggggggattgtgccaccgccgatggcaacaacaagatttgggaattttg

SEQ ID NO: 40732 - DNA, 277 bp, Glycine max
  unsure (1)..(277): unsure at all n locations; Clone ID: 701123225H1
ggcatacaaggatggtcatgttgcaccatttgttaagtctgaacccattcccgagactaacgatgaacctgttaaagtggtagttggggccagtcttgaggacattgttttcaaatctgggaagaatgttctgctggagttttatgctccctggtgtggtcattgcaaacagttggctccaatattggatgaagttgctatctcatatcaaaatgaancnnatgttgttattgcaaaactggatgcaactgccaacgatatcccaagtgaaaccttt

SEQ ID NO: 40733 - DNA, 279 bp, Glycine max
  unsure (1)..(279): unsure at all n locations; Clone ID: 701123226H1
gccaaacactctctctctgtctctcgaaaattctcagtttgcagagaaaatctgaatcatgtcgtggcaagcgtattcngacgatcaccttctgtgtgacatcgaaggtaaccacctcactcacgctgctatcatcggccaagacggcagcgtttgggctcagagtaccgacttccctcagttcaaacctgaggagataactgccatcatgaatgactttaatgagcctggatcacttgctccaactggattgtatctcggtggcaccaaatatatggt

SEQ ID NO: 40734 - DNA, 279 bp, Glycine max
  unsure (1)..(279): unsure at all n locations; Clone ID: 701123227H1
gtttccatctatactttttccaattgaaattaaaaatatccaacgcggcaaacacggcagtgacactggagtctacgatactgaaggaaggtttgtaccttcaaaatttgaaganatttttaacaagcatgcacatacacatccaaatgctttgacatatgatgagttaacggagatgataaaggcaaatagagagcctaaagatttctcaggaaggattggtagtgtggttgaatggaaaattcttacaaacttgctaaagataagagtggattactg

SEQ ID NO: 40735 - DNA, 276 bp, Glycine max
  unsure (1)..(276): unsure at all n locations; Clone ID: 701123230H1
atttgattcgtgtgcacatataaggtggggcatggnctacaccctttccaacactctcccactcncactcgccttnttcccagaccgcaccctccttcatccaccctccacacaacatangatcaatcgnnncctnagattcaaaagtctttgcgtcgtcaatctcaagagacctgttcccccgctaaaagcatcgatggcggagaccaacaacaagttnnncgtangaggtcttcgaaaaanaggatcttgccgtgtccctggccaaatacgtcg

SEQ ID NO: 40736 - DNA, 284 bp, Glycine max
  unsure (1)..(284): unsure at all n locations; Clone ID: 701123233H1
ctttgtttgcaacaacgataccatggcagagaatctccaaagacaanctctttggtctgcctccacggtacagagattcagttagaacaataactccagggttgcccctttttctgtacaactactccactncaccaactccatggtatcnttgaggctgcaagttttggaggatctaatattgatccaacggcttgggaggataagaagtgccctggtgaatctcgtttccctgctcaggttcaagtgatactaggaaagtttgtgagccactagaggaagat

SEQ ID NO: 40737 - DNA, 277 bp, Glycine max
  Clone ID: 701123235H1
atacaggtgacattgaagcaacagttgtggcatgcaaggcagctgatgctgctgtgaagatgattcttgatgcaatagagcaagtgggtggaatttatgttgtcacagctgaccacgggaatgctgaggatatggtcaagagggataaatctggaaaaccacttctaggcaaggatggaaaaatccagattcttacttcccatactcttgagcctgtgccaattgctattggaggtcctggattggcccctggtgtcagattccgcaacaatgttcc

SEQ ID NO: 40738 - DNA, 275 bp, Glycine max
  unsure (1)..(275): unsure at all n locations; Clone ID: 701123236H1
gtgtggggatggtggtggaagggggncagagaaccctcaacgccgacagcggtggtgccgcgaaattcctggtggcgcagaacaaccgccagctcgggacggttcaccagcntctggccggcggcatctccggcgcgtttagcaaaacctgcactgctccccttgcgcgcctcactatcctctttcaggtgcaaggtatgcattcttatgtngcagcattgancaaccctagcatattgcgtgaggcatcacgtattatcaacgaagaagggttt

SEQ ID NO: 40739 - DNA, 139 bp, Glycine max
  unsure (1)..(139): unsure at all n locations; Clone ID: 701123237H1
caaacacaaaaaaacattcacttacttcaaagttgcancataataacatatcattaatatcatggatcataggctttctgtgaaanaagaaggagagggaatcgttcacatacaagttgctgnactccacncnacatac

SEQ ID NO: 40740 - DNA, 274 bp, Glycine max
  unsure (1)..(274): unsure at all n locations; Clone ID: 701123238H1
gaaacacccaaggttcgtttatggttatcagatagtgaccaagnagtgcgtttaggtcatacacccactatatatgtttacaaagcaaaacacaacaccaaaaccatagagagaatgaaaacctcacttggcaagattttggtgtactactatccagttgcnggaagattgaacttatcagatagtggtcgaatggaattggattgcaacgcaaagggagtgacacttcttgaagctgaaaccacaaagtcattgggtgattatggagattttt

SEQ ID NO: 40741 - DNA, 274 bp, Glycine max
  unsure (1)..(274): unsure at all n locations; Clone ID: 701123239H1
gccgccgccaccgagattatcacaacgcgccgccgccaccncagattatcacaacgcgccgccgcagcattcacctccccggagatccaccctttgcatggcagtgagctttctggcgcgcgatgtatcggacctctgccttgggaagccaccgctgaggtcgctctccgctgccgccaccgtcgccgacgccttagacgcgctcaagagctccgacggcgagatccacgtcagcgtgtggagcttcgagaatgaatgggtcgatgcgtaggga

SEQ ID NO: 40742 - DNA, 276 bp, Glycine max
  unsure (1)..(276): unsure at all n locations; Clone ID: 701123241H1
gcagtttcaaagagaggatttgggattgggaaggcgagggattgcgctgcgtctcttcctcttctctancgattcatccctcattcataatcttccaatccaacaacctcancctcacactcacacatacacacatctgaacgcgtatcgtccctcccatggcttcaaagcgcatcctcaaggagctcaaggacttgcagaaagacccaccaacttctnncagcgctggtccagtagctgaggacatgttccattggcaagcaacgattatgggtc

SEQ ID NO: 40743 - DNA, 276 bp, Glycine max
  unsure (1)..(276): unsure at all n locations; Clone ID: 701123242H1
gtgagagcatacctgtcgggacccgaaagatggtgaactatgcctgagcggggcgaagcaanaggaaactctggtggaggcccgcagcgatactgacgtgcaaatcgttcgtctgacttgggtataggggcgaaagactaatcgaaccgtctagtagctggttccctccgaagtttccctcaggatagctggagcccgcgggcgagttctatcgggtaaagccaatgattagaggcatcgggggcgcaacgccctcgacctattctcaaactttaa

SEQ ID NO: 40744 - DNA, 277 bp, Glycine max
  unsure (1)..(277): unsure at all n locations; Clone ID: 701123244H1
gatggatnctactacaccaangtactccaaggccaggtatgatgaaattgtgatggaagtttcttcctatttgaagaaagtaggatacaaccctgacaagattccttttgttcctatatctggttttgagggagacaacatgattgagaggtccacanancatnanagcaccaanggtcntactctgctagatgcacttgaccagatctcngagcccaagaggccttctgacaagncccncaggctaccccttcaggatggtangaagattggagga

SEQ ID NO: 40745 - DNA, 278 bp, Glycine max
  Clone ID: 701123245H1
agaggcagctaagtgttgtgatgacactcctttgttgtgttcattttcatgtccaatgttgtgatgaagttgaagatgcaatcagcagatctgacttcccagaagggttcctcttcggaacgagcacttcctcttaccagattgaaggagcaccttttgaagatggtaggggtttaagcaactgggatgtttttagtcatacaccaggaaagataaaaaatgacgagaatggtgacattgcagatgatcattatcatcgctacttggaagacattgag

SEQ ID NO: 40746 - DNA, 279 bp, Glycine max
  unsure (1)..(279): unsure at all n locations; Clone ID: 701123246H1
agctcagtctcgctcagagtcagagaaaaacacccnaatcaaatattatgcatggagcccagcttggatttgagactgggcttgtccccaaacccctttnccngnttttcggcgacgtttcngggaacagagacnagtgcgacaaagtggtcacactcgatggcttcgtgcagagattggaggaagagttgacaaaggtcgaggcttcaaacgcgagcttcctnncttgcantctctgcntaaacgatgcnatagcganattgaaggaggagaaagtga

SEQ ID NO: 40747 - DNA, 283 bp, Glycine max
  Clone ID: 701123247H1
ggaaatatcactcttcactctcgagctatattttgctttcttagttcccaacaatatggccaaatccactttctttgtctgccttaacctttcattactcttctctctagtcacagccacttactactcaagtttaaccccaacacttttgggttttcgcgaggagcagttcacccacctccacttcttcttccatgatgtcgtgacaggcccaaagcccagcatggtgtttatcgccgagcccaacgggaaagcgaaggatgcccttccgttcggaaccgtt

SEQ ID NO: 40748 - DNA, 281 bp, Glycine max
  Clone ID: 701123249H1
gcacttggtggcaatcgtgatgtggcaggaagccagaacagccttgagatcgatggtttagctcgctttgctgttgaagaacacaacaaaaaacaggtttttctttcttttttcccttaaaaaagatgaaagaaaatgttaattatgtgttgtattgcattgtttgcttctcgagaaattcctatgatttgttttgagttgttaatttgtattgggtcaggccgatgatcggttttggccatgttaacgtttcttcggaaatgcacatcttgaattggatt

SEQ ID NO: 40749 - DNA, 270 bp, Glycine max
  Clone ID: 701123250H1
cttcaacaatgctcaaaattttgatggctctgctccttttgtctctatcttttcaagcatatggacaatttgaggaatggtgcatagcagatgagcagaccccagatgacgagttacagagggccatggagtgggcttgtggaaagggtggagcagattgcagcaagatacaagtgaatcaaccctgttaccttccaaataccttgaaggaccatgcctcttatgctttcaacaactactatcaaaggttcaaaaacaaaggaggctctt

SEQ ID NO: 40750 - DNA, 276 bp, Glycine max
  unsure (1)..(276): unsure at all n locations; Clone ID: 701123251H1
cttcttcttctcatgcgatcatcactacatatgatgtgtttgtcagcttccgcggtgaagacacgcgcaacaacttcactgcttttctctttgatgctctctttgaaaatggcatccatgccttcaaagatgatacacatcttcagaaaggcgaatccatagcacccgagctgctactggccattcaggggtctcgccttttcgttgtggtcttctcaaagaactatgcttcctcaacttggtgcttgcgtgaattgganacatcttgcanttgca

SEQ ID NO: 40751 - DNA, 274 bp, Glycine max
  Clone ID: 701123255H1
aaccaccatggtttctgagacactccaaagccaaaccaagaacgtgtgcgtgattggagcaggaccatcagggctagtggcagcaagagagttgagaaaagagggtcacagggtggttttgttggagcagaatcatgatgttggaggacagtggctatatgaatcaaatgtggaaggagaggaccctttagggaaaaagccttttctaaaggttcatagcagcatctatgaatctttgaggctcacatctccacgtgagatcatggggttcact

SEQ ID NO: 40752 - DNA, 275 bp, Glycine max
  unsure (1)..(275): unsure at all n locations; Clone ID: 701123256H1
attttggcttcaggtttacttctctttctcagggagtgaanantacaccgcttagttcatgagagatatttgagngttctagtgattttttncattcctgggatgcatctttcanagagtttcaancatggagttgttttcntcttgtggttgctgcntcctatntgctgcatgctgctggngcanaataacatcactgatcccgntgaagttgacgcatgagagccataagacgcgtttgatngatcctaatggaaattngagcaattgggaag

SEQ ID NO: 40753 - DNA, 203 bp, Glycine max
  unsure (1)..(203): unsure at all n locations; Clone ID: 701123257H1
tgattgaagnagatgccgatcagaaacatcgccatcggaaggcctgaagaggctactcaccccgacacgttgaangcggggttggctgagttcatctccaccttgatcttcgtgttcgccggttcaggttccggcatcgcctacaacaagctcaccgacaacggcgccgccactcccgccggcctcatctccgcttccatcgc

SEQ ID NO: 40754 - DNA, 278 bp, Glycine max
  Clone ID: 701123259H1
cagtacccgacatatcaaattccagaaaagtctgcagacgataagccttatgtaccaacatttcaggtttccaaagaaaaggcaaagaccttggggattgaatttattcctttggaagtgagtcttagagagacagtggaaactttgaaagaaaagaactttgccaacttttagtctctgatatctctgcttgatcaggagtgaacacgttgagaatctcaacggtgtttcgtttgtggttctggttttagaatctcattgcttgaaaataaactatt

SEQ ID NO: 40755 - DNA, 283 bp, Glycine max
  unsure (1)..(283): unsure at all n locations; Clone ID: 701123260H1
ggnctcgagtctcctcttccanacancatcatagncnccaatgaccatgatatacaccttactcttnactttctttcactttnnncatatgctattaagacctccaccatcatcaactacncccgacaatgaggtcatggccatgtacgaggagtggttggtgaagcaccaaaaggtgtacaatgagttgggaaagaaggacaagagattccaagttttcaaggacaacttagggttcatacaagagcacaacaacaatctaaacaacacttacaaacttggg

SEQ ID NO: 40756 - DNA, 192 bp, Glycine max
  unsure (1)..(192): unsure at all n locations; Clone ID: 701123261H1
gcacctctctcccctcccctgaaccctgttccatcctccaaccatggtagatncaagacttcgaagagcgccaacagcagcaacaaccgcaggaggctagggtacgacccgaacttcgtccccgactcggtaaaatccttcgnggtccacctctaccgccacancccgcgagaagaacgtgtacgagatcca

SEQ ID NO: 40757 - DNA, 280 bp, Glycine max
  unsure (1)..(280): unsure at all n locations; Clone ID: 701123262H1
ggcttacgctgctttcttttttcttcatttgcggttttgatttggatttggatttggatttggactttggtcgtcaacacagcttttggtccttcgcttcgtttacgaatcctcttcttgttgttcctgncacgcactgcattcgatcaatccatccatcttcacttgcttggtttcgatcggagggaaatggccgatcagttatccaaaggagaggaattcgagaagaaagctgagaagaagctcagcggttggggcttgtttggctccaagtacgaag

SEQ ID NO: 40758 - DNA, 285 bp, Glycine max
  unsure (1)..(285): unsure at all n locations; Clone ID: 701123263H1
cggcattantgtacttggaantaagggagnagcaatacgacaagaaggaataccttgatttttatactgaccttanccgctacatctccagccgtttctggagtgntggtatatatagcaactcccgacaagaaatctaatgtaaattatttgggccctgcatcgattgaagacattgcaaggcaaataattcaagctaaaggtcccgcaggacctaacagagattatcttttcaaccttgaaaaggctcttcatgaaataggatgcaaagacaaacatgtcatt

SEQ ID NO: 40759 - DNA, 289 bp, Glycine max
  unsure (1)..(289): unsure at all n locations; Clone ID: 701123264H1
cggcattagtgtacttggaagtaagggagaagcaatacnccaagaaggaataccttgattttnatnctgaccttaccgctacatctccagccgtttctggagtgatggtatatatagcaactcccgacaagaaatctaatgtanattatttgctcccctgcattcgattgaagacattgcaaggcaaataattcaagctaaaggtcccgcagganctaacagagattatcttttcaaccttgaaaaggctcttcatgaaataggatgcaaagncnaacatgtcatgatc

SEQ ID NO: 40760 - DNA, 280 bp, Glycine max
  unsure (1)..(280): unsure at all n locations; Clone ID: 701123265H1
gcctttttggcatgancatatagcatgtgcgccgtgaggtcaatcactgtcagttcttctntagaaattctcgaacatgatgacgagctcttancgggcttgaggcttcttttcaagctgagtcgaaatttcataagagaagaaaganagtagaaaggatttggattcgaggcttgctaagtgaagtcancaaacaangaaaaaangctttctccgagaaagcgtctgttcacgtcagggtccggggtaggctcttcttcgagattggcttggtcttcag

SEQ ID NO: 40761 - DNA, 272 bp, Glycine max
  unsure (1)..(272): unsure at all n locations; Clone ID: 701123267H1
ttttgggcacagttgctgaggcttaggactatttgtgattgattggtgtttaggttttgtgattgattggtgtgaaaaggaggaaaggaaaaagtgaccttttnttttaatatttcggatcctaaattttagaagctggatttgatctttctgtttctgagctatcaagatgggagggcaatcaagcaagatggttagtgttgaatccccgacacccattaaaatgggtacccattctctgtatgctgctgatttgagctcctatgaagctg

SEQ ID NO: 40762 - DNA, 272 bp, Glycine max
  Clone ID: 701123268H1
cttgcttctggtgatataatgatctcgtgtcttggagataaagatggaaatgctgcaggaaatggatttcttcttcttgattctgagtttaatgtgaagggaaggtgggagaaaccgggtcacagcccactatttgggtatgacttttggtaccaaccacgtcacaataccatgattagcacatcatggggtgctcctagtgcttttacaaaaggttttaacttacagcatctctctgatggattatacgggaggcatctccatgtatatag

SEQ ID NO: 40763 - DNA, 270 bp, Glycine max
  Clone ID: 701123269H1
gtccctggagaagatgttgtagaagttgttgtgagccctccttttgtgttccttccttttgtaaaaagtttgctgcgccctgatttccatgtctcggcccaaaattgttgggttcgcaaaggtggtgcttatactggagtcgttagtgctgaaatgcttgttaatttgggaattccttgggttattattggtcactctgaacggaggcagcttttgaatgaatcaaatgagtttgtgggagataaagttgcctatgcacttcaacaaggt

SEQ ID NO: 40764 - DNA, 274 bp, Glycine max
  unsure (1)..(274): unsure at all n locations; Clone ID: 701123271H1
cacaaacacactcttttttgttctttgctcacttnccttgttcgtttcactctccacnatggantccctctctctctnnngcaccgnancccntcnccgccggcggcctctactggttcgtctgtgttctgggccccgccgagnagaagggcaaangcgccaccgatctatccggcggctccatctccgccgagaaagtccangacaactacaagnnctactggnccttcttccgccgcaccaangagatcgagancgcngannaagtncccga

SEQ ID NO: 40765 - DNA, 272 bp, Glycine max
  unsure (1)..(272): unsure at all n locations; Clone ID: 701123272H1
gttaagccttcaccagtagtggcagcttttagttccaganggcccaatatggttaccagacagattctgaaaccggacgttattgggcctggggttaacatcttggccgggtggtccgaagcaattgggccatcagggttatccgatgacactaggaaaactcagttcaacatcatgtcaggtacatctatgtcttgtccacacataagtggattggctgccttgttgaaagctgnncatccgcaatggagtcctngntgcgataaaatcag

SEQ ID NO: 40766 - DNA, 275 bp, Glycine max
  unsure (1)..(275): unsure at all n locations; Clone ID: 701123275H1
ctaagcacttccatacacaaattttctntcccagaagaaatattttcatttcatttcgagtaaaagtaaaacacagttcctgatccatggcatctcgccgccgcatgttgttgaaggtcataatcctcggagacagcggggttggtaaaacatcactgatgaatcagtatgtgaatcgtaaatttagtaatcagtataaggcaaccatcggcgcagattttcttaccaaggaagttcaatttgaagataggttgttcacattgcagatttgggat

SEQ ID NO: 40767 - DNA, 276 bp, Glycine max
  unsure (1)..(276): unsure at all n locations; Clone ID: 701123276H1
cttcacgaagaaagtactacagaaactgggtcttggtcaactcaggcagcagagtctaagaatgaaaaggagtctcaagaatcctccaagcaggcaactggatacaagtggaagctttgcaatgtcactgctggtcctgattttatcccatgccttgacaactggaangctattaggagtctccggagtactaaacactatgaacatcgagaaagacactgtcctgaagaacctcctacctgccttgttcctgttcctgaaggatataaacgccca

SEQ ID NO: 40768 - DNA, 276 bp, Glycine max
  Clone ID: 701123277H1
ggctcccaagggtttaacctttctggctgtgttaatatgcgtttcagcactgtcactgagtccttctgttgcgggggaagggcaaaataatggccttgttatgaacttctacaaggaatcatgccctcaggctgaagacatcatcacagaacaagtcaagcttctctacaagcgccacaagaacactgctttctcctggctcaggaacatcttccatgactgtgctgttcagagttgtgatgcttcactgttgctggactccacaagaaggagctt

SEQ ID NO: 40769 - DNA, 280 bp, Glycine max
  Clone ID: 701123279H1
ctccttcttctctctcctctggcacccctaaagcttcttctgttctgtgcaggcagtttttctttggtttggttgcatcctttgatctgatcagcaaatttgagaattcagtttgggaagggccattcctctttagtgcaaaacagatcgcaggtgcctttgtgctgatggccactaatgaaaatcttccaccaaatgtaattaagcaacttgccaaggagttgaaaaatcttgatgaatctcctcccgagggcattaaagttgtggtaaatgatgatga

SEQ ID NO: 40770 - DNA, 273 bp, Glycine max
  unsure (1)..(273): unsure at all n locations; Clone ID: 701123282H1
ggaagagactgggtggaaatatatccatggggatgtgtttaggttccccaagtttaagtctctgtttgcngctgcgcttggatctggcactcagttgtttacccttacggtgttcatattcatattggcgcttgttggtgtgttttatccatacaatcgaggggcgctgtttactgcacttgttgtcatatatgcacttacttcagggattgctggatacactgcaacttcatctattgtcagttggaaggaacaaactgggttaggaatctg

SEQ ID NO: 40771 - DNA, 274 bp, Glycine max
  unsure (1)..(274): unsure at all n locations; Clone ID: 701123283H1
agagtcaccatgttgagagccattctgctctgacatatttcaagtcttccttcaagaaattttttacattgtttctctctgggaagcgaaaaacagactcagaagctgctgaaagtgatgacagaaagaatacacacaaagttagaggggtatcatcttccacagatgtatcatcgtntagttccaagagttcatcaaaaagggtgttttctcattgctctgcatcatctggcactgcaagtagtaagcttggaatgggaaactcactttgang

SEQ ID NO: 40772 - DNA, 272 bp, Glycine max
  unsure (1)..(272): unsure at all n locations; Clone ID: 701123285H1
atgtccgttgaactcaagctcnctcgttccaatcgtatcgatcnntantcggaagctctggaaggaaaaatcggtgtcaaaactcagtctncaatgctcccactatggaattcgnccttactgtcaaaggatccgtcaacttgcaggttcgnggaggatcagctggggttgttgaatcattcnacggtgttattaagcccatccctattgtgaataggaccattgaggttanatctctgganagatnggtnctggnacatcagagatnncat

SEQ ID NO: 40773 - DNA, 272 bp, Glycine max
  unsure (1)..(272): unsure at all n locations; Clone ID: 701123286H1
gggaattcaagcactttgtaattgttaagttcaaggnnggtgtggccgttgacgagctcacaaaagggatggaaaagttggtcacggagattggtgctgtcaagtcctttgaatggggacaagacattgaaagcctagatgtgttgagacaaggtttcactcatgcattcttgatgacattcaacaagaaagaagactttgttgcatttcagagccacccaaatcatgtcgagttctcgacaaagttttcggcagctattgagaatattgtg

SEQ ID NO: 40774 - DNA, 268 bp, Glycine max
  Clone ID: 701123287H1
ggagtatcatgggtgaacaattagggctactaaaagtcatggttgtgcaagggaaaaggttggtgatccgggatttcaagaccagtgatccttatgtagtactcaaactagggaatcagactgcaaagaccaaggtaattaatagctgcttgaatcctgtttggaatgaagagctgaatttcactctgacagaaccattgggagttctgaatttggaagtgtttgataaagatctttgaaggctgatgacaagatgggaaatgcttct

SEQ ID NO: 40775 - DNA, 273 bp, Glycine max
  Clone ID: 701123288H1
cttaccaacccctcaagaagttgtggccctctacaatcaagccaacattcgcaggatgcgaatctacggtccaagcccagaagtcctcgaagcactaagaggttccaacattgagcttttgctagacattccaaatgacaacctcagaaacctagcatctagccaagacaatgcaaacaaatgggtgcaagacaacatcaaaaactatgccaacaatgtcagattcagatacgtttcagtgggaaatgaagtgaaacccgaacactcatttgc

SEQ ID NO: 40776 - DNA, 274 bp, Glycine max
  Clone ID: 701123289H1
gttcccacctctctaacaactctgcttccaacttcccaagtttcacctataattcctttcaactttcaataacatcacataccacagtctctcatatcgctttctctcatgaatataatgctatcatcatccaagcaagaataagcaacaaaatgagtcaaagtggctacatcagtgagaaaccaggcttgtctttgagacagaattccaataggaaatcaaccagaaatgggcaagtgaagagctgcatgttcagaattccttggcagtctga

SEQ ID NO: 40777 - DNA, 273 bp, Glycine max
  unsure (1)..(273): unsure at all n locations; Clone ID: 701123291H1
gtagttattctctttcttcttttttagccaancctctctngananatctagatctcnttnttccttgatctacgttacgncanatagtgaccggatctnnanggatctgaaccagatctacacgccgatggtngtttnggcctggtcttcatagatctgntgcatggaggctcaganctactgtacagaggtntgcgattcatgttngtctctctttnngaatctgnttcgtagaaagtcgtntggtcatccaagtcgcatggnactngaggt

SEQ ID NO: 40778 - DNA, 256 bp, Glycine max
  unsure (1)..(256): unsure at all n locations; Clone ID: 701123292H1
atatcagagantttgcagctctctaaggtttttaaaaaacacnacgcaancagcaagatgncccacttccgacagtaacatgctnnnnaaattntgttccagtttatgtgatgctncccactcggagttgtcaatgttgacaatgtttttgaagacccagatggccttaaagaacagctcttgcagcttcgagctgcgggtgttgacggggttatggttgatgtgtggtgggggatcatagaactnaaggggccta

SEQ ID NO: 40779 - DNA, 181 bp, Glycine max
  Clone ID: 701123293H1
gcccttttctgaggaggagagaatttcaccaaatcaaggggaaactctctgaagaatatgggtttaatggagtgcaatgtggaggacaataagaatctataccttcatgctcctactttcattgagtggcttaaaccatgttcttctcctaattattcatatctaaacaattccacacaac

SEQ ID NO: 40780 - DNA, 282 bp, Glycine max
  unsure (1)..(282): unsure at all n locations; Clone ID: 701123295H1
gccacagcaagagtgttcaaatgggagagggaaaaggaagaatttgtgtcactggaggcacaggattccttggttcatggataatcaagagcctccttgaacatggatatgctgttaataccactataagatctgacccaggacgcaagagagatgttagcttcctcacaaacctacctgncgcatcagaaaagcttaaaattttcaacgctgatctcagcgacccagagagttttggtccagcagttgagggttgtgttggaatttttcacactgccaccc

SEQ ID NO: 40781 - DNA, 286 bp, Glycine max
  Clone ID: 701123296H1
tggagggtggaagatcatcagtttcaaatgggaatgttgaggttcgttatagagggattagaagaaggccatggggaaagtttgcagcagagattcgtgaccctacaaggaaaggaacaaggatatggcttggaacatttgacactgctgaacaagctgcacgagcttatgatgctgctgcttttcattttcgtggccacagagcaattctcaacttcccaaatgagtatcaatctcataatccaaactcttctttgcctatgcctctagctgtgtcagctcctcc

SEQ ID NO: 40782 - DNA, 289 bp, Glycine max
  unsure (1)..(289): unsure at all n locations; Clone ID: 701123301H1
cagntcttgaggctcccttgcgccctaagaggaaganggtttgggtggactatttcgttcagtttcnanggatccttgttatngntgtggtccgtcccatnctcctagcaccatttattnccttacatcacctcnggggatgtaagatctgngtggangtcctataagangcgtncgaagggncatgangatnctgtngngaaggnnnncaaacggctaaaacagaagnaatccnattaaagcatnganntgnctgtaacgcncttnatcccngtganagctcgctggc

SEQ ID NO: 40783 - DNA, 276 bp, Glycine max
  unsure (1)..(276): unsure at all n locations; Clone ID: 701123302H1
atgctcttagagaagctatctcaggaatcatgactgattccaaggaaaagaacaggaaatttgtggagaccattgaactccaaattgggctgaaaaactatgatccccagaaggacaagcgttttagtggctctgttaagttgcctcacattcctcgccccaagatgaagatttgtatgcttggngatgcccaacacgttgangaggctgagaagataggnttggactacatggatgtcgaggccttgaagaagcntaacaaaaacaagaatttgg

SEQ ID NO: 40784 - DNA, 264 bp, Glycine max
  unsure (1)..(264): unsure at all n locations; Clone ID: 701123303H1
cttctcaaactagtagtattattcttccattcataatgggtgttttcacattcgaggatgaaatcaactcccctgtggctcctgctactctttacaaggccctagttacagatgccgacaacgtcatcccaaaggctcttgattccttcaagagtgttgaaaacgttgagggaaatggtggcccaggaaccatcaagaagatcactttcgttgaggatggagaaaccaagtttgnnctgcacaaaatagaaagcattgatgagg

SEQ ID NO: 40785 - DNA, 273 bp, Glycine max
  unsure (1)..(273): unsure at all n locations; Clone ID: 701123304H1
ggatggtatgattcttgcaaacacaacatcaattggaatgcaacctaaagttgatgagacgcctgtttctaagcacgctttgaaatattactccctagtttttgatgctgtctacacgcccaagattactagactcttgaaagaagcagaagaatcaggagccactattgtaacaggattggagatgtttatggggcaagcatatggacaatatgagaatttcaccggattaccagcaccaaaggagctcttcagaaaaattatgganaacta

SEQ ID NO: 40786 - DNA, 268 bp, Glycine max
  Clone ID: 701123305H1
ggagtgctgaccagtgtattagcagtggtcaagagggccttacttatgatgacaactctatacatggatacttaaatgatgttttggttgaaaatgcaattgtggatgatactgatctgaatcctttggagtttttagcttccctgttccctggttttgcagcagaaagccttgcggaagcttactttgctaatggatgtgatttacatctgaccactgagatgctcaatcagttagagctcaagttgatggcggtttcaatcagaat

SEQ ID NO: 40787 - DNA, 268 bp, Glycine max
  Clone ID: 701123306H1
gtgagttattcagaacccaggatttggcgaaagtgaagcgatgagcagtgataggaatattggggttgccttggacttttccaaaggaagcaaaatcgctctcaaatgggctattgacaatcttctccgcaacggtgacatactctacatcgtccacatcaagccttccggaggaagtgaattccgaaatcttctctggtccaccactggttcacctctgattccgttgtcggagtttcgtgagaaggaggtgatgcatcactatgag

SEQ ID NO: 40788 - DNA, 267 bp, Glycine max
  unsure (1)..(267): unsure at all n locations; Clone ID: 701123307H1
gtggctgtgaacaacaacatcaacaactatgaatccaaggcaacttccaccatcaccattaagggcattctcagccttctaatggaaagcattgatgatgagaattgtgatggtggtggaagcaagaagagagttatttctcttggtatgggtgacccaactctcaccacattgttccacacaccaaaggttggcngaagaggctgtcgctgatgctcttcaatctcgnaagnttcatggctatgctcccactgctggacttctcca

SEQ ID NO: 40789 - DNA, 262 bp, Glycine max
  Clone ID: 701123308H1
gcttgacacaaagggtcctgaagttaggagtggggatttgccacaaccaattacattaatgcctgggcaggaattcacttttactattcagagaggtgttggaactgctgattgtgttagtgtgaactacgatgattttgtgaatgatgtggaaatgggggacatgcttcttgtcgatggtggtatgatgtctatggttgttaagtctaagacagaggattctgtgaaatgtgaagttgttgatggaggagagctcaagtca

SEQ ID NO: 40790 - DNA, 268 bp, Glycine max
  Clone ID: 701123309H1
atgctcttagagaagctatctcaggaatcatgactgattccaaggaaaagaacaggaaatttgtggagaccattgaactccaaattgggctgaaaaactatgatccccagaaggacaagcgttttagtggctctgttaagttgcctcacattcctcgccccaagatgaagatttgtatgcttggagatgcccaacacgttgaagaggctgagaagataggattggactacatggatgtcgaggccttgaagaagcttaacaaaaacaa

SEQ ID NO: 40791 - DNA, 267 bp, Glycine max
  Clone ID: 701123310H1
ggagcccgcgggcgagttctatcgggtaaagccaatgattagaggcatcgggggcgcaacgccctcgacctattctcaaactttaaataggtaggacggtgcggctgctctgttgagccgcgccatggaatcgagagctccaagtgggccatttttggtaagcagaactggcgatgcgggatgaaccggaagctgggttacggtgcccaactgcgcgctaacctagaccccacaaagggtgttggtcgattaagacagcaggacggt

SEQ ID NO: 40792 - DNA, 247 bp, Glycine max
  unsure (1)..(247): unsure at all n locations; Clone ID: 701123311H1
gcgcgaggnagctaaaagtagcaacgagggatgagagaacaagaggattggaggattacgnncagcgctgttaacgttgttgttggtgtttgtttcttcttttccggcgttgagctacggagttgttcctcctcgtactctgctcaataagctgtctcagggcagttatctcaccactcaggagcaatggttcaatcaaaccctcgatcacttctctccctatgatcaccatcaattccgtcaacgt

SEQ ID NO: 40793 - DNA, 267 bp, Glycine max
  Clone ID: 701123312H1
gggacagattggtgcttttgaagggtgttagtggtgcattcaggcctggtgttctcacagctttgatgggtgtaagtggagctggtaagactactttgatggatgttctggctggtaggaaaaccggaggatatattgatggaagcatcaaaatttctgggtaccctaagaagcaagaaacatttgctcgtatctctggctactgtgagcaaaatgatatccactcacctcatgttacagtttacgaatcctgctctactctgcatg

SEQ ID NO: 40794 - DNA, 246 bp, Glycine max
  unsure (1)..(246): unsure at all n locations; Clone ID: 701123313H1
ccagcacaaccatatccagaaaganttgcattgagttttganaattgttcttttggaactacttactggcagaaagaatcttgatagccatcaccccaaggaagagaggaacttagtcaagtggagccggcctttcctggccgatgattttcgactgtcactgatcatggatcctcaacttaaaggtcactttcctcccaaagcggcaagaacgatggctgacattgcacaaagatgcctccaaaa

SEQ ID NO: 40795 - DNA, 264 bp, Glycine max
  unsure (1)..(264): unsure at all n locations; Clone ID: 701123314H1
aaaaccaaaagggcactgactaattttcacaatcaactggattcaagctggttttctcttcctcttcttcatgttcattgattggatcccatcccaccccaattttctaatgctttgtctctcactctcccacgtgcactttcctcttctccgctctaaataattctccatnnnnnnnnnnnnnnnnnnnnnnnnaatacaatattatatgtgtgtgtggaaaaaagaaccgtttttcttttcagcgaaagcgaccacctttat

SEQ ID NO: 40796 - DNA, 265 bp, Glycine max
  unsure (1)..(265): unsure at all n locations; Clone ID: 701123315H1
gtgtgtgagtnaagangctctctgttgatgtttacctcttccattccaacctttgaatctgtaggcttcagttgtngctatttaacagtgtagggcattgtgtgcttaggaaatagnaagtttgtataattactgtaaataaaatcagtatgggtgaggaagaatcagtgaatgaagtttcaaagactgattcaaatggaaagagctttcaggaganaactttggatgaaattactgagaaaaaggacttggaaactgatggagg

SEQ ID NO: 40797 - DNA, 250 bp, Glycine max
  unsure (1)..(250): unsure at all n locations; Clone ID: 701123316H1
aaactactcatttcccacaacacacccttcactcacgtttnttggtccggattcttctgacgtctattctgaagngtggtttttaaagcatatgcctttatagtcaagtgattcctcttgtttctggcatanaataaaccactccaaaagaacacaatgagcgctgcttcttttctattctcctgctctatgcatgtgggtgtgtctcatcccaaagtggctgcaaaatcctctccatgcggtttgctca

SEQ ID NO: 40798 - DNA, 274 bp, Glycine max
  Clone ID: 701123317H1
gtttgcggctgaggattccgaacgagtgaccttcttcgtttctcgcaaagtttaagtaatcatgggtaaggaaaaggttcacatcaacattgtcgtcattggacatgtcgactctgggaagtcaactaccactggtcacttgatctacaagcttggaggtattgacaagcgtgtgattgagaggttcgagaaggaggctgccgagatgaacaagaggtcatcaagtatgccgggtgctcgacaagctcaaagctgagcgtgaaagaggattacc

SEQ ID NO: 40799 - DNA, 272 bp, Glycine max
  unsure (1)..(272): unsure at all n locations; Clone ID: 701123318H1
ggcngcccatagagatgcagaaaactctcaagtagatgttgaagttgtaggggagacagattctattcaagaaaatactgagtatgaaagagacaganactcacacacaaatgttgctgagaagaaagagaagttattctattctcaggcctccgatctgggtattcagatggctagagagacctataacatagagggagctgtcnagctgataatattangaccatcaatgcacctgatcaaagtggtaactctgttgaggaagaaattcc

SEQ ID NO: 40800 - DNA, 244 bp, Glycine max
  unsure (1)..(244): unsure at all n locations; Clone ID: 701123319H1
ctcactcacctgttantagtagtttcttcccncattttctgttcataactcantttgtaacaatgactgctgaggttatggctcaagaggagacacaagcagctgaggttgttgttgctgttgagcccctgaaagaggagaaggttgctgaagaaaatgtgaaaccaagagagtcatcagtggaagcatccaaacccaaaatggtggagaaaagctcttcttacnagganganagcaactacct

SEQ ID NO: 40801 - DNA, 267 bp, Glycine max
  Clone ID: 701123321H1
cgttgaagcagcttgtgctgcacatcctactgccgatgtcttcatcaactttgcttcatttagaagtgctgcagcatcatccatggctgctttaaaacagccaacaattagagttgttgctattattgctgaaggagtacccgagtcagacactaagcaattgattgcatatgcccgatcaaacaataaggttgttattggcccagccacagttggaggcattcaagcaggtgctttaaaattggtgacacagctggaacaattgac

SEQ ID NO: 40802 - DNA, 268 bp, Glycine max
  Clone ID: 701123322H1
ctttcattttctctgcatctgtactctccaaaatgccgtccttagaggaggagctcttcccttcaaccccaggcaagttcaagatcgagcgggcccaccacatgaaccgccagctctaccgctgcttcgcctccaccagcaccatgtttcctgtgggccctctttttaatcgccctcaccgcttcatatctcagcttccaaggcttcgttgattccggcagccgctacctctccgcctcctggggcgggatccagtgggagaagcagg

SEQ ID NO: 40803 - DNA, 265 bp, Glycine max
  unsure (1)..(265): unsure at all n locations; Clone ID: 701123323H1
ccgctctcttgcactctcccttgttgcccgtcttcggacacatgattttccaattgcatacaaatttaccccaacgcttcatccattttctttcgattcacacacaaacagatgantgttgttaccgattctcctgtgcattcgtccagcagtgatgacttcattgcatttcttgacgctgaactagatgcaagttcaccggactcgtcgcctgataaagaagttganaaacaagatgatgatgagcttgagagtgtcagaatta

SEQ ID NO: 40804 - DNA, 255 bp, Glycine max
  Clone ID: 701123324H1
gttaataccctttttttgggtactattcctagtattccgtctttgtctatcacaggtatgtaggattatatctggtatgactctggtagctgtataaaagtattgattatgtatgagaattatggtgcattgctaatggaaattctgagtaattttgttataccattttaaagatattccttgactcctataaagcatgatctcatttctgaaattctaattcccgcaaggtaggtcctgatgtacatgaaaatg

SEQ ID NO: 40805 - DNA, 267 bp, Glycine max
  unsure (1)..(267): unsure at all n locations; Clone ID: 701123325H1
gtggaggcccgcagcgatactgacgtgcaaatcgttcgtctgacttgggtataggggcgaaagactaatcgaaccgtctagtagctggttnccctccgaagtttccctcaggatagctggngcccgcgggcgagttctatcgggtaaagccaatgattagaggcatcgggggcgcaacgcccncgacctattctcaaactttaaataggtaggacggtgcggctgctctgttgagccgcnccatggaatcgagagctccaagtgggc

SEQ ID NO: 40806 - DNA, 266 bp, Glycine max
  Clone ID: 701123326H1
agtagtcatatgcttgtctcaaagattaagccatgcatgtgtaagtatgaactaattcagactgtgaaactgcgaatggctcattaaatcagttatagtttgtttgatggtatctactactcggataaccgtagtaattctagagctaatacgtgcaacaaaccccgacttctggaagggatgcatttattagataaaaggtcaacacaggctctgcctgttgctttgatgattcatgataactcgtcggatcgcacggccttgtg

SEQ ID NO: 40807 - DNA, 266 bp, Glycine max
  Clone ID: 701123327H1
atttagttgttgacatcaacaaagtcatggaggaagttaatgtggttcaaaccaagaatggaactgttgcagtagcttctgcgtttgctggacataaggaagctatacagcaaagggaccacaaatttttaagaattgctgttgaagaagcctataaaggggtagactgtgaagatgggggtccctttggtgctattatagtatgtaatgatgaaatagttgctcgatgtcacaacatggttctgaggaacacagaccctactgct

SEQ ID NO: 40808 - DNA, 266 bp, Glycine max
  Clone ID: 701123329H1
gcagtttcttccttcatttcatactctctggcaaaaccctcgtcgacggtgaccaatgcggtggatcaaacatggacaagagcatgctagcggatttggattcgctccctgaggctgataagcaaagaatgactgtcatgatcgatcagctccaaatccgtgacagctacattgagcccaaaaacattgatgttgcagctgaaattgcggctctggattatattttaaaatcaacaaaaggttgatccaggttgtaagaatcaggc

SEQ ID NO: 40809 - DNA, 267 bp, Glycine max
  Clone ID: 701123331H1
ataaaatatactcatggccgagcacgattttgatggacatgttgtaggatatgtgcccgaggaccctaattttcctcagaatcattctgatgaacatgatgtagggactgtgattgatagctctggatttcctcacctgctgcctgatgaagatgatgcaggcaatttggtggaggatgccaattttcctgaaaatcattttgatggacatgaacatgatgttggaggttttcctggggacacggactctccacagaaggaggagca

SEQ ID NO: 40810 - DNA, 262 bp, Glycine max
  unsure (1)..(262): unsure at all n locations; Clone ID: 701123333H1
tgaagtctgctatgtgtgcagtggtggttgtagcacttcttcttctggcggnggtggggcccatggctgaggctgtgacatgcaccccaacagagttgagtccgtgtcttccagcaatcacttccggtgctaaaccttccaatgctgttgcacgaagctgaagcagcaaaaaccatgcttatgtggctacctcaaaaagctagcttgaagcagtatgttaactctccgaatgcccgaaaaaccgttgcttctgtggattcct

SEQ ID NO: 40811 - DNA, 273 bp, Glycine max
  Clone ID: 701123334H1
caaaacccattttactccttctttcacaaaagaacaatatctcttgctatttgccaaactacgaacatcatttagaaccatgtctttctctaccaaattgcctttggtccttttattttcatccctttttatccatgcatctttagctgagatggtgtgtgaggacctgccaaaggaagtgtgtgctttctcattagcttcatcagggaagaggtgtttgttggagaccgagaaggtggccgacggtggcgtcgagtaccaatgccggacgtc

SEQ ID NO: 40812 - DNA, 270 bp, Glycine max
  Clone ID: 701123335H1
cttttattcgcaccgcaaacagtgagccatggccgtcggaaagaacaagcgcatctccaaggggaagaagggtggcaagaagaaggcagctgatccctttgccaagaaggattggtatgacattaaggctccttctgtttttcaagtgaaaaatgttggcaaaaccctcgtctctcgtactcagggtaccaagattgcttctgaagactcaagcatagagtgtttgaggtctccttggctgatcttcaaggggatgaggatcatgcattc

SEQ ID NO: 40813 - DNA, 269 bp, Glycine max
  Clone ID: 701123336H1
tctcaatccaacatgttcaactaccttctctccctctaacgatggaccactcagatccattgatttgatagttgcaaaggaaaagatacgaccatgcagattcattaccattggtttgattctgaagctaaaatacggttgttatctaattgtatatccagtctctattgcaattgataagccactttcaaggtgttatcatcttgctgacactggagactttggtctgagtgaatagataaattggtcacaagtttgcaagatgccat

SEQ ID NO: 40814 - DNA, 268 bp, Glycine max
  unsure (1)..(268): unsure at all n locations; Clone ID: 701123337H1
gnggccagtccttccacttctccccctccatccccggtaagtcccaccgcgaggccacgcgcctccacgaggagatggccgtcgatctcatcgaggccaagcccggcaacaaaatcctggacgtgggctgcggcgtgggcgggcccatgcgggccatcgcggcccactcccgcgcgaacgtggtgggcatcaccatcaacgagtaccaggtcaatcgagcaaggatgcacaacaagaaggctgggttggactctctctgcgaggtcgt

SEQ ID NO: 40815 - DNA, 266 bp, Glycine max
  Clone ID: 701123338H1
caagccttacatctatgcgtcacctccccctccttaccactattagctagcatagctctatggatatgaagaatatgtgcaacgaataaaagaaagcgatagaaaaggaagaagaagcgcttcgcgatgcacgaaagagaagaattggaagcaaagtttcggcgttttgtcttttataaaaaaaatgttaaatcattataattttctatgatagggattggtttcttgtcttttttcttttgtttatgaatatcggtgtattttaa

SEQ ID NO: 40816 - DNA, 262 bp, Glycine max
  Clone ID: 701123339H1
gtgcgcttgcatggcgggtccgaaaagcgctaataaaaattaatattgttttttgttttggggagggaaggtttcgggggtgtttttttttctttttggccccgattctcttctctctctatggtgttgttgtgttttttcctttcctttcttttcctttctctcttctatgtcctgtgaatttttctatactctagttcgcgtcgtaagggctcaacaacatgacaaagaattggcaactcggcaaggtacatattacata

SEQ ID NO: 40817 - DNA, 263 bp, Glycine max
  Clone ID: 701123340H1
caaattctcaaacccaaatcccaagtctcctaaaaccctaattcgcagtgaaaatgagagaaatcttgcacatccagggagggcaatgcggtaaccagatcggagcgaagttctgggaggtgatatgcgacgagcacggcatcgaccacaccggaaagtacagcggcgactccgagctccaattggagcgcatcaatgtttattacaatgaagccagcggcggaaggtacgttccacgcgccgtcctcatggatctggagccc

SEQ ID NO: 40818 - DNA, 266 bp, Glycine max
  unsure (1)..(266): unsure at all n locations; Clone ID: 701123341H1
cggagagagatgaccggagaagagatttccggccccgccggccccaagctcctccgtctcgtttccttgcgtnggcgccgcagtgatctgcaccgccgcaatcaacaagtatcgcgaatacgagaggaacaccatcatcaagcagcagcaagtggtggagacacgtaattcgtcggaatctgttgccgttcacaaaactctcaaataaaaaaggttagggttttttataattattattgttgttgctatccgcaatgtttggagcg

SEQ ID NO: 40819 - DNA, 267 bp, Glycine max
  unsure (1)..(267): unsure at all n locations; Clone ID: 701123342H1
cacctcctgtccatcagtaccctcaccctacaccctcccttgcgnccattactctgcnccaccatctcctaagangncatacaagtacncatcacctccaccaccagtacaccctccttnnactcnccaccnagttnancactctcctcnaccanggcctangnanaagccttacntntntgngtcncctngccctgcntaccantattagcnagcatagctctatggatatgnagnatatgtgnaacgantagaagagagcgatag

SEQ ID NO: 40820 - DNA, 265 bp, Glycine max
  unsure (1)..(265): unsure at all n locations; Clone ID: 701123343H1
gaactacacataatgttatttccgttcccaggtcaggggcacttgataccaatgagtgatatggcgagagcatttaatggaagaggggtgaggacaaccatagtgaccactccactcaacgtagccactattcgtggaacaataggaaaagagacagagacagatatagaaatcctgacggtgaaattccctagtgcagaggctggtttacctgagggatgcgnnaatacagagtcaatcccctcccctngacttggtactgact

SEQ ID NO: 40821 - DNA, 265 bp, Glycine max
  unsure (1)..(265): unsure at all n locations; Clone ID: 701123344H1
ggtcaaggaagggtaagaaggcatggagagctaacatcagcaccgaagagatcgaagatttcttcgagaaatcaacgaaggacgctctttctggtggctctctacaagccgtttcttccgattctctcttctatgaagacaagtccaaagatcttgctgtgaagaagangatcgagaaacatagggagagggtgctccgatgtgatagcctgctacagaaaaatcagtttgttaagccagtgccatcttctattctgaagaagtg

SEQ ID NO: 40822 - DNA, 263 bp, Glycine max
  Clone ID: 701123345H1
gacttatggaactatttctccattgggtagtccccagcaggttattcttatcaatggtcagtttcctgggcctagacttgacttggtgactaatgagaatgtaattctcaaccttatcaacaagctggacgagccatttttactcacttggaacggtattaaacaaaggaagaattcatggcaagatggagttttgggaaccaactgtcccattcctccaaactcaaattacacatacaagtttcaggccaaggatcagattg

SEQ ID NO: 40823 - DNA, 261 bp, Glycine max
  unsure (1)..(261): unsure at all n locations; Clone ID: 701123346H1
aaccaatgactcagcttagtttcacttcccaaggtgctccatgntgcaaagttacatattttactccatgaacctccttgaacaccgtcaaagttctctttttttccttcgtggtgctcttcaattgtgtgttgtataacatgtctgagcctctgaggagatgatgctgttttaaattgttggcaaggttttacaaaaaggatccgtgactgtgattttggcctcaacgtcaaagttacaggggtctctatgactataatt

SEQ ID NO: 40824 - DNA, 265 bp, Glycine max
  unsure (1)..(265): unsure at all n locations; Clone ID: 701123347H1
tatggcatactctcaacttcaaaaggtggaaactngcctgcanatcaaggcttctgcngaacagttctatgangtttnttggaacnagccanacactatngccancatttcaccagagnntatncagncngttnangttcatgaangtgnntggggcaaaganggatcanncgtctcctggaactanntacangagggaccagnctgtgtagccaagcaagtgcttgaaggcanagacnaggaccataacgaantggacatgggg

SEQ ID NO: 40825 - DNA, 252 bp, Glycine max
  unsure (1)..(252): unsure at all n locations; Clone ID: 701123349H1
atatgcttgtctcaaagattaagccatgcatgtgtaagtaacnactaattcagactgtgaacactgcgaatggctcattaaatcagttatagtttgtttgatggtatctactactcggataaccgtagtaattctagagctaatacgtgcaacaaaccccgacttctggaagggatgcattattagataaaaggtcaacacaggctctgctgttgctttgatgattcatgataactcgtcggatcgcacggc

SEQ ID NO: 40826 - DNA, 272 bp, Glycine max
  Clone ID: 701123350H1
caaccacctctttcaattctctcctctcttattccaaactcaaattagaggaaaaagggtcaaataataattaagtgtaatatggatacgatcagtgttcaggcgatgagaagcttatcagatagtgactcattatcatctgcaacatatgcaagtgaagaagatatgaaaattaagaaaggtccatggactgaggaagaagattctgttctgatcaactacgtcaacttccaaggcgaaggtcaatggaactccctcgctcgctctgcagg

SEQ ID NO: 40827 - DNA, 268 bp, Glycine max
  unsure (1)..(268): unsure at all n locations; Clone ID: 701123351H1
cattgctggaggtgctactcagaattcaatcagggttgctcagtggatgcttcaagcaccaggtgccacaagttatataggttgcataggaaaggacaaatttggagaggagatgaagaagaaatgtacactagatggtgtaaaggttaactattatgaaatcgacactacacctacaggaacttgtgctgtttgtgtggttggtggtgaaaggtcccttgttgccaacttatcagctgcaaattgctacaagtctgagcnttgacga

SEQ ID NO: 40828 - DNA, 265 bp, Glycine max
  Clone ID: 701123353H1
gcaacttcgcatgcttcaattgttctataccaaattacagttctatacttatagccgagaaattgcttgatgtaatgttctttcaacgaatagctgtaatcagtaggttatcgtgaagcttgttcaatgtatcgatgaactataaatctcgtggttgtgatgaattttggaattccccctccccccttttctgcgtcctcgaaaagctaggtctcgtacgtggtttcgtgtgttagtaaagtaataagtttcaatatgcagatct

SEQ ID NO: 40829 - DNA, 244 bp, Glycine max
  unsure (1)..(244): unsure at all n locations; Clone ID: 701123354H1
gggacagaaccctgcagctaacaancctcagagaaccccaancaaaaagcagttacaatganggtcatgccgtgtcatctagcgcctcatctaacttgactagattggacaacggaaccgagtatgcgagtccattaaaagatgattaggtgaagacactcatcttactgaaaaccaatttattctgttgggagatggtggtttgtctggtggctgcatgcttgtccacaaaattcatgacttg

SEQ ID NO: 40830 - DNA, 263 bp, Glycine max
  Clone ID: 701123355H1
agtaaacactgccacagcaagagtgttcaaatgggagagggaaaaggaagaatttgtgtcactggaggcacaggattccttggttcatggataatcaagagcctccttgaacatggatatgctgttaataccactataagatctgacccaggacgcaagagagatgttagcttcctcacaaacctacctggtgcatcagaaaagcttaaaattttcaacgctgatctcagcgacccagagagttttggtccagcagttgaggg

SEQ ID NO: 40831 - DNA, 264 bp, Glycine max
  Clone ID: 701123356H1
ggcctcttcaagaacggtgaggattacaggagaaagaccacttcaaggcaacaaatggcacaaaatggaccaatcatatcccattcctgactattgtgagcctgaggcacttcagggcaagtttgagattccaattctcacccttacaatgccaaagaagatcacttctcaagttgctcctaaacaacaagaagtgggaacatcccaagagaaaggtgaagcaaagcccacagaaaatgtacaagacaccactccaccacaacc

SEQ ID NO: 40832 - DNA, 264 bp, Glycine max
  Clone ID: 701123357H1
attagttttacgattattttttttcccttggattggagctggggtttcttgtggtgagagaaagaacccttattctttgatttgggaacatctaggtctcaatttagtggaacacccttcgtagttggaagttaaattttgaagctttggacgaagatggtaaatgggaatgtgagaataaccagttgggtccaaaagaagatcactgatccccttctctccattatccgaagaggaactgaaccaaaccagttggctttctct

SEQ ID NO: 40833 - DNA, 248 bp, Glycine max
  unsure (1)..(248): unsure at all n locations; Clone ID: 701123358H1
aatcagttcacccacacagttcaaggtactacgtggtggctgttgganaaaaantcaattttgagagagtgaatccgcaaacgagtaggattaaccagtgtcatgacttgacggaaaatccatggattcagcactaccgatcttcaagcaaacagagaagcatagcagtttcatcccttcaagaaagtgttactaccacaagtaaagttgttgatttaggccaaaggaaaggagttccctctggatca

SEQ ID NO: 40834 - DNA, 267 bp, Glycine max
  unsure (1)..(267): unsure at all n locations; Clone ID: 701123359H1
gccttctctcaacaagaagctcacaactatattcttagtctgtgtccattttaaatccttccgtgtccctgctcctttcctccacccaaaacgccaccntttcgccctgcggctccctcgatcggccactgtccccgcnaccggcgcgtgagcaagcgccactgccaagtcctcttcgacgcttccctccgcaagctctacatcctcaacggcgttcttccgcacggccacggcgantccaccgccacgtgtcgcctcgtccacgag

SEQ ID NO: 40835 - DNA, 244 bp, Glycine max
  unsure (1)..(244): unsure at all n locations; Clone ID: 701123360H1
cctctgtatcccattcctctgccancatcctgaaatacgttnncacaacactcacctttgcatatacagcataatcatcaattttctgaaatgagccagcgtgtccccaactgcgatgtggacgacaataacaacattcccacaaccacaaaaatccctcttcttcccaatttcaatttcatatcccatgaagtcccaatgttgggctaccaagctgctgaactaccatgcaaaaagggacaac

SEQ ID NO: 40836 - DNA, 263 bp, Glycine max
  unsure (1)..(263): unsure at all n locations; Clone ID: 701123361H1
agggtcacatgtttggctatgccactgatgaaacccctgagtacatgcccctcagccatgtccttgcaaccaaactcggtgctcgcctcaccgaggttaggaaaaatggtacctgtgcttggctgaggccagatggcaagacacaagtaactgttgagtactacaatgacaatggtgccatggttccagttcgtgtccacactgtcctaatttccacccaacatgatgagnctgtgagcaatnaccaaattgctgctgacctt

SEQ ID NO: 40837 - DNA, 262 bp, Glycine max
  unsure (1)..(262): unsure at all n locations; Clone ID: 701123362H1
ggggctacccgctcctgcaatttgcttttgcgattggagtggaaggccattctcgcaacgtttgagttcagcagatccagaatttttcagaaaccaggttaaggagaatgaagaatacggaacgaattgccaatttggcttagcaggtttaaccttagcgccgcttgttgtgaaagtagatccgaatttgaatgttattttgactgcttgcctcactgtgtttgtgggatgtnaccgctccgntaaaccaaccccancaact

SEQ ID NO: 40838 - DNA, 259 bp, Glycine max
  unsure (1)..(259): unsure at all n locations; Clone ID: 701123363H1
attcttcaactaaaagctattgtttacatcacaagaaacaaggctacgctaaactattcttttgagttttgaaatcccaagccaatacagattctcaagcacagcagcagcaagggatatgatgggcagcagcagcatgttnagggtagtgttgggcttgtctgttttgagttgtgtgctagtgacatcctcagctcaaacgtgcagaaaccaaacattctcaaacagggtgtttgccacatgtcgtgatcttccacag

SEQ ID NO: 40839 - DNA, 272 bp, Glycine max
  unsure (1)..(272): unsure at all n locations; Clone ID: 701123364H1
gaaatcacatnnctagttgtttaaagtaaganagnaganagaagcacatggcnaactttccagttgttgacatggggaagcttaacaccgaagagagacctgcagccatggagattataaaagatgcctgtgagaactggggtttctttgagttggtgaaccatgggatatccattgagcttatggacacagtggagaagctcacaaaagagcattacaagaagactatggagcaaaggttcaaagaaatggtgaccagcaaaggtcttgag

SEQ ID NO: 40840 - DNA, 270 bp, Glycine max
  Clone ID: 701123365H1
gaatactactaactgtgttgtaatacctcagtggagaacaagatgaatccatggaacatgagaacttccaagttactctctcaacaacttgcttatcctccttatcgcttggtagaagagattccaaacatgggaaattccagttgtgtgagcaaggagccaagaggttcacagatgacaatcttttatggtgggccaagttcttgtctggatgatattcaactgacaaagccaaggacatcatgtcttttgccggcaaaggatgtctca

SEQ ID NO: 40841 - DNA, 270 bp, Glycine max
  Clone ID: 701123366H1
tgcctgttctctccatacattgcgactgccaaggagcagtatgaatgattccattgtggaacagattgctgggaggctttctatgatttctttcttggatgtgagctactgtattaaaatcggtccctatgcacttgagatgattggcaagaactgcaaactgctagaagggttgtgtcgaaacatgcacccgttggatactgcaagcaagccgtttcaagatgatgaagcatatgcaattgcctccacaatgcctaagctcaagcatct

SEQ ID NO: 40842 - DNA, 241 bp, Glycine max
  unsure (1)..(241): unsure at all n locations; Clone ID: 701123367H1
aagcttggggtttgantcgaatcgaatcgaagcgattcatcgatcgatcgatggctccttgtaggagttgnactcaagcntncggnggagggcgnaccggaggcgnattgctccgnnaagcccaccaatcagggcgnnggcctncnccactactattctctcaanatccangagnatcanctccttcntcgccannagactcannncctcanncgtctngaggcncagagnaacgacctca

SEQ ID NO: 40843 - DNA, 258 bp, Glycine max
  Clone ID: 701123368H1
gttctctctccgtacttcattcaggcacatcatcttcttctataacattaacccagggtcgtctccaaaaatgctacctctgcgtccacaagcacaagttggaggactacaaacatcgctgtctctggtttcctcagaccctctcctgtctcctgatgaacctagatcaaactccaacaatctccatgaatctccggctgaaagtgcaagttctcaggaaacttggcctactgctgatgcagctgcagcaaagaagat

SEQ ID NO: 40844 - DNA, 242 bp, Glycine max
  unsure (1)..(242): unsure at all n locations; Clone ID: 701123370H1
ganattntggatttgtnctgatgnacaanagggacgnncaatgcaagtaccagcaaggngnnaactgnctttgagcaatggtggcaagnangttcgtgccagtcatgaggaacggaatgtnggttctgcngncggccgnttgnctcctaaatcaggatctagttacnagaccagtnatgctannatggcancagcagattctagaaagcagcttggtaacnacagtgataatggaccngggt

SEQ ID NO: 40845 - DNA, 261 bp, Glycine max
  Clone ID: 701123371H1
cactctctctgctcttcttctacctttcaagtttttaaagtattaagatggcagagacattcctatttacctcagagtcagtgaacgagggacaccctgacaagctctgcgaccaaatctccgatgctgtcctcgacgcttgccttgaacaggacccagacagcaaggttgcctgcgaaacatgcaccaagaccaacttggtcatggtcttcggagagatcaccaccaaggccaacgttgactacgagaagatcgtgcgtg

SEQ ID NO: 40846 - DNA, 259 bp, Glycine max
  Clone ID: 701123372H1
gacgagtgcatggtgcttgacaatgaagctttgtatgacatttgcttccgtaccctcaagctaaccaccccaagctttggtgacttgaaccatttgatctcagctacaatgtctggtgtcacttgttgtttgaggttccctggtcaacttaactctgatctgcgaaagcttgcagtgaaccttattcccttccctcgcctccacttcttcatggttggatttgctcctttgacatctcgtggctctcagcaatacaggg

SEQ ID NO: 40847 - DNA, 264 bp, Glycine max
  Clone ID: 701123373H1
atcgtcttccaaaatgaacgacgcagatgtctcgaagcaaatccagcagatggtgcgtttcatccgccaggaagctgaggagaaagccaacgagatctctgtatctgccgaagaggaattcaatatcgagaagctgcagttggttgaagccgaaaagaagaagatcaggcaagaatacgaacgcaaagagcgccaagtcgaaatttcgcaagaagattgagtactcaatgcagctgaatgcttctcggattaaagttcttcaag

SEQ ID NO: 40848 - DNA, 266 bp, Glycine max
  unsure (1)..(266): unsure at all n locations; Clone ID: 701123374H1
agcacagcactcttcaaccatcaatcatccatccgccttcttcatttcaccaccgcgcgcacaattgcaattacatttccagcccccaaatttccntttcagaagaaaaaaccaccaccanctcacctctgatccgtgcacctcacgtgcccatggctcctgctacctccgagcgcgtggagttggccaggctctgcgcctccaaggactggtccaaagccattcgaatcctcgattccctcgtttctcattccaacgcaattcaa

SEQ ID NO: 40849 - DNA, 261 bp, Glycine max
  Clone ID: 701123375H1
ctcagtcttccacctcactgtcctagattgtggggtttctcttttcagttctcatcgtaactaccatagttgctgctccgaaaagggttttcctaacaccgcccatgcaatcaatttccgggttgtacaattcgtgaataggttgttgctgttctgaaaagtagtggatagtaaaaaatattgaactttttttgagagaaaaatgcagagtaaagaagctgttgtggaagatggggacataaagagtgtgactgctgtagg

SEQ ID NO: 40850 - DNA, 261 bp, Glycine max
  Clone ID: 701123376H1
ctacattcaccgagcatttgcattcacattgaatatggctgagactacacaatctaatgctgagttgttggagtggcctaagaaagataagcgccgcttcctgcatgttgtgtatcgtgttggtgatcttgatcgcaccattaagttttatactgaatgttttgggatgaagcttttgaggaaaagagatattccagaggagaaatatgccaatgcttttcttggatttggccctgaacaatcccattttgttgtggaatt

SEQ ID NO: 40851 - DNA, 263 bp, Glycine max
  unsure (1)..(263): unsure at all n locations; Clone ID: 701123377H1
caccgataaatcgctatgactgctcagacccaagaggagcttcttgcggccgaccttgagcaacaaaagatccatgatgatgagcctgtannnnnnnnnnnnnnnnnnnnnnnnnnnnnngacgacgatgaggatgacgacaatgttgaaggtgatgcatctggtaggtccaagcagaccagaagcgaaaagaagagtcgcaaggcaatgctcaaacttggaatgaaacctgtcacaggtgtcagttcgtgtgactgttaaga

SEQ ID NO: 40852 - DNA, 265 bp, Glycine max
  unsure (1)..(265): unsure at all n locations; Clone ID: 701123378H1
gcnatcngccgcctcgagacgnattcgnctcgagcggcntnnagcggcctcgaggntagagannagccactaagggacctgcggaaataggagaganagaagagannancgangaagcagcatcgacgaggaggcatcagnaacattacctttcattcttgcaantnaagtgtgtgacagatttgcaagtgctggttntcatggtaacttgataattactgacccaagagctgaacatgncnattggtagctgnctcaancacat

SEQ ID NO: 40853 - DNA, 266 bp, Glycine max
  unsure (1)..(266): unsure at all n locations; Clone ID: 701123379H1
gagaattctcaagccatcaaagtggttctcaaacaaaactnctaagaattagtcttcatcgccgaagatcaagatcctcctccaataactcattatctagtaattctccaagtccaagatcccccatgtcaaacaatggagagatcactgggctaatggaggcttttcgtcactttgataatgatggagatgggaaaatctcggcctatgagctaaggtcatattttgggtccattggggatcacatgtctcatgaggaggctgaa

SEQ ID NO: 40854 - DNA, 263 bp, Glycine max
  unsure (1)..(263): unsure at all n locations; Clone ID: 701123380H1
ctcgagcccttttttgtctcgctctctctggtgttatcagaatccgactagattaactgttngtgcatgtgggtttggttcctttggtgctacagtcaatgntggagatgtatcagctgcatcttctctttatcgaaatggtgttggttgtggtgcctgttaccaggtgaggtgtaccaacagtgtatattgctcagaaaaggtgtgactgcagttataaccgaccaaggttcaagtgataacactgatttcatcttagcaaa

SEQ ID NO: 40855 - DNA, 270 bp, Glycine max
  Clone ID: 701123381H1
agcgtacgcataactccccgccgtccggacatttcttggttcctgaaatttcaaagaataccaatggctcacaggcgttgcctcttgataagagggaacctcatgaatcggaagtgccacccatctttcagttatgttctccatagcaatgaagggaaacgtgaatgccctgatgaaaagtcatcttcagctggcattagtattctatccaaagaaggatgtttgggaactcagttgatggatcaatgcggttgtttcctattctggtca

SEQ ID NO: 40856 - DNA, 246 bp, Glycine max
  Clone ID: 701123383H1
atttcttctagccatggacgagaaactcatacagcggttaacatcggcggtgttgcgcttagagtcgctatcctccggactccacccctccgcttcacaatccggcggcgcccacgctcccgatgcggcgctcgatccctccgtcgtcgccttcgccgatctgatcgaccagtacgtcggtagggtttccggcgctgcagaggttatcggcggacaggtcttgggtgtcaccaagctggtgcagga

SEQ ID NO: 40857 - DNA, 265 bp, Glycine max
  Clone ID: 701123384H1
gtgccctcttctcacaactgtgatgttcctcatgtgaatcgtactgattaccagctcattgatattgctgaggatggatttttgagtctgcttactgaaaatgggaacaccaaggatgacctcaagcttcccactgatgagagtctgctcactcagataaaggatggatttgctgagggcaaggatcttgttgtgtctgtcatgtctgctatgggtgaggaacagatttgcgccctgaaggatattgggccaaagaactagcttt

SEQ ID NO: 40858 - DNA, 87 bp, Glycine max
  unsure (1)..(87): unsure at all n locations; Clone ID: 701123385H1
antgctacgctgntgcaaactnaacactgattntaaatgntgcttccaatnatgcaactgcaaggcaaattcctaanactttnntng

SEQ ID NO: 40859 - DNA, 262 bp, Glycine max
  unsure (1)..(262): unsure at all n locations; Clone ID: 701123386H1
cacctatcctgtttctcctgttggtgtcaatcattccagagtacttaatgcagttcaggaagcaagaagagcaactgagaaagcctatgatgtggccaaggtagatgagagggttaatagagcagtagcagctgctaacagagcagccaatgcagctagagtagctgctgtcaaggccgtgcaaaaccanatgcatcataacgttaacagcatgagcatcccaattcccattgtgtgaggctgtcaactgcaaacttttgat

SEQ ID NO: 40860 - DNA, 260 bp, Glycine max
  unsure (1)..(260): unsure at all n locations; Clone ID: 701123388H1
ggtgttgttactgctgctcttttctcttttcttttctctttagttctctcttcccctnnnnnnnnnnnnnnnnnnnnnnnnngagcctgtttaagcttttcttccattaacatattatcanaatgtgtggtattcttgctgttcttggttgttctgatgactctcgagccaaaagggtccgcgtgcttgagctctctcgcagattgaagcaccgtggccctgactggagtgggctccatcaacatggtgactgctttttg

SEQ ID NO: 40861 - DNA, 232 bp, Glycine max
  unsure (1)..(232): unsure at all n locations; Clone ID: 701123389H1
attccaatggccgntcagctcaccgacgaacagatactccgaanttcaaggaagccttcagcctctncgaaaaagacggggatggttgtattaccaccaaggaacttggnaccgtgatgcggtcacttggccagaacccacctgaggcagagctgcaggacatgataaatgaggttgatgctgatgggnatggtaccatgatttcccagaattcctgaatctcatggctcgc

SEQ ID NO: 40862 - DNA, 263 bp, Glycine max
  Clone ID: 701123390H1
ctagagagctgtggtttctctgctaccattggaatggatgttctcaaagataagtgtctgatatctactttggaaggtaaaattgagatgcatgatttaatacaagaaatgggacaagaaattcttcgtcaagaatgttgccataatccaggaaaatgcagtcgattgtggaaggttgaggaaattcatcaagttttaaaagataacaaggggacagatgcagtacagtgtatgtttctagacacaaggaaagtcaatgaagt

SEQ ID NO: 40863 - DNA, 265 bp, Glycine max
  unsure (1)..(265): unsure at all n locations; Clone ID: 701123391H1
gacaacggctgatcttacattggaaattgccaacaagatgcagaacattgtctgtgtggagaccatgatgcacctcacctgcaccaacatgcctgttgagaagattgaccatgctnctccacaccatcaagtccanctggcctccaaaatgtgcttgcacttcgaggtgatccancgcatggtcaggncaaattcgtcnaggtcgaaggcngctttgcctgtgcacgcgacttngngcaacatancagagctanatatggtgact

SEQ ID NO: 40864 - DNA, 253 bp, Glycine max
  Clone ID: 701123392H1
agctattagcaatctatctatttatctaactatccatcttcaaatctttctctcaagggaagaagtagcaacaacaatggtggtgaagaagccacggattgtgataattggagcaggaatggcaggtctcacagctgccaacaagctctacactgccactgcctcaaaggacttgtttgagctgtgtgttgtggagggtggaacaaggattggtggcagaatcaacacctcagagtttggtggtgaccgcatt

SEQ ID NO: 40865 - DNA, 260 bp, Glycine max
  Clone ID: 701123393H1
gaacccttccacggtggtgactgcgcgatgggtgcctacaagtatgtttcagagctatggcgcaagaagcagtctgatgtcatgcgcttcttgcagcgggtgaggtgctgggagtataggcagcaaccttccattgttcgcttgacaaggtcgacccgccctgacaaggctcgtcgcttgggcttcaaggctaagcagggctatgtgatataccgtgttcgtgttaggaggggtggccgaaagaggccagttcccaaagg

SEQ ID NO: 40866 - DNA, 265 bp, Glycine max
  unsure (1)..(265): unsure at all n locations; Clone ID: 701123394H1
atatattagtatcgagacttccatgaaaaaaaaagtataaaaaccagtacataattagataccacaaaacactaaacatcacaacttaacccacactcaatagtcttggaccaggacctctccgaccgtctcgtccccgtcctcgcttcagcagcacaacaagaccaaaccctcgatttccaagacatcctccaacgtttcgcgttcgacaacatctgcaaaatcgcgttcgggtatgacgccgagtacctgangccgtcaactg

SEQ ID NO: 40867 - DNA, 265 bp, Glycine max
  unsure (1)..(265): unsure at all n locations; Clone ID: 701123395H1
ctcaatttcgaaccccatttctggtttcttttccccttttgttattcatcttcaacctcaccccttcgcacgcactctatggagcatcctcacccgtacttcaactcantccctctaanttcaagtncaaggttctnanttcanatngtgtgttcttgttgaattctttgcnccatggtgtggacactgtnaggctctgantcctatatgggaganggcagctactgtgttgaagggtgttgttactgtggcagcaattgatgct

SEQ ID NO: 40868 - DNA, 281 bp, Glycine max
  unsure (1)..(281): unsure at all n locations; Clone ID: 701123402H1
gtttgtatcaacagtgaagaggctacgagtgttgaagagttctgagctttctggcttttacccttgggagtaagcaagacaagataccccttgnctcagcaatgaaatgaacagcggtttgaggttttgatcacctgctgaaaacttgaagactcttcctaatttgacgttttggttctattgtctgatgaaaagaacatggaatgaagctagttgcgtacattacaactaagtaatgtgatgaatgtgtcttttntntntnttttccnaaangaagnttg

SEQ ID NO: 40869 - DNA, 118 bp, Glycine max
  unsure (1)..(118): unsure at all n locations; Clone ID: 701123403H1
tactctacatncncaacnnaactctccgattctgangnttttnttatctcttgtctttgaaactagaagctccgtgattgatcaatggncgacnataancatgnaaagccatangnat

SEQ ID NO: 40870 - DNA, 282 bp, Glycine max
  unsure (1)..(282): unsure at all n locations; Clone ID: 701123404H1
tttgcttcccaagtctctcgaagcatctttctttctcttcctgcagaagctatccgtgttncttgttcccaagttctccaacaagcaaagtacatggttgatttggaaatccaggtccccagcgcattcgaacccgtttgccgaggcgagagaatcagatgcccccggggcaaaggagtatgtgcacatacganttcagcagaggaatggaaagaagagtctgacaacagtgcaagggctgaagaaggagttcagctacgagaagatcctcaaggacctcca

SEQ ID NO: 40871 - DNA, 280 bp, Glycine max
  unsure (1)..(280): unsure at all n locations; Clone ID: 701123405H1
gntggagtctgagaactctagcatgtactagtactactcctacattcctccatcttcctttgtactatttttttttttaaccatanaagcaagangcacaangntggtganagctccttgttgtgaaaagatgggtttgaagaagggtccttgggctcccgnggaggatcaaatcctcacatcttacattganaaacatggtcatggcaattggngtgccctcccaaagcaagcaggttgttaagggtgtgggaaaagctgtagacnccgctgggttaaa

SEQ ID NO: 40872 - DNA, 197 bp, Glycine max
  unsure (1)..(197): unsure at all n locations; Clone ID: 701123406H1
agaggttccaacattgagcttttgctagacattccaaatgacaacctcagaaacctagcattagccaagacaatgcaaacaaatgggtgcaagacaacatcanaacttgcacatgtcgtcgtcgttagggaatgaggaccgacccttgaatctggcgatgactcgagcatctagtgctgacataagtcatcatgtng

SEQ ID NO: 40873 - DNA, 277 bp, Glycine max
  unsure (1)..(277): unsure at all n locations; Clone ID: 701123407H1
gcggcgtgagaatgttggacatcaacctattcagagaggagaagggccacaaccctgaactcatacgcgatcccaacgccgtcntttcgccagcgtcgaaatcgtcgacgaggtcatcaatctcgacaaagaatggcgaaaacgtcaattcgagttgganaatctccgcaaggaattcaacangatcaacaaggaagtctccaaantcaagcgtgctggggaggatgcttctaagttcattactgaatcagaggagaccaaaaaatcgatagcgggg

SEQ ID NO: 40874 - DNA, 276 bp, Glycine max
  Clone ID: 701123408H1
gtttgctaccttctctcggaaaaatggttacgttcaggtttcaccagtaccaggtggttgggagggctcttcccacggaagcagatcagcaccccaagatctaccgaatgaagctctgggccaccaacgaggttcgcgccaagtccaagttctggtattttctgaggaaactgaaaaaggtgaagaagagcaatggccaagtgcttgccatcaacgagatttttgagaagaacccaaccaaaattaagaactatggtatatggttgcggtatcaga

SEQ ID NO: 40875 - DNA, 278 bp, Glycine max
  unsure (1)..(278): unsure at all n locations; Clone ID: 701123409H1
aaaatcacttgaaatttccagaggaggtcagattgacacccgaagccaaggatctaatatgcaggttgctttccggtgtgccacataggcttggtactagaggagcagaagaaattaaagctcatccttggttcanagatgtcatgtgggacaggctctatgaaatggaggcagcatttaaaccacaagtcaatggagagcttgacactcagaattttatgaaatttgatgaggttgaacaaccaaaatcaactagatctggatctggacccttcaga

SEQ ID NO: 40876 - DNA, 280 bp, Glycine max
  unsure (1)..(280): unsure at all n locations; Clone ID: 701123410H1
ggccaaggtgtttgatatcgacctgcagaaacagttgaggncttacatggaatctatggtttccactcccncggaatctatggaccccgatttcattgctgccaaccaaggagaccgtgccaacaacgtgatcaagggcacaaagaaagaacaagttcaacaaatcatcaaagacattaaggagtttaaggaaagcactaaggttgacaaggtggttgtcctgtggacagccaacacagagaggtacagcaacctagttgtgggactaaacgacaccatg

SEQ ID NO: 40877 - DNA, 277 bp, Glycine max
  unsure (1)..(277): unsure at all n locations; Clone ID: 701123411H1
ccaaacacaacaacacaaaganaaaaagagcacaaacagaccaattccaacggttgaattttttgggntgnagacaccccaccgacgttagtcaaataaaacatgtcttgctccgtcgcggtttccaattcgccggtgttctctccttcttcttccctcttctgctcgaagccctccatcatctcttcttcgccggaannnnnnnnnnnnnnnnnnnnnnnnnnaaaccttccaactcttctacgacgtcgtcttgttcttcaccctctgctgcngc

SEQ ID NO: 40878 - DNA, 277 bp, Glycine max
  unsure (1)..(277): unsure at all n locations; Clone ID: 701123412H1
gctcttcctcactctcattcgcaatggcngcagcagcacgtcctctcgtcaccgtgcaggncctcganagtgacatggccaccgacgcctccgccaccgtccctatccctgacgtcatgaagtcctccatccgcccggacatcgtcancttcgtacactccaacatctccaagancagccgacaaccctatgcagtcagccgccgcgccggcnaccagacttccgccgagtcctggggaaccggtcgtgccgtctcccgtatcccccgtgttcccgg

SEQ ID NO: 40879 - DNA, 280 bp, Glycine max
  unsure (1)..(280): unsure at all n locations; Clone ID: 701123413H1
cttttctcttgaaccttccttcacccatcttctccaccactccacaacaaccttaaatcnnagacccaaaccaaacgnnnnnnnnnnnnnnnnnnnnnncaagagaagaattttctttcttcaggattccgagaagttggtgtgatctgatgcgagtgttaagaagataatctgaggagaaaanagaaagaaaaaaaagtttcatttttttttttcaatggngtcagatcttcaggnagcaccctcccatgtttttggntcaccaccagcagcagntgat

SEQ ID NO: 40880 - DNA, 278 bp, Glycine max
  unsure (1)..(278): unsure at all n locations; Clone ID: 701123414H1
cttcttcacttcnaacttgccaatctcgaagatggcaatagaattggcatctcccaattgggttccaaccgcagccgcatgtttggcagccttggccgccctcctcctcttcctcctccgcggtctccgccgccgtaaatacaatctccccccaggccccaagccctggnccatcataggcaacctaaacttaatcgggctccctcccacaccagtggattcangcgctgagtaaaacatacgggcncatcatggcacgtgtggttcgggtcgaaccc

SEQ ID NO: 40881 - DNA, 276 bp, Glycine max
  unsure (1)..(276): unsure at all n locations; Clone ID: 701123415H1
gtcgcaaccctaatcagaagaagcgcanttcaagcgagtgacagccaccagccatgggtcgtatgcacagccgcggtaagggtatatcctcttctgctttgccctacaaaaggacacctcctagctggctcaagatctcttcgcaagatgtcgaagaaaatatctgcaagtttgcgaagaaaggtttgaccccgtctcagattggtgtcattctcagagattctcacggtattgctcaggtcaatagcgtcatggcagcaaaatcttcgcatcctc

SEQ ID NO: 40882 - DNA, 260 bp, Glycine max
  unsure (1)..(260): unsure at all n locations; Clone ID: 701123416H1
ctcccccataatgaaattgctgcacngatatgccgtcaggatggcttagtcaagcgactaannaagtctgataatcttctcgagggtggaggagaagaggacaattttgccatcgtgtttgcagctatgggagttaacatggagactgcacagtttttcaaacgtgactttgaggagaatggctcgatggagagagtgacccttttccttaatctggcaaatgntcctnacaattngagcgtatcatcactcctcgtatt

SEQ ID NO: 40883 - DNA, 281 bp, Glycine max
  unsure (1)..(281): unsure at all n locations; Clone ID: 701123417H1
tttgccatctaacctgccatggccacagtccttttcccttcaaaatcgtttatctgatcgacttagagacctatctgccaaaggttggagtcagctagctggatcaggtcctgtaccatggaagcaagcacccagtctgttcaattctgcttcttcatctgacctgatcccagaagtgccttctttagttgagttatccaatagctttgacaaaatgtnntgcaatgaaaggttacctgcctcagccttggaaaagaaaaatgaggattgtctggaatacc

SEQ ID NO: 40884 - DNA, 285 bp, Glycine max
  unsure (1)..(285): unsure at all n locations; Clone ID: 701123418H1
gcacttctctcctccttcacacatatatccattctgaaactgtgaaaaactaactcaaacaacttaaagaaccattattacttcatcagccaaaatgccgagaaaaggaatgagaagcattttcttcaaaccatcaacttccacctcatcgctaccancacctccttcccctcaacgcactttctccagactccttaatggacgaaaacatagaaaccgcagagaagctantaaccaaatgggacgatnccaaanttccgangacaanngggcttttnagcggca

SEQ ID NO: 40885 - DNA, 277 bp, Glycine max
  unsure (1)..(277): unsure at all n locations; Clone ID: 701123419H1
tagtccccttacttggctcgctggttggatttgattcgactcgattctcgctgatgaagaagcatttgatgcacagtatggcgttgccgtgattgtggtgttggctttgagtttgagtttgggtgcatcagcggaacaactcagttcacgagaatgcgagaatctcggtttcaccggactcgccttgtgctccgactgcaacactctctccgagtacgtcaaggacaaagagttggtatcggatgtntcaagtgttgcaccgangactccaatgatg

SEQ ID NO: 40886 - DNA, 282 bp, Glycine max
  unsure (1)..(282): unsure at all n locations; Clone ID: 701123420H1
tcacgttatccacacaacaacactcnaannaaccctanccaaccatngcttcttccancttcaccgcaatgncngcttgcaagtttcctccgccgccgcatctnctgccttcnccacccagcgcngcacnaangccgtccttctgtccagacgcagccgcgccgccagggtctcngccatggccaaggagttgcacttnaacaaagacgggnaccgcaattagggaagctccagagcggtgtgaacaagttcggcggatctgggttggggtcacgntggtcc

SEQ ID NO: 40887 - DNA, 395 bp, Glycine max
  unsure (1)..(395): unsure at all n locations; Clone ID: 701123421H1
anacttcgagcccggaatccgggctcgagctatatnattcattattatnagttaaagcttancnccaaaccttcccatttccaaaagtttaaaaagnatggccntccgtaacccaggccaacttctgggaagtggcctncccgggtttggcncctccncggctttccgcngctnctnaaaccctttggaancggcggcttggggttcctccattccaaaagttgtgggaagggnccccgcggattaaaggcaaaccgaggganggcttccccccagggttcgttnagaagnaggtggggggcggaccttgganatccatccagggttcggcctttnatggaacatgttctggcttccaggaagggaggggcctgtttctcctncatttngatttc

SEQ ID NO: 40888 - DNA, 278 bp, Glycine max
  unsure (1)..(278): unsure at all n locations; Clone ID: 701123422H1
gcaagntgcttgtttgatagggaagagaagaaagagagaaaacaaagggnggtggtgagtgcttctgcttcatcatcatcagagaatgngcggctactgtgtcttctgcttggtcaaagcccggcgcgtgggccctagattccgaggaacacgaagccgagctccttcaacnnnnnnnnnnnnnnnnnnnnnnnnngccactcgccgacttcccntcccttgcngccgcagncgccaccaagcccaagaagaagaagggccagacctattccttcgcc

SEQ ID NO: 40889 - DNA, 276 bp, Glycine max
  Clone ID: 701123423H1
gaggcgagaatgaagatatattcggtctcgactaggcactactttgcgtttggggctcttgtgtctgaagagctttcttacaagattaaagaattgcctggagttcggtgggtgcttcctgattcttacttgaatgttaaggaaaaggattatggaggtgagccctttattaacgggcaagctgctccctatgatcccaagtatcacgaagagtgggttagaaacaatgctcgtgccaatgaggagaaacaggcgcaatgacaggcctcgtaatgc

SEQ ID NO: 40890 - DNA, 279 bp, Glycine max
  unsure (1)..(279): unsure at all n locations; Clone ID: 701123424H1
attgaactgatggcgagcgccatgttaggggatgctaccacgagctttgaagatggtaagttggcgtctatgaccaccgatgacgtcgtcagagcctctcgtattctcgaaaacgatattcgcattctcaaggaagaggtgcagagatcgaatcgggaatgggaatcgtacaaggagaagatacaaggataatgaggagaaagttaaacttaatnaggcaattgnccctacctcgtggtaacattgttgagatattgggaaataaatncnggaggtgag

SEQ ID NO: 40891 - DNA, 274 bp, Glycine max
  unsure (1)..(274): unsure at all n locations; Clone ID: 701123426H1
aagattatgccgagggagaggaagaatatgaagaagaaaatggtggtgctgttgctgggggacaacaaggttttcctgctcttggtgaaaatttctttgaagttgaagccatacgtcgtaagaggttgcgcaagggtgaggtgcaatacttaatcnaatggaatgggtggcccgagacagccaacacttgggagcctctggaaaatctagagtctgttcctgatgttgttgaagcttttgaggagagcttgangtccggaaaacatcgtaagcg

SEQ ID NO: 40892 - DNA, 218 bp, Glycine max
  unsure (1)..(218): unsure at all n locations; Clone ID: 701123427H1
gngtaacaatattctttttnacaancactttnattaatgcanntacncaantgcangctatttncctttttttcttngagtgcgnggaagttcaaagaacctnggttgccccattcatnggcnatgttnaatttttggngagngcttataatgatatttacaggngtcttnccntngaaagntcgccaacangantagaatccaggaaaccccnctat

SEQ ID NO: 40893 - DNA, 275 bp, Glycine max
  unsure (1)..(275): unsure at all n locations; Clone ID: 701123428H1
actcactgcagtggatcacaaatcgcaagcacgcagccagagaagaccgccaganttctggtcagagacgacggagaaaacaaaacttcgaaaattcaattcaacttccaaccattatttaatccgcaactataaattcaagtcagagtcctaccgaaaaaaaaaaggtggcgaatcggaatcgagttacaatgaaatcaaatgatgttacacgttggttatgttcgntactattttgcatagttttngtttgtgttcatttgaaggatgtgtgg

SEQ ID NO: 40894 - DNA, 276 bp, Glycine max
  unsure (1)..(276): unsure at all n locations; Clone ID: 701123430H1
gcgaaaccgaatcagatagtgcggcanggacggggttgtaggaaactaggaattaaagcaatggcagaagatcttgtgctggatactgcaatcagagactgggtgttgatccctctctccgtggttatggttctcattggtgtgctccgttactttgtttctaagcttatgcactcttcacaaacccctgatgccaaaattgttaaagaagggcaagtgattgttagagctcggaatttacgtgctggggcgaatttcattccatccaaggcattt

SEQ ID NO: 40895 - DNA, 279 bp, Glycine max
  unsure (1)..(279): unsure at all n locations; Clone ID: 701123431H1
cacacctcccgcagcagccatggttctcaaaactgaactatgccgattcagtggtgccaagatctacccaggaaaggncatcanatttgttcgtngtgattctcaggttttcctgtttgcaaactcaaaatgtaagaggtatttccacaatcgcctgaagccttcaaagctcacctggactncaatgtacagaaagcaacacaaaaaggacattgctcaagaagctgtgaggaagaggagacgtgctgccaaaaagccttactctaggtccattgttgg

SEQ ID NO: 40896 - DNA, 279 bp, Glycine max
  unsure (1)..(279): unsure at all n locations; Clone ID: 701123432H1
ctctccagctaaagcttgtagcaacctcagacgcgaatcttccattctgttctgcctgaatgaacagacacacatagtcacattccatttccatgtctgcgtcatgcggggtggtggagtgtgtgttcgtgctgggctgcgcgcggtggctgtggaagcgctgcacctacgtgggcagctacgacagcgccacgtggccctccgccaccgccgacgagttcgacccggtcccacgcgtctgcngcctcatcctcgccaactacgagcccgatctccgta

SEQ ID NO: 40897 - DNA, 283 bp, Glycine max
  unsure (1)..(283): unsure at all n locations; Clone ID: 701123433H1
atctccaccacgatcccaccatcaaccctggcctcggttccgctcgntgccctcgttgtctctctctccttcaaccctaattccgaaagangcgagtggaccatcactcccgtcttgcacgatgccactgccgtcgctggctccgggattggtggtatgcttggctttgttcatggtttcaatacagatccggaccaacaatccntccctccgcactctnagcttgcnggcaactccagcnaccgccaacaatgcccacgacctccacactttccattctgtt

SEQ ID NO: 40898 - DNA, 207 bp, Glycine max
  unsure (1)..(207): unsure at all n locations; Clone ID: 701123434H1
ccttttgcaatttgctgtgtcgcaaaaccgaaccagacatcatcctctctctcacacacacatggaagaggggaaggtggaagannnnnnnnnnnnnnnnnnngaaggagtagcatcnatagcattgttgccatgtggctctatctcaggacacttcatccaacttccacattctattgctatggctttgtggcactgaattngcat

SEQ ID NO: 40899 - DNA, 282 bp, Glycine max
  unsure (1)..(282): unsure at all n locations; Clone ID: 701123435H1
gggagtcctcaaagatntatgcttacctcttcntttgcatgntcttcctctcctcngcnactcccattctcggtgtggctactgtgggcaaacnccccaaaaagcacaagcctggtaaaacaccaaagacacccacagtacccgntgttaagccagcagtcacaatccctcccattgttaagccaccagtcacagtccctcccattgttaatccaccagtnangatccctcncattgttaatccnccagtcacantcnctcccattgtnaatccancagtga

SEQ ID NO: 40900 - DNA, 278 bp, Glycine max
  unsure (1)..(278): unsure at all n locations; Clone ID: 701123436H1
tctcaatccaacatgttcaactaccttctctccctctaacgatggaccacttcagatccattgatttgatagttgcaaaggaaaagatacgaccatgcagattcattaccattggtttgattctgaagctaaaatacggttgttatctaattgtatntccagtctctattggcaattgataagccactttcaaggtgttatcatcttgctgacactggagactttggtctgagtgaatagataaattggtcacaagtttgcaagnngccatattatat

SEQ ID NO: 40901 - DNA, 280 bp, Glycine max
  unsure (1)..(280): unsure at all n locations; Clone ID: 701123437H1
agcgaagaaagagctttcgatccctgtaaccgcgttcgacgatttagggtttttttcggagacaatggcggatgaatnggagcacacggcggcgccggcnagcggtgaaatcgctgcttgacaagattgccgagaagattcacgggccaccangactccttcctcttcctccgattccgattccggagaaaaaggaaacttcgtcaattaaggaaaaaggtttccgcntctttgggaagggagaagccagttcactccgtcctcggcggtggaaaacctg

SEQ ID NO: 40902 - DNA, 276 bp, Glycine max
  unsure (1)..(276): unsure at all n locations; Clone ID: 701123438H1
attcacaaatgataatcatctctactgaccaaatctgaagaaaattgctttctctttggttcctagctcgcactctctctacgcangcntcaacatcccttctntggctccattcattatgtctccgtcgttggatcttgcnccccaagggtggcttcagtntggatctatgccgaagaaacgcaatgttcaaaacaagggcctcaaagcnccaacctttctcaaaactggcaccactattgtcggtttagttttccaggatggtgtcattcntgg

SEQ ID NO: 40903 - DNA, 225 bp, Glycine max
  unsure (1)..(225): unsure at all n locations; Clone ID: 701123440H1
gtccgggatcatccacaagattgangagaccctccatgtggtcnggcacaaganagaggagantcaaaggagaacaccatggtgagcacaaaggtgaacacaaaggagaacaccatngtgagcacaaaggtgaacacaaaggagaacaacaccatggggagcacaaggagggacttgtggataagatcaaggacaagatccatggtgatggccatgacaagggtg

SEQ ID NO: 40904 - DNA, 279 bp, Glycine max
  unsure (1)..(279): unsure at all n locations; Clone ID: 701123441H1
gcatgatagcccgcttattgtcaanattttgcagatgcagtgttaaacagacactccaacaggtccccgcccgcancattgtctatatcagctgntgaaacaaacacttcatatcagtcncacatanaaccatccctagctgaagttctggttntaaatcttnanactagngaagtattcctttccagngtacatagagganatgggtgagactaaaagtncttatcangnnaaattatggttttncatccgtgtgaattagnccatttcaaatantcc

SEQ ID NO: 40905 - DNA, 278 bp, Glycine max
  unsure (1)..(278): unsure at all n locations; Clone ID: 701123442H1
gagaaagagaaagagtgaaatcggagtttgggaaggaattgcaatcaatggatgtgataaagangcagcaaatctcatctcgancaatngagaaggtggtggttcaccctctcgtggcttctcagcatngtcggcaactanaacagagtcgccaaagacantcgcaagcgcgtcgtncggngtcttgntnggctcctccttcaaaggcaccgtcgacgtcaccaacagctacgccgtgccctttgaagaagatgacaaggatccttagcatctggttt

SEQ ID NO: 40906 - DNA, 263 bp, Glycine max
  unsure (1)..(263): unsure at all n locations; Clone ID: 701123443H1
aaaggnaagaggcctcttgttcctgttagtatagaggttcatcctgatgttaangaagtcttggatacattccganttgccgnactggggagtgattcacttggagcttatgtgatctctatggcctcaaatgcaagtgatgtccttgcagtagagcttttacagaaggatgcacggcttgctgctattggggagttgggaaaagcatgtcctggtggaacgttgcgggttgtccctctgtttgaaactgtgaaagacctgag

SEQ ID NO: 40907 - DNA, 265 bp, Glycine max
  unsure (1)..(265): unsure at all n locations; Clone ID: 701123444H1
atcaatgttggggaacaaaaagattctggggctagccttatttcctacgaaggngcgctgtagtgcttgacacagtttncattgtttggtcttatgttcttcttcttcatatggtgtgttaaaatggntattgccacattaatgaagactgaaaagttaatatcggaacaagagttcgctttgatggtggcctcgattatngtagtaaattgtatcctagtaccactcataagatacatatatgatccttcagaactatatcngg

SEQ ID NO: 40908 - DNA, 290 bp, Glycine max
  unsure (1)..(290): unsure at all n locations; Clone ID: 701123447H1
tgcaatctacagccaaaatgcntttcaagaggtacgttgagatcgggagggttgcccaaatcnactacggcaaggaatntggcaggctgcgttcgtcattgtcgacgtcattgaccagaacagagctcttgtacgntgcccctgatatggtgaggtcccaagtccaattttcaaaagggatttccctaacccgatcattangnttgacattgnagagggtcccnaatnngaaagatcctggtgcaaagccatggcgggatgctgatgttnagaaccaagtgggggagaag

SEQ ID NO: 40909 - DNA, 276 bp, Glycine max
  unsure (1)..(276): unsure at all n locations; Clone ID: 701123448H1
gttgtgaagaaggggtgcgaggctctgcatagatgcgaggacatggtcaataacctaggtttgtttctntcccaacgagaccaaagaagatatcagcaccaccaatctcaagtacattctggtgccattttatcttgcggagttgacagaaaaattagcacaggatgacaggatncatattctaaaggcttcccaggcanaactaaaggagtttatttcatttgcgaacaatggagctggtcccaaaagaggagttagaatcttacattgaagggg

SEQ ID NO: 40910 - DNA, 207 bp, Glycine max
  unsure (1)..(207): unsure at all n locations; Clone ID: 701123449H1
gcgtcggaacagccctgcatactacagtcctccgcggcgaggatacggcggtggtggccnnnnnnnnnnnnnnnnnnnnnnnnnnnnnnnnnnnnnnnnnnntcgtggacaggccaggaancatggactctgtcgacatcctgttcaaacgagactccncctncacnttgacttctgcttctncagattantgaactgaagttcttt

SEQ ID NO: 40911 - DNA, 273 bp, Glycine max
  unsure (1)..(273): unsure at all n locations; Clone ID: 701123450H1
ctagggtttcatctttgccatcagaaacaacaatgatttacgacgttaactctccccttttccgatccttcctcaggccagaagggaggntcctccgataagaggaaaacggatgaacagaagccanaagagcagaaacccagagccagcgagaacaaacctataatgacagagtgacaacaaatttgctgcattcagttgtagaatgatnataggtggtagatattgcatttggttctacaaaaattaagatcatttggtgtgttcctgaag

SEQ ID NO: 40912 - DNA, 278 bp, Glycine max
  unsure (1)..(278): unsure at all n locations; Clone ID: 701123451H1
tggggcatgtgggtatggctctttggcactagacataagtggtggacaccttgcagctggtgtggattctctcttcaaaaatggagcaggttgtggtgnctgctttcagataagatncangnacccaactctatgtagcaaagaaggtaccaaagtggtattgactgatcttaatcacaacaatcaaactgattttgtgctaagcagcagagcctttgcgggcatggctcaaaagggtatgggccanacaaatactgaagcttggcattgctgaaatt

SEQ ID NO: 40913 - DNA, 277 bp, Glycine max
  unsure (1)..(277): unsure at all n locations; Clone ID: 701123453H1
tcaacacccagttgaagaacaaaaacatcactactgatatcaaagttgatacagattctaatctcttcacaacttatcactgttaatgaacctgctcctggtctgaaggctatttttagcttcaaagttcctgaccnaaggtctggaaaggtggaagttcagtacttggcatggactatggctggaataagcaccagtgttgggttgacagcaaacccnattgtcaacttctctngtgntataggaactaatgttcttgctcttggtgctgaacttt

SEQ ID NO: 40914 - DNA, 272 bp, Glycine max
  unsure (1)..(272): unsure at all n locations; Clone ID: 701123454H1
aatcttcctcaatcatgtcttcagaaacaaaagcagaaacacaaactttgaccaccccctcttactcctcagntgttgacaatggtatagtgaaggatgtagtcctatggagaagaaagaaaataaatataagcgttcttgttgcggcaacagcggcatgggtgntgatggaagtgtttgaattcaacttcctcactctcatatcatgggtggccatactcggtcttgcttcaatattcctctatgccaatatgcttagactttgggcaagt

SEQ ID NO: 40915 - DNA, 296 bp, Glycine max
  unsure (1)..(296): unsure at all n locations; Clone ID: 701123456H1
cgatgtgggacttttgggggtttctaagtgtttgaagttggagtctttggcaccttgtgaaaacacccgantgttccgacgtgggactttggcgangttgcggangaggtgtaagatgctgaagaagcttcacantgatgggctggangtaccaacagggnttggggattgtcgcntgntnnncngntngncaaaacaatggtcccaaacntnggaannaggcttgtggncggattcccaaagtcntnccaacggctttagngnnttggctggcgaattgantcncanggnngcnc

SEQ ID NO: 40916 - DNA, 274 bp, Glycine max
  unsure (1)..(274): unsure at all n locations; Clone ID: 701123457H1
gggtctttgcttgattttggagatgtctctgctctcagatctcatcanccttaacctctccgataccaccgagaangtgatcgcagagtacatatggatcggtggatcaggaatggacctgaggagcaaagcaaggactctcccaggaccagttagcgacccttcagagcttcccaagtggaactatgatggttccagcacaggtcaagctcctggtgaagacagtgaagtgattttatacccacaagccattttcagggatccattcagaagg

SEQ ID NO: 40917 - DNA, 264 bp, Glycine max
  Clone ID: 701123458H1
ctctccctccctcctagggtttcacgtttccatgtgaaaacggattgagaatctctctctcattctctctctattttatattttctttcacgtcaattagggtttttttgctggcgtgattctgaaggcttggatctggatatcttctttgtttctgattgggactggatattctaaactaacctttcgcgaagactaaggagcaaatagagggagttagaagcttgaaaacgtacaccctaaaattatacactcgcagaggcg

SEQ ID NO: 40918 - DNA, 272 bp, Glycine max
  unsure (1)..(272): unsure at all n locations; Clone ID: 701123459H1
gtggaggttcaaaggaataacctttttgttgccacctttatttttatttnagcaccttggnttctccgtctttcttggagacacacacacgctctctcatgactctaaccaacttacccaccaactantaatctttttaattccanaaaaccaaacaatgcctctttttctcacttcacaacttttatttgtgtttgagttctccaatggcagctcctgcaccattctctctttcttctgatcccttcgcttccaaatctgccacatcaacg

SEQ ID NO: 40919 - DNA, 274 bp, Glycine max
  Clone ID: 701123460H1
gccgaacgaaacataaataaaaccttgctcttttttcacgccctagctcattttcttctccgttctcttctctctgttcctcactcactcgcatttattcaccatgactaagcaacaagctaattggtctccatacgataacaacggaggatcatgtgttgcaattgctggagcagattactgcgtcatcgccgcggatacgaggatgtccaccggttacaatatcctcactcgcgattactccaaaatctcccaactgggcggagaagtgtgt

SEQ ID NO: 40920 - DNA, 272 bp, Glycine max
  Clone ID: 701123461H1
tcacagcacactcagatctctcttctctttcttcaattccattgttgtttggttcccttcactctcacaatgcgaatcctcgtcctgctctctctcgccacccttctcctcttctcctccttctctcccaccttctgcgaccacctcgccgacgacgaggacctcagcttcctcgacgagccctccgccgcgccggagcacgaccaccactacggcgccgatgactccaatttcggcgactttgaggattcgaggaggacgacgcggaggcg

SEQ ID NO: 40921 - DNA, 275 bp, Glycine max
  Clone ID: 701123462H1
gaaggaggttgagagccatggcctctacaatcacgaattgtcagttgcagatatgacccacagacgtaggaaccattatcctgaaaatgttagtggggtggatgacacatcatctgagagcagctcatttttgcaagaaaggttttctcaaggtcaggatccgtatgatatggagccttctagacatcttacacctaatggagctcttccacccctaaatcccaaaggtgcagttaagatggggcacaaaccatcaggatatttgaaagtgaagg

SEQ ID NO: 40922 - DNA, 275 bp, Glycine max
  Clone ID: 701123463H1
aagcacctgaggagaataaatatcatgtgcagaacatttctcaggtgacaaaagtggaaggggtcaattggaagaatactaaaattgatgataatcccagtgagcaacagtttagccacgaaaagaacaggggatactctgaccagtgcaccgcatttttatcaaatcttcatcctacggcaaactatgaacatattcgtaatttcttcagtgatgttggtggaattgttgccatccgcatcctacatgataattcactggaaaatcaaggggat

SEQ ID NO: 40923 - DNA, 258 bp, Glycine max
  unsure (1)..(258): unsure at all n locations; Clone ID: 701123464H1
ttatggaggttatgaatgtgttaaaccgtgctaaagcagcagnatatctggttagatcatggactggaagaaatatttcctggtcttaatcaccgtatactttcttatataattgggtttgatagccttaaagctaccagcgggaatggaaatgagtcatcacagacaactagtgaagataataggctacgcatggatgggctttttgaacagaaagaacaagccatccaatttaccagagaatttatagcattgtat

SEQ ID NO: 40924 - DNA, 280 bp, Glycine max
  unsure (1)..(280): unsure at all n locations; Clone ID: 701123466H1
cgattatctccgatttcaacgaagaggagccgaaacccgctcactcttcaccaccgcaaccccaannnnnnnnnnnnnnnnnnnnnntnagtgctacttttgaccggtcaaatcccatcgctttcctggaganagtcttcgaattcgtctccgaacagagcgactttctggcgacgcagagcgccgagaaggagatagtgtcgctggtgcacgncgccggggaagaagaagagagagcttctcaaaggcggagagagagaatgccggataagnagaagag

SEQ ID NO: 40925 - DNA, 279 bp, Glycine max
  unsure (1)..(279): unsure at all n locations; Clone ID: 701123467H1
gattaaaatcagaatccaaaaccaaatcaaaatcanaattaaatacatataaaaggagaaacatatgatgtggggtggttgttagttgactagttggcaagttggtgagttcagttattaagctcttttggcatgcttcttgctggtcttagggtgaacttttgatgccataaaaanccatcccatattagttctatttctctctctgcctctccctttgtttcaagttccntctgcttattctgcacaggaacgatgtctgagaaaaccacagctgag

SEQ ID NO: 40926 - DNA, 266 bp, Glycine max
  unsure (1)..(266): unsure at all n locations; Clone ID: 701123468H1
gaaagccctctttnatgttagggtgctttctggatatgaagagcgaagaatacgatcttataggctgcagcttgagcaacgtgtacaacaggcacaagcaaggagggcggccataaataaagtaccagaacaggttatattntccgaggttcgtcgaatggttgaagagatgcaggctttgaataagaagctggaagaaacagaggcagccgttgaagactatttcaaaccttctagacaaggaagctgagttaataatgaaaatg

SEQ ID NO: 40927 - DNA, 281 bp, Glycine max
  unsure (1)..(281): unsure at all n locations; Clone ID: 701123469H1
cagaatcattcccaccatcaaagggttccttcaaatctgattatagaggagcatatcttgatggtgtcatgcagatttctagtgaacaataatgccccattaatggttnatgtgtntcttacttcgcttacactgcnaanccctaaggncattagtcttggactatgcantttgaaggntccnccttcggtgggtagtgcaagatggttcacttgggttaccgtaacctcttttggatgcttcgggttggatgcngtttatgctgcnttgggagaaagcag

SEQ ID NO: 40928 - DNA, 250 bp, Glycine max
  unsure (1)..(250): unsure at all n locations; Clone ID: 701123470H1
gaaattctggatttttgctgatgttnaagagggacgaccagctcaagttccagcaaggagtaaactgcctttgagcaatggtggcaagcatgttcgtgccagtcatgaggaacggaatgtaggttctgctgccggccgtttgcctcctaaatcaggatccagttacaagaccagtaaacctagtatggcatcagcagattctagaaagcagcttggtaacaacagtgataatggaccaggctggccagtt

SEQ ID NO: 40929 - DNA, 281 bp, Glycine max
  unsure (1)..(281): unsure at all n locations; Clone ID: 701123471H1
ggcaganagcaagctcatcctaganttttaaaaatggcagcagcctccttccatggctctctnttncccatccttggctggcaaggncgtggaagctgggcccatcagcccncgaagttcgggannggtcagcatgaggaagaccgtcacacaagcaggnntgcctccggnnnncnatggtacggcccagatccgngtcaagtattgggcccattcgctggcgancacccgtcntacctcactggcgagntnccaaggtgattanngntgggaacacttgc

SEQ ID NO: 40930 - DNA, 210 bp, Glycine max
  unsure (1)..(210): unsure at all n locations; Clone ID: 701123472H1
tatcaagatgtctttggctttcggatctcatcaacctcaatctctcagaatccacagaaaagatcgttggctgagtacatatgggttggtggatctggtatggacctcagaagcaaagccaggactcttcctgggccagtgantgaccctgcaaagcttccaaagtggaactacgatggcnctagcacagacccaagcttccagggggtt

SEQ ID NO: 40931 - DNA, 254 bp, Glycine max
  unsure (1)..(254): unsure at all n locations; Clone ID: 701123473H1
caaacttccacggttatggctatggnnaacgtggggagtttacangcggccattgngcanttnnctgaatgcggagaagcatgcgatgctcgccggcnacgtcgccgccaccagaaacgccgtcacngaaattttacggttgtgcttcgaagcgcgtgcctgggaaaactctcaatgaccagnattgnttctcntgtccaaacgactggccagcttaagcaggctgtgacacgatggtcccaacaggctatgca

SEQ ID NO: 40932 - DNA, 263 bp, Glycine max
  unsure (1)..(263): unsure at all n locations; Clone ID: 701123474H1
tgcacctacaaaagggccaccccttcttcccttctcaacttgtacttcatctaattcnntactancaacttctgaatcacttagttgaattgaattatcttcaaaatgagagaaatccttcatgttcaagctggtcaatgtggcaaccaaattggaggcaagttttgggaggtgatgtgtgatgaacatgggattgatgccactggaaattacgtaggcaattcccatcttcaacttgagagggttaacgtgtactacaatga

SEQ ID NO: 40933 - DNA, 198 bp, Glycine max
  unsure (1)..(198): unsure at all n locations; Clone ID: 701123475H1
gagtagaacgccgtcgttccttgtttcgttccctcctctctttcccgctccgcacactcttnctcctntgttcttgccncanttcnccanccaacattttggggtttaggggtntcctctctcctctgcaatatccaatttctccctttctcccccactctctccggcaatccagtgacaatgatgtacaatgatcct

SEQ ID NO: 40934 - DNA, 270 bp, Glycine max
  Clone ID: 701123476H1
gaacaatttgtggcggaagaggctgtttagcaagattgcgtctttccagcagtttattcctcatgattttgatgccagtggatcatgggacatcgagtttcccggttgcttctgtgcatcgtatagggattttggacattaggattcttaacaccgataggcatgctgggaacttgttggttaggaaacttgatggcattgggagttttggtcaggtggagtgattcccattgatcatggggctctgcctgcctgaaactttggaggatc

SEQ ID NO: 40935 - DNA, 251 bp, Glycine max
  unsure (1)..(251): unsure at all n locations; Clone ID: 701123477H1
ctctactcaaaccactctgtttctactgctctgctattaccntgtttcctgtggaacaaatatccatctaggctctcctccgaattaggttttgttctggagaaatgtatgcagagactggtcttctcttcccatatttgaacaacatctctcacggccttcatcagctcgaggagtactgcaaaacccagaagtccaatgcttcaatgtttctagtgtgaactctcggtggagtttgtctttttgcgccg

SEQ ID NO: 40936 - DNA, 273 bp, Glycine max
  Clone ID: 701123478H1
attctaaaccaagtgactttgacatgaaggtcttgcttcctatcagttcccgtctaaatctacaggagaaatatggcaaattggatacaatggtaatgtatgattcatgagtgtgctacaataagacacaacgcctgtccgcacttgcaaaggtcatttcctttgttatattactttcaaccaatttagaatagattaaacaccacaagaaaatggcaagtttcaccacctcacccattttccactctttcccttctaccttgttccacctct

SEQ ID NO: 40937 - DNA, 273 bp, Glycine max
  Clone ID: 701123479H1
aatggcttatgctaggcttgctcctatggctgtcttcttgcttgccacttccaccataatgtccccaacgaagatagaagcagcagattgtaatggtgcatgttcacctttcgagatgccaccgtgccgctcacgtgattgtcgttgtgtccctataggactagttgctggtttctgcatacatccaactggactttcatctgttgcgaagatgatcgacgaacatcccaacttatgtcaatctgatgatgaatgcatgaagaaaggaagtgg

SEQ ID NO: 40938 - DNA, 277 bp, Glycine max
  unsure (1)..(277): unsure at all n locations; Clone ID: 701123481H1
ggatctgcccctgacttcacatgcaagaaagacacaaaggaggctatcattgaggccgtgaaacagggttacagacacttcgacactgctgctgcttatggctctgaacaggctctcggtgaagctctcaaggaagctatccatcttggcctcgtctcccgccaagacctctttgtcacttccaagctttgggtcaccgnaaatcatcctcatcttgtccttcctgctttgcgcaaatcacttaaaactcttcaactagagtattggacctgtatct

SEQ ID NO: 40939 - DNA, 277 bp, Glycine max
  unsure (1)..(277): unsure at all n locations; Clone ID: 701123482H1
ggatctgcccctgacttcacatgcaagaaagacacnaaggaggctatcattgaggccgtgaaacagggttacagacncttcgacactgctgctgcttatggctctgaacaggctctcggtgaagctctcaaggaagctatccatcttggcctcgtctcccgccaagacctctttgtcacttccaagctttgggtcaccgaaaattcatcctcatcttgtccttcctgctttgcgcaaatcnttanaactcttcaactagagtacttggacctgtatc

SEQ ID NO: 40940 - DNA, 288 bp, Glycine max
  unsure (1)..(288): unsure at all n locations; Clone ID: 701123483H1
gcttcatnggattacgactgcaatnaccacttagnaccgntncaaacaccntctcgtttntgtaactttntcngcancagattctcattccatntnccttntgggatgaantcgctgtctcaatgagcntctagcactctcnactctgctnctacaactggttnntcnaaagatggagcgncaccagggctgaaacatggagaggtcgttgnntctggtncgacttccctgcggnagaatctgntttggatctnggaaagnaactgtagcagtcatnctgatntagct

SEQ ID NO: 40941 - DNA, 258 bp, Glycine max
  unsure (1)..(258): unsure at all n locations; Clone ID: 701123485H1
cttagggtggtgcatttgcaaccctttaatttccttcacaanaatncagnncagtacnttgtagttcactagtgnttcgngtgcttggctttggctattgtgaacaaagtngcatgggcaagggaacgcgtgtagggttctattcgagtacatggcncacgcgctgaggtccatgttaagtccacagttacgacccatgttaatgctganagtacntnggctgcngggttgctcggatgcacttncatgattgctttg

SEQ ID NO: 40942 - DNA, 272 bp, Glycine max
  Clone ID: 701123487H1
gggatatccagattgcaaatgaccagattgaccatagcctccttctcagcccccaccttctgggaggatatgcccaaccagagtcaggttctcaaaaagctccaccatctggttacggtggtgcagtgcagccggggtatggtccaccatcatatggtggtgtcccagcaggtggtcaaccaggttatggccaggctcctccatcgtatagcaacagttcttatggtgctggtggttatgctcagcctccagtatattccagcgatggtaat

SEQ ID NO: 40943 - DNA, 241 bp, Glycine max
  unsure (1)..(241): unsure at all n locations; Clone ID: 701123489H1
attccaatggccgatcagctcaccgacgaacagatatccgaantcaaggaagccttcagcctcttcgacaaggacggggatggttgtattaccaccaaggaacttgggaccgtgatgcggtcacttggccagaacccaactgaggcagagctgcaggacatgataaatgaggttgatgctgatgggaatggtaccattgatttcccagaattcctgaatctcatggctcgcaagatgaaag

SEQ ID NO: 40944 - DNA, 250 bp, Glycine max
  unsure (1)..(250): unsure at all n locations; Clone ID: 701123490H1
attcacaaataaggttgaagagggacctgccggaagaagatacntaccgtctttcattttcnggcgatctcttttttcttccatcaccgttttccggctatccctaatccttaacagaaatgacgacatcaaggcgccttgcggacaggaaggtggagaagtttgagaaaaacatcaccaaaagaggatttgtgccagacacaaccactaaaaaggggaaagactaccctgttggcccagtgctgctcgg

SEQ ID NO: 40945 - DNA, 270 bp, Glycine max
  unsure (1)..(270): unsure at all n locations; Clone ID: 701123491H1
agaacagcctatcgtttnaagagaagatggtaactaganttgtggatcttcgttcagacacagttacaaagncaactgaagcaatgagagctgctatggnaagtgctgaagttgatgacgatgttctaggctatgatccaactgcttttcgcttagaaacagagatggcaaagacaatgggcaaagaagctgctcnttttgttccatctggcactatggggaaccttgtatctgtacttgttcattgtgatgtcaggggaagtgaggtta

SEQ ID NO: 40946 - DNA, 271 bp, Glycine max
  Clone ID: 701123493H1
atgatgcctctgattgcactacagttgtacttccaggtggtgtgcatggttcaccaaacaaaggtgaacctacacctttgatctatcgatggaaaaccgggggatcatgtgattgcgggggttgggacattggttgcagactgcttgtgctctccaaccagaaccagaattcaagtattgcaaagagctataaaccttacaatgatcgttttcaactttttgttaaggaaggagctgagcaagaaaaaccacttttcactttgttgccact

SEQ ID NO: 40947 - DNA, 271 bp, Glycine max
  unsure (1)..(271): unsure at all n locations; Clone ID: 701123494H1
tccctttggggaggctctgagactagccaagcctctcgagttagagatgaagaggagtttcctcaagggcagatcttggataatgttgacttgagagcatttactttggcagaattgaaggcagccaccaaaaatttcagagctgagactgtgataggagagggggggtttggtaaagtatacaagggcttgattnatgatagagcagcaaaaaaaagaggtgaggggttgactgttgccatcaagaaattgaattctgaaagcacccaag

SEQ ID NO: 40948 - DNA, 225 bp, Glycine max
  unsure (1)..(225): unsure at all n locations; Clone ID: 701123495H1
gtccgggatcatccacaagattgaacngaccctccatgtggncagggcacaagaaagaggagcacaaaggagaacaccatggtgagcacaaaggtgaacacaaaggagaacaccatggtgagcacaaaggtgaacacaaaggagaacaacaccatggggagcacaaggagggacttgtggataagatcaaggacaagatccatggtgatggccatgacaagggtg

SEQ ID NO: 40949 - DNA, 274 bp, Glycine max
  Clone ID: 701123496H1
gttttcttcgtttatttggctctgtggccccattacaggtcttgtggttcaaccatgcgttggtatttggagtgataaatgtacttcaaggtttggcagaagacggccgttcattctggcaggatctcttatgatatgtctggctgtgatattaatcggattttctgctgacattggatatgtattaggtgatacacatgagcattgcagaacatttaaagggacccgaacaagggctgctcttgtatttattcttgggttctggatgctggga

SEQ ID NO: 40950 - DNA, 264 bp, Glycine max
  unsure (1)..(264): unsure at all n locations; Clone ID: 701123501H1
cccgccgctcgatgggaattgcgcttcaaggcgtcacgtagggctaatccgactcacgagggtcaccaacggcacgtgcctttggggggccgaggccccctactgctggtcggcaaacggacggcgggcgcacgcgtcgcttctagcccggattctgacttagaggcgttcagtcataatccaacgcacggtagcttcgcgcnactggnttttcaaccaagcgcgatgaccattgtgcgaatcaacggttcctctcgtactagg

SEQ ID NO: 40951 - DNA, 271 bp, Glycine max
  Clone ID: 701123503H1
ggaaaaccctagctagtagtctcagttcgtttgagagagaaaaaatggcagagggtctcgttctccgcggaaccatgcgcgcccacaccgacgtcgtgacggcgattgccactcccatcgacaactccgacatgatcgtgacggcgtcgcgcgacaaatccatcattctctggcacctcaccaaggaggacaagacctacggtgtcccccgccgccgcctcaccggacattctcacttcgtccaggacgtcgtcctctcatccgacggtca

SEQ ID NO: 40952 - DNA, 268 bp, Glycine max
  Clone ID: 701123504H1
agatgctgctcttgaatctgcggttctgcagtctatcccttgcatccgttctggtagttttgctgacattgggccacggagatacatggaagatgaacatataaggatagatgatttgtcgtctcatctgggatcactatacaactttccccaaccaagtgccttttatggggtgtttgatggtcatggaggacctgaagctgcagcttatataaggaaaaacgtgacaaagttcttctttgaggatgtcaatttcccacggacatca

SEQ ID NO: 40953 - DNA, 268 bp, Glycine max
  Clone ID: 701123506H1
cttgaggatttggagtttgtacaatttcacccaacaggtatatatggagcaggttgccttatcacagaaggatctcgtggtgaaggtggaattcttaggaatagtgagggtgagcgatttatggaacgatatgcccctactgcaaaggatcttgcatcaagagatgtagtttcaagagcaatgacgatggagattcgggaaggtcgtggtgtaggacccctgaaagatcacatctatctccacttgaatcacttacccccagatgtgc

SEQ ID NO: 40954 - DNA, 268 bp, Glycine max
  Clone ID: 701123507H1
aggatttcaactttaggctccatctaaaaaaaatggctggtttggctagcaatcttcctctaattgttatgataggtctgcaaattcattatgcagcacttgccatattcacaagagccgctctcttagatgggttgagtacaacggtgtttgtagtatacaggcaaggcatagccactttggctttggcgcctatatttttctctcctaagaggagacaatcagtgaaagattctttgggattcaggagcttctttttgatgtttgt

SEQ ID NO: 40955 - DNA, 270 bp, Glycine max
  unsure (1)..(270): unsure at all n locations; Clone ID: 701123508H1
aaaccctaaccctacctcctcgcagccatggctaagaaacgaaagcttcgatcctctgaccccgaacccaccaaacccatcgagccacagcaacaggaccaagagccagttgaactcgaccaacagcaacaacaacccaaccccgaacaaaccctagaagatcctaacacgatggccgtcgacgnnnnnnnnnnnnnnnnnnnnnnnnnnnnnnnnnnnccccaaaacgccgaaagcgaagaagaggaagaggaagctgaggaacaacaa

SEQ ID NO: 40956 - DNA, 257 bp, Glycine max
  Clone ID: 701123510H1
cgaatatcttgttgtttggagcgatccgagaaaaactctgtaaacatgttggtttaccaggacctccttacaggtgatgagcttctctctgactccttccgttacaaggaaattgagaatggaatgctgtgggaagttgaggggaagtgggttgttaaaggagcagttgatgtagacattggtgcaaacccttctgctgagggtggaggagaagatgagggagttgatgatgcagctgttaaggttgttgacattgt

SEQ ID NO: 40957 - DNA, 265 bp, Glycine max
  unsure (1)..(265): unsure at all n locations; Clone ID: 701123511H1
ctttaccgtcagctcaattggaatagtttttcgctatgttcgcangcaagtgagacgatccatcaatgcccttatctgcttcgaaagaaccggtgtcatccaaacatggtgaagaggtggcaactggatcaataatagctgaaacttctactgtacagggttcggcttgcccaactgtccaagcttgagatctattttagaatatgcttaacacaacacatgcaattcgaacgttgttttctcggaaagatttgaaagtaactcc

SEQ ID NO: 40958 - DNA, 266 bp, Glycine max
  Clone ID: 701123513H1
atactacgtacttaaggaggatgagtctccttgtatttttggttcaattgaaaagcagagatggtcctatgcctgtgctaagcagttgattgagaggctgtttatgctgagggtgctgaaaatggcttggaattcacaattgtgaggccttttaattggattggaccacgaatggatttcattcccggcattgatggcccaagtgagggtgttcctcgggttctggcatgctttagcaataatctcctccgtggagagcccctcaa

SEQ ID NO: 40959 - DNA, 250 bp, Glycine max
  unsure (1)..(250): unsure at all n locations; Clone ID: 701123515H1
aatggcggttgttgctcaaacccangacatcgccggcgaacggcagtccggccaagacgttcgcacccaaaacgttgtggcatgccaagccgttgccaacatcgtcaaaagctctttaggccccgttggcctcgacaagatgctcgtcgacgacattggcgacgtcaccatcaccaacgacggcgccacgattctcaagatgctggaatggagcatcctgctgccaaggttttggttgaactcgccgagc

SEQ ID NO: 40960 - DNA, 273 bp, Glycine max
  unsure (1)..(273): unsure at all n locations; Clone ID: 701123516H1
ggatgatgaatgtgagcattgcggggttggattcccagatggctgcagagagagctgtggatgtnattggtcaagggtatgtacctttgcagcgatataaggttntcggcttgtaaaaacaggttgatcgagattganannacacanagtagagancttgtttttcccggtggggttgttgtcaagaatgttcccaactccatcaagtgtgacaagggtgaangaaccaggtttcactctgatgtgctcccttttaatcagatgtctgagcat

SEQ ID NO: 40961 - DNA, 271 bp, Glycine max
  unsure (1)..(271): unsure at all n locations; Clone ID: 701123517H1
gccaacatcatgtagtccaaaatcctacaggaatttgggaattcttaaccattcatattccaggtgcaggatccattttaggtctttcagtgtcaagcaagagtagtaaagctncgcctatgttaacatattcacttttaccaatatcattgtctgagacaatatgtgcttgaaatatttatatattgcaaattttgttacctgtcaataaattagggacttctttgttttgaattttattggattcttgtgaatctacaatatagatgac

SEQ ID NO: 40962 - DNA, 269 bp, Glycine max
  Clone ID: 701123518H1
aaaaaccatagccttcctcttgctcggataaaaaagataatgaaagctgatgaagatgtccggatgatttcagcagaagctccggtcatatttgcaaaagcttgtgaaatgttcatattagagttgacgttgcgatcttggatccacacagaagagaacaagaggagaactctacaaaagaatgatatagcagctgctatttcgagaaacgatgtttttgatttcttggttgatattattccaagagatgagttgaaagaggaaggact

SEQ ID NO: 40963 - DNA, 266 bp, Glycine max
  Clone ID: 701123519H1
gctgtggccgttcttggcagcagtgagggtgtcactggaactattcacttcgttcaggagggaagtggtccaaccaccgtaactggatctcttgctggtcttaagcctggtctccatggtttccatgtccatgccttgggggacactaccaatggttgcctctcaactggatcacatttcaatcctaataacaaggagcatggtgcccctgaggatgagaatcgtcatgctggtgatcttgggaatgttaatgtcggtgatgatgg

SEQ ID NO: 40964 - DNA, 267 bp, Glycine max
  unsure (1)..(267): unsure at all n locations; Clone ID: 701123520H1
gtccctccttcctctgccttataattcttgtgacccttttngctggtagcattgaaagtgcaccagcaaacgtgaagccaagccattatgctgcacccttcaataggagtgtttttccttctggttttctatttggaataggctctgcagcttaccagatagaaggagcagcagctatagatggcagaggaccaagtatatgggacacctatactaaacagcaaccagggaagatttgggatcatagtgatggaagtctagcaattg

SEQ ID NO: 40965 - DNA, 267 bp, Glycine max
  Clone ID: 701123521H1
aagaaagaatcccaggcgaggagaaagatggaggggaaggagcaggatgtgtcgttgggagcgaacaagttccccgagagacagccaattgggacggcggcgcagagccaagacgacggcaaggactaccaggagccggcgccggcgccgctggttgacccgacggagtttacgtcatggtcgttttacagagcagggatagcagagtttgtggccacttttctgtttctctacatcactgtcttaaccgttatgggagtcgccggg

SEQ ID NO: 40966 - DNA, 266 bp, Glycine max
  Clone ID: 701123524H1
gtgatatatagagagagacaaagagtctaacttgaaagtttttctctttcaaaacctagtgacacttcttctgtgtcagagtttgtgaagtgaaccccatcaacagagtcccataataatcatgaagaaaggaaacttgggtctggtctcaaactctcagttcctgtgtctgatcaatctaattttgccaagttcctgactgaaagtgggacttttaaggatggggatctgcttgtcaacagggatggagttcgaattgtctctca

SEQ ID NO: 40967 - DNA, 265 bp, Glycine max
  unsure (1)..(265): unsure at all n locations; Clone ID: 701123525H1
gggcaattagagattcttcttcgggtggttttgacagataggtcattttgtgccgtgcatggtgatggtcttctctgattgaaattccacacactgcctcntntntccaatttggtacaccggttagatggtatgcagcagttgtgtaaggtctttggttgttcaagctggaaccttcgtcaacagagtgagaatcaaacgaatttgggaggagtttgctggcggttcagagtttttctcattggccgattcgtgaatacaagac

SEQ ID NO: 40968 - DNA, 263 bp, Glycine max
  Clone ID: 701123526H1
gtgaaatcataacaagacaacccctatttctggggaaagattatgttcatcagctcaggctgattacggagctcataggctcacctgatgacactagccttggatttctacgaagtgataatgctcgtagatatgtgagacagcttccacaatatccaaggcaacaatttgctgctagatttccaagtatgtctcctggtgctgttgatttgttagagaagatgcttgtctttgatccaaataggcgcatcacagttgaagaa

SEQ ID NO: 40969 - DNA, 263 bp, Glycine max
  Clone ID: 701123527H1
gtttggattggatttctaatctaatctatacctttctttttcctatgcttttaaggcacaaatccttctcccttctctcttctttcttcttcttctcctgacccttattattattccttgcccttaccctttaggcaagggaaggaagaaagaataactatattattatctttattgtaatctatctttttattataattataattataattattgttgttattattccttaaatatggattcgccgtgtctctccaacgatt

SEQ ID NO: 40970 - DNA, 263 bp, Glycine max
  Clone ID: 701123528H1
cggcgtggcaggatcgtatcttctacactctcgccgtactctacggtatcgtggccaccgtagctttggttcaactggctcggatacaattgagagtgccggagtacggttggaccacgcagaaggtctttcactttctcaattttttgttcggtgtgtagttttcatcttctttcggaatgtgcagaggttgaagccagagattgttcaacacatcttgcttgacgtgccgagtcttgcttctttacaacatatgcactttt

SEQ ID NO: 40971 - DNA, 267 bp, Glycine max
  Clone ID: 701123529H1
aagaaatgctcttcaccaagtagaggagaagtctaaaattcgagatgctattcgagctgaaagccagactataaaggccagttgtaaggatttcgaccaagagtttagggctgcaattgcagctcatagagctgctcgggacttgctcaagtccaaacgccaggaaatggattcagttcaatccacaatgaacagattaaacaatgcaatttctgttggggatatagatggcaagataagaagcatggaacacatgatcgagcatga

SEQ ID NO: 40972 - DNA, 267 bp, Glycine max
  Clone ID: 701123530H1
gaattcttcttctggtcagagcagtggctatgatctctccttcaagatcttgctgatcggtgactctgctgtgggaaaaagtagcctccttgttagcttcatctccaattctgctgaagatattgcccccacaattggtgttgattttaagatcaagatgctcactgtaggagggaagagattgaaactaactatttgggacactgctggacaggaaaggttcagaacgctaactagttcttactatagaggagcgcaaggaatcat

SEQ ID NO: 40973 - DNA, 268 bp, Glycine max
  unsure (1)..(268): unsure at all n locations; Clone ID: 701123531H1
atccctctctgttctcttctctgccttctctgtgtataaccccgtgacccttcttctcatttctcattctcttttctttctcacaagagnnnnnnnnnnnnnnnnnnnnnnnnnngttactattactaaacttggtgtagaatgacgaaccgtaatgtgaataacacccttgtggagttggcaatgtcgatttcaaacacaagtgctctacctagagctacggtgcctggaataatggccttgcttggtggggttttgggcctacccc

SEQ ID NO: 40974 - DNA, 271 bp, Glycine max
  Clone ID: 701123532H1
gccacttcgaaaccaaattttcttccttcgttggcatctgtgatctcttctcctcacaatgagcagatcagggcaaccaccggatttgaagaagtacatggacaagaagcttcagatcaagctgaatgcaaatcgcatggttgttggtactctccgtggcttcgaccagtttatgaatttagttgttgacaacactgtggaagtgaatggcaatgagaaaaatgacatagggatggtggtaatcagaggaaatagtgtggtcactgttgag

SEQ ID NO: 40975 - DNA, 226 bp, Glycine max
  Clone ID: 701123533H1
gttgcagctagaaggctctcttctctctcctcctcctctccgtggcggcccaaccacgccgcttccgcttatgtctctcgaaacgcagtcgttgatgaccgcagatccgatccttcctcccatcccctttttcccttcagaggttttgctactgaatccctgatccacccaatagaaaacagcattattcctgagattcctgcaactgttactgctgttaagaacc

SEQ ID NO: 40976 - DNA, 249 bp, Glycine max
  unsure (1)..(249): unsure at all n locations; Clone ID: 701123534H1
ctcttttcgtggttctaagtgctaaccaataagagcatctatnccgagttcacaacactgnctnnnnaatacagctggcttctcggcatattcatcccattgaacctctcactctcccacatgtctcttgaagccagactgcaccattcatgctacattcttgtttaatttgtccccacattcttctattttccttcctcaatttgcttgtgantgagccttgtcaagaaatctaaccaaaataaactc

SEQ ID NO: 40977 - DNA, 265 bp, Glycine max
  Clone ID: 701123535H1
attccccaagtgatcctacagtgaagaaagttgctgacaaactggcaagttttgtggctaaaaatggaaggcaatttgaggatgtaacacgccaaaaaaatcctggggatacacctttcaaatttttgtttgatgagagatgtgctgaatacaagtattatgaatatcggcttgctcaagaagaagatgctcttgggcaatcaagggaatcacaggtgcctcgtaacgggggtacaagcacttcatcttccaaacaggctagtgg

SEQ ID NO: 40978 - DNA, 242 bp, Glycine max
  unsure (1)..(242): unsure at all n locations; Clone ID: 701123536H1
tgtcgcttcgtggttcattcttcacgttcttgtgatctgatctattttggagtacttacnacactcctttgcaagtttaattaattaaagaggctaatcaattttcaattggactgcagcagatggctgaggagggttgcagggttactctaaatgtttatgacttgagccaaggactagcacggcagctttcaatgtcctttttggggaaagctattgaaggcatatggcacacaggagtt

SEQ ID NO: 40979 - DNA, 263 bp, Glycine max
  Clone ID: 701123538H1
ccaaggcacattgagttccaggttcttgcagataaatatggtaatgttgttcactttggagaacgtgattgcagcattcagaggcgcaaccagaaactgcttgaagaagcaccatctcctgccctgacccctgagttgcgaaaggcaatgggagatgcagcagttgcagctgctgcatctattggttacataggtgttggaacggttgagttcctttggatgaaagaggttccttttactttatggagatgaacactcgtatc

SEQ ID NO: 40980 - DNA, 263 bp, Glycine max
  unsure (1)..(263): unsure at all n locations; Clone ID: 701123539H1
gtgagctataagctagtttatcgtgaggagaatatgaagttgtttgttttctttgttgctgcagtagttttggtagcatggccatgccatggcgcaggctaccaaaggttccctctccgaatgaaaactggctatggtgagcgttcttcggaggtaaaatgcgcaagttttaggcttgctgtggaagcacacaacatccgagncttaaaaccattcctgaagagtgcgttgaaccaacaaaggactacattaatggcgaacaa

SEQ ID NO: 40981 - DNA, 204 bp, Glycine max
  Clone ID: 701123540H1
gtcttggcctctccaaccataacaactagcttttgtggtatagttctcccaaggttcttattagtgggggatagggaaattggaatgaatagcatctgtgggaattgaacctccaaatccaaatacaacaaaataaaaggtcgtgatgcttatgaggatgccaaattgaaactatttaatttgtgccagacaatgaagtaagtc

SEQ ID NO: 40982 - DNA, 263 bp, Glycine max
  unsure (1)..(263): unsure at all n locations; Clone ID: 701123541H1
caaacccaaacgttaactcagacgaagcaccaacagaagaagaagaaacaaaaccgaacctctctaaactctccaacgtcgccacccgattcatcgcatttcgcaggctgcaatggcgacgttcgaactgtaccgcagtcgacgattggaatgtgcctgacggagacgctggacgagatggttcagaacggcactctaagccccgagctcgcgattcaggttctggtccagttcgataagtccatgactgangctctggaaac

SEQ ID NO: 40983 - DNA, 262 bp, Glycine max
  Clone ID: 701123542H1
tgtgtatttccctacctctcccttcaagatgcagatcttcgtcaagaccctcaccggcaagaccatcacccttgaggtggaaagctctgacaccatcgacaacgtcaaggccaagatccaggacaaggaaggaatccccccggaccagcaacgtctcattttcgccggaaagcaacttgaggacggccgtacccttgctgactacaacattcagaaggagagtactcttcacctcgtcctccgtctccgtggtggcatgcag

SEQ ID NO: 40984 - DNA, 261 bp, Glycine max
  Clone ID: 701123544H1
atctgaagtcatgtattaaggttgctttggattttgtctctcctgaaaatgttggggagtgctttcgtttgacggaggagtttcgcacacttccaataaaccacaggtctactgaggacaaattggagctgagtggtggaaattgtatggagggaaaacaccacacttgcaaaccattgccattaaagttttaagtttgacctgtagctcatcgggatttggagtacttttgagcatattcactcaaagaagagaagtaag

SEQ ID NO: 40985 - DNA, 262 bp, Glycine max
  Clone ID: 701123545H1
cggattctcagatccatggagcaggctcatattattaagccaaagcctctcagatccgcggtggcggcgtgacggaaatgaagtcctcaagccgtctcttcacgatcggactggtgtcggcgtggtactcctccaacattggggtactgctcctcaacaagtaccttctcagcaactatggcttcaagtatcctatcttcctcaccatgtgccacatgaccgcctgctccctctttagctacgttgccatcgcctggctcaa

SEQ ID NO: 40986 - DNA, 266 bp, Glycine max
  Clone ID: 701123547H1
cgtcaatcttgatatcttagatttgcttgcaagattatgtcaagaccctttcttgcctcctctcattaggataattggctttcccaaatttgcaagttttttgggtttacttacatggggtattgagaaaatactttttcgctgaagctctgaataacagaccatcatcgacagatggggtctgaaggtcctccagcagctgtggcaacagttcatgtaacaggtttcaggaaattccatggagtttctgagaatccaacggagac

SEQ ID NO: 40987 - DNA, 269 bp, Glycine max
  Clone ID: 701123548H1
tgtactgttgttgctagagagtttccattaaagaaaggaagcctccgacaaggatagtttgggcattacggtaaatataaaaccggtcggttagaaggtcccttcaccacccttcaacgtcccttcaccaaacctccaaagtcactcacatagaaatctaaattacaccgaagcatacctcaaacctcaacacattcataacataaagcaaaccaacaacaacttcaaataaaacagagcatctctctgttctctgttctgttctgatt

SEQ ID NO: 40988 - DNA, 265 bp, Glycine max
  unsure (1)..(265): unsure at all n locations; Clone ID: 701123549H1
ctttttttctccttgaactcgaatattcactatggcagatgaggangttctgctagatttctggccaagtccatttgggatgagggtcaggattgcacttgctgaaaagggtatcaaatatgagtccaaagaagaggacttgcagaacaagagccctttgctcctcaaaatgaacccggttcacaagaaaatcccggttctcatccacaatggcaaacccatttgtgaatctctcgttgctgttcagtacattgaggaggtctgg

SEQ ID NO: 40989 - DNA, 261 bp, Glycine max
  unsure (1)..(261): unsure at all n locations; Clone ID: 701123550H1
agttcccaaaggtattgtttatgggaagcccacaaaccagggagttacccaactgaaatttcagcgaanaagaggtcagttgccgaggagcgagctggacggaagctgggtggacttagggtcctcaattcttactgggtgaatgagcttgtcatggtgtttcaggactctacttataaatactttgaggtgattctggtggatgttgctcatgctgctattagaaatgatcccagaatcaattggctcgccaatccagtg

SEQ ID NO: 40990 - DNA, 262 bp, Glycine max
  unsure (1)..(262): unsure at all n locations; Clone ID: 701123552H1
cagaaacctagcatctagccaagacaatgcaaacaaatgggtgcaagacaacatcaaaaactatgccaacaatgtcagattcagatacgtttcagtgggaaatgaagtgaaacccgaacactcatttgcacaatttctagtgcctgcattggaaaacattcagagggccatttctaatgctggccttggaaaccaagtaaaagtttccactgccattgatactggtgccttggcagantcattccnaccatcaaagggttct

SEQ ID NO: 40991 - DNA, 261 bp, Glycine max
  Clone ID: 701123553H1
gttgggtgtgtgtgggcctgctctctattggcgattcaaaaacgcaatcactcttcgcaattcccacagcagcaaactctcttgccctccctgcctctgtgattgccctccccctctctcgctcttccaactcgctcctgggttggccaatctctctatctcagattgtggaagtaatgacccggatctgaaggaggagatggagaagcagtttgtggaccttctcagtgaggagttgaagttgcaagagtctgttactga

SEQ ID NO: 40992 - DNA, 254 bp, Glycine max
  Clone ID: 701123554H1
tgcaatggcttcaagtcaggaggaggtgacccttttgggagctactggaagcccatttgtgtgcagggttcatattgccctcaagttgaagggagttcaatacaaatatgtcgaagaaaatttgaggaacaagagtgaactgcttctcaaatccaacccagttcacaagaaggttccagtgtttattcacaatgagaagcccatagcagagtctcttgtgattgttgaatacattgatgagacatggaagaaca

SEQ ID NO: 40993 - DNA, 262 bp, Glycine max
  Clone ID: 701123555H1
cagagattcataagctaggaaatgagcaattgtacatggagacttcggattcggtgccaaggttgaacacggactcgagcagttcggagcacgtggtttcgcccgatgtcacgtgcgagagggaggtgcagagcgaccccaagtggaacgatgatctggacctaaagctagaaaacgcgtttgattttcagtttaattacttggacgataataacctttccgtggatgattacctttttggcactgttcagtatcaaatggg

SEQ ID NO: 40994 - DNA, 261 bp, Glycine max
  Clone ID: 701123556H1
gtaggagggtttcaaaagatggagaacatgcagagcttctggcaattgggcgatgaactccgtggacactcaaaagcatcggaggatcacaaatggttaatggttgcttcgaaattggcggaacagacaagattgaagggggagcgtgtgaacaaccttgatctttcaaagggccccattgaaacaaggtcaagggataaatttgggttccaggaagagaacaaatttgattctcttaacttaagcatgttgaacctggac

SEQ ID NO: 40995 - DNA, 234 bp, Glycine max
  unsure (1)..(234): unsure at all n locations; Clone ID: 701123557H1
gcgcctttgcatttcagcagcacaccacaatggccaccaatgcattacactggcaantctctctccatgcganntgtcattcctcaaacacaggcatttgcctcaatttctggcccgacatctgcttcaatttccagctttgggagaaagaatgtttcttttagcttgcagccacgcttaattcgccttaaaatttcctgtgctgccgctaaaccagagacagtagagaaggtg

SEQ ID NO: 40996 - DNA, 260 bp, Glycine max
  unsure (1)..(260): unsure at all n locations; Clone ID: 701123558H1
acaaaattagggttttctcaaccctagggtttaccttctcttcccctgttcgaaattaggcaaatncaaaacagaaacacgactacaaaaagaagaaaagaagaaaaagaatcaatcattcattgatcgctgaaacgatacgatgacagggaaggcgaacganagaagcacacggcgaaggagatcgcggcgaaggtggacgcggcgaccacgaaccgcggcggcgggaaggcgggtatgaaggaccgaaccgggttgga

SEQ ID NO: 40997 - DNA, 258 bp, Glycine max
  Clone ID: 701123559H1
cacaaattgaagggttgcaagtattgtagctgatcaaatactatacttctgatggcatttcctaattccaaaatgtaccatggttgctaataggaacctgattacttggaacacaaagagtggtttgttaaattctgggtcagcatggctgcccagacaattgctgagactgcccagaaaattctcacccctgaaacccttcgctatgctgccaaacaatctgcacgttgccttgttgtccctgtccgtctccgccgt

SEQ ID NO: 40998 - DNA, 259 bp, Glycine max
  Clone ID: 701123560H1
aaaacactccctttctctttccccttacccttcttctgtgtgtgatgatgtagatagagaataaaaagagaccagtgtgcagtgagaaagaggttggtcacttcttgtgtggctttgttttgttctttgtgttggaatttgttgatgggtgaagagggagaagaggtgtcaagagataaggaacagcaacacatgggagtttatggaaatgagtggttgtttagtagtttctgtgcaaattggcgccgtttaagacacc

SEQ ID NO: 40999 - DNA, 262 bp, Glycine max
  Clone ID: 701123562H1
cgcacactgaattcaaaaacatcgaaagagagaggcatggccgagcaaaccttcatcatgatcaagccagatggcgtttcaaagaggccttattggcgagattattagcagatttgagaggaagggtttttacttgaaagggttgaaactcgttactgtggaccgtccttttgctgagaagcactatgctgatttgtctgcaaagcctttctttagtggtttggtggatacattgtctctggccctgttgttgccatgatct

SEQ ID NO: 41000 - DNA, 262 bp, Glycine max
  unsure (1)..(262): unsure at all n locations; Clone ID: 701123565H1
attatcttccccanatcgtagatctacggtttaactggagtagtgtggtaagatgggaggtggatttagagtgcttcatttagttaggccgtttctatcgtttcatcctgaagttcaaactgctgacaggaaagtgccatttagagagaaggtcatatacactgtgatctctcttttcattttcctggtttgtagtcagctccctctatatgggntacactcaacaacaggtgctgatccattctattggatgcgagttatt

SEQ ID NO: 41001 - DNA, 259 bp, Glycine max
  Clone ID: 701123566H1
gttttgaaacccccatacatatcctaacccacttcgttgattacgttacaaaagaagtgactgtgaatccgaatccaaatctgaatgggttatcttcaatttggcagacatggtgttaggcaggtccttagatttagagatgctagttgtgataatgttgtggtaaacccactcttatatgcttcccaaggacttcgttacaagaggaagctccaagtcatccttacaactgacatagataagctgggaaaggcaggtg

SEQ ID NO: 41002 - DNA, 258 bp, Glycine max
  Clone ID: 701123567H1
gccagcctcaaaaaatacttgctctacctctgccactttctgagtacaatacaacactgccatggctgcctcagtctccactattggagctgtcaacagagctccactgagcttgaacagctctgaagctggagattcggttcccagttcagccttctttggcacaagcttgaagaaggttactgcctcaagggtccctaacgtcaagatttcttctggaagtttcaaaatcgttgcggcggagaaagagattgatga

SEQ ID NO: 41003 - DNA, 258 bp, Glycine max
  Clone ID: 701123568H1
gcacgctctgcttccagcgagtgttctttcttcgtttcaacaccttaatttgcacacgctgcttcttcagcttgagaaatggcacaagaaacctttctattcacatctgaatctgtaaacgagggtcaccccgacaagctgtgcgaccagatctctgatgcagtgctcgatgcgtgccttgaacaggaccctgacagcaaggttgcctgtgagacatgcaccaagaccaacatggtcatggtctttggagagatcaca

SEQ ID NO: 41004 - DNA, 257 bp, Glycine max
  unsure (1)..(257): unsure at all n locations; Clone ID: 701123569H1
aattttctagggttttattcattttccgatggcttctgcagatgttgagtaccgttgctttgtcggtgggctcgcttgggccactgacgaccatgccctcgagagagccttctctcagtacggcgaaatcgttgaaacgaagattatcaacgatcgtgagactggcagatccaggggttttggatttgtgaccttcgcctcggagcagtccatgaaagatgcgnnnnnngcgatgaatggacagaacttggacggcc

SEQ ID NO: 41005 - DNA, 257 bp, Glycine max
  unsure (1)..(257): unsure at all n locations; Clone ID: 701123570H1
gtggaagctggtttggctcctcttctgttgaagttgttgtcatcgagtgattcgttgactcaagagaatgctgctgcagcccttctcaacctctcaaaatgtgcaaagagtagaagtgtgatggttgagaaatggggtttggaattgatcattgatgtcttaaggaaggggctgaagattgaagctagccagcatgttgctgctgtnttgttttaccttagtgccgagtatggaaacttgataggtgaagagccaga

SEQ ID NO: 41006 - DNA, 258 bp, Glycine max
  unsure (1)..(258): unsure at all n locations; Clone ID: 701123571H1
cccccgagtacatgcccctcagccatgtccttgcaaccaaacttggtgctcgcctcacagaggttaggaagaatggcacctgtgcttggttgaggccagatggtaagacacaagtaaccgtcgagtactacaatgacaatggtgccatggttccagttcgtgtccacactgtcctaatttccacccaacatgatgngacgtgagcaatgatcaaattgctgcggaccttaaagagcatgttatcaagcctgtcattcc

SEQ ID NO: 41007 - DNA, 258 bp, Glycine max
  unsure (1)..(258): unsure at all n locations; Clone ID: 701123572H1
aaaacatcaccctattctctattgtgtaatcaaatatcattaaccatccatggcacaaagaagcaagtnatttcgttttaggatcccatggctatcagtaccatctgaatcattcgctcgtcgnacaagaganagaccanaatcccctccccactcagacacaagtgtgcctattcatagaccatctaagccttctgtgatagccccttcagagtnatctcctcttagtcccacganaactgaggaagccccaagagc

SEQ ID NO: 41008 - DNA, 257 bp, Glycine max
  unsure (1)..(257): unsure at all n locations; Clone ID: 701123573H1
tccggttcacagcagactaaccgcaacccacgaaccggagaagaacctaatagccctccgtctccaggagttggaaaagcagcttctagaagacnngaagacgacgccgtttcggtcattaccaccaccacttctgaatggtcacacacaatacaaaacctaatcactccgcagaaacccgcgtcttcgtctcccacttcctctacgacgtcgtctaacacctccgtagaatccagcagttacaaacagtccctaac

SEQ ID NO: 41009 - DNA, 254 bp, Glycine max
  Clone ID: 701123574H1
cgtcaatcttgatatcttagatttgcttgcaagattatgtcaagaccctttcttgcctcctctcattaggataattggctttcccaaatttgcaagttttttgggtttacttacatggggtattgagaaaatactttttcgctgaagctctgaataacagaccatcatcgacagatggggtctgaaggtcctccagcagctgtggcaacagttcatgtaacaggtttcaggaaattccatggagtttctgagaa

SEQ ID NO: 41010 - DNA, 254 bp, Glycine max
  Clone ID: 701123575H1
aattccgttacattattaaacaactcattttcactttcttccttaatctccctctctattttcgtaataccaaacagtctctaagtgaggggtggaggagagtatcaaaagagagaaaataacatttatttgtagcaatattttgaaaatgtaattatacagtatagagcttaaaaagaaatggtagttccatgtcagaaattatgcaataaaatctttgactaggttatagagttggttttggtgcttacgag

SEQ ID NO: 41011 - DNA, 218 bp, Glycine max
  unsure (1)..(218): unsure at all n locations; Clone ID: 701123576H1
ctttttngctttctttcttcttntgtttatncgcatcgcgtatannnttggtcannaaacaaagagtgtgtgttgtgtggtttggtttggtttttcacttttcttcatctttttgcgagaagacacacacacagagagagatggctacgacgaggattgaggcagagaagaagccgaagacgaagatcgtgtgcactctgggccccgcatcacggtcg

SEQ ID NO: 41012 - DNA, 257 bp, Glycine max
  Clone ID: 701123577H1
aatggcttcagctaaaaggtggcttccgctcgaagctaatcctgacgtcatgaatcagttcctttgggggcttggacttcgagaggatgaggcagaatgctgtgacgtttatggcttagatgaagagcttctggaaatggttccaaagcccgttcttgccgtgctttttctttatcccataaccacccagagtgaagaagagaggttgcagcaggaaaatgaaaaaaagcaaactgtgggtaatgcttgtgggacaa

SEQ ID NO: 41013 - DNA, 257 bp, Glycine max
  Clone ID: 701123578H1
cccatgcttcatccagagaaatttgtcaagcttgggattgatcctccaaagggtgttctttgttatggccccccaggaactgggaaaacacttttagccagggctgtggctaataggactgatgcttgttttataagggttattggaagtgagctagttcagaaatatgttggtgagggggctaggatggttcgtgaactatttcagatggctcgttcaaagaaggcatgcattgtgttttttgatgaagttgatgc

SEQ ID NO: 41014 - DNA, 259 bp, Glycine max
  Clone ID: 701123579H1
ctttcccctgctagattctcgctagtacaatcatagaatccgagtttttgtgggttgcattgttgtgagaagatgagaagagttggtggtgatgttttgaacgtggatttggctgctgcagtgaacaacctcttcaatcttcctgaaactatggagaagttcatgtttccttcttctcgtgctcatgatcaccaccatgaaaccagaggggtctctagcatcattccagtggacattttggacactcccaaggagtata

SEQ ID NO: 41015 - DNA, 254 bp, Glycine max
  unsure (1)..(254): unsure at all n locations; Clone ID: 701123580H1
attgaattcaaaaactaagttcatttcttgtgctttgctttattcctcaaaaccaaacatgtcgaacacatgcggcaactgtgactgcgctgacaagactaactgcaccaagggaaacagctatggtgttatagtagagactgagaagagctacatcgagactgttgacatggatgttccagcagctgagcatgatgggaagtgcaagtntggcactaactgcacttgcacggactgcacttgtggccattaag

SEQ ID NO: 41016 - DNA, 256 bp, Glycine max
  Clone ID: 701123581H1
ggggaggttatgaagatgtcaaatatgttggtcgtgctccctctgcagccacagctactggtttcctcaaggttcaccttaacgagcaggctgagctagttcagaaagccattcaacgtgagccaatcaatttcccttactgaggcatagcatatactttgtttctccagagtgatgaaggcaataattggagggtagcttacaaacacaattcttaatatttgcttttcacctttatgtgttctggttttgacaa

SEQ ID NO: 41017 - DNA, 246 bp, Glycine max
  Clone ID: 701123582H1
tgatctcccaccaggttttcgattctacccaacagaagaagaattagttttcttctatctacacaaccagctagaaggccaaatacacgacacaagcagagtcattccagtcattgacatcaatggcgtagagccatggaaccttccatcacttgcaggggagctttgtcgtggagacacggagcaatggtttttcttttcaccgagacaagagagagaggccagaggaggcagacccaacagaac

SEQ ID NO: 41018 - DNA, 254 bp, Glycine max
  Clone ID: 701123583H1
gagatcgggagggttgcccaaatcaactacggcaaggaatatggcaggctcgtcgtcattgtcgacgtcattgaccagaacagagctcttgtccgatgcccctgatatggtgaggtcccaagtcaatttcaaaaggctttccctaaccgatattaagattgacattaagagggtccctaagaagaaagatcttgtcaaagccatggaggatgctgatgttaagaccaagtgggagaagagttcatggggcagga

SEQ ID NO: 41019 - DNA, 201 bp, Glycine max
  unsure (1)..(201): unsure at all n locations; Clone ID: 701123584H1
catccacaatatccggggtacccatttcaccgaatcatacttntnctaacaatcctgataccctttggtgaaaaatcgtttctggggtcttaaaggaccaaacttggattcagggtcgtgatggaacagaagcacgttctgttgtcagcattgagtgttggggttgggttgggtgtggggcttgggttgagctcaggccag

SEQ ID NO: 41020 - DNA, 254 bp, Glycine max
  Clone ID: 701123585H1
gttgattcatccccatgaaggccaggaagacatgcagggtggttccaaccacgctcacctcggagacccttgtcttgttctcacctctgatcccaaacctcgtcttcgttggaccgctgaccttcacgaacgctttgttgatgctgtcactcaacttgggggtgccagtaaagccactccaaaagcgataatgaggaccatgaatgtcaagggtttgacgctctatcatttgaagagtcatcttcagaagtaca

SEQ ID NO: 41021 - DNA, 254 bp, Glycine max
  unsure (1)..(254): unsure at all n locations; Clone ID: 701123587H1
ctaacacggagtgatggctgtgcagctgtgggaaaccctgaaggaagccatcgtagcctacactggcttctctccttccaccttcttcacggtgctggcgcttctttttgccgtttactacgtcgtcacgggtctctttggctcctccgacgatcaccatcaccgccaccgccacgtcnnnnnnnnnnnnnnnatgccgcctctgcgccccccggttcagctcggcgagatcacagcggaggagctcaaggctt

SEQ ID NO: 41022 - DNA, 254 bp, Glycine max
  Clone ID: 701123588H1
tgcaaaccaagccatgtcacaaaatattggaaacgaggatcaaaacgatgcttctaataatgaagccaggaaccttctgggtcctgctgcacctcctccaagaccaggtatgccttcagttcgtcctcttccaccaccacctggactggcattgaatcttcctcgtgttcctatccaatattctgctccccatagtggtgcccttccaatgcctccacctagacccatgatgccatctattcggcctgctcctc

SEQ ID NO: 41023 - DNA, 233 bp, Glycine max
  unsure (1)..(233): unsure at all n locations; Clone ID: 701123589H1
aaaaagctttcgatccctgtaactgcgttcgactatttagggtttttncggagacaatggcggatgaatcggagcacacggcggcgcggctgccggcgaatcgctgctcgacaagatcgccgagaagattcacggccacgacgactcttcctcttcctccgattccgattcggataaaaaggaatcttcgtcgattaaggagaaggttttccgcctctttggaagggagaagc

SEQ ID NO: 41024 - DNA, 251 bp, Glycine max
  unsure (1)..(251): unsure at all n locations; Clone ID: 701123590H1
actgtctcctctgtccccttctactctcttccgattaacaaacaattttattaaccatgatgcagatcagctccaccataccagcacccaacctccacatgttccaaacganacgcaccantttccgatgccgtgcttctccgttgaacccaacaacctcgtcttctcctcaatccataaaatcggtctcagattccacccgcctgcacctcnctaaccttgacaatctcctccagaagcaatcaccaacg

SEQ ID NO: 41025 - DNA, 252 bp, Glycine max
  Clone ID: 701123591H1
ctattttcctattgttcctcttctcgttcggatcttccactactccaaccaccagttggagaaaaaaggttcgtgagccatgccagaagtaagttttttactttcacgacattatatacaatggtcacaactcagagaatgcaactgcggccattgtgggtgcacccacatgggccaatagaacaatcttggctgggcagaaccattttggtgactcgccccaagttggacgcgctcagggattttacatgt

SEQ ID NO: 41026 - DNA, 252 bp, Glycine max
  Clone ID: 701123592H1
gcgcaatcgtcttctgcttcaaggaaggagagcttgttattctctatcaacaaggaaaatgtcaggtgaagaggttgttgttgcagctgagccagctgctgccatcccaggcgagcctatggatatcatgactgccttgcaacttgtgctcagaaaatctctggcttatggtggtctgcacgaggccttcacgaaggggcaaaagtgattgagaagcatgctgcacaactctgtgttctagcagaagactgt

SEQ ID NO: 41027 - DNA, 256 bp, Glycine max
  unsure (1)..(256): unsure at all n locations; Clone ID: 701123593H1
attagaataaaaaggtgttggaatagagggaagaacgtggaaagtggttgnnnnnnnnnnnnnnnnnnnnnnntggagaagtcagggaagagagtgttgcttacctccaacggcgacgacatttctcaaggcattgccttccatttggtgaagcaagggtgcaggttggttttgctgggagatcagaattccctgcggagcatcgcgaacaaaatcatggattccctctccctcgcagacagaggcaccgtgcagg

SEQ ID NO: 41028 - DNA, 237 bp, Glycine max
  unsure (1)..(237): unsure at all n locations; Clone ID: 701123594H1
agaaaaagcaaccacttgatcggtcnccttaaacttcctaacattcctgctgtcgattccgancctaggaggcgggatatggctgagcagcagggcgaacaacaccgactgcctcaagttcctgcagtggccgcnnnnnnnnnnnnnnnnnnnnnntcatggtcgtgtccctggcggggttcgccggcgcgtgttaccgcaacaccttcctcatgcggctctacctcgtcgtcatgt

SEQ ID NO: 41029 - DNA, 257 bp, Glycine max
  Clone ID: 701123595H1
ataatgttcgaaagggtaccaagatccaagagttgttagttcttggaggtcagaccttaactgctctgagggacaagattttttgctcaacggaccaggtgatgcacaaagctgggcagcatgatccttctggttattttctcatcgaagatgtattctgtcccgatttgagggatccgtctgctattgatctcacaagacctatactggattggctcagagactccaaggaggaggcccaaaagaaatgggaatat

SEQ ID NO: 41030 - DNA, 259 bp, Glycine max
  unsure (1)..(259): unsure at all n locations; Clone ID: 701123596H1
ctntntgcaannaanaggaacntgaattaanttgggttgcngnaanatganacgtgnnatgancnntgctgnnntntnactnactaagcccggcttggaggagtcacaggagcaaatccataagattagaatcaccctttcctctaagaacgtcaagaatctcgagaaggtttgtgctgacctggttcgtggtgccaaggacaagcatctcagggtgaagggacctgttaggatgccaactaaagttcttaacatcacc

SEQ ID NO: 41031 - DNA, 268 bp, Glycine max
  Clone ID: 701123601H1
ctttggttttgtccaatttgtggatcctgcggatgctgctgatgccaaatatcatatggatggtcaagttcttcttggtcgggagctcactgttgtttttgctgaagagaatagaaagaagccaactgagatgaggacaagagagagaaggggtcgattttctgatcgtaggaggtctcctcctcgttactctcgttcacctcgctactctcggtctccaccaccacgtcatagatctcgttctcacagtcgtgactattattctcct

SEQ ID NO: 41032 - DNA, 267 bp, Glycine max
  unsure (1)..(267): unsure at all n locations; Clone ID: 701123602H1
canaacatgtctctaatancttcactctcctccacaacttcacaactcacttcccttccttccctcccttcttcctcctctccactttctcgcaaatttcccctcactttccgggaaaaaaacagaactccaatcacacctcacaagctccctttttcagcaaggcctaccaccaccagagtggtgttggtgaagtctcaggccacagcacctgcttcttctgaggctgtggcagtgacacctgtgtcttctgagatgaaggcatgg

SEQ ID NO: 41033 - DNA, 228 bp, Glycine max
  unsure (1)..(228): unsure at all n locations; Clone ID: 701123603H1
tcggagtgtgtttncagattnatgacaagcaacccnattacgtggaagcctaagaggagaagacgacgaagaggacaaggttaactgaatcgccgcttctgtgtggcttcgntctttcgttttagttttttcatctttttagctttagagggtaatacattctttaaaaaaatggaggttttggtgggtcccgctttcaccatcgacgttccttcgtctccgccgcgg

SEQ ID NO: 41034 - DNA, 242 bp, Glycine max
  unsure (1)..(242): unsure at all n locations; Clone ID: 701123604H1
cttgtagtttatactgaaagatgannttgaagatggcgtanactgatcctaggcctttcactcatgctccttttggtctcctctgaggtggcatccacgaatacaaaagaggaggcaaatggagtggatgatgccaaatatcccggtggaagctatggagggggttacccaggtcatggcggtggcggttatcctggccatggcggtggcggttatcctggccatggcggtggtggtggcta

SEQ ID NO: 41035 - DNA, 261 bp, Glycine max
  Clone ID: 701123605H1
gctactttgttttgaatgatgtttttagatatgttgatgaaaatggaatccaagggtctgctcatgatattggatctcctgcccctccggacactgtttccaatccttctgtgctggagacacaagtttccgagcaaatatctgtgacagctgaggatggtgatgaagaggtagtctacaatccagaaaatggtcaagctgcaattgaagaagaggaagcacctgtacctgaggttcttgatgaaattcctgatgattctc

SEQ ID NO: 41036 - DNA, 252 bp, Glycine max
  unsure (1)..(252): unsure at all n locations; Clone ID: 701123606H1
gttgatacaagactagggaggagaatacccacccaaagctgttgctaaggtgctactttctattagtttttttttttncattttcttgctaaggnggtattgaaagtccatgaaaatattatgttatatattattttaaattgnatgcatatgaattggaaaactctagngataacatcagaattctatttttttaggtngtaaatncngaatatgcaaaaagaccaaattttgngtctaaaactgctgtat

SEQ ID NO: 41037 - DNA, 230 bp, Glycine max
  unsure (1)..(230): unsure at all n locations; Clone ID: 701123607H1
ggttttctntctcgaactcgaacgaagatgcgtgagattcttcacatccagggagggcaatgcgggaaccagatcggagccaagttctgggaggtggtgtgcgcggagcacgggatcgattcaacggggaggtaccaaggggacaacgagttgcaacttcgagcgagtcaacgttctacttacaatgaagcgagttgcggaaggttcgtggcctagggcggtgctcatgg

SEQ ID NO: 41038 - DNA, 264 bp, Glycine max
  Clone ID: 701123608H1
tgccagggattcggttgattaatcaggacaagaacaaatataacaccccgaaatatcgctttgttgttcgtttcagcaacaaagacattgttgcacaaataatatctgctagcattgctggcgatattgttcttgctgcagcatatgcacatgagctgccacgatatggtcttgaagtagggcttacaaattatgctgcagcttattgcactggtctcctgttggcccgaagagtcctcaaaacacttgaaatgggatgaggag

SEQ ID NO: 41039 - DNA, 247 bp, Glycine max
  unsure (1)..(247): unsure at all n locations; Clone ID: 701123609H1
ctcgaggtgttttcaagtggctgcttnannatcttctttctttcantactgcctaanntaattaataannntagttcattataataatgttgtttttgttgctttgcttttcttgatttttgtttgtggtgtttcagagttgccagaaaccaatcccccgcaagtcattgaggaggagccacaaggtgctactgctgtaagtgggagctgtggcagcaacagcacctgctcaacaagcaaggcggtg

SEQ ID NO: 41040 - DNA, 262 bp, Glycine max
  Clone ID: 701123610H1
cgaatccaaggaagggaaaggaaagtaagagaagagaagaatggccgaagagggacaagtgattggtgtccacagcgtggaggagtgggaggaacatctcaagaagggacaagagtccaagaaattgattgtggtggattttactgcttcttggtgcggcccatgccgtttcattgccccaattcttgcggatatggctaaaaagttgccgaatgtcaccttcctcaaggtggatgtggatgaattggcgactgtttccagg

SEQ ID NO: 41041 - DNA, 262 bp, Glycine max
  Clone ID: 701123611H1
cgcgtacctcgattcctcccagggtggtgctgtttcgtgttctttttattggcggtaaaatgccagaagatattgtttaccaacaccctttgtttggtggcaagatatctagcacattcccccacagattccaggatgtcagcagcattcgacaagtccctgatcatcaggaggtgtttgcggacccgagccgtgatgaaagcttgatctttgagcttttagaattcaagcctgatgttgctgataatgggagtgctgggtg

SEQ ID NO: 41042 - DNA, 262 bp, Glycine max
  Clone ID: 701123612H1
tggcatccacacaatgcttcttgcaccaccatgccctcaccactccaaccagagcttcatcacagcgcttagttgtgagcaccaaaccaaaccacattgtttgcaaggcacaaaagcaggttgtccaagagggtgaggacactactaacattgtctctcgcaggttggccctcactgttctcattggtgctgctgctgttggctctaaggttgcacctgctgatgctgcctatggagaagctgccaatgtgtttggaaagcc

SEQ ID NO: 41043 - DNA, 262 bp, Glycine max
  Clone ID: 701123613H1
tgcttcgattgagctgaacaagtttgtgttcttttgtttgttggtgctaatacaagtggcagtttctgaaatcatttttgaagagcgttttgatgatggatggcgaggtaggtgggtgaagtcagactggaaaagcagtgaaggcaaagcaggttcattcaagcacacagctggaaaatgggccagtgatccagatgataaaggtattcaaacatccagtgatgccaaacactttgccatctctgcaaaaataccagaattc

SEQ ID NO: 41044 - DNA, 264 bp, Glycine max
  Clone ID: 701123614H1
cggcgcgtccctgcaggaccttcataatctcctcctactcgttccgcaaccctaactccaacaccttcgccaccatcaccgagatccgatccttcacccctctctacatcaccgacaaacccaccggcaaaccctcctcctcctacgacctcttcttcccccacgcgactcacctccctgagcccgagcgcgtgaacccacgcgctcccctagggttcgcctccgcgtacgatttctcctccctccgcgaccgcaccaaggaca

SEQ ID NO: 41045 - DNA, 270 bp, Glycine max
  unsure (1)..(270): unsure at all n locations; Clone ID: 701123616H1
ctagtctcctactctcacccgcaagaaaaaaaatggcatctcacatcgttggatacccccgtatgggtcccaaganagagctcaagttcgctctcgagtctttctgggatggcaagagcagcgccgaggatttgcagaaggtgtcttctgatctcagggcatccatctggaagcagatggctgatgctgggatcaagtacatccccagcaacactttctctcactatgaccaggttctcgacgccaccgccaccctcggtgccgttccac

SEQ ID NO: 41046 - DNA, 257 bp, Glycine max
  unsure (1)..(257): unsure at all n locations; Clone ID: 701123617H1
cgaggngcactagctagtttcacaatttccaaatggctaggggattgaagaaccatctcaagaggctcaatgctcctaagcattggatgcttgacaaactgggtggtgcatttgcgcccaaaccctcatctggaccacacaaatctagggagtgccttcccctcatactcatcctacgaaaccggctaaagtatgctctgacttaccgtgaagtcatcgctattctgatgcagagacatgttcttgttgatggaaaa

SEQ ID NO: 41047 - DNA, 262 bp, Glycine max
  Clone ID: 701123618H1
caaacatcgtggtggagatcctctaatcctttgttttgtggattttgctaatccggcctgtgcagcaactgctctgagtgcattgcaaggttataaagttgatgaactcaatccagagtctagccacttgcggcttcagttctctcggtttcctggtcccagatctggacctggacctcgtggcaagaggtgagccagttcacggaaggcatttaggttttatgcttgtcataatgtcctcctttatctgtatcgttctggg

SEQ ID NO: 41048 - DNA, 147 bp, Glycine max
  unsure (1)..(147): unsure at all n locations; Clone ID: 701123619H1
gagagtacacgtctaagtacgagagcgtcgggtggagcgctgtcttctcgtcgttgccggaaaatcccgcggcggagttgaacggcggagcaggcaagggcctgttttcgtgagggttcgacgcngcgtttcatgaaacgtgtaaaa

SEQ ID NO: 41049 - DNA, 260 bp, Glycine max
  unsure (1)..(260): unsure at all n locations; Clone ID: 701123620H1
gtttgacactgcctcatancgnagtgctnggagaagaagcaaacatgatcaaagttggancaagtgggttttgtgcaaantctatgggangatcaggtctcaacaaggtgtaaactgctatagcnatgatgatgacagtggatcagagctttcttggctagacgaagtttatctgtcgttggatgatgatctnggaagaaatntgcatgcctatttagattgaatgtgtantacccantgntgtatatatgtatacgcgc

SEQ ID NO: 41050 - DNA, 260 bp, Glycine max
  Clone ID: 701123622H1
gggaagctctggtgagatcaagaatgaggaagaagacgttgaggctggattactcccctgttgtcgaatttgcctcgaaagcgattccgacccagaggatgaattgatatctccgtgcatgtgcaaagggacccaacagtttgtccatcgttcatgtcttgatcattggcgctcagtaaaggaaggatttgccttctcacactgcacaacctggcaaagcccaatttcatcttagagttgaatcgattgaggacaacact

SEQ ID NO: 41051 - DNA, 262 bp, Glycine max
  Clone ID: 701123624H1
ctttcacatccaatcaacgaaaaatgctggctgttttcgacaaatcggtggcaaagagcccagagggtcttcagagccctcactcaaattccgtctcagccctaaaagacggttttctcgcagagcacttctcttccgttcaccctggttccgtcaccgttaaccttggctcttccggtctcttggcctattctcttcacaaacagaaccccctcctcccaaggctgtttgcagtcgtggatgacatttctgtttgtttcaa

SEQ ID NO: 41052 - DNA, 257 bp, Glycine max
  unsure (1)..(257): unsure at all n locations; Clone ID: 701123625H1
cttggatggtggcttcagggagatcagtgtttatgttctgatcatnccaattgtaccacgcttcagtctccgatggatggaaagcccgggttccggtgtcgctnccgcgacgggttcgtcggcgatgggtttttggccggaactggttgccggaaagcctcgtcatgcaacccagcgaagtacatatctggtcgatgtggaggaacaacgagattcattgtcttaattggagggttcgttgtgggtgtttcgctgat

SEQ ID NO: 41053 - DNA, 258 bp, Glycine max
  Clone ID: 701123626H1
gtcgatgatgacaaggcaaggcacgtgtatatattcgcagtcgcaggtggcctgattacgccaactacagtacaacgaggtaatagtcgatggttcttcagattttggtttgaagcccaaaattagttttagtgatatggggactgcatcatctatgttaactcaatacgacatcgaggaagttcaggaacactgcaataatttattttcccagcaggaaattgtgtccttgtatcaaaggttttgtcaacttgaccg

SEQ ID NO: 41054 - DNA, 258 bp, Glycine max
  unsure (1)..(258): unsure at all n locations; Clone ID: 701123627H1
tttaactcgaccttgtatgatgaatgggttaacaagggcaatgcaccggcactgcccganactcttaagaattacaacaagctggtgtctcttggcttcaagattatattcttgtcaggaagaacactggacaaacaggccgtaacagaagcaaacttaaagaaggctggctaccacacatgggaaaaattaattctcaaggatccacaagatccttccactccaaatgcagtttcatacaaaacagcagcgagagag

SEQ ID NO: 41055 - DNA, 260 bp, Glycine max
  Clone ID: 701123628H1
cagaaggctgcaattgaaggatttaagcggttactggatgaagcctcagaagatattaattacaatactgattatcaaactttccggaagaaatggagaaatgatccacggtttgaggcattggaccgcaaggaacaagagcacctattgaatgaaagagtgcttcctttgaagaaagctgctgaagaaaaggctcaagcaatgcgtgcagctgctgctgccagttttaagtcaatgcttaaagagcgaggagatatatc

SEQ ID NO: 41056 - DNA, 260 bp, Glycine max
  Clone ID: 701123629H1
cttccgcctcccttcccttcaactccacggcgcagatccgaggagtttgggaaaccctaattcattcctctttgcttcttctatctctattcctctaacaccagtgatggcaggtttggctccagaaggatcgcagtttgatgctcggcaatatgattctaagatgaatgaattgctttccgccgatggacaagaatttttcacttcatatgacgaagtctatgatagttttgatgcaatgggccttcaagaaaatcttc

SEQ ID NO: 41057 - DNA, 253 bp, Glycine max
  Clone ID: 701123630H1
cttgtctcaaagattaagccatgcatgtgtaagtatgaactaattcagactgtgaaactgcgaatggctcattaaatcagttatagtttgtttgatggtatctactactcggataaccgtagtaattctagagctaatacgtgcaacaaaccccgacttctggaagggatgcatttattagataaaaggtcaacacaggctctgcctgttgctttgatgattcatgataactcgtcggatcgcacggcctttg

SEQ ID NO: 41058 - DNA, 264 bp, Glycine max
  unsure (1)..(264): unsure at all n locations; Clone ID: 701123631H1
ggagacgcttgcataacagtgctggtgatgattccaccagcaaccgctctttctgtttgtatactaccaggaacctccaatcctcttcctctttactggtacctttaccttcctctttcntccactttaatttctctctctgtctataatggggatgcgttattattttaatgaaatcaggaaagaagcatgttaaatcgggcatacccagatgaaaatctcggaggagcggcacgcgaagccaaacggagacttgatcagaag

SEQ ID NO: 41059 - DNA, 269 bp, Glycine max
  Clone ID: 701123632H1
gcttgtctcaaagattaagccatgcatgtgtaagtatgaactaattcagactgtgaaactgcgaatgggctcattaaatcagttatagtttgtttgatggtatcttctactcggataaccgtagtaattctagagctaatacgtgcaacaaaccccgacttctggaagggatgcatttattagataaaaggtcaacacaggctctgcctgttgctttgatgattcatgataactcgtcggatcgcacggcctttgtgccggcgacgcat

SEQ ID NO: 41060 - DNA, 142 bp, Glycine max
  Clone ID: 701123634H1
cttaagcagcttcagagtctgagaagtgagaagcggaagaagaagcgatgcgtttttgcccgtgttttggatccgaggaggccaagggggtggcggattcgcgacccggtcctgtggtttcgggcatgggcggctccattgt

SEQ ID NO: 41061 - DNA, 258 bp, Glycine max
  Clone ID: 701123635H1
tcctgtgcacaccgttgccaatagtatcggtcttcctgggttgcaactgataactaagaaattagagctgcctgtaaagattgtttttccaagaaatttgttgggtggtgttgttcctggagagaatgcggcagacttcatgatgcttggtttaggagacatggctatcccaggcatgctactggctttagtcctctgctttgattatcgcaagagcagggatacagtaaatctcttagaattacattcctcaaaggg

SEQ ID NO: 41062 - DNA, 258 bp, Glycine max
  Clone ID: 701123636H1
cgcaattacgcagaggcctttgctgtgcaaatgatgacaagcagcaggagaggtccccatctgttattgtcattggaggtggcatggctgggattgctgctgctcgtgctcttcaagatgcctcatttcaggttattcttctagaatcacgagaaagacttggtggccgaattcacactgactactcatttgggctttcctgttgacctgggtgcatcgtggttgcatggagtttgcaaggagaatccactggctcca

SEQ ID NO: 41063 - DNA, 259 bp, Glycine max
  unsure (1)..(259): unsure at all n locations; Clone ID: 701123637H1
gtaatgctaataccccaaaaaagtaaaagggtgggtcatgatattatgacataaaatttcccnnnnnnnnnnnnnnnnnnnnnnnnnnnatcaaacgcaaacaaactcaattcaactcactctcccaccacaccacacagcatagagatctattcgcttctctctgcaaaagtaaaaagctttgcaagcaagcaccccaacatctaaaaacccagaaaaagaaaaggccatttctttacatcttccatgacctgggtag

SEQ ID NO: 41064 - DNA, 255 bp, Glycine max
  Clone ID: 701123638H1
gaagtacttaagagagcaatccacacagctgttgctatccttactgccctaatggctgcaacaaaagcaaccaggtcttccaatgttattcttgtaattgtgattggtgctcttggtttgtttattggatggttgatagaaatctcaacaaagtataggtccctttccttttcaattggaatctcatttaatttctctcactgtggctctataatcttgtcaagacacttttgagacggtaccactgggcatttg

SEQ ID NO: 41065 - DNA, 237 bp, Glycine max
  unsure (1)..(237): unsure at all n locations; Clone ID: 701123639H1
attcacaaataaggttgaagagggancctgccggaagaagatnaataccgtctttcatttaccggcgatctcttttttcttccatcaccgttttccggctatccctaatccttaacagaaatgacgacatcaaggcgccttgcggacaggaaggtggagaagtttgagaaaaacatcaccaaaagaggatttgtgccagacacaaccactaaaaaggggaaagactaccctgttggc

SEQ ID NO: 41066 - DNA, 259 bp, Glycine max
  Clone ID: 701123640H1
gtcatcacatcattcactgctgttgtgactagtaataccttggagatccgcttgtattgggctggaaaaggaacaaccagtcttccatttagatcagtatatggtcctcttatatcagctatatctgtggaacctgattttacacctccttcgaaaaacaaaagtagcatatctgtaggagttgtggttggagttgtggcagcaggagcagttgttatcatccttgtacttggtatactttggtggaaaggctgcttcg

SEQ ID NO: 41067 - DNA, 255 bp, Glycine max
  Clone ID: 701123642H1
gcgagattgtgggataggagatgagagactcatgaaagttgttagtgattctgtcaaactagtgatggaagaggatccattacgtcccttaattttgggtggtgatcactcaatctcatatccagttgtcagagccatatctgagaagcttgggggaccagttgatgttcttcattttgatgcacatcctgatctctatgatgaatttgaaggaaattattattcgcacgcttcttcttttgctcgaatcatgga

SEQ ID NO: 41068 - DNA, 258 bp, Glycine max
  Clone ID: 701123643H1
gcaagccccactcaaccaccacacctctcctcgttcacgctacccctttctgctcttcttctacctttcaagttttaaaagtataaagatggcagagacattcctatttacctcagagtcggtgaacgagggacaccctgacaagctctgcgaccaaatctccgatgctgtcctcgacgcttgcctcgagcaggacccagacagcaaagttgcctgcgaaacatgcaccaaaaccaacttggtcatggtcttcggaga

SEQ ID NO: 41069 - DNA, 127 bp, Glycine max
  unsure (1)..(127): unsure at all n locations; Clone ID: 701123644H1
aagttactggaaaggacaagaccaaggatcttagcactctgaagcagaagcttgaaaaaattaacggaaaaatacaaccttnctatcctcntnctgannctccncttnnncctnctnnnncnttttg

SEQ ID NO: 41070 - DNA, 258 bp, Glycine max
  Clone ID: 701123645H1
ctcttcacacaacaaaacttttttctggcattgtagcatcatgactggcagagaaatcctccatatgatgaaggtgaaagcagggtttggaacaccagacacagggaatggaaaaggcaaaatatcaaaacacattacacatggctttcacttgatgaagggcaaatcagcgcatcctatggaagattatttagtttcagaatttaagcaagaaaaggacagagaattaggcttgtttgcaatatttgatggccactt

SEQ ID NO: 41071 - DNA, 259 bp, Glycine max
  Clone ID: 701123646H1
ctctctgctcttctcttctcttctacctctcaagtttttgaagtataaagatggcagagacattcctattcacctcggagtcagtgaacgagggacaccctgataagctctgcgaccaaatctccgatgctgtcctcgacgcttgcctcgaacaggacccagacagcaaggttgcctgcgaaacatgcaccaagaccaacttggtcatggtcttcggagagatcaccaccaaggccaacgttgactacgagaagatcgt

SEQ ID NO: 41072 - DNA, 261 bp, Glycine max
  Clone ID: 701123647H1
caacttcccctgtaaatcgcgtttcgtttgtgcaaggttttaaaagatggctgatgctgaggacattcaacctcttgttgttgataatggaactggaatggtcaaggctggttttgcaggtgatgatgctcctagggccgtgttccccagcattattgggagaccacgccatactggtgtgatggttgggatgggtcagaaggatgcttacgtgggtgatgaagcccaatcaaaaaggggtatactcaccttggaagtatc

SEQ ID NO: 41073 - DNA, 236 bp, Glycine max
  unsure (1)..(236): unsure at all n locations; Clone ID: 701123649H1
aattctncctttcctctccgaaccctcgatcactanncacgcgcacctatattanctcatccaccgtcgctctctcgaacaaccacaacaccatcttcatcacatggcaaacgcagcatctggtatggcagtccatgatgactgcaagttgaggtttttggagctgaaggcaaaaaggacacaccgtttcatagtttttaagattgaggagcagcagaagcaggtcattgtggaga

SEQ ID NO: 41074 - DNA, 260 bp, Glycine max
  Clone ID: 701123650H1
ggctaagtatcattcaagtgggaaaagctcttccatgactgctatagccttcctgtttatccttctaatcacttatacaggcacaacagatgcacaatccggggtatgttatggaagacttggcaacaacttaccaacccctcaagaagttgtggccctctacaatcaagccaacattcgcaggatgcgaatctacggtccaagcccagaagtcctcgaagcactaagaggttccaacattgagcttttgctagacattc

SEQ ID NO: 41075 - DNA, 256 bp, Glycine max
  Clone ID: 701123651H1
aattgcttcgcctttggctctaaagtgactagcaaatcacgtgtcctcattctcgtcgagagtatgttttctctctctgttcagacttcagagtacgcttcctctctcacggtgggtttcattatgccataccactgaagaacgaagtttatctctctcttgtgacttgtgagcaattcaaattgcggagaacagaacctacacactgcattggaagatacaagaatatcatcagtttctcctattcattaactcc

SEQ ID NO: 41076 - DNA, 140 bp, Glycine max
  unsure (1)..(140): unsure at all n locations; Clone ID: 701123652H1
gatcagaaaganaaaatgagttcccttcgtctggctttatgctgtgtngtggtagtgcttggagcactaccacacttctcatatggcacagctagatccttcattnacgataggcacatgttcaaatgtgacttcaatcc

SEQ ID NO: 41077 - DNA, 256 bp, Glycine max
  unsure (1)..(256): unsure at all n locations; Clone ID: 701123653H1
caagatcgccagangccgtctccgggaggagatggccagactttacttccaacaactcatctctgctgtggacttctgccacagccgcggcgtctaccaccgtgacctcaagccagagaaccttctcctcgacgacgacggcaacctcaaggtcaccgacttcggcctcagcactttctccgagcacctccggcacgacggcctnctgcacactacgtgcggcacgccggcctatgtcgcgcccgaggtgattggg

SEQ ID NO: 41078 - DNA, 253 bp, Glycine max
  Clone ID: 701123654H1
gggatgggaaatcaaagtgttttggatttgtgaattttgagaatgctgatgatgctgctagggctgttgaggctctcaatggcaaaaattttgatgacaaagaatggtatgttggaaaagctcagaagaaatctgaaagggagaatgaattgaaacaacgatttgagcagagcatgaaagaagctgctgataaatatcaaggcgcaaacttgtatgtaaaaaatttagatgatagcattggtgatgaaaaact

SEQ ID NO: 41079 - DNA, 256 bp, Glycine max
  Clone ID: 701123655H1
aaaaagcaaaacagagagaacaactgttactcacacacgccatgggtaaatgaatggtttttgagcaacagcagttaaaagagaaaagggattcagcgaagatgacatccgttggtgtggcaccaacttcgggtttgagagaagccagtgggcatggagcagcagctgcggatagattgccagaggagatgaacgatatgaaaattagggatgatagagaaatggaagccacagttgttgatggcaacggaacgga

SEQ ID NO: 41080 - DNA, 188 bp, Glycine max
  unsure (1)..(188): unsure at all n locations; Clone ID: 701123656H1
ggaanccnnaacaactctaatnncngacaatactgctgtgaaacaagtncncttntcaatagnanactcaaaaagcattggntatatatccatatgtggatntaaaggattgacacatgatgnnttgcattcnatcannctgtcntggcatgnctangacaatgaatcctctatctcatatgcgttng

SEQ ID NO: 41081 - DNA, 254 bp, Glycine max
  unsure (1)..(254): unsure at all n locations; Clone ID: 701123657H1
gcaaacacagcattggttgtctcttctggctccttgcaaggatggtgttgcagatgaggggtaccattcgccctggcctcaaatgggatgtcatggttgatctgttcttctatagagaaccagaggaggctanacaacaagaggaggaggaagctccggcggttgattatgccatcacggatttcaatgcaggtgctattgctgctgatggccagtggcctggtacaattgatcaatcatggagtgatgcagtt

SEQ ID NO: 41082 - DNA, 254 bp, Glycine max
  Clone ID: 701123658H1
ggaaaattcaagttccaatcggaatcggaatcggaatctgaaatgagtagtagggtttggtttctactattccttctgctgatctcgaaatgccatcaagtgtggggctcctacgcgggttccgctagctccatcgtcaacccttccaaggtcaaacagatttcctggaagccaagagctttcgtttatgaaggtttcctcacggatttggaatgcgaccacttgatctctttagccaaatcggagcttaagag

SEQ ID NO: 41083 - DNA, 61 bp, Glycine max
  unsure (1)..(61): unsure at all n locations; Clone ID: 701123659H1
gttctctacatgggnccaaaatctnttcatagntgccattatctntntgcagnanattcat

SEQ ID NO: 41084 - DNA, 211 bp, Glycine max
  unsure (1)..(211): unsure at all n locations; Clone ID: 701123660H1
ganagaagaatggaggaggaaggtgacatatacgacggtgttcgagctcagttccctctctcattcgggaagcaatcgaagcctcaaacccctcttgaagccatccacaatgcgacacgtcgttccaattccaatcccaaaacagccaacgaccttccttctgtctcctcctcttccagggattggctcaattccctccgccctcccaaaa

SEQ ID NO: 41085 - DNA, 95 bp, Glycine max
  Clone ID: 701123661H1
ttaatgtattactagtcacaatagcagtgaacgatttgatgattgcccttaccaattcctcctgtttcttttaaaatattaaagtccttccttca

SEQ ID NO: 41086 - DNA, 256 bp, Glycine max
  Clone ID: 701123662H1
gtgcaattcgaagataggcttttcaccttacagatttgggatacagctggccaagaaagattccaaagccttggagttgctttctatcgtggtgctgattgttgtgttcttgtatatgatgttaattcgatgaaatcatttgacaaccttaataactggagggaggaatttctgattcaagcaagtcctctgatccagagaattttccttttgttgtcataggaaacaaaatagatattgatggtgggaacagcag

SEQ ID NO: 41087 - DNA, 261 bp, Glycine max
  unsure (1)..(261): unsure at all n locations; Clone ID: 701123663H1
ctttttccaatccgatatggccgccgcgaccgccttgctccgctcnctccgccgccgcgaccttccctcgtgcttctctctccgcctttcgttcgttgacgagtggcacaaagacatcatatgtagggaacaagtgggcaagtttgtctcggccgttcagttcaaagcctgctggtaatgatgtcattggaattgatctgggtactaccaattcatgtgtttctgttatggagggaaagaatcccaaagttattgagaatc

SEQ ID NO: 41088 - DNA, 265 bp, Glycine max
  Clone ID: 701123664H1
ggcacctttaagcatagttatgacatcactgtccactgcttctgcagtttttgtcacgccactcttattactgttgctcattgggaagaaattgcctatagatgtaaaaggaatggtgtataacattacacagattgtggttgtgcctattgcagctggcctgcttctaaatcgattctttcctcgtatttgtaatgttattcgaccatttttgcctccgctatctgtactggtgggcatctatctgtgccggagcgccacttgt

SEQ ID NO: 41089 - DNA, 261 bp, Glycine max
  unsure (1)..(261): unsure at all n locations; Clone ID: 701123665H1
cctttcaaaccttacactcctcatttcgtttccgtagcagttttctcacacttcaccgctgcttccccttcacctctgatttcgtatcagtagtcagagatcaaaatgtctcgaagatatgacagccgtacaacaatcttctcccctgaaggacgtctttaaccaagtggaatatgcnatggaggctattggtaacgctggtaccgcaatagggatcttatcaaaagatggggttgtgctggttggtgaaaagaaagtcac

SEQ ID NO: 41090 - DNA, 150 bp, Glycine max
  unsure (1)..(150): unsure at all n locations; Clone ID: 701123666H1
tgtttaaggacattgaattatcaaaagacataaatgattcattccaaacagtccatcacaaggcgagggtccaaaaccttgnatcagggatgcanatgagtgttccaggttttaacctaccagggccnntgggccacctntcggcccngg

SEQ ID NO: 41091 - DNA, 257 bp, Glycine max
  unsure (1)..(257): unsure at all n locations; Clone ID: 701123667H1
atcaaagtatgaactggtgttcagcaagaagctatcggtccctatattcacgggaagcagaatagtggacatagatgggaattccatccacgtgattctggttgacaaaagtggcggtgaagtagtagcggttcccactagtctgggccacccgataaagctagaagatagtggtgcttgatggggattttccagntcccancaacnaacaaggaagatatccntggangattgaaggggttcaccaaccacatagt

SEQ ID NO: 41092 - DNA, 254 bp, Glycine max
  Clone ID: 701123668H1
gctccctccaaaagcagaggtgattgcttggtcagaaatgactggagttgagatgtttagctatggagaccacatgtttggcatccaaggccacccggaattcacctatgaccttctcttgttctttattgaccgtattattcagcgaaatttggtccaggaagcgtttgctgtggatgcaaaggttaaggcggcatcgcaagagccagataaagagatattgaaaagattgtgcgttgattttctaaagggtc

SEQ ID NO: 41093 - DNA, 251 bp, Glycine max
  unsure (1)..(251): unsure at all n locations; Clone ID: 701123669H1
gcagcaccccttcatattctttcaaccagacacagagcnngaaaaccctgaagaagccagagtcagagagaaacagaatagtggaatatttgttggaccatgaagcataaagatggaaaaccgattaatcagccaaataagaaccgggctgtgactttggcagtcactttaattgctctatgtggtttttctttctatctgggaggaatctttgctctggaaaggatggggttgtggttaataccatcaga

SEQ ID NO: 41094 - DNA, 251 bp, Glycine max
  Clone ID: 701123670H1
tatgaggagaggaaggctaagttgatttcacgtgtggcagctctcaactctgctgctgataatgatgaagatgatgagtgaaagttcattgcagatgccttctcatggctacactagtagaaactatcttatttggtatctacagaatcattttcttgaaaatttatttgcctgcctgtttatttctaggcccaaaatttggatactttttttggagttgagtaagccttaattttggtcaatttcgggtt

SEQ ID NO: 41095 - DNA, 256 bp, Glycine max
  Clone ID: 701123671H1
gcaatggcagagctgcaatcgaagtctgaaactgcccctgctccggctccggttgtggctgaggtgccatcgaacgacgccgttgcaaagaaagcttctgaaacaggggaatccaaagctattgtttctgtatccgagaagacaccagttcctgcaaacaagcaaagctcaagaggatccattgatagagatatcgctctggctgaagtagagaaagagaaaaagttgtcctatgtgaagggcatgggaagaaagt

SEQ ID NO: 41096 - DNA, 259 bp, Glycine max
  unsure (1)..(259): unsure at all n locations; Clone ID: 701123672H1
tatagaccccagaaaagaagaggtaattgcaaganttagtgagggagataaagaagacattgatattgctgttaaagcagcacgtcaggcatttgactcgggtccatggcctcgcttgccaggctctgaaagggcaaaaattatgntgaaatgggcagacctagttgatgaaaatatagaagaactaggcagcattagataccattgatgctggaaagctatactatantaataaggtagcggaaattccttcagctac

SEQ ID NO: 41097 - DNA, 254 bp, Glycine max
  unsure (1)..(254): unsure at all n locations; Clone ID: 701123673H1
cactcccttatccatttccacaccacancanngnananaannaacgctctctcttcagcctccattctacgctctcccaacngccagtctctgacccgaagagcgaaccataatggaagagtaaattaccggaaaccgaataaccgtttctccgtgaaagcctccgccaaagagattgcctttgaccagcattcccgctctgctatgcaggccggcattgacaagctcgccgacgctgttgggctcatcttggg

SEQ ID NO: 41098 - DNA, 252 bp, Glycine max
  unsure (1)..(252): unsure at all n locations; Clone ID: 701123674H1
cacatatttgccagcattgaaatttgctcgagaacaaggtctttatgtaacacttcattgtggcgagttacctaattcaaaggagataanaaatatgcttgacttccgtccccaaaggattggacatgcttgtttctttgaggatgaacactggagacagctgaagtcgtcgaacattccggttgaaatttgcttgacatcaaacgttaggacaatgactgttccatctatagatgttcaccactttgctca

SEQ ID NO: 41099 - DNA, 254 bp, Glycine max
  Clone ID: 701123676H1
ggatcgtcttcttcatcccacccacacagagttcacgttcagttaggatatctattttttaatggctaatagaccggatccggatattgatgatgattttcgtgagctttataaggagtacactggccccctggggactgctactacaaacatgcaagagagggcaaaatcaaataagaggtctaatgcagggtctgacgaggaggaggaagcccgggaccctaatgctgttccaactgatttcaccagccgag

SEQ ID NO: 41100 - DNA, 261 bp, Glycine max
  Clone ID: 701123677H1
ttgcgttggcgcaaatgggcattcttccagaagcgtttctggcacttttctcgactttcgcttctcgcgtggggccaacaatctaatctgggcgaattcagttagatgggctccaaactccgagctccagtaacactgatctttattctgagttgaaggaactggttccagagtatcaggaacgtgttaagaagctgaagaaagatcatggaagtgttgaattaggaaaaatcactgttgatatggtacttggtggaatga

SEQ ID NO: 41101 - DNA, 255 bp, Glycine max
  Clone ID: 701123678H1
gggctcattgtgctcatgcacgtgccgctctacaatagtaatggagctcactatatggagggtgaaaacatgcgtctgtttttgagagctggttcatcgagtacaaagttgatgtgatctttgctggccatgtccatgcttatgaaagatcatatcgatactctaatgttgactacaacataacaggcggtaacaggtatccattacctaacaaatcagcacctgtttacataacagtcggagatggtggaaatc

SEQ ID NO: 41102 - DNA, 141 bp, Glycine max
  unsure (1)..(141): unsure at all n locations; Clone ID: 701123679H1
cnatgttccttcttcnttctncttcgtcctcctacctaatgaagcaccagagtcacaatgctctctggtttcgaggantcccttatggtagtggcaangctaatacggcacatccggtgtgcgaagagaaccggaaaacag

SEQ ID NO: 41103 - DNA, 258 bp, Glycine max
  Clone ID: 701123681H1
ctaagtctttgggaatagtgctgcaatggcttcaagtcaggaggaggtgacccttttgggagctactggaagcccatttgtgtgcagggttcatattgccctcaagttgaagggagttcaatacaaatatgtcgaagaaaatttgaggaacaagagtgaactgcttctcaaatccaacccagttcacaagaaggttccagtgtttattcacaatgagaagcccatagcagagtctcttgtgattgttgaatacattga

SEQ ID NO: 41104 - DNA, 257 bp, Glycine max
  unsure (1)..(257): unsure at all n locations; Clone ID: 701123682H1
tcccttttcacgtcattatcctaaaaacttgcagattttcacatcccaaacaacatgaaggaagcggttcatgtttctgtcggtgctcctttgtgccacttttcatgtctccttctctattatcgacggtttagttgccaacggcaactttgagttgggtccaaagccctccgccctaaaaggaacagtggtggtgggcgggagccactacgancccagaatgggagatctccggctttgtggagtacataaaancc

SEQ ID NO: 41105 - DNA, 134 bp, Glycine max
  unsure (1)..(134): unsure at all n locations; Clone ID: 701123683H1
gcaatttctgttcccataaataatgcccgggaganggaganggaagttgaaatcgttgagtgatacaattaccgacagcagacgggcatcagtggaggtggaaaatgaatatttagagcngcaaacttggtctg

SEQ ID NO: 41106 - DNA, 251 bp, Glycine max
  Clone ID: 701123684H1
tatttggctcagctagtaacatccattccaatggtgaaaagcaatccgaaaatgttgctcatataccttctgttggaaacaaccaaactcccaaggtgaggaaaccatataccattactaaacaaagggagaagtggactgaggaagagcatcaaaagttccttgaagctttgaaattgtatggtcgtggctggcgccaaattgaagagcatataggtaccaaaaatgctgttcagattcgaagccatgct

SEQ ID NO: 41107 - DNA, 233 bp, Glycine max
  unsure (1)..(233): unsure at all n locations; Clone ID: 701123685H1
aatggcggttgttgctcaaaccccanacatcgccggcgagcngcagtccggccaagacgtncgcaccnaaaacgttgtngcatgccaagccgttgccaacatcgtcaaaagctctttaggccccgttggcctcgacaagatgctcgtcgacgacattggcgacgtcaccatcaccaacgacggcgccacgattgctcaagatgctggaagtggagcntcctgctgcccaagtt

SEQ ID NO: 41108 - DNA, 250 bp, Glycine max
  Clone ID: 701123686H1
tttggatcctccgaatctcccctcttttcattttcacattcttcttattatttattcacccttttccccttccttcacacttcattttcttttataataccattcttttttctctttatctctttcatcaatacttcatcgttttcgttaagggatggcttctgccggcgatgttttcaggcagggtttgccggaagtttgtgctgccgggaagttacacgtgcttgctgttgatgacagccacgtggac

SEQ ID NO: 41109 - DNA, 254 bp, Glycine max
  unsure (1)..(254): unsure at all n locations; Clone ID: 701123687H1
atggctaccatgaccccgaagcttttgttcattccattcaaaagcctagggtgatnataatgcttgttaaggctggggcacctgttgaccagaccattaagaccctatctgcatacatggaaaaaggtgactgcataattgatggtggtaacgaatggtacgagaacaccgaaagaagagagaaatcggtggctgaattgggtctgctctnaccttgggatgggagtntctggtggtgagggaaggtgcttcgt

SEQ ID NO: 41110 - DNA, 255 bp, Glycine max
  unsure (1)..(255): unsure at all n locations; Clone ID: 701123688H1
ggtggacctagttggacagtgcaattgggcagaagagactcaaccactgcaagtttaagttctgcaaactcagacttgccccgttttgatttaagtctgcaacaactcagcgataatttccaaaacaaaggtctcaccaccgcngaaatggttgctctctcaggagggcacacaattgggcaagctaaatgttcaactttcagaacaaggatttacaacgagaccaacatagattcctcttttgcaacatcattg

SEQ ID NO: 41111 - DNA, 230 bp, Glycine max
  unsure (1)..(230): unsure at all n locations; Clone ID: 701123689H1
gnaagagtaagatgctattgcaattnccgctgctctcattctacccacaaactgacacttgcntgcagttgaagaaagaatagaggatcgtggtcgatggcgtctgctagccttggaagtggtggggtcggcagttcgaggtctgttaatggtggcttcaggggttcttccagttccgtcgattggcttggcagagagatgcttgagatgaggttgagagaccacgaaga

SEQ ID NO: 41112 - DNA, 252 bp, Glycine max
  unsure (1)..(252): unsure at all n locations; Clone ID: 701123692H1
ctcttccacacgttctcgctctcttccccaattcccttccaaactacgacgcaaagccaccatncaagccgaggctgttgacgatcatcgaccccattttgctctttaacggcgtcgccaccactttctatttcgacacgcaaacacttatcgtcactgtcagtgttttggccgccattgctctttctctcttccttggccttaagggtgatccggtgccttgtgagcgctgtggtggcaacggtggcacaa

SEQ ID NO: 41113 - DNA, 250 bp, Glycine max
  unsure (1)..(250): unsure at all n locations; Clone ID: 701123693H1
taactcctctctctttatatatagctgctttgtttggtacattcatttcatatcatggctccatcattggaaaccagtaacggtgaagccatgcnacttaaacaggttgaagaagagcaagatggtatacttttcgccatgaacatgatgtctaccatggtgtatccgtttgtggttcggaccgcgattgagttagggatctttgacatcatagcgaaagccggtgaaggtgcgaantatcagcagagga

SEQ ID NO: 41114 - DNA, 258 bp, Glycine max
  unsure (1)..(258): unsure at all n locations; Clone ID: 701123694H1
ggtggnctannngnncagtncanttgggcagangagactcanccactgcaagtttgagttctncaaactcagacttgaccccgtnttgatngnagtctgccanaactacagcganaatttccaaaacaaaggtctgcancaccgcnnaaatggttnctctctcaggagggcacacaattgggcaagctanatgttcaactttcagaacaaggatttacaacgagaccaacatagatnccncttttggcaacatcattg

SEQ ID NO: 41115 - DNA, 257 bp, Glycine max
  Clone ID: 701123695H1
ggttgggacccgaatacgaagtcgacgctgacacagatccctctgctgacgacgaaggcgggtccacgagacggagcggcatggacgcagaggcttaaggaagagtacaaggctctgatagcgtacacgcagatgaacaagtccaacgacaacgattggttccgtatctccgccgccaatccggaaggcactcgctggaccggtaaatgctggtacgttcacaacctcctcaagtacgaattcgacctccaattcga

SEQ ID NO: 41116 - DNA, 259 bp, Glycine max
  Clone ID: 701123696H1
ccagatctgtagacaatatgggaagcactggtttgctacatttgatatgccttgtcattgctttagtaagtgtgtcgcttgtgcaagcagaagatgcgtataagtatttcacatggacggtgacttatgggactctttatcccttggctagtccccagcaggttattcttatcaatggtcagtttcctgggcctagacttgacttggtaactaatgaaaatgtaattctcaaccttatcaacaagctggacgaaccatt

SEQ ID NO: 41117 - DNA, 216 bp, Glycine max
  unsure (1)..(216): unsure at all n locations; Clone ID: 701123702H1
aaaaagtagctgccaatttcacgttctcattctccnaattaaaacctcattcctccaatccggcaagtnacncgtgancccttnnnnnnnnnnnnnnnnnnnnnnnnnnnnnnnncgtgccctaatcggttctcacgttgcgggtgcagatgattgatcgattgattgggctataaaacgctgccaccgaccatgatcaaccattcataatccaaa

SEQ ID NO: 41118 - DNA, 270 bp, Glycine max
  unsure (1)..(270): unsure at all n locations; Clone ID: 701123703H1
atttcaaataattggtcctcnctttttgtggaactcaattctattaggttagtggaaagaganaaaaaaacatggttgaatcaattgctgcaacttcactccttggccaccgtccaatttgtggtggaaatttaaccagggatgtatctgttaaacgcaaatctttgaatactgttcggttcccaacaactgagtttctacngtggtggaaggattgtggttnctctggctttgcctananntgatnggngngatatnggaganattana

SEQ ID NO: 41119 - DNA, 252 bp, Glycine max
  unsure (1)..(252): unsure at all n locations; Clone ID: 701123704H1
tnccgccccttttttgttgttccttcttctcgttcgtcgctttgngatctctcactgcaaccatgtccgtcnagaaagagagagagacccaggtttacttggccaagcttgccgagcaggctnagagatacgaagaaatggttgagtgtatgaagaaagtagcaaaacttgatcttgatctgactgtggaagaaaggaaccttctctcagtgggatacaaaaatgtgattggtgcacgaaggcctcttggcg

SEQ ID NO: 41120 - DNA, 244 bp, Glycine max
  unsure (1)..(244): unsure at all n locations; Clone ID: 701123705H1
cctacttcgcctgtntcatttggcccgttgtttctcacaagccacactcctttcattgaancttaaactctctaaagcccaattctttattaatttactcaatctcaatgtttcatcatctggagttcttcttttgagggctttagcagattccattccttgagtctcatgctggatatgccaatccttgtatcctcatttctgatatccttgtttgcatgatcacatattttccaaggatttt

SEQ ID NO: 41121 - DNA, 269 bp, Glycine max
  Clone ID: 701123706H1
ggactgtcttggagaccaacttgcctaaagtgaaggaaggtaagaagtccaagttcagtttaggtgtgtccgatcctaagattggttcccagatatctgaagtgactaagattccttgccaaagtaatgagtttgtgagtgaacttcttcgtggtgtgcgattccattttgatacgtttgttggtgatctcaagtctggagatttggaaaaggcacaacttggtctgggacatagttacagcagggcaaaggtgaagtttaatgttaac

SEQ ID NO: 41122 - DNA, 273 bp, Glycine max
  unsure (1)..(273): unsure at all n locations; Clone ID: 701123707H1
atcggagtttcagtttcacccctcttttctcatctctaacatccatagtcctcagaggntagtcttcctattatccacaaacaatgtctgacagtcaagaatctgacaagaacattgagatatggaagatcaagaaattgatcaaggctctggaagctgctcgaggtaatggtaccagcatgatttctctgataatgcctccacgcgatcaaatttcccgggtcactaagatgttgggagatgaatttggaactgcttcaaacatcaaagtag

SEQ ID NO: 41123 - DNA, 271 bp, Glycine max
  Clone ID: 701123708H1
aaaccctcttcatcttgttctatctgtgacgagcatcatggcctcaagagcagtgttattgttgggctatgtgtgtgcttccggcgatggttgtggccattcgcccagcaaagaaccctttttgcgtgaagggtcgtgtctactgtgacccttgccgtgctggttttgagacctcagctaccacctacattgctggtgctgagattatgttgcaatgcaagagcagggttagcaacgaggttgtgtacacgaagaaggggtacaccgactc

SEQ ID NO: 41124 - DNA, 273 bp, Glycine max
  Clone ID: 701123709H1
gttccctggtattgctgacagaatgagcaaggaaatttcggcattggcaccccagcagcatgaagatcaaggttgtagcaccaccggagagaaaatacagtgtctggatcggtggttctatcttggcatctcttagcaccttccagcagatgtggattgcaaaggcagaatatgacgagtctggtccatcaattgtgcacagaaagtgcttctaaaactgtttgagagatagggttattgaagcgaaagactactatcatcatgattgtctgg

SEQ ID NO: 41125 - DNA, 275 bp, Glycine max
  unsure (1)..(275): unsure at all n locations; Clone ID: 701123710H1
actgatcttcaccatatcattcgctcanatcaaaatctgtcancggagcncntctcaataacttcttgtaccagattcttcgtgggcttaagtatatacattctgcaaacgtaatccatngagatttaaaaccaagcaacctgctgctaaactcaaattgtgacttgaagattattgattttggtcttgcgagaccaactttggaaagtgacttcatgacagaatatgtagtcacaagatggtacagagctcccgaattgttgttgaattcctct

SEQ ID NO: 41126 - DNA, 262 bp, Glycine max
  unsure (1)..(262): unsure at all n locations; Clone ID: 701123711H1
tgaaacatatgatgtgacaacaattagagcaagcattcccatgtttcttatggtctcgtaagatcaagtcattgggagtcaaatgggttatatctggagaaggatctgatgagatctttggagggtatctatatttccacaaggcaccaaacanagaagaatttcatcaagaaacatgccgcaagattaaagcactccacaaatatgattgcttgcgagccaataaatcgacctttgcctggggtctagaagccagagtgcc

SEQ ID NO: 41127 - DNA, 99 bp, Glycine max
  unsure (1)..(99): unsure at all n locations; Clone ID: 701123712H1
atagaggatgaaattctagtttaaggaaggttnnttggttgggtgggggtaggagatactctcattcacctcccatcatcattataatcattcattcca

SEQ ID NO: 41128 - DNA, 271 bp, Glycine max
  unsure (1)..(271): unsure at all n locations; Clone ID: 701123714H1
gctgactgagaaagttctgagactttttatagcaactggtaaggatgaagtcctctcatttgttcaggcactcaatatccaacatattttgacccctgtgcttcncaccaggtgttctgaggcaaaatcngacttttagtttgtaagatagtctgtaccttgcaagatgtctcaagcagttatcaacgataatgaagtggacattgtgattggtgcactgcatctgatcttacaacttttatgaatgaatggaggccaattttctcccgct

SEQ ID NO: 41129 - DNA, 273 bp, Glycine max
  Clone ID: 701123715H1
ctgaggaaaccaccactggagttaagaggctctatcagatgcaggcgaatgggactcttctcttccctgctattaatgtcaatgactctgtcaccaagagcaagtttgacaacttgtatgggtgccgtcactctctccctgatggtctcatgagggctaccgatgttatgattgctggaaaggtggctgttgtggctggatatggtgatgttggcaagggttgtgctgctgcaatgaagcaggctggtgctcgtgtcatcgtgaccgagattg

SEQ ID NO: 41130 - DNA, 276 bp, Glycine max
  unsure (1)..(276): unsure at all n locations; Clone ID: 701123716H1
anggaaagaacaaaaganagangtggaagcactgcactgcatagcttctttttttgtccagtgnattgacttgcataaatggttttaactgctaggaatgtggcggaaatgaagatgatggatgagggtggcattgaggagaaagcagaagaggggggaaaacaaaaattgcgaacagagaaaggtttgtcaaagaaaaaaaagtcaaaagaaagaagaaaagaatctgcagaggaagggaaaaaacagagaaaagaggaagtagaaccttagcag

SEQ ID NO: 41131 - DNA, 268 bp, Glycine max
  Clone ID: 701123717H1
cacgacaccaagtcaaacaggtgatttgttcactttgtgggactgaacaagaggttcagcaaaactgtataaattgtggtgtttgtatgggcaagtacttctgtggaacatgcaagctttttgatgatgatatatctaagcagcagtaccattgcagtggctgtggaatttgcagaactggaggaagcgaaaatttcttccattgctacaagtgtggttgttgctactcaactctctgaaaaacagtcacccttgtgtagaaggagca

SEQ ID NO: 41132 - DNA, 268 bp, Glycine max
  unsure (1)..(268): unsure at all n locations; Clone ID: 701123718H1
agaaggtccaccttaggatattgtatgctttttgggagggaaatttcagcgacatagaggaatancatgtaaattgtagttgcaaggtcaagtgccaagtagagttttgagctatggctcatggagtttgaggtgttattcttgtaattacaccttgatttaatatctctatttctgtaattattcaccactttaaacattcagaagaaggtaaacttactgtcctatttgtgtatgtggatgatatcgttatatcaggtgatgagtt

SEQ ID NO: 41133 - DNA, 267 bp, Glycine max
  Clone ID: 701123719H1
cttgttttcttcgttgctacaattttggtagcatggcaatgccatgcgtacgatatgttccctctccgaatgaacactggctatggtgcccgtactccggaggtgaaatgcgcaagttggaggcttgctgtggaagcacacaacatctttggctttgagaccattcctgaagagtgcgttgaagcaacaaaggaatacatccatggcgaacaatatagatcagactccaaaacagttaaccaacaagcttacttttatgccagagac

SEQ ID NO: 41134 - DNA, 266 bp, Glycine max
  Clone ID: 701123720H1
gtttacgatgctatcattatttgtgagaatgaaatgaaatataaattcatcggagatgcaatgccttgtggttgttagttaggggttttcgagaaactcgtctctgtatttatgtcgttgttcgagttgctattgaatactagtataaacggttaggaccaattgtggcgatgtttcttcaagtgcgattcagacgtcttgagtgaattgaattgaacattgcttcgaaatgtacaacgtaatttgtagtgaattgaattagtgtt

SEQ ID NO: 41135 - DNA, 268 bp, Glycine max
  unsure (1)..(268): unsure at all n locations; Clone ID: 701123721H1
agatgttgtcttgtctactgctatcgatttgaagcgaacagctccaagacctgttctgacatcatctggagtgagttccaggtctgtgtcccctttctctagaagaccaagcccccctcgttcagctacacctattccaacaacatcgggactncnccttctctaaaagtattactgatagtttgaagaaaacaaatgaacttttgaatcaggaagtgttgaagttacgcggtcaggttgagaccgnagacagagatgcgaactgcaa

SEQ ID NO: 41136 - DNA, 269 bp, Glycine max
  Clone ID: 701123722H1
ccatcttctccaaagttatcatattcgaagagaaaaaaggagtgactgtccaggttgggcaattagggacggaaaaggagaaacacgaaaatgtttttccacatagtactggagcgaaatatgcagcttcatccacgctactttggtcgtaaccttcgcgataatctcgtttccaagcttatgaaagacgtggaaggcacttgcagtggccgacatggatttgtggtggcagttacagggatagagaacatagggaaagggctaattcg

SEQ ID NO: 41137 - DNA, 271 bp, Glycine max
  unsure (1)..(271): unsure at all n locations; Clone ID: 701123724H1
gtagcatggccatgccatggcgcaggctaccaaaggttccctctccgaatgaaaactgggctatggtgagcgttcttcggaggtaaaatgcgcaagttttaggcttgctgtggaagcacacaacatccgagcntttaaaaccattcctgaagagtgcgttgaaccaacaaaggactacattaatggcgaacaatttagatcagactctaaaacagttaaccaacaagctttcttttatgctagtgaacgcgaagtccatcacaacgacata

SEQ ID NO: 41138 - DNA, 270 bp, Glycine max
  Clone ID: 701123725H1
cagaaatgagatatttgctatgcaacctgcacccattcaagtttcatatatgggattcccggaacaactggggctacttacatagactacttagtcactgatgagtttgtttcaccactacggtatgcaaatatatattcagagaagattgtacatctaccgcattgctactttgtaaatgattataaacagaaaaatcaggatgtgttagatccaaactgcccacacaaacgatcagattatggtctacctgaggataaatttatattt

SEQ ID NO: 41139 - DNA, 269 bp, Glycine max
  Clone ID: 701123726H1
agggtaaggtaaccctagagtggtgaatcgaatctgcaaagatggaagctgtttctcgaagaagaggtggaggcattttcgaaagcctctacaaggtcgttatgcgtcgcaactctgtctacgttaccttcgtcatcgctggcgccttcctcggagaacgggctgtagattatggagtccacaagctctgggaggctaataatgttgggaaacgatatgaagacattcctgtgctagggcaaaggcagtcagaatagtgaccagcttgt

SEQ ID NO: 41140 - DNA, 260 bp, Glycine max
  Clone ID: 701123727H1
ctcgtccatcccgtaaccatgtctcagactgttgtcctcaaagttggtatgtcatgtgaaggatgtgttggagcagtgaagagagttttaggaaaattggatggtgtggaatcatatgacattgatttgaaggaacagaaggtggtagtgaagggaaatgtccagccagacacagttcttgcgaccgtttccaaaactgggaagaagactaccttctgggaaggtgaagcagcagcatccgaaactagcacagcaactgc

SEQ ID NO: 41141 - DNA, 270 bp, Glycine max
  unsure (1)..(270): unsure at all n locations; Clone ID: 701123728H1
gggctctgtgatttgatcagcagatagagattgaacatttgcagcnaaaagggaaagaaagagaaaatcatgtcaacagcagaagctcctccttctttccaagaagcagcgcgatgcgttgtctgcaattgcagtttcaacactttcagaaganggncaccactgtcgatcctgtgggagaacattgtgtaatgaacattcatcaaatcaaatggctttaccacaatttggcctttactcaaatgtcgagntatgtgctgattgtttcaa

SEQ ID NO: 41142 - DNA, 268 bp, Glycine max
  Clone ID: 701123729H1
agcctgaggtggaagagctgctctggggtttttttggaggcaaaattcataatttcattattgttaggaaaaacagaagtcccagtggtaagtaaagtatgtaaattgttgacagtaaatgagtgtggagtgtttaataacagaagaggaagagggtgttaggctaccctaggcaacgtcataatgaactttgcttatttattctctgagtgagactggtggcaacaatcaagaatggaagaagggaattgggttctcttcctaaccc

SEQ ID NO: 41143 - DNA, 187 bp, Glycine max
  unsure (1)..(187): unsure at all n locations; Clone ID: 701123730H1
gactgaanncaaagttagaaaaaaaaaacatgtcttgctccgtcgcggtttccaatttcgccggtgttctctccttcttcttccctcttctgctcgaagccctccatcatctcttcttngccggaatccctctcnctctctctgtcgcatctcaaaccttcgaantcttctacgtcgtcgtcttgtt

SEQ ID NO: 41144 - DNA, 273 bp, Glycine max
  Clone ID: 701123731H1
tgttagatctgtacccgcctagccattgatttggaaaagtccaacttcaaggatgagtaagcttcagagtgatgctctaagagaagctatctcaggaatcatggctgattccaaggaaaagaacaggaaatttgtggagaccattgaactccaaattgggttgaaaaattatgatccccagaaggacaagcgtttcagtggctctgttaagttgcctcatattcctcgccccaagatgaagatttgtatgcttggagatgcccagcacgttga

SEQ ID NO: 41145 - DNA, 251 bp, Glycine max
  unsure (1)..(251): unsure at all n locations; Clone ID: 701123732H1
gggtcgctgcaaaacccagggngcgaagccgngcggacggnncgtcggtgcanatcttggtggtagtagcaaatattcaaatgagaactttgaaggccgaagaggggaaaggttccatgtgaacggcacttnccacatgggttagtcgatcctaagggacgggggaagcccgtctgatagcgctctgtgcgcgtactccgaaaggaatcgggttaaaattcctgaaccgggacgtggnngctgacggcaac

SEQ ID NO: 41146 - DNA, 275 bp, Glycine max
  Clone ID: 701123733H1
gtgaccccaatatacttagccatatctttacttcccaaaacttgctctacaatgagtttccttcgttcttttgcaagaaacaaggatatatcaaaagtaggacgcagaggtatccattgcatgcagaaactatgtgcagaaaaaatatctcctgattcactagagaaggcccaaaatcgtgtgatagatgctgcactcacacttgttcgagaaaatacaaggcttaagaaagaacttgtgcatagtttgggaggtgctgtagcaacttcaactct

SEQ ID NO: 41147 - DNA, 267 bp, Glycine max
  unsure (1)..(267): unsure at all n locations; Clone ID: 701123734H1
gcgatttaatgtagtttcatttcatggagacggaatcacatgaagatttacagcacccgtcggnctcttcgaatgacacgcacagtgatgatgcgtcgaaccacagagacgctgagcaaaagcaagatgtttcgagggaagaagttgtgcagattctacaagttattgcatctacggggaggttctggcatgactgggataagttgaagagtatgctatcatttcagctgaagcaggtactgtcagaatatcctgaggcaagaatga

SEQ ID NO: 41148 - DNA, 244 bp, Glycine max
  unsure (1)..(244): unsure at all n locations; Clone ID: 701123736H1
caggttggccaatgtgtcacttctancctcttattgttatcnccttgcgctttcaacatttacttgttggtatcacaactggaattggttcgtagagttccttgaattcttcgtatatctaactaacagtatatacagccgtgtgattcgttagcgctcattatatcataaatgagttgtactaactactaagtgagcatatatgcatgcgtacaacaaacatgatgcactctccttccaagca

SEQ ID NO: 41149 - DNA, 267 bp, Glycine max
  Clone ID: 701123737H1
cgaagatggaggacgcatcagcatcaaagttcattccacaccaaatcggaggggtccaaaacgacgcgcttcgattcggtctccatggagtcaagagcgacatcgttggttctcaccctcttcaatcttcactccaatctacaaggagaatggatgaagcgatgaagaggcaatgcaaagttaacctgtacggaactgcttttcccatgaaggaggagctgacaggcaaatcctgtccaggcatagatcatatacatcaccatccgg

SEQ ID NO: 41150 - DNA, 266 bp, Glycine max
  unsure (1)..(266): unsure at all n locations; Clone ID: 701123739H1
gctttaacatatttggttatactgtcatagtganggatagggatataaagccttctttttgcaaggggggaactcttgatttacaaggaaatgaaatgtgtgtttgtttctgtttattatagactattaagttcttttggtaatttagtgacaaggagagcagagggaggttcatttcttttgtcatttctgtgcatgatgttgtcccgagtcttttataagttggtggcttcttcctgctccataattatctatttaaatttagg

SEQ ID NO: 41151 - DNA, 268 bp, Glycine max
  Clone ID: 701123740H1
cattttttatggaaaaacaaataccatttattgggatattgagcaacaaagctgaggaaaatccagattttttcaattggaatagaataaaaatccgttattgcgacggtgcatcatttagtggggacagtcaaaatgcgggagcagggttatatttcagagggcaacgcatttggcaagctgctatggaagatttaatgtcaaaagggatgcgctatgccaaacaggctcttctatctggatgttctgctggaggtttagctactat

SEQ ID NO: 41152 - DNA, 267 bp, Glycine max
  Clone ID: 701123742H1
gcagtgttagggtttctgtagcctccaaccagaaagagagggaaatggctcccaaacatcctagtacgggtttgtttgttggattgaacaagggtcacgttgtcaccaagaaggagttgcctccacgcccttcagatcgtaaggggaaaacaagcaagcgagtgcactttgtgaggaacctcattcgagaggttgccggctttgcaccttatgaaaagcgaataactgagttgctcaaggttggaaaagataagagggcatgaaagt

SEQ ID NO: 41153 - DNA, 267 bp, Glycine max
  Clone ID: 701123743H1
atccctcccaatgataccggttttcaaaagaaactcctgtatctggaatccatcggtattgactctttcttgcttattgaaaaccatccaacagtgatcacaacctctcttgctgacataagatccaccgtggagtacattacctccttggatttcactgcaattgagtttcggcgtatggttggcatgtgccccgagattctgaccacccaagtctcagacctcatacctgtcttcaccttccttcatcgtgaggttcatgtgccg

SEQ ID NO: 41154 - DNA, 267 bp, Glycine max
  Clone ID: 701123744H1
gggatccttctcagtgctgcgacgaacacgacgtcgtgatgggatttttcaaaaggatagccggatatctagggtttggaaaccacgaacacgattccaaggatgaggcccgcgatggtcaacctcgtaccacacaacctcgtaaaggcttcagtgtccctgcccaggtcgtcgtcgatcgcccccacctcgctcccgttctcactccttctacttccggcgacggtggaattcagggtctggattggtatgtaaagcgtcttaaga

SEQ ID NO: 41155 - DNA, 271 bp, Glycine max
  unsure (1)..(271): unsure at all n locations; Clone ID: 701123745H1
gctctgcttccagcgagtgttctttcttcgtttcaacaccttaatttgcancacgctggctttcttcncgcttgagaaatggcacaagaaacctttctattcacatctgaatctgtaaacgagggtcaccccgacaagctgtgcgaccagatctctgatgcagtgctcgatgcgtgccttgaacaggaccctgacagcaaggttgcctgtgagacatgcaccaagaccaacatggtcatggtctttggagagatcacaaccaaggccaacg

SEQ ID NO: 41156 - DNA, 269 bp, Glycine max
  Clone ID: 701123746H1
gctagctactccttaattactaattagtttcattctttggtgcaagctagcttcattagttgattcataaaattataacaatggtgagtgttgaagcaatccgtaaggcacaacgtgcagaaggccctgccaccgtcatggccatcggcactgccactcctccaaactgcgtcgatcagagtacttatcctgactattatttccgcatcaccaacagtgagcacatgactgagctcaaagaaaagttcaagcgcatgtgtgataagtcg

SEQ ID NO: 41157 - DNA, 270 bp, Glycine max
  Clone ID: 701123747H1
ctcatcttacatgttcctgacaacttatttgcagaaaacatgcgttgtcaaaagtttcgaggttggaacctactacagtaacggctgatgggagaagttgaggcaaaatcttacactttacagtgtgcaagatctgcttacccttggacaatgtcaaagtgacacttttgacattcttcaaacacggattcccagctgttgaacaattgaaagcagattgcatcacgagagttaatttcaaccatgttataattccgtacagattaaatt

SEQ ID NO: 41158 - DNA, 270 bp, Glycine max
  Clone ID: 701123748H1
attcttcccatcattacttttctcatgcttgttgtggcaactaatgctgatgctgcattacctcctgcattttactggaagtccaagcttcctaccacaccaatgccgaaagccatcactgatttgctacaacctgattggaaggaagagaaagacacctctgtggatgtagggaaaggtggagtaaatgttggtgtagaaaagggaaaccaaggaccaggagatggcactgatgttaatgttggtggtggagacggtggagtgaatgtg

SEQ ID NO: 41159 - DNA, 265 bp, Glycine max
  Clone ID: 701123749H1
tccagcgcttgtgaagctgaaggaagcagggaaggcgcggttcattggaataacagggcttcctctggggattttcagttacgtgcttgatagggttccgcctgggacgctggatgttgtgctttcatattgccattactgtgtgaatgacactagcttgggggatttggtgccctatttgaagaccaaaggggttggcattatcaatgcttctcccttgtctatgggccttctcaccgagtctggcccgcctgaatggcatccc

SEQ ID NO: 41160 - DNA, 256 bp, Glycine max
  unsure (1)..(256): unsure at all n locations; Clone ID: 701123750H1
ctacccgccgctcgatgggaattgcgcttcaaggcgactcgtaggggctaatccgcctcacgagggtcaccaacggcacgtgcctttggggggccgaggccccctactgctggtcggcaaacggacggcgggcgcacgcgtcgcttctagcccggattctgacttagaggcgttcagtcataatccaacgcacggtagcttcgcgccactggcttttcaancaagcgcgatgaccaattgtgcgaatcaacggttc

SEQ ID NO: 41161 - DNA, 264 bp, Glycine max
  unsure (1)..(264): unsure at all n locations; Clone ID: 701123751H1
gtagaggcagtggttttntttttttgatttctctttgtagaatcgaatcgagttaatttttgatcgtntgagtgtccgatcttgaaatccacaacaacaatggtgagaggattgctcaacaagctcgtctctngctccctctcggtcgccggaaaatggcagcacaatcaactccgccgcctcaacatccacgagtaccagggtgctgaattgatgagcaaacacggagtnaacgttccgagaggcgtggctgtttcctctgtt

SEQ ID NO: 41162 - DNA, 262 bp, Glycine max
  Clone ID: 701123752H1
caaggttggaaatgttgttgaggctttggttaagatgcttagggagcctattgggagtagtacttccacaaaggcttgtttggcaacaatttttaacttggtttcttcagcggctgcgaatagagaggggattgttcaaagatttgtggagttgggtttggtttcacttttgcttgaggctattgttgatggagaaaaaggggtgtgtgagaaggcacttggggtgttggattgcatttgtgattgccaaaaggggaaggag

SEQ ID NO: 41163 - DNA, 236 bp, Glycine max
  unsure (1)..(236): unsure at all n locations; Clone ID: 701123753H1
aaattttcaaacaattttactcaggataagtcnccaaaggtccagcgttataantgaatcgagatcttctcttagacagggggctcttgcaaaaagaaggtctaatttccagggaaaccaatttcctgctgcagttgaagttgcgcgaaaagctgttactgctcctctgcacaatagagtccctaatcgtaatagggtggctaactggaataaaacaagatttcaagttcctgtag

SEQ ID NO: 41164 - DNA, 257 bp, Glycine max
  unsure (1)..(257): unsure at all n locations; Clone ID: 701123754H1
attgacatatccaagtggtactgcaactgcacatctcatcaacagcttccacantcctcaaggagnccaaactagcaaagaagcaagtgaaaatgttgggaaaattcttcagtttgagttttttttggggcttctttcaatggttctacactgctactgaccagtgtggatttcaagccttcccttcattggggcttaaagcatatgaaaacaagttcttttttgattttgctgcaatctatgttggagttggaatg

SEQ ID NO: 41165 - DNA, 262 bp, Glycine max
  Clone ID: 701123755H1
ggtagcagtatgaatcactgatatgtggcatgttaacaagcacaatggcagggtgcaatgattggcgtcactctatggcaataactatttgctgaatttgaggcaaagttgcattgtggttctgcatatttgattcagaacattaaagttgttgacaatcattctacatacaaatgatggtgagatgatcatgaccgtgtaggaggaatatgcttttcagcttgatgatgctatcgagaaaaatcatttgttagaaagccat

SEQ ID NO: 41166 - DNA, 245 bp, Glycine max
  unsure (1)..(245): unsure at all n locations; Clone ID: 701123758H1
gagtatgtctctgggggtccccacacctgggaggcatgttacttcccagtanactcatggaatccatgctgtgaggcttggcaatgatgcctcaatctcccaaagcatcaaggtcaaacccggtcaactgtatgctctaattcttggggcctcaaggacttgtgcgcaggatgaagttttgaggatctctgtgcctccacagactggtgatgttcctttgcagaccctttatagcctcaatggtg

SEQ ID NO: 41167 - DNA, 267 bp, Glycine max
  unsure (1)..(267): unsure at all n locations; Clone ID: 701123759H1
angnaatgnaanttacntgntgatanaaanttnagacagagcgagtngttgtaaagctangccttgttgcagccatggccacccacgnggctctaaccntctacaaggatccccactaacaccaagttcccatccaaggcttcacactctttcccaacccaatncgcctcaaagagacttgaggtgacagaattctctgggctaagatccacttcatgtgtgacatatgctancgntgctagagaatcttccttttttgatcttgta

SEQ ID NO: 41168 - DNA, 265 bp, Glycine max
  Clone ID: 701123760H1
tgaggaaggaggagtggaggggaacggatctgctgggtgggactagataaagtgaagcaagctgacaagactaagggaagattggatggtggaaatggaatcggcagctgaaaaccctaattacccggcggtggactacaagcgaccttccatcttgtcatttcctcggaggcccgccctcagagttacatccgagttcgatagtgaaagcgcagtcttcttccataagatttcctgcaagttgttggacagccttgccaagttc

SEQ ID NO: 41169 - DNA, 268 bp, Glycine max
  unsure (1)..(268): unsure at all n locations; Clone ID: 701123761H1
cccgcgtttcctttatcatattcttattccgccatgtcccagttgaacggagcctactatgggcccctccatcccgccgccgaaaacctcctaccaccgcccagggcnnnnnnnnnnnnnnnnnnnnnnnnnnnnnnnnagcctcatcttcaagctcatcttaaccgtgataatcatcgttggcatcgccgggttcgtgttctggctcatagtccgtccgaacgtggtgaaattccacgtgaccgacgccaccctgacgcagttcaat

SEQ ID NO: 41170 - DNA, 267 bp, Glycine max
  unsure (1)..(267): unsure at all n locations; Clone ID: 701123762H1
gttgccgatgaatccaccgactacatctccgatctcccgaacgagtgcctggnttcggtgtttcagtttctcagctccgccgatcggagccgctgttcgctcgtttgccggcggtggctccagatcgaaggacagagccgccacaggctttctctgaacgccgaactggatctgtttccggcgattccgtcgctgttctctcggttcgattcggtgacgaagctcgcgctgaagtgcgaccgcagatccgtgagcatacgcgacgac

SEQ ID NO: 41171 - DNA, 268 bp, Glycine max
  Clone ID: 701123763H1
ctctacactccatcaaaagtagatatcccaacatctcaagtttacgtgaattcttcaatgctaagtatcaagaaaattctcccagttttaaacttgcccagagaaactttgttgaaagtatggcaggatattccctggtgtgctactttctgcaggtgaaggataggcataatggaaacctcctattggatgaagaaggtcatatcatacatatcgattttggcttcatgctttccaattcacctggtggtgttaactttgaaagtgc

SEQ ID NO: 41172 - DNA, 266 bp, Glycine max
  Clone ID: 701123764H1
agcaaatgctctgttttggtcacctgccggtcgctacattgtactggctgggttgaaagggcttcaatggacagttggaattttacaacgttgatgaacttgaaaccatggctactgctgaacattttatggcaacagatattgaatgggatccaactggaagatatgttgcaactgcggtgacttcagttcatgaaatggagaatggtttcaatatatggtctttcaatggcaagcatctatatcggatctgaaggatcacttct

SEQ ID NO: 41173 - DNA, 260 bp, Glycine max
  unsure (1)..(260): unsure at all n locations; Clone ID: 701123765H1
ctaagaatcatgaaaggatcagaggcaaggggtttgggttgtgctgtatgaggnaccaaatcactaaaaaattactatgagcagagaattaaaagtgttttgggggtgaagggaaaacatgctgaaaagcttgtgttctcggatctgaagggttttgacttttgaatcactctagtgtatgcttttggcatacctttatacgaagttatactctgaagcaggagaagatggaagatacggtgcagtttcttcctcaagtt

SEQ ID NO: 41174 - DNA, 76 bp, Glycine max
  unsure (1)..(76): unsure at all n locations; Clone ID: 701123766H1
gcgaatgccaggagaactccaattaccacccgggttcagattccacacaacatacgaangggnannnntntnngta

SEQ ID NO: 41175 - DNA, 262 bp, Glycine max
  Clone ID: 701123767H1
caaaagttaaagtgaaagttcggttgaatcttcatggaattgtatctgtcgaatctgcaactctgctggaagaggaagaaattgaggttccagtttccaaagaaccagcaggagaaaataccaagatggaaactgatgaagctcctgccaatgttgctgcacctcctagcaccaatgacaatgatgttaacatgcaagatgctaattccaaggcaactgctgatgcccctgggtccgaaaatgggacccctgaggcaggaga

SEQ ID NO: 41176 - DNA, 263 bp, Glycine max
  Clone ID: 701123768H1
gcacgctctgcttccagcgagtgttctttcttcgtttcaacaccttaatttgcacacgctgctttcttcagcttgagaaatggcacaagaaacctttctattcacatctgaatctgtaaacgagggtcaccccgacaagctgtgcgaccagatctctgatgcagtgctcgatgcgtgccttgaacaggaccctgacagcaaggttgcctgtgagacatgcaccaagaccaacatggtcatggtctttggagagatcacaacca

SEQ ID NO: 41177 - DNA, 252 bp, Glycine max
  unsure (1)..(252): unsure at all n locations; Clone ID: 701123769H1
atttaaataagagtccaaaacaggtggattaagaaaggggtctagagggttattctanttatagtttatagcttcactgttttcaatataacctttgattttttgaatttttgatgcctaaaactagtattgttacactgtagaggagattgttctaagatcttttggtttcttgccgtaggagtcttcttggtggttatatatatatgcctattgaacttgtcatagagaagagggttgatgaggttagca

SEQ ID NO: 41178 - DNA, 262 bp, Glycine max
  unsure (1)..(262): unsure at all n locations; Clone ID: 701123770H1
ggggcctcngccccctactgctggtcggcaaacggacggcgggcgcacgcgtcgcttctagcccggattctgacttagaggcgttcagtcataatccaacgcacggtagcttcncgccactggcttttcaaccaagcgcgatgaccaattgtgcgaatcaacggttcctctcgtactaggttgaattactattgcgacactgtcatcgcgcntcttctagatttnnggaagatgggtaaggaaaaggttcacatcagtattg

SEQ ID NO: 41179 - DNA, 245 bp, Glycine max
  unsure (1)..(245): unsure at all n locations; Clone ID: 701123772H1
tctctctctttgtcgcttggatcacnngatctcatctccaattanncagatatgtcgacatctganaagccagaagtggtggaaaggggtagcaaggatgaaaaacacaaggaagatgatcaagaggaggggaagggtggattcattgagaaggtgaaggatttcattcatgacattggtgagaagattgaggaagctattgggtttgggaagccaactgctgacgttactgcgattcacattcc

SEQ ID NO: 41180 - DNA, 265 bp, Glycine max
  Clone ID: 701123774H1
attccccatctcctcaccttattcagccactgctaatttctagggttccgaaatggacgctggcggaaagatcaagaagggcgccggaggaagaaagggcggcggccctaagaagaagccggtttcaaggtccgtcaaggccggtctccaattccccgtcggaagaattggccgttatttgaagaaaggaaggtacgcccagcgtgtcggtaccggtgctcccgtttacttggccgcagttctcgagtacctagctgctgaggtg

SEQ ID NO: 41181 - DNA, 264 bp, Glycine max
  unsure (1)..(264): unsure at all n locations; Clone ID: 701123775H1
gtttactaccagcttgacaacttttaccagaatcatcgccggtatgttaaaagccgaaaacgatgaacagctgagggattctggaaaagcaaactccgtaagtggttgtgagcctgaaaataatgcaaatggaaaggcaattttaccttgtggtcttatagcttggagcttgttcaatgatacatacagcttctcacgcaacagcaagaatttgacagtgaacaagaaagacatctcatggnagagtgacagggaccacaaatt

SEQ ID NO: 41182 - DNA, 263 bp, Glycine max
  Clone ID: 701123777H1
actgtctgtggttttaatgaaggctgggtgactagaatggtaggaaagttgtatgtggatcacaaactggaatcattctattgtattcgtggggatgtttcaaggattgtagcgatcgatttactgatctctcttctaattctattgatgctatgttgaagcttgatgaagacaggattattaccggatcagagaatagaattatcaacctggttgggatattaccaaacagagtcatccagccaattgcagaacactcagaa

SEQ ID NO: 41183 - DNA, 268 bp, Glycine max
  unsure (1)..(268): unsure at all n locations; Clone ID: 701123778H1
atcctctgacgtcaacgttacctcaaaaccgttgcgtcgtctttattccgtcaaaccccaacgccnccccaataaaccacctctccgttctcctctcccccaaaattcaaattccaaatacctaagattcgctaaaatcccttccccgtcgccacatcgcatgaacccttgaattccgattcggataggcatgtccggagcggccttgtcgccgccgacgaattcgaagtcgctgacgcagacggtgagcgggtcgcacaagttcgtg

SEQ ID NO: 41184 - DNA, 267 bp, Glycine max
  Clone ID: 701123780H1
gcaggctggacccggcggcatggcccaacaagcgaaccaacaatacgcacagcaacagcaacaaccctacatgatgatgccgccgcagcctcagccccctcagatgtgggccacatcggcccagcctccgtcccagtcggtggctcctccgcaacccaccagcgccgatgaggtccgtaccctctggatcggtgatttgcagtactggatggacgaaaattatctctacacctgtttggcacacaccggcgaggtggcttcagttaa

SEQ ID NO: 41185 - DNA, 259 bp, Glycine max
  unsure (1)..(259): unsure at all n locations; Clone ID: 701123782H1
cttacaggtttactctgtcgggtctgcttaacaacatggatggtttntggtcaagtggtggagaggagcgaattataatattcactactaaccacagagagagaattgaccctgcattgctgcgccctggtcgtatggacatgcacattcacttgtccttcctcaaaggcaaggcctttcgagtcttggcttccaattatttaggaattgaagatcattcactttttgaagaaattgatggactattggagaaattaga

SEQ ID NO: 41186 - DNA, 253 bp, Glycine max
  unsure (1)..(253): unsure at all n locations; Clone ID: 701123783H1
cgcgaannctttccaacgtcaagtccgtgaagagaaagaacgccgtcaatcccttngacaatctcgtcctcttcccgatactccgcaagacctcattgaatacttccttgacactgaagctcaggagattgagtttgagattgcaagaatgagaccaagattgaatgaggaattctttgcgcaactcaaattcgagttaggacagcttcgattcgctgttaacaaaacacagctcatggaggacagacagatt

SEQ ID NO: 41187 - DNA, 259 bp, Glycine max
  Clone ID: 701123784H1
gattgggtaaagtgtcaacacatgccgtggtttatgcccgactaattactgatggccaagatccatggagtgcatggtttcattgtccagctgcggagcctggatgatcacttacctcttccaggcataactgttggtgatattggaatgaaatttggaaatggagcatataactccatggataatgggatgctaaggtttgaccatgtacggattccaagaaatcaaatgttaatgagggtttcacaggtaacaaggg

SEQ ID NO: 41188 - DNA, 261 bp, Glycine max
  unsure (1)..(261): unsure at all n locations; Clone ID: 701123785H1
gggtacggtttcgacttgtttcttcttcgtgtttcttctttctctccttcttccttttcagatgctccgctgaggaatcctcggagaaggagttcgtactncacattggatcactctaactttctcgacactgtcagcangcacgatttcatcgtcgtcgagttctacgccccatggtgtgntcactgtaagaagcttgctccggagtatgagaaagctgcttctatcttgagtagtcatgatcctcctattgtttggcta

SEQ ID NO: 41189 - DNA, 259 bp, Glycine max
  unsure (1)..(259): unsure at all n locations; Clone ID: 701123786H1
cctctngcactccctcctcatcggcgtcgncaacctccgcnccgcacgtgcgnacgtcgccggcnnagatcgagccaggtccatcgccgacggcctcgatcagggaaccgtcttcggcttcttgaagctcctctggacattgtngtggacggatatgtccttcanggacctctacggcgctgtttccgacatgaacgagctgctgcggggcttgactgagttgactcgcttggaatcggtcgcggaaaggtccgcttgg

SEQ ID NO: 41190 - DNA, 262 bp, Glycine max
  unsure (1)..(262): unsure at all n locations; Clone ID: 701123787H1
cgagaacgagacatgttccttcaccgatttcccagaggacattcaggtgtccatcctctcgttcctgggcccatcggagatcgcaaccctagcctgcacctcgaagaaactgggctctctctgctccaccgtctccaagctctggttctctatgtgcgagcgcaggtggggctccaacacccgcatcacccaatgggcccaaaagcccgccatctccttcaagcaactctaccacaccctccaccgctnggagaatctcctc

SEQ ID NO: 41191 - DNA, 264 bp, Glycine max
  unsure (1)..(264): unsure at all n locations; Clone ID: 701123788H1
agagaagtagggtttccgaagangaggaaatcgaatccgataccaaccccttcgataaaaaacgaaaactctctctatcaggttatcttaatccttcgattgcgtttccatncaatnnnananncnaatncgcttttagaaattatctatgtcgaaagnccataccccgttaccaaatccgcattttgttatgcctttttttctgattttanttctttaggtagccatcggtgtgtaaaagtaaaattcagtttatgtgagtag

SEQ ID NO: 41192 - DNA, 263 bp, Glycine max
  unsure (1)..(263): unsure at all n locations; Clone ID: 701123790H1
ctctcaactcaccaacaacaaccgccccatctttccccttcgacgacccaactattccatgggccaaaagaaaacgttcaaagcgttgttcacgcgaccacccttcggaggaagagtacctcgctctctgcctcatcatgctcgctcgcggcggcaccacccgccgcgtcagcactccaccgccgcaaccgactccagatccttccaccaagctcagttacnaatgctccgtttgcaacaaaagcttcccctcttaccaagcg

SEQ ID NO: 41193 - DNA, 262 bp, Glycine max
  unsure (1)..(262): unsure at all n locations; Clone ID: 701123791H1
gctcgatgggaattgcgcttcaaggcgtctcgtagggctaatccgcctcacgagggtcacccaacggcacgtncnctttggggggccgaggccccctactgctggtcggcaaacggacggtgggcgcacgcntcgcttctagcccggattctgacttagaggcgttcagtcataatccaacgcacggtancttcgcgcnnttggcttttcaaccaagcgcgatgaccaattgtgcgaatcaacggttcctctcgtactaggt

SEQ ID NO: 41194 - DNA, 129 bp, Glycine max
  Clone ID: 701123792H1
gcgaaatgcgatacttggtgtgaattgcagaatcccgtgaaccatcgagtctttgaacgcaagttgcgcccgaagccattaggccgagggcacgcctgcctgggtgtcacacatcgtttcaaagagaag

SEQ ID NO: 41195 - DNA, 51 bp, Glycine max
  unsure (1)..(51): unsure at all n locations; Clone ID: 701123793H1
atttacaaggaactcaantannatggaagcatgctttntntcgcanaattg

SEQ ID NO: 41196 - DNA, 265 bp, Glycine max
  unsure (1)..(265): unsure at all n locations; Clone ID: 701123794H1
anacgcaatgcccatgtacactccatcactctccaccctnctccaatcanattcaaccangtgtcacactccccttatatatcacaaccaccaagctcaatctcaagcagcagcatcacaccacaccaatgccaatanccatgtgcaacgaaattcaagcccaagcccaagcccaagcccaagcccaacctgggtttaagctcgtcggtttcaaaaacttcgtccgaaccaatcctaagtcggaccgctttcaagtcaaccgctt

SEQ ID NO: 41197 - DNA, 237 bp, Glycine max
  unsure (1)..(237): unsure at all n locations; Clone ID: 701123795H1
caaatcttnatcagatggcaccttctcggagtgtcgctgattcaacgcctccntnaanaanatnnannaaacgtagagaacgattttnagcnattctttgttcttcataaagcttcatcccggagaaaagatagaaaaccaacagctcagggaaaattgtggaagagaaatgagttatcttcatcatttccacacaacatacnannttaaananncnanaatnantnnanaatnnna

SEQ ID NO: 41198 - DNA, 264 bp, Glycine max
  Clone ID: 701123796H1
gcccctggttgtggtgaatggaagaggccaacgaagaggaatccagcttataagggaaagtggagtgctccttacatcgataaccccagttacaagggcatatggaagcctcgcgagattccaaaccctgaatactttgaactcgcaaaacctgattttgagcctattgctgctattggcattgagatttggacaatgcaggatggcatcctatttgacaatgttctgatagctaacgatgataaagttgcagaatcctatcgg

SEQ ID NO: 41199 - DNA, 278 bp, Glycine max
  unsure (1)..(278): unsure at all n locations; Clone ID: 701123802H1
accctaggtaagaagaaaagatgccggctggtcatggtttgngatcccgcaccagagattccttctctcgtcctttcaggaagaagggaaccatcgccctcaccacatacctgagaacctaccacgtcggcgactatgttgacgtcaaggttaacggtgccgttcacaagggaatgccccacaaattctaccatggccgcaccggacgcgtctggaatgtcaccaaacgtgctgttggcgtcgaagtcaacaagcaggttggcaacagaattataagg

SEQ ID NO: 41200 - DNA, 276 bp, Glycine max
  Clone ID: 701123803H1
cgagattcattcttcaccaaaacttcgcaaagaaacactacacatccatggcaactgctggcgtgcaagaagttcgtgttccccctctaacttccacctctgagccaccttctctctttgacggaaccaccaggttgtacatcagttatatttgtccctatgcgcaggtgtttggatcactcggaactataagggactacaagacaagatcaaactggttcctattgacctacaaaacaggcctgcttggtataaggagaaagtctaccctgaaaa

SEQ ID NO: 41201 - DNA, 250 bp, Glycine max
  Clone ID: 701123804H1
ccagcatagaatttaatgtggctggtgaatgatttgttctctcataggttgctgatatgcttaaaagattggtaacctagattggaacctcaggatatagaatggttggcatgcagtatggaaatgtgatggactgtgtatctgttgagtactgtttttgttctggtttgcaagtatggttggatggttttgtgattgtgggttttcatctttctcatgtttccttcaattgagttgtttttgtactttt

SEQ ID NO: 41202 - DNA, 274 bp, Glycine max
  Clone ID: 701123806H1
cttctttcttcttatatatcgaacatggctaagtatcattcaagtgggaaaagctcttccatgactgctatagccttcctgtttatccttctaatcacttatacaggcacaacagatgcacaatccggggtatgttatggaagacttggcaacaacttaccaacccctcaagaagttgtggccctctacaatcaagccaacattcgcaggatgcgaatctacggtccaagcccagaagtcctcgaagcactaagaggttccaacattgagcttt

SEQ ID NO: 41203 - DNA, 264 bp, Glycine max
  unsure (1)..(264): unsure at all n locations; Clone ID: 701123808H1
cagtggtggttgtagcacttcttcttctggcggnggtggggcccatggctgnggctgtgacatgcaccccaacagagttgagtccgtgtcttccagcaatcacttccggtgctaaaccttccaatgcttgttgcacgaagctgaagcagcaaaaaccatgcttatgtggctacctcaaaaacgctagcttgaagcagtatgttaactctcctaatgcccgaaaaaccgttgcttcttgtgggatccctttccaacttgttaatt

SEQ ID NO: 41204 - DNA, 279 bp, Glycine max
  unsure (1)..(279): unsure at all n locations; Clone ID: 701123809H1
gccaatttgaaatgaatagtaattgcagcagtgggnacctgtcaggnaggtggaacctgcatttgcataggatggatatgctcataaacttctcagatccattcattncaganaggtttgatgccaatgcttgcacatgggcatttnggatgaacttgtttgatttacaacagtggnggagacataatttaaccgctctctatcacagatatttgcaaatgggttccangaggccgttgtggaacattggnagtctgcctttangctggctcactttct

SEQ ID NO: 41205 - DNA, 274 bp, Glycine max
  unsure (1)..(274): unsure at all n locations; Clone ID: 701123811H1
ctgggaaagaacaacaaatcaccatccgttcatctggaggactctcagaagatgagattgataagntggtcaaagaagcagagttgcacgctcagaaagaccaggaaagaaaggctctcattgacatcagaaacagtgcagatacaagcatctacagcattgagaagagtttaggtgagtacagagataagatccccagtgaagtggccaaagagattgaagatgcagtatcggatttgagaacagcaatggcaggagacaatgctgacgaaat

SEQ ID NO: 41206 - DNA, 274 bp, Glycine max
  unsure (1)..(274): unsure at all n locations; Clone ID: 701123812H1
gttgttgtgagaaggatgaagaatgaaattgaaaagtgaagtttagagatggaagaagaaaaagcagcggcgtactacgacgagctggcccgtaaggggaggggagctgcgaggttcaagcaaggtctaggcttttcctcttcagcaccaaacgacgacgttccaaaaccctcctcctccttcctctccaaattcgtcaaagcctcctccgagtcggagaagcaagcgcagtnccaatccatccacgacaagctcaagaaaaatccctcttccg

SEQ ID NO: 41207 - DNA, 275 bp, Glycine max
  Clone ID: 701123818H1
ctctgaagccgctcacgttatccacaacactctcaaccctccttaaaccctaaccaatccaaccatggcttcttcttccaccttcactgcaatgtccgcctgcaagctctcctcctccgccgccatctcctccttcccctcccgccgccgctccaacgccgtcgttctgtcgaggcgcaggcgccgccagggtctccgccatggccaaggagttgcacttcaacaaagacggcaccgcaattaagaagctccagagcggtgtgaacaagctcgcg

SEQ ID NO: 41208 - DNA, 273 bp, Glycine max
  Clone ID: 701123819H1
ggaagcgtgttgtattctacactgtgggagagtaccttctcttggctgctgttagtgcactgcaagtcatatacatcaggcgcctcttcagcaagtcagtggcctacaatcgtgtttgagtccccttcatgattaacgttatggtttccttcattagcaacaggattaggtttattacatatgcgttctctattcaacagtacgattacaatcccttggtgaacactttttttcttttcaagagagactccacttgtatgttgatacccaaca

SEQ ID NO: 41209 - DNA, 272 bp, Glycine max
  Clone ID: 701123820H1
agagcagacactccaatggtcaaggacgctggcccgtcaaatcagctaagttcatcctagatttgctgaagaacgctgagagtaatgctgaggtaaaaggtttggatgtcgatgctctgtacatttcccatgtccaggttaatcaagcacagaagcaaaggcgtcgtacctacagagctcatggaagaatcaacccttacatgtcatctccatgccacattgagctgatattgtctgagaaggaagagcctgtgaagaaagaggctgagacc

SEQ ID NO: 41210 - DNA, 276 bp, Glycine max
  unsure (1)..(276): unsure at all n locations; Clone ID: 701123821H1
attgaagtncttanagatccttgtcctttgaattcaaagaaaaatcaggacctaatggatgcagatgaaatgcatgatacagaggtcattggttctctggttccggatcctcaaaaccangaagctttagttgttgagaatatacctgatcctnttgctggagagcagacatggccaacagaggctgaaattgctaaggctgatgaagatcaaaagaaaaagaagataaaaaagaggagtcttcctcatggcacttcagaatatcaggctgcttgg

SEQ ID NO: 41211 - DNA, 271 bp, Glycine max
  unsure (1)..(271): unsure at all n locations; Clone ID: 701123822H1
ccgaacttgggtcgattcactaatccccctgattggcaggaaattttgacctattttcgaggntctgaactgcagaattattttactcggattctagaggatgatttgaaggctatcatcaagcctcagtatgttgaccatattccaaaagctgtgcaagggaatgtggggcaggtgctagaccagaaagatgagagagagaagaaggaggagcttgtgctgatcttgagcttaatcaagttatagatcgtaatgttggtgatctttcggg

SEQ ID NO: 41212 - DNA, 269 bp, Glycine max
  Clone ID: 701123826H1
aattcatgacaatccagatgaaatgactgctgctttgtatctacaagtcagtatagttagccaggctttgatatttgtcacccgttcgcgcactggtccttcatcgaacgccctggattgctgttagtgactgctttcgttattgctcagctgattgctacagtaatagcagtgtatgccaactggggctttgcaaggatccaaggaattggttggggttgggcaggagtgatttggctctacagtattgtcttctatttcccacttga

SEQ ID NO: 41213 - DNA, 269 bp, Glycine max
  unsure (1)..(269): unsure at all n locations; Clone ID: 701123827H1
ctgtttcttctttttctccaaccttcgtttcaccaccacacttacattactttgtcgaaatggctccaccaattgagaccccaaacaaggtttccagctatcaacagtccccaaaccctcgtcttaacgagaggattctttnatnnatttccaggagacacgttgctgcacacccgtggcacgatcttgagataggacccgnagctccaaagatcttcaactgtgtggtcgaaatagggaaaggaagcaaggtgaaatatgaacttgac

SEQ ID NO: 41214 - DNA, 268 bp, Glycine max
  unsure (1)..(268): unsure at all n locations; Clone ID: 701123828H1
gcctcatctctcactctatcattcatagggcttttgtataattctgcgcgttctcattcacgacctcaccagtttgaatttcgttnttttgttgacaatttaggattttccaagtgttagcattgtgttttcattcccaatccgaaaggcaatttttttgttttttttcccctgcttttaaatttctgtctaaaatggtgttattttttgcagaaaatatactcatggccgagcacgattttgatggacatgttgtaggatatgtgcc

SEQ ID NO: 41215 - DNA, 270 bp, Glycine max
  unsure (1)..(270): unsure at all n locations; Clone ID: 701123829H1
gcttcatggattttggtatagtccctacactttgagggtggtatggaccttaaanctaaaggatataccatatcaaaacatagaagaagaccgctacaataagagtcttcaacttcttgaatacaacccagtatacaagaaaactccagtgcttgtccataatggaaaacccttatgtgagtccatgcttattgttgaatacattgatgagatttggtcacataattcattacttcctgctgatccctacgagagagctctggcaaggtt

SEQ ID NO: 41216 - DNA, 264 bp, Glycine max
  unsure (1)..(264): unsure at all n locations; Clone ID: 701123832H1
gngcnnnnttaantgcgtcnccntctgcnacagcgctgtcggcaanncctgcttgttgatttcctacaccagcaacacttttcccacggactaactgcccacggtttttgacnatttcagtgctantgttgtggtggatggaagcaccgtaaacctggggttgtgggatactgctggtcaggaggattataataggcttagacccttgagttatcnnggagctgatgtatttatacttgcctttctctcataagcaggntngca

SEQ ID NO: 41217 - DNA, 286 bp, Glycine max
  unsure (1)..(286): unsure at all n locations; Clone ID: 701123833H1
gaatcaactagccccgaaaatggatggcgctaaagcnacccgacctatacccggaccgtcggggcaaggaccaaaccccgatgagtaggagggcgcggcggtcgctgcaaaacccagggcgcgagccggggcggagggtcgtcggtgcagatcttggtggtagtggggtaacgatacgtaataagttncatcattgaggaagtttcctgtgcatcgtctccgaaaatgaacgacgcagatgtctcaaagcaaatccagcagatttncgcagttcatccgccaggaa

SEQ ID NO: 41218 - DNA, 127 bp, Glycine max
  unsure (1)..(127): unsure at all n locations; Clone ID: 701123834H1
cttgtngactccacctcctgtctttccncttccannaactnaggnacaacnatngttggtattaaaaactcacaatgcaatgnccgtgccaagnanactacctggaacngtaantagangattntca

SEQ ID NO: 41219 - DNA, 272 bp, Glycine max
  unsure (1)..(272): unsure at all n locations; Clone ID: 701123838H1
caccattctagatatcagagaactttgcagctctcttaggtttttaaaaaacaccacgcaaacagcaagannngccacttccgacagtaacatgctantaaattatgttccagtttatgtgatgctcccactcggagttgtcaatgttgacaatgtttttgaagacccagatggccttaaagaacagctcttgcagcttcgagctgcgggtgttgacggggttatggttnttgtgtggtgggggatcatagaactgaaggggcctaagcagt

SEQ ID NO: 41220 - DNA, 271 bp, Glycine max
  Clone ID: 701123841H1
acggaatcaatagtggtgaagcaatattgtctcgtggagatgcaagttaagacaaatcacacgcatcccaaggcaaaaccatctcttaagtcttaacttatggaatagtcttttaatattgcaataactataagtctggttttctgaacagcataaggataataacatggtaatgcaaagcaaaaggaactgtttccttttggattcaattgctttcttactatcataagcaagctcttcctttgttagtgagacttcactttgaagcaac

SEQ ID NO: 41221 - DNA, 267 bp, Glycine max
  Clone ID: 701123842H1
gcagagatggtcctatgcctgtgctaagcagttgattgagaggcttgtttatgctgagggtgctgaaaatggcttggaattcacaattgtgaggccttttaattggattggaccacgaatggatttcattcccggcattgatggcccaagtgagggtgttcctcgggttctggcatgctttagcaataatctcctccgtggagagcccctcaagcttgtggatggtggccaatcccagaggacttttgtgtatattaaggatgctat

SEQ ID NO: 41222 - DNA, 265 bp, Glycine max
  Clone ID: 701123843H1
cttgtgaaccactggaggaagattccttcaggccaatccttcaccactatgatggtcccaagttccgtcttgagctgaatgtgcccgaggtattttatttttatcttgctgaatattggtcccatttgaaagaagatactaacatggttcagtgtttttatttttcctggtccgctaaactctatcgctttttgggtttataggcgttgtctcttctggatatttttgcagaacaagacaccttcaatgacactttcgaggcttg

SEQ ID NO: 41223 - DNA, 266 bp, Glycine max
  unsure (1)..(266): unsure at all n locations; Clone ID: 701123844H1
attgagccatgttcttgcaacaaaactcggtgctcgtctcaccgaggttcgcaagaacggtacctgcccttggctgaggcctgatgggaagacccaagtgaccgttgagtattacaatgacaatggnnccagggttcctattcgtgtacacaccgtgctaatctccacccaacacgacgagactgtcaccaatgacgaaattgctgctgacctcaaagagcatgtgatcaagcctgtgatcccagagaagtaccttgatgagaaga

SEQ ID NO: 41224 - DNA, 257 bp, Glycine max
  Clone ID: 701123845H1
ctttgaaattaacttttgaagggaaaaatcagttaatctacccagagacatggttttttatgttagttgtggctatatgtgtcatcatgcaaatgaattatcttaataaggctcttgacaccttcaacacagcaattgtatctcctatatactatgtcatgttcacaacacttacaatactagccagtgtaataatgtttaaggattgggatggccaaagtggtggaactattgtgtcagaaatatgtggctcatcg

SEQ ID NO: 41225 - DNA, 268 bp, Glycine max
  unsure (1)..(268): unsure at all n locations; Clone ID: 701123846H1
gcctccctaatacttagccacatctattgcatgctctctcccctcatctccttcttattctctgcaatatatcatagtgccaaactctcatctttctctctctctcacacacacacaatataagtccnccctaaacaatcaccatggcagttgaagctagttacatgaatctcttgccttctcagttactcactaacagagaactcatcaaatccaatcaacagctacagnatcaattaaactctgattacagtacaacactactacc

SEQ ID NO: 41226 - DNA, 279 bp, Glycine max
  unsure (1)..(279): unsure at all n locations; Clone ID: 701123847H1
aancnaggttattcgcaccgcaaacaaacagtgagccatggccgtcggaaagaacaagcgcatctccaaagggaaaaagggtggcaagaagaaggcagctgatccctttgccaagaaggattggtatgacattaaggccccttctctttttcaagtgaaaaatgttggcaaaaccctcgtctctcgtacgcagggtaccaagattgcttctgaaggacttaaacatagagtgtttgaggtctccttggctgatcttcaaggggatgaggatcatgcatt

SEQ ID NO: 41227 - DNA, 255 bp, Glycine max
  unsure (1)..(255): unsure at all n locations; Clone ID: 701123848H1
agaaaccgangagaaganaaaatgccgtgcctcaacctcaacaccaacgtgtaccctcgacggcgtcgacacctcttccatcctcgccgaagccacctcctccgttgccaacatcatcggcaaacccgcggcctatgtgatgattgtactgaaaggatcagtacccatagcttttggtgggatgaacagccacnagnttanggagatttggtgtccttggtggtcttaaccctagtgtaaacaaggaacttagtg

SEQ ID NO: 41228 - DNA, 273 bp, Glycine max
  unsure (1)..(273): unsure at all n locations; Clone ID: 701123849H1
gnanaanttgactttcccgaactccacctgagaanaagnacnccttaattcgcaggcgcgtcttgtgttggacaacaaccacaagatgattaacttcgaagaaaccgagttgcgactcggcctccctggcaacgactcagcactcaagggaagtgctgccaagagaggcttctctgaaacttgtctgttgatttgaagcttaatctttcttcttgcataacgatctgnctcggattcacctcatctgtgtctacagagaagcccaaagagaac

SEQ ID NO: 41229 - DNA, 271 bp, Glycine max
  Clone ID: 701123850H1
atggactccttcaattccttcttcgattcaacaaaccgatggaattacgatactctcaaaaacttccgtcaaatttctccggtcgttcagaatcacctcaagcaggtttattttactctgtgtttcgccgtggttgctgcggctgttggggcttaccttcatgtcctcttgaacattgggggttttcttactacagtggcatgcgtgggaagcagtgtttggttactctcgacacctccttttgaagagaggaaaagagtgactttgttga

SEQ ID NO: 41230 - DNA, 269 bp, Glycine max
  Clone ID: 701123851H1
cttttgttgttctgtgtttgtgtttgttttttctctcacctgaaaatgtcttgctgcggtggtaactgtggttgcggaagctcctgcaagtgcggcaacggctgcggaggctgcaagatgtacccagacttgagctacactgagtcaaccaccaccgagaccttggtcatgggagtggcacctgttaaggctcaatttgagggtgctgaaatgggtgtgcccgctgagaacgatggctgcaaatgtggaccaaactgctcctgcaaccc

SEQ ID NO: 41231 - DNA, 249 bp, Glycine max
  unsure (1)..(249): unsure at all n locations; Clone ID: 701123852H1
gcgagcgaccatcccatttttttgnttattttgttattcantttttgtaagtgaaccttatctctcaagcttatagttctagctcttgttccctcaagagtcttggtttttagaagggaaacagcatgtgctctttctcttcaaaacagaccctttatttggcacttcctcgtccatggacatctaagagacaccaccacagtcacaggcaccttcggttgggcatgctcaacagaaggagggcacact

SEQ ID NO: 41232 - DNA, 241 bp, Glycine max
  unsure (1)..(241): unsure at all n locations; Clone ID: 701123853H1
gngcatgcactctcatgtctgaagaatttgtnccanntcaantagttggttgacagattacaaagcctccatgttcaaagatgacctcttggctggtttaactcttgccagcctctgcatacctcagagcataggatatgctactttagcaaaagttgctcctgaatatggcctgtataccagtgttgttccacctcttatttatgctatgatggggagctcaagagaaattgcaattgga

SEQ ID NO: 41233 - DNA, 239 bp, Glycine max
  Clone ID: 701123854H1
tggtttttgaccaattggtcttgtttttgttagtagtaatttcaagttgttcttgagtttgtgagttttgaaagtttggattgttctttctgtttgatgagtggtgttggaataagtttggtttggtttggtttggtttggttttccaatttttaatgattggatttcatggatgttgttagtgaacttgaattgttccaaagcaagttacagttaataaatgataattcggttttcag

SEQ ID NO: 41234 - DNA, 269 bp, Glycine max
  Clone ID: 701123856H1
gcggcataacctaaacctatctttcttctctctctgtgtgtgcgcttcaacggcaaccagaagcagccatggccactgcaaggactgtgaaggatgtttcacctcatgagttcgttaaggcgtactcctctcacctcaagcgatccggcaagatggagctgccagagtggactgatattgtgaaaactgcaagatttaaggagttggctccttatgatcctgactggtactatgtcagagctgcttccatggcaagaaagatctacttg

SEQ ID NO: 41235 - DNA, 269 bp, Glycine max
  unsure (1)..(269): unsure at all n locations; Clone ID: 701123857H1
ataattccaaccttcaacgtctctncactctcttccttttttccctaattgcaccctctttggctcaacaatccttcagacccagagccctcgttgtcccagttaaaaaagacgcttccaccctccaatatattnctcaaatcaaacaaagaacaccacttcgtcccagaaaacctagtacttgacatcggtggccaattcctgtgggtcgattgcgacaacaactacgtctcctccacttaccgccccgcacggtgtggctccgccca

SEQ ID NO: 41236 - DNA, 223 bp, Glycine max
  Clone ID: 701123858H1
ggcgggaatgacagaaacgggggtttctgataatttcaagggcttaatactggcgatgggttctagtgcattcatcggttccagtttcatcttgaagaagaagggtcttaagcgtgctgctgcaccggtactcgtgcaggagttggtggctatacttatctactagagccgctttggtgggctggcatggtgacaatgattattggggagattgcaaactttg

SEQ ID NO: 41237 - DNA, 263 bp, Glycine max
  Clone ID: 701123859H1
cagtggccaagtgtggcttgaagggtatgagcaatgatgtggagaaatgcttgtcactgtgtgtggaggaaaggatgcgtgggctgataagtaacctgattagaatatcaaaacagagggttgattttgagaaaacaagacatcggactgttgtcacttcagatgttcggcagcaaatcatgacaataaataggaaagtaaggaaagagtgggatataaaacaggcagaagcagagaagattaggaaactacataatgttgac

SEQ ID NO: 41238 - DNA, 262 bp, Glycine max
  unsure (1)..(262): unsure at all n locations; Clone ID: 701123860H1
tcttcttttgttgttctgtgtttgtgtttgttttttctctcacctgaaaatgtcttgctgcggtggtaactgtggttgcngaagctcctgcaagtgcggcaacggctgcggaggctgcaagatgtacccagacttgagctacactgagtcaaccaccaccgagaccttggtcatgggagtggcacctgttaaggctcaatttgagggtgctgaaatgggtgtgcccgctgagaacgatggctgcaaatgtggaccaaactgc

SEQ ID NO: 41239 - DNA, 261 bp, Glycine max
  unsure (1)..(261): unsure at all n locations; Clone ID: 701123861H1
gcaaatttcaactcaactaactagnacnttctttccacacaacntacnatcncaccggagatcacgtagcagngaagagtaaacattaaacaagaannttnngggagcananaaacaangtcgatganagttgagtttanaaggtngcagcaatacgagtgaagtttcnncgnnggtgctataaataattaaacatgtctctgcggcacttcaancggatcacgtcctctcgtgttcacccaatgcaatccaaattaccnc

SEQ ID NO: 41240 - DNA, 266 bp, Glycine max
  unsure (1)..(266): unsure at all n locations; Clone ID: 701123862H1
attttctctgctcaccaagccgttggtttctcagtgctcacgccaaagatcattctttcttcttctgagtacgtgcacagtgaatttgattgaagaatggcacaagatattgctactccaccagttccttttgattttgaactcttggttggtgatcaccttagaactgtcacagcctcatccaacagcagcaggacagacccatggattgaccngaaagntgaaactccggacncagggattggtcggggaccctttggtgatgt

SEQ ID NO: 41241 - DNA, 274 bp, Glycine max
  unsure (1)..(274): unsure at all n locations; Clone ID: 701123863H1
gtctcgagnncggcnacactnagatcggagaaagaatggcgaaaacgacgtcgttgctgctctttacactgctcctcttcggaaccctagctctcatccaggcgaagaaatcgaaggaggatttgaaggaggtgacccacaaggtttactttgatgttgagattaatggaaaagaagcaggtcgtattgtaatgggtcttatgggaaggctgttccaaaaactgcagaaaacttccgagcatttgcacaggggaaaagggaatggtaaaagtgg

SEQ ID NO: 41242 - DNA, 272 bp, Glycine max
  unsure (1)..(272): unsure at all n locations; Clone ID: 701123864H1
ggggcggtgttagcatagacgactggtggaggaacgaacagtnnnnggtgatcggaggtgtntcttggtccacagcgtgccctanttcagggccgtgtanttgntctnngtcgntggtnngncnaacttcnctntgacctcaaaagcagcagatgatggaganttctcagaactctacatattcaagtggacatcactcttgatccctccaatgactttacttatcatgaatattgtcggggtggttgtcgggatctcagatgccatcaaca

SEQ ID NO: 41243 - DNA, 282 bp, Glycine max
  unsure (1)..(282): unsure at all n locations; Clone ID: 701123865H1
aaagtaacttatgtttgtttaattgtcttatgagtataggaatggagacagtgatggaagaggaagaatacaactatagagaagtgaggcttccttctctgatagcagtggtgggcgagccagagctggggagggaaacaggggaaaggagaagaggaagggacataataatagccatagatcatggtgccaataccaaacatgctttcgattgggctctggttcaccttngcaggctcgctgataccatccatctcgttctnnnntttccgacttgcataa

SEQ ID NO: 41244 - DNA, 280 bp, Glycine max
  unsure (1)..(280): unsure at all n locations; Clone ID: 701123866H1
agaaggtccaccttaggatattgtatgctttttgggagggaaatttcagcgacatagaggaataagatgtaaattgtagttgcaaggtcaagtgccaagtagagttttgagctatggctcatggagtttgaggtgttattcttgtaattacaccttgatttaatatctctatntctgtaattattcaccactttaaacattcagaagaaggtaaacttactgtcctatttgtgtatgtggatgatatcgttatatcaggtgatgagttgattgagaaact

SEQ ID NO: 41245 - DNA, 268 bp, Glycine max
  Clone ID: 701123867H1
tgcaagtggagaaggagagcttggtgtacatgtggggttacctgcccggagctctgccgcagaggacgcctctgttgacgccgcttcttgttagggttccgccctctggttacttttggaaggatgtctgcggcggtggttgtggattcgccatggctatctctgagcctggaaagctcataacatggggttcaacagatgatttaggccaaagctatgttacatctggcaaacatggggaaactccagagcctttccctcttccaat

SEQ ID NO: 41246 - DNA, 277 bp, Glycine max
  unsure (1)..(277): unsure at all n locations; Clone ID: 701123868H1
aagatccaacaacttctcaaccacaacgagttncnattcccttcgattcacgaacccagaaaattaaaacattaaaaaagatatcaagtatcaaaatctaaacggcatcagcaaacatgtctcaacaccatggtgatgaaatggagtatgcggcagatgataatgaaatggcagaggtagaagaggatatgtatttccgtggcagggcatttggtgaatcagattcggatgatgacgacgactacgaatatgaccctttggaaaaccgaatatcaga

SEQ ID NO: 41247 - DNA, 275 bp, Glycine max
  Clone ID: 701123870H1
cttctttcttcttatatatcgaacatggctaagtatcattcaagtgggaaaagctcttccatgactgctatagccttcctgtttatccttctaatcacttatacaggcacaacagatgcacaatccggggtatgttatggaagacttggcaacaacttaccaacccctcaagaagttgtggccctctacaatcaagccaacattcgcaggatgcgaatctacggtccaagcccagaagtcctcgaagcactaagaggttccaacattgagctttt

SEQ ID NO: 41248 - DNA, 246 bp, Glycine max
  unsure (1)..(246): unsure at all n locations; Clone ID: 701123873H1
gttgacttatccagatgccaatctacncaaaagangctttaacctgccataagtgtagtccngtctctaaatccaacttcaactattgctcacatatctggtattggtataaaagccatcccttctatttcacacttatccagtctcgtgctgtcaacttgtcaaacaatttcatagttcacatctcaccaggagttctaccatagggtattcaaacacttaacttgtcaaaaaacaaaatcagca

SEQ ID NO: 41249 - DNA, 266 bp, Glycine max
  unsure (1)..(266): unsure at all n locations; Clone ID: 701123874H1
atccaacacccctcggccagnnagagtttccccttggaaaatagagcctgctcttgctcccccggctctaaatcctctttcaatgcccaggcctaaaaggcctcggtctaatgcagttccttcatccccagattcttctgttcttactcgagaagcatcatctaaagtgagcatagacccttcaccggcaaatggctttccaagggtcttgcaaggtcaagaattctcgaccttgagaggcaattttgctgaaagtaatgagtctg

SEQ ID NO: 41250 - DNA, 149 bp, Glycine max
  unsure (1)..(149): unsure at all n locations; Clone ID: 701123875H1
ggtgagtgctgcttctgcttcatcatcatcagagaagaatggcggctactgtgtcttctgcgtggtcaaagcccggcgcgtgggctctcgattccgaggaacacgaagccgaactccttccacacaacatacncctngnnntnntntnt

SEQ ID NO: 41251 - DNA, 264 bp, Glycine max
  unsure (1)..(264): unsure at all n locations; Clone ID: 701123876H1
ggaggataccttgtattgattttcttcatatttgtatttnttgtttacgtttatcttactctttctccatacctgctgtcccctagaatcatacccatttgttccattgacgccatgtgctgtcttgttctctgagttcctcctcttcaacacaacgatccatgtgtaggcctccaaaagcacagcaatgccacccaaagctgcaatgatgccaatgtaagcatgcttccagtcattgtagcgatcccctacagaagtctccaa

SEQ ID NO: 41252 - DNA, 261 bp, Glycine max
  Clone ID: 701123877H1
ctgacctcggaaatccaaagagggaaactcacggtgtttcgttgcgttgtgctctgctctgctcctttgggcctgggctgggctgggctgggctgggctgggcatggctattgcagcagcggccgtggtggtaccattgggcctgctcttcttcgcctccggcctccttgttaatctcattcaggcaatatgctatgtcgtcgtaaggccggtgtcgaaaagtttgtacagaaggatcaaccgggtagtagcagagctctt

SEQ ID NO: 41253 - DNA, 264 bp, Glycine max
  unsure (1)..(264): unsure at all n locations; Clone ID: 701123878H1
gaanatcgcaggtgaaaatgagcggaacggtgaagaaagtaaccgatgtagcattcaaggtgggaaggaacatcgattgggatggaatggcgaacttcttcgtctccgatgaggctcgcagggagttctccaatctccgtcgcgctttcgacgaggttaactcccaactcgaaaccaagttcagccaggaacctgaacccatagactgggattactatagaaaaggaattggcatcgcttggtggatatgtacaaggagcttat

SEQ ID NO: 41254 - DNA, 250 bp, Glycine max
  unsure (1)..(250): unsure at all n locations; Clone ID: 701123884H1
ggcgagcgaccatcccatttttttganttattttgttattcantttttgtaagtgaaccttatctctcaagcttatagttctagctcttgttccctcaagagtcttggtttttagaagggaaacagcatgtgctctttctcttcaaaacagaccctttatttggcacttcctcgtccatggacatctaagagacaccaccacagtcacaggcaccttcggttgggcatgctcaacagaaggagggcacac

SEQ ID NO: 41255 - DNA, 267 bp, Glycine max
  Clone ID: 701123885H1
cgctctgcttccagcgagtgttctttcttcgtttcaacaccttaatttgcacacgctgcttcttcagcttgagaaatggcacaagaaacctttctattcacatctgaatctgtaaacgagggtcaccccgacaagctgtgcgaccagatctctgatgcagtgctcgatgcgtgccttgaacaggaccctgacagcaaggttgcctgtgagacatgcaccaagaccaacatggtcatggtctttggagagatcacaaccaaggccaac

SEQ ID NO: 41256 - DNA, 268 bp, Glycine max
  Clone ID: 701123886H1
cttaaccccaaacaaaggctctgcaattgcaaattcagaggatgtacgatcttcgagtacaacggaagcgccgtggtggctatggtcggcaagaactgcttcgccattgccagcgaccgaaggctcggcgttcagctccaaactatagccacggattttcaacgcatttccaagattcacgacaagctcttcatcgctctctctggcctcgccaccgatgctcaaacattgtatcagcgtcttgttttccggcacaaactgtaccagc

SEQ ID NO: 41257 - DNA, 263 bp, Glycine max
  unsure (1)..(263): unsure at all n locations; Clone ID: 701123887H1
cagtggtggttgtagcacttcttcttctggcggaggtggggcccatggctgnggctgtgacatgcaccccaacagagttgagtccgtgtcttccagcaatcacttccggtgctaaaccttccaatgcttgttgcacgaagctgaagcagcaaaaaccatgcttatgtggctacctcaaaaacgctagcttgaagcagtatgttaactctcctaatgcccgaaaaaccgttgcttctgtgggatccctttccaacttgttaatt

SEQ ID NO: 41258 - DNA, 206 bp, Glycine max
  unsure (1)..(206): unsure at all n locations; Clone ID: 701123888H1
tgggaganaacaaacctgcagaggtgaaggatttccagatagtggtagctgagaacaaggangagagcaagaaacagcagcaacagttggcaccaaagaggagttccaacaaggacaggcacaccaaggttgaaggcaggggaaggaggataaggatgcctgctctctgcgcancagaatcttccagttgaccagggaattgggtc

SEQ ID NO: 41259 - DNA, 262 bp, Glycine max
  Clone ID: 701123890H1
atcatccctcgttttctccgaacaatggctgctggtgtcactgtcaagtccgaggttctagaatcttctccccctgaaggagtatgttccaacacggaggaaaaccacctggttcagaccaatttgtctgatgggtcacccaacaagtctgtgccagcatctggacttaatgcagtgattcctagtgcaaatcagcttaccatcttctataatgggagtgtttgtgtctatgatggaatccctgcagagaaggtgcatgaaa

SEQ ID NO: 41260 - DNA, 73 bp, Glycine max
  unsure (1)..(73): unsure at all n locations; Clone ID: 701123892H1
gacaagagagtgtctttaatttcacagttnccatagcaatntatgcgcnngaanaatgncaaaattncccagc

SEQ ID NO: 41261 - DNA, 267 bp, Glycine max
  unsure (1)..(267): unsure at all n locations; Clone ID: 701123894H1
gtcgaatttgagtttccttcaatttcatagtagcagccctttggggcactcctcttcnncaacccaaaagtccaaccccaaacagcaacaacttcaaatcatcaaaacatacatcaaatgtagggtgcaatattcaaccaaaatcggaggaaatgaaattggtgttcgacaagtttgacaccaacaaagatggccagattacccttgaagagtacaaagcagctatgaggacaatggggtggggaatcgaaggcactgaggctgatg

SEQ ID NO: 41262 - DNA, 264 bp, Glycine max
  unsure (1)..(264): unsure at all n locations; Clone ID: 701123895H1
gttttactctgtctctgaaaatggctgataccatattgaagatatgcatccatgaatgactttgccttacaattgttttctctaacaagtctgcatgaactatttttnnctcttgttatgtatcccaacatattccatttatataattgcacttgcagttcttgtaggtttcattgtcatggagctgaattcacagaagagaccnttttcaatcaaattatggcctcctagtcagnacactaggcagacccttgtggagaggat

SEQ ID NO: 41263 - DNA, 269 bp, Glycine max
  unsure (1)..(269): unsure at all n locations; Clone ID: 701123896H1
ggtatacaacagaaactacttttcgttgtttacctgtactaagtagttttcttacctaaaaatagatccacagcgaaaactagtttacgccgtgtatttgttttaaatcaatggtttgtttttgaattgttgattaagttaatattttttcaatacagtgtaccgcacacacatgatatattagacacgattgacaagtcacgggaagcttctattcatagcagagatatggcagcgacgcaagagcgggaagcttccatgatgangca

SEQ ID NO: 41264 - DNA, 290 bp, Glycine max
  unsure (1)..(290): unsure at all n locations; Clone ID: 701123901H1
ctacagtccaatcaaaagaacctgaacttgcaacctcacactcncagccagggcattctctcccaattcctgtaaagggtgtaaggttcaatgatctatgcacaacctatggttctgtatttccttcagtgtttcgtgcccagtcaggttcaccagcaatgccaagtccaaattcagttatgctccttgaaccaaactttcaagtcaatgcattttatcagtcaaatatgaaagagagtagttcagagcagctttatgaacctggtggtccaaatggaaacaccacccaa

SEQ ID NO: 41265 - DNA, 232 bp, Glycine max
  unsure (1)..(232): unsure at all n locations; Clone ID: 701123905H1
caaaggcccacgattcctcactcttcttccatncacctgcngccttcactctacatctcctggtctccagtgagatgaaccctagctccaattggtcccattagttacctctttcctgcatctcatatatcccattctttctacatncacacaacataanantnaaaaangttttgttgaangaggcatcgcttccatcatcgcaggatgttccacacaacatagnctnncc

SEQ ID NO: 41266 - DNA, 277 bp, Glycine max
  Clone ID: 701123906H1
gttatcctcataaatacactctaattaggtggcaagataagtgtctaaccttagtaacattgccacatattgtgttcattttggaattgtgccactaaaattctattcaattcatctatggctgcctcttcttatgctatgcaatcaatcctggcaaaccctttgatccgcatttccagcgggtctagggtgaaccaatttggcgttcctgctttgcacatgagaaggaatgttggcctgagagttaggtccatggctaaggaagaacaaccaagtg

SEQ ID NO: 41267 - DNA, 207 bp, Glycine max
  unsure (1)..(207): unsure at all n locations; Clone ID: 701123907H1
cttttagggttttctcaactcttcnatttggggcttaaaccctctccgattcanattcggatttagggcttccctttctctattccgcntccaaagaanaanagatctcgtggttggttcgtcatggccaccgttgctaatcccgcggatcaagcaactgatttgctacagaagctatcgttagaaactcagcccaagcccttggag

SEQ ID NO: 41268 - DNA, 275 bp, Glycine max
  unsure (1)..(275): unsure at all n locations; Clone ID: 701123908H1
gaaaaacaagtttaaaaatggtcctagttgtggggatcattaggtctaccattttgcatgtacatgttgaaaagcnnnnnnnnnnnnnnnnnnnnnnnnnntactttattattaatatattattattatatgatggttaagtctttggttgtattatggagggtatacctacgtgtgagcacaacacttggctccacatcagcgtgcttaccacgtggtgacatgagaaattctaggagttgtgtattgaagtgagcaagctgctgctggtgctg

SEQ ID NO: 41269 - DNA, 280 bp, Glycine max
  unsure (1)..(280): unsure at all n locations; Clone ID: 701123909H1
ctcnatttggccgtcantggcngcctccgnggctctcaacggcacaaccaccanntcnatcaggcacgcgttcggcaacgtcctcgcgtacatcatacttactcatgancggcgntctcgccttactacgatccgtactcttctcccgttataaagtatgagagtgttattcacgagtttgatccttatttcaactatanagtcactacagtttttgcacaaagaatgggatatatgatttctggaatggtttgatgatcncacttggtatcccctggtc

SEQ ID NO: 41270 - DNA, 273 bp, Glycine max
  unsure (1)..(273): unsure at all n locations; Clone ID: 701123910H1
gagcagcngctntagatggcngaggaccaactatntgggacacctataactaaacagcaaccanggaagatttgggatcatagtgatggaagtctagcaattgatttttatcaccggtacaagagcgacncaaagatggtgaaagaagttgggttggattcatacagattttccatctcatggtccagaatattccccaagggcaagggagcagttaacaccttggggncacaagttctacaacgatctacataatgagattatagcaaatgg

SEQ ID NO: 41271 - DNA, 272 bp, Glycine max
  Clone ID: 701123911H1
gcttgcaatcccacccatattgaagttcgctgaaatgctttcccttaatgttaagtctgtgaattacaccaggggaagtttcattttccccagtgctcagccatatccccatcgcaacttttctgaggaagttgctattcttgatggctactttggcaaacttggtgcaggaagcaatgcttatattttgggtggccaagacaaagcacagaactggcatgtctactctgcttctgcagattctgtaactcaatgtgacaatgtttacatct

SEQ ID NO: 41272 - DNA, 272 bp, Glycine max
  Clone ID: 701123912H1
gcagtcatagaggcagttgatcaccaacaagctggtggctggtctgctaatgttactggcaacgtcactggatcagttgatgtgggtgaggccaaggcagctagctctattgtgatgcagaaagctgaagtacctgcaggacgagcttggaaacctgctcctggtgtcaaaccaaaatctttcttagaaattcaacaggaagaacagaggaaggcagagactgaaatgcttgtatctaatattgctgtttctgtcattcaatgagtctggta

SEQ ID NO: 41273 - DNA, 278 bp, Glycine max
  unsure (1)..(278): unsure at all n locations; Clone ID: 701123913H1
gcaggctttatctccactctccatggtcatncttgctcctcttcttcgccatatggttggntcagttgttgttgagcatgcttatgagttagcaaatgctgcacagaagcaagaactgctttcggaattatactctacggaacttcggntntcataaggatctagtctcattgaaagagagcagattattagatgtgatgtccaagttgggtctacagaaaggttcagttctgcgacatatggcatacagtgattcagccaattttagagaaagggat

SEQ ID NO: 41274 - DNA, 273 bp, Glycine max
  unsure (1)..(273): unsure at all n locations; Clone ID: 701123916H1
cgctgatttaatggctgcagggctccaatgaggatgcttctgctttataanngcagcaattccagctatatgtggtgcagccatgctggttccagatatcatggcaaacgcttcaccaacataatttggctcatcagttccatttggacaccaagcagcccaaatcaatgaaccaggagctaatatatctggtttgagaagatctgcctcttggaagctgaagtccttatatttggccctcgagcagagaataatgctactgtggtgcagatt

SEQ ID NO: 41275 - DNA, 286 bp, Glycine max
  Clone ID: 701123917H1
gctggccccctctggtggggtggtgttggcttctcgtgatggaaagattgtgtgcgaaaatactcttgatgcacgacttgatgtagtgttccgtaaaaagcttccagaggggaaggagagagccaggaagggaatgttggattaagggttgccaaacttcttcaattaaaactctgtgaacttggatgtattgctgtacactcaaataagatccgaaagcagctcttggacaagttgttgtttgaagatttgattgtatggtttggttacccctgaaatgtttata

SEQ ID NO: 41276 - DNA, 284 bp, Glycine max
  Clone ID: 701123919H1
gcaatggtgtacgtcaaggctcagaaatcaaaagcctacttcaagagatatcaagtacaagttcaagagaagaagagagggaaaaaccgattaccgtgccaggattcggttgattaatcaggacaagaacaaatataacactccgaaataccgatttgtggttcgctttagcaacaaggacattgttgcacaaataatatctgctagcattgccggcgatttagttcttgctacagctattcacatgagctgccacgatatggtcttgaagtaggacttacaaa

SEQ ID NO: 41277 - DNA, 280 bp, Glycine max
  unsure (1)..(280): unsure at all n locations; Clone ID: 701123920H1
gttctctaatcagcctattgcaccttcatcagttgctggaggagaaaatgacccaactgcaattcctaatagaagtccatctaccccaataacatccgttggaaatgaagcatcgcagcagatcctgcaccttcaaactcaaagttcttcttcagcttctggatctcctgtcatggctacaaatcctcgaggaatttactctaatgaaagaggctctactgcttgttcttcaccagcaaaccaagatagagcagagccatcagagttgcagtcntttctg

SEQ ID NO: 41278 - DNA, 276 bp, Glycine max
  Clone ID: 701123921H1
tcagctacagttattggtgctacttttcagtggtttttgagggatctaactggtatgcttggaggaatcttattacacattttaccagggatcaaatcttgatagctatgcaaaaatgtggcgattggttgcagatcttatgaatgaccttggaatgttaatggacctcatttctccgttgtttccatcagcttttgtatttgttgtttgcttaggaagcatatcaagatctttcactggtgttgcaagtggagccactagagcagctttgactca

SEQ ID NO: 41279 - DNA, 274 bp, Glycine max
  unsure (1)..(274): unsure at all n locations; Clone ID: 701123922H1
tggtggaccatgaggacggtccacttgttcctgagaagatactaattgctgtcaagcaangattgggttgcaaatgccacatctacacaataatcactaaagacaagttgaaacttgtactgccattacctttctatacactatccttgtagagttttaatggctttgcatgagcattttggcttaactaatcatctcaactgtggtacgagggtggatacttggcttaacaaaacatcacaactgtgtcattagcttaaggtttatggcttag

SEQ ID NO: 41280 - DNA, 273 bp, Glycine max
  unsure (1)..(273): unsure at all n locations; Clone ID: 701123923H1
gaaaaaatgggttcctctttgtggacttgtctgattttgttatcacttgcttctgcttccttacgccgccaacccnagaacaccaattgatgtgccatttggcagaaactatgtgcctacttgggcctttgatcacatcaaatacctcaatggtggttctgagattcagcttcatcttgataagtacactggtactggcttccaatccaaaggatcctacctgtttggtcattcagcatgtacataaaattggttcctggtgattcagctggc

SEQ ID NO: 41281 - DNA, 275 bp, Glycine max
  unsure (1)..(275): unsure at all n locations; Clone ID: 701123924H1
cttgctccctcagaagcgaagnagaagccacagagaactagtctcctactctacacccgcaagaaaaaaatggcatctacacatcgttggatacccccgtatgggtcccaagagagagctcaagttcgctctcgagtctttctgggatggcaagagcagcgccgaggatttgcagaaggtgtcttctgatctcagggcatccatctggaagcagatggctgatgctgggatcaagtacatccccagcaacactttctctcatangaccaggttct

SEQ ID NO: 41282 - DNA, 270 bp, Glycine max
  Clone ID: 701123925H1
ggatagggctaagagtggccatggaggctcaagcaatcattggtgaagaatcaaaacaatttgaggcttggagagactcattggaaactgttcctaccattaaaaagttgagggcatatgctgaaagaataaggcttgctgagcttgagaagtgcctaggtaagatgggtgatgatatcaacaagaagacacaaagagctgtggatgatcttagcaggggtatagtgaataagttgctctgggccaatgcaacacttgaggtgtgatggc

SEQ ID NO: 41283 - DNA, 271 bp, Glycine max
  unsure (1)..(271): unsure at all n locations; Clone ID: 701123926H1
ggntccaaaagccttggtcaagactcattcatgtctgttcctaatgaggaaaacttgtacatattcccagagaaagatggttcagtgatgcatggagtggaaagtctatcttgaacagccaacctttctatctgctatcaaatctttcttttataataaggatggagggaatcctaaatggcactcttcaacccttattttgttaccttaaataaatgaatcataaatgttagatgctagtcacagtagtataccttctatcatatttgta

SEQ ID NO: 41284 - DNA, 263 bp, Glycine max
  unsure (1)..(263): unsure at all n locations; Clone ID: 701123927H1
atttgtagtttgttttgtgctttagataaaagttctgccaaatcaagaggggttttaagatcatagtgtgtgttttgcaacaatggctaagttctttgctgctatgatcttggcactctttgccatttccatacttcaaacagtggtaatggctgctaatgaacaaggaggccacttgtatgacaacaagagcaaatatggnnntggaagtgtcaagagttaccaatgcccatcacaatgcncgaggagatgtagccagaccc

SEQ ID NO: 41285 - DNA, 275 bp, Glycine max
  unsure (1)..(275): unsure at all n locations; Clone ID: 701123928H1
gctagagtgtgaganctctagcatatactagtactactacattcctccatcttcctttttatttttcaccataaaaaaaccagagcacaaagatggtgagagctccttgttgtgaaaagatgggtttgaagaagggtccttgggctaccgaggaagatcaaattctcacatcttacatccaaaaacatggccatggcaattggcgtgccctcccaaagcaagcaggccttctaaggtgtgggaaaagctgcagactccgctggattaactatttg

SEQ ID NO: 41286 - DNA, 115 bp, Glycine max
  unsure (1)..(115): unsure at all n locations; Clone ID: 701123929H1
cataatctgacgacatacagagtcgatccatgtcaatcaatttcattggtctagttccgacacaatattaaaanngnaaacaacttttggtcatgcttcaattttccacacaaca

SEQ ID NO: 41287 - DNA, 280 bp, Glycine max
  unsure (1)..(280): unsure at all n locations; Clone ID: 701123930H1
tgggaancccataaagcccatcaccatttgcntgattggcgccggtggcttcattgggtcccacctctgcgagaagctcatgtacggagacccctcacagtgtcctcgccttggatgtcnacaatgacaagatcaaacacctcttggaaccccacacgctcccttgggnctctcgcatccagttccatcgcctcaacatcangcangattcccgtctcgaaggcctcatcaaaatgtcagatctgactattaatctggctgccatttgcnctcccgcgga

SEQ ID NO: 41288 - DNA, 279 bp, Glycine max
  unsure (1)..(279): unsure at all n locations; Clone ID: 701123931H1
tgcaatcctatctgaatcattcatcatcttcttaanagttaaaaaggccaaggtcctgaatctcacagagacagagagantgagtacngtgggagaagggaaggtgagtagtaatggtcatggatgttgcaaatcagggccaggctatgcttccccactggaagccatttctggtcccagagagtctctcatttatgtaacctctgtctacacagggaccggaatagagaagccagactatttggcgacatggatgtggatccaaatctccaattattt

SEQ ID NO: 41289 - DNA, 287 bp, Glycine max
  unsure (1)..(287): unsure at all n locations; Clone ID: 701123932H1
ctcctaacacccaccaaaccaaaaacgcttcctttaatcagaagattcagaacaaaacccatacaccaccattcaacaaagtttaatccttttcacttcaattcatcattgcctgntcgtttaagcacaaaagctatgccgaactgggagctcaggaactgttgtgaccacgaccagaaggtcttcattgcttgtgttgctgccttcaccgttgtaatcctcgtgctatggaggacctttctattacaccttttaagctcatcaccgtgtttctgcatgaagcaagt

SEQ ID NO: 41290 - DNA, 284 bp, Glycine max
  unsure (1)..(284): unsure at all n locations; Clone ID: 701123933H1
ctctatttccgtctcattttcactcactatggcttcggatgagaccatgaactttcactcttgttcgttacacnnnnnnnnnnnnnnnnnnnnnnnnnnnnnnnncccccacaacttgtcgaggctctccgtgtgcactggcagcacctttggtgtcgacgacgatgttgacaatctggcctccatgtgcgtgtcacacttgtccatcgaaagcttcgacgcagatggtgagttatcatccgactcagaaaacgaattgggaagttgttactctctgccctcta

SEQ ID NO: 41291 - DNA, 283 bp, Glycine max
  Clone ID: 701123934H1
gggctatttccttctcggcctcgttactcttgttcttgttaaatcttccaaagttacatgcgaagaagaatcagttaatacagtttcacccattattgacatttcactcaatcggaagagtttcccagaagggttcatatttggggcgggatcttcctcgtaccagttcgaaggggcagcaaaggaaggtggtagaggaccaagtgtatgggataccttcacccataattatccaggaaagatcatggatagaagcaacggagacatggcattgactcatatt

SEQ ID NO: 41292 - DNA, 278 bp, Glycine max
  unsure (1)..(278): unsure at all n locations; Clone ID: 701123935H1
gcgattcttgcttcaagttccagaaatgggtgtggctcaaaacattcccgatgcggaggagggaaccttggagattggaatggaatacagaactgtttctggagttgctgggccattggtcattcttgataaagttaagggacccaagtttcaagagattgttaacattcgcttaggagatggtacnactcggcgtggacaagtgctagaagttgatggtgaaaaggctgttgttcaggtcttgagggtacatctgggattgacaataatttacaact

SEQ ID NO: 41293 - DNA, 276 bp, Glycine max
  unsure (1)..(276): unsure at all n locations; Clone ID: 701123936H1
ggatgatacttgtttttttttttgttcacaaaggggtgtttttggtggatatgttgagaggtgctggcaacttttgcttagttcatgtcagccttgttcctgttttgaatgttgttggngaacagaaaacaaaaccaacccagcatagtgttcgtgcactgcgtggccaagggctgactccacatatcttagcatgccgcagcactatggtnctggatgagaatgcaaagggaaaactctctcaattttgcctaattccggcagaaaacttgttac

SEQ ID NO: 41294 - DNA, 274 bp, Glycine max
  unsure (1)..(274): unsure at all n locations; Clone ID: 701123937H1
gatgtagtgcgccagaccagagatcttctgctctttgttgctcgcagccccgaaacccgcgaaagcaaacgtgaggngaagcagatgtccgagctatttaaaaatatcagggagctaaagtcaatcctgtatggaaatagtgaatctgaaccagtnnccagaagcttgtgcgcagttgactacaggagttctttaaggaggacacgttgcgactgcttatcntnntctccaaaattgaatttggaggccagaaaagatgccatcaagttgttgc

SEQ ID NO: 41295 - DNA, 274 bp, Glycine max
  unsure (1)..(274): unsure at all n locations; Clone ID: 701123938H1
gatggtcactccatgcccctgttgtccatccaagtcactgaactagttgatggtgatgccttaggttgttccatgaaccacgctgtcggtgatggcacctctnattggaatttcttcaatacatggtctcagatctttcaatctcaagctaaagggcacgaaactgatgttcccatttcacaccaacctattctcagccgctggtttccgaatgattgtgctccaccaataaatcttcctttcaaacatcatgacgagtttatcagcagatttg

SEQ ID NO: 41296 - DNA, 271 bp, Glycine max
  unsure (1)..(271): unsure at all n locations; Clone ID: 701123939H1
cttttgagggttcgcgtgaagcgtggtgtcaaccttgccgttcgngatgttcgaagcagcgacccttatgttgtcatacaagatgtacaaccagaaactaaagactcgtgtgattaaaaaggatgtgaatcctgagtggaatgaagaccttactctttctgttataaatccgaatcacaaaattaaactgactgtgtatgaccatgacacttttagcaaagatgacaaaatgggagatgcagaatttgacatctttcccttatagaggcct

SEQ ID NO: 41297 - DNA, 269 bp, Glycine max
  unsure (1)..(269): unsure at all n locations; Clone ID: 701123940H1
taaggaccttggtttaaagaatgtgaggcattttatacttgatgagtgtgacaagatgctacgaatcacttgatatgagaagagatgtgcaagagatcttcaaattgactccccacgataagcaagtgatgatgttttcagctacactacagtaaagagatccgacctgtttgcaagaaatttatgcaagatcccatggaaatttatgtcgatgatgaggccaaattgactctcatggtcttgtccagcactatatcanttgcaagaga

SEQ ID NO: 41298 - DNA, 272 bp, Glycine max
  unsure (1)..(272): unsure at all n locations; Clone ID: 701123941H1
caccctttgccttgtttccactctctgctacgctcacacatcttccctaaccctacctgtgacaaaagaccattacaacacaccaatacctancaatcctctcttatggcacccctgttgagtctgcaaaatttgtgcttgatctcggaggctcactcctctgggctgattgtgcatccagaaccaccccatcttccaccctcgcccccattttccaccgttcaattcgctgcctcacagcaaagggtcctgaaattgagacccacaggtgg

SEQ ID NO: 41299 - DNA, 265 bp, Glycine max
  Clone ID: 701123942H1
gaaagaagcaaatggcaaactttccagttgttgacatggggaagcttaacaccgaagagagacctgcagccatggagattataaaagatgcctgtgagaactggggtttctttgagttggtgaaccatgggatatccattgagcttatggacacagtggagaagctcacaaaagagcattacaagaagactatggagcaaaggttcaaagaaatggtgaccagcaaaggtctgagtcattcatcagaaatcaatgacttggatgg

SEQ ID NO: 41300 - DNA, 269 bp, Glycine max
  unsure (1)..(269): unsure at all n locations; Clone ID: 701123943H1
gtagaaacacaaccctcttactcctcggatgttgacaatggtatagagaaggatgtagtcctatggagaagaaagaaaataaatataagcgttctagtctgcaacagtagcatgggtgttgatggaagtatttgaattcaacttcctcgctgtcgtctcatgggtggccatactcgttcttgcttcaatattcctctatgccaatatgcnncgacttttggggaaccaccgaacttgttgaggttggaagtgactgaagaaacaacaac

SEQ ID NO: 41301 - DNA, 206 bp, Glycine max
  Clone ID: 701123944H1
ggttttacaggaaacacaatccaagtgcaaccaatatgtttcagagacatggggactgagatgacaccgattactagccaagagccttcaagaactgggacaccaattagagccacaactcctgctactagaagcccaattcattcagggacttcaactccaatgaggggtcaaaatgggttgcaacaagttgctgagggtggcct

SEQ ID NO: 41302 - DNA, 272 bp, Glycine max
  unsure (1)..(272): unsure at all n locations; Clone ID: 701123945H1
cttggatcaaaggaagcatgaaggtanaagaggatttctgaaatngttgantgtgggagttggcttacctgtattattaggaggtgggaaagcttatgctgatgaacaaggaccttcctcctccagaatgtcttattctagatttcttgagtatttggataagggtagagttaaaaaagtggatctgtttgagaatggaaccacggctgttgtggaggctgtttctcctgagttgggtaatagggtgcagcgagtgcgtgttcaacttcctg

SEQ ID NO: 41303 - DNA, 275 bp, Glycine max
  unsure (1)..(275): unsure at all n locations; Clone ID: 701123946H1
tcganccgcacaaacctcggccncagacattgcagcactcaaagccttgggaggcctcaatanaaaccctcctncaanagcaanangtcangcctncgcctacatggaacttnacaaccgacccatgcncacnccctcgccgaaccnaccttcatctgcggcctcacctgcacccaagactccacaagaatcaaccaaatcactctcgacccagcagggtatcaggcacactcaccccataatctntcaatcacacaatnannagggtgacctng

SEQ ID NO: 41304 - DNA, 277 bp, Glycine max
  Clone ID: 701123948H1
aatggcacctgcaacactgtctctgtctctcctcctcctgttctcactcagcatcgccgtaaccgttagatcgagcgactacgactacgattgtgtgtacactgcatacgttagaaccggttcggtgttgaagggcggaacggactctaagatcgggctgaagctgtacgacaagtacggctactacatctacattaaaaacctcgaagcatggggcggcttgatgggcaagggctacgatattcgagcgcggcaacctcgacatcttcagcggaag

SEQ ID NO: 41305 - DNA, 283 bp, Glycine max
  unsure (1)..(283): unsure at all n locations; Clone ID: 701123949H1
aaaatgaggtgagcaaattacacaatgaattgaatgagaaaatatctganataaaatgtctgcaattggagctgactagacgagaagatgaagaagcaggtgattctgtggatagcttcaaaagactaattgaaactatagagaaggaaaacactactcttaagttggaaaaggatgaactncaggctgcgctacaaatcacgtaggatggctagtcaaatgtcacctgatgattctcagattcagaacaaggttccaagcagtaacagtgatgagcagttac

SEQ ID NO: 41306 - DNA, 282 bp, Glycine max
  unsure (1)..(282): unsure at all n locations; Clone ID: 701123950H1
cttgatcgtgcacgcacatatcaggttcttcgtgccaatgatgcngagtttgaagtgatatctacacgaaggaacaaatatagttgatatcaggaaccgttgctgtctttgccgtggctggcagctctatggtttgccctgtgcacatgctgtggcagcacttctctcctgcaggcagaatgttcatagattcacagaaagctgtttcactgttgcaacttatcgcaagacgtactcacaaaccatacacccaattcctgataaatctctctggaaggagta

SEQ ID NO: 41307 - DNA, 286 bp, Glycine max
  unsure (1)..(286): unsure at all n locations; Clone ID: 701123951H1
attgcccatcgctctctctannagttcacgcgcggcaattggagattcacgcgcnaccatggcctactccatacgagcctnncctatatacctcccaatcaagcgctgcangnngccggcgccncgcagtacccagcctccgatacgcgannccggcgttccgcgccttcatctcccgcatctcctacgtcgctccgccacgccttcgcgcaggccgcccgtggacggagctcatcgaccggagctccatgtcccgacccgacaccctcgccgaagcatatctcgg

SEQ ID NO: 41308 - DNA, 275 bp, Glycine max
  Clone ID: 701123952H1
tccaagttcagctctgttccagagacaaccagactgggtcatctaccatgagcttgtgatgacaactaaggaatatatgcgtgaggtcactgtcatagaccccaaatggcttgttgaattggctccaagatacttcaaagtggcagatcctacaaagatgagcaagcgaaagcgtacaagagcgaattgaaccactttatgacagataccatgagccaaattcatggcgtttgagtaaacgtcgtgcataatatgtattcatctatgttctcttt

SEQ ID NO: 41309 - DNA, 268 bp, Glycine max
  Clone ID: 701123953H1
acagcattagccattagcactataaataaatagagaacacgcgaaacacctgattcccctaccccagacgccgtagagtacagagagagagattcactgaaacagagcgcagaagaaaatacataaactaatccagaaaatgagcagcggcgctggaaaggtggtgtgtgtcaccggcgcttccggttacattgcttcctggatagtcaaattcctcctcaatcgcggctacaccgttaaggccaccgttcgcgacacaagtgatccg

SEQ ID NO: 41310 - DNA, 275 bp, Glycine max
  unsure (1)..(275): unsure at all n locations; Clone ID: 701123954H1
gcgaatagcgaaggtggaaatgtcgaaaggcggttcgcttcaaaaggacgtgccatggagagcatcgtacttcttctgcgaancccataccccaaaattcaccacagtccccttcttcgcgtatcccaaacacctgtttccgattacggtatctccgtcatgaggcatccggaccctataggtggtggattgggtcatgaggccatagtggaaccagctggccctgattgtctcgtacctggccagaaaatgcccatccaattacttggcctcca

SEQ ID NO: 41311 - DNA, 260 bp, Glycine max
  unsure (1)..(260): unsure at all n locations; Clone ID: 701123955H1
ctcagctcagttttcattcaaaacaaacactgatctgtgaagtgtgaaccacnaagcacgttttgttctatgccttggctttgttcaccatggactcttctaagagacttacattttcggaaccctttatgtcacaggggagaaaggtgatttctgggttcagtttgggcgttggagtttctctccttttcctcactcttatcttgctcaacagcacttccctctccgttcccaaggttcaagtgtttctccaaggatcc

SEQ ID NO: 41312 - DNA, 252 bp, Glycine max
  unsure (1)..(252): unsure at all n locations; Clone ID: 701123956H1
tgctgactatctaggcactgtccaccatgagtttacctnccactgttacaggaangaatagatgccattgaagatgttatctaccatattgaaacatatgatgtgactacaattagagcaagcacacctatgtttctcatgtctcggaagattaaatcacttngtgtcaaatgggttatctcaggagaaggatncgatgagatctttggagggtatttgtacttccacaangcanccaacgcccaanattcc

SEQ ID NO: 41313 - DNA, 268 bp, Glycine max
  unsure (1)..(268): unsure at all n locations; Clone ID: 701123957H1
gaaaggaggaaagtccaagaccgaatctaagagagccgatgccaaacttgctgtgaatanagaagggcgccgccaccaagactaggaaacccgccggaaaggggaaggcagcgaaagatcctaacaagccaaagaggcctccaagtgctttcttcgttttcatggaggaattcaggaaggtgttcaacaaggaacatcccgacaacaaagcatgtctgctgtgggcaaagctgctggagcaaaatggaagacgatgtctgatgctgaa

SEQ ID NO: 41314 - DNA, 267 bp, Glycine max
  Clone ID: 701123958H1
gcaaaagctagttcaattggagccaaagggattatgtatattagggctttacaatggaattgtcatgcgctatgtcaccgcttcaagtgcctacttgggaaagcaggaggatgctttagaatttgatttcttgtactaccgtagcagagacccaatgactcccaggctttatgaagacattcttgaagaggttgaacaacttgggatttttaaatatggaggactacctcattggggtaagaataggaattggcatttcaaggagtc

SEQ ID NO: 41315 - DNA, 270 bp, Glycine max
  unsure (1)..(270): unsure at all n locations; Clone ID: 701123960H1
gttgaattttgcatacccctcgagtatttttcagtttcccagaaaaattattggtgtggctagtcaaagttgtgagctttngtcccttttggttattatagtttgattccttcacttcaccaagttatataaacatgctgtatgtgttttggagtttcagctagagacttggacaattttggttgctattgtgtgcatcttggtctttgttctgaaggagattgtnatgggagggaagagctcaaaagggagtggtaggaggnatgattt

SEQ ID NO: 41316 - DNA, 270 bp, Glycine max
  unsure (1)..(270): unsure at all n locations; Clone ID: 701123961H1
caacacttgtttcttcagccatggccagtcaacctgaatcatctgacgcanagggcacaaaaagggattntagcaccgccatattagagcgtaaganggctccgaatcggctcgtggntgatgaagctgtcaacgacgacaactctgttgtcgcgcttcatcctgataccatggagaaacttcaactttttcgtggtgacaccatcttgatcaaggggaaaaaaagaaaggatacaatatgtatcgcattgctgatgagactgcgaggna

SEQ ID NO: 41317 - DNA, 277 bp, Glycine max
  unsure (1)..(277): unsure at all n locations; Clone ID: 701123962H1
ggaaaaaccgattaccgtgccaggnttcggttgattaatcaggacaagaacaaatataacactccgaaataccgatttgtggttcgctttagcaacaaggacattgttgcacaaataatatctgctagcattgccggcgatttagttcttgctacagcatattcacatgagctgccacgatatggtcttgaagtaggacttggaaattatgcagcagcttattgcactggtctcctgttggcccgaagagtcctcaaaacacttganatggatgagg

SEQ ID NO: 41318 - DNA, 276 bp, Glycine max
  unsure (1)..(276): unsure at all n locations; Clone ID: 701123963H1
gcgcanttcttctagatttaaggnngatgggtaaggaaaaggttcacatcagtattgtggtcattggcccatgtncgactctgggncatccactaaccactggtcacctgatttacaagcttggaggcattgacaagcgtgttattnagaggtttgagaaggaanctgctgagatgaacaagaggtctttcaagtatgcctgggtgctggaacaaacttaaggctgagcgtgaaagaggatcaccattgatattgcttgtggaatttgaaacaaca

SEQ ID NO: 41319 - DNA, 282 bp, Glycine max
  Clone ID: 701123965H1
ctcttgtcctagagaagttagaacttcaagtataccagagattagtaaagaagatttacatcattcaaaagcagagggacccaagcagagctcatcaggtgaagttagaagttattgttaaagcattgaaatggcttgaaattgatatggacgtggatgaggtagagtgtatagtggccatactgatatataagaatcttatgaaaggttactttgcccacaaaagcaaagttgttgtattgagcaagcaagaccccttccctaaattaaatggaaaacctg

SEQ ID NO: 41320 - DNA, 275 bp, Glycine max
  unsure (1)..(275): unsure at all n locations; Clone ID: 701123967H1
acaaactagagcgaganatattatagctcagggttttggggtatcattattcaaccatcaaccattttctctcttcttcttctctagtgagaaatttctctttcattgtgtgtggtcagtgagatgtatgtagcttccatgcgcaagtctttcaaggactccttgaaagtccttgaagctgatatccaacacgccaataccctggcctcagattttccaagggagtatgatggtgcatgccttcagatgagaatgtctacagtccagctgcacac

SEQ ID NO: 41321 - DNA, 273 bp, Glycine max
  unsure (1)..(273): unsure at all n locations; Clone ID: 701123968H1
ttatcatcttcaaatcgcaactttttcatttttcttacttttcanctctcttttacctttttcgtagttttcactaacactcccctattttagctctcacaaacttcgtacagtgacaatatgaagaaagttgtgttgaaggtggaaatacatgatgacaaaatcaagaaaaaagctatgaaggctgtctctggcattttaggggttgagttagtttctgcagacacgaaagacaagaaattgaccataattggggacattgatccagtaaaa

SEQ ID NO: 41322 - DNA, 261 bp, Glycine max
  unsure (1)..(261): unsure at all n locations; Clone ID: 701123969H1
ctctgacttgcttgcatactctctctgttctttctgttcacaaagatttgtaactttatatttatacataccatatatactatataatatattgtatgctccacttgtttgaagctgtgttgcatattctggatcctatcatcttgtggctttgatgtctagagcattggaacatgattacatagggttggcagagaatccgtcaatggacggaagctctgacaaactgtcttctgnggatggtaaaacctcatcatgaac

SEQ ID NO: 41323 - DNA, 267 bp, Glycine max
  Clone ID: 701123971H1
aacatagcagtcttctggaccccatagatgtttcttcatcttcagatgatgaaaatgaccttcctaatgatgatgtgtctaatcaattagtcctttatgatcctgtggtgaatggaaacaatgcaattgaacttgcacctgatcctctccagtgtgaacatccattgcttccaagaagcaaaccttcacattcagttcctagagttttgccttcagttggtgctttcactgttcaatgtgcatcctgcttcaaatggaggttgattc

SEQ ID NO: 41324 - DNA, 267 bp, Glycine max
  unsure (1)..(267): unsure at all n locations; Clone ID: 701123972H1
cttctgcttcaaggaaggagagcttgttattctctatcaacaaggannaatgtcaggtgaagaggttgttgttgcagctgagccanctgctgccatcccaggcgagcctatggntatcatgactgccttgcaacttgtgctcagaaaatctctggcttatggtggtcttgcacgangccttcacgaaggggcaaaagtgattgagcngcatgctgcacnttcngngntctagcagnagactgtgaccagcctgactatgttaaactg

SEQ ID NO: 41325 - DNA, 266 bp, Glycine max
  Clone ID: 701123976H1
gtttttgggctcctgtgccggtccgttaatggccgtaacgagtgaggcaaagcccaagtttagggttcgctgaaaacaagggagtgagtgttattgtaaaatttgcaggtgaagcaacagtgttacgattacgaagcaattacatgagcatgggggaagctcatagaaggatcacggagtatctgaatcgcttttccgacgcgatttcttcgcaagacggagctacgttcaagtctctcttcgctctctcttccaatccccattcc

SEQ ID NO: 41326 - DNA, 271 bp, Glycine max
  unsure (1)..(271): unsure at all n locations; Clone ID: 701123977H1
ctcagttgctgtcagcgagtgagtgagtcgtttctctgcagcaacacnggtttagccactccaaacagnacgggaaatgggtcgtggggtcagtgctggtggtggtcagagttccanggttatctctttggcagtggggtgcctgccagcagtgcaaacagtcagcctgcaaatggtgctacgcactacaaaatgctagtgctccttcaccaccagtcgataagcaaagtccagcaccagcaccagcaccagcacctgcancatcaccatt

SEQ ID NO: 41327 - DNA, 264 bp, Glycine max
  unsure (1)..(264): unsure at all n locations; Clone ID: 701123978H1
cttaaggggatcataaaaggaactgggtatttgtgtncatgtgacaactgcaaccagtacaaaggctnntaatgcatacgagtttgagcgtcatgctggtgccaagacaaaacatcctaacaatcacatatactttgagaatggaaaaaccatctatgctgttgttcaagagctgaaaaacactcctacaggatatgctttttgatgctattcaaaatgtgactggctctaccatcaaccaaaagaatttcgaatatggaaagc

SEQ ID NO: 41328 - DNA, 279 bp, Glycine max
  unsure (1)..(279): unsure at all n locations; Clone ID: 701123979H1
ctgaatccgtgcccnagcntctnccncctccgccantgcagcanggncacacaacctncgtacancaaacccaatnntccnaaggaacggattcgccatcatggggaagaagaagaagagagtttcctcgaaggtgtggtgttattactgcgatcgcgaatncgacgacgagaagatcttggtgcagcatcaganagccaagcacttcaagtgccatgtctgccacaagaagnnnnnccaccgccggcggcatggccaaccagaacctccagttcacaa

SEQ ID NO: 41329 - DNA, 275 bp, Glycine max
  unsure (1)..(275): unsure at all n locations; Clone ID: 701123980H1
cagaattagggtttatcaaatttaacccttttgcttctgccattgttgagttttcttctgcaatacgattgantttcaatatagggttggtgtagaaggttgttctgtgttctcgtgcgtggttaaattttggagatgagtgatgcaaaagagaatgatgaagcagggcagaatgtacccttgactgtggaggaaactcaggagttagttgaagcacaggttcaactagaagatttggctgctcctgtgtccaaaggggatacttcaaatctgtt

SEQ ID NO: 41330 - DNA, 277 bp, Glycine max
  unsure (1)..(277): unsure at all n locations; Clone ID: 701123982H1
gtgctgcaatggcttcaagtcaggannnaggtgacccttttgggagctactggaagcccatttgtgtgcagggttcanntgccctcaagttgaagggagttcaatacaaatatgtcgaagaaaatttgaggancaagagtgaactgcttctcaaatccaacccagttcacaagaaggttccagtgtttattcacaatgagaagcccatagcagagtctcttgtgattgttgaatacattgatgagacatggaagaacaaccccatcttgccttctga

SEQ ID NO: 41331 - DNA, 261 bp, Glycine max
  unsure (1)..(261): unsure at all n locations; Clone ID: 701123984H1
cgccagccagtgaattcaattgtaatggcatacagactccttacaccttctgncaaggttcaattattgatatatttcatgctcaaatatgtaatggagattttgctatcggaatctagtgtcgttacaacatactactncanncggtcaacaagcacagttgcagtttttcttgcttgccttggcctgacagttcttcctgtaaacannctgttggaagctatataagcaacatgttccaggacaggcaaattctgttgg

SEQ ID NO: 41332 - DNA, 256 bp, Glycine max
  unsure (1)..(256): unsure at all n locations; Clone ID: 701123985H1
gctaaattcnattattgaagccaaacgnaaaagagacaagancaaaggcaggtgtgganngacagaagaaagctctcatcgatacggtgttcaactttaaacactacaggaagagccacaaaattcttctttctgcagggtgcaaggtacagcttcgatgggaaattgctggggttctccacctacacaacccaanccncancactannnctannncttagtacaggtacgacggggacatctacaggcgatcagc

SEQ ID NO: 41333 - DNA, 269 bp, Glycine max
  unsure (1)..(269): unsure at all n locations; Clone ID: 701123986H1
gtgttgtcccctatttcatcttcatcatctacttctccatctgactttaaacttggtgatcacaattctaatgctcatgtcaaanaggcaggtttattaaaaactcaaaggccaagcctgaaaggtggcaaagaaatcaagcagcacagatatgcatttcaaacaaggagtcatgttgatatactggatgatgggtaccggtggagaaagtatggggagaagtccgtgaaaaacaataaatttcctaggtttgtcttacttcattaatt

SEQ ID NO: 41334 - DNA, 266 bp, Glycine max
  unsure (1)..(266): unsure at all n locations; Clone ID: 701123991H1
gcctatcctacctgatgcagggaggaacaccttcaacactttgctgcagcngagtcaagaacattcttggctctgctgtacaccaccgttgacanacaaactgtgtgcaactgtctcaaggcggatgctgctaggtacaacatcaatgaccagtatgctcaggcactccctggtttctgcaaggtcaatgtcccttacaagatcagccgctccactaactgtgcaagcatcaggttctgaacaagccatggacagatttgctcttt

SEQ ID NO: 41335 - DNA, 259 bp, Glycine max
  unsure (1)..(259): unsure at all n locations; Clone ID: 701123992H1
agaacaacgataacggcatgtttgagcgtacttgananatttgagcggccatggacgaaaccgccgtaatnacgaagcctgattggctcaacaaccgcgcgagggtcgccggagagagaaccgaagaatttttctgtggcggcgacgacgaagaggaatgcgacgacgaggcttgggacatgttgactcggagcttctggcangcgcagactgtgctggacgagaaccgtgcgctgatcgncgantgaacagcaaccac

SEQ ID NO: 41336 - DNA, 270 bp, Glycine max
  unsure (1)..(270): unsure at all n locations; Clone ID: 701123993H1
cantcagctatggcaggcattcgaatgatagatatagccgtcaacttcaccgatggcatgtttangggaatctatccacggcaagcaatgtcacgtctcggatattgcaactgttttgaacagagcttgggctgccggcgtcacccgaattattgtaactggtgggtctctagaagaatcaagggaggcacttgccattgcggaaacagatggaagacttttctgcacagttggagtgnctccaacacgttgcaaggaatttgaggagag

SEQ ID NO: 41337 - DNA, 201 bp, Glycine max
  unsure (1)..(201): unsure at all n locations; Clone ID: 701123994H1
ctcggatttatcgcacctagcttcctttgttgcaatttcggtcncgttgctctgattctgattttatgtgttccaatctctggcctgcctgcctgcattcgccattctattttttcagatcatcatagcctagccgtattacactgttgaatcaaaactgtgtcggaagattcttaactttccacacaacatanatnnncc

SEQ ID NO: 41338 - DNA, 275 bp, Glycine max
  unsure (1)..(275): unsure at all n locations; Clone ID: 701123996H1
gaaggataggcataatggaaacctcctattggatgaagaaggtcatatcatacatatcgattttggcttcatgctttccaattcacctggtggtgttaactttgncaagtgcacctttcaaattaacacgtgaacttcttgaggttatggattctgatgctgagggtgttccgagcgagttctttgattattttaaggttttatgcattcaaggcttccttacttgccgcaagcatgctgagcgcatcatcttctgttgagatgttgcaggattc

SEQ ID NO: 41339 - DNA, 267 bp, Glycine max
  unsure (1)..(267): unsure at all n locations; Clone ID: 701124001H1
attctgttttcatagtgacgaacttctgaagaaatgggcaaatcatcctttgacacactctcactctttccgcgagaggtttgatgncaactctcactggtcacaggaacgaaattttggcccttctgtcaaggcttgaagccaagggcaagggaatcctgcaacatcaccaagtggttgcagagtttgaagaaatccctgaggagagcagaaagaaactccaagatggtgtctttggagaagttttgagatccacacaacatacgc

SEQ ID NO: 41340 - DNA, 262 bp, Glycine max
  unsure (1)..(262): unsure at all n locations; Clone ID: 701124003H1
ccgataaatcgctatgactgctcagacccaagaggtgcttcttgcggccgaccttgagcaacaaaagatccatgatgatgagcctgtannnnnnnnnnnnnnnnnnnnnnnnnnnnnngacgacgatgaggatgacgacaatgttgaagaaggtgatgcatctggtaggtccaagcagaccagaagcgaaaagaagagtcgcaaggcaatgctcaaacttggaatgaaacctgtcacaggtgtcagtcgtgtgactgttaag

SEQ ID NO: 41341 - DNA, 270 bp, Glycine max
  unsure (1)..(270): unsure at all n locations; Clone ID: 701124005H1
gtttncncncccacaatnccttcaccaaaaccactgatcaactcatccncacaannaaaaatnngaananaancanacnncaaacnatangancaacatttccacnatagaaaagctangaatnccacttcccatatcatgncagccacatgtcatcaccannnnccatttgatgatgatgaaaaatctaccctaagtggtgattggcgancttnccgagcaaaactggngncnggagaacaattgacaaggcctgttgaggaggtttct

SEQ ID NO: 41342 - DNA, 265 bp, Glycine max
  unsure (1)..(265): unsure at all n locations; Clone ID: 701124006H1
ttngactcgaacaatacataaccctaacgaaacgtctttgagcggcaagttagnnagcaacganttcggaaattgatgcnctgatgagctgccatgtgcgttagggtttgcgttttgcattcaaattccaaattccaaattccangttccaaacactctctttctcantttgacgatgagcattgttcccaaagagacgattgangttntcgcgcagagcattgggatcaacaatctgtctcatgatgtcgctcttgccgtcgct

SEQ ID NO: 41343 - DNA, 266 bp, Glycine max
  unsure (1)..(266): unsure at all n locations; Clone ID: 701124007H1
cacttatgctagtggtggtggttggctccatggtggcttcctgtggtgctaacttcaacccaagactttgatctaacatggggtgatcaccgtgctaagatattcaatggtggtcagcttctatctctttctctggacncagtctctggctccggcttccaatccaagaaagagtacctatttgggaggatcgatatgcaactcaagctcgttgctggcaactctgccggcactgtcactgcttactacttgtcgtctcaagggcc

SEQ ID NO: 41344 - DNA, 267 bp, Glycine max
  unsure (1)..(267): unsure at all n locations; Clone ID: 701124008H1
tgcgaaaccgagagagcgaaggggcaaacacaattttttttatcttcttttttattttttgtnnnnnnnnnnnnnnnnnnnatgttggggatcttcagcagttcagtggtgtcgccgccggaggagctggtggccgctggcagcagaacgccgtcgccgaagacgacggcggggaagctgctgaaccggttcgtggagagcaaggcgtcggcggtgtcgctgcaggtgggggaacacgtgcagttggcttacacacaccacaacgaa

SEQ ID NO: 41345 - DNA, 273 bp, Glycine max
  unsure (1)..(273): unsure at all n locations; Clone ID: 701124009H1
ctngtgtntgttctgctgagantccgatacacatcnaggaatccgctatctatgggctttnttaacggaggcgcnaaacgcgtttgtgtatccataaggcactattgttcgaattcagcgtcagagaaggtgaatctgatnaagcagctgagagagagaacaagcgcagtatgaaggacgtgaaagcggctctggtggattcgaattnggacatagaggaagctcagaaggaactgaggaaaagaggcnnagttttggcgtccancnaatcct

SEQ ID NO: 41346 - DNA, 138 bp, Glycine max
  unsure (1)..(138): unsure at all n locations; Clone ID: 701124010H1
atttccantaccncacncacagantccnagaanccaaaaanacncagaganacntaacccaaaccgagagcgntnantaccagaaggccgttgagaaggcgaagaagaagcnccagaggctncatcgctnagaagaga

SEQ ID NO: 41347 - DNA, 267 bp, Glycine max
  Clone ID: 701124011H1
ttcgaggggacacaaatgatttattttatttatttaaatcctaaacaaaagcaaatacttagcgtgtagcagcggtggaaggaagagaggattgatttgattgtttctgattctgaaacccctcacagtgtcctggccttggatgtctacaattgacaagatcaattaagccactcgaaggcctcgtcaaaatcgcagatctgaccattaactctggacaccatgtggtgcgtctctctctctgtcttttttattgtgaaaattgga

SEQ ID NO: 41348 - DNA, 267 bp, Glycine max
  Clone ID: 701124012H1
gccaattcagatggatatcctctcagatgaaccgtgtgaggaacggagagctctaccgtgtcatctgtgacacaaggggtgcctttgtgcagcctgcagtttatgaggcctttgggttgactgtggttgaggccatgacttgtgggttgccaacgtttgccacatgcaatggtggtcctgctgagatcattgtgcatggaaaatctggttaccacattgatccttaccatggtgaccatgctgctgagatccttgttgagttctttg

SEQ ID NO: 41349 - DNA, 267 bp, Glycine max
  unsure (1)..(267): unsure at all n locations; Clone ID: 701124013H1
ataggactgatctttacaagacatacttactttattgtctaactggtgaagtgacaagggttccatttggtgctcagatcactactaagaaggatgattctgagtatcttcttctaaatcagcttggtgggatcctgggattgagtagtcaagaaatagtggaagtgcacaggggtctagctgancaggcttttaggcaacaggctgaggtaattttagccgatggacagttgacaaaggccagggtggagcagcttaataacctcc

SEQ ID NO: 41350 - DNA, 267 bp, Glycine max
  unsure (1)..(267): unsure at all n locations; Clone ID: 701124014H1
ttttctcctctcatggcttcagattccaaaaaggatttccctgctgtttgcatttgtgtgtaggcatgacgaagaatgactcagctggaacagaagagagtaaaacatccaaagatgagacttcatctaaagattctccagcagaacaaagagcnacagtacttttggacctagacctggacctgctgggcatccaggcaacccttttgatctctcagcaatgtctggtctgctcaatgatccaagtatcaaggaattggctgaaca

SEQ ID NO: 41351 - DNA, 269 bp, Glycine max
  unsure (1)..(269): unsure at all n locations; Clone ID: 701124015H1
aaaaattccacacactgcagagtntcgactctctatggcggaagattgggatctacatgcggtggttagaggctgctccaccgttacatcatcctcagtgnnnnnnnnnnnnnnnnnnnnnnnnnnnnnnnnnnnnnnnnnnnnnnnnnnnnnnnnnnnnnnnnnnnnnnnnnnnnnnnnnnnnnnnnnnggcttcaacatcttcaagggtgaacaaggaataagccaagttttgtcgctctctgcgtaccccttgaggcaaggagctc

SEQ ID NO: 41352 - DNA, 261 bp, Glycine max
  Clone ID: 701124016H1
gagagactgttgatatagaaaggtaggataaaccagtggccaaggaatatatggcgttttctatggttttcattgttagcaacattatgctgcttttcagttcagcatttgccaaaactgctagtcctccctctctgagcccaactccagcaccagccccggcacccgactacgtgaacctcaccgagttgctcagtgttgctggtccatttcacaccttccttggataccttgagtccaccaaagtgattgacactttcc

SEQ ID NO: 41353 - DNA, 259 bp, Glycine max
  Clone ID: 701124017H1
gcatttactacattgttaggattagtgttgtgccttttttggaatgttatagctgttactgctgcttggattaagggtgaaggtgtaaaaatatggtttcttgccattatctatttcatagcaggggttcctggagcatatgttctgtggtatcgcccattatatcgtgcttttaggaatgaaagtgctttgaaatttggatggtttttccgttttatctgcttcacataggatctgcatcttagctgcattgctcctc

SEQ ID NO: 41354 - DNA, 201 bp, Glycine max
  Clone ID: 701124018H1
caagagaggagacatgcttaacttcaacccaacacttcaagtacttgcttcttcatacccttaccagatcccaaaggtcacgatctaattttaagtgattagtctgatgagcattttgaaggttacatgaagcaatttctctttttgaatcttcctgacaccgagatcaattgttcacaagttgattgcaatcactcaatg

SEQ ID NO: 41355 - DNA, 245 bp, Glycine max
  unsure (1)..(245): unsure at all n locations; Clone ID: 701124020H1
cactgttattctctgaattttctanaccatctacaactnncagnngnantgnaatatggaaactgaaaagtctaatgtntcaaaggctgaagaatttaaactccttgccaatgaagtgttcaatgctcgaaaatactcccaagccattgatctatatacacaagcaattgagctgaacagtcaaaatgcagttnacttntctaatcgngccttngcccatcttcggcttgaggaatatggtagtg

SEQ ID NO: 41356 - DNA, 265 bp, Glycine max
  Clone ID: 701124022H1
gcttaggctagggttcagaaacgaaaaagggttcggtgttcagttcgcgatgagagccaagtggaagaagaagcgtatgaggaggttgaagaggaagcgccgaaagatgagacagagatccaagtagtgcgttaatccaagtagttgatttccgttgcttttataattatgttgtcaaattgggcacccagttgttagaggcactggtttctcctttttgatgttttgatacatttttgtttggtttaattcgtcttatgttatt

SEQ ID NO: 41357 - DNA, 267 bp, Glycine max
  unsure (1)..(267): unsure at all n locations; Clone ID: 701124024H1
gnacgatagtnatggaaatcaagcccggtttgtcantactcgttaccggtggtgcctctggaatcggcaaaggtcttgcactagctcttgcagagaagggtgtatttatcacgatcgtggatttctctgaagaaaagggaagacaagctgcaatcctcgtcgagaaaattaactccaattttcattctaagttaggatttccgtctgccatatttgtgaaatgtgatgtgagtaatgcaagggatctagctgctgcatttgaaaagc

SEQ ID NO: 41358 - DNA, 268 bp, Glycine max
  Clone ID: 701124025H1
ccaccacctcgctctcttcttccctgcttcacaatttttattttaatgatactattttgttattgttaagacggcatcatcagggaaatggatcgggtgaagggtccatggagcccagaagaggacgaggctttgcggaggctggttcaggcccacgggcctcgaaactggtcggtgataagcaagtccgttccgggacgatccgggaaatcgtgccgcttacggtggtgcaaccagctctcgccgcaggtggcccaccgccccttct

SEQ ID NO: 41359 - DNA, 269 bp, Glycine max
  unsure (1)..(269): unsure at all n locations; Clone ID: 701124026H1
tttatatctaccctaaagaggagatccagaaaatgagcccaggtacactgagctcgaaaaaatgaagagaaccagtncggtgatggctagtgatggtgcagatgcaaaagttgttaaatgtcagccacatcaaaagttcaattcagaaaatggccttgacgcctaatgattagtagattgatttccatagctttcagattctgggatggaaagtaaggaactgtcatgaagccatccatccagttggaaaacataacttgaagatgaaa

SEQ ID NO: 41360 - DNA, 259 bp, Glycine max
  unsure (1)..(259): unsure at all n locations; Clone ID: 701124028H1
ggctacggcaatttctcagcttggctgcttctccgccgtccaccgcagctcacacctccggcggcgctcgcttctattcccttgccctcgctccaagttatcagttgttatgagtctggagaggcatgacacagatactgctgggtctgataccaaaaatacnctaagttatgcagctgatgtgtcaaagctacatgttgaagaaaaaaagcactcatattctacaaaagatggccatgatactgaaaaattaggtttt

SEQ ID NO: 41361 - DNA, 248 bp, Glycine max
  unsure (1)..(248): unsure at all n locations; Clone ID: 701124029H1
tgttgatcagttcaaacagcagtantctcatctcgaggaatatggtggtaanngttatccnattatgccacttgaaagaaagcatgcatcacttccaagggccaacaatggtacattcaaatatggtaccctcgaaagagcaatcaaacattgcttcctgcataaaccggcagacaactggggaatttaataataattccagggatacagaaagtcctgcgccaaggtctattccgggtctgcaaaaa

SEQ ID NO: 41362 - DNA, 141 bp, Glycine max
  unsure (1)..(141): unsure at all n locations; Clone ID: 701124030H1
cggcncnancntggctttcacgtttaccttcncancgctctnnctctctgaaccctaatttacacacacncccaanactccnancccncncnccaaccatggcgatcaactctnccaagaatccagatggttctgtccaaa

SEQ ID NO: 41363 - DNA, 237 bp, Glycine max
  unsure (1)..(237): unsure at all n locations; Clone ID: 701124031H1
gggcactgcccctctntttggacccaaggtangcttcggacggtcgatccgggcggaagacattgtcacgtggggagtttggctggggcggcacatctcttaaaagataacgcaggtgtcctaagatgagctcaacgagaacagaaatctcgtgtggaacaaaagggtaaaagctcgtttgattctnatttccagtacgaatacgaaccgtgaaagcntggcctatcgatcctttag

SEQ ID NO: 41364 - DNA, 269 bp, Glycine max
  Clone ID: 701124032H1
ctttttggtttcttgaagatgtcgttactctccgatcttatcaaccttaacctctccgacatcaccgataaggtgatcgccgagtacatatgggttggtggatctggcatggatatgaggagcaaagcaaggactctctcgggactggttaatgacccttccaagcttcccaagtggaactatgatggttccagcactggtcaagctcctggacaagatagtgaagtgatcttatatccacaagcaatttttcgggatccattcaggag

SEQ ID NO: 41365 - DNA, 203 bp, Glycine max
  unsure (1)..(203): unsure at all n locations; Clone ID: 701124033H1
ataataaccctcaaactccatttcactcacagaaaaatagagatatagagagagaacgtgctgcagaatacacacatacaccacttcttcgagagaggtgtgtgaaggaaaataagaactgaaagaaaaattgttttgcaaaggaagatatgancactttgcaaatttaacagctgagaaagaagatctgtgatttctctctc

SEQ ID NO: 41366 - DNA, 259 bp, Glycine max
  unsure (1)..(259): unsure at all n locations; Clone ID: 701124034H1
gccccactcaaccaccacacctctcctcgttcacgctacccctttctgctcttcttctacctttcaagttttaaaagtataaagatggcagagacattcctatttacctcagagtcggtgaacgagggacaccctgacaagctctgcgacnnaatctccgatgctgtcctcgacgcttgcctcgagcaggacccagacagcaaagttgcctgcgaaacatgcaccaaaaccaattggtcatggtcttcggagaaatcac

SEQ ID NO: 41367 - DNA, 261 bp, Glycine max
  unsure (1)..(261): unsure at all n locations; Clone ID: 701124035H1
gtccacnaccatcataccattataccttaccacccttcccttctctcttttatacacacacaggaaagaaagagggagaaaacaaaaacaaaatcaaaaggtggtagatgcatgagccacaacacaacacacattatctcttaccacactcaccaccttgtattccccaaaattcacataattctccntctcttgccttttccctcagatttctcaccccttctctcttctgtgttcccacccttttcaggtactcttcct

SEQ ID NO: 41368 - DNA, 217 bp, Glycine max
  unsure (1)..(217): unsure at all n locations; Clone ID: 701124036H1
acgccacacacactgcatcantcttcttctttcaatcatcattttcaaaaccatttctactttnccnnncatggcttttcttgtattcctattccnattcctattagggttccacagaatntaccnaagcaacaannnagccggnggngcctgatgntgcngagnacncttncnccgacnagnacgacggnccgccgntnacctgngacntcgtcac

SEQ ID NO: 41369 - DNA, 262 bp, Glycine max
  unsure (1)..(262): unsure at all n locations; Clone ID: 701124037H1
ggaacatatcaccgattgatgtcatcactcatgttcctattctttgtgaagagtctgacantccntatatttatgtcccatctanagaagatcttgcaggcgcaggagcaacaaagaggcctacttgctgtgttctggtacagacaaagcctgcaaagggtgaaatagagcaaggggaacaagagaaactaaagtcagattatgatcaagttgtagcggaagttactgagcttacaacttcactcttttgaaacangcacac

SEQ ID NO: 41370 - DNA, 261 bp, Glycine max
  unsure (1)..(261): unsure at all n locations; Clone ID: 701124038H1
ctgcactataccagaatgtctcagggaagaggcagtgcatctttgcctattgtggtcactgtggttcatacngtgccttttggaacgtgctaacgcagcaacttactccgttggaggacctgggggatggaccttcaacactaatgcttggcccaatggannaagattcagagctggtgatatcctaatcttcaactatgactcaacgacccacaatgtggttgctgtggacagaagtggatacaacagctgcaagacacc

SEQ ID NO: 41371 - DNA, 266 bp, Glycine max
  unsure (1)..(266): unsure at all n locations; Clone ID: 701124040H1
gtccttttctggtttcattcaaagcagtgccatcaatgggaacataacatagcaattaagcaaatgatcttcacaagacatggcatcnctgtgtctaaactcattaccagtcccaccaannnnnnnnnnnnnnnnnnnnnnnnnnnnnnnnnnnnnnnnnnnnnnnnnnnnnnnnnnnnnnnnnnntcttagtcccttgaaacccattgttgtcagtggagaccccccaacttttgtttctgctcctggtcgcagaattcttgctg

SEQ ID NO: 41372 - DNA, 266 bp, Glycine max
  Clone ID: 701124041H1
ctggaacgaggtgatgaaggaaacaaagcctggtccacttttgaaaacccaatcagcccgttgtatggactgtggtactcctttctgtcatcaggaaaactctgggtgtcctcttggaaataaaataccagaatttaatgagttagtataccaaaataggtggcgtgaagcattagataggcttcttgagacaaataacttcccagagtttaccggtagggtatgcccagcaccttgtgaaggttcttgtgtccttggtattattg

SEQ ID NO: 41373 - DNA, 269 bp, Glycine max
  Clone ID: 701124042H1
gcgaaatcccaatcccacacaaatggcatgctcagccacctctgcttctctcttctccgcaaaccccacacctctcttctctcccaaatcctccctctccctccctaacaactctctccacctcaaccctctccccacgcgcccttctctctccctcacgcgcccctcgcacactcgccgctccttcgtcgtcaaagcctcctccagcgagcttccgctagttggaaacaccgcaccggatttcgaagcagaggctgtgtttgaccagg

SEQ ID NO: 41374 - DNA, 175 bp, Glycine max
  unsure (1)..(175): unsure at all n locations; Clone ID: 701124043H1
gtttggaatcaccacaacaaccaccagggttaataatgttcctcctcgtaggtttagttgttcagcatcgtcatcttcttcctcttccactcttccctcagctcttctatttgactgtgnctgagtccttgtggatactgagaaagatggtcaccgcatatctttcaaccaaacc

SEQ ID NO: 41375 - DNA, 237 bp, Glycine max
  unsure (1)..(237): unsure at all n locations; Clone ID: 701124044H1
gttttgctctacgcctctaccctctctctcaaganatngttcacttcgattttagggttttgttttgctgctgcctccgtnccccccttctcataaacnacgcgttttctcttctgcttcgtatctatnctttgcttttggttntggttgattcaaggccttcacagcattcgttgcggcattttaatcgatttatccaagcnggactgaatgaactaatggngtctaaaggtggga

SEQ ID NO: 41376 - DNA, 266 bp, Glycine max
  unsure (1)..(266): unsure at all n locations; Clone ID: 701124046H1
gtttggtcggaataagattcaaaacgctgtttttttgcagtttcttcgattctctctttctctttcttcagaaaaattaaacccattcnnnnnnnnnnnnnnnnnnnnntcatttccaatcacaatggcagatcaactcaccgatgaacagatctcggagttcaaggaagccttcagtttgttcgataaggatggcgatggttgcatcacaacaaaggagcttgggactgttatgcgttcgttgggtcagaatccaacagaggctg

SEQ ID NO: 41377 - DNA, 248 bp, Glycine max
  unsure (1)..(248): unsure at all n locations; Clone ID: 701124048H1
ggagtgagagagagtgttcttcgantgctaccttctcccagccaatggttacgttcaggtttccaccagtaccaggtggtcgggagngctctcccaacggaagcagatcagcatccgaagatctaccgaatgaagctctgggccaccaacgaggttcgcgccaagtctaagttctggtattttttgaggaagctgaagaaggtgaagaagagcaatggtcaagttcttgctatcaacgagatttttga

SEQ ID NO: 41378 - DNA, 260 bp, Glycine max
  Clone ID: 701124049H1
ggagtttcaagggttaccggaaggttgcattgctagtatactctctcgcactacgccggcggacgtgtgtaggttttccgtcgtatcaaagattttccgttcggccgctgaatcggacgctgtgtggaaacgttttctcccttccgattaccattccatcatttcccagtctccttcgcctctcaactatccttccaagaaggagctctatctcgctctactcggatcgccctatcatcatcgatcagggtaaaaagagc

SEQ ID NO: 41379 - DNA, 259 bp, Glycine max
  unsure (1)..(259): unsure at all n locations; Clone ID: 701124050H1
cgaagttgcagaaagaagaagaaaaatggtggctgacaggagcaagaagccgaaggtctccgacaagggcgaaaacctcgangaaatcgacggagaactcgtcctctccatcgagaagttgcaggagatccaagacgagcttgaaaagatcaacgaggaagccagtgacaaagttctggaaatagagcagaagtacaatgagatacggaagcccgtttatgataagcgcaatgatattatcaatgccattcctgatttc

SEQ ID NO: 41380 - DNA, 250 bp, Glycine max
  unsure (1)..(250): unsure at all n locations; Clone ID: 701124051H1
agcgtttctgcaaattccaattttccaaaataaaaaacaaaaacgggcgtttgaaaaaaagctgttattaattcgggagcgatatggaggtcgtactcaaagagttgcacgccgatcttcaatctctgagccaatcgcttcccgatccatctcaccatgatttgctccgcaagattcaattgcgtgttgaggaccttgcgaanttgcagaggctgcacctgttcgtcgctctaaagttgaggatatgagt

SEQ ID NO: 41381 - DNA, 261 bp, Glycine max
  Clone ID: 701124052H1
gcactcgtctggagtcaagactctggaggagccttatcccgatccgcaagaacacgcaaacaccgatcaattaattttctttatgctagatggggagtgcatcagagttcgacccagcgcttgcgctttcccacaaattccctgatactacgtactcttataccgaaagggatgcagcactttatgccctaagcgtaggggtgtgtttgtcggacgctgttgacgctgatgagcttaaatatgtttaccatgaaaatggtc

SEQ ID NO: 41382 - DNA, 262 bp, Glycine max
  unsure (1)..(262): unsure at all n locations; Clone ID: 701124053H1
ttatgttgcatctgctttgagcaggtgtgcacaattgaagttcagaactgtggccaccagatgtgtgcacaatgcacactagnccctgtgttgccacaacaagcccaaccctgccactgcctgtcttactccaccagtttgtccattttgtcgaagcaccataacaagacttgttgttgtgaagacggaatgccacgatgaaactgatcaagacagtgttgatatcaactgttccaagctgagcaagtcatcaaggaaactc

SEQ ID NO: 41383 - DNA, 256 bp, Glycine max
  unsure (1)..(256): unsure at all n locations; Clone ID: 701124054H1
tccgggttcacgtttcacaatcactttttgcgcttctctacactcactcactctancttcttcctcttcgtgtggttttctttctcgaactcgaacgaagatgcgtgagattcttcacatccagggancgcaatgcgggaaccagatcggagccaagttctgggaggtggtgtgcgcggagcacgggatcgattcaacggggaggtaccaaggggacaacgagttgcaactcgagcgcgtcaacgtctactacaat

SEQ ID NO: 41384 - DNA, 263 bp, Glycine max
  unsure (1)..(263): unsure at all n locations; Clone ID: 701124055H1
acgaacacacgacacnnctcaactgtctcgcttcgcttctcccttcaaacattcaccaaaacttcttcacttcccggcaatgagagataanggttccttaacatggagtagtgattntttgaagcaattgaatctataccgccagagggtttggatgtgtaaagtcactggaaaaactggcttgacttatgaagaggctttggtgtctgaacaacttgctaccgagaaagttcaacagtttcctaaagaactgatgactgttg

SEQ ID NO: 41385 - DNA, 265 bp, Glycine max
  unsure (1)..(265): unsure at all n locations; Clone ID: 701124056H1
gcttgagccgcctttggtcaaagctgtagaaactgcagaagctatggtgctcatcccttctgtnggtggattgccagtgcagcctaaaataccgaacctggccttagagatagtgctttccattaatgtgtcttgtaattctggtttttgtcatcgttgtatttgtttcgtggagaactattatgcatgaataacttccaggagggatattctgcaagttacaccaatgttaagtttttgatgtcctaaattccaataaattcct

SEQ ID NO: 41386 - DNA, 265 bp, Glycine max
  Clone ID: 701124057H1
cgcttgtttactcactttgagtctgctgatttttcttccccatatcaaagcaagtcaagctaataaacttgatgagttgatcctatctaggagctcacataatcctcctgtgaccctttcttgggcagaggaagatgcattgaaaatgcattctgctgcttatgttgcgccccaagagggactaaggcaagctgacaagattgtcacactgcctggccagccacatggggtgaactttgaccaatattcaggccatgtcacagtt

SEQ ID NO: 41387 - DNA, 264 bp, Glycine max
  unsure (1)..(264): unsure at all n locations; Clone ID: 701124058H1
ggnaatgcaacttacttgttgatataaacttcagacagagcgagttgttgtaaagctagccttgttgcagccatggccacccacgcggctctagcttctacaaggatccccactaacaccaagttcccatccaaggcttcacactctttcccaacccaatgcgcctcaaagagacttgaggtgacagaattctctgggctaagatccacttcatgtgtgacatatgctaacgatgctagagaatcttccttttttgatcttgta

SEQ ID NO: 41388 - DNA, 157 bp, Glycine max
  Clone ID: 701124059H1
ggaagacctaaggtatgcagtgtggaaactcagtagcaagcttaagaggaatagctttgctatggttacgttctttgagatgagagtcttgatgaacagtaccattctgatgtattgctttccttgaaagttaatgcatgcttcttatcttctgtct

SEQ ID NO: 41389 - DNA, 264 bp, Glycine max
  Clone ID: 701124060H1
gcagtcatagaggcagttgatcaccaacaagctggtggctggtctgctaatgttactggcaacgtcactggatcagttgatgtgggtgaggccaaggcagctagctctattgtgatgcagaaagctgaagtacctgcaggacgagcttggaaacctgctcctggtgtcaaaccaaaatctttcttagaaattcaacaggaagaacagaggaaggcagagactgaaatgcttgtatctaatattgctgtttctgtcaattcaatg

SEQ ID NO: 41390 - DNA, 264 bp, Glycine max
  unsure (1)..(264): unsure at all n locations; Clone ID: 701124061H1
gcggattcttctcgggaggagaacgtttacatggcgaaattggcggagcaggccgancgttacgaggagatggttgagttcatggagaaggttgcaaagactgtggaggttgaggagttgacggtggaggagaggaatctcctctctgtggcttacaagaacgtgattggtgcgaggagggcttcgtggaggatcatatcctccattgagcagaaggaggagagcaggggcaatgaggaccacgtggccattataaaggagtac

SEQ ID NO: 41391 - DNA, 265 bp, Glycine max
  unsure (1)..(265): unsure at all n locations; Clone ID: 701124063H1
ggggattagggtttaggaagcagcgacaacaatggatttcacagtggagaagaaggaatcagagaacaacgccgaaaatgctcacccaacaacgttagnttcttcttctcaattggcatcggcacttgattccaacaacaaagaaatcgcagaacgacaagctcgtgaactcaaagccggacttcaccccctaaagcacaagtttgtcttctggtacactcgtcgaacacctgggagttcgaaatcaaacatcatatgaggacaa

SEQ ID NO: 41392 - DNA, 265 bp, Glycine max
  Clone ID: 701124064H1
tctacccatgggagacttttaaagggttgcgtgaaatcgggactggggttttgctgtccgttggaggtgctattttcatcaatgtgtttctcagtcagagtactcgtcccggaaagtttccatctatactttttccaattgaaattaaaaatatccaacgcggcaaacacggcagtgacactggagtctacgatactgaaggaaggtttgtaccttcaaaatttgaagaaatttttaacaagcatgcacatacacatccaaatgc

SEQ ID NO: 41393 - DNA, 257 bp, Glycine max
  Clone ID: 701124066H1
ccgaggggaagatactcgttatggtttcactggctatctctacaatgtccttcgggaaaggggaattcacaccttcattgatgacgacgagccccaggaaggggacgaaatcacgacagcacttgaggcggctattgagaagtccaagattttcatcatcgtgctctctgaaaactacgcatcttcctccttttgtttaaactcactcactcacatccttaactttactaaggagaataatgatgtgttggttttgc

SEQ ID NO: 41394 - DNA, 257 bp, Glycine max
  Clone ID: 701124067H1
ccagtgttagtgtgtatttcctctcttctcactccgggatcgatattttcaagaacagatcgaaaagccgttcatcgatttgttggatctgtgagtgagaagatggttactaagacagaggagactcaattgaacaggctcgaaaaccaggtcgataacggcggcggcggcgcgtgggagtacctctgcctcgtgcggaagcttcaaagttcggcggtcggagaaagttctgaagcacggtctctccatcttgaacg

SEQ ID NO: 41395 - DNA, 259 bp, Glycine max
  unsure (1)..(259): unsure at all n locations; Clone ID: 701124068H1
gaaaaccacactcttctcactctctcccttattcctgttcctactcttctccctagtcgaaggactcacccccaaatgtgacacccaagaccatggctcaacccttgaagttttccatgtgttnagcccctgttccccatttaggccaccaaagccactttcatgggcagagagtgtccttcagctgcaggccaaggaccaagccaggctgcagttccttgccagcatggtggctgggaggtcagttgtgcccattgcc

SEQ ID NO: 41396 - DNA, 262 bp, Glycine max
  unsure (1)..(262): unsure at all n locations; Clone ID: 701124069H1
caaagctaatgctccttcttcttcacatgtcattttcaattttgcacgtgtggacagatattggttttctactcaacccgcnctancagcttcccgcgagcaagatcgtggacgtgccgttggcacaaactggtgaaggcatcgcagaatgtgagcttctcaaatggtatgtacaagagggggattatgttgangactttcaaccactttgcgaagtccaaagtgataaagctaccatagaaattactagtcgttacaaagg

SEQ ID NO: 41397 - DNA, 265 bp, Glycine max
  unsure (1)..(265): unsure at all n locations; Clone ID: 701124071H1
cccgcttcttacctcaacccgatgtcttcattcgcacttccncacggaacacgcattctnancccacgccggcattctggcttccatgtcncctgtttttgacaactttatagatcgcccacgtaagcntcggagctccgagagaattatccaaatccacggcgtcccctgcgacgccgtcaccgccttcgtcggattcctctactcctgcaggtgcacggaggaggagatggacaagtacgggatgcaccttacttgcattgtt

SEQ ID NO: 41398 - DNA, 262 bp, Glycine max
  Clone ID: 701124072H1
gcccgttgtttctcacaagccacactctttcattgaagcttaaactctctaaagccccaattctttattaatttactcaatctcaatgtttcatcatctggagttcttcttttgagggctttagcagattccattccttgagtctcatgctggatatgccaatccttgtatcctcatttctgatatccttgtttgcatgatcacatattttccaaggattttaaaaccatgggtagaggtagaggaaagggtaaaaaactaa

SEQ ID NO: 41399 - DNA, 265 bp, Glycine max
  unsure (1)..(265): unsure at all n locations; Clone ID: 701124073H1
ccctgcaacnnacggcaccccccacaaaaatgacaggagagacagtgaacccaaaagcttaccctttggccgatgcgcaactcgcaataacaatcttggatcttgtgcaacaagctgccaactacaagcaactaaaaaagggtgctaatgaagcgactaagacactgaacagaggcatttctgagttcgttgtgatggccgcagacactgagcctcttgagattcttctccatcttcctctccttgctgaggataagaatgttcc

SEQ ID NO: 41400 - DNA, 270 bp, Glycine max
  unsure (1)..(270): unsure at all n locations; Clone ID: 701124074H1
gactcacantnactcaggaaccgttgcnncccctaggaagcantgtctgtcaagaacacgttaanattccncttcatataaattgtggtggnaagatagtaacagacaatggaagcacatatgatgntgattcagatactgncaggtccagcaagatttcaccgaagtggaacaancnaattgggcatatatcaatnctggtaactttatggataatgacgctggcgcctattatatcgtgcaaaataaaactttnctttctatgggaca

SEQ ID NO: 41401 - DNA, 262 bp, Glycine max
  unsure (1)..(262): unsure at all n locations; Clone ID: 701124075H1
ggctcccaagggtttaacctttctggctgtgttaatatgcgtttcagcactgtcactgagtccttctgttgcgggggaagggcaaaataatggccttgttatgaacttctacaaggaatcatgccctcaggctgaagacatcatcacagaacaagtcaagcttctctacaagcgccacaagaacactgctttctcctggctcaggatncatcttccatgactgtgctgttcagagttgtgatgcttcatgttgctggactcc

SEQ ID NO: 41402 - DNA, 264 bp, Glycine max
  Clone ID: 701124076H1
gacggttcaaatagtgatgttgcaacagccttggatggccttggactgaacacaagagccaggctgtgtctacgagcagctggtgagttggagaagcagaaacgcaaaaacgaggacaaaatcatgaaggagattcaggataaagccttgacaagcatgaaagagcttcaaaattacaaaacaacatgtgagatgcacaaggggaagggctattacgatgccttcaaggtgcaaaaggagtcgaacgacttccaagcaaacgtg

SEQ ID NO: 41403 - DNA, 262 bp, Glycine max
  Clone ID: 701124078H1
gtttgctcacccctactcttcttccagtctctatctcaatctccatcaaatttaactatggctactgaagaggttttggttgatgaaatcacttaccctaccaagatcactactaccaagcccctatctttgcttggccatggaatcaccgacatggagattcacttcatccatgtgaaattctattcaatcggggtttatttggagccagaagtagtaggccacttggaccagttcaaaggaaaatctgcaaaggagctgg

SEQ ID NO: 41404 - DNA, 135 bp, Glycine max
  unsure (1)..(135): unsure at all n locations; Clone ID: 701124079H1
cncganccgccncnanccgctcnanccggtaaganctggggatctgntttcttatactnctaacgaaggtgtacangattctnggagagggaaagtncnggtntcggatanctttcctggaaatgaaaggacgaa

SEQ ID NO: 41405 - DNA, 133 bp, Glycine max
  unsure (1)..(133): unsure at all n locations; Clone ID: 701124080H1
gaacgtttgacacggcggaggaggcggcgcgtgcgtatgacacggcggcgcgtgagttccgcggcacgaaggcgaagaccaatttccacacaacatacgagnacncgananggggatgtgctgannnnccccc

SEQ ID NO: 41406 - DNA, 255 bp, Glycine max
  unsure (1)..(255): unsure at all n locations; Clone ID: 701124081H1
gnaatcctgacaatttttccatcattgggaagttaatttgcttttggttaacaactgtatatcatgaatgtttttgataatcatatgcttggtcaatagtatatgcattcttggatactgtacgagaaaacttgagtgtggattnnnggttgaacagtcccttgcagttgacacaagcaggagtactattacgtcaaaagatgcacttgtgattttcatcttttgtagtnttcattgaatttngaaaacagaagg

SEQ ID NO: 41407 - DNA, 255 bp, Glycine max
  Clone ID: 701124082H1
gcaagcagtccctgaatcatcttttgattctgaacctcatacttccaatcctcaaatcattttgcactctgtcaaagatttcttagctactttatgcacactttcctatccatatgcaatgattggcttagcattatgtgcactttcttcgtctctccttgcagtggaaaaactatcagacatatctctatcattttttgttggtgtgttacaagctgcggtacctcaattgtttttcgcaatttatagtaatgc

SEQ ID NO: 41408 - DNA, 258 bp, Glycine max
  unsure (1)..(258): unsure at all n locations; Clone ID: 701124083H1
cctgcctcttcctcacccctttctccatctaacgagtaaggaaaaatggcgcgtaagaagatcagagagtatgactncaaagaggttgttgaaggagcactttaagagactttctnncaaggagttgccgatcaagtctgcacaaattactgcatcaactgatttcactgagctacaagagaaggaaccctggctttcatcttctaaattggttgtgaaacctgacatgttatttggaaagcgtggcaaaagtggttt

SEQ ID NO: 41409 - DNA, 249 bp, Glycine max
  Clone ID: 701124085H1
gaagtggcttaagggtatctacctatgctgacacctggaaacctgcaaagagggcaggtcacccacaatatgttatacccttatgtacatgtgtacaaaatgagattattagcaaattttggaatgtatttttaattgctcaggttcttatttgtgaataggagcacaattctctcacccttaaatttatgggttagattgttagaaagagggaagtgattccttcttgttaattaactgaggatggat

SEQ ID NO: 41410 - DNA, 134 bp, Glycine max
  unsure (1)..(134): unsure at all n locations; Clone ID: 701124086H1
gcgccctcnaacaattacccgagtcggttgtaangccnctcctttctgtcaaaatgcaanactctgggcaagtggatcgtctctggctttgttagagaacataatcacgaactcgttccacacaacatnggncg

SEQ ID NO: 41411 - DNA, 260 bp, Glycine max
  Clone ID: 701124087H1
tgggttaaacatggaaccaagcccgttttgccccgattcgtttcccgtaaagtggctaagcagtcgcacaaatatcccagcggtggcgtgtgtgtataaataacccacccataaatcctttcattctaaaaccctgtcatttcatttcattcagtgagaacctttctcaaacaccatgagtgcattcccgaacggttccaactcgaacctcgacaacctcctcctccaaaccatgatgggcaggctccagctgcgagctc

SEQ ID NO: 41412 - DNA, 260 bp, Glycine max
  unsure (1)..(260): unsure at all n locations; Clone ID: 701124088H1
atcgcgggcggccgctcgcntcgagccgaatcggctcgagaagctaccctaactcagttccattagggcttgggttatttcgagnnaactgagtaactacgcaacggtgggtccgaccccgantgcggcacgtgtgggaaacgacggtgacaatggttcgttgatgattcctcgtttcaacgcttaccgcgtaaacaacctcaacctgtgatcaaaagcatcatctccaaaatcccaaactcatatcataacgggatcgg

SEQ ID NO: 41413 - DNA, 265 bp, Glycine max
  unsure (1)..(265): unsure at all n locations; Clone ID: 701124089H1
aaatggnngcattgggntcgttngactacaagaaagaagagaggcgtacactggcagttcaaatctcgtgaagctccacctanattcnggactcctgaacgtcaaaagctgatcgntgnnatacacgagnncatggtaagcaaggcacctcctgttccttnacctagcgccangaggcttctgaagagaaccccngaaatgnagnanctgatacnccacgaccaatncantgaatcctgagtctttaactgnaagagnngttatt

SEQ ID NO: 41414 - DNA, 262 bp, Glycine max
  unsure (1)..(262): unsure at all n locations; Clone ID: 701124090H1
caccctactttttcaacaccctctatgaacctttccgagaaggtgcagattttgttcgcggttaaccccttccagtctccgggaaggtgtaccaactgcagtttctcatggtctttggctcaacatcccagattacgatgctcctactcagcttgtgaagcctcttgagaggaacactaggnatgtggatgctattttgaccataccanagggcactttgtttcccatgtgtggaatgaacttggcctttgatcgcgatctt

SEQ ID NO: 41415 - DNA, 264 bp, Glycine max
  unsure (1)..(264): unsure at all n locations; Clone ID: 701124092H1
gatcactgatcctcaccttttaccacacctacttccaaangacacatgaggnngaatgaccatggctgccattacagatcaatggatgcagttctatcancaacctctaatggatagccatggccatgatcatcatgctttggcaccaatttccacagaattaggcaagnaagangcaaccgtgactacgacaactagttctcccacccccaccatgccatcatcagagagcaatagcatcttgganccaattgagtccaaagg

SEQ ID NO: 41416 - DNA, 254 bp, Glycine max
  unsure (1)..(254): unsure at all n locations; Clone ID: 701124093H1
ggaagtgnngggatgcatttctanttctaactaattattgtgcttatnattattgttgagaaaganaagnatggcaaagttaatanaattctttgagttgaacacaggggccaagattccntctgtngggtnaggcacntggcaagctgagccnggngtngtagccaaagctgncaccacagccatncaggntnganacnggcatanngntngngcncaagcgnataacaancaagcanaaattggttctgntc

SEQ ID NO: 41417 - DNA, 263 bp, Glycine max
  unsure (1)..(263): unsure at all n locations; Clone ID: 701124096H1
agttgcccaattacactatcactattgtctttagcttttcttccaattacaacactgttnttttccctcactttaagttctttcaaaagttagttcttaacatttgttcggaacaaacaaatgaacacacgtacagaatgaaaaactaggttcaaatctagtatgctattaattaaggcctaggaaagcagtatctcgctgtgtttccttcgatcaaaaganccttccaggaaggttcctactggcataacangtanaatgtt

SEQ ID NO: 41418 - DNA, 259 bp, Glycine max
  unsure (1)..(259): unsure at all n locations; Clone ID: 701124101H1
gttttccttctccatttctcgtcgcaccttttcctcttctctctctttctctctttctagttcgtgttcttcgtcgcaaatccgaagtaggatctctcttgtttttnctctaggtttttcgcgatggcgtcgaagcgaattttgaaggagcttaaggatttgcagaaggatcctccaacatcttgcagtgccggtcctgttcatgaagatatgtntcattggcaagctacaattatgggtcctccagacagtccctatg

SEQ ID NO: 41419 - DNA, 112 bp, Glycine max
  unsure (1)..(112): unsure at all n locations; Clone ID: 701124102H1
gatacncgatgatgctgaattaggagaagagacaaagaggaaaattgcnattgaaaaggaacgtcagganacgccnnganngtctttgcgaggacagntttctgcttcgnca

SEQ ID NO: 41420 - DNA, 256 bp, Glycine max
  unsure (1)..(256): unsure at all n locations; Clone ID: 701124105H1
atcaaactttggtcacggttatattagaccctttgataaacctctttcaaggcttattcaatcacacncttntctaatcacttcttcttgtgcgggcatnacttcaanaacntattctgtggtnctcgatctcacgatgggctcatttggccctgtctcagatggctgtaactgttncctgttgggcancgatttgtctctcataagatctgcggttaaggcacctaantttaactnttgggataaatcatggggg

SEQ ID NO: 41421 - DNA, 93 bp, Glycine max
  unsure (1)..(93): unsure at all n locations; Clone ID: 701124107H1
cagcnccctcgaagacgattcttnctncttctnccctganatggntcccaagcgtcgtggaaacgacacccgctttgannganntcctcaatt

SEQ ID NO: 41422 - DNA, 262 bp, Glycine max
  unsure (1)..(262): unsure at all n locations; Clone ID: 701124109H1
tgaagggnagcaggttcccaatgatangcttgtggatttggtgcatgttgaatctttgggtggnntttatgagcctgtgggncactacttttgctgggctgtatcgataccgcgttggngacgtgcttcaggtggtaggattttacaacaacgccccanaagtccgtttcatctgcaggagaaacgttgtnatcagcgtcgacaccgngnagaccaacgaggaggacttgcacaggggcgtgacaatgggcaaaaaagttgt

SEQ ID NO: 41423 - DNA, 147 bp, Glycine max
  unsure (1)..(147): unsure at all n locations; Clone ID: 701124111H1
gccaatcctgctcccgnagccgcctagcccgacggcggcgcgtgggcactcccgacatcttncngaatccgggtgtgcagnaccctcgtncgccnngccgttgtcatgcggcaacggtttcccctgcctccgagaatcacagcatgg

SEQ ID NO: 41424 - DNA, 253 bp, Glycine max
  unsure (1)..(253): unsure at all n locations; Clone ID: 701124116H1
gttcaatccacgtgtgtcgagcagccgccgcaaganccgaaaggctcatttgcacggcgccatncgancgtgcggcgggtgcttatgancgccccnctgtcggcggagtgcggtctaagtacaacgtgaggtcgatcccagtacggaaggaggacgaggtgcaggtnatgcgaggaacatacaagggtcgcgaggggaaggtgactcaggtctaccgtncgaaagtgggtgattcacattgagcgcataaccc

SEQ ID NO: 41425 - DNA, 237 bp, Glycine max
  unsure (1)..(237): unsure at all n locations; Clone ID: 701124117H1
gntttaattaaattgtggtcacncggaaaatacggctaatgtgactgcaattgcggttntggaacgctatttaanatcatattaacccccttctatccccctcaaaattctttcactganaagcagcaagaggaggagaatgaggaatggtttcatgtgccactctgaggcatcaacaacagtgtgcatganangctgcgatactattactgggtctgtggttgtgcctaggactag

SEQ ID NO: 41426 - DNA, 259 bp, Glycine max
  unsure (1)..(259): unsure at all n locations; Clone ID: 701124119H1
gagatcggaaaatgggtacgcttcagtcttggagaagtgcctacggtncccatcaaggacaccaccaaagtgggtctggcccatgtcaatagcgattacgcggatttggacgttgccattgtcaaagccacgaaccacgtcgagtgtccccccaaagagaggcacctcagaaagattctgtttgccacgtctgctgtgaggcctagggctgatgttgcttactgtatccatgcactttcgcggcggttggcgaagacgc

SEQ ID NO: 41427 - DNA, 261 bp, Glycine max
  unsure (1)..(261): unsure at all n locations; Clone ID: 701124121H1
gcaaaaccagcatgaatctgagaagaaagaagagaatgtaagcatgttgcctaatagagggaaagatgagaagttaactgattcctacaagggaaggaaaaagtacaaggacgtagctgatgcagcacaagcagcttttgagtcagcagaatatgctgcagctgctgcaagagcagcattggaactctcccgatctgaatcacatgatcctgatgatccattatagtccaagactccaaccaaganaagtggaggatggac

SEQ ID NO: 41428 - DNA, 260 bp, Glycine max
  unsure (1)..(260): unsure at all n locations; Clone ID: 701124123H1
gaaggctccttccgttattccattcagcgattccatggtggcgagaggcgtgccggcaatggcggcggtggccgttgccgcccttgacttgacggaatcctccaactggtggcgggacatcaaccgctccncgctctggcaggatcgcattttccacctcctcgccatcctctacggaatcgtcgccgccgtcgctctcgttcaattagtgcgaatacaattgagagtgccggaatatggttgggaccacgcagaaggtc

SEQ ID NO: 41429 - DNA, 258 bp, Glycine max
  unsure (1)..(258): unsure at all n locations; Clone ID: 701124125H1
tttaggcaaggcttcagtactggatggaacttgtgatgttgatgtttntnatggcatnggangagatgtccggaaaagagttttgaagatggagatcaagaaatacggttgcaggatttgaaaaanatttcaacaacagaagcagatgacaaccagtctgttaatctggttgaagtcaatggacattgttctaatcaagttgattttcttcgntttgaggtgagnccatacactggaagganccacttgtatacttgc

SEQ ID NO: 41430 - DNA, 252 bp, Glycine max
  Clone ID: 701124130H1
aaaataaaaatcaaagagcataatgtcagggatcattcacaagattggggagacccttcatgtgggagggcacaagaaggaggaggagcataagggtgagcaccatgctggagaatacaaaggggagcaccatggtgaacacagtagtgagtacaaaggagagcatcatggtgaacacaaagctggagagtaccatggtgagcacaagccagagcacaaagaggggttcctagacaaagtcaaggacaagat

SEQ ID NO: 41431 - DNA, 256 bp, Glycine max
  unsure (1)..(256): unsure at all n locations; Clone ID: 701124131H1
cggcnctannnaagaagttnatcanntccttgtctctccntgaatnataaaaccattcacagttcgtgganncaattncacgcgttncacctcanacnccttataagcctcaatttcacaaccaaaaatgcnnagttcaatcttcacaatctgagatntgcatcactgattacctnctaccccaagaagttccatctcaattncaatnnccagatatganccaanaancaacataccaatgaancatnncaacctt

SEQ ID NO: 41432 - DNA, 256 bp, Glycine max
  unsure (1)..(256): unsure at all n locations; Clone ID: 701124133H1
tttccctctcgcttctccggcaaccaagattcgccgtctcgacgctgagttgccgccaattttggaagaggacggaaccgttacctaacgaggagagagtctcgttctcttcaagcctctcgtccattccccttcctctttctctctcactctcgattctgaccttatganaggaattaggaacaatcaatatctgtggtccaaacaatgtgagcgcgtgacagagtnagnatcacgtgaggagganaatgatgat

SEQ ID NO: 41433 - DNA, 259 bp, Glycine max
  unsure (1)..(259): unsure at all n locations; Clone ID: 701124134H1
ggcaggagcagaggggctaaacagagaacagtacgtgtgccttgcnncntgtcggagcaggcggagggtacgaagagatggtggagttcatgcaganggtggtngtagggtggacgccggcgtcggagctcacggtggaggagcgcaacctcctctcggtggcctacaagaacgtgatcgggactctgcntgccgcgtnggcgcattcgtgtcctccatcgaacannaggangaatggccgcaanaaacgaacgancaa

SEQ ID NO: 41434 - DNA, 269 bp, Glycine max
  unsure (1)..(269): unsure at all n locations; Clone ID: 701124138H1
ctgcagccaaggaggcggtggagacaggtacggcggaggcggtgntngtggttcccaggtatgtnaggcggncggtgggcggggaagtcacnnnnnnnnnnnnnnnnnnnnnnncngcggaggaanctgctacagctgtggagagtctggggcatttccgccanagattgcccatcaagtggctccttgaaattactgttatggttggtttatngttatggcggattgttttaagtttttactttgaaacatgttgtagggattttnaa

SEQ ID NO: 41435 - DNA, 218 bp, Glycine max
  unsure (1)..(218): unsure at all n locations; Clone ID: 701124141H1
tagtgcctccttgccagaagtaaaaatggcccaagaaactttcctattcacatctgaatcagtgaacgaggggcaccctgacaagctctgtgaccagatctccgatgctgtgctcgatgcatgcttggagcaggaccctgacagcaaggttgcctgtgaaacctggcaccaagaccaacatggtgatggttttcggngagatcacaaccaaggccaag

SEQ ID NO: 41436 - DNA, 80 bp, Glycine max
  unsure (1)..(80): unsure at all n locations; Clone ID: 701124149H1
ctttctctntntctcnctttgtntctgaaattantcatacnanggganaccagcaattgcactttanccttttagacatt

SEQ ID NO: 41437 - DNA, 175 bp, Glycine max
  unsure (1)..(175): unsure at all n locations; Clone ID: 701124151H1
gccggcgatgttttcaggcagggtttgccggaagtttgtgctgccgggaagttacacgtgcttgctgttgatgacagccacntggaccgcaaggtcattgaacggttgctcaaaatctcgtcttgcaaaggttaagagccaaagatggagactttgagtgtcttttttttttttt

SEQ ID NO: 41438 - DNA, 254 bp, Glycine max
  unsure (1)..(254): unsure at all n locations; Clone ID: 701124152H1
agatacactaagttatcctcatanatacactctaattaggtggcaagataagngtctaaccttagtaacattgccacatagtgtgttcagnntggaattgtgccactaaaattctattcaattcatctatggctgcctcttcttatgctatgcaatcaatcctggcaaaccctttgatccgcatttccagcgggtctagggtgaaccaatttggcgttcctgctttgcacatggagaaggaatgttggcctgag

SEQ ID NO: 41439 - DNA, 258 bp, Glycine max
  unsure (1)..(258): unsure at all n locations; Clone ID: 701124153H1
tacgaaacgngcttcatcagtcaaaagccaccaaaggtgatgttatcaagtatggnagttgtggcacaatccaatgggatttaagatacatattcgcaactataagatgagaatagagagtatctcaacaaataaggcttcttatttctcagttatactagaagtctttgaaattgcncctacatttttcatggtggatattcagaaagcagctggagatgctggtgaatatctcaagttttcacaagaatttttcta

SEQ ID NO: 41440 - DNA, 248 bp, Glycine max
  unsure (1)..(248): unsure at all n locations; Clone ID: 701124156H1
cacgcaacccgcaatacaacatttattacncatacncaaagtagcttcgaagtgcgncattttcaattagcatatcanggagaataataatcagtcgttttggcaattcagtgaccagctgaggttacaggcatctaatttggcgaacctttctctaaacgattcgatttggagcaacagttacatctccaagaggcgtgatgaaaggataattttgacatcaaagttgggggtgagatcaactcttt

SEQ ID NO: 41441 - DNA, 257 bp, Glycine max
  Clone ID: 701124157H1
attccccttatctttctctcttctctctccccgcccaaaccctaactccctaccctatttcccgctttctctcatccatcatgaaaggaggaaagtccaagaccgaatctaagagagccgatgccaaacttgctgtgaataagaagggcgccgccaccaagactaggaaacccgccggaaaggggaaggcagcgaaagatcctaacaagccaaagaggcctccaagtgctttcttcgttttcatggaggaattcagg

SEQ ID NO: 41442 - DNA, 244 bp, Glycine max
  unsure (1)..(244): unsure at all n locations; Clone ID: 701124158H1
aatttgcaccgttgaatccgttgcttacactcctaggaaagaccttttgcaaatcanaggtatcagtgaagctaaagttgacaagatcattgaagcagcttctaagctggtgcctatgggtttcaccagcgctagtgaacttcatgcccagcgcgatgcaatcattcagataaccacgggatcaagagagcttgacaagatattggagggtggagttgagaccggttctataactgaattatat

SEQ ID NO: 41443 - DNA, 252 bp, Glycine max
  Clone ID: 701124160H1
tgtgcctcaaccaaaaatctcccttctaaccttattcttcttctcttccttcaccatcattgcgcatgcaattgttcctcaaaacgaaaccttcaaatttgagaactcaggtgaacttggaccctacatcgttgagtacggtgcagattacagaatgataagcatcttcaactctccattccaagttggtttctacaacaccaccccaaatgccttcactctagctttgcgtgtagggctccaacgctcgga

SEQ ID NO: 41444 - DNA, 250 bp, Glycine max
  unsure (1)..(250): unsure at all n locations; Clone ID: 701124162H1
gttggttctttcacctcttgctacctcacaacaggaccatnttcgcgttcggctgtgaactataacgctggatgcaagacagcagcttccaacattataatgtcacttgcagtaatgttgacattgttattcctgacacccttgttccattacactcccctggtggtgctatcagctattatcgtatctgcaatgcttggactcatagattatgaagcagccatccatctatttaaggttgacaaatttg

SEQ ID NO: 41445 - DNA, 248 bp, Glycine max
  unsure (1)..(248): unsure at all n locations; Clone ID: 701124163H1
gcttcttctagatttaaggaagatgggtaaggaaaaggttcacatcagtatngtggtccattggccatgtcgactctgggaaatccactaccactggtcacctgatttacaagcttggaggcattgacaagcgtgttattgagaggtttgagaaggaagctgctgagatgaacaagaggtctttcaagtatgcctgggtgctggacaaacttaaggctgagcgtgaaagaggaatcaccattgatatt

SEQ ID NO: 41446 - DNA, 250 bp, Glycine max
  unsure (1)..(250): unsure at all n locations; Clone ID: 701124164H1
gttggagncagctggaccctccggntcctccgatggaggggtaggagtgaattggctctgcatgagccctaaggcgagatcacaaccccgaaaactatgacgaccttcaattcgagttcaatcctaatctcttcgcctctctcgagcactatttgcctcctcatangctcaacctctcacgcgatgttaagcttcactacatccaggaacattcttcttcgctatttgcctgagaatgaccgcaactgga

SEQ ID NO: 41447 - DNA, 233 bp, Glycine max
  unsure (1)..(233): unsure at all n locations; Clone ID: 701124165H1
agttgtgtggcagttgcagcgcganggttcacacttcacaacggagaacggagtcggagganccgttttcgcatgcctgcaaccccaccgagtaacaaaggaagaatctctaccctcttcgctttcacttctcgccaagtttagttaagcaaccagacaatgaagcacactgacaatggagctttcaactcggaacacaaagttcttcttcaccaatccattgcccgttactt

SEQ ID NO: 41448 - DNA, 193 bp, Glycine max
  unsure (1)..(193): unsure at all n locations; Clone ID: 701124168H1
ctaagttntacaacccagtnttctccttcattctagtctagtctttttcttcttnttttcccccatgtatagctaccaagttcagaaagctgttttgttctgtgntgttntcatgngctctgttttggaggtttggccatggcagcaggtgaaagtagcagcagctccagagacctaganccagncaccancg

SEQ ID NO: 41449 - DNA, 244 bp, Glycine max
  unsure (1)..(244): unsure at all n locations; Clone ID: 701124169H1
cttcctcttccttcttcttgtttcatctgccactgcttgtgatcgctgcttgnatcaatccaaggcttcctatttctccaaagcttctgctctttcatctggggcatgtgggtatggctctttggcactagacataagtggtggacaccttgcagctggtgtggattctctcttcaaaaatggagcaggttgtggtgcctgctttcagataagatgcaagaacccaacttctatgtagcaaaga

SEQ ID NO: 41450 - DNA, 253 bp, Glycine max
  unsure (1)..(253): unsure at all n locations; Clone ID: 701124171H1
gcgcgttccgattcacatcgtgaccgcggcgacgcaacttcccgtcgaatttctggaaccctcgcctcaatccaagctcgtcatcggcttanactgcgagggcgttgacctgtgtcgcaaaggcactctctgcgtaatgcagcttgcatttccggatgctgtgtacttggttgatgcgattgaagggggagaggagcttatcatagcgtgtaagcctgcacttgagtctaattacatcacaaaagtgattcat

SEQ ID NO: 41451 - DNA, 254 bp, Glycine max
  Clone ID: 701124172H1
gcagctttggtatgctttaggcaagatgagagcagagaaggctgcttggagaatatctgatgaaaggggtttgaagctcactactatttgtccagctctaattacaggtcctgaattttgtaacaggaatccaacagcaacaattgcttatctcaaaggtactacttactattgaccaaaatcagtggtccaatttcttgtactatgtgatattgatataatatgttgtaaagtccacgtggtttgtctcaatt

SEQ ID NO: 41452 - DNA, 254 bp, Glycine max
  unsure (1)..(254): unsure at all n locations; Clone ID: 701124173H1
aagttgctgaacatgaacccgcaatcgccggttcgggcggaaccggagcctccggttncgacggtctccccacggtttcgcgctcacgtccggttcgcagcggaaaatcgcgatcgcggtcgatctgagcgacgaaagcgcctacgcggtgcgctgagcggtgcagaactacctgcgaccgggcgacgccgtgatcctcctgcacgtgcgtcccacgagcgttctctacggcgcggactggggctccgtggatc

SEQ ID NO: 41453 - DNA, 65 bp, Glycine max
  unsure (1)..(65): unsure at all n locations; Clone ID: 701124175H1
ataagacangcggttatagagaggcgnatagnntattnntgcttncagaactactgtaggtcgga

SEQ ID NO: 41454 - DNA, 252 bp, Glycine max
  unsure (1)..(252): unsure at all n locations; Clone ID: 701124176H1
gtcctccactttcctggtcgccctttgccaagccnttgacttgaggcatttggatgagaatttgaagaaacacggtcaagaacgttgtgagtcaagttgctaagaggactctcaccacaggtgtcaatggagagcttcacccttcaangttttgtgagaaggacttgctcaaggttgttgatagggagtacacatttgcatacattgatgacccctgcantgggacatnaccctttgatgcaaaagctaagg

SEQ ID NO: 41455 - DNA, 253 bp, Glycine max
  unsure (1)..(253): unsure at all n locations; Clone ID: 701124177H1
aagttaagcccaagcaaaccagactctagctcaatgggtttctgncgagaggaaagcaaacaaacaanaacccatanactataatanntaaaggaaggttattcaaaagaataaaganaaaaaganantagggtatanaaaanaatagaagaggggacgcagtgctatcgagttttttnttgcntaatgccatggctgctctgcaatacttggaatcgctgcgcaacgngatncctgagctctccgantggta

SEQ ID NO: 41456 - DNA, 249 bp, Glycine max
  unsure (1)..(249): unsure at all n locations; Clone ID: 701124178H1
aacccccaaaatatctctcgctctgaaaccggcatggatttgcagcagagcgagttcgatncgcctcttgttcttcgagcacgctcgcaaggccgcagaagctgaatacgagaagaaccctctcgatgccgataacttaacaagatggggtggagctctattagagttgtctcagtttcagagttttcctgaatcgaagaaaatgacccaagaggctgtttcgaagctagaggaggcgcttgcagtgaa

SEQ ID NO: 41457 - DNA, 249 bp, Glycine max
  Clone ID: 701124179H1
gccagtacctttcactactggttattccacattcgaagaaataaactcacccactaagcactaacacaaatcacacagagttgcaagagaaagataaaagaagatggcgactcttgattccgacgtgcctatggttcccgccggcgagccctcgagcagcgccggtccttcttccaagaagcccaagcgcttcgagatcaagaagtggaacgccgtcgctctctgggcttgggacatcgttgtcgataa

SEQ ID NO: 41458 - DNA, 244 bp, Glycine max
  unsure (1)..(244): unsure at all n locations; Clone ID: 701124180H1
acatgtgaaactagcatacctctaagcaatgctcttagcaaggatttcgattaaaaaataantccatgtaaagaggcgttgatgcagttggaagatgcaccatgagctatcgcattcacctgcctttgacaaaacttccactaccaacggttcctgtctgactgtctgtcggattatcgaatgagctttccaatattcggaattatcatgttctgaatgtgtgtagtctaatcttggcaccata

SEQ ID NO: 41459 - DNA, 102 bp, Glycine max
  unsure (1)..(102): unsure at all n locations; Clone ID: 701124181H1
gttttcttttcctttggtttgcatctcatacacgacatcacgtgcgaacaccacacaaccttaactaanntcgatttcacttctttctttccacacaacana

SEQ ID NO: 41460 - DNA, 251 bp, Glycine max
  unsure (1)..(251): unsure at all n locations; Clone ID: 701124182H1
aaaaatccgcgattngctcttctcttggaaaagtgaaaaccagaagtacgaacgaaagagaagagcgatttagaagtgagagaagatggggttgtcgttcacgaagctgttcagcaggttgtttgcgagaaggaaatgangattctgcatggtaggtctcgatgctgctggtaagacaaccatcttgtacaagctcaagntctggagaaatcgtcaccactatccccaccatcggatttaatgttgagact

SEQ ID NO: 41461 - DNA, 75 bp, Glycine max
  unsure (1)..(75): unsure at all n locations; Clone ID: 701124183H1
gccacctanttctcctgtnnanacgtcttcactcattctcattntngcctgcnaantacttctnccacagcaaca

SEQ ID NO: 41462 - DNA, 107 bp, Glycine max
  Clone ID: 701124184H1
gctttattggtgttcgtgttattactagtccagcaaatttgtgctaccagtgagcaagagcatgcttgccccccttcttcctgtggcaaaatcacccacacaacata

SEQ ID NO: 41463 - DNA, 230 bp, Glycine max
  unsure (1)..(230): unsure at all n locations; Clone ID: 701124186H1
atctgaagataatggataaagacaactttagtcaagatgntactctttgcgangcaaccataccatttagatccagtgtttgaagccgntagcattccagaaactgcttacaaggttgtgaaggacgaagaatattgtggtgagantaaggtggctctcactttcactgctgagagaaatgaggagcagggttatgatgcacctgaagagagctatggtggatggaaaga

SEQ ID NO: 41464 - DNA, 232 bp, Glycine max
  unsure (1)..(232): unsure at all n locations; Clone ID: 701124187H1
gcctctactacatcatcacattcaactttcagtaccttctcantctcccagtctctcacacacaacaattgnannagaaaatggttgacaatgattcgctctcggaattcctcgcatctgcggtcgacgcggctcagaaagctggcgagattattcgaaaaggcttctaccagaccaaaaatgtggaacacaaaggacaggttgatttggtcacagaaactgntaaagcatg

SEQ ID NO: 41465 - DNA, 251 bp, Glycine max
  Clone ID: 701124189H1
ggcaattcctgctgcctctaggattcaaacaaatcggattggtggacgcatcaggggaccatcaccattgatccatcagtggatagagttttgtctgcaatctgcaagagcactcccctttaagcaggaggtgatcccaggtgcctctccctctcatcttcaaggtcattcagccaatgtgcctgtggagttaaccaagggtgggccgaggataaatggcaacctagttgatggagcacctccaccagaca

SEQ ID NO: 41466 - DNA, 250 bp, Glycine max
  Clone ID: 701124190H1
gttactactcttcgccttttcctttgcaattgttaccaaacaattcttgcttagcccttacaaggcaagcattaacaacaatgaagaaagtagtgttaaaggtgggcttacatgatgatagaatcaagcgaaaagttatgagaacagcatctggtctttcaggggttgaatcagtttctattgacatgaaagacgagaaaatgaccttattagggaacattgatccagtgaatgcagtgtgcaagctacg

SEQ ID NO: 41467 - DNA, 188 bp, Glycine max
  unsure (1)..(188): unsure at all n locations; Clone ID: 701124191H1
gggagggtatgcttctttgctcacaagcttgangaggcttcgccccttgtatncntctacnggtctgncaattccntccccgaggtcctantcancctagtgctncctgcattggagangggttcagttaacccaattggcacttggtnctccatctgtcttgatgccaccnacctcaacacnacnta

SEQ ID NO: 41468 - DNA, 247 bp, Glycine max
  unsure (1)..(247): unsure at all n locations; Clone ID: 701124194H1
ctcgttcttcttcttttgttgttctgtgtttgtgtttgtnttttctctcacctgaaaatgtcttgnngncggtggtaactgtggttgcggaagctcctgcaagtgcggcaacggctgcggaggctgcaagatgtacccagacttgagctacactgagtcaaccaccaccgagaccttggtcatgggagtggcacctgttaaggctcaatttgagggtgctgaaatgggtgtgcccgctgagaacgat

SEQ ID NO: 41469 - DNA, 247 bp, Glycine max
  unsure (1)..(247): unsure at all n locations; Clone ID: 701124195H1
gcttcttcttcagatacctaacctaatctcccaaacaaacaaaccanacgcaaccttatcaatatcgtttaaataaattttgatcgcgcacgcgctttgagatagatcatgctgcgtttgtgctacggccctctggattgcngcttcggacgccgtggtggccgcgccgccgacggacttctctggcacaccgacttgaagccccacgcctccggcgaacttctccatcgccgtcgcccaggcgaat

SEQ ID NO: 41470 - DNA, 249 bp, Glycine max
  unsure (1)..(249): unsure at all n locations; Clone ID: 701124196H1
tccnantgaaccgcnaccantnagatggagtnnctagagnaaatngcntctgaggtgagtatcttantannggtntgggtagttgatttgacttnttngnttaagganataggtgatgcntggntaaggggtatgtggactagaaattccagatgnnagtggttgtatagagnaatcacgttgttnanggaattgtgtagcatcaatgtgaaggctaaattcactgaatggggagtgaacgggcttcac

SEQ ID NO: 41471 - DNA, 263 bp, Glycine max
  unsure (1)..(263): unsure at all n locations; Clone ID: 701124203H1
ctgcgaagtacaggcacatgattggggggccttctttgaaagtggatttgcacaccggggctgtcgctgaaggggtgttganctttgtgattacctttgctgttctcctcatcttcctcaggggccctcgtagtgacttgttgaagacttggttactggncacggcaactgtagttttggtcatggttggatctgcctacactgggcctgccatgaatcctntaatgcttttggctgggcatacttaaacaactggcacaaca

SEQ ID NO: 41472 - DNA, 273 bp, Glycine max
  unsure (1)..(273): unsure at all n locations; Clone ID: 701124207H1
gttgtagggtattgacaacacacaaaaactacaaagttaaaggncgtgatggagaaaggaagtgtggttgaagttgcagcaccaagatgctcccatgcagatgaagatgggggatgaattagaaggtcaacaccagtggccctacgcactggctgancacgtttgcngcgtttagtntctcgttggtctatgtgtttcagcacttgttcttcatgcttaagaactntcagcgaatgaatatggatctgttgattacagcgattcttggagctt

SEQ ID NO: 41473 - DNA, 264 bp, Glycine max
  unsure (1)..(264): unsure at all n locations; Clone ID: 701124210H1
atggtggacaagatgaatatgctnatattcaagtcccttcagatttctttgctgctagttttctctatcagaaacaccacagcagaacaganaacccatcacacanaacacacnttccataattcacatggacaagttcaacatgccagagagntttaacgaccatctcctctggtttgattcatcactaaaatcagtatcagnactcagcagagatgctctaacatataaaaaagnagctcatggctctctacaaggctaact

SEQ ID NO: 41474 - DNA, 263 bp, Glycine max
  unsure (1)..(263): unsure at all n locations; Clone ID: 701124211H1
cgagatgggtgaagaagtgaangtagttgttccagaatcagtgttgaagaagcgcaatagggaggangaatgggcgttggccaagaagcaagaactcgatgctgccaagangaagagagccgagagccgcaaactcatctacaacagagctaagcagtacgctaaggagtacgatcaccaggagaaggaattgattcggttgaaacgcgaggccaagctgaaggtggnttctatgtggatccagaggctaagctgntgtttta

SEQ ID NO: 41475 - DNA, 206 bp, Glycine max
  unsure (1)..(206): unsure at all n locations; Clone ID: 701124212H1
gacgaaattcgacaataaancctggatctcgtttctganaacanctggctgtcganaaatcctggcnnagtttgcgtcttggtgaattaatagacaaacncgtaaatcttatcttgaaaganagattnttaacagaangggantcagagaatcggggtgttncagaggggggagggantganaagaagnnagatgaaccacacnac

SEQ ID NO: 41476 - DNA, 262 bp, Glycine max
  unsure (1)..(262): unsure at all n locations; Clone ID: 701124214H1
ggacctatntgttaggccataantagccngcacttngaaatcnatttcagtttgaattttgaaagtgagtgtggcgtaccgtgtacgtatntgcagaaagtgantgaatggtaatgggggaagaagggtgcaaggtatgtgttacaggaggcagtggttacattggttcctggctcatcaagaagctactggccaagggctacacagttcatgncaactcnagagacttgaagantgagtcaaaggttggcctcttaaagag

SEQ ID NO: 41477 - DNA, 259 bp, Glycine max
  unsure (1)..(259): unsure at all n locations; Clone ID: 701124217H1
tgctattgaaatccccacaatagtgtttccaaactcctctgcccaacagaggatgccagtggttggaatgggatctgcccctgacttcacatgcaaganagacacaaaggaggctatcattgaggcnctgaaacagggttacagacacttcgacactgctgctgcttatggctctgaacaggctctcggtgaagctctcaaggaagctatccatctggcctcgtctcccgccaagacctcttttgtcacttccangttt

SEQ ID NO: 41478 - DNA, 264 bp, Glycine max
  unsure (1)..(264): unsure at all n locations; Clone ID: 701124218H1
tggcacccttgccaattgggttcgctgtgttcttggttcacttggcaancatccccatcaccggaactggtatcaaccctgctcgtagtcttggtgctgctatcatcttcaacaaggaccttggtnnngatgaacactggatcntctgggtgggaccattcatcggtgcagctcttgcagcactctaccaccaggtcgtaatcagggccattcccttcaagtcaagtgnttcaatcaaacggttcatgcttaatcaagttggga

SEQ ID NO: 41479 - DNA, 183 bp, Glycine max
  unsure (1)..(183): unsure at all n locations; Clone ID: 701124220H1
tctgagttccaactttcacctcagcnaaatacacaacaanatggggtttcagaagataagggtgggcaaccccatcgttcgaaatggntggggatgaaatgacccgagtgntttggnaactgataananntaagcttnttttcccttatttggagcnggatattnagtatttngacnttcgcc

SEQ ID NO: 41480 - DNA, 213 bp, Glycine max
  unsure (1)..(213): unsure at all n locations; Clone ID: 701124223H1
agctgctgagcgtgattatgacctgaaccgtgctgctgagcttaatgatggaactttgatgtcccttcagcgccanttagaagaagctgaaaagaacctaagtgacttccgaaactctggacaatctttactccgagaagaggtcactgacctngatattacagagattgttagcaaatggaccggtataccattatcaaacctccacaaaac

SEQ ID NO: 41481 - DNA, 127 bp, Glycine max
  unsure (1)..(127): unsure at all n locations; Clone ID: 701124224H1
gcccgtccagaagcagacccgcgccggtcagcgaacccgcttcaangcctttcgtggtggtcggcgacaacaacggccacgtcggtctcggagtgaagtgcagcaaggaagtcgccaccgccatacg

SEQ ID NO: 41482 - DNA, 141 bp, Glycine max
  unsure (1)..(141): unsure at all n locations; Clone ID: 701124226H1
gntttgtgtatattgtactcaaaaanaatgaaaccattggttgtggctctctacaatagaattaccatgtccttttcataancctacanacgtnactacnttaggtnganggacccagaaaattgtcttccgnacaagttt

SEQ ID NO: 41483 - DNA, 260 bp, Glycine max
  Clone ID: 701124227H1
catcaatgatgtacactcatcatggattggaggtagcatttactggaaattacaatgagtattttggttttgcaactgatgttgatgctgtgatttacctgatgctgactaatgatgtcattcatgggctgttccctgaggctgttacaattggtgaagatgtgagtggaatgccaacattctgccttcctacgcaagatggtggggttggctttgatatcgcctgcacatggccattgcagacaagtggattgagattc

SEQ ID NO: 41484 - DNA, 261 bp, Glycine max
  unsure (1)..(261): unsure at all n locations; Clone ID: 701124230H1
atttgagaggtacgataaagacaggagtgggaaaattgatccattagaactcagagatgctctatatggtattggctatgctgtaccgggctcggttctacaacttctgctttccaaatacggtgatggaagtngtaggagggttgaacttggttttgacagttttgtcgagtgtgggatgattattaagggtctgactgataaatttaaggagaaggatcacggtatacgggttcggctacactttcatacgatgccttt

SEQ ID NO: 41485 - DNA, 267 bp, Glycine max
  unsure (1)..(267): unsure at all n locations; Clone ID: 701124233H1
cttttntgcgagtccatttggcaaaagggttgaatgggcattgaaactgaagggtgtggagtatgagtacatagaacaagatatcttcaacaagactagtctccttctccagttgaacccggttcacaagaagnttccggttcttgttcatgcccacaaacccatcgctgagtcantcgtcatcgttgaatacgttgatgaaacatggaagcagtatccactgtgcctcaagacccttatcaaagagcacttgctcgattttgggct

SEQ ID NO: 41486 - DNA, 267 bp, Glycine max
  unsure (1)..(267): unsure at all n locations; Clone ID: 701124234H1
gtcgaacagtcaactcanaactngtacgganaaggggtatccgactgtttaattaaaacanagcatttgcnatggtccctgcgggntgttgacgcaatgtgagtctgacccagtgctctgaatgtncnngntgaagaaattcaaccaatcgcgggtaaacggcgggagtanctatnannctctaagntaggccaaatncctcgtcatctaattagtgnangcgcatnatggattaacgggattccnactgncctgtctactatccag

SEQ ID NO: 41487 - DNA, 262 bp, Glycine max
  Clone ID: 701124236H1
gaaatttcatgctctatattcttgaactgaagctggttttcctattttgcgttacgcgtttgatatcgagtccatgagacgaattcagcttccggagccgccgagccccaccggccggagtggcactccggacatcttcgaatccggagttcacacgtttgtgcggcgcgccgtcgtaatcggcaacggtttcgccgcatcggagaatcagagcgtcggatggtccgcgcccttggcctctccgataagcacgtcttatatc

SEQ ID NO: 41488 - DNA, 239 bp, Glycine max
  unsure (1)..(239): unsure at all n locations; Clone ID: 701124241H1
gttgggagctgctgcaatcgatcangatcacccaattctttactgtagatganctagctgancaaatagccgaggttctcaacttttttggtcttagtgcagtcatgtgtatgggagtaactgctggggcttacattcttaccttatttgctatgaagtatagacaacgtgttcttggtttgatacttgtttctcctcatgtaaagaaccgtcttggactgaatggttgtacaacaagg

SEQ ID NO: 41489 - DNA, 84 bp, Glycine max
  unsure (1)..(84): unsure at all n locations; Clone ID: 701124242H1
gggcgagtagcttncttttccaggtggtggaacccaatttcaaacacggtgnantgtcattagcattgacaccaacacaacata

SEQ ID NO: 41490 - DNA, 85 bp, Glycine max
  unsure (1)..(85): unsure at all n locations; Clone ID: 701124244H1
ggcttctcatatctacnaatcctttgcttagccacncntgtttctncacacangccnngtnntccctcnaagtgtacacacgctg

SEQ ID NO: 41491 - DNA, 261 bp, Glycine max
  unsure (1)..(261): unsure at all n locations; Clone ID: 701124246H1
ggccctcctaacgaaacgaagaatctcgcatcggaatctggaagcacgcgatgtncaacctcganccagcaccagttccgatacactcaaaccccttccaaggtgctccaccttcgcaaccttccctgggaatgctccgaagaggaactcagagagctctgcaaacccttcggtaagatcatcnncaccaagtgcaatgtcggcgccaatcgcaaccaggtttgtcgaattcgcggatctaaatcaagccatttcgatggt

SEQ ID NO: 41492 - DNA, 265 bp, Glycine max
  unsure (1)..(265): unsure at all n locations; Clone ID: 701124248H1
tgttgcttcactctgttcctcttcgtgcgaagtactaggatcagatggctttgcgaggggtttggcaacttaacaagctgattgtcagttattgcaactggggcggaagtagcagangtatnagggcatttatggagtctcatttgccagcatttaaggagangaatcctcaattagaggtggttactgaactncataccgtggtcagcatccacatctgaaggttattacaagaacaagaatcagcgagtgatatgtgtgaagt

SEQ ID NO: 41493 - DNA, 263 bp, Glycine max
  unsure (1)..(263): unsure at all n locations; Clone ID: 701124249H1
ggaatattggtgagtgaagaagaattaagaagagaagcaagaatagtgtcataggatgtatgtgactaggccttgtctctgtatncgaaatctgcagatgctctctcattgcctccacctgagggccccaattctggtattttggtgatccaagatgaagatttggtgccaacctcttgttttgggttgggagagttccatgaagtgaaggagttgcctttcctcaaaatctaaaccttgagttgttctatagatcaggcatt

SEQ ID NO: 41494 - DNA, 263 bp, Glycine max
  unsure (1)..(263): unsure at all n locations; Clone ID: 701124251H1
ggnaggngacccttttgggagctactggaagcccatttgtgtgcagggttcatattgccctcaagttgaagggagttcaatacaaatatgtcgaagaaaatttgangaacaagagtgaactgcttctcaaatccaacccagttcacaagaaggttccagtgtttattcacaatgagaagcccatagcagagtctcttgtgattgttgaatacattgatgagcatgggaagaacaaccccatcttgcctctgatccttaccaaa

SEQ ID NO: 41495 - DNA, 260 bp, Glycine max
  Clone ID: 701124252H1
atgatacgttatgaaggactacctggcttttataaggggatgagcacaaagatagtacaaagtgtttttgcagcttctgttctattcatggttaaggaggagcttgttaaggcttttatggttgtggcagataagagcaaaaaagttgtatcaaatataagtagttgactttcttcttttggataaagaaagtaaaacaagtagttgactctttaccattgaaagggataactccctcttgatctacctctccctgttgg

SEQ ID NO: 41496 - DNA, 261 bp, Glycine max
  unsure (1)..(261): unsure at all n locations; Clone ID: 701124253H1
gggaatcgcagcgaagtccactatgccgaagcaaattcacgagattaaggncttcctcctcactgctaggaggaaggatgcacgctctgtgaaaatcaagcggagcaaggatgtggtgaagttcaaggtccgttgctccanntacctttacaccctctgtgtgtttgattctgagaaggctgataagttgaagcaatcacttcctccaggtttaagcgtgaggatgtgtgattcttactgctgtatgaagatcaggttttt

SEQ ID NO: 41497 - DNA, 261 bp, Glycine max
  unsure (1)..(261): unsure at all n locations; Clone ID: 701124254H1
atgatacgttatgaaggactacctggcttttataaggggatcgagcacaaagatagtacaaagtgtttttgcagcttctgttctattcatggttaaggagacgcttgttaaggcttttatggttgtggcagataagagcnaaaaagttgtatcaaatataagtagttgactttcttcttttggataaagaaagtaaaacaagtagttgactctttaccaatgaaagggataactccctcttgatctacctctccctgttgg

SEQ ID NO: 41498 - DNA, 260 bp, Glycine max
  unsure (1)..(260): unsure at all n locations; Clone ID: 701124256H1
actgtcttggttgacaacgttgatttcttggaagaactgaagtgaagagcaagctttatatgaaataagtagtcntgctgcntntgtatgaataagttgtctcgcatnttatcattgtgcgttttgtatcagtaccagtcatcaacttgttttcttgctnttatgggttcttttgttgacttaaaaccgcaattcatccgccaggnagctgaggaaaagccaacgagatctctgtctccgccgaagaggaattcaatatc

SEQ ID NO: 41499 - DNA, 259 bp, Glycine max
  unsure (1)..(259): unsure at all n locations; Clone ID: 701124258H1
gctctctaaagtcatatttttcagtacgttttgtcacatccaagtgtagaatttgtggcaatatcatatgccattgtgaaaatcctagcaattcaacacaggtgtcatcagacatatcatccgaaggatctgaaggaagggacctaattgcacgtggtgccgattcattgagacaggattgccggnctaaatgtacatcacctatggagaagaaatctatcttgattctgatggagctgtaagttctttggacagtgaa

SEQ ID NO: 41500 - DNA, 258 bp, Glycine max
  Clone ID: 701124259H1
atatgaacagcaaatagagcagcttggaaatttccagttgcgtattcatgaccagatgatattgttggaaggtgctaaagctaccactgaaacagtagatgcattaagaactggagcagctgctatgaaggctatgcaaaaagcaacgtatgtagtggagtgctatttatgttttaaaatatttagtgattagtgatttaactcattaacattttctgtatttcttatgtctcaatatcatgctctgacttataatat

SEQ ID NO: 41501 - DNA, 258 bp, Glycine max
  unsure (1)..(258): unsure at all n locations; Clone ID: 701124260H1
gttagcttatgtttctcgtgagtcgagggtggttggtgctggagatttggttgaccatccaaagangattgctcttgcattacctaaagggttatttccttattgacttatttgttgtatttcctcttcctcagataatgatattgtttgtcctaccaaattccttggagggagcaaattatgccaagaatcttctccgtgcagcgatcttagtgcatatatccccaagttattcaggtttctgccactgctaattgg

SEQ ID NO: 41502 - DNA, 261 bp, Glycine max
  Clone ID: 701124262H1
gtgaggtgcgagagggaagtgcagagcgaccccaagtggaataacgatgattatgatctgggcctacagctagaaaacgcgtttgattttcagtttaattacttggacgataataacctttccgtcgacgatgacccctttggcactgttcagtaccaaatgggtcagctctcgcccttgcaggacatgttcatgtacctacagaagatgtgaaaacgaacgttttttttggacaagatgatgggacccgcaaatatcttt

SEQ ID NO: 41503 - DNA, 262 bp, Glycine max
  Clone ID: 701124263H1
ctagtctcagctgaaatggcctcttcagtgatggcatctgtggccctcaaacctgcccctttcactgttgagaagtcctcagtgagaggccttccctctctctcaaggaactcttcttcattcagagttgtggccagtggcaagaagatcaagactgacaaaccttatggaattaatggtggcatggctttgagggatggaactgatgcatctggcaggaaggaaagggaaagggtgtttaccagtttgtagacaaatacgg

SEQ ID NO: 41504 - DNA, 263 bp, Glycine max
  unsure (1)..(263): unsure at all n locations; Clone ID: 701124264H1
cagtgctacagccctatacttgacgagcttaatatgctattccctaatcgcagtaaagatagtccacctgcatgtttagttcctggtgctggacttggtcggctggccctggagatttcatgtttagggntttatcagtcagggaaatgaattttcatactacatgatgatatgctcgagctttattcttaaccattcccaaacggctggcgagtggacaattatccttggattcacagcaattgcaatcattatcagacagt

SEQ ID NO: 41505 - DNA, 128 bp, Glycine max
  unsure (1)..(128): unsure at all n locations; Clone ID: 701124265H1
ctcctctctcatcacacactcaaactntntcnctcactacattggttcanaggcaaaaatcctganttgggtcctcaatcganagtgataggccacaanagagagcctttngtttcaacacnacactt

SEQ ID NO: 41506 - DNA, 260 bp, Glycine max
  unsure (1)..(260): unsure at all n locations; Clone ID: 701124266H1
tcttcgttcttcgactgtctacgatctgctttctctgaattgtgaaaatgtcgcncggagaaactgcntgttcatacgcagctctcatccttcatgaagatggaattagtgtaactgctgacaagatcagcaccttgttgaaaactgcaaaggntccagtagactcttattggccaaccttgattnctaaacttgctgagaagaaaaatcttggcggttgatagcaaatgcggcaggcggtggtgcaccagttgctgttg

SEQ ID NO: 41507 - DNA, 175 bp, Glycine max
  unsure (1)..(175): unsure at all n locations; Clone ID: 701124267H1
cggncagntacctttgctgtgagtggcagangattcgtagcacgagacattaccttccaaaacacggcaggactcagagaagcaccaagcagtggcactaagatcagacncagacctctctgtgttcttccgatgtgggatcttcggttaccaagacagcctctacacannnnac

SEQ ID NO: 41508 - DNA, 93 bp, Glycine max
  unsure (1)..(93): unsure at all n locations; Clone ID: 701124270H1
gttttctgatcgcntcatgagcagagttgcgacgcggcngttntcagaanaagattcgcaagatgatnnttccaacanacncgagtccccacc

SEQ ID NO: 41509 - DNA, 256 bp, Glycine max
  unsure (1)..(256): unsure at all n locations; Clone ID: 701124271H1
aaaccttttagatatttcacttatggggctgcgtttgctgaggttgaaattgacactctgactggagattttcacaccagagtggcaaacatatttttggatctaggttattcgctgaatccagcgatagatgttggacagatcgagggagcttttatccaaggtttgggttgggtagctttagaagaacttaaatggggagatgaagcacatnnnggatcccgtctgggtgcctttacacatgtggacctggagc

SEQ ID NO: 41510 - DNA, 123 bp, Glycine max
  unsure (1)..(123): unsure at all n locations; Clone ID: 701124272H1
gcggttaggattataaatagtaaaacgacgacaatgcgatcaagaagcgtggttgggtcacgtggacgtagcagagaggtctctgattaaactttcacgctcacacctcccncacaacatacg

SEQ ID NO: 41511 - DNA, 257 bp, Glycine max
  Clone ID: 701124273H1
ggaccaccaagggttacggaggcgtgccaatgataactactctgttgcacatagtgccaatcgtcggggaagagtcacccatgctttgagtgatgatgctttagctcaagctctaatggacaatagttctccgactgaagggcttgacaattttgatgagtggacaattgatttgaggaaactgaatatgggtgagccttttgctcaaggagctttgggaaactctacagaggtacttacaatggtgaagatgttgc

SEQ ID NO: 41512 - DNA, 258 bp, Glycine max
  unsure (1)..(258): unsure at all n locations; Clone ID: 701124274H1
cctccagcctccttcttcatccatcttccctctccaccaaaatcctccgcggttcgttccgttattcatcgaaccgttctctcncgtctcgtacttggcttagttcacaactcgaaacttcaccgaacgcattccattcaccaattcgtccaagtctcgtatcaatcagtcaatccgtctcgtggaggttggagagatcggaggggaaaggatccatgcgcatcgagtggaccacgagtatgactatctgttcaagat

SEQ ID NO: 41513 - DNA, 256 bp, Glycine max
  unsure (1)..(256): unsure at all n locations; Clone ID: 701124275H1
ataaacccactgatcgcttctctttcctcttctctctctcagtagaaagcctacaaccttcttttatctgcgtttcnnnnnnnnnnnnnnnnnnnnnnnagtgctagacaaggactggtaaccaaaaattccaagaagggtacattaattcatggcctttgaggagcactatgtttctcaggaattgaaaaccatccccagccccatgacagtgaagaaaatttggatgggtgttttgattgcaacatctgcttag

SEQ ID NO: 41514 - DNA, 89 bp, Glycine max
  unsure (1)..(89): unsure at all n locations; Clone ID: 701124277H1
gtttctcgtctgatggtcgtgagtggttcctttcccactaacttcgaagcggagaagggtcaccagcttttgttgccacacaacatnnc

SEQ ID NO: 41515 - DNA, 259 bp, Glycine max
  unsure (1)..(259): unsure at all n locations; Clone ID: 701124278H1
gaaaaatgncggaactttaaggccacttgccatagagttncagtttgccacatcctcagggaganccaatctggtgcttttagtcaagtttttctgcctgcagatgaaggtgttgaaagttctatttggctgctagcanaggcttatgtagttgtgaatgactcgtgctatcatcaacttgtcagccattggttaaacactcatgcagttgttgagccttcatcatagcaacaaacaggcatctcagtgttgttcaccc

SEQ ID NO: 41516 - DNA, 260 bp, Glycine max
  unsure (1)..(260): unsure at all n locations; Clone ID: 701124279H1
gtagaggtaccaaagctagggaaagaggctgcagtaaangccataaaggagtggggccagccaaagtcaaagattacccacttgatcttctgcaccactagcggtgnggacatgcctggtgctgattaccaactcaccanacaattgggccttcgcccttatgtgaagaggtacatgatgtaccaacaaggttgctttgcaggtggcacggttcttcgttggccaaggatttggctgagaacaacaagggtgcacgtgtg

SEQ ID NO: 41517 - DNA, 266 bp, Glycine max
  unsure (1)..(266): unsure at all n locations; Clone ID: 701124281H1
atgggcttcaagctcggatgtgggtagcacngtctgnctncttctngaccgtattaactctttcacgngcaagtngcatacccnaangaccaagaaatttcctgcatncgtcttctaatgatgatancagtacttcaaaaccacntcctgatacagcaaacatggatgtnctncctccttgntcaactcctacagaggaaaatctncttccctccatgcngaaaggnnaggtgagcttgaagagnnngttgacacactccaatcta

SEQ ID NO: 41518 - DNA, 257 bp, Glycine max
  unsure (1)..(257): unsure at all n locations; Clone ID: 701124287H1
cagccatggccantgcaaggactgtgaaggatgtttcaccntctgagttcgttaaggcgtactcctctcacctcaagcgatccggcaagatggagctgccagagtggactgatattgtgaaaactgcaagatttaaggagttggctccttatgatcctgactggtactatgtcagagctgcttccatggcaagaaagntctacttgagaggagggctgtgttagtgcctttcagaggatttatggtgggagcaagag

SEQ ID NO: 41519 - DNA, 148 bp, Glycine max
  unsure (1)..(148): unsure at all n locations; Clone ID: 701124288H1
aaataggtaaaagagcatagtgtgtgttggtgtagccactctggagacaggaaaacctactcaactttttttattttggtttatgntctgaaaattcctctccatcttcttctccttccaattatntccnacaanccaaagaaagaga

SEQ ID NO: 41520 - DNA, 258 bp, Glycine max
  Clone ID: 701124289H1
aaatggcaagcagacaacaaaaatggtctcttattgtgcttaccacagggctcccaatccagatacagttttgattatgcaaacccctcttggggtcatttcaactaaaagccttctccaaactaagaaaaaaactggttcgaggttaatctcatctagcagaaaaaagcaagatgactctcctgttgataacactgagcatgagccattttctgctctaggtgccgtatctttcaaagaacaaaccataccaaaaag

SEQ ID NO: 41521 - DNA, 256 bp, Glycine max
  Clone ID: 701124290H1
atagaaactcactctttcgaaaaaaccagaatttgaatatgacgttagggtttgagggttatagttataccacaacacttggaaggaagagggtcgtgttattacacaatgaagcttcttctctcaactctaattcggcggtgaatccattgaagagaatgtgcagcggaaaattcacttttgactctgaaaggtctcgccttgaggcccttcctctgatgttctgattagggtgttgtgtggtgtcgatcatgaa

SEQ ID NO: 41522 - DNA, 134 bp, Glycine max
  unsure (1)..(134): unsure at all n locations; Clone ID: 701124291H1
cgcggtgctgatggacctggagcccggaaccatggacagcgngcggaccgggnccgtacnggcagatcttccgcnccgacaacntcgngtnnnggcagtccggcgccggcaacaactgggctaaggggcactac

SEQ ID NO: 41523 - DNA, 248 bp, Glycine max
  unsure (1)..(248): unsure at all n locations; Clone ID: 701124292H1
gttcaagagagtgtatatgagcagcttcgtgttgttcgtgaaggtcaacttcgnatcatattcactcaagacttgaagatattatcttgggagttctgtgcaaggtgccatgaggaacttcttcctcgaaggttggttgcaccacaggtcaaccagttagttcaggtagctaaaaaatgtcaaagtacaattgctgaaagtggttcgatggggtttctcaacaagacatccaaacaaacagcaacatg

SEQ ID NO: 41524 - DNA, 259 bp, Glycine max
  Clone ID: 701124293H1
ctcccttgtatattgttgcagctctagctagggtttcgcaagtggcgatccaagaagaacaacgacgatggcgatggctgcagctctgcgtcgcgaaggaaggcgtttgacccaaccaatcaacgccctccactcttctctcaattcctccctcatctctcaagaccaagcccctcatggcgcgcgctccatttccactcaagttgtgaggcaccgatgaagagtgtgaggaatatccagaagatcaccaaggccatga

SEQ ID NO: 41525 - DNA, 259 bp, Glycine max
  unsure (1)..(259): unsure at all n locations; Clone ID: 701124294H1
agaaggaccatagccatagtcttaagccgtggaagcaaatcgatgttattgaagaagaagggcttcttcaaggggatgatcgccgcaacgggcttccacgtcggtgctacttnccttgctttcgttgttgggtttttggttctcttctcgttcttctcgcttatcctttggggggctagtagacccatgaagcccaagatcaccatcaggagcataagtttgatcatgtaagggtccaagctggttcggatgcaacagg

SEQ ID NO: 41526 - DNA, 262 bp, Glycine max
  unsure (1)..(262): unsure at all n locations; Clone ID: 701124296H1
ggttctgatcttctttgttttgttttgtctggttccctttcttccttcaaccaattttgancatccgaaaccggcatcagatccgattcgaaatgtacggattcgaagctctcaccttcaacatccacggcggcttcctcgaggccatcgtccgcggccaccgcgccggcctcctcaccaccgccgattacaacaacctctgccaatgcgaaaccctcgagacatcaagatgcacctctccgccaccgagtacggtccttac

SEQ ID NO: 41527 - DNA, 274 bp, Glycine max
  Clone ID: 701124301H1
gaagagcatcacttcgattctcaggcggatgcgggagcgtccaagacgtatcctcagcaggctggtaccattcgcaagaatggctacatcgtcatcaaatccaggccttgcaaggttgtagaggtctctacgtcaaagacaggcaagcatggacatgcaaagtgtcactttgttgcaattgatatttttaatgggaaaaagcttgaagatattgttccatcatcccacaactgtgatgttccacatgtgaatcgcactgactatcagcttattg

SEQ ID NO: 41528 - DNA, 270 bp, Glycine max
  Clone ID: 701124302H1
ctcttcaattcaacttcaagccaagccaagcaacatgggctcaacaacaggaggacgaaatggagtatgttgctgatgataatgaaatggcggaagtagaagatgacatgtatttccgtggtagagtgtttggtgattcagagtccgaatcagatgacgatgatgaatatgactccatggaaaatcggatgacagatacctctgctgcagaagccaggaaaggaaaggatatccaaggtattccttgggatagacttagcattagtcgtg

SEQ ID NO: 41529 - DNA, 266 bp, Glycine max
  unsure (1)..(266): unsure at all n locations; Clone ID: 701124303H1
tttgtggtnagaattccggatancctnccactngatgctgctgctcctnctcctctgtgactngnatcactgtgtatanccctttgagatactatggacttnanaagcctggtcngaatcttggtgtggtnggtctnggtggacttgntnacatggctgtcaagtttgccanagctctnggagctantgncacagtgattagcacatctccnaacnanaanaaggnagccattnagaacanaggggctgacncantngnggtgngc

SEQ ID NO: 41530 - DNA, 267 bp, Glycine max
  unsure (1)..(267): unsure at all n locations; Clone ID: 701124304H1
cttgggagantttaagagaaatactactatagtataatcttttgcgttgattgaacaggattaaaaaaacagaatgtgtgtgtctccctctctcttcttgtttttgaacgccttcaattcatttgggcatcttatgtacattctgcagtgtaaagatcttcttctctctctcttttcagtctttaatttaacgccgattataaagttgtgggttctaggagtaattggtggcgacatttggggaattcttatccgccgcattcttgt

SEQ ID NO: 41531 - DNA, 257 bp, Glycine max
  Clone ID: 701124307H1
cgggtacggtttcgacttgtttcttcttcgtgtttcttctttctctccttcttccttttcagatctccgctgaggaatcctcggagaaggagttcgtactcacattggatcactctaactttcacgacactgtcagcaagcacgatttcatcgtcgtcgagttctacgccccatggtgtggtcactgtaagaagcttgctccggagtatgagaaagctgcttctatcttgagtagtcatgatcctcctattgttttg

SEQ ID NO: 41532 - DNA, 265 bp, Glycine max
  Clone ID: 701124308H1
gcgcttcaacggcaaccagaagcagccatggccactgcaaggactgtgaaggatgtttcacctcatgagttccgttaaggcgtactcctctcacctcaagcgatccggcaagatggagctgccagagtggactgatattgtgaaaactgcaagatttaaggagttggctccttatgatcctgactggtactatgtcagagctgcttccatggcaagaaagatctacttgagaggaggacttggtgttggtgccttcagaggatta

SEQ ID NO: 41533 - DNA, 238 bp, Glycine max
  Clone ID: 701124309H1
acgccaacgcaaacgcaaacgcgaataagagcgagaacattctcttcagctcaacccttttctttttcgatggctaatcggcacacgattattctaatgcagacctcgcagaacagagcaactaggacgttcatggattatgaatccataactcaggccatggatggcatatgtgcactgtatgaaaggaaactgaaggagttgaatccggctatcagaaatctctcttatgacatta

SEQ ID NO: 41534 - DNA, 270 bp, Glycine max
  unsure (1)..(270): unsure at all n locations; Clone ID: 701124310H1
caaccacccaactaaccctnggncaacttttccgatctgatcacttcgagtaaaaattccaaatgagtcgggcacaggatgcaaaccaatcattcttcccttttggaaatccttttaggatgatatcacctaaaagccctaaaatttcttcacagctgttgttaattctacatgcttttgaagcaactttggaagagaggctgaaaaagcttatncccaagagcaaggatgagatcctcagcttgtcttggatgactttggctatgcagt

SEQ ID NO: 41535 - DNA, 269 bp, Glycine max
  Clone ID: 701124311H1
agtacgtaccaaaccatggcattgacaagtcaattgagaaaccttcttgcagctctagaggctgaggaagcagcccaaaaatccaaaggtaaagtgaacacatacaccaaccatggcgatgggtttcagaacatcactggcactaagaccaacagtggtgcatattctggtgatggtaacactcatcacgccaccaacaactacggtggtggtcctgctataaataatagtggcaatttccagggacatggcaatggaggcttattggt

SEQ ID NO: 41536 - DNA, 270 bp, Glycine max
  Clone ID: 701124312H1
aagaggatatatgatatggtcattgttggacaactttgaatggacaagtggctatgacataagatttgggctatattatgtggacagaggcactcttgaacgaattcctaaactttctgttcaatggttttctagtttcctcaacaacagtagccaccccaacataacagaacacttgagcaagcaacatattgaaagcaaagatgtgagaaatgttggttttgattttatttgaactatcccgtcaaacacggttaacattttcttact

SEQ ID NO: 41537 - DNA, 276 bp, Glycine max
  unsure (1)..(276): unsure at all n locations; Clone ID: 701124316H1
cagcgccagggtanngggtaagatctncnngngtntggtnctcgtcgatnctccatctncnntgcagggaaccccccacgtnagatccgatgncctccgatcatcgttacaaggacggagnctccgttcctctttacgccaacaaagtcggtnccctttcanaacnccagngaaangtatgcggtactttgacctgccattctgtgtaacaggtcatgagaaagatnagactgaagccctcggtgaggtgttaaatggngattcgcttgttagtnc

SEQ ID NO: 41538 - DNA, 265 bp, Glycine max
  Clone ID: 701124319H1
caggggcaggggttagggcaaaacgccggatcagaaaaaaaaagtgatggagatgggaagaaagggcgtaaattggagaatgataatttttctgtagctaattctaattctaatgctaatgttaaccatagtggtggtaagagtagtgtgaataataatattgggaaagagaatgagagttccaatgttggggcttttgatgtaaataggcttcagaagcttaaaggaaaaaaagggaatgggaacgggaagaagaaagatgctc

SEQ ID NO: 41539 - DNA, 264 bp, Glycine max
  Clone ID: 701124325H1
ggttcatagaaggagaggctcatgagtttgtgggtgcacttcaatggtggaaccagattgatgactcagatcaatggcagagaggcacttactatgccctttgtgccgcttatacgttggtctcctttgttgccctggtgcaacggtacgaattcaaaggagggtacctgagtatgggtggacaacgcagaaggttttccatttgatgaatttgttgtcaatggattgagggctgtcctttcggtttttacagaagtgtttttg

SEQ ID NO: 41540 - DNA, 266 bp, Glycine max
  unsure (1)..(266): unsure at all n locations; Clone ID: 701124326H1
gttgaagccgnntgcaacccaatcattagtgctgngtatcagagatctggaggngccccaggcggtggtggtgcatcaggcgaagaagacgaggacgattcncacgatgagctctagattagtcggagtctgttaaatttttatgatagctgggaattaagaagtcccctgcgcttgcttttttggnggcgatgataagatactttgtgaaatacttgtactttacttttttgcttagttttacgacgaaacttcttcagctgtat

SEQ ID NO: 41541 - DNA, 269 bp, Glycine max
  Clone ID: 701124328H1
gcagaggaaaaggggaagaaaaatgttgagtgcgacggcgatgcggcgcgttattgggtttgggaacccagatgtactccaatgctctccgcaaactcccctacatgcgccatccgtgggagcacgtggtcggaatggggttgggcgcggtgtttgtgaaccagcttctgaaatgggaggcccaagtggagcaagacctcgacaagatgctcgaaaaggccaaggccgccaacgaaagacgttatatagatggagatgatgattaatgc

SEQ ID NO: 41542 - DNA, 272 bp, Glycine max
  Clone ID: 701124332H1
ggggaattcaagcactttgtaattgttaagttcaaggaaggtgtggccgttgacgagctcacaaaagggatggaaaagttggtcacggagattggtgctgtcaagtcctttgaatggggacaagacattgaaagcctagatgtgttgagacaaggtttcactcatgcattcttgatgacattcaacaagaaagaagactttgttgcatttcagagccacccaaatcatgtcgagttctcgacaaagttttcggcagctattgagaatattgt

SEQ ID NO: 41543 - DNA, 270 bp, Glycine max
  Clone ID: 701124333H1
ttttaacttcctctttctacatttcattcaaaacaatcatggcttctcttcattccattacattttcaacaaaaactgtcctttatgtatttgtattggcctcttccatcgcagcctctgctggcaacttctaccaggattttgacgtaacttggggagatggtcgtgccaagatactcaacaacggcgatcttctcactctttcccttgacaaagcctctggctcggggtttcagtccaaaaacgagtatctctttggcaagattgata

SEQ ID NO: 41544 - DNA, 266 bp, Glycine max
  unsure (1)..(266): unsure at all n locations; Clone ID: 701124334H1
ggaaggggtgtaacggctccttcttccgcgcgtttgacatggacgacaatggggacgagtgcatggatgagtactttcataaacccgagaagaagcgtcgtctctccatgaaccaggttcagtttctggagaagagtttcgaggaggagaanaagcttgaaccggaganaaagaccaagcttgcnaaagaccttggtttgcggccacggcaattgctatttggttccagaaccgtncgagctcgctggaagaccaagacgctggag

SEQ ID NO: 41545 - DNA, 264 bp, Glycine max
  unsure (1)..(264): unsure at all n locations; Clone ID: 701124337H1
gattggtgggatccccctgtnggtnncaccgccgaccgaccctgatcttctgtgaagggttcgagtganagcatacctgtcgggacccgaaagatggtgaactatgcctgancggggcgaagcaggaggaaactctngtggaggcccgcagcgatactaacgtgcaaatcgttcgtctgacttgggtataggggcgaaagactaatcgaaccgtctagtagctggttccctccgaagtttccctcaggatngctggancccgcg

SEQ ID NO: 41546 - DNA, 220 bp, Glycine max
  Clone ID: 701124338H1
gggatcatccacaagattgaggagaccctccatgtgggagggcacaagaaagaggagcacaaaggagaacaccatggtgagcacaaaggtgaacacaaaggagaacaccatggtgagcacaaaggtgaacacaaaggagaacaacaccatggggagcacaaggagggacttgtggataagatcaaggacaagatccatggtgatggccatgacaagggtg

SEQ ID NO: 41547 - DNA, 263 bp, Glycine max
  unsure (1)..(263): unsure at all n locations; Clone ID: 701124339H1
attctattctaagattttgagaatgtctagctgtgggtgtggaagcagctgcaactgtggcagcaactgcggttgcaacaagtactcttttgacttgagttacgttgagaagacaaccacagagactctagttttgggtgtngggcctgtgaaggcccaattggagggtgctgaaatgggtgttgcatctgagaacggtggctgcaactgtggatcaagctgcacctgtgacccatgcaactgcaagtaaggtcaagatgtat

SEQ ID NO: 41548 - DNA, 263 bp, Glycine max
  Clone ID: 701124340H1
attctattctaagattttgagaatgtctagctgtgggtgtggaagcagctgcaactgtggcagcaactgcggttgcaacaagtactcttttgacttgagttacgttgagaagacaaccacagagactctagttttgggtgttgggcctgtgaaggcccaattggagggtgctgaaatgggtgttgcatctgagaacggtggctgcaactgtggatcaagctgcacctgtgacccatgcaactgcaagtaaggtcaagatgtat

SEQ ID NO: 41549 - DNA, 266 bp, Glycine max
  unsure (1)..(266): unsure at all n locations; Clone ID: 701124342H1
atgggtgnngttttgacttataggcatgnattaggaatgaactataatttcatccgtccagacttgattgtgggatcatgccttcagactcctgaagatgtagacaagttgcgtagaattggagtgaaaactatattttgcttacaacaagattcagaccttgaatattttggagttgatattaatgccatacgagaatatgccaagacatgcaatgacattcaacacttgcgtgcctgagataagggactttgatgcatttgatc

SEQ ID NO: 41550 - DNA, 268 bp, Glycine max
  unsure (1)..(268): unsure at all n locations; Clone ID: 701124346H1
ccacaacacaaattaaagttagtgngacgtacccttattatggccaaagaaggtcttggacttgaaatcactgagctaaggttgggtctacctgatgcggagatcaagtaagtgtagtcaataagaaaaatgagaagaagagggcattctcggaaattgatgatggtgttggagatgaaaatagctcctccggcggaggcgaccggaaaatggagacgaataagagtcaagtggtggggtggcctccggtgtgctcttaccggaagaa

SEQ ID NO: 41551 - DNA, 202 bp, Glycine max
  unsure (1)..(202): unsure at all n locations; Clone ID: 701124347H1
tcactatcataacttgagttgaacacgttcccgagacatctcaaatttcctctgctgagaatttcacgagtatcaggtggtttattcaaccaacagtggatcttcaatttgttggtttcagngttcttgtatgtgtgttttcattttgatgagttcatgtttatgagccacaaatgcaagtgggaacgaagaatggggtttg

SEQ ID NO: 41552 - DNA, 238 bp, Glycine max
  unsure (1)..(238): unsure at all n locations; Clone ID: 701124349H1
atttccttcaaagtgaagacggcttgcatgtgantggaacacaatgtgttanancttttggggatgagcagcttgcagtggatttgctagctaatcagcttctttttgaggccttaaattactctcatttctgcaagtatgcttgctctgangaaaatcctgagctcttggacatggcnnnnncagttgaaggtggatttantgttgcntttgatgcccctgatggctccaacantgt

SEQ ID NO: 41553 - DNA, 261 bp, Glycine max
  unsure (1)..(261): unsure at all n locations; Clone ID: 701124352H1
ataaatctagctccaattcctaatcacctggttaanttcnncacatanancnatnggggatccaacgttaacatgaagaatgttttagtaaggtcagctgcgngantctgcttggcngcggtgggcggagtactaccgccagctctcaacggnggcgatcgtggaacaganacaccagcacggtggcggcgcgtttggaagcttccattgcggaggatgtnnantcttccagaggtaaaggancagcactcagaggagaaa

SEQ ID NO: 41554 - DNA, 53 bp, Glycine max
  Clone ID: 701124353H1
attgaggaatacgtaggagcaaagggaaacacccttgtcgaccacaaaaagag

SEQ ID NO: 41555 - DNA, 264 bp, Glycine max
  Clone ID: 701124354H1
gcaaatttctcttagcaatttagccttcaagacccctcaactcttcccaatacaccaccccattttccctccaaagccaccactgaaccaccaagtttcaacgcagagccatgtcaacaatgtcctgaaaggttcgtcggggtatttgtccgaaatcagcaaagtgattgatcacgaagaacagtaccgggtagcccggtcgcaggttagccgtaaagttttggacttggaaggttattccatagagggtctttcagttggagg

SEQ ID NO: 41556 - DNA, 260 bp, Glycine max
  unsure (1)..(260): unsure at all n locations; Clone ID: 701124356H1
gtatatgcttagctattantgggtatcanctcagtttcataaganatgccaagnatttgctgagtnctacngaagtgcncntcnnctatttggnatacacatcagtggaatctctctcagattcatncaagctggatcnggcagtgattggtccctctctgnncttcntggggatnacanctanaacttnggagagctacttgcccatactngnattaanatnccnnctggggacannagtggaatggcttactanattg

SEQ ID NO: 41557 - DNA, 265 bp, Glycine max
  Clone ID: 701124357H1
gcgccgtctccgatctccgacaatggcgacccaaatgagcaagaagagaaagttcgtagctgatggagtgttcttcgctgaactgaacgaggttctgacaagagagttggccgaggacggttactccggcgtggaagttagggttacgccgatgcgcaccgaaatcataattagagccaccagaacccaagctgttctcggtgagaagggaaggagaataagggaacttacctctgtggttcagaagaggttcaagtttcccgag

SEQ ID NO: 41558 - DNA, 248 bp, Glycine max
  unsure (1)..(248): unsure at all n locations; Clone ID: 701124358H1
atnttatgtctgatcattttatcatntacatactaattataaacattatgtgtcaataaggtgaattcccatttaatgtgtgtaagaaaagtcttacaccaataccacatattaattaaattctttataaatattatcgtttttggtgtgttaatctatgatgaacttttgtctggttgttgcattggttttgcaacgcagtgacaagcaataaatgtccatctgttgctctcatgtttcaaattgga

SEQ ID NO: 41559 - DNA, 268 bp, Glycine max
  unsure (1)..(268): unsure at all n locations; Clone ID: 701124359H1
ggncaggnacttgngtgtgccttattccctctgattctggaacaagttcccgttctttgcttatctttctccactgttttattttctccctgatcttcctctaccttaatttcagtcctatttgttcttctgacagatactcttttaccttcaccagctcattcttcttctatcttcttctgctatatatgctcaacctttaaaggaagtacatgagactcttaaaagagggtatgctttaaagaccagaatcagaagctgattaaag

SEQ ID NO: 41560 - DNA, 267 bp, Glycine max
  Clone ID: 701124360H1
gatagcttggatcttagctataacaatctcacaggtaagctacatagagaatttgctactctgtcatatataaacctttcgtacaattcatttgacttctcgcaagaccttgagtcagagtttccagactattgttattttggggaagactcattaattagttaccacatgccaaatttcacatcctgctaccttacacatatcaattctgtccaccaaaccaatcctcgaactaaaaaaggcaagcctttcatgttaattgttctt

SEQ ID NO: 41561 - DNA, 267 bp, Glycine max
  Clone ID: 701124363H1
gccgcattccaggagggtaaaagtcaaggtcaaggttcagaaggaggttctgaatggagcaatactcgaacagtcttatcccgtcgagtatgttcaacaagaacatatgtgtgaatcctgttctagggtccaagctaatcctgaccagtgggttgctgctgtgcaactcaggcaacacgtttctcacaggcgtactttcttttatttggagcagctgattctgaagcatggtgctgctgccactgctatacgaatcaagcagatgga

SEQ ID NO: 41562 - DNA, 268 bp, Glycine max
  Clone ID: 701124364H1
gtgggagataaagttgcctatgcacttcaacaaggtctaaaagttattgcatgcattggggagactctcgaacagcgtgaagctggtacaacaacggctgttgtttctgagcaaacaaaagcaattgcagctaaaatatcaaattgggacaatgtcgttttggcctacgagccagtttgggccattggaacaggaaaggttgctactcctgctcaggctcaagaggtccatgctgatttgaggaaatgggttcatgacaatgtgagtg

SEQ ID NO: 41563 - DNA, 263 bp, Glycine max
  unsure (1)..(263): unsure at all n locations; Clone ID: 701124365H1
gtattaccaggngggttatgcaaattatcaagataatggtgggtattcaaaccggggacgaggtggtgggcgangtanaggttgggggtatcgtggtactggttatgatggtggcangggtggaggttcagggtatgaaggtggcagaggtggaggtggttatgaaggtggcagaggtggaggtggttatgaaggtggcagannnantggctatgaaggtggcagaggtggtggttatgaaagangcagaggaggaaggggtt

SEQ ID NO: 41564 - DNA, 263 bp, Glycine max
  Clone ID: 701124367H1
ctcatggcttcagattccaaaaaggatttccctgctgatgacaaagctggaacagcagagaataaagcatccaaagatgaaacgtcatctaaagattctccagcagcacaaagagctactacagctacttctggacctgcaactggttttccaggcaacccttttgatttctctgcaatgtctggcctgctcaatgatccaagtatcaaggaattggctgaacagatagcaaaagatccatcattcaaccagatggctgagca

SEQ ID NO: 41565 - DNA, 261 bp, Glycine max
  unsure (1)..(261): unsure at all n locations; Clone ID: 701124368H1
acacactcactcaccactgtgtccgtgtgtttgtnggttttcttttcctatccactctcaacatagcaaccagcaactgcttcagtttctattttcagtagtttgttccaagtttctgatcaatggaacatagtttgaaaagaaagtctccagatngtggagacaatttactcttcaacagattttctctggatgaccttaatgaagatctcttggagagggtantttcatggctaccaacttcctcattttttcgcctca

SEQ ID NO: 41566 - DNA, 254 bp, Glycine max
  unsure (1)..(254): unsure at all n locations; Clone ID: 701124370H1
aaaagcttcagtgaaagaaaatggcgttgtacctggacgaagaagagatttggaagtgcccgaagcatccatacgaagcgaagaagaagcggaatttgccatatttgccttcgcgaccgtctcgtaactctttgccctgactgtgctaacgtgcgcccctgttcctgctacgnnnnnnnnnnnnnnnnnnnnnnnnnnnnnncgtcttccttctcgcgtttttccggngccaggaactccgtcggccgcgtcca

SEQ ID NO: 41567 - DNA, 260 bp, Glycine max
  unsure (1)..(260): unsure at all n locations; Clone ID: 701124371H1
aatgactcaagcccagattcaaccagttaaacttggaacccaaggctttgnggtttcaaaattggtcctcggatgtatgggccttactggagcgtacaatgaccctctccaagaacaggatggcatatctgttatcaagtatgcgttcagtaagggaatcacattttttgatactgcggatgtttatggagccaatgctaatgaactttggttggaaaggctttgaagcagctgcccagagaaaagattcagatagccac

SEQ ID NO: 41568 - DNA, 263 bp, Glycine max
  unsure (1)..(263): unsure at all n locations; Clone ID: 701124372H1
ctcaaccctgataggctgggtgagctcaaagcatttgatgacacaaaagctggtgtgaaaggccttgttgatgaaggggtcgcaaagatcccaagattatttcatcatccacctgatgaatttgtcagggcttcaaagttaggcaacacagaatacactatacctgttatagaccttgaagaagttggcaaagatccaagttcacgccaagaaattataggcagaataagggaagcatctgagagatggggtttctttnnnnt

SEQ ID NO: 41569 - DNA, 242 bp, Glycine max
  unsure (1)..(242): unsure at all n locations; Clone ID: 701124373H1
gctggaccctccggctcctccgatngaggggtaggagtgaantggctctgcatgagccctaagcgagatcacaaccccgaaaactatgacgaccttcaattcgagttcaatcctaatctctcgcctctctcgagcactatttgcctcctcatatgctcaacctctcacgcgatgttaagcttcactacatcaggaacattcttcttcgctatttgcctgagaatgaccgcaactggattcaa

SEQ ID NO: 41570 - DNA, 260 bp, Glycine max
  unsure (1)..(260): unsure at all n locations; Clone ID: 701124374H1
tgccatttctttccattatcttaagatatgatgattgtaattggagctgaatatgggttgtttgaataattgtttacatgttttctatgtctattatatttcctagtacaaattctggttatatgagatcaataacatgggctatattgttgctgtgttttgcaaatcatcataaatgcaattatgatnagttttgcattgtatttggttattgaatctcagtgactgtaaaaatatttctatgctgtactaaattttta

SEQ ID NO: 41571 - DNA, 247 bp, Glycine max
  unsure (1)..(247): unsure at all n locations; Clone ID: 701124375H1
gcaggctcgtatcttctctgattcnatcctcccttccgtaganctcaatcgaagccctcaaattccgcatcgacatcgagntcncacgtcatccaaccgtgcctcaccgcacggatacttgctgaaccgcgtcgccgagtacgccaccgccgcggctgctgctaccgnnnnnnnnnnnnnnnnnnnnnnggggaagaaggagctcggcggcggcgggaagatcaccgatgaattcaccgggaagggc

SEQ ID NO: 41572 - DNA, 255 bp, Glycine max
  Clone ID: 701124376H1
gtttgtccatggtggaacgggccttgcttatttgaggcacttgacgctattgaagttccactgcgagatcccaaaggtcctttcaggatgcctattattgacaaattcaaagacatgggaactgttgttatgggcaaagttgaatctggcagtgttcgtgagggagattccttgttggtcatgccaaataaggatcaagtgaaagttgttgccatctttattgatgaagatcgtgttaaacgtgctggacctggt

SEQ ID NO: 41573 - DNA, 268 bp, Glycine max
  unsure (1)..(268): unsure at all n locations; Clone ID: 701124378H1
cngccgcanangcctccntcaaaaactangcngtacgcattagcngatgccaaaaagacggctgtaacggntatggctgntgagagcgtcgttgagtccccagtgaagaggcagagagatgatgatgaagaaaatgaggtctctgtttccatggatgtggagggtggcaaagaccctgnttagtaacggtttatnatctgtgattcctgggtggttctctgaaattagttcaatgtggcctggagaggctcantccttgaaggtggaa

SEQ ID NO: 41574 - DNA, 257 bp, Glycine max
  unsure (1)..(257): unsure at all n locations; Clone ID: 701124379H1
cttgtatacgtcgccgcttcagcgnagaacatgatcattcccgagaagaaccgtaaagagatctgcaaatacctcttccaagagggagtttgctttgcgaagaaggacttcaatctggcgaagacccggagattgatgtgccgaatctgcaggtgataaagctgatgcagagcttcaaatccagagagtacgtgagggaaacatttgcgtggatgcactattactggttcctcaccaacgatggaattgagttcctt

SEQ ID NO: 41575 - DNA, 260 bp, Glycine max
  unsure (1)..(260): unsure at all n locations; Clone ID: 701124380H1
tgcttctcaattgtntgggcttctgcggttccatgaacattactcatnccaagctncatctcagagaaagtatccaacggtaatagaagagttgtgccatcaattttctctggccgatcttaggaaatccaccaacaacttcgatcaaaacagagtaattggacgtggattatttagtgaagtatataaaggctctgtacaacataagggtgcttctgattatactgttgcagtaaagcgattcaatgaacgaggattgg

SEQ ID NO: 41576 - DNA, 243 bp, Glycine max
  unsure (1)..(243): unsure at all n locations; Clone ID: 701124381H1
cgagaatggacaaggaagtggagcntggttcccntgaangtgaagtggccacccagcncantncanaaccacagaagcgnnnaggnggtcttgttaccatgcctttcatcattgcaaatgaggcacttgccgagggtggcaagtntgggcctttgcccaacatgatactgtatttgatggggacctncaggcttcacctngcccaagnaacccagatacttcnctggtcccatgctnccagca

SEQ ID NO: 41577 - DNA, 261 bp, Glycine max
  Clone ID: 701124383H1
tgctgcccaaactatgaagttatccgataatggagctcgaaaacgaaaaggaaaacatagtgaaaagaaaattaaatttgtcaaatatgacctccatcaaaactctgagccagtcaaagccagtactttagccgcagatgatagttcaagtggtgagagtgaagttgaggatcctgtttcggatacagatgcataaagctagaataacaaactgttatctgtgtaatcatgttatttacctactccaactagataccacag

SEQ ID NO: 41578 - DNA, 261 bp, Glycine max
  unsure (1)..(261): unsure at all n locations; Clone ID: 701124384H1
ggaaagagccacaaggcgaacggaaagctgtcgccggagactcggaaggatcngaagtcggcgacggggctgagcggatcgccgaagaagggaggccacggcgggaagttcacgtggatcggccacggctacgagcaagttgagatgccgcacggtgctatggacgccaaggacccgaacttcgaggatcctgtggagatcgccaccgtgtgatcgcggtggtttccggtggccaggtctgtaaatagtagtaattggcga

SEQ ID NO: 41579 - DNA, 260 bp, Glycine max
  unsure (1)..(260): unsure at all n locations; Clone ID: 701124385H1
gatgaattaaacctcatctcgaagaaagtgaattcaggtagtgttggaggttgtgatgtccaacatgatgttccagcagtgttcttctcnaatgggggctacactggcaatgtttatcacgaattcaatgatggaatcgtacccttatacattacttctcagcatttcaagaagaaggttgtgtttgtgattcttgagtatcataatggtggatcatgaagtatggagatatcctttctcgcctatcggattttccgcca

SEQ ID NO: 41580 - DNA, 259 bp, Glycine max
  unsure (1)..(259): unsure at all n locations; Clone ID: 701124386H1
tagcgtangntggtgcgattgaacgatacgatgggaagangaaaattcaagagcaagcccactggtcgccgccagttctccaccccggaagatatgattgctggaacctctaaccgtcctcgaacttttagacagaaagaagctgancatgaagaggaagaacccgaggaagtatctggagatgaatctggagaagaatctgaagaagaaacttctaaganaaaaggaacacaaggggttattgagattgaaaatccca

SEQ ID NO: 41581 - DNA, 262 bp, Glycine max
  Clone ID: 701124388H1
caagaccttaaggaattccgacaatggggaagcagaactcctggacatcctgagaactttgagacccttggagttgaagtgaccacaggtcctcttggtcagggcattgccaatgctgttggattagcactagctgagaagcacttggctgcacgatttaacaagcctgacaatgagattgttgaccattacacatatgttatattgggtgatggttgtcaaatggagggaatttcaaatgaagcatgctcacttgccggtc

SEQ ID NO: 41582 - DNA, 262 bp, Glycine max
  unsure (1)..(262): unsure at all n locations; Clone ID: 701124389H1
gttacaattacacactttcactagctnttacactttttgagggttttttttttattctactatatatgggggcaagctcgggtatagtactagaaatcacagttatatcatgcgaaaaccttcgtgtcacggaggatccatacgttgtcgttagggctgagtcgttaaattgttgcacctcgaatatagcgaaggattgtgggagcaacaaaacgagtttgttttcgtggaacgagaagttgatgctgaacatgcccatgca

SEQ ID NO: 41583 - DNA, 242 bp, Glycine max
  unsure (1)..(242): unsure at all n locations; Clone ID: 701124390H1
ctgtaaacagatactgcaaaagaancataatattnaatatttggttgggntnaatccctgngttgaagcgttgcagacatcacggctatnctaagagtgtctcgctctctcattcatgtcccaactgtacgacggangacaggttgcgtaactgccaccaacccttcgccgcacggtgggcgtggtgctttgccttctgaaggtggtagcccttcagacttgctcttcttagctggtggtgg

SEQ ID NO: 41584 - DNA, 263 bp, Glycine max
  Clone ID: 701124391H1
cttcgttgcttggtgatgtccctttctgttctcttcactcttggtcttgcgagagaaagccatgccagagacgaagatttttggcatgctgtttggccaaacactcccattccaagttcattgcgagatcttctaaagccggccctgcaagtgttgaaatcgatgatcaccctatgcaaattgaagaaacacagtacccgaaaaccttcttctataaagaagaccttcatccaggcaaaacaatgaaagtacaattcagcaag

SEQ ID NO: 41585 - DNA, 265 bp, Glycine max
  Clone ID: 701124392H1
ggttgacgaacagatgatcaatgttcagaacaagaactcatcatactttgtggaatggatccccaacaatgtgaaatccactgtctgtgatatccctccaactggtttgaaaatggcatcaaccttcattggcaactctacctctattcaagaaatgttcaggagggtgagtgagcaattcacagctatgttccgcagaaaggccttcttgcattggtacactggagaaggtatggatgaaatggagtttactgaagctgagagc

SEQ ID NO: 41586 - DNA, 265 bp, Glycine max
  unsure (1)..(265): unsure at all n locations; Clone ID: 701124393H1
attatatttgcagtggagaaggaaagaatatctatctctcattctctcgtgcctcaacgcttttttaactcctttcgcttttccattccaacctctttcacacttcagatctgtttcttcatcggttgtncaagtaaatagcctttntnaccactgctgaagtgtgtgatgcgaacccacagttaattttgagtggggagcttcgtgcccttcagccagtttttcagatttatggccgtcgacaggttttctctggacctatagt

SEQ ID NO: 41587 - DNA, 267 bp, Glycine max
  unsure (1)..(267): unsure at all n locations; Clone ID: 701124394H1
cttctttctccaacttcacacacaaaaaaacanngcaaaggatagancaattggtgtggctctagatttctccaaaagcagcaagaatgctctgaaatgggcatttgagaacttagccgataaaggtgacaccatttatgtcattcacatcaacccaaactctctagacgagtcccgcaacaagctatgggcaaaatctggttctcctcttattcctttggtagagttcagagagcctgagattatgaaaaagtatgatgttgaaat

SEQ ID NO: 41588 - DNA, 266 bp, Glycine max
  Clone ID: 701124395H1
gcaactacatcagtccatggcaacccccaaccctaccagattctcccttgccatggagagaaccgggcaatgggttttctccccagaaatcccaaccgatgttattgttgcagttggagaatccactttttctctccataagtttattctggcggctaagagtaactacatcagaaaagtgataatggaatcagaggagagtgacctaacaagaatagagatttccaacatacctggaggacaagaagcttttgagaaagccgcga

SEQ ID NO: 41589 - DNA, 268 bp, Glycine max
  Clone ID: 701124396H1
gcatatggcagaggagagctttgatctccgcccggaccttattttctggctctgcttctcactgcttcatcatcttcccatgcgatctcgcttcgcttcgccaaagctaatgctccttcttcttcacatgtcattttcaattttgcacgtgtggacagatattggttttctactcaacccgccctagagcttcccgcgagcaagatcgtggacgtgccgttggcacaaactggtgaaggcatcgcagaatgtgagcttctcaaatggt

SEQ ID NO: 41590 - DNA, 260 bp, Glycine max
  unsure (1)..(260): unsure at all n locations; Clone ID: 701124405H1
gggaattctatgcattgtatgttcaagaaggattggatttgagtngcaacaataggnagaagaacgncaagaaagggtttgannnagttctgaagattggcngaagagcttggtttgagtgtancaggagcatcaaaacatgatctgaatatggtggctgataaccgtccccatcagggtttggttttagacgcttcaanagctaggagatggtgnaagtaaatgaatggatcctgtttntattgatgaagggnaaggtt

SEQ ID NO: 41591 - DNA, 100 bp, Glycine max
  unsure (1)..(100): unsure at all n locations; Clone ID: 701124406H1
ttgnatcttcgttatccttntttttntctccttgaactcgnntattcantatgngcaaatgaggtggttctggtaggttntnngggcaagtccatttngg

SEQ ID NO: 41592 - DNA, 259 bp, Glycine max
  unsure (1)..(259): unsure at all n locations; Clone ID: 701124407H1
ggggcgancaagaacntccacacncataagctacagtgncgctcccncttccnatgtcnacgatccggnagttcnttggacntcggggctcgtgccgctgnttgngggcggttaacgttgtggtgtnctnngtggtcatgtctgtcaacgattgccccagggaaaatctcgggnnttggaaggggattgtggtcgccangttncngggtcgcctnnccttntcngccccttaggganaatccgttanttgggccccttc

SEQ ID NO: 41593 - DNA, 51 bp, Glycine max
  unsure (1)..(51): unsure at all n locations; Clone ID: 701124408H1
gcgctcaacggnanccagcngcagccntggccantgcaaggnctgtgaagg

SEQ ID NO: 41594 - DNA, 255 bp, Glycine max
  unsure (1)..(255): unsure at all n locations; Clone ID: 701124409H1
ctcctatctatctttaaggaaattgcttcttcgggctggttgttntaaatctgctttcgtccaagatcggancttacaattgctttgcttctcagtcctcccctctaccgagccacaaccctagttaccggtaaaggtttattcgaaggcacgaaagcatacagaaaagaaaatgggggcttgctactcttccgtccagaagaaaatgccattcgcatgaagactggtggcccaaagaatgtgcatggcatcccc

SEQ ID NO: 41595 - DNA, 137 bp, Glycine max
  unsure (1)..(137): unsure at all n locations; Clone ID: 701124410H1
tgattgctaaatctgtgtgtgtggcttaatgcaagatcatttaaatattttgcattangattttcgtgcatattttagatgtctgaatgatatgcaattttttttttggaaggcaaatgatatgcaatttagtgaga

SEQ ID NO: 41596 - DNA, 122 bp, Glycine max
  unsure (1)..(122): unsure at all n locations; Clone ID: 701124411H1
gagacnatttggagctcgttgccgntagntaccctttcatannancggttggtggacgnaaangngnnaatactaaccgtgtttcncggagactgnaagcatcacgangtcagcgttaaggg

SEQ ID NO: 41597 - DNA, 255 bp, Glycine max
  unsure (1)..(255): unsure at all n locations; Clone ID: 701124412H1
aagatgtgangcttttgggagttgttggaagcncgtttgtntgcagggtccagattgccctcaaattgaagggaattgaatgcaaatttntggaagaaaatttggcaaacaagagtgatctacttctcnaatccaaccccgtttacaagaaggttccagtgtttattcataatgagaagcccatnccagagtctcttgtgattgttgagtacattgatgagacatggaagaacaaccccatcttgccttctgatc

SEQ ID NO: 41598 - DNA, 257 bp, Glycine max
  unsure (1)..(257): unsure at all n locations; Clone ID: 701124413H1
gcgaggataaagatggaggggaaggagcaggatgtgtcgttgggagcgaacaagttccccgaganacagccaattgggacggcggcgcagagccaagacgacggcaaggactaccaggagccggcgccggcgccgctggttgacccgacggagtttacgtcatggtcgttttacagagcagggatagcagagtttgtggccacttttctgtttctctacatcactgtcttaancgttatgggagtcgccggggctaa

SEQ ID NO: 41599 - DNA, 260 bp, Glycine max
  unsure (1)..(260): unsure at all n locations; Clone ID: 701124414H1
gtacggtgnggagaagggaaggtgagtagtaatggtcatggatgttgcaaatcagggccaggctatgcttccccactggaagccattnctggtcccagagagtctctcatttatgtaacctctgtctacacagggaccggaaaagagaagccagactatttggcgacagtggatgtggatccaaactctccaacttattccaaagtcatccataggcttcctgttccttatttagtggacgaattgcatcacacaggctg

SEQ ID NO: 41600 - DNA, 264 bp, Glycine max
  unsure (1)..(264): unsure at all n locations; Clone ID: 701124415H1
ancactgccactcttcaatcacactaatggctgtnaccttctcagatcctcacaccgaagagggnatcaaatccctcgatcaattcctttctgggaaaacctatatctctggggatcaattgacaaaggatgatatcaaagtgtatgcagctgttgtggaaaagccaggagactcttttcctaatgctgcnaagtggtacgatgccgtctcttctnaacttggntccaagcttccctgggcacgctcaaggggtaagattcagt

SEQ ID NO: 41601 - DNA, 266 bp, Glycine max
  Clone ID: 701124416H1
ttctcacacttacaaaacacgcatcttaagcgcttgaagaatgaaagtctcaagggtgtatggctttcaaagagatcaattcatgaagtttcataggaaaactagattgacctcttcagtgacacttggtagtgtccaaagaagggcatcacaagggtcattagggtgtttccctccatcatgcattttcaggcaagtgttttacaagttgaagagtcgattgaagcaagctttggtttggcaaaggagtagtagtccacagtata

SEQ ID NO: 41602 - DNA, 260 bp, Glycine max
  unsure (1)..(260): unsure at all n locations; Clone ID: 701124417H1
tgancatcctctcgtggtcaggcaatgtcatctgctgttcttcaagcagaggaagtccaatcaaatttggaaagagaattccctagttttgtgaagtctttagttagatcacacgttgctagttgtttttggatggggctgcctgtgtcattctgtaaaagacacttaccggataaggatacaacattcattttggaagatgaatctggtnnnnaatacatgacaaaatacattgcatgtaagacaggattgagtgctng

SEQ ID NO: 41603 - DNA, 258 bp, Glycine max
  unsure (1)..(258): unsure at all n locations; Clone ID: 701124418H1
gtttgaaggcatcagagatagcgaagaagttgaatctgcaacctcacccagaaggtgggttttacgtggagacattccgagaccattccgtccagctttcgacctctcagctcccccccgaatacaaagtggatcgccctgtatcgacctccatctattttctcgttccttctgggagtgtgtctcgcctccatcgcatancctgcgccgaaacctggcatcattacatcggcgaccctctcaccgtatgtatatctt

SEQ ID NO: 41604 - DNA, 239 bp, Glycine max
  unsure (1)..(239): unsure at all n locations; Clone ID: 701124419H1
aatgcaagctgcgtcttcaggcatcggatacggtctaaaatatcaggctaggtgcatatcggatgttaaagcagacacagtcacactagcttcctcgtggcatctcagcctcaaagaagaaatgaggactactcgatattgttctaagttgtcctgtagaattattgagtgaatcgttccatgtaggtacatctgattcggctttcgtcgagtggactgaantctctgcgaggatgttc

SEQ ID NO: 41605 - DNA, 256 bp, Glycine max
  unsure (1)..(256): unsure at all n locations; Clone ID: 701124420H1
tttgagctttcccacaactcaaagaatgccagtnttcatttctgtngatacaaggcattttatgatgctggcgatgatagcnaggaggatgaatttactgatagcgaagaggatgttccattgcttaaagcagagaatggaaaacctgaaacaaaagctgaagagttgaaggtacctgaatctaaaaaagctgttgccaaggctagtgcatcagcaaaacaagtcaagattgttgaaccgaaaaaagacatggaag

SEQ ID NO: 41606 - DNA, 179 bp, Glycine max
  unsure (1)..(179): unsure at all n locations; Clone ID: 701124424H1
ttgactcggttccgtttttnatctcgcggatctaatattaaggaatagntaagggcaattacaatgaaggcattgatctggttgggggattggaaaaggcgagcatgcatcgtcctagcctgtgttgtaagcagtttgacgtganctagcatgagcgagatgtacacatcacaagtagt

SEQ ID NO: 41607 - DNA, 240 bp, Glycine max
  unsure (1)..(240): unsure at all n locations; Clone ID: 701124425H1
aaagcnggntactgtntgttcaagctaccatctctctctctcnntnttagtgacttncntgccaggtgntgccactctcnctttctctctcttcatccttctgttgggttngttgtggagtgttgttttctgttgtgcacgtgttgtcattttttaccctcgccacagatctgaagtgttcaagtttggnttntgtgcntctgggttggnttgttttgcctttcctcaacngggtcgacc

SEQ ID NO: 41608 - DNA, 252 bp, Glycine max
  unsure (1)..(252): unsure at all n locations; Clone ID: 701124427H1
ttgtgtgcntgtctntntnttntctcacctgaaaatgtnttgctggcngtggtaactgtggttgcngaagcgcctgcaagtgcggcaacggctgcggaggctgcaagatgtacccagacttgagctacaccgagtcaaccaccaccgagnccttggtcatgggagtggcaccagttaaggctcaattcgagagtgctgaaatgggtgttcccgctgagaacgatggctgcaaatgtgnagcntnnntgcacc

SEQ ID NO: 41609 - DNA, 261 bp, Glycine max
  unsure (1)..(261): unsure at all n locations; Clone ID: 701124430H1
gnagcgccccttctcttcacccttcccttcccatcttcttccatttccgtaccgtagntacgattgtttctctnnnnnnnnnnnnnnnnnnnnnnnnnnntctattctatcgatcttcaccgcctcgctcgaaccttttcgatctccaaattagggttttcagcttcctcgatgttccgcgcctagattcattccccaattgcctcacagatccacactcaccttcttctcccctcatgttctggaagctcgcctctatct

SEQ ID NO: 41610 - DNA, 264 bp, Glycine max
  Clone ID: 701124432H1
gcacgccctatgctggccttcgggtgtggatatgatcaaacgcatcatggtcaaaatcccccaccttccacagctggggttcttggccttggaaatggcagaacaagcattttgtctcagcttcactctcttggcctaattcgcaatgttgtaggccactgcttaagtgggagaggaggaggctttttattctttggagatcaactcattcccccatctggagttgtttggacacccttattgcagagttcctccgcacaacac

SEQ ID NO: 41611 - DNA, 119 bp, Glycine max
  unsure (1)..(119): unsure at all n locations; Clone ID: 701124434H1
ttctaagcactcacctctttcatacacgtttgtncgcttgttgagaagcntgggcgaaggtnttcgagntnccaagtgtggnacattggaatcctgangagcatnnttnnnnactcgtc

SEQ ID NO: 41612 - DNA, 257 bp, Glycine max
  unsure (1)..(257): unsure at all n locations; Clone ID: 701124435H1
caacatgccaattggtctccttacgataacaacggaggatcatgtgttgcgattgctggagcagattactgcgttatcgccgcagatacgagaatgtccaccggttacaacatcntcactcgcgattactccnnnatctcccaactggctgagaagtgtgtgatggcttcatctggctttcaagctgatgtcaaagctttgcagaaggttttgtctgctaggcatttgatttatcagcatcaacacaacaagcaaat

SEQ ID NO: 41613 - DNA, 253 bp, Glycine max
  unsure (1)..(253): unsure at all n locations; Clone ID: 701124437H1
atgggtggtatgggtggcatggattattaaggggctatttcccctggatgaatcttgctccctttaaatggacgtagattggngtggtgtttcaccactattttgccttttttttcttcttntttattgacagaaggcatcaatgtaatcatagtgagagataagagatcttgggaggnaaatttgctattgttgttgcaatgacattaagggacgtctntgaacaatttcagattccncattattgcacggg

SEQ ID NO: 41614 - DNA, 255 bp, Glycine max
  unsure (1)..(255): unsure at all n locations; Clone ID: 701124439H1
tgtcaatnttgtctctcagaagacaacanagattggacaaaggncatggggtatgatgaaaggggtcatggcattgngcttcacagaaggttgangnattcgctaganataacccgaattggacgtctgataactggcaacnaaatgaaannnntagaaatggtttctaccaggagttcaatcgagaggntnntngccgggattcctctacccnncgnangccaacattcttnnnagtggncaaagtgcncnctt

SEQ ID NO: 41615 - DNA, 252 bp, Glycine max
  unsure (1)..(252): unsure at all n locations; Clone ID: 701124440H1
gttacacaagtctctctgatggcaacctcgacctctttctctccgacagcctctgtccgctccatcatcttccaaaagcaaaaccctcncaaagcccttcttcttctctcccagcagcgntccttcgcctcttccgcaagctatgcaactctcaagctccctcgcagacccctcctttncaaagggagaacgccacttntaaagggtggtaataanngangaattnaanncgganaatgcggaatngggnaa

SEQ ID NO: 41616 - DNA, 250 bp, Glycine max
  unsure (1)..(250): unsure at all n locations; Clone ID: 701124441H1
ttctaagcatggggaaggnnggagatctatgggacgattcagtactcatcaatgccntcgaccaagctatttctacttacaacaaaatgnatagcagcggcaaacacanagacgccgcctcggttcaagaggaggcgaagacactgatcggagaaaatggctccaattttgncactanaaggggtgctgatacgaatattccngctactganggcgcttgattcaggtgaggcnggtaatttgtcgaagt

SEQ ID NO: 41617 - DNA, 249 bp, Glycine max
  unsure (1)..(249): unsure at all n locations; Clone ID: 701124443H1
tcacgaattccgatggatcgccgatctccgccgaagacgcgttcgacaacggccatattacgtccgattttnccgattttcaaccaggatcttctgttctccgacgattacaacggcggcgacggtctccggctgccgataaaggtcttcgtcgaacacgcggatgtttctncgtcgccgtcggaggcgacgacgccggcggaaggaacatactgcgagtggaatccgaaagcggcggtgaagagcaac

SEQ ID NO: 41618 - DNA, 111 bp, Glycine max
  unsure (1)..(111): unsure at all n locations; Clone ID: 701124444H1
aaactggccatcttgggatttggcttgtncgtngattcccccatncatggacgcanttgcatatagttttgtcnatttttaatttgccagccgatatcatacncgncgctt

SEQ ID NO: 41619 - DNA, 188 bp, Glycine max
  unsure (1)..(188): unsure at all n locations; Clone ID: 701124447H1
atataacancccgaaatacnctttgttgttcgtttcagcaacaaagacattgttgcannataatatcgctagcattgtggcgtattgtctgtgagatatgacatggtgcacgnatgctgagaggtaaatagtnactatccgangctacgagccacatctcnntccacatcaggttgtgaaccngttct

SEQ ID NO: 41620 - DNA, 231 bp, Glycine max
  unsure (1)..(231): unsure at all n locations; Clone ID: 701124448H1
cagaaacttcgaaganttcacttggtgacaannaatccaaggatgacatagacttggcatngaacgaagttaataaagataaaacttctgtggatgattctgacttagctgagagtgggaaaaaagacccatttgtcagaaggcaggagctgttgatcaagagtgggcttgcagatagtcttcttgatatatgtattgagagcgtgggagaactgattcagtcaaatttgg

SEQ ID NO: 41621 - DNA, 210 bp, Glycine max
  unsure (1)..(210): unsure at all n locations; Clone ID: 701124449H1
gttcccttgtganttgcgttnagaacttcncanaaagccgtgnggttgtnctgggcatcntncnnaggntacgttggtctcagtggagncatcattanacaactctactttncttnttnctacgacgnttcaaggtccttgattttgctcatagggtggctcccagcnggtatntgcttncagttcccgngnggcagtngctncatgnaa

SEQ ID NO: 41622 - DNA, 245 bp, Glycine max
  unsure (1)..(245): unsure at all n locations; Clone ID: 701124451H1
ganaattgttatccacaacacaacatcatnanaagttacacaagtctctctgatggcaacctcgacntctttctctccgacagcctctgtccgctccatcatcttccagaagcaaaaccctcccaaagcccttcttcttctctcccagnagcgtccttcgcctcttccgcaagtatgcaactctcaagctcctcgagancctcctttncaanggagaaggcactgtaangntgctatatngagaa

SEQ ID NO: 41623 - DNA, 251 bp, Glycine max
  unsure (1)..(251): unsure at all n locations; Clone ID: 701124453H1
ggcaaccagaagcagccatggccactgcaaggactgtgaaggatgtttcacctcatgagttcgttaaggcgtactcctctcacctcaagcgatccggcaagatggagctgccagagtggantgatattgtgaaanctgcaagatttaaggagttggctccttatgatcctgactggtactatgtnccgagctgcttccatggcaagaaagatctacttgagaggaggacttggtgttggtgccttcagagg

SEQ ID NO: 41624 - DNA, 251 bp, Glycine max
  unsure (1)..(251): unsure at all n locations; Clone ID: 701124454H1
gtttatcgtgaggagaatatgaagttgtttgtnttctttgttgctgcagtagttttggtagcatggccatgccatggcgcaggctaccaaaggttccctctccgaatgaaaactggctatggtgagcgttcttcggaggtaaaatgcgcaagttttaggcttgctgtggaagcacacaacatccgagctactaaaaccattcctgaagagtgcgttgaaccaacaaaggactacattaatgggcgaacaat

SEQ ID NO: 41625 - DNA, 251 bp, Glycine max
  unsure (1)..(251): unsure at all n locations; Clone ID: 701124455H1
atgaccactctcccctcccanggtggttggnggagtccctaaatgcagtgaagtacatagactcatgccacttctcagtacctgcaaggcaaganagcngtggagctaatagcaggcaaagagagtgccattgcccaagtggctagaaccatccctggcaaaacctatgtgctctcattctctgttggggatgcaagcaactncatgtgaagggtccatgattgtggaagccttgcaggaaaagacaccat

SEQ ID NO: 41626 - DNA, 249 bp, Glycine max
  unsure (1)..(249): unsure at all n locations; Clone ID: 701124456H1
tcacancagancaacttccgnagggctttgcagtgtgttgtatccagaatggcaggnttctgaacttcctgtgcgtgttgnttnagtttttnctttgcgttctgttnttgaagcttgcaaanatttgnatgaaatccgtcntattcttcctcaactccttgatgantttttcacacttangantgcagntggncatgnggnccttntatgtacatnngggactnnngtggcnaacnttggggaagtagg

SEQ ID NO: 41627 - DNA, 185 bp, Glycine max
  Clone ID: 701124459H1
atcaaagccacgaagattcaggcccattttctccggttatatcaaagaaagggtttgggcttggtgtaattgtccgcaaagcagcatctgctgcatcagtagctgcaaggcatgcttatgcagctgcctctgcctctagccctacttttgatgagttgatacctttgaaatgcagcttaatgtcc

SEQ ID NO: 41628 - DNA, 254 bp, Glycine max
  unsure (1)..(254): unsure at all n locations; Clone ID: 701124460H1
attatttcaagattaacaatngttcgaccttcgttgctgccgcgacanctagagtctnntatctgaactttgtgganctcatatgtatgtaattccctacctgttactgaaatggagttttgaaaaccattcaagtggataaacctcttgcatccaatctttgggaatagtgctgcaatggcttcaagtcaggaggaggtgacccttttgggagctactggaagcccatttgtgtgcagggttcatattggccc

SEQ ID NO: 41629 - DNA, 261 bp, Glycine max
  unsure (1)..(261): unsure at all n locations; Clone ID: 701124464H1
atccttcttctgcaccgcaatgctcttcctcttccctccgtcattagtttgttagttagattacccttttcccttncatgcttangtcaccancgctcaccattcactctctttttacccctaaaccattgaatcgatctaaatctctcccaaatcgcaaaccccttttgctcaattgagtcaattctctccctaagttcctctgtcggcgtctgggtgggtaaaagttgtngttttgtcntctgggttttggagcaaaga

SEQ ID NO: 41630 - DNA, 59 bp, Glycine max
  unsure (1)..(59): unsure at all n locations; Clone ID: 701124465H1
tggtagtngncttctagagcatcacctcctccacctngcnctgnttncctgagacantg

SEQ ID NO: 41631 - DNA, 255 bp, Glycine max
  unsure (1)..(255): unsure at all n locations; Clone ID: 701124466H1
tgaagtgaatgcgacccctgaaattcctcaaagcaacaccatctacatcaacaacctncancgagaaaattaagattgatgagttgaagaagtctctgaacgctgttttcactcagttcgggaagatacttgaggtgttagctttcaaaaccctaaagcacaaaggtcaagcttgggtggtnnttgaagatgcctcttctgcttccaacgccctaaggnanatgcaaggnttccccttctatgataagcccatgg

SEQ ID NO: 41632 - DNA, 254 bp, Glycine max
  unsure (1)..(254): unsure at all n locations; Clone ID: 701124467H1
atttggcaccgagcaggatgtctcgtgggttcattcattggttaaagatgttccctccganangtctgagaagcaacaatatgatcatctcagcaaagagatgcttntttcaccatgggtagaagcaacaatatgatcttcttcagtaaagagatgctgctttcaccatgggtggagcagctgtatatagagcagaagcnaatggtagcatgancagcaanggctgctgcnatgacaatgcttcttggttattt

SEQ ID NO: 41633 - DNA, 252 bp, Glycine max
  unsure (1)..(252): unsure at all n locations; Clone ID: 701124468H1
gcaattcaggtccaaggttccctncataacaatgatgctcnataccaaaatgctctttcccaccttttctctgtctctcagttgaaaatgttgaaaggagaagagatacttgagcaattcgaggcttctagttcttctgagcctgtggcttctttaactcaggaaacagaaagtgaaaaggagaatggaagggaaggtaagggaagtaagaatgatgagataatcaaagagctgaagaaggtgaagaggcag

SEQ ID NO: 41634 - DNA, 240 bp, Glycine max
  unsure (1)..(240): unsure at all n locations; Clone ID: 701124470H1
atgacagaccttagatacccattgaaagctaatacnattcccttttgggctgatccgataatagcaatattgttaccactggctgtttttctcgtttactatttcattcgtaaggatgtctatgacctccaccatgctatactgggcccttctattttccgtactcattactgcggngatgactgntgctatcaaggatgctgttggacggccaaggccagacttcttctggcggtgttt

SEQ ID NO: 41635 - DNA, 251 bp, Glycine max
  unsure (1)..(251): unsure at all n locations; Clone ID: 701124471H1
gaaggttgctgtacctcagataattgcaaataccgaagaaattttcttcgagaaaaccattgatcaatttgaggcatacagcagatatatgttgtaaagagatagaggatattccctgcattttttnncccttacaaaccagaaggatccatggctatgatggtgaaattaaacctttcacttctggaagatattagtgatgatattgacttctgtttncaaacttgcaaaggaggaatctgtgatcattc

SEQ ID NO: 41636 - DNA, 258 bp, Glycine max
  unsure (1)..(258): unsure at all n locations; Clone ID: 701124476H1
ctcgancngctgntanggcgtcgtttctccntgtnccttcgncggangntggaaaangganaaacnnaagggtggtggtggcggcggcgtttctgtgaacnttcggaggactgcnaaganaagcaanntttgtgacggttgcttgncaggtncaaggcaaacgcacaagcccctccgaagaccatgnanaaggttgagaatggtttgccatggttgccgtcgtcgttcgatttcgcacgccccgaggagttttataaa

SEQ ID NO: 41637 - DNA, 252 bp, Glycine max
  unsure (1)..(252): unsure at all n locations; Clone ID: 701124477H1
caggcatggaaatctgcagtcactgaggaccctcttaagattttatcaagttggattggtcccaatgtgtgtgcttacaaaggagtcttctgtgctgcaaaccctcaagatgaaacggttggtgcatcagcagcattcccagttgtagtagcaggcatagatctcaaccatgcaaatctgaaaggaactcttgtgaaggagctctctctactcagtgatttgtcccttctccacctncaacagtaacancnt

SEQ ID NO: 41638 - DNA, 255 bp, Glycine max
  unsure (1)..(255): unsure at all n locations; Clone ID: 701124478H1
gcacgctctgcttccagcgagtgttctttcttcgtttcaacaccttaatttgcannacgctgcttcttcngcttgagaaatggcacaagaaacctttctattcacatctgaatctgtaaacgagggtcaccccgacaagctgtgcgaccagatctctgatgcagtgctcgatgcgtgccttgaacaggaccctgacagcaaggttgcctgtgagacatgcaccaagaccaacatggtcatggtctttggagagat

SEQ ID NO: 41639 - DNA, 258 bp, Glycine max
  unsure (1)..(258): unsure at all n locations; Clone ID: 701124479H1
angagtctcaactcgactcggtccttgactcggaggtgcgtctacaagacgacatttttaacatacttgacgangccgataatgtgcctgagcgtgactcggtgcagggtcttgactcagtgatcaaaagcttcgaagatgagataaacgctcctggttcggattctggttcgggtgacccganccaggaaccagactctggggagctacaatctaacttggggtatcttctanaagcctctggacgacgaatggggt

SEQ ID NO: 41640 - DNA, 241 bp, Glycine max
  unsure (1)..(241): unsure at all n locations; Clone ID: 701124481H1
gagtttccaactggtggctttgatcgattggagcttttaattgctaaggctnagttgcttgctttctatcgtttgaagggttactcttgcttgcctgagttgcaatattgtggagttgtggataatgacactgatgccttcttaattaaggacttaattaagggctctgataaaagtttgagtgnagttaataagcatgcaactcatgcgagtaaaaaangtcaaacnggtgctggaaatt

SEQ ID NO: 41641 - DNA, 178 bp, Glycine max
  unsure (1)..(178): unsure at all n locations; Clone ID: 701124482H1
tcaggacactagcagcagttcagcttttatgatagtttagttcnaaacaagaatagaactatcatggcattcttgtcatttttcatgtacaacaacactaatggaaataatgtgttgcatgtgatgtatagtatatgtggccgcatgattttttttttanttcttaaatgctcttaca

SEQ ID NO: 41642 - DNA, 251 bp, Glycine max
  unsure (1)..(251): unsure at all n locations; Clone ID: 701124483H1
caaaaaaagggccgttattgttgttaccatccaaaaaatggccggtcttgttgtttcttcccaatgctttctcaaactcttgcttgtagtttcagtctttcatgtttcctttgctgctaggaggttgaatnagctggttcaggaccagtctcagttgctacattaccacaatggtcctcttctatacggcaaaatcgccgtcaacctcatctggtatggtaacttcaaaccatcccaaaaggctatcatca

SEQ ID NO: 41643 - DNA, 242 bp, Glycine max
  unsure (1)..(242): unsure at all n locations; Clone ID: 701124484H1
gttctttcgtcgtcgtcacaagtcacaactcgcaaaccacaatgcctaagcagataccacgagattaaggattttnttctgacggcgnggaggaaggatgcgaggtcggtgaaaatcaagaggagcagggatgtcgttaagtttaaggttcgatgctccaagtacttgtacacgctttgtgtctttgaccctgagaaagccgataagttgaagcaatctcttcctcccggtttgagtgttca

SEQ ID NO: 41644 - DNA, 246 bp, Glycine max
  unsure (1)..(246): unsure at all n locations; Clone ID: 701124487H1
atggggtcaacccaagtccaagattacccatctcatcttttgcaccactagtggtgtcgacatgcctggtgctgattatcagctcactaaactattaggccttcgcccctccgtcaagcgttacatgatgtaccaacaaggctgctttgccggtggcacggtgnttcgtttggccaaagacctcgctgaaaacaacaagggtgctcgcgngcttgtcgtttgttctgagatcaccgcagtcacatt

SEQ ID NO: 41645 - DNA, 247 bp, Glycine max
  unsure (1)..(247): unsure at all n locations; Clone ID: 701124488H1
anacaaaccaaacaattccccacaaggaacatacnttactttgttctttttctttttctcaaatcttcttttaaagacaattcttatttgtttatttctgcacgagaattcgaaccttgaacaacataaacatgggaataaacacacgtacactagaaatcaccgttatctccggcgaaaacctccgcgtaacggaggacgcgtacgtcgtcgttcgggcggagtccttaaactgctgcaccacgag

SEQ ID NO: 41646 - DNA, 226 bp, Glycine max
  unsure (1)..(226): unsure at all n locations; Clone ID: 701124489H1
ggcagaatcaattttctctctcaatcntctttcatggctncgtaccaagcaaaccgctcgcaaatncaccggtgggaaggctcctaggaagcaactcgccaccaaggctgcaagaaaatctgcacctaccaccggtggagtcaagaagcctcatcgctatcgtcctggaactgttgctcttcgtggagatccgaaaataccaaaagagcacagagcttctgatccg

SEQ ID NO: 41647 - DNA, 245 bp, Glycine max
  unsure (1)..(245): unsure at all n locations; Clone ID: 701124490H1
ctctgctgtgtannataancntaacnactcttaaggtgccnttnntctgtnngggtttcttcantatttcanatcngctgtgantggnnnttgagttgtnttantgggatctggagttntgtccctgaagtgagaggctatntgttttctggtgaantggagttttcacttgatgctttcntgagaagtaganaggcattggttgantgggacaacaantccggctttgttgagagngatggatt

SEQ ID NO: 41648 - DNA, 246 bp, Glycine max
  Clone ID: 701124491H1
agggcctggtggtgacccaataagaaatccaaaagtcttgccaacaggaaagaatattcatgccctggaccctcaatctattcctacaactgcagcgatgcagagtgccaaaatagtggtagataggttgattgagaggcagaaagctgagaatgggggaaaatatcctgagacaattgcacttgtattgtggggaactgataatattaaaacatatggtgaatccctggctcaagtcttgtggat

SEQ ID NO: 41649 - DNA, 249 bp, Glycine max
  Clone ID: 701124493H1
tccccgctgcgtctctcgtaatcatgcctaagcaaatccacgagattaaggatttccttctcactgccagaaggaaggatgcgaggtcagtgaagatcaagaggagcagagatgtggttaagttcaaggtcagatgctccaagtacctctacacactttgtgtgtttgacccagagaaagctgataaattgaagcaatctcttcctccaggtttgagtgttcaagacctgtaaaggtactgggcgagag

SEQ ID NO: 41650 - DNA, 254 bp, Glycine max
  unsure (1)..(254): unsure at all n locations; Clone ID: 701124494H1
gaggaatagagctgatgaatgagccacaaggtgtgaatcttgagagccttaagaagtattacaaggaagcttatgatgccgtgaggnagcacaacccaagtgcttatgtgatcatgtcaaacccattagatgcagattctaaagtgcttctctcatttgtgaaaggctttgacagagtagtcattgatgtgcattactacaatctttattccagcaaattcaacaacatgactgctcaacaaaatattgactac

SEQ ID NO: 41651 - DNA, 257 bp, Glycine max
  Clone ID: 701124496H1
aaaagctgaaaatcttgggttggtctgagaggaccacttgggaagagggcttgaagaaaaccatggactggtatatcaacaatcctgattggtggggtgatgtcagtggtgcattgcttccccatccaaggatgctgatgatgcccggtggactggagagacattttgatggatctgacgaagaaaaacctccatcatatgtctcaactaatactcgaatggtggttccgacatccaagaatgttaactcctcacag

SEQ ID NO: 41652 - DNA, 218 bp, Glycine max
  Clone ID: 701124501H1
ccttcttcagaatcatcaacaggcttctccgaaaccatttgtgtgaccggcgctggtggcttcatcgcctcttggatggtcaaactcctcttggagaaaggctacactgtccgaggaaccctcagaaacccagatgatcccaagaacgggcacttaaaagagtttgaaggagcttcccagagactaactctgcataaggttgacctccttcatcttga

SEQ ID NO: 41653 - DNA, 280 bp, Glycine max
  unsure (1)..(280): unsure at all n locations; Clone ID: 701124502H1
attcttcgtttgtctaagatccgccttctctgaattgtaaaaatgtcgctcggagaaactgcttgttcatacgcagctctcatccntcatgaagatggaatcagtgtaactgccgacaagatcagcaccttgttggaaactgcaaaggttcaagtagatacctattggccaaccttatttgctaaacttgctgagaagaaaaatcttggcgatttgatagccaatgcagcaggcggtggtgcaccagttgctgttgcagctgcccctgttgctgcctcag

SEQ ID NO: 41654 - DNA, 279 bp, Glycine max
  Clone ID: 701124503H1
ggcttctgtgcctcaaccaaaaatctcccttctaaccttattcttcttctcttccttccaccatcattgcgcatgcaattgttcctcaaaacgaaaccttcaaatttgagaactcaggtgaacttggaccctacatcgttgagtacggtgcagattacagaatgataagcatcttcaactctccattccaagttggtttctacaacaccaccccaaatgccttcactctagctttgcgtgtagggctccaacgctcggagcagctatttcgttgggttt

SEQ ID NO: 41655 - DNA, 275 bp, Glycine max
  unsure (1)..(275): unsure at all n locations; Clone ID: 701124504H1
ttctctctttctctctccttttccctcaagctcagaatctcccgaatcttgttaaaaagaagaaggatgtcaagcggagaacacactggtgtcatgcatgcagacagccagttgtgcttgatgggagagatgctgtttgcccttactgcgatggaggatttgtacaagaacttgatgagttggaaggaattgcaccccaccataccttttgctcacaatnangaggcngnnnatcaaatgcctgacattttcgatgctatacctgcttttatggg

SEQ ID NO: 41656 - DNA, 279 bp, Glycine max
  unsure (1)..(279): unsure at all n locations; Clone ID: 701124505H1
cttttagcaagttaacaacacttttgtccttcgttccattatctagttctcaattctccttcaccctttgcctcctgaaagaaatgggtantcttgaagcggaaagaacaacagtaggattggcagcaagagacccttcagggattctctccccatacacctacaatctaagaaacacaggccctgatgatgtttacattaaagttcactactgtggagtttgccattctgatctccaccagattaaaaatgatcttggcatgtccaactatcccatgg

SEQ ID NO: 41657 - DNA, 274 bp, Glycine max
  unsure (1)..(274): unsure at all n locations; Clone ID: 701124506H1
cacttgtgtaatgtattgatatcgaggtattttgttctgacagcaagtgatttggaagagtggtatcgtaaccccgagtcttttcaccatgagcaggatatggttcagtggacagaaaaattgaggccatgtgctgaagctttgtacattgtattatttgaaactaatagccaattgctaggtcctgttgtggtctctcttcttcaagagtctatgaatanttgcccaactccagtgacggaaattactcctgcattgcttcttaaagatgctg

SEQ ID NO: 41658 - DNA, 276 bp, Glycine max
  unsure (1)..(276): unsure at all n locations; Clone ID: 701124508H1
gccgtcttcncctggaagggtgagaccctccaggagtactggtggtgcaccgagcgcgccctcgactggggccccggtggtggacccgacctcatcgtcgaacgacggtggtgacgctacccttctcatccacgaaggcgtcaaggccgaggagctctatgagaagaccggcgaactccccgaccccaactccaccgacaacgccgagtttcagatcgtgcttaccatcatcagagatgggttgaagaccgatcccaccaggtaccgcaagatgaa

SEQ ID NO: 41659 - DNA, 276 bp, Glycine max
  unsure (1)..(276): unsure at all n locations; Clone ID: 701124509H1
aaaatcttctctcttccctaggaaggttgaatgatttggaaaaatganttctggcaatgtgangccagaagaagaagccctagaaaaggagaatgtaggtgttcctgtccctgaaatttcagaaccaaaagagcagaaggctggaagtaactgcaagggaattgagcagattcctttgtctggggaannnnaagaggatgtgctagttaatataactgggagtgggtccataatttctggtggcaaggcagtggaagatgcttctgaggatgtcac

SEQ ID NO: 41660 - DNA, 273 bp, Glycine max
  unsure (1)..(273): unsure at all n locations; Clone ID: 701124510H1
tcnagccgaanaaccttctttctttttctgtgagcctttctttcaggttcttaacttgattcagtgtgcagtgtccaaatcataagggtagttgcaaattgcaatggctaagcatgatgttgagggtggttccttctctgcaaaggactaccatgatcctcctccagcaccgttgattgatgctgaggaactcacacagtggtccttctacagggcttgattgctgagttcatgccacaatgctcttcctttacatcacagtgctcactgtga

SEQ ID NO: 41661 - DNA, 273 bp, Glycine max
  unsure (1)..(273): unsure at all n locations; Clone ID: 701124511H1
gcagatccacgagattaaggattttnttctgacggcgcggaggaaggatgcgaggtcggtgaaaatcaagaggagcagggatgtcgttaagtttaaggttcgatgctccaagtacttgtacacgctttgtgtctttgaccctgagaaagccgataagttgaagcaatctcttcctcccggtttgagtgttcaagacctgtagagctgttgagtgtggcagcatgcgtttgtttctctttttgttacctgatgctctagattttgtggctggtt

SEQ ID NO: 41662 - DNA, 279 bp, Glycine max
  unsure (1)..(279): unsure at all n locations; Clone ID: 701124512H1
gaaaggtctccgcctccgccgagancnaggagctgaccgtggaggagcgcaacctcctctccgtccgcctacaagaacgtaatcngcgctcgcngcgcctcctggcgcatcatctcctccattgagcagaaggaggagagccgcggcaacgaggaccacgtcgccgtcatccgtgactaccgctccaagatcgaggccgagctctccaacatctncgacggaatcctcaagctcctcgacacgcgcctccgtcccctccgccgcctccggggactccaa

SEQ ID NO: 41663 - DNA, 279 bp, Glycine max
  unsure (1)..(279): unsure at all n locations; Clone ID: 701124513H1
cagaatcaattttctctctcaatcgtctttcatggctcgtaccaagcaaaccgctcgcaaatnccaccggtgggaaggctcctaggaagcaactcgccaccaaggctgcaagaaaatctgcacctaccaccggtggagtcaagaagcctcatcgctatcgtcctggaactgttgctcttcgtgagatccgaaaataccaaaagagcacagagcttctgatccgcaagctcccctttcagcgtcttgttcgtgaaatcgcgcaanacttcaagactgatt

SEQ ID NO: 41664 - DNA, 259 bp, Glycine max
  unsure (1)..(259): unsure at all n locations; Clone ID: 701124514H1
aaggcgaactcaaattggttaaacaaacttatcaatgaangnatggatgtncaatgtgtntgcttggggccccaaattcaaaaggggtgacccctctccaccttgctgccgaaggtggtcacattggagtgatggncgtactacttgagcgtggtgctgacattgatgccagaactaagggtgcctgtggctggacaccgctccacattgcagccaaggaaaggaggagggatgctgtgaaattctgttagagaatgga

SEQ ID NO: 41665 - DNA, 286 bp, Glycine max
  unsure (1)..(286): unsure at all n locations; Clone ID: 701124516H1
gggatattcaatgcaattagcgaatgagagaatgaagagccggtggttcgtgtggcttttggcggtactaggcatcatcggagccacactcttcatagtgagcttgatccaaacctcggagaacaacttcctatgttccataacaagaacgatnaatcnnnnnnnnnnnnnnnttcaccgatggccccacatcgatgcaactcaaagccatcctccactacgcgacctctcagattgtccctcaacaatctctttccgagattacaataaccttcgacgtgctcca

SEQ ID NO: 41666 - DNA, 278 bp, Glycine max
  Clone ID: 701124517H1
gtggatggttcacgcgacccatacaaaagttcctccgctggttgtggtggtgttctgagggacgcatcagcaaagtggctccgtggctttgctaaaaaactgaaccctacttatgcagtgcaccagacagagttagaagccattctcacgggcttgaaggtggcttcagagatgaatgttaagaaactaattgtggagtcagacagtgactctgtggtgagcatggtggagaatggggttaagcccaatcaccctgactatggtgtcgtggaacttat

SEQ ID NO: 41667 - DNA, 275 bp, Glycine max
  Clone ID: 701124518H1
gtttttatcacagaggaattaacatatatatagcaagcatggcagtcacactctacgaccttagctcttcctctgggttgaagaaacttgatgagtaccttctcccacgcagttacatcaccgggtaccaagctacaaaggatgatcttactgtttatgcagctttgccaactgctccatcagatgaatatggaaatgtttccaggtggtacaagcacattgatgcttgttgagaatctctggtgttactggcgagggatctggtgttattgttg

SEQ ID NO: 41668 - DNA, 273 bp, Glycine max
  Clone ID: 701124520H1
gtttggaatatatttttattccttctttgtttcttcactttcttccatacacataaccatgtccttctcagaccgttgtcctcaaagttggtatgtcatgtcaagggtgtgctggagctgtaaacagggttttggaaaaaatggaaggtgttgagtcatttgacattgatctgaaggagcagaaggtgacagtgaaaggaaatgtgcagccggacgaattctgcaagccgtttccaaatccggaaagaagacggcattctgggtggatgaagc

SEQ ID NO: 41669 - DNA, 276 bp, Glycine max
  unsure (1)..(276): unsure at all n locations; Clone ID: 701124521H1
atctacntgtgaanccggntcatcctgcgggcnttcgccggcagcggcatctccgtgacggtgaccgcccccaacggcgacatcgccgccttaaccaanatcgantcggcgaggcagtgggtggcgacgcacatcaaaccctttctccctcagaccaaaantaattacatcctgcgtcggcagcgaggttctccactggngcgacaccatcatgatcngcngcctcgtccctgcnatgagancccttcantcagccctcctagtncgagggcataa

SEQ ID NO: 41670 - DNA, 272 bp, Glycine max
  Clone ID: 701124522H1
gcatctccaaggggaagaagggtggcaagaagaaggcagctgatccctttgccaagaaggattggtatgacattaaggctccttctgtttttcaagtgaaaaatgttggcaaaaccctcgtctctcgtactcagggtaccaagattgcttctgaaggactcaagcatagagtgtttgaggtctccttggctgatcttcaaggggatgaggatcatgcattcaagaagattaggttgagagctgaagatgtgcaagggaagaatgttctgaca

SEQ ID NO: 41671 - DNA, 273 bp, Glycine max
  Clone ID: 701124523H1
ctattatgtcacacaagcataacactataacctatatattccaagagtaaacacaaatgtaactaagcaagacgacagaatgaagcttacagtgactactaagctagctactatatccctcctcctcatctatgcatgtttttctgccaaattcttctatgcagctggggccacatcgatgacgccattatcatcatcgtcatcatcaccttcatttgagatgcaaaacttgtggccaaattcatgtgttgcagcccagccattgctcaaggg

SEQ ID NO: 41672 - DNA, 272 bp, Glycine max
  unsure (1)..(272): unsure at all n locations; Clone ID: 701124524H1
acacccgtgagagcagaaagatagtcatgganacaagaacattgctnctgaaantactcatcannnatgtggctctttcaggatgntcttcttnggnttcagatcatttggttaatgtatccaagttggagaagttcgtggatgagcttccncacatgatnagacnngnnggctatnatntttcagatggngtcncaaaatctaagtnnttgnagattggcatgttcaagaagaaatggaaattnnanagggatcnggatttagtnnnagtg

SEQ ID NO: 41673 - DNA, 251 bp, Glycine max
  unsure (1)..(251): unsure at all n locations; Clone ID: 701124526H1
atttttttggtatccattcatgggaatttccttagttttcatgctcgtctanntttggagccgcgagtttccaaatgcacgaatcaacatttatggtgttgtatcattgaagggtttttaccttccatgggctttgctagctctggatttaatatttggagatcctataaagccagacattgtaggtatgattgcaggacatctatactacttcttaacagtgcttcaccctctcgcaggaggaaagttca

SEQ ID NO: 41674 - DNA, 203 bp, Glycine max
  Clone ID: 701124527H1
caccatgtctctcatggctcccatggctcctatggccaatatgcacatggtgctcacatgccacatggaaaattcaagcagcacgggcacggtaagttcaagcatggaaagcatggcaagttcggcaagcatggaaagcatggcaagttcggcaagcatggtggattcaagaagtggaagtgatgaatatgtatctatgactc

SEQ ID NO: 41675 - DNA, 273 bp, Glycine max
  Clone ID: 701124529H1
gggaacctacagtattagctactataatcattcctagtgagtatgtgggacctgttattacccttgtctctgagcgtaggggtcagcagttggagtactcattcatcgacagtcaacgggtattcatgaagtaccgcctgcctttgagagaaattgttgttgacttttataatgaattgaagagcataacatcaggctatgcatcatttgattatgaggactcagattatcaacaagctgatatggtgaaactggatattctcttgaatggac

SEQ ID NO: 41676 - DNA, 277 bp, Glycine max
  unsure (1)..(277): unsure at all n locations; Clone ID: 701124530H1
gccacggacccacacagcatcgctgangcgttacgtagggagagaatcgccgagagaatgaaggccctacaagaactggttcccaatgccaacaagacagacaagnctnccatgctagatgagatcatcgattacgtgaagttcctgcagctccaagtcaaggttctgagcatgagcagattgggcggtgctgctgctgtcgctccccttgttgctgatatgtcctctgagggaggcggagactgcattcaagccaacggcaagagtaacggcggtg

SEQ ID NO: 41677 - DNA, 283 bp, Glycine max
  unsure (1)..(283): unsure at all n locations; Clone ID: 701124532H1
gccctcactcttccctcttttctttctttcatccccaaatcaaaacctaaattcccaccttcaactttctcccccaaatcgaccaccaccactgtcaagcccattcatttatattttattcgtatatatacatnnnnnnnnnnnnnnnnnnnnnnnnnnnnnagaatggattcggatcaaggcaagcttttcatcggtgggatttcatgggatacgacggaggacaagctcaaggagcatttcggtaactacgggcgacgttttgagcattccgtcatgcggg

SEQ ID NO: 41678 - DNA, 279 bp, Glycine max
  Clone ID: 701124533H1
aagatgccggctggtcatggtttgagatcccgcaccagagattccttctctcgtcctttcaggaagaagggaaccatcgccctcaccacatacctgagaacctaccacgtcggcgactatgttgacgtcaaggttaacggtgccgttcacaagggaatgccccacaaattctaccatggccgcaccggacgcgtctggaatgtcaccaaacgtgctgttggcgtcgaagtcaacaagcaggttggcaacagaattataaggaagaggattcatgtgcgg

SEQ ID NO: 41679 - DNA, 273 bp, Glycine max
  Clone ID: 701124534H1
ggacgccattgattctgtgttcgatccgttgagagaattcgcaaaggacagcgtgaggctcgtgaagcgctgccacaaacccgatcgcaaagaattctccaaggttgccgtgcgtaccgcaattggtttcgttgtgatgggattcgtgggtttcttcgtgaagcttattttcattccaattaacaacatcatcgtcggatctggttaggatgaagggtactacaatcgcctcaggaattcaggttgtcaagcaaaagtaggcagaaagagttc

SEQ ID NO: 41680 - DNA, 270 bp, Glycine max
  unsure (1)..(270): unsure at all n locations; Clone ID: 701124536H1
atccaatccaaatgcatcgaatgcnaatcacctgaaattccgccagatctctccctcttacacgctcttgataaacngaaacgaagcaatagctatagcatcanacacacacaccanngntagggntagggttagggttgggggtgttccgaagtaacaacaatggcggtctccgacggcgtngtgaagaaaatcgtcctctcctacacctacgtngnggaatggatttcctcagcttcacggtcatcgtgtacaacaagtacattctgg

SEQ ID NO: 41681 - DNA, 272 bp, Glycine max
  Clone ID: 701124538H1
gctttctttcagttgagttaacagcatggagagggaggaagatgttaaggttggagcacagaaattctcagagaggcaagcattggggacaggagctcagggtgacaaggactacaaggaggcaccaccagcacccttgtttgagccaggggagttaaagtcatggtctttttacagagctgggattgcagagtttgtggccacattcttgttcctctacatcactgtcttgactgtcatgggtgtcaacagggcacccaacaagtgctcct

SEQ ID NO: 41682 - DNA, 272 bp, Glycine max
  unsure (1)..(272): unsure at all n locations; Clone ID: 701124539H1
gctttggaagaaaaacagaagcaaaaaccttcatttgagctatctgtnaaagcttgcatctgaaacaaatcgagttagaggtgttactttgttattcaatgaacccgcagaggctcgcaaaccagatattaaatggagactttatgttttcaaggctggtgaagtgctaaacgggaaagaagggttgctgatatccctacagatcatccatcttgcagcaagcaacatgctgttattcaattccggcaagtcgaaaaggagcaacctgatgg

SEQ ID NO: 41683 - DNA, 242 bp, Glycine max
  unsure (1)..(242): unsure at all n locations; Clone ID: 701124540H1
attttctcttgcctcacctgcactccagatngnnntgctncgagtttgcacagcttgttcattgtctanccatgatggtcatcagattgtagagctatggacaaaaagaaacttcagatgtgattgtgggaactcaaaattcggtgaattctactgcaagattttcccaaataaagatgtagaaaatgttgagaattcatacaatcacaactttaaaggttcatattgcacatgtggtcgcc

SEQ ID NO: 41684 - DNA, 269 bp, Glycine max
  Clone ID: 701124542H1
gcaacacctagaagatttccttattctttttggtgctaaaccgttgggatatagcaacaacatgttaggaatgaagagacatagagataatgaagggtcagagagcttagatttggcaaaatgtcttgtgctgttctcttgtccaatagaaagcaacaaggcacaacagaaaggttttggggctgtggaatttgagtgcaagacgtgcagccgcaagttctcttcttttcaagcactgggagggcacagggcaagccacaagaggcaga

SEQ ID NO: 41685 - DNA, 270 bp, Glycine max
  Clone ID: 701124544H1
agaaggagcagagccgatgtggtagagcagttcctcccagaccacaatgaatccatttctgcagttcttgacaagtttggtgccatgggaattgacacccccggcgtagttgcattgcttggagcacacagtgttggtcgaacccattgtgtgaagttggtgcaccgtttgtacccagagattgatccagctctgaaccctgaccacgtccctgcacattctgaagaagtgccctgatgccatccagaccctaaggccgtgcagtacgtg

SEQ ID NO: 41686 - DNA, 208 bp, Glycine max
  unsure (1)..(208): unsure at all n locations; Clone ID: 701124545H1
ggntcncctcacctcttctctccganatccccannttgcctgtnaatgctagaaaccctaggcacgtttcgatttgatgctctcccatttgcaatcaagggcgagcgcattcggttcttgcacgcaaggctggtactaccgctgcatcggcctcgatccctgaattcatcattctttctcgcaccatctttttctattccgattcgat

SEQ ID NO: 41687 - DNA, 77 bp, Glycine max
  unsure (1)..(77): unsure at all n locations; Clone ID: 701124546H1
atggaaannatcccanagctgttagagcatgagatagatatgagttcattagatgtattttcaatgccttctccacc

SEQ ID NO: 41688 - DNA, 280 bp, Glycine max
  unsure (1)..(280): unsure at all n locations; Clone ID: 701124548H1
gtcaccactcttncttcttcaatcaatggcagcaacctcaacatccctcttctcctcaaatctccattctctcaactcacaacctttctcttcctcactctccttcttcngaaatgtccattccaccctctctttcccttcttctaaaccctcccgtggcgttgtagccatggctggctctggcaagttctttgttggtggcaattggaagtgtaatgggaccaaagactccatcagaaagcttgtctctgacttgaacagtgcaacattggagtctgat

SEQ ID NO: 41689 - DNA, 272 bp, Glycine max
  unsure (1)..(272): unsure at all n locations; Clone ID: 701124549H1
ggcggtcctgctgctatgatgaggtactggaataatgaggaggttttgcagaagttgggacaagccatgggtcttgccncttcgggagatgcaggtgcctctgctgaaaattctggggcagatgagaccgaagatttgggaaatgaagatgaatcaattgttcatcatactgctagtgttggtgatgtggagggcttgaaaaatgcactagcctctggtgctgacaaggatgaagaagattcagagggaagaactgctttgcattttgcctg

SEQ ID NO: 41690 - DNA, 270 bp, Glycine max
  unsure (1)..(270): unsure at all n locations; Clone ID: 701124550H1
ccgaagcttttctgcgatcaatggagttcgacccgatcccaatcggttcgtgctccaaagaacaccagatgatctataaggagtggttcaattacgctgattcagatagcgatggccgcattacggggagtgatgccaccaagtttttcgccatgtccaatttgccccgcgaagnccttaagcaggtgtgggctattgcagattcaaagcgacaaggatatcttggtttcactgaatttatcatgctatgcagctagtttctttggctca

SEQ ID NO: 41691 - DNA, 269 bp, Glycine max
  Clone ID: 701124551H1
ggagattctttgtttgctaccttctctcggaaaaatggttacgttcaggtttcaccagtaccaggtggttgggagggctcttcccacggaagcagatcagcaccccaagatctaccgaatgaagctctgggccaccaacgaggttcgcgccaagtccaagttctggtattttctgaggaaactgaaaaaggtgaagaagagcaatggccaagtgcttgccatcaacgagatttttgagaagaacccaaccaaaattaagaactatggta

SEQ ID NO: 41692 - DNA, 267 bp, Glycine max
  unsure (1)..(267): unsure at all n locations; Clone ID: 701124552H1
gtggattcagaggtngccgcgacggtggcggtcgcggcagangtggttttggtcgcggcggaggtggttttggtcgcggannaggtggttttngtcgcggcggcggatttaccgacgaaggaccaccctccgaagtcgtagaggtgtcatcatttatgcatgcatgcgagggagacgcatgacaaagcttacaaatgagaaagttccctttttcaatgctcctatatatctgaaaaacatgactcagattggaaaagttgatgaaat

SEQ ID NO: 41693 - DNA, 269 bp, Glycine max
  Clone ID: 701124553H1
caagcctcaggtaagccaaaaccatggttaagcataacaatgttatcccaaacggacacttccgtaagcactggcagaactatgtgaagacttggttcaatcagccagcacggaagacaaggagacgattggctcgtcagaagaaagctgtgaagatattccccagacctacggctggacctctcaggcccattgtacatggtcaaactttgaaatacaacatgaaagtgagaggtggaaggggattttctcttgaagaactcaaggca

SEQ ID NO: 41694 - DNA, 267 bp, Glycine max
  Clone ID: 701124554H1
gaaaaatagcgtttattttaaactagaagactagaagattacgtatttgattatgcaaagcggtgcacaaattacataatccaaagtccaaaactcacactatatatataagcaggacctaggcttcttctttgcactgcaaatcacttttctactttgagtcttcttgatccttctttttctccttgaactcaaacatggcagatgaggtggttctgctagatttctggccaagtccattgggatgagggtcaggattgcacttgc

SEQ ID NO: 41695 - DNA, 271 bp, Glycine max
  unsure (1)..(271): unsure at all n locations; Clone ID: 701124555H1
ctcacttccttgtccgattccgccaacgangccagtnaaatcagatctatctgcttcttcgtcatggccaccggacaactattncttccncacnacatacgatncgannttacangnatnancnngttcccatacagnggatgcttnattttganttcctttgnngnagngaaacaccatcagttgctggaataattaaccctggttctgagggatttcaaaaacttttttttggtcaggaggaaattgccatcccagttcatgccaccat

SEQ ID NO: 41696 - DNA, 270 bp, Glycine max
  Clone ID: 701124556H1
atcaagatctctctctctgtaatcgaaaatgagcaagggaccgggtctctttaccgatatcggcaaaaaatccaaagatcttttgactaaggactacaactccgatcagaaactcaccatttcctcatacagcatctccggagtggccctcacttcaacatctgtcaagaaaggaggactctccactggggatgtggcagcactgtacaagtataagaacactattattgatgttaaactggacaccgcatcaactatctccacaaccct

SEQ ID NO: 41697 - DNA, 268 bp, Glycine max
  Clone ID: 701124557H1
aaaataatcaattgagctacttactataagatttagatctcccaacagagagtttcacaaaattgccaagtacccttttcaggatcaaggaagagaatcaagaaccaacaaaaggtgttgttcattgttgtagttgtttgtaactgtagcaacaggaagatggttggaaagttggttgtggtgaggcttgtgttggccatatctgtgttgagctctctccttctgacaacctcggcacagacagcatgcaagggccaggccttcaccg

SEQ ID NO: 41698 - DNA, 258 bp, Glycine max
  unsure (1)..(258): unsure at all n locations; Clone ID: 701124558H1
cgagccctagctcttatccgtgccgttgaatctcgncgtccggctgctgctantagtcgccggagctctcctactattcaaaacagaagctatgaaatcgttcaatataaatggaaccactctttctgttgcactctacactgacgtaacaaattcaaaagaactcttggaaagtatgcaagccgggacattggagccagaagttgcattcctcaatgctttacttattccagatattttccctgttctagcagctgc

SEQ ID NO: 41699 - DNA, 267 bp, Glycine max
  Clone ID: 701124559H1
ggactgggctgtccatgccttcagaatcaccaatgttggtgtccaggataccacccagatccacactcacatgtgctactcgaacttcaacgacatcatccactccatcatcgacatggacgccgatgttatcaccattgagaactctcgctccgacgagaagcttctgtcagtcttccgcgaaggtgtgaagtatggtgctggaattggccctggtgtctatgacatccactccccaagaataccaccaactgaagaaattgctga

SEQ ID NO: 41700 - DNA, 270 bp, Glycine max
  Clone ID: 701124560H1
cagatatgtggtgcctctcctcattcagattatgggcatgatcactctcctaatgactgatggtgttcctggactgcagatctgcaaggataaagtcaaccaacctcaagtctgggaggatgtgcctcatgtagaaggggccttaatagtgaacattggagacatgatggagaggtggacaaattgtttatacaggtcaacacttcacagggttatgccaacaggaaaagaacgttattccgtggcattcttctttgacccggcctcaga

SEQ ID NO: 41701 - DNA, 272 bp, Glycine max
  unsure (1)..(272): unsure at all n locations; Clone ID: 701124561H1
gtttaaagtaaganagaagaaagaagcaaatggcaaactttccagttgttgacatggggaagcttaacaccgaagagagacctgcagccatggagattataaaagatgcctgtgagaactggggtttctttgagttggtgaaccatgggatatccattgagcttatggacacagtggagaagctcacaaaagagcattacaagaagactatggagcaaaggttcaaagaaatggtgaccagcaaaggtcttgagtcagttcagtcagaaatc

SEQ ID NO: 41702 - DNA, 274 bp, Glycine max
  unsure (1)..(274): unsure at all n locations; Clone ID: 701124562H1
gataatnncaacttaggatgttcttccagaagatcctaagttgcgattatcaaaagctagtattacacatcgaggaaagaatctgtacatgcaagctccccctgtattggaaccaaatgactcgatcaaacctgaatctatctctttttaatctcatgggtaaattgcccaaggatgttgtgcatgtgaatggtacaacaatcaagaacgaccaaaagttttcctgtttgagaaaattacgtgttgttttcaagggagttgacggggttacaga

SEQ ID NO: 41703 - DNA, 277 bp, Glycine max
  unsure (1)..(277): unsure at all n locations; Clone ID: 701124563H1
accagaatnaccttccctatcttttagccactgctaaaacttgtccttttcctttccccccgcaaaaaataaaataaaataaaatccaacacatttaacagatttcacgccaccaacggtgncctcgtaacggatatagcataaccttttgatcattcggtatgaaaatccaatctccaacctcggatccatcttttacattcttcagatcataggatctaatattgtatgcagttttgaaagaagaaaaaaaaaggagaaaattttgatctttgtg

SEQ ID NO: 41704 - DNA, 266 bp, Glycine max
  unsure (1)..(266): unsure at all n locations; Clone ID: 701124564H1
atgggaattgcgcttcaaggcgtctcgtagggctaatccgcctcacgagggtcaccaacggcacgtncctttggggggccgaggccccctactgctggtcggcaaacggacggcgggcgcacgcgtcgcttctagcccggattctgacttagaggcgttcagtcataatccaacgcacggtagcttcgcgccactggcttttcaaccaagcgcgatgaccaattgtgcgaatcaacggttctctcgtataggtttaattactatgg

SEQ ID NO: 41705 - DNA, 270 bp, Glycine max
  Clone ID: 701124566H1
gaagaactagtctaagcagaaatggcctcttcagtgatggcatctgtggccctcaaacctgcccctttcactgttgagaagtcctcagttagaggccttccctccctctcaaggaactcctcttcattcagagttgtggccagtggtggcaagaagatcaagactgacaagccttatggaattaatggtggcatggctttgagggaaggagttgatgcatctggcaggaaaggaaagggaaagggcgtttaccagtttgtagacaaatac

SEQ ID NO: 41706 - DNA, 266 bp, Glycine max
  Clone ID: 701124568H1
ggagcaacaccatctttcattttccggcgatctcttgtttcttccatcatcaccgttttccggcgatccctaatcctcgcaaacagaaatgacgacatcaaggcgccttgcggacaggaaggtggagaagtttgagaagaacatcacaaaaagaggatttgtgccagacactaccactaagaagggaaaagactaccctgttggcccagtgctgctcggtttcttcgtctttgttgtcatggatcatctctcttccagataatcag

SEQ ID NO: 41707 - DNA, 270 bp, Glycine max
  unsure (1)..(270): unsure at all n locations; Clone ID: 701124570H1
gtgacagtncctctacgagctacctctctgcctgcctatncagntttaggtgaaaataacaagaaatatngccggaggagaaagggctacgatgctcgacaacgtgtcactctacgcctgctggcaacttggcttgatatcaagtgggcaaaaatggaggccattgagacaatagttgctagttctgcaatgtctttcattaaagagcaagaggcaagtaaagaagaaactcaatcaaaagaagacaagtgggctaaatggaagaggggt

SEQ ID NO: 41708 - DNA, 267 bp, Glycine max
  unsure (1)..(267): unsure at all n locations; Clone ID: 701124571H1
gtttgcttatcaacatcactgaaggaaataatggtgtctaaagtggaagaagcaatgaagaggaacaagcaaatgcaaccacaagcccagaatcagcaacaacagctgcagaaacaaattcagtgcaacaaaggaaaagctggcaagttcaagaggagcagctccaatctggaagaggatggtgcctcttctgccattctctttctagcttgcatagcttatgccccttcctatgcgtangcgcataattcatatatatatataaat

SEQ ID NO: 41709 - DNA, 268 bp, Glycine max
  unsure (1)..(268): unsure at all n locations; Clone ID: 701124573H1
caaaaattgggtcctgcaggccttgctttacattatgctaatatagtgctccaaattgatactcttgttgccagatccagttctatgcctgcaaatacaagggatgcactgtatcagagcttgcctcctaatataaaattagccttgcgttccaaattaccaagctttcatgttgtaannnagctcaccatatcagatattaaacaagagatggagaaaacattgcattggctggttccgattgctacaaacacggccaaagcacatc

SEQ ID NO: 41710 - DNA, 265 bp, Glycine max
  unsure (1)..(265): unsure at all n locations; Clone ID: 701124574H1
gttaggttctgcacgctctgcttccagcgagtgttctttcttcgtttcaacaccttaatttgcacacgctgcttcttcngcttgagaaatggcacaagaaacctttctattcacatctgaatctgtaaacgagggtcaccccgacaagctgtgcgaccagatctctgatgcagtgctcgatgcgtgccttgaacaggaccctgacagcaaggttgcctgtgagacatgcaccaagaccaacatggtcatggtctttggagagatc

SEQ ID NO: 41711 - DNA, 265 bp, Glycine max
  Clone ID: 701124575H1
accacttccaatggcttcatatcatgaagaagaagtgaggctattgggcaagtgggccagcccatttagcaacagagtagaccttgctctcaagctcaagggtgttccctacaaatactccgaggaagatcttgctaacaagagtgctgatcttctcaagtacaaccccgttcacaagaaggttccggttttggtccacaatgggaacccattgcccgagtcactcatcattgttgaatacatagatgagacgtggaaaaataac

SEQ ID NO: 41712 - DNA, 268 bp, Glycine max
  Clone ID: 701124576H1
agcaagctcatcctagagttttaaaaatggcagcagcctcctccatggctctctcttccccatccttggctggcaaggccgtgaagctgggcccatcagcccccgaagtcgggagggtcagcatgaggaagaccgtcaccaagcaggcctcctccggaagcccatggtacggcccagaccgcgtcaagtacttgggcccattctctggcgagcccccgtcctacctcactggcgagttcccaggtgactacggctgggacactgctgg

SEQ ID NO: 41713 - DNA, 258 bp, Glycine max
  unsure (1)..(258): unsure at all n locations; Clone ID: 701124577H1
aatttcagggacttgctggggagttggtgaatgttttaagagaagcagggcaanttgtaccggatgccctcctgaaatttggcacacatgtaaagaaaaaggtctttttttttccacttttgtttatgcaccagttcagattttttctatgatgaagctaggataaacatttctttgtgtggcagtcctttattttttgtcttgtgcagaacattgattgattgataaaattctaaattttcaatctatgataggagt

SEQ ID NO: 41714 - DNA, 272 bp, Glycine max
  unsure (1)..(272): unsure at all n locations; Clone ID: 701124578H1
gtttgctnntcaacatcacttcnaggaaataatggtgtctaaagtggaagaagcaatgaagaggaacaagcaaatgcaaccacaagcccagaatcagcaacaattnntgcagnaacaaattcagtgcaacaaaggaanngctggcaanttcaagaggagcagctccaatctggaagaggatggtgcctcttgctgccattctctttctagcttgcatagcttatgccccttcctatgcgtaggcgcataattcatatatatatataaatgct

SEQ ID NO: 41715 - DNA, 270 bp, Glycine max
  unsure (1)..(270): unsure at all n locations; Clone ID: 701124581H1
atggcattcagcggttatttccttttgggcctcatagctcttgttattgttaggtcttccaaagttacatgcganggattagcagttaatacagtttcacctattattgacatttcactcagtcggaacagtttcccagaagggttcatctttggggcgggatcttcctcgtaccanttcgaaggtgcagcaaaggaaggtggtagagaaccaagtgtatgggataccttcacccataattatccaggtaagatcatggatagaagcaac

SEQ ID NO: 41716 - DNA, 268 bp, Glycine max
  Clone ID: 701124582H1
attgtgttcgatatcaaaccaattgatgaggaggctgggaagtattcggagctatgcaaagcatcttcgcatagatggggtgaagaacactatagccgttgcctctggcaaaggtggtgtgggcaagtccaccactgctgttaatttggctgttgcacttgcaagaaagtgtcagctcaaggttggtttgcttgatgccgatgtgtatggtcccagcattcccacaatgatgaacatcaatacaaagcctgaagtcactcatgataag

SEQ ID NO: 41717 - DNA, 264 bp, Glycine max
  Clone ID: 701124583H1
gcctacgtgaatgtactcgccatttgtgttcttttagtaatccatatttgtaagttaatgtaattattggagttcatctaaaccctcgtctatttagaatctaatgtctcttgatgtggagtgttatctcgacattttcatattatcatgttatatatgttgatggaacgaccctgcttaattttataattacatcaagatctgtcctggacttgaggatggtagcagtctattttgtgtcgttataataaactattcttttat

SEQ ID NO: 41718 - DNA, 269 bp, Glycine max
  unsure (1)..(269): unsure at all n locations; Clone ID: 701124585H1
ggccagtanggctctctctcaagattctcataagtgtatgcacnatagtcagttcctccagcacttcccnnggntgtgnnngngacctncctggccatcagagnagcttaagatntccatcactggtgctgggggttttatcgcgtcacacatagctcggcgnctgaagannagaggggcnttncnttnttgcttntgattggaaganaaatgagcacntgactgnnggacnantctgtgatgannnccatctngttgatctacagggg

SEQ ID NO: 41719 - DNA, 265 bp, Glycine max
  unsure (1)..(265): unsure at all n locations; Clone ID: 701124587H1
tgttcctacaatcattccaaatgtgcccttccggtcgcaccctcctcccttcctccgtctccgatttccgaccggcattcgacgtcctcgatgccgaccgcgacggcaaaatcagccgcgacgncctccgcgccttctacgccggagtcggcggcggaggagatgacgtgatcggggcaatgatgacagtggctgacaccaataaggacgggttcgtggagtacgaggagttcgagcgcgtggtctcggcggagagaaagcccgt

SEQ ID NO: 41720 - DNA, 268 bp, Glycine max
  unsure (1)..(268): unsure at all n locations; Clone ID: 701124588H1
ggcaccccccacaaaaatgacaggagagacagtgaacccaaaagcttaccctttggccgatgcgcaactncgcaataacaatcttggatcttgtgcaacaagctgccaactacaagcaactaaaaaagggtgctaatgaagcgactaagacactgaacagaggcatttctgagttcgttgtgatggccgcagacactgagcctcttgagattcttctccatcttcctctccttgctgaggataagaatgttccctatgtattcgttcc

SEQ ID NO: 41721 - DNA, 231 bp, Glycine max
  unsure (1)..(231): unsure at all n locations; Clone ID: 701124589H1
aatttggcttggaaaaatcatttccgtgaagaannatctaagccgaggcgcttanngaaacgcttccgtaagcgattctgtggaaattcttcatcgttcttcaccgttcttcatccgttcttcgttcgttcttcgttcttcaacgggtaagttttcgaattcgagactttcaatcattcttgttttgtctatttcactataattcgnttactttcagtttcntttctnccg

SEQ ID NO: 41722 - DNA, 232 bp, Glycine max
  unsure (1)..(232): unsure at all n locations; Clone ID: 701124590H1
gttctcttctaagtaactatttggaaacctctcantctanntctctctctagaaagtcccagccagcnaggtaggtaaaggttgtnnnnnnnnnnnnnnnnnnnnnnnnnnnnnnnnctcttcttcccatccctgccttgcttttctgcctcaacaaattcanaccccagcacaaagactatgtttttactatcattttctgtttggcctgcaaaaagtaactgtttttatt

SEQ ID NO: 41723 - DNA, 210 bp, Glycine max
  unsure (1)..(210): unsure at all n locations; Clone ID: 701124591H1
ctgcatgcaanttgggattcatcttctccttcggtgttgcaaagtgtcaaagaacaatgggattcacactcctcccctgaagcttgcactgttgatcaatccctccccagagccttccctcttcctccttcttcttcatcccccgaagcntacgccaccggccgccgcaaacgacgtcgtaccaagagcgccaagaacaaggaggagatc

SEQ ID NO: 41724 - DNA, 267 bp, Glycine max
  Clone ID: 701124592H1
cttagccattcagctggcatttctactgctacaaataactatgctgccaaaggatatgcttccgatcgaatatttgctccttatactgtttacaagggcaaagctgcattctcgttgatcccttgtcttccaactttcactaagttgaattctgggactgttgtagttgatcgacgtggttcaatcatgatgactttcatgcattctattggagagcgcaaatatgactgggagaaaagacaaagatttgctctctcagcaactgaa

SEQ ID NO: 41725 - DNA, 268 bp, Glycine max
  Clone ID: 701124593H1
gatacactaagttatcctcataaatacactctaattaggtggcaagataagtgtctaaccttagtaacattgccacatattgtgttcattttggaattgtgccactaaaattctattcaattcatctatggctgcctcttcttatgctatgcaatcaatcctggcaaaccctttgatccgcatttccagcgggtctagggtgaaccaatttggcgttcctgctttgcacatgagaaggaatgttggcctgagagttaggtccatggct

SEQ ID NO: 41726 - DNA, 273 bp, Glycine max
  unsure (1)..(273): unsure at all n locations; Clone ID: 701124594H1
gcggaagagaaaatgacgaccaggttcaagaagaacaggaagaagagaggtcacgtcagcgccggacacggccgtatncggaaagcaccgcaagcatcccggaggtcgcggtaacgccggtggcatgcatcaccaccgtatcctcttcgacaagtaccatcctggtttcttcgggaaggtaggcatgcgctacttccacaaacttcgcaacaaattctacaatccgatcatcaacatcgacaagctgtggtccctcctcccccaggaggccaa

SEQ ID NO: 41727 - DNA, 273 bp, Glycine max
  Clone ID: 701124595H1
gctacttatgagtggagtggtggatgaacaaggtaaggctgggatgggtcagtttattcagactaagaagttggagagctgggaggatcaaatgctaggtcaggctccaaacgcttctcttgttgatgttaaacaagaaaacttggttaacagctatgcatatgggcatggaagcgaagaacttcagtcatcaaagccatcttggtctccaaaatcatgtgtgacaacaagtttcagtagcaacatgttagatttctctaacaataagacaga

SEQ ID NO: 41728 - DNA, 273 bp, Glycine max
  unsure (1)..(273): unsure at all n locations; Clone ID: 701124596H1
gccnctcgatgggaattgcgcttcaaggcgtctcgtagggctaatccgcctcacgagggtcaccaacggcacgtncntttggggggccgaggcccctactgctggtcggcaaacggacggcgggcgcacgcgtcgcttctagcccggattctgncttagaggcgttcagtcatnatccaacgcacggtancttcgcgccactggnttttcaaccangcgcgatgaccaattgtgcgaatcaacggttcctctcgtactaggnntcttactatt

SEQ ID NO: 41729 - DNA, 162 bp, Glycine max
  unsure (1)..(162): unsure at all n locations; Clone ID: 701124602H1
aacctgnnccagntntcncatgggctcagagagttaaaattgctgttggagcagccaggggacttgnntatcttcatgaaaaggcagagattcatatcatncatcgttacattnagtctacgnncngacgtcttgctnccngtgannttgcgangattgnng

SEQ ID NO: 41730 - DNA, 259 bp, Glycine max
  Clone ID: 701124603H1
ctgagatggtgtgtgaggacctgccaaaggaagtgtgtgctttctcattagcttcatcagggaagaggtgtttgttggagaccgagaaggtggccgacggtggcgtcgagtaccaatgccggacgtcggaagtggtggtggagagaatggcagagtacatagagacagaccaatgtgtggaggcatgtggggttgataggaactctgttggaatttcatctgatgccttctttgagcctcaattcactggcaagctttg

SEQ ID NO: 41731 - DNA, 256 bp, Glycine max
  unsure (1)..(256): unsure at all n locations; Clone ID: 701124604H1
cttcaggggagagcttggaaaatggattgctgcagttgctgttgtattacgccttttccttccaagacacttccctgattggctggaattgcctggtgctctgattcttcttatcgttgtagctccttctctaattgcaagcacctttagagacaacattgttggggtggtagtgtgcctcatcattgcatgttatttgctgcaagaacacattcgggcttctggtgnttcagaaatccttcactaaagctcacgg

SEQ ID NO: 41732 - DNA, 257 bp, Glycine max
  Clone ID: 701124606H1
atcaccctctacctacacacatcaaggtgactctaatatctaaaaccttgatacatacatacacatctttggtgcaaccaacataatcaaattcaaaggcaatgaagtttgggaaagaatacacatcccaaatggtgccagaatggcaagaagcatacatggattacaattttctgaaatcccatttgaaagaaatacaacgtttcagacaaagaaccaagcctcctacagccactccaagaggcctaagaagaaag

SEQ ID NO: 41733 - DNA, 254 bp, Glycine max
  unsure (1)..(254): unsure at all n locations; Clone ID: 701124607H1
ctttcggttgcagaggagggtttaaattcgatacccaattttaacataaaaggaataatcttagggaggagtcggcgtgttcacacttccaacccaatcngnctgtccaaaacgacgacgttgacagcccggttctctggagatagacagatagatataggtacattcccagtttcaggtctggaattttgattctagataaggacaagggttgctacttgttggtgttgtgctgtagtattggtttgacaagc

SEQ ID NO: 41734 - DNA, 247 bp, Glycine max
  unsure (1)..(247): unsure at all n locations; Clone ID: 701124608H1
cgancccacgccccatccccagtacaaatcaggtctcaacccctacgcccccaatttcctgtcgcctcccccttcttcgctcccacccttcgttgacctcctattctcccctcatcggagctcaaatctccgatcccttcatccatatcgcttcaccgcaactttctcttnatccatcgcaagatctagttgaatctcaaccgcgctcctccgattcgaagctccactcactcaaatcctcttcaga

SEQ ID NO: 41735 - DNA, 254 bp, Glycine max
  Clone ID: 701124609H1
ggctggtgaaccctaattagttgtcggtgtttgttggaagagcacatctctgttttcttcgtcatcttcccctcccctccccaaccagagatgcgccccgcaacacatatgtactaaagctttcaacttttcagcatcctttcagatgttagcgaaaacccataacaaaggggatggatctaagtccctggctaagatactggcaaaatggaaagaatataatgcccagattgattccagcagtgatgcggata

SEQ ID NO: 41736 - DNA, 251 bp, Glycine max
  unsure (1)..(251): unsure at all n locations; Clone ID: 701124610H1
cgattatatggatcccaagcaggcctctcttggttagcaaaacctgtcactggacagagttctattggccttgcatcacgccatggaagcatcatcaaccaaagcatgccactcatggatcctctagtgacactgtttggtaccattcatgagaagctccccgagacaggagcaggaggaagcatgcgaanactctgtttccaaattttggaagcatgttcagcacagctgagccgcatgttaaaaatgaa

SEQ ID NO: 41737 - DNA, 243 bp, Glycine max
  unsure (1)..(243): unsure at all n locations; Clone ID: 701124611H1
ctttggaaactctcctccttatcccaataattatggctcataattactcttaatatggctctatcttcccctgagattgcactatccgattatctcatgctcgatgactatgttgatcatcaagattctcgatcatcacaaagcaccgagtcatctgaaaaagcaaccttcaatgatgccactcacggattcagtactggtgcaacctctaagantaataacataaactgcaaaaatgggatt

SEQ ID NO: 41738 - DNA, 250 bp, Glycine max
  unsure (1)..(250): unsure at all n locations; Clone ID: 701124612H1
ctttatcagtatcattcattatcactacgattgttctaaaagcanttattactcttgagagaattaaaagatcatcatcacaataacaagatgagttcaggaattagagcatggagtgtggcagctagtgttggagttgtggaggccttgaaagaccaaggcatatgcaggtggaatcatgctttaagatcagctcaacaccatctcaaaaaccatgttggctcattctctcaggctaacaagctttctt

SEQ ID NO: 41739 - DNA, 248 bp, Glycine max
  unsure (1)..(248): unsure at all n locations; Clone ID: 701124613H1
gtgaaggctgtggccgttcttngcagcagtgagggtgtcactggaactattcacttcgttcaggagggaagtggtccaaccaccgtaactggatctcttgctggtcttaagcctggtctccatggtttccatgtccatgccttgggggacactaccaatggttgcctctcaactggatcacatttcaatcctaataacaaggagcatggtgcccctgaggatgagaatcgtcatgctggtgatcttgg

SEQ ID NO: 41740 - DNA, 252 bp, Glycine max
  unsure (1)..(252): unsure at all n locations; Clone ID: 701124614H1
cttagcaatagctacccctatcacaacaatactctattaggcaanaacaccaaatgggagaggaaaaagagcagcctaagaatgaaaccgagaagaagcccgaggaggccgccgcagcccccaagaaagacgacggacccatccctgtcgtttacaagctcgacttgcattgcgagggatgcgtcaagaagatcaaacgcacatgtcgccacttccaaggtgtggaaaccgttaaggcagatctatcgtcga

SEQ ID NO: 41741 - DNA, 250 bp, Glycine max
  Clone ID: 701124616H1
cttatcaatgggtaacaattaactatctactgggaaacttgggaaagcattattcagaaactgttgcagtagttgatcttggaggtggatctgttcaaatggcttatgcagtctcagagacagatgctgcgaaggctccacgagcaccggacggagtggaatcatacataacggagatgttccttaggggaaagaaatattacctctatgtacacagttacttgcgatacggtatgctagcagctcgtgc

SEQ ID NO: 41742 - DNA, 110 bp, Glycine max
  unsure (1)..(110): unsure at all n locations; Clone ID: 701124617H1
ctcttctcttctcttgcatncaaattacaacttgttccacacaacatncnactncnaagnnttnattttgganatttgtantgattcaannagtaaaattttttcttgnc

SEQ ID NO: 41743 - DNA, 259 bp, Glycine max
  unsure (1)..(259): unsure at all n locations; Clone ID: 701124618H1
atctgaaatcacccgcgaanccgttaggataaggcaaagagagagaaacaaagcggcttccaatggcgactctgcggctcaccttctccgactcaaccaccttgttcaggccttctctaccttccacgcgaaccttctctngaaaccgaagcctcattgtcaaagcctcttcttctgaagacgatttctccagaagcagcagaagacgcttcatcgccgaaaccgccgcactctcggtctcgctccctcagttaacggc

SEQ ID NO: 41744 - DNA, 151 bp, Glycine max
  unsure (1)..(151): unsure at all n locations; Clone ID: 701124621H1
caacaataacagcnaggtacccncccgggannnnacntgtgcgcggnggnttcaatccgaanctganccagaacccgaancagaaccagaacccgagcctgaaccagaatcatcacgcgttncaggctcggcngcagtnccnanaaacngc

SEQ ID NO: 41745 - DNA, 251 bp, Glycine max
  unsure (1)..(251): unsure at all n locations; Clone ID: 701124622H1
caaatcgtngatctacggtttaactggagtagtgtggtaagatgggaggtggatttagagtgcttcatttagttaggccgtttctatcgtttcttcctgaagttcaaactgctgacaggaaagtgccatttagagagaaggtcatatacactgtgatctctcttttcattttcctggtttgtagtcagctccctctatatgggatacactcaacnacaggtgntgatccattctattggatgcgagttatt

SEQ ID NO: 41746 - DNA, 124 bp, Glycine max
  unsure (1)..(124): unsure at all n locations; Clone ID: 701124623H1
gccaagacggtgctctcggcggcggcctcggtggctgccaccgcaatggtggtccgctccgtggcgagcgacctccttccgttcggagctccggtcctacatcaccaacggcatccacancatg

SEQ ID NO: 41747 - DNA, 243 bp, Glycine max
  unsure (1)..(243): unsure at all n locations; Clone ID: 701124624H1
ctgcccctgctagctattttgtaacaagcagatcaaattaattgcttgatattcaagaaacatggcaatcaccggtgttcatggatggggagacatcaagagtctcagcgtccaagtgatcaccggtcgatggttcgtcgtattcgcctcttttctaatcatggcagccgccggagcaacctacatgttcggtctctattccagagacattangatgncncncncttacgacnantcnactct

SEQ ID NO: 41748 - DNA, 249 bp, Glycine max
  unsure (1)..(249): unsure at all n locations; Clone ID: 701124626H1
atggaagtcacactttcagcctgcaagtccgttagctcgccttctgttcccgtcgcaggtttgtttgcggggaatggaggaattaagagctcgcaatgcagtttcttagcgggagcgaggcaaagtgaggtttcctaggcaagtaggtcaagttagccaccttcgcaaacagcgccaaacgcgtcactgcggtgctctccacncgacttgcnagnanacaagatcctgatcgcgaacagaggcgagatt

SEQ ID NO: 41749 - DNA, 247 bp, Glycine max
  Clone ID: 701124627H1
gcagcccttgcaatctcaatcttctcttcttttttcaggatacccatttcgtttttcttctcaaatggccctttcttgttccaaagtttcaagcttttctctctcacccgttgtgggtggtggtgatgtttttaaaaatctcactttttcttccttttctttgagtttttctaataagcgtgttggtggaatcaagaacttgagggtgcgtgctgctgcttcaaacgcaccagctccactcgctggg

SEQ ID NO: 41750 - DNA, 249 bp, Glycine max
  Clone ID: 701124628H1
caacacaacgcgaatggctacggcgctggagaagaaagcgaaggaggcattcttcgacgacgaattcggtctggccgtcgatctctactctgaagccatacgattggatccgaacgacgccaatctcttcgcggacagagcccaagcccatatgcaaactcaacgctttcactgaagccgtttccgatgccaacaaatccatccaattaaacccttccttgcccaaggcctatcttcgtaaagccaccg

SEQ ID NO: 41751 - DNA, 250 bp, Glycine max
  unsure (1)..(250): unsure at all n locations; Clone ID: 701124631H1
agagcctttaagaggcctgttggtattttacatgtaaaggttctgcaagcaattaagttaaagaagaaagatcttcttggtgcatctgacccttatgtgaagctaaagcttactgagtgntaaattgccatcgaaaaagactactgtgaagcacaagaacttaaatcctgaatggaatgangaattcaatatggttgtaaaagatccagactcccaggttttagagattaatgtttatgactgggagcag

SEQ ID NO: 41752 - DNA, 120 bp, Glycine max
  unsure (1)..(120): unsure at all n locations; Clone ID: 701124632H1
gtngactgtcggctccggcgttgggggcgttanggttanggttagggtttccaagagatntggtatggtccaagcattggtgaatctnttctngctgtgntngnanccannntgccgcna

SEQ ID NO: 41753 - DNA, 258 bp, Glycine max
  Clone ID: 701124633H1
ctgccagtagtcatatgcttgtctcaaagattaagccatgcatgtgtaagtatgaactaattcagactgtgaaactgcgaatggcagtttttatcatcttaatcattcaactagcggtgtatcagaacctatacttaatgatccatcgcttccaaaaccacataattgttctgacaaatttgatactgaacttccatcagatcttatcacttcgtgtgttgctacattaatcatgattcagacttgtactgaacggca

SEQ ID NO: 41754 - DNA, 259 bp, Glycine max
  unsure (1)..(259): unsure at all n locations; Clone ID: 701124634H1
ctcacttctagggttcgcagcttgtctctcaaacaatggcgctgntccttctctacgaatccgnttcgggctacaccctgttcgagnccacacggcctcgacgaaatcggccagaacaccgaagcggttcggaactccgtttcggacctcaacaggttcggcaaagtcgttaagcttcgctccttcaaccctttcacttccgntctcgatgctntgnnacagtgcaatgcngtctctggaaggctattaactgatgagc

SEQ ID NO: 41755 - DNA, 255 bp, Glycine max
  Clone ID: 701124635H1
gttgaatcagtagtgaagctgaagggacttgacattgatacaatccaacagcattatacagtttaaggaatttggacaaccttcaagcagaacacactttggtgcttatccaagaacaagaacaacaaatgtaatgaagacctaagttaatccgtctttagattaggatgaaggtccttttgtcagtcaaaatctgaatggtttactcttctattccataccaaataacgtggttgataggatttacttttcgtc

SEQ ID NO: 41756 - DNA, 252 bp, Glycine max
  Clone ID: 701124636H1
gttgatgctactaagaaagttatatctggtaatcttgatgatttgatgccaccaccggagagacccatcttcagcttcaattccaagcaagagttaagcaagtggcatttgtattctgattctgaatttggaggtttgtcctctgcctctctgcagataactgagtcggaaaatggagcaacttctggaatctctccgggaacctttctctggatgtctctgagggctctaaatggaacatcactcggagtg

SEQ ID NO: 41757 - DNA, 251 bp, Glycine max
  unsure (1)..(251): unsure at all n locations; Clone ID: 701124637H1
attttcggtggccgtaggagcaatgtgttcgatcccttcaaggattttcctttcccaaattccgtctctacttccttccctgagttttctcgggaaaattctgcgtttgtgagcactcgtgtggattggaaggagaccccagaggcgcacgtgttcaaggccgatattcccgggctgaagaaggaggaagtgaaggtgcancttgaagatgataaggtgcttcagatcagcggagagaggaacgttgagaa

SEQ ID NO: 41758 - DNA, 252 bp, Glycine max
  Clone ID: 701124638H1
caattttcgaatctctctcctccatggacccaacttcgatccctccccctaccggccaccaccgtccccttcactgtcgaacccagcaatcacgtgacccccgccgacaacaccaacaccaaccaccctccttacgatgagatgatatacacagcaatcggggctctgaaggagaaagatggttcgagcaagcgagccataggaaagtacatggaacaagtgtacaaggaccttccacccacccactctgct

SEQ ID NO: 41759 - DNA, 251 bp, Glycine max
  unsure (1)..(251): unsure at all n locations; Clone ID: 701124639H1
agcacctgtacctgaggttcttgatgaaattcctgatgattctcagatggtagctggattggcatctcaaattgaagancttccaaagaagtcttatgcttatattgtgaaggtcatgaaagagggtgctgcgccctcttccactgtgacacctgtttctgtgaaatctgcccacaagagccaagaacagcagggtnnttgctgcacctccaccatctagcatatctngagacaaatggttctattataaa

SEQ ID NO: 41760 - DNA, 249 bp, Glycine max
  Clone ID: 701124640H1
gtgttaatatgcgtttcagcactgtcactgagtccttctgttgcgggggaagggcaaaataatggccttgttatgaacttctacaaggaatcatgccctcaggctgaagacatcatcacagaacaagtcaagcttctctacaagcgccacaagaacactgctttctcctggctcaggaacatcttccatgactgtgctgttcagagttgtgatgcttcactgttgctggactccacaagaaggagcttg

SEQ ID NO: 41761 - DNA, 248 bp, Glycine max
  Clone ID: 701124641H1
ctttcgatgaactcaaagctggtctaagaagatatgggtctacccttaaggatatagaaatacgtgatcttatggaagcggctgatgtggacaaaagtggaaccatagactatggggagtttattgctgcaacagttcatctcaacaaactagagcgtgaagaacatctcattgcagcattccaatattttgacaaggatggtagtgggtacattacagttgatgaacttcaacaagcttgtgcagaa

SEQ ID NO: 41762 - DNA, 249 bp, Glycine max
  unsure (1)..(249): unsure at all n locations; Clone ID: 701124642H1
cctatatcttcggtttcactccagtccactccacnnnccatntgcnctnatcattccgtncccgatctcatcatcgccaaggaagatgaatngtgcagggagacaggggctganatctggtgcggcgggggtgcaccaccagcgccagtactccgataacttcctcgacagctcatccancggcaacaggtggttccagtcggctggccttcaacaccttcaatcctcatccacacaacatacnacnng

SEQ ID NO: 41763 - DNA, 84 bp, Glycine max
  unsure (1)..(84): unsure at all n locations; Clone ID: 701124643H1
gnggacgnggccgcgaaactcgncgacgngntcnngccgcacaccactncgttgcgccatctnctntcaacaatcagccacagc

SEQ ID NO: 41764 - DNA, 247 bp, Glycine max
  unsure (1)..(247): unsure at all n locations; Clone ID: 701124645H1
gctacttcctactccaaccgcactncctgctaccgcnattatcatgggcnaggtcannatcggaatcaacggatttggaagaattggccgtttggnagccagagtggctctgcagagagacgatgttgaactcgttgccgttaacgaccctttcatcaccaccgattacangacatacatgtttaaatacncacagtgttcatggacactggaagcatcacgatgtcaccgttaaggacgagnagac

SEQ ID NO: 41765 - DNA, 245 bp, Glycine max
  Clone ID: 701124646H1
gttgagttctaatgagtaacgaatacgattacctgttcaagcttctcctaatcggagactcttccgttggaaaatcctgcttgcttctcagattcgctgatgactcctatgtcgacagctacataagtaccattggagttgatttcaaaatcagaacggtggagctggaagggaaaaccgtcaagctgcagatttgggatacagctggacaggagcgattcaggactataacaagcagttattat

SEQ ID NO: 41766 - DNA, 246 bp, Glycine max
  unsure (1)..(246): unsure at all n locations; Clone ID: 701124647H1
gctcgatgggaattgcgcttcaaggcgtctcgtagggctaatccgcctcacgagggtcaccaacggcacgtgcctttggggggccgaggccccctactgctggtcggcaaacggacggcgggcgcacgcgtcgcttctagcccggattctgacttagaggcgttcagtcataatccaacgcacggtagcttatngccactggcttttcaaccaagcgcgatgaccaattgtgcgaatcaacggttc

SEQ ID NO: 41767 - DNA, 249 bp, Glycine max
  unsure (1)..(249): unsure at all n locations; Clone ID: 701124648H1
cnnncatnaacnnganntgactgnctatacactcattgattgacaaaaaacttcccagttgctacctgctccttgaagtctctcttccactcancancctatncccctaaccatggtgctctctctctctcacacacccacccactnntttcactaacacttaaacaaagtccatcaatggcatttggactttttccagcataagangccccccgtaggnctccanatgtttctcctcgtttggagagt

SEQ ID NO: 41768 - DNA, 258 bp, Glycine max
  unsure (1)..(258): unsure at all n locations; Clone ID: 701124649H1
tgcgaatctacggtccaagcccagaagtcctcgaagcactaagaggttcncaacattgagcttttgctagacattccaaatgacaacctcagaaacctagcatctagccaagacaatgcaaacaaatgggtgcaagacaacatcaaaaactatgccaacaatgtcagattcagatacgtttcagtgggaaatgaagtgaaacccgaacactcatttgcacaatttctagtgcctgcattggaaaacattcagagggcc

SEQ ID NO: 41769 - DNA, 231 bp, Glycine max
  unsure (1)..(231): unsure at all n locations; Clone ID: 701124650H1
gccgcagctatggtgaagtactccagagaacccgacaancccaccaagtcctgcaaggccagaggcgctgacctcagagttcattttaagaacactagggagactgcctttgccatcaggaagttgccccttgttaaagctaaacgatacttagaggatgttttggcccacaaacaggctattcctttccgacgcttttgtggtggtgttgggaggacggcccaggctaag

SEQ ID NO: 41770 - DNA, 251 bp, Glycine max
  Clone ID: 701124651H1
aactgtggttgcggaagctcctgcaagtgcggcaacggctgcggaggctgcaagatgtacccagacttgagctacactgagtcaaccaccaccgagaccttggtcatgggagtggcacctgttaaggctcaatttgagggtgctgaaatgggtgtgcccgctgagaacgatggctgcaaatgtggaccaaactgctcctgcaacccctgcacttgcaagtgaggtgttgggagagcaagcttcaagcagag

SEQ ID NO: 41771 - DNA, 249 bp, Glycine max
  unsure (1)..(249): unsure at all n locations; Clone ID: 701124652H1
ctcttcaaagttgatcaangtggatgggctccccttgcaattgctggagcatttcttctcattatgtatgtctggcattacggcacggtgaaacgctacgagtttgaaatgcatagtaaggtctcaatggcatggattctcggacttggaccgagtttaggacttgttcttgtcccgggaattgggctagtatacacagagcttgcaaatggagtaccccacatcttttctcacttcatcacaaaccta

SEQ ID NO: 41772 - DNA, 248 bp, Glycine max
  Clone ID: 701124654H1
agacaacgttgtagcctttttttcatttctctgttcccacaacatggcttcttcgatctcccaaggtctcgtgttcaccacagccatggtcgtctccaccactgttctttaccttgcattctctgggcaaaagacttccccgcctttccaaattcccccaaattccagttcttcccactccaacaaacaaattcttcgctcttgcatatattcagaggagaagaaacgggaaatgaagaagaataaga

SEQ ID NO: 41773 - DNA, 247 bp, Glycine max
  Clone ID: 701124655H1
gggatgctaagatggacaaaagaagtgttgatgatgttgtccttgttggtggttctaccagaattcccaaggttcaacaactgctgcaggacttctttaatgtgaaaagagctttgcaagagcattaatcccgatgaggctgttgcatatggtgcggctgttcaggctgcaatcttaagtggtgagggcaatgagaaggttcaggatcttctcctcctggatgtcacccctctgtctcttggtttgg

SEQ ID NO: 41774 - DNA, 201 bp, Glycine max
  Clone ID: 701124656H1
tagaagttcccctctccccaaagttgtttgttctgtctgacaatttacttattcggttatttatgcaatgaagattttgaattaagtgtttttgttataggttgacaatattgtttatgttggatgattgatggtttagaaagtgaaaaatagctgggaaaagcctttatttttaaataaaaaagtaactttattttggga

SEQ ID NO: 41775 - DNA, 245 bp, Glycine max
  Clone ID: 701124657H1
gcgaccttcttcgtttctcgcaaagtttaagtcatcatgggtaaggaaaagactcacatcaacattgtcgtcattggacatgtcgactctgggaagtcaactaccactggtcatttgatctacaagcttggaggtattgacaagcgtgtgattgagaggttcgagaaggaggctgctgagatgaacaagaggtcattcaagtatgcctgggtgcttgacaagctcaaggctgagcgcgaaagagg

SEQ ID NO: 41776 - DNA, 242 bp, Glycine max
  Clone ID: 701124658H1
ggaatgcttgatcaaattatggatcagaatctggtggggaaagtcaatcctgcttctcttaagaagtttggggagacagctgagaagtgcttggccgagtatggagtggatcggccgtctatgggcgacgtcttgtggaatcttgaatatgctttgcagcttcaggagacctcatcagcactcatggaacctgaagataacagcacaaaccacattactggaattcagttaacacgtctcaa

SEQ ID NO: 41777 - DNA, 243 bp, Glycine max
  unsure (1)..(243): unsure at all n locations; Clone ID: 701124659H1
ctctcacacactcactctcngnntctctncctattgnggctagggnttgggttnttcactttcagcctctccattccttcaacctncttctnntctttgatctctgatggagacgttccgtgtttagtagcaagggttagttgaggccttgtgtttggaaacgtacggtgtcgttttggagttgggaaaacnaacaattctgagagatggcaaccacgaacccttttgatttgttgggtgacg

SEQ ID NO: 41778 - DNA, 242 bp, Glycine max
  Clone ID: 701124661H1
gcatcgtggaggatcctgtcttccattgagcaaaaggaagaaacaaaagggaacgagttgaatgcgaacggattaaggagtacaggcagaaggttgaattggagctttcaaacatctgtaatgatgttatgacagtgattgatgagcaccttatcccttcggctgcagctggtgaatccactgtgttttactataagatgaaaggagattattatcgttatcttgccgaatttaaggcaggc

SEQ ID NO: 41779 - DNA, 247 bp, Glycine max
  unsure (1)..(247): unsure at all n locations; Clone ID: 701124663H1
ctttcaccgagtaacttcactttccccaactccacctgagnnaaagatacnncataattcgcangcacgcangcantccacntgttctnactcagtgcttgtgttggacgcagaagaaccagaaaagaaaaacaagcacgaggngatgattaanttcgaaganaccgagttgcgantcggcctccctggcgggtctgcgagtgntcacaacgagtcaacaacggtcaagggcagtggtggaaagaga

SEQ ID NO: 41780 - DNA, 243 bp, Glycine max
  Clone ID: 701124664H1
gggccttcgtgtccgtggtcagcacaccaagactactggccgcaggggaaagactgttggggtctctaagaagcgttaagctattatgttttggcttggatattagattttgtttaggaggcatgtttgaagtacactacatgttttgcatcataccaactttgtatccgttgttaaatggcttgacaatttcaattttgtttgttatttgcatctgagattccgattagttaaatgatgttg

SEQ ID NO: 41781 - DNA, 252 bp, Glycine max
  unsure (1)..(252): unsure at all n locations; Clone ID: 701124665H1
atcatggcgatggcaaacttggctcgacggaagggttacgccgncaccntgtcgtcgaggtcgtcgctttgtctgacaaggtggagggggttcgcgtccggatctgacgaaaacgacgtcgtggtcancggcggcggtcccggcggctacgtggcggccattaaagcggcgcactgggtctgaaaaccacttgcatcgaaaaacgtggcactctcggcggtantgcctcaacgtcggatgcatcccttccaa

SEQ ID NO: 41782 - DNA, 251 bp, Glycine max
  Clone ID: 701124666H1
ggcaggaagaattggagcgtgcacgtcaaggtcagagggaagctgaaaacaagctatcatccttggaggctgaaatgcaaaaaatgagagttgaaatggctgccatgaagagggatgctgagcattactcacgtcaggagcatatggagttagagaaacgctatcgggaactgactgaccttttgtactacaaacaaactcaattagaaaccatggtcagtgaaaaagctgctgcagagtttcaattggaa

SEQ ID NO: 41783 - DNA, 168 bp, Glycine max
  unsure (1)..(168): unsure at all n locations; Clone ID: 701124667H1
cactcttgaatctgtggccacccagattgagaagaatggccaaaacaacaacaaaagtactaaaacaacacaatctcaccactctttctagaaaaccctgttccacacaacatacnactngnannntnaannncannnnanatnattaanaaaaattnnantcacttt

SEQ ID NO: 41784 - DNA, 247 bp, Glycine max
  Clone ID: 701124669H1
cggcaaagtccttgctggttgcttccattcgcgatggcgttgcaggagaggctagacaagttcaagaaacagcaagagaagtgccaaacgacactttcgaccattgcagctaccaaggccgccgcggcaacccaaaagtccgccacacatgcctcggcaaatggaagaaacgctgcccctgcggttaagttttccaacgacaccgagaggcttcagcatattaatagcattcgcaaggcccctgtgg

SEQ ID NO: 41785 - DNA, 244 bp, Glycine max
  Clone ID: 701124670H1
tctctctcgtgcggacacaatttttgatggggatatacctcagcactcccaaaacagagaaggcctctgaagatggtgagaacgacaagcttcgcttcggtttgtcttccatgcagggctggcgtgcttccatggaagatgctcatgcagctcatccatatttggacgagtctacgtcatactttggtgtttatgacggccatggaggcaaagcagtttcaaaattctgtgccaagtatctaca

SEQ ID NO: 41786 - DNA, 246 bp, Glycine max
  unsure (1)..(246): unsure at all n locations; Clone ID: 701124671H1
cttgatttggaaaagccctcatttcttcaacacgattaaagagcngtgagttagatctcagaggcaacaagatagctgtaattgaaaacttgggtgctactgaggaccaatttgacacaatagacttatctgacaatgagattgttaaacttgaaaatgtaccatatcttaaccggttgggcacaatgctcattaacaacaacaggattactagaattaatcccaacatcggagagttcttgccaa

SEQ ID NO: 41787 - DNA, 236 bp, Glycine max
  unsure (1)..(236): unsure at all n locations; Clone ID: 701124672H1
ataaaaacaccatcagcatcttcactcaccacgaaggttccgttctctgtngntctatatctctagggcacgttacgtggaaggaagctcttcaccgacttcaatcgaagaagatggattacagtgctggttcgagtctgtttccgttgcaccgttgcaaaaccattcacctggtgaggcacgcgcaggggattcacaatgtggagggtgacaaaaactacaaagcctacatgaac

SEQ ID NO: 41788 - DNA, 244 bp, Glycine max
  unsure (1)..(244): unsure at all n locations; Clone ID: 701124673H1
cagggttatgcacaggacagctataatgcatataatgcgcaatcacaatcagggtatgggcagccacctacatatgatcagcagcaaggctatggtagtgaaagcaacccggcacaagagggccacactgcaaactatgcagtacagggagattcagcccaagctccttctgcccaaccaattaccgtagcgcanaaggttatcctaccaaccaactgcccagttcaaacactgccaactaccc

SEQ ID NO: 41789 - DNA, 242 bp, Glycine max
  Clone ID: 701124674H1
attttccaggaggatcttgtgaaacgcctagagtctgagatcaaaggagactttgagaaagccgtgtaccgatggatactagaacctgcagatcgtgatgctgttttggccaatgttgccatcaagaatggcaaaaactacaatgtcattgtggaaatcgccactatcctctccccggaagagcttttggccgtgagacgtgcttatctcaaccgctacaagcactccttggaagaagatgt

SEQ ID NO: 41790 - DNA, 242 bp, Glycine max
  unsure (1)..(242): unsure at all n locations; Clone ID: 701124675H1
attaaaaatgcagatcttcgtgaaanccctaacggggaagaccataaccctcgaggtcgaaagcagcgacaccattgacaatgtcaaggctaagattcaagacaaggaaggcatccctccggatcagcagcgtttgattttcgccggaaagcaacttgaagatggaaggaccttggccgattacaacatccagaaggaatcaacccttcaccttgtcctcaggcttcgtggtggcatcatcg

SEQ ID NO: 41791 - DNA, 240 bp, Glycine max
  Clone ID: 701124676H1
atggcactcacgtctactggactactatttggatggggttggaataagtttggacaggttggagtcggtgacaatgttgatcactgctctcctgtgcaagtgaagttcccccaagatcagagagtagttcagatctcatgtgggtggaggcacacaattgctgtaactgaaaaggaaaatgtattttcttggggaagaggcacaaatgggcaacttgggcatggggataccattgaccgg

SEQ ID NO: 41792 - DNA, 240 bp, Glycine max
  Clone ID: 701124677H1
ggtcctcgtcaacattgagcaacagagtcctgatattgctcaaggtgtgcacggccacctcacaaagaggcctgaggagattggtgctggtgaccaaggtcatatgttcggctatgccactgacgagactcccgagctcatgcccttgagccatgtccttgccacgaagctcggtgccaagctcaccgaggttcggaagaacgggacatgcccttggctgagacctgatggcaagaccca

SEQ ID NO: 41793 - DNA, 244 bp, Glycine max
  unsure (1)..(244): unsure at all n locations; Clone ID: 701124678H1
ccacgtttnggtttagcttgagcgatgtcgggcctgtataactccaacttctcaccagtgagagctncttctcctcagattagaaccaacccagaagtcnacagtacagtaccttacggagttgctggcagagcatcagaagtttggtcccttacatgcaagcccttcccatatgcagtcgtctcttgaatcaaganatattaagagtttctggaatgctgtccaatcaaggttttggtgactt

SEQ ID NO: 41794 - DNA, 242 bp, Glycine max
  Clone ID: 701124679H1
gcgaaatcgcaatcgcaatccagcgaatatgaaggtcgtcgctgcatacttgctcgcagtgttgggagggaatccttccccttctgccgatgacatcaaacacatcctcggcgcagttggagctgaggctgagaatgagttgattgagttgctcttgactgaagtcaagggaaaagacttcaatgagctaattgctagtggaagtgaaaagatgtctgcagtgtctggtggcggtgcagcgg

SEQ ID NO: 41795 - DNA, 111 bp, Glycine max
  unsure (1)..(111): unsure at all n locations; Clone ID: 701124680H1
ataaaatccctaaacactacgaaatccagccacgaagacagacacagagtgccccaaaacaatccaaaatcccgaaaaagatattcaggtcaaggggnanngatccttgnc

SEQ ID NO: 41796 - DNA, 245 bp, Glycine max
  unsure (1)..(245): unsure at all n locations; Clone ID: 701124681H1
atttgatgcaaggngttatanttccagactgaacagtatgataaggagtgatactgantcaattttgggagcatcccctgactatactttttcttccagagtggacagtgcaatagcatccccgctcggtagttttgcttccagagaacacagtgcaataaggagtcagactgagtcaattttgggagcatcccctgtccatgagggagtgtgcngaagcagatcattctcaaagaaggagggag

SEQ ID NO: 41797 - DNA, 247 bp, Glycine max
  Clone ID: 701124682H1
ctgcacttgtgtctcttgcattgtttggtgcttatgtgagcagagcaggcatcaaaacagtgaatgtgatgaccccaaaagtttttataggtttgattgtgggagcaatgcttccctactggttttcagccatgacaatgaagagtgtcgggagtgcagctctcaaaatggttgaagaagttcgtaggcaattcaataccatcccggtcttttagaaggaagagcaaaacccgattatgcaaattgt

SEQ ID NO: 41798 - DNA, 86 bp, Glycine max
  unsure (1)..(86): unsure at all n locations; Clone ID: 701124683H1
aagactttncagcngaaccaacagcatngagggtcanacctccaatgaaggcncnagnacntgnaaacattaccagcaaaangttc

SEQ ID NO: 41799 - DNA, 246 bp, Glycine max
  unsure (1)..(246): unsure at all n locations; Clone ID: 701124684H1
ctccattctccaaggtttggacgaaatagagaggcgcattgagaatggagagttcaattggagagctgacagggaggatgttcacatgaacattgaggccgcnctcaccgacttgatcggtgagcctgccaagaagctccacacnncatngaancngaacgatcaggtcttgacggattttcgcctctggtgtcncgacgcnattgacaagatcctcgtgagcatgaaacagcttcaggtctcatg

SEQ ID NO: 41800 - DNA, 242 bp, Glycine max
  unsure (1)..(242): unsure at all n locations; Clone ID: 701124685H1
gggagcagcttccatggaggcatagacgnagatgcagtcatgaacaggacaaagttcagattcttcttctgagcaaaattttggggcagcaactaactaaatcctcaaaacagtgcaatntagtgaagattgttgggtcagttatggcagcgttgatttccaaaaggatcctacgttgttcttctgggtccttgcattcactaggacgatgttactttgattcacctgggtttncctctatt

SEQ ID NO: 41801 - DNA, 243 bp, Glycine max
  Clone ID: 701124686H1
gctcaacaatgggttgttttcttcattgctttggttcctccaagagcacaaaacctaggcgcaaggcacaccatcaccatcgactcgctagagacaggttagagcaatgctctattcaggattactccgaaacggtggtaattggcactgcatcacaagaagtccaggctaaacctttggagcagataaacgtgagccccaaaaagaaagtaacttttgatgtcaatgtgaaaacgtacgagc

SEQ ID NO: 41802 - DNA, 133 bp, Glycine max
  Clone ID: 701124688H1
gacaatcactactcacgctctaaagcataagtagtggatctccaaaattttgactggcttctattcccccctcaattttgtttttcattgcttgactttgaaagttacctggaaatttgttttaagctatgac

SEQ ID NO: 41803 - DNA, 164 bp, Glycine max
  Clone ID: 701124689H1
ttctaatcaacttaattcaacctatatacgttttttatatattcaatattgttaattctttaaccaaccttgttaagactctcagcaaaaatatctctttacagattctgctctcatctctcgcctcggtactggaaatgaaatagcggaatcctatgtagaga

SEQ ID NO: 41804 - DNA, 237 bp, Glycine max
  Clone ID: 701124690H1
gattcggttctttacttgttgggttgttctgatcttctctcatagcaatcaaatcacactcccatcttctcatctcgtaaaccctaaaccccgttttcagtgacatcgagatcgatcgaacatggatgaggagtacgatgtgatcgtgttgggcacgggtctcaaggagtgcattctcagcggtcttctctccgtcgatggcctcaaggttctgcacatggacaggaatgactatta

SEQ ID NO: 41805 - DNA, 201 bp, Glycine max
  unsure (1)..(201): unsure at all n locations; Clone ID: 701124691H1
acatgctgggangctgttgttgctccacaacaacagcagccnttgttgattccccttcacttgctncagagaatcagagatttgcctaaggaccttcctggaaccaacatcaagaagcatgtttctcagctcattgggaggactccactgntttatcttaacaaagtcaccgaagatgtggagcttatgttgctgtcaagc

SEQ ID NO: 41806 - DNA, 237 bp, Glycine max
  Clone ID: 701124692H1
gaagcaatgcaagtggagaaggagagcttggtgtacatgtggggttacctgcccggagctctgccgcagaggacgcctctgttgacgccgcttcttgttagggttccgccctctggttacttttggaaggatgtctgcggcggtggttgtggattcgccatggctatctctgagcctggaaagctcataacatggggttcaacagatgatttaggccaaagctatgttacatctggc

SEQ ID NO: 41807 - DNA, 240 bp, Glycine max
  Clone ID: 701124693H1
gttcactttcactttaccaactcctaacaatttctctctgtttccttcttcaccgcatcaatggagttggacggcgttctcctcggcatgtgcaaccctctcctcgacatctctgccgtcgtcgacgacgctttcttgcaaaaatacggtatccaagttgaacgatgcgattctcgctgaggataagcacaaacctatgtatgaagaattggctaacaatcctaatgtggagtacattgg

SEQ ID NO: 41808 - DNA, 241 bp, Glycine max
  unsure (1)..(241): unsure at all n locations; Clone ID: 701124694H1
cttctgtgctcgcccttgtattccttcttgtcatactatttcaggaaggattggtaacatgtatgaagaatgaagacggatcagaagaatggggatatgtgcaagttagaccaaaagcccacttgttctggnggctttacagaagtccatacagagtggagaatccctccaagccttggccaatcattctctggcttcagggaggaccaggctcttcaggagttgggtttggaaattttgg

SEQ ID NO: 41809 - DNA, 240 bp, Glycine max
  Clone ID: 701124695H1
ccaagaccacaaaatccgcgtctggaaaacaaccgaccaacccggtaataataataacaaccccaactactacaaatgcgtcgcctcgcttcccacgctccacgaccggttctccaaactcttctcctccgagaactacgtcgagattcgccgccacaagaagcgcacgtgggtgcatcacgtggacaccgtctccgccctcgcactttcccaagacgggtctcttctctactctgcgtc

SEQ ID NO: 41810 - DNA, 240 bp, Glycine max
  unsure (1)..(240): unsure at all n locations; Clone ID: 701124696H1
gggtttttagctcccccaatttcttcgctcaacatggttcttcaaaatgatattgatttgctaaatcctccggttgagcttgagaagaggaaacacaagctcaagcgtcttgttcagtcaccaaactctttcttcatggatgttaagtgccagggttgcttcaacataaccactgtctttagccactctcagactgttgttgtatgcggaaactgccagactgtcttgtgtcaaccnacc

SEQ ID NO: 41811 - DNA, 268 bp, Glycine max
  unsure (1)..(268): unsure at all n locations; Clone ID: 701124701H1
attcatacgtggtgttgttactgctgctcttttctcttttcttttctctttagttctctcttcccctnnnnnnnnnnnnnnnnnnnnnnnnngagcttgtttaagcttttcttccattaacatattatcanaatgtgtggtattcttgctgttcttggttgttctgatgactctcgagccaaaagggtccgcgtgcttgagctctctcgcagattgaagcaccgtggccctgactggagtgggctccatcaacatggtgactgctttt

SEQ ID NO: 41812 - DNA, 264 bp, Glycine max
  unsure (1)..(264): unsure at all n locations; Clone ID: 701124702H1
aaaggagttccgatgaaatcttcgtttgtnaganggtctgcacttcaaagaggatgctcaagaaggttggttccttctccaaggaccccattcctgatacctgcgtcaccgtttgcngcgtttccgatttagatgcctgtgctgatgcctgtgcccgcantgtgtgtatcaaccaacatcaagtccctaattggaacgacatttgcctcaggaggtgccagagtgaatgcctcaaactctcttctcagagtcagtcctcgtagc

SEQ ID NO: 41813 - DNA, 259 bp, Glycine max
  unsure (1)..(259): unsure at all n locations; Clone ID: 701124703H1
accgttccgttccgttttcctctgtttttnttttctttctttcaaatccccgcttcgtngaaatcccgaaccagaaaccatgcttctccgaaccgntgctgcttctgcntcgtccctctccctcttcagcccgaacgccgaacctccccgttcggttcccgctcgtggattggtggttcgcgcagnaaaggatccacgaaccaccgcgccctgaccggagtgatttttgaaccgttcgaagaggtgaagaaggagctcg

SEQ ID NO: 41814 - DNA, 260 bp, Glycine max
  unsure (1)..(260): unsure at all n locations; Clone ID: 701124704H1
tgagatttgcgaatctgagaaatggcggantcttctcgggaggagaacgtttacatggcgaaattggcggagcaggccgagcgttacgaggagatggttgagntcatggagaaggttgcaaagactgtggaggttgaggagttgacggtggaggagaggaatctcctctctgtggcttacaagaacgtgattggtgcgangagggctncnnnnnnccntcatatcctccattgagcagaaggagganagcangggcaatt

SEQ ID NO: 41815 - DNA, 241 bp, Glycine max
  unsure (1)..(241): unsure at all n locations; Clone ID: 701124705H1
ggttctgccttcacacaanantnnnnccnnaatccccttttactccctaagaaaagccatggactaagggtcccgnnntctactctgacatcggcangaaagcangggatctgctgttcaaggactaccacagtgaccagaagttcaccatcaccacctactcacccactggagttgctataacagcatcaggaaccaggaaaagtgaactgtttgtggctgatgtcaacacccagttgaa

SEQ ID NO: 41816 - DNA, 254 bp, Glycine max
  unsure (1)..(254): unsure at all n locations; Clone ID: 701124706H1
aaggtccttgttttcttcgttgctacaattttngtagcatggcaatgccatgcgtacgatatgttccctctccgaatgaacactggctatggtgcccgtactccggaggtgaaatgcacnagttggaggcttgctgtggaagcacacnacatctttggctttgagaccattcctgaagagtgcgttgaagcaacaaaggaatacatccatggcgaacaatatagatcagactccaaaacagttaaccaacaagc

SEQ ID NO: 41817 - DNA, 252 bp, Glycine max
  unsure (1)..(252): unsure at all n locations; Clone ID: 701124709H1
anaggcacttatccttacaaacagaaaatggacatcttcaattagagagcaagagaaacataggttgactcctattgtggaagccctgtcctcaagttatctgggtcctgattattctcagtcaagagaatatgctgatatatcattaaaggacatagatcaagttgccaagagctcatttcctttgtgcatgcgtcacctatttgataagctgaaagaggatcatcattaaagcatggagggaggatgcaa

SEQ ID NO: 41818 - DNA, 253 bp, Glycine max
  unsure (1)..(253): unsure at all n locations; Clone ID: 701124710H1
ttagtcctggaagtgaaataccaaagtggttcaataatcagcatgagggaaattgtgtaagcttagacgganctcatgttatgcatgacgataattggattggcgttgcgttttgngcaatattcgtcgtacctcatgaaacaatctcagcgatggctttntcaagnacagatgggtactactcgggttttagtgatattccagtgggnttttatggaggtccaggtccaggacctggttttagancaatccg

SEQ ID NO: 41819 - DNA, 254 bp, Glycine max
  unsure (1)..(254): unsure at all n locations; Clone ID: 701124711H1
gcgacttttgagttcaaaagntgactaacttcccattgatcaacttggagaagctcagtggtgaggaaagaaacgataccatggaaaaaattaaagatgcttgtgaaaactggggattctttgagctggtgaatcatggcattcctcatgacatattgganaactgtggagaggttgaccaaagagcactacaggaaatgcatggaagagaggttcaaggaattagtggcaagcaaaggtctagatgctgtcca

SEQ ID NO: 41820 - DNA, 252 bp, Glycine max
  Clone ID: 701124712H1
gaagagtcaggtttctaatgacttcaacatgatggatctgaaaatttacacatgtgaacaccctcagtgcccttacagtcaagttcgccttggtttccctgaccgaatttcaagggacaaccatcagttgatttgtgcttatagaggtacttcagattttgggggtccaagttttcctgttaatgagataaagccagtcgtacaccccccgtcctttgttcaacccaaatctactgctcagcctggtagtat

SEQ ID NO: 41821 - DNA, 121 bp, Glycine max
  unsure (1)..(121): unsure at all n locations; Clone ID: 701124715H1
gcctcttctcttctcccagaatcggttacaggtttaagggttttgttttcatttaggtcactaatccgatatcatgaagctcgatacgactagtctcgnatcgtttcccacacancatncg

SEQ ID NO: 41822 - DNA, 261 bp, Glycine max
  unsure (1)..(261): unsure at all n locations; Clone ID: 701124716H1
aggtaaggtaggttaacactcttcttcatcgtcgtcgcaatgggacgtgtgatccgtgcgcaggtaagggagcaggctcggtcttcaagtcccacacgcaccaccgcancggccctgcacgcttccggagcctggacttcggggagcgcaacggctacctcaagggcgtggtcaccgacgtcatccatgaccctggccgcggcgcgccgcttcgccaaggtcgccttccgccaccctttcagatacaagaagcagaacgag

SEQ ID NO: 41823 - DNA, 263 bp, Glycine max
  unsure (1)..(263): unsure at all n locations; Clone ID: 701124717H1
ggctaccctaatcctctcctcttcctctctactaatttcagctatggccgatgaagctgtggttgttccagatcccacccagatcgatgtcaagctctttaaccgctggagcttcgacgatattgagattactgacatttctctggctgattatatcggagtggcgacatccaagcacgncacgtatgtgcctcacaccgccggcaggtactcggtgaagcggttcaggaaggcgcaatgccccattgttgagaggctgacca

SEQ ID NO: 41824 - DNA, 262 bp, Glycine max
  unsure (1)..(262): unsure at all n locations; Clone ID: 701124718H1
gttggtttctcttgttttttttttgtaggtactgaggaagaaagaccaaaactttatccgcttgcttcacttagctcaagagcgtacaattcaggcaaaggccttgaagtcggagtgtgtgttaaggatttcttaggagttgcttctgtcttgactgaagaaatggaggtatatggcaaatctatggttgcaggtcctgcaaatgttatttttctgtcaagnattttgggccaagaaggtcnagttcccggtcacaaatgcg

SEQ ID NO: 41825 - DNA, 260 bp, Glycine max
  unsure (1)..(260): unsure at all n locations; Clone ID: 701124719H1
aggcgtgccactggtggcaagaagaaggcctggaggaaaaagagaaagtatgagcttggtcgccagcctgctaacactaagctgtcaagcaacangacagtcaggagnatccgtgttagaggtngaaatgtgaaatggagggcattgagattggatactggaaattactcctggggaagtgaagctgtaactcgcaagactcgtgtactagatgtggtttacaatgcctcaaacaatgagcttgtgcgtactcagactct

SEQ ID NO: 41826 - DNA, 258 bp, Glycine max
  Clone ID: 701124720H1
ctctaaatatgcaaactgagagtgcaaagaaaaacctgacttttgtcccccttgctccagcatgcgtggttattcgagttctcactccagtatatactgcaaaccttcctcccaatccccttccatggaggcttttctggattctgcttttttcagcaatgacctatgtcatgctcacaagcctcaaggttctcattggcatgggactacagaagcatgccacatggtatgttaatcgttgcaaaaagagaaaacatc

SEQ ID NO: 41827 - DNA, 255 bp, Glycine max
  unsure (1)..(255): unsure at all n locations; Clone ID: 701124721H1
gttctatcgtcntgttgtngtccacgcttngccccttcnttgtcgngtgcttcagccctccgttctcgcatccggtaangtactactctnacttctacttcttcagagactnccactccaacctccgtcnagaaacgagtanngtcgggagttcagcccacgggctcaattcacctcggaaactattttggcgccatcaagaattgggttgcccttcagaatgtgtatgatacacttttcttcattgtggacctg

SEQ ID NO: 41828 - DNA, 253 bp, Glycine max
  unsure (1)..(253): unsure at all n locations; Clone ID: 701124722H1
gttctaagtgcatgtgttaacacaaatctctaatggcagaagcancctgtcgttcttcttcgcgtaagggtaagagtaaggtcgtgaaggatcactgcttggtgataactgagtctgacgtggacgcggcacagaacctttcaggaagcaagaggagcagaagcatggatgaagaaaagggagaagaggttggtcagaggctaagtaatattataatggcgaaaatacaagagatttttgggaatgatataga

SEQ ID NO: 41829 - DNA, 233 bp, Glycine max
  unsure (1)..(233): unsure at all n locations; Clone ID: 701124723H1
gcagacgcaaacgcaaacgcaaaacncaaacgcaaacgcaanncgtgatccattgacgaaactggtgcagcgtctcacctaccgcaagcggcacagctatgccaccaagtccaaccaacacagggtcntcaaaacccctggtgggaagctcgtttatcagactaccaagaagagggccagcggacccaagtgccccgtcactggcaagaggattcaggggattccacacttga

SEQ ID NO: 41830 - DNA, 250 bp, Glycine max
  unsure (1)..(250): unsure at all n locations; Clone ID: 701124725H1
ttttgctctacctcctcacttctagggttcgcagcttgtctctcaaacaatggcgctgttccttctctangaatccgcttcgggctacaccctgttcgaggttcacggcctcgacgaaatcggccagaacaccgaagcggttcggaactccgtttcggacctcaacaggttcggcaaagtcgttaagcttcgctccttcaaccctttcacttccgctctcgatgctctcaaacagtgcaagccgtctctg

SEQ ID NO: 41831 - DNA, 251 bp, Glycine max
  unsure (1)..(251): unsure at all n locations; Clone ID: 701124726H1
caccggttcgatcatatangaagaatactctacaacaaaaggaagaggaacagggtgaagggtctgggatgtacgtgaaagttagcatggcaggtgcaccttacttaaggaagatagatctaaatgtttacaagagctacccagaacttctcaaggccttgggaaatatgttcaagtgcacatttggtaagaacctagaacaagttttaaataatctcttattattttttttggctttcttaagattaatt

SEQ ID NO: 41832 - DNA, 254 bp, Glycine max
  Clone ID: 701124729H1
gatccctgtaaccgcgttcgacgatttagggtttttttcggagacaatggcggatgaatcggagcacacggcggcgccggcgagcggtgaatcgctgcttgacaagattgccgagaagattcacggccaccacgactcttcctcttcctccgattccgattcggagaaaaaggaaacttcgtcaattaaggaaaaggttttccgcctctttggaagggagaagccagttcactccgtcctcggcggtggaaaac

SEQ ID NO: 41833 - DNA, 257 bp, Glycine max
  Clone ID: 701124730H1
caggcgagtgagaaagatggaggggaaggagcaggatgtgtcgttgggagcgaacaagttccccgagagacagccaattgggacggcggcgcagagccaagacgacggcaaggactaccaggagccggcgccggcgccgctggttgacccgacggagtttacgtcatggtcgttttacagagcagggatagcagagtttgtggccacttttctgtttctctacatcactgtcttaaccgttatgggagtcgccgggg

SEQ ID NO: 41834 - DNA, 258 bp, Glycine max
  unsure (1)..(258): unsure at all n locations; Clone ID: 701124731H1
gaattgcgcttcaaggcgtctcgtagggctaatccgcctcacgagggtcaccaacggcacgtgcctttggngggccgaggccccctactgctggtcggcaaacggacggcgggcgcacgcgtngcttctagcccggattctgacttagaggcgttcagtcataatccaacgcacgntagcttcgcgccactggcttttcaaccaagcgcgatgaccaattgtgcgaatcaacggttcctctcgtactaggttgaatta

SEQ ID NO: 41835 - DNA, 260 bp, Glycine max
  Clone ID: 701124732H1
attagaaactcttgtacttggttttatgccaaattagggactcttttggttgtcaattagatcacaaagatatggaggttgccatggaactggaagatgatctattttttgctgatttgagcaaggaaattgctctactaattatggatgaagatgaagatccacttgcttcttgtcctcctgactctcttcaggctttttctggggcaattcatcctcctccacagtttgctttcatctttgagcatgctttgagaaga

SEQ ID NO: 41836 - DNA, 264 bp, Glycine max
  unsure (1)..(264): unsure at all n locations; Clone ID: 701124733H1
tgccagtagtcatatgcttgtntcaaagattaagccatgcatgtgtaagtatgaactaattcagactgtnaaactgcgaatggcagtttttatcatcttaatcattcaactagcggtgtatcagaacctatacttaatgatccatcgcttccaaaaccacataattgttctgacaaatttgatactgaacttccatcagatcttatcacttcgtgtgttgctacattaatcatgattcagacttgtactgaacggcaataccct

SEQ ID NO: 41837 - DNA, 260 bp, Glycine max
  unsure (1)..(260): unsure at all n locations; Clone ID: 701124734H1
gtggctataatctttctgtggtgagttgtcaagatgtacacatcaaggaagaaaatccacaaggataaggatnctgagccaactgaatttgaggaatcagtcggacaggcattgtttgatctgganaataccaacaatgagctgaaaagtgatctgnaagatttatacataaactcagctgtccaaattgatgtttcngggaaccgcnaggctgtggntatccatgtnccctacngattaaggaaaggattccggaagat

SEQ ID NO: 41838 - DNA, 260 bp, Glycine max
  unsure (1)..(260): unsure at all n locations; Clone ID: 701124735H1
gagagtcttctcagcaagttggattattcaaagacattaacagagatatggtgaacaataatgtgagagatattcctgaaacttcttatacacacaacanangncnngnnncnggtggcatttctgctcctattaagatcantgaaaagactncaagaggngcaaagggacacaaggttgtttctgatttagtcaagcctattgacgtggttcctggatctgngcctgaaattcaggctcctccttttaactgttagtaa

SEQ ID NO: 41839 - DNA, 255 bp, Glycine max
  unsure (1)..(255): unsure at all n locations; Clone ID: 701124737H1
atttggagcaaattgccacccgaaatcctcgaatacatactctnnnttcttcctctcaaaaccttcttncnacctaagatccacttgcaaaggtttctggtctctcatattctctcctcctttcatttcgaaacactgttctcccactgcttcttcacccttctcttcattcctcttactctcacaccctcaattccaccgtcacttccctcnatacgattgcacactcggcacgtggngcaatttctctctctc

SEQ ID NO: 41840 - DNA, 243 bp, Glycine max
  Clone ID: 701124738H1
cttatttagggtttttgtgactgtgctccacaaccgagtcgccatggcgtcgcaggagagtatcgaaaagatgcaggcacggcagaattaccggaatttatggcacaccgatctcatgagatccattcaggccgatactccttattgttgcctcgcgttgtggtgtgcaccatgtgtgtcttaccttcttcgcaaacgagctctctatgatgatatgtcaaggtacacatgttgtgctggcta

SEQ ID NO: 41841 - DNA, 249 bp, Glycine max
  Clone ID: 701124739H1
tctaaatatgcaaactgagagtgcaaagaaaaacctgacttttgtcccccttgctccagcatgcgtggttattcgagttctcactccagtatatactgcaaaccttcctcccaatccccttccatggaggctttctggattctgcttttttcagcaatgacctatgtcatgctcacaagcctcaaggttctcattgggcatgggactacagaagcatgccacatggtatgttaatcgttgcaaaaagag

SEQ ID NO: 41842 - DNA, 228 bp, Glycine max
  unsure (1)..(228): unsure at all n locations; Clone ID: 701124740H1
ggggtgcttctttgctggacaccnntgttcaaggcccttgannaggtggtgaagttagtggattgtgatatttacggttatgtccctgattttgaagcagatccattactagagagtggaggaacaatatggtcctttaatttcttgttttacaatagaaagcttaagcggattgtatcttttcgattcagttgttttagtaacttgattgctgacggactgcttatt

SEQ ID NO: 41843 - DNA, 249 bp, Glycine max
  Clone ID: 701124741H1
aaacctgatgccaatggaatccttagattgaattacaagttagaggtgaaggagttcgagtttgttgctcaaaggtctggttatctaggcgacaagaaattggaatctgttgaagcagatgctggcatgcaaaaaaatcaaaatcggcttcacctttggcaagtgtttttttccaatccaaatgagtggtgggatcaaagaaagagcaagcgaaatccaaaacagcctgattttaagcacaaggatacc

SEQ ID NO: 41844 - DNA, 155 bp, Glycine max
  unsure (1)..(155): unsure at all n locations; Clone ID: 701124742H1
ggaggagcaagttgancagangaaaaacanncgaaaagagannganaanaagataaaatggngggagaagaagtagtaccantggacgacaaagcgnagaggatgcgagatctgctatcgagtttctactcccctgacccttccatctccanana

SEQ ID NO: 41845 - DNA, 249 bp, Glycine max
  Clone ID: 701124743H1
ttttagggcacacaccgcagggagacggtttctttcactctctgcaattcgcgatggctgacgaggactatgaagatattgacatggggtacgaagatgaaccgccagagcccgagattgaggaaggtgcagaggaagatgtggagaacaaaaacgatgaaataactggagagcctattgacaccgaggataaggaagaggaacaaccagtgaagcggcctcgaaagacatcgaaatatatgactaagt

SEQ ID NO: 41846 - DNA, 253 bp, Glycine max
  unsure (1)..(253): unsure at all n locations; Clone ID: 701124744H1
atgggaantgcgcttcaaggcgtctcgtagggctaatccgcctcacgagggtcaccaacggcacgttcnctttngggggccgatgncccctagctgctggtcggcaaangganggcgggcgcacgcgtacgcttctagcccggattctgacttagaggngttcagtcataatccaacgcacggtagcttcgcgncantggnttttcaaccaagcgcgatgnacanttgtgcgaatcaacggttcctctcgtat

SEQ ID NO: 41847 - DNA, 256 bp, Glycine max
  Clone ID: 701124746H1
agcatggagtcctcaaagatctatgcttacctcttcctttgcatgctcttcctctcctccgccactccccattctccggttgtggctactgtggcaaaccccccaaaaagcacaagcctggtaaaacaccaaagacacccacagtacccgttgttaagccaccagtcacaatccctcccattgttaagccaccagtcacaatccctcccattgttaatccaccagtcacaatccctcccattgttaatccaccagt

SEQ ID NO: 41848 - DNA, 253 bp, Glycine max
  unsure (1)..(253): unsure at all n locations; Clone ID: 701124747H1
ccacacccacaccaataacaagcttggttggtacttatctacaatctgcatcatggaaggtgttattctgagaagggtcattccttcggataacagttgcctcttcaatgcagttggatnagttatggatcatgacaaaaagaaagctgctgagttgagacaggttatagcagcaacagtagcaagtgatccacagaaatattgtgaagcatttcttgggaagccaaacgctgagtattgtaactggattctt

SEQ ID NO: 41849 - DNA, 259 bp, Glycine max
  Clone ID: 701124748H1
accatttatagggttttcttttctttgcccaagaaaattgagagagtgcatttcaatccacattggtcaggccggtatccaggtcggaaacgcctgctgggaactctattgccttgaacacggcattcagcccgatgggcagatgccgagtgacaagaccgttggaggaggagacgacgccttcaacacattcttcagcgagaccggcgccggaaagcacgtgcctcgcgccgtcttcgtggatcttgagcccaccgtg

SEQ ID NO: 41850 - DNA, 265 bp, Glycine max
  unsure (1)..(265): unsure at all n locations; Clone ID: 701124749H1
gccatggattctctactggcgaactatgcctcttcagatgaagaagaagatcaacaaccatcacnaccaaaaacgacgacnttttcctcccttcctcaacccaaactttctctgtttcaatcccttcctcaacccaaatcttctctgtttcaatcccttcctccacccaaacaaccttntcnccgaaagctcttccntccctaaccctaaccctaaccctgaccctaaaccccaaatcganaagacacaacccaaacgcgtcgtg

SEQ ID NO: 41851 - DNA, 259 bp, Glycine max
  Clone ID: 701124750H1
gctggaccctccggctcctccgatggaggggtaggagtgaattggctctgcatgagccctaagcgagatcacaaccccgaaaactatgacgaccttcaattcgagttcaatcctaatctcttcgcctctctcgagcactatttgcctcctcatatgctcaacctctcacgcgatgttaagcttcactacatcaggaacattcttcttcgctatttgcctgagaatgaccgcaactgggtgcccctttttttaattaatt

SEQ ID NO: 41852 - DNA, 100 bp, Glycine max
  unsure (1)..(100): unsure at all n locations; Clone ID: 701124751H1
anacncntgtcatcgtgncctgcatcangacatgggtaaggtcttngcccgaatataccatgttgantagataatatttctggccactcatnagcaaggt

SEQ ID NO: 41853 - DNA, 85 bp, Glycine max
  unsure (1)..(85): unsure at all n locations; Clone ID: 701124753H1
caccactcncctctttaatnatgcaacgctctcactntttccctctctagagacnttanncctgccatgtcatcacaatttcnng

SEQ ID NO: 41854 - DNA, 248 bp, Glycine max
  unsure (1)..(248): unsure at all n locations; Clone ID: 701124754H1
gtgtctttatttntttaaactatgtatcatgttttccttgggatgatctgcatggttaaactttaaaatttgtatgtccggctcttcttaatttccttgcttaacancatttttttctccgacatatgatgtcttgttttggatgtagttgagttgttgattttgaattattagagagtcttaatcattgattggagacacccaccaaccaatttgattgctttccttttgcatgttttagtttttcc

SEQ ID NO: 41855 - DNA, 250 bp, Glycine max
  unsure (1)..(250): unsure at all n locations; Clone ID: 701124755H1
gttccccnctttgtgttcgttcgcgacgatggggtccatccccgatccaggcgagttgagcgagttgactcagccgagcttcgacgagttccagcgccaaacctctcncatgaccagctgcaccctcctctggaaggagctctccgaccacttctcctccntcgagcaagacntcaaccacaaatccgaagtncnncaagcgcaagattcacaccctcgacaactnaacctcggactccctcngcctcct

SEQ ID NO: 41856 - DNA, 247 bp, Glycine max
  unsure (1)..(247): unsure at all n locations; Clone ID: 701124756H1
ttttgggttgcaaatgggtcgctgcnagtttccggaggttgcggtggagattgagacgcagttgaataagtataagaaggatgtggatgaggtgaanaagaggactggcgggactcatggcgcggagtttgatgggacggatttgattgggaacacgaagcatttgatgaatgctgtgaattctctgcctgagttgactgagaggaaacaggtgattgataagcataccaacattgcgactgtgttg

SEQ ID NO: 41857 - DNA, 66 bp, Glycine max
  unsure (1)..(66): unsure at all n locations; Clone ID: 701124757H1
ggtaactccaatagttgaaggttatngtggatnnagcctttcgaactgaaattgtaccaattgagt

SEQ ID NO: 41858 - DNA, 249 bp, Glycine max
  Clone ID: 701124759H1
cttgttctctaaccaattatttaattgccttttccctgctgttgttgcaactaattgattttcatggttacaagatgaagtgtttcttcttcaaggagaagtgcaaatccgccccggaactgcacaagaagaaaacccccgccgtgaaccgcgccgcaaactccaccggctccgtgtcttcgcccaagagcgtgaaggacttgtacagagagaaagagcacagctttagagtcttcactttgcaggaac

SEQ ID NO: 41859 - DNA, 241 bp, Glycine max
  unsure (1)..(241): unsure at all n locations; Clone ID: 701124760H1
tgtctccttggaccctccttatgaggtatatcaggatcagagggccaggctgaggcaccagagtctcttgcaggactatgaagacctgcacaaggaaacagaagccatgaganggaaattgcaggctacgaggcagaaaaagttgatgctggaagatgaagttagatttttgaggcaacgttacaattacttgctaaaacaccctnttctaaagcctcatccaaagcaagttgtaaagcca

SEQ ID NO: 41860 - DNA, 252 bp, Glycine max
  unsure (1)..(252): unsure at all n locations; Clone ID: 701124761H1
gcaaaatcncatnancnatcatgcannattnnngtgtaccatngtaantggtggtngccggcttaggcctcangaggattcacttaataaccccattgatgtggtagttggtacccctggcagggttcttcaacatattgaggnnggncnatatggtatatggtgacatcaaatacttggtnttggangaggcggacacaatgtttgatcggggctttggncctgatanacgcaaatttataggcccattaa

SEQ ID NO: 41861 - DNA, 204 bp, Glycine max
  Clone ID: 701124762H1
gggaactggcctcgcaaactgagaaggttatattggctattggggatttcatcaatatacaagctcatgcatgcgttggaggtaaaagtgtgggagaagacataaggaaacttgagtatggagttcatgtggtgtctggaactcctggccgagtttgtgacatgatcaaagcttttgagttgtgtgtgtcagcattagatccaa

SEQ ID NO: 41862 - DNA, 255 bp, Glycine max
  unsure (1)..(255): unsure at all n locations; Clone ID: 701124763H1
gcgaaactnctaaggaccgtttgaagaacctggaaagtaggatatctcaaatggagagaagtcccacttatagtcagatggatggggaattcagtggaaaaaatattctagagaaggtgatagttggacagtctccaagacgggctaaacattccaggaaattttcctgtgactcgtcttcattgtgccctgagtatatgatggattctcctagctttaggaagatagatgaggatctttccaatttgaagaagg

SEQ ID NO: 41863 - DNA, 250 bp, Glycine max
  unsure (1)..(250): unsure at all n locations; Clone ID: 701124764H1
tccatctctctcacaaaatgacaacaatatcaaattgctcccttctcttcctcttnctcttcctctccaccctccacatagcttccaccctctcaacccccaccaacttcatcaagtcctcctgcagcaccacccagtacccagccctctgcatccagtccctctccgtctacgcctccaccatccagcaagacccccacgagctcgtccagacagccctctccctctccctcaaccacaccgaggccac

SEQ ID NO: 41864 - DNA, 261 bp, Glycine max
  unsure (1)..(261): unsure at all n locations; Clone ID: 701124765H1
ccttgttgtgttctctagccagcaccatacacgatcccttgtgtgtgtttctgaaacataatccaatttttctctgacttcgtctctgcaaatgcctttcatgatttcaacaacagcatatgaatgtctctaatttcaggatcattctttcataaaaaagtttgaagataaagatctagatcttgggattttgttagcagcaaaatcagtgaacaacgaagatgaagacaaagatgccatgaagcagctgnagctcgcggt

SEQ ID NO: 41865 - DNA, 257 bp, Glycine max
  Clone ID: 701124766H1
cttcgatagtgctttctcagattcttccttcgtggtaaccggtcgaatcatggagcccatggacattgttggcaagtcaaaggaagacgcttcgcttcctaaagcaacaatgacaaaaattattaaagagatgttacccccagatgtacgtgttgcaagagatgcccaagatctattgattgagtgttgtgtagagtttataaaccttgtctcgtcagaatccaatgaagtttgtaacagagaggataaacggacaa

SEQ ID NO: 41866 - DNA, 99 bp, Glycine max
  unsure (1)..(99): unsure at all n locations; Clone ID: 701124767H1
agagaggggaccanggtttgctaaaagggataagntgatgaagcttgcaggatattccctggccgnttnatatgcncccataagtnctaatgtcgtnaa

SEQ ID NO: 41867 - DNA, 70 bp, Glycine max
  unsure (1)..(70): unsure at all n locations; Clone ID: 701124768H1
tgaatcgaatcgaatcgaagcgattcatcgatcgatcgatggctcttgtaggagttgaactgnagcatnc

SEQ ID NO: 41868 - DNA, 247 bp, Glycine max
  unsure (1)..(247): unsure at all n locations; Clone ID: 701124770H1
tcaacacgcgcaacgacgatgatgcaaaccaacatcaccaccacaatcctcatcgcgttctcttcggtcaattcctcgaatgttctaccttgagccatgtccaaccccgttcagattcgcgtcgccgccgacgcaggcgacggcttcgantctccggcgaagagaaagccgccaaccgnagngcctacagcattcgcccctttctctacntccgccgcgccaaacagttcntcgggngccgccaagt

SEQ ID NO: 41869 - DNA, 227 bp, Glycine max
  unsure (1)..(227): unsure at all n locations; Clone ID: 701124771H1
cgtctccctgagctcagagccctatgggcctccaaggacanaccccaattgggccaacgagaccatcttaaagcccgccttacacgccctcgaaatcaccttccgcttactcgcaaccgttttctccgaccngagaccgtacatcaacaaacgcgagtggaacccgacgcgtcgagtctctcgccacggcccaaatccagatcatagccatgttatgcgaagacgaa

SEQ ID NO: 41870 - DNA, 246 bp, Glycine max
  unsure (1)..(246): unsure at all n locations; Clone ID: 701124772H1
cttgagacagttatctttatctangcaaganaagaatagaaaatggatatcaggttgatggatttggactctccattgttcaacactctgcaccgaatcatggatctgacagaggacgcagagaagaacttgaacgctccgacgcggacatacgtgcgcgacgcgaaggcaatggctgcgactcctgcggacgtgaaggagtaccctaactactacgtgttcgtgatcgacatgccaggcctgaaa

SEQ ID NO: 41871 - DNA, 224 bp, Glycine max
  unsure (1)..(224): unsure at all n locations; Clone ID: 701124773H1
gtaattaatagctgcttgaatcctacttggaatgaagagcannatttcactctgacagaaacattgggagttctgaatttggaagtgtttgacaaagatcttttgaaggctgatgacaagatgggaaatgctttcttgaaccttcaaccaatagtctctgcagccagattaagagacatcttaagagtgtcctctggtgagacaacattaaggaaggtcatacc

SEQ ID NO: 41872 - DNA, 247 bp, Glycine max
  Clone ID: 701124774H1
accacttccaatggcttcatatcatgaagaagaagtgaggctattgggcaagtgggccagcccatttagcaacagagtagaccttgctctcaagctcaagggtgttccctacaaatactccgaggaagatcttgctaacaagagtgctgatcttctcaagtacaaccccgttcacaagaaggttccggttttggtccacaatgggaacccattgcccgagtcactcatcattgttgaatacatagat

SEQ ID NO: 41873 - DNA, 214 bp, Glycine max
  Clone ID: 701124775H1
agccccgccgcgccagcttctcccagaaggaagccgacatccagatgatgttagccgccgacgtccacctcggcaccaaaaactgcgacttccaaatggaacgttacatcttcaagcgccgcaacgacgggatttacattattaaccttgggaagacatgggagaagcttcagttagcagctagggttattgttgcaattgagaaccctcagga

SEQ ID NO: 41874 - DNA, 247 bp, Glycine max
  unsure (1)..(247): unsure at all n locations; Clone ID: 701124776H1
atggaagtnacactttcagcctgcaagtccgttagctcgccttctgttcccgtcgcaggtttgtttgcggggaatggaggaattaagagctcgcaatgcagtttcttagcgggagcgagcaaagtgaggtttcctaggcaagtaggtcaagttagccaccttcgcaaacagcgccaaacgcgtcactgcggtgctctccacgcgacttgcagcanngacaagatcctgatcgcgaacagaggcgaga

SEQ ID NO: 41875 - DNA, 250 bp, Glycine max
  unsure (1)..(250): unsure at all n locations; Clone ID: 701124777H1
gacgctctntccgccttcgcttctctcaatcccgatctccgatccttctcccccggctacctccgtctctcactccgtcctcgtcttcccanganacttcagatnccgggctncctgggagtatctatggaaatcactttcgtgtttcaacatatggagaatcgcatggaggaggtgttggttgtattattgatggatgtcctcctcaccttcctctctccgaagctgatatgcaattggatcttgacag

SEQ ID NO: 41876 - DNA, 249 bp, Glycine max
  unsure (1)..(249): unsure at all n locations; Clone ID: 701124778H1
aagatatnnnngncncatggatacctnananggtgtctggatgggaagaaagccactgatgtgaggctgctgcaattgcagttgggactagtagncgtggcggtctagggaagcttttgatcagaggaagcaactctgagcgtggtgtcacaaaccttggcctctctgcagttgctcatggttggccttctctcagatcactttctttatngaatntgtctaccattggggatgagggtgtgtctcaga

SEQ ID NO: 41877 - DNA, 252 bp, Glycine max
  unsure (1)..(252): unsure at all n locations; Clone ID: 701124779H1
caatccctcacttctccacaatccatctctttnattcttcaagacttatcttctcagcctcggtgctcgcatccctccccaacccaaaacggaaccaggtgattttgatgacaagtcagatcctcctttatccgcacaaaatgacattntagaatctgatatagagttggataatgctgatgttgttgaacctgataatgaccctcctcaaaagatgggagatccttctgctgaaataacggaagaacaaag

SEQ ID NO: 41878 - DNA, 254 bp, Glycine max
  unsure (1)..(254): unsure at all n locations; Clone ID: 701124780H1
taggcctaacccacaagggtcattccattatgggaagattactcntacaaaagtaattaagttggccaattcagcacctttgatcaatggaaagctccgttatgctgttaacagtgtctcctatgttaaccctgacacccctctcaagcttgctgattacttcaacattcccggaatcttcagtgtgaatttactccaaaactctccctcaaatggtccaggatacataggcacctcagtgttgcaaacttctc

SEQ ID NO: 41879 - DNA, 258 bp, Glycine max
  unsure (1)..(258): unsure at all n locations; Clone ID: 701124781H1
ctgtccgtttcaaatccgacagcagcccagccnngcccggcccaatcatgantcccaanctccaaaccgcggcctccgnggtggccaccgcgatgctcntncgnnccctcgcccgcgactacgtcccggcggagtccaccactacctccgctggaaaantgtcganactcctctcngcattctcctccgaactgantctggtcatcgatgagtttgacgggctgacgccanatnccctcttcagcgccgcgcagtcta

SEQ ID NO: 41880 - DNA, 254 bp, Glycine max
  Clone ID: 701124782H1
cactgtttgtattggtaatttggatcttaatgtgacggaggaggagcttaagcaagcctttgtgcaatttggtgatattgtgttggtcaaaatttatgcgggcaaaggatatggttatgttcaatttggaactagagcgtctgctgaagatgccattcagaggatgcaagggaaggtaataggtcagcaagtgatccaaatttcttggggcagtaccttgacagctagacaggatgtacccggtggctggggtg

SEQ ID NO: 41881 - DNA, 173 bp, Glycine max
  unsure (1)..(173): unsure at all n locations; Clone ID: 701124784H1
aaaccttcgagggacagtcggagctcgcgaganaggaggccaagctagaaagggaagtcatcaagatcatcctcagcngaaacggagagtctgttctcatgcccaattcggggcaggccgtgtcggttcgcgaccaccacatatgcgtggggtttcaagacgaagagggttct

SEQ ID NO: 41882 - DNA, 247 bp, Glycine max
  unsure (1)..(247): unsure at all n locations; Clone ID: 701124785H1
tgtgcccttcattcctatcaattatcaaacagcttcggtgatcatcgtaactacctctacatttgtttgtttatcatttctttgctcgtatcaatgtctaacaccagcaacaatgtcgctggggtcgacaacacgttcagaagaaaatttgatcgagaagagtatctagaacgagcacgggagcgcgaganacaggaggaggagggtcgagcgaaacctaaagccaaaggtcctcccgtgcagagga

SEQ ID NO: 41883 - DNA, 248 bp, Glycine max
  unsure (1)..(248): unsure at all n locations; Clone ID: 701124786H1
cgngnnanntntatcgggtaaagccaatgattagangcatnggggncgnaacgccctnnnacctattctcaaactttaaatangtagganggtgcggctgcnctgttgagccgcgccatggaatcgagagnnccaagtgggccatttttggtaagcagaactggcgatgcgggatgaaccggaagctgggttacggtgcccaactgcgcnnctaacctagaccccacaaagggtgttggtcgattnna

SEQ ID NO: 41884 - DNA, 245 bp, Glycine max
  Clone ID: 701124787H1
aataacccttttttttctagctttttcaccaaactttccaaaaatgaattcctcaaaggcatgcacccttttgaatttgatcatgcttgttgttatgttggttgcaatttttattagccaaagtagggtggaggcaagggttttatctcattcggaggagtttgcatttgcaagagctaataaccttcaaacatacagttcatcagcctatgaacaagccaagaaaaccatggggttttggatgc

SEQ ID NO: 41885 - DNA, 245 bp, Glycine max
  unsure (1)..(245): unsure at all n locations; Clone ID: 701124788H1
ctcctccttcccgttcgcnngcnggaatcctattttccggccatatttccggcngcctgcaattccccttcaccttccgaantcaatcaatcnnctcaattcgaagctgttgctatctttngcagcgatattggagcagagagagggaagatggcaagtcaaagcggtgcctctagaaggagtatttcgtcgtcgacgaggagagcctctgaatcaggggcgcctcgaaaatcaatttcctcttc

SEQ ID NO: 41886 - DNA, 244 bp, Glycine max
  unsure (1)..(244): unsure at all n locations; Clone ID: 701124790H1
gttctttgctaccncaanttnccaaganntnagngntanggctgaatcccaaggttntgggttttaatcctcntgaaagatggggccantctgcttgcttctccaaggggcttatgtatgtctttgggggtngctgtggtggactgcatttttncgatgttctgacnttggaccttaacaaaatggtttggagcaagcttactaccacaggtgaaaagccggggcctagagatagccatagtgc

SEQ ID NO: 41887 - DNA, 245 bp, Glycine max
  unsure (1)..(245): unsure at all n locations; Clone ID: 701124792H1
ccttctctcctctattttggcttccaacctttttgctccattcattctcaacaacaaaccaatntctatattttgcttagacaatgagggggagcttgtggcaacttgggcaatcgatcactcgccgtcttgcccatggagataagaaggctgttgctcgccgatgttttgcctcagaagctgagctgaaaaagacagtgtttcatgacttccatgttgctcatggtgggaagatggttccattt

SEQ ID NO: 41888 - DNA, 247 bp, Glycine max
  Clone ID: 701124793H1
tggcctcagagatggatattatatccatgggcaatgtgcgattataatgtttgatgttactgcccgtctaacatacaaaaatgtccctacctggcaccgggatctttgccgggtctgtgaaaacatcccaattgttctttgtggtaacaaggttgatgtcaagaacaggcaagtgaaggcaaagcaggttaccttccacaggaagaagaatttgcagtattatgagatttcagcgaagagcaactac

SEQ ID NO: 41889 - DNA, 250 bp, Glycine max
  unsure (1)..(250): unsure at all n locations; Clone ID: 701124794H1
tcaaccttctttcttcttatatatcgaacatggctaagtatcattcaagtgggaaaagctcttccatgactgctatagccttcctgtttatccttctaatcacttatacaggcacaanagatgcacaatccggggtatgttatggaagacttggcaacaacttaccaacccctcaagaagttgtggccctctacaatcaagccaacattcgcaggatgcgaatctacggtccaagcccagaagtcctcga

SEQ ID NO: 41890 - DNA, 252 bp, Glycine max
  unsure (1)..(252): unsure at all n locations; Clone ID: 701124795H1
cacaccttcagcagcagcagccatggttctcaaaaccgaactatgccgattcagcggtgccaagatctacccagggaaaggcatcagatttgttcgtngtgattctnaggttttcctgtttgctaactcgaaatgtaagangtatttccacaacaggttgaagccatcaaagctcacctggactgcaatgtacagaaagcaacacaagaaggacattgctcaagaagctgtgaagaaaagaagacgtgctgc

SEQ ID NO: 41891 - DNA, 253 bp, Glycine max
  Clone ID: 701124796H1
gctggttttaagagtgatccactctgccaaactttgaagtcaatgacaactgttctttgctcatacatggcacagatgggtgacaattctcttgttctgcagatagtagagaaagtgataattgatcagataccacaaaagccttctttggataatagttgctctctcctgagaatgcttgttacagtggattccaagcccacaagactttctgaacaaagcattatcatctaggccagcatctttctgaata

SEQ ID NO: 41892 - DNA, 265 bp, Glycine max
  Clone ID: 701124802H1
ctgatatgaacctcatcactgatgatgacttcagagaatttgtagatggggtccctagagaatgtaagctcacaatagtatcagattcttgccatagtggtggcctaattgatggagctaaggagcagataggaactagcacaaagggagaagggcaacaacattctggttctggttctggctttggattatccagttttcttcgtcgctccgttgagggagccatcgaatctcgtggagtttcatatcccttcagcatgccatc

SEQ ID NO: 41893 - DNA, 266 bp, Glycine max
  unsure (1)..(266): unsure at all n locations; Clone ID: 701124803H1
gtaaatggcgaggaagaagatcagagagtaccactccaagaggcttctcaaggagcatctcaaacgtctcgcctctatcgacctccaaatcctctcagctcaggtgacagaatctacggatttcactgagctgacagaccagcatccatggctttcgtcaaccagattggtcgtcaagccagacatgctgttcgggaagcgcggcaagagtggcttagttgctctccaatttagacatagctcnagtcgnnggntgcgtcaaagca

SEQ ID NO: 41894 - DNA, 245 bp, Glycine max
  unsure (1)..(245): unsure at all n locations; Clone ID: 701124804H1
atgagactttcacccttttcagagntcaatgaatgtagtgnctcaaatcctcaagcattangtctctacatggccaaatcacttagcaaacatggtgtgctttattgccacatggttgagccaagatgggacatttctggggagaataaggaaacccttcacactctttcaccaatgaagaaagcttttgatggaaccttcattgttgctgggggttatgatagagaagaaagggaaccaggctg

SEQ ID NO: 41895 - DNA, 265 bp, Glycine max
  unsure (1)..(265): unsure at all n locations; Clone ID: 701124806H1
gctccacctcatcatgatgatgacgacgacaacgaagaagttttccttgatgagtctgacatcatccatgaagttgccatggataatgaagatcttcctgacgctgatgatgattctgaactcctcgaagaggatgaggatggtgattttgtgcacaaattcactgctcataccggggagttgtactcagttgcctgcagcncaacagatgcagacttggtggctactgcaggcggtgatgacagaggatttctctggaagattg

SEQ ID NO: 41896 - DNA, 256 bp, Glycine max
  unsure (1)..(256): unsure at all n locations; Clone ID: 701124807H1
atggcttctgtgcctcaaccaaaaatctcccttctaaccttattcttctncactnccntcaccatcattgcngctgcaattgttccncaaaacgaaananancaaaangagaactcaggtgaacttggaccctacatcgttgagtacggtgcagattacagaatgataagcatcttcaactctccattccaagttggtttctacaacaccancccaaatgccttcactctagctttgcgtgtaggggctcccaacg

SEQ ID NO: 41897 - DNA, 261 bp, Glycine max
  Clone ID: 701124808H1
acatggcaaaggatagaacaattggtgtggctctagatttctccaaaagcagcaagaatgctctgaaatgggcatttgagaacttagccgataaaggtgacaccatttatgtcattcacatcaacccaaactctctagacgagtcccgcaacaagctatgggcaaaatctggttctcctcttattcctttggtagagttcagagagcctgagattatgaaaaagtatgatgttgaaattgatattgaggttcttgatatgc

SEQ ID NO: 41898 - DNA, 263 bp, Glycine max
  Clone ID: 701124809H1
cgtttgtatcggattcagaagatattgatgaaaaatatggaagccagaagtggtattgaagtaaaccaacgaggatggaacttaaaaaatgtgattagtttaactcaaaatggtagtcataatggtgcacagaaaaatcctatattgaactttgatcttgaaagtcctgctaaggaggacaatgcagaatctgacagcgatggagttctagagattacaaatgagactgagattgagctgacactaggcccttcaagttacaa

SEQ ID NO: 41899 - DNA, 266 bp, Glycine max
  unsure (1)..(266): unsure at all n locations; Clone ID: 701124810H1
gttccctttgcttctnagtgnttctagctgcagcaatgcaaggaacacttgcagttgattacactgtcaccaacaacgccctctccaacctctggtggcgtgcgtttccgtgatgcaataggggacgattatgcaaaacaaacgctcgactcagccacccaattcatatggggggtgctccagcaaaacgctcctgctgatagaaaagatgtgcaaaaagtaaacctgttcgtggatgacatggatggcgntgcatataaccagcc

SEQ ID NO: 41900 - DNA, 260 bp, Glycine max
  unsure (1)..(260): unsure at all n locations; Clone ID: 701124811H1
tccaggacaaggaaggtatccctcctgaaccagcagaggttgatttttgctgntaagcagctggaagatggtcgcactcttgctgattataacatacaaaaggaatcaacacttcacttggtcttgaggctcaggggaggaaccatgattaaagtgaagactctaaactggaaaagaaattgaanttggacntgagccaacttgatacnttcgaccggatccnaggaacgcggttgaagaannagaaggganttccnctg

SEQ ID NO: 41901 - DNA, 262 bp, Glycine max
  unsure (1)..(262): unsure at all n locations; Clone ID: 701124814H1
cttctttttctccttgaactcaaacatggcagatgaggtggttctgctagatttctggccaagtccatttgggatgagggtcaggattgcacttgctgaaaagggtatcaaatatgagtacaaagaagaggacttgaggaacaagagtcctcttctcctccaaatgaacccggttcacaagaagattccggttctcatccacaatggcaaacccanctgtgaatccctcattgctgttcagtacattgaggaggtttggaat

SEQ ID NO: 41902 - DNA, 215 bp, Glycine max
  unsure (1)..(215): unsure at all n locations; Clone ID: 701124815H1
gttccatgcgaatcatggccggncgccctccaagcattcttggagtncanggagcatgtttttacaggaagtgtctctnccttggcttggntcatgtcaaatcaagaaactagctttgtaaccntggcccaacgagttttagcaaataccnctcaaagttcgcatgcactatggacanccagatgtatttgaccgaatattccacataacnngng

SEQ ID NO: 41903 - DNA, 263 bp, Glycine max
  unsure (1)..(263): unsure at all n locations; Clone ID: 701124817H1
cttgaatttaaggcttctcttgacacaatatgggaagaaagctttttcaagaatgangctttcagcaatttcaattaaagatgcatttgagtatcttatcaatcttcgtcagaaccgacctgcagagttgattgcccagtttttggatgagaagcttcgtgcangtnataanggtacttctgaagagggaacttggaggctacacttgataaagtccnggtgttaattcaggttcattcnagggccaaggtgtattggaagcc

SEQ ID NO: 41904 - DNA, 156 bp, Glycine max
  unsure (1)..(156): unsure at all n locations; Clone ID: 701124818H1
ggaaaaaggaagcagaagtgaagatcgaaacggtgaagaagcctaacagcagcaaagagcgttagagctgatcgcttgagataaggtcaatttgcagttgcacgcttcccaattcgcacacccatatcacatcacatctttctncacacaacatag

SEQ ID NO: 41905 - DNA, 262 bp, Glycine max
  Clone ID: 701124820H1
ccttcatcatgatcaagccagatggcgttcaaagaggccttattggcgagattattagcagatttgagaggaagggtttttacttgaaagggttgaaactcgttactgtggaccgtccttttgctgagaagcactatgctgatttgtctgcaaagcctttctttagtggtttggtggattacattgtctctggccctgttgttgccatgatctgggagggtaagaatgttgttacaactggccgaaagattatcggagccac

SEQ ID NO: 41906 - DNA, 265 bp, Glycine max
  unsure (1)..(265): unsure at all n locations; Clone ID: 701124821H1
ctcaggtaagccaaagccatggttaagcataacaatgttatccccaacggacacttccgtaagcactggcagaactatgtgaagacctggttcaatcagccagcacggaagacaagaagacggttggctcgtcagaagaaagctgtgaagattttccccagacctacagctggacctcttagacccattgtacntggtcaaactttgaaatacaacntgaaagtgagagctggaaggggnttttcccttgaagaactcnagggcg

SEQ ID NO: 41907 - DNA, 261 bp, Glycine max
  Clone ID: 701124824H1
atttgagcagtgtagcagagatgatggcatgtgtgagcagtcatcatcacttgaggaattcatactgaaggatcttgagatggtaattggacaggtgaagtgactaagaactcaaatccctggcatctgattaactgcaataattttttttccttattctttttgtttcacatggcaagttcaccgagaggacccgtatttgcttccgagatgctctgtaccgtcttgctagaaacactgaagaacaacctgtaatgctgg

SEQ ID NO: 41908 - DNA, 262 bp, Glycine max
  unsure (1)..(262): unsure at all n locations; Clone ID: 701124825H1
tgcgaanagtnttgcagcatagcactatctcgaaattgttcattttcctctaatctatggatcccgaaacancgttagaacttgtcaagcacggtgtcactctcctcttactcgatgttcctcagtacacccttgtngccgtcgatactcagatgttctctgtggggcctgcttttaagggtattaagatgattcctccaggcgttcattttgtgtattatagttcatcaagcagggatgggaaggagttctcatcaattat

SEQ ID NO: 41909 - DNA, 263 bp, Glycine max
  unsure (1)..(263): unsure at all n locations; Clone ID: 701124826H1
agaaatcccatattttccccccacattaactcanccancccctcttnctaaaaggcctcnnggatancctccggacttaattaacgttattttgttagggtcaccgtttcgagatattctaaacttgtactgaaanatatngagggaaaagaagaggacgtnagagttggagccaacangtacggagagaggcagccaatagggaccgctgctcaggctaaanactacagagagccaccgtcggcgcctctcttcgaancggg

SEQ ID NO: 41910 - DNA, 261 bp, Glycine max
  unsure (1)..(261): unsure at all n locations; Clone ID: 701124829H1
ggagtccaatcctcacttctccgacgacacgccctcacctgcttcttccgtcgactccccatccccgccgccgactttcaacggcatcgtcatggtgtcgcagccggacacccaggacgttttccacacgccgccggaggnctcatcgcttcactcctccgacaacggaggcgtcgaacgttgtgccgttaatctcgccgtcgacgtagatgccgtgagtcaggggttcgtcaatttctgcgatggatcgaagttcgttga

SEQ ID NO: 41911 - DNA, 262 bp, Glycine max
  Clone ID: 701124831H1
cagagcttcacattccaatttgttcttcaaaccctccatcatgtgtcaaacccatcaaattagtggtagcatcatcgtatgggaaaaatttgaaaaatccaccttccaaatttgcaatcactcttagagagcacagaacaactttggagcatgcggcgaggttgccattactgaaacatgattccggtattgtggtaatgggagcggtgtgtgtggtggggatattggcggtggttctgagcgaggaaaaggccttggcttt

SEQ ID NO: 41912 - DNA, 134 bp, Glycine max
  Clone ID: 701124832H1
gacaatcactactcacgctctaaagcataagtagtggatctccaaaattttgactggcttctattcccccctacaattttgtttttcattgcttgactttgaaagttacctggaaatttgttttaagctatgac

SEQ ID NO: 41913 - DNA, 265 bp, Glycine max
  unsure (1)..(265): unsure at all n locations; Clone ID: 701124833H1
tagatgggttaaagttttctggaggttctcacagcatgatgccaaaggctactatcaagcaaatacattgacatggcccatcagcatgacgtgtatgttagcacgggtgattgggctgagcacatgattagcaaaagtccatcaggtttcaaggaatatgtagaggaatgcaagcagttggggtttgacacaattgagctcaatgtgggatcgcttgagattcctgaagaaaccnttttgagattgtncgnntgggtccaaangg

SEQ ID NO: 41914 - DNA, 95 bp, Glycine max
  unsure (1)..(95): unsure at all n locations; Clone ID: 701124834H1
gntactccantgaccctcacgngnnttnctnccgcgacgtacgccggccaaattcccttacccggccggcgccattctaccgtccgtncggaaaa

SEQ ID NO: 41915 - DNA, 262 bp, Glycine max
  Clone ID: 701124835H1
ggcgtttcgcatccagtgggcacaatattatctaaaaaaagcaaaaaatccggaagccatagttgttgatgataaatcatggatgttttttgaaacaacaatgagagttgatgctctatcaaaaatgagaaaccttaagttgcttatgtttcctaggtatgaggaggagctttccacagatgaggagaaggaggagaaattttcaggaaacctcaattatctttccaatgaattaggatatcttatttgaccatacaatccc

SEQ ID NO: 41916 - DNA, 177 bp, Glycine max
  unsure (1)..(177): unsure at all n locations; Clone ID: 701124836H1
atttacanagcgtacacaagcatantgctgnttggagngtgnacattcatangctagaactangaggncaaggtnatgaggaccgangctttctgaaaatgctgcnangacannaatgcngttccaactaatttaggggnncacaaggntacccctaaaanacgagaaancnaagaa

SEQ ID NO: 41917 - DNA, 262 bp, Glycine max
  unsure (1)..(262): unsure at all n locations; Clone ID: 701124837H1
ggggtggttctgttggatacatgggccagcatgtttgggatgagggttaggattgcattagctgaaaagggtgttgagtatgaatacaaggaagaaaatctcaggaacaagagtcctttgcttttgcaaatgaacccaattcacaagaaaattccagttctgatccataatggcaaaccaatttgtgaatctgcaattatagtgcagtacattgatgaggtctggaatgataaagctccaatcttnnnctctgacccttatg

SEQ ID NO: 41918 - DNA, 261 bp, Glycine max
  unsure (1)..(261): unsure at all n locations; Clone ID: 701124838H1
gattctgacccacaatagcaagggaatcagattccagattttatcaaaccctgaattccttgctgagggaactgcaatcaaagatctctttaacccagaccgtgttcttattggaggcagggaaaccccagagggccaaaaagctattcaagcattgaaggnngtttatgctcaatgggtccccgaagaaagaatactaaccacaaatctctggtcggcagaactatctaagcttgctgctaatgccttcttggcccaaag

SEQ ID NO: 41919 - DNA, 259 bp, Glycine max
  unsure (1)..(259): unsure at all n locations; Clone ID: 701124839H1
ggagcacttgttctactctttgcatttctcttcctcagttgtgtgtatgcacaagacacaacaacccttgtgcctgcnatcataacttttggtgattctgctgtggnngtagggaacaatgactatcttcccacccttttcaaggctgattaccctccttatgggagggactttgttaaccaccaacctactgggngttttgcnatggcaaattagctactgatttcactgctgacacattgggtttnaagacctaatg

SEQ ID NO: 41920 - DNA, 259 bp, Glycine max
  unsure (1)..(259): unsure at all n locations; Clone ID: 701124840H1
ggagtttgggaaaccctaattcattcctctttgcttcttctatctctattcctctaacaccagtgnctcgcaggtttggctccagaaggatcgcagtttgatgctcggcaatatgatnctaagntgaatgaattgctttccgccgatggncaagaatttntcacntcatatgacgnagtctatgntagtnttgatgccatgggccttcaagaaaatcttctgannggcgtanatgcttatngtnntgagcggcctnctg

SEQ ID NO: 41921 - DNA, 260 bp, Glycine max
  unsure (1)..(260): unsure at all n locations; Clone ID: 701124842H1
ggggcctcntccccgggcgtcgaacagtcaactcagaactggtacggacaaggggaatccgactgtttaattaaaacaaagcattgcgatggtccctgcggatgttgacgcaatgtgatttctgcccagtgctctgaatgtcaaagtgaagaaattcanccaangcgggtaaacggcgggagtaactatgnactctcttaaggtagccaaatgcctcgtcatctaattagtgacgcgcatgaatggattaacgagattcc

SEQ ID NO: 41922 - DNA, 261 bp, Glycine max
  Clone ID: 701124843H1
cgcggcataacctaaacttacccttcttctctctgtgtgtgtgcgcatcaaacgcaaccagaagcagccatggccactgcaagaactgtgaaggacgtttctcctcatgagttcgtcaaagcttactcttctcacctcaagcgatctggcaagatggagctgccagagtggactgatattgtgaaaactgcaagatttaaggagttggctccttatgatcctgactggtactatgtcagagctgcttccatggcaagaaag

SEQ ID NO: 41923 - DNA, 182 bp, Glycine max
  unsure (1)..(182): unsure at all n locations; Clone ID: 701124846H1
gcgatggcncagaactgaatccactgtacccatatttnatatggncgacatagaggagggtgttgaaggttatgatgatgaaaggacactacttatgtctcaaaagagcttggagaagcgttttggtcagtctccagtttttattgctgccactttcatggagcagggtggcattccacctt

SEQ ID NO: 41924 - DNA, 252 bp, Glycine max
  unsure (1)..(252): unsure at all n locations; Clone ID: 701124848H1
ctcgagcgaaaattttcatctctcgccatcgccgttggagaacgctccaattttctctccaacaattcgttctttcccttctcaatttccggcgagttctccctcttcaatttctcaatccngatctggatgcacatgaaccattgtttgcntttggggcaaccttgatttgggtttttaagtgctttatggaaactgtggtctttaaatttttaaacttttgtcgaatgacgagtggcgtggcttcaattg

SEQ ID NO: 41925 - DNA, 263 bp, Glycine max
  unsure (1)..(263): unsure at all n locations; Clone ID: 701124849H1
gctggacctaattcccggtcaaagcgcgtggttacacctcctgttgatgctactactaattggntgtggcagcttgccaaggcccatgtttgctccaatgatgctggggtgcaccaacttgttaaccattggttacgtacacatgccaacttggaaccatttatattggcggctcataggcaattaagtgctatgcgtccanttttccagttgttggaacccccacatgaggnnacccttgggagatcnatgccttggctaga

SEQ ID NO: 41926 - DNA, 267 bp, Glycine max
  unsure (1)..(267): unsure at all n locations; Clone ID: 701124850H1
gggaaagtccaagaccgaatctaagagagccgatcccaaacttgctgtgaataagaagggagccgccaccaaggctaggaaacccgccggcaaggggaaggcagcgaaagaccctaacaagccaaagaggcctccaagtgctttcttcgttttcatnagggagttcaggaaggtattcaacaaagaacatcctgaaaacaaagcagtgtctgctgtgggcaaagctgctggagcaaaatggaagaccatgnctgatgctgaaaaagc

SEQ ID NO: 41927 - DNA, 260 bp, Glycine max
  unsure (1)..(260): unsure at all n locations; Clone ID: 701124851H1
caatgctcctcttctatatttcnggtntgctgaggtggagcttgcaaataactctgctaatgatcgtgaatcttcatctcgtgcaatacatatattatcatgcttaggaagtggtacaaagtacaacccatttaaaagtcaagcatcaagtttgctactgcttagagcacatcaaggatttaaagaaaaactgagaacagtatggtcatcttgggttcgtggtataataaatgaccagtctgtagctctaatatgttctg

SEQ ID NO: 41928 - DNA, 263 bp, Glycine max
  unsure (1)..(263): unsure at all n locations; Clone ID: 701124853H1
agcaattgaaatttctgatctacggtcgcagcggttggattggtggnctactgggtaagctctgcgaagagcgcgggatccaatatgagtacggcaccggcagnttggagaaccgctcgtcgttggaggcggacatagcggctgtgaagcccagccacgtgttcaacgccgcgggtgtcccgggtaagacccaatgtggactggtgcgaatctcacaaagttgaaaaccatccggaactaagttcgtcgggcacttncaccct

SEQ ID NO: 41929 - DNA, 258 bp, Glycine max
  Clone ID: 701124856H1
gataaaccaatgccaaggggagagattgtagttggaggatttagtgtgacagctggttactttaagaatcaagaaaaaactaaagaagtgttcaaggttgatgagaagggaatgcgctggttttatactggcgatattgggcaattccatcctgatggatgtcttgaaatcatagataggaagaaagatattgtcaaacttcaacatggagaatatatatctcttggaaagattgagggcagcactatcatcgtgtga

SEQ ID NO: 41930 - DNA, 260 bp, Glycine max
  Clone ID: 701124857H1
gtccttccttcttcgatccagatctctctccttctccctcaaatggcttcccttctgcaatgttccatgcccctacgtctctctttccaatcgagctctggtacccggtaccaggatctccaacccaagttcagtttccctttcaattaagggaagaagtttcccatccgttacattgcagcccagagggcgtcggtttcagcttagatgtgcggcaaaaccagagacagtgaagaaggtgtgtgacatagtcaagaagc

SEQ ID NO: 41931 - DNA, 258 bp, Glycine max
  unsure (1)..(258): unsure at all n locations; Clone ID: 701124858H1
tgggttcntcttcttctatgtggacggtgtgtgtgatccgcngcatcactggcctctgcagcactctgtgccaacccacgcaggccagtggatgtacaatttggccgaaactacgtgcccacatgggcctttgatcacatcaaatatttcaatggtggttctgacattcagcttcatcttgacaagtacactggtactggcttccagtnccaaagggtcttacttgtttggtcattcagcatgtacataaaganggtt

SEQ ID NO: 41932 - DNA, 258 bp, Glycine max
  Clone ID: 701124860H1
gccgtttgctccccaaaaaggaaagaagcagattctgtcctttgaaatcaacaagaaaagatgtcaggtgaagaggtagctgttgcagttgaggtacctgctacttcaattccaggtgagccaatggacatcatgactgctctacagcttgtgctgagaaaatctctggcctatggtggtcttgcacgaggtcttcatgaaggtgccaaggtgatcgagaagcatgctgcacagctctgtgttctagcagaagattgt

SEQ ID NO: 41933 - DNA, 156 bp, Glycine max
  unsure (1)..(156): unsure at all n locations; Clone ID: 701124862H1
gcctcactctctcactctctcacnctcnnnaggagnnggntaatcngagcgatgtcagatctcgaggctcccttgcgcccnaagaggaagaaggnntgggaggactatntngttcantttcgatggatccttgtgattgtnntggnccntcccatc

SEQ ID NO: 41934 - DNA, 260 bp, Glycine max
  unsure (1)..(260): unsure at all n locations; Clone ID: 701124863H1
atcttctntcntattgctgttatgtctgatcatagcagcttcttctgggttnntganttgctttnntgttgaaaaganggagaagatngaatatntgngctcantaaaggtgacctttctttgaaggtcaccaactggggtgcttcaatnttgnccctggtgatncctgatangncatggaaagttgagtgatgttgttcntggatatgattctgttaaggnttacactaatgntgacaacatattttggngcaactgtt

SEQ ID NO: 41935 - DNA, 261 bp, Glycine max
  unsure (1)..(261): unsure at all n locations; Clone ID: 701124864H1
agcaaatgatgctgctaccgctgatgaaagtgctccaacagatgcttttgtcccagagcctgaggtcattcatgttgctgaagatgttcctcctagtccaaactgctgttgttgatgctgacattagtgtcnncnaagaagtgagtcaaccnctggaggaatggaantgtatcngttactgaaaaggnggtncnggtaatccngntnaagnatcnagtcntcnggagcntagtcattatcatgctgagaaanctgcttcta

SEQ ID NO: 41936 - DNA, 91 bp, Glycine max
  unsure (1)..(91): unsure at all n locations; Clone ID: 701124865H1
gcggctcncggntgaanttaatcgcttcgnttgaacacngatatgaggacccacagctgatttanaagaattaacgcttggngcnattccc

SEQ ID NO: 41937 - DNA, 251 bp, Glycine max
  unsure (1)..(251): unsure at all n locations; Clone ID: 701124866H1
atatatagcaagcatggcagtcacactctacgaccttagctcttcctctgggttgaanaaacttgatgagtaccttctcccacgcagttacatcaccgggtaccaagctacaaaggatgatcttactgtttatgcagctttgccnactgctccatcagatgaatatggaaatgtttccaggtggtacaagcacattgangcttggtganatcccctggtgttactggcgagggacntgtgntaatgttgaa

SEQ ID NO: 41938 - DNA, 258 bp, Glycine max
  unsure (1)..(258): unsure at all n locations; Clone ID: 701124867H1
attttttctactttacagttngatcttgtcacacagacaaacacaaacacatacatatgtacagataggatatgatttaaaggatgtagcttctgttgcagcttacaatgtcaaaacccctttcgcngttgaattctcttgaaaatgatctattggtcaatatagtttatttcactgaacgtatatcatgtctggttaanngtggttctaattannttatttatttcatggattgcttttncatggaatganagtgga

SEQ ID NO: 41939 - DNA, 256 bp, Glycine max
  Clone ID: 701124868H1
gttgaccaattcagcagtttggttttccagacagtgctgagggtcttggcaggcgatgatgaagagttgttacatgtgattcctatccttcttggctgcaaggataagaataatgcagaggacaattttataggcactagagtagtagcggagtcaagaatttgttaaaagaatctaaatttagccatctaatggaggttgttttggaagtatctcctgaggccttattccatgaatattcataaagtattccggg

SEQ ID NO: 41940 - DNA, 201 bp, Glycine max
  unsure (1)..(201): unsure at all n locations; Clone ID: 701124870H1
ggtggttggtgaagttaatagcggggagggagatgcagaagcgcaactaccattggtgccgaagggaagcagcagcataagcatgacatgtctatgccttacccattcaatcactcaaactcataaccataaccataacnttccacacaacataanaatntaanaaancgngntnngtnanngnnggnnnnngtnnnnant

SEQ ID NO: 41941 - DNA, 257 bp, Glycine max
  Clone ID: 701124873H1
cactttcaggcttcattgctcccaggaaagaagccttgcaccgccttctgtaacttctgttgggcaagatgaaagcattggaagaatagaaatcagaaacgaccacgttttgaggaacaactctccggtgcttcaacaaaatggcctacctcctctagttagtgcattgaaagcttcggctgagcaaaatgttgccagttttcatttcctggacataacagagggcgtgctgcgcccgcttcgttgactcggcttca

SEQ ID NO: 41942 - DNA, 256 bp, Glycine max
  Clone ID: 701124874H1
gttatatgactttgtggagcatatggtacaaggtgatggtaattgtcagtttcgtgcgttgtctgatcaattgtataacacacctgatcaccacaaatatgtgagacgacaagttgtgaaccagctgaagtctcatccagagatttatgagggatatgttcccatggaatatgacgaatatttggagaagatgtctaagagtggtgaatggggggatcatgtcacccttcaagcagctgcagattcgtatggtgtg

SEQ ID NO: 41943 - DNA, 259 bp, Glycine max
  Clone ID: 701124875H1
ggaggaggtggtggagggaaatcatcgtggagttcatcaacatcgtcatgggtacccacaacctcagtgtcggcatctggaaagaggattcagagggaaatggttgaactcaacaacgaccctcctcctgattgctctgctggccccaagggcgataacctctatcactggattgccaccattattggaaccccagaaacaccctaccaaggtggcatctttttccttgacatcaaatttccaattgattatcccttca

SEQ ID NO: 41944 - DNA, 254 bp, Glycine max
  unsure (1)..(254): unsure at all n locations; Clone ID: 701124877H1
gttaaacctgttgggcttcccgagtctcggcatgacgaaagagtgagaggtaaaggttcaagaggactgcatgtcatcactaccaagtgtagaagatttgcaacaagctcacttgtatgtgttgaataatagtaatgaagttttgccatacatagttcgtcatgaaaatttagtcaaacaaagtaatccaaaaatgtcgaagaactcagtgttgaaaaaactaacaaaacttncctagattggtttaaacacac

SEQ ID NO: 41945 - DNA, 257 bp, Glycine max
  unsure (1)..(257): unsure at all n locations; Clone ID: 701124879H1
ctcaggannaagaggatcggagaatatggaaagaaatgagtgctcntgtagggcggatgtgttggaaaatagcttctaagaggaaccagactgtcatatgggtcaagcctcttacaaatgactgttacttgaaaagagagcctgatactcaccctccactctgcagtcctangcgatgatcctgatgctgtttggggagttaaaatgaaagcttgtatcacacgctattctgatcagatgcacagagcaaaaggagc

SEQ ID NO: 41946 - DNA, 258 bp, Glycine max
  unsure (1)..(258): unsure at all n locations; Clone ID: 701124880H1
cttcatttcattatataatatgcatgttgcttatttccaacatatacctttgatttcattaatgatatcaatgaaatttaatttattatttcaggtgataagtcgatgattaagaagcgatacatgtacttaaacgaagagatcctgaaggagaatcccagtgtttgtgcatatatggcaccttcgttggntgcaaggcaagacatggtggttatggaggtaccaaagttgggaaaagaggctgcaactaaggcaatc

SEQ ID NO: 41947 - DNA, 258 bp, Glycine max
  Clone ID: 701124881H1
atcccgttcttccagagcattgttcttcctaaagaagctaccactgttcagaagtgctacattgagcttgccaagcaagtcaaggaaaagctttccaaggtagatccttactttgacaagttggcagatgccatggtcacttggattgaagcttgggatgagcttaaccctgcgggagcatcagtggccaatggcaaagcgtgaatcggtttttggttaactgcataacagccacaaaacttggaagtgggactattt

SEQ ID NO: 41948 - DNA, 256 bp, Glycine max
  unsure (1)..(256): unsure at all n locations; Clone ID: 701124883H1
gttctctctgtcctgtgttttgtgatttcccccttcaagccaccaccaatggccaacaacgagatgcaagttgagaggggtttggacttggaaaggtacatggggcgttggtatgagatagcctctttcccttcaaggaaccagcccaaggatggcgtgaacaccagagccacatacactcttaggaatgatggcactgtgcaagtgntcaacgagacttggagtaatggcaagagagggcacatagagggaatgc

SEQ ID NO: 41949 - DNA, 256 bp, Glycine max
  unsure (1)..(256): unsure at all n locations; Clone ID: 701124884H1
agagcctgcnccggagcctgacatccggcttcttgttcggtctctctcagcttgccctctatgcctccgaggctctcattctatggtatggtgcacatttggtcagcaaaggtgtttcaaccttctcaaaggtcatcaaggtgtttgtggtcctagtgatcactgcgaattcggtggctgaaaccgtgagccttgcaccggagattattcgcggtggcgaactgttggttcagtgttctcaatcctcgatcgatca

SEQ ID NO: 41950 - DNA, 257 bp, Glycine max
  unsure (1)..(257): unsure at all n locations; Clone ID: 701124885H1
aagatgcntccagaagctattgatcttgcatcccggctgttgcaatactccccaagtctccggtgcactgcacttgaagcatgtgcacatcctttctttgatgaacttcgtgaacccaacgctcgcctgccaaatggtcgcccatttccccctctatttaacttcaaacaggaattatctggagcatctcccgagcttgttaataagttgatacctgaccatgtgaagcgggcaaatggggctacaatttatgcatc

SEQ ID NO: 41951 - DNA, 255 bp, Glycine max
  unsure (1)..(255): unsure at all n locations; Clone ID: 701124886H1
ctatggcaccaacattcaagngcttcgctcttttcctcctcctcgctctcttctccgccgcctccgctcaagaattatcccccgcctcgtctccggcaccgtngcctgaagcaggagccgcagactccgtgccttgctccgccatcatgatcggtgcctcgctcgttttgtctctcatggcggtcttcaagttctaggatttcttattttgcattcatgaatgaattaatattccaaaataacatatataataaa

SEQ ID NO: 41952 - DNA, 254 bp, Glycine max
  Clone ID: 701124887H1
ggttggaggacgcacttcatgtggctctggcaagggcaagagccatcagggctcagttaagtatggctttagcctagttaaagggaaagcaaaccacccaatggaggactatcatgtagcaaaaattgtcaagcttggagggcaagagttaggactttttgctatatatgacggacacttgggagacagtgtgcctgcctatttacaaaagcatctcttttctaatatcttgaaggaggaggacttctggactg

SEQ ID NO: 41953 - DNA, 51 bp, Glycine max
  unsure (1)..(51): unsure at all n locations; Clone ID: 701124889H1
ggcgaaacgcagtgtctnagcattgttcctcaaacaaaaaaaaanncnana

SEQ ID NO: 41954 - DNA, 249 bp, Glycine max
  unsure (1)..(249): unsure at all n locations; Clone ID: 701124890H1
catggcctcaagagcagtgttattgttggctatgtgtgtgcttccggcgatggttgtggccattcgcccagcaaagaaccctttttgcgtgaagggtcgtgtctactgtgacccttgccgtgctggttttgagacctcagctaccacctaacattgctggtgctgagattatgttgcaatgcaagagcagggtttgcanacgaggttgtgtacacgaagaaggggtacaccgacttcaaccggagcata

SEQ ID NO: 41955 - DNA, 254 bp, Glycine max
  unsure (1)..(254): unsure at all n locations; Clone ID: 701124892H1
ctcagtctcatcatcaacaccttctactccaacaaggaaatcttccttcgtgaactcatcagcaacgcctctgatgctttggacaagattagatttgagagtttgacggacaagagcaagctcgatgctcagccagagttgttcattcatattattcccgacaagactaacaattcgctnaccattgttgacagtggcattggcatgaccaaagctgatttggtaaacaacttgggtacaattgctaggtctgg

SEQ ID NO: 41956 - DNA, 244 bp, Glycine max
  unsure (1)..(244): unsure at all n locations; Clone ID: 701124893H1
cttctaaaagtgacttaacagctcatattgaaacttacctacagaatngaggatcatgggttgctttggcttctgcaaaggagatgatagtgtcacagttgctgacagaggacctttcatgcaaagcactcctactgggaaccccagttatcatggaagacacgcagcagtaactgctcctcggactataaatgttcaacctattgctgtcccttcaattacagtagatgagttgaagcctttg

SEQ ID NO: 41957 - DNA, 255 bp, Glycine max
  unsure (1)..(255): unsure at all n locations; Clone ID: 701124894H1
gaactaccccgtgaaattctctgtcaacgaatcgctggcgaaggaaaatcgtttatctcttgagatcaagctcatctccgaccgcaccctcggcgacaccgtcatcggcaccgtccatgttcctctcagggaactcctggataaccccggcgatgacagctccttccgccaagtcagttatcaggtgatgaagcaatcaagaaaatccnngggatccttgaatttctcctacaaattcggcgaacatgttcccgc

SEQ ID NO: 41958 - DNA, 196 bp, Glycine max
  Clone ID: 701124901H1
caaaaactggttgttagtggcctgtccgttggcctagtagatggatcatccttgtacatcaaacaaattaggtatgaggattcatgtaccaatctcaaaattgctttgttattgagatacgcatccttaaggaatatttattaatgtaaagttttggaatttcaccagaatttttaagatgaagtttcacttgaaa

SEQ ID NO: 41959 - DNA, 255 bp, Glycine max
  Clone ID: 701124902H1
ggatatacaacctcttgtttgtgataatggaactggaatggtcaaggctggatttgctggagatgatgctccaagggctgtgttccctagcattgtgggtcgtccacgccacactggtgtgatggttggaatgggcaaaaggacgcatatgttggtgatgaggctcaatccaagaggggtattttaacactgaaatacccaattgagcatggcatagttaacaactgggatgacatggagaagatctggcatcac

SEQ ID NO: 41960 - DNA, 254 bp, Glycine max
  unsure (1)..(254): unsure at all n locations; Clone ID: 701124903H1
gaaaattcgatgtggagagangctttcatgaaggcatacaaggctatggataaagtgttgaggtctcattccaaatttggactgcttctgtagtggaagcacagctgtcactatagtgaagcagggttcaaattgttcatgggaaatattggggattcccgagcaatcatgggatccaaggacggcaatgactccatggtggcaattcagttgaccattgatttgaagccgatttnntaagtgggaagcagaac

SEQ ID NO: 41961 - DNA, 252 bp, Glycine max
  unsure (1)..(252): unsure at all n locations; Clone ID: 701124905H1
gcaaaagttgccgccaatgccaaaagttgggtttgaagatgaaacaaagaaaggtttgatttcctttccccttcggatgtggagcatgatgggttcaagtattcgaattgttgatgtcataatgagctggctgggaggagagatgccctggactggatgccttttgtggttgctccataggagctgttgatggntgcatctatgcattaggaggnttttcaagagcntcagcaatgaaatatgtttggcagt

SEQ ID NO: 41962 - DNA, 104 bp, Glycine max
  unsure (1)..(104): unsure at all n locations; Clone ID: 701124906H1
ggaagcagtcaaaactaaagcccaaaaacccataccaagatgcttccttccgaagccactgttgcttaccttcgggcataattcgccgggctagncagtgttcc

SEQ ID NO: 41963 - DNA, 253 bp, Glycine max
  Clone ID: 701124907H1
gcatcgctgtccatggctaccatcgttagcatcaaggcccgccagatcttcgacagtcgtggcaatccaactgtcgaggtggatttgacttgctccgatggtacttttgccagagctgctgttccaagtgggcatccactgggatttatgaggcccttgaattgagagatggaggatctgactaccttggaaagggtgtatcaaaggctgttgacaatgtgaacaccgtcattggccctgctttgattggcaa

SEQ ID NO: 41964 - DNA, 194 bp, Glycine max
  Clone ID: 701124908H1
gaaagctctcatcgatcggtgttcaactttaaacactcaggaagagccacaaaattcttctttctgcagggtgcaaggtacagcttcgatgggaaattgctggggttctccacctcacaacccaaccccaacactaccggtaaccttagtacaggtacgacggggacatctcaggcgatcagcagcggtagcta

SEQ ID NO: 41965 - DNA, 255 bp, Glycine max
  unsure (1)..(255): unsure at all n locations; Clone ID: 701124911H1
ggngcagnntgtgtcgttgggagcgaacaagttccccgagagacagccaattgggacggcggcgcagagccaagacgacggcaaggactaccaggagccggcgccggcgccgctggttgacccgacggagttacgtcatggtcgttttacagagcagggatagcagagtttgtggccacttttctgtttctctacatcactgtcttaanncgttatgggagtngccggggctaagtctaagtgtagtaccgttgg

SEQ ID NO: 41966 - DNA, 254 bp, Glycine max
  unsure (1)..(254): unsure at all n locations; Clone ID: 701124912H1
tgttgtcaccccttcttctatttctatgcctaactcttcctttgtttttgttgtccttcttcaaataccgtaaaaccttcaagaatccacnacttccacacannatangaccngntcncataatagggaattncatcaactagatagtccttctcttcatgagcagctanngnatctctcaaagaaatatggtcctttattttcnnttcaatttggattaaggccagtcatagttgtntcctctcnaaaatggg

SEQ ID NO: 41967 - DNA, 255 bp, Glycine max
  unsure (1)..(255): unsure at all n locations; Clone ID: 701124913H1
gcaaggtgtggctttggcgatcttgaggggtgtgattgacttcaagagggaaccttggccgcaaatatcggagagtgccaagagccttgtgcggcgaatgttggagccggatcctaaaaaccgcttgacagtgaacaggtgcttgaacatccctggctgcaaaatgcaaagaaagctccaaatgttccattaggagatattgtcaggtcaaggcttaagcagttttctgtgatgaatagattcanaaagaaagct

SEQ ID NO: 41968 - DNA, 259 bp, Glycine max
  unsure (1)..(259): unsure at all n locations; Clone ID: 701124914H1
ctttgacacttgtatctcattcatagatggagtcaccccacgcatccctcttcatnnaattcaagacaccaatctttttctgcttcttcctaagcactctttcagtctcagcttcttcaaaatcaacccatctttccccaaagaagctcttcccaacaagtatggttaccttccaatcagcaccacttccacttcttccattttcnatgctttctatgaagcccagaattccactttacctctcctcnagaccccactt

SEQ ID NO: 41969 - DNA, 261 bp, Glycine max
  unsure (1)..(261): unsure at all n locations; Clone ID: 701124916H1
ggggtcacntctttgctggttcacttggtgaactatggtgacactattaagtccataggaagggcctatggtgtggatgaacaaagtgtgctagaggccaataagttggcagtttcacaaagtaaaaacagnagctggncctccttgccttgacacctattatagttcctctaatagggaagagctgcaaagagaacccagataaattctattgtagatgttaccaagcaccagatggaagctccaaggggcccttctgtg

SEQ ID NO: 41970 - DNA, 257 bp, Glycine max
  Clone ID: 701124917H1
gggaggggtgtcatataagtctgatgtctatagttatggaatgatgattttggaaatggtcggaggaaggcaaagtatcagtattgaagcaagtcattcaagtgagacatattttcctgattggatatacaacatgttgagttgggaagcaatttagcatgggatgaaggtatgaccacagatgaaaatgaaatttgtaagaaaatgattattgtgggattgtggtgcatacaaacaatcccatctgacaggcctgc

SEQ ID NO: 41971 - DNA, 256 bp, Glycine max
  unsure (1)..(256): unsure at all n locations; Clone ID: 701124918H1
gagagaatgagtacggtgggagaagggaaggtgagtagtaatggtcatggatgttgcaaatcagggccaggctatgcttccccactggaagccattnctggtcccagagagtctctcatttatgtaacctcttctacacagggaccggaagcagagaagccagactatttggcgacagtggatgtggatccaaactctccaacttattccaaagtcatccataggcttcctgttccttatttaggtgacgaattgc

SEQ ID NO: 41972 - DNA, 253 bp, Glycine max
  Clone ID: 701124919H1
atcaaagagcataatgtcagggatcattcacaagattggggagacccttcatgtgggagggcacaagaaggaggaggagcataagggtgagcaccatgctggagaatacaaaggggagcaccatggtgacacagtagtgagtacaaaggagagcatcatggtgaacacaaagctggagagtaccatggtgagcacaagccagagcacaaagaggggttcctagacaaagtcaaggacaagatccatggtgagg

SEQ ID NO: 41973 - DNA, 255 bp, Glycine max
  Clone ID: 701124920H1
caattcaccggagcaaatactaaggaggtttagctcaattgattcagcaagtgtgtgagtgagttattgtaaactttctgatatctgtcttccatttttatgattaaaaaaatcagagcaatgaatgtttttatttaagctcaagttcaagcctaagcatgtccaagccgtttcaattctcaagtaaacatcatcaaagagcttctagtgtgaagtttggtggtgtttcatgcagagccgcaacgttaacccaag

SEQ ID NO: 41974 - DNA, 85 bp, Glycine max
  unsure (1)..(85): unsure at all n locations; Clone ID: 701124921H1
gcaggctcgtatcttctgctgattcgatcctcccttcgtagattctcaattcgaagccctcaatttcccacacaacanagcgang

SEQ ID NO: 41975 - DNA, 254 bp, Glycine max
  Clone ID: 701124922H1
caagaatcaaggaaccaaccaaccaccccatttcagctctctctggatattgtaatggaagcaggtttagaatcaatgggagtatcagaggcttggaaggctcatgtgggcatggctctggtgcagctatttatggtggctaccatgtcctaaccaaagtggcacttaatgttgggatcaaccaactagttttctgcttttaccgcgatttccttgccttcactattgttgctccgctcgctttttttcttgaa

SEQ ID NO: 41976 - DNA, 254 bp, Glycine max
  Clone ID: 701124923H1
ccaaatcgtagatctacggttaaattggtgtagtgtggtaagatgggaggaggatttagagtgcttcacttagttaggccatttctctcgtttcttcctgaagttcaaactgctgacaggaaagtgccattagagagaaggtcatatacactgtgatctctcttttcattttcctggtttgtagtcagctccctctatatgggatacactcaacaacaggtgctgatccattctattggatgcgtgttattctc

SEQ ID NO: 41977 - DNA, 256 bp, Glycine max
  Clone ID: 701124924H1
gcttgctgtggaagcacacaacatctttggctttgagaccattcctgaagagtgcgttgaagcaacaaaggaatacatccatggcgaacaatatagatcagactccaaaacagttaaccaacaagcttactttatgccagagacctcgaagtccatcccaaggacacatttgtgttcagtatagatggcaccgtactctctaatattccatactacaaaaaacatggatatggggtggagaaatttaactcgacct

SEQ ID NO: 41978 - DNA, 258 bp, Glycine max
  unsure (1)..(258): unsure at all n locations; Clone ID: 701124925H1
cttctctctccacccaaaccctaactncccgaccctgttcccctctacgtatccgtcatgaaaggaggaaagtccaagaccgaatctaagagagccgatcccaaacttgctgtgaataagaagggagccgccacaaggctaggaaacccgccggcaaggggaaggcagcgaaagaccctaacaagccaaagaggcctccaagtgctttcttcgttttcatggaggagttcaggaaggtattcaacaaagaacatcctg

SEQ ID NO: 41979 - DNA, 222 bp, Glycine max
  unsure (1)..(222): unsure at all n locations; Clone ID: 701124927H1
gctaaaccccccctttntttttcctatctcgctaacatcnatgggagacgagaataagacnaagtcccctgcttccggcgtgtggtccaccatcaagccttcgtcaatggcggagctccggcatgctcgccacctgcgtcattcaacccatcgatatgatcaaggtgaggattcaacttgggcaaggatcagctgcgcaggtcacttccaccatgcttaaga

SEQ ID NO: 41980 - DNA, 234 bp, Glycine max
  unsure (1)..(234): unsure at all n locations; Clone ID: 701124929H1
cttcacttttgtttgtcccacaganttcactgctttcagtnnaccggcatgcagagttcgangcactaaatactgagatattgggtgtttcagttgacagtgtgttctcgcacttgcatggatccaaacagatagaaagtcaggtggccttggtgacttgaattatcctttgatttctgatgtcaccaaatccatatcgaaatcttatggtgttctcatcctgatcagggaatt

SEQ ID NO: 41981 - DNA, 259 bp, Glycine max
  Clone ID: 701124930H1
accagcaccacttccaatggcttcaaatcatgaagaagtgatacttttggggcaagtgggccagcccatttagcaacagagtagaccttgctctcaagctcaagggagttccctacaaatactccgaggaagatctgctaacaagagtgctgatcttctcaggtacaaccccgtgcacaagaaggttccggttttggtccacaatgggaacccattacccgagtcacttatcatgttgaatacatcgatgagacatgga

SEQ ID NO: 41982 - DNA, 266 bp, Glycine max
  unsure (1)..(266): unsure at all n locations; Clone ID: 701124931H1
gcgagacntanaatggcaaactttccagttgttgacatggggaancttaacaccgangcgnagacctggcagccatggagattataaaagatgcctgtgagaactggggtttctttgagttggtgaaccatgggatatcattgagcttatggacacagtggagaagctcacaaaagagcattacaagaagacgcatggancaaaggttcaaagaaatggtgaccagcaaaggtcttgagtcagttcagtcaggaaatcnatgactt

SEQ ID NO: 41983 - DNA, 256 bp, Glycine max
  unsure (1)..(256): unsure at all n locations; Clone ID: 701124933H1
gaaaccatcacaatttgtttctcaatcatgtcaacctcatcctcttccaaaagcctcaaaattggcatagttggattcggcaactttggccagtttctggccaagacaatgataaaacaaggccacactctacagcaacttctcgatctgattactctgaactttgtctccaaatgggcatccattttttcagggatgtcagcgcattcnttaccgcagacatagatgtcatagtgttgtgcacatcgatattatc

SEQ ID NO: 41984 - DNA, 253 bp, Glycine max
  unsure (1)..(253): unsure at all n locations; Clone ID: 701124934H1
gccgaagaagaggaagaatcagagctcagcgataagcagaaagtggagatcgcgaaatggttcctcctcaactctcctnacggagaaatccaatacgttgccaaagatgtgaaatcgattctcaacaacgcgatttgtacaaggaagccgcttccgaggcttttccctattacaacaaatcgcaatgatttccattccaatgcccaaccgaatggagacgtactggttacttcgttcggtgagcttgagggta

SEQ ID NO: 41985 - DNA, 257 bp, Glycine max
  unsure (1)..(257): unsure at all n locations; Clone ID: 701124935H1
catcaccancatggaagatgngcaagcgaggataggcagagttgctgggaacaaagacctttaccttgggacgttcagcacccaagaggaagcagcagaagcatacgatgtagcggcgatcaaatttcgcgggcaaatgcagtcacaaactttgacatttcaagatacgatgtggagagaatcatggccagtngcaatctcctcgctggggagcttgcaaggcgtaaganagataacgatcctagaaacaaggacct

SEQ ID NO: 41986 - DNA, 251 bp, Glycine max
  unsure (1)..(251): unsure at all n locations; Clone ID: 701124937H1
gaactctanatttggcattagaaatgaaaagctgnagtggtttttagangcagtgaaggagcttcctaatgagcncaaacttgtaggggcccactgtcatcttggttcaacaattaccaaggtagacatttcagggatgcagccaccattatgattcaactacattgaccaantccgagatcagggttttgaagttgattacttaaatattggtggaggacttgggatagattatatcatgctggtgccat

SEQ ID NO: 41987 - DNA, 297 bp, Glycine max
  unsure (1)..(297): unsure at all n locations; Clone ID: 701124939H1
ctcaacgaagaggttaaagagacggcaacactttgctgtccgccttgaccgagcagagcttcgtcttgggccctcgattttgccctaaagtactctcagtcacaacagacacnnnnnnnnnnnnnnnnnnntcaatgnggcaccgaaggcaganccaagggctggagaaagaaagattcggctttaacggatggcgaaagtggtggcgaaccctnaattggnagngagtnacgggnccagattccttcgtttggtggaaacttcccggattaaacgtnggggattcgnaaacccagg

SEQ ID NO: 41988 - DNA, 252 bp, Glycine max
  unsure (1)..(252): unsure at all n locations; Clone ID: 701124940H1
gtngananagtgncaatnanntngcnaacancgatnangttntggnacnancattaaacgtagctgctgcagttggncaaagcctccaccggaagctgtgacgaaataanccttgcgttgaaggaccttgnatggaccgttatgacgacgaagatgaaggaattgaggtgttcagttctggaattggtgatcttattatcccagtaacgacatggtccatatatcaaagntaancaacgatgatgatctggt

SEQ ID NO: 41989 - DNA, 250 bp, Glycine max
  unsure (1)..(250): unsure at all n locations; Clone ID: 701124943H1
gcctaacctactattatccctttccttcctgcntctctttgcnttcctggctcttgnagaagatgttganacaagttgtggacataagtgncaaccccattttcccaggtggcacatattacattatgcctcaacttggggcgctgcnggtggtggattgaaactaggtggacaggaaactcaaactgcccanttactgntttgcaagattactcagaaatcttccgtggcacaccagtcaaatcagcat

SEQ ID NO: 41990 - DNA, 255 bp, Glycine max
  unsure (1)..(255): unsure at all n locations; Clone ID: 701124944H1
atcangcttgcnccctccaaccctgcagcttggtnttggangggttannatgaanganaacagccnccaagaatgngtcttctggangcccatngtgcggcgcanaccgtntncagtacttgggcncattcctggtgagcccccatcctacctcantggtgaattcccaggtgactatggttgggncactgctgggctttctgctgacncngngacctttgccaagaaccgtgaacttgacgtcannccactcca

SEQ ID NO: 41991 - DNA, 255 bp, Glycine max
  Clone ID: 701124946H1
caaggcccctctggttccaccgagtacgccagtggttaatgcactgtcaaagcagcgagctatgctggaaaacatcctaagggcttgtgttggattagctcctgagaacaacatgatcctggagtacaagtaagttcaaagtcttaagagtaatggtttgggatactgtagttgaatgagatcaaaacttaactcatatcccataccctcttttctgttatatatttatggcaaatgtgaaatttaaagatcgtt

SEQ ID NO: 41992 - DNA, 248 bp, Glycine max
  Clone ID: 701124948H1
atggaacagctggcagcggtggaaggattgtgcgagttggcgaggaaggcggttggggcgggggaatcggttcggagatatcacgtgaacctgtctgttttcacgtccgttccagacgcgtggggttgaacaggtgttcccattatcccaattcaccgtttggacgaaaagccttcggtgaggggtattctctcggacttgacttgtgacagcgacgggaagattgacaagttcatcaacggagagtc

SEQ ID NO: 41993 - DNA, 255 bp, Glycine max
  Clone ID: 701124949H1
gcgggttacagagccgacgacgactacgactacctcttcaaggtggtcctcatcggcgactccggcgtgggcaagtccaacctcctctcgcgcttcaccaagaacgagttcaacctggagtccaagtccacattggcgtcgagttcgccacccgcaccttgaacgtcgattccaaagtcatcaaggcccagatctgggataccgcaggccaagaaaggtatcgtgcgatcaccagtgcttactatcgtggggcag

SEQ ID NO: 41994 - DNA, 235 bp, Glycine max
  Clone ID: 701124950H1
ggaggccaacatggtcgtccccgacgccatcaagatgatcaactacgccttgacgcactggaggaccgataggtcacttggggcgtacaggatgggcttgtctgtgttgaagtttgcattaccaatgagttgactgagggcaaggagccaaagcgcgagaattcgaagggaatggccatgcttgctatgtccactttgttgtttgaaagaggagagtacgcagaagcgattgaga

SEQ ID NO: 41995 - DNA, 253 bp, Glycine max
  unsure (1)..(253): unsure at all n locations; Clone ID: 701124951H1
ataaacgcnaacctctgtaccattcttcttcttaaaaatgagagagtgcatttccanccacantnnaaagaaanaacanncaggtcggaaatgcttgctgggagcnttattgcnncgagcatgccattcacgtncatctacgttgatctaacgtnctgccantcgcaanatacagncanacctnggcngatgngcanatgccgagtgataaagaccanangtggtgatgangaagcttncaacacctcntcag

SEQ ID NO: 41996 - DNA, 248 bp, Glycine max
  unsure (1)..(248): unsure at all n locations; Clone ID: 701124952H1
gaaaccttctagagctggtggatncaagtcttggttgcaaagtactcctcggaagaggccatgagaatgctgcagttagcactcttgtggcnccaatgccttgctcccactgcttagaccatctagtcatcagtggtgagcatgcttgagggaaaaactccaattcaagcaccaataattaagcgcagtgacagtgtagaagatgtaagatttaaagcctttgagatgttancacaagacagtcaaat

SEQ ID NO: 41997 - DNA, 252 bp, Glycine max
  Clone ID: 701124956H1
tcggaacctcttctgcggcgtacaatgggacactccaacgtttggaactctcacccaaaaaactacggtcctggttctcgcacttgccgtgtgtgtgggaatccacatggactgatcaggaagtatggcttatgtgctgtaggcagtgcttccgtagcaatgccaaggaaattggcttcatcaagtatcgctaaaagagcagttgtcaactacggaccaatattgtgttctggcactaggatgttttgagga

SEQ ID NO: 41998 - DNA, 252 bp, Glycine max
  unsure (1)..(252): unsure at all n locations; Clone ID: 701124957H1
gctctaaacttttccttccgttcactcgcctcgctcatcctcgccgtcacagtcacctccaccgatcatgttctagacttnnnnnnnnnnnnnnnnnnnnnnnnnnctcagctggagatgattcaacaagtatagattctaaattttgtgagtatagtctgggcaattgtaaaatggacttgcctaatcgtgataaacaactgactgttgctgtgaagacagcattgagagatctgcaaaatgataataaaa

SEQ ID NO: 41999 - DNA, 233 bp, Glycine max
  unsure (1)..(233): unsure at all n locations; Clone ID: 701124958H1
ggctttcttcgttttcatgtccgagntcagagagcagtttaangaaggagcatcctaacaacanatccgtcgctgttgtcggtaaagctggtggtgacaaatggaaatcntgtctgatgctgaaaaggcccccttcgttgccacggccgaaaagaagaaacaagagtatgagaaaactattttggcttacaataagaaattggaggggaagaattcagaggaagacgagtctg

SEQ ID NO: 42000 - DNA, 259 bp, Glycine max
  unsure (1)..(259): unsure at all n locations; Clone ID: 701124963H1
ggcgcctcncagacagagggtcattacattattgcttctgattggaagaaaaatgagcacatgactgaggacatgttctgtgatgaattccatcttgttgatctcagggtcatgaataactgcctcaaggttacaagggggttgatcatgttttcaatcttgccgcanacatgggtgggatgggttttattcagtctaaccactctgtcattatgtacaacaacacaatgatagcttcaacatgatngaggctgccagg

SEQ ID NO: 42001 - DNA, 254 bp, Glycine max
  unsure (1)..(254): unsure at all n locations; Clone ID: 701124965H1
gctccctccaaanccgacaatggangagcgcattaaagcaactgcaggatatgttggangatccttgatgttgagtccctcgtggagaatttacttggtcaacttgctggtcaccangcaattttggtaacgtatatgatatcacaaattctactaaccccttaatcatgtatggcaaccaaaangaagaaggtggatatgtctcttgtnccaggaaagtaagcttgattttggnntccctancggggacnttg

SEQ ID NO: 42002 - DNA, 252 bp, Glycine max
  Clone ID: 701124966H1
gccgacagtataatccatgtggttgccaaacggcttgtggaaagcagtgtccttgtcttcaaaatggaacctgctgtgagaagtactgtggatgccccaagagctgcaagaatcgatttcgtggctgtcattgtgctaagagtcaatgcagaagccgtcaatgtccatgttttgctgcagatagggaatgtgatccagatgtttgtaggaattgttgggtcagttgtggcgatggtacacttgggattccta

SEQ ID NO: 42003 - DNA, 250 bp, Glycine max
  Clone ID: 701124969H1
ttcggttgtgatataaacctgcgttgcgctaaacgacaccgttttcactgtctctgagaatggaggcactaagtcgctccgtggaagaaatattcgaggatttccagggccgaagagccggcatccacaaagcccttaccaccgatgttgaagatttctacagccaatgtgatcctgagaaggagaatttgtgcttatatggattcctaatgagcaatgggaggtaaatttacccgttgaagaagttcct

SEQ ID NO: 42004 - DNA, 255 bp, Glycine max
  unsure (1)..(255): unsure at all n locations; Clone ID: 701124971H1
gtttgcatgtgatgtattataatgtcacagtagttatgaaataaaaatncatgtaactgatganaaanagaatncaanngctcngantanccanttgaaaaantgaacacgtgaaatcacagaacaagggtaatgatnaatntggtttggatctattcaggacggggganagtaagcacgctatctgatgtttntggaaatgtngnaccttctgccctggcttgtgggctatcccnctggagtgtttggcatngg

SEQ ID NO: 42005 - DNA, 252 bp, Glycine max
  unsure (1)..(252): unsure at all n locations; Clone ID: 701124972H1
gcaacatgctccttcgcaccanacagtcactttctctctcttcactctacacttgccancgccnccagattngcgaaggggtttagggttccgtncatggncgcngttnaattgccgttaccagttgagtggcagctgcccccaaattgatggnatcggagggtttctcgctaattcaaaatgatgttgcaagtataaaaacggcagctgagtttccttcctgcaataaatttgtagaaactcaactctctg

SEQ ID NO: 42006 - DNA, 253 bp, Glycine max
  unsure (1)..(253): unsure at all n locations; Clone ID: 701124973H1
tctgcttctttgcaactctgcatattttcgctgcaaancccaagatcnntntgttgtttgtgctcctctctttgaatgcaaaagccaaaaggtaaaccaaaaagctaaaacnagaacatagaaaccatttctactgtttgaaaaggttgctctgctctgctcngtttgtcatccgaagagagcgaggaataagaagacncagagaaaaaaaatgaagtacgtgctggtgactggtggagttgttagtggcctg

SEQ ID NO: 42007 - DNA, 250 bp, Glycine max
  unsure (1)..(250): unsure at all n locations; Clone ID: 701124974H1
gttcctctccttcgtttcgtcttcgatcttcggtttcattctgcgtttgttcacatcatggccaccgcttcagtggcatttaagtccagggaggaccaccgcaagcagattgagttggaggaggcgcgaaagcngggcttgcgccggctgaactcgatgaagatggaaaggaaatcaatcctcacattccccagtatatgtcttctgcaccttggtatcttaatgctgagagacctagtttgaaacatca

SEQ ID NO: 42008 - DNA, 253 bp, Glycine max
  unsure (1)..(253): unsure at all n locations; Clone ID: 701124977H1
gcttcttcttccgtttttgtctatcggcgtgaacaatggcgacttacgctgcnatgaagcccacaaagcccggcttngagganccccaggagcagatccacaagataaggatcaccctttcctccaagccgtcaaaaacctcgagaaggtttgtgcggacttggttcgcggtgcaaaggacaagcgcctcagggttaagggacctgtcaggatgcccactaaggttcttctcatcactaccaggaagtcccct

SEQ ID NO: 42009 - DNA, 234 bp, Glycine max
  unsure (1)..(234): unsure at all n locations; Clone ID: 701124978H1
tatatcctctccttcaccgtcgctctctccaacgntcacaacaacatcntcatcccatggcaaacgccgcatctggtatggcagtccatgatgactgcaagttaaggttttggagctgaagacaaagaggacacaccgtttcatagtttttaagattgaggagcngcagaagcaggtcattgtggagaagctggtgagccagcccaaggctatgaagatttcactgccagcctt

SEQ ID NO: 42010 - DNA, 259 bp, Glycine max
  unsure (1)..(259): unsure at all n locations; Clone ID: 701124979H1
atcccaaataagttccttgttccttattcttttttctggaagaattttgagaggctggcatcaaggtggtgtaaattggactaaccttcctgacatttcgaagtgnccttgagcaggctggcaaccaatataaaacttgattncagatagcatcatgtgccatggtcatcataatgggaatatctgtattgttcttaatgcagtctaaaacaaaagtgttaacagggattgggctcagtttgttaatgtctggtttgtt

SEQ ID NO: 42011 - DNA, 260 bp, Glycine max
  unsure (1)..(260): unsure at all n locations; Clone ID: 701124980H1
atttatgttaaacaacaccatacttctcctttgtcaaagttggagatgaaaaactatattcaggatattggnaatcagaggttctctgacatcaacagccaaacaagttcagggcnaacaaaatctaaggatagggtgttgatcccttttcattcaatagtcaaggggtttatccccaacccacgactgcaacatatcctattgggaaagaagatgtcacagtcatttttagaagaagaggaggagatgatttggaacaa

SEQ ID NO: 42012 - DNA, 206 bp, Glycine max
  Clone ID: 701124982H1
gcgagtgagagtgagtgagtggttctcttgcagcaacaaggtttagtgacaccaaacagactggaaatgggtcgtggggtcagtgctggtggtggacagagttccttggattatctctttggcagtgggtacctgccagcagtgcaaatggtgctcgcacttcaaaatgcaagtgctcctttcaccaccggttgataagcaaagtc

SEQ ID NO: 42013 - DNA, 256 bp, Glycine max
  unsure (1)..(256): unsure at all n locations; Clone ID: 701124983H1
agatatggnaagatttggtctttcccttngggcagctntataagcgtttgtttgctaccgtgattagagggaattcangcaanaaccnttgcttatacagtgcttaattngtaacatngnttnccatcagcacanaactnngtcgnngttacgaataactgctcactgaagatcttgaagcacnacnntagtcactcagaaacttnaatgggaagattgaatacatgntaagcgngcntncctagtggnggggaaa

SEQ ID NO: 42014 - DNA, 251 bp, Glycine max
  unsure (1)..(251): unsure at all n locations; Clone ID: 701124986H1
cttttccgttaacccacagtttgcaggctcctacngctacattgctcccgagtatgcttgcatgcttaagatcacagagaagagcgacgtgtacagctttggagtggtcctactggagataataacgggaaaaggccagtggatccatcattcccggatggacaacaacatgttattcagtgggtgagggagcacctcaagagcaagaaggacccagtcgaggttcttgattccaagctacaaggccatnc

SEQ ID NO: 42015 - DNA, 254 bp, Glycine max
  unsure (1)..(254): unsure at all n locations; Clone ID: 701124989H1
aaagtcccctcccacaccactgtaacatacnacttacagaagcacatcacaggaactagaaaatccatacaatctnncaccaccaaaaagaaaataatggcaatggccagtgcaacaactctagccacaacactgttgtggcggctagccccagtgttggcagcagaaggagtgggaagaggaatgtgaacttcatcagagggttgaattcttttggagggttgaaggctcagaacaatgtgacattactaggc

SEQ ID NO: 42016 - DNA, 250 bp, Glycine max
  Clone ID: 701124990H1
acagtttgcaagtttaggggccaagcttattatctctgcaaggaatgaagctgagctaaaccgagtaaggacacagctgaaaggtaagcatgcacctgatgacgtcaagatcttaccattggatttacatctggagaggattctcttaggatagctgttgagaaagcagaatccttttttccggattctggtgttgattacatggtccataatgcagcttttgagcgtcctaaaacatcaattttagatg

SEQ ID NO: 42017 - DNA, 247 bp, Glycine max
  unsure (1)..(247): unsure at all n locations; Clone ID: 701124991H1
agagaacttcttgctcaatacctgttgaggtgttgattgttcatagtgcgcaattagtttttttgggaacttagatgctgtggagtttatttttctgtcattaaagacaaatttgaggccatatagagaanatgtctagtaagaaggaagagaaatctcagggctggcggctgaaagaatcaaggctgcagccctgagtgctggcgaaaggccttagttcgtgcccaggctgaaagggcctgcgact

SEQ ID NO: 42018 - DNA, 252 bp, Glycine max
  unsure (1)..(252): unsure at all n locations; Clone ID: 701124992H1
aaaagtgcatcatatttcccacgctacantgtntanacngttacatgatttnnaanccaagagnaanangatgtnaacgtgccnncaatacaaggnatttntataatcttggttaagccacagganaagaatcngangcattctatttccgangcctactagttgtcctttgtcctttctgggtttgcagaatttcttacaaccctgtatcaaacaaggcntctttgattctctctctcacacttcttttgg

SEQ ID NO: 42019 - DNA, 253 bp, Glycine max
  unsure (1)..(253): unsure at all n locations; Clone ID: 701124993H1
gcggntcgnngagnaacccngcancancttntntatcgntncagatgatggantctccttgcngnncaagancctgtnggtgnttctaaggtaaaatgtgngtngcctgctantcatgcagcacacacagttctaggagttctgttattgtttctggtggctaggtggaaatcntgctgcaancacaancagatgctcttttgcagcnaataaaaaggaagaagcnaccagcatttgcttggcaaaggatcca

SEQ ID NO: 42020 - DNA, 258 bp, Glycine max
  unsure (1)..(258): unsure at all n locations; Clone ID: 701124994H1
gggaccttgctgtncgtgctagtcttaggggatggaaatttttgtaccttggagacctccaggncaaaagtgagntccgagtactttgagagcntttcagattccagcagcacagatggtggntgtggtcctgctaatttgttccgcaaaatggtgatggcgattgtgaggancaagaaagttaagtttnggaagaaagtgtatgtnatatacagcttngtctttgttcgcaaaatcatcgcccnnatggtcaccttc

SEQ ID NO: 42021 - DNA, 259 bp, Glycine max
  Clone ID: 701124996H1
atctaggcatgcctcatcttcaaaagttacaaatttaaatgaagtgcttatatctcttattagtactattgtatgtagaattgttttggggagaaggtatgaagaggagggatctgaaggtagcagattccatagttgttcaatgagtgtgaagctatgttgggtaacttctttgtttcagattatattcctttcatgggttggattgataaactcaggggactggatgcacgtctgaacgcaatttcaaggagatgga

SEQ ID NO: 42022 - DNA, 293 bp, Glycine max
  unsure (1)..(293): unsure at all n locations; Clone ID: 701125002H1
ggaatcctctttcatgggtcatggaagctgcagcaatcatgggccattgctttngccaatggaggaggcaaacctcctgattggcaagactttgttgggattatcacactccttattatcaatncaacaataagtttcattgaggagaacaatgctggtatnntgccgcagctctgatggctcgtctagcaccannagctaagttccttcgagatgggaaatgggttgaggaggatgctagcattcttgttccgggtgatataattagtgttaagctaggggatattatcccg

SEQ ID NO: 42023 - DNA, 298 bp, Glycine max
  unsure (1)..(298): unsure at all n locations; Clone ID: 701125004H1
cnaattcgaagttaatttgcaagatggctaaggaaaagggctcagatcaacattgtngtggttggtcatgtggaccctgaggaggcaaccaccattaacgagctgaagaagcctgttgtgggagaaagaagctcccaggggcatgccatatgagggcatgccagtacggcctcggaggggaaccagaaaattatgttaacaaaataatctggaanccctaatgtatcagtgtcatcatcagtgtgtagtttaagctagctttgctatggttacgttctttgagatgagagtcttgatg

SEQ ID NO: 42024 - DNA, 293 bp, Glycine max
  unsure (1)..(293): unsure at all n locations; Clone ID: 701125005H1
ttcgcgtttgtctgagagagagaattggaaggttgcgacgagtgatgatatacatattgtggcggtatganatcgaggaaaaagaggtancatcgtgagttgcaaatgagtagcganaaagntctccntcatcaagcttctgcttcagcttcttccttcggtagcttacgagtggagcaagggatnattngcctcgacaaggttattcttcgcgacccacgtggtagctccgctgnggtgtacttgtaacgtgctcacgtgacttcatggaagantgaacaggccgaggaatt

SEQ ID NO: 42025 - DNA, 246 bp, Glycine max
  unsure (1)..(246): unsure at all n locations; Clone ID: 701125006H1
gtgaggttcaacataaaatgaataagcaaganaccttgattaatgttatggtactagctatataggttttttgtactaaattttcatgttcatgttgatgtaaatgcgagtaacgattaattgtggggggggttgtccttatnngttcttaatncccttttccaattttgttacccttcaaatgtngtcaancatttttgtttccttttcctccttcaattggatattatcttgtcttgatgagtt

SEQ ID NO: 42026 - DNA, 287 bp, Glycine max
  unsure (1)..(287): unsure at all n locations; Clone ID: 701125009H1
catggctgcactccagagctcaatggccggtctctccctctcttccaaatctttcttaggccaactccttcctcccatcactctcccttctcttcttccgggtaagtcaacagagaagcaatgtcccattgtaatgaggntaaacgatgggagcggaggagtgtaaaccaaacagtcttcctatcttgcacaaaatgcatgttaaacttggagatacggtgcaagtcatatctggacgagaaaggggtaaagttggggagattactaaaatcttcaagcataacagc

SEQ ID NO: 42027 - DNA, 283 bp, Glycine max
  unsure (1)..(283): unsure at all n locations; Clone ID: 701125010H1
gttttagaagctcagctaagcacaatagagagtttaattaggccattaanatatcatatgggtctgactaagcctcatgtgcttatgctgttgatcatcatggttgtctcaattgcagagaaaccatcagtaatagaangaaggggtcttccctgtatctggtcaaagggtactccaaagatttttgcaaaggcttggactgtatgcaagtnttgtgatggggttggaggtgcctgcactagtacatggacagaatcttgcatacttgcatgtttaccttgga

SEQ ID NO: 42028 - DNA, 283 bp, Glycine max
  unsure (1)..(283): unsure at all n locations; Clone ID: 701125012H1
ataataatggggtctatgggtaactcaaatccaaatctaaatccaaatccaaatccaaatccatggactccaaaggattgttctgaaggaatttgcagcatctattgtcctcagtggtgttacaaagtgtactctcctccccctccaattctacaaggtgatggcgatgatgacccttcaggctttgaattctctcctctcatagttgctgtgattggaatcttggctagnactttcatcttggtcacttactataccattatctcaaggttctgcaggcgna

SEQ ID NO: 42029 - DNA, 120 bp, Glycine max
  unsure (1)..(120): unsure at all n locations; Clone ID: 701125015H1
gttcaagaaagttccattccctggtatcaagaagaaggctcctcttaatgtcaatgtcaacactcttcaccanagntggcatagaacgcagaactttgaatcataaccacacaacatnng

SEQ ID NO: 42030 - DNA, 292 bp, Glycine max
  unsure (1)..(292): unsure at all n locations; Clone ID: 701125017H1
ggnattcctgttgggacatcattaattgatgctcatgctggtggcgtgggggtaattgaaagtgtgccaccatcagaagctgaagaacatgacatggaagcaaattgcaaccgtatggtgttagtttgtggaacttctacatgccatatggctgtatccggagcaaattgttcatacctggggtttggggtccattttggtcagcaatggtaccagaatattggctaacggaaggtgggcagagtgctactggtgcattattggatcatatattgaaaaccatgctgcttct

SEQ ID NO: 42031 - DNA, 308 bp, Glycine max
  unsure (1)..(308): unsure at all n locations; Clone ID: 701125018H1
ctcgagnttcacnccactaacttgtttggtcccaagacatgggctctgntcctgcatgcttaccaannacaaacaagaatggccttcaagactctggattgcggncagaggtacagtgggcgtccaagtggaattgggccctaattncgagatggnngtctctaagcaaanctctgaatttctcaagatgaancctattggaaaggttcctgttttgggaaacgccccgatggtcccagtctttganancaatgnaatccgntcgttacgttgctcgactaangggtganaacgctttgttctcatct

SEQ ID NO: 42032 - DNA, 292 bp, Glycine max
  unsure (1)..(292): unsure at all n locations; Clone ID: 701125019H1
atcttgattcagttcaaaaaaccttccaacagcccagatgcatcatctgtcacgaaccagcctcaatncgtctgctcaaccatctgaagctgatagaagttcagagacaatagaatcgaagtgagagaatttcggactgacttgatggtcatcaatttctactgcatgttgaagcattggtgagctgaggttcttgccttcttgggtactattttatatccagatttcaggatgttaattgtcaataggggattgcaaatttgtgaaaaactaattcatgggactagtattg

SEQ ID NO: 42033 - DNA, 296 bp, Glycine max
  unsure (1)..(296): unsure at all n locations; Clone ID: 701125020H1
cnaatcagttntcnaagtgggacganatttcagattaagataatggctgcccacttgcccagaatattggttggtgaatcctatttagataaccttacnttgaaggggaagtcgccgttcgctgttcaaccaagaaatagcagcnnncatatgtntgagcacgaggtttgagggaatcgtggaaaagtaaagcatgagattgaaaaaccatcagcaagccagataancactgccatttatggatannttaattnataatgctgccaagacctggtgtaattctcatccttacatgc

SEQ ID NO: 42034 - DNA, 298 bp, Glycine max
  unsure (1)..(298): unsure at all n locations; Clone ID: 701125021H1
gagaatantgccccaaaatgattctcacatacggtgtcaagtattttgatggcaccataacacatggaggctactctganctgatggttgcggatgaacactttgtggttagaattccggataacctaccactncgatgctgctgcttcctcctcctctggctggggatcactgtgtaanagcccctttgaagatactaatggacttgaacaagcctggtcctgaatcttggtgtggttggtcttggtggacttggtcacatggctgtcaagtttgccaaagctcttggagctaatgt

SEQ ID NO: 42035 - DNA, 297 bp, Glycine max
  unsure (1)..(297): unsure at all n locations; Clone ID: 701125022H1
gcaccatgttanaagntgctnagaaggatgctaacatctctatcaagggatgttgatgaggttcttcttgttggagggatgactcgagttcctaaagtccaagangtggtttcagagatctttggaaagtctcctagcaaaggagtaaaaccctgatgaggcagttgccatggggggcagccaatccaaggtgggtattctacggggggatgttaaaagancantaactcntagatgtaacaccantctctcnccggnatggancttggggtgtacctttacgagattgatcaaccc

SEQ ID NO: 42036 - DNA, 263 bp, Glycine max
  Clone ID: 701125024H1
ccttaaaagaaaatgccttcaccagtggcagccaagttcactctccatcatctgctgaaggtgagaaacatgcacgcaagcaattggatagagagattaggggacatggtctctgccatcactgacagggtccagattttcacaaaccaggctcaaccaaccatatggagaatgatggtgaacatggtttgagcatggtcacccttgtaggaaacaacaacggcgccactatgaaaagtgattcgacgaaaaatcaggcaacc

SEQ ID NO: 42037 - DNA, 87 bp, Glycine max
  unsure (1)..(87): unsure at all n locations; Clone ID: 701125025H1
ccaantttcccctttcactgatcanggcttcttctctcatnatttccccaagaaagcttcnnntgatttgtantcctactncctntg

SEQ ID NO: 42038 - DNA, 257 bp, Glycine max
  unsure (1)..(257): unsure at all n locations; Clone ID: 701125026H1
atcacaatttcatcnaaanctnnctaaatnnncanagttttancttctgtctttctgtgtgaaaanacaaagngtccaaaccatgggtcagnaaaaccgagaaagaagaaaccggacttcaaggttcccgaaagatacggctttggttaaacaatggcggcgtcacnggaaacctgtaggaataacatgtgtcagantgttnacggccttcancacntnaaggcaannagtcgggngcgggaggtgcgggaatactc

SEQ ID NO: 42039 - DNA, 151 bp, Glycine max
  unsure (1)..(151): unsure at all n locations; Clone ID: 701125029H1
gcangantcatcatcgttaccaaacatggtgacagggcgacaaggagaggcgtgttagactttacgtcagggggttcaatacttgtgatacaagaggtccaagtcaaaatcaatacnccagacacctcattaatccagattgagaatgtaa

SEQ ID NO: 42040 - DNA, 279 bp, Glycine max
  unsure (1)..(279): unsure at all n locations; Clone ID: 701125030H1
ttatttaggccgtgaatgtccagagcctttaaaggaaattcttgttttgtgtgacaatcgttgcgtactttttngtaacaagactaaggatgaagggaagcgcttggacaagttcaacaacttctctcttttgtaaacacagttctatcacgtaatggtggacgaccttatncagatgagtattacacaactgaagaaggggngcatggagctgcataaccaacaagnggggtgattctttaaaagggttctccaggaggggggctatgcagttaaang

SEQ ID NO: 42041 - DNA, 294 bp, Glycine max
  unsure (1)..(294): unsure at all n locations; Clone ID: 701125033H1
gnaaaagaagagtcaccgctacgacgccgttcgtgcttttttgaggtgccacagtcatgtttgggcgtggtggaccaaggaggagtgacaacttccaaatattatgatattcncggggtttccaaaatgccagtncaagatgaaatcaagaaggcctatgaaaggctgctatgaaganccatccagataagggaggagatcctgaaaagttcaaggagttaggtcaagcatatgaagttttaagtgatcctgagaagaaagacctgtatgaccagtatggtgaagatgccctta

SEQ ID NO: 42042 - DNA, 294 bp, Glycine max
  unsure (1)..(294): unsure at all n locations; Clone ID: 701125034H1
tcgagccnctctttctctctgcgacaccagatgatggagacgacggcgaacgaaaacgctgtccgttgcgcccaatcgcggcgttgttgttggtggtgctaactngcggcgagtgtggtggtggaggctcaggagaactccggacgtgaaaaacgctggtgaagcacatgcacgggaagaagtactgcaacaaaggatgggaatgtaagggctggtcatttactgttgtaacctcactattactgattatttccagacctacnagttcgngaatctcttctccaagcgganctc

SEQ ID NO: 42043 - DNA, 289 bp, Glycine max
  unsure (1)..(289): unsure at all n locations; Clone ID: 701125035H1
cttctgagtactgtgttgtcgctccagacacagagatcttctgtgaaggagagcctgttaaaagggaagatgagaatagattagacgaggttggatatgatgatgttggtggtgtaagaaaagcaatggcacagattcgggaattagtggaatgccactgangcatcccacagttattcaagtctattggtgttaagccaccaaaaggattctgttgtatggacccccagggtctggtaagactttaattgctcgggcagttgcaaatgaaactggtgccttctttttc

SEQ ID NO: 42044 - DNA, 295 bp, Glycine max
  unsure (1)..(295): unsure at all n locations; Clone ID: 701125040H1
cgagtcataaggtcacanggngnacgcgnncnggcncaacgagttgtccggttgcagggagcnaganaggttncctcncaatancaaacgtcnanccagannctgaagaaggcgttgccggagancgcgaagatatcgaaaggnngcaaagngagacggtgcangagtgcgtnncggngttcatcagccttcataacaggagangntccnataagtgccanaaggagaacnngaagacgattcaacggcgacgatcttctcctgggcnatgactaccctgggcttcgangntnac

SEQ ID NO: 42045 - DNA, 280 bp, Glycine max
  unsure (1)..(280): unsure at all n locations; Clone ID: 701125044H1
atgggtgnctacaagtatgtntcggagctatggcgcaagaagcagtctgatgctatnagattcttgcagngggtgangtgctgggagtatcgccagcaaccntctattgtccgtgtgacaaggtntatcgcncagatanggctcgtcgcatggngtcaaggctaagcaagggctacgngattttaacgtgtttcgcgnacgaagggnagncgtangganaccngtncnaanggtaatntttgaggttggncccaccancnaagggttanccanctgaagt

SEQ ID NO: 42046 - DNA, 294 bp, Glycine max
  Clone ID: 701125049H1
tgaccatcggcggtcaatctgctggccgcatcgtgatggagctctacgccgacgtcactccccgcaccgccgagaatttccgcgcgctttgcaccggcgagaagggcgtagggcggaacggcaagcccctccactacaaagggctcgtccttccaccggtgatcccgagtttcatgtgtcagggtggcgacttccaccgccggaaacggaaccggcggcgagtcgatttatggcgccaagttcgccgacgagaattcgtgaagaagcacaccggtcccggcaatcttttcaatg

SEQ ID NO: 42047 - DNA, 116 bp, Glycine max
  unsure (1)..(116): unsure at all n locations; Clone ID: 701125054H1
tcacagtactttngcttctctcgaagatgtctctacgagtgctgaaccctaacgccgaagtgctggaacaaatcggcggcacttcacangacnnncgaangngnncaaggnanagc

SEQ ID NO: 42048 - DNA, 99 bp, Glycine max
  unsure (1)..(99): unsure at all n locations; Clone ID: 701125055H1
tcccatctacgctctaaactccgatccctaacttaacctaaccagacatcttcctcgcctctgccagggcacatcgtcctacgccncacaacataggga

SEQ ID NO: 42049 - DNA, 279 bp, Glycine max
  unsure (1)..(279): unsure at all n locations; Clone ID: 701125057H1
gaaaatttcagtttaggctacacagcctcaacatcattgacatttgataatgggcaatgcctctgtttgcttctgtatgattcttctcagcagataatcgatcgcgctctgttgattcgatcgaaatcgaagaagaaggcgagctttaancctaggttgcacaatctattctgatgatatattgcngttggtgttgcctgaggttttggggcgattccaagtgatacatacttgacttgatgtggtcgatactaactgganaggatatgcatcgcaatt

SEQ ID NO: 42050 - DNA, 277 bp, Glycine max
  unsure (1)..(277): unsure at all n locations; Clone ID: 701125058H1
ggaanatgtggagaacttaccgaagtcacagctcactagggagaagnananaagaaggaanaatngatgaggctttctcataataagtttaattnacttatgcacctcagcttntggangaagttagacaagaaannntctatgaaananaaggtgganggaantggggaaagtccaantancntttcanngnntgattncgaangccccctttcaattggtagngatgnagggtncnggggtaaacccccggggttannacnaggnctcatgggtt

SEQ ID NO: 42051 - DNA, 259 bp, Glycine max
  unsure (1)..(259): unsure at all n locations; Clone ID: 701125062H1
tgacgttagtaagtaacaatggtgnngaagggccaagggtangnaggnggaggttgtcactngagagtacaccatcaacctccacaaacgcttgcatgggctgcactttaagaagaaggctcctaaagcaattaggagataaggnagtttgctcaganagcgatggggacgatgatgtaagannggatgtgaagctcaacaagctgtntggagcaaggggnccggagccttccaaagnggtttgggttcncatnccccc

SEQ ID NO: 42052 - DNA, 222 bp, Glycine max
  unsure (1)..(222): unsure at all n locations; Clone ID: 701125064H1
tttganattgggagatggagcggaagtgggagcagcgaatctggtggggaatgttntgtcgtcaccattcacacacacacttcgcagtcgcgtaacgggcatttctcgttcctcttcgctcaccctcatggaagaggaatttcaccgtcaaaaggctcanatgtggtgcaaaggcggcggttcagngcttggccaggtnatggctctnagantgcgtcgccg

SEQ ID NO: 42053 - DNA, 90 bp, Glycine max
  unsure (1)..(90): unsure at all n locations; Clone ID: 701125065H1
ctcgcttcaaagagcgtttgcgtctncactttcgccgccgcagaagcggcaatgggtcttctanntcacaagctccttcaacgccgatgt

SEQ ID NO: 42054 - DNA, 289 bp, Glycine max
  unsure (1)..(289): unsure at all n locations; Clone ID: 701125066H1
tcttcctcctcctcgtgattcccgaacattctcttcttattcccagctccacgcgcgcgactccatatttctcaccactcgcgcnattctnccttcttcctccattagggttntctgacatggctgaatgtnagcttcgtctccacattgaacccttgaanccacanggtccggcncgcnnccacggnttcgnctagaccctgtttcgaggattctccgggattgatgngaagaggaaaggaggcganttgnagcnnnnnangnnngagggnagacngnannagctccc

SEQ ID NO: 42055 - DNA, 167 bp, Glycine max
  unsure (1)..(167): unsure at all n locations; Clone ID: 701125067H1
atttttattatgccattcagattgcgttagctaatgattcttttgttctgtttcattgtttgcttgttccttaaagatctcaaagggtccacaatcgcacaatttnctgaactgctcatgggataaaatggaatgcccctcaagtgggatatcccaaacatacgang

SEQ ID NO: 42056 - DNA, 106 bp, Glycine max
  unsure (1)..(106): unsure at all n locations; Clone ID: 701125069H1
atttgggntgcatgcattacngaaggagntgcaagatcagagcgccgtgctgtgatgaggtntttgcactgtaggcantgccatcaatgaagctaagaattccgcc

SEQ ID NO: 42057 - DNA, 285 bp, Glycine max
  Clone ID: 701125072H1
gtttgttttgtgctttagataaaagttctgccaaatcaagaggggttttaagatcatagtgtgtgttttgcaacaatggctaagttcttgctgctatgatcttggcactctttgccattcccatacttcaaaacagtggtaatggctgctaatgaacaaaggaggccacttgtatgacaaccagagcaatatggaagtggaagtgtcaagagttaccaatgcccatcacaatgctcgaggagatgtagccagacccaataccacaagccctgcagtttttctgtc

SEQ ID NO: 42058 - DNA, 275 bp, Glycine max
  unsure (1)..(275): unsure at all n locations; Clone ID: 701125073H1
ctttgatgggtatcagtggttttntgttttgccccttgttgtgtcttctttagcttggtttaggctttttcctttgtctgtttgttaggggtagagaactactgggtggtggttgacctgaactcagcagtgataggaatttgggttttggagtcccattttnatttttgaagangtgggtggagtggtncaagggtttttgaaggtgtggtggattcagancttttggttgttgtttngcctgggaattttgataaaggcgtgtatttggaaga

SEQ ID NO: 42059 - DNA, 277 bp, Glycine max
  unsure (1)..(277): unsure at all n locations; Clone ID: 701125074H1
ctcattgagagcttcaaaaattcaggagtaaatctaaattcagggagatatgaatgatcatgagagtctggttaatgcaatcaagcaagttgatgtcgtaatctgtgcattggtagactactaattgaagaccagttgaagatcttgcagccataaaaagaagctgggaaacngtccagaggctttttncatccggaatttggnttggntgtggntcgtcacgattcnagttgaccnagttngagaagttttcgaggaaaaagcaagatttcgagga

SEQ ID NO: 42060 - DNA, 172 bp, Glycine max
  unsure (1)..(172): unsure at all n locations; Clone ID: 701125075H1
aagaagttccagagcttgttgctggacggagagtgtttataaatcaaggatatgcatatgttgcaatgaatcagattgtttcacttgtagccacacaattccgcagtnaannnntcannccgcattatccttacaaacagaaaattagacatctcaattagagagcaagagg

SEQ ID NO: 42061 - DNA, 278 bp, Glycine max
  unsure (1)..(278): unsure at all n locations; Clone ID: 701125076H1
ctagatctgatctgagagaatggctcctcggtctagcagcaaggacgcccaagaccttttccgcgctctttggtctgcttatgctgcaacccccactaatctcaagatcattgatctctatgtcatctatgccgtattcaccgctttcatccaggttgtttacatggcttggttggatcattccattaactccntcctatcaggagtaatttctgtggtaggaangcnggttccttgcnggttggtcccaggnncnaggtgatgancnnncncnggga

SEQ ID NO: 42062 - DNA, 286 bp, Glycine max
  unsure (1)..(286): unsure at all n locations; Clone ID: 701125081H1
aaaaaggccttattactcctggaaagactgttctggttgagtatacaagtggtaacaccggcataggattggcttcatagcagcattgaggggctataaacttcaggtgactatnccgcntatgtgantctngggaggaagatttactgcggcnatttggagctgaggtanatctnacggaccctgcccaaaggtattgangnnaatgattcagaaggcngaaggagctactagccaagacgcctgatantttnangctnaancatttgaaannctgccaanccaa

SEQ ID NO: 42063 - DNA, 293 bp, Glycine max
  unsure (1)..(293): unsure at all n locations; Clone ID: 701125083H1
gtcgagtgncacagcagcaatggtgncacgtcaagggctcagaaatcaaaagcctactttcaagngatatcaagtcaagttcaagagangaagagcgggannaaccgntttaccgtgccaggatcggttggnttntccagnncanaggacnggtatgaacnacggaantaccggttngtngggcgcttnagcaacaaggacattgtggcaccnataagntncngccgncatcgccggcgnanatggtnctggcgcgcatatgcgcannagcngccacgatagggcctgaaggg

SEQ ID NO: 42064 - DNA, 184 bp, Glycine max
  unsure (1)..(184): unsure at all n locations; Clone ID: 701125084H1
cgtgaggngaatatgaagttgtttgtnttctttgttgctgcagtagttttggtagcatggccatgccatgggcgcaggctaaccaaaggttccctcctccgaatgaaaactgggctatggtgagcgntcttcggaggtaaaatgcgccagttttaggttgctgtggaagcacacaaacatccgg

SEQ ID NO: 42065 - DNA, 280 bp, Glycine max
  unsure (1)..(280): unsure at all n locations; Clone ID: 701125087H1
gcttcttcctatttttctctcccttttganggatgaatttcctgatgtacgcctaaatatcataagcaagcttgatccaagtgaatcaggttattggnntcaattgttatctcaatctttgtaccagcccattgttgagnctgctgagggataggcatggaggggtccgacttgcaataataggaatatataccccttataagcaagtcattgggggttgggtttttttatnacaacttggtgcctttgcagcatggttacaggacaggttcattcgatc

SEQ ID NO: 42066 - DNA, 289 bp, Glycine max
  unsure (1)..(289): unsure at all n locations; Clone ID: 701125089H1
anactaccctcaacatagtaaagcagctggtgcaagtngaagcaatggctcaaaccatgttgctcatgtctagtgtctctagcagttattccgtggatttgaagaaagaccttttcctccattgcagagtcaaagttaanggctaagttctctcaaactctcatncaancccacttccaccatncaacttccttccttttcttcnacccggtacnattcaacaaccntggctcctcttcaaatctaggacaaangcggctcctgctaggactaaggttacaaggccaag

SEQ ID NO: 42067 - DNA, 285 bp, Glycine max
  unsure (1)..(285): unsure at all n locations; Clone ID: 701125090H1
agnggctcctcgtaatcgtgttgggcaaatttcacatagtgttgttcttgggaacatttaatgtgggtgaacaaggtgaaggaatgttcatgaccctcactcggggtattggggcatgttttaaattctattggaaacagtgggccagagcacattagtggtcctaatggctacgcanaacttcttcagttcagcccaaggaatgaaactgatggaatgcaagctggaaatnaaaacccagcaggaaatcaggcaccatcnggacagacatttcaggcccgacat

SEQ ID NO: 42068 - DNA, 281 bp, Glycine max
  unsure (1)..(281): unsure at all n locations; Clone ID: 701125091H1
acaacaacggctgttgttgctgagcaaacaaaagcaattgcagctaaaatatcaaattgggacaatgtcgttttggcctatnngccagtttgggccattggaaacaggaaaggttgcaactcctgctcaggctcnagaggntcatgctgattaagggaatgggttcatgacaatgtggagtgccgaagttgccggcatccggtaggaaataatctatggaggctctgtaatggaggaaactgccaaagattggnagcacagcccgatgtngatggttttgg

SEQ ID NO: 42069 - DNA, 277 bp, Glycine max
  unsure (1)..(277): unsure at all n locations; Clone ID: 701125092H1
anaggtcacactgccacctttcagatttgacttcctctccgggcgctgccattctcttccacggcagnnnnnnnnnnnnnnnnnnnnnnnnntcaatttcgagaagtagctccagtattatatggcctccttcagagcattctggaacagtccagttggtccccaaaacaactcattttgggggactattgccaattggggatttgtagnagtggattggctgactgaacaaacctccagaaaatgatctctggcaacatgacaggagcatgtgtgt

SEQ ID NO: 42070 - DNA, 204 bp, Glycine max
  unsure (1)..(204): unsure at all n locations; Clone ID: 701125093H1
aganaaacacactgcaattgtttggactagttttaatttcttccaattccatggctgggaaagatagaatcctgattttgggacccactggagccattggaaggcacatagtctgggcaagtgtgaaggcagggaacccaacatttgtgttgtgaggaacacccctggctctaacaacaggggtcatctggtcaaagngctaat

SEQ ID NO: 42071 - DNA, 281 bp, Glycine max
  unsure (1)..(281): unsure at all n locations; Clone ID: 701125094H1
cttggtgcctatntgattggtaacatgacagctttgatagtcnaggggatcaaagactgaaaagtttagggacaagatgaccagaccttatgaaatatatgaacagaaatangctcggnagggatatccgtgaacaaatanaagggcatgtgcgtnacagtatgagagtagctacactgaggcttctgtcattcaggatatcccnatttcnattcgagcnaaggtatcccaaacattatattgcggtacatngaaaagggttctcttttaaaggtgcncct

SEQ ID NO: 42072 - DNA, 279 bp, Glycine max
  unsure (1)..(279): unsure at all n locations; Clone ID: 701125095H1
cnaacaccgttcttctnacttctctnctnccncngcaactctcncaanantcatcttacgtgtttatcatcgtcactcaaaacgacgccgactcctctccgttcctaagccacgtttatcaggtttcntggngctgttgtncaaagtacatnatattnccacaggacngaanggtntnnaaggtgcttnccaatctgggattaatggggagacatagaactgatnagtgacgactttgcatgtncgttttnncaaggatgaattagcanganagccgca

SEQ ID NO: 42073 - DNA, 113 bp, Glycine max
  Clone ID: 701125101H1
aaattaactagctaggatggtcagtgttgaagagatccgtaatgcacaacgtgcagagggccctgccactgtgcatggctattggcaccgcaactcctccaaactgtgttcga

SEQ ID NO: 42074 - DNA, 283 bp, Glycine max
  unsure (1)..(283): unsure at all n locations; Clone ID: 701125103H1
gtcctgacaagcatgatggcttccatgatgttcgtacaaactacaattacacagagccaactcttgctggaaatgctggtttagttgcagcactagtggcattgtcaggcgacaaaagcacatcgattgacaaaaataccantttctctgctgttcccccaatgtttcngannnnnnnnnnnnnnnnnnnnnnntggaaaccataagcgcatcatgccattggttatttctttctagcaagtatcccagatgatttgagtgcaccggtaaccttcgttgtttt

SEQ ID NO: 42075 - DNA, 279 bp, Glycine max
  unsure (1)..(279): unsure at all n locations; Clone ID: 701125104H1
ttnctagnctttgncgctgccatcattgctcttagcnttactgttgcgtagaaaatcagggaganagaaggaccaccagaaagaaaattcggatcctttntancgttcaaatgctaattactcgcaatctcgcatgaggctcgattnaacagtgaacaataattgcttacttatcttcgtgaacgttttgggatcaattaattacattaatttggnggagtttgcataatcgcgttctnnngatttttagaaatatctaaatnaattgcagatatngtt

SEQ ID NO: 42076 - DNA, 281 bp, Glycine max
  unsure (1)..(281): unsure at all n locations; Clone ID: 701125105H1
ggaccatagaatccagccaagtaataacgttgggccacaccacacaggtcaaaaanacaccacttgcntntctgctgtcccagcaatggaggttnttgagaaggagaagaagtacataacctcagaggagctgaagggtcacaacaaggagggagatttatggatctcaattcaaggtaaggtgtacaatgtctcagattgggtcaaggagcaccctggtggtgatgttccaatctgcaaaccttgctggccaggatgtcactgatgcattcatagcatac

SEQ ID NO: 42077 - DNA, 278 bp, Glycine max
  unsure (1)..(278): unsure at all n locations; Clone ID: 701125106H1
gaaatctctcaatgataataaattcgtttatcatttcatacaacaagatnctncctctagcctctctggagtttttgatgcgtcttctagtgcctcgttgaaaaatgatttagatttcacacttagaagtggagatcatgtggtttccttttccaagcgtttacgaattcctgggagttcttccactgcacatgatctcngtcagcaggtttggagaattgataaggatgaatatgtgacttcatttgctattatgaggtttaatcttgtacagcttt

SEQ ID NO: 42078 - DNA, 274 bp, Glycine max
  unsure (1)..(274): unsure at all n locations; Clone ID: 701125108H1
gttctgtgtttgtgtttgttttttctctcacctgaaaatgtcttgctgcggtggtaactgtggttgcggaagttcctgcaagtgcggcaacggctgcggaggctgcaagatgtacccagacttgagctacactgagtcaaccaccaccgagaccttggtcatgggagtggcacctgttaaggctcaatttgagggtgctgaaatgggtgtgcccgctgagaacgatggctgcaaatgtggaccaaactgctcctgcaacccnngcacttgcaag

SEQ ID NO: 42079 - DNA, 227 bp, Glycine max
  unsure (1)..(227): unsure at all n locations; Clone ID: 701125110H1
agaaaattaagcaaataacaagaaagaaacaatgaacgacttgttctccggttccttctcccgcttccgcagcgacnagtcctnncccggaccgccaccacgacatcgagagcnggcgcnancgnctccagcggcggtcgcngcggcgaggtgaaccttgacaagttcttcgaggacgtggaaggcgtgaaggaggaactaaaggagttggaaggtttggctcagag

SEQ ID NO: 42080 - DNA, 95 bp, Glycine max
  unsure (1)..(95): unsure at all n locations; Clone ID: 701125114H1
catctacgctctaaactccgatccctaacttaacctaaccagacatcttcctcgcctctgccagggcacatcgtcctacgccncacaacntanga

SEQ ID NO: 42081 - DNA, 180 bp, Glycine max
  unsure (1)..(180): unsure at all n locations; Clone ID: 701125115H1
gggagataaagagtggatttcttaatcggattggaattggtgncaagtactctactccaaaggatcccctgaatgttcaagtaaccaaaatcaaatnnccttgatgcagaagacacttgtaanttaatatcagtctcaccagtcctgtgtctgctttgggcattggccactggatgggcc

SEQ ID NO: 42082 - DNA, 271 bp, Glycine max
  Clone ID: 701125116H1
cgaagatctaccactcaacatttcaagagaaatgttgcaacagaacaagatcttgaaggtcatcagaaagaacttggttaagaagtgccttgagctcttctttgaaattgcagagaacaaggaggattacaacaagttctatgaggctttctccaagaacttgaagctaggtatccatgaggattcacagaacaagggaaagattgctgaattgctcaggtaccactccaccaagagtggtgatgaaatgacaagcctcaaggattatgtg

SEQ ID NO: 42083 - DNA, 290 bp, Glycine max
  unsure (1)..(290): unsure at all n locations; Clone ID: 701125117H1
gttcttttctacggagcctcgaccaagaagaatcgcagagagaagagggtcagagtgagaaagagatgagagagaganagaaactgagagaaattcgcaaaccctaatttcggaaagatcggcgatggctgcctccaaggatcgcgagaacttcgttctacatcgccaagcttcgccgaacaggccgagcgatacgaagagatggtggaatcaatgaagaacgttgcgaatctcgacgttgaactgactgttnggaggagcggaatttatttctgttggggtacagnant

SEQ ID NO: 42084 - DNA, 257 bp, Glycine max
  unsure (1)..(257): unsure at all n locations; Clone ID: 701125123H1
aagcaaggctagctatgaaaaacattgcaaagaagtggactccctgaactaagggcatncangcccctggtgttccaataattctcgntggaacaaagttagatcttcgggatgataagcaattttttatggaccatcctggtgcagtgccaattactacagcacagggagaagaattgagaaagctgattggtgctccggcctacattgagtgtagttccaaaacgcaacagaacgtgaaagcngtgcttgacgcg

SEQ ID NO: 42085 - DNA, 271 bp, Glycine max
  unsure (1)..(271): unsure at all n locations; Clone ID: 701125124H1
aagaaatcgaggaggtataggatggaacnggggatatacgcggactgagcgaggcgatggagtgtttggaacacatatgctatgaggggtgcacccacgttggaccgtacgatgcggaggtgaagagggagaggacgccgtgtgggagattcgccacgtgccagggtcttcaggttctgatccgccactttgccacgtgcgagaagaaggttcgcggtggctgcgtgcggtgcaagagaatgtggcagctctttcgactccattcctatgt

SEQ ID NO: 42086 - DNA, 112 bp, Glycine max
  Clone ID: 701125125H1
gtctttctggaacaggcagtaatctgacagcagcgatctctggaggtaacttgacaggaactagtgccaatacttcatctgaatcaaaccaagctcaaaatggtactgtgaa

SEQ ID NO: 42087 - DNA, 253 bp, Glycine max
  unsure (1)..(253): unsure at all n locations; Clone ID: 701125128H1
cacctctgcttaccctgttacggatttactattaaacccgctaccaaacattctgttgagntccctgtttctgagaaaagccaacttgtttggncaatccgagtggtgggttgggatgtcagctatggagctgaatttgtgcccagcgctgaggatggatacactgtcatagtacacaagagcaggaaaattgctcccgctgatgagaccgttcttaccaacggtttcaaaattggtgaacctggcaagattg

SEQ ID NO: 42088 - DNA, 266 bp, Glycine max
  unsure (1)..(266): unsure at all n locations; Clone ID: 701125129H1
ggggttcctcgacaaggattaaggagaagctaccagggcacaagaagacagaggaggccacagctactactcctcctccaccaccacctgttgcatcattggagcatggtgaaggtgctcatcatgnangagaggccaaggagaagaaaggtatattngaaaagataaaagagaagcttcctggttatcactccaagacagaggaggaaaaggaaaaggaaaaggagagtggtgctcttgatatttaagattgagacaaggctttt

SEQ ID NO: 42089 - DNA, 188 bp, Glycine max
  unsure (1)..(188): unsure at all n locations; Clone ID: 701125130H1
gtttatcgtgaggagaatatgaagntgtnngtnttctttgttgctgcagtagttttggtagcatggccatgccatggcncaggctaccncaggttccctactccgaatgaaaactggctatggtgagcgttcttcggaggtaaaatgcgcaagttttaggcttgctgtggaagcacacaacatccgng

SEQ ID NO: 42090 - DNA, 267 bp, Glycine max
  unsure (1)..(267): unsure at all n locations; Clone ID: 701125131H1
gtgttattgagcagatagcatggagccacagtgtagaatcncgaaggatgccactgaattgatagggaataccccaatggtatatctgaacaacattgtggatgggtgtgtagcccgtattgctgctaaattggagtacatgcaagcgtgctgtagtgtcaaagataggattgctttgagcatgattgaagatgctgagaaaaaaggccttattacacctggaaagactgttctggttgagtatacaagtggtaacaccggcatagg

SEQ ID NO: 42091 - DNA, 280 bp, Glycine max
  unsure (1)..(280): unsure at all n locations; Clone ID: 701125134H1
gaaagagcatctttctcctttctttcatcaccgttggaagagactgagatgggttcaaaaaccnngacttttacctttgaggaggtggctaagcacaatcacaggaaggattgctggattatagtcaaagggaaggtgtncgatgtcaccccatttttggatgatcatccaggaggtgatgaagtnttagtgactgcaacagagaaggatgccaccactgattttgaagatattgggcacagtgattcagcaacagagatgatggaaaaatactttgttg

SEQ ID NO: 42092 - DNA, 268 bp, Glycine max
  unsure (1)..(268): unsure at all n locations; Clone ID: 701125137H1
cgtaacagcagagcagaacaccgataaatcgctatgactncncatacccaagangngcttcttgcggnccgaccttnagcaacaanagatccatgatgatgagcctgtannnnnnnnnnnnnnnnnnnnnnnnnnnnnngacgacgatgaggatgacgacaatgtngaagaaggtgatgcatctggtaggtccaagcngaccagaagcgaaaagaagagncgcaangcaatgctcaaacttggaatgaaacctgtcacaggtgtcatc

SEQ ID NO: 42093 - DNA, 271 bp, Glycine max
  unsure (1)..(271): unsure at all n locations; Clone ID: 701125140H1
gttaggttctgcacgctctgcttccagcgagtgttctttcttcgtttcaacaccttaatttgcanacgctgcttcttcnngcttgagaaatggcacaagaaacctttctattcacatctgaatctgtaaacgagggtcaccccgacaagctgtgcgaccagatctctgatgcagtgctcgatgcgtgccttgaacaggaccctgacagcaaggttgcctgtgagacatgcaccaagaccaacatggtcatggtctttggagagatcacaac

SEQ ID NO: 42094 - DNA, 211 bp, Glycine max
  unsure (1)..(211): unsure at all n locations; Clone ID: 701125141H1
gtatcccggtcctcccccccgcgcctcctctactccctctgctgcaccantgcatcgcggtcaccggcgtcgtccctncatcggcggcgccttccatctccgccacttttcagccgggaacgcggcgcncacgaagccggacaaggagccgtggtggaaggagtcaatggagcggctccgcaacatcggaatntcggcgcacatcgactcc

SEQ ID NO: 42095 - DNA, 154 bp, Glycine max
  unsure (1)..(154): unsure at all n locations; Clone ID: 701125142H1
ggattgtagcttgttggagattgctagatccaatggcaaaaatgcgttgcatttagcagctcgtcagggtcatgtggagattgtcaaagccttgctcagtaaagannctcagttggctcggaggaccgacaagaaagggcaaactgcattgcat

SEQ ID NO: 42096 - DNA, 265 bp, Glycine max
  unsure (1)..(265): unsure at all n locations; Clone ID: 701125148H1
agtggtcctgcttcaactgaaattaaatctgctgatgaagctactgcttttattggtgnaaataaagttgctattgttggagttttcccgaaattttctggagaggagtttgacaacttttctgccttagcagagaagttgcgttctgattatgactttggtcacactctgaatgccaaactccttccaagaggagagtcatcagtttctgggcccgtagttaggctgttcaagccattcgatgaactttttgttgacttccagg

SEQ ID NO: 42097 - DNA, 58 bp, Glycine max
  Clone ID: 701125149H1
tgtcatttcatctttatgaaattatacaggtaaataaagaaattgggttcccttgtag

SEQ ID NO: 42098 - DNA, 231 bp, Glycine max
  unsure (1)..(231): unsure at all n locations; Clone ID: 701125157H1
ttgctccactgttagggtttttggcgggngtcgtcgcggtcgtcatcgtcattgaatcagccatgcctcggtactactgtgactactgcgacacctatttgacccacgattctccatctgttagaaagcagcacaatgcaggttacaaacacaaggcaaatgtgaggacttactaccagcaatttgaagaacaacaaacacaaagtttaattgatcaaaggatcaaagaac

SEQ ID NO: 42099 - DNA, 262 bp, Glycine max
  unsure (1)..(262): unsure at all n locations; Clone ID: 701125161H1
accctgggantaaagtataacgaaattattgtggataactgctntatgcagcttgtttcaaagcctgaacagtttgatgtcatggttacccncaatctttatggaaatctagttgcaaatactgcagcaggcattgctggaggcactggagtcatgccaggaggtaacgttggggctgancacgctgtgtttgagcaaggtgcgtcagcagganaatgttggtagtgataaaataagggaacaaaagaaagccaatccagtg

SEQ ID NO: 42100 - DNA, 263 bp, Glycine max
  unsure (1)..(263): unsure at all n locations; Clone ID: 701125163H1
gcattntacttggtgctgtttcatggggttgtggagtccctgtttaggagntacactgaaaatggaatgaacgaagatctggcctataagaatactgttgantctataacaggaattatatctaaaaccatctcaactaagggcatgctagctgtatacaatgctttatctgaagatgagaaaagggaatttgagaaggctatagtgcttctttttatccttgcatggaaattctgtatgagtgctacgaggntgtagccagt

SEQ ID NO: 42101 - DNA, 267 bp, Glycine max
  unsure (1)..(267): unsure at all n locations; Clone ID: 701125164H1
gcaacgtcgagaggaggagctgaagggccgatcctcaaaaaaaaagggcaagatgctgagcaatctatacttaaccgggccagtagtccccaaactggtggaanccatgaagtcaatgaaggaggacaagaaagngaaggaaaaggacaaatctggcccggcagagaaagaagggcaagaaagctcaagtttaaagactgctggtgctgaaggagaaatnacagcaggatttttattaaagaaaagtgcaaaaactaatggttggag

SEQ ID NO: 42102 - DNA, 276 bp, Glycine max
  unsure (1)..(276): unsure at all n locations; Clone ID: 701125165H1
gggagcctacaggatgcttgtgtatgagtatgntagacaatggcaatctagaacaatggctgcatggggatgttggagctgtnagccctttgacatggaacatacggatgaacattatattgggaacagcaagaggattggcctatcttcatgagggtcttgaaccaaaagttgtccaccgagatgtgaaatcaagtaacatactcatgatcgccaatggaactccaaggtttctgattttgggcttgctaagcttttatgttctgagaatagtta

SEQ ID NO: 42103 - DNA, 74 bp, Glycine max
  unsure (1)..(74): unsure at all n locations; Clone ID: 701125167H1
cccgcccgcacattgtctatatncagctgatgaaacaaacactttcatatcagngcccacatnacaaccatgcc

SEQ ID NO: 42104 - DNA, 274 bp, Glycine max
  unsure (1)..(274): unsure at all n locations; Clone ID: 701125169H1
ctatgatccaaagatgctgcnaccttttctccgtagcagtcaacactacacccttgannnnggcttacgaaatttggcattaaaagagacctattgagggagcaagtcttcatcctaggaaggatgggaaactcgaaacaagccctagctgttattataaacaaattgggggatatagaggaggccgtagagtttgtcaccatgcagnnnnntgntgaactttgggaagaattaatcaagcaatgccttcacaaacctgaaatggtgggcatat

SEQ ID NO: 42105 - DNA, 270 bp, Glycine max
  unsure (1)..(270): unsure at all n locations; Clone ID: 701125171H1
gaaacggcatgatttatgtgtgaagggtgatgcgcgcaagagaaacaatggattgcaaagagcatatccccatgctccgtacggtggtactcaccgtcttcttggttgttgttaatcactctgccatactgtgaagccgcatacaattattcggaatgcaaagagcaaacatacaaatgcggaagtctgatcaacatatcgtatcctttctggggacacgaccagcgagactctgaatgtggtggcggtgacctatngngagctcaaatg

SEQ ID NO: 42106 - DNA, 264 bp, Glycine max
  Clone ID: 701125172H1
gttgctgtcaccactgcggggaagctgtgcgataaccctttgggatacgctctcgagttggtgaggaaagccaaagcggatgtgactgaggaatacatgcactcggtggctgatttaatggtcaccaagggccggcctcacttcactgttgtgagatcgtatctcgtgtcggatgtgactcgtgctgggtttggaaacattgagtttgggtgggggaaggctgtttatggaggacccgccaagggaggggttggagccatacct

SEQ ID NO: 42107 - DNA, 260 bp, Glycine max
  Clone ID: 701125173H1
tctctctctctcaaccataatagtcatgggtttgaaggaggattttgagcagtatgctgagaaagcaaaaactttgccaccgactcaatcaaacgaagacttgcttatcctttatggattgtacaaacaggccaccgttggacctgtcaacaccagccgtcctggaatgttcaacatgagggacagagctaaatgggatgcatggaaggctgttgaagggaatccaaggacgaagcatgggtgattacatcattaaggtg

SEQ ID NO: 42108 - DNA, 83 bp, Glycine max
  unsure (1)..(83): unsure at all n locations; Clone ID: 701125174H1
anaaaatacataaaattctttgattttctttgactcaagaaccatttcatttccccccccttgccttagngctccttggttat

SEQ ID NO: 42109 - DNA, 184 bp, Glycine max
  unsure (1)..(184): unsure at all n locations; Clone ID: 701125175H1
cggaacataaggcggggaagagttagtttcttctctcttcgatggaaggcngggaagaggttctcccttcggccactgccacctccgccgccaccggcaatcccaccgcttcgcctcctccgctcgctgatcttgtcggtgctcccgatctcgctgctgcctcggacgacgtcgttacccaacc

SEQ ID NO: 42110 - DNA, 181 bp, Glycine max
  unsure (1)..(181): unsure at all n locations; Clone ID: 701125176H1
gctctttgaagaaagaagggtctttgcntgattttngagatgtctcnnctcncagatctcatcaaccttaacnacancgataccaccgagaaggtgatcgcagagtacatatggatcggtggatcaggaatggacctgaggagcaaagcaaggactctcccaggaccagttagcgaccctt

SEQ ID NO: 42111 - DNA, 263 bp, Glycine max
  unsure (1)..(263): unsure at all n locations; Clone ID: 701125179H1
ctttcactttaccaactcctaacaatntcntctcnacnntccttcanccaccgcatcaatggngncggacggcgttctccacggcatgtncaaccctctcctcgacanctctgcngncgtcgacgacgctttcttncaaaaatacggtanccaagttgaacgatgcgattctcgctgaggataagcacaaacctatgtatgaagaattggctaacaatcctaatgtggagtacattgctggaggtgctactcagaatcatcag

SEQ ID NO: 42112 - DNA, 253 bp, Glycine max
  Clone ID: 701125180H1
cgacgacaacaacactcgtcctcacaccgactgccaccgcgtccaaagatgattgatgatcaagatctgggtttctttgccaattttcttggcgtcttcatctttgtactggtcatagcgtatcattttgtcatggctgacccaaagttcgaaggaaactaggaatgtagactgaggtgctttgcaaatggaaatgaatttgatgcaatcaagaactgtagtttgggaatgtgaacgttaagcttactaaaac

SEQ ID NO: 42113 - DNA, 273 bp, Glycine max
  unsure (1)..(273): unsure at all n locations; Clone ID: 701125181H1
gccaagttctcttgtattgtggaaggaagcaaatgctaaaggaagtctatttcaaagncttccttcagatttnttgacacagctgaagacagattgtctcgtcctgcacaatcatcgttatgccatatccccaancaagcttcaatataataccaagttatctgacttttttgagattctggcaacatctgaggatagagatggaaagacttcgtttccacagcacgtggtaggaaatatcccgtgactgtcaacctatggcaaccagagagg

SEQ ID NO: 42114 - DNA, 270 bp, Glycine max
  Clone ID: 701125182H1
caaaaatgaagcttgtctttgccaccctactgttatgttctcttcttctaagctcctctttcttggagccagtcatcgcctatgaagactcgtgtaagattttctcttactgctataaagaagtatatatataaaatcagtgaatatttttgtgtgtttgtggcagcttattgcagcaacaagtgttcggacagatgctcatcggcaggggttaaggataggtgtctgaggtacgtggaatatgctgtgctgagtgcaaatgtgttcctt

SEQ ID NO: 42115 - DNA, 119 bp, Glycine max
  unsure (1)..(119): unsure at all n locations; Clone ID: 701125183H1
tctcgaccnacttttgaagttcaaaacttanaccctagntctctctcncttnctttctccngcatcttcaaccatgtcagcggatgctgcnacctcagatcattcngctcaaggaaggg

SEQ ID NO: 42116 - DNA, 141 bp, Glycine max
  unsure (1)..(141): unsure at all n locations; Clone ID: 701125185H1
gnccagtctatataacgaattctttgctttgtttgtccgctacatactaacaacacaaagaattcgttatatagactggcctgcaatgttgaactatgcaattccttcatttctttnccctataaatagaggctttttgtg

SEQ ID NO: 42117 - DNA, 259 bp, Glycine max
  Clone ID: 701125189H1
ggacagttagagaatttgcagtgctgctggatgcatgccacacttattcaaatatgaaggggcaaatcagtgatcgtgacaaccaagaggatccaccaaaacaaaccttgcctgataggtttatcggaatgaaagctgctattttgaccaacaattcaagcttgaagtcttttagtgccaaacttggatttagtgttcttaaattggatgagttagtgggaggaggttctgctgaggttgtggcccttgagctgctcaa

SEQ ID NO: 42118 - DNA, 259 bp, Glycine max
  unsure (1)..(259): unsure at all n locations; Clone ID: 701125190H1
cgaagatggtgcagcgtctcacctaccgcaagaggcacagctatgccaccaaatccaaccaacacagggtcgtcaaaacccctggtgggaagctcgtttatcagaccaccaagaagagggccagcnggcccaagtgccccgtcactggcaagaggattcaggggattccacacttgaggcctgcagagtnccaagagatcaaggttacccagaaaccgtaggactgtcaaccgtgcatatggcggagttttgtctggaa

SEQ ID NO: 42119 - DNA, 110 bp, Glycine max
  unsure (1)..(110): unsure at all n locations; Clone ID: 701125192H1
gggctgcgtcatgcagtttgatacntattcattgaaactccnacgttttgcattgggcacaaaaaagcaaaantncngcnggggncaanaaaanccnaanccnctngggc

SEQ ID NO: 42120 - DNA, 218 bp, Glycine max
  unsure (1)..(218): unsure at all n locations; Clone ID: 701125193H1
attcccgccaagcccgagaaagaattcccgccaccgccaccataacctgtccctaactctttgagtcactcattcactgcactcattacacaacacacanccaatggctccttcccgccgcaacaccaacggtcgatcaccgctacgtcaatcaacagagtcaaatcacttccttcttcaccaaatccgcttccccttcgcnctctcccactctctac

SEQ ID NO: 42121 - DNA, 260 bp, Glycine max
  unsure (1)..(260): unsure at all n locations; Clone ID: 701125195H1
gtgcttatngatccagcgtcagcagattcaatttgacactggaagnaatttctcatttcaaagattangtgaaaacatggttgtccttgctgcatccattgtgagcaaatctggcaaagttctagtttctagacagtttgtggacatgtctcgtatcagaattgagggtcttctagcagcatttcccaagttaataggcactggaaagcaacacacatatgttgagacggagaatgtgcgctatgtttaccagccaatgg

SEQ ID NO: 42122 - DNA, 272 bp, Glycine max
  Clone ID: 701125201H1
gccggaggcagccgcgccggaggagggttgaagcacaaactggagagaaaatggacgttttggtgcgacaaccaatccaaacccaagcaaggcgctgcttggggaacctctcttcgcaaggtctacaccttcgacaccgttgaagagttctggtgtttgtatgatcaggtattcaagcccagcaagttgcaaatcaatgccgattttcacttgttcaagactgggattgaccctaaatgggaagatccagagtgcgccaatggaggaaagtg

SEQ ID NO: 42123 - DNA, 261 bp, Glycine max
  unsure (1)..(261): unsure at all n locations; Clone ID: 701125202H1
aatctctccaagcaaagtgaagattcatcattaccactgctgcgacacagaccaagcggctctgaatagagtgaaaggttcactcgactgcgctcacttagaaattatttggcatntggatccattgtgatccaactgccacaatgtatgtgttttgattatgtaattgtaataagttcaaatagcaaaacataggccataagagaaatattaagaacacattttgtgttattagttaanatttattgaaaattataaaat

SEQ ID NO: 42124 - DNA, 264 bp, Glycine max
  Clone ID: 701125204H1
gcactgctatcaatgttttcttctttgcttgaagtttaaaaccagcaatactttttctatggttatttatttcctagtgttagtggctagtgttgacaatttgataaggttcttgtaaaattgatagaggtgaagagatgatatgaggggagagccgggtgattatggcttaaacaatttcatgatgccactcacgtttatggaaagttcttttaaagtaatatcaatatatggtgccaacctgttaaaagaaaaatgtggttc

SEQ ID NO: 42125 - DNA, 258 bp, Glycine max
  unsure (1)..(258): unsure at all n locations; Clone ID: 701125205H1
aaagtgccttttcttaggatgaagctcttgtggaaatctcacgtgagggtaattngattggtttgtgctctccttttggtgacactgctgagctcagaggtagctgagagcagaaaagccaaaactgctagaacttcctttgagtacaaagctataaattgcngggcntcatagtgctccattgattgaatttgggtggtggtggaagangggaatactcaaaatacaanggntttcnagtccggnancnnntcncng

SEQ ID NO: 42126 - DNA, 245 bp, Glycine max
  unsure (1)..(245): unsure at all n locations; Clone ID: 701125206H1
gggcaaatggatggagctctagggannaaatctaggttatcngtcagaagggtgcatcagntcccgagacaggatgagaactccatggctatcactcctgttgttccaagtgacgaagagattgttgatgttaagcctcttcaagtttctagagatattgtgcatattcctggtccaaagaggtctaatttaagtttggataagcttataatggaagcaatcactagcttgaaggagaatggtgg

SEQ ID NO: 42127 - DNA, 262 bp, Glycine max
  unsure (1)..(262): unsure at all n locations; Clone ID: 701125207H1
ggaggataatcctttggtagattttgttgagcttcctgacaactgccaaggnttgtactattgcaacatcttaagtggagtcatcagaggagccttagatatggtgtcaatgaaaactgaggtaacttggcttcgtgatgtgcttcgcggtgatgatgtgtttgagttgcaggtaaaacttctcaagcatgtcccagaagagtatccatacaaggatgacgagtgaatttgttttgtagtattgtatactccaggttttcat

SEQ ID NO: 42128 - DNA, 264 bp, Glycine max
  Clone ID: 701125208H1
gttctgtgtttgtgtttgttttttctctcacctgaaaatgtcttgctgcggtggtaactgtggttgcggaagctcctgcaagtgcggcaacggctgcggaggctgcaagatgtacccagacttgagctacactgagtcaaccaccaccgagaccttggtcatgggagtggcacctgttaaggctcaatttgagggtgctgaaatgggtgtgcccgctgagaacgatggctgcaaatgtggaccaaactgctcctgcaacccctg

SEQ ID NO: 42129 - DNA, 265 bp, Glycine max
  unsure (1)..(265): unsure at all n locations; Clone ID: 701125210H1
catatatatcagcaagcatggcagtcacactctacgaccttncgctcttcctctgggttgaanaaacttgatgagtaccttctcccacgcagttacatcantcnggtaccaagtctacaaaggatgatcttactgtttatgcagctttgccaactgctccatcagatgaatatggaaatgtttccaggtggtacaagcacattgatgctttgttgagaatctctggtgttactggcgagggatctggtgttattgttgagggatc

SEQ ID NO: 42130 - DNA, 262 bp, Glycine max
  Clone ID: 701125211H1
acagcagctctatccggaaccatggtgagcacctccttcatgaggaagcaacctatgacgaccaagagcctaaagacattccccaacgctctttttggtctgaaaggtggacgaggtggtcgtgtaacttgcatggcctcgtacaaggtgaagctcataaccccagaaggagaagtggagtttgaatgcccagatgatgttttcattgttgacaaggctgaggaagaaggcattgaacttccctactcgtgcagggctggtt

SEQ ID NO: 42131 - DNA, 263 bp, Glycine max
  unsure (1)..(263): unsure at all n locations; Clone ID: 701125212H1
gccgcaataaaaccttctaggtcgaagcaataaaacgccggagacagaggtagtttccacgacggtgcaggtcnncgacacgaaggggcttcttgcggcgtgagatcgtgcgattataccgatcctaacagagtgagatttcagggttacataatgaccaagaagaagaaacaaaatggggttgttgttggagagggtgatggtgttggtntngttgtagatttggagtctgtcatacacaaccacgctctttttttcgacaa

SEQ ID NO: 42132 - DNA, 265 bp, Glycine max
  unsure (1)..(265): unsure at all n locations; Clone ID: 701125213H1
ggncggctacggcaatttctcagcttggctgcttctccgccgtccaccgcagctcacacctccggcggcgctcgcttctattcccttgccctcgctccaagttatcagttgttatgagtctggagaggcatgacacagatactgctgggtctgataccaaaaatacactaagttatgcagctgatgagtcaaagctacatgttgaagaaaaaaagcactcatattctacaaaagatggccatgatactgaaaaattaggttttgg

SEQ ID NO: 42133 - DNA, 256 bp, Glycine max
  Clone ID: 701125214H1
ctccttctcaaactagtagtattattcttccattcataatgggtgttttcacattcgaggatgaaatcaactcccctgtggctcctgttactctttataaggccctagttacagatgccgacaacgtcatcccaaaggctcttgattccttcaagagtgttgaaaacgttgagggaaatggtggcccaggaaccatcaagaagatcactttcgttgaggatggagaaaccaagtttgtgctgcacaaaatagaaag

SEQ ID NO: 42134 - DNA, 268 bp, Glycine max
  unsure (1)..(268): unsure at all n locations; Clone ID: 701125215H1
ctgattcgtcacgtcagacaaaggaaggggttagggtgtgacctgagatcaaaatgttgcggaggcttctctcttctcacctcaaaaccctannnnnnnnnnnnnnnnnnnnnnnnnnnnnnnnnnnncgatctgcttccgcctccgccagattcgccgctctctctcgctcctgcctctacttctcaacccaatccgaggatgctactgcgatcaaaaagaaggttgaggacataatgccaatcgctactggccacgagcgcgagga

SEQ ID NO: 42135 - DNA, 271 bp, Glycine max
  Clone ID: 701125216H1
cgaaattggaagcgaggaaggaaaatcgaaatcgaaaatggcagtaatggagaggttgaagatgttcgtcgttcaagagccagttgtccgccgcttcctgtctcatcgctggcttcggtctttttcttcctgcttttgtgaggcccatgttggattcatatcaggcaaccaagcaacctcctcaacctgctttaagcgatgtggttgcaggtatgactggaaaaaagtaaaggtgatttacttgacagatacaagtgcaaatttgctaatt

SEQ ID NO: 42136 - DNA, 269 bp, Glycine max
  Clone ID: 701125217H1
gcagcctcaggaggagaaggatgtctcacaggaagttcgagcacccaaggcacggttcactgggatttcttcccaggaagcgtgctgctcgtcacaggggaaaagtgaaggcattccccaaggatgacccatccaaggcacccaagctcactgcattcttgggttacaaggccggtatgactcacattgttagagaggtcgagaagccaggatcaaagcttcacaagaaggaaacttgtgagcctgttacaattattgagacccctcca

SEQ ID NO: 42137 - DNA, 265 bp, Glycine max
  unsure (1)..(265): unsure at all n locations; Clone ID: 701125218H1
gttcacagcgtancctctgctctcgaagatggctcctcccagaggtggtggtgggttcaggggtggtaggggtgacagaggtagaggaaggggtggcggtggaggaagaggaggagacaggggtacgccgttcaaagctagaggcggtggccgtggtggccgcngaggaggcaggggtggtggccgtggcggcggccagaggtggaatgaagggaggtagcaagttgtggttcagccccataggcatgatggcattttcattgcc

SEQ ID NO: 42138 - DNA, 263 bp, Glycine max
  unsure (1)..(263): unsure at all n locations; Clone ID: 701125219H1
gaaggcacgatagtcatagacacagggaccgtgattatgacagagactatgatagggattacgattcgagagcggggacgtggccgagacagggacagagatagggaaagggacanggacagggaccgatatcgtctaagggaagaaaaagattatggtcgtgatagagagggtagggagcgggagagaagagagaagtctcgtgaccgtggaaggcgaaggagtcactcaaggagtcgaagtagaagtagggatcgcagggc

SEQ ID NO: 42139 - DNA, 260 bp, Glycine max
  Clone ID: 701125220H1
ggctctgcctgttgccttgatgattcatgataactcgtcggatcgcacggcctttgtgccggcgacgcatcattcaaatttctgccctatcaactttcgatggtaggatagtggcctaccatggtggtgacgggtgacggagaattagggttcgattccggagagggagcctgagaaacggctaccacatccaaggaaggcagcaggcgcgcaaattacccaatcctgacacggggaggtagtgacaataaataacatac

SEQ ID NO: 42140 - DNA, 253 bp, Glycine max
  Clone ID: 701125221H1
gtaactatgactctcttaaggtagccaaatgcctcgtcatctaattagtgacgcgcatgaatggattaacgagattcccactgtccctgtctactatccagcgaaaccacagccaagggaacgggcttggcggaatcagcggggaaagaagaccctgttgagcttgactctagtccgactttgtgaaatgacttgagaggtgtaggataagtgggagctggaaacagcgaaagtgaaataccactacttttaa

SEQ ID NO: 42141 - DNA, 261 bp, Glycine max
  Clone ID: 701125222H1
cgcacggcctttgtgccggcgacgcatcattcaaatttctgccctatcaactttcgatggtaggatagtggcctaccatggtggtgacgggtgacggagaattagggttcgattccggagagggagcctgagaaacggctaccacatccaaggaaggcagcaggcgcgcaaattacccaatcctgacacggggaggtagtgacaataaataacaataccgggctcattgagtctggtaattggaatgagtacaatctaaat

SEQ ID NO: 42142 - DNA, 262 bp, Glycine max
  unsure (1)..(262): unsure at all n locations; Clone ID: 701125224H1
agacggtgttgcaccctccaaatccaatccatcttctattctctattctcttattaataacctctttcttttggtcttctctgtgactttctcttcattcatccacttcttagaccgatntctcctctcattttcctccaaaaagttctagttttttagcctgttgatcatctnggtggtggaaattttcctgtttgtcccctccttatcggggagggttgttagaattgcttgcttgagtgatcggaatgtttttctcata

SEQ ID NO: 42143 - DNA, 260 bp, Glycine max
  Clone ID: 701125225H1
ctctcagctggctcgtccaccaccaacaatcagccgcatcacaccgctttgtgtttcagtttttgatatcttataattaacaggaattccattagcgagacggcgccgggtgatcccagtttcctcatcatgaagctttgtagcatctgtttcaggatttacaggaataaaggccggcttgcgcagtttttcaactcttctagctttgttgattgtattagctcttttggcacctcaagctcaggctctggctgaatagg

SEQ ID NO: 42144 - DNA, 260 bp, Glycine max
  unsure (1)..(260): unsure at all n locations; Clone ID: 701125227H1
gaaccttgttgtgatctgacatggcagangaacaacaacgacggatcctggtggccgtggatgaaggcgaggagagcatgtatgctctctcatggtgccttaagaaccttgcttttcaaaattccaaagacacccttcttattctctacgtcaaaccccctcgagtcacttattcagccttcgatggcacaggatatttgttttcctctgacataacggctaccatggagaggtatagccaacaagtggccgattgcgtc

SEQ ID NO: 42145 - DNA, 263 bp, Glycine max
  unsure (1)..(263): unsure at all n locations; Clone ID: 701125229H1
gggagggtattcctccagaccagcaaaggttgatttttgctggaaagcagcttgaagatggacgtacactggcagactacaacatccaaaaggagtccacccttcaccttgtccttcgtctcaggggaggtatgcagatctttgtgnagactttgacaggcaagactattaccttggaagttgaaagctcagacacaatcgataatgtcaaagcaaaaatccaggacaaggagggtatcccaccagaccagcagaggttgata

SEQ ID NO: 42146 - DNA, 258 bp, Glycine max
  unsure (1)..(258): unsure at all n locations; Clone ID: 701125231H1
gtgttgagttgagtgtctccctctccctctccgctactgcaactctctctctgcttttccaattttactctgcaccgcaataatcataaacgacgccgtttgaatttccacgaaacccagatttngtgggagcttatggcttccattcacgccaatctcgtccccaacttgtcctttaatcacttccagacaccaccatcatangtaccttgttggtgctggtattgtgcaagtggagttagtttgcgcaattgtaga

SEQ ID NO: 42147 - DNA, 270 bp, Glycine max
  unsure (1)..(270): unsure at all n locations; Clone ID: 701125232H1
cttgtcactgctcattttcgcgttctgcgccgtcgccgtcgccgtcnccgtcgcgggctcctccttcgatgatgccaaccctatccgtttagcgtcggacttggagtcgcaggtgctggacgtgatcggacagagccgccacgctctctccttcgcccgcttcgctcgccgccacggcaagcgctaccgttccgtcgacgagatccgcaaccgcttccggatcttctctgataatcttaaactcatcagatccaccaacaggaggtctnt

SEQ ID NO: 42148 - DNA, 267 bp, Glycine max
  Clone ID: 701125233H1
cccctttctggtttcaacgctgcaactatccatggcaaaccactggctcagacccgaggtgtatccactgttcgctgcggttggtgccgctgttgggatctgtggattccaattggttcgtaatatctgcatcaaccctgaagtcagggtgaacaaggagggaagaaaggcaggagtgttggagaactttgctgagggagagaagtatgctgagcatttcctgaggaagtatgtgcgcaacagaactcctgagattatgccctccat

SEQ ID NO: 42149 - DNA, 265 bp, Glycine max
  unsure (1)..(265): unsure at all n locations; Clone ID: 701125234H1
gtggaagnaagccaagaaacctaaatcaattcaaaagcgttgaattttccatttttcccccataaaataacaaaaaaacaccctcaattctctatttactcgctttgcttcaacgccaccaggcctccttcttttntcattaccctagtttttctccattttcttcataattgaaccgtttctcctcgatcccatatgtgttgatagtgaaaggcatccgtcctcatcatcatctatcatggganggtttagagctggagcaagc

SEQ ID NO: 42150 - DNA, 176 bp, Glycine max
  unsure (1)..(176): unsure at all n locations; Clone ID: 701125235H1
gctagctactccttaattactaattagtttcattctttggtgcaagctagcttcattagttgantcatannattataacaatggtgagtgttgaagcantccgtaaggcanaacgtgcagaaggccctgccaccgtcatggncatcggcacngccactcctaccanactgcntngt

SEQ ID NO: 42151 - DNA, 261 bp, Glycine max
  Clone ID: 701125240H1
cagcctcaggaggagaataaggatgtctcacaggaagttcgagcacccaaggcacgggtcactgggatttctccccaggaagcgtgctgctcgtcacaggggaaaagtgaaggcattccccaaggatgacccatccaaggcacccaagctcactgcattcttgggttacaatgctggtatgactcacattgttagagaggtcgagaagccaggatcaaagcttcacaagaaggaaacatgtgagcctgttacaattattga

SEQ ID NO: 42152 - DNA, 239 bp, Glycine max
  unsure (1)..(239): unsure at all n locations; Clone ID: 701125241H1
gggaatctcttactcaaattagctacagtttggttaatgggnntctcttatttgtttgtganacttgcatttgaatttgtatgccattagatgttatttcaattttaggttataaataatccgatcctctttcaccagagggtgttcaaatttcgagctaaagttccgatcttttttttttttttngcnaaaatcangngtctaatcatcaagtgtnggaattgnaatgtacanggngt

SEQ ID NO: 42153 - DNA, 258 bp, Glycine max
  Clone ID: 701125242H1
ggaaccatcaccaaccctaatttcttagctaaaccctattcgtttagcatttcctctcttttctcccactcgtaaatcctctccccaaacttttcaccatccaaataaatcatggttttctgggtttttggctacggttcactggtgtggaaccctggattcgattacaatgagaagattataggtttcattaaggactacagacgcgtgtttgatttagcgtgcattgatcaccggggaacacctgaaaacccagca

SEQ ID NO: 42154 - DNA, 264 bp, Glycine max
  unsure (1)..(264): unsure at all n locations; Clone ID: 701125243H1
gcggtganntgccgcnaccgtctggngccgaanatggncgcgttctcacttggngcaatgcgattcanancntcncgacggtacgngnncgtacgnagaaattctctncgcgcnatctgcgcttctgcgcagatncttctgcaccgtaangtcgtcgctcatgatgacgctanggtgcgccgctgaattgaggactgggagantncnccaaggctgtttcctctcggaaactttgacggngcgatgatcaccatgggaagctcc

SEQ ID NO: 42155 - DNA, 259 bp, Glycine max
  Clone ID: 701125245H1
ggaccctgtcttgacggacccgtctgtgccgttaacgttacttctgacggatcgggttctcaccacggctggtaccttaactacgtccaggtcacctccactgggccccacctttcctgcgctcaggatcagtacgaggtggagcagtggctcgctctcgacacttcgccttaccagctttgggccgttaggaaccactgccgctacagtttggaccgggcccagcccgtttcggagcgccccggatccggatccggat

SEQ ID NO: 42156 - DNA, 261 bp, Glycine max
  unsure (1)..(261): unsure at all n locations; Clone ID: 701125246H1
cgaaggagaagaaacccaataagtgattctcatttttatggctcttgccctgaagtcaagttgcttcttgcaattgangaaacctgaggctggtttcaatgtttgtttttcatctaagaaagctataatctccgtgaaacgacacactcccgtggctgctatcaggaccatggaagcagtgggactctctgcaacattcaccaggttgaaaaaagaaggaaaagtagctttcatcccgtatgtcactgctggtgatcctga

SEQ ID NO: 42157 - DNA, 267 bp, Glycine max
  unsure (1)..(267): unsure at all n locations; Clone ID: 701125248H1
ataccaacntggagttcttgaaggagatcggnttgggctcctccaacattggttcttcacattaatggccaatggaaagccactggtnctnctgtcacttctgttaatccttctaacaatcagagcatanctcaagtgactgaagcgactttggcaagattatgaggagggattgcaagcttgcagtgaagcagccaagacatggatgactattccggcaccgaagagaggtgagatngtgagacagatnggtgaagcattgagggc

SEQ ID NO: 42158 - DNA, 208 bp, Glycine max
  unsure (1)..(208): unsure at all n locations; Clone ID: 701125254H1
gccgccctttttttccttnttccctatcttgtgatctatttatgagtgagannaacaaaagtgagaaattgtgcgtgtatctggttgctaattcgagtgctattagtctgtggtttggttggtttgtaaccccgctacttgggttatgtttgattgtatattatcctagagaaataaaaattttaaattatcagtacgtattggtatt

SEQ ID NO: 42159 - DNA, 259 bp, Glycine max
  unsure (1)..(259): unsure at all n locations; Clone ID: 701125255H1
gtttatcaaagcttttccatggcgtctggttcagaagatctggctccagatgacctttccaattcaatgggcttgtttctacagaanacaaacattattcgagattatctggaagacatcaatgagatccccaagtcacgcatgttttggccacgacagatttggagtaaatatgttaacaaacttgaggatttgaaatatgaggagaactctgttaaggcagtgcaatgcttaaatgacatggtcactaatgctctga

SEQ ID NO: 42160 - DNA, 258 bp, Glycine max
  unsure (1)..(258): unsure at all n locations; Clone ID: 701125256H1
gtgcttcaccgccttcaccacctctaccgccancacgtccggcgccggangtgcnggaatagcttctccggctaccagatccggcatctccgcgcgtccactgaagagatcttttcccgaggagccctcgccgccggcggatcctccgtcttcagaccagacgaccccgtcggaggcgaaggcgtggtgaaccgctgctccggctgcaggaggaaggtcggactcaccggatttcggtgccgatgcggcgagctcttc

SEQ ID NO: 42161 - DNA, 201 bp, Glycine max
  Clone ID: 701125257H1
gagaaattttttagaacaatggaggcatcaaagatgaagtttttcttggttttggtgattgccatgttggcgatggtagcaactggggtttcagctgctgaggcacctgccccaggtccttcatccgatgccaccaccttctttgtacccactgctcttgcttctctctttgttcttgcattggccttctcttctaattaa

SEQ ID NO: 42162 - DNA, 260 bp, Glycine max
  unsure (1)..(260): unsure at all n locations; Clone ID: 701125259H1
ctgaaagtgaaacgcaaaatcccgtgacggagtgcttccactgcactgtcatacncatggcttcctccaacacttcccaaatccnnanataagaagagtaccaaaaaatccgaaatctccaaagccgaaaagaagaaaaccaaaaacgctgaaatccccaaaaccgatggcaaaacgaagaagaacaaaganatctcacaagaggagaacaagaagaagattaagaaggccaagctcagcaacggcacttcaaaacagcg

SEQ ID NO: 42163 - DNA, 273 bp, Glycine max
  unsure (1)..(273): unsure at all n locations; Clone ID: 701125265H1
ggntcntgnaaaaagtagcagctgctgcagctcccccgcagcttatctcagcagcagatactcaaccctgtttgantagccgagaataacaccaatgggagaggtcgnaaagaaaccagaggaacaacccaaggcagaggngaanaaaccagaggaagagaagaagcaagaagaagcagcagcagnggnaaaaccaagcgaagagaaaaaaccggaacaagagtcgnaagaggaagttgctgctccgccaccgccaccgccaccggccgagat

SEQ ID NO: 42164 - DNA, 259 bp, Glycine max
  unsure (1)..(259): unsure at all n locations; Clone ID: 701125266H1
ctttgaccngcaagaccatcacccttgaggtggaatcctccgacaccattgacaacncaaaagctaagattcaagacaaggaagggatcccacctgaccagcagagacttatctttgcgggtaaacaacttgaggatggtcgcacccttgccgattacaacatccaaaaggaatcaaccctccatctcgtgcttcgcctcaggggtggcatgcaaatctttgtcaagactttgaccgggaagaccatcacccttgaggt

SEQ ID NO: 42165 - DNA, 258 bp, Glycine max
  unsure (1)..(258): unsure at all n locations; Clone ID: 701125269H1
cttttgccccctcgacgacgcgttnnanagcgtttctccccaaattcaaaaacctaaccaaatccggtaaggtcgcgcttctcgaattccacggtgttccggtttacncagtccaaagccactctcaaatccaacaangganttcagganactctcgnnactgatggcgctaacaagttcgacttnactgttcagaacgacggtgaagatgttactctgaaaacgaagctcaccactgcgaagatcaccgacacgttg

SEQ ID NO: 42166 - DNA, 88 bp, Glycine max
  unsure (1)..(88): unsure at all n locations; Clone ID: 701125271H1
gtacgcttncgtgagattaagcttcttaggcatttggatcatnnaaaatgtaattggtttgagagatgtaattacctacccacacant

SEQ ID NO: 42167 - DNA, 253 bp, Glycine max
  Clone ID: 701125274H1
agaaccaaagaaaactcactctcacacactttggttcacaaaaacctttcacttctattttcaatctttctagttccttctcccatattatagtacccttttatcccaagttacttaaatttaaaacctttattactgctcatacttgtttttcgctttgttaagttttaagaaaaatggaggcacattctccagttatagccaagaagctatggaatgtgttgaggatcaccttcttcatgatcaggaaggg

SEQ ID NO: 42168 - DNA, 254 bp, Glycine max
  unsure (1)..(254): unsure at all n locations; Clone ID: 701125275H1
gcaaagttcaagctctgcaaggttaggtcagtgcagtttggccagaaaggtatcccatacctgaacacctatgatggtcgcaccatccgttacccagaccctctcatcagggccaacgacaccattaanctggatctggaggaaaacaagattgttgattttatcaaatttgatgttgggaatgtagttatggtaacaggtgggagaaacagggggcgtgttggagtgatcaagaacagggagaagcataaggg

SEQ ID NO: 42169 - DNA, 255 bp, Glycine max
  unsure (1)..(255): unsure at all n locations; Clone ID: 701125276H1
gtactctnncnagcaactcctttccttggncaaggcaaggntgccaatgccaatgctcttagggatgttgtctccatgggaactgggaagtacaccatgggcaatgatttgtggtatggaccagacagagtgaaatacttgggacccttctcagctcagaccccttcatanttgaaagganaattccctggggattatggatgggacactggctggcttatctgctgacccagaagcatttgccaagaacagggc

SEQ ID NO: 42170 - DNA, 109 bp, Glycine max
  unsure (1)..(109): unsure at all n locations; Clone ID: 701125277H1
gtctcttcctacttgaagaangntggttacanaccagacaagattccatttntgcacatctctggtttcgagggtgacaacatgattgagaggtccacnnaacntnnna

SEQ ID NO: 42171 - DNA, 259 bp, Glycine max
  unsure (1)..(259): unsure at all n locations; Clone ID: 701125278H1
aatcactccttcctctcatcctcnannaagncnagtgctnaanttgtgttgtnacttggttcagnttccatggannnggggcnncctatatcnnctcatcctaaacctnatncantcacaactggtggaaatctctggcggagtaaacacaccaccaagaanattnantttgcaagtncttgganatcnaaagcttcacgacacaaaagggaaacncaaataggcacanaatgttttgaggnnccaacaaccaagtntg

SEQ ID NO: 42172 - DNA, 261 bp, Glycine max
  Clone ID: 701125280H1
gttgctgtcaccactgcggggaagctgtgcgataaccctttgggatacgctctcgagttggtgaggaaagccaaagcggatgtgactgaggaatacatgcactcggtggctgatttaatggtcaccaagggccggcctcacttcactgttgtgagatcgtatctcgtgtcggatgtgactcgtgctgggtttggaaacattgagtttgggtgggggaaggctgtttatggaggacccgccaagggaggggttggagccata

SEQ ID NO: 42173 - DNA, 256 bp, Glycine max
  unsure (1)..(256): unsure at all n locations; Clone ID: 701125282H1
cctcactctctctttctctctgttttctggtaattcatcaattgattcaaaatgcagaggctcaaactgcaactagtgctattcctctcaatctcaacttntcacactgttttctccttcactgatgggttgttgccaaatgggaacttcgagcagggcccaaagccatcacaattgaaggggtccgtagtgacaggccacgatgccataccgaattggacaatttcggggttcgttgaatacataaaatcaggac

SEQ ID NO: 42174 - DNA, 253 bp, Glycine max
  Clone ID: 701125284H1
ggagtccctgcctcaggcaactttcaccccattcggatgaattctggaaatgatatgatgatggaccacagcgctcctgatatggttcctgttataccaccaaatggtacaatgtcatctgtctcagaaatgcctgtgagtccgacatcagtagcatccagtggtcattttcccttcactgcatcagaaataccaggaatgggcgcagatacatcagctcttgatacagcatttacatctgatgtggcaagtt

SEQ ID NO: 42175 - DNA, 253 bp, Glycine max
  unsure (1)..(253): unsure at all n locations; Clone ID: 701125285H1
tgcggctnncggtnntngngcanttgcttctagatttaaggaagatgggnaaggnaaaggttcacntcagtattgtggtcattggccatgtcgactctgggaaatccactaccactggtcacangattnacaagcttngaggcattgacaagcgtgttattgagaggtttgagaaggaagctgctgagangaacaagaggtctttcaagtatgcctgggtgctggacaaacataaggcgagcgtgaaagaggc

SEQ ID NO: 42176 - DNA, 231 bp, Glycine max
  unsure (1)..(231): unsure at all n locations; Clone ID: 701125287H1
atctacattcaaacagcacactctctgtttcattcacaattcaaatctcaatcaccatntcngaccaagaaggtggcaaagggtctcccaaatcttcgtctttgagtccctatgaagaagcaatggaggccttgtcgtctttgatcactagacgcactcgtgctgatgatagcaacgtgggggatcagttcagcctgttatatgattacctgaagatgctagagttggagg

SEQ ID NO: 42177 - DNA, 252 bp, Glycine max
  unsure (1)..(252): unsure at all n locations; Clone ID: 701125289H1
ggcgggtacggtttcgacttgtttcttctncgtgtntcntctttcnctccttcntccttttcagatctccgctgaggaatcctcggagaaggagttcgtactcacattggatcantctaacttncagnacactgtcagcatgcacgatttcatncgtcgtcgagtncnaccccccatggtgtgntcantgtaagaagctgctccggagtatgagaaagntgctatctatcttgagtagtcatgatcctccta

SEQ ID NO: 42178 - DNA, 253 bp, Glycine max
  unsure (1)..(253): unsure at all n locations; Clone ID: 701125290H1
caatttcgtaggagatgctcaggagcagcacgctaacacagagtgttacagtcacctgtgttcgtcacagtcacagacaatggttccaatcaattcccgtaaattatagattntttgacgctgctcggaactctctatcatcacccaactccgcgatcttcaaatggaaaagaaaggccaattataaccgtcatagttctggaatggggaccttcaccactcgcgcgttggcgcagcggcttcagaacgccga

SEQ ID NO: 42179 - DNA, 253 bp, Glycine max
  unsure (1)..(253): unsure at all n locations; Clone ID: 701125291H1
caaaaggcaatgtcattaccatcttcaccacacgattatnganccgcaagcttctgagagaagtggatcatcaagatacagagtgaatgntnaaatggagtcaacatggaataaagtactggaatctccaatgttcaataataaacctctgttaccatatgaaaaatggaatattgacttctccgaattgactgttggaactcgcgtagggattggtttctttggagaagttttccgtggcatntggaatggc

SEQ ID NO: 42180 - DNA, 256 bp, Glycine max
  unsure (1)..(256): unsure at all n locations; Clone ID: 701125294H1
aatctatgtgacacaatcaaggtgggatgaaagcctagattctcttaaagatttgttccctaaaacatatacaanggaatccatcattcccgcagataaaaagaaaaagttcctagactctgaagattctgagttggagaaagtgattgacttttatattagttctgagagtgatgttttcgtaccagcaatatcaggtctattttatgcaaatgtagctggtaagagaattggctctggtaaatcccagatactg

SEQ ID NO: 42181 - DNA, 259 bp, Glycine max
  unsure (1)..(259): unsure at all n locations; Clone ID: 701125295H1
gcaaaagantgggtttttgtaagttgggtgtggcggtgccatcatcgctgacttcataccccgccgtggaggccgccgcctcacggcctccgagctctggccaaactccttcgccaaagacgatgactttgacttggattactcccacatcgctacccaacaaccctccnctctcaaaaggtccnaacctcccaaanttagcgagcaggttgagaataagccggtgaagaggcagaggaagaatctctacagagggatt

SEQ ID NO: 42182 - DNA, 258 bp, Glycine max
  unsure (1)..(258): unsure at all n locations; Clone ID: 701125296H1
agaaactnnaacaacttncggntnagctgcgttctgatnttattttccatgtttctagaactgngggtcatttgggatctagccttggtgttgtagaactcactattgcccttcactatgttttcaatgctcctaaggacaaaattttgtgggatgttggtcatcagtcttatcctcataagatactcactggtagaagggataagatgcataccatgaggcagacagatggattgngccggtttacaaaacgatctg

SEQ ID NO: 42183 - DNA, 270 bp, Glycine max
  unsure (1)..(270): unsure at all n locations; Clone ID: 701125301H1
ctcttctggttgaaggtatcattgatcgagcagaggctaatgatgcagctcagagaaagcagaagatgatgattctggagcagcaataccgtgatgatttgaaaaaagaacttcaaggtatnacatgtacctcagcaggttctatagaaacatctactgaagtggtacagactggagaatcaactaccagtgttcatgaaaatgttgatcatgatgacatgggtaaacttatgttgtcacgtaaaaggagggggctagtgaaagccattg

SEQ ID NO: 42184 - DNA, 271 bp, Glycine max
  unsure (1)..(271): unsure at all n locations; Clone ID: 701125302H1
cggcgagtgcaagttgtgcggtatcatntagaaanagcttcggtgtgagnaaaccctcggatcttgggttcttgagcttctcgtctgaacgggcctcagaatctgcttccccaaattgccanccananccctcantgcttctcccttccccananccctccctancgtngccaagagagtgtgtcccttcantggaaagaaatcaaacagggccaanaaagtatcattttcaaaccanaaganaaagaaantgcagtttgtgaaccttcag

SEQ ID NO: 42185 - DNA, 266 bp, Glycine max
  Clone ID: 701125303H1
ttcgccagttaatagaaactcaactttgagtagataatactgctggatgtctcgtctctaattattgtatttggaaaatagttttgagttgaggatctaatcattaccagatttaatatacttggcaaatggggtctgaaggtcctacgacaccgacaacaacaattcatgtgacaggatttaagaaattccatggagtttcagagaatccaacagaaacaattgccaataatttgacggagtacatgaataagaagggtttgcca

SEQ ID NO: 42186 - DNA, 267 bp, Glycine max
  unsure (1)..(267): unsure at all n locations; Clone ID: 701125304H1
cgcactgggggagcttctcaacatcgaacctctcgaactcaagttcccctttgagctgaagaagcagatctcangttctcttcaantgtccaanaagaccganagctatgtggccttcaaggtgaaaanaancaatccgaagaagtattgtgttcgtccgaacactggtattgtcacgccacgatctacgtgtgatgtnatcgtnaccangcaagcgcaaaaagaggctcctgctgatatgcaatgcaaggataagtttcttcttca

SEQ ID NO: 42187 - DNA, 263 bp, Glycine max
  unsure (1)..(263): unsure at all n locations; Clone ID: 701125305H1
ctcaccattctcttcttcttctccctttcttagattctcccttttttctcttnancctccgccanggctgagganaaggagatgtcttcctctgtcaccaatggcgatgattctctcactggccanatcanatctanaactantggaggcaaaaatggggaacccaaacagactattagttacatggctgaacgggttgtaggaactggatcatttggaattgttttccaggcaaaatgtttggaaactggggaagcagtggc

SEQ ID NO: 42188 - DNA, 254 bp, Glycine max
  unsure (1)..(254): unsure at all n locations; Clone ID: 701125306H1
attttatcttgctctcagatggaaattcacattgcttganttggaaaaacagaatacagatagcaatcgatgctgcagaggggttggattatctacaccatggatgcaagccacctattatacacagggatgtaaagtcagccaacattcttttaagtgaagacttagaagccaagatagcagattttggcctctccagggagtttaggacagataaccaagatcaacaatctcaagtgattcacagtgatgct

SEQ ID NO: 42189 - DNA, 263 bp, Glycine max
  unsure (1)..(263): unsure at all n locations; Clone ID: 701125307H1
tgccttctatccctcccttccctcttctacgccaaaaacaataccctttctctctgcaattcccancaagcccctcaacctccancttccatgctccaactcttcgctctttcccctcancancaaaacaangcgccantcttctctcctcacattcgtggctcagacatcggattgggccannnnnnnnnnnnnnnnnnnnacctcgtgggaganccagggcgacacngcgngggaanttnaaaagggggcccnaanaaagg

SEQ ID NO: 42190 - DNA, 263 bp, Glycine max
  unsure (1)..(263): unsure at all n locations; Clone ID: 701125308H1
atttnnaatgcagctggagtaactgggcagacccaatgtcgattggtgtgaatctcanaagacggaaaccantcgcancaacgttgctgggacttnaacattggctgatgtcagcagagagcatggactcttgatgataaattangctactgggtgcanatttgantatgatgcagctcatccagaggtttctggcattggctttaaggaggaagacagacccaactncttnggttctttctantccaaaactaaggcnangg

SEQ ID NO: 42191 - DNA, 186 bp, Glycine max
  unsure (1)..(186): unsure at all n locations; Clone ID: 701125309H1
cgaaagctctcaaaagnanggcggcggagtcancantgagggtggcgactcccantanntgcaanctcaanggttctcagagaagannaancantctctctccgcttcgcttcangggtttnagccctcgaccctctcantctctcanttcctcttccctttcananttcttcgggagnanaagaa

SEQ ID NO: 42192 - DNA, 256 bp, Glycine max
  unsure (1)..(256): unsure at all n locations; Clone ID: 701125310H1
cgtccctgatggctgattgttcagcanattgctatttaaacaacgcctttnttcttcgtctcttcatgttctcggacattgcttgaagctcaagtcgaacttggagaccttgatcganctccaaggccntgtttggattttcggggagatgattaactgtttgggccttnancctcttanttctgccccttcaancantgcctgcannantcanattgtgagaagtaagcagtatcttgcganacaaaagccagtt

SEQ ID NO: 42193 - DNA, 118 bp, Glycine max
  unsure (1)..(118): unsure at all n locations; Clone ID: 701125311H1
ancgctggtggaggaatcancgaatctgcaanggcttcttcggtgttctntantncantgcccattgctagtgcntactaaaacctnacttctnctgcgttttccgcctgcnagcgct

SEQ ID NO: 42194 - DNA, 255 bp, Glycine max
  unsure (1)..(255): unsure at all n locations; Clone ID: 701125313H1
caaaaaantcaaacaccttcaagaacttgtanctttctttgttagnanttgttantanaatnntacannctnttcanctcnananantncannagtcanggcacctcaagcagtttccttcaagtccttcgccgttgctctnantgtggcgctttncttctccgcctccgctctggacttagtttcggggcagtcgccggtnccggcgccggcgccggaaccagatgccggagcagctggatccgtgtcgagctc

SEQ ID NO: 42195 - DNA, 258 bp, Glycine max
  unsure (1)..(258): unsure at all n locations; Clone ID: 701125316H1
cgggtattgagattgagattcaagtaatggggaagagcaaggttcttgtggtggggggaactgggtacatagggaggaggatagtgagggcaagcctggcactgggccatgagacctatgtggttcagagncncagagttgagcctccagatagagaagctgcagaggctcctctccttcaagaagcaaggtgctcatctcattgaggcctctttcaatgatcacaagagccttgttgatgctgtgaagcaggttgat

SEQ ID NO: 42196 - DNA, 269 bp, Glycine max
  unsure (1)..(269): unsure at all n locations; Clone ID: 701125317H1
cntngtnnaaagtnnagananaaagaaagaagaaaatggcaaactttccagttgttgacatggggaaacttaacaccgaagagagagcagcagccatggagatnanaaaagatgcctgccagaactggggtttctttgagttggtgaaccatgggatatccattgagttgatggacactgtggagaggctcacaaaagagcactacaagaagactatggagcaaaggttcaaagaaatggtggccagcaaagggcttgagtcagttcaa

SEQ ID NO: 42197 - DNA, 266 bp, Glycine max
  unsure (1)..(266): unsure at all n locations; Clone ID: 701125318H1
tccctcccattgttaatccaccagtcacaatccctcccattgttaatccaccagtggacagttccacccgttgtgcttccancaatagtgaagcccccgggttttctccctccaattcttaacccancaagtanaccaacaccgtcgccggggaagggagggaacactccatgtccancancaaagtctcctgcacaggctacatgccccattgacacgctcaaactaggtgcttgtgtggatcttcttggtggcttggttcacat

SEQ ID NO: 42198 - DNA, 233 bp, Glycine max
  unsure (1)..(233): unsure at all n locations; Clone ID: 701125319H1
atcgggangngcagcctcgcgncgctccgtgcggtgnctcgggaggtttccgacggagcgttggcnncngcggtannagaaggggttggagaaggatccgcgcncactgtggcggagatacgtgggtgggctanaccagcacaaggaacttgggatttacttnnatgtgagtcgggtcgngnncagtgatgagttcgtnaaggagatggaaccccgtttccaagcanngtttt

SEQ ID NO: 42199 - DNA, 261 bp, Glycine max
  unsure (1)..(261): unsure at all n locations; Clone ID: 701125322H1
cctgatatgacatgtcgacaagctttaacttttcaatctctgttttagcagcctgcctgcccttcccaattgcagcancgaaatatcnanaggaaacaccggaaggttcaaccangtacaactgtggtccanccctgtcanaacctcctagtatgacaccanatccaaaaggtctgagccaccaatanagcgtacagaggtgcacanaactagccacacggtcagcaagttctaaanaggattnggtccgcaaaatcngng

SEQ ID NO: 42200 - DNA, 261 bp, Glycine max
  unsure (1)..(261): unsure at all n locations; Clone ID: 701125324H1
ccctcctgctcctgttaatccacctcctgttccggttcatcctccagttaaacctcctgttccggttcancctccagttaaacctcctgttccggctcancctcctgttaaacctccggttgttccggttcancctcctgttaaacctccggttgttccggttcanccctttcctagaagctttgtcgcagttcaaggagttgtttangtnaagtcctgcaagtangctggggttgacaccctcttgggagcaacaccatt

SEQ ID NO: 42201 - DNA, 256 bp, Glycine max
  unsure (1)..(256): unsure at all n locations; Clone ID: 701125325H1
caagagccatgggaaggtgggtacggaaaccgtggttcctctttctcccaatcacgtcgtggtcgaggtcgaggtcgaggtcgcggtcanagatttccttcgaatcaatccaaagtttcaagttttgccgaaaggggcactccttcttctagtaatggcaanagagcttctgcctctgtnatcagtaacacgcaagaagacgatgcacagccancttccaattttgttggaacatgtccttacagtgcccagaaaa

SEQ ID NO: 42202 - DNA, 253 bp, Glycine max
  unsure (1)..(253): unsure at all n locations; Clone ID: 701125326H1
cttgcgtttcgagtgtctgtngaatccctaaccctaatttattgtgtggcgaaatgggatcaattggggtactcctggtggctcaggtgatancgtacctggagcaagagctggacaagcgctanaagctgtttcgggcgtatgatcagccgcagacggcgcaggttctaagccagcacgcgagctcgatccgtgcggtggtcggaaactcgaacgccggcgccgacgcggagctgatcgaggcgctgccgaa

SEQ ID NO: 42203 - DNA, 236 bp, Glycine max
  unsure (1)..(236): unsure at all n locations; Clone ID: 701125327H1
gtngaaagtgcaganaaaataaaactcaaagagcataatanccaggnatcattcacaagattggggagacccttcatgtgggagggcacaagaaggaggaggagcataagggtgagcaccatgctggagaatacaaaggggagcaccatggtgaacacagtagtgagtacaaaggagagcatcatggtgaacacaaagctggagagtaccatggtgagcacaagccagagcacaaa

SEQ ID NO: 42204 - DNA, 251 bp, Glycine max
  unsure (1)..(251): unsure at all n locations; Clone ID: 701125328H1
tnangtcanctcctcttagnnctgaagagtttcataagggtttttgctttgcccancattgattctcttgagttttgtaaaagaaagcctcttntagattcctttgatcanaagaagctcctancctctgcantcctctctgagggtatctctctctctttgaacttnnnnnnnnnnnnnnnnnnttgaattnagaagtatcgtttttgctatgtgcaattgttagagagancaatgaataggggaattga

SEQ ID NO: 42205 - DNA, 256 bp, Glycine max
  unsure (1)..(256): unsure at all n locations; Clone ID: 701125329H1
ggaggcnaatctantaggcgctgttctctcgtcttctanaaaannttctgtgcgatctcaancaaggttgttccttccaccgccatgagtnnaacncttcggaaagcgaaaaacacccgcagagcttctgcgggaaaanaagaggatgctggacaaatcaatcagagaaattgaggcgcgaggggcaaggcttgcaaacgcaagancaagaaattgattgcggaganaaagaaaagtgccaaacagggccagatgg

SEQ ID NO: 42206 - DNA, 113 bp, Glycine max
  unsure (1)..(113): unsure at all n locations; Clone ID: 701125330H1
agaggancatgancctgacatggatgtntaaantcnantaagancttgcttngttgtgcttttgctanaaacccaaaccanagagagagggaagaagattccacacancatnt

SEQ ID NO: 42207 - DNA, 254 bp, Glycine max
  unsure (1)..(254): unsure at all n locations; Clone ID: 701125331H1
atttgcacctgtantaaatataaggcagtggaagaaggtttaattactgtgaatgttagggaagaagtactgaaggtgtggtgatgggtgttccanaanctccanctccctctcaanatctctatccanaagaaattcagcttaaactttaccaagccttcanattctcaattcccanantcttttccancattttggttcttttgttttacttgttctanctcaaaaggagggcttcttctctctcatcanca

SEQ ID NO: 42208 - DNA, 264 bp, Glycine max
  unsure (1)..(264): unsure at all n locations; Clone ID: 701125333H1
atgttgagtaccgttnctttgtcggtnggctcgcttggacccantgacgaccatggncctcgagananccttctctcagnaacggcgaaatngttgaaacgaagattatcaacgatcgtgagactggacgatccaggggttttggatttgtgacttcgcctcggagcagtcnatgaaagatgcgatcggagcgatgaatggacagaacttggacggccgtaacatcactgncaatgaagctcagtcccacggtggcggcggcgg

SEQ ID NO: 42209 - DNA, 236 bp, Glycine max
  unsure (1)..(236): unsure at all n locations; Clone ID: 701125334H1
cttcgaatcgaaactcagaagnagaaagaaanacaaatcanaatcgctatggctaggtacgaccgagcaatcancgtgttctcccctgacggccatctcttccaggtcgagtacgccctcgaagccgtccgcaagggcaacgccgccgtcggcttccgcggcaccganaatgttgtcctcggcgtcgagaagaaatccancgccaaactccaagactccaggtcggtgaggaagat

SEQ ID NO: 42210 - DNA, 93 bp, Glycine max
  unsure (1)..(93): unsure at all n locations; Clone ID: 701125336H1
ccttctngnggctgatatancgaanangggctaagtancantcaagtgggaaaagctctnccangactggtanagcctgcctgttnagccttc

SEQ ID NO: 42211 - DNA, 120 bp, Glycine max
  unsure (1)..(120): unsure at all n locations; Clone ID: 701125337H1
gnaataganagtanatcacagttggtgccattcccantgttgacgaatgggaattananagcatggcannantccttggaggttcccttcagacgatccaagcanncccactcncannga

SEQ ID NO: 42212 - DNA, 249 bp, Glycine max
  unsure (1)..(249): unsure at all n locations; Clone ID: 701125343H1
aaagatatcagggcattgttaactttggaaccaaattatataacttcaaatnaaaagatctcagggaaatacttggttcatctccttagccatgtggtacagcaaaagagtcaggctgaatgctggatgcaattatacgaacaatggtcttctgtagatgatgttggttctttggctattatacatcagatgctggagaatgagcctggaaagagcctgctggagtttcgtcagtctctactccttttg

SEQ ID NO: 42213 - DNA, 250 bp, Glycine max
  unsure (1)..(250): unsure at all n locations; Clone ID: 701125345H1
caaattctctggtgcagttgaagcgttctcccggaggaaccctggcaaatgctagtccttgtggtgatcacaccaaacacaggagttttgaggatgtaccagtgcaaaaggatttgcantatgcgcaanacaattccactcganatggcagccgttcaagaagagccatgatctcancaaacaagccaatatcctcaggtgaccatactggcaggcaaaccataactgggagccgtccatctggtgctca

SEQ ID NO: 42214 - DNA, 248 bp, Glycine max
  unsure (1)..(248): unsure at all n locations; Clone ID: 701125346H1
cccggancagccggatccgtttcgagctcggtggccgtgattggagcttcggttgtnctgtcaatgctcgccatcttcaagcantgaatgtcacgatgccgattttttattttgctgtggatttcgtgtgagcntnattgattcgttctacanatagacgtttantgttgttgatttanactgnaantcgttacggagtgatgatnantacgcgttgatgttgatctatgtanacttgagagagagag

SEQ ID NO: 42215 - DNA, 250 bp, Glycine max
  unsure (1)..(250): unsure at all n locations; Clone ID: 701125347H1
tttcggaagcagagaccgtcatacttcgagatggcccgtacaaagcaaactgctcgtaagtcaactggaggaaaagctcccaggaagcagcttgcaaccaaggctgcacgtaagtctgctccaacaactggtggtgtgaagaagcctcatcgttatcgccctggaactgttgctcttcgtgagattaggaaataccagaagagcantgacctccnaatcaggaagcttcctttccagaggttggttcgtg

SEQ ID NO: 42216 - DNA, 252 bp, Glycine max
  unsure (1)..(252): unsure at all n locations; Clone ID: 701125348H1
cagnatctccattcctacggtggagataagggtaatggttgcaaggnntcgaanaatctgaaccgttcgttttcntcggcgcanggagcnttnactanaagccggagtatgcgcgcaaggntttggtctcgtcgtcttcntcgtcgtcgcggtacgagagggatcggacagtggaggaggatcgggagggttcgcggctggttcggaagcgatcagagcacgatttcgaggctttcgatcggaggaaggggt

SEQ ID NO: 42217 - DNA, 262 bp, Glycine max
  unsure (1)..(262): unsure at all n locations; Clone ID: 701125349H1
cgganatnaaaccagataacctgatactagataaaaatggccatttgaagctttcagactttgggcttatgnaagcctcttgatganaagnanncancaattttattggaaaatgatgatcttaccagtcaagaatccactagtgaaactgaaggatattctgtctctccttggttgatgccaaaggaacaattacagcagtggaaacgtaatcgacgtgcannggcgtattcaantgttggaactcttgattanatggcac

SEQ ID NO: 42218 - DNA, 261 bp, Glycine max
  unsure (1)..(261): unsure at all n locations; Clone ID: 701125351H1
annacncgcaanattcccacgttaatcaatctcatagagtcttcccgcggaattcgaaaganaggaaagctttgcatctatgccatgcacttgatggaactctcagagcgatcttcagcaatcacaatggttcacaaggcacgcaanaatggcatgcccttctggaacaagaaaccggatgacaaagatcaaatgatcattgcttttcaggcttatgagaaactaagaagtgtcaatgtgcgccccatgacagccatctct

SEQ ID NO: 42219 - DNA, 255 bp, Glycine max
  unsure (1)..(255): unsure at all n locations; Clone ID: 701125356H1
gcnagtctgggccanagcaaccagcgacaanaactcaatcagctagggttgctttgcttgctatcttgttggaggattttctgttcaagagaagatggtaactagaattgtggatcttcgttcagacacagttacaaagccaactgaagcaatgagagctgctatggcaagtnctgaagttgatgacgatgttctaggctatgatccaactgcttttcgcttagaaacagagatggcaaagacaatgggcaaaga

SEQ ID NO: 42220 - DNA, 250 bp, Glycine max
  unsure (1)..(250): unsure at all n locations; Clone ID: 701125357H1
ctttggtgtttggatcttcaagaaagagagacccttgggatttcgtcannangagtctcttcggtcttggaaanaggttcttnanccaaatttctctccttttcttccgcttcanctnttctntnnagantctgtgtttnttnatgnaaaaaaaangtctttttgtgttanccttttgagggtgagctgggattttgattttgaggctgcccttgatttgtttttggatgaattttnanccccttngttt

SEQ ID NO: 42221 - DNA, 250 bp, Glycine max
  unsure (1)..(250): unsure at all n locations; Clone ID: 701125358H1
taagcatggagtcctcaaaganctatgcttacctcttcctttgcatgctcttcctctcctccgccantcccantctcggttgtggctantgncgnaaaccccccaaaaagcanaagcctggtaaaanancaaagacanccanagtanccgttgtnaagccannagtcanaatccctcccattgtnaagccannagtcanaatccctcccantgtnaatccannagtnanaatccctcccattgttaatcc

SEQ ID NO: 42222 - DNA, 249 bp, Glycine max
  unsure (1)..(249): unsure at all n locations; Clone ID: 701125361H1
ttccttttgaaggttagacntgctanaatacaaacaangggnagcnanncnaggaagatgtgaagcttttgggtattgtgggaagcccatttgtgtgcagggtccagattgcccttaagttgaagggagttgaatacaaatttttggaagaaaattngggcaacaagagtgattnggcttctcaaatanaaccctgttcacaagaaggttccagngttgttcanatgagcagcccatagcagngtctct

SEQ ID NO: 42223 - DNA, 253 bp, Glycine max
  unsure (1)..(253): unsure at all n locations; Clone ID: 701125362H1
tctcgcgngtgcaacacaggttanagcanntggctttctttggtagaattgggaatttattaagacagacagcaagcaggcaggttagttcagaattgcgatcatccccttcgttttttcaggctatacgcagtatgtgcatctgctccaagcanaaagctgtttatcggncgtgtttcanattctantgacgagcaaagtttgagggaagctttttcaaaatatngtgaagttgntgatgctagggataatt

SEQ ID NO: 42224 - DNA, 251 bp, Glycine max
  unsure (1)..(251): unsure at all n locations; Clone ID: 701125363H1
cttttacgccggggttttggttgctcacancgtgttctctgccnncacganataantagggtttagaatctcgcagttanagaaaacatggcgantgtngtgccaacctccgaagaagacgctgcantctccgtcgttcgattcgcctctgaanttgcctggnccgatgccggtcctgaggttgctgagccccaagttagcagactctgcacggaggctgaagagttcattgttatgggaaagtggttgga

SEQ ID NO: 42225 - DNA, 263 bp, Glycine max
  unsure (1)..(263): unsure at all n locations; Clone ID: 701125365H1
gccgctcgatgggaattgcgcttcaaggcgtctcgtagggctaatccgcctcacgagggtcancaacggcacgtgncctttngngggccgaggccccctactgctggtcggcaaacggacggcgggcgcacgcgtcgcttctagcccggattctgacttagaggcgttcagtcataatccaacgcacggtagcttcnncgccactggcttttcaaccaagcgcgatgaccaattgtgcgaatcaacggttcctctcgtactag

SEQ ID NO: 42226 - DNA, 257 bp, Glycine max
  unsure (1)..(257): unsure at all n locations; Clone ID: 701125366H1
ttgtgttttttcctggttatagaaaagtttagtggagtttgatcttgggaaattcataacaggtttcaccgttcaaaaagcacttaatgtacaggatattcaaattcacattcttgtgaaatatgaattctatcttgccaactggatcaatcttcgttcatattnactanatgattatgtaaagagttatataatttgatcaagcctatggagagcatgctatggaggatcatacatacaccagaatgtcactgaag

SEQ ID NO: 42227 - DNA, 257 bp, Glycine max
  unsure (1)..(257): unsure at all n locations; Clone ID: 701125367H1
tctgagggagacgagaanacccttgatggtgaacccgtacccgtacttcggttanaacgggaaaaacgtgaactttcttctgttcaggcccaaccgaggcttgtacgacaggtanacgaagaggagttacacgaaccagttcgacgctctgatggacgcggtgcactcggcgatgaatgctttggggtacggtgacgtggacatcgccgtcggcgaaacggggtggccctccgtttgcnacggttgggacgcgtgca

SEQ ID NO: 42228 - DNA, 255 bp, Glycine max
  unsure (1)..(255): unsure at all n locations; Clone ID: 701125368H1
ggagggacaggctaaaacaatcatggcggcgcagtggtggcgctccgccgccggccancttcgaacggtggcggcgggccgtggttccttgtcgggattccagcgcagacttatcanacgatccaagccanccanagggagtgcagcggcagcaaagtctcggcgagagaccgaacgcaaggtcgaataccttgcgtcgttttcctccagaaccttctggaaaaaaaccccgacgcgcgttcggaatcgaagaag

SEQ ID NO: 42229 - DNA, 257 bp, Glycine max
  unsure (1)..(257): unsure at all n locations; Clone ID: 701125370H1
ctcttattaggagtgggacggatggacaagaaaattgagttgtcntattgttgttatgaggctttaaggttcttgctaagaattatttggatgttgatcatcatgatttgtttcatgatgttgaggggttgttggaaaagaccaatatgacacctgctgatgttgccgagaatatgatgcctaagtcgaagggtgataatgttgagacatgcttgaagaagttgattgaaatccccttgagaaggccaagaagaagc

SEQ ID NO: 42230 - DNA, 111 bp, Glycine max
  unsure (1)..(111): unsure at all n locations; Clone ID: 701125371H1
cgcttgatnnggtcnaacaccctanaancatgganaangttgctggccagctccanctccgttctggtgtttctggnatnaggagttangaaggagcctantgccanccca

SEQ ID NO: 42231 - DNA, 253 bp, Glycine max
  unsure (1)..(253): unsure at all n locations; Clone ID: 701125372H1
ccaaacactatatcaaggggaaaatggcagaggctaatgtagtgctgttggatttctggccaagctcttatggaatgagagtgaaaatcgctttggcagagaagggaatctcatatgagtgcaagcaagaagacttggaagctagaagctctctgcttttagagatgaacccggttcacaaaatgataccagttttgattcataatggaaaacccatctgcgaatcactcaacatngttcagtacntgatgag

SEQ ID NO: 42232 - DNA, 249 bp, Glycine max
  unsure (1)..(249): unsure at all n locations; Clone ID: 701125373H1
gagggtgtanatgggcattgtcatcancctcgttaagctcttctggaagaagccccancagcgctacaagttcgagccantccaagacgacgaggaactcgggaactctaattaccccgtcgtgcttgtgcagattccaatgttcaatnaaaaagaggtgtacaaggtgtcgattggagcagcttgcaatctttcatggcctgtggatcgtctcgtgatccaagtgctcgatgattctactgaccctac

SEQ ID NO: 42233 - DNA, 249 bp, Glycine max
  unsure (1)..(249): unsure at all n locations; Clone ID: 701125374H1
ttctcccaacagttggantcaanaagccagncacagactgagttgggtgcagaagaantacatgattnacaattantgcactgacaccaaaagatttccanaaggccttgnccccagagtgtcaaacancttgaantccttctaatcctantcgaaanaaanancanaanannantctttantcttcctaggctgattgaattgctttncannngtatggatgttcantcttntatnctttganactng

SEQ ID NO: 42234 - DNA, 247 bp, Glycine max
  unsure (1)..(247): unsure at all n locations; Clone ID: 701125375H1
agagaaggagaaagtgtgcagcgtattggacccgttaaaattgtcctacgancgcgcgtgtncacgcgtcaaagaacaagcgcttgccgctgcagatcgtgcttcacgcgctgtactacgancagcnacatanaaggagcgggacggcggaggaaaaggtggcgctggcggtggcggagaaaaaacagctgcaagctgagcgtgtccttggtgagggagaacgaggagttgcggtcggagctgatga

SEQ ID NO: 42235 - DNA, 244 bp, Glycine max
  unsure (1)..(244): unsure at all n locations; Clone ID: 701125377H1
taatagcaccantcatgattagaccaattacaaggtggccttttttcgcatttttagggggtgccatgttttgcttgctagctagncgtatttgccatctcctctcttgtcactctgcacgcatggcatacattatgctcaggctcgactatgctggaattgcagccctganatctacctctttctancctccagnanattactcttttatgtgttacccanttttctgcaacctttacttggg

SEQ ID NO: 42236 - DNA, 246 bp, Glycine max
  unsure (1)..(246): unsure at all n locations; Clone ID: 701125378H1
cgcaatatngcggaaaatgcttcgattganctgaacaagtttgtnttcttttgtttgttggtgctaatacaagtggcagtttctgaaatcatttttgaagagcgttttgatgatggatggcgaggtaggtgggtgaagtcagactggaaaagcagtgaaggcaaagcaggttcattcaagcanacagctggaaaatgggccagtgatccagangataaaggtatncaaacatccagtgatgccaaa

SEQ ID NO: 42237 - DNA, 248 bp, Glycine max
  unsure (1)..(248): unsure at all n locations; Clone ID: 701125379H1
cggtgtcaaccctggatgaagcagttgcctatggtgctgcagtgcaaggnagcattttgagtggagagggtggtgaggaaaccaaagatatccttctcttggatgtggctcccctcacccttggaattgaaactgttggtggggtgatgacgaagttgattcccagaaatactgttatcccnaccaagaaatcccaggtgttnaccacctaccaggatcagcagagtaccgtctccatcaggtttttg

SEQ ID NO: 42238 - DNA, 259 bp, Glycine max
  unsure (1)..(259): unsure at all n locations; Clone ID: 701125381H1
gctgggatgtncngcctntatattttttgacaaaagctggaaagaagaaattcctacggacaaaactgnagattttgatatgatatatggattcctgagagagaactggaatattgtgagatgggttgctcttggaattgtcatctttgangtaagcaagaacagtcatgatcggcatttaaaaaaaaaaagcagngttatttcanggacatgcttatttcatggtcngtgtacccacagagantatgtggcaagnanc

SEQ ID NO: 42239 - DNA, 259 bp, Glycine max
  unsure (1)..(259): unsure at all n locations; Clone ID: 701125382H1
cctccttctcctcctttacctccttcaagccttaacatgttcaatggaggtccatattccactgatggcaataattcgaaggacgataaagcccattggggtcgacatactgaagagacagcaaaaagttggacttagcagaggcataatttccactattgctgtttctntttctttagcagttgttttatgtgctgctgctgcctgggtcatgttcaagttcagagatcatgttagtcagtcagcatcaaccccacgg

SEQ ID NO: 42240 - DNA, 253 bp, Glycine max
  unsure (1)..(253): unsure at all n locations; Clone ID: 701125383H1
tagagaaggagaaagtgtgcagcgtattggacccgttaaaattgtcctacgangcgcgtgtgcacgcgtcaaagaacaagcgcttgccgctgcagatcgtgcttcacgcgctgtactacgatcagctacatataaggagcgggacggcggaggaaaaggtggcgctggcggtggcggacaaaaaacagctgcaagctgacgtgtccttggtgagggagaacgaggattncggtcggantgatgaagatgaaaa

SEQ ID NO: 42241 - DNA, 255 bp, Glycine max
  unsure (1)..(255): unsure at all n locations; Clone ID: 701125385H1
atggatcaagtccanctccaacactgctgtttgcttcaaaggttgacgagaaaaatatnancanctcccaaanaattcctgggagtanccagaatgtagaatctggcttgagctcagcaantanccccaagacaatggatcatcatgctggaatgatgaacaaggcttttccaattccnantccttcacagctaaattnnnncantccaanccaaataggtggtccaggtggagtagtatctcagctaacacata

SEQ ID NO: 42242 - DNA, 253 bp, Glycine max
  unsure (1)..(253): unsure at all n locations; Clone ID: 701125386H1
gcattttcctancnaaacaagagtcacctcttacaagagaanatatactctcatgccgggcttaaggganaatcatgcaanatnnaaagtttgtaggactaaccanaactttccgggttattcccttcagtttgggatcatagaggcttnatcctntttactttnagtantgctanttctaccaggtaaaaananantcaacattaggtggtaactgtnggctgggannagtttncaancacatgggntggtt

SEQ ID NO: 42243 - DNA, 254 bp, Glycine max
  unsure (1)..(254): unsure at all n locations; Clone ID: 701125388H1
gnatttctagggattccatgcacaagaggcgtgccactggtggcaagaaaaaggcttggagaaagaagagaaagtatgagcttgggcgtcaggcagcaaacaccaagttatcaagcaacaagacaatcaggaggattcgtgttagaggtggcaatgttaaatggagggcattgaggctggatactggcaattactcanggggtagtgangcanttactcgnaagcnttcgtntnctagangnngttnacacncc

SEQ ID NO: 42244 - DNA, 239 bp, Glycine max
  unsure (1)..(239): unsure at all n locations; Clone ID: 701125390H1
ctcgagcttaactgggattagacctttcaattaacaaactctctggaancatnccgggagacanatccactccttanannanngncngacgtcnantganctancnanaaatgagttttctggggcaattcccgtgagtcttgcgaattgtacctttctnaananccttaaacttgancagaatcgactcactggccaaattcctccanaatttggtgttctctcacgaattaaggnat

SEQ ID NO: 42245 - DNA, 245 bp, Glycine max
  unsure (1)..(245): unsure at all n locations; Clone ID: 701125391H1
caagggaggcctcgctctcttcgcgatcttngcgcgattgacgcgcaaaaagccgccaaggaagggaattgtggtttcgaacggcgaacgattgtngcggctctgaaggaaacgctgagatacggtttgtttctccgaaccttcgccggaacgttcgtgtccaccgacgaggttatcggtgctctcgcaggtcatcgcaggacagcaaagtggagggctctggttgccggggcggttgcagggtt

SEQ ID NO: 42246 - DNA, 149 bp, Glycine max
  unsure (1)..(149): unsure at all n locations; Clone ID: 701125393H1
ggtgaccccanctctcttttanctctctcttccaaaaagcancgannncgagngcacgccaacgcgaatcgcgaagagggtctcaccgagaanaaaaaangggtgtttntnggtcgaggcccaaagtgaacgaagaagacctcncanca

SEQ ID NO: 42247 - DNA, 207 bp, Glycine max
  unsure (1)..(207): unsure at all n locations; Clone ID: 701125394H1
cagtatgacgtgtttgtnagcttccncggtgaagacacacgcaacagcttcaccgcttttctttttgaagctctgaaaaaacaaggcatcgaggccttcaaagatgataaagatatcaggaaaggcgaatccatagcaccagagctaatacgagccattgaagggtctcacgttttcgttgttgtcttttccaaggactatgcttcc

SEQ ID NO: 42248 - DNA, 116 bp, Glycine max
  unsure (1)..(116): unsure at all n locations; Clone ID: 701125395H1
gcggcacatctgttaaaaganaacgcaggtgtcctaagatgagctcaacgagaacagaaatctcgtgtggaacaaaagggtaaaagctcgtttgattctgatttccagannanatt

SEQ ID NO: 42249 - DNA, 249 bp, Glycine max
  unsure (1)..(249): unsure at all n locations; Clone ID: 701125396H1
ctgggaacataccgttggatggctccggagatgatccagcataggccttacacanaaaaagtggatgtatatagctttgggattgttctatgggaactcatcactngtatgcttccatttcagaacatgacagcagtacaggccgcatttgcagttgtcaacagaaatgttcgcccaatcatacctaacgattgcctagcggttctccgtgacatcatgacaagatgctgggatcccaancctgatgtc

SEQ ID NO: 42250 - DNA, 280 bp, Glycine max
  Clone ID: 701125401H1
aagccttgtttggagatggtgcagccgctgtcattgttggatcagaccccttaccagttgaaaagcctttgtttcagcttgtctggactgcccagacaatccttccagacagtgaaggggctattgatggacaccttcgcgaagttggtctcactttccatctcctcaaggatgttcctggactcatctccaagaatattgagaaggccttggttgaagccttccaacccttgggaatctccgattacaatctatcttctggatgcacacctggtggacc

SEQ ID NO: 42251 - DNA, 200 bp, Glycine max
  unsure (1)..(200): unsure at all n locations; Clone ID: 701125402H1
gtgcccnttggctattgaagagtaaattcatgtttgaagagaacatcaatggagaaaccggcttttggtcgtttgaagtcttatggagctttcataaataacgccattgattttgattgtgatcagcttttggatttaaagagtctaaaaaaaagtgtcgtttgtttttatattttgcttaggttttgggtaaaaaaagt

SEQ ID NO: 42252 - DNA, 276 bp, Glycine max
  unsure (1)..(276): unsure at all n locations; Clone ID: 701125403H1
catggcattgcttgaggcaaaaaaagattgcatctcagtatcagaaggaagcagacaagtgtaattcnggaatggaaacgtgcgaggaggctagggagaaggctgagttgacattagtcacgcagaagaagctaactgcattgtgggaacttagagcacgtcagaaagggtggaaggaagggcttgccaaatctcatgcacactctcaagggaaagtacagagttcttagatacgttacacagccacctccatggaggtgagtggttgcataatac

SEQ ID NO: 42253 - DNA, 274 bp, Glycine max
  Clone ID: 701125405H1
agacaccactatcaatgtcgtcgcatgtgaggttgtccttttcgaacacttgctctggatgctcgataacgccgacccacaacccgagtcactcaacgaactcgtcgacttctacgcttgctaatgctacctcataatttcaagccttccacgtgtcactttcaccctacattattaaaaaaaaaacacgtatattatattatattacatcatatatcatattatatcatgtaatactcgcatctatttgtgactgtaatttaattagttgtaa

SEQ ID NO: 42254 - DNA, 263 bp, Glycine max
  Clone ID: 701125406H1
gaaaaatgaaaatgggtaaaggaattgtttttattgttgctctggtggccatttgccttggtgggaaatgggtggaagcgcaggtgcatcatgttgtcggagcagaccgtggttgggatcaaacctccgacctcgtttcttggtctgcaagcagagtcttcagggttggagaccaaatttggctcacttactctgtggctcagggattagtcgctgagctgaaaagcagagaggaatatgaggcatgtaatgtgagcaacccc

SEQ ID NO: 42255 - DNA, 270 bp, Glycine max
  Clone ID: 701125407H1
gcagaccagtgacgacgctaatgtgatgcttaatgggtttggtgcagttgtaaactcacttgggcagagagtgaaaccatatcttcctcagatttgtggtactatcaagtggcgattgaacaacaagagtgcaaaggtgagacagcaagcagcagatctcatttcaaggattgctgttgtcatgaagcagtgccatgaggaacaattgatgggtcatcttggtgttgtcttatatgagtattgggagaagagtatcctgaagtcttagga

SEQ ID NO: 42256 - DNA, 130 bp, Glycine max
  unsure (1)..(130): unsure at all n locations; Clone ID: 701125408H1
gcactatcnggcatataaganaaatgntnttcagatatccgtgcatgantttatattngtcctggcnnaagangacaagcgtctagttgcctanttggaaganctttatnaggattccaaaggcaataag

SEQ ID NO: 42257 - DNA, 274 bp, Glycine max
  Clone ID: 701125409H1
attctttcaaaacgggtccaagcccctacttaatcaacccgaggaggacctctcaaattttctacaaaggcagtgtttgggttgggacatcaagctaagaaagggaaagagaaagatcacagaaagagaattcatctttctttgcgaacagctaaaaacctcaaagggaaagaaggcatgaatagaggtgttcttcagagctcaccagtgcaacaaatgatgactggaaaccctaactggtggaacatcaatatcaatagcatggctccacaag

SEQ ID NO: 42258 - DNA, 271 bp, Glycine max
  Clone ID: 701125410H1
atctgcaccacaggtagcattattctctgctcgagggccaaatataaaggacttcagcttccaagaggcagatcttctcaaaccagatatattagctcctggttcattgatttgggctgcttggtgtccaaatggaactgatgagccaaattatgttggtgaagcgtttgccatgatatctggaaccagcatggctgcaccacatatagctggaattgctgctcttataaagcagaagcatcctcattggagccctgcagccattaaatca

SEQ ID NO: 42259 - DNA, 274 bp, Glycine max
  unsure (1)..(274): unsure at all n locations; Clone ID: 701125411H1
ggttccgccaagttcgtagtnatctgcgtggggcttttaggcttcgctctcgtcgccgactttctatgggcctctacctcttccactcttcccacctcnaggaaaccctccgcanttgtggttccctccaaccacaataagaagnaatatgagaatgccactgcttctggaagattccttnctgcngcttannccgatttggatgcnccgcagctcaagtggcaaaagatggctcctgctcccgtccctcgccttgacggagccgccattcaga

SEQ ID NO: 42260 - DNA, 279 bp, Glycine max
  unsure (1)..(279): unsure at all n locations; Clone ID: 701125413H1
ggaacatanggcgnggaagagtnagtttcttctctcttcgatggaaggcggggaagaggttctcccttcggccactgnccanctccgccgccaccggcaatcccancgcttcgcctcctaccgtcnnctgatgcttgtcggtgctccngtantngctgctgcctcggangacgtcgttacccaacctgaaatncagcgcngatttcaagaggaagagnangatcaggangaagaaacatgacgatgacctngagcacgagcaggatcagnatgagcatg

SEQ ID NO: 42261 - DNA, 277 bp, Glycine max
  unsure (1)..(277): unsure at all n locations; Clone ID: 701125414H1
gttactggggaatggtccaccacaaagattaatgagggaatgcagctgtgtttggatgcttgtgcaaagcttgcgaagattatgaggtcatgtttaaaagaagttgcttcggattcccaggagtagaatgacagttctaaattaacacagatcgccttatgtgctgttgtgttggaggaaggtagggaaaggtgccttgaatgccctgaaaattttgtggctcatgatcttgtcaaagncaaagtaaattacctgaatttcgaaatngacaaccacc

SEQ ID NO: 42262 - DNA, 230 bp, Glycine max
  unsure (1)..(230): unsure at all n locations; Clone ID: 701125416H1
cttnactcttcttcaattcatatcatatcaattagattnagagctaaacataaaattgttttcacataccatggacaancnacaatgactttncggaaattcagtgaccagttgaggcttgaatctggtttggccaatctgtctctgaatgattattccatttggagcaacagctacagctccaagaggcctgatcagaggaggaactttgatgtcaagggcagtgattt

SEQ ID NO: 42263 - DNA, 280 bp, Glycine max
  Clone ID: 701125417H1
caccacttgcttggagtggttgtggaaactccatctccaactaataagatgtacattgtttttgtgattaaacctgacatgccatcctcagtggataatgcctcgagtagcggtaatatgcagaataaaagtggtgcattcgaccaaggttattttgtaatgccgaaatcaagacgtgttgttgtagatgaatatagtacatctgtttctgcccgcaaagggaaaggtgtcatcaccatcagattgccctattctggctctgcctgtggaatgggctatg

SEQ ID NO: 42264 - DNA, 274 bp, Glycine max
  unsure (1)..(274): unsure at all n locations; Clone ID: 701125419H1
ctattctccaccgtagccgcaagcttcgccgtttgaaacagngcctcaaccatggcagaacaaacagagaaggcttttctgaagcaaccaaaagtgtttctatgctctaagaaaggtgggaagggaaagaggcctgggaaaggtgggaatcgcttttggaagtcaattgggcttggattcaagactcccagagatgccattgaaggaacatatattgacaagaagtgccccttcactggcaatgtttccattcggggtcgtatcctagccggta

SEQ ID NO: 42265 - DNA, 207 bp, Glycine max
  unsure (1)..(207): unsure at all n locations; Clone ID: 701125420H1
ctaanccataaagtcanagctctcatctttgataagttgtgaacaaggtctatgagttgttccttgtagtgcagagaagggcatggtctttttgttgagtttgagtgattctgctacttactatactagttagtttgacatcttgnggtgaagtagaatgggatctggaaatgaggttcactcagttgtggagttcaatttggatgc

SEQ ID NO: 42266 - DNA, 269 bp, Glycine max
  Clone ID: 701125421H1
gagatggctctgggaagaggcagtgcagtggttctactactttgcttcttgctgcttcactctcagatggctcgtgctgccacctacacagttggagattctgggggttggacctttaacactgttgcctggcccaaaggaaagctctttcgggctggtgacacacttgctttcaattatagccctgggactcacaatgtggtggccgtgaacaaggctggatatgatagctgcaagactccaagaggagccaaagtgtataagtcagg

SEQ ID NO: 42267 - DNA, 262 bp, Glycine max
  unsure (1)..(262): unsure at all n locations; Clone ID: 701125422H1
cgaaaccctcgctcgcaacttctacagaatccctttnannatggatattgaggaggacatccgtnctttacagctcgattcancagaagacaataatggggtggtaaatncagaggatggaaggccagaagaagttgagaaatctgataagatggatgaagatccaaagcaggatgttgaggctgagccaaaggctgttgaggctgagccaaaagtgaaggataaggaggttccttctgttcaagatgaagaagatgaacca

SEQ ID NO: 42268 - DNA, 270 bp, Glycine max
  unsure (1)..(270): unsure at all n locations; Clone ID: 701125423H1
tcttaatctttgtgaaaaataatgttcatcgagaattttaaggttgagtgtcctaatgtgaagtacaccgagactgagattgcagtccgtgtacaactacgaaaccaccgaacttgttcacnagaacaggaatggcacctatcagtggattgtcaaacccaaatctgtcaaatacgaatttaaaaccaacatccatgttcctaaattaggggtaatgcttgtgggttggggtggaaacaacggctcaaccctcaccggtggtgttattgc

SEQ ID NO: 42269 - DNA, 269 bp, Glycine max
  Clone ID: 701125425H1
agcacacctatgtttctcatgtctcggaagattaaatcacttggtgtcaaatgggttatctcaggagaaggatctgatgagatctttggagggtatttgtacttccacaaggcacccaacaaggaggagttccacagagaaacatgccgcaagatcaaagcacttcaccaatatgattgcttgcgagccaataaatcaacatttgcttggggtctagaagcccgtgtaccatttttggacaaggcgtttatcaatgctgcaatgattat

SEQ ID NO: 42270 - DNA, 252 bp, Glycine max
  unsure (1)..(252): unsure at all n locations; Clone ID: 701125426H1
gcagacgcaaacgcaaacgcaanacgcaaacgcaaacncagagcgtgatccattgannaagatggtgcagcgtctcacctaccgcaagcggcacagctatgccaccaagtccaaccaacacagggtcgtcaaaacccctggtgggaagctcgtttatcagactaccaagaagagggccagcggacccaagtgccccgtcactggcaagaggattcaggggattccacacttgaggcctgcagagtacaagag

SEQ ID NO: 42271 - DNA, 271 bp, Glycine max
  Clone ID: 701125427H1
agcctattggggtccccttcccaaagaatcagccaatgaggatgtactctagtttgtggaatgctgatgactgggccacaagaggtggccttgtgaagacagattggacacaagctccattcacagcttcctacagaaacttcaatgctgagacttgcatatggtcttctggagcatcttcttgtgctaaaacttcttctacttccaccactagcagtggttcatggctttcacaggaactggactctgcaggccatcagaggttgaagtg

SEQ ID NO: 42272 - DNA, 276 bp, Glycine max
  unsure (1)..(276): unsure at all n locations; Clone ID: 701125428H1
aagaaagactcccaggcgagncagaaagatggaggggaaggagcaggatgtgtcgttgggagcgaacaagttccccgagagacagccaattgggacggcggcgcagagccaagacgacggcaaggactaccangtagccggcgccggcgccgctggttgacccgacggagtttacgtcatggtcgttttacagagcagggatagcagagtttgtgggccacttttctgtttctctacatcatcgtcttaaccgttatgggagtcgccggggctaag

SEQ ID NO: 42273 - DNA, 255 bp, Glycine max
  unsure (1)..(255): unsure at all n locations; Clone ID: 701125429H1
ggnaggtacctagatcaatatanggaggcttcaaagggattcgttgaaacagatcggcgagtttccaagcgttcccgcaagactaaaaatgggagttcaattagtctaaaagtttctgcttnaacatctttatatcagctgaaaatgatgatatgggaatcctttggggttgtcaaggaaaaccagatactacataaaggtgataggatattgatagcgataatgaatttgctaccctcgcagatgtgaacatat

SEQ ID NO: 42274 - DNA, 276 bp, Glycine max
  unsure (1)..(276): unsure at all n locations; Clone ID: 701125430H1
tgcccatccgaacagttcctgttcctaaggttagaaccttcagccaaggctcggagctggtagaggcatcagcgaaggaggagatgctggtgcaagantgccacacacccacgtcatnatcaaaagtggctcaaacgttgttggtttgtccaccacctccgaagaaaccacgagtntccagaaggacttctcattctcattctcaagctggcttctttcaagtgccccacgatgatctcgcttctgtctttctgcttcggaccaaaccttccgttc

SEQ ID NO: 42275 - DNA, 278 bp, Glycine max
  unsure (1)..(278): unsure at all n locations; Clone ID: 701125431H1
acccgccgctcgatgggaattgcgcttcaaggcgtctcgtagtgctaatccgcctcacgagggtcaccaacngcacnngctttngngggccgaggccccctactgctggtcggcaaacggacggcgggcgcacgcgtcgcntttagcccggattctgacttagaggcgttcagtcataatccaacgcacggtagcttcncgccactggcttttcaaccaagcgcgatgaccaattgtgcgaatcaacggttcctctcgtactaggttgnattactatt

SEQ ID NO: 42276 - DNA, 278 bp, Glycine max
  unsure (1)..(278): unsure at all n locations; Clone ID: 701125433H1
ataatgcactagtagtaactcattcatcattccgtttccagttcaagaacttgttctactcttttatcctacgcactcctcccttcttatcctgcgcatctttcaccgagatcctccccttcgcatcttcactttccaccatttcagtggganagaatcatgagttgtttcanctgttgcnaagaggatganctccacaaggctgctgaaagttgaggaccatacgtngtanaanatccagcaggaaatgatggaaattatctgcttctgaaactgnc

SEQ ID NO: 42277 - DNA, 272 bp, Glycine max
  Clone ID: 701125435H1
ctgggactgccttaaacgatgcatggatcttatcaagaaaggagcctctgtttttttctttccagagggaacacgcagtaaagatggaagactaggcacattcaagaagggtgctttcagtgttgctgcaaagacaaatgcaccagtagtaccaattacccttattggaactggtcaaatcatgcctgcaggaaaggagggaatagtgaacataggttctgtgaaagtggttatacataaacctattgttggaaaggatcctgacatgttat

SEQ ID NO: 42278 - DNA, 266 bp, Glycine max
  unsure (1)..(266): unsure at all n locations; Clone ID: 701125440H1
agggtctccaaagtcttcgtctttgggtccatatgaagaagccatggaggccttgtcgtctttgatcactagacgcactcgtgctgatgancagcaacgtgggggatcagttagcctgttatatgattacctgaagatgctagatttggaggagccaattgcnaatatgaagattatccatgtggctgggaccaaagggaagggatctacctgcaccttcacagaatctatattgcgtaactgtggttttcgcactggtctcttca

SEQ ID NO: 42279 - DNA, 268 bp, Glycine max
  Clone ID: 701125441H1
cacctgcttccttccttctccgaattttgctgttgattaaaatcgtgcagggcaagaatatttgttagccttattaaccaaagtagtattcatgaaccaaaagggtcatgagaagaaaattgaaaaaccagatgatgagtcagagagctatggtcggagttggaggctaacggttgaagcaaacaatgcgcgtccatggaggattgttccagacaactgctacaaccaccttcagaactacatgtctggtggacaataccagcttgac

SEQ ID NO: 42280 - DNA, 268 bp, Glycine max
  unsure (1)..(268): unsure at all n locations; Clone ID: 701125442H1
agataccatgggacaactacncacagcaatgacttttggaaattcagtgaccagttgaggcttgaatctggtttggccaatctgtctctgaatgattattccatttggagcaacagctacagctccaagaggcctgatcagaggaggaactttgatgtcaagggcagtgatttcaacaactcatcaaagccttttgatgatgatttcaatgatggctggaagatcaccaattccaatggaccccttttctctatgcctcacaacaaca

SEQ ID NO: 42281 - DNA, 271 bp, Glycine max
  unsure (1)..(271): unsure at all n locations; Clone ID: 701125443H1
atttaaacctcagggcgtggcaagtttcaacctttttcgagcacccattaacattaacatggccattccctacccccatttcatcgccaccgagaaagccgccatggacgccggcctcctccacccctcctccccctnctccgtcatcctcacccaagacgaccnccaaganaatcgccgcctacaaggccgtcgagtacgtcgagtccggcatggtcctcggcctcggcaccggctccactgccaagcacgccgtcgaccgcatcggcga

SEQ ID NO: 42282 - DNA, 271 bp, Glycine max
  unsure (1)..(271): unsure at all n locations; Clone ID: 701125444H1
agtaccctgggctggtaatcaaaccccaagctattttgtgtgggaagtactttttacaatggccatcataggattgggactcttgctttttgcacttctcattggaaatatacagaactttctgcaggctcttggacgcaggaggctagaaatgcaacttagaggtcgtgatgttgagcaatggatgagccaccgtcgcttacccgaagatctaagaaggagagtacgtcatgctgaacggtatagttgggcagcaacaagaggagtgant

SEQ ID NO: 42283 - DNA, 272 bp, Glycine max
  Clone ID: 701125445H1
cacttttctcactctctcccttattcctgttcctactcttctccctagtcgaaggactcacccccaaatgtgacacccaagaccatggctcaacccttgaagttttccatgtgttcagcccctgttccccatttaggccaccaaagccactttcatgggcagagagtgtccttcagctgcaggccaaggaccaagccaggctgcagttccttgccagcatggtggctgggaggtcagttgtgcccattgcctcaggcaggcaaattattcaa

SEQ ID NO: 42284 - DNA, 271 bp, Glycine max
  unsure (1)..(271): unsure at all n locations; Clone ID: 701125446H1
gtgaaaannagaaactcntgtacttggttttatgccaaattagggactcttttggttgtcaattagatcacaaagatatggnggttgccatggaactggaagatgatctattttttgctgatttgagcaaggaaattgctctactaattatggatgaagatgaagatccacttgcttcttgtcctccngactctcttcaggctttttctggggcaattcatcctcctccacagtttgcttgcatattgagcatgctttgagaagaganagc

SEQ ID NO: 42285 - DNA, 274 bp, Glycine max
  Clone ID: 701125447H1
gggaacttcattaccattactacccagttaccccaagcaccgtggaacaagaaatggttgaggctactggtgcttgatgaagtaactcgtggatgtctttttaagtttcctttgcttgccagcgtattttgaacccattgcatgaaactgattactttataattggaaattgacaatagtttgataaatacaagtgctgtcctatcctgttgtgttttagatcaagccatatttatcatccaaaatgatagattagagccatatataatgtgga

SEQ ID NO: 42286 - DNA, 263 bp, Glycine max
  unsure (1)..(263): unsure at all n locations; Clone ID: 701125448H1
ttcacgttccaatgtaaagctttatagtttaaattaaattacgacgtacanctcaacattgtttaactcaaatncaattttttaaaataaaatgggcactgagatatcatttattttgagcctgttcaatttaaaagccacaaagcagctatcatattaatactctataagataaaactccaagttctcatgatcaaggaaaattgaaaacagactcaaggaaaaccaacacacatgaaaccatcacacacaagtatagcttt

SEQ ID NO: 42287 - DNA, 272 bp, Glycine max
  unsure (1)..(272): unsure at all n locations; Clone ID: 701125449H1
atcaaatagctcccagtactttaattgatttctgaatatcatcacttaatttgaaggaaagatggtgagcgtantgagatccgccaggcacaaagggcagaaggcccagcaaccatccttgccattggaactgcaaacccaccaaactgtgttgatcagagcacctatcctgactactacttcagaatcaccaacagtgagcacatgaccgagctcaaagagaaattccagcgcatgtgtgacaagtctatgatcaagaggagtatatgtac

SEQ ID NO: 42288 - DNA, 270 bp, Glycine max
  Clone ID: 701125450H1
attcgccgattttaaaagatgagtaagcttcagagtgatgctttgcgtgaagccatttcaggaatcatggccgattccaaggagaagaatcgcaaatttgtggagaccatcgaactccaaatcgggttgaaaaactacgatccacagaaggacaagcgtttcagtggctctgtcaagctgccccacatccctcgccccaagatgaaaatttgcatgcttggtgatgctcagcatgttgaagaggcggagaagataggactggactggatg

SEQ ID NO: 42289 - DNA, 266 bp, Glycine max
  Clone ID: 701125452H1
tcttcatcttgttctatctgtgacgagcatcatggcctcaagagcagtgttattgttggctatgtgtgtgcttccggcgatggttgtggccattcgcccagcaaagaaccctttttgcgtgaagggtcgtgtctactgtgacccttgccgtgctggttttgagacctcagctaccacctacattgctggtgctgagattatgttgcaatgcaagagcagggttagcaacgaggttgtgtacacgaagaaggggtacaccgactcaa

SEQ ID NO: 42290 - DNA, 267 bp, Glycine max
  unsure (1)..(267): unsure at all n locations; Clone ID: 701125454H1
cttactccttacaagatgggcaanttcaatctgtcccataganntgttttggcaccgctgaccagacagangtcttacgacaacgtcccacaaccccatgccntcctctactactcccaganaacttccaacgnaggccttctcattactgaagccactggcgtctctgacacggctcaaggctatccgcaaacccctggcatatggactaaagancatgttcaagcttggaaacccattgtcgatgccgtccacgccaaaggggtg

SEQ ID NO: 42291 - DNA, 265 bp, Glycine max
  unsure (1)..(265): unsure at all n locations; Clone ID: 701125455H1
atggagggttttatgaccacgtgcccacgcccgcgcgtggggttccgagccctgatgggattgtnggccccgagccttttaacttcacgtttaataggttgggagtgagggntcccaanattgctatctctccttggattgaaaagggtacagttgttcatgggccaaatgggtcaccatctcctacatcagaatatgaacactcatccattccagctacagtgaaaaagctcttcaatttgccttcatttctgaccaatagaga

SEQ ID NO: 42292 - DNA, 267 bp, Glycine max
  unsure (1)..(267): unsure at all n locations; Clone ID: 701125456H1
gtgaaaatggcggtacccttgctctccaagangatcgtgaagaagcgcgtcaagaagtttatacgcccccagagtgatcgcaagatctccgtcaagccaagctggcgcagacccaagggtattgattctcgtgtcaggagaaagttcaaaggatgcactttgatgcccaacattggttatggctcagacaagaaaacccgccattatctaccaaatggtttcaagaaatttgtcgtgcacaatgtgaaagacctggaacttctcatg

SEQ ID NO: 42293 - DNA, 266 bp, Glycine max
  unsure (1)..(266): unsure at all n locations; Clone ID: 701125457H1
gnnatattcatacctcgtgtctagaagtcanagancncgaggnagatgatgaggtcactggggaccgggaagctcatatggcaagtgtgttgggcagatacaaaagagctttgactgaaaggancaaagcatcatttagggtacccctataatttggatttcgattatggtgcgctcacgcaacttcagcacttttccanaaacaaccttggagatccatttattgaaagcaactatggtgtccactcccggcagtntgaagttgg

SEQ ID NO: 42294 - DNA, 268 bp, Glycine max
  unsure (1)..(268): unsure at all n locations; Clone ID: 701125458H1
ggctcganngccaacaacaagaagaacaaaaccaacatcaacaaccacaagaagaagaagcntgcaaattagaagaatcttcagttgaaagggaagaacacacaagaacaaagagaggaagaaacgcgaatgaagggagaattagagttgccaccagggttcagatttcaccccactgatgaagaattggtgaatcactacttgtgtaggaagtgcgcgggtcaaccaatcgcggttcccatcatcaaagaggtcgatttgtacaagt

SEQ ID NO: 42295 - DNA, 265 bp, Glycine max
  unsure (1)..(265): unsure at all n locations; Clone ID: 701125459H1
atttaaagtgttcccctcactcaatattatttatgtgttaggagaggtcaattgcctttgcatattctatctcatatcgatcaatttgtaataatggccagtgagagaattctcaagccatctaaatggttctcaaacaaatcactaaagcttagtcttcatcgtggaagatcaagatcctcctccaataactcattatcgagtaactctcccagtccaagatcacccatgtcgataatcgagagntcatgggctaatggaggtt

SEQ ID NO: 42296 - DNA, 267 bp, Glycine max
  unsure (1)..(267): unsure at all n locations; Clone ID: 701125460H1
cgaaactgaggtcgtagaaagaatggcgnaaacgacgtcgttgttgctctttacactgctcctcttcggaaccttagctctcatccaggcgaagaaatcgaaggaggatttgaaggaagtgacccacaaggtttactttgatgttgagattaatggaaaagaagcaggtcgtattgtgatgggtctttttggaaaggctgttccaaaaactgcagaaaactttcgagctctttgcactggggaaaagggaactggtaaaagtggcag

SEQ ID NO: 42297 - DNA, 271 bp, Glycine max
  unsure (1)..(271): unsure at all n locations; Clone ID: 701125462H1
anctgctcgagcagctatagaaaagatgaaaagaaccgttgatatagaacataatgtggagatncttaaagaacttgaaagtttgagtggatgcacgctatcttataaagccgtgggctgtagaaatggctacaaagttgcattggagacattggataaacctcagtttgagaacccattggagcggcttggtttatttatcaaggaagactttaccgcagatgaagatgaggaggttttgaacggaggctttgaagaaggggaaattttt

SEQ ID NO: 42298 - DNA, 272 bp, Glycine max
  Clone ID: 701125463H1
gtaaggtaaccctagagtggtgaatcgaatctgcaaagatggaagctgtttctcgaagaagaggtggaggcattttcgaaagcctctacaaggtcgttatgcgtcgcaactctgtctacgttaccttcgtcatcgctggcgccttcctcggagaacgggctgtagattatggagtccacaagctctgggaggctaataatgttgggaaacgatatgaagacattcctgtgctagggcaaaggcagtcagaatagtgaccagcttgttagcca

SEQ ID NO: 42299 - DNA, 272 bp, Glycine max
  Clone ID: 701125465H1
ggaggcaggctgataaatacggtgtcccgcgaatttgttttgtcaataaaatggaccgtcttggagcaaacttttatcgaacaagagacatgatagtaacgaatttgggtgctaaaccacttgtaattcagttaccaattggttcagaggataactttaagggagttatagaccttgttaggaataaggctatagtttggtctggagaagagctgggtgccaagtttgatattgtagatgttccagaagatcttcaagagcaggctcaggaa

SEQ ID NO: 42300 - DNA, 266 bp, Glycine max
  Clone ID: 701125467H1
aaatttgcttggaaaaatcgtttccgtgaagaaaatctaagccgaggcgcttccgaaacgtttccgtaacgttttccgtgaagaatttcgcaaaggtttcaaccgttcttcgacgttcttcattcgttcttcatcgttcttcgatcttcaacgggtaagtacctcgaaccaagcttttcgattcattctatgtacccgtagtggtccacattgtgtttcgtgcatttttattctcgttttgtttactttttataccccctgttgac

SEQ ID NO: 42301 - DNA, 265 bp, Glycine max
  Clone ID: 701125468H1
cttttgatagctcaccaaggcatcatgtcactctatcatcaacacttgactcagagtacaagagtgtggacatttcggatgtcttgtatgattctgctcagcttgatgatgcctttgaacccttccttgaatttagatgagcatgtccttgtttggtttgtgattttttttatataatttttactttagtgaaggcagtacaaaacaaaattgtctaatatttagtagtacttttcttagataaatgtaatatccgtgcttttat

SEQ ID NO: 42302 - DNA, 264 bp, Glycine max
  Clone ID: 701125469H1
gctaccatactcaccagtggagttgatttatcccttttctctatcctagtacatgctggagggcagcaagaggtgcttgtacagttggctgctttcatccccttaatgtatatgtgtatctgtacatattattccttgtttaaaatgggaatgatgatgttttactcactgacaccaaaacaaacaagctcagtaagcctgcttatgatatgctcgatgattgcaagatatgcagcacccatttcatacaactttctcaatctc

SEQ ID NO: 42303 - DNA, 264 bp, Glycine max
  unsure (1)..(264): unsure at all n locations; Clone ID: 701125470H1
aagagcgnagnggaaaagaggaggaggaaggnggtttgggaanggtngatgatgatggggttgaagggacaannnnnnnnnnnnnnnnnnnnnnngttaaagaattcggttgtagtttcttcggcgaggtcttcgaggatgaaactgtggatgatacgcgccaccacatcggtgttactgnggacctgcgtcgttcagttaacggcgttgggggatatgtggggcccgcgtgtcctcaaagggtggccgtcgtgtttcacgcac

SEQ ID NO: 42304 - DNA, 263 bp, Glycine max
  unsure (1)..(263): unsure at all n locations; Clone ID: 701125471H1
gatgaatanaaaatggactaatcttcttctgacttgtgaactctctttgaaaaaacgaccctctcagccaaccattgcaccaattcgtcagaattatggagtttacacacagantnanaaancannacaaatggaataacttgttttcctctgtggcttctctctntctctcacctgaaatcaacttgtaatctccatgagcttctattgaattgatactttgatcaagatggatgggaaaaactctcttcaaataactagaa

SEQ ID NO: 42305 - DNA, 263 bp, Glycine max
  Clone ID: 701125473H1
tctctctactactgctagctgtgacttgttttgagttcaatcaaatcgcattggtatctgaaatcaggaaagatggttagcgtagtgagatcaggcaggcacaaagggcagaaggcccagcaaccatccttgccattggaactgcaaacccaccaaaccgtgttgatcagagcacctatcctgattactacttcagaatcaccaacagtgaccacatgaccgagctcaaagagaaatttcagcgcatgtgtgacaagtctatg

SEQ ID NO: 42306 - DNA, 263 bp, Glycine max
  Clone ID: 701125474H1
aacgtaggaaaattagagtttagtggagaattatagaaattacggtcccttcttctaattgtgtgcgagtagctgttcttctgcttctgctttacaagttttgttgccatggaagcagagttggataccgagcagcagcagcaaatgacggaaggaagctattcccaaactatgcaaattgatccaaaaagggctcgatttccatgctccgttgtgtggtcaccacttcctgtaatctcgtggttcattccttgcattggtca

SEQ ID NO: 42307 - DNA, 222 bp, Glycine max
  Clone ID: 701125475H1
ggaaacatctaagcaacaaccaggtgaataggcgatggcagtagttgatgggatatgtattaccgataatatacatccaatgtggcttgccatagtggaactgtgtattaatgagtttcgtgatttcaattgcgggttgcgcttgagatttacaatgtttcagtcgtgtatgtgttttattgacgagaacaatgtggctggtggtttagtgatttataaatt

SEQ ID NO: 42308 - DNA, 260 bp, Glycine max
  Clone ID: 701125477H1
gggaagccatgcactcgtctctctcactcaaaccagccagaatttattgccaagcagtgtgcaaagtgaaggtgtttcaccacataatcaatcttcatccaatgtgttgaatgaagatcaagctaaatctatgagaatgcctggcatgccttttgagcaactggttactgaagttgttaagaggatccaagctccgtcagatgcaatggataccgagactgacaacagtaagtcaggtgacaatacagtagtgaagtatc

SEQ ID NO: 42309 - DNA, 267 bp, Glycine max
  Clone ID: 701125478H1
ccagatctgacaatatgcgaagaactggcttgttacatttgttatgccttgtcattgctttagtaagtgtgcaagcagaagatgcgtataagtattacacatggacggtgacttatggaactatttctccattgggtagtccccagcaggttattcttatcaatggtcagtttcctgggcctagacttgacttggtgactaatgagaatgtaattctcaacctatcaacaagctggacgagccatttttactcacttggaacggtat

SEQ ID NO: 42310 - DNA, 268 bp, Glycine max
  unsure (1)..(268): unsure at all n locations; Clone ID: 701125479H1
gttcccttaagtggaaacttgagcaagaacgcaaagttgtgaagtctgaagcgtacgagcttgaaagaaggctagaagggtgtaggcaaganttattgactgctaaggctatcatttcagtcaaggactctgaatttgatgcattgcagaataatttgaaggagctagaagaattgagagaaatgaaagaggatatcgataganagaatgaacagacagctgccatactgaaaatacaaggggctcattagctgaatggaatcacttt

SEQ ID NO: 42311 - DNA, 274 bp, Glycine max
  unsure (1)..(274): unsure at all n locations; Clone ID: 701125480H1
ttttcctcttatccaattctaatcacgatcagnnnntaaatgtaaacacttctctatcaaaaatttgaacttagttcgcctgcacacttttgttttgtcaccttgtgagagactaattccctctaataaacgcaacgttgttcatcagtggcacatacatatacagcntcacanttctttgaagggtgaaaaancttgatcaagaattgaagcatattgatcttcagccatggctacacccttggcctaccaagagcaccttccggcggcaccc

SEQ ID NO: 42312 - DNA, 267 bp, Glycine max
  Clone ID: 701125481H1
ggatttattttacatagttcgggcttgttactcttggataattcacaatgctcctgtaaccgacctgaccaccatcattgtgctggcatcaattgttttagctattgctgaagccactgtaccaaactccatcaacgaccaacataatgttttgactgtatctggtcttattggttatgctgctgttagaggatatatttctgaactttttttctggacccttctggttggggtgtatgccttttcaaaatttgtcaagaagagaga

SEQ ID NO: 42313 - DNA, 264 bp, Glycine max
  Clone ID: 701125482H1
cttcccctgtaaatcacgtttagttcgcacaaggttttaaaaaatggctgatgctgaggacattcaacctcttgttgttgataatggaactggaatggtcaaggctggttttgcaggtgatgacgctcctagggccgtgttccccagtattattgggcgaccacgccataccggtgtaatggttgggatgggtcagaaggatgcttacgtgggtgatgaagctcaatcaaaaaggggtatactcaccttgaagtatcctataga

SEQ ID NO: 42314 - DNA, 264 bp, Glycine max
  Clone ID: 701125483H1
cggggatcaggttcgtttcctggcaaggtcttttggtgtccctggaaatcatcttggacaacaaagtcatggttttcgttggccatatggtcccgtggccattattactccttttaattttcccttggagattcctgtccttcaattgatgggtgccctttacatgggcaacaagccagtccttaaagttgacagcaaggtgagcattgttatggaacaaatgttgcgcctgcttcatacctgtggcttacctgcagaagatgt

SEQ ID NO: 42315 - DNA, 263 bp, Glycine max
  Clone ID: 701125484H1
gccagcttgagttcaaggccattctctttgtgccaaagagggcaccctttgatttgtttgacaccaggaagaagatgaacaacatcaaactttatgtcaggagggtgttcatcatggacaactgtgaggagctcattcccgagtacctcggatttgtgaagggtgttgtcgactccgatgacttgcccctcaacatttctcgtgagctgctgcagcagaacaagatcctgaaggtgatcaggaagaatcttgtgaagaagtgc

SEQ ID NO: 42316 - DNA, 262 bp, Glycine max
  Clone ID: 701125485H1
gtggtccccacctttaagatctccgttttctcaaaaatcttcctggtttggtctttcaagatccaaccctgtttgaaattcacctgtgcttgtttttctcctacttcacacttctgatctcatctctctcacacctcacctcgttttgctttttttacttttgaatgttaccatcttaattttttctctttgggtatcttcacaaagcaaagaaattcactgagaaagccaaagccaaaggtgatgatggaataataagtac

SEQ ID NO: 42317 - DNA, 261 bp, Glycine max
  unsure (1)..(261): unsure at all n locations; Clone ID: 701125486H1
ggctcttaaggatgggagccaagcgaagttggatctaacaaaagggatgtacgatgctggggataacatgaagtttggttttcccatggcttttacggcnacggtgctgtcgtggtccattctggaatatggagatcagatggatcacgttggccagttagacgctgcgcaagattcgctcaagtggatcactgattatctcatcaatgctcacccttctgagaatgttctctatattcaggtgggtgatcctgttgcaga

SEQ ID NO: 42318 - DNA, 260 bp, Glycine max
  Clone ID: 701125487H1
gtttgaaaagcacaatgatgaccttgctgcactcgagacttgggataatgggaagccatatgaacagtctgctcaaatcgaaattccaatgctggttcgcctatttcgatactatgctggttgggcagataagattcatggtctcacagttccagctgatgggccatatccatgtgcaaacattgcatgaacccattggtgttgccggtcagatcatccgtggaacttccctcttgtcatgtttgcctggaaggttgggc

SEQ ID NO: 42319 - DNA, 242 bp, Glycine max
  unsure (1)..(242): unsure at all n locations; Clone ID: 701125488H1
ctaaaccgttgggatatagcaaanaacatgttaggaatgaagagacatagagataatgannggtcagagagcttagatttggcaaaatgtcttgtgctgttctcttgtccaatagaaagcaacaaggcacaacagaaaggttttggggctgtggaatttgagtgcaagacgtgcagccgcaagttctcttcttttcaagcactgggagggcacagggcaagccacaagaggcagaagctaga

SEQ ID NO: 42320 - DNA, 262 bp, Glycine max
  unsure (1)..(262): unsure at all n locations; Clone ID: 701125489H1
gaaanaaacctgtggctaanagcggaanaacatctcaaaagcctaagaaggctaatgatgatttagaaaaaactgaggaacctcccaaaaagttctctcattcaacccgacgaagaaaancatgcgtggacaaggctctgctggaaattcctgaggatgaacttgatcgtctaaatatacctattaaggatattattttacttgaagaacatagggagcggctggcgaaaaaagaggcgatgacttcaaatacttcttccac

SEQ ID NO: 42321 - DNA, 253 bp, Glycine max
  unsure (1)..(253): unsure at all n locations; Clone ID: 701125490H1
aaaacttcaagatgataacaaagctttagaccgtctcaccaaatctaaagangcagcacttattgaagctgagaagactgtacagattgccttggctaaggccaccttcagtctatgcattttgtccaaaattttattttcttcctggcaaatctcaatctgtttaattagctcttgatttttattttggagatcatccaccctttgataggagtgtgctgttccaagtcccatagcagcgatgggaatcgat

SEQ ID NO: 42322 - DNA, 246 bp, Glycine max
  unsure (1)..(246): unsure at all n locations; Clone ID: 701125491H1
tggcccggtggaaccaaacgaagaagacgttccgttttcactctgcttttccaagttttacatcgactnaaccatgctattccttacataactagggttaggagttagggcgttcttatcgttttcgctccgttaattacaacaacgggcaacatggttgttctttcgctttcacctcccagcctctctaccgctttcctcggcaaagaaactgtntccccaagaacacgcggtgaagntagcgnc

SEQ ID NO: 42323 - DNA, 267 bp, Glycine max
  unsure (1)..(267): unsure at all n locations; Clone ID: 701125492H1
cgccgtcaaaaaccgccgtccacggcggtgnaaactcgccttcgaatccagancctctctcggttcctcactcttctcanaatgaagcgcaacgccaaanaatcgaatttcacgatggaagagttggagcagtggaaggaacaactttctcacttcgctaacctagctttggatcgtcttctcgaggttcctccgaatcagctctacgcagctgctgcaatcgtgattttcacaacgctgcttcttctctcaattcggttgttcaag

SEQ ID NO: 42324 - DNA, 265 bp, Glycine max
  unsure (1)..(265): unsure at all n locations; Clone ID: 701125493H1
ctcgtatacccttttgtctttcttcactaaggtatcttattgagagttcaagactagtcctttgatacgttgaatttctttcaagtattgagattcatttaaaaaatcaattttttgatatcttatacatacatctattgggatgtctagaaccgtggagatcacagttttgtcggcagagaacctccaaatgaccaaaaaacccattngngggaacgctttggnagggttnatccgnggnaagaagggacacaggtgccananc

SEQ ID NO: 42325 - DNA, 271 bp, Glycine max
  unsure (1)..(271): unsure at all n locations; Clone ID: 701125496H1
tgcttatccttattgagagaaaaaatggccaaatcaatcaaattctttgagttgaacacaggggccaagattccttctcttgggttagggacttggcaagctgaaacctggtgttgtagctgaagctctcaccacagccattcaggttggatacaggcatattgactgtgctagtgcgtataagaatcaagcagagattggttctgctcttaagaagctttttgatgatggtgtngtgaagcgtgaggacttatggatcacttccaaactc

SEQ ID NO: 42326 - DNA, 137 bp, Glycine max
  unsure (1)..(137): unsure at all n locations; Clone ID: 701125501H1
aactcagtgaaagagaatccgaggcgaagagaagagaaaaattaagatggagnggaaggagcaggatgtgtcgctgggagcgaacaagttcccggagagacagccgattgggacggcggcgcagagcccaagaccgc

SEQ ID NO: 42327 - DNA, 142 bp, Glycine max
  unsure (1)..(142): unsure at all n locations; Clone ID: 701125502H1
cgtatgaattggtcggtttttctccggagtcgtcttcacttttctccgagtttttattatcatcatctctctcgtgctcctgtctccatcnccatntnttagtgtcgtctgcaaatggcagaagttgaagacatagacaacc

SEQ ID NO: 42328 - DNA, 141 bp, Glycine max
  unsure (1)..(141): unsure at all n locations; Clone ID: 701125503H1
gtcgttatctnctncttttgttgtttgtgtgtntgtnttttctctcacctgaaaatgtcttgctgcggtggtaactgnggttgcggaagcgcctgcaagtgcggcaacggctgcggaggctgcaagatgtacccagacttg

SEQ ID NO: 42329 - DNA, 233 bp, Glycine max
  unsure (1)..(233): unsure at all n locations; Clone ID: 701125504H1
acttaatttctctctgattttctccctcacttttatttctctctttctggattattctctctgtgtagattgtggcgtgttctcnnnnnnnnnnnnnnnnngccgcagcggcgccaaccgggtagcgaacaccgcaatgtttgtggcgaagggtttaagcggcgaagttggtggtttaagagcattatatggcggtggtgtgaggatgagagcactttggcttgtccanagag

SEQ ID NO: 42330 - DNA, 235 bp, Glycine max
  unsure (1)..(235): unsure at all n locations; Clone ID: 701125506H1
gcaaaacccatttnactccctcttccacaaaagaacaatatctctattttccaaactacacacatcatttagaaccatgtntttctctaccaaattgcctttggtcctcttattttcatcccttttcatccatgcatctttgtctgagatggtgtgtgaggacctgcnaaaggaagtgtgtgctttctcagtagcttcatcagggaagaggtgtttgttggagatgagaagggca

SEQ ID NO: 42331 - DNA, 232 bp, Glycine max
  unsure (1)..(232): unsure at all n locations; Clone ID: 701125508H1
tcactcgctaccattcgattacaacgtcttctggttctttgaagaagaacccttctctttgcgcgtgtcccgttctcttctccaatcctcctcnatccccactgtgtgatctgatcctaaaccctatagccatggctaccatggaggtnaagctatggaatgacaagcgcgagagaganatggatgncaactttggggagctnantgcnttntcaaagcggtagggnggttg

SEQ ID NO: 42332 - DNA, 242 bp, Glycine max
  unsure (1)..(242): unsure at all n locations; Clone ID: 701125509H1
cactctttctgggtagcaagtagcaacgcaaactcagatatggtttggtttcaatgcgaagattgcggagacaacctcaaaaagcccaagttgtctagtcacttccgaacttgcncngcctacaaattgtcgtgcnttgactgtggggaaatnttggggcgtgatnacggtccaggttcnacaccgcngtntnttcccnagagngggnaaatttgtgccnaaagggccggggaaaanttttt

SEQ ID NO: 42333 - DNA, 226 bp, Glycine max
  unsure (1)..(226): unsure at all n locations; Clone ID: 701125512H1
ggtaaatgttaccagcacaacaccccaaaaaccaaggaagcatattactacagaatgatctttgagaggttcttccctcagaactcagctaggctcactgttcctggaggagcaagtgttgcatgtagcacagccaaagctgttgagtgggatgctggcttggtctaacaaccttgatccctctggtagagcagcacttggagtgcatttttnancctatgaaacc

SEQ ID NO: 42334 - DNA, 239 bp, Glycine max
  unsure (1)..(239): unsure at all n locations; Clone ID: 701125513H1
atcccccacggagcggaagcncaacttctatggatttgaaattaggttccaatttggngnagaaacattccatctntncagtngnagngccggaatgatntnttcaatctcattangaagaaaacattgatgaactcctctgcagttcttccaggactctgggcccaatngnttcatctcctgccatggnggaaatctggtgaagtaaatnggggagtnatagtnnaccntnccgncna

SEQ ID NO: 42335 - DNA, 141 bp, Glycine max
  unsure (1)..(141): unsure at all n locations; Clone ID: 701125515H1
gcccctaacatccagggaaaacaaggaaggtttggaattgctgaaaactgccattgccaaagctggttacacaggcaaagttgtcattggaatggatgttgcagcttctgaattctacanggaagataaaacatncgnttt

SEQ ID NO: 42336 - DNA, 232 bp, Glycine max
  unsure (1)..(232): unsure at all n locations; Clone ID: 701125516H1
ctttcactttaccagggccttggaacaaagaatcttcaatccttcatttcacaatttgtctacttctatggatacagctattttnaaagggctgtatctagaaaaaagcggttataaatccattggaacaaaagcaaacttggttatngctgctgctgctggggcttgcacagccatngcgantcagccccgggaaanngcntctncnnggttgcannnatgnaattttgga

SEQ ID NO: 42337 - DNA, 91 bp, Glycine max
  unsure (1)..(91): unsure at all n locations; Clone ID: 701125517H1
actgtgttagggttttacgaaaccaccgaagttgcagnnaaaggaagantagnnngatcaaaatggtggctgacaggngcnagangccgtt

SEQ ID NO: 42338 - DNA, 142 bp, Glycine max
  unsure (1)..(142): unsure at all n locations; Clone ID: 701125518H1
gtgctattgttggctatgtgtgtgcttccggccatggttgtggccattcgcccagcaaagaaccctttttgcgtgaaaggtcgcgtctactgtgacccttgccgtgctggttttgagacctcagcaacnacctacnttgcgg

SEQ ID NO: 42339 - DNA, 237 bp, Glycine max
  unsure (1)..(237): unsure at all n locations; Clone ID: 701125519H1
cgtgaacaagcctcaggtaagccaaagccatggttaagcataacaatgttatccccaacggacacttccgtaagcactggcagaactatgtgaagacctggttcaatcagccagcacggaagacaagaagacggttggctcgtcagaagaaagctgtgaagattttccccagacctacagctggacctcttagacccattgtacatggtcaaactttgaaatacnacatgaaagtgg

SEQ ID NO: 42340 - DNA, 232 bp, Glycine max
  unsure (1)..(232): unsure at all n locations; Clone ID: 701125520H1
tcattccanaccggtgaacgncncgctcttgaaaggagaaattgtatgaatggattctcaggcaacaacaagaaggnctaaggtggccaccattgatgttgttacccatttgcaggtatggacttanaagatgatgctgntaagggcatagtcccttgggatgggactctctcttcattnattttacccttgngggncatanaantnccngcnaaagtggaaanggttcatc

SEQ ID NO: 42341 - DNA, 233 bp, Glycine max
  unsure (1)..(233): unsure at all n locations; Clone ID: 701125521H1
actgaacaagggttnctctntctctttctcngtcngcttcttcacnttctctcgtttcaatcgagaatcatcatgggcagaaaattcttcgtcggtggcaactggaaatgcaatgggaccactgaggaggtgaagaagattgntantactttaaatgaagctaaagtccctggagangatgtngtagantggcngtaagcccnccttttgngttcctncctttgtaaaaagnt

SEQ ID NO: 42342 - DNA, 233 bp, Glycine max
  unsure (1)..(233): unsure at all n locations; Clone ID: 701125522H1
agttttttctcactgtcatagacacaagtaagaacgacgtcgttgacatatactatatcttgcttcttggctggaggagcngaagctggttttttactcttcgcatcgaattgaggggatagggatttgatcgaagaggagagtgatggatttctcttcggtgagagctgcgttggattcgaagtcgtnggncaaggtnacagatgtgtgcgacaacttgatgctcaggttgc

SEQ ID NO: 42343 - DNA, 235 bp, Glycine max
  unsure (1)..(235): unsure at all n locations; Clone ID: 701125523H1
ctgccctagaccaccgcaagcncacgtcgcacaccgccttcatccgttagggcaaaaatgagtcgaggaagtggaggtggatacgatcgtcacatcactattttctcccctgaaggacgtctctttcaagtggagtatgctttcaaggctgtgaaggctgcaggaatcacctcgattggtgtccgaggaaaggattcaatttgtgtcgttactcagaagaaggttccggataagc

SEQ ID NO: 42344 - DNA, 88 bp, Glycine max
  unsure (1)..(88): unsure at all n locations; Clone ID: 701125524H1
cagtgancgangttttctggactctcgtcgacaaagccgacaaaaaattctccaaaatcagagnccttcccttttaccaacgcagcag

SEQ ID NO: 42345 - DNA, 235 bp, Glycine max
  unsure (1)..(235): unsure at all n locations; Clone ID: 701125526H1
cggcgaanaatggcggaagaagcaattctgggatacctagagaagaacgatgagattagagactcgggtgaattcgcagctgaatgcggcattgaccacaacgagatcgtgaatgtgattaagagcttgcacggtttcagatacgttgatgcgcaagatattaagagagaaacatgggtactcactgatgaagggaaaacgtatgctactgtaggatcccctgaagttcaacttt

SEQ ID NO: 42346 - DNA, 195 bp, Glycine max
  unsure (1)..(195): unsure at all n locations; Clone ID: 701125527H1
ccttcttncagaatcatcaacaggcttctccgaaaccatttgtgtgaccggcgctggtggcttcatcgcctcttggatggtcaaactcctnttggagaaaggntacactgtccgaggaaccctccagaaacccagatgatcccangaacgggnacttaaaaganttgnaagggntccccanngtcnatttcggnt

SEQ ID NO: 42347 - DNA, 213 bp, Glycine max
  unsure (1)..(213): unsure at all n locations; Clone ID: 701125532H1
aagnaagatctagtcctagaatcaccacaggggcgacctcacctccangaacacatagccatgtcaagnaacttgcttctgttcttnttgcagtagcnancttcctnccatggcttcagaagcacaagcaccagcaccaaaagcnnttagccccattnttnaacaaggntaaccccggnncngggccttctgnnggaaagntnntgaacgnng

SEQ ID NO: 42348 - DNA, 234 bp, Glycine max
  unsure (1)..(234): unsure at all n locations; Clone ID: 701125533H1
aggaaaaccctaattgcggtattctcagtgccttcgagagaaagaaaaaatggcagataatcttgttctccgtggcaccatgcgcgcccacaccgacgttgtgacggcgattgccactcccatcgacaactcccgacatgatcgtcaccgcntcangcganaaatcnatnntcctcgggttttacaccnggggngaaaatttggggtccccngnggggnnncagggnntttttt

SEQ ID NO: 42349 - DNA, 75 bp, Glycine max
  unsure (1)..(75): unsure at all n locations; Clone ID: 701125535H1
gtggatattcgtctgaattagtagncngcaagtgcaagtgganggtcncccattncacatatacgcatgccttgt

SEQ ID NO: 42350 - DNA, 139 bp, Glycine max
  Clone ID: 701125538H1
ggggtgggtggtgaaggcttcttgtagttgacacatgaaaggaaacacaaaccagggaaaggaaatttcagtggccgggatcgatcataaggaggaagaaatacaaggttttgggacctcttctcttggcttataaaaa

SEQ ID NO: 42351 - DNA, 230 bp, Glycine max
  unsure (1)..(230): unsure at all n locations; Clone ID: 701125539H1
ggcaaaatcaggggtcgaatcttccaaggttgttctggggggcattcaaacctaatactattattcgtgaagtgtcctgtgganctgtccatgtggttgctttgtctgaggaaggcctactacaagcttggggctacaatgaatatggtcaacttggccgaggtgttacttgtgaaggactacagggggcttgtattataannncttatgctaaattccttgatgaagcc

SEQ ID NO: 42352 - DNA, 230 bp, Glycine max
  unsure (1)..(230): unsure at all n locations; Clone ID: 701125540H1
gtatatattaaggcggcacagacccaagtgggtgtaagtcagtcttgggagtgagtcactcttcttgcataacccagatctggtagtttacaaattgcttccttttatagaaactgaacgataatgtttcatttnnngttcanggttcnangtatgccttttnatggcccctngagggatgtggaaccgtgaaatnaancanggggtttttttccccggncggnntngaa

SEQ ID NO: 42353 - DNA, 143 bp, Glycine max
  unsure (1)..(143): unsure at all n locations; Clone ID: 701125542H1
gtagaggngatnttnntggtaaattacaggtaatcaaggagtggagcaatgtttctgaaatgttttggctgcacaagttncatctcagagaaagtatncccacaatncatagaaganttgtgccatcaattttctctggccga

SEQ ID NO: 42354 - DNA, 235 bp, Glycine max
  unsure (1)..(235): unsure at all n locations; Clone ID: 701125543H1
cagctagagcgtgggtgtcaacgttacatgcaactcagttggttcnaaaagcccataaagaagctgtgaattccttaagtgggaatggctctacaaaattaggaactgttgcaacagttgttgctgnnnccagttcaacanccttggaatgttccaaaagaaattgangcaggcaatgcagnttnctttgcnaaatgctctgggantgatgantatngggnctncnganggncct

SEQ ID NO: 42355 - DNA, 230 bp, Glycine max
  unsure (1)..(230): unsure at all n locations; Clone ID: 701125544H1
gaatatcttgttgtttggagcgatccgagaaaaactctgtaaacatgttggtttaccaggacctccttacaggtgatgagcttctctctgactccttccgttacaaggaaattgagaatggaatgctgtgggaagttgaggggaagtgggttgttaaaggagnngttgatgtagacattggtgcaaacccttctgcngaggntggaggagaaaatgaggnantttntcnc

SEQ ID NO: 42356 - DNA, 220 bp, Glycine max
  unsure (1)..(220): unsure at all n locations; Clone ID: 701125545H1
attcctccantcccttcgcaacanagcagtagcgaganctcctccanccgcnggnacangaggngcactggntcancnaggtgtcaaganatatttcggtgctnnanctacttcagagctctccaataattnnnctnccatgaaattacntccctccnttagcttcaggtgtncaanggaaaccnggatatgggcaatcagggnggaatnaaggacgaaa

SEQ ID NO: 42357 - DNA, 234 bp, Glycine max
  unsure (1)..(234): unsure at all n locations; Clone ID: 701125546H1
gttagactctgcttctttctccaacttcacacacaaaaaaacatggcaaaggatagaacaattggtgtggctctagatttctccaaaagcagcaagaatgctctgaaatgggcatttgagaacttagccgataanggtgacnccatttntgtcattcanatcaacccaaactctcgaggaggngccccngaaacangctagggggaaaaatcnggtcctcctctnntnccgggg

SEQ ID NO: 42358 - DNA, 229 bp, Glycine max
  unsure (1)..(229): unsure at all n locations; Clone ID: 701125547H1
gtcatattcactttgttggcttcatttcataaggnanaagtagggtttcaccaccaggaagtgtctatcccatcagtccctgctccagatacgcttttatcgttggaagagcttcgggagcagcgtcttactgacccttgtcttccaggaanttacnggaanagggtngctaaatggaattcatnccctggcccataggnanagggttctgtganccnanaattncaac

SEQ ID NO: 42359 - DNA, 225 bp, Glycine max
  unsure (1)..(225): unsure at all n locations; Clone ID: 701125549H1
attttgatgctcagaagcatcctacttgttcatcttatctgttccatgcctggtggttgactatcaggaatgttttagttttgacacttgacagcagtgtggaggattgagttatatactacaaatatgcatgaatgccgaagtttattactagacgacatcgtatnagntgtcncctgtatgnnagggtaatcctanagtnnntntaanntaanaagnctttnc

SEQ ID NO: 42360 - DNA, 232 bp, Glycine max
  unsure (1)..(232): unsure at all n locations; Clone ID: 701125551H1
gggagactccatgaaggtgtcatatttacaccagctagaaagattgaatgggggagttgttgtgggagagattagcagaaggttctctacaaatgagaacacattgacagttggatgttcatatgtggttgattctcagacagttttgaaggcaaagctgaacaaccacggcaacttggggccttattgcagcatgagctaacacgtangtncatcctggncanccnggnnc

SEQ ID NO: 42361 - DNA, 233 bp, Glycine max
  Clone ID: 701125552H1
aacgtctcattgtgttccacttgtaaaccccatctttctctctcaacctccaatcccaacaaagcttcttctacttttcctcttcctcttcctcttctgggactcaacataaagaaaagtctccaaccatctcagaaactcacattttcattgggtgaatccgtgtctggtgccaccctcgttgctctcctctctgcttctttcatctttgttgatcccgcacttgcattcaa

SEQ ID NO: 42362 - DNA, 234 bp, Glycine max
  unsure (1)..(234): unsure at all n locations; Clone ID: 701125555H1
ctaatttgttccgcaaaatggtgatgnncgattgtgaggaacaaganagttaggttttggaagaaagtgtatgttatatacagcttttcctttgttcgcaaaatcatcgcccacatggtcaccttcttcttctactgtgttgtgattccccttacaatcttggtcccagaggttcatgttccaatctggggagctgtttatattccttctgtcatcaccattctcaaattcagt

SEQ ID NO: 42363 - DNA, 232 bp, Glycine max
  unsure (1)..(232): unsure at all n locations; Clone ID: 701125556H1
attcaatattcctgggatccacctaattgttgacatgacagattatgttgaaggccatttttcttatctttaggcgacacatatcttagacaaacttaatttggatagatattatcctgtttataacagcattctttgcaaacagtaacctctcgccttcattgtttgcttgttgatgaagaaaagaaagagcgtaagggttttcgtagtctggtcnattcnnaggaatccc

SEQ ID NO: 42364 - DNA, 236 bp, Glycine max
  unsure (1)..(236): unsure at all n locations; Clone ID: 701125557H1
gggtctccgacgctggcatgcctaaaatcctgattgctaatagttctatcttgaagaggaacttgtaaaaatgcctcatcccacgttatgagatcctaaagagtgtactttgtgatgatcgggaagttgttagagctttgagaaattcccctctnggttttatatatggtgacttagtgaatgccttggttccaaacattaaaaattntnnangcaangtggtgtggnncnggccc

SEQ ID NO: 42365 - DNA, 233 bp, Glycine max
  unsure (1)..(233): unsure at all n locations; Clone ID: 701125558H1
ataggtgcnttgagagagatgaacttggagtattttaccatagatagtcagggcttcattacaancaatgagagagcgcctagtggagctatttggggatgaggagaataatcgtaaagctgttgcatgtntaaatgtgatggctactcggattgcaacactttttggcttcattaagagaatttcctttgtcncgctttcgtgctgccaatnccttagatgnaaccacaatg

SEQ ID NO: 42366 - DNA, 230 bp, Glycine max
  unsure (1)..(230): unsure at all n locations; Clone ID: 701125559H1
gcgaagacagccatggcgtcgtttcttcaatcgtttctggatccgaagaagaactggttcgccgctcagcacatgaaatccctctccaaacgcctccgcaaatatgggctccgatacgacgatttgtacgatccttactacgatctggatgtgaaggaggcgctgaatcggcttccngaaagaggtgtggaggntcncaggggggnnttaaacgcngcaatngatnttnc

SEQ ID NO: 42367 - DNA, 232 bp, Glycine max
  unsure (1)..(232): unsure at all n locations; Clone ID: 701125560H1
ctagttgccacactacaccgatatttccaccaaacccgtttgcnttgttgtttgcgaataaatggcgactaagaggagcgtgggaacgttgaaggagggtgatttgaaggggaagagggtattcgtgagggtcgatctgaacgtgcctttggatgacaaccttaacatcaccgatgacactagagtccgtgctgctgttcccaccatccaagtacttgaanggttatggggc

SEQ ID NO: 42368 - DNA, 218 bp, Glycine max
  unsure (1)..(218): unsure at all n locations; Clone ID: 701125561H1
cgaatatcttgttgtntggagcgatccganaaaaactctgtanancatgttggnctaccaggacctnctacangtgatgagcttctctctgantccttccgttacaaggaaattnanaatggaatgctgtggancagttgaggggaaatgggttgttaaaggagccgtggattnaacatggggcaaacccttctggngagggggagnagaanntgagg

SEQ ID NO: 42369 - DNA, 226 bp, Glycine max
  unsure (1)..(226): unsure at all n locations; Clone ID: 701125562H1
ctttaagtnaacaactgaagctgtgacagtttcagatgagtgaagcaacaacaagaaacgaacggcgggttctggtggcggtggacgaaggcgaggaaagcatgtacgcnctttcttggagcctcangaacataattttccaaaatnccagggatnccccngatcnttnttnnggtaagccccnntangggggttnnnnccccctnggntncnnaggcnangngat

SEQ ID NO: 42370 - DNA, 236 bp, Glycine max
  unsure (1)..(236): unsure at all n locations; Clone ID: 701125564H1
gctgaagaangcacttatgtggctcctacacttgatnggactacagaattacctaacctgtacaagaattccaatgccaatgcaggagccattcactcggaatactgctggngtatggggttatatttttcaaataacttttcagacttgtgcnaggtgtgtagtggctcactgaccgtggnatncgggcctggnccttaatccaacantttcngaancccnangttnncctncng

SEQ ID NO: 42371 - DNA, 235 bp, Glycine max
  unsure (1)..(235): unsure at all n locations; Clone ID: 701125565H1
cttggattcagatcttcacctctcgttaattcaaatgagatgatgatacccaagccagccacagaattaattagggaaattgcagtgttagagttggaagttgtgtattnggagcaacatcttctctccctgtaccgtaaancttttgcgtcnaanaattctctcggtngccgccggttgcgaggggggaaacantgnngctccgcnnagaaggggcgggngtggttgntttttt

SEQ ID NO: 42372 - DNA, 230 bp, Glycine max
  Clone ID: 701125566H1
cttaagtatgacagaaaatgtgacttcaatcctatcaattgatgatatgcttccagctgttgcccaaggtgctattggaatagcatgtagaagtgatgacgataaaatggcggaatacattgctacacttaatcatgaagaaacaagactagcagttgtctgtgagagggcctttcttcagactttggatgggtctgccgcactccctattgcagggtatgcttgaaaac

SEQ ID NO: 42373 - DNA, 230 bp, Glycine max
  unsure (1)..(230): unsure at all n locations; Clone ID: 701125567H1
gtccggccaccttggataccaaggacgccaatgaaagggcaaatctggttcttgatcatgcagagagaatgggctgcaaaagatacttgaccccaagggatgttgcagagggtacttcaaacttgaatcttgcatttgttgcacaattgtttcatcataggagttgtctatctacngnccctaagagatgccctatgcnnngatgttgccgntgatgtncnaccttctng

SEQ ID NO: 42374 - DNA, 233 bp, Glycine max
  unsure (1)..(233): unsure at all n locations; Clone ID: 701125568H1
gggcatggttgtngtggttcctcttgattggntctcttttcagcattgtcttcgcaatcgcacaacccatttgcncntctcctccagattnnnnnnnnnnnnnnnnnnnnntctctgcttccactctcccataattnttggncaagttgccttttttcaccaattccgactnctttcaagtgggtcgacccattggcacttatggcttcatcaacgtcaccaggtatatgacc

SEQ ID NO: 42375 - DNA, 229 bp, Glycine max
  unsure (1)..(229): unsure at all n locations; Clone ID: 701125569H1
gtaagatttgcagtagacagaggaggattagttggaccagatggttccacacactatggngcnaaagatgtcacttttacggcctgcctccctaacatggtggtgatggntgcttctgatgacgcagaaatttttcacacggttgccacagcagctgccattagtgatcaaccgtgttgtttccgataccagaaggganatggagttggtgttgaaataccaccaggga

SEQ ID NO: 42376 - DNA, 197 bp, Glycine max
  unsure (1)..(197): unsure at all n locations; Clone ID: 701125570H1
ggtgttcggcggtttangagcggttgttgcaangacggagctgagcaagagacncaaggaccgaatcaacacctcttccgcattcaattccttcnagaacaactacctcatcgtctattccctcatgatggctggagattggctacaaggtccatatgtctactactttacagtacatatggatatgggaaggagac

SEQ ID NO: 42377 - DNA, 230 bp, Glycine max
  unsure (1)..(230): unsure at all n locations; Clone ID: 701125572H1
gcagaaagcagcagggaaggaggaggagggaaaactgcagaagggaattgcagagttctacgacgagtcgtctggcatatgggagaacatttggggcgatcacatgcaccacggcttttatgacccggattccaccgtttctgtttctnatcatcgcgctgctcagatccgaatganccaagattcctnactttnccccctctgctttccganacccnttacaantgncc

SEQ ID NO: 42378 - DNA, 211 bp, Glycine max
  unsure (1)..(211): unsure at all n locations; Clone ID: 701125573H1
ctatgagcaaggattatctaatcatacctttctctccttcttnccacggtncttgcaactaaacgnnnnnnnnnnnnnnnnnnnnncctctatcttgggaagggcttctcccatcgcaaattgtctcccagttatcacattcacanaaccattgacgnatcctatgcagnaatcntcgatgagaatnnaacgggaagccgggtaaangtct

SEQ ID NO: 42379 - DNA, 232 bp, Glycine max
  unsure (1)..(232): unsure at all n locations; Clone ID: 701125574H1
tttgagtttcctcttataggcaacgaagaagggccacagatggttgaaaccgatatggatgccgaaactgttgcaaatgtggttccaccaaaggagactccncacagtgttcccatctcttatcattccncacactcacnccctnnctcttaatgagagggattatttcatccatgaccagaagatctgttgctgnacaccgtggcanggacttgagntaggnaancnttnc

SEQ ID NO: 42380 - DNA, 228 bp, Glycine max
  unsure (1)..(228): unsure at all n locations; Clone ID: 701125576H1
cttccttcgtcggttgattggtgaagttgctggtgaccccagaagaaggggtagtgttggaatattattgttaagctttgaactttgaagtagtggcagaaaggttcattgacccttttttggtngacttacttgtttgtggtccgaaactgctgattgcaactgttcagtggtcacaggaagcaccaccctccaaagccagcacttaaaacctttccttctcttccg

SEQ ID NO: 42381 - DNA, 209 bp, Glycine max
  unsure (1)..(209): unsure at all n locations; Clone ID: 701125577H1
attcatctatggctacccttatnnancccagcanccacttctccccangaagacgctnangcnctcataacggcntttgaaggatgggggactgatgagaatncngtcatagtaatattgggtcatagaactgtttatcanaggnancaaatcagnagagtctatgnggnaattttccaggngggtctngtgaaacgncctagagtctg

SEQ ID NO: 42382 - DNA, 229 bp, Glycine max
  unsure (1)..(229): unsure at all n locations; Clone ID: 701125578H1
ccctaggaaaatcactcaccaacgacaacattgttagtttagcatccaagggtgcctcgaaagacgccatcaacgttgttctcacatcctcggacgtaaccgttgaaggattctgttccagtaggtgcgggacccatggctcctcggtgggtcctcgcaagttcgctnacgtgtgggtggggaactcggagacgcantgccngggcnnaatgcggggnccctttcaaac

SEQ ID NO: 42383 - DNA, 229 bp, Glycine max
  unsure (1)..(229): unsure at all n locations; Clone ID: 701125580H1
gttactgtaacaaaaatgttggccaatctcgaacgtccaagtgcaccacgtgtgcagcctaagccatctaatgttcagantctggatgccaagaatcatattgagaaacatggtgtgaacaatagtccatctacttcctctggcnnntccaaaatcctctacggtaantgcctcgaaacccaaaaggcccgggggaacncnaaacctggggcggnttttggggaaancc

SEQ ID NO: 42384 - DNA, 230 bp, Glycine max
  unsure (1)..(230): unsure at all n locations; Clone ID: 701125581H1
gcaagtcctatcccaaccctaaccctaacttcgaaccttcgtcctttctctcttcttccttcagattcatccgtaccgttagttactactggattcgcggttgattgctgctaccggtttctcctctttcacgtataagattttgagtnggtntctgaatataaatggangccnaacggntnaccanncggttgaggagagnagnaggaattntgggagaaagggangcc

SEQ ID NO: 42385 - DNA, 231 bp, Glycine max
  unsure (1)..(231): unsure at all n locations; Clone ID: 701125582H1
caacagcagcaacaacatgggcatttgacccgggttttgacttgggcctggacactactgggcttcactcttctgttcctcctgctccccatcttttttcccaggcccagatgggctttgagttctcggaactcgaggccctcactggacctgggaatggaaataatgcccctttgnggacggggnaaaggtggctgcggccatgctgctgcggcaacttcntcgngnggg

SEQ ID NO: 42386 - DNA, 210 bp, Glycine max
  unsure (1)..(210): unsure at all n locations; Clone ID: 701125583H1
cgaagttgctaaccgaacaactgaaccatcttatatgaggancagcatgatgagcctgcaaacactaacattgctgattacatgctagctgccgttgaaaattaagagacacatattcagacctctgttttccaaggagtttcttttcttcaaatatggatgagaacatganacagttccagaagaattaacagaactggaagtgggagc

SEQ ID NO: 42387 - DNA, 199 bp, Glycine max
  unsure (1)..(199): unsure at all n locations; Clone ID: 701125585H1
gctananananagggtaccctcttcttaatttgcactgtttttgtgtctnttacagcacttttaggagttcttctattctagtaacctctgccaaccaacataacanntacgaaaatanaatagagntgctgcctccttantggcgatcgttcgngaanaaacataatgctactgacatngganngaagnggagttggt

SEQ ID NO: 42388 - DNA, 222 bp, Glycine max
  unsure (1)..(222): unsure at all n locations; Clone ID: 701125586H1
ggtagcagttatttagttggctgaccgaaaccatttatagtttctacggagcacaatgttgttccatcaaacttctgcaanccaatcttcttcgaaaattgcaacaaaaatacatacaacggaactcatccaatttcaatggttgcgagagctaacggaattgagtgtgtttgaagtgattatgggtcctatgaggatgctgaataacagaaagaaaggacc

SEQ ID NO: 42389 - DNA, 230 bp, Glycine max
  unsure (1)..(230): unsure at all n locations; Clone ID: 701125587H1
gaggaactcatctttcacatcaactatcttggtgctgatcaacccaccttcacccttaacttctccaaaggttctagccaagtcattgctcaatactaccaactaattcgccttggttttgagggatatagaaacgtgatggaaaactgcagagacaacatgttggtgctgaaagagggtntaggaaaaccaggggattttcaattgtgtccaaagacaatggagtgcct

SEQ ID NO: 42390 - DNA, 232 bp, Glycine max
  unsure (1)..(232): unsure at all n locations; Clone ID: 701125592H1
attttggcaaagtcaagttcgctaggaacactgattctggccaagcttttgctgttaagatcattgacaagaacaccatcgttcgatatcaacatcaccaatcagataattagggaaatagcgaccttaaagctcctacggcatcccaacgttgttagattatatgaggtcttgggctagcaaaacaaaaatttatatggtacttggagtacgtgantggagggganttatt

SEQ ID NO: 42391 - DNA, 226 bp, Glycine max
  unsure (1)..(226): unsure at all n locations; Clone ID: 701125593H1
aaacacancacagagagaagcgtcttaataaacgctcttctctgaanaacctgganttcntctctncnctctnctcnnncgtntcgancttcgatctcngaaaatgagaganngcatntcaatccacatcggtcngnngaaaancaggtcggaaacgcctgctaggngctctacngcctcgaacacggnattcancctgatgggcngatgccaagtngtaatactg

SEQ ID NO: 42392 - DNA, 167 bp, Glycine max
  unsure (1)..(167): unsure at all n locations; Clone ID: 701125594H1
ttggccctggctcccattgctaaacctcttgctgggaagaagctttgcaagcgaaccctaaaacttgttcgtagagctgccgaacacaaatgcttgaaaagaggantgaaggaggtcgtaaaaagtataaggnggggnnaanaggtttgngtgtaatnnncgggaac

SEQ ID NO: 42393 - DNA, 224 bp, Glycine max
  unsure (1)..(224): unsure at all n locations; Clone ID: 701125595H1
ggggaaccaaacctgtggcttccatctctcaaaagctcaacaaccacatgccatggcaacagcgtcaatgtgtatgagcttcaacctggcaacagcattcaagggtctcnnnnnnnnnnnnnnnnnnnnnntcttcggtggaagtagtggttctctccgcgcgggtctgcctcggtggtgtcgtgcccnggngtgcccgctgacatagagnccgcgcaaaaggg

SEQ ID NO: 42394 - DNA, 231 bp, Glycine max
  unsure (1)..(231): unsure at all n locations; Clone ID: 701125596H1
gtacggttcatcaagacagtgcaaagggtggggctctatgtccatcttcgcattngaccttatgtgtgtgctgagtggaactttggaggatttccagtttggttgaactatgttcctggcatcagcttcagaacagataatggcccttttnaggccgcaatgncaaggtttcatcnaganaatagtccncattnngangantgaaaggcttntncnagtnnccnggggggc

SEQ ID NO: 42395 - DNA, 262 bp, Glycine max
  unsure (1)..(262): unsure at all n locations; Clone ID: 701125604H1
gttttttcgaaagtactaatcgaagcgtggatattgggtttttcccgcccattttgaaagaaaagaaaaccctggctggttccatttctcatcttcccccactcgcacaaaaataagtttcgacttccgagcagcaaaatgagtgctcacatggagacgganctcacaaccnancaannntnntctgcttacnancactcacttcccgttnccgaggncaaagtncttgtncctgtggaggtaaccctaagnncttcaagca

SEQ ID NO: 42396 - DNA, 259 bp, Glycine max
  unsure (1)..(259): unsure at all n locations; Clone ID: 701125605H1
ccctaatcctaaaaatgtgtacctcgtcggaggtttgcaagtggagtttccctaccaaccatatggatctcagtttgcgtttatggctagagtgatttccacccttaatctagttnagaaagaaggccattgtcacgcgttgcttaagtctccaagcggtactggtaagtccctttcgcttctttgttcctctctcgcttggcagcaccacttaaatctcaacatgaccatctcaagcccgcgtcggangcaaccaccg

SEQ ID NO: 42397 - DNA, 256 bp, Glycine max
  unsure (1)..(256): unsure at all n locations; Clone ID: 701125606H1
gggaaaatgaagagtactgtaggcgtgtgtttgttgtttttggntttgttggaggcgatgtgctgtgaagggtgttggaaggaagagagagatgctcttttggtcctaaattcccgttttgacttccctctctcttgggacggcccagactgttgtcaatgggaaggagtggagtgcaactccaccactgggagagtggccggactcgatttgcggtggcggtggtcgtttccgccttccaatggcaccaaactat

SEQ ID NO: 42398 - DNA, 252 bp, Glycine max
  unsure (1)..(252): unsure at all n locations; Clone ID: 701125607H1
atttttaatgcagctggagtaactggcagacccaatgtcgattggtgtgaatctcataagacggaaaccattcgcaccaacgttgctgggactttaacattggctgatgtcagcagagagcatggactcttgatgataaattatgctactgggtgcatatttgagtatgatgcagctcatcctgagggttctggcattggctttnaggaggaagacagacccaacttctttggttctttctattccaaaact

SEQ ID NO: 42399 - DNA, 219 bp, Glycine max
  unsure (1)..(219): unsure at all n locations; Clone ID: 701125608H1
gttggccaatggtccatggcaanncaagaacccggaaaggcctttttggatactgcnactggttcttagtctgtttgttaatttggaaatactagactttggattactttagttttgcaagagtgaatttgagttattgtcagaacattccaattacttaaattgtttgcgaacctcttcaatttggttattttaatgttatattttgttatgatgcac

SEQ ID NO: 42400 - DNA, 249 bp, Glycine max
  unsure (1)..(249): unsure at all n locations; Clone ID: 701125609H1
caaatgcgtgtcgaatttaaagcaatctctggctttctgctacttcatgttcattcacacccaattttatgtgttgtatgtaggaactctcttaacgagttgttgcattgagagatggcaacagctaacaggcacagctatgagcttctcctactccaccgacttctgcttnncttgtcgtctcatgctcattatcgttatcttgggcagtgcaagatggtgaacgggttatggtgcgcaacaccccac

SEQ ID NO: 42401 - DNA, 249 bp, Glycine max
  Clone ID: 701125610H1
cccaactccaacctctgttcatcgtctaccgcgctttcttttcaaccagaactatgattaagctttttaaagtaaaggaaaagcagagagaacttgcagaaaatgcaagtggcggaccacctgttaagaagcaaagtgctggagagttgcgtcttcacaaagatataagtgagctgaatctaccaaaatcatgtaccatgcaattccccaatggcaaagatgatctgatgaactttgaagtttcaattc

SEQ ID NO: 42402 - DNA, 248 bp, Glycine max
  unsure (1)..(248): unsure at all n locations; Clone ID: 701125611H1
ctccattccactccgaaccaaaaacaaacaactcatcttcccaaattcaaatcacacactcttttctctctgtctctgagattagagttagggtttgtgtttagttcgatcatggcttcgtcttcctccgatccaggaaagtccgcggagacgtcnnnnnnnnnnnnnnnnnnnnnnaacgaccagctcttgctctacagaggattgaagncggccaagaaggagagaggttgcacggccaaagagcg

SEQ ID NO: 42403 - DNA, 248 bp, Glycine max
  Clone ID: 701125612H1
ggacatcaacctaagctctctgctcttgctgttatgcttcaccactcttaccgaggctctatggttaaccatccccagcaagggaaccaagtgcatgtccgaggaaatccagacacacgtcgtcgttttagcagattactatgttgtagccgatgatgtccagggtcaccaacttcaaactatttctgccaaggtgacatccccttatggaaataatcttcaccagaatgaaaatgttactcacggtc

SEQ ID NO: 42404 - DNA, 247 bp, Glycine max
  unsure (1)..(247): unsure at all n locations; Clone ID: 701125613H1
ctcgagcggttgagtacaccgtggcccaggtcacgctttagctttgacgattttgaagcgtntcaggctttgtcacacagtgtaagagancggttgattgaacgctggcatgatactcatgtttacgtcaagagaacaaaacctaagcgcctctacttcctttcgcttgagtttcttatgggtcgttccttgtcaaatagtgtcatcaatcttggcatccaggatcaatatgcagaanccctaancc

SEQ ID NO: 42405 - DNA, 252 bp, Glycine max
  Clone ID: 701125614H1
gcttgtctcaaagattaagccatgcatgtgtaagtatgaactaattcagactgtgaaactgcgaatggctcattaaatcagttatagtttgtttgatggtatctactactcggataaccgtagtaattctagagctaatacgtgcaacaaaccccgacttctggaagggatgcatttattagataaaaggtcaacacaggctctgcctgttgctttgatgattcatgataactcgtcggatcgcacggcctt

SEQ ID NO: 42406 - DNA, 248 bp, Glycine max
  unsure (1)..(248): unsure at all n locations; Clone ID: 701125616H1
caaaaccctaatcgagatcacaatcggatcgtaaacaaacagagaccaancatggacggtgattcctcttggagtgctcgactctcttccgcttccaggcgctaccaatccgctcttcaatctcgatcagacatgttcatgggttttgatgaaaatgatggggacgatgatataagagaggagtttctctgcccattttgttctgagtattttgatatcgttggattatgctgccacattgatgaaga

SEQ ID NO: 42407 - DNA, 270 bp, Glycine max
  Clone ID: 701125617H1
caattatcatgggcaaggtcaagatcggaatcaacggatttggaagaattggccgtttggtagccagagtggctctgcagagagacgatgttgaactcgttgccgttaacgaccctttcatcaccaccgattacatgacatacatgtttaaatacgacagtgttcatggacactggaagcatcacgatgtcaccgttaaggacgagaagacccttctcttcggtgacaagccagtcactatttttggacacagaaaccctgaagagatcc

SEQ ID NO: 42408 - DNA, 266 bp, Glycine max
  unsure (1)..(266): unsure at all n locations; Clone ID: 701125618H1
gnaaaaaaacattgtaagcgctgtaacagcaggtttcggaggcttttggggtagccgacgagacacagtggattccttaattctccatggatatggagatgaaagaaggtgaagcccccgtgttgtggttcgaaacctctgactctgtctgtcgtcgacaccagtttgaacccgatggtcaactctccgtagtgattgtcgatgattccaggcccttataccaaagggtggctggatctttcatgaataaatttttcccctcggga

SEQ ID NO: 42409 - DNA, 258 bp, Glycine max
  Clone ID: 701125620H1
gttcttcttcttttgttgttctgtgtttgtgtttgttttttctctcacctgaaaatgtcttgctgcggtggtaactgtggttgcggaagctcctgcaagtgcggcaacggctgcggaggctgcaagatgtacccagacttgagctacactgagtcaaccaccaccgagaccttggtcatgggagtggcacctgttaaggctcaatttgagggtgctgaaatgggtgtgcccgctgagaacgatggctgcaaatgtgga

SEQ ID NO: 42410 - DNA, 257 bp, Glycine max
  Clone ID: 701125621H1
ttactctctcactttctccaatatgggcttcttctcgaaatgagttttatgcacttatggtagtggtggtggttggctccatagtggcttcctgtggtgctaacttcaaccaagactttgatctaacttggggtgatcagcgtgctaagatattcaatggtggacagcttctatctctttccctggacaaagtctctggctctggcttccaatccaagaaagagtacttatttggaaggatcgatatgcagctcaag

SEQ ID NO: 42411 - DNA, 253 bp, Glycine max
  Clone ID: 701125622H1
gcctgcttctgagaaagaaaagagaggttgctttgcacaaattggatttgaaactgtgttttgactttgaacatgaccattatcgctcttagtttttattattttctatgttgatttacatttcgtggatatgaaatattgttctgcttcattaacaggaggattcgtggttttttgtttttcctgtgtttttgtttatattggcgattgatacaaaaaataaaaaccctctaatagcgcactaatctgcatt

SEQ ID NO: 42412 - DNA, 109 bp, Glycine max
  unsure (1)..(109): unsure at all n locations; Clone ID: 701125623H1
ggcattctcagccttctaatggaaagcattgatgatgagaattgtgatggtggtggaagcaagaagagagttatttctccttggtatgggtgacccaactnctcaccac

SEQ ID NO: 42413 - DNA, 250 bp, Glycine max
  unsure (1)..(250): unsure at all n locations; Clone ID: 701125625H1
cttcccctttttgatttttcttagaaaactcccaacttcgaannaatatgaagaaagtggtgctaaaggtggaactccatgatgacaaaatcaagaaaaangccatgaaggcagtatctggtatttcaggggtagagtcagtctcagtggacatgaaggaccagaaaatgactataattggggatgttgatcctgtaacagtagttggaaagtttacaaaattcagtcttggcaagcttagaaaattctg

SEQ ID NO: 42414 - DNA, 247 bp, Glycine max
  unsure (1)..(247): unsure at all n locations; Clone ID: 701125626H1
gngcagtctcattggctctgaatcgggccgaagcttcaggctcttactaataagcttaaagctgtacgcatgacttgccctctatttgacacggcccgttgggtgagttcgacattatataaaccctctatacaacaatcttatggtatttccgttgcctgttcagttctttaagttgctgcactgaatattgcaggtgaggaatcttgagagatcatattttaaaatgtggaatctgcattgctct

SEQ ID NO: 42415 - DNA, 249 bp, Glycine max
  Clone ID: 701125627H1
gttgggacccgattgcattcgggttcaaggcggagaatgagacagtagagatgttgattcataaccctggcaaagaggaggatcccgcgtgtggcccgcttgttgactcggttgctctcaggactctctaccctcctagagctactaaccagaacatactaaagaatggtggatttgaagaaggaccctatgtgttccccaactcatcttggggagtgatcatccccccaaacattgaggatgaccact

SEQ ID NO: 42416 - DNA, 250 bp, Glycine max
  unsure (1)..(250): unsure at all n locations; Clone ID: 701125629H1
ctttgtttttgttgtccttcttcaaataccgtaaaaccttcaagaatccaccacttccaccaggtcctagaggnnttcccataatagggaatcttcatcaactagatagtccttctcttcatgagcagctatggcatctctcaaagaaatatggtcctttattttcccttcaatttggattaaggccagccatagttgtttcctctccaaaattggccaaagaggtaatgaaagacaatgaccttgagtg

SEQ ID NO: 42417 - DNA, 226 bp, Glycine max
  unsure (1)..(226): unsure at all n locations; Clone ID: 701125630H1
gtgatagaccaanatgatgtatataagannggggcaaantctcacctcttgaacttattttttngatcgagttaggcccaaatccaaattttgagactacgaataccatatgacatgggattaccacagtttgaatcccacactgatttccaaaaattgtgaaagaactatgcagagttgtaatcagattgcttcctaactacatgttggaattggaagaactgag

SEQ ID NO: 42418 - DNA, 265 bp, Glycine max
  Clone ID: 701125631H1
gtcaagttgtacactaatcaaagagctgtatcttgttgggaacaagataagtgatgttgaagggctaacacagggctattgaagctaacagttctagacttgagcttcaacaagatcacaacagcaaaagcattaggccagcttgtggctaacttcaactcacttaaggcccttaatctccttggaaattcaattcaaagcaacatcagcgatgaccagctaagcaaagcagtctgtggtcttcttccaaagatggtgtacctga

SEQ ID NO: 42419 - DNA, 248 bp, Glycine max
  unsure (1)..(248): unsure at all n locations; Clone ID: 701125632H1
cagggcacagcataggcagtgaannaacacaacacagcngcccttggaattaaccatgnaangcntgntttcggcggccggtgattacgtccatttaaatcccaangtcctcttaanaaaattcntattggcactaagnagtggcggtattacgatttcggtccaaaagccgtgcctccgcttatatgtcttcctggaaccgccggaaccgccgatgtatactataaacagatcagtcattatctatg

SEQ ID NO: 42420 - DNA, 166 bp, Glycine max
  unsure (1)..(166): unsure at all n locations; Clone ID: 701125633H1
tgccttccaaggacaaaatcgcttacttctacgacggtgatgtcggtagtgtatactttggggcgaanatccaatgaagccccaccggctttgcatgactcatcatcttgttctctcatacgatcttcataagaagatggagatttaccgtccacacaacatacga

SEQ ID NO: 42421 - DNA, 267 bp, Glycine max
  Clone ID: 701125634H1
tcacttttcactttcgggctatttgctttcttagggcatctctaacaatatggccaaatccactttctttgtctgccttaacctttcattactcttctctctagtcacagccacttactactcaagtttaaccccaacacttttgggttttcgcgaggagaagttcacccacctccacttcttcttccatgatgtcgtgtcgggcccaaagcccagcatggtgtttatcgccgagcccaacgggaaagcgaaggatgcccttccgtt

SEQ ID NO: 42422 - DNA, 262 bp, Glycine max
  unsure (1)..(262): unsure at all n locations; Clone ID: 701125635H1
gttttccgcctctcaacttgacctctccttgaaacacttaaccttggtgggtgttcgagtcttgagtattttccagaaatattaggaganatgaaaaacataacggtggcaatgggtagaatcggaagaaggtgaagaaaaagtagtgggctcaatactatcttttgaggccacggactgcaatctatgtgatgattttttttttataggttccaagaggtttgctcatgtaggatatttaaatctaccggggaataatttc

SEQ ID NO: 42423 - DNA, 255 bp, Glycine max
  Clone ID: 701125638H1
gggtaatgtcttcaagaacaagagagtcttgatggagagcatacacaagtccaaggctgaaaaggcaagagaaaagaccttgtctgatcagtttgaggcaaagcgtgccaagaacaaggctagcagggagaggaaaaatgctaggagagaagagcgtttggctcaaggccctggagagaagccatcagcagccccaagtgctccatctgcaatagcatccctgccagcccaagcatcaaagaaatcaaagaagtg

SEQ ID NO: 42424 - DNA, 242 bp, Glycine max
  Clone ID: 701125639H1
ctccacccaagacttctgttactgtcaccttgagcacttcttgttgtttgttctcgacaggtgcaccattagatacttcctccccttcaacatagttctcccaaattctcagcttttgcttcttggcagattgttcagcaacagctttcttttttgaaccttcaagaagctcctctgcttggagctttcaatcctaagaagggtgacacagtcctttgtctttttggtgctgataaatcttg

SEQ ID NO: 42425 - DNA, 250 bp, Glycine max
  unsure (1)..(250): unsure at all n locations; Clone ID: 701125640H1
cgcattatattactagttttaatttgttttgtcgtttgcttctttctttgattaatgatgactagctttaaggttgcatgtgtggttgcgatgatgtgcatggttgtngccatgagtgttacacccatggcacaggccgcaatcacgtgcgggcaggtcgccggcgacgtgtctccgtgcctcagttatcttcgaagcggcggaaaaccatcggacgcctgctgcaacggagtgaagtcactcagcggtg

SEQ ID NO: 42426 - DNA, 239 bp, Glycine max
  unsure (1)..(239): unsure at all n locations; Clone ID: 701125641H1
atcagaaccacctgaagtagttcaggcacgaaatgacaattctcatggtacaaacttcccggattcccccgagcccatctatggaactcagttcttgccaaggaaattcaaaattgctgttactgtgccaactgataactccgtggacattctcacaaannnnnnnnnnnnnnnnnnnnnnaccgatgacgatggggagcctcaagggttcaacatatatgttggtggtggaatnnnnc

SEQ ID NO: 42427 - DNA, 246 bp, Glycine max
  Clone ID: 701125642H1
gcctcctgctgttaaccaagtggaattgcacccaggatggcagcagccaaagctgcatgcattctgtgaatctaaaggagttcatctgtctggatattctccactgggctcaccaggagttctcaaaagtgacattcttaagaatcctgttgtgatagagattgcagagaaattggggaagacaccggcacaagttgcccttaggtggggactgcaaacaggtcatagtgtgctgcctaagagcac

SEQ ID NO: 42428 - DNA, 248 bp, Glycine max
  unsure (1)..(248): unsure at all n locations; Clone ID: 701125644H1
gnnagcatcattccttatagggtgaaggttagtctcatttttgatgttcccatcttgggaaggctaactcctacctttggagaaaactggagaaatccccataccatacaagcctgatattgatcttgagaagattcattttgaaaggttctcttttgaagagacaattgcaacgcttcatttgaagttggaaaacaagaatgatttcgaccttggcctcaatgcgctcgattatgaggtctggctgg

SEQ ID NO: 42429 - DNA, 247 bp, Glycine max
  unsure (1)..(247): unsure at all n locations; Clone ID: 701125645H1
ctttttctttaggcctttccgaattaagtacttgtttcattntctctcgaagcaagaaaaatgttcatcgagagtttcaaggttgagagtcctaacgtgaagtacacagagactgagattcagtccntgtacaactatgaaaccactgancttgttcacgagaacaagaatggcacttatcagtgggttgtcaagcccaaaactgtcaaatatgaatttaaaaccaacacccatgtccctaaactag

SEQ ID NO: 42430 - DNA, 250 bp, Glycine max
  Clone ID: 701125646H1
attgcatcctgcagtaaatggaagtgttttgcctgcttcagtaatatcattatactgcacttatctctgctatagtgcactggctagtgaaccaagagattatgagtgcaatggtcttcacaaacactcaaaagctgtttccactggcacccttactttgggtttagctacaactgttctatctgtcgtttattctgctgtgcgtgctggatcttctggctgcagtgcttccccaccaagctcccctcgt

SEQ ID NO: 42431 - DNA, 250 bp, Glycine max
  Clone ID: 701125647H1
atggacttacaaggtgctgttaaggacataattgcttgggatggtactctctctcaagtgatttttcccttctgctcatacattttctgagaagtggaaaaggttcaatccttccttcctccatggcagtggatcccatgtttaaaacatcatttggttgcttctcataaggtggaaggatactatccctggagaacatgtgccatatcaaatcaagtgaggaagagagagtgatagaagtctgacagga

SEQ ID NO: 42432 - DNA, 265 bp, Glycine max
  Clone ID: 701125648H1
ggggaattggagatagacacctgaaacaatgggtgacagcagagcctgagaccaaagttctcagaattgaacctgaacatgacttgttaatcttagcttcagatggattatgggataaggttagtaatcaggaagcagtagatactgctcgttcttttctcgtaggcaacaacaaatcacaaccattgctgctggcttgtaaaaagcttgtagatttgtctgtttcacgaggctctttggatgacacaagtgttatgctaatcaa

SEQ ID NO: 42433 - DNA, 262 bp, Glycine max
  unsure (1)..(262): unsure at all n locations; Clone ID: 701125649H1
actaacgcaggtctatggattttatgatgaatgccagangaagtatgggaatgctaatgcttggcgatattgtacagatgtttttgactatcttactctttctgcaattatagatggaactgtgctttgtgttcatggtggcctttctccagacattcgatcaatagatcagataagggtcattgagaggaactgtgaaattcctcatgagggaccatttgtgatctgatgtggagtgatccgaagatatcgaaacatgggc

SEQ ID NO: 42434 - DNA, 263 bp, Glycine max
  Clone ID: 701125650H1
ctggaataattggcttcctatgtctgtggagcaacctttaatattcttctttttttttcatcttttgatatagctgctacgattacgcgttgctgtgtgttactttatttaccaatccatttattgatatgttcatgctgctgactaatcttgcactagcagaatatactatataacatcgttgtggtgattgaatcatgtcgcggagaccggtgaatccgtctcggcgattcggagacagtggaggtggattgttttcatct

SEQ ID NO: 42435 - DNA, 258 bp, Glycine max
  unsure (1)..(258): unsure at all n locations; Clone ID: 701125651H1
gacaggcctttaatagtggcgtaaatcttttgtattttgggttctgaatgtttgagcaggttgatgctgtacattctgcttgagtgccatgggattccaggacgtggagattgtngttgctgagactggatggccctcacgtggtgacagcaacgaattgggacccagtgttgaaaatgcaaaggcctataacgggaacctgatttctcatcttagatcattggttgggacacctttgatgcctgggaagtctgtgga

SEQ ID NO: 42436 - DNA, 257 bp, Glycine max
  Clone ID: 701125652H1
ggctggagggagagtccagttatggggaggaagctgcttcagaccaacagtatggtgaggtgagtcatgatagagctgggtggcctatgagggaaaaagatagaggttcggaaagggactggtctggttcttctgagagaaggtacagagatgatagagatcaaggatatgagagagatgcatctagagaaaaagatatgggtcatgatcatgaatggtctgaaagaaggcatcgtgatgatagagaaacgggcaga

SEQ ID NO: 42437 - DNA, 256 bp, Glycine max
  Clone ID: 701125653H1
tatccttgaaagcgtgctgggtgtgggaggcacgtgacgtctacacaaacaaaataaaaacccagtttctctccactcactaccactaccgctatcacccaatttccccccttcgttccttcagctcatgacgacgtcgttcggaggaccagccaccacctcagcgccgctcaaggacaccaagcttcagatcccaagcttccattgcttcagctctgcttccgcctctgctctctcgcgcaatgccctctccctt

SEQ ID NO: 42438 - DNA, 251 bp, Glycine max
  unsure (1)..(251): unsure at all n locations; Clone ID: 701125655H1
catcccctccgacattttctctattcttcaagcaaactcttcgtctcagannnnnnnnnnnnnnnnnnnagggtttccgtttctctctctgctatttatgatcactctctgacgcgcttctgtcaccatctcaagtgcttccgtctcttccccttcttctctgattggaaggattcgtgtggtcggagatggtggtttcggggccaatcacgccggggcaggtgtctttcttgctgggggttattccagtt

SEQ ID NO: 42439 - DNA, 200 bp, Glycine max
  Clone ID: 701125656H1
cgattttttagttacacctgaacaccaggtacgttaaacataaaaacaaaagcactctcctcttcctcctttcccccgaaaaacccttaaaccccgaccttcatatttgcagtgctagtctgtttatttcttcagctatgtttttgtcaagaacacttggacgaacactatttgctgcagctgccagatcaaaacaatat

SEQ ID NO: 42440 - DNA, 245 bp, Glycine max
  Clone ID: 701125657H1
gtttggagcgatccgagaaaaactctgtaaacatgttggtttaccaggacctccttacaggtgatgagcttctctctgactccttccgttacaaggaaattgagaatggaatgctgtgggaagttgaggggaagtgggttgttaaaggagcagttgatgtagacattggtgcaaacccttctgctgagggtggaggagaagatgagggagttgatgatgcagctgttaaggttgttgacatgttg

SEQ ID NO: 42441 - DNA, 213 bp, Glycine max
  unsure (1)..(213): unsure at all n locations; Clone ID: 701125658H1
gagaatatgaagntgtttgttttctttgntgctgcagtagttttggtagcatggccatgccatggcgcaggctaccaaaggttccctctccgaatgaaaactggctatggtgagcgttcttcggaggtaaaatgcgcaagttttaggctgctgtggaagcacacaacatccgagagaacgnaaccattcctgaagagtgcgttgaaccaacaa

SEQ ID NO: 42442 - DNA, 249 bp, Glycine max
  unsure (1)..(249): unsure at all n locations; Clone ID: 701125659H1
ctgtcggaaagaataagaggntttccaagggaaagaagggtggcaagaagaaagccgctgatccctttgccaagaaagactggtacgatatcaaggccccttccctcttccaggtcaagaatattggcaaaaccctcgtctctcgtacccagggaaccaagattgcatccgaaggactcaaacatcgggtttttgaggtctcattggctgatctccaaggggatgaagaccactccttcaagaagattc

SEQ ID NO: 42443 - DNA, 255 bp, Glycine max
  unsure (1)..(255): unsure at all n locations; Clone ID: 701125662H1
aactttcctattcacatctgaatcagtgaacgaggggcaccctgacaagctcctgtgaccagatctccgatgctgtgctcgatgcatgcttggagcaggaccctgacagcaaggttgcctgtgaaacctgcaccaagaccaacatggtgatggttnccggagagatcacaaccaaggccaacgtggactatgagaagattgtgcgtgacacatgcaggaacattggttttgtctctgatgatgttggtcttgatg

SEQ ID NO: 42444 - DNA, 262 bp, Glycine max
  Clone ID: 701125663H1
ctcttttatcccattctgggttttgcatcgtttgtggttttcatttacatgtcttttgggggcataaggttcagttttttggaggaaggcccagaattgagctttgtggagagaaatggaacacagtttgtgttggatgaaaaagcgttttatgtcaatgggtggaactcttactggttaatggtccaatccgtggatgtttattcgagatccaaggttcgggaaatgatgaaaactggtgctaagatgggtctcaccgtgt

SEQ ID NO: 42445 - DNA, 267 bp, Glycine max
  unsure (1)..(267): unsure at all n locations; Clone ID: 701125664H1
cnatcctttctttgtcaaacaccaaagtccaaaccattttttgctccgatcaacatgaagttgatcaataaaccatcgcaactacgttccctcttgagccttttctgctccattttgctgctcttggaattagctttcgtggctgcggaggacccttatagattcttcgactggaccattacctatggtgacatttatcccctaggagttaaacaacagcagggtattcttatcaaggccaattcccaggccctgaaatctatctgt

SEQ ID NO: 42446 - DNA, 231 bp, Glycine max
  unsure (1)..(231): unsure at all n locations; Clone ID: 701125665H1
cnanccaatcaaatcttcgtctgaatcctcttctctttctcgttcaccgcatcccaaactcctcagatccgtcgtcgattcggttttcccgctttctaatttttcgttttccattttctcccgggatgcgttngaagttcttgctctgtctgatctcggcgtgattctcacgtgacatgggttttggaacctggacgagtgcagtatgcgtgtgtgtggtagtgaaggcgt

SEQ ID NO: 42447 - DNA, 264 bp, Glycine max
  unsure (1)..(264): unsure at all n locations; Clone ID: 701125666H1
ctagttaggcaaacacaccaaacaccaaacaccaaactagttggctcaattctctttgaatggctttggaggctttgaattcaccaacagcagccaccactccgttccgtggctaccnnnnnnnnnnnnnnnnnnnnnnnnctgaccttcacttacgtgagccttgggctaaaaggaaacgctccaaacgaccgcgttttgagacggaggaagagtacctcgctctttgcctcatcatgctcgcacaaagcggtaacaccagaa

SEQ ID NO: 42448 - DNA, 262 bp, Glycine max
  unsure (1)..(262): unsure at all n locations; Clone ID: 701125667H1
caaccttcgtcanaaacccaattcncgagggatcggattcgccatcatggggaagaagaagaagagagtttcctacgaaggtgtggtgttattactgcgatcgcgaattcgacgacgagaagatcttggtgcagcatcagaaagccaagcacttcaagtgccatgtctgccacaagaagctctccaccgccggcggcatggccatccacgtcctccaggttcacaaggaatccgtcactaaggtgcccaatgcaaagcctgg

SEQ ID NO: 42449 - DNA, 257 bp, Glycine max
  Clone ID: 701125668H1
gcaaagtcactttctccaccatcaccaccacttcctagcaagacctcattgacacccccagtttctccaaagtcaaagtcccctaggcttcctgccacaaagagaggcaatgacaacaatggacttaactcaagttatgaaaagattgtgatccccagaagctccataaaaactccaactttggagagaaagaagtccaagagcttcaaggaaggttcctgtgtgtctgcttctattgaggcttcattgagttactc

SEQ ID NO: 42450 - DNA, 239 bp, Glycine max
  unsure (1)..(239): unsure at all n locations; Clone ID: 701125671H1
attttgtatcactatgacacggttgtgttcttgtaggtactatttgaaanntgcagtccttgaagggggtattccatttaacaaagcatatggaatgacagcctttgaataccatggnacggatccaaggtttaacaaggttttcaacaaggggatggctgatcactctaccattacaatgaagaaaattcttgagacctacacaggctttgagggactaaatccctggttgatgttgg

SEQ ID NO: 42451 - DNA, 248 bp, Glycine max
  Clone ID: 701125672H1
attttttctctctcttcctctttagcttcatcgccatggcatcaccagcaagaaccttctttgccttcattctcgccgtcgtcgctctcttcttcgccgccgccaatgctcaagacctctccccggctccgagtcccgatgccggagcggcgggatccgtttcgagctccgtcgccatgatcggagcttcggttgtgctgtcattgatggctatcttgaagcattgaattcgttaatttcgttgggtt

SEQ ID NO: 42452 - DNA, 227 bp, Glycine max
  unsure (1)..(227): unsure at all n locations; Clone ID: 701125675H1
ggncaagtaccatgatgagcttacgcgccaatgctgcgancattggcactcctggaaagggtattcttgctgctgatgagtcaacagggacaattggcnagcgtttggccagcatcagtgtagagaacattgaatccaacaggcgagctcttagggagctgcttttcactgctcctggtgttcttcaatatctcagtggtgtcatcctctttgaggaaaccctctac

SEQ ID NO: 42453 - DNA, 251 bp, Glycine max
  unsure (1)..(251): unsure at all n locations; Clone ID: 701125676H1
ggcgttgtcaacttcccttcacccaaccaccttcnggtctccaaacaaacatgggtnnggaaacacgacgccgttttggccagcgaacctgtcgccgaagaagccccctgcagccctgagctcgattccgnnnnnnnnnnnnnnnnnnnnnnnnnnnnnnnaaacaaagacaagcaccaaaccgaaagcagccccaaacgaaagctcgacgaacacgacccccaaaacggcaccgaatcgaagaagaaaaa

SEQ ID NO: 42454 - DNA, 113 bp, Glycine max
  unsure (1)..(113): unsure at all n locations; Clone ID: 701125677H1
ggttgatttacattggaaatcaaagatgccaagttccgacatgccttccaaaactctcaaactctctctctccgacaacaagtccttagncctctttgcaactacccttcnac

SEQ ID NO: 42455 - DNA, 251 bp, Glycine max
  unsure (1)..(251): unsure at all n locations; Clone ID: 701125678H1
ggaggaggnnacacaacacanggnnggnaaaaacagaaattaaacantacaagtatagggtgagaaaatgggtgaaantaaggaaatatggtctgcaccaataacccctagaacagcttcagnggttggaacacctgttgtggcatctccacctgtgtnatgtncnccctctcagcttcanactcnatctctaacaaggtcnnccctnctncaccctgaggatggagatgcaccacgtncnaataaaactt

SEQ ID NO: 42456 - DNA, 255 bp, Glycine max
  unsure (1)..(255): unsure at all n locations; Clone ID: 701125679H1
gggagtcctcaaagatctatgcttacctcttcctctgcatgatctttctctcttccgccactcccattctcggttgtggctactgtggcaaaccccccaaaaagcacaagcctggtaaaacaccaaagacacccaaaacacccgttgttaagccaccagtcaccatccctcccattaatgttctcccgttgttcttccaccaatagtgaagcccccaggtattctncctccattccattattaacccaccaacac

SEQ ID NO: 42457 - DNA, 265 bp, Glycine max
  unsure (1)..(265): unsure at all n locations; Clone ID: 701125680H1
ggaggctatttcanctctctttaatgttgttggaattggaattggaattcaattagcatctactgtatgtgcgtcaatgcagggaaagttggttgtggggcctctactatcaattatacacatatacagtgtttctgaagaaatgagagcaactcctgtcaatacattgaatccacaaaggactgcaatgattgtggctgattttctcaaggctggaagtgtatcaagcccagctgatctaagatatcgagaagattgctatttc

SEQ ID NO: 42458 - DNA, 264 bp, Glycine max
  unsure (1)..(264): unsure at all n locations; Clone ID: 701125681H1
tgagaaggatccatcaaagattgggagactttcaaatgaagcccttgctcctcttgtggaagttgcattgaaactttcgaagatggaagaattcactggtcgatccgctccaacagtcattacatgaacacatacaggtggaaggtggttagatcctgaagtttctcccagtcatttcttctttgtncagtttcttacggatggccgaacactagtgttggttgtttgcagcctttgctatgggcacttgagtggaatttgatc

SEQ ID NO: 42459 - DNA, 254 bp, Glycine max
  Clone ID: 701125682H1
catcgctaagaaatttagatatttcccagtctcctaagacaactagtgaacaccattatgaccgaacataccagctagttcttgttgtgcaacagtggcattcacactttgagaagcttgtcaaccatcaaaagggatacataaaggcgctaaacacttggttaaaattaaacatcatccctattgaaagcaatttaaaggaaaaggtttcttcgcctccaagagttagaagtccacccatacaaggccttctc

SEQ ID NO: 42460 - DNA, 257 bp, Glycine max
  Clone ID: 701125683H1
atgaccatatctttaaaccccatcgtgagcttcagctcaacgttggaaacaaagtatcaggatgcatcaagatattctgttggagcttctttaccaaaggcaactcagtttacacctttgttgatagtgtctagatcgagaaagcttgtcaaggaaagaagatttggtcattgcttttcagtggcagatagtgatcagcttgccgcagacaacagtagcagtaaggattttgacaatgttgaaagttcagcaaccaa

SEQ ID NO: 42461 - DNA, 254 bp, Glycine max
  Clone ID: 701125684H1
ctaccagcagtgctaaagtaaaagcttgggttactgcaatcaatgaagctagtctaagacctcttgagggctggtgttgtcctcatcgctttggttcctttgctcccataagaggtttgactgaagatgggagccaagcccaatggtttgttgatggacaggcagcatttgaagcaattgctacttcaattcaagatgcaaagtcagagatcttcattacgggttggtggttgtgcccagagctatatctgaga

SEQ ID NO: 42462 - DNA, 253 bp, Glycine max
  unsure (1)..(253): unsure at all n locations; Clone ID: 701125685H1
ggcagctantactgaacctgaggccgctgccatacacaatggtgnntcaccaattaacanagaatgagttttcaagtcttggacgtggaaaatatagtgaatgtagtacaactgaatcatctgatgatattgagaaacaagagatggaggaagtgtcagatgaagatgaaatctcatattatgataccagagagtgttttacagagcctgattgcaagtgtgagtcagcgggagctangaatcaagtggacag

SEQ ID NO: 42463 - DNA, 248 bp, Glycine max
  Clone ID: 701125686H1
cctcaatcaccctcgcgccctcgctcttcccttcctggtggcgacaatgtcgactcctgctaggaagaggctgatgagagacttcaagaggctgcaacaagacccgcctgcagggatcagcggtgccccccaggataacaacataatgctgtggaatgctgtcatatttggtcctgatgatactccatgggatggaggcacgttcaagttgactctccagtttactgaggattatccaaataaaccac

SEQ ID NO: 42464 - DNA, 250 bp, Glycine max
  unsure (1)..(250): unsure at all n locations; Clone ID: 701125687H1
ggnagcgcccaagaagaacggcgtcgtttttgtcattctgcgatggatcctcgcgattctttttcctttcctcctctttctctcgattccctttctgcttggcttactggttctcatgttcgccgatttctccatccccaaccccatttctctcccctcacagtgcaaaatcgtctccactggtgttgatattaggtcatctaagatatgtgaacttggattgttagattataaagcaaaggatgtgttc

SEQ ID NO: 42465 - DNA, 250 bp, Glycine max
  Clone ID: 701125688H1
ctcagatcttcgcaaacttgctgtgaatctcattcccttccctcgtctgcactttttcatggtgggttttgccccactcacatctcgtggttcccaacagtacagagctcttactgtacccgaattgacccaacaaatgtgggatgctaagaacatgatgtgtgcagctgatcctcgccatggtcgatacttgacagcttctgcgatgttccgtggtaagatgagcacaaaggaggttgacgaacagatg

SEQ ID NO: 42466 - DNA, 244 bp, Glycine max
  Clone ID: 701125689H1
atgggttcttcttcttctatgtggacggtgtgtgtgattttggcatcactggcctctgcagcactctgtgccaacccacgcaggccagtggatgtacaatttggccgaaactacgtgcccacatgggcctttgatcacatcaaatatttcaatggtggttctgacattcagcttcatcttgacaagtacactggtactggcttccagtccaaagggtcttacttgtttggtcacttcagcatgt

SEQ ID NO: 42467 - DNA, 243 bp, Glycine max
  unsure (1)..(243): unsure at all n locations; Clone ID: 701125690H1
gtgggaactttgaccatcgaagcagcgaatgaccctaatgccttgaacaaaaccgtgcacataagactccctaagaattatttgaccataaatgagatcatctctttgtgggagaacaaaattgggaagactcttgaaaaaacttatgtttcagaggaaaaggttcttaaagacattaaggaggcttcttttccacacaacatannaanngaaaaaaannacncncngcannacnccggngnc

SEQ ID NO: 42468 - DNA, 211 bp, Glycine max
  unsure (1)..(211): unsure at all n locations; Clone ID: 701125691H1
tatacattttatatcacatangaancaatagnaacagnganacgggggaagcnccgaaaggnttcngacagcngacttgtnctttngnccanaatactatcaggaatcacncctttcaacttcncagggcaaatngngagnagatatctgngaatacaaatagataaaangtaganggnaaaacngttttcaccctcaaaccaatngccnc

SEQ ID NO: 42469 - DNA, 244 bp, Glycine max
  Clone ID: 701125692H1
gctgcttccgcggcgagagcgggtcgtcgcgtgccggtccgggggacggattgggaacgggcccttcggggcctcttccccgggcgtcgaacagtcaactcagaactggtacggacaaggggaatccgactgtttaattaaaacaaagcattgcgatggtccctgcggatgttgacgcaatgtgatttctgcccagtgctctgaatgtcaaagtgaagaaattcaaccaagcgcgggtaaacgg

SEQ ID NO: 42470 - DNA, 248 bp, Glycine max
  unsure (1)..(248): unsure at all n locations; Clone ID: 701125693H1
ggagtttcgcgtttccgtcatttggagccttctcctcattgtctctttcttctctcctcaaatcaagggtgangcttctggttccgtcttcttcgtcgatagctccagtaatcaattcattcgcgccagatcatccaactatgagcaaccttcactgttgctagaagaagctggtgctgttgtgtcagtcttgcttggttttgctcctccttccacccttccagctgccagctcatccaagttgaatg

SEQ ID NO: 42471 - DNA, 255 bp, Glycine max
  unsure (1)..(255): unsure at all n locations; Clone ID: 701125694H1
ctttgttgctgcagtagttttggtagcatggccatgccatggcgcaggctaccaaaggttccctctccgaatgaaaactggctatggtgagcgttcttcggaggtaaaatgcgcaagttttaggcttgctgtggaagcacacaacatnngantnnaaaaaaaccattcctgaagagtgcgttgaaccaacaaaggactacattaatggcgaacaatttagatcagactctaaaacagttaaccaacaagctttct

SEQ ID NO: 42472 - DNA, 262 bp, Glycine max
  unsure (1)..(262): unsure at all n locations; Clone ID: 701125695H1
cttcaaagtagctagctagctcccatgatggatcaagaggtagaaacgcttgaagcgaantgcaacgtgtgaaggaggataatcgtacccttagagagatgctggaaactctgagcagcaaatgcgagaagcttcagtctcatcttcaagagatcaataatgaagaacaagaagtgagcacaaaatcagaccaaagtggatcagtattattagctagagccgattttcccatagcacaaaagccatcacaaatctttgttaa

SEQ ID NO: 42473 - DNA, 261 bp, Glycine max
  Clone ID: 701125696H1
gcccttccgtaaagaacgtccttcttttggattctgatgggaaacgtgtcgcagtcaaatacttctctgaagactgggcaacgaatagtgccaaggaaaattttgagaaagttgtcttcaacaagactcagaagaccaatgcccgcacagaagcggaaatagcaatgtttgagaataacattgttgtttacaagtttgtccaagatcttcacttctttgttaccggtggtgattatgaaaatgagcttatcttagccacag

SEQ ID NO: 42474 - DNA, 285 bp, Glycine max
  unsure (1)..(285): unsure at all n locations; Clone ID: 701125701H1
gcagcctccaattcgtgccactctcttcaaaatggccgttaccttctcaaatctccacacagaatcaggtctcaagtccctcgacgacttcctctctgggaaggtctacgtttctggggatcagttcacaaaggacgacatcaaagtgtatggtgctgttttggagaagccaggtgactcttttcccaatgctgccaagtggtacgaggttgtctcatctcagcntgctgcaagttccccggnatgctcaagggggtgaaantcagtgncaaagcttccgccccc

SEQ ID NO: 42475 - DNA, 281 bp, Glycine max
  unsure (1)..(281): unsure at all n locations; Clone ID: 701125702H1
cttctctttctctctgcgacaccagatgatggagacgacggcgaacgaanacgctgttcgttgcgccaattcgcggcgttgttgttggtggtgctactcgcggcgagtgtggtggtggaggctcaggagaactcggacgtgaagacgctggtgaagcacatgcacgggaagaantactgcgacaaaggatgggaatgtangggctggtcantttactgttgtnacctcactattactgattatntccagacctaccagttcgagaatctcttctccagngg

SEQ ID NO: 42476 - DNA, 151 bp, Glycine max
  unsure (1)..(151): unsure at all n locations; Clone ID: 701125704H1
tctctctctaggcctagggtttccttctccactaccgttcttttatacngatcgctgccgtttccggcgtcattccgataattcggcggcatgaagctcacagtgaagactttgaaagggagccatttcgaaatnagggttcaaccctccg

SEQ ID NO: 42477 - DNA, 150 bp, Glycine max
  unsure (1)..(150): unsure at all n locations; Clone ID: 701125705H1
gttcccaataaaagccttgattttttcatatttgatccaaacaaacgtgggaatttgaattgggaaagacgctacantntcataagaggcatcgctcgcggtcttctttaccttcatgaagattctagattngaagttgttcatcgtgat

SEQ ID NO: 42478 - DNA, 273 bp, Glycine max
  Clone ID: 701125706H1
ggggactgcattggctctgctgtgggggaaagatcctggacagtcatctttgattgagggatttacagcaggtggatttatatacattgcaattgcgggagtacttgcagaaatgaataacggtgggaatacaacattaagaagtactgttgtccaaataatctccctgaccattggcatggctgttgcccttggtatttcccttgtagaatgaatggaaattggtctctataggacttgcatgtcttgattcctgatttgccaattatttca

SEQ ID NO: 42479 - DNA, 274 bp, Glycine max
  unsure (1)..(274): unsure at all n locations; Clone ID: 701125707H1
gcgagtgttgttnntgtttggtccaggctggaccagggaatgaatagagatgagaggctttcggttgaagagaactgagttaagcggcgaagcaaacgcagaatcggcggcagaaattgccaccggaagcacgtcgaaganggtgaaccaaacacaaaattccatccaccacttctctnatcaatccccaactcaaatctgtgaagaaaatctcaatttcnaaattgtaattcttagcactaatgctagtaagtggtaaaaaaaacaattggnc

SEQ ID NO: 42480 - DNA, 151 bp, Glycine max
  Clone ID: 701125709H1
gaaatctggccacgttccttatgcaaaaacatgtggataacagtacctcttggagctttgacgtcagctatgtgaacgtggctgcatgctctatctatggctatgcgattgtggttccattggcatactacttcttccttcagtatatggg

SEQ ID NO: 42481 - DNA, 260 bp, Glycine max
  unsure (1)..(260): unsure at all n locations; Clone ID: 701125710H1
gggatgcacatactattggcttagtaanataccgagaaccatntccatttncgtgtggatcccagttggcggggaagtcgttcagagttgccttttctaaactctctcaagatgaagatgtccattctgctgggtgtggtgnacatgaanttgggaattcttttaagtnatntnnaatgctcgtntctttggcaattcgctggntataaggtacnagttnntgccccagatgatttnccttaactgtctattggggtatc

SEQ ID NO: 42482 - DNA, 280 bp, Glycine max
  unsure (1)..(280): unsure at all n locations; Clone ID: 701125711H1
caattccccattgagcgcaccgaaagcaaagtgtctcttctaacctctgcaaaagtccaagatggatgatactcttgcctactcctatagtgggtagacctgagagaagnnnnnnnnnnnnnnnnnnnnnnnnnnnnnngtaggaatgaaannncttacatgtgcttacaagttccatttgctatatgcangttgcacggttttaactgcttaggtttttgtcttcaaaattaaaactgtggcaactttggttgnaaagtcatngggntnaantngtntt

SEQ ID NO: 42483 - DNA, 157 bp, Glycine max
  unsure (1)..(157): unsure at all n locations; Clone ID: 701125714H1
accggacctcccttcgcgaacggtcaaccaagcatcaagntcgagaaagtggaatgcatcaacgacgaagttnancnacgacggatccaagctcatggtgacaaaatcgaactcgctgattagcgtctacgattgcagaatcgccgaagagattagg

SEQ ID NO: 42484 - DNA, 157 bp, Glycine max
  unsure (1)..(157): unsure at all n locations; Clone ID: 701125715H1
aacngctccagccttgtttcttctcagatcttnttccatggaacagtangtggggtggagaagataggngagggancatacggngtcgtttacaaggntcgcgacngagtcaccnntgagaccatcgctntnaagaagattngnntcgagcaggngg

SEQ ID NO: 42485 - DNA, 290 bp, Glycine max
  unsure (1)..(290): unsure at all n locations; Clone ID: 701125716H1
cangtgcatgcttcngtngcaagaagacngcngtggccgtgacctactgcaagnncgggcgcngtctcatcaagatcaacggctgccccattgagctcgtggagccggagatcctccgcttcaaggccttcgagcctatcctcctgttgggtaaganccgcttcgccggcgtcgacatgcgcatccgcgtcaagggtggnggccacacctcncagatntaggcnatccgcaggnncatcncnnaaggcgntcntcncgttntacagnaagttgtcggangancagttnaa

SEQ ID NO: 42486 - DNA, 154 bp, Glycine max
  unsure (1)..(154): unsure at all n locations; Clone ID: 701125717H1
gtgaaagggttgtctcaccgggtgaagagtgtgacaaagtttttactgctatgtgccaagggaagatcattgatccacttttggaatgccttggagagtggaatngtgctccacttccaatttgttagttttgttttcttctgttttcttcaag

SEQ ID NO: 42487 - DNA, 150 bp, Glycine max
  unsure (1)..(150): unsure at all n locations; Clone ID: 701125719H1
gtatgtggctgcagatatccaaaccttaaattcggtnctcgaatntttctgatcattggttgtnttttattctttcaaatacattccaaaatctcttggaaattgcgagattcactgcttatcctagcagcagattttgggttctgaccc

SEQ ID NO: 42488 - DNA, 273 bp, Glycine max
  unsure (1)..(273): unsure at all n locations; Clone ID: 701125720H1
ggaagaggcagtgcagtggttctactactttgcttcttgctgcttcactctcagatgggctcgtgctgccacctacacagttggagattctgggggttggacctttaacactgttgcctggcccaaaggaaagcncctttcgggctggtgacacacttgctttcaattatagccctgggactcacaatgtggtggccgtgaacaaggctggatatgatagtgcagactccaggaggagcaaaagtgtataantcagggacggatcagatcaga

SEQ ID NO: 42489 - DNA, 254 bp, Glycine max
  unsure (1)..(254): unsure at all n locations; Clone ID: 701125723H1
gcttctggctcttgcgatcaacannacgcagcgttttganctcagatttgagggggagacaatggcaacaacagtgagaagtctgaagataaagacaagtacgtgcaaacgtatagtgaaggagctgcattcttatgagaaggaagttgagagagaagctgccaaaacagctgatatgaaggaaaaaggagccgatccctatgatctcaagcaacaggaaaatgtcttggctgagtctaggatgatgattcctg

SEQ ID NO: 42490 - DNA, 126 bp, Glycine max
  unsure (1)..(126): unsure at all n locations; Clone ID: 701125725H1
ttcnttcttgntccttcanacnttcanttgantntttcatttnnctcaaaactttnaaacacgcgcttccccattttcttcttctgcntcctcacaatcncttgttcanatctcccttntacaaaa

SEQ ID NO: 42491 - DNA, 265 bp, Glycine max
  unsure (1)..(265): unsure at all n locations; Clone ID: 701125726H1
ctttttctctctctctagggtttcgaaaatgttctccggctcccagttcgacgccaccaccgccttctccggcggcggtttcatgtcttctcagccgtctaccctcaacgattcctctcccgcgccgtcaaaaagccgcgaaactnagggtttggtgccagtgacagtgaagcagataagcgaggctctcaatccggtgatgaaaagtcgatttcgtgatcaacggtgtggntctgnacnatgtaacactncttgggatgggttt

SEQ ID NO: 42492 - DNA, 290 bp, Glycine max
  unsure (1)..(290): unsure at all n locations; Clone ID: 701125729H1
accacttacttctattanaataacacantattctcatcggtancatccatcaccaganccatggtncangangnagangctcgtggacgaagtgtcgggttggnagngactctacnaanacggttcagtagaccggacttggnccggttcgccagnagttaaattcttggttgaaccggttctccccatggaagaattttatcgnnggggtngccacntgncgatatcctgggnggtaaaanttccngggccgggttttacntgccggggaaatttgnccccnggggggg

SEQ ID NO: 42493 - DNA, 130 bp, Glycine max
  unsure (1)..(130): unsure at all n locations; Clone ID: 701125731H1
aacttcctnaaccttcctcctctccatcccgatactggtacnccggagtgtggctgagcaagcagggcnccaccgagtgcgagcggtggctggagaagccggtgatcgnactcggcgtcttcntcatgct

SEQ ID NO: 42494 - DNA, 288 bp, Glycine max
  unsure (1)..(288): unsure at all n locations; Clone ID: 701125732H1
ggaaaataaagaaattagcgtgaaaaatgttgggtgtgttcagcagctccatagtgtcgncgccggaggagctcgttgcngccggcagccgtacaccgtcgccgaagatgacggcggcggcgctgcggaagtggttcgaggagaagaacccctccgcagtgtcggtggaggtcggagagcatgtcaagctcgnttataccnaccagaacgantcnccgtttaagccaagttcatantttaaaganagggaanccgttttnggnggggnccttnaaaattggggaattt

SEQ ID NO: 42495 - DNA, 281 bp, Glycine max
  Clone ID: 701125733H1
gcggatttggcttccaagatgtcaagggtgaaggtggtgggagagaacctgagtgaggaagagagagcttcttgtgtgaaggatttgtatcagaacactgaagaggaggttgattttgaattgtttctcaaggtctatttgaaactccaaacatttgtgaattctagaaccggaagtagtccaaagaactcgttggcattcctcaaggcagctacaaccacattgcttcacacaataagtgaatctggagaaagcgtcatatgtagcacatataaatccta

SEQ ID NO: 42496 - DNA, 275 bp, Glycine max
  unsure (1)..(275): unsure at all n locations; Clone ID: 701125734H1
caagtaccctgtagttcgattatccgaaatacctgctaagcagttggaaaatgataaatctgagcagaaaaaaattgttattagacctaggcctaataaaaacagtttgaatgatgctaacggagttgggaggaaaggaaaccctttaagaagtgtggaagaaaggaaggaggantatgaccgggcacgggcacgtatctttagtnnccctagnngctctgantcnggtganacctcatccgtggttccaatgggtggtattcttcnncggnggg

SEQ ID NO: 42497 - DNA, 275 bp, Glycine max
  unsure (1)..(275): unsure at all n locations; Clone ID: 701125735H1
gaaaccctagcctctcaccctccctgcgacacgatgcagatcttcgtgaaaaccctaacgggtaagacgatcacccttgaggtggagtcttctgacaccatcgacaacgtgaaggccaagatccaggacaaggaaggcatccctccggaccagcagcgcctcatcttcgccggaaagcagctggaggacggccgcaccctcgccgactacaacatnnagaaggagtccaccctccacctcgtcctccgtctccgcggtggcgccaagaagcgcaa

SEQ ID NO: 42498 - DNA, 284 bp, Glycine max
  unsure (1)..(284): unsure at all n locations; Clone ID: 701125737H1
gccactttctgaatctattgaatcaacaatcatgtnggacgaagagcaccatttgcgagtccaaggccgncgccggngcctccagaanctacnctcagcnagccggtancatccgcnagaanggctacntcgncntcnaaggncgccnctgcaaggttgtggacgtttcgantgcnnaaanctggnaagccccggnaangcctaantgtcacctttggtngggattnggncattttcnattccaaggnaactngaggganaatgcngcntctgntaaaangggg

SEQ ID NO: 42499 - DNA, 272 bp, Glycine max
  unsure (1)..(272): unsure at all n locations; Clone ID: 701125738H1
gcaagaagnaagtgttgtgggaggaaagaggcagagctgcaatcaccagagtggaagcgcgaaacggtcctccccggctttccattttttctcttctgatgaaattttagttcatcccagttgctgattgagattgaatttaaattcgaaaaagcgtacttgtgccactgtacttttacagatctgcggctacgggctagcctatcgtatttttgcgtagatctagtgtccgtgaagcggttaccatttcaccactcaccactattcatctc

SEQ ID NO: 42500 - DNA, 97 bp, Glycine max
  unsure (1)..(97): unsure at all n locations; Clone ID: 701125740H1
gaaacctaccatgatatgatatgtcttctataaccatactcatactccaanncagtgttgcttcttctactccanacngcnntaaacnaanncgcca

SEQ ID NO: 42501 - DNA, 149 bp, Glycine max
  unsure (1)..(149): unsure at all n locations; Clone ID: 701125741H1
gctgctttatctttgtattggtctgatttgaaagataaagttgctgggttggcattagcacaaagtccctatggtggaactcctatagcttcagatcttctgcgagaaggacagcttggtgattatgtaaatttacggaaacttacnga

SEQ ID NO: 42502 - DNA, 269 bp, Glycine max
  unsure (1)..(269): unsure at all n locations; Clone ID: 701125742H1
gctagggttcggaaacgaaggaagggttctgttttcttttcgcgatgagggccaagtggaaagaagaagcgtatgaggaggctgaagaggaagcgccgaaagatgagacagagatccaagtagtgcgtaaacctagtttgttccgttgctttacaatttgcttatgttgtcaaataggacacccagttgttagtggcactggtctccctttttgatgtnttgatacattttgttggattttattcngcttatgtcctaactgaaaacaa

SEQ ID NO: 42503 - DNA, 230 bp, Glycine max
  unsure (1)..(230): unsure at all n locations; Clone ID: 701125743H1
gagaaagaaaagaatggcaaagttaataaaattctttgagttgaacacaggggccaagattccttctgttgggttaggcacttggcaagctgagcctggtgttgtagccaaagctgtcaccacagccattctggttggatacaggcatattgattgtgctcaagcgtataacaatcaagcagagattggttctgctcttnagaagctttttgnatgatggtgtggtgcac

SEQ ID NO: 42504 - DNA, 101 bp, Glycine max
  unsure (1)..(101): unsure at all n locations; Clone ID: 701125744H1
gnngcaacggctgctattgacanntatgttaacnncacttattctgattgtgncanacgtcagtgactattncctngaattgagatgtncctttaaatgtg

SEQ ID NO: 42505 - DNA, 227 bp, Glycine max
  unsure (1)..(227): unsure at all n locations; Clone ID: 701125746H1
gagaagccgctggagttacgatactctcaagaatttccgtgagatctctccgctggttcagaatnanatcaaacgggtttattttacgttatgttgcgctgtggtggctgctgctgttggagcttttcttcaggtnctgtggaaaaattgggggttttntnacaaggttggcttcaatgggaancaagggtttgggtgcaattnaacaccccctttggaagggaaaa

SEQ ID NO: 42506 - DNA, 155 bp, Glycine max
  unsure (1)..(155): unsure at all n locations; Clone ID: 701125747H1
attgccttcaaatcacacactctcttcaatttctagggttttgctattgctttgcctccgttccccctttctcacaaaaacaacgcnntttctcttctccttcgtatctattctttncgtttngatttnggttgantganggcattnanngcgta

SEQ ID NO: 42507 - DNA, 289 bp, Glycine max
  unsure (1)..(289): unsure at all n locations; Clone ID: 701125748H1
ggagtatgagaaagcgtantgccagcactaacttgctttgctccacccaggagaaatggttctaataatccatcaccttgtattacggaaccttctatcaagcctgtgcaagacaagcaagaatataaacaccttgaagctccgagcccttctaacaataattcttcgttggatactaatgaaatcgaacagtcacacaaaaacaataatgttccngctggagatgctaaaagtgagacaagatttcaatccnccgttgnntggganaagnccggggctgccattgntc

SEQ ID NO: 42508 - DNA, 194 bp, Glycine max
  Clone ID: 701125749H1
ctgaggcttccaaagcaatggcttcccttgcagcatccactgctgctgcttcccttggcatgtcagaaatgcttggaaaccccatcaacttcagtggtgccacaaggccagctccatctgcttctagtcctgcctccttcaagactgtggctcttttctccaaaaagaaggctacaccaacacctccaaaaaaa

SEQ ID NO: 42509 - DNA, 274 bp, Glycine max
  unsure (1)..(274): unsure at all n locations; Clone ID: 701125750H1
cttttccttttcattccatcatctctttagctttgtccaaagaccatgtctgtggtggctgataattctgcaaacaatggaagcnaccaagtggttttaaatgtaaacggtgatgcccccaagaagtgtgatgactcagccaaccaagactgtgtacctcttctgcagaagttggtagcagaggtggtggggacgtacttcttgatatttgcagggtgtgttcggtggtggtgaaccttgacaaggacaaagtggtaacacaacctgggatttc

SEQ ID NO: 42510 - DNA, 273 bp, Glycine max
  unsure (1)..(273): unsure at all n locations; Clone ID: 701125751H1
gaatgacgtaacngtggcccaaaatcattggtgtcccgtggtgaatgcggggttttcttcgcccaagagagtggttntggttggttacgctcttactactaaaaagattaagagctttttgcagcctaagcttgaaggtttagctaggaacaagggaatactattcgtggctattgaccataatagggcctctttnagatcaaggtccttttgatattgtcttggcataagttatcaggcaaagagtggcgccagttcttgaggctatcacat

SEQ ID NO: 42511 - DNA, 147 bp, Glycine max
  Clone ID: 701125752H1
acaagaacattactttggttttaggtccaaacatgctgaaatggttatgtcccacggcagtaagccatctgaaggatggggttagcttccccacgttacgtgataattcttaaaactttctggtctggccccgtcatgaaccaaagc

SEQ ID NO: 42512 - DNA, 272 bp, Glycine max
  Clone ID: 701125754H1
agccatgcatgtgtaagtatgaactaattcagactgtgaaactgcgaatggctcattaaatcagttatagtttgtttgatggtatctactactcggataaccgtagtaattctagagctaatacgtgcaacaaaccccgacttctggaagggatgcatttattagataaaaggtcaacacaggctctgcctgttgctttgatgattcatgataactcgtcggatcgcacggccctttgtgccggcgacgcatcattcaaatttctgccctat

SEQ ID NO: 42513 - DNA, 274 bp, Glycine max
  unsure (1)..(274): unsure at all n locations; Clone ID: 701125755H1
gccccttgtgagtnagtgttctgaaagatgagaccaattttgatgaaaggtcatgagaggccattgacgttcctgaaatacaacagggacggcgatctcctcttctcctgcgccaaggaccacaacccaaccgtctggtttgccgacaatggcgaacgcttgggcacttatcgcggccacaacggcgccgtttggacctgcgacgtctcaagagattcggttcgtctgntcacgggtagtgccgatnagacccgccaagctatggggacgtgca

SEQ ID NO: 42514 - DNA, 275 bp, Glycine max
  unsure (1)..(275): unsure at all n locations; Clone ID: 701125757H1
cttacaaagggcttttgaattttcgtgttttgatcagaatcagangaaaaaatcacataatttcgaattcaaaatttgaattttcgtgtataaaacgaagagaagagaatggaatcggaggatttggtgaagcaggaattggaggaattgcagaaacaattggggacgaagctaaaatttgaagcctctatttcgtctctaaaatctcttctccancgcacttacccatcagcttccccagcgcttcgcagatccttttatttggttatatgccg

SEQ ID NO: 42515 - DNA, 273 bp, Glycine max
  unsure (1)..(273): unsure at all n locations; Clone ID: 701125758H1
cgactcatgagagtgggggcgagcagagcccgcgcggttcgtcgtccggcgcgagggagcaggaccggtacctcccgattgccaacatcagccgcattatgaagaaggctctgcctcccaacggcaagattgcaaaggatgncanannnnccctgcaggaatgcgtttctgagttcatcagcttcattacnagcgaggcgantgagaattgccngaaggggaggagaaggccattcatggggncgntttgctatgggccatggccatttaggt

SEQ ID NO: 42516 - DNA, 275 bp, Glycine max
  unsure (1)..(275): unsure at all n locations; Clone ID: 701125760H1
ctgnctcgagaatttggnatttcttgttatgatgcttactaaatgttttaactgttggattttcattgcaggaccaaacagttcancttcaagctctgnaatggattttnttatgatggtggattgctgcacttatttgggctatttagcttgaaaacttagcacggctaaatcatgaaacaacactttgatctgaagtggtggcctcagaagatatgaatctgannctagcagcctggttacttccatatatcgattccaggaaacctntgcng

SEQ ID NO: 42517 - DNA, 154 bp, Glycine max
  unsure (1)..(154): unsure at all n locations; Clone ID: 701125764H1
actcntcctcctctctgcgctcccaacgctgcaataacacgntcactctctttctgnaantcttctcttcnctttngcncccaactctgatnggtgttccttcnctncttcnncntcctcctccngcntcanatgcagantctncctcccttct

SEQ ID NO: 42518 - DNA, 274 bp, Glycine max
  unsure (1)..(274): unsure at all n locations; Clone ID: 701125765H1
atgacagtactgtctccttctctttctnggcctaagttgcaatcttcctttctttgttgccctctcaaatattctaagcctacaaatagaaatattcaaccaanacccacttcttatccacgcattagagctttngaccttgatcaaaacacgtggctataagtgtaggtgttgttagtgtggctgttgggattggcattncagtgttctatgaaacccaaattgataatgcngtgaagtgttttgnactccacactataacatttntttattt

SEQ ID NO: 42519 - DNA, 273 bp, Glycine max
  unsure (1)..(273): unsure at all n locations; Clone ID: 701125766H1
aaatcttagccgccattgattttncctcttccatttctcttactttctcagcctttttcgattacccatttggttatttcgccctaatggctcttgctccatccaaagtttccaccttttctggtttttctcccaaacccagtgttgggggtgctcagaaaaacccaacttgctctgtttctctgagctttttgaatgagaaacttggaagcagaaaccttagggtttgtgccnnaacggtgcctcnnactggggtgattttaaaaccgttgg

SEQ ID NO: 42520 - DNA, 266 bp, Glycine max
  unsure (1)..(266): unsure at all n locations; Clone ID: 701125768H1
ancngagnntggtgttgtagccaaagctgtcaccacagccnctctggttggatacaggcatattgattgtgctcnagcgtataacaatcaagcagagattggttctgctcttaagaagctttttgatgatggtgtggtgatncgtgaggacttatggntcacctccaaactctggtgttnagatcagcttcagaggatgtgcccaaagcattgganaanannttncaggtttnnaattngttnaccttggcctcnanctgctccac

SEQ ID NO: 42521 - DNA, 151 bp, Glycine max
  unsure (1)..(151): unsure at all n locations; Clone ID: 701125769H1
gccacttctgaatctnttgaatcaacaatcatgtcggangnngagcaccatttcgagtccnagnccnacggccggagcctccngaacctaccctcagcnagccggtancatccgcnaggancggctacatcgtcatcanaggcngnccctg

SEQ ID NO: 42522 - DNA, 269 bp, Glycine max
  unsure (1)..(269): unsure at all n locations; Clone ID: 701125770H1
agaagcggctcgcngcgagcntgctcaagtgtggcagaggaaaggttttgnttgaccccaatgaagtcaacgaaatctccatggccaattctcttttcataggatctgaacctcttcggtgtttttgagcgtctgcgagaatatatggaaatgcaaacgcgagctattgccaaaacataaggaagctggttaaggatgggtttatcatcaggaagcccaccaagattcactctcgctcacgtgctcgtcgaatgaaggaagccaagagg

SEQ ID NO: 42523 - DNA, 138 bp, Glycine max
  unsure (1)..(138): unsure at all n locations; Clone ID: 701125772H1
ggccacctccaacttctctattgttntctncgtntccctagnnttctttttggngctacttnccaagggnacactcgacnngntancgtttctttcannttcaacnagttcaacccagtccaaccaaacattatgntc

SEQ ID NO: 42524 - DNA, 145 bp, Glycine max
  unsure (1)..(145): unsure at all n locations; Clone ID: 701125773H1
tggaaagggagagattgtggatggttccaagattatggagttagttggnaacgagaaagttttcagcaactttgtggaccataagtttgatgaattggataaagacagagatgggaaactctccatgaaggagcttgnacctgct

SEQ ID NO: 42525 - DNA, 251 bp, Glycine max
  unsure (1)..(251): unsure at all n locations; Clone ID: 701125774H1
ataatttttttttatttgaaataangtccgggatcatccacaagattgaggagaccctccntgtgggagggcacaaganagaggagcacaaaggagaacaccatggtgagcacaaaggtgaacacaaaggagaacaccatggtgagcacaaaggtgaacacaaaggagaacaacaccatggggngcacaaggggggtnttgtggataanntcnggganaagntccatggtgatngccnatgacanggntaa

SEQ ID NO: 42526 - DNA, 270 bp, Glycine max
  unsure (1)..(270): unsure at all n locations; Clone ID: 701125775H1
taatgtccgggatcatccacaagattgaggagaccctccatgtgggagggcacaaganagaggagcacaaaggagancaccatggtgagcacaaaggtgaacacaaaggagaacaccatggtgagcacaaaggtgaacacaaangagaacaacaccatggggagcacaaggagggacttgtggataagatcaggacaagatcctggtgatggccatgacaaggntgagaaaancangangagggncaagaagaagaaggngctntnncnt

SEQ ID NO: 42527 - DNA, 252 bp, Glycine max
  unsure (1)..(252): unsure at all n locations; Clone ID: 701125776H1
gaagggttangccgtcgttttgtcgtcgaggtcgtcgctttgtctgacaaggtggagggggttcgcgtccggatctgagcgaaaacgacgtcgtgatcatcngcggcggtcccggcggntacgtggcggccattaaancggcgcactggggtctnaaaacnanttgcntcnaaaaacggggnantctcggnngtacctgtctcaaacttnggatgatcccttccnaaggcnatttttgcatttttcnaaatg

SEQ ID NO: 42528 - DNA, 150 bp, Glycine max
  unsure (1)..(150): unsure at all n locations; Clone ID: 701125778H1
ctgcaatctagtggaagccacagtgttgatgggaactggagggctctggggaagcttcttatattctgttcaggttgcaggcaaggcagtttgttcaataacgttcaggttcctggccattttgttaacnagactcgattttctagaaca

SEQ ID NO: 42529 - DNA, 251 bp, Glycine max
  unsure (1)..(251): unsure at all n locations; Clone ID: 701125779H1
caaaattagggttttctcaaccctagggtttaccttctcttcccctgttcgaaattaggcaaatcaaaacagaaacacgactacaaaaagaagaaaagangaaaaagaatcaatcattcattgatcgctgaaacgatacgatgacagggaaggcgagcgaagaagcacacggcgaggagatcgcggcgaggtggacgcgcgacangaacgggcgcggaggggtttgngncaaccgtttgaaaggggcncca

SEQ ID NO: 42530 - DNA, 265 bp, Glycine max
  unsure (1)..(265): unsure at all n locations; Clone ID: 701125781H1
cggatcttcaatctcatctccgatgctcaaaatgcccgctgtttatggnctcgcttgaccacnttcgaagactccgagaaggagagtgaatacggttacgttngcaaggnttaaggacccgtcgtngttgcggatggnatggntggtgnnganatgtatgaactcgtgagngttgganatgannntctnatnggtgaaattattcgtctcnaaggggattctgnaacnatccaagttaagaggannctncnnggtngaanatnaa

SEQ ID NO: 42531 - DNA, 272 bp, Glycine max
  unsure (1)..(272): unsure at all n locations; Clone ID: 701125782H1
gatgggaattgcgcttcaaggcgtctcgtagggctaatccgcctcacgagggtcaccaacggcacgtggcctttngngggccgaggccccctactgctggtcggcaaacggacggcgggcgcacgcntcgcttctagcccggattctgacttagaggcgttcagtcataatccaacgcacggtagcatcgcgccactggcttttcaaccaagcgcgatgaccaattgtgcgaatcaacggttctctcgtactaggttgaattactattgcga

SEQ ID NO: 42532 - DNA, 268 bp, Glycine max
  unsure (1)..(268): unsure at all n locations; Clone ID: 701125783H1
gttagcagtagtttggcgtggtaattggtagagcgagaaacagagaaatggacgattacacgagggaaatgatggacctgaagacactggtcactcgcactctcgagaagaaaggcgtcctcgccaggatccgtgccgaactcagggcgagtgtgttcgaagccatcgaagaggangntcgtgtgattgagaaggaacaggntctacctcctgnatngctagntanttncaacgntcgagctaagcagnttcacgttctcctccnggg

SEQ ID NO: 42533 - DNA, 140 bp, Glycine max
  unsure (1)..(140): unsure at all n locations; Clone ID: 701125784H1
atcgaaagnagaagcagaagcaggaacctgagttgacgcgaatggagggagaatcgaaggaagatgtttggtgcagagaaacagtgccaaaggtattgaaacttgtctgttccacacaacatacgaannnaacgnnnncg

SEQ ID NO: 42534 - DNA, 272 bp, Glycine max
  unsure (1)..(272): unsure at all n locations; Clone ID: 701125785H1
aatgaattataagtaactggcaccggnaaagccatgcgaaggtttctctttctctacaacgaagcacgaaaattccgnaaacctcatattccccttgcatttccatcgcccttagcttatagtactagcttgaatcatactcataatatcggagacagtaaattcaatttggtggatgtttctgcccaaggtggaaccaaagctggagtttgcgtaatttgangcccnngngggnttaacccantttccctgngntctgaaaaacaaanggg

SEQ ID NO: 42535 - DNA, 269 bp, Glycine max
  unsure (1)..(269): unsure at all n locations; Clone ID: 701125786H1
gccccactcaaccaccacacctctcctcgttcacgctacccctttctgctcttcttctacctttcaagttttaaaagtataaagatggcagagacattcctatttacctcagagtcggtgaacgagggacaccctgacaagctctgcgaccaaatctccgatgctgtcctcgacgcttgcctcgagcaggacccagacagcaaagttgcctgcgaaacatgcaccanaaccaacttggtcatggtcttcggagaaatcacgaccaaggc

SEQ ID NO: 42536 - DNA, 267 bp, Glycine max
  unsure (1)..(267): unsure at all n locations; Clone ID: 701125787H1
gttgtttggagcgatccgagaaaaactctgtaaacatgttggtttaccaggacctccttacaggtgatgagcttctctctgactccttccgttacaaggaaattgagaatggaatgctgtgggaagttgaggggaagtgggttgttaaaggagcagttgatgtagacattggtgcaaacccttctgctgagggtggaggagaagatgagggagttgatgatgcagctgttaaggttgttgacattgtngacaattccagacttcagg

SEQ ID NO: 42537 - DNA, 269 bp, Glycine max
  unsure (1)..(269): unsure at all n locations; Clone ID: 701125789H1
cgacacagatgatgttggtacgaagtgtaacttctcgttcgcattcaacaacatcantttctcagacngaattctgcaacattgaggttatacccgaccctcatttcatccgcgcccaatcccattctctctctacccncgctccaaatcgtaagagacgcagactctctcttatgaaagccaatgatgtctcttggcaacctgaggaaaattaaattgtaatttaccagatgcagggaattgtggnaatnatggggnatcanttnnng

SEQ ID NO: 42538 - DNA, 152 bp, Glycine max
  unsure (1)..(152): unsure at all n locations; Clone ID: 701125792H1
cccggggcntgttctgnagtctgcttctctgcttgtatgncaanggccacgcncgcnctctnntngcctgnnaacgactgttggtgcacggnaaaccacnnagatccgggtccgncccgtncgcaggntccgatgccaaataagaangatga

SEQ ID NO: 42539 - DNA, 276 bp, Glycine max
  unsure (1)..(276): unsure at all n locations; Clone ID: 701125794H1
cgcttctnttctctgcagcaactatgcctaaccctaaggtcttctncgacatgaccatcggcgntcaatctgctggccgcatcgtgatggagctctacgccgacgtcactccccgcaccgccgagaacttccgcgcgctttgnaccggcgagaagggcgtagggcgganggcaagcccctccactanaagggntcgtncttccaccgggtgatccgggtttcnatntnacagggggggnattgnnngnngaaaagcancnggggggtttnttttng

SEQ ID NO: 42540 - DNA, 275 bp, Glycine max
  unsure (1)..(275): unsure at all n locations; Clone ID: 701125795H1
agtgaaccttatctctcaagctnatagttctagctcttgttccctcaagagtnctggtntttanaagggaaacagcatgtgctctttctcttcaaaacagaccctttatttggcacttcctcgtccatggacatctaagagacaccaccacagtcacaggcaccttcggttggggcatgctcaacagaaggagggcacacttgaaagaagcaagacaaaggaaaaggattgttgtgaaatcagagatcagatgangagntgaagttgtacatggg

SEQ ID NO: 42541 - DNA, 266 bp, Glycine max
  unsure (1)..(266): unsure at all n locations; Clone ID: 701125801H1
tnaatgtccggnatcatccacaagattgangagaccctccanctgggagggcacaaganagaggagcacaaaggagancaccatggtgagcacaaaggtgaacacaaaggagaacaccatggtgagcacaaaggtgaacactnaggagaacaacaccatggggagcacaaggaggggctgtggataagattcaggncnagttcnnggttgntggcnatgncnanggntgagaaaaggaggangaaggccaagatgaggaagganct

SEQ ID NO: 42542 - DNA, 261 bp, Glycine max
  Clone ID: 701125802H1
gaggataagaatgttccctatgtattcgttccatcaaaacaagcacttgggcgagcatgtggagtcacacggccagtgattgcatgttctgtaacaactaatgaaggaagtcaactcaaatcccaaattcagcaactaaaggatgctattgagaagctgttaatttgaaaatttgatattcggtatgacgggcttcttgagaggcttgactggaccagatgttgtattcaacagacaaaggtgttttatgtgtaaacctac

SEQ ID NO: 42543 - DNA, 263 bp, Glycine max
  unsure (1)..(263): unsure at all n locations; Clone ID: 701125803H1
accctggcacaggaaaaccctaacaaaaccctagaccccaccgaaccagatccaatccctgccactgaggacgccaccgccactaagggctccgacgccaaggaccccgcngacgccgacgccgacgccataacttctccgccgcccgattccgnaaacgacgctccgctctccgatattcagaagaagatgcgccgcgccgagcgattcggcatttccgtccagttgtccgagaaagagaagcgcaattcncgagccgaaag

SEQ ID NO: 42544 - DNA, 251 bp, Glycine max
  unsure (1)..(251): unsure at all n locations; Clone ID: 701125804H1
ctcggcaacaagagtgccatgctcctacagtatanccctgtccacaagaanntaccggctctcgtgcatgacggtaagcccctggcagaatcactagtgattcttgagtatattgatgagacctggaagcaagatccctcccttcttccacatgatccctatganaaggccaatgcgattctggtccgaattcgttgatgaaaaggtagtaaaaaattagaacacagcatgttattaagtgctttattgaa

SEQ ID NO: 42545 - DNA, 259 bp, Glycine max
  unsure (1)..(259): unsure at all n locations; Clone ID: 701125806H1
caactacangatgctgctccacgttctgtgaactcttcaccttcactcttttagattttgatggatgcagcaaagggattggaagcttctggggagacccttcgtgcagaagtgaaaacctttttcgattctgctcctcctttgcagaacagtgatgagataactcagaagttgaatcagttcattcaacgcaattcttcagctaggagaattgtttgtgtgactctggtggcaccaccgcgccattggaacaacgatg

SEQ ID NO: 42546 - DNA, 241 bp, Glycine max
  unsure (1)..(241): unsure at all n locations; Clone ID: 701125807H1
tgccccagctgttactgatgctgaaactttgccatcaactngcttgctganntcaacagggaaatcaagcttgaacaactcaaaagctacacctgacagacagcagtctggaaactctgaaatgtttgaaccaccatctttcatgaccttggttgatcctagtcaggttagccccaaagcttctgcttctgaagtccagaaggggcagaacacacaacatacagattccattcacaggctg

SEQ ID NO: 42547 - DNA, 226 bp, Glycine max
  unsure (1)..(226): unsure at all n locations; Clone ID: 701125808H1
gctgaagcatacttataagcctccacantcctgaaacngttttaacataccaatcttacnagtacacctccccagcttccatttaagacagaaggngttcctgtgggaatcacttttgttgaaaatgcagtggcaaaaggggctgtttgtttggatgggagtcctccagcttaccacttccacaagggatctggnttcaggattaacaatggatagttcactttga

SEQ ID NO: 42548 - DNA, 260 bp, Glycine max
  Clone ID: 701125809H1
cgaaattctaatttcgttaggggaaagagattgtttgtgtgtgagtgagtatggctggaaaaggcgagggtcctgctatcggaatcgatttgggaacgacgtactacctgcgtcggcgtgtggcaacacgatcgtgttgaaatcatagccaacgatcagggtaacagaactaccccatcctacgtggctttcaccgacacagaacggttgatcggcgatgcggcgaagaaccaggtcgctatgaacccaaccaacaccgt

SEQ ID NO: 42549 - DNA, 260 bp, Glycine max
  unsure (1)..(260): unsure at all n locations; Clone ID: 701125810H1
cacgactcaactacaatcgcgttcgatttctcttattatgaacctctctctatgcaattccttcaaancttaacacctcaagaaaaccattgatggcactccctcactncatctctgccttagccaccacactcacactctccncgccaacaaccaanncccagaaagttaacccctttccctttttctcgaaccaaaagacacgatttttaacgaaacnaacgcgacccagaagcagaagaagcctctccctaaccccg

SEQ ID NO: 42550 - DNA, 110 bp, Glycine max
  unsure (1)..(110): unsure at all n locations; Clone ID: 701125811H1
gggaagaaaaaaaagatcattcctcaatctgaagcataattgtaacacatnaatncagaatgnaaggttgaaattgaagggcagccacagtggattatggctgaatctgt

SEQ ID NO: 42551 - DNA, 256 bp, Glycine max
  Clone ID: 701125812H1
gtttatcgtgaggagaatatgaagttgtttgttttctttgttgctgcagtagttttggtagcatggccatgccatggcgcaggctaccaaaggttccctctccgaatgaaaactggctatggtgagcgttcttcggaggtaaaatgcgcaagttttaggcttgctgtggaagcacacaacatccgagcctttaaaaccattcctgaagagtgcgttgaaccaacaaaggactacattaatggcgaacaatttagat

SEQ ID NO: 42552 - DNA, 255 bp, Glycine max
  unsure (1)..(255): unsure at all n locations; Clone ID: 701125813H1
anaacacaacaccaacaattgactctcacaagcgatgtcttctctctggttccttaaactgtccctcaaatgccttgatcacctcgcatggcctcttcttgctttggggtatcctctatgtgcttccgtacaagcaattgagactgattccaataaagaaactagggatttgatctcgtattggatacttctctcgttaatatacctctttgagtatgcatttcgaggattcttcaatggttccagttttggcct

SEQ ID NO: 42553 - DNA, 272 bp, Glycine max
  unsure (1)..(272): unsure at all n locations; Clone ID: 701125814H1
attgacatttgatgggaaatatttgccacattcagaacagaaatctgagcacatggtttcaagaacaaggccactgggaaaacagtgannntcttcattgggaggaaccaactaacgcaattctttcaacaccagttctacctggcacatgaatttattcattggatctgtaaacaaccacaagttgtatttggattcagtggctattttgtgttgtctatagaaaaacttgggaagagaaaaataaaagtgtttaagatttataaataatt

SEQ ID NO: 42554 - DNA, 257 bp, Glycine max
  Clone ID: 701125816H1
gctctcactagtcactactactactggagatggcttcaactgcctcttgcacttctatttccccttctagtgatggttgcctttgctggtgacttaaacaaagactttgacatcacttggggagatggccgcgccaagatactaaacaatggagagttactcactctttcattggacaaagcatctggttcaggttttcaatcaaagaatgagtatctctttgggaagattgacatgcagctcaagctcgtccctgg

SEQ ID NO: 42555 - DNA, 272 bp, Glycine max
  unsure (1)..(272): unsure at all n locations; Clone ID: 701125818H1
actgtttatctactttgcatggctactgtgtgcatgcaacattctggctccggcatactagtntaggactttcaatcaaaatgatagtgataacccagnagacctaaagctcaagggttttttggtgtcattgtggcaaattttatccttaggattagagtctgaccaagaaccaaacagtaacatggaatggattttctaatattaaagtaacttnccatnnnancntacgnngnnccggnnnggggnntnngntgnnncnnncnngannc

SEQ ID NO: 42556 - DNA, 260 bp, Glycine max
  Clone ID: 701125819H1
gatgccaccaaagggtacttgaagcttttgtttctcactgtggcatcaggagatagaattaatggtgaagcaattcaaagcaatcgagatctttccatgatccttgatgctcttctgaaaacaaaatctagagcagtgctgaatgatataattaacaaaaatggtttgcagatgttacataacattatgaagcagtacaggcatgacttcaaaaaaattccaatactacgaaagcttcttaaggtctggagttcctagaa

SEQ ID NO: 42557 - DNA, 260 bp, Glycine max
  unsure (1)..(260): unsure at all n locations; Clone ID: 701125820H1
gttctttttttcttttctctcagttagaaaaatggaataatttaatttgggccttgaggatccagctttaaattgggctcagatccaacgacaaacaatgtaatagatngtactgtacacgtgtcaaacagaggttggaaccacgtatgttagtttgaaaccacacacagaacagttnaagttccctccaagacttgtggagtcgaaacgtttggtncaacaatggcatccacagcgtcgccgatgacggttcaggcggg

SEQ ID NO: 42558 - DNA, 263 bp, Glycine max
  unsure (1)..(263): unsure at all n locations; Clone ID: 701125821H1
cctgaactaactttaaccctgcttgtcgaatctgtgcattgcttgaacgattgaaccctaatggctgctctcttgaggaggtttgcnagcgccactnccgatcccatccaattcctctncacaccaatctcnnccttcccttcaccgccatcnccgccatttccggcggagtctccttccttttctaccattcctctcccaacttcgctnattncacaagaagcagaacaagtggaaagtaaaaacatcgcacttcgttccgg

SEQ ID NO: 42559 - DNA, 263 bp, Glycine max
  unsure (1)..(263): unsure at all n locations; Clone ID: 701125822H1
cagatatatttttttttttgtctccatcattttctcganntcctttcagtttgtgtggttcatgctttcttcttctccttccctcccccctctntaacaccccgcttctctgaatccctttctgttaatcatctgtctttcaagctaagattttcgggtttgtctattaattcaccaagaagnaaacttagaaggatttttcgaaagccaggtgttttcagaaacgagatccaggttttattgtcgaatttcgctagtcaaat

SEQ ID NO: 42560 - DNA, 257 bp, Glycine max
  Clone ID: 701125824H1
ccaaaccaccatgttgctgccattgtggctgctgcattttatgcaatttggaatctcttctcaggatttatcgtcgtaagacctaaaatgcccgtgtggtggagatggtactattgggcatgtcctgtggcttggaccttgtatggattgattgcatctcagtttggagatataactgaaagaatgccgggtgaagataacaagatggtgaaagaattcatagaagactattttggtttcaaacatgacttcgttgg

SEQ ID NO: 42561 - DNA, 258 bp, Glycine max
  Clone ID: 701125825H1
cacatgactgaggacatgttctgtgatgaattccatcttgttgatctcagggtcatgaataactgcctcaaggttacagagggggttgatcatgttttcaatcttgccgcagacatgggtgggatgggttttattcagtctaaccactctgtcattatgtacaacaacacaatgattagcttcaacatgattgaggctgccaggattaacggcattaagaggtttttttatgcctctagtgcttgtatctaccctgaa

SEQ ID NO: 42562 - DNA, 256 bp, Glycine max
  Clone ID: 701125826H1
tgtacaagtcctttattaaagagaatcattgatgatgaggctgagcctgatgatagcattctccctctaagagatatgtttggaacttgtctgagtgtagttgctgctctgactaaggattgcattgagggatttcatttgcaggaggttaaaagtttcaaccaacgcaggctaatacatacaaagcttgcattttctcttgaacaaattatatccatttctaaactagctcttgcaagtaaatatgccgaagatt

SEQ ID NO: 42563 - DNA, 247 bp, Glycine max
  unsure (1)..(247): unsure at all n locations; Clone ID: 701125827H1
atctgagtggtgactgaaggaatctagcttctttcatttctcatcactantcttaggtctgagggctcattgccattatcatgtcaaggaggccagtaaatccttcgcgtcggttaggtgatggtggaagtataccatttgctgcatctatccggtctaaatctcaaaactctcccctactatctattgggcttgtcattgtgggtgcaatccttctgattggttattgttacagcaattcaggtgg

SEQ ID NO: 42564 - DNA, 254 bp, Glycine max
  unsure (1)..(254): unsure at all n locations; Clone ID: 701125828H1
gtcaaaccccaaganaccatttgctgctattgtcggtggatcgaaggtgtcttccaagattggagttattgaatccttgttggagaaagttaatgttctcttgcttggtggaggaatgatctttaccttttacaaggctcagggttattcagttgggtcatctcttgtggaggaagacaagcttagccttgcaactacacttcttgaaaaggccaaggctaaaggggtttctttgttgctccaactgatgttgt

SEQ ID NO: 42565 - DNA, 258 bp, Glycine max
  unsure (1)..(258): unsure at all n locations; Clone ID: 701125829H1
gttctccantagggtggacattnttcctgcaagaatatgttganccagttttccgaacttcaggatcaagttcctccatttccctgcaganacctctgtagctattgttgaagaagagcttggagctcctttaggtgatatctttgatcagtttgactatgaaccaatagctgctgcaagtcttggtcaggttcatcgtgcgagattaaatggacaggaggttgttattaaagtacaaaggcctggtctcaaggatct

SEQ ID NO: 42566 - DNA, 250 bp, Glycine max
  Clone ID: 701125830H1
atttagcagaagactgatctgaggcatccaaactcatactacccatcagttctccaatttcttcaaagggcatgatgcatacaagccctaacacatgaaggttgtgctgcaccatccagagccattccagaggatcaatcaggttaacagtaaatttagaatatggctttacttgctgaagagaccattggcaaattcttacaggtactagtgcagagaaggataatgggcaataatctgtagttgtagg

SEQ ID NO: 42567 - DNA, 257 bp, Glycine max
  Clone ID: 701125831H1
gtttgcagggcaaagacaagatggtcaagtccatcagctacagacgcagaagggcaaagcaaaggcaaatctttctcacaacctacaagttatcttctttgaatagtaacacttttggggagccgacacaaaagcctaagctgaagctgaagaaggttgctgttaaggttaagaagattgtggcctcggttttgatgttcatgcgagttggttcttttaggtcatgcagttctaggtctcagatttctgccacctca

SEQ ID NO: 42568 - DNA, 263 bp, Glycine max
  unsure (1)..(263): unsure at all n locations; Clone ID: 701125832H1
ctcgagcnacnnaganaacaaatcccccaaaagatgaatgntatgcccaaattataaaaactaggntttgattcatattttcccctcgattttcattnncctgagaaaatcannnnnnnnnnnnnnnnnnncttttctccgtcctcagtgtcgagttatttccccccctcaaattntcgtttttttccctaaaaaaaaggaanagtaaatggcggcggcgattccttcaccganggctcagtctgtggcggnggcggcgactc

SEQ ID NO: 42569 - DNA, 118 bp, Glycine max
  unsure (1)..(118): unsure at all n locations; Clone ID: 701125835H1
cctagagantgntgatgaagtctgcnatgtgtgcagtggtggntgtagcactncttcttctggcggnggtggggcccatggctgaggctgtgacatgcaccccaacagagttgagtcc

SEQ ID NO: 42570 - DNA, 260 bp, Glycine max
  unsure (1)..(260): unsure at all n locations; Clone ID: 701125836H1
agcagcctcaggaggagaaggatgtctcacaggaagttcgagcacccaangcacggttcactgggatttcttcccaggaagcgtgctgctcgtcacaggggaaaagtgaaggcattccccaaggatgacccatccaaggcacccaagctcactgcattcttgggttacaaggccggtatgactcacattgttagagaggtcgagaagccaggatcaaagcttcacaagaaggaaacttgtgagcctgttacaattattga

SEQ ID NO: 42571 - DNA, 257 bp, Glycine max
  unsure (1)..(257): unsure at all n locations; Clone ID: 701125837H1
gtcgaagcgtggtcgtggtggttcggcggggaacaagttccgcatgtcgctgggtcttccagtggcggcgacggtgaactgcgccgacaacacgggggcgaagaacctctacatcatttcggtgnaagggatcaaaggccgtttgaaccgtcttccctcggcctgcgttggcgacatggtgatggccaccgtgaagaagggaaaacccgatctgaggaagaaggtcttgccagctgtcatcgttcgccagcgcaacc

SEQ ID NO: 42572 - DNA, 256 bp, Glycine max
  Clone ID: 701125838H1
gagttttcctctctcgaatctgcgacaccgacgaatctcactaagcggaacttcgcattcagaaaatggctttaggtggaacagctcccccgagaggaagtgcagcggctactgccagcatgaggagaaggagaacaaccggtggtgcggcctctggaggagcagctggaactatgctccaattttacactgatgatgcccctggactcaagatctccccaaatgtggttcttgtaatgagcatggctttatagca

SEQ ID NO: 42573 - DNA, 256 bp, Glycine max
  unsure (1)..(256): unsure at all n locations; Clone ID: 701125840H1
ggtagatagagctgaaatcaacagtatagctttgtctccaaatgtccagtggttggcagcatccagtgacagaggcactgttcatgtattcagcttgagagtgagagtgtctggggaggatagtttgactcagccaaatgcttttcaagggcctgcactgnttcatnagaattcttcatctnctttagatcccttgatttctccaaatactggtgctaaccccaattcatcattntctttcatgagaggagtttta

SEQ ID NO: 42574 - DNA, 88 bp, Glycine max
  unsure (1)..(88): unsure at all n locations; Clone ID: 701125841H1
cttatactgcaaaggttcacactcacacccctagncacccatnagcntatggggcatggccaaagttaaggctnctttcttcccaaca

SEQ ID NO: 42575 - DNA, 256 bp, Glycine max
  unsure (1)..(256): unsure at all n locations; Clone ID: 701125842H1
gtttttggtgttccatttttcttcctccatctttatcttaaacataacttgaactctccattccttaaattttagctacgagctagttccgnaacagatannacangngcaaagaccgagttagaggtgactgttgagagcaagaacaaagacctcaagcacctggggtttgtgaggattgctgctattcaaacatttgtgattgtgtcaaatctgtatgantacgcaaagcagaantctgggcctttgagatccg

SEQ ID NO: 42576 - DNA, 254 bp, Glycine max
  unsure (1)..(254): unsure at all n locations; Clone ID: 701125843H1
attctctggttgcattcagcttcttggcttctgtgcttttgagagttgtgttggcatattctggccatccattatgaagatgagatctcaatacattcctgaggaggccaggagcaccatncatgaactttttccgcattcctctcaacatttttgtgtgtgttgtgctgtacaatgttgatgcattccctatcactgttatgtttggcatgtgctcaattttcctttggtggcttgtatcttgcaaaggcgac

SEQ ID NO: 42577 - DNA, 245 bp, Glycine max
  unsure (1)..(245): unsure at all n locations; Clone ID: 701125844H1
gtttggagaagaggggaacaaatacttccgacatgcaactgggcagatatatncaatctcaaaggatctggccacttacatttccatcaaccagccgattttgcataaatatgctaatgaagatgtctcacttggtgcatggttcattggtcttgaagttgagcatattgatgaccgcaatatgtgttgtggaactcctccagactgtgagtggaaggcgcagccggtaacatatgtgttgcatc

SEQ ID NO: 42578 - DNA, 258 bp, Glycine max
  unsure (1)..(258): unsure at all n locations; Clone ID: 701125845H1
agttgttctgcataccgcattttccccaagacccagaaatntgggttatctgagcaaagcttnccaaaaccctaaggcaatccgaattacctatcgttgttgtgcaattccaatttcaatttcaatcccattaacgaacagaataacccatgaacgtttttctgtgacgcgtgcactgttgtgttcccagacacgccaaaacagcaccacgagagagaaaagcaccatagatttgagccaatatccaaaagagctcgt

SEQ ID NO: 42579 - DNA, 87 bp, Glycine max
  unsure (1)..(87): unsure at all n locations; Clone ID: 701125846H1
gttgatttgttttttttttncttntttnaaattaatnaaattaattncagaaagggttaccttncccttnccttttccaanaacaca

SEQ ID NO: 42580 - DNA, 256 bp, Glycine max
  Clone ID: 701125847H1
aaactctttccatttgcaacatcaaaatgagtgaagatggcattgactacggcggaattgtgacggcggttatagcagctgctgcggtggtcaccatagtcagatgtttatttgctgccatggttgccatagccagatgtttatatgccgcaatgatcgccatagccagaagtttatatggcaacactaagcgacaacaagagtcattcgatgagcacgaagaaactgaggatgacgaagaatctgaggaggcaga

SEQ ID NO: 42581 - DNA, 255 bp, Glycine max
  Clone ID: 701125848H1
gttaccccagcaccacaaaatgtcgaagcgaggacgtggtggttctgctggtaacaagttcaggatgtcactgggtttgccagtggcagctgtggtgaactgtgcgacaacactggggccaagaatctttacatcatatcggtgaaaggaatcaagggtcgcctcaacagattgccatatgcttgtgttggtgacttggtcatggctactgtgaaaaaggggaagcccaatcttaggaagaaggtattgccagca

SEQ ID NO: 42582 - DNA, 260 bp, Glycine max
  Clone ID: 701125849H1
gtccaatttgagatcaaaacacatgggtctaagatggattctggtcctattagtttggtagtaaatgcttgcgcgagcagggatcttcgagataatgttgtcggggtttgttttgtggcccatgatataactgctcagaagaatgtcatggacaaattcatccgtattgaaggtgattacaaggcaattgtacagaaccgcaatccattaatccctcctatatttggcacagatgaatttggctggtgttgtgagtggaa

SEQ ID NO: 42583 - DNA, 262 bp, Glycine max
  unsure (1)..(262): unsure at all n locations; Clone ID: 701125850H1
gttctttctgtatcccttatncaactcgggtgtgtctctacttcttcacaataatccntnaancatcaccnncnnaccctttgcccaaatccctctttccttgtggaatttccctcaaactgaaagggttggtgttttggtgtaaaagtagttcagtgtgtgnnnnnnnnnnnnnnnnnnnnnnnnnngttgggagtatcagtgtcaatgcctctttggttgaggctcnngttttgtgggctggaaggctcttcatcttcta

SEQ ID NO: 42584 - DNA, 258 bp, Glycine max
  Clone ID: 701125851H1
aaaatgctcttctaaaagatggtttgccagtgatgaccttaactcccttgaagaactaattggaaggttaaggaggctgaaggagaatgtggggtttatagtaaatcgtgtcacagcaattcaggctggtctagacagctggcagtcagagcaaataaacaggaagctgtactatctttcgttcctttcaataatattcctccctttgtccatcataacaggagtctttggcatgaatgttggaggagttccatggac

SEQ ID NO: 42585 - DNA, 259 bp, Glycine max
  unsure (1)..(259): unsure at all n locations; Clone ID: 701125852H1
ctagctgtgacttgttttgagttcaatcaaatcgcattggtatctgaaatcaggaaagatggttagcgtantgagnatcaggcaggcacaaagggcagaaggcccagcaaccatccttgccattggaactgcaaacccaccaaaccgtgttgatcagagcacctatcctgattactacttcagaatcaccaacagtgaccacatgaccgagctcgcagagaaatttcagcgcatgtgtgacaagtctatgatcaagacg

SEQ ID NO: 42586 - DNA, 260 bp, Glycine max
  unsure (1)..(260): unsure at all n locations; Clone ID: 701125853H1
gccnnaccatggctgtaatnncccttgaagtgtnctgagatcnaggtggtcgtggtggacattgntgcaccgcgaatcaacgcgtggaacagcgannacctcccgatatatgagcctggccttgatgatgnngtgaagcagtgcagggggaagantctcttcttcagcactgatgtanagangcangtnncccgaggctgncnttgtcnntgnctcggngaacaccccaacgaagactcagggncttggagcnggcaagg

SEQ ID NO: 42587 - DNA, 259 bp, Glycine max
  Clone ID: 701125854H1
tcccattttgccccttcctcctttccttgtttccgaggagggccaaccacatatgctaaacaaggaaacaaatttctaacctccttcagatctacaccacccttctctttttttccagtttcataaattctacaccatgggcacggaggttctacggccacaagattgtttcacccaccgcatcgctgttccaccggcggggttttcccggagaagaacccctgggacacacaacaacaattacttcaggggcacgcgg

SEQ ID NO: 42588 - DNA, 254 bp, Glycine max
  unsure (1)..(254): unsure at all n locations; Clone ID: 701125855H1
tgatcnagaggcaacatnancngntgattgggangatgaggaggtggtgaatgggangccccanaganngaaaagcccaaaatgtgaagnagcccccggttgnggtgagtggtagnggccaatgaagaggaatccagcttacaaaggaaagtggctgccccactggttgatantcctgnttatnanggagtttggaagcctcaggacntccanaccctggctgntttgacattnaanacctggnnntgagnctc

SEQ ID NO: 42589 - DNA, 257 bp, Glycine max
  Clone ID: 701125856H1
gaaacaaccaagaaggagcctgatgagtcacaacacatgcagatgacgggtgcccgatgccgcagatgcacagagggtaaggtgggcttgagggatattatccacgccggacatggtgatcggtatcagctggaatgtactggctgtggttattcctggtttgcctcccgtgatgaggtgtctgagctgactatagatgcatcagattcaaaaagaagcgtaggcacagcgccatgggccactgcaaaatttgaaga

SEQ ID NO: 42590 - DNA, 256 bp, Glycine max
  Clone ID: 701125857H1
gcaagggtcaatttgtacctccagactttgttgctgttgttctctaggagaaaggtgccagatagagcctttaacataatggggatccttgtgttttgggtttggttccctctgttgatctcttcactaccaaattggggagaaagggtcatgtttgtgttggccagttttgctgtttgttcaatccagcaccttcaattttgtttgaaccatttctcagcagatgtgtatgagggcccaccaaatggcaatgact

SEQ ID NO: 42591 - DNA, 257 bp, Glycine max
  Clone ID: 701125859H1
gggcgaatccttaccattgctcgagatgggtgaagaagtcaaggccgtggttccagagtctgttttgaagaagcagaagagagaggaggaatgggcgttggccaagaagcaagacctcgaggctgcgaagaagaagagagccgagagccgcaaactcatctacaacagagctaagcagtacgctaaggagtacgatcaccaggagaaggaattgattcggttgaaacgcgaggccaagctgaaaggtggattctatg

SEQ ID NO: 42592 - DNA, 259 bp, Glycine max
  Clone ID: 701125860H1
acaaaatgtctggaaccgtgattgttttcgactttgacaagaccattgtcgatgtcgatagtgacaactgggtcatcgacgaattgggtttcaccgatttgttcaaccagcttcttgcccaccatggccttggaactctctcatggaacaggatgatgatggagcttcattcaaatggtaaaaccattgaggacattgaagaggttctggcgtaggattcctttggcaccccagagtgattccagctcttcaagcagct

SEQ ID NO: 42593 - DNA, 254 bp, Glycine max
  unsure (1)..(254): unsure at all n locations; Clone ID: 701125861H1
ggaaaacgttgttgagttcacagacttacccgtcaagaggccaagagaagaagaagaaggaaccaatggcgtctccaacgacgccgtttcagcgctcccctatgaccctcaataccctggnatctctgcggttattcccggttggttctccgaaatcagcccaatgtggcccggggaggcacattccttgaagatggaaaagattttgtttcaagggaagtctgactatcagaatgtcatggtcttccagtcat

SEQ ID NO: 42594 - DNA, 256 bp, Glycine max
  Clone ID: 701125862H1
ggaaatatcactcttcactctcgagctatattttgctttcttagttcccaacaatatggccaaatccactttctttgtctgccttaacctttcattactcttctctctagtcacagccacttactactcaagtttaaccccaacacttttgggttttcgcgaggagcagttcacccacctccacttcttcttccatgatgtcgtgacaggcccaaagcccagcatggtgtttatcgccgagcccaacgggaaagcg

SEQ ID NO: 42595 - DNA, 278 bp, Glycine max
  unsure (1)..(278): unsure at all n locations; Clone ID: 701125863H1
gtttgcaancacacacaaaanccatncncttcccgntntcattgcngtngccggtgtccacggtggtctccgcanctgcgccgtacgaccgcgccaaancggtgaaagagttcgaacgaaaccaaggtcggagtcaaaggtttgatccgattnggngaattcagaaccatgcccccctttnttncgtnccacccggcccgaaaaccctcaggcggnacctgcaagncggggtggccgnaacccggntgctgtggcagggagattccccacggttggcg

SEQ ID NO: 42596 - DNA, 258 bp, Glycine max
  Clone ID: 701125864H1
gcagtattgtgtttcctgtgctatccactctcatgttgtgagcgttcgatcccgcactgataggagaaagcgtgagccttccacagcgatttatcagacgcagggatgatgcaccaaggcctggtcagcctggtcaagccccacgtcctgctggagtaggagctcctgcccgaacttaaaaaacaaattccaaagttttttggggcttgttggttcagttttatgttacaaacttatactccattgctgtttattttt

SEQ ID NO: 42597 - DNA, 259 bp, Glycine max
  unsure (1)..(259): unsure at all n locations; Clone ID: 701125865H1
gaaagtccatganacaaccagatctggaaacacaaggnacagaaganaatangcatcttcgcactcggcaagctcctggtgctgcttcatctgagactgtgcccaaganatcgccaataccaagccaggaagatgcaacgaggaatgcactgaaaattttgtcacatggtaaggntgatggaagtnntnctggnaaaggaagagattttgggagnganagttgggttggatgngggacagggacaggnncagacncggg

SEQ ID NO: 42598 - DNA, 309 bp, Glycine max
  unsure (1)..(309): unsure at all n locations; Clone ID: 701125866H1
gcgcgttctcattcannacntcaccagtttgaatttcgttttnttgttgacaatttaggattttccaagtgttagcattgtgttttncattcccaatccgaaaggcaattttnttgtttttnttccccctggcntttanaatttctgtntnnaacatggtgttatttctnnggcagaaaatataactncatgggaccgaggcaacgnatttttggattgggaacatggtatgttaagggattatggttggcctcccnnggaacccctngaattttttgccctgccaggaaattncatttcncnngganc

SEQ ID NO: 42599 - DNA, 258 bp, Glycine max
  unsure (1)..(258): unsure at all n locations; Clone ID: 701125867H1
gcaatgaaagcaataagtccctccttcctctgccttataattcttgtgacccttttngctggtagcattgaaagtgcaccagcaaacgtgaagccaagccattatgctgcacccttcaataggagtgtttttccttctggttttctatttggaataggctctgcagcttaccagatagaaggagcagcagctatagatggcagaggaccangtntatgggacacctatactaaaacagcaaccagggaagatttggga

SEQ ID NO: 42600 - DNA, 256 bp, Glycine max
  unsure (1)..(256): unsure at all n locations; Clone ID: 701125869H1
atttgggagttaggttctgcacgctctgcttccagcgagtgttctttcttcgtttcaacaccttaatttgcatacgctgcttcttcngcttgagaaatggcacaagaaacctttctattcacatctgaatctgtaaacgagggtcaccccgacaagctgtgcgaccagatctctgatgcagtgctcgatgcgtgccttgaacaggaccctgacagcaaggttgcctgtgagacatgcaccaagaccaacatggtca

SEQ ID NO: 42601 - DNA, 257 bp, Glycine max
  unsure (1)..(257): unsure at all n locations; Clone ID: 701125870H1
ctgggctctccactgaactgagtctgnagaggaaaacatttaactaactgcaatggctgcacgtgtggctgcaaggtacggatctagaaggctatttagcagtggttctggaaaaatactgagcgaggaggaaaaggctgcagaaaatgcttactttaagaaagctgagcaagagaagttggagaagcttgctcgcaagggtcctcaacccgaagcaggctcggggggttcagtaactgatgccaaacctagtagct

SEQ ID NO: 42602 - DNA, 253 bp, Glycine max
  unsure (1)..(253): unsure at all n locations; Clone ID: 701125874H1
aaacaaacagtgagccatggccgtcggaaagaacaagcgcatctccaaagggaaaaagggtggcaagaagaaggcagctgatccctttgccaagaaggattggtntgacattaaggccccttctctttttcaagtgaaaaatgttggcaaaaccctcgtctctcgtacgcagggtaccaagattgcttctgaaggacttaaacatagagtgtttgaggtctcctggctgatcttcaaggggatgaggatcatg

SEQ ID NO: 42603 - DNA, 251 bp, Glycine max
  unsure (1)..(251): unsure at all n locations; Clone ID: 701125875H1
attccttgtttctcttaatgtcttcttgcatgtnaccttcttcccagggtgatgaaaaaggctagaattcttggttatggtgtttatgagggggtgaacgacttgttttgatttcagaggatgagcatgatgttgtctggttttggctggagaaagacaagccccacgaatgtccagtgtgcgcacagtattttgttgtaagttcataatgacttttagaatagctctactgttacagtgtttttgtgggg

SEQ ID NO: 42604 - DNA, 224 bp, Glycine max
  unsure (1)..(224): unsure at all n locations; Clone ID: 701125876H1
attagatgtgactttaaataaagatgcantcctcggcannttcaacaaccacttacattnncncgctaccaatgatagttcgtcccagattagagactttaatggtgttggcactctagctcatccatcagtaactgattctgttgaaaagagaaggggtgaaattgtagaagaagcagcttctcaagtggagcacatgaatagcgagcagcaggttgatgctc

SEQ ID NO: 42605 - DNA, 215 bp, Glycine max
  unsure (1)..(215): unsure at all n locations; Clone ID: 701125877H1
ctttanacctctctctcacttgaaactccacanccccattttcnacctcctatgaccctattccaaatcaccaattctaattccattcttcaggtgttcnattgaattcgtgatgaagagggatcaccgagntannnnnnnnnnnnnnnnnnnnnngagtgtgaagggtgagtgttcctcaatgccgtcgaacgggaaggcaaatatgtgggagg

SEQ ID NO: 42606 - DNA, 255 bp, Glycine max
  Clone ID: 701125879H1
gttcgcttgcagtcacacaagaggccaatcctattcatagctcgagatgggtgaagaagtgaaggtagttgttccagaatcagtgttgaagaagcgcaagagggaggaggaatgggcgttggccaagaagcaagaactcgatgctgccaagaagaagagagccgagagccgcaaactcatctacaacagagctaagcagtacgctaaggagtacgatcaccaggagaaggaattgattcggttgaaacgcgaggc

SEQ ID NO: 42607 - DNA, 238 bp, Glycine max
  unsure (1)..(238): unsure at all n locations; Clone ID: 701125880H1
aagcaggacctaggcttcttctttgcactgcaaatcacttttctactttgagnccttcttgatccttctttttctccttgaactcaaacatggcagatgaggtggttctgctagatttctggccaagtccatttgggatgagggtcaggattgcacttgctgaaaagggtatcaaatatgagtacaaagaagaggacttgaggaacaagagtcctcttctcctccaaatgaacccggt

SEQ ID NO: 42608 - DNA, 256 bp, Glycine max
  Clone ID: 701125883H1
ctcccaagggtttaacctttctggctgtgttaatatgcgtttcagcactgtcactgagtccttctgttgcgggggaagggcaaaataatggccttgttatgaacttctacaaggaatcatgccctcaggctgaagacatcatcacagaacaagtcaagcttctctacaagcgccacaagaacactgctttctcctggctcaggaacatcttccatgactgtgctgttcagagttgtgatgcttcactgttgctgga

SEQ ID NO: 42609 - DNA, 256 bp, Glycine max
  Clone ID: 701125885H1
atttccttctaatacatagtgagttacactattatcaacttgaggttgtgaagaatattaagagtgtgtcacatcacttttactacatttacttgcaagaaatcgatgatgagttcaagtaggagagcatggactgtggcgattagtgttggagttgtggagaccttgaaggaccaaggcctctgcagatggaattcggctttcaagtcagctcaacaaagtgtgaaaagccatcttagatctttgtcacaggcaa

SEQ ID NO: 42610 - DNA, 256 bp, Glycine max
  unsure (1)..(256): unsure at all n locations; Clone ID: 701125886H1
ctggtcncnnaaaaatcaatcaaatggcgncgaaacgattttttgatgattctgatcaagacaacaataataagccaccaggcgataaacggatganaactacaccaagaccttcttttgcttcggtaataggngaagtggtgatggtgaaaaacttgcagaaccttttctcaggcttggagcccttgcttagaagagtggtgaatgaagagntggagagagtgatgaggcattttagtgtgccacgtttcaatat

SEQ ID NO: 42611 - DNA, 254 bp, Glycine max
  unsure (1)..(254): unsure at all n locations; Clone ID: 701125887H1
gtcttcataaacgcctttcttctccgtttccgtttcctcgttcgaattcgctttttgatctgcgaaaatgagagagtgcatctcgatccacattggtcaggctgntatccaggtcggaaatgcttgctgggagctctactgcctcgagcacggcatcgggcccgatgggcaaatgccaagtgacaagacagttggcggtggtgatgatgctttcaatactttnntcagcgagactggtgctggaaagcacgtgc

SEQ ID NO: 42612 - DNA, 255 bp, Glycine max
  unsure (1)..(255): unsure at all n locations; Clone ID: 701125888H1
tnctcacccatgcaatacaaattaacacgaagggatcacaactccaactccaagcaaggnaagacaccagagacaganacaaagaaggatgagtaaggtgaagattttngttgtgggaggcacaggttacttgggtcagcatctgctacaagcctatgttcatgccaatgccaataatggaactccttttgctttcgatctcgctttcacccatcactcctctcctcctccccaacctctgttggatgccatcct

SEQ ID NO: 42613 - DNA, 257 bp, Glycine max
  unsure (1)..(257): unsure at all n locations; Clone ID: 701125889H1
antcattcgtgcactctccaaagtcaaagatgttatggttganattcttaaagaaaactgcaaccatgatccacaaaaagcactacaacaactacagacgcaagaataagatcatcctaggctccttcaggctccactacaactggtgctcctccaaatcctcgcatgtgttgccggttcccgaaccggtttacgccacgtgccgcgactcgggggagccgccgcgagacgaagaagattgcccctacctaaggtgg

SEQ ID NO: 42614 - DNA, 233 bp, Glycine max
  unsure (1)..(233): unsure at all n locations; Clone ID: 701125890H1
cttaaccacccaaggatacaaatantcatttggatattgantggtaacccctggttagtannttagttagtgagtgaagtgggtgatgatgtatataaanaggaagaggggtcatgagggaatcactcattgtgtgggaatttggagagagttggatctttcaaaagtccaggagcgttcacttcattgtctttgcctgtttttgattgtgaaaccaattgggaccaggattg

SEQ ID NO: 42615 - DNA, 253 bp, Glycine max
  Clone ID: 701125892H1
cgcatctccaaagggaaaaagggtggcaagaagaaggcagctgatccctttgccaagaaggattggtatgacattaaggccccttctctttttcaagtgaaaaatgttggcaaaaccctcgtctctcgtacgcagggtaccaagattgcttctgaaggacttaaacatagagtgtttgaggtctccttggctgatcttcaaggggatgaggatcatgcattcaagaagattaggttgagagctgaagatgtgc

SEQ ID NO: 42616 - DNA, 316 bp, Glycine max
  unsure (1)..(316): unsure at all n locations; Clone ID: 701125893H1
aattttttggtttggggatagatagagtgatacacatcacattttctgcaaagtnnnnnnnnnnnnnnnnnnnnnnnggcggnggcggcggcagtgcacggtggctaactgcccacctagggattgccgatccggccaccaacgttaacccggctngctgctggctnttggccttgctnctggcctgccctgcggcgggtcanccaancaactcaaananccaactttttggcttcttgatgctgtgcnccttcanacccaactntgcttccagtngttccccgggaaaattctttgcttctnggctntgcaggag

SEQ ID NO: 42617 - DNA, 203 bp, Glycine max
  unsure (1)..(203): unsure at all n locations; Clone ID: 701125894H1
cgccgcacgccgaaacaatggccgnaaaaggagagggtcctgctatcggaatcgatctcggaaccacctactcttgtgtcggtgtgtggcaacatgaccganttgaaatcatcgccaacgaccaagggaacanaacgacgccgtcttacgtnggcttcactgataccgagcgtctcatcggtgatgcggctaanaaccaagtc

SEQ ID NO: 42618 - DNA, 269 bp, Glycine max
  unsure (1)..(269): unsure at all n locations; Clone ID: 701125896H1
ctctgtctctctgtctcctccatgtccatctccttcagtcccacncaccctccttacgatgagatgatatacacagcaatcggagctctgaaggagagcggatggttcgannaagcnagccatangaaagtacatngaacaagtctacaaggaccttccacccactgcaccctggnctgttggantgcaccatntnanncnnttggaaatcnctgctggccctcgntcgtcctgcgttcaagaaatcctancaagcttcctggatctca

SEQ ID NO: 42619 - DNA, 252 bp, Glycine max
  unsure (1)..(252): unsure at all n locations; Clone ID: 701125902H1
gttgaaattggcataaaactantaaaacgttcacactaaggatgtcctatgggcattcacnctaaaggagatacgagccaacagtncaaaaagcgtacatcttgaattgtaccaacttccaagaactaaagccaaatagaagttcatnaaacactaaaattaagcagcaccctttcccttcttcctctggagtttcttcatgtaaaactccagctgccttaccttccagaatgtacccatcagccctgccac

SEQ ID NO: 42620 - DNA, 255 bp, Glycine max
  unsure (1)..(255): unsure at all n locations; Clone ID: 701125903H1
gcttaantcaccttggtcacaaaggaaaagaaaacatgccctttcacctcagncaatggaanagcatgtttgcagaagncggtagattctgtgatggtggaaatnagttcctgaaaagagtgcgcagtggaggtgttgatcctagtattagggctnaagtttggccgttccgcttggagtgtatgacttagacagcaccaaagatganagagatgttaaaagaactnnnnatnagaaagcaatatgagaaactcc

SEQ ID NO: 42621 - DNA, 251 bp, Glycine max
  unsure (1)..(251): unsure at all n locations; Clone ID: 701125904H1
cgcgtttccgtcatttggagccttctcctcattgtctctttcttctctcctcaaatcaagggtgaggcttctggttncgtcttcttcgtcgatagctccagtaatcaattcattcgcgccagatcatccaactatgagcaaccttcactgttgctagaagaagctggtgctgttgtgtcagtcttgcttggtttngctcctcttccacccttccagctgccagctcatccaagttgaatgatgttctgatt

SEQ ID NO: 42622 - DNA, 252 bp, Glycine max
  unsure (1)..(252): unsure at all n locations; Clone ID: 701125905H1
aaatcccctcatattatctctctctctcttaaaccatcatgtcctccaccgcgcctnccgtcctccccatctncaactcccaaaccaccgngggaaccaccggtgcaggcngcggcgccatgcgaggttccggccaacaacccggccttccgngctttcatcaacaacctctccaactccctccgnnacggcctcgaccagcgccgcccctggtcggagctcgcggaccgcttcaggttctcgaaacncgac

SEQ ID NO: 42623 - DNA, 251 bp, Glycine max
  unsure (1)..(251): unsure at all n locations; Clone ID: 701125907H1
cgctactgaaggtcagttcagagatgaatgctactaacctactcaaacnagatatcgtacatttnaatcttaagttgtcacaacttcaagctttgcttgatgagaaagaggcacagttacgccaatttagaagtatggnaggggggagtactggttcatcgagcaatttgcgtgaagaaactgntcgtgtgtcgaaagattcttcanagctttttccaactggcattccacaagtaggtcaaacagagctt

SEQ ID NO: 42624 - DNA, 255 bp, Glycine max
  unsure (1)..(255): unsure at all n locations; Clone ID: 701125908H1
aaacaacaaaccctccacccctttagtcaagtcttctcaaccaattccatttttttcctccatacgttttcccaatcaataacccagtacctcctatctacaaaatcgcatgcactttcccatcctcattctnccacacaaaaattcttgacncaaacacatatttctatctttttccactttcgttaaaacattctccgctatgatcactaaacaaaaacaagaacaacttctcttgttcctgatcttagtttt

SEQ ID NO: 42625 - DNA, 251 bp, Glycine max
  unsure (1)..(251): unsure at all n locations; Clone ID: 701125909H1
caaaggatacctttttgaaatttgcagctggtaggaactgatcnttgtgcctttaattccacccaaaaagctcgtggaatcgatgacttccggaaaatgcctaatggtgtcaatggtattgaagaaagaatgcatttggtatgggatatcatggtggaatctggccaaatatctgtcactgactatgtcaggataacaagcactgantgtgctaaaatcttcaatatatatccaaggaaaggagctgttct

SEQ ID NO: 42626 - DNA, 244 bp, Glycine max
  unsure (1)..(244): unsure at all n locations; Clone ID: 701125910H1
gtaaccattcctatgtacagtgatcgcagtggcatgaacttctcatctcanggagttgaaaagatcaaaaactcagcaggccaaatcatgaaacaagagaaacttgaaagggacaagtctcagcttgaaaaactacaagttcctggaaatcatgattcaccactgtgctcaatagatttaaatgatgtagtcaactatgaggagtttatgagaaacttgacaaatgaagagcagcagcaattac

SEQ ID NO: 42627 - DNA, 252 bp, Glycine max
  Clone ID: 701125911H1
gggacatatcactgaaatagtatataagggccaacatagccacccaaaaccgcagtctactagaagaacaaactctcaatcaattcatcaaccttcttcgtcttgcacaaactcagggataactgatcattcagtggtgactctaggaaatccacaaatggatcatttctccatacaagaagattcttcagcttctgttggagaggaagagtttgagcaaacaccgcaaaccagttattccggaggagacgg

SEQ ID NO: 42628 - DNA, 257 bp, Glycine max
  unsure (1)..(257): unsure at all n locations; Clone ID: 701125912H1
cgagaacaaaaaatgggtgtttgtgggtcgaggcccaaagtgaacgaagaagacctctcatcannnnnnnnnnnnnnnnnnnnnnnnnnnnnnnnnnnnnnnnnnnnnnnnnntcctcagaagacgcgtatcttctagaaagatcgaagccaacaacgtttnctccactctaattcagctncttgcaagcttctaatcgcgcttctgatgctgcttggtttgattctacttcggcgttggattctgagtgtgatgac

SEQ ID NO: 42629 - DNA, 252 bp, Glycine max
  Clone ID: 701125913H1
aaaattgtatggataggaagcactatgttctggtgcatggggcatgccatggagcttggtgttggtataagctcaagccacgcttggaatctgcaggccataaggtcacagtacttgaccttgcagcttctggaaccaacatgaagaaaattgaagatgttgatactttctcagagtattctgcgcctttgttgcagctaatggccacaattccctcaaatgagaagttagttctagttggtcacagccttg

SEQ ID NO: 42630 - DNA, 253 bp, Glycine max
  unsure (1)..(253): unsure at all n locations; Clone ID: 701125914H1
acagggcnctcctctggtgctgnaatggcaactcaaactaccttttgggtcttggaaaagtactttaacccaacaanaatnccacaaacccaagctacccttttgtgtcacttttgggtctcccttaattggcnatcatatattctctcacgcttcaaggagagaaaattggtcacgctatttcatacactttgttttgagatatgacatagtgncaaggattttgcttgctcccttggcttctattgaggaa

SEQ ID NO: 42631 - DNA, 252 bp, Glycine max
  unsure (1)..(252): unsure at all n locations; Clone ID: 701125915H1
aatcagattcatttttttgttcacaggttcttgagaagaaaagaagtggaactgaaaactgagtatggaaactgaaaattgcgaaacttttggcacaacctcactagatactactagtgttggtattgttggccactataagttcgaaaatgggtcatctcagtttgctttcatgaaagttgagaatganagaggagttttcccttgacccattccctcagcttctctatgaaaatntgtgcagaccctgnc

SEQ ID NO: 42632 - DNA, 255 bp, Glycine max
  unsure (1)..(255): unsure at all n locations; Clone ID: 701125916H1
gaaagagtaacgtatctattgtgttggtggtggtgttttttcaagggtaagcagatccaagacagagagaaaggttcctttcttagaaaaccggggtgcttaatttatgtttgagggtttgtgcttgaaaatggagaaaagagggaatgtgttgatggagaagtatgagtttgggaagctattaggtcaaggaaactttgccgaaggtttaccatgcaagggacgtcagaactggtgagantgttgccgttaagt

SEQ ID NO: 42633 - DNA, 256 bp, Glycine max
  unsure (1)..(256): unsure at all n locations; Clone ID: 701125917H1
agaaaatggaaagaagctgaaaatattgtgcctccatggattcagaacaagtgggagttttcttanaaagcaaatcagccaaatgggatccttctatattcactcaatttgatatggttttcccagatggtaaataccctgcaggagggaagtctgacatagaaggcatcttccctccaccttactttgagtggtttcaattcgaaaaggacttcacagtgtactttaacttggaagaatgcatctcatacttatg

SEQ ID NO: 42634 - DNA, 256 bp, Glycine max
  unsure (1)..(256): unsure at all n locations; Clone ID: 701125918H1
tgacgccctgagagagagaattggaaggttgcgacgagtgatgatatacacatattgtgacggtagtgaaatcgaggaaanagaggtagcaatttgcgagttgcaatgagtaacgaaaaggctccttcatacagcttcttcgagtagctacgagttgagcaaaggcatcaatggcctcgacaaggttattcttcgcgacgcacgtggtagctccgctgaggtgtacttgttacggtgctcacgtgacttcatggaa

SEQ ID NO: 42635 - DNA, 254 bp, Glycine max
  unsure (1)..(254): unsure at all n locations; Clone ID: 701125919H1
caaccacctccgtgcgagttatccatccaacgtcccttcctctcctgtgaggaagccctcatcttttgggtttgactcatcagctgctgtggcaactgcaatgatgaattccaggtccgccgcgtttgcaaagcgaanccaaagtttcatcgatcgtggagctgctgcaacccaccaccatcttggggggatgtcttccccttccaacccttcctgcagggtgtcctctaccctttcaggttggagttccccta

SEQ ID NO: 42636 - DNA, 251 bp, Glycine max
  unsure (1)..(251): unsure at all n locations; Clone ID: 701125920H1
aggacatgaagtggttggtgaggtactggaggtgggatcaaacgttagcaggttcagagtgggaganttggtcgggagttggactcctcgtaggttgctgncaaaaactgccagccatgccaacaagacattgagaattactgcagcaagaagatctggtcttacaatgatgtttatgtcgatggaaaacccacacagggtggcttgctgaaaccatgatcgttgagcaaaagtttgtggtgaagattcca

SEQ ID NO: 42637 - DNA, 228 bp, Glycine max
  unsure (1)..(228): unsure at all n locations; Clone ID: 701125921H1
aganatttggtcaagttaattngtatatgtattgaaancancttccgcagccttntntatgaacttgttccaaatggaagcgtggaatcctatttacatggggttgacaggggaaacagcccacttgattggggtgcccggatgaagatagcacttggtgcagctcgtggcctagcttacctgcatgaagattcaagtccccgtgttatacatagggacttcaatctc

SEQ ID NO: 42638 - DNA, 251 bp, Glycine max
  unsure (1)..(251): unsure at all n locations; Clone ID: 701125922H1
atataaataccttgtgctttagaaaagtgataattgcattgtaactgtctttatttgaaagaaganataaaanaatgttttgaaaacagacaagtttctcgaggaagcgatccaaagcccaatgaatgaatggttatcgttttgaagaagcttttgatggcagtgctctgagactgaatcattgaaactagattcnatttattcgctcctttcttcaccaaaattgaattgaatggatgctatcagaaagc

SEQ ID NO: 42639 - DNA, 250 bp, Glycine max
  unsure (1)..(250): unsure at all n locations; Clone ID: 701125923H1
tngcagaacccagatctgtagacaatatgggaagcactggtttgctncattnnntatgccttgtcattgctttagtaagtgtgtcgcttgtgcaagcagangatgcgtataagtatttcacatggacggtgacnatgggactctttatcccttggctagtccccagcaggttatncttatcaatggtcagtttcctgggcctagacttganttggtaactaatgnaaatgtaattctcaaccttancanc

SEQ ID NO: 42640 - DNA, 252 bp, Glycine max
  Clone ID: 701125926H1
gttcttcaaaccgcttttttccctgaaccggacgtcggtggagacggtcgagcctggttaaagccgctgctacggaaatcccaaaccggacggcgacggcagcactacgacggagttgtggaatgcgagtgatcggattccgaaatggcttcgaacccttcgcttctccctgagatcggacccgatggtctcgctaaagaagctcccgtcatcggctacaccgagaagatcatcgaagcagaacagcttcaa

SEQ ID NO: 42641 - DNA, 251 bp, Glycine max
  unsure (1)..(251): unsure at all n locations; Clone ID: 701125927H1
ttcagtttnttgtcatcactctcagctggtcggtgcttatagatccagcgccagcagattcantttnacactggaagcaacttttcatttcaaagattaagtganaacatggttgtccttgctgcttccattgtgancaaatctggcaaagttctagtttctagncagtttgtggacatgtctcgtancanaattgagggacttctancagacatttcccaagttaataggcactggaaagcaacacacac

SEQ ID NO: 42642 - DNA, 249 bp, Glycine max
  unsure (1)..(249): unsure at all n locations; Clone ID: 701125928H1
tgagaaatggcggattcttctcgggaggagaacgtttacatggcgaaattggcgganaggccgagcgttacgaggagatggttgagttcatggagaaggttgcaaagactgtggaggttgaggagttgacggtggaggagaggaatctcctctctgtggcttacaagaacgtgattggtgcgaggagggcttcgtggaggatcatatcctccattgagcagaaggaggagagcaggggcaatgaggacc

SEQ ID NO: 42643 - DNA, 253 bp, Glycine max
  unsure (1)..(253): unsure at all n locations; Clone ID: 701125929H1
aagtttacaaaattcagtctcagtggacatgaaggaccagaaaatgactataattggggatgttgatcctgtaacagtagttggaaagtttacaaaattcagtcttggcaagcttagaaaattctgtcatgttgagatactttcagttggaccagccaaagaggaaccaaagaaagaggagaagaagccagaagccaagaaagatccaaaggaggaatatgctgaacttctgaaggtagttgaagccattnat

SEQ ID NO: 42644 - DNA, 251 bp, Glycine max
  unsure (1)..(251): unsure at all n locations; Clone ID: 701125930H1
gnaataaccccactcacacactaacatagttactgacagtgccaganagagaaagacgtgtgaagtgtgagtgaagaagctcttgatgttttctcttgcaacctctgaatctantcttgcgatacagaaaattgttgtgatccaanncntttgattcaggtgattcaaggtangcttcagttgtgctatttaacagtgtagggcactgcgtgtttacganataataagtttgtataattatgtantaatac

SEQ ID NO: 42645 - DNA, 245 bp, Glycine max
  unsure (1)..(245): unsure at all n locations; Clone ID: 701125931H1
aanaaacttcaactccttactcaacaattcttgnttgtgtaatttatatcttgttagtatatccttgttgtgggttttgtgtggattttcttctgctaatacttgtttgtttttcactcttagagagatagaaattggttgtgaaaaacagaagcactttgtttctaagtaaaaggaatcttcagctgccatgtttcatcgctggagcaattctcatcaacaggatcagggaagcagcgagcttt

SEQ ID NO: 42646 - DNA, 259 bp, Glycine max
  unsure (1)..(259): unsure at all n locations; Clone ID: 701125932H1
ctcaaatggagaacgatgatttcantgattcacagttaattcntcacttcagangcgtncttgttgcagtaacaactggtgatcgagagaattacnacgagctcgtcggttatttgcacccgaagaagaatcttantcctgatgaggttgctatacttgtgacgactttgaaggcgctttctggagcagtgtcctatatagattctgttcattcatgnataccctggctctttgcngtttncgagaatgagactctggc

SEQ ID NO: 42647 - DNA, 250 bp, Glycine max
  Clone ID: 701125934H1
ggttgattaatcaggacaagaacaaatataacactccgaaataccgatttgtggttcgctttagcaacaaggacattgttgcacaaataatatctgctagcattgccggcgatttagttcttgctacagcatattcacatgagctgccacgatatggtcttgaagtaggacttacaaattatgcagcagcttattgcactggtctcctgttggcccgaagagtcctcaaaacattgaaatggatgaggag

SEQ ID NO: 42648 - DNA, 252 bp, Glycine max
  unsure (1)..(252): unsure at all n locations; Clone ID: 701125936H1
atgtggtactgccctagatgcaaggnacacagacaagctacaaagaagcttgacttgtggaaattgccggagattcttgtttttcacttgaacacggttctcatacagtagatacctgaaaagacaaacttgacacttttgtgaattttcccattcacaatctggatttnactaaatatgtgaaaagcnaggatggaccgtcttatgtgtatgacctttatgcaatncagcaaccattatggtggtctaggt

SEQ ID NO: 42649 - DNA, 251 bp, Glycine max
  unsure (1)..(251): unsure at all n locations; Clone ID: 701125937H1
aatttcactactttgcttccttagaaagaggaactacaattgatagctagcctccaccaaaacatatgtntgncngaaacccaccaagaaaaccgagggaaggtaccaaaacacataccaattatggatttgatgtcatccatcttcaattgctttgtnccatcttcatcaagtcaagtctctgactatgccaaaggatcatctcaattgaaatctccttcttcagagaaaccaaagagcaaaccaaaatc

SEQ ID NO: 42650 - DNA, 252 bp, Glycine max
  unsure (1)..(252): unsure at all n locations; Clone ID: 701125938H1
gtgaccctcctcacgccaacgccatagttgttcccttttctctctgcgttttttctcaaaaagttgcaagagttaaagcaaaaaccanagtgttagagaaaatgatgaagccatcgatgctcagatctcttcactctgccgccacccgcggcgcctcccacctgtcccgccgtggctacgcctccgagccggtgccggagcgtaaggtggccgttcctaggtgccgccggcgggatcgggcaacccctctcc

SEQ ID NO: 42651 - DNA, 253 bp, Glycine max
  unsure (1)..(253): unsure at all n locations; Clone ID: 701125939H1
gncgaagagcatcacttcgattctccaggcggntgcgggancgtccaagacgtatcctcagcangctggtaccattcgcaagantggctacatacgtcatcaaatccaggccttgcaaggttgtagaggtctctacgtcaaagacaggcaagcatggacatgcaaagtgtcactttgttgcnattgctatttttaatgggaaanagcttgaagatattgttccatacatgcccacaactgtgntgttccacat

SEQ ID NO: 42652 - DNA, 250 bp, Glycine max
  unsure (1)..(250): unsure at all n locations; Clone ID: 701125940H1
gagcaaaggtgctgagcctaaaaactctgtgattgattccacagtaagagatttgnccagaattcaganccttcacagaagggttatagaaaataggaaccaanacaccatttcaaggctgcagaggttacagaaggagcaaccancagcagtccttcaagccagtgtttgctccggccgcttcatcgacaagtccagtttccgggcagcttgtggcaaccttggaatccggggtgagtcttggctctgg

SEQ ID NO: 42653 - DNA, 251 bp, Glycine max
  Clone ID: 701125941H1
aaaaaacagaacaacaatggcgacacttaaggttcctcagcctcttccccccgttgcagatgattgtgagcagctccgaaaagccttctcaggttggggaactatccgaggagctgattgtatcgatcttggctcataggaatgctgctcagaggaagcttatcagagaaacttatgcccagacctatggagaagatctcctcaaggccttggacaaagaactcacgagtgattttgagaggctggttcat

SEQ ID NO: 42654 - DNA, 160 bp, Glycine max
  unsure (1)..(160): unsure at all n locations; Clone ID: 701125942H1
agngttagtnggtatcctcaaaatactagatttncgnttcgtttggtgancggatttttangtgngattcattcacgttnnntcatttgtngcaacaanctatnncnaggntctncggtcgattgaaagnctgcagcaaaccgaagtaggagccgngtgc

SEQ ID NO: 42655 - DNA, 243 bp, Glycine max
  unsure (1)..(243): unsure at all n locations; Clone ID: 701125943H1
cgaacaatagcgaagtaanccgtnnaaacgaacactaccgaancccactgcaacagagtngngncaagacaagcatcatttactactgntaacggtcatgcggaactgcangcagctggcaccagntctaaggcccagatagtgtgacccangtantccagggcaacgattnacgtcaccccgagtttcgtnacagcatgggcgcgcctcnncggaattntncacgcccgcagagtgttcgtc

SEQ ID NO: 42656 - DNA, 252 bp, Glycine max
  unsure (1)..(252): unsure at all n locations; Clone ID: 701125946H1
gggagacgtaaacagtgctcaaatgantcatgcaaacagaggatatatccacgacttgacccggtggtcattatgctagtaattgatccgggagaatgaccgtgcccttttgagcaaacaatcgagatttgtacctagaatgtggagctgcttagcaggttttatagagccaggagaaagcttggaggaggctgtaagaagagaaacgtgggaggagactggtattgaagtgggagaagttgtatatcatac

SEQ ID NO: 42657 - DNA, 252 bp, Glycine max
  unsure (1)..(252): unsure at all n locations; Clone ID: 701125947H1
ctataagctagtttatcgtgaggagaatatgaagttgtttgtnttctttgttgctgcagtagttttggtagcatggccatgccatggcgcaggctaccaaaggttccctctccgaatgaaaactggctatggtgagcgttcttcggaggtaaaatgcgcaagttttaggcttgctgtggaagcacacaacatccgagcncttaaaaccattcctgaagagtgcgttgaaccaacaaaggactacattaatgg

SEQ ID NO: 42658 - DNA, 255 bp, Glycine max
  unsure (1)..(255): unsure at all n locations; Clone ID: 701125948H1
agttggggtgctggaaccgagggacagttnggaacaaagattcttcaggatgagcacttccctcaactccttcaccaattctctctctcctccatctcttcccttgcctgtggcggtgctcatgtgcatagccttaacctctgctggaaaggcactatcatggggtaggggcaattctggccaactggggccatggggangttgtgagtaacactttgtatccaaaggctgtaacatcattggatggctatttcc

SEQ ID NO: 42659 - DNA, 252 bp, Glycine max
  unsure (1)..(252): unsure at all n locations; Clone ID: 701125951H1
gcttcatanacactccatagttggcagcctggcagcacaagaatcccatattnctcattctcttaagccagtgattagaagccagtttttctgtgcttcatactacaccttcacaaaccccaagaagaatggaacggggaagaagaagcagctcttttggccctatgtcctcaactgtcccttgttttctcctccttttgttctgtctctcaggatctgctgaggcctacaagaattatacagttggagact

SEQ ID NO: 42660 - DNA, 252 bp, Glycine max
  unsure (1)..(252): unsure at all n locations; Clone ID: 701125953H1
gttacagacccnatgtcttctccaccactctctcccatctcattgctaccaanctcttcccacttacatcattccttttntcacccatcagaganaggttgaaagacaagttcnaggagtttttcaagtgtgagtntgagntcttnattgaattcactggtttaatcagttggagtagnggagnaancattggatggcatagtgatgataacaggccctacctcaaacaacgccattctncagcantatgcc

SEQ ID NO: 42661 - DNA, 241 bp, Glycine max
  unsure (1)..(241): unsure at all n locations; Clone ID: 701125954H1
caaaattgttgggttcgcaaaggtggtgcttatactggngaggttagtgctgaaatagcttgttaatttgggaattccttgggttattattggtcactctgaacggaggcagcttttgaatgaatcaaatgagtttgtgggagataaagttgcctatgcacttcaacaaggtctgaaagttatagcatggcattggggaaactcttgaacagcgtgaagctggtacaacaacggctgttgt

SEQ ID NO: 42662 - DNA, 256 bp, Glycine max
  unsure (1)..(256): unsure at all n locations; Clone ID: 701125955H1
gccgatttgaaaagatgagtaagcttcagagtgatgctttgcgtgaagccattctacaggaatcatggccgatttccaaggagaagaatcgcaaatttgtggagaccatcgaactaccaaatcggtttgaagaactacgatccacagaaggacaagcgtttcagtggctccgtgcaagttgccccacatnccctcgccccaagatgaaaatttggcatgcttggtgatgctcagcatgttgaagaggcagagaaga

SEQ ID NO: 42663 - DNA, 249 bp, Glycine max
  unsure (1)..(249): unsure at all n locations; Clone ID: 701125956H1
gcctaacattaccaagttctctctattttatctctggggcgttcttagcaccaccaccagcttctgcagtagcttcaagcttcgaaagattttccttgaccatggggcaaaagcntttagtgacagtcttatgtttatgggctttaacatgttcccttcttccatctttctcctttggaattctgagantcggtttgaagaagagacctctagatattgatagtattaatgctgctagaaaggcaagac

SEQ ID NO: 42664 - DNA, 247 bp, Glycine max
  Clone ID: 701125957H1
ggcggcaagcaactccatccgcaatggtatgtttcgcttcaacggcgtcaccatccctcatccttggagagttgatctgactgagttcttgaacttgattgcagggaatcgatttgaaggcaggaggtaagtccaagaagaccaagcgaaccgcccccaaatccgatgatatctacctcaagcttctcgtcaagctgtaccgttttcttgttcggaggactgggagtaattcaatgctgttgtcctc

SEQ ID NO: 42665 - DNA, 249 bp, Glycine max
  unsure (1)..(249): unsure at all n locations; Clone ID: 701125959H1
gttttgttntccgtgttatttctccttctccaacgtcctttctacatccttctcagccaactccgaaggaaacgctncttcatgatttgagaagcaggctttctgaccccagcaangtgcttcagagctgggacccaaatctcgttaatgcttgtacttggtttcatgttacntgcgactccaacaatcacgtcattcgcttagacttgggcattctaagtctccggaantttgggaccanaanttgcc

SEQ ID NO: 42666 - DNA, 253 bp, Glycine max
  Clone ID: 701125960H1
taaaaaatcaaaacgctttgggtgatacataaacagaaggcagtaactgtaccaaattgtaataaccggagaaaaattcaagcaccgagtcctcttctctctgtggtcgccgcgactacgcttcttcgaaactcgaggcgcgtgaaaaaagaccttctggatctggatctcgaacgccatggcgttttggagatctctcgtagcgttctctgcggctcttctgcttctcatccatggcgctcactgcttctac

SEQ ID NO: 42667 - DNA, 256 bp, Glycine max
  unsure (1)..(256): unsure at all n locations; Clone ID: 701125962H1
gcaatgagagagatacagttacccttaagccaaacacagaaggttcgtcttcagaaggctctggancagttagagtctctgtcaacgaaggtgaattccgatgcttcggtaatcatcgccgattccatccacgtcaaccacgaagtccggcgtcctcaagggacacggaaccgccgacctgcaacggcgaagtcgtcgccaccctntgaggagtngtcgagngcgtcaacaaacttgtctaagtncgngcgttaac

SEQ ID NO: 42668 - DNA, 253 bp, Glycine max
  unsure (1)..(253): unsure at all n locations; Clone ID: 701125963H1
aaatgggtcgttttctgaatctcgtttctctgctgttacttatggcttccgttactgttccatttangaagaggagnccatgctgatataaatttgaagggcattcaggctgataatcacagaaatgttgttcctaccatcttcccgctcgtcttcaaactatgttgctctccgtttctgtgacttcaatttggactccaatggacatgggtttcatgtgaaagcaagcaacagtcgttacatggttgtttat

SEQ ID NO: 42669 - DNA, 255 bp, Glycine max
  Clone ID: 701125964H1
cttgatcattcgatttttctcctcaagatgcagatattcgtaaaaactttgaccggcaagaccatcacccttgaggtggaatcctccgacaccattgacaacgtaaaagctaagattcaagacaaggaagggatcccacctgaccagcagagacttatctttgcgggtaaacaacttgaggatggtcgcacccttgccgattacaacatccaaaaggaatcaaccctccctctcgtgcttcgccttcaggggtgg

SEQ ID NO: 42670 - DNA, 252 bp, Glycine max
  unsure (1)..(252): unsure at all n locations; Clone ID: 701125965H1
gttggtctcaaaccaggaaaatcatgttcaagtntganaatgccttctccttcaataaatggatncncaccacgagtgtgtaaattnatttacagaactaaaaatgcattataattanttactgcatgttatagataccacatgcagaaaaaagtatgtatggaggtttttagaaattattgttatttgatatcttaaaatcaaattctgcaataggaaaanaaatcanncaacattgagtttatccagctc

SEQ ID NO: 42671 - DNA, 250 bp, Glycine max
  unsure (1)..(250): unsure at all n locations; Clone ID: 701125966H1
gggttgtggtagtttggcagcgacacgtatcttcatcaataatcgcagaagcagtttccggtgcatctgcatcgtncttccaaaatggacgacgcagatgtctcgangcanatccagcagatggtgcgtttcatccgccaggaagctgaggagaaagccaacgagatctctgtatctgccgaagaggaattcaatatcgagaagctgcattggttgaagccgaaaagaagaagatcaggcaagaatacga

SEQ ID NO: 42672 - DNA, 249 bp, Glycine max
  unsure (1)..(249): unsure at all n locations; Clone ID: 701125967H1
aatttctgaccctaaccgcgtgtcgttaaaatcctcaaacgcagagtagacatagaattatcncaaagcggggtaanggagattgaattcgatcctgggacgttaacgttgtttcaattcaattgtggtcctgtcggtgccctatctcagacgacgatgtcatctttatatagaggggaatccaggaggtacaacaataaaccaagaggacgtcntaattgctnnncgcagaagaagcaagagcttaac

SEQ ID NO: 42673 - DNA, 251 bp, Glycine max
  unsure (1)..(251): unsure at all n locations; Clone ID: 701125968H1
gttttggttgattgcgggatggaagtggaggcantgcaacaacagcgcaaaggagccgcacctgaagaagagggctctgaagaacaaanntttgggcatcactttcaacgagaaagatctcactgactacgtcaccggctttcacaagcgcaagaagaagagcagaaaggaagcccagaagcaacagaacgaggctctgcgccgcaaacgcaccgnggaacgcaaaaggaggaagttggaaaganaacatc

SEQ ID NO: 42674 - DNA, 251 bp, Glycine max
  unsure (1)..(251): unsure at all n locations; Clone ID: 701125969H1
gggcgtcattcctattcagactttntatncnagcagtggttngncacncgattgcntcncgggttcaaggtcggngaatanggacagtcncaatgttgattcntaaccctggcnaagangaggatcncgcgtgtggnccgcttgttgactcggttgctctgcaggactctctaccctcctagagctantaaccagaanntnctaaagnntggtggatttgangaangaccctatgtgttccncaactcanc

SEQ ID NO: 42675 - DNA, 228 bp, Glycine max
  unsure (1)..(228): unsure at all n locations; Clone ID: 701125970H1
aaagcaactccatccgcaatgggnntcgatttgacggcaggaggtaagtaccangaagaccaagcgaaccgcccccaaatccgatgatatctacctcaagcttctcgtcaagctgtaccgttttcttgttcggaggactgggagtaacttcaatgctgttgtcctcaagcgccttttcatgagcaaggtcaacaagcccccgctatccctctctagattgatccgtta

SEQ ID NO: 42676 - DNA, 236 bp, Glycine max
  unsure (1)..(236): unsure at all n locations; Clone ID: 701125971H1
gctggannttgccatttnctgntcnagggcangtcantcctcngangntcttgtgcngaaaaactcgctgaaaatgacntcanagtcacnnttagtacaacacagcttacaaccnnnagagagtnttgagtgnaacaaatgagganggatcngcagtgagantaatctcaatcncagatggtttangcccngaggntgaacagaaataacgtggtcaatttatgttccggcancct

SEQ ID NO: 42677 - DNA, 250 bp, Glycine max
  unsure (1)..(250): unsure at all n locations; Clone ID: 701125972H1
gccgtacctaatcggagagctcccgctgactgcgatcggatttcatggctcctaagaaagacaaggctcccccaccttcatgccaagcccgccaagtctggtggtggnnnnnnnnnnnnnnnnnnnnnnnnnnnnggaaagcaaaaggagaaggtgaataaccaggtgctgttcgatcaggctacctatgacaagctcctctccgaggcacccaaatacaaacttcattactccttccattctctctgac

SEQ ID NO: 42678 - DNA, 249 bp, Glycine max
  unsure (1)..(249): unsure at all n locations; Clone ID: 701125973H1
gngagccannggcgtcggaaagnacaagcggcatctaccaaagggnncnagggtggcaacaagaangcagntgntccctttgccaagaaggantngtctnacattaaggccccttctnctttttcaagtgaaaaatgttggcaanaccctcgtctctngtacgcagggtaccaagattgcttntgaaggacttaaacatngagtgtntgacgnntcctggctnatcttcaaagggatnaggatcatgca

SEQ ID NO: 42679 - DNA, 320 bp, Glycine max
  unsure (1)..(320): unsure at all n locations; Clone ID: 701125975H1
gtttcctctgctaattccatatccccgttttccttcactcttgaaccccgattcatttccaccagcacaagaagcntggctgacaatatncaatanccttctacacatgaaaagcttggnncatanctgctggagtatgcgaaaattccaaggnnagttgctccaaagttctaatccagaagtggtggggctnntngaccttgnagcgntgnaaagcnaaagnanccanaggtcccttncatnncaaagggtncgcctngactcggctttaccccttttacaacncccccatntgnnntgcaattacagcaaggaactnc

SEQ ID NO: 42680 - DNA, 253 bp, Glycine max
  unsure (1)..(253): unsure at all n locations; Clone ID: 701125976H1
ggctactcgctcatcccgtggagaaccgtaaccctaaccccttcccctaccttgtaaccttcctttacgatccttcacctcgcagataatgggagaaacaaaggacgnagcatacgaggaagagcttctcgattacgaggaggaagacgaaaaggcccccgactccgccggagctaaagttcaacggcgaagtaccaagaagggctatgttggaattcacagttcgggattcangggattccttctgaagccc

SEQ ID NO: 42681 - DNA, 247 bp, Glycine max
  unsure (1)..(247): unsure at all n locations; Clone ID: 701125977H1
gcaacctgctgctaaactcaaattgtgacttgaagattnttgnttttggtncttgcgagaccaactttggaaagtgacttcatgacagaatatgtagtcacaagatggtacagagctcccgnattgttgttgaattcctctgattacacctctgctatagatgtgtggtctgttggttgcatcttatggagcttatgantaaaaagcctctgtttccgggcaaagaccatgtgcatcagatgcgctc

SEQ ID NO: 42682 - DNA, 253 bp, Glycine max
  unsure (1)..(253): unsure at all n locations; Clone ID: 701125978H1
gttctcatttggtgaactagatgacttgcaggtggaagtganactgagtgaagcaagggatatcttgcntcaagacaagacacagatgcgcaacgacttgaagctatttttancagcctgttcgggaaaagttgctgcaattcgaacagggaactcnnnnnnnnnnnnnnnnnnnnnnnnnggaagtattncgtatctgtgacaaaagccatgcagtttttgtaattttagtcgcnacttgtatttctagtac

SEQ ID NO: 42683 - DNA, 301 bp, Glycine max
  unsure (1)..(301): unsure at all n locations; Clone ID: 701125979H1
agcgggtcgtcgcgtgncggtcgggggacggattgggaacgggcccttcggggcctcttcccgaggttacggatccattttgccgacttgcccttgcctaacattgttcccatcgaaccagaggctgttgcaaccttggnagcacctgatgnggtctatgagtaacgcacngggccgtgggnagggccacttcgggtncctnccgggntttntcaaannnggcngcncgggnggncgncaacncgggancaacccaacgacggaaccgtggcgggttggcttctntncccaggcccggccc

SEQ ID NO: 42684 - DNA, 188 bp, Glycine max
  unsure (1)..(188): unsure at all n locations; Clone ID: 701125980H1
gcatagtgttattgtnatttttatgttanaatgttattaattaaactgtttctgttggtgattttntccccgtgtaaacttctgaaaagggattcgaacaggtgagatttccttggagaccanagaagtttatatgtttcgccaaaattttagtaggggtcctctcaaaatattgacgaggtggctcc

SEQ ID NO: 42685 - DNA, 258 bp, Glycine max
  unsure (1)..(258): unsure at all n locations; Clone ID: 701125981H1
gcgnagatncnaagtggtganccnnggaggtggtgttgccngngccaaccttgcaaaaacctannccacgncaagcnaacgtcacccttattganccgaaggnatnttttgagnttccatggganagtttgaggngattggntgagccaacttttgctgaaaggatngtgatcaaccatagagagtactttcaagaagggtcaaccttgnngtntccagtgctgtncaacagaactgnanactgncagtagtgactnc

SEQ ID NO: 42686 - DNA, 250 bp, Glycine max
  unsure (1)..(250): unsure at all n locations; Clone ID: 701125982H1
taagccactagtacctcacaatgcccattgtagcaacctctccttctcttctttcttcttaatttatgcctcagagncacttatgctgactatggaggtggttggcaaggtggtcatgccacattttatggtggaggtgatgcatctggcacaatgggaggggcttgtggatatggaaatttgtacagccaagggtatggcactaacactgcagcactcagcactgctctattcaacaatggcatgagtt

SEQ ID NO: 42687 - DNA, 248 bp, Glycine max
  unsure (1)..(248): unsure at all n locations; Clone ID: 701125983H1
gggttctaagattgttttgtttgagttaaacgcgacaaactcaaatacgtgtgcattacaactnctaacccctcaccatcctcttcttctctctcattcatacccctccttttttatttgtattctcagctttgttagattccgtttctggtttttcccaattccatagtactctgttatcgtcgtcatcccttttataggacagacaaagctgattcacttaggagcctcgagagctatgtctacac

SEQ ID NO: 42688 - DNA, 246 bp, Glycine max
  unsure (1)..(246): unsure at all n locations; Clone ID: 701125984H1
tgggtaggcattttnatttgcacgnttctctggtgagggcaanntcacagaattggtgtganagagatgggttcgttccgtgaagctttcaaggagagccttggaaactgagatgccccgttatggttcagatgcaggaattgcaacnaggagctaagaatgccttgtctttggcccagggggtggtttactggcagcctcccaagcaagcgttggaaaaagtgaaagaantgtctctgagcctta

SEQ ID NO: 42689 - DNA, 238 bp, Glycine max
  unsure (1)..(238): unsure at all n locations; Clone ID: 701125985H1
tgctaacctttgccgtcaccattttggctcttatgtgcgccatggcctcngtatccgaacaacttcaacacccccactccnntgcacaagtccaggtgttgaacatcaactggtttcagaaacagcccaatggcaatgacgaggtcagcatgacactgaatatatctgcagatttgcagtcccttttcacatggaacacaaaacaggtttttgtttttctagctgctgagtatgaaac

SEQ ID NO: 42690 - DNA, 307 bp, Glycine max
  unsure (1)..(307): unsure at all n locations; Clone ID: 701125986H1
gtgaagggtcgtgtctantgtgacccttgccgtgctggttttnagacctcagctanccacctaacattgctggtgactggnaattatgttgcaataacaagagncagggtncagacaaacggaggtatgtcgtnacacgaagccagggggtaacaccgnaattcataccgggagacattacacaatgtcaacgtnngatgnnggattcatcggcagattcaggattctnggcaggtggcncaagactntggtnaagncaggcnccttacaacnnctnccaaattggcccagggtaagttncancccc

SEQ ID NO: 42691 - DNA, 247 bp, Glycine max
  unsure (1)..(247): unsure at all n locations; Clone ID: 701125987H1
gaacttagctacaagctaaggaaggatcaaagagaatggctcaagcaatggcatcaatgactagcttacgtggttcctctcangctgtgttggaaggtagccttggctccacacgcttgaatgtggggagtggaagcagggtgncctcagtcacacgtgcagggttcacagttagagcacagcaacaacaagtgaatggtggtgaggtacaaagtagccgtagggcagtgctttcacttgttgctgc

SEQ ID NO: 42692 - DNA, 253 bp, Glycine max
  unsure (1)..(253): unsure at all n locations; Clone ID: 701125988H1
acacctgactagcaggnacacgtacantcttcganacgcagtttgcgcggtgcactactcaggtatatcccaagtcatgncactgctatatatattgcgcttganaagcgtgggaatgtggaacttgangtntgaattntgggcacggcagtaccttggccaacagttttacatnngcgtttatacaacatcganattcaataccgcgatgaatatcctgttccaaagaatgcactacttcgtggnagggcnc

SEQ ID NO: 42693 - DNA, 248 bp, Glycine max
  Clone ID: 701125989H1
aaccccaagaccttccttctttcgttctcccatcaaacccccatggaagtattcccaaggtgctgtcttcgatgttccaacacatgaagaagctgaagtgggtactcgcgaactcgtttcacgaactggagaaagaggtaatagactccatggctgagttatgccccataacaacggtgggcccactagtccctccatcgttactcggccaagacgaaaacatcgaaggagacgtgggaatcgaaatg

SEQ ID NO: 42694 - DNA, 247 bp, Glycine max
  unsure (1)..(247): unsure at all n locations; Clone ID: 701125990H1
atatgaagttgtttgttttctttgttgctgcagtagttttggtagcatggccatgccatggcgcaggctaccaaaggttccctctccgaatgaaaactggctatggtgagcgttcttcggaggtaaaatgcgcaagttttaggcttgctgtggaagcacacaacanccgagcctttaaaaccattcctgaagagtgcgttgaaccaacaaaggactacattaatggcgaacantttagatcagactc

SEQ ID NO: 42695 - DNA, 249 bp, Glycine max
  unsure (1)..(249): unsure at all n locations; Clone ID: 701125991H1
ganaancctagctnaccgtttcaagatgcaaatcttcgttaagaccctacactggtaagaccatcactctcgaagtacgagagttcagataccatagancaatgtaaaggccaaaattcaagacaaggaagggatcccaccagatcagcaanggctcatttttgctggcaagcagcttgaggntggacgtacccttgctgattataacatccaaaaggagtccactctncattggtncttcgtctcccg

SEQ ID NO: 42696 - DNA, 247 bp, Glycine max
  unsure (1)..(247): unsure at all n locations; Clone ID: 701125992H1
attcggcggcgctatccactttgattccatttgcattcgaaggnccttctctgctccgctccagtatcagcacgcanccatggcggatccttctcggagtttcatgaaggacgtgaagccgtgctcatcaaggtcggcaccgcgtggtcactncgcgaggagggaaggttagctgtcggaagattaggcgctctctgcgagcagattaagcaatcaatccctcggatacgacattatctcgtctccc

SEQ ID NO: 42697 - DNA, 239 bp, Glycine max
  Clone ID: 701125993H1
agtggatggatgtctttgggtggaatattgctgtgcataacaggctcagaagctatgtttgctgatcttggacatttctcatatatggctattcagattgcattcacctttctggtatatcctgcgcttatattggcctatatgggtcaagctgcttatttgtcgcatcatcatgattccgaactccaaatcagtttctatgtctcagttccagaaagtgtgaggtggccagtgcttat

SEQ ID NO: 42698 - DNA, 255 bp, Glycine max
  unsure (1)..(255): unsure at all n locations; Clone ID: 701125995H1
gccaagtcatctctctcgctcccattctccgtatttccaagatcccaacgcantcgtcttatcctgcccagattccggtgaatccccccttgcccttttaatcttaaatatntcaacaaccacaaccaacaaccttaacctttttgtttgtttctaccaaacaccattttntttttctataacagagtaatggtggtgaagatnatgnggtggcggccctgagcgcttntcctctcgaagnagttccaagtgngg

SEQ ID NO: 42699 - DNA, 223 bp, Glycine max
  unsure (1)..(223): unsure at all n locations; Clone ID: 701125996H1
gtccctccttcctctgccttataattcttgtanncctantngctggtagcattgaaagtgcaccangcaaacgtgaagccaagccattatgctgcacccttcaataggagtgtttttccttctggttttctatttggaataggctctgcagcttaccagatagaagaggcagcagctatagatggcagaggnccaagtatatgggacaccttatactaaacag

SEQ ID NO: 42700 - DNA, 254 bp, Glycine max
  unsure (1)..(254): unsure at all n locations; Clone ID: 701126001H1
gtttccgcctaagatttcctgtttcacagaaatgacagatagtnntgttgctactgtgctagataacttgtcgctgcttgaagatgagcacaagttgctttctggcgtggaggacaaagtcaactctctttgcaatgagctcaagtttatacacatccttcctncaagaattccgaggggcaagcgcagtcatgncacagggaaagaatggtganccaaatcagagatgcggcccacaaactgaaaaantnttt

SEQ ID NO: 42701 - DNA, 270 bp, Glycine max
  unsure (1)..(270): unsure at all n locations; Clone ID: 701126004H1
gagagcatgctgagaaattgatggagtatcaggtgtttganttagacttatttttcgtataaagaatcgagtgatgttgaacgctgaatnnnnnnnnnnnnnnnnnnnnnnnnnnntcagaacaaacgtggtggaaaagtgaagttgcagtcaattgtnatgccgctttctgattttgatcatggcagataagggagatgcgctgcacggttagtgtttctgggccttgtaatntcccttttagtgcttcagtttagttcgngtgtnaac

SEQ ID NO: 42702 - DNA, 272 bp, Glycine max
  unsure (1)..(272): unsure at all n locations; Clone ID: 701126005H1
ggttttctcaaccctagggtttaccttctcttcccctgttcgaaattaggcaaattcaaaacngnnacacgactacanaaaagaagaanagaagaaaaagaatcaatcattcattgatcgctgaaacgatacgatgacagggaaggcgaacganacgaagcacacggcgaaggagatcgcggcgaaggtggacgcggcgaccacgaaccgcgggcggcgggaaggcgggtatgaaggaccgaaccgggttggagaaggcnggcacgcganat

SEQ ID NO: 42703 - DNA, 270 bp, Glycine max
  unsure (1)..(270): unsure at all n locations; Clone ID: 701126006H1
tttcaccctctttcaaggctccacttttataattccttgtaattancttcatcaaagtatcaaacttgtcttctctctcnctcctntacttcctctgcatatatgatatattcttccaaaatcctcatctaagggttaattttgttccggacaagnnnnnnnnnnnnnnnnnnnnnnnnnnnnnnnntccagaatgntttacttataggtttctgatccaaggtttaagatgttatagtttccttgaattctcatctgggttcaacctgt

SEQ ID NO: 42704 - DNA, 273 bp, Glycine max
  unsure (1)..(273): unsure at all n locations; Clone ID: 701126007H1
ctcgattctctgttttgcccttcgaaacacctgttacgcgccaccgcaagaaccttcccctttccctgggtntcgtcancaatttctcgtcaatatccaactatggccctcaaggctgcctcaggttctataccaagtgcagacacaagtagtgccgataaggaggaagaaaagtctganacatatagtncataacatgacagaagccatgggtgctgttttgacttataggcatgaattaggaatgaactataatttcatccgtccagactt

SEQ ID NO: 42705 - DNA, 272 bp, Glycine max
  unsure (1)..(272): unsure at all n locations; Clone ID: 701126008H1
atcaggnaggntctctatggtaacatagtcttgagctggtggttccacnatgttcccgggtattgctgataggnncagcnangagattacagnattggcaccgggtagcatgacantnnaggttgtagcaccancagacangcagtacagtntctggcttggnggctctatcttggcctccctcagcaccttccaacagatgtggattgccaaggcagagtatgatgantctggaccatccaatcgtacacaggaaatgcttctnagttatc

SEQ ID NO: 42706 - DNA, 273 bp, Glycine max
  unsure (1)..(273): unsure at all n locations; Clone ID: 701126009H1
gttccctctctcttcctcctccttccacntcacngtcgctntcanaccggatcangtgcttctccgaaagaagcanccaacgncacgtcatcgcaagggtcacggtttgcaattgcaataccaccaccacgcgtgccaggccagcnaggagtgntgtggaaaagatagtnaagcggttcaggagtgtggttgtggtnccgatcgtgcttgcgtcgtttcctataagcgtttcgtggcgccgttggttgattacgtgangtctcctggtgtcgc

SEQ ID NO: 42707 - DNA, 269 bp, Glycine max
  unsure (1)..(269): unsure at all n locations; Clone ID: 701126012H1
ctctgtctctgtatctgtctttgtctctgttcgtctcgctgaagnaatcgcttaggatcacattctttttcaagtttagtttctgcttctggccacctctcaagttctctgcttttgtttttagggctcctttggttctgaattggattggattgcaattgggtgcctcaccctgttttgctcaattgctgccactctacctgttcatagaattgcagaattttgacctgacaagtgaactgccagagcaaacgacaaggtatagtact

SEQ ID NO: 42708 - DNA, 271 bp, Glycine max
  Clone ID: 701126013H1
cacacacaaggtttgcatgttttctattctcatttttttgatcccaacattaactataagggggagggataacaagaatagaaaaaaggaacaaccaacatgttgcagagagctgcaagcaatgcatattcatggtggtgggctagccacatcagaacaaagcaatcaaaatggatggaacaaaacctccaagatatggaggaaaaggtgcacgctgttttgaagctcctagaggaagagggggattcctttgccaagagagcagaaatgt

SEQ ID NO: 42709 - DNA, 268 bp, Glycine max
  unsure (1)..(268): unsure at all n locations; Clone ID: 701126014H1
atgccaagagggcttttgttcattggtatgttggtgagggtatggaagagggagagttctctgaggctcgtgaagatcttgctgccctggagaaagattatgaggaagtcggtgcagaggcaactgaagaagatggtgatgaaggagaagattattgattagaagtttgcactgttncgttactttatctgtgttgttttttttcctcgtggctctgtgtatggtagttcttttcgtggggctgcctgttccggtacttttggagctc

SEQ ID NO: 42710 - DNA, 275 bp, Glycine max
  Clone ID: 701126015H1
cacaactaaaaaaaagaagaaaaacttagagtggtagttgtaggaaagcaagaacagtgaagtgttctcctaattcagtgagtgaggttctgaattctttaacttgagatgatggcatcatttgcagggactactcagaagtgcaaagcatgtgagaagactgtgtatttggtggatcagctcactgctgacaacaagatctatcacaaatccatgtttcagatgctaccactggcaagggtacccttaagttgagtaactattgttcctttgag

SEQ ID NO: 42711 - DNA, 274 bp, Glycine max
  unsure (1)..(274): unsure at all n locations; Clone ID: 701126018H1
ccggggatcatccacaagattgaggagaccctccatgtgggagggcacaagannagaggagcacaaaggagaacaccatggtgagcacaaaggtgcacacaaaggagaacaccatggtgagcacaaaggtgaacacaaaggagaacaacaccatggggagcacaggagggacttgtggataagantcaaggacaaggntccatggtgatggccatgacaagggtgagaaaaagacgaagaaggaccaagangnagaaagagcatggacntgacc

SEQ ID NO: 42712 - DNA, 204 bp, Glycine max
  unsure (1)..(204): unsure at all n locations; Clone ID: 701126019H1
taactcttagcagccangggcgagcaccaaagttcagagggttatgactcagcccattaacttgattttcaggtttcttcagagcaaagcacgcattcagatttggctatttgagcaaaaggatttgaggattgaaggcagaatcattggttttgatgaatacatgaatttggttcttgatgatgctgaagaagtgagcatcaa

SEQ ID NO: 42713 - DNA, 272 bp, Glycine max
  unsure (1)..(272): unsure at all n locations; Clone ID: 701126020H1
gtgggttgtngncgccgtttgcacagtcatncgtcgccatatctctcgctgctgagcgcctcttcattatggcggaaagtttctcaaagncaaggaccagaagtcgctctacgaagctctccagaagatcaaagaagagctgatgcttctgggcttcatttccctgcttctcacggttacacaaaacggcattaccaaaatctgcgttcgtcccagtttgangcncnacatgctcccttgtaatctccgacgccggtgngattccnangcng

SEQ ID NO: 42714 - DNA, 302 bp, Glycine max
  unsure (1)..(302): unsure at all n locations; Clone ID: 701126021H1
ggatagtggcatgttggagnatgttttctcattgtcatttctctactgttnataaaagttggcnagtggcnagntntgctaannaagcnggtgagcacttttgtaggccaacnnatcccttncacagtatttcatncgngtggctatcngtnccaagccatatcaaaatgcccaagcatnaagggggtcaagagttgnctccaaaggcaantcttccacgnggtggcacatcanacnttcggganagtcnggntnctgacttctggtgccntagacatnnttcgggncgattgncngnaacg

SEQ ID NO: 42715 - DNA, 261 bp, Glycine max
  unsure (1)..(261): unsure at all n locations; Clone ID: 701126022H1
aaattcacactctctttggctctggtgttgtgttgtgttgaggtacttgagaagagaaaatggtgtcgtcgcaagttgtgaataccgtaaccntttgtcgagctacacgttcggcaccaaggngcccangatggagaagggtacccccggcgggatgcgtcccgctcgnatgaannccntctatgtaagngnggannngngcacngtgtaggaattnctggtngagaacancacatccccaanatcttcttnaannggnaa

SEQ ID NO: 42716 - DNA, 277 bp, Glycine max
  unsure (1)..(277): unsure at all n locations; Clone ID: 701126024H1
atcgaacatgctgtatcaatatatcaaccagttgatcggccaagtacttctgcgatttcacctctttcaagttaatgatcaaatgggatattgaaaccacattaatccttctgaancccccctncaagtacatttctggccttcagagataaattaccaatgaatcttcacatgtatttacccttatatagagttgcattgagaggtgattgggagaaggccaatgagttcctaaatttgcatcctggtgcggagaatgccaggacttcaagagggt

SEQ ID NO: 42717 - DNA, 271 bp, Glycine max
  unsure (1)..(271): unsure at all n locations; Clone ID: 701126025H1
gtcaatactcaattcatcatcagcttgtggccatagtctcattatttatccttttgcttccaaatatccatgggtggggagacgatggggcatgtcattgtttgcaagattgcanaggctcgcctcagtgaagcagctgcagaggctgtgaagaaactgctgccaatatccgcaggaaatgatttgtccacaaagtgttcttgggcagatcatgttcatcatatctatccttgggcctctgctttgcactacgcaaataccccagaggccc

SEQ ID NO: 42718 - DNA, 270 bp, Glycine max
  Clone ID: 701126026H1
cacatgttactactccactttgacctttgttgtatgtctagtgtctacccttcaaataccaagcacacatgggttctctggctgcattaaatttgcaatttaagacagtctggttctggtatagtccttggactaataaaagctaacaggtggtaggaagcaaggtaaagaaagaaagaacatcagccagaaaaatattaactggctcagaaatgctgattttagtaataaaaagtaaaaacaaacatggagaaaggaaaataggagctg

SEQ ID NO: 42719 - DNA, 269 bp, Glycine max
  Clone ID: 701126027H1
ctgctttggaagaagacttggcgaacttaatgatgagcttcaacaggaagcgcagtgtataccaaacatgactcatccagatgttccaataggaggggaggattgttccaccataaggaagatggttggtagctctcccaaatttagctttcctgtcaaggatcatctccaactaggaaaggagcttgatctatttgattttgatgcagctgcagaggtcagtgggtcaaagttctactacctgaaaaatgaagcagttttgttagaga

SEQ ID NO: 42720 - DNA, 268 bp, Glycine max
  unsure (1)..(268): unsure at all n locations; Clone ID: 701126028H1
agagaaggaaagcgagagtcggaagagatttggcgcgagttgaaaaccctaattgggaaggttgcaggatagcatgcggtgttgtcgnatttcaacgacttctctcagcactgctttgctgagatttccggcgacatcgctagaaacacgcgtgttttgaggtctgtcaagtccgaccttgattatatctttcagaagctcagcaaaatgtgtctactattgaatgtttccctctagtcaaaggcaccaaaggttcctaggcaaggca

SEQ ID NO: 42721 - DNA, 261 bp, Glycine max
  Clone ID: 701126029H1
agaaagcagaaagcagaaagcagggatggaaaagcactcagatggggagaatggcgtagaagaagaacctcgatcacttgagcagaaggagaagcgaaaggggaagcacgacaagccaaagccatgggacgacgacccaaacatcgaccactggaagatcgacaagttcgacccttcgtggaacgacggcggctgtcgagttagctccttctccatctcttccctcagtaccgcgaaatactccagaagttggccatggtc

SEQ ID NO: 42722 - DNA, 276 bp, Glycine max
  unsure (1)..(276): unsure at all n locations; Clone ID: 701126030H1
tttgctccatgccacggtgggcattagcaatattactgctgtctagactcctaaatttttcatgnttgatcttgtncaacanctntccactgcnagtgcgcgcgcgctanaactgtaacaagtttaggaagtgnatgtatctatttatctgagttatttgtncgctcactgcaactgcagccaccgaatgnngaacannaaaagaattaanataaagactgtgggtagtgaagatctgggaatcttagagtaccaaattagatctctcgaatgtct

SEQ ID NO: 42723 - DNA, 271 bp, Glycine max
  Clone ID: 701126031H1
cttttaaatccttttgtaccctcaactccataagccactagtacctcacaatgcccattgtagcaacctctcttctcttctttcttcttaatttatgcctcagaggcacttatgctgactatggaggtggttggcaaggtggtcatgccacattttatggtggaggtgatgcatctggcacaatgggaggggcttgtggatatggaaatttgtacagccaagggtatggcactaacactgcagcactcagcactgctctattcaacaatgg

SEQ ID NO: 42724 - DNA, 226 bp, Glycine max
  unsure (1)..(226): unsure at all n locations; Clone ID: 701126032H1
cgcngnacgccgaaacaatggccggaaaaggagagggtcctgctatnggaatngatctcggaaccacctantcttgtgtcggtgtgtggcaacatgaccgnnttgaaatnatcgcnaangnccaggggaacagaacgangccgtcttacgtnggttccactgataccgagggtntnatnggtnatgcggctaagaaccaatcgccatganccccatnaananggtt

SEQ ID NO: 42725 - DNA, 91 bp, Glycine max
  unsure (1)..(91): unsure at all n locations; Clone ID: 701126033H1
ttcgagcatggattaaagaagccaataangtggttgttccttgtgggcgcanannanagaangngccgtgttttatnggggcnatgggncg

SEQ ID NO: 42726 - DNA, 101 bp, Glycine max
  unsure (1)..(101): unsure at all n locations; Clone ID: 701126034H1
gtgaanagncntaggtcctnggcantcgtagaagaaacttttcaattttcacnttagttgtgntgatggtggaaaggnttcatttgggnttcnncaaatna

SEQ ID NO: 42727 - DNA, 267 bp, Glycine max
  unsure (1)..(267): unsure at all n locations; Clone ID: 701126035H1
ggtggttgcaatgatgcttatatttcttctaatttctacgcaaatggagagcgttgagcccgatgctgcagattgcttggatggttgcactactgcctgtgttcaaagcgactcgaggcttcaagcacggtgtgatcgcaagtgcagcattagatgcggtccagattccacaatcaaggaggacatgggttgnatatgtaaagtcanngcgnagcaaccangttcgctngaccaaaaccgngncttttnagcccnnnnctnaaaanc

SEQ ID NO: 42728 - DNA, 270 bp, Glycine max
  unsure (1)..(270): unsure at all n locations; Clone ID: 701126036H1
gacagagttaagagcctgtcaaaagggaacacctctagaagggatcctactttnttcctcaaaccttagagactnctactgtgttgcctggctcttcagtnttatctcatgatgataccttgnangatgaaacaacatatgtttccagtgacaagaatcgatttggttggcccaaacagctagaaagggaaccctctcctccgaataatgtggaccgtgttccaagtggtagaatggggggaaatttgataccatctgtgtattctgatc

SEQ ID NO: 42729 - DNA, 266 bp, Glycine max
  unsure (1)..(266): unsure at all n locations; Clone ID: 701126039H1
gcgatttagcgccttctgctactttgtnntcgttcnagagntgtgnatgtgaaggntgagttcaaanagncgngcntnaggcntggaggngtggcggccgtgttggagtgntngcggncttgcagggccagggtnatgcaggnggaaccgtgtgatgagttcagnacnagcancatgntaancntgtgtgaggtcttngtctnaanccgagaggttttcttttcgatcttctgcgatggcttctgccgattganagntgagnaagc

SEQ ID NO: 42730 - DNA, 270 bp, Glycine max
  Clone ID: 701126040H1
gaaaaatcaaacaaacatgagctacaacatttccaaagcatccttctttcatatatacttggaaagaaggaaattaagttaggcaagtgagcaacaaggagtttcaatgatacaacatagactccagcgaaagaaggttctcttgattctagatgatgttgacaagctcgagcaattacttccattggctttggaagtaataggttccaacttgtttggaaaaaatacaagaagaaccaaaatctgtcatcaaacatataaacaaattct

SEQ ID NO: 42731 - DNA, 268 bp, Glycine max
  unsure (1)..(268): unsure at all n locations; Clone ID: 701126041H1
ggtccagacaacggccaccgacaccttcactcgggttcgtggaaaacaacttttgaaaacgaaatgttaacgagganacagaggagatgagttcagtaccaatcaatcgtttgaaatcttttacttttccatttttgttcgttcacctaaatttgttaagtgggtatcattcggatagacttattgaatctggatcttgtttccgaggatgaaggtgaagatttggatgaagatatatctatcgaggagggttagtctatggatgagg

SEQ ID NO: 42732 - DNA, 272 bp, Glycine max
  unsure (1)..(272): unsure at all n locations; Clone ID: 701126042H1
ctttgagtcttcttgatccttctttttctccttgaactcaaacatngcagatgaggtggttctgctagatttctgggccaagtnccatttgggatgagggtcaggattgcacttggctgaaaagggtatcaaatatgagtacaaagaagaggacttgaggaacaagagtcctcttctcctccaaatgaacccggttcacaagaagattccggttctcatccacaatggcaaacccatttgtgaatccctcattgctgttcagtacattgagg

SEQ ID NO: 42733 - DNA, 265 bp, Glycine max
  unsure (1)..(265): unsure at all n locations; Clone ID: 701126043H1
gngggtggctgcattggtcaatgatactgttggaacattagctcttggacattatcatgactcagatatgttgnttcngtagtaattggnactggtaccaatgcttggcnatttggaacgggttgatgctattatcaagtgtcaaggtcttcctacaacatcaggataaccggtattgctctttttnnttgtttgtnnttnnttttcactttngttnattgtctgtnttgaacctagtataaatcttcngtttattaggttgtaa

SEQ ID NO: 42734 - DNA, 266 bp, Glycine max
  unsure (1)..(266): unsure at all n locations; Clone ID: 701126044H1
tttggntcatgaggcaagcagggaggtacatgaagagttaccaaaccatctgtgagaactatccttcattccgtgaaanatctgaaaatgttgatctcgtggtggaaatttctctgcaaccgtggcatgttttcaagcctgatggagtgattttattctcagacattcttaccccactttctggaatgaatataccctttgatattgtgaagggtaagggtcctgttatatngatcctattcacacatctgcccaggttgatcaat

SEQ ID NO: 42735 - DNA, 267 bp, Glycine max
  Clone ID: 701126045H1
aaagaagtgtctccttttgaggctgcgtttctctaaagtaattggtgcaattctggcagaaggaacctgagtgggatcatcctccagtcttggccagtttagcaacaagtctgggggtatcttagcatttatttccaaagagggacagaggggtcatccaaagccaggtgataaaaccattggttccaatacatattcgtctgcacgccctgcgccagtgcacacacctaagcttcaaagatttgttgacacaaccgaaatgatgag

SEQ ID NO: 42736 - DNA, 269 bp, Glycine max
  unsure (1)..(269): unsure at all n locations; Clone ID: 701126046H1
caacttagtgggggtggtggtaattctnncatcgtttggttcaaagtcgtcatgtaaatcagacagcaaacaagatagtactggtactagtactaatactacttgtacccccaccaccactgcctcgtcatgttctactactatgtatgaatgtgatggaacggtgcaagtggaccatggggacatggattggacattcttgaacgtatttgattattccaatgaggtgtttcctgttgttggatccgactatgatctccataattctg

SEQ ID NO: 42737 - DNA, 271 bp, Glycine max
  unsure (1)..(271): unsure at all n locations; Clone ID: 701126047H1
ggnatggctgtggcttttcagtgtttatcatgtgctcggagtgaccccttcctcaccgcaagccaatccctcactcttnccttccaacgcaaaccacttttttgctntgtccctctttcctctcgcgctcgcaatctctcttcttcaattgtcgccgcttcttccaaaaagaaaaacaagaaaaaaaagtctcatgatcatgttacgaaggacgatgacgatggcgtggacgcgtttgagctgctcttcagcaactcgaggaagatctcaa

SEQ ID NO: 42738 - DNA, 278 bp, Glycine max
  unsure (1)..(278): unsure at all n locations; Clone ID: 701126049H1
cttatcagagagcatttagagacagtcttctagactctggtgtgtcaccctttaatggcttccacctatgatcatctctatggaacaaaggttggtggaaccattttcgacagatttggccgccgtcaaacggctgntganantgnttncttgacnaagagcaaggnacaaacntgnntggttgagnnactgggcccacaggnnncgnacnannacggnanggnnagnanngcgnaaaagcnganggggggnattttcccannatgaacnttggggaa

SEQ ID NO: 42739 - DNA, 269 bp, Glycine max
  unsure (1)..(269): unsure at all n locations; Clone ID: 701126050H1
gtaacggcgacgtccgtgaagtcaatcgcaagtactacgatcgcnacgtctgtcgcctctacctcgtcggtctctgccctcacgaactcttccagttaacgaaaatggatatgggcccctgccctaangtccactccttgcagctnccggaaagaatatnangaggcgaaagcaaaggggaccgntaattatgacagggagttggggccatgtacangngnnggnnanagangngtntgacaggaaaataggggnncntgnacatgncc

SEQ ID NO: 42740 - DNA, 273 bp, Glycine max
  unsure (1)..(273): unsure at all n locations; Clone ID: 701126051H1
atagcacatagcatagcaaggaaggagtattacaaccgaaaccctgaagaaaaaaagagtagaggaagaaaaaacacctggcaccaccaacgatgggtgtggattactacaagatcttgcaggttgataggagcgccaaagacgacgacttgaagaaggcttataggaaacttgctatgaaatggcaccctgntangaaccccaacaacaagaaagaagctgagnnctaagtttnagnngnttccccggngtcatgggggtttgtggttcccc

SEQ ID NO: 42741 - DNA, 274 bp, Glycine max
  unsure (1)..(274): unsure at all n locations; Clone ID: 701126052H1
gatacactaagtnatcctcataaatanactctaattaggtggcaggntnagtgtctaaacttagtcancattgccacatattgtgttcactttggaaattgtgccactaaantnanattcaanncatctatggctgcctcctccttatactatgcaatgcaatcctgggnaaaccctttgatccgncatttccagcgggtctagggtgaaccatttggcgttcctgctttgcaaatgagaaggnatgtngggcntgagagttaggtccanggcc

SEQ ID NO: 42742 - DNA, 269 bp, Glycine max
  unsure (1)..(269): unsure at all n locations; Clone ID: 701126053H1
atttctggggntcctgcttctggtaaaggaacccagtgccacctcatgcaacaacaagtacggtttggntcatattnnngctngcgnttacttaggggcaganattgccactngaagtgataatgganagcgagccaaacagtatatggagaagggacagtnggtccctgacgaaattgttgtgatgatggttaangagcgtctcttgaaaccagattcgaaagagaatggttggctttggatggatatcccaggngcttattcacngg

SEQ ID NO: 42743 - DNA, 275 bp, Glycine max
  unsure (1)..(275): unsure at all n locations; Clone ID: 701126054H1
aatgggctgcaatcttagctcgaaaatcactccttgctcttcgtgcgcgccaattggctgtaagcggtcaanggctgcacanctcccaatactatggccttcggttaagtgcacactccttctctaccaaaagagaggatgaggaaagggagcaactcgcaaaaggacatttcaaaggattggagttccgtcttngaacggtannattaanacnctcttcctcangaaaagggttccgaggnntaatnnngnacncgggaattcaattttgnaaa

SEQ ID NO: 42744 - DNA, 271 bp, Glycine max
  unsure (1)..(271): unsure at all n locations; Clone ID: 701126056H1
cttggaagaggctctccctacactacagtgacctggatttgtgatgggtggaagttctattgatgatgattgggagtccactttccctcatctaatgaggttcggacagtggtcttagttggacgtaccggcaatggcaagagtgcaacaggtaataccattcttggaaggaaggccttcaagtcaagggcaagctcctnctgctgtatccacctcatgtgaattgaaaacaacagaattaaacaacggacaaattgttaatgttattgac

SEQ ID NO: 42745 - DNA, 269 bp, Glycine max
  unsure (1)..(269): unsure at all n locations; Clone ID: 701126057H1
tcaaactgagaactaanatcccgctggcngttngcgcaacctttcgatcttcatccaacgnggcaacgttggatctgntgaatgaactncttttnatatgcaactctgtgattncactctgcttcgccatcctatgggggacaacaacagcaacaacgntgccttcatgcgcaaccaaaacgccgcccgttcaggcccgcaccaaagcgcnnaaccgttccancgtccttcagctcaaactggttggacagagtcacncaaccggtctc

SEQ ID NO: 42746 - DNA, 269 bp, Glycine max
  unsure (1)..(269): unsure at all n locations; Clone ID: 701126061H1
ataaccatgtcttctcagactgttgtcctcaaagttggtatgtcatgtcaagggtgtgctggagcagtgaacagggttttgggaaaaatggaaggtgttgagtcatttgacattgatctgaaggagcagaaggtgacagtgaaaggaaatgtggagccagatgaagttctgcaancccgtttccaaatctgggaagaagactgcattctgggtggatgaagcaccacaatctaaaaacaagcctttagaaagtgcacctgttgcctcag

SEQ ID NO: 42747 - DNA, 270 bp, Glycine max
  unsure (1)..(270): unsure at all n locations; Clone ID: 701126062H1
angggccatggaggccctgcacttgcaccgcgtgcttctcatgcctgtttcccaaaaaacctcaatctttttgcgcggccagtngaaccccattatccacacttgcaaggccancattgcgttggagctctcaaacttgcagtgccagagcagggtggtttttgggtcttggagcagacagcaagaagaccaatttacctgataccgtcaaagccggtgaccccgttctgcacgagccagcccaggatgttgatcctaacgaaataaagt

SEQ ID NO: 42748 - DNA, 276 bp, Glycine max
  unsure (1)..(276): unsure at all n locations; Clone ID: 701126063H1
ctatacagntttcagaggcggaggcggaggctggagctgcctcaactcaagtcttcaactatctgaatctgaactcatncactcactcgttagccanccgctagannganaactgngtaatggaaagtggagggaaactcccttnccatcagggtcagatggtgtgaagagaaaggtttcatatttctatgatnccagaggttggaaactattattatgggcagggacacccatgaaacctcataggattcgaatgacacatgctccttttagccc

SEQ ID NO: 42749 - DNA, 242 bp, Glycine max
  unsure (1)..(242): unsure at all n locations; Clone ID: 701126064H1
gncttcgccgcacgccgaaacaatggccggaaaaggagagggtcctgcnatnggaatcgatctcggaaccacctactccttgtgtcggtgtgtggcaacatgaccganttgaaatcatngcnaacgaccaagggaacagaangacgcngtnttangtnggnttcactgataccgagngtctnatnggtgatgcggntaaganccaantngccatgaaccccatcaacacngtnttcgatgcc

SEQ ID NO: 42750 - DNA, 217 bp, Glycine max
  unsure (1)..(217): unsure at all n locations; Clone ID: 701126065H1
tcttgaacattcatggatccantnagcntgtggggtaacacnnccttngngacggtggatcccgagattccatgacntcatcgngaaggagangcaccgccaatnccggggcatctagctnatagccttccnagaacttnacntncttggcaatcntcggggccntnggcagcnccctcgccannaaatnctcnganggcatgcccggtaaccncta

SEQ ID NO: 42751 - DNA, 267 bp, Glycine max
  unsure (1)..(267): unsure at all n locations; Clone ID: 701126066H1
gaagaagaagatggtgtcaggttctggaatctgcgcaaagcgggtggtggtggacgcgcgccaccacatgctgggtcgtctagcctccatcgtggcgaaggagcttctgaacggccagaaagtggtggtcgnncgnnctgaaaagatttggccccncgggcggnctttanncanagagngttctttcnccnaaaatntccaccgaggaatatgcnaatggaaangcattngtgcccncggtgangantctgtcntcggngagggnng

SEQ ID NO: 42752 - DNA, 339 bp, Glycine max
  unsure (1)..(339): unsure at all n locations; Clone ID: 701126067H1
acttaagttcattccttgtgttttgctttcttcctcaaaaccaaacatgtncgaaccacatggcgggcaactgncgcactgcgnctgaacaaagacctaanctgncaaccaagnggaaaccaggctnatnggtgtntattgtagaggactngagaaagagtttaccattcgnagnactgtttcgtncatgggatgtttcccagncaggcttgaagccatgggatggggnaaagttgccaagttgttggggcaacttaaanctggncaactttggccaccgggaactggncaacctggttggggcccatttnanagggganatnatggtcatggnaanaa

SEQ ID NO: 42753 - DNA, 275 bp, Glycine max
  unsure (1)..(275): unsure at all n locations; Clone ID: 701126068H1
gaaaaatcatgctttgggtgatgtcctacagattttgancatgttgattaccattaaaaantggattgtncattcgacaatctgggctggcaaccacttaaccatcactcttactgaggtcaattctgnattcagaggaacatagcatgcccatagcttcaaanggcatgcnagtgaaaatgnaaggnnttnctgantatattaaaaggccnttggacnaggnaaccntnggaatgntctaagtnaaanncnttttccaaaggggannanaggng

SEQ ID NO: 42754 - DNA, 268 bp, Glycine max
  unsure (1)..(268): unsure at all n locations; Clone ID: 701126071H1
ggatcctcctccttccattcaggatgcttccgataggattactaaacgaggtgactcggtggatgacaagattaagaagcttgatgcccgagcttagtagatataaggagcagattaagcaaaactagacctggtcctggcccaggaagctgttaaagctagagccatgagagttcttaagcaaaaacgaatgtatgaaggccagcgtgacatgctgtacaatcagacattcaatctcgatcaagttcatttgcagctgaaggnatta

SEQ ID NO: 42755 - DNA, 271 bp, Glycine max
  unsure (1)..(271): unsure at all n locations; Clone ID: 701126072H1
aggcagtcatacatgcataagtgaaanaaattgtctcaacaccaacggatcccacatatgtttgtgtccacaatcaggaaatggaacaaaggggtccanaagggtgccaccaacaagacgttgttnccaaggttgtcataggtaagcgcatgnaattgtnctattntcctcttcaactcnngtantttattnngatgtatctngcgttccttccagntaatatgctactaagatangagtcatgttccaaataagactttttcaataagtt

SEQ ID NO: 42756 - DNA, 265 bp, Glycine max
  unsure (1)..(265): unsure at all n locations; Clone ID: 701126073H1
ataattcattattctccaaaggcagaaacatgtgctgaacttgatccagacaanatttntctttttgattctggagcccagtatctagatggaacaacagatattacacgaacagttcattttggtaaaccttcgactcacgaaaaagcgtgttatacagcagtcctaaagggtcacattgctcttggaaatgctagatttcccaatgggacaaatgggcattctcttgatattcttgctcgaattcctttgtggaaggatggtc

SEQ ID NO: 42757 - DNA, 267 bp, Glycine max
  unsure (1)..(267): unsure at all n locations; Clone ID: 701126074H1
gaaaccctaattcagaaaccaatggaaccagaaaccaaatgcatagagctgaaactaatttcctggcaaggncataagcggcttcaacttcttccaaaaactcaccctttacgcgctcgtcttcatcgagagcgaggatcccaatacggatctaacggcggaacagaggcagatgcagagaacgttaacggaccgagaccccgacggcgatggcagcaacccagagtggaatcaccacgcgcgtttcgatttgtggtggctttcgca

SEQ ID NO: 42758 - DNA, 270 bp, Glycine max
  unsure (1)..(270): unsure at all n locations; Clone ID: 701126075H1
atgataagggctcaaaaattagccctccaacattggctagaagctattgacccacgtcattcgctatggacacnatttgcacatgtattacgatatttggtttgagagccnaaggcacccaagccatttttctactggttggatgttggagntggtaaagaaataaatcttgagaaatgcccaagatccatcctncaacgccagtgcattaaatatcttggaccaaaagaaagggaagagtatgaagtaattgttgaaaaagggaagcng

SEQ ID NO: 42759 - DNA, 264 bp, Glycine max
  unsure (1)..(264): unsure at all n locations; Clone ID: 701126076H1
ctttcttctccttttagggtttcctttttgtttctcctttccagatctgcatcttccattttttaggattaagcggtgagattcgtgaatctgagaaatgtcggattcttctcgggaggagaatgtttacatggcgaaattggcggagcaggccgagcgttacgaggagatggttganttcatggagaaggtagcaaagactgtggaggttgaggagttgacggtggaggagagaaatcttctctctgtggcttacaagaacgt

SEQ ID NO: 42760 - DNA, 269 bp, Glycine max
  unsure (1)..(269): unsure at all n locations; Clone ID: 701126077H1
atgggtgttgccgtgaatttggtgaacatatttgacgggtacgatgcatttnggcagtgctaattctggccaanacggtnaccaacttcatgggaacctctttcatgctctgtttgttcggtggtnnttgtagctgacacttttatcggcagatacctcactattgccnccttcgcgactgttcaagccactggtgtgacaatattaacaatatncaaccataatcccaagcctgcaccctccaaaatgcataagagacgcgancagac

SEQ ID NO: 42761 - DNA, 266 bp, Glycine max
  Clone ID: 701126078H1
gtaccattcaggtcccaaggaagaatacagagaaataaagcacagttgtctaccgtgaaggattctgtgatctgatatgaagaatgagttccctcatgtgttcttataggcatagatcaacaaggagaattcaactctatctttatctttctgtgcaatcttctcctctaaccacaatctgctatccaagccactcctggtcctgaacatgaacacagcattcccagaagcagggttgaaaaaccagttatgaacatcccaaagca

SEQ ID NO: 42762 - DNA, 266 bp, Glycine max
  unsure (1)..(266): unsure at all n locations; Clone ID: 701126079H1
ggggtttctctcgctaaccaagaaggaactagggttttacagaatacaagnnnnnnnnnnnnnnnnnnnnnnnnnnnnnngctagtaatgttgatgatgtgttcttccatgatgtgcccagacatcaatttctggggttcatgggttgctgttgtctgaaaaaatttcatccttactgctgtttccactagcatctatctgatagcagcaacagaagtgtcctggatgcatttttcttgggaaaagctgtagctgaagctctaaat

SEQ ID NO: 42763 - DNA, 265 bp, Glycine max
  unsure (1)..(265): unsure at all n locations; Clone ID: 701126082H1
attcaacccttcttctatagttgtgtggcacagaggacggagccgaagaagccgtttcgcatgcctgcaactccacccagtaacaaaggaagaatctctaccctcttcgctttcactcctcgccaagttttgttaagcaaccaaacaatgaagcacaccantgacaatggaacccccatctcggaacacaaagttcttcttcaccaatccattgcccgttacttggaacgcnntggcttctccaaaactctgaaaaaatttctcc

SEQ ID NO: 42764 - DNA, 248 bp, Glycine max
  unsure (1)..(248): unsure at all n locations; Clone ID: 701126084H1
aagatccccgaggtctttaaccgtgnnatgcaatcaaacacaatgcagttgcactagttatttnagaaacatccaagcaaggatggcctcactattatttgntcaaaaagaggaggagatatgttcaagcacagtcactcaatttggcttcagacagtgccgtctaaccctgaagcaatcctcttcaagtttgttccaatttcctctcttctgacaggaattcctggaagtggatatcttagtcatgc

SEQ ID NO: 42765 - DNA, 265 bp, Glycine max
  unsure (1)..(265): unsure at all n locations; Clone ID: 701126085H1
cttggtgtaaattttggggatgtttncactgatgtaccacggaactccaccttcaagagtggtgacttggtgacagcttcgttctggtctgcatgtcctcgtaacgaccttatgactgaaggcacctttgcactggtggaatttctccaagaaaaggatgcttggactccnnnnnnnnnnnnnnnnnnnttctgcctgcgctataagtggtcaaggccttccaaactgagttctaggagcaaagcaaccttggaatggaggatac

SEQ ID NO: 42766 - DNA, 266 bp, Glycine max
  unsure (1)..(266): unsure at all n locations; Clone ID: 701126087H1
ttnactctctctatatttgcatcattcatcggaaatggctctcgaggttgctgttaaggctgctgttggggctccaaatgttctcggagattgtaccattttcccaaagggtcctcttaactttggaggagaagaaaattccttacaaactccacctcatcgatctcagtancaaacccgaatggtttttgggtgtgaatcctgaagggaaggtgccagtggttcttttgatggcaaatgggtggctgattctgatgtaattgtgg

SEQ ID NO: 42767 - DNA, 244 bp, Glycine max
  unsure (1)..(244): unsure at all n locations; Clone ID: 701126088H1
ggggttngtttcattgcaacaccganttgtttctgagcncgatgttcaagggccccaaggtnaccntntctcctcattgcacggaacaggctccctttggaaatggtttgggatgctttctttaggggaggcgatcgcaaattctcaatttttntacactgcaggcctgggtttctctcaacaaggcaacgactagatcaccatatttnttgaatcgtcaagttaatgatagcgtacaggttga

SEQ ID NO: 42768 - DNA, 273 bp, Glycine max
  unsure (1)..(273): unsure at all n locations; Clone ID: 701126089H1
ctagctgtgacttgttttgngttcantcanatcgcattggtatctganatcaggaaatgtggttngcgagntcngnancagncaggcacaaagggcagnaggcccngnaancatccttggccattggnactgncaaagcccgccaaaccgtgttgctccagnagnncctatcctgnttactacttcagaatgcnccangagtgcaccacatgancganctctccnagagtttcagcgcatgtgtgacaagnctangatcaagncgnggtatnt

SEQ ID NO: 42769 - DNA, 265 bp, Glycine max
  unsure (1)..(265): unsure at all n locations; Clone ID: 701126090H1
anaacatagaccatgtcgaatttnagtttccttcaatttcatagtagcagccctttggggcactcctcttctcaacccanaagtccaaccccaaacagcaacaacttcaaatcatcaaaacatacatcaaatgtagggtgcaatattcaaccaaaatcggaggaaatgaaattggtgttcgacaagtttgacaccaacaaagatggcaagattacccttgaagagtacaaagcagctatgaggacaatggggtggggatcgaagg

SEQ ID NO: 42770 - DNA, 265 bp, Glycine max
  unsure (1)..(265): unsure at all n locations; Clone ID: 701126091H1
ctcaactctctccaacaaccacaatggcnctcttgggcgccgctcctcctccgctcgcatcattncctccgtctcantcacttcctcttctcgctccttcttctcactctnatcctcttcttccaaactccaatgcttgcgctcctctcctcgtatttcgcacctctttctcaatcagcgaagagcggaggttcgcgtttcgagtggaggatacggaactgtgtcggcaccgaagttcagttgcgtctgatcctgatcagttgaa

SEQ ID NO: 42771 - DNA, 266 bp, Glycine max
  unsure (1)..(266): unsure at all n locations; Clone ID: 701126092H1
cacagatctgtcttccgaagcaggaactaaatatggctgacttgttggaatggtcaaagcaagatnagaaacgaatgcttcatgtccgtctaccgtgttggtgaccttgatcgcaccatcaaattttacacagaatgtttaggaatgaagcttttgaggcaaagagatatcccagaggagaaatatgctaatgcttttcttggatttggccctgaagaatcccattttgttgttgaattaacatataattatggggttacctcgta

SEQ ID NO: 42772 - DNA, 257 bp, Glycine max
  unsure (1)..(257): unsure at all n locations; Clone ID: 701126094H1
cataaatacactctaattaggtggcaagataagtgtctaaccttagtaacattnccacatattgtgttcattttggaattgtgccactaaaattctattcaattcatctatggctgcctcttcttatgctatgcaatcaatcctggcaaaccctttgatccgcatttccagcgggtctagggtgaaccaatttggcgttcctgctttgcacatgagaaggaatgttggcctgagagttaggtccatggctaaggaag

SEQ ID NO: 42773 - DNA, 268 bp, Glycine max
  Clone ID: 701126095H1
gttccattgggcaagctacaattatgggtcctccagacagtccctatgcaggaggtgttttcctagtgaccattcatttccctccagattatccctttaagccacccaaggttgcattcaggacaaaggttttccacccaaatataaatagcaatggaagcatttgccttgatatattgaaggagcagtggagccctgctctaaccatttccaaggtgttgctctcaatttgttccctattgacggatccaaatcctgatgatccttg

SEQ ID NO: 42774 - DNA, 259 bp, Glycine max
  Clone ID: 701126101H1
catacactgatcatgggagtggatttaagacaagtggtggcgggtgtcctcaccctcacaatgttcgtcatgcttatacacatgatcaaaagagaccattttgatgctgttgatgataaacttcctggaacggaggatgtcagctttgaaagtacaaactttgatactactcatgttagaaagaacatcgggatttggaagggagatggtgatgagttaaaaccatgttggcttaagccatctgaagataacgtggatc

SEQ ID NO: 42775 - DNA, 259 bp, Glycine max
  unsure (1)..(259): unsure at all n locations; Clone ID: 701126102H1
cggtttcattgggcacccacaccgtcgttcagtttctcaaagctggcttcagcgtttcaatnatcgacaatttcgataactccgtcatggaagcagtggaccgcgtccgccaagtggttggccctctgctttctcagaacctccaattcacccagggcgatctccggaatagggatgacttggagaaactcttctccnaaacaacatttgatgccgtgatccactttgctggcttgaaagcggttgctgaaaggttgcg

SEQ ID NO: 42776 - DNA, 257 bp, Glycine max
  unsure (1)..(257): unsure at all n locations; Clone ID: 701126103H1
gtaaagcatggctttgttggtggagaaaaccacgagtggtcgcnagtacaaggtcaaggacctttcccaggccgacttcggccgcctcgagatcgagctggccgaggttgagatgcccggcctcatggcctgtcggaccgagttcggcccctcccagcccttcaagggggcccgcatcaccggctccctccacatgaccatccagaccgccgttctcattgagaccctcaccgcncttggcgccgangtccgctggt

SEQ ID NO: 42777 - DNA, 254 bp, Glycine max
  unsure (1)..(254): unsure at all n locations; Clone ID: 701126104H1
tnttgaattatacaatatnggtagcaacaggactattgnttggtttagnaggaccttagnnttgaggacatcctgcattagctgctgctgcnaagnanggttctgtantccctgtgtanatatggngccctaaagangaaggacanttttatccangaagantgtcaaggtggtggctgaagcagtctcttgctcacttngatcaatcactgaagtcncttggatccagacttgngctcatcaaaacccacagt

SEQ ID NO: 42778 - DNA, 256 bp, Glycine max
  unsure (1)..(256): unsure at all n locations; Clone ID: 701126105H1
acgcaactcagctttccttcgatccctgaatctggacgttactaaagcagcccagccatccacgcaccattttanaagccaacacagaaagcacagaaccaccacatcgttgccttcctctaaacgataaatttttgggattctgaaactagtgatacattttcttgcatgaaggcagcgtattgaggaattcagttagtgtattggaagatctagttcaacatgtcttctgtaagcnagggtgataggaaggctt

SEQ ID NO: 42779 - DNA, 255 bp, Glycine max
  unsure (1)..(255): unsure at all n locations; Clone ID: 701126106H1
aagccttcaatcatatagcattctaagaaatgaagagccctaccattttcattctctttctactttctgccttctacacctcantcctaccttcagccaccgctcaagtcgtggttgacatggaaggtaatgatcttcaaaatggtgggaaatattatgtgttgccagtaatagagtcatcatatggtggaataagagtagccgcaactggaaaagaaagatgccctctcactgttgtacaatctgccgatccgt

SEQ ID NO: 42780 - DNA, 253 bp, Glycine max
  unsure (1)..(253): unsure at all n locations; Clone ID: 701126107H1
ggggtcagagtgagaaagagaaagagagaattcgtaaaccctaatttcggaaagatcggcgatgactgcctccaaggatcgcgagaacttcgtctacatcgccaaactcgccgagcaggccgagcgttacgaagagatggtggaatcaatgaagancgttgcgaatctcgacgttgaactgacggtggaggagcggaatttgctttctgttgggtacaagaatgtgattggtgctcgcagacgtgcctggagg

SEQ ID NO: 42781 - DNA, 256 bp, Glycine max
  unsure (1)..(256): unsure at all n locations; Clone ID: 701126108H1
tgaccccaatatacttagccatatctttacttcccaaaacttgctctacaatgagtttccttncgttcttttgcaagaaacaaggatatatcaaaagtaggacgcagaggtatccattgcatgcagaaactatgtgcagaaaaaatatctcctgattcactagagaaggcccaaaatcgtgtgatagatgctgcactcacacttgttcgagaaaatacaaggcttaaganagaacttgtgcatagtttgggaggtg

SEQ ID NO: 42782 - DNA, 257 bp, Glycine max
  unsure (1)..(257): unsure at all n locations; Clone ID: 701126109H1
tattagtggtgggtttgggtttcaagagaggagacatgcctaacttgaacccaacacttcaagtacttgcttcttcatacccttaccagatcccaaaggtcttgatctaattttnagtgattcttctgatgnctatattgaaggttacatgaagccntttctctttttaaatcttcccaacaccgagttcaattcttcacaagttgattgtaatcactcaatggctcattcttcttatccctacggcgatccaattt

SEQ ID NO: 42783 - DNA, 256 bp, Glycine max
  Clone ID: 701126110H1
aaaatggcaatctccatacccagtagacaacttttcatagatggagagtggaaagtccctcttctcaacaatcggtttccgatcatcaaccccgctactgaagacatcatagggcatattccagccgctactaaggaagatgttgaccttgcggtggatgctgctaaaagagccttttcccataacaaaggcaaagattggtcttcagctcctggctctgttcgtgctcgctatcttcgagccatcgcttcaaaga

SEQ ID NO: 42784 - DNA, 255 bp, Glycine max
  Clone ID: 701126111H1
atcgtttccgtgaagaaaatctaagccgaggtgcttccgaaacgcttccgtaagcgattctgtggaaattcttcatcgttcttcaccattcttcatccgttcttcgttcgttcttcattcttcaacgggtaagttttcgaattcgagactttcaattcatttcttgttttgtgtactttcactttaatttcgtttactttcagttttcttttcttccgtttttaacgtgctttaaccatttatttaagccgtttt

SEQ ID NO: 42785 - DNA, 255 bp, Glycine max
  unsure (1)..(255): unsure at all n locations; Clone ID: 701126112H1
ggatcaatttcccgcgagatctgttaagaaccttcgtgggagtgaacaataataacaataacaacagtcagcancacaatttgcctatgccagtggtgaagttagaggatgagaaagaagagctggaactaagtctcggcctttcgatgaatggtagatttggggtggaccctacagcgaagaagataaagagaacaacctcgataccggagtttgtgcgcgacgaggagatgggatatgctgctgngnngngnt

SEQ ID NO: 42786 - DNA, 256 bp, Glycine max
  Clone ID: 701126113H1
ctcctgacttgtacattccattaatggcatttggtacctatgttgttcttgctggcatctcattgggtcttcgtggaaagtaagtataatatttccttaatcttaattctatagtgtagtacaaaggttattatagttattttcctcaaatttaaaagtttgtataaaagtattcccctttttgtacagttgttttattactttttcttttgtgcatcagtaagttgcattgcatatcagggaacttttcagctta

SEQ ID NO: 42787 - DNA, 257 bp, Glycine max
  unsure (1)..(257): unsure at all n locations; Clone ID: 701126114H1
ttacaccacgcttctaaattctgagantgaattcgtaagatcgaagcaatagcctttttctctgccgccactggtttcgatcccacacccacaaacgcaaaccctccatcctttgaatgctcttgcgttttcctttcactacctcattcctaactcacacacacacaacgggtgatatcaatgtcgactcctgctaggaagaggctcatgagagatttcaagaggctgcaacaagacccgcctgcaggaatcagcgg

SEQ ID NO: 42788 - DNA, 257 bp, Glycine max
  Clone ID: 701126115H1
ttacactactatgaaccagagaatgcctctcatctacgtgaaactgtatacatatcaaatcttcaggggattagcatatatccataccgccctgcgagtttgccatagggatgtaaagcctcaaaatcttttggttcatcctcttactcaccaagttaagctatgtgattttgggagtgccaaagttctggtcaagggtgaatcaaacatttcatacatatgttcacgttactatcgggctccagaactaatatttg

SEQ ID NO: 42789 - DNA, 256 bp, Glycine max
  unsure (1)..(256): unsure at all n locations; Clone ID: 701126116H1
cgattttcgcttcccaatttcttccctctcatatcatcttagctagaaattaagatagtctatcttgatcatgggtttcaattctgtctatagaaacttgcaggagatatttccgcagttgatcccaggctactgagggctgtngctattgaacacccaaaggatgctgatctagcagctggaatagttcttgcggaagtcatcccgttcatgtccanaaaactacctgctgcaattcctccacagcacaatgacc

SEQ ID NO: 42790 - DNA, 258 bp, Glycine max
  Clone ID: 701126117H1
gatggagaacatgcagagcttctggcaattgggcgatgaactccgtggacactcaaaagcatcggaggatcacaaatggttaatggttgcttcgaaattggcggaacagacaagattgaagggggagcgtgtgaacaaccttgatctttcaaagggccccattgaaacaaggtcaagggataaatttgggttccaggaagagaacaaatttgattctcttaacttaagcatgttgaacctggactctaaatttactga

SEQ ID NO: 42791 - DNA, 247 bp, Glycine max
  unsure (1)..(247): unsure at all n locations; Clone ID: 701126118H1
ctctgtcattngnngccttgccttagcttcgctattaaggcattttanagcannagtggcagccatgtaggctccattttgtgggtattggccacccaacttggtgtccataatctgaaatagtcttattagcgaantaaggcaaggcctccaatgacagaggttttagaaacccttgaacagattgcagagtgctaaaagggtcccatttgaatcatactcctactgcattcccngcatctgcttg

SEQ ID NO: 42792 - DNA, 256 bp, Glycine max
  Clone ID: 701126119H1
gactacgactacgattgtgtgtacactgcatacgttagaaccggttcggtgttgaagggcggaacggactctaagatcgggctgaagctgtacgacaagtacggctactacatctacattaaaaacctcgaagcatggggcggcttgatgggcaagggctacgactacttcgagcgcggcaacctcgacatcttcagcggaaggggaccctgtcttgacggacccgtctgtgccgttaacgttacttctgacggat

SEQ ID NO: 42793 - DNA, 255 bp, Glycine max
  Clone ID: 701126120H1
gcgattttcgattctcttctctgcaactatgcctaaccctaaggtcttcttcgacatgaccatcggcggtcaacctgccggccgcatcgtgatggagctctacgccgacgtgactccgagcaccgccgagaacttccgcgcgctctgcaccggcgagaagggcgccgggcggagggcaagcccctccactacaaaggctcgtccttccaccgcgtgatcccgaacttcatgtgccagggcggcgacttcaccgcc

SEQ ID NO: 42794 - DNA, 235 bp, Glycine max
  unsure (1)..(235): unsure at all n locations; Clone ID: 701126121H1
gngaacatcttgataaaatctcttngtttttcctccagaannttacatacaattgtcnatnctgtgtagaatgtcaccctagtttgggtttgcattccttgcactctgatttacttggataactttggttttggctttattgatcaatatcccatggagtcaaagcattggccctgtatgcagttcaaaccagaagatggggttctggacattgctagaaggttttctgctcttt

SEQ ID NO: 42795 - DNA, 255 bp, Glycine max
  unsure (1)..(255): unsure at all n locations; Clone ID: 701126122H1
ctctactactgctagctgtgacttgttttgagttcaatcaaatcgcattggtatctgaaatcaggaaagatggttagcgtantgagatcaggcaggcacaaagggcagaaggcccagcaaccatccttgccattggaactgcaaacccaccaaaccgtgttgatcagagcacctatcctgattactacttcagaatcaccaacagtgaccacatgaccgagctcaaagagaaatttcagcgcatgtgtgacaagt

SEQ ID NO: 42796 - DNA, 254 bp, Glycine max
  Clone ID: 701126123H1
tttgaaacagctcactcggaagcagagcagaatagatgaatttgttatcgcaatccactgccccttctacttctctatcaccttcctgttttcttccacgccaccctcatggttccacctggttctcttctggtaccttcaaattcttgaagaaagagagtagatgtctaaggaaagctggacgtactaaaatcactgcaaagtttgagctgaagccaccaccatatcctttgagtgctttggagccaattatg

SEQ ID NO: 42797 - DNA, 256 bp, Glycine max
  unsure (1)..(256): unsure at all n locations; Clone ID: 701126124H1
ggaagaaccagtatcgcggaatccgccagcgtccatggggaaagtgggctgctgagattcgcgacccaagaaagggggttcgtgtttggcttggaactttcagcactgctgaagaagctgcaagagcttacgatgctgaagcaaggaggatccgtggcaagaaagccaaggtgaatttccctgatgagccttcaggcgctgcttcctcaaaacgtctcaaggcgaatccagaggctcagccnatgaagaaaaatct

SEQ ID NO: 42798 - DNA, 258 bp, Glycine max
  unsure (1)..(258): unsure at all n locations; Clone ID: 701126125H1
gaagacttcgacatccccggcggcgaggaaatggatctcggcgaagacgaggtncggcgaggagagggagatcggctctggcggcctcaagaagaagctcctcaaggaaggtcaaggctgggaaacccccgaagtcggtgacgaagtccaagttcattacacggggactttgctcgacgggactaagttcgattcgagccgcgacagggattctcccttcagcttcacgctcggacaagggcaagtaattaaaggatg

SEQ ID NO: 42799 - DNA, 256 bp, Glycine max
  unsure (1)..(256): unsure at all n locations; Clone ID: 701126126H1
gggagttgtgagtctgatgagntttctgtggagcaaattgtgttggagctcaacaacagagtcattgntgggaagaacagcaaagtcacatttgatgactttccatattacttaagtganagaatccgatttgtgttaacaagtactggntatgtttatttaaaacangacttttccnagcacttgaggancnttcgtccagcaagcagagctattttgctttctggacctgcagaaccttatcagcaaaatcttg

SEQ ID NO: 42800 - DNA, 244 bp, Glycine max
  unsure (1)..(244): unsure at all n locations; Clone ID: 701126127H1
gcattgctgagctcggggtgatgatgatgaccactattttagtaacccttganatgattcttatatggcagatacacatcatcatagtgctgagtttcgtggtactcttcttgggattggaattaacttttttttcgtctgtcctgtggagtgtgacagatggaagttggattatactggtctttgccataataatgtttctaataatgtacgtatggnattatggaagcaatctcaagtatga

SEQ ID NO: 42801 - DNA, 254 bp, Glycine max
  unsure (1)..(254): unsure at all n locations; Clone ID: 701126128H1
agacctgcttccatctaattaatgccctctcaggagttggtattatttccatgccttatgcactggcatctgggggatggttaagcatatcactactatttgtgattgccattgcttgctgttatnctggtatgttggtcaaaagntgcatggatatggaccctgacatcaaganttttcctgacataggtcaacgtgcatttggagacaaggggaggataatagtatcaattgccatganttctgagctcttc

SEQ ID NO: 42802 - DNA, 256 bp, Glycine max
  Clone ID: 701126129H1
cgggcattgaaacacgagaatggatatgcagggagctccaccataatagttagggttatagcatgctttcaacctctcacagattgccaggctgaatactttcgtcatttgctaaagcctgttacgtaatagtttttttctttttgttcgtgttgggttaaagctggtggtttagttgttttccttgttggtgaaagagttaccaatagtaaaagatagcacttgtgtttgaaacgtttttcttcaggtgattgtt

SEQ ID NO: 42803 - DNA, 256 bp, Glycine max
  Clone ID: 701126130H1
ctcctccaaattaaaacacttatcatggatgttaagaaaggtgggtctgtagtacaagcacaagtgaagttgcagaagcataacgaaaaggagatgggcatgagaaaaggtccatgggcggttgaggaggacaccattctggtcaattacatcgccacacacggtgaaggccactggaattccgtggcacgatgtgcaggtctaaggaggagtgggaagagttgcagattaaggtggctaaactacttgcgcccag

SEQ ID NO: 42804 - DNA, 258 bp, Glycine max
  Clone ID: 701126131H1
ggcgaagagaagttgatgaagattagaatgaccataaactaagggggacaaatacaaccaactgatgttggagatgccataagcttggacataacaagaggacttgcaaaaattcccccattcatccaaaaccagcaaagactcgtgttgaaggtgagggagcacccagtgaagaacaacaaagtcatgttcaagttggaccaaatggaacacaagtgcaaactgaagcgaacaccaaaggtgataatggaacacatg

SEQ ID NO: 42805 - DNA, 260 bp, Glycine max
  Clone ID: 701126132H1
gccagaggaaactctggtggaggcccgcagcgatactgacgtgcaaatcgttcgtctgacttgggtataggggcgaaagactaatcgaaccgtctagtagctggttccctccgaagtttccctcaggatagctggagcccgcgggcgagttctatcgggtaaagccaatgattagaggcatcgggggcgcaacgccctcgacctattctcaaactttaaataggtaggacggtgcggctgctctgttgagccgcgccatg

SEQ ID NO: 42806 - DNA, 258 bp, Glycine max
  unsure (1)..(258): unsure at all n locations; Clone ID: 701126133H1
caagatcttctttgtattgctgntatgtctgatcatagcagcttcttctgggtttgtgaattgctttgatgttgaaaagaaggaaaagattggaatatttgagctcaataaaggtgacctttctttgaaggtcaccaactggggtgcttcaattttgtccctggtgattcctgataagaatggaaagttgagtgatgtttcttggatatgattctgntaaggattacactantgatacaacatattttggagcaactg

SEQ ID NO: 42807 - DNA, 256 bp, Glycine max
  Clone ID: 701126134H1
cttcttccaagtccaaccacgcttttctctacagtcatgggcaaggtcaagatcggaatcaacggatttggaagaattggccgtttggttgccagagtcgctctgcaaagagacgatgtggagctcgttgccgttaacgaccctttcattaccaccgattacatgacatacatgtttaaatacgacagtgttcacggacactggaagcatcacgatgtcaccgttaaggacgagaagacccttctcttcggtgaca

SEQ ID NO: 42808 - DNA, 255 bp, Glycine max
  unsure (1)..(255): unsure at all n locations; Clone ID: 701126136H1
gtgaagcacacgcagtgcattttgactncaccctttatttttggatccataaattgattgaataacgaaatcttcaatgaccggccattttctccggacacccctcacactcaagatcgctgctttcttcttcatcgcagtcaccttcttctacttcggcaagcactggtccgntggctaccagcagctcgtcttcttcacccagcgatccgacccggattcgaactcgaacccgtttgtttccacgtccccgaa

SEQ ID NO: 42809 - DNA, 254 bp, Glycine max
  unsure (1)..(254): unsure at all n locations; Clone ID: 701126138H1
atcctccgagcttctaggtccanactttcttcttcctcctccgcttctctttctaaaaccttagctcgctnctgctcctcgccgatcccccggctcctcatccgccgncacccgctccttcggctccgcntcccgcgatggagccacggcgtcgactggcgctctccgctcggcctccgccctcagatcanagccgccgctcccctncatcgaacgcttccaccgcaggatcgcnantagcgctactgataatt

SEQ ID NO: 42810 - DNA, 254 bp, Glycine max
  Clone ID: 701126140H1
ctattctcttcattccatggctttgcccaaccagcaaaccgtggattaccctagtttcaaactcgttatcgtcggcgatggtggcacaggaaagacaacctttgtgaaaaggcatctcaccggagaattcggaagaaatatgagccaaccatcggtgtggaggttcacccattggattttttcacaaactgtggaaagattcgattttactgctgggatactgctggacaggagaaatttggtggcctcagaga

SEQ ID NO: 42811 - DNA, 136 bp, Glycine max
  unsure (1)..(136): unsure at all n locations; Clone ID: 701126141H1
gttgccttcntnttctcgganaattcttcttttccgaganatttcgcgtttttactgttgaatcgataattcacaaatcgngggtgtntganantcaaagctgttgttnttnannggctactggggnnantctntg

SEQ ID NO: 42812 - DNA, 253 bp, Glycine max
  Clone ID: 701126142H1
acgaagtgcatttcaaccaagtcaagcagtgtcaagctcagctgggattgttgcttcctctcctgaaagcagtttagactcgcctgacattcacccgtttcgtgtgtctacgaccgaagccgaagaagcaagaaggcttgctggtctttctgctgccgccactgcgaacctgaagggaatccctctgtcaaggtcaactagtgatggatatgaggcctctggtggggaggatagtgacagggttcccaccagg

SEQ ID NO: 42813 - DNA, 252 bp, Glycine max
  Clone ID: 701126143H1
cggatgcgacctgggcataggttgacatggatacaatgctggggaatacccttaattgcctgggacatgcagcaaataaagaagattgtggcgggtattggagaaatggttgaggttgatgacaatgtagagggacagtggaagatggacatggcaaggatcttacttaaaacaccatggaaaccactcatccaacataccgttagggtgaacatccagggggagatatttcaggtgcatataacggaggaa

SEQ ID NO: 42814 - DNA, 255 bp, Glycine max
  Clone ID: 701126146H1
cttttagcttctatcattcatcatcagcatcttcttattattcttctgcttctcacacagatcttcacttcacctttgagtttctcacccaacacctatacataatacgcattggtaaccagtcatcaaagcggaatatgaaggtttcttgtgacggtgcataggttgataaagttctggtggatctgagtggattggttgtcattttcaaatattttcagtaaaggaacatcgttgaaagtggaaggggttttt

SEQ ID NO: 42815 - DNA, 252 bp, Glycine max
  Clone ID: 701126147H1
ctttctttggtttcacaccatttttctattgacttcatcacaatataaaagatcattagtgtcggtattatcaccaccatattcttttggacttcctctgctatttctaggtttcgttttatttggcttgattttcttctgcaaccttatctactgcaaagctttgattactgagtctaacttaccctgccacagtttgccttgtttacctgagctctgtttttaactggtctttgatcaaggaggccataa

SEQ ID NO: 42816 - DNA, 256 bp, Glycine max
  unsure (1)..(256): unsure at all n locations; Clone ID: 701126148H1
gatggcctcacaggtttgcaaagctgcttccagagccgcgaggtcccttctctccgcttccagagcctcccatggacgtgcggttggggctgctacggctgtttcattgagctgcaaagtgcctcttttctacggaaagaacggttctggaagtggtnnnnnnnnnnnnnnnnnnnnnnnnnggatttcaggagcacttgctcttcctgccgcagcttacatgttccaagatcaggaggtgcgcgcantgagctgg

SEQ ID NO: 42817 - DNA, 258 bp, Glycine max
  unsure (1)..(258): unsure at all n locations; Clone ID: 701126149H1
aatggcttcaagtcaggaggaggtganccttttgggancnactggaagcccatttntgtgcagggntcatattgccctcaanttgaagggagttcaatacaaatatntcgaagaaaattngaggaacaagagtnaactgcttctcaaatccaacccagtncacaagaaggttccagtgtttattcacaatgagaagcccatagcagagtctcttgtgattgttgaatacattgatgagacntggaagaacaaccccat

SEQ ID NO: 42818 - DNA, 254 bp, Glycine max
  Clone ID: 701126150H1
gggtgttaaagttccttcaagcatacttggaattcacccattgcttttcattagagttttgcagatgtgccagtggcgttttcctccagatgttcctcccccttataagggatacagggatgaggactggcaagacaatgatggagcactaaatacaatatccatgactcatcctcgcctcccaattgaacaccccaactgcttggttgaaaaggaatcagactgccaaccattacaacctggcatctggtact

SEQ ID NO: 42819 - DNA, 254 bp, Glycine max
  unsure (1)..(254): unsure at all n locations; Clone ID: 701126151H1
agcgtcttaatnnacgctcttctctganaaacctgatttcttctcttcttctgcttctntncgtttcgatcttcgatctctgaaaatgagagagtgcatttcaatccacatcggtcaggccggtattcaggtcggaaacgcctgctgggagctctactgcctcgnacacggcattcagcctgatgggcagatgccaagtgataagactgttggnggaggtgatgatgctttcaacaccttcttcagtgaaatgg

SEQ ID NO: 42820 - DNA, 251 bp, Glycine max
  unsure (1)..(251): unsure at all n locations; Clone ID: 701126152H1
ctcgatccgcgaaagcaanctccggnctgttctngnanaaactannanacacccatcaccantttccccgtacactcttatcaattttctttcgatngtttctgcgtggcgtcgtggtcttcttcatgtttccaantcagattcttgtgctatcttgttctggatttnccatttgagtangaagcnagaacngtnttnaattgttggtgcantgtgntgnnagttctgcatttgcctgttnaatttgagga

SEQ ID NO: 42821 - DNA, 252 bp, Glycine max
  unsure (1)..(252): unsure at all n locations; Clone ID: 701126153H1
tttgctcaaattgatagtgcactgacaagtcttatagaggaaaggaaggctgcttcaggatctgtggcagcatagaagacccatcttttgacattttgatctagcatggtgcgttgctggtggtagtggattttaaatgatttatttntagngttaaacaaaagantcttcactcaaactaagctgcattttctcgtgaagattgtctcacggcttatatcctcccatttggnaagcaatgtgatgattggc

SEQ ID NO: 42822 - DNA, 235 bp, Glycine max
  unsure (1)..(235): unsure at all n locations; Clone ID: 701126154H1
cttccattctcacactacttactcnccnttctctctctgacggtttccgctgttctctttcnnngttccaagaaatgtcaattataacacgcagaggcatccgttacatgccaagactagatgcagcaaaagtatctgctgctttgctagaaaaaggccaaaatcgtgtcatagatgcttcacttacacttattcgagaaagagcaaagcttaagggagaacttgtgcgtgcttt

SEQ ID NO: 42823 - DNA, 252 bp, Glycine max
  Clone ID: 701126155H1
atctcgtctcgatcgatagatctcgaacatgagcactggggagcttctcaacatcgaacctctcgaactcaagttcccctttgagctgaagaagcagatctcatgttctcttcaattgtccaataagaccgatagctatgtagccttcaaggtgaaaacaaccaatccgaagaagtattgtgttcgtccgaacactggggttgtcacgcctcgatctacgtgtgatgttatcgttaccatgcaagcgcaaaa

SEQ ID NO: 42824 - DNA, 253 bp, Glycine max
  Clone ID: 701126156H1
gcatttgacgccgcagcaacgaaaacacgaaaataactgcacagcataagcttgtagaattgtactgcatcgcaaagccccatgttgatcgtgttcatttgcatcttccttttcttcatctttctttacaagttcctcatcgcttatggcgatttcactttgatgtctaagaagcaacctaagcgccaagagattgaagataaggttgtttggattactggtgctagccgtggaattggggagattctggcta

SEQ ID NO: 42825 - DNA, 254 bp, Glycine max
  unsure (1)..(254): unsure at all n locations; Clone ID: 701126157H1
tttcttcttccttttctctaaagagaatctaatctcaatcctcaatacagatttcttcattcctctctcagtcttttctgttttccccctttgacatcctcgttttcgccgaaacaaaaacaactaagatnnnnnnnnnnnnnnnnnnnnnncttctccttgttgttatttgactcggttgtctgaatcggttgttgcagcagggtcgggagccacagctatgcagagccaagttgtgtgcaatggttgtagga

SEQ ID NO: 42826 - DNA, 253 bp, Glycine max
  unsure (1)..(253): unsure at all n locations; Clone ID: 701126158H1
ggctaagtatcattcaagtgggaaaagctcttccatgactgctatngccttcctgtttatccttctaatcacttatacaggcacaacagatgcacaatccggggtatgttatggaagacttggcaacaacttaccaacccctcaagaagttgtggccctctacaatcaagccaacattcgcaggatgcgaatctacggtccaagcccagaagtcctcgaagcactaagaggttccaacattgagcttttgcta

SEQ ID NO: 42827 - DNA, 239 bp, Glycine max
  unsure (1)..(239): unsure at all n locations; Clone ID: 701126159H1
atcaaantcagangaaatgtgcnatcctcaaaatttcanatacgaaaatngtctgatattgntcnaaaaagccaacaagaaaagattgattcaactaatcaantgattgaacagtgctanngctcaattcattctcctgattagcncattgangnaattctcccggtttccagcatcacctccctcaacataatggttnctcttctncttnaagccacccaaaggagcctnggncttng

SEQ ID NO: 42828 - DNA, 253 bp, Glycine max
  Clone ID: 701126160H1
gtgacactccggctccactcgagcccactcctcgcccctccaggcgccggagtttggacatcttacctttaaaatatatcgccgacatgcccatgccgccgccggaggtttacggaagcgtcccaagctcaacctcagggactgcgataacgcaattgaaaattgcgacgaatccactggacacaaggtgacgaagaaggaatccaaagtagactacgacgacgacgtctttcggaaactaagaacgtaactg

SEQ ID NO: 42829 - DNA, 256 bp, Glycine max
  Clone ID: 701126161H1
gggagattcaggataaagccttgacaagcatgaaagagcttcaaaattacaaaacaacatgtgagatgcacaaggggaagggctattacgatgccttcaaggtgcaaaaggagtcgaacgacttccaagcaaacgtgaagaggcttgtgctagcaggggtatgggatgaagtcattgagatgctaaagaggtatgaactccctgatgagttcgaaggggacaaagaatggataaagcgtggaaccgaatatcgccg

SEQ ID NO: 42830 - DNA, 254 bp, Glycine max
  Clone ID: 701126162H1
gttcttctacgcggtgttcggcggtttgggagcggttgttgcagtgacggagctgagcaagagcaacaaggaccgaatcaacacctcttccgcattcaattccttcaagaacaactacctcatcgtctattccctcatgatggctggagattggctacaaggtccatatgtctactacctttacagtacatatggatatgggaagggagacataggacaactcttcattgctggttttgggtcttccatgctct

SEQ ID NO: 42831 - DNA, 256 bp, Glycine max
  unsure (1)..(256): unsure at all n locations; Clone ID: 701126163H1
agtagtactagtgataaggtgatcataatagagcataatataagagagtgaaaactcatggaggttggcctcaacaagaaggagaacatggggtttgaggaaactgagctaaggcttggactgcctggaaacgtaggaggcnctggcactgaagaagtgctcatcaggaagagaggtttctctgagactgaaactgaaactgaggaggatgagtctgctaccactgtggatttgatgcttaatctttcttctaagg

SEQ ID NO: 42832 - DNA, 258 bp, Glycine max
  unsure (1)..(258): unsure at all n locations; Clone ID: 701126164H1
gaaatatttcttgaaggaggaaatgagttcacagccattgtccttgatgtaggatctgatttagatagttttcctgttgtactacttccaactgaggtggagcttcaattccgtggtgcaaatgatgtgaaagagaatgatgcaatatttaattaccgtaggaagtaccttccaacccaacaggttgcntatcacactccaccacggtttcctttggatgtaattgaaaatattcgcaaaggagcatctctgttattt

SEQ ID NO: 42833 - DNA, 226 bp, Glycine max
  unsure (1)..(226): unsure at all n locations; Clone ID: 701126165H1
ttggattggtnttcttcttccttttctctaaagagaatctaatctcaatcctcantacagatttcttcattcctctctcagtcttttctgttttccccctttgacatcctcgttttcgccgaaacaaaaacaactaagatntttttgtttgtnttgtntttcttctccntgttgttatttgactcggttgtctgaatcggttgttgcagcagggtcgggagccaca

SEQ ID NO: 42834 - DNA, 254 bp, Glycine max
  unsure (1)..(254): unsure at all n locations; Clone ID: 701126166H1
gtgaagataagcacaaggagtgtcatcnagtcagctactaccaaattttcagagtggactantcttcctttnttatattcnnaatnaccgtgccttatccgaccctctcntaccanacccaacccaacccaaccaactntntttcaaccagccgcggcgactaaacaacgaccacaccctcaanaccatttccaactaccanntactctctctatcactctcccatggcttcctcttccctctttctctcactc

SEQ ID NO: 42835 - DNA, 250 bp, Glycine max
  unsure (1)..(250): unsure at all n locations; Clone ID: 701126167H1
tgccatcaatagaagcagtctttattccaaagcactccattattttttgaaaaagtttttttgttatctttagagtagatattttgtggtttggntatcaaacagatgcttttaagcatgccagctgtgcagctgaattttgaggtgtctgattaaactgggtgtgactcgtctaattgaattaatggaagcctgccactttaagacttaagacagccagtcatgctgttganttcagtggttcacattg

SEQ ID NO: 42836 - DNA, 200 bp, Glycine max
  unsure (1)..(200): unsure at all n locations; Clone ID: 701126169H1
tacgtatcgtggagttcgtcagcgaaaatggggcaaatgggtgtccgaaatccgtgagcctggaaagaagagcagaatatggttagggagctatgagtcaccaganatggctgcagcagcntatgacgtggcagcgttacaccttcggggacgagctgcaagactcaatttccccgaattagttgagacgctgccacgtc

SEQ ID NO: 42837 - DNA, 250 bp, Glycine max
  Clone ID: 701126170H1
aatacttgtttgtatttaaggtatatgattcttgcatttgacttgattacacatgatggaataaggcaaagttgttaccaatatcaaccagcctcatcaataaaagacatgttatatggatcatgaaattttatcatgctagaatggcggaggactggctgagtttgcggttgctaaggagagtgtcactgcatcaagaccatcagaaacctcagcatctgaatgtgctgccctacctgtagcaggtctg

SEQ ID NO: 42838 - DNA, 249 bp, Glycine max
  unsure (1)..(249): unsure at all n locations; Clone ID: 701126171H1
gttcaaaaccaatctatctatctatttggtatnagcatggagctttgttggcnnaaatccatccatggctcttaaagaagcttggaggattttntgtgagagggttctcacccttcacactccacctcctacagtttgcntatgctttagccattggtttctctnatcaatcaccacaaaagggtntacatggaggaacataattctctgnnnggcatgaagcagagaagctatggccacatcttagca

SEQ ID NO: 42839 - DNA, 251 bp, Glycine max
  Clone ID: 701126173H1
cagaggagcagaagcctaagccttcaacatggcgagagggttgaagaaacacttgaagaggctcaatgctccaaaacactggatgcttgacaagcttggtggggcctttgcaccgaagccatcatctggaccccacaagtccagggagtgtcttcctttgatcctcatcctacggaacaggctaaagtatgctctaacatatagagaagttattgccatcttgatgcagcgccatgttcttgttgatggca

SEQ ID NO: 42840 - DNA, 226 bp, Glycine max
  unsure (1)..(226): unsure at all n locations; Clone ID: 701126174H1
gaacaaggagaggtgcgtnctatcctggtgtagtcnncaaggatgangctccaatgtgagggttacgaagaaaaaaagcaaggatctgcacatgcatatgcatgttcctgccggagactccattatttatagccggaaaaagcagaagaaaacgccggaaaaactcgccgccggtcgttacgattttttcgagtccttgccggatgacctcgtaatctccatcttc

SEQ ID NO: 42841 - DNA, 252 bp, Glycine max
  unsure (1)..(252): unsure at all n locations; Clone ID: 701126176H1
ccttganagcgtgctgggtgtgggangcacgtgacgtctacacaaacaanataaaaacccagtttctctccactcactaccactaccgctatcacccaatttccccccttcgttcttcagctcatgacgacgtcgttcggaggaccagccaccacctcagcgccgctcaaggacaccaagcttcagatcccaagcttccattgcttcagctctgcttccgcctctgctctctcgcgcaatgccctctccctt

SEQ ID NO: 42842 - DNA, 251 bp, Glycine max
  Clone ID: 701126177H1
gcaccaaaaacatagtactatacagccccactttctctttctctttctcttcactctaaagtctaagcatccatggccatggcgtctgcaaagctcaacaccttgtcttcccagtggatcgcccacaattccttctctcctcgccgtggatcctcttctcgccgagtctctcttccgatccgcgcttcttcttaccaacacgaactcgtccaaaccgccaaatctattgcatctcccggtcgtggaattct

SEQ ID NO: 42843 - DNA, 251 bp, Glycine max
  Clone ID: 701126178H1
gcgggctcaaagagaatcccgggattgtacctcttatctattatggcctgcagcactatctatcgttggttggttctcttgtattgattccattagtcatggtacctgtcatgggtggaacagataaggatactgctaccgtaatttctacaatactgtttctttctggcatcacaactatactgcactcctactttggtacgcgactgcctttagttcaagggagctcatttgtgtatttagcaccagca

SEQ ID NO: 42844 - DNA, 223 bp, Glycine max
  unsure (1)..(223): unsure at all n locations; Clone ID: 701126179H1
gggattcattgccaangacataggttttgtgaccaatgcaggtgcatctaancaccaggctgtggcatttagatctggttcggaccgttctgtgttctttagatgctcattcaatggcttccaggataccctctatgcccattccaatcgccagttctaccgtgactgtgacattacaggcaccatagacttcatattcggaaatgcagctgcagtgttccaa

SEQ ID NO: 42845 - DNA, 253 bp, Glycine max
  Clone ID: 701126180H1
atcgaagcccttcattttgattttcttcctcgtcactgcgcatcatgtacagagttgcagcttcatcattcagaaggcatctcaagggccatggaggtaacttgggatccattaggttttcaacttcggccgcggtagctgcaaggacttcatctggtggtttgtttagctggcttactggagagcgttctagtgctcttcctcctcttgacataccccttggtggcgttgctctcccagattcacttccaga

SEQ ID NO: 42846 - DNA, 254 bp, Glycine max
  unsure (1)..(254): unsure at all n locations; Clone ID: 701126181H1
cgagccgattcgctgtctcagtcccttcgttgccaactantttgcgtaggattttccttnntcacaacctcgtaataaattcgttaagttcctccttgtttggtcccaaaaatctgagaaccctctttcaatttctcttcctcaactccatcattcatcactgtccattattattgttattattaacaatggatcctatggagcttaagcgtgttttccaaatgttcgaccgaaacggtgacgggagaatctca

SEQ ID NO: 42847 - DNA, 291 bp, Glycine max
  unsure (1)..(291): unsure at all n locations; Clone ID: 701126182H1
tggcctcttcagtgatggcatctgtggccctcaaacctgcccctttcactgttgagaagtcctcagttagaggcctttccctcactctcaaggaaactccctctttcattcagagttgtggnccagtggtggccaagaagattcaagaactggacaagnccttatgggaattnaatgggtgggcatgggctttngaggggaagggagttcgatggcatctgggcagggaaaagggaanaggggaaaagtgggcgttttnacccagttttngtaagaacaaaataacgggtt

SEQ ID NO: 42848 - DNA, 251 bp, Glycine max
  Clone ID: 701126184H1
attcaatgtaaaaaaacacagtagccacccaatacataaaatttgtttatgctttctacacgcacttcctccttcgtatccgtctcttccccaaccattggaatacattccttaacccaccgcaaatccaaatccaaattcaattcgagctgaacctagggtttgttccttcctattgccttcacggatctcgcattctcctcaaatttccgaaacgggaaaaagaaaatgcacgcgaaatcggcgcagtc

SEQ ID NO: 42849 - DNA, 252 bp, Glycine max
  unsure (1)..(252): unsure at all n locations; Clone ID: 701126185H1
aaaaccacactcttctcactctctcccttattcctgttcctacttcttctccctagtcgaaggactcacccccaaatgtgacacccaagaccatggctcaacccttgnagttttccatgtgttcagcccctgttccccatttaggccaccaaagccactttcatgggcagagagtgtccttcagctgcaggccaaggaccaagccaggctgcagttccttgccagcatggtggctgggaggtcagttgtgcc

SEQ ID NO: 42850 - DNA, 249 bp, Glycine max
  Clone ID: 701126186H1
gagcattccgtttccttcctccagggaaaagttagcgtgtctttaggtcacaggattttgagagatttactttttaatctgcctctgaatcaattctgcaagaagatatataatgtttggttcaaagaaatctcctttgaaggttgctaaacctagctccgttgagtcttggacgaatccatttgattctaatgatgagggaatggataccaaaaagtatagttcctctagaaagacttcttcggagcg

SEQ ID NO: 42851 - DNA, 250 bp, Glycine max
  Clone ID: 701126188H1
gcaactccgagtgtgttagaagtccgccctcctgctttaacttccatctctgaaccacttccattttttgatggaaccacaaggttatacatttgctatctgtgcccttttgcacaacgcgcatggataactaggaactgtaagggactgcaagacaagatcgaattggttcctattgatcttaaaaacaggcctgcttggtataaggaaaaagtttatcccacgaataaggtaccttcgttggagcaca

SEQ ID NO: 42852 - DNA, 252 bp, Glycine max
  Clone ID: 701126189H1
cagcatcactctcgtcgccgccgtcgtcgaccaccgcaagagccatcgcactccgccgtcatccgttagggcaaaaatgagtcgaggaagtggaggtggatacgatcgtcacatcactattttctcccctgaaggacgtctcttccaagtcgagtatgctttcaaggctgttaaggccgcaggaatcacctcaattggtgtccgaggaaaggattcgatttgtgttgttactcagaagaaggttccggataa

SEQ ID NO: 42853 - DNA, 249 bp, Glycine max
  Clone ID: 701126190H1
ggcccttctatagagtgtaataatttttgaaaaacctctgtctctgttgtttctgatgcaaatctccgttgtcgttggtgtttcggtctgaaatcaaatcaaaatcaacactgtgcgctgcggttagaagagattcaatctgaatctgaatggaagctatcagaaagcaagcctccaaacttcgagaacaggtcgctcgtcaacaacaggctgtgcttaaacagtttggggctgggggatatggaggat

SEQ ID NO: 42854 - DNA, 252 bp, Glycine max
  unsure (1)..(252): unsure at all n locations; Clone ID: 701126192H1
ccgccatttccttcctcaccaacgtcgcccgcncngccttcggccttggcgcggcggccaccgccctctcctcctccctctacaccgtggacggcgggcagcgcgccgtcctcttcgaccggttccgcggcatcctggactccaccgtcggcgaggggacccacttcctggtcccatgggtccagaaaccctacatcttcgacatccgcactcgcccccacacattctcctcggtctccggcacaaaggatt

SEQ ID NO: 42855 - DNA, 250 bp, Glycine max
  Clone ID: 701126193H1
ggggcatcagagtgatggaacagtcttcgggcttgctgggttgggctctggctgcattctgctggcctgtccgttccaagttgtgagttgagctacgggacttgagcgaaggcccaagtttctgggttcctagacttgagggcacagcgtgaggctggtttaacagagcagcgaatacctcaggcttccaacagtggagggataacaggctgctgcaacagcagtccacaatggcctggtgagcccattt

SEQ ID NO: 42856 - DNA, 251 bp, Glycine max
  unsure (1)..(251): unsure at all n locations; Clone ID: 701126194H1
ctgggatctgtgacatgtttgggtgcttgattgacttgcttcgatgttgtttcttggtggggtttgtcctggcaatgggagctttatatagaaacagcatgatgagaggagcagcagccctgtgcagctttccaagtttttagggcgtgacaaagatgatggtgtccgtcgcagtgctgtatctggcaagaagattcttctgaaacttnagaaaacaaaggaagataaggtagctgaaagcaagagaaatg

SEQ ID NO: 42857 - DNA, 252 bp, Glycine max
  Clone ID: 701126195H1
aaaaacaaaaccctcactgagcgctgctgctttgagagagagatggctccgaaccttgaatgtcgtatgtacgaagcgaagtacccggaggtggacatggcggtgatgatacaggtgaagaacatagcggacatgggggcgtacgtgtcgctgctggagtacaacaacatcgagggcatgatcttgttctcggagctctctcgccgtcgtattcggagtgtgagcagcctcatcaaggttggccgcatcgag

SEQ ID NO: 42858 - DNA, 256 bp, Glycine max
  Clone ID: 701126196H1
ccaagatgcaggcatggatacttccatgtggtgaacaatgactacacccattggagaatgtatgccataggggggagtgctgccccaactatcaatagccaagggaatagatttcttgctcccaatgacaataccttcaaagaggtgacaaagagggagaattcagcacagagcaagtggaagaattggaattggaggtcaagtggagatttgatgttaaacggtgcgttttttacggcatcaggagcaggtgcat

SEQ ID NO: 42859 - DNA, 271 bp, Glycine max
  unsure (1)..(271): unsure at all n locations; Clone ID: 701126201H1
atttcacttcacttagggtggtgcatttgcaaccctttaatttcctcacaaaaatggagcnacgtagtttgtactcactagtgtttcttgtgcttgctttggctattgtgaacaaagtgcatgggcaagggacgcgtgtagggttctattcgagtacatgcccacgcgctgagtccattgttaagtccacagttacaacccatgttaattctgatagtactttggctgcggggttgcttcggatgcactcccaagatgctttgtgaaggtg

SEQ ID NO: 42860 - DNA, 138 bp, Glycine max
  Clone ID: 701126202H1
gggaccgggtctcttcaccgatatcggcaaaaaatccaaagatcttttgactaaggactacagctccgatcagaaactcaccgtttcctcctacagcgtctccggagtgaccctcacttcaacatctgtgacgaaagg

SEQ ID NO: 42861 - DNA, 276 bp, Glycine max
  unsure (1)..(276): unsure at all n locations; Clone ID: 701126203H1
ggttcatccaatccccgaagcccttcaccgcattgcaaccatgtcgaggagaaaggtcagagagccaaaggaagaaaacgtgactctgggcccagctgttagagatggtgaacatgtctttggcgtcgctcgcatctttgcctccttcaatgataccttcattcatgtcactgatttgtctgggagggaaacgcttgtccgcatcactggtggaatgaaggttaaggctgacagaataaacnacccntanngcgnnnantctggcngctnnngntt

SEQ ID NO: 42862 - DNA, 268 bp, Glycine max
  unsure (1)..(268): unsure at all n locations; Clone ID: 701126204H1
cttgaacccaccgcgtttcggagagagagacgtcgcaatggggaggaggcctgcaaggtgttaccggcagataaaaaacaagccataccccaaatcacgtttctgccgtggtgttcctgatcctaagatcagaatttatgatgttggtatgaagaagaaaggtgttgatgagtttcccttctgcgttcatctggttagctgggaaaaagaaantgtttcaagtgaagcttggaanctgctagatttncngcaanaangtggggntttt

SEQ ID NO: 42863 - DNA, 272 bp, Glycine max
  unsure (1)..(272): unsure at all n locations; Clone ID: 701126205H1
ctccaattgcagtgggaaacgtgattccagacggcattttggcttacttggatgaagaaaacaaaccccaaactgtctccattcactctctcgccaccggcaagaaagtcatcatctttggggttcccggtgccttcactcctacttgcagcttgaagcacgttcctggcttcattgagagagcagaagagctgaaagggaagggtgtggacgaaataatctgtatccgtgtgaatgnccccnttggggganaacctcagggcnaaaaactc

SEQ ID NO: 42864 - DNA, 271 bp, Glycine max
  unsure (1)..(271): unsure at all n locations; Clone ID: 701126206H1
ttttctattttcttctctcatggcttcagattccaaaaaggatttccctgctgatgacaaagctggaacagcagagaataaagcatccaaagatgaaacgtcatctaaagattctccagcagcacaaagagctactacagctacttctggacctgcaactggttttccaggcaacccttttgatttctctgcaatgtcnggctgctnangnnccangtatcagggattnggctgaacagatagaaaannncnntntnnccanngggggggg

SEQ ID NO: 42865 - DNA, 265 bp, Glycine max
  unsure (1)..(265): unsure at all n locations; Clone ID: 701126207H1
tggcctccaccaaggaacgtgaaaacttcgtctacgtcgccaagctcgccgaacaagccgaacgctatgaagaaatggtggaagcaatgaagaatgtggcgaactaaacgtggaattgacggtagaggagcggaaccttctgncggttgggtncaanaacgtggtgggtnctcgtagggcttcgtggaggttctttcctcgnttgaacagaaagagtttttaaggggactnttnnngcgtaaaaannataaggnnnctcgnnccg

SEQ ID NO: 42866 - DNA, 264 bp, Glycine max
  unsure (1)..(264): unsure at all n locations; Clone ID: 701126208H1
tggatcgtgtgggtcgatgaacctctaaccctaactttcagttgccttcaggcaaactttggagttaagaaatggagagggacatgatatcgactttgccgaaaacaatacttcatgacattctgtcaaggatgccagaggaagatgctgttaggacaagtgttttgtccaaatcttgggcggaacgtggncncgnancccatcgggnattttccnganncgatnncgggggggnttttcngggccgggggnanttttaaaaaa

SEQ ID NO: 42867 - DNA, 214 bp, Glycine max
  unsure (1)..(214): unsure at all n locations; Clone ID: 701126209H1
agcatggcatctcaagcaatcaccttcaagtccttcgccaccgttatcatcgtggcgcttttcttnnnnnnnnnnnnnnnnnnnnntcaggatttgtctccggcgccggcaccgggacccgatgccggagcagccggatccgtttcgagctcggtggccgtaattgganctncggttgngnngnnaangcccgnantttaaagnctnaatgnca

SEQ ID NO: 42868 - DNA, 273 bp, Glycine max
  unsure (1)..(273): unsure at all n locations; Clone ID: 701126210H1
aaaatcatgatgatgtattgggcctgtaaagcccatttgagcgaantttctgaatttgacggaaataataataaaataaaataaaagcgaaccccgagcatgtattgtagattgtagatccatccgcatccgctagctcgcgcaggcaccagcaggtgaggttattgtgatttgaatggagggaagtggaggtggcggtgcttcaccgtctgcaccgttgaagcaatacttacaggtggattgggactttcgtcattgcatccatctacgttt

SEQ ID NO: 42869 - DNA, 266 bp, Glycine max
  Clone ID: 701126211H1
atcctcacccattttcttcgtagccaaacactctgaaattctcagttatgtcgtggcaagcgtatgtggatgatcacctactgtgtgaaatcgaaggtaaccacctcactcacgccgctatcatcggccaagacggaagcgtttgggctcagagcaccaacttccctcagttcaaacctgaggaaataactgccatcaataatgactttaatgagcctggatcacttgctccaactggattgtatatcggtggcaccaaatacatg

SEQ ID NO: 42870 - DNA, 251 bp, Glycine max
  unsure (1)..(251): unsure at all n locations; Clone ID: 701126212H1
atctttctgatcattggttgtnttnnattctttcaaatacattccaaaatctcttggaaattgcnagattcactgcttatcctagcancagattttgggttctgacccaattattcattttccccaactgggtcttgtggatctnttgttggggttttaaatttcgtgttgctgggtttgaaagttatntcctntcttccccgtctggattcaactcccaagtatttgctttnattgggaatgttaggttg

SEQ ID NO: 42871 - DNA, 276 bp, Glycine max
  Clone ID: 701126213H1
gaaaacccagaaaaactctgaagaagagttcgttgctttctgcttcactgcgaagatgaacggaggcccatctggtttcacaaatgctcccgtcacaagggctttcatcatcacttcggcgcttttcacaatcttctttgggatccaaggccgtttcagcactctggggttgtcgtatcaggatatttttggaaagcttcgcctttggaagttgatcatttccatattttcctctcgtcaacaccagagttgatgtttggattgtatcttctatat

SEQ ID NO: 42872 - DNA, 278 bp, Glycine max
  Clone ID: 701126214H1
gaaaaacaaaggagaaaagatagaaatggagaactttccagttgttgacatgggaaacctgaataatgaagagagatcagcaaccatggagataatcaaagatgcctgtgagaactggggtttctttgagttggtgaaccatgggatatccatagagttgatgatggacaccgtggagaggatgacaaaagagcactacaaaaagtgtatggagcaaaggttccaagaaatggtagcaagcaaaggcttggagtctgctcaatctgaaatcaatgatt

SEQ ID NO: 42873 - DNA, 277 bp, Glycine max
  unsure (1)..(277): unsure at all n locations; Clone ID: 701126215H1
gtgaaaggtggcactctgatttcttatgaaggaagggttcagntcctggaaattgcccaagtaccagatgaacatgtcagtgaatttaagtctatagagaaattcaaaattttcaacacaaataatttgtgggtaaacttgaaagcaattaaaaggcttgttgaagctgatgctctgaagatggaaattattcccaatccaaaggaagtcgatggagtaaaagttcttcaattggaaactgcagctggtgcagcaataaggttcttgacaaagctat

SEQ ID NO: 42874 - DNA, 280 bp, Glycine max
  Clone ID: 701126216H1
ttttcttctaataatggctgcgacaacacgttcccttgcatacaactacgatgtgttcctcagcttcacagggcaagacacacgccagggtttcactggctatctctacaaagctctttgtgacaggggaatctacactttcattgatgatcaggagcttcggagaggagacgaaataaaacctgcactttccaacgcaattcaagagtccaggattgctattactgtgctttctcaaaactatgcatcttcctcattttgtttagatgaactagtaacc

SEQ ID NO: 42875 - DNA, 273 bp, Glycine max
  unsure (1)..(273): unsure at all n locations; Clone ID: 701126218H1
gggaggagaaggatgtctcacaggaagttcgagcacccaaggcacggttcactgggatttcttcccaggaagcgtgctgctcgtcacaggggaaaagtgaaggcattccccaaggatgacccatccaaggcacccaagctcactgcattcttgggttacaaggccggtatgactcacattgttagagaggtcgagaagccaggntcaaagcttcanaagaaggnaatngtgagcctgnaanattatngnccccccnnaatgnttttggggggg

SEQ ID NO: 42876 - DNA, 275 bp, Glycine max
  unsure (1)..(275): unsure at all n locations; Clone ID: 701126219H1
ttgatattatggcagaccctcagaaaattcaccctgtgcaccatgatgttgaggcacaaaaccacccttcagcaccattggtgccaaggagcatgtcaaaatctgatgctggtgatccacaaagagtagtagtagtnnnnnnnnnnnnnnnnnnnnnnnnnnnnnacattcctgtgangcacaccaagccaccaacanagaaaagaagaagctgctgcngnaggttctncctgtgggctaattngcnnttggcggattcgnttggggcatgggcc

SEQ ID NO: 42877 - DNA, 141 bp, Glycine max
  unsure (1)..(141): unsure at all n locations; Clone ID: 701126220H1
ggctctctctttctaaatttccccattcccttnctctctctgcgggcgaacgcgcttcaaacctctttccaaagaacgccaaacaggaacttcattcaaggcaatcncgaacaaaccatttcccagtttcacagaacattc

SEQ ID NO: 42878 - DNA, 181 bp, Glycine max
  Clone ID: 701126221H1
agagaaagtgattcaattaatatattatatggtgtttctcttcaattcccatggagcctaagacacaacctcaagcgaatagtcctccaccaaaaccttgggaacaagcgggttcctcttctggtccagcacctttcaaacctccgtcagctggcaacacaagtgatgtagttgaggcttc

SEQ ID NO: 42879 - DNA, 262 bp, Glycine max
  unsure (1)..(262): unsure at all n locations; Clone ID: 701126222H1
ctggtttcatcaaagaacgcaattccaggatatctaactgatgcttccagccatcngcagagtccttctgttggtgaggatgatggaggggtgacaatgtctgatgagatggatcttcttgtcgagcaagtcaaaatgcttgctggggatattgcttncagtactagcnctttgaacgcgcttaatagagccagtctgnaaatgatccggaaacccccaaaatacggttngannncnnggacaggttcnccaanaanngggg

SEQ ID NO: 42880 - DNA, 148 bp, Glycine max
  unsure (1)..(148): unsure at all n locations; Clone ID: 701126223H1
cttgcatttcccaggatcaatggcaaagctccattttgcgttcagtttctcacttttgtttctactcagcaatgnctttcactgcaccatccaccactttacccgccaagattgttagtgggtttctctcaaatgccgttcctgcgtt

SEQ ID NO: 42881 - DNA, 224 bp, Glycine max
  unsure (1)..(224): unsure at all n locations; Clone ID: 701126224H1
gtgattactccggcaggaaattggcttattggaggagatttggaagtgctaaaacctatcaaatataatgatggcctagataactacaggctctctcccaaacaactccgtgaagaatttgacaagcgtcaagcagatgcagtttttgcctttcagttaagaaaccctgtacacaatggtcanggcttgttaangaatgatactngtaagngctattggaatgg

SEQ ID NO: 42882 - DNA, 274 bp, Glycine max
  unsure (1)..(274): unsure at all n locations; Clone ID: 701126225H1
atttgtacatcccggcgagaaggcccgccgtcgggaccctcgccggtttcattactctgcaacagtctgtccagagtttccgccgcggtcagtgtgaccgtggcgatgcatgtgagtnttctcatggggtgtttgagtgctggttacacccttctaggtatagaaccgaggcttgcaaggatggtcaggaattgcaagcgaaaagtttgcttctttgctcaaacccctngcnaaaaccgggtttgccnttccatgaaaantacnacangaaana

SEQ ID NO: 42883 - DNA, 274 bp, Glycine max
  unsure (1)..(274): unsure at all n locations; Clone ID: 701126226H1
cttcttcttctagtgcttctgatccaaaccaccaccatacacaaaattcatattgaaactgtgtnnnnnnnnnnnnnnnnnnactctactaatctttagaacaattcagtctttggatttgtttgtgtcctttttatcaatcaaggccacactcaaaatcccaagttttataaatcaagcataatggaatctgaaaatggagttgctatggaggacgagaaacatgtcattggggaaacaaccaaggagaacataaacaaagaagctgaaaaca

SEQ ID NO: 42884 - DNA, 275 bp, Glycine max
  Clone ID: 701126227H1
gtggtggttctggctctgtccttttttcctttctctcgttaccagaaccagaagaaccatttgtggccaacatggatttggaccagtggatctccaaggtcaaagagggccagcatcttcttgaagacgagcttcaacttctctgcgaatatgtaaaagagatccttatcgaggagtccaatgtgcagcctgtcaatagtccagtgactgtttgtggtgatattcatggtcaattccatgatctaatgaaacttttccagactgggggtcatgtg

SEQ ID NO: 42885 - DNA, 275 bp, Glycine max
  unsure (1)..(275): unsure at all n locations; Clone ID: 701126228H1
cacattgggacattgcatttcagaacagatgggatccgacaatccgagtttggctggtgacagccagtatagtagatctattctggaagaattttctcagtacttgttcaatgactctcaacatgcaactacctctgatgaacagcgtgtgatgtcaagggtgaactcactttactgccttctgcaganggatccttcttcagcagaagacataaacacaatgacaaaaaatggcaatagtctgagagatgcaaatgcttgtcaagggtgaactc

SEQ ID NO: 42886 - DNA, 269 bp, Glycine max
  unsure (1)..(269): unsure at all n locations; Clone ID: 701126229H1
cttaaatggcgtggacttgaatggcagagctatacgagtctcattagcagattccaagcccaagcagttctgaggatttagcttttcgtctancacccgagagaggatttcggtatttgggncttgggagttatacagctgcaagatgtcattggcaaaaacagtttgggaaagaaatacacttacatgcattgagactacatgtacacagtttcaatatctgacaggcttcttcctagatgagtgtctgttgaaagtttaaatgtatg

SEQ ID NO: 42887 - DNA, 278 bp, Glycine max
  unsure (1)..(278): unsure at all n locations; Clone ID: 701126230H1
aatggatagaagtcatgctgatgagataggcatcgtcagcacccgaagggcaaagtttcatatattctgttgaaattgtagttcgatggtgatgacatattttatttagattcaatannttaatgtattttattggcaaccgattgtaaactatttttgtcttgatggtgttccacatgttttgtattcacaactgctatttattatttagaaaactttctgatttgacacatttaattcatctatagtatatgatgggggaaccatatttgttcaaa

SEQ ID NO: 42888 - DNA, 277 bp, Glycine max
  Clone ID: 701126231H1
caagccacagaatctgagctttgctgaggctgctagccttcctttaacacttgagactgcttatgaaggccttgaacgaaccgggttttctgctgggaaatctatccttgtgcttggaggtgctggtggagttggaacccatgttattcagcttgccaagcatgtttatggagcatccaaggtagcagctactgctagcactaggaaactggaactattaaggaatttgggagctgactggcctattgattatacaaaggagaattttgaagacctg

SEQ ID NO: 42889 - DNA, 279 bp, Glycine max
  unsure (1)..(279): unsure at all n locations; Clone ID: 701126232H1
ctcttgttagtgctttggggaatgaaggagtttcagaagaagcagctggtgcactggccttgatcgtccggcagccaattggggccaaagcagtggtgaatgaggaatcagcagtggctggattaattggaatgatgcgttgtggaacaccgagaggtaaagagaatgcggttgcagcgatgctcgagttgtgccggagtggaggtgcagctgcaacagaaagggttgtgaaggcaccagctttggccggattacttcaaanccttctttngaggggaa

SEQ ID NO: 42890 - DNA, 276 bp, Glycine max
  unsure (1)..(276): unsure at all n locations; Clone ID: 701126234H1
cggcatcctggtgtggtccatgtcaaacatttacgccaactttggtngatgtgtacaatgaggttgcaaaaaaaggtgacttccagatcgttttcattacggctgatgaagatgatgagtcctttaacggttacttttccaagatgccatggcttgcaatcccattttctgnattnagaanacacgcaccgncctgnanaaattgnccnanntnngggggatcccccatcnggnatntctcgggaaacccgncnatttnnnnnnanagngggtttt

SEQ ID NO: 42891 - DNA, 273 bp, Glycine max
  Clone ID: 701126235H1
gctccaactccaacccagtttcacactagtttgttgctccaattcttgtagtcaaggggaacaatgaatgcactagcagccaccaacaggaactttaagttggcctctaggcttctgggattggattcaaagcttgagaaaagtttactgattccattcagggaaatcaaggttgaatgtaccatacctaaagatgatggcaccttgcaatcttatgtagggttcagggttcaacatgataatgccagaggccccatgaaaggaggaatcaga

SEQ ID NO: 42892 - DNA, 270 bp, Glycine max
  unsure (1)..(270): unsure at all n locations; Clone ID: 701126236H1
gaagacttgcaggcgctctgttacagcctgtgagttcaaaacttgtgcgaaatcgcatatncatcctgtttccaattcagatcttcttgatgtgcatgtcttgagggttttatgcagaatgatgaacattctctaaccaacccattaatgatttatttcnatttattttgcaaagggaactatttttgcaagtgaaacttgtcccctttgaggattttgtntganaaacatgcgtgcttangganggtctngaaacaaatcngtnangcc

SEQ ID NO: 42893 - DNA, 267 bp, Glycine max
  unsure (1)..(267): unsure at all n locations; Clone ID: 701126238H1
ataaacatgggaataaacacacgtacactagaaatcaccgttatctccggcgaaancctccgcgtaacggaggacgcgtacgtcgtcgttcgggcggagtccttaaactgctgcaccacgagaaccgccaaggacgacggcaccaaactcctctcgtggaacgagaagttcctcttggacatgcccatgcatgcaaggtccataaccttcgaagtgnatgtaacaggtncaagggtttgggcngctcggggtggcccaatggccgcc

SEQ ID NO: 42894 - DNA, 265 bp, Glycine max
  unsure (1)..(265): unsure at all n locations; Clone ID: 701126239H1
aaatttccaaggtaaaaagatgaatctgaagaacatgaagattccgaacgttccaggcggcggtgcgtcctctgcgctgctgaagcttgggcttcttggtggaattggtttatatgcagctgctaacagtctctacaacgttgaaggaggtcaccgagccattgttttcaaccgtctagttggtgtcaaagacaaggtctatctgaaggaacccanttnangatnccggggtttgagnggctgtggncnncncgccnccnccccc

SEQ ID NO: 42895 - DNA, 266 bp, Glycine max
  unsure (1)..(266): unsure at all n locations; Clone ID: 701126240H1
gcagaggagcagaagcctaagccttcaacatggcgagagggttgaagaaacacttgaagaggctcaatgctccaaaacactggatgcttgacaagcttggtggggcctttgcaccgaagccatcatctggaccccacaagtccagggagtgtcttccttngatcctcatcctacggaacnggctaaagtatncccaaacatatagngaattntcgccntcttgnatgcgngcccntnttnntngnggncaggntaanannaaaaac

SEQ ID NO: 42896 - DNA, 229 bp, Glycine max
  unsure (1)..(229): unsure at all n locations; Clone ID: 701126241H1
attactatcactattaatggcagttcttagttctggagaattccttggggcatttcttgttttcgttgtaatccactactggaggctcaacagacacaccccaattgctaagtggcccattcttggcatgtnacctggtgatcctcaacatgccacccatcttgatatatactcgtttgaacggagggcattcanttgaggcagctacaactganaatttncaggccag

SEQ ID NO: 42897 - DNA, 271 bp, Glycine max
  Clone ID: 701126242H1
gttaggtagcaagcataagtgtctaaccttagaaacatatctgctacatatcgtgtgcattttggaattgtgccactaaaattctattcatctatggctgcctcatcttatgctatgcaatcaatccttgcaaaccctatgatccgcatttccagcgggtctagggagaaccattttggtgttcctgcttatcacatgagaaggaatgttggcctgagagttaggtccatggctgaggaagagcaaccaagtcagcctgcgaccccagtta

SEQ ID NO: 42898 - DNA, 273 bp, Glycine max
  unsure (1)..(273): unsure at all n locations; Clone ID: 701126243H1
actcgttcctcttattagcgacggccattctcgccgttgtgtgctccgccgtgagcggttgctcgccattcggatagggcggcgctgctggcnttccggaaggcgctgagcgagccctaccttggcctcttcaactcgtggacgggctccaactgctgcctcgactggtacggcatcagctgcgacgccaccaccggccgcgtcaccgacatcaacctccgcggggagtccgaagaccccatcttcgagaaagccggtcgctccggctacatg

SEQ ID NO: 42899 - DNA, 275 bp, Glycine max
  Clone ID: 701126244H1
tggaggcttgctgtggaagcacacaacatctttggctttgagaccattcctgaagagtgcgttgaagcaacaaaggaatacatccatggcgaacaatatagatcagactccaaaacagttaaccaacaagcttacttttatgccagagacctcgaagtccatcccaaggacacatttgtgttcagtatagatggcaccgtactctctaatattccatactacaaaaaacatggatatggggtggagaaatttaactcgaccttgtatgatgaatg

SEQ ID NO: 42900 - DNA, 275 bp, Glycine max
  unsure (1)..(275): unsure at all n locations; Clone ID: 701126245H1
gacagctctagtcacaggaggcanccgaggcatagggcatgccattgttgaagagttagctgagtttggagcaactgttcatatatgtgcacgtaatcangatgatattgataaatgtttagaagagtggaaaaacaagggacttaatgtgactggttcagtatgtgatttactatgttctgaccaacgtaaaagattaatggaaattgttggctccatctttcatggaaagctcaatattctagtgaacaatgctgctacaaatataacaaaga

SEQ ID NO: 42901 - DNA, 258 bp, Glycine max
  Clone ID: 701126247H1
gttttggagggagagaaagaaaaaaggggaatttcaatggcgtcaagggtttactctgaaggcgaaggggaagagttcaaagggatcgaaggctgcggaagatcgatccgcgagcgagtgcctgaaggagtggacgacatgggcgatgcgaaaagcgaaggtcatcactcactacggtttcatcccttggtcatcgtcatcggtatgaactctgaccccaagcccccactttcccagcttctcagccccgtctgatcc

SEQ ID NO: 42902 - DNA, 269 bp, Glycine max
  unsure (1)..(269): unsure at all n locations; Clone ID: 701126248H1
aattgaaccttatggtgacttgaatactgaagcgganaggaaattgggtcaantagtctcagagaaatatggcacagagttctatatccttcaccggtaccctttggctgtaaggccattctatacaatgccttgctacgacaatcctgcatacagcaactcgtttgatgtctttattcgaggtgaggagataatttcaggagctcagcgtgttcatgtgccagaatttttggaacaacgtgcagcagcttgtggcatcgatgtcaaaa

SEQ ID NO: 42903 - DNA, 275 bp, Glycine max
  unsure (1)..(275): unsure at all n locations; Clone ID: 701126249H1
gaaaaaactgtaggtggtctttctgctttaagaaatttgggaaaatcaacaaaagacaatactattggaactgctagtaatccaattcatatggtggctagagaaggtgggaatataaaagatcagctatggcgtacatttaggttcattgtggtgtcctttttcatgatttctggtgtaggagcactcattgaagataaaggaattagtaaaggncttggnanaaatgnagnagnncnccntagngggacccnagtnnaannttgggggggagg

SEQ ID NO: 42904 - DNA, 250 bp, Glycine max
  unsure (1)..(250): unsure at all n locations; Clone ID: 701126250H1
cacatagctagttgtttaaagtgactganaaagaaagaaannaatggcaaactttccagtangttgacatggggaaacttaacaccgaagagagagcagcagccatggagattataaaagatgcctgtgagaactggggttnctttgagttggtgacccatgggtancccatnganttgngggacccngtgganggctcacaaangggcctacaagaggnctatggnnccanggtccaagaatggggccc

SEQ ID NO: 42905 - DNA, 271 bp, Glycine max
  unsure (1)..(271): unsure at all n locations; Clone ID: 701126251H1
gccagtagtcatatgcttgtctcaaagattaagccatgcatgtgtaagtatgaactaattcagactgtgaaactgcgaatggctcattaaatcagttatagtttgtttgatggtatctactactcggataaccgtagtaattctagagctaatacgtgcaacaaaccccgacttctggaagggatgcatttattagataaaaggtcaacacaggctctgcctgtngctttgntgatccanganaccgcgncggatcgnaggcctttgtgcc

SEQ ID NO: 42906 - DNA, 268 bp, Glycine max
  Clone ID: 701126253H1
cacttgcaaactagttttgttttgggaacatcatcacattacattagattggtggtaatggcagcgtcactacaagcagcagctactttcatgcaacccaccaagttgagcaggagcaacactttgcagcaaaagtctactcagtccatttccaaggcttttggtttggaacctgttggagctaaaaaggtcacatgctcccttcaggctgatcttaaggacttggctcacaagtgtgttgatgctaccaaaattgcaggattcgccc

SEQ ID NO: 42907 - DNA, 269 bp, Glycine max
  unsure (1)..(269): unsure at all n locations; Clone ID: 701126254H1
ggctaggggattgaagaagcatctcaagaggctcaatgctcctaagcattggatgcttgacaaactgggtggtgcatttgcgcccaaaccctcatctggaccacacaaatctagggagtgccttcccctcatactcatcctacgaaaccggctaaagtatgctctgacttaccgtgaagtcatcgctattctgatgcagagacntgttcttgttgatggaaanntcaggcctgacaagacttccccngcnggtnncngggatttcccnc

SEQ ID NO: 42908 - DNA, 267 bp, Glycine max
  unsure (1)..(267): unsure at all n locations; Clone ID: 701126255H1
agcgactgaactaatcattaatttgcactcgctgtttcagcttcatcacccttcttttgcatcatttatatctcttngagaaatggcacaagaaacctttctattcacatctgaatctgtaaacgagggtcaccccgacangctgtgcgaccagatctctgatgcagtacttgaggngtgcnttgaacaggaccctgaaagcagggttgcntgtganacnngccnagcnccaanngggncangttntggnananaccanaccnngng

SEQ ID NO: 42909 - DNA, 274 bp, Glycine max
  unsure (1)..(274): unsure at all n locations; Clone ID: 701126257H1
gttgccttggacacttctcaccttgttttctgagttatgttaatttgaaagaagctacgtggcatcaagaatgggttcaggtgattggtttaagacaataattagctcaagaaaatcaaaagaaggaagatcaaagaaattaaagactaagatttatacaaganaaaagtccaatggnttagcaaatggaatgannagcgnanatctagagtcagatggggtatcagttgnaaactnttgctgccaacanggatccaaacagcattccgngctt

SEQ ID NO: 42910 - DNA, 272 bp, Glycine max
  Clone ID: 701126258H1
taaaaaatcatccttatctatgccacttccacttggacttccacctcacccactttctcctgcgccatggaaacagcataggcaccggttcgtcacgattaatctttgaaacaaggagtctaaggctggatttgtacgttgtctggcatgtgtacttgttcaaggtgacatatgacctaaacaattattagaacttaatctgatcacaaggcagtttttttgagctgatctggatgggaaccggtgaagaaagcacagctaaagttcctaaa

SEQ ID NO: 42911 - DNA, 275 bp, Glycine max
  unsure (1)..(275): unsure at all n locations; Clone ID: 701126259H1
gggcggcgacggagaacnatcttctcaattttcgatcactgcattggttctgttgtcaagggttttgttcttcctgacttgcatacttgatggcttcaaagttgcagaagttgcaggccacagcatctcaagcgtctcaatttgtatgcagtcgtggaactaactactacaagcaattgctggaacagaacaagcaacacattcaggagcctcctacagtagagaaatgcaacctgttggcaaagcaattgttttacactcgccttgctagtatt

SEQ ID NO: 42912 - DNA, 209 bp, Glycine max
  unsure (1)..(209): unsure at all n locations; Clone ID: 701126260H1
aagccacgagtacggtttccaagcatcatcagaagacaaaccccatgtgggaatcattnnnnnnnnnnnnnnnnnnnnnnnnnnnctgcatgcaaattgggattcatcttctccttcggtgttgcaaagtgtcaaagaacaatgggattcacactcctcccctgaagcttgcactgttgatcaatccctccccagagccttccctcttc

SEQ ID NO: 42913 - DNA, 274 bp, Glycine max
  Clone ID: 701126261H1
ctgtactacactatgcaaactctttttcctctgcattgggacccgtgcctgctccccctgttgataaatatgactttgactggtccatgaagcaagctagaacctacagatggaatctgacagcaaatgctgctaggcctaacccacaagggtcattccattatgggaagattactcctacaaaagtaattaagttggccaattcagcacctttgatcaatggaaagctccgttatgctgttaacagtgtctcctatgttaaccctgacacccc

SEQ ID NO: 42914 - DNA, 276 bp, Glycine max
  unsure (1)..(276): unsure at all n locations; Clone ID: 701126262H1
aaacattgcaggatttgcaacttgattaccttgacctctatctgatccactggccagtgcgcatgaaaagcggatcagttggattcaagaaggaatatctcgatcaaccggacattcccagcacatggaaagcaatggaggcactctatgactcaggcaaggcangagccataggagttagcaatttctcttcaaaaaagcttcaagatctcatgaatatagcaagagtgcctcctgctgttaaccaagtggaattgcacccaggatggcagcagc

SEQ ID NO: 42915 - DNA, 278 bp, Glycine max
  Clone ID: 701126263H1
atgacgaccaggttcaagaagaacaggaagaagagaggtcacgtcagcgccggacacggccgtatcggaaagcaccgcaagcatcccggaggtcgcggtaacgccggtggcatgcatcaccaccgtatcctcttcgacaagtaccatcctggtttcttcgggaaggtaggcatgcgctacttccacaaacttcgcaacaaattctacaatccgatcatcaacatcgacaagctgtggtccctcctcccccaggaggccaaagacaaggccaccgccga

SEQ ID NO: 42916 - DNA, 276 bp, Glycine max
  unsure (1)..(276): unsure at all n locations; Clone ID: 701126264H1
caggcattggttgatgccattaaagagttacaatctcatggaaatgttatgaaactggctgaagatcaaaagaggcaaaaagaacaactccatgctaaaatcattcagcttcaaaaacaacttgatgtgaaacaagagctggagttggagattcagcaattaaaaggttcattaagtgtgttgaagcacatggaagatgacgaagatgctgaattctgaacaaggtagatcccctacaaaggtttaagagncaggagcgtcacttcagncttnggt

SEQ ID NO: 42917 - DNA, 226 bp, Glycine max
  unsure (1)..(226): unsure at all n locations; Clone ID: 701126265H1
ctaagttatcctcataaatacactctaattaggtggcaagataagnngtctaaccttagtaacattgccacatattgtgttcattttggaattgtgccactaaaattctattcaattcatctatggctgcctcttcttatgctatgcaatcaatccggcaaaccctttgatnngaatnnccagcgggtctagggtgaancatntggggttcggctngnaagngggg

SEQ ID NO: 42918 - DNA, 145 bp, Glycine max
  Clone ID: 701126266H1
tcaaccacaccaagagaagcaaccaacaagggaaaaaatactacatatcatacatgtctccaattccaaagcagtttataggtgatatcagaagcaagccacttttttcacttgatcttgaaacttgagagaggaccaaacagtt

SEQ ID NO: 42919 - DNA, 263 bp, Glycine max
  unsure (1)..(263): unsure at all n locations; Clone ID: 701126267H1
tcagaggctccccctaacttctggggccacaccccggaagaagaatactacaactcccaaggcgttcgcaacaccaagtcccacttcgaaacccccaacggcaaaatcttcacccagtccttcctncctctcaacctccaaccccaccaagtcaaagccaccgtctttatgacccacggctacggctccgacaccggctggctcttccagaaaatctgcatcaattcgccacctggggctacgccgtcttcgccgcngacctt

SEQ ID NO: 42920 - DNA, 188 bp, Glycine max
  unsure (1)..(188): unsure at all n locations; Clone ID: 701126268H1
ctccgacacggcctcgaccagcgcngcccgtggtcggagctcgggnaccgctccgcgttctcgaagcccgagtnttctccgaagccaccctccgcgtcnnngaatntctattcgcgcatantaagcgcgttatattgatttttacanctctttacntgggtctgcntgatttattcgcgaaacatgnt

SEQ ID NO: 42921 - DNA, 142 bp, Glycine max
  Clone ID: 701126269H1
ttaaataggctccctcggaagccctccaaatcgggggaaagtcgtgaaggaggggcgatattgactccctcttcaactccttcgacaagtgcaaggagcagcgatgcagcaggctacagccatggaaatgcaactgcttcac

SEQ ID NO: 42922 - DNA, 263 bp, Glycine max
  unsure (1)..(263): unsure at all n locations; Clone ID: 701126270H1
gcagggatgtgtcgttgggagcgaacaagttccccgagagacagccaattgggacggcggcgcagagccaagacgacggcaaggactaccaggagccggcgccggcgccgctggttgacccgacggagtttacgtcatggtcgttttacagagcagggatagcagagtttgtggccattttctgtttctctacatcactgtcttaaccgttatgggactcgccggggctattctaagtgtatncgtnggaananaancntncc

SEQ ID NO: 42923 - DNA, 54 bp, Glycine max
  Clone ID: 701126271H1
gtttgaaccccccttccttttctgctttgaattaaagattcgtgttttatatat

SEQ ID NO: 42924 - DNA, 242 bp, Glycine max
  unsure (1)..(242): unsure at all n locations; Clone ID: 701126272H1
tgcatttgtatgttgggtgttcttactgtctaacacaaagaangatacagttcactcaacgantgcctttgggttccgaactccatatggggaaggagcgttgttgtttccgaggtctcgatcatttacatggacccacttttcattccatttgtgggaatttgatgatctataaaccgtccctaacgaatgatcgcctcagtttgagcngatgaatcattcgtgccgactgttgncaaaaa

SEQ ID NO: 42925 - DNA, 270 bp, Glycine max
  unsure (1)..(270): unsure at all n locations; Clone ID: 701126273H1
ttatagttcctgcataagcttgcatttttggaaaattgtagggttcagctcttaaacaagaggatgcctgtgctttgggtgctcaattttctactcnagttttcgaaggggttttgtggaagaatcaatggtggaccggtggtgatgagtttaacacaccagtnataanaatnaatcagtgatnagccaacgggaaanntncccggcatttcgggcanaggggncnaaaaggtctgatancccccanggtttcnagganngcgaatggng

SEQ ID NO: 42926 - DNA, 245 bp, Glycine max
  unsure (1)..(245): unsure at all n locations; Clone ID: 701126274H1
ggaagctctagcttgggtagcgaanntacaatggcgagaggantaaagaagcatctgaagaaccttaatgccccaaagcattggatgcttgacaaactgggtggtgcatttgctcctaanccctcatctggaccacacaaatcgagggaatgcctgccactcatactcattttgcgaaaccggctgaagtctgctctaacataccgtgaagtcattgcnatnctgatgnagcgacatgtcntgtt

SEQ ID NO: 42927 - DNA, 273 bp, Glycine max
  Clone ID: 701126276H1
cttgactcgttactgactcactcaatggctgaccgagttcaccccagccactcgccttccgtttccgcggattcacaaccgccatcgcctcaagactcctccgtcgttccgaaaccgccgtcgccaccgtcaccggagaagccagtgcctccgcctggaacctacgtcatcaagatccccaaggaccaagtctaccgcgtccctccgccggagaacgctcgccgctacgaccaatacgctcgccgtaaacaccgccggagccgatgctgctgc

SEQ ID NO: 42928 - DNA, 251 bp, Glycine max
  unsure (1)..(251): unsure at all n locations; Clone ID: 701126279H1
tttccccttccttcaccattcattannttttataataccattcttttttctctttatctcantcatcaatacttcatcgttttcgttaagggatggcttctgccggcgatgttttcaggcagggtttgccggaagtttgtgctgccgggaagttacacgtgcttgctgttgatgacagccacgtggaccgcaaggtcattgaacggttgctcaaaatctcgtcttgcaaagtgacggtggtggagagtgga

SEQ ID NO: 42929 - DNA, 277 bp, Glycine max
  Clone ID: 701126280H1
gtttgcttctcaacccctttcttaaatcccagaaggcagaaacatcacacacagagcatcgtcatcaattcatcatatcatagctaaaaaaaaacaggagagagaaagtgaaaaaataccttttttttagagagagaaagagaaggtagaactgtgaatgtgcaccacagctttttgatcctgttcctaaaatagctaggtgataagttttggtgtactgaatattggggtgtcaaagtttctgtgaaagattctgaaggcaatcgaagtaaatgcc

SEQ ID NO: 42930 - DNA, 145 bp, Glycine max
  unsure (1)..(145): unsure at all n locations; Clone ID: 701126281H1
cctttctttcactttggttgtctcttctacaccactttcccttnaccttccgttctccactcactactactaacataaattaaaaacacgcnatgaanaacaacccaacaacaatcatcggntccactacccacggatcagaaga

SEQ ID NO: 42931 - DNA, 261 bp, Glycine max
  unsure (1)..(261): unsure at all n locations; Clone ID: 701126282H1
gatgcctcccgtcgctcctcgatccggcgatgncatattcgccaacgtcgaaancgtcaatgcggagctgtttactttgacgtatggcgcaattgtgcgtcaattgctcacggatctggaagaggttgaggaggntaacgagcagcttgatcaaatgggttacaatattggaatccgnttgattanntgagtttttagcnaattctaatgnntcaagatgcaacgatttcagagagatactgatgtaattgcanaggnggt

SEQ ID NO: 42932 - DNA, 261 bp, Glycine max
  unsure (1)..(261): unsure at all n locations; Clone ID: 701126283H1
ggcatttgcacaactattgcganctcnacatgatgatgnccaaatgataattagagaacgtnttccggttcctagattggtagtgngtgaccnacatggttcccaggctagnttcttgttagcaaaactgaatccttcagcaacgtataacaatgcncatgagatggctgctngttcagatgnaatcnntacngatgatgtgagcttcagtttctnngacctntnnaagggtggnggcccncnctggngggcagaaaanat

SEQ ID NO: 42933 - DNA, 266 bp, Glycine max
  unsure (1)..(266): unsure at all n locations; Clone ID: 701126284H1
ccataggtatctcgacctcttccacatacttatttacaaggtacataatgatggtagatcaatcatgcctactcatggaaggaaggctaccattggggacttttatgctgttatattaccatctctccaacggcttcatggtagtttggagaagttggaggttgttaaagaagaaggccagtcangcataganggtcccannttatggcaanaaggtcnttgaagagggngngaacctannggcccattttgntttncaaanannc

SEQ ID NO: 42934 - DNA, 264 bp, Glycine max
  unsure (1)..(264): unsure at all n locations; Clone ID: 701126285H1
gcgctaagtcgctccgtggaagacgtattcgaggatttcaagggccgaagagccggcatcatcaaagctcttaccaccgatgttgaagatttctacagccaatgtgatcctgagaaggagaatttgtgcttatatggatcacctaatgagcaatgggaagtaaatttacctgttgaaaaagttccncnaaatttctgacccttccaggggcnaaattnggcggggnnnnncagaagaaaacagctggnntncttgtggtggacc

SEQ ID NO: 42935 - DNA, 272 bp, Glycine max
  unsure (1)..(272): unsure at all n locations; Clone ID: 701126287H1
ccgccatgctccgcccgcngcacccgacgccgtttttcgcatcgtgtgtccggccgcaaagacggaggacgtagcgactatcggcggcgacggagctaagattctggtggaggacttggncagcgcggagncagcgcgtggttgttatcgtggccgaggngtccgctnaanaggttaccnttgntanngggttttnaaaannangntgnnnnaanaaacctaagntttccagngtgtcntaaaaatggnngcccccccaacnatnngggtnc

SEQ ID NO: 42936 - DNA, 172 bp, Glycine max
  unsure (1)..(172): unsure at all n locations; Clone ID: 701126288H1
ggaagtggtagaagggttcaagttcgaacagaggcacgggaaagagcgcgtganagtggcgcgcgtgtggaagacgaggcaggggcagcacttcgttgtggagtggcgcgtgggcatcactctcttctcagactgcgtcaactncgtatctccgctatgacaactctgacat

SEQ ID NO: 42937 - DNA, 258 bp, Glycine max
  Clone ID: 701126289H1
cttgtgatttcagcattgaagctgctttctacctttggtggacctgaatgcctccatggcctagcaggcgaactgggaaagaaagacgtttctttgcagtcccggaggaccctttttctggtgttccgtattctgctgctaatggactttgcatccgggacttggctttcgcagatttagttggcaccatgtaacttggaatagatggagagcttgcaaggctttcgtcatctccaactatcgatccagcaaggagtg

SEQ ID NO: 42938 - DNA, 271 bp, Glycine max
  unsure (1)..(271): unsure at all n locations; Clone ID: 701126290H1
ctcgagccctagcgagagaattctcaagccatcaaagtggttctcanacaaaactctaagaattagtcttcatccgccgaagatcaagatcctcctccaataactcattatctagtaattctccaagtccaagatcccccatgtcaaacaatggagagatcactgggctaatggaggcttttcgtcactttgataatgatggagatgggaaaatctcggcctatgagctaaggtcatattttgggtccattggggatcacatgtctcatga

SEQ ID NO: 42939 - DNA, 269 bp, Glycine max
  unsure (1)..(269): unsure at all n locations; Clone ID: 701126291H1
tattagtggtgggtttgggtttcaagagaggagacatgcctaacttgaacccaacacttcaagtacttgcttcttcatacccttaccagatcccaaaggtcttgatctaattttaagtgattcttctgatgnctatattgaaggttacatgaagccatttctctttttaaatcttcccaacaccgagttcaattctcacaagttgattgtaatcactcaatggctcattcttcttatccctacggcgatccaatttttgcttatggacc

SEQ ID NO: 42940 - DNA, 255 bp, Glycine max
  unsure (1)..(255): unsure at all n locations; Clone ID: 701126292H1
gttttatagtgctcggagaatccccantgattgcaacaccaanncaactcgaagaacaccgtacnccgttcgccgccgtttcctgaagccgagtaaaattttctccgcgctactctccgagttcaacattgctcagaagaaaccaccatgtctccgaaactgctattattggcgaattagggtntgtaaannaggttttaatggcgnacgacactggttccggncgcgtcgtcacagagaaaggnntggcnangc

SEQ ID NO: 42941 - DNA, 274 bp, Glycine max
  unsure (1)..(274): unsure at all n locations; Clone ID: 701126293H1
gtacggtgggagaagggaaggtgagtantaatggtcatgnnngntgnaaatcanggcnaggactatgctnccccactggaagccatttctggtcccagagagtctctcatttatgtaacctctgtctacacagggaccggaatagagaagccanactatttggcgacagtggatnnggatccaaactctccaacttattccanannnanncataggcttcctgttcctnatttaggtgacgaattgcatcacacaggttggaattcatgccngc

SEQ ID NO: 42942 - DNA, 269 bp, Glycine max
  unsure (1)..(269): unsure at all n locations; Clone ID: 701126294H1
cnaaaaagtagtggcttgtgttgtgtgactgagggccaaaggcaaaacatggaggtggatcagatgcagagagagtgctggactacaccaaatccttattcttggagggcttcttggatggtcaatttcttcaacttcagcagctacaggatgagaacaacccggactttgtagttgaagtggtctctctcttctttgaagattctgagagacttctcaatgaccttaccttgctctaaatcagaaaagtatgacttcaaaaaagttgc

SEQ ID NO: 42943 - DNA, 195 bp, Glycine max
  Clone ID: 701126295H1
ttgtgaagtctcgccctgagtaatattttttgttgattgattttgagttaattggtgcaccttagtcatgggatatttttccataaatgatgataatgtttgaggtaaaactcttgcagtttaatcagtgtttggatgtttaaacatgtgaatgtttacttgctaaataaaatgttacttaagattgactaatgc

SEQ ID NO: 42944 - DNA, 274 bp, Glycine max
  unsure (1)..(274): unsure at all n locations; Clone ID: 701126296H1
gtgaattggaacattcttcactcttgaggggattaagagacaagatatggcaattggtttcatggaggtgcagcttgtcaaagcaaaaggnctgcataacgctgatatctttggtgaaatggacccatatgttctgatacagtacaatgaccaagagcagaggagtagtgtcgctattggtcagggcacaaacccagtatggaatgagaatttatgttcaaagttgataccttggatcaggtgataaccacaggcnctcttcaaaatngtggnc

SEQ ID NO: 42945 - DNA, 233 bp, Glycine max
  Clone ID: 701126301H1
gcttaagcggaggatagcccttgcagcggttgagaagatttgtctgagtgaactaagtgataactttcttgcagttataattccgacagagtatgatttactatagctagcgctagaagaatgaaatcgtcgctgccttgttgaagcttatgaactcgaggtggtttcttccaataggtttgagtataatgcagcatctgacttggttaaggaaattgaattgagagctgaag

SEQ ID NO: 42946 - DNA, 235 bp, Glycine max
  Clone ID: 701126303H1
gtaattggaatgagtacaatctaaatcccttaacgaggatccattggagggcaagtctggtgccagcagccgcggtaattccagctccaatagcgtatatttaagttgttgcagttaaaaagctcgtagttggaccttgggttgggtcgatcggtccgcctccggtgtgcaccggtcggctcgtcccttctgccggcgatgcgctcctgtccttaactggccgggtcgtgcctcc

SEQ ID NO: 42947 - DNA, 233 bp, Glycine max
  unsure (1)..(233): unsure at all n locations; Clone ID: 701126304H1
ggctaatactagagtatgcaaaatacggcaganattactttggttaattctcaaacgactttttttttaattccaatattagttttatattactgtaattgtttgtgtgggggaggttttatttgttctgtacttttgttttaactttttattattattactgtgtttttntntcttcttctgattttcctataataagagaaatgttgggaatttatgaggctgtggagctt

SEQ ID NO: 42948 - DNA, 234 bp, Glycine max
  Clone ID: 701126306H1
gtgagagcggtgtggtgcttagtgctcacaccaattaccaatggcagtggagaagacggagcaagaactccgcaacgagatcgatgagcttcttcgccaacagcgcgagatttcggaaaggcttcgagatcctcgaggtcttcgcagaggtgccttgccgggtcctcctgctctccgcactaacggtgttcgccaacgaccctttattcgccctggagacaggaacgattctga

SEQ ID NO: 42949 - DNA, 234 bp, Glycine max
  unsure (1)..(234): unsure at all n locations; Clone ID: 701126307H1
ttccatgagcgcgagcaacaaatggagagcaatgtcgcaccaccagcatcagcctctgtgcacgcgcacgcaccagatcggcgccctcctcctcgtggcgaccaccttcttcttcacgagaatgctttccacctccacgctctccaccagcgtcgtccacgtgtcgcaaccccggttccagtgggggcagtcccagctatccctcaagatctacgtnnnnnaagaagacgaaat

SEQ ID NO: 42950 - DNA, 216 bp, Glycine max
  unsure (1)..(216): unsure at all n locations; Clone ID: 701126309H1
cttaaagagcatgttatcaagccantcattcctgagaagtaccctgggatgagaagaccatcnntccaccttaacccttctggccgttttgtcattggtggccctcatggtgatgctggtctcactggaagaaagatcatcattgatacctatggtgggtggggtgctcatggtggaggtgccttttcagggaaggaccctaccaaggttgacaga

SEQ ID NO: 42951 - DNA, 233 bp, Glycine max
  Clone ID: 701126310H1
gttttacaccctccctacccttctggggatttaaaatttcaatcacaaaatcccagagaatctgactgtcaaacttctaattcaagccagaaaacaacttctgtaggacagcaaatgaatatggtatcctacccaactcgaccactattgaaagtattcatgtatgacttgcctcctgaatttcacttcgggttattgggttggaagagaagtgtgaatcaaacatggcctga

SEQ ID NO: 42952 - DNA, 234 bp, Glycine max
  Clone ID: 701126312H1
acgcatcttaagcgcttgaagaatgaaagtctcaagggtgtatggctttcaaagagatcaattcatgaagtttcataggaaaactagattgacctcttcagtgacacttggtagtgtccaaagaagggcatcacaagggtcattagggtgtttccctccatcatgcattttcaggcaagtgttttacaagttgaagagtcgattgaagcaagctttggtttggcaaaggagtag

SEQ ID NO: 42953 - DNA, 235 bp, Glycine max
  unsure (1)..(235): unsure at all n locations; Clone ID: 701126313H1
tctcaccataccatgttaaccnctatcctcagaagaacctgttccactctctcaaggcgcggtttccccgctgccttaatctccgcctccaccgccggaaaccacttccggccaccctccgcggcctttatttccagaaccttccactccaacactggccncttgaatttccgctcctcttcatgtcaccgcgcagaatacgccgtcgacgatttcccttacgaagaaggctcca

SEQ ID NO: 42954 - DNA, 230 bp, Glycine max
  unsure (1)..(230): unsure at all n locations; Clone ID: 701126314H1
gctgcttgtgtactataaccaaattggagcaacacctttttgtatctgatcctagaatcacaagcctagctacccattttctaccttctcatgatcttgtaagttaaagctttcttctttttgtctttttcttgatacccttttccacacancntangannnnngngnaaaanaaaaaggatttgggggntttagtntcantggggngaatctgaaaannggntttngtt

SEQ ID NO: 42955 - DNA, 238 bp, Glycine max
  unsure (1)..(238): unsure at all n locations; Clone ID: 701126315H1
gaatggcgcagaaacttggagttccatttaagttatcatgcaaaccctctcacattcacgctcttaaaccctttcactctctccctccccttcgcaccttcaccaccaaaccttctcttaatgccaaatccnnnnnnnnnnnnnnnnnnttattaacgcttctncgtnnccaccgcactcttgcnccctgctgcnactncaacanatcagatatnatgtgacanttggngcttgggaa

SEQ ID NO: 42956 - DNA, 236 bp, Glycine max
  unsure (1)..(236): unsure at all n locations; Clone ID: 701126316H1
agatcttgtagcaatggcgagcgctcccactccacgcgaagagttcgtgtacatggcgaantggcggagaggccgagcgctacgaggagatggtggagttcatggagaaggtctccgcctccgccgagagcgaggagctgaccgtggaggagcgtaacctcctctccgtcgcctacaagaacgtgatcggcgctcgccgcgcctcctggcgcatcatctcctcaatcgagcagaag

SEQ ID NO: 42957 - DNA, 240 bp, Glycine max
  unsure (1)..(240): unsure at all n locations; Clone ID: 701126317H1
ctaagacgnggaaganaattgatgaagagattgaagcaactgncatgcctgaagattatcgaanacaggaangtttggatactatgtaatgactgcaatgacacaacagaagtttacttccacattcttggccaaaaatgtggtcactgcagatcatataatactcgtgcagttgcgcctccagttcttccccaatgaccagattcttgggttcaagaagggaaaactgtcagcagnaaa

SEQ ID NO: 42958 - DNA, 230 bp, Glycine max
  unsure (1)..(230): unsure at all n locations; Clone ID: 701126318H1
ctctctgtttggtttggcctcttgctgtaagaagccagccacactattacgcttctgtggaaccatcgatcccactcaatgggccttgcaagttccacatcggttgagcntgtgtcaggtggctagtgttatcctaattattcttgtgacatactagtttgtatgatcatattttctcggattgtttaggaggtctagtttaattgacttgaccaggatggatgaattat

SEQ ID NO: 42959 - DNA, 233 bp, Glycine max
  Clone ID: 701126319H1
gttgaggagttgaggaggttaaagaagaggagggctactaaaaagaggattttgaaagagaatgaaccgaaacccgatccttattggttgagaacgttttttagttttgctcctgaggaggctgctaaactacctgattatggccattttgggattttgagtcctttgcttgctaatgtttgtcttaatgagttggatcactggatggaggaaaagattgttgagtttttcag

SEQ ID NO: 42960 - DNA, 212 bp, Glycine max
  unsure (1)..(212): unsure at all n locations; Clone ID: 701126320H1
aaagtgtcaattgggtgtatgcaatgttcatacttcatacntgcatatatcattcttcaacgttgtttggacccttagccttgccttacactttcttctttttaatttttggacttcacaggaggaacaagagtgcatattgaagagcaaggaagaaagtggagaagataagggtctaaattgggaagatgcaaaaaagatgccaataactt

SEQ ID NO: 42961 - DNA, 234 bp, Glycine max
  Clone ID: 701126321H1
cccaaagcgcagaacacaacacacaacaataaaagaaacttgtaaacaacaagaacaacggaacatagatacacttaagcatgcaaaggatcaaaacctcagaacgcactttgatcttcccttcccaccctccttttctccaagaccaccccttccctctctcccacctcgacactgatcccaacctccaccttaccttccgctacctccgcgcgtacacctcaacaacaacaa

SEQ ID NO: 42962 - DNA, 231 bp, Glycine max
  unsure (1)..(231): unsure at all n locations; Clone ID: 701126322H1
tccgatttcaacgaagaggagccgaaacccgctcactcttcaccaccgcaaccccaannnnnnnnnnnnnnnnnnnnnntcagtgctacttttgaccggtcaaatcccatcgctttcctggagagagtcttcgaattcgtctccgaacagagcgactttctggcgacgcagagcgccgagaaggagatagtgtcgctggtgcacgccgccgggaagaagaagagagagctt

SEQ ID NO: 42963 - DNA, 232 bp, Glycine max
  Clone ID: 701126323H1
cttccttacaatcaaaaccaacaacaactatggcaagttatcaaaagcactacgatgatcagggtcgcaaggttgacgagtatggcaacgttgagaagcaaaccgacgaatacggcaaccctgttcatgctgctagtgtcacctatgtagccaccagaactgctgctggtggttacagtgatgacattaataagcaacatgataccaccaatgcctacggcgtagacactgg

SEQ ID NO: 42964 - DNA, 233 bp, Glycine max
  unsure (1)..(233): unsure at all n locations; Clone ID: 701126324H1
gcaagctggttaccagcttgacaaggggaactgttcgctcacctttagcacagtgccttttgatccgttacacaagtncaggctattcatgaatcaggcaatacacagtcaggggaacgccccttctatgattatcttgagagttgccttcgccacaagtcagacatggtgatttttgaagctgcnagggcaataacagagctcaatggcgtaacaagccgagaattaactcc

SEQ ID NO: 42965 - DNA, 233 bp, Glycine max
  Clone ID: 701126325H1
aaatggcacctgcaacactgtctctgtctctcctcctcctgttctcactcagcatcgccgtaaccgttagattcgagcgactacgactacgattgtgtgtacactgcatacgttagaaccggttcggtgttgaagggcggaacggactctaagatcgggctgaagctgtacgacaagtacggctactacatctacattaaaaacctcgaagcatggggcggcttgatgggcaa

SEQ ID NO: 42966 - DNA, 231 bp, Glycine max
  Clone ID: 701126326H1
gtgagactgagggctcacgggaacaaaccacccaacaagtccaagtccgaggcgaagaagacaacctggattttgtcatccccaccgtgccgttgatccctacagtttcggaagtttgtggggttaaacaaatggatcacataaaatcactttttatttttatattttaaattttctggcaccactcaaagattcagatagcggaaaatctttcggatttgaggaccatgt

SEQ ID NO: 42967 - DNA, 147 bp, Glycine max
  Clone ID: 701126327H1
cggcggcggcggctatacatccgtcgcaaccgccgcagtctcagccgcaacccgaagttcctcgccggagctccgatgtggagaccgataaggatatgtcagctactgtcattgaggggaatgatgctgtcactggccacataatct

SEQ ID NO: 42968 - DNA, 231 bp, Glycine max
  Clone ID: 701126328H1
attggtgtttttaggccttggttttgctttggggctttcattaatggtcttatttatttttaataaattggccccttttttcttcttctgatattcaggtggaagtggtgctcttggtgcagggctcagtaaattcagcactgctgctgcaattgaagaaccaatcaaaccaccagttaaagtagaacacacccagctcttaatcgatggaaaattcgttgatgctgctac

SEQ ID NO: 42969 - DNA, 223 bp, Glycine max
  unsure (1)..(223): unsure at all n locations; Clone ID: 701126329H1
attggtttttcttcttccatttctcttcctttctaagcttttttcgattacccatttggagattctgtcctaatggctcttgctccttccaaagtttcctccttttccgggttttctcccaaacccagtgttggggatgctctgaaaaacccaacttgctctgtttctctgagctttgcgaatgtgaaacttggaagcagannnnntagggtttgtgcctcaa

SEQ ID NO: 42970 - DNA, 236 bp, Glycine max
  Clone ID: 701126330H1
aagaaacttaacaatctcaaacaagaactgacagggaaggttcagacactcacttcaagatgttgcaaggttacaagcagacaatcaacaaattcctatgatgagggctaagattgatggcctgcaccaagagctaatgcatgccagaaccatggtggattacgaaaagaaggcaaacatggagttcatggaacagaggcagtcaatggagaaaaatttggtttccatggcccggg

SEQ ID NO: 42971 - DNA, 234 bp, Glycine max
  Clone ID: 701126331H1
aatactattaatattcattcttcttcagttcttgtttcaccaaaagagaaggaggggatgaaaatggtgctcaacatggtttctgagaacgccgttatagtgattgcgagaagagggtgttgcatgagccacgtggtgaagcgtttgcttcttggtcttggtgttaaccctgcggtttatgaggtagaggagaaagatgaagagggtgttgccacgcaactggaagcaacaatt

SEQ ID NO: 42972 - DNA, 243 bp, Glycine max
  unsure (1)..(243): unsure at all n locations; Clone ID: 701126333H1
ctcctctcttctacgatggccatggacagtgtttatgcttcgtctttaactagcaatttatatttatagatatattcctcccctcttcttcttcattttcaaccacccgcgnccatttctacctcgcagtcgataggctccagttcaaaatgcnaacaagtgattgaactggtgggatcctggtggctcgacgtccatgnttcctcatcgtggtctgctgcagcaacgcgcaacgacctcgat

SEQ ID NO: 42973 - DNA, 233 bp, Glycine max
  Clone ID: 701126334H1
gatatctttggctaaaagattgaatattgtgttattccttctagtagtcaaggggaacaatgaatgcactagcagccaccaacaggaactttaagttggcctctaggcttctgggattggattcaaagcttgagaaaagtttactgattccattcagggaaatcaaggttgaatgtaccatacctaaagatgatggcaccttgcaatcttatgtagggttcagggttcaacat

SEQ ID NO: 42974 - DNA, 211 bp, Glycine max
  unsure (1)..(211): unsure at all n locations; Clone ID: 701126335H1
tctgagtcacaaaatattgtttntgtacaaacattaacaccatggcagatgtcctgagtgaagaacagattggtgagatcaaagaagcctttggcttgtttgacaaagatggagatgggtgcattactgtggaagaattggccactgttattcggtcattggatcagaaccccacagaagaagagctccaagacatgataaacgaggtcga

SEQ ID NO: 42975 - DNA, 233 bp, Glycine max
  unsure (1)..(233): unsure at all n locations; Clone ID: 701126336H1
caaccaccaaattaaaagatctaccatggcaaacaagtaccataagcttcgctncaataagtttgccttctagatctcatcctagcaccgttagagtagaggaggagctgagaaagatcaaaacttgggaaggaacatccacaatatccacatcaaagtctattcacacaggcctttcattgcttgaagatttgtacatttgcttggatgatcttctcaacatggcatccacc

SEQ ID NO: 42976 - DNA, 223 bp, Glycine max
  Clone ID: 701126337H1
ctcatatactgattcagttctatacataaccatcgagatttactatcaaaccagaaattctcaaaatctcttcacctctgtgatgaccatggaatacagaaccttagaactcaacatcatatccgcaaaggacatcaagaacgttaacctcttctccaagatggacgtatacgccgtcgttacgctctccggcgaccctctccaccctcagggcgccaccacc

SEQ ID NO: 42977 - DNA, 232 bp, Glycine max
  unsure (1)..(232): unsure at all n locations; Clone ID: 701126338H1
ataaacatgggaataaacacacgtacactagaaatcaccgttatctccggcgaaanncctccgcgtaacggangacgcgtacgtcgtcgttcgggcggagtccttaaactgctgcaccacgagaaccgccaaggacgacggcaccaaactcctctcgtggaacgagaagttcctcttggacatgcccatgcatgcaaggtccataaccttcgaagtgcaatgtaacaggttc

SEQ ID NO: 42978 - DNA, 229 bp, Glycine max
  Clone ID: 701126340H1
gcgaaaccgacggtgaagattttgtttgaaggcacaaagttggggattcagccatctcctgtggtggcagcgtttagctctagaggacccaactcgatcaccccgcagatccttaagccagatcttatcgcgccaggtgtcaacatcctagccgggtggtccaaggcggtgggacccaccgggttacccgttgataacaggcgcgtggatttcaacatcatttctggca

SEQ ID NO: 42979 - DNA, 230 bp, Glycine max
  Clone ID: 701126341H1
gttttgaagaggaagcgacccgctaggttggacatacccgtttcctctctcacctttgcggttccgcccacgccctccgcggcggcgcgtgacttggtcgaggctgaggaagatgggtttggggtgtactgcaagagaggcaggagggagtacatggaggatcgttacaccgctgggaataatcttcgcggagaacacaaactggctttttttggcatatttgatgggca

SEQ ID NO: 42980 - DNA, 231 bp, Glycine max
  Clone ID: 701126342H1
caaaagatggggttcactcccacaagttactgcaacatgctttctcataaatagcacctctggttgtgctatggtgttggaagctactaaagtgggtgtggctgaggccaaagagattggagagagcattaagggcacagggccttcaggggaatccctacagcctcttgattggggacactaaggaaatgtacacagtgctcatgcaagctgccagatctcaacaatcta

SEQ ID NO: 42981 - DNA, 230 bp, Glycine max
  unsure (1)..(230): unsure at all n locations; Clone ID: 701126343H1
tgtcggtcacacacagcgatngatagataatagagaagagaagcattcataggcgccaattgtgagtgagagagaagtttctgttttttctacttttccatttttttnnnnnnnnnnnnnnnnnnnnnntctgattcttcaccataactgtcattgctttgcttctctcactcagcacaagttgacaagaagggcattgccatttcaatcccatacaaaaagcacacacc

SEQ ID NO: 42982 - DNA, 231 bp, Glycine max
  Clone ID: 701126344H1
aaaggcccatcctgatgctcaacctttcaaaaaaagagtcattccgtattatgatgatttgtgcataatttatggccatgcagttgctgatgggagatacagcctttcgtgttttgatgtagattttgaatacgaagaaaaagatttggatgacaagactatgactagtaaaggagtggatgatcaaactcccccagcagttgttaatcaaggtagaattgactggtctcc

SEQ ID NO: 42983 - DNA, 232 bp, Glycine max
  Clone ID: 701126346H1
ggcgcggcacccacacacacagttcgtcggaatgggaagggtgattcgcgctcagcgtaagggtgctgggtcggtgttcaagtctcacactcaccaccgcaagggtccggcgaggttccgcagcctcgacttcggcgagcgcaacggctacctcaaggtcgtcgtcaccgacatcatccacgaccccggtcgcggcgcccctctcgccaaggtggcattccgccaccccttc

SEQ ID NO: 42984 - DNA, 238 bp, Glycine max
  Clone ID: 701126347H1
ctcccccaatcctttctctcccgaaaccgtacggttacgtaaccgtaggcgatattcagaattcacgggcacacacacagtcccccactctctacgatgaccggtcaacgcatctcctacggcaaacgctcccactcgcactccgattccgacgccggctccaaaaacaagcgccgcaaccccgcagctgatgactcctcctcctccctcatcaccgccgacgacaccgtcttccgct

SEQ ID NO: 42985 - DNA, 234 bp, Glycine max
  Clone ID: 701126348H1
caagaatccccttgatcttctccctccaagtccgatgatactggatgagtggaaaagactctactcaaacactaaaaccaacttcagggaggttgctatcaaaggattttgggacatgtatgatcccgagggatactctctctggttttgtgattacaaatacaacgacgagaatactgtttcttttgtgacattgaacaaggttggtggatttcttcagcggatggatttggc

SEQ ID NO: 42986 - DNA, 234 bp, Glycine max
  Clone ID: 701126350H1
gggaatcgagtttgtatttccaggaacaagtataccagagtggttcgatcagcaaagcagtggacattccaatttctttctggtttcgtaataaatttccagccaaacttctttgtcttcatattgcaccgtctactgggtcttttatccggtatccagaggtgttcatcaatggaaaatttcaagaatttgagtcccatgagacggacgatacagaaagtatgttgggattgg

SEQ ID NO: 42987 - DNA, 232 bp, Glycine max
  Clone ID: 701126351H1
actttacccaatcctaacactttcttctctctttttccttcttcctcgcatcaatggagttggacgggcgttctcctcggcatgtgcaaccctctcctcgacatctctgccgtcgtcgacgacgctttcttggaaaaatacggtatcaagttgaacgatgcgattctcgccgaggataaacacaaacctatgtatgaagaattggctaacaatcctaatgtggagtacattg

SEQ ID NO: 42988 - DNA, 229 bp, Glycine max
  Clone ID: 701126352H1
gtgcacttgaggacccctacaattatttgcaatcttggaatttcaataacaataccgaagggtatatatgcaagtttattggggttgagtgttggcaccctgatgagaacaaggtcttgaatctcaaactttccaacatgggactcaagggcccgttccctcgcggcattcagaattgcacaagcatgacaggattagatttttcgcttaacagactctctaaaaccat

SEQ ID NO: 42989 - DNA, 229 bp, Glycine max
  Clone ID: 701126353H1
cttcttttgttgttctgtgtttgtgtttgtttttttctctcacctgaaaatgtcttgctgcggtggtaactgtggttgcggaagctcctgcaagtgcggcaacggctgcggaggctgcaagatgtacccagacttgagctacactgagtcaaccaccaccgagaccttggtcatgggagtggcacctgttaaggctcaatttgagggtgctgaaatgggtgtgcccgct

SEQ ID NO: 42990 - DNA, 227 bp, Glycine max
  Clone ID: 701126354H1
gctggctgttgcattaacacttatcggaggtgtgcaacatgttgatgcttctggaactagggtaagaggggagtcccacttactcttggttggtgatcctggcaccggaaaatctcagtttcttaaatttgctgcaaaattgagcaaccgttctgttattaccactgggttgggaagcacaagtgcaggattgactgttactgcagtgaaggatggaggggaatgga

SEQ ID NO: 42991 - DNA, 229 bp, Glycine max
  Clone ID: 701126355H1
catagtttcacttcggccttatccagtttagggtttcggttctctaccctatctttcacgtatcgaaaccttaaatttacgatcaggtctgagcaatctggttggtagaacctttggtcttagtgagtcaagttttatgtctgaattagacgatcaaattcctactggccttcgatccttttgctgatgcaaatgctgatgactcgggtgctgggtcaaaggagtatgt

SEQ ID NO: 42992 - DNA, 229 bp, Glycine max
  Clone ID: 701126356H1
gtggcatccaaactaacatgtacatcatgatactcttctctgttcatttccatgcttcacccttcatccttcatttttcacctactaccacaaggtccttaaaccccactcccattccataaagcaagccacttcattgaactccaagtttctctctatctttatccatgcttgttccgaatccatggattgatttgacaaatgtcttcaactacaagatactcacccc

SEQ ID NO: 42993 - DNA, 229 bp, Glycine max
  Clone ID: 701126357H1
gtccccgcctaatcatctgaggccgtagtcagcctccatctttcagattcgtaagtaactcagtgagtgctttccttttcccatgtctttcttgattggtaaacccaaccagcgatttacaacaaacaagtctttcttcattgcttaaagtaagtaaagaaagcggatcacaaagactgttcatatatatatgaaatatatctgtgttgggaaggattccaaggatgta

SEQ ID NO: 42994 - DNA, 230 bp, Glycine max
  Clone ID: 701126358H1
ctctcttctaccacaaaccactcaatcctaagaaatccatttgaaatttcaagtctcgttctgggctaagtccatgttcattgtttactatacctcaccactccaaggttctcgtaattttcttcagcagaaaacgaaactattgcttccagagaagagcatcatctacgaccattttggcaatattataaaacaagacaaaaatggagagtgacttgagctgggagcgg

SEQ ID NO: 42995 - DNA, 231 bp, Glycine max
  Clone ID: 701126361H1
agatggtgcggttcatccgccaggaagctgaggaaaaggccaacgagatctctgtctccgccgaagaggaattcaatatcgagaagctgcagttggtcgaagccgacaagaagaagatcaggcaagaatacgaacgcaaagagcgccaagttgaaattcgcaagaagattgagtactcaatgcagctgaatgcttctcggattaaagttcttcaagctcaagatgacgtga

SEQ ID NO: 42996 - DNA, 231 bp, Glycine max
  Clone ID: 701126362H1
ctaatcacctggttaatttcttcacatagagctatcaagatccaacgttaacatgaagaatgttttagtaaggtcagctgcgcgagctctgcttggcggcggtgggcggagtactaccgccagctctcaacggcggcgatcgtggaacagagacaccagcacggtggcggcgcgtttggaagcttccacttgcggaggatgtccactcttccagaggtaaaggatcagcac

SEQ ID NO: 42997 - DNA, 232 bp, Glycine max
  unsure (1)..(232): unsure at all n locations; Clone ID: 701126363H1
gttgaatgttaaggatctgacacttttttgagatagaatgaggtttgctatttagacagccccaatatctctttcttcttcttctnttggntctccttttggccacggagaataatgaaacttgtttctgtctagattgactcgagtccttctcttcttcttnntgcntntttttgggatccattttggnncananntgcangncctangnntntttncnaaactttnnggg

SEQ ID NO: 42998 - DNA, 235 bp, Glycine max
  Clone ID: 701126364H1
ggcagggctttctctagcagctagagatggcagagggaagagggtccactctcgtgcaccttcttggtcgtggttctgtgcttggtcgctttcgggttcgccattgccgccgagagaagaagaagcgtcggaaccatgcacaaaattgaaggaacaaatgaaacattctgcagctatagttcagatgttgccactggttatggagtgggcgctttcctgtttctctttctggtga

SEQ ID NO: 42999 - DNA, 235 bp, Glycine max
  Clone ID: 701126365H1
gccccacgttctgagacaaacccagtatgctatctgccatgggggatcagaaagtttcgatttttcattgattgtgtataactgcacaaagaaggtagtgaagcaatgcgtagagcgatcgcgtttctcgttcacccacgattcctccttctcttccttgttctctcaattttcctcattttcacattttctggttctaccaccaccaatggttttactaatcccaaacaggttg

SEQ ID NO: 43000 - DNA, 232 bp, Glycine max
  unsure (1)..(232): unsure at all n locations; Clone ID: 701126366H1
ggggaacaagttccgcatgtcgctgggtcttccagtggcggcgacggtgaactgcgccgacaacacgggggcgaagaacctctacatcatttcggtgaaagggatcaaaggccgtttgaaccgncttccctcggcctgcgttggcgacatggtgatggccaccgtgaagaagggaaaacccgatctgaggaagaaggtcttgccagctgtcatcgttcgccagcgcaagcca

SEQ ID NO: 43001 - DNA, 221 bp, Glycine max
  Clone ID: 701126367H1
aactgcacaggtagtcactaaaataatggagtctcacgatgagactggatgcccggctcctgaacgccccattctttgcattaataattgtggcttctttggaagagcagctaccatgaacatgtgttccaagtgttacaaggacatgctgttgaagcaggagcaggacaattttgcagcatcgtcggttgaaaacattgtgaatggcagttccaatggca

SEQ ID NO: 43002 - DNA, 220 bp, Glycine max
  Clone ID: 701126368H1
cttttacgtgcccatcaaacaaataagctctccactctatttcagtcaccaatcaccaatgactccttctttcactaacgtcaaaatcttctcttctctcgtcctagacggattcttcaacgctctcaccagacgcgggtacgcggtggcatcacaaagcgcaacaaaggaaggagtgggctttatgagcggcaagatggcaccaaagtcaggggaagac

SEQ ID NO: 43003 - DNA, 229 bp, Glycine max
  unsure (1)..(229): unsure at all n locations; Clone ID: 701126369H1
cttctacctctcaccccatacccctcttttccaaactccctcctctctttttgtcctacccgtgtgaaanataacaccaaactaaagcaaaaacaataatgtcaacaccaacatcaacggcagcgtttgctggtgtagaaactcctaatggagactcttctaacaccaatcctcatcccaaacacacccctcaagaatcgcgtgacctctctccttttttgtcttgttc

SEQ ID NO: 43004 - DNA, 219 bp, Glycine max
  unsure (1)..(219): unsure at all n locations; Clone ID: 701126370H1
cgaaaatggcgttggctttcgacgagttcggaaggccgttcataatcctgaaggngcaggagcagaagagcagactccgaggattggacgctcagaaagccaacatctccgncggcaaagccgtggctcgcatcctccgaacctccctcggccccaaaggcatggacaagatgctccagagccccgacggcgacgtcaccatcacgaacgatggagcca

SEQ ID NO: 43005 - DNA, 229 bp, Glycine max
  unsure (1)..(229): unsure at all n locations; Clone ID: 701126371H1
aaaaacccttagccaacacaaccatcatggccacctctgctattcagcaatcagcattcactggtncaaactgctctgaagcagctcaatgagttcgtccgcaagaccggtggcgccggcaaaggtcgcactaacatgcgccgcaccgtcaagagtgctcctcagagcatttggtatggccctgaccgtcccaagtacttgggtccattctcgnngcagattccatcat

SEQ ID NO: 43006 - DNA, 167 bp, Glycine max
  Clone ID: 701126372H1
ctcctcactcaaacttcccctctctacgccgttcctcccaaatggatgcaccaatggagttttggggtgttgaggttaaggttggtcagaccgtgacagttgacccaatggatcctgtggattcatacatacacatatctcaggttgcgctcggagaggcgaaaaag

SEQ ID NO: 43007 - DNA, 209 bp, Glycine max
  unsure (1)..(209): unsure at all n locations; Clone ID: 701126373H1
ctttgaagaaagaagggtctttgcncngattttggagatgtcnctgcttctcagattctcatcaaccttaacctctccgataccaccgagaaggtgatcgcagagtacatatggatcggtggatcaggaatggacctgaggagcaaagcaaggactctcccaggaccagttagcgacccttcagagcttcccaagtggaatatgatggt

SEQ ID NO: 43008 - DNA, 227 bp, Glycine max
  Clone ID: 701126374H1
agattagacagattcgtaggaagatgagggagatcatgaccaaccaggcaacagcatgtgatttgaaggagttggtccggaagtttattcctgagattattggaaaagagatcgagaaggcaacatctagtatttaccctctgcagaatgtgtttgttcgtaaagtcaagatcctgaaagctcctaagtttgatcttgggaaactgatggaggttcatggagattac

SEQ ID NO: 43009 - DNA, 229 bp, Glycine max
  Clone ID: 701126376H1
caagaatcaaggaaccaaccaaccaccccatttcagctctctctggatattgtaatggaagcaggtttagaatcaatgggagtatcagaggcttggaaggctcatgtgggcatggctctggtgcagctattctatggtggctaccatgtcctaaccaaagtggcacttaatgttgggatcaaccaactagttttctgcttttaccgcgatttccttgccttcactattg

SEQ ID NO: 43010 - DNA, 231 bp, Glycine max
  unsure (1)..(231): unsure at all n locations; Clone ID: 701126378H1
ggttgcccctttttctgtacaactactccactcaccaactccatggtatctttgaggctaacaataatgaagccaccaagactgctgcagagaagaaattcaaaacactgccaccatcagagtctctgcctaagaatgaaaccattggaggctacatntttgtttgcaacaacgataccatggcagagaatctccaaagacagctctttggtctgcctccacggtacagag

SEQ ID NO: 43011 - DNA, 215 bp, Glycine max
  unsure (1)..(215): unsure at all n locations; Clone ID: 701126379H1
atttgaagtcaagtgttgttgctgtttttatcgccaatgaagagaattctgcgataactggtgttggtgtggatgcacttgtcaaagatggcctcctcaataaactcaaggtggccctctgtattggatgacacggcggtaaacaaccatgcgtgggntggtggtatgtacctggaacttcacgtcccgggagctcttctagtggatagctctaa

SEQ ID NO: 43012 - DNA, 233 bp, Glycine max
  Clone ID: 701126380H1
gggctccggctcttgccgctaagaagaagcctgagaaggtcacgaatccgttgttcgagaagcgtccgaagcagttcggaatcggaggggcgttgcctccgaagagagacttgactaggttcgtgaagtggccaaagaatgttcaaattcagaggaagaagaggattctgaagcagaggttgaaggttcccccagctttgaaccagtttaccaaaactcttgacaaaaaccta

SEQ ID NO: 43013 - DNA, 231 bp, Glycine max
  unsure (1)..(231): unsure at all n locations; Clone ID: 701126381H1
acgaaaccctcttcatcttgttctatctgtgacgagcatcatggcctcaagagcagtgttattgttggctatgtgtgtgcttccggcgatggttgtggccattcgcccagcaaagaaccctttttncgtgaagggtcgtgtctactgtgacccttgccgtgctggttttgagacctcagctaccacctacattgctggtgctgagattatgttgcaatgcaagagcagggt

SEQ ID NO: 43014 - DNA, 226 bp, Glycine max
  Clone ID: 701126383H1
caacaagtctgcttggcctgatcctcgacagttcctagaggaagcaagggcagtggggcagctgaggaatgagcggttggctaacttggttggttgttgctgtgaaggggaagagagattgcttgttgctgagtttatgccaaatgaaactctctccaaacatctctttcactgggagagccagccaatgaaatgggcaatgaggctgagagtggcctgtatttag

SEQ ID NO: 43015 - DNA, 227 bp, Glycine max
  unsure (1)..(227): unsure at all n locations; Clone ID: 701126385H1
atatagaagangttccttatttctgtctgccagcaaacgatttggttgatgttatgccccatcttgttacagctgtngtgactatacaaatgcntagcngacttagtggttggatatatgggagtgccaaaatatttctggaatcngcatgacacaacatccacaatatgtaacagtaaggaatgaacgtggaagagngatgtttgagtcgtatagagatactcact

SEQ ID NO: 43016 - DNA, 224 bp, Glycine max
  unsure (1)..(224): unsure at all n locations; Clone ID: 701126386H1
cttcgcttctacactcatctgggtcctcttttttctctcaatttcntgcctttcaattctcttcttcttcgctgtttcctcatggaaacaggcatgggaatgccgtggtctctgtgaaggcctctgcttctggggttgtgttggtggagaagtctgaggcagagaaggccaataggctcaaaacagcttacactgagaaaattattcccttgctcatggaagag

SEQ ID NO: 43017 - DNA, 225 bp, Glycine max
  Clone ID: 701126387H1
aaagtggtgatcaatatgtcaaagaatccaaaagttttctttgatattctaattggaaagatgaaagctggacgagtagtgatggagttgtttgccgatgcaaccccaaaaacagctgaaaacttcagggctctctgcactggggaaaaggggattggacgatctgggaaacctttacactacaaaggttctgtatttcatcgtattattccagaatttatgtgt

SEQ ID NO: 43018 - DNA, 226 bp, Glycine max
  unsure (1)..(226): unsure at all n locations; Clone ID: 701126389H1
aaatcacatagctagttgtttaaagtgagaganaaagaaagaagaaaatggcaaactttccagttgttgacatggggaaacttaacaccgaagagagagcagcagccatggagattataaaagatgcctgtgagaactggggtttctttgagttggtgaaccatgggatatccattgagttgatggacactgtggagaggctcacaaaagagcactacaagaagac

SEQ ID NO: 43019 - DNA, 226 bp, Glycine max
  unsure (1)..(226): unsure at all n locations; Clone ID: 701126390H1
gtccctccttcctctgccttataattcttgtgacccttttngctggtagcattgaaagtgcaccagcaaacgtgaagccaagccattatgctgcacccttcaataggagtgtttttccttctggttttctatttggaataggctctgcagcttaccagatagaaggagcagcagctatagatggcagaggaccaagtatatgggacacctatactaaacagcaacc

SEQ ID NO: 43020 - DNA, 229 bp, Glycine max
  unsure (1)..(229): unsure at all n locations; Clone ID: 701126391H1
gtgtggttgcgcctctgcttgcaagagtgaaaaccttctcttaccnnctctctcaagtttcaagagatttcatcatggctccaaagaaggacaaggctccancaccttcctccaagcccgccaaatctggcggtggcnnnnnnnnnnnnnnnnnnnnnnnnnnnggaaagcaaaaggagaaggtgaacaatatggtgctgtttgatcagggcacctatgacaagctcct

SEQ ID NO: 43021 - DNA, 228 bp, Glycine max
  unsure (1)..(228): unsure at all n locations; Clone ID: 701126393H1
atcttcttcaaccttcagagtgagaaaacacattcagaaaccacgtttctcnnnnnnnnnnnnnnnnnnnnnnnnnnnnnnctcgaggtcattattaagtattcaccatggaggcaccatctcccaccaaacccaacgacccaacaaaaccttcctccacttccaccacccttagtctggaggccggcccggcccaagcgagcccactccgaaaaatgtttgccgtgg

SEQ ID NO: 43022 - DNA, 228 bp, Glycine max
  unsure (1)..(228): unsure at all n locations; Clone ID: 701126394H1
ggacccttatctctctctctctcccgaattattgttcgttcgacccttttacttagtattccctgtttccggtattcgctccctttttttctgcattctggttttacttagatctctgtcccgcaccagatctggtgnagggtgagagggttgggttcattaattttgtatcaatcttccttctgagcggtaggcgtggggataccagagtcttttcgggaagcaaga

SEQ ID NO: 43023 - DNA, 229 bp, Glycine max
  Clone ID: 701126395H1
tttctctcgcgtcttcattcctctcattccctctgaattcttctcactcttcagatctctctcccttccttccatcccaaccacaaggttgctgagaagacataaaaaatggtgaagatttgctgcattggagctggctatgttggtggcccaaccatggctgtaattgccttgaagtgtcctgagatcgaggtggtcgtggtggacattgctgcaccgcgaatcaacg

SEQ ID NO: 43024 - DNA, 205 bp, Glycine max
  unsure (1)..(205): unsure at all n locations; Clone ID: 701126396H1
ccgcctagctnaccttttnaactttcaagatgcnaatcncngntaagnccacgcactggtaagncaatcacccttgaggtggagagttcagataccatagataatgtaaagtccaaaattcaagacaaggaagggatcccaccagaccagcaacgtctcatttttgctggcaagcagcttgaggatggacgtacacttgctgatt

SEQ ID NO: 43025 - DNA, 269 bp, Glycine max
  unsure (1)..(269): unsure at all n locations; Clone ID: 701126401H1
tatgaggaggctgaagaggaagcgccgaaagatgagacagagntccaagtagtgcgttaaacctagtttgtttccgttgcttttacaattgcttatgntgtcaaataggacacccagttgttagtggcactggtctctcctntttgatgtnttgatacatttngtnggattntatttcgtcttatgttcttagctgaaaacaatgctgttactgcgtttgcgaatcaacaggatatcttgtttgcattnccgnatctctctttgcnact

SEQ ID NO: 43026 - DNA, 265 bp, Glycine max
  unsure (1)..(265): unsure at all n locations; Clone ID: 701126402H1
cgacaatgctggagtaagttcncatgtgactccagtagccttgattatggatggtaccagccttgtgcatattctgacagtgaacttgaagaacagctatttnaacttgcaagtaggtgttctgttgttctatgttgccgtgtcgctccgctgcaaaaggctggaattattgcccttgtgaagaatagaacatctgacatgncactagccattggagatggtgctaatgatgtctcatgattcaaatggctggtgttggagtggc

SEQ ID NO: 43027 - DNA, 265 bp, Glycine max
  unsure (1)..(265): unsure at all n locations; Clone ID: 701126403H1
ggttttactgtacagaagtgtcaaatcaggacgtaaagaaggatgctaacttactgggtgttcgccgancatgtatcatgctgatggaatgtctatgtgatttcctgagnaactcaggttgtgtttctaatgtaatttcagaagntatcaaggaccgggctaaggcagttgcngaagantggaaacccagattggatgctcttnacatggatgctancaatgtgaatccttggaggctcatgcatttttgcaacttctagccagt

SEQ ID NO: 43028 - DNA, 257 bp, Glycine max
  unsure (1)..(257): unsure at all n locations; Clone ID: 701126404H1
caagangttcctcagcagcaaagaggaaaagggtcattagagaacttgttcagggtcgagactatgctactcagttgaagtttctgcttcagaagcctattggccctgatgggtctgtttctgctaaggaacttgtggccaatgtgctgagatctttcgctgaaactctctctgtgttgacttcttcttccgaggattcaacaagtggtcatgatcatgacgacgaggttattgctcagaatcttgtaatttccgga

SEQ ID NO: 43029 - DNA, 259 bp, Glycine max
  unsure (1)..(259): unsure at all n locations; Clone ID: 701126405H1
aaactccaccaacagactctctcactgcccttctcnctcncccattccaaaattctnctngcnaagttccaagcatctgcttttcacctcanacaatccggtggtaanggcgactgggggtcacgtgggaagcgtgcaatgantattccctttacacgggagctctgggaccgcatagctgcttttcaaggcctaccaagtaaccanggncgggaatgatcatantttgtgctcagagattgttaaggcttgtnattct

SEQ ID NO: 43030 - DNA, 248 bp, Glycine max
  unsure (1)..(248): unsure at all n locations; Clone ID: 701126406H1
caaaaagtggggcgggcacgcagagcagngggaggnaganagggncgangagantgtgggantcaatgnnttgacggtggttgccantgccggcaacaacatcggcaaaatccttcaaaagaanggcactgtcattcntccccctctntctttcaagctcaaggtcatnagggcatangctttgaacaaaacctgggctcannaggttttgnaatgggtatatntggggcactgttgatnttaagggc

SEQ ID NO: 43031 - DNA, 266 bp, Glycine max
  unsure (1)..(266): unsure at all n locations; Clone ID: 701126407H1
ttcctggctctagaaaataaaaccttaggacccatcacagacaaagaagcaattaattcaccagctacatagtttttctgtttgaagtgctacaaacaatggcagctactcaggnagatgtgacgcttttgggagttgttggaagcccgnttgtgtgcagggtccanattgccctcaaattgaagggaattgaatgcnaatttttggaagaaaatttggcaaacaagagtgatctacttctcaaatccaaccccgnttacaagaag

SEQ ID NO: 43032 - DNA, 270 bp, Glycine max
  Clone ID: 701126408H1
ggaccgtgatgagtttctgggtcccttctgaaacacttacgaagccgaagaaaaaaaacgagaagcccagaattcagctcgaagcccagcaggcccgcggtggttctggtgcacggctttggcgccgagggaatcatgacatggcagtatcaagttggcgccttgacaaaaaaatacgcagtctacgttcctgacctcctcttcttcgggggctccaccaccgacaaaccccaccggttcgccgggcgtttcaggcgcagtgtgtggtgg

SEQ ID NO: 43033 - DNA, 267 bp, Glycine max
  unsure (1)..(267): unsure at all n locations; Clone ID: 701126409H1
ggtgactcacgtctcaagtttgcagagggagaggctccggttcaatcaagcaatgaaaccatacntgctctcctttcagtgcgtgccttatttgtctcaccaaaaactgtactcgatgcttggagtacgctatgtccaggatttcatattggtgtgatggaaaaacaggtggttggtatctaggacgaagctgttctttaagatatgagacctacctcttctttgaggccatattccacgatgcaccagcacnacagccttcccaac

SEQ ID NO: 43034 - DNA, 266 bp, Glycine max
  Clone ID: 701126410H1
ctcaatttggtacttgaatatgttcctgaaacagttaatcgtgtgatcaaacattacaacaagttaaaccaaaggatgccgctgatatatgtgaaactctatacataccagatctttagggcgttatcttatattcatcgttgtattggagtctgccatcgggatatcaagcctcaaaatctattggtcaatccacacactcaccaggttaaattatgtgactttggaagtgcaaaggttttggtaaaaggcgaaccaaatatatc

SEQ ID NO: 43035 - DNA, 264 bp, Glycine max
  Clone ID: 701126411H1
gcaaaagcaagaagaactagtctaagcagaaatggcctcttcagtgatggcatctgtggccctcaaacctgcccctttcactgttgagaagtcctcagttagaggccttccctccctctcaaggaactcctcttcattcagagttgtggccagtggtggcaagaagatcaagactgacaagccttatggaattaatggtggcatggctttgagggaaggagttgatgcatctggcaggaaaggaaagggaaagggcgtttacca

SEQ ID NO: 43036 - DNA, 266 bp, Glycine max
  Clone ID: 701126412H1
cacgcttcagccactattcttcaaggaaaaacaaaatgaaagacacaatggaaactcctacgacactcaccaccttgctccgccacgtcgccgccaaattcccctcccgccgtgccatctccgtcgctgccaaattcgacctcacccactcccgcctccaccgcctggtcgaatccgccgccgctcagttagtctccgccggcgtcaaacccggcgacgtcgtcgccctcaccttccccaacaccatcgagtgctgtagtcatgtt

SEQ ID NO: 43037 - DNA, 264 bp, Glycine max
  unsure (1)..(264): unsure at all n locations; Clone ID: 701126414H1
ctgaagtgccagtaactgcaaatgcacaacaaaatgcaggagttgcattgaacgaacggatgttgcaganccactaataggaatacacaaacccaatacaatactacgatggacctgagaaatgtagctgatgattctgcagtagaatcttcaagtggtaccaggagagaaagggatggaggtttagttccagtatggtctccaccagcttccagttactcagaacaatttgtaggagatgaaaatggtataacaagcagttca

SEQ ID NO: 43038 - DNA, 262 bp, Glycine max
  Clone ID: 701126415H1
atgacaccctcgccggtcctcgcccggagaacggcctcggcaagctccgaaagcaccactccttcgctttccgatctgcctccgccaaggaatcagacagcggaagcgtgaaatcgtacggtgaggattcgcccaagaatgcggtgagagtgacgcgaagtataatgatcgtgaaaccacctggtaaccagagtcccagtggatccgctccggcttcccccgccggttctactcctccggtgtctccgttttcgggtaagga

SEQ ID NO: 43039 - DNA, 261 bp, Glycine max
  unsure (1)..(261): unsure at all n locations; Clone ID: 701126416H1
ctcacctacnaacccggtcccaacaaggtctttccttccaactcctatggcgggagaaacatcttggatcagccactatgatgacagacaaagggagactggggcgtttgattcatttttagaacttggtgaggaaggtgaaaaagaagcaactgctgtttctttggatgttttgccagatgacttgttggaacgaatcctagcctatctccccattgcaagcatttttagagctggctgtgtgtctaagaggtggcatga

SEQ ID NO: 43040 - DNA, 271 bp, Glycine max
  unsure (1)..(271): unsure at all n locations; Clone ID: 701126417H1
gcgattngctcttctcttgganaagtnaaaaccagaagtacgaacntaagagaagagcgatttagaagtgagagaagatggggttgtcgttcacgaagcctgttcagcaggttgtttgcgaagaaggaaatgaggattctgatggtaggtctcgatgctgctggtaagacaaccatcttgtacaagctcaagcttggagaaatcgtcaccactatccccaccatcggatttaatgttgagactgtggagtacaagaacatcagcttcactg

SEQ ID NO: 43041 - DNA, 265 bp, Glycine max
  unsure (1)..(265): unsure at all n locations; Clone ID: 701126422H1
gttcttgcacgtttagctaaactggagactgtcaatgctgatcttgcaagatcnnttgcagctntgcagtggagccttgaagttgaggttaagcaagtatcagaactcagacagcaaatcagttcgaaagagttgtttcacgaagaactcagaaggcgaatgnagaatcctcgtcaaactggagcttcacaaaatcaagtaagttatataattttttgctgaaactggttcatgatactttggtttcttttgtttagnattccgg

SEQ ID NO: 43042 - DNA, 248 bp, Glycine max
  unsure (1)..(248): unsure at all n locations; Clone ID: 701126423H1
attgtctttatcaacttggattaaattgctcgcttctcaaagagcttgatctacactgattgctctggtgttgatgacatagctctaagatatctatcaagatgttcagaacttgtaagattgaaattaggattatgcacaaatatatcagacataggattggcacacattgcttgtaactgcccaaaaatgactgancnnnnnctctatcgatgtgtacgtattggagatgatgggctagcggcaca

SEQ ID NO: 43043 - DNA, 264 bp, Glycine max
  Clone ID: 701126426H1
gctcactgaatcgaagcccttcattttgattttcttcctcgtcactgcgcatcatgtacagagttgcagcttcatcattcagaaggcatctcaagggccatggaggtaacttgggatccattaggttttcaacttcggccgcggtagctgcaaggacttcatctggtggtttgtttagctggcttactggagagcgttctagtgctcttcctcctcttgacataccccttggtggcgttgctctcccagattcacttccagatt

SEQ ID NO: 43044 - DNA, 261 bp, Glycine max
  Clone ID: 701126427H1
agacctgcttccatctaattaatgccctctcaggagttggtattatttccatgccttatgcactggcatctgggggatggttaagcatatcactactatttgtgattgccattgcttgctgttatactggtatgttggtcaaaagatgcatggatatggaccctgacatcaagaattttcctgacataggtcaacgtgcatttggagacaaggggaggataatagtatcaattgccatgaattctgagctcttcctagttg

SEQ ID NO: 43045 - DNA, 261 bp, Glycine max
  Clone ID: 701126428H1
atcctaacactttcttctctctgttttccttcttcctcgcatcaatggagttggacggcgttctcctcggcatgtgcaaccctctcctcgacatctctgccgtcgtcgacgacgctttcttggaaaaatacggtatcaagttgaacgatgcgattctcgccgaggataaacacaaacctatgtatgaagaattggctaacaatcctaatgtggagtacattgctggaggtgctactcagaattcaatcagggttgctcagt

SEQ ID NO: 43046 - DNA, 260 bp, Glycine max
  unsure (1)..(260): unsure at all n locations; Clone ID: 701126431H1
aaaatattcaacctgagcaactggaaatacaagaaacagagagaagagagagtgcattaggcaaagatatagagcaactanctaccctccttgaggagtatcagttaaggaataaatctgaaaaaagccctgcaacttatatatctagtcatggctttactgagaatagccattttcctgaaggaaaagaggcacttagtggtgcaatggaggagttaaaagatggttacatttctgagaatgggaaactggttcttgat

SEQ ID NO: 43047 - DNA, 260 bp, Glycine max
  Clone ID: 701126432H1
catctccaacctcggtgctatctacggttggttcggaagcatttgggtctcaattttcagagcagactaacagatgcctttcaccaaactcttgcaccactgatattcactcagtcagcttatcacctgctgaaaaggaaaatgattgcatgacatccaaagcatccgaggaggaagagaaagcatcaccagcttcacttcctttatccactgtttctaacccaaacatgtgcatgaagcctgagtttagttccaaggac

SEQ ID NO: 43048 - DNA, 269 bp, Glycine max
  unsure (1)..(269): unsure at all n locations; Clone ID: 701126433H1
gcagacttcggtttcttcagccacatttcatagtcatacccaacgaaaacaaatatttcataacagaatcccnaactacatatatcaactgtaaaagttttcactcnaagttatccttttcctttccgaaaagcacgactgtgataaagatacataattcggcggtgttccatcaacatggccctaacaaccgcnaatgtaatagcaataaaacagaacatngttgtttcctcagtttaattggcatagcctcagcatggtacntctcc

SEQ ID NO: 43049 - DNA, 256 bp, Glycine max
  unsure (1)..(256): unsure at all n locations; Clone ID: 701126434H1
ccacaatgctcttcctttacatcacantgctcactgtgattggttacaagagacagagtgatgtaaaggctgggggtgatgtgtgtngtggantttgcattcttggcattgcttgggcctttggtggcatgatcttcattctggtgtactgcactnnctggaatctcagggggtcacataaacccagcagtgacatttgggctcttcttggctcgcaaggtgtctttgattagagcaataatgtacatggtggctc

SEQ ID NO: 43050 - DNA, 266 bp, Glycine max
  unsure (1)..(266): unsure at all n locations; Clone ID: 701126435H1
cgtgagttgcaaaaatgaagacgattctttccaccgagaccatgaacatcccggacggcgtgagcatcaaagttcatgccaaggtcatcgaagttgagggcccccgcggaaaattggtgcgagacttcaagcatttgaatctcgattttcagctcattactgacgaaaacggtaaaagaaagctgnaaatcgacgcgtggtttggttctcggaaaacatccgccgccatttcgcaccgccttgagccacgtggagaatcttancac

SEQ ID NO: 43051 - DNA, 267 bp, Glycine max
  unsure (1)..(267): unsure at all n locations; Clone ID: 701126436H1
atcctatcgatggcgttcaggaaaacccttgctcaacggctccttaacatcancaaagtgtcatcacaagcgctcaccanttgtcggatttcctcttcctccgtcatcggaaggctttcaccgngggccgangagcccgttgancccgggagaaaatggcctcttccgtgnnccgnaactncggccggaaacctcctcgacaggctcaggangatgggtattgnccagaaccgganncggttggatgggttgacgccgcctccggcg

SEQ ID NO: 43052 - DNA, 227 bp, Glycine max
  unsure (1)..(227): unsure at all n locations; Clone ID: 701126437H1
ttggnttgttataagttgcacatagtttntgaatggngaaggtcacttcattatgaattcacggttgagattnnctcagttcagagtnagattcncantgnnatgganatgcgtgctatacaggggtgagtntatntgttnctggaactacctattcttgggtannngtaanagtgtttactanatttacanagttacttaagnaaattgnnttgnccntncattta

SEQ ID NO: 43053 - DNA, 264 bp, Glycine max
  unsure (1)..(264): unsure at all n locations; Clone ID: 701126438H1
cgcctcaacatctgaaacagactctatccctaatccctatcttcttctcttcnctctccgcacgctttgggctcctnctgatctcaggtgttgttggcttggnatncgtgcaagttctgctgtagccgatttgaaggtgaaggtgtcaccttaaagtttctttcatgtttgatcaggctactatccatttgggagcaactgagctgcttggagagnatnnttcttcttctagaaaaaattanngaccctcatcccagagagtta

SEQ ID NO: 43054 - DNA, 263 bp, Glycine max
  unsure (1)..(263): unsure at all n locations; Clone ID: 701126439H1
tgctttatgctcaggcaatggtgtgactgtggttataactgaccaaggctcaggtcataacactgacttcattcttagccaacgagcctttgggagaatggctctgaacactgacgcagctgcttctctattagctcttggtgttgttgatattcagtatagacgtgtttcatgcagctacccaaacaaaaacattacagttaagatacatgnnnntcagcaacaaccctcactatttggcttttgtcatatggtttcaacaa

SEQ ID NO: 43055 - DNA, 264 bp, Glycine max
  Clone ID: 701126440H1
tgcagatcaaggcttctgctgaacagttctatgatgttttttgcaacaagccacacactattgccaacatttcaccagaaaatattcagtcagttgaagttcataaaggtgaatggggcaaagagggatcaatcgtctcctggaactatttacatgagggaacagtttgtgtagccaagcaagtgcttgaaggcatagacaaggaaaataacaaaatgacaatgaaggtcatagagggtgacgtgctgggactctacaagagct

SEQ ID NO: 43056 - DNA, 263 bp, Glycine max
  unsure (1)..(263): unsure at all n locations; Clone ID: 701126441H1
agcacccctcacattaccttgtgtcancaactannttgactcctttaccataccattacaataattatcaancctaaccagtaaaaatggtgaccgtggaggaaatccgcaacgctcagcgttcccatggacccgccaccatcttggccttcggcaccgccacgccgtccaactgcgtctcccaagccgattaccctgactactacttccgcannacatacgacnnaaacatnnctganttcagacaantntggnnngnatgt

SEQ ID NO: 43057 - DNA, 264 bp, Glycine max
  Clone ID: 701126442H1
gggctacccttattgctcccagcaaccactctccccaagaagatgctgaagctctcagaaaggcttttgaaggatggggaactgatgagaacactgtcatagtaattttgggtcatagaactgtgtatcagaggcagcaaatcagaagagtttatgaggaaatttaccaggaggatcttgtgaagcgcctagagtctgagatcaaaggagactttgagaaagccgtgtaccgatggatactggaacctgcagatcgtgatgctg

SEQ ID NO: 43058 - DNA, 225 bp, Glycine max
  Clone ID: 701126443H1
ggaactttgactctttgaatagtgatggtatgcaagttggtggtgattctagttttcttgttaaattacggtttgaaacagaggtttaactgggtaggtgtgatagaaacaggggagggagagaaagaaattcagtatgcatttgctatataaattcaatgctttttttaatttgttcaaaaggtactaggtatattccaaaattttgttaccaaaaataattgg

SEQ ID NO: 43059 - DNA, 259 bp, Glycine max
  Clone ID: 701126444H1
gttcctatctctggttttgagggagacaacatgattgagaggtccacaaaccttgactggtacaagggtccaactctgcttgatgcacttgaccagattagtgagcccaagaggccctctgacaagcccctcaggcttccccttcaggatgtgtacaagattggaggtattggaactgtgccagtgggacgtgttgagaccggtgtcttgaagcctggaatggtggtgacttttgcaccaactggactgacaactgaag

SEQ ID NO: 43060 - DNA, 257 bp, Glycine max
  unsure (1)..(257): unsure at all n locations; Clone ID: 701126445H1
ccgacatagtgtncgtctccgncaacancccgacaaaaactcgtggtcttggagccggnaaggctgcagntttgacttactgggagagtgcagcacgcatgattgctgatgtctccaagagtgacaagattgtggtggagaaatccactgtccctgtgaaaactgctgangccatagagaagattttgactcacaatggaaagggaatcangntccaaatcctttcaaaccctgaattcctgcngagggaactgcaa

SEQ ID NO: 43061 - DNA, 259 bp, Glycine max
  Clone ID: 701126447H1
cacgttagcacaaactatcatggccacggcaacagcagctgccaccttcgtcctttatggggacgcgtctcctggaggctcactccggggcggggcgagtgcacgcccgattcggcttcggcaagaaaaaggctcccgccccaaagaaagcctccaggggatcgggccgagacaccgacagacccctttggtatccgggcgccaaagcgcccgaatatctcgatgggagtcttgtcggagatacgggttcgatccgttt

SEQ ID NO: 43062 - DNA, 257 bp, Glycine max
  unsure (1)..(257): unsure at all n locations; Clone ID: 701126448H1
cggcttcaaccttgtagttattctctttcntctnttttagccacccctctncttgaaaaatctagatctcgttcttccttgatctacgttacgcttttagtgaccggatctgtatggatctgaaccagatctacacgncgatggtggttttggcctggtctttcatagatctgatgcatggnggctcagatctactgtacagaggtgtgcgattcatgttcgtctctcttttggaatctgtttcgtagaaagtcgtt

SEQ ID NO: 43063 - DNA, 261 bp, Glycine max
  unsure (1)..(261): unsure at all n locations; Clone ID: 701126450H1
gtccacccatttgttgactggtttgngtggatctggtaaaacnactttggctacaaagctctgtagggatgangaactcaanggtaaattcaaggnanatatttnatttntcaccttctcacaaacgcctaagttgaagaatatcatagaaagactatttcaacattgtggataccnngttcctgagtntataantgatgaagatccattaaacgggtggcaatntnctgcggaaaattgnngggagtccacttttgttgg

SEQ ID NO: 43064 - DNA, 263 bp, Glycine max
  unsure (1)..(263): unsure at all n locations; Clone ID: 701126451H1
ggccgatgaaaagacgtttgagggaagttttcaggcattttgatcatcatgctctggaattgttggagaagatgttgacacttgatccggctcagagaattactgcgaaagatgcacttgatgctgagtatttctggacagatccattaccgtgcgatcccaagagtttacccaagtacgaatcatcacatgagtttcagncaaagnaaaagcgccaacnacaacggnaaaatgaagaaatggctaagcgtcaganaattcag

SEQ ID NO: 43065 - DNA, 261 bp, Glycine max
  unsure (1)..(261): unsure at all n locations; Clone ID: 701126452H1
accctcttcatcttgttctatctgtgacgagcatcatggcctcaagagcagtgttattgttggctatgtgtgtgcttccggcgatggttgtggccattcgcccagcaaagaaccctttttgcgtgaagggtcgtgtctactgtgacccttgccgtgctggttttgagacctcagctaccacctacattgctggtaattgctaacccttttctntatatnntttaaaaaaatactagtgtttatgttatacggtaccaagtc

SEQ ID NO: 43066 - DNA, 261 bp, Glycine max
  unsure (1)..(261): unsure at all n locations; Clone ID: 701126453H1
ctgtaaaggaggtgtctttgctggatgacggaagccagggcaaacagagccttttccaacttcagcaggaaatatctcttttgagtcagttncgacacgacaacatagtccgatatcttggcactgacaaggatgatgataagcgtatatcttcctcgagcttgtaacaaaaggatcattggcaagtctctatcaaaagtaccgtttaagggactctcaagtttctgcatacacacgacagattttaagtggcttgaagta

SEQ ID NO: 43067 - DNA, 261 bp, Glycine max
  unsure (1)..(261): unsure at all n locations; Clone ID: 701126454H1
tatagaagaggttccttatttctgtctgccagcaaacgatttggttnatgttattgccccatcttgttacanctgtattgactatacanatgctttagctgacttantggntggatatatgggantgccaanatatnctggaatcggcatgncacaacatccacaatatgtaacagtaangnatgaacntggaanagagangttgngtcttatagagaacttactggagattactccancaattagtactggggataggcg

SEQ ID NO: 43068 - DNA, 260 bp, Glycine max
  unsure (1)..(260): unsure at all n locations; Clone ID: 701126455H1
gcgattgaaacgctcgtgctgggcgctggtcaagaagttggcaanagctgcgtggtggtaaccatcaacgccaagcgaatcatgttcgattgcggaatgcacatgggctacttggatcancgtcgttaccctgatttcacccgcatctcccccagtagagatctcaactctgccctctcttgcatcatcatcactcactttcacttggatcacgttggtgcttagcttacttcactgaagttttggggtataacggaccg

SEQ ID NO: 43069 - DNA, 263 bp, Glycine max
  unsure (1)..(263): unsure at all n locations; Clone ID: 701126456H1
ttgcaatgttctcacngtgccattttctctcagtccccaatacccaataatagtgcctnnccgtctgagagccatggcacctcacagctcgcctcttgaactcaatcacttcgccgaggtcggtaacaaagttgccgatgctgccggagaaattattcgcaaatacttcaggaaaaacttcgacgttattcacaaacatgatctcagtccagtaaccattgctgatcaatcggctgaggaggctatggtttcaatcatactag

SEQ ID NO: 43070 - DNA, 261 bp, Glycine max
  Clone ID: 701126458H1
ggtggccggagaaacaatgtgttcgatcctttctcactggacgtgtgggatcccttcaaggattttcctttcccaaatacgctttcttcagcttccttccctgaattttctcgggaaaattcagcatttgtgagcacccgtgtggactggaaggagaccccagaggcgcacgtgttcaaggcagatattccaggactgaagaaggaggaagtgaaggtgcagattgaagacgataaggttcttcagataagcggagagagg

SEQ ID NO: 43071 - DNA, 259 bp, Glycine max
  unsure (1)..(259): unsure at all n locations; Clone ID: 701126459H1
caatggcaaccgcgaggnccgtgaaggatgtttcgcctcacgatttcgtgaaggcttacgcctcccatctcaagcgttccggcaagatggagcttcctgagtggactgatattgtaaaaacagcaaaatttaaggaattggctccanatgatcctgactggtattatgttagggctgcctcaatggcaagaaagatttatttgagaggcggtcttggtgttggggctttccagaggatctatggtggaagcaagagaaa

SEQ ID NO: 43072 - DNA, 259 bp, Glycine max
  unsure (1)..(259): unsure at all n locations; Clone ID: 701126460H1
atccgctcatccccctcacaaattagggtttttgcgaatcttttatcgtctgaaatcgaatccaacgtttcagccatggtttccgattcaatcgccgccgtaccgattccctccgccgcaaacaccaagaacccggggaagaagaagaggactaacaggtccgcgaaattgaagcagtacaaaatcgatgcgcgccgcgagcaatggttgtctcaaggtgcggtgaagagcaaggggtgcaaggncggagtggacgatg

SEQ ID NO: 43073 - DNA, 259 bp, Glycine max
  Clone ID: 701126461H1
attacattagattggtggtaatggcagcgtcactacaagcagcagctactttcatgcaacccaccaagttgagcaggagcaacactttgcagcaaaagtctactcagtccatttccaaggcttttggtttggaacctgttggagctaaaaaggtcacatgctcccttcaggctgatcttaaggacttggctcacaagtgtgttgatgctaccaaaattgcaggattcgcccttgccacctctgccctcgttgtctctgg

SEQ ID NO: 43074 - DNA, 258 bp, Glycine max
  Clone ID: 701126462H1
agtagtactagtgataaggtgatcataatagagcataatataagagagtgaaaactcatggaggttggcctcaacaagaaggagaacatggggtttgaggaaactgagctaaggcttggactgcctggaaacgtaggaggcactggcactgaagaagtgctcatcaggaagagaggtttctctgagactgaaactgaaactgaggaggatgagtctgctaccactgtggatttgatgcttaatctttcttctaaggaa

SEQ ID NO: 43075 - DNA, 258 bp, Glycine max
  Clone ID: 701126463H1
gctagctactccttaattactaattagtttcattctttggtgcaagctagcttcattagttgattcataaaattataacaatggtgagtgttgaagcaatccgtaaggcacaacgtgcagaaggccctgccaccgtcatggccatcggcactgccactcctccaaactgcgtcgatcagagtacttatcctgactattatttccgcatcaccaacagtgagcacatgactgagctcaaagaaaagttcaagcgcatgt

SEQ ID NO: 43076 - DNA, 256 bp, Glycine max
  unsure (1)..(256): unsure at all n locations; Clone ID: 701126464H1
gttaatggnaatggaagtggaagtagcacttccattttccaatntccaatttccagtggagtagaacacattcattcaattgcaattttttataatttcatatatcctccaatattgctggtggtnagcactcacaagagacaggctcaactaccaganaaattntcnattcccggcatctcctccaaacctacgtaccccagataccctaaattcgattcatacacataacacaacacaacctcgttcctttgnt

SEQ ID NO: 43077 - DNA, 156 bp, Glycine max
  unsure (1)..(156): unsure at all n locations; Clone ID: 701126465H1
gccgatcagctcaccgacgaacagatctctgagttcaaggaagcctttagcctcttcgacaaggacggcgatggttgtattaccaccaaggaacttgggactgtgatgcngtcgcttgggcagancccaactgangctgagctgcaggacatgata

SEQ ID NO: 43078 - DNA, 261 bp, Glycine max
  unsure (1)..(261): unsure at all n locations; Clone ID: 701126466H1
cnttttcccatcgatctcgtttctcccaaattcgagtcttccttcgtttccaagtcagcgttaagggtttantttggcgcgtgcgatgaagatcgaggaattggacgatggagagtgtagtagggaccatgaagagaagtttgagangcagattgtgancgttgatgccaagagagcgttggttggagcaggtgctcggatcctgnnctatcccanactcttgtataatgtgcttcgtaacaagattgaagctgagttcag

SEQ ID NO: 43079 - DNA, 261 bp, Glycine max
  unsure (1)..(261): unsure at all n locations; Clone ID: 701126467H1
tatcaagatcaatgattatcagaagagccgttttgtgaaccgtgtagttgcatcaatgttcaacacagtctcaaacaanaagattgctattctgggatttgccttcaagaaagacactggtgacactagggagacccctgccattgatgtatgccaggggctacttggtgataaggccaacctgagcatatacgatccacaagtaactgaggaccaaattcagagggatctatcaatgaacaagtttgattgggatcatcc

SEQ ID NO: 43080 - DNA, 156 bp, Glycine max
  Clone ID: 701126468H1
ctccaagccaaccctatccttttcctcatcaagtttctatttaggctaagatggaaaagagctcatttgacaagaaccaccattaatccttgagcagctccgcaaaaagtgcccattggcagctgctcattttgtgcccaggtgacaatctagtgg

SEQ ID NO: 43081 - DNA, 257 bp, Glycine max
  Clone ID: 701126469H1
catttggacacaataatagggcctggagtgatgcttctttatcctctatacgcatcaatgagagcaatgaaagtccttcaaccttggatgatcaacagtggctaacgtattgggttttatactccttcatgaccctctttgagctttccactcataagatccttgcttggtttcccatttggggatacctgaagcttatgttttgcgtctggttggtacttccaatgttcaatggagcggcttacatatatgagaat

SEQ ID NO: 43082 - DNA, 259 bp, Glycine max
  unsure (1)..(259): unsure at all n locations; Clone ID: 701126472H1
gtgcagtgtccaaatcataagggtngttgcaaattgcaatggctaagcatgatgttgngggtggttccttctctgcaaaggactaccatgatcctcctccagcaccgttgattgatgctgaggaactcacacagtggtccttctacagggctttgattgctgagttcattgccacaatgctcttccttnacatcacagtgctcactgtgattggttacaagagccngagtgatgtaaaggctgggggtgatgtgtgtgg

SEQ ID NO: 43083 - DNA, 258 bp, Glycine max
  unsure (1)..(258): unsure at all n locations; Clone ID: 701126473H1
tgtttanagtganaggnnnagananaagaaaatggcaaactttccagttgttgacatggggaaacttaacaccgaagagagagcagcagccatggagattataaaagctgcctgcgagnactggggtttctttgagtncctgaaccatgggatatccatgtgntgatggacactgtggagaggctcacaaaagagcactacaagaagactatggngcnnaggttcaaagaaatggnggccagcaaagggcttgagtna

SEQ ID NO: 43084 - DNA, 238 bp, Glycine max
  unsure (1)..(238): unsure at all n locations; Clone ID: 701126474H1
ggagaaaatggaggacaagtctgcnngctgaagcggcaattaactcaagtgttcttcgtcaactaagggagtcaaaggcattgctttctacagcagatgaaaactatgaggccttagccctgatcattgatgggaagtctcttacttatgcactagaagatgatgtaaaggacttgtttcttgaacttgccattggctgtgcgtctgttatctgctgtcgttcatctcccaaacagaa

SEQ ID NO: 43085 - DNA, 248 bp, Glycine max
  Clone ID: 701126475H1
gtttgttttctttgttgctgcagtagttttggtagcatggccatgccatggcgcaggctaccaaaggttccctctccgaatgaaaactggctatggtgagcgttcttcggaggtaaaatgcgcaagttttaggcttgctgtggaagcacacaacatccgagcctttaaaaccattcctgaagagtgcgttgaaccaacaaaggactacattaatggcgaacaatttagatcagactctaaaacagtta

SEQ ID NO: 43086 - DNA, 256 bp, Glycine max
  unsure (1)..(256): unsure at all n locations; Clone ID: 701126476H1
gttgcatttngcagtgtgtgtgagaagaagagaaaaatggagaaaatgatgcgactganaccactgttccgatcactganttgcagatcttatcatgccttcccattcatcaaccatgtngttcttcgaccttctcttatctctcgctctcccaatcctcttccttctccttcacactcagaatgcatgtctcctttctcgatgggtttagggagcatgcgattctatagtgaagatttgacccatgtgcccaata

SEQ ID NO: 43087 - DNA, 256 bp, Glycine max
  unsure (1)..(256): unsure at all n locations; Clone ID: 701126477H1
gcttntgagggcnatcncatctctgagnnagtctcagccagncctatgtgttcttctgacagatactcttttaccttcaccagctcattcttcntctancttcttctgctatatatgctcaacctttaaaggggannnnnnnnnnnnnnnnnnaactagtttgagttncattgtacttngatatcactgcagaagtacatgagactctttttagagggtatgctttnnagaccagnatcagaagctgattaaagga

SEQ ID NO: 43088 - DNA, 256 bp, Glycine max
  Clone ID: 701126478H1
ggaatttccattctgagacacacagaagcacagaaagaaactccttttaatttttcaatttacaagtcaagatctgacatcatagaaaaatgaccatggatgtcgttcagctgcagaggaagctgcgcgaacaccaagccgctatgtttcaacagttgtaatatttggtggcgattttggatgggttgttttttgttggcggggagaagggttttttggatgatcagttcagccagcttcagaaactgcaagatga

SEQ ID NO: 43089 - DNA, 255 bp, Glycine max
  unsure (1)..(255): unsure at all n locations; Clone ID: 701126479H1
gttcaaaaccaatctatctatctatttggtataagcatggagctttgttggcaaaaatccatccatggctcttaaagaagcttggaggattttgtgtgagagggttctcacccttcacactccacctcctacagtttgcttatgctttagccattggtttctctaatcaatcaccacaaaagggtatacatggaggaacataattctcngantggcatgaagcagagaagctatggccacatcttagcaaaccgg

SEQ ID NO: 43090 - DNA, 256 bp, Glycine max
  unsure (1)..(256): unsure at all n locations; Clone ID: 701126480H1
gatcctctctcangcttgacaatagggccaggccatatatgaggtagctctcatgattgcagttctgagatgggtcttgtgcttgatcttcagagtgatcaacgacagaagaacaacacaatccgacgagaccccaacaccagaaccatgttctcagatgacaagggacaaggacagcattcttttgctgacgactttcggagagattaaggagaggcttccagagacagaggagacgtgtgcggtgtgccagctg

SEQ ID NO: 43091 - DNA, 253 bp, Glycine max
  unsure (1)..(253): unsure at all n locations; Clone ID: 701126481H1
gcactctccctccaacctctctcttcggcnccagaatcaccctcctacgcgccanctcatcgtgccgttcnctacccaacacaagttgcagtgncacgtcagcaaccgtntcgtttanctcnccannccgtaagtttctctcttcgcnaacanatggaatgggtntctngnattttattctgggtcgtttcggattgcttaaagtgtccanctgnttcntctcttccannnntngtttttgcnggaaaccnct

SEQ ID NO: 43092 - DNA, 260 bp, Glycine max
  unsure (1)..(260): unsure at all n locations; Clone ID: 701126482H1
ttcgctgctattgctttctgcaatgcaccttttttcatttccataactctttacagttacaccannnnnnnnnnnnnnnnnttagccattcccctatccacaacagctattccaattagatctagggtttcctcttcctcactattcaccatccctcgccggagaacaacaccgattttncggcgccggcttcacggatctcgcatcagcgtctgatacattggcaaaatgcacaccaaatcggcgcagtcatcgtttcg

SEQ ID NO: 43093 - DNA, 260 bp, Glycine max
  Clone ID: 701126483H1
gtgaataaatggttcctaattttctcattgcaaggttagctgtatcactcacacaccacagaagtacccatatccaattgggttctctgctgcaacacaaacgcaatgctttccttcttttattcaattcattcacttcaggaacctcttctgattctgaatcagatggaaaccaccaaaaaggtggcacctttactgtgtcttacctcatcaactcatgtggggtgtccccaacactggccaggaaactctccaataag

SEQ ID NO: 43094 - DNA, 258 bp, Glycine max
  unsure (1)..(258): unsure at all n locations; Clone ID: 701126484H1
gtgggttgatttagatttgaccaacagcttttgctacctctttgaattttattggaagacatggattgttcatcatggnttaacacttccttggatctcagcattaatcctcgcagagttcatgaagaagctgttcctaaggtggtagaaagcaagcttttctctttgggaatgcccaagtttaacgtcgaagaagagtctactagtgacttggaggaggaactgaagcgggtgagtgcagaaaacaagaagttggcc

SEQ ID NO: 43095 - DNA, 258 bp, Glycine max
  Clone ID: 701126486H1
gttccgcagatggtacaatcctccttggttctctgaggctattccatctgccccttatgatcctcttgttttaagacacgcctttgagcaggcagtcataaaaaggttgatgactgatgtgccttttggtgttctactctctggaggtttggactcttctttggttgcatccatcacttctcgttacttggccaacacaaaggctgctgagcagtggggatcaaagttacattcattctgtgtaggccttgagggctc

SEQ ID NO: 43096 - DNA, 259 bp, Glycine max
  Clone ID: 701126487H1
ggcgatgggaggttcatcggaggatttctcggtggtggtgctggcgtcggacctcggcgtcgatgcgcgacctttcctcgaacacgatcaacagcaagaagaagagaattggcacgactgttcccagtacctctcccccgacgaggacttctccgatctcgatcagttgcaattcctccgcctccaaggctccgacaagaactccaatcgcattctccgcatcgtcggcaagtactttcccgcaactgttgtgagtgcg

SEQ ID NO: 43097 - DNA, 260 bp, Glycine max
  unsure (1)..(260): unsure at all n locations; Clone ID: 701126488H1
ccaccattgtcatgcaaacataaaccgatccttttctcttgcattccatctgcaatttctttgntctcatggctccgaaacgacgtcctaagaaaggcgagtcgcgaatggacgcagcactcgacgccatgaaaccctacggcttccccaacagactcgtccgaacaaccgttaacagtctcctcaaagtttacggtggcaacggtggctggttcttcatcgaagaatccgcgtactctctgctgatcgagacgcttctt

SEQ ID NO: 43098 - DNA, 258 bp, Glycine max
  unsure (1)..(258): unsure at all n locations; Clone ID: 701126490H1
tatttatttattctccgaaaatggttgatttacattggaaatcaaagatgccaagttccgacatgccttccaaaactctcaaactctctctctccgacaacaagtccttaccctctttgcaactacccttccgcaccacagatatctntcacgccgcaccttctgtttgcnnnacttacnactactatntncntnttcctcaactnananagctttggtactnctcagatttnnctaattggnacancgaaccaatct

SEQ ID NO: 43099 - DNA, 256 bp, Glycine max
  unsure (1)..(256): unsure at all n locations; Clone ID: 701126491H1
ggagattcagatggcatgcgatcacatcattaccttttcacactttgttcccaggcaggaactttgtccagagaagaggatgttgttctatcccaagcttccaaaaataattggttcagactctcttgaagatcgaataaggtctattcatggtgctgagggaaggaaggatgcgtcgtcttgtcatgtgtttggtcatactcacttctgttgggatgctgttgttgatggtatcaggtatgnacaggcaccctta

SEQ ID NO: 43100 - DNA, 253 bp, Glycine max
  Clone ID: 701126492H1
actactgctagctgtgacttgttttgagttcaatcaaatcgcattggtatctgaaatcaggaaagatggttagcgtagtgagatcaggcaggcacaaagggcagaaggcccagcaaccatccttgccattggaactgcaaacccaccaaaccgtgttgatcagagcacctatcctgattactacttcagaatcaccaacagtgaccacatgaccgagctcaaagagaaatttcagcgcatgtgtgacaagtct

SEQ ID NO: 43101 - DNA, 255 bp, Glycine max
  unsure (1)..(255): unsure at all n locations; Clone ID: 701126493H1
caagaatcgtaagctatgggaaagtcttacccaactgtgagtgctgattaccagaaggncgttganaaggcgaagaagaagctcagaggcttcatcgctgagaagagatgcgctcctctaatgctccgtttggcatggcactctgctggaacctttgacaagggcacgaagaccggtggacccttcggaaccatcaagcaccctgccgaactggctcacagcgctaacaacggtcttgncatcgctgttaggctt

SEQ ID NO: 43102 - DNA, 260 bp, Glycine max
  unsure (1)..(260): unsure at all n locations; Clone ID: 701126496H1
cacaccntctttctcctactnctncttccacttcttctccttccaatctctngtncantcagttctttcaacatgggtngcatcancctncgaaganatnataaacnncgaacgtcgattctgnganncggattccaatagaggaagtgtttgngcagctgaaatgttcaagagcaggnctaacatcagaggantgggtnaatcggntccangtctttggaccaaacaaattggnanagcanaaanagagcangtttttg

SEQ ID NO: 43103 - DNA, 288 bp, Glycine max
  unsure (1)..(288): unsure at all n locations; Clone ID: 701126501H1
gtccctcacactctccaaaccctagcggcantacanactagttctatcgctatctccccaagatgttcgagcgccggtcccgnggcacagagaagaggaggaggcacccgccgttngngacgacgaggacaccggagctcacgtcgctccantcgtcaagctcgaggaggttgctgtcaccaccggcgaggaggacgaagatgcaatcctggatctcaaatcgaagctttaccggttcgacaaggacgggaaccagtggaaggagcgtggcgccggcactgtgaagtt

SEQ ID NO: 43104 - DNA, 283 bp, Glycine max
  unsure (1)..(283): unsure at all n locations; Clone ID: 701126502H1
atatgaagctgcaaaaatcatatttgcttttatatctaactgggccaagttggctatcacactggncaaattncaacagtntncaaggtgctgttgatgcagcaaggaaagccaacagctcaaagacatggaaggaagtttgctttgcttgtgttgatgcagaggagtttcgtttggcccaaatttgtggactaaacattattattcaggtggatgacttggaagaagtcagtgaatattaccaaaacagaggttgcttcaatgngctcatatctctcatggg

SEQ ID NO: 43105 - DNA, 286 bp, Glycine max
  unsure (1)..(286): unsure at all n locations; Clone ID: 701126504H1
ggagtaacgtgctgtctccgcttcccaggngcanctganctccgacctccgcaaactcgccgtgaacctcatccccttgcccttcggcctncncttcttcatggtcggcttcgcgcccctcacatcccgcggntcccagcagtatcggtccctcacaatcccggaactcacccagcaaatgtgggacgcccggaacatgatgtgcgccgccgatccccgccacggcaggtacctgacggcgtccgccatgttccgcggcaagatgagcaccaaggaagtggaccag

SEQ ID NO: 43106 - DNA, 283 bp, Glycine max
  unsure (1)..(283): unsure at all n locations; Clone ID: 701126505H1
cttctttctcttgaacccataattccatgactcggcgttgcnccnactgcagcaanaacgggnacaatttccgtgacatgcccttcgngtgggggcnnaagtgtgaagcttttcggggtcaggctgacggatggatcaatcattaagaagagcgccagcatgggcaacctaaacctctcctccgccgccgcacatcaccanttccattcatctccttcttcttccaanctcgncgcngncncctcatcccccaatccaaggtccccatgctccgaccctcccc

SEQ ID NO: 43107 - DNA, 285 bp, Glycine max
  unsure (1)..(285): unsure at all n locations; Clone ID: 701126506H1
ggaagggtcttgcgtncttctgnggtttgatagatagctagccatgtgngcatgaagatttgagcggggaanatcaataagaggacatggnntaacgttttctcaaagtggttttgngtattttattttttttatcntaagacggcagtttgcctgcactgatcagntcttagagcatgaattcagcatccccgcagtttgtttcctcaagaaggatgagtgtgnacgatccgatccaccagattagtatgtggggagaaggcttcaaaagtaatggaaatttaa

SEQ ID NO: 43108 - DNA, 282 bp, Glycine max
  unsure (1)..(282): unsure at all n locations; Clone ID: 701126507H1
gttggggtcggaggaggagaggatggtgtggagttggaggagtgcctttatgggtggggaatncgaggagtggtgtcgttgtatgtcgtgggtggcttctttcagagcttcaaggacttgcaccaactgtggggctttctcactctcttccatccaagccaaggcaaaaccaaaaacactttcttccacgggccattttatactctctttgtttttctgacnaaaaatctttacaattttttttttnnaattngtaatctaaattcgtaaaagattttaggc

SEQ ID NO: 43109 - DNA, 287 bp, Glycine max
  unsure (1)..(287): unsure at all n locations; Clone ID: 701126508H1
gaaaaaagagtactngctgaagaacaggnnctttcctcattctgagttnggtntcacnacaaaggtntgtnttgtgacccantgnngagaaaatcaaggtcanaggcatggacgctgtgtcatccgcactactagagccagtaactaattctttgttggatctgcttaaaaagcaactggattacatccattacagtcgaaactttgatgaactacgcgagtgtgtaaagcagcttaaacttgtaaaggagaaagtngatcatcaatgtgaggaagctttcnanaat

SEQ ID NO: 43110 - DNA, 288 bp, Glycine max
  unsure (1)..(288): unsure at all n locations; Clone ID: 701126509H1
tttactctctctctgtctctctctacgctttctcgttcganatccctcaagggntccactanctgaaangngaaatgggggttgaacattcnccaggcttttcagccggcttttcgccaagaaggaaatgcgaattctgatggtgggtctcgatgcngctggtaagaccaccatcctgtacaagctcaaacttggagagatcgttaccacaattcccaccattgggttcaatgtggagactgtggaatacaagaacattagtttcactgtctgggatgttggtggcca

SEQ ID NO: 43111 - DNA, 300 bp, Glycine max
  unsure (1)..(300): unsure at all n locations; Clone ID: 701126513H1
aacatatcgagattggaatctangtactcctcgaanccaagncaaattcnnctacctgtanagnttgggtacanagttgaggtngaaactaaaacgngctaantcatcagccagttgtaccaatggacttctttggcttacaagagcaatggntttcttggtggcnttgtttccanaacttaattgagcatgcagattggncaatgtcacaagcctgtaccagattcctatgacagggctctaangaagttggcatggctgggcttgcanagttcangcttccagggtggcgntgnagct

SEQ ID NO: 43112 - DNA, 299 bp, Glycine max
  unsure (1)..(299): unsure at all n locations; Clone ID: 701126514H1
gttggtgaaatcnccaacagtgcattcgangccatcatntatgatggccaagtgtgatccccgccatgggcaaatgcatngcngtggctgtctcatgtgacagaggtggacgtagtgcctnaagatgtnaatgcagctgttggaattatcaagnnccaagcgcactattcaatttgttgactggtgccccaccgggttcaagtgtangaatcaattaccagcctccgactgttgttccaggtggtgatcttggccaangttcagagggccgtgtgcatgatctccattccancagtntt

SEQ ID NO: 43113 - DNA, 298 bp, Glycine max
  unsure (1)..(298): unsure at all n locations; Clone ID: 701126516H1
attcaattcccttaaactctcatctttcccccctcatattcacctacgtccaacnctttcnctctcctcatacttcctgctccctgcanactcgcagctgnntctggnnnnnnnnnnnnnnnnnnnnnnnncagttgcagttggcacagaacaggnccgtcttccagcagaattgaatgtcactgaaacagnggaacccaattccagagttagattgcatgtggaggtgccatcattggtatgtgaggattgtacaagagggtcatagcagagtttatgaagcaagcaaagatcctgg

SEQ ID NO: 43114 - DNA, 282 bp, Glycine max
  unsure (1)..(282): unsure at all n locations; Clone ID: 701126517H1
atgtaatgtgatgttttgtgtgtcagtgggtgtgaattttattggtggattcgcattcgcctctggnattcccaaatcatcagtttcagcgaccatggcttccaactccgtccgnattgccgccgctcagatgacatccatcagcgacctcgctgccaatttggccacttgctctcgtctcatcaaagaagcagcatcagctggagccaaattgctttgctttccggaggccttttcttacgtgggtactaaggatggcgacagtgttcgtgttgctgaacc

SEQ ID NO: 43115 - DNA, 284 bp, Glycine max
  unsure (1)..(284): unsure at all n locations; Clone ID: 701126519H1
atcacctccttcagaaaccacataacaatcaanaacgtccacgcacaacagcagnnaacatacttatcangactcgtctcaattctggagtgatcagctccatcagagacaanactctggcattccttcatcatcatattcaaaaccggatttcttggattcgagcatgaagttccctgcttcagtttcccctgggcaaaacatnacttagttcactttgtcccgaaggaagtggcagtctcttgaatttatccaggagtggtcagtccttgctgaccgaacag

SEQ ID NO: 43116 - DNA, 284 bp, Glycine max
  unsure (1)..(284): unsure at all n locations; Clone ID: 701126521H1
gccgattttaaaagatgagtaatcttcagantgntgctttgcgtgangccattttcaggaantcatggccgattccaaggagaagaatcgcaaatttgtggagnccatcgnactccaaatcgggttganaaactacgatccacagaaggacaagcgtttcagtggctctgtcaagctgccccacatccctcgccccaagatgaaaatttgcatgcttggtgatgctcagcatgttgaagaggcggagaagataggactggactggatggatgtggaagccctga

SEQ ID NO: 43117 - DNA, 282 bp, Glycine max
  unsure (1)..(282): unsure at all n locations; Clone ID: 701126522H1
cgctgaaagaganggacctgtgagtgtcncaaacatgggagaggngnatgttnnacnancgtntttggagaggaagtactactaggactgcccaggttgtaangtggatcaagccanagagttgngtnaggnaaagggtgtacctgttaaaaatcttgttatcatgtggatggtggtgctgtgtactgcactgcctatatcatctctctttccattccgctatttcatggtaagggatttcaatattgcgaaaacagaanctgatattagtcttntgcntgg

SEQ ID NO: 43118 - DNA, 276 bp, Glycine max
  unsure (1)..(276): unsure at all n locations; Clone ID: 701126523H1
ctcaaattcctcataacccagttgcagtcacgggtgttgttggcttcatagggaactggacttcctccntttgttggcattaagagctgacatggatgctcttcctatgcaggaaatggtggagtgggagcacaagagtaaagtacctggaaanatgcatgcatncggtcatgatgctcatgttgccatgcttcttggtgctgcaaagatcctcaaagagcatgaaaatgagatacgaggaactgttgttcttgtttttcaaccagcagaagaagg

SEQ ID NO: 43119 - DNA, 285 bp, Glycine max
  unsure (1)..(285): unsure at all n locations; Clone ID: 701126524H1
ctgacggccncccttcatatcttgtngttaatgctgatnanagtnaanctggnaacctgtcgcnagannggggnatcattnggcatggcccgcataaattgttggaaggtttcntgnttgctggagttggaattaaggctagtggccgcgtacatcnacatcnggggtnaatatgtcaatnnncgtaagaatctcgntaanggctnngnaagaggctatggctngctgngttgtgnnggtaagnattccttgttgggccaggctattgattttgntgtncatatc

SEQ ID NO: 43120 - DNA, 71 bp, Glycine max
  unsure (1)..(71): unsure at all n locations; Clone ID: 701126525H1
gctgctttgtattaaatcttaatcacattaatgtncagtatnantagangtgacatgcgtnntctctnant

SEQ ID NO: 43121 - DNA, 291 bp, Glycine max
  unsure (1)..(291): unsure at all n locations; Clone ID: 701126527H1
gtttggctcacacnctaacacaactgttctgtacntttcttcctctcctcaacttgtttcctncttaacgngttgtccgtgttaccaatcgccggttctcgcgctttatctntnaatcgcgagatacctcancgcaancagtggagtcaccganttganctcnnnnttgttctcttctctnggtttcancgccatggatgaagaagtgcgcaagatcttcagcaagttcgacaagaacggcgacggcaagatctcgtgcgccgagctgaaaccagatgatggtggcgctgg

SEQ ID NO: 43122 - DNA, 196 bp, Glycine max
  unsure (1)..(196): unsure at all n locations; Clone ID: 701126529H1
gcacgtatcaacttcaataancgcatcggcagnngtcagttntccggttgncatctcatcgtctncggtagatttgncnaacgcanntgtctcctnntgcgaatnccagaggntgggttcgggnnntccgccaggangctgggganaatgccaacgatatctntgtctccgccgaagtagggattcnntatcggna

SEQ ID NO: 43123 - DNA, 296 bp, Glycine max
  unsure (1)..(296): unsure at all n locations; Clone ID: 701126530H1
ctattcgaacattgatccttcaattgacttcactaataacttntagtcganagctgcgactanggttanacncggctgagnntnantggntatggaatgtgtggntncaggganttatagagantcagcatgttgaggccttggagatttaatcttcaaggactatgtggtgttcagagagaacgattgaggntccatgaaatatgcctcaagagtggtccacatctgggcactgtagcctcagaggttcgactcttgtgtgacctagagcaagctgaaccttcctggactgttaa

SEQ ID NO: 43124 - DNA, 278 bp, Glycine max
  unsure (1)..(278): unsure at all n locations; Clone ID: 701126533H1
tcacgttctcagnntctttaagatggncatgatcgctgtnctnaccgnactnnagcgtcaagagcaagtttgtctcgcnctnatgtaggttaatgtnntgcanaagcaagattngtacnanncggatgcatacctctatnnggactngatcattncagtggcaanggctngtnnaatgcatgnagtattgcaattgtnggaaagcatgagagaggaaaatctgttccccgattcccagacttatactgaagttataaggggctcttgaactatggact

SEQ ID NO: 43125 - DNA, 277 bp, Glycine max
  unsure (1)..(277): unsure at all n locations; Clone ID: 701126534H1
ttggcaccatcaacctctacgnatttatggcaaagtataattgcaaaaagatggttttctcatcatctgcaancgnttntggccaacctganaagataccgtgtgaggaggatttcaagttacaagctatgaatccctatggacggaccaagcttttcctggaagaaattgcccgagatattcagaaagctgaaccagaatggaagatcatattactgagatacttcaatccagttggggctcatgaaagtggcaaactcggtgaagatcccaaggg

SEQ ID NO: 43126 - DNA, 278 bp, Glycine max
  unsure (1)..(278): unsure at all n locations; Clone ID: 701126536H1
gttagtgntgccaatngtaaacattggcnatcttntgtagctntaatgcnataatacagtttggctattgggtgtggtgagcngggangtaggtagacctgagatttgngtgnagaatggnntcnnacctgntgcaaatgannctaaacnnnngaagatagcaantgggnangatgangattcatccgaatctnaatntgatgatgattcaagtnaagatcaggtatttatatnatctcgaaagcggcttttatnatggactgttgatgatcttgnct

SEQ ID NO: 43127 - DNA, 283 bp, Glycine max
  unsure (1)..(283): unsure at all n locations; Clone ID: 701126538H1
antnctacaaacaacnatggctgctaatcaggaagatgtgaagcttttgggagctactggaaggcccattgntgtgcaggggtgcagattgccctcaagtttaagnggagttcaatacaaatttttggaagaaaatttgaggaacaagagtgnactgnttctcaaatccancccaggttcacaagaaggtnccagtgtttattcacaatgagaagcccatagcngagtctcttgtgatgtnggatacattgatgagacatggaagaacagccccatcttgcct

SEQ ID NO: 43128 - DNA, 175 bp, Glycine max
  unsure (1)..(175): unsure at all n locations; Clone ID: 701126540H1
gtgctcaaccctagtaagccgcaatggtgaagtactcaaggnagcctgacaatccaactaangtnttgcaangctagaggcgccgaccttagggttcattttaagancacangggaaacttcctttgcaatcaggaatttgcccttggtcaaggctagnaggtacttggangttt

SEQ ID NO: 43129 - DNA, 291 bp, Glycine max
  unsure (1)..(291): unsure at all n locations; Clone ID: 701126541H1
aagacntggcattggatttggaggagcttcgccgcctccacagcatcgccaaaagnccttngnannncnctctnttgtntccntccgaggattcgtaacctcgaaaagttatcgtcataggaagctnctgcncagattccggcgccgatttcgaccggaactaaagtggngncttcacctggcgctgaagtatgcggcantcgcntcgttcattgggaccaangntagtgacaaagntaagnnatangtgttaatggaggggatccgntgagaattaggttttaatcccnt

SEQ ID NO: 43130 - DNA, 183 bp, Glycine max
  unsure (1)..(183): unsure at all n locations; Clone ID: 701126542H1
gctgaacctctttnttctctctgtctaagaagaagangaagaagaanaagnagaanagagantgcnnanatnctggatgccagacatgtncanggaacnctggcttcacgtgcttagggtcatcagtgcccgttcgtgcagcagcagcaggatacctgccagtgccagatttgcaagttccgt

SEQ ID NO: 43131 - DNA, 283 bp, Glycine max
  unsure (1)..(283): unsure at all n locations; Clone ID: 701126543H1
gggaagtgaagatcgcaaagggnaggaattgcatattaaaaccgaagatatgctgttaaagcttnaagctnanctggtntctccnttngatgcctgcaaccacatcatacagtttttcaactacgtggatggcgtgtcagactttcctgcttctgctatatcctcaaaggatttgtcaacatctaaggctaaccttgcaatggacacaacnacatcatctcttccacaatctacttctctaatacaaaaatacacttatgncatgagctacactaggtcaaat

SEQ ID NO: 43132 - DNA, 289 bp, Glycine max
  unsure (1)..(289): unsure at all n locations; Clone ID: 701126544H1
gtctctgtnatggcaacctctttctctccgacagcctctgtcggctccatcatcttccaaaaccctcccngaggnnttcgtncttntgctgcccagcaagcagcnacaangntccttcgcctcttctgcaagctatgcaantctcnagctccctcgcnccttcgcacttttctccaatacccctcctttccaaagggagancaanacttgttaggntgctactancgangaaattnangccganaaagccgcanttgaaaaagatgctananccaggatggntaggnct

SEQ ID NO: 43133 - DNA, 290 bp, Glycine max
  unsure (1)..(290): unsure at all n locations; Clone ID: 701126546H1
aaaaacttagctactaaggaaggatcanagagaatggctcaatcaatgggcatcaatgggctggcttgcgtggttcctctcaggctgtgttggnaaggtagccttcaggtgantggctccacacgcttgaatgtngggagtgganaaaggtggcctcagtcacncgtgcagggttcacagttagagcacaacaacaacaagtgagtggtgaggtacaaancagccgtagggcagtgctttcacttgttgctgctggtttggccactggctcttttgttcaagctgtgcat

SEQ ID NO: 43134 - DNA, 298 bp, Glycine max
  unsure (1)..(298): unsure at all n locations; Clone ID: 701126548H1
ataacacgtaaggntagcagaaaccccgaattgataaggggaatcggaaagtantcgaggtctcaantgtaccancnagaggnggcnttttgggctatcaagggccanaaacngtggcgtgttacctcgccacggccctaaacccanacctgaaactcccgctgnaaaaccanccaaattttnccctgctgacgatgtcaagaaaccccttgtcaacnaagcacnaacccaaacccgcgaactcagggctagcattactcccgggacagtgttgattcttcttgccggtagatttaag

SEQ ID NO: 43135 - DNA, 219 bp, Glycine max
  unsure (1)..(219): unsure at all n locations; Clone ID: 701126551H1
gagtatgangtgtttgtgagcttccgcggtgaagacacacgcaacagcttcaccgcttttctttttgaagctctgaaaaaacaaggcatcgaggccttcaaagatgataaagatatcaggaaaggcgaatccatagcaccagagctaatacgagccattgaagggtctcatgttttccttgttgtcttttccaaggactatgcttcctcaacttggtgc

SEQ ID NO: 43136 - DNA, 251 bp, Glycine max
  unsure (1)..(251): unsure at all n locations; Clone ID: 701126553H1
ggtatggtgataatgttttnngntgtgnaatagttccncctnatnggaggcttgnggttncttgntggtnaccagggggcaatattnttgccaaatcttgccgntcctatgtaaaagagggcttaaaaaantnaananangaggcggaccgngcgtttcaggggcccctgngncccgggnntnaattcctggccggaacntgaaggtttgccagcttccccgatntgnagcatgttnagagtngggnaaat

SEQ ID NO: 43137 - DNA, 286 bp, Glycine max
  unsure (1)..(286): unsure at all n locations; Clone ID: 701126556H1
cacgtatcggctttaagtagcattgaagttttcanagatgtaggaccatctgtggtgatgggaagcccctggttggacttcagngtgggcttgtcacgacaattatttgatatgtggtgctctgntaagaaaaattcttgtgttttaccagggtatgtagttgaagggacattggcaaaaaccatcatcaatgngcccaaggaagttactctcatgaatggactcactgcacctcttaacatgcaggtgcactacatntcctnttctgcttcatgntgactctgct

SEQ ID NO: 43138 - DNA, 284 bp, Glycine max
  unsure (1)..(284): unsure at all n locations; Clone ID: 701126557H1
tagacaccaaggccattganaagagtnctaaggttggattngggttggttctcaaaccctnnggattttgatccatgcctgngcaagagcattnagtaggtgttaggaagcgtatagtctgtgagactaaattatttccttgangttggttctcttcttgggnaagaagtgttcatggagttttcgttgcatttgagcaattcaaccttgtaaaaataaataggctttctataaaccacatgtgactttttaaatgcccaaagcttagcaagcctcttttgttg

SEQ ID NO: 43139 - DNA, 282 bp, Glycine max
  unsure (1)..(282): unsure at all n locations; Clone ID: 701126559H1
atgggagggtctattcatgcaaagtggtgctgagcttaccacaaagagaatttgcttatgagcactgggatgagatacttganattgcaaccagtatgatgtggctctatccattggtgatgggctaagacctggatccatctatgatgcaaatgacacagcacaatttgctgagctcttgacacaaggagaactgacccgtagagcatgggaaaaggatgttcaggtgatgaatgaaggacctggacacatcccaatgcacaanattcctgaaaacatgca

SEQ ID NO: 43140 - DNA, 296 bp, Glycine max
  unsure (1)..(296): unsure at all n locations; Clone ID: 701126562H1
gcgaatggtcctgacccttccatcgacccttcatttctttcccaactacaatcactatgccctcaaaacgggggacgggttcaaaancnagtagnggctagatancgggtagtcaaaccanattnnatttntgcttactatagtaatttgangaattctcgtggaattctgcaatctgatcaagcactatgnagtgatgcttccacaaagacaactgttcagaggtacttgggcttaataagagggttacttggattaacattcaacgtggaatttgggaagtctatggtgaaaat

SEQ ID NO: 43141 - DNA, 288 bp, Glycine max
  unsure (1)..(288): unsure at all n locations; Clone ID: 701126563H1
tggacgatcgcttcgcggatttgaaccctaanacgtgcgtggttttangcggcagaggattcctcggaagatcgtnggtgttcaggcngttgaaactcggtaactggatcgtccgagtcgcngattccgctcagtctctccanctccaccantccgagtctcncctcgaacaagctctctcttcttctcgcgcttcttacttccacgtcgaccttctcgntaaacggagcattgtcaaagttctanaagttcctctgttgtctttatatggatgttgccggcgtcgat

SEQ ID NO: 43142 - DNA, 298 bp, Glycine max
  unsure (1)..(298): unsure at all n locations; Clone ID: 701126564H1
tggaataagagtcctggtcaatacaaccggcatgnagatccnatnccanggcctcaagggaatcnctntttcagtngttnagggnacccatggcnggggggtggaaggaactatgggcnttcacnaaattatccancccaacagaantaaangtcaagcatcccagaattatccgncccaacagaactatgcccaagcatcgcagaattatccaccccancagnattatggccaagcatcgcagaattntccaccccaacagnattatggccaagcatcacagaattatccaccccaa

SEQ ID NO: 43143 - DNA, 279 bp, Glycine max
  unsure (1)..(279): unsure at all n locations; Clone ID: 701126565H1
cagcatcaaatgttgctaattagaaaattgattgctgcgggtgnaatgttccatcatcacagttcaagnnaagnccatntgcntcacncatgnaaatgcatagtattggaggcagtcctggaacatcattcagnatctcagacactcagatatttttgtacacaggagttgagaatgcatcagatncaagcactgatcagggaagtgcaggaatgagttcaacttcatcagancacactgcatatgactcagcagcagagaacagaccctcaacancaa

SEQ ID NO: 43144 - DNA, 281 bp, Glycine max
  unsure (1)..(281): unsure at all n locations; Clone ID: 701126568H1
gttggatcnagtcanactagntntgaaaaatagngangaatatcattgngaggatttcgctcngtnggctgatgggccagagnngngtnggngttntcatntgtagttncttcgccccnaatactgaggntggtgtggacaatctgtttgagangatggaccgcatggttgctcacaacccctctttntgcgacatcacttggggcgctggaggnnnaacggntgatcttacnttgggaatggccaacaagatgcntnacattgtctgtgtggaggccatt

SEQ ID NO: 43145 - DNA, 283 bp, Glycine max
  unsure (1)..(283): unsure at all n locations; Clone ID: 701126572H1
gnaagtcttacccaactgtgagtgctgattaccagaaggccgttgatgaaggcgaantaanangntcagaggnttcattcgctggagaagatatgcgctcctctnatgctccgtttggcatggcactctgctggaacctttgacaagggcacgaagaccggtggacccttcggnaccatcnagcaccctcccgnactggctcacagcgntaacaacggtcttgnacatcgctgttaggcttttggngccantcanggcggagttccctattttgggcaacgcc

SEQ ID NO: 43146 - DNA, 232 bp, Glycine max
  unsure (1)..(232): unsure at all n locations; Clone ID: 701126573H1
gtaagaagcagnntggnacgagcagcgtcgccnggcattggttggccctcccgctcctccggtaggagctcctggatcaagccaggatgcgtcgtctcctggtccagctgtatctgaggacgagagtngagctgaaaccatcaggtgcctgaagaaggtgataggatgcttagctttgagctgggctacccttgttttgttcttctagagaagaagctgaggattcattgct

SEQ ID NO: 43147 - DNA, 155 bp, Glycine max
  unsure (1)..(155): unsure at all n locations; Clone ID: 701126574H1
ggtggcggtcgatttggtggaagtgnctggtngtggtcgttnnagtggangttttggttgtncactttggtggaagatggtggcggtgganggggtcttggaaatatacccaaccttgctgcggaangnacagggaanaagaccaaattttctgt

SEQ ID NO: 43148 - DNA, 287 bp, Glycine max
  unsure (1)..(287): unsure at all n locations; Clone ID: 701126576H1
anatgcacaganagaaaatggtgtcggggtcaggnattctncgctaagagggtagttgtggatcncgcggcaccncatnctggggnaggcttgcatngatcgttgccgaagganttctgaatgggcatnaggtngtggtgntggcgctgcnatgagatttnatctccggtgggctcgttcaggcagaagatgaagtacttgcntntcctccgcaagcgcatgancaccaagccctctcacggccccatccatttccgtgcacccggcaaagatcttctggcgcaccg

SEQ ID NO: 43149 - DNA, 68 bp, Glycine max
  unsure (1)..(68): unsure at all n locations; Clone ID: 701126577H1
tggttgtgtgggctgtggggtttagtgtaggaaggtanngcanantnaacagnagctgtcatttcaaa

SEQ ID NO: 43150 - DNA, 292 bp, Glycine max
  unsure (1)..(292): unsure at all n locations; Clone ID: 701126579H1
gttttgtaggggttcaataggcccattancaagattactacatgactctgatcttgtctctattgacaacnttgttctcancatgttgcatntgnttttagtagatctttancaaangctatttattttctgcagaggtttggttgtaggactatctcaataggttttcgttctctatttttatttgctcattgctgagcactccgtattcttgtttttctcacaagtttccccattcaattgtgcaatgaggatgtggaaataatttatttggttgttatcaggacataat

SEQ ID NO: 43151 - DNA, 277 bp, Glycine max
  unsure (1)..(277): unsure at all n locations; Clone ID: 701126581H1
gtttgacttngnaaacattgtagangctgcaaaaantgctgtgnagaaggtcaatgtnttagnttcggnataatngctgatgtgggtccacagggttcatccntatgttaccactgggaataagaactctaaatttggcattagaaatgagaagctgcagtgcgttttagatgcagtgaaggnacatcctaatgagctcaaacttgtaggggcccactgccatcttggttcaacaattaccaaggttgncattttcagggatgcagccaccattatg

SEQ ID NO: 43152 - DNA, 278 bp, Glycine max
  unsure (1)..(278): unsure at all n locations; Clone ID: 701126583H1
aaataggagtngaacacttgncttagagatgtaaaggatacnaccattagnncccttggccagnngangtaaagtgcannnctcacagccgtgaagggtttggntgcaagacttaaagagatcaggggttaccttgaccttgttaagcatcttgttgttaatcaagttgtggagtgcanttacacttctaatgagagatgagaggtatattaccagcntcatatcattnggnttcactgcanaagccttgataagatcancaacattgagatttggta

SEQ ID NO: 43153 - DNA, 275 bp, Glycine max
  unsure (1)..(275): unsure at all n locations; Clone ID: 701126584H1
gtcgattgttaggctgttgctctgatctggagtttnatcaactgtacctaattnancttggangatnagtgancttcggntgtaatganattttcaaggtcgagaaggtagaccctgnnggtaaaaagtatgacaaggtttctcggattgtggcacggagtgagaagtgtgacatgtacatgcttctagatataaataccgagatttatncgatgggggnaaaanaaagattcntgatggctttgtctccttcacttgttctgaatactaaggat

SEQ ID NO: 43154 - DNA, 280 bp, Glycine max
  unsure (1)..(280): unsure at all n locations; Clone ID: 701126586H1
caggttcatatttttcttggaaagcttctgctatggggaaaaatgtttctaatgcaaagacggttcttggagnaagaggtanacagatgatatggagcttgatgatgcagtccacacagcaatgttgactctgaaggaagggtttgagggacagntctcaggaaaaaacattgaaattggcataattggtgctgatanaaagttcagggtattgacaccagctganattggatgactatttggcgganntaggataatcngnnatgaggaatnctgngtt

SEQ ID NO: 43155 - DNA, 99 bp, Glycine max
  unsure (1)..(99): unsure at all n locations; Clone ID: 701126587H1
cnaccacaaccatgtcttctgccactgcctccancactggctnccgttnantcttgtncctncggcgtgtggtctnctcgcggcncctgccgttggtgt

SEQ ID NO: 43156 - DNA, 279 bp, Glycine max
  unsure (1)..(279): unsure at all n locations; Clone ID: 701126588H1
anctttttnncacacaatttggaacagnaaatgggtgcaggagattactacaagatcctcaagatgnngcncnaatnccgcggntgtnganctcaaganggcgtataagangttggccatgaantggcacccagataagnnccatccacaccaccatcnacanngttacgaangnagaagctgaggcaaagttcaagcaggtttcggangcttatnatgttctcagtgaccccaagnaggcnagatctatggttcnntggtcantatnnccgagctcct

SEQ ID NO: 43157 - DNA, 281 bp, Glycine max
  unsure (1)..(281): unsure at all n locations; Clone ID: 701126589H1
cctattagagatgatgaggttgttcttggacaatacgaaggctataaagatgacccaacagtacctgangaggtcanacaaccccnncatttgcaactgttattctgcgaatncacaatgaaagatgggaaggtgttccgttcatactnaaagcagggaaggcactaaattctagaaaggcagagatcagggttnaattcaaggatgtccctggtgatattttcaagtgtaaaaagcaggggagaaatgagtttgttatccgcctacaacctttaggaggt

SEQ ID NO: 43158 - DNA, 202 bp, Glycine max
  unsure (1)..(202): unsure at all n locations; Clone ID: 701126591H1
gggggatacagcccaactctgtcttggaatttgaaatcgaagtcttgagtgcacaatgaaaaccttggtagtctgtctctgtcctaagantnnnatcatcatccatttccatggacttgtattatggtatccccactttgtgactcgtgagtgatatctacagtggttgagttgttcaactgaaatactaaataacttttgg

SEQ ID NO: 43159 - DNA, 287 bp, Glycine max
  unsure (1)..(287): unsure at all n locations; Clone ID: 701126593H1
cacttcacttnactantacntcntgggcagacgagacccagaacangtatgagnatctctgangttgaggtccaggatcgtggngttttgggntttctcggtangnaaaaggatgnngaagacaagctcatcctcacgaggnngtcatcgccaccgagtttcaaanngtcactgtgctcagaccaaggagagnnnnagcacagcctcttagaaaagcttcaccgatctgacagctgactagctcttcaagtgaggaggaaggngnagatggagaganaagggggagt

SEQ ID NO: 43160 - DNA, 290 bp, Glycine max
  unsure (1)..(290): unsure at all n locations; Clone ID: 701126594H1
aaacttgctgtgaatctnattcncttccctcgtctgcacttgtncatggtnggttttgccccantcgatntnggtgtntcccngnngtgtnagagnctnttngtgtacncgantnagncccaacaaatgtnggatgctnngaacatggtgtgtggnagctgatcctcgccatggtcgatacttgacagcttctgngatgttncgtggtaagatgagcacaaagnaggttgacgagcaggtgatcnattttcagaacaaganctcatcatantntgtggantggatcccca

SEQ ID NO: 43161 - DNA, 290 bp, Glycine max
  unsure (1)..(290): unsure at all n locations; Clone ID: 701126595H1
ctnttggtnctcttggttctctatgtcacagtggagcagagtaagcnantccaccacntanaagccgncngtgtggtttgtaaaanncaagnggnatnccagntatgcggaatgggnttccctnntatggtaatgggctttaatgcntattggcttatgtaccttgcctctgatccttcccannggaacanaatctcatcggtatttcaacaggctgcaaatcatggantcaacattgccagaacttgggccttcagtgatggtggatatcagccctacaatntctccng

SEQ ID NO: 43162 - DNA, 289 bp, Glycine max
  unsure (1)..(289): unsure at all n locations; Clone ID: 701126601H1
ctgaaggangccatcgtagcctacactggcttctctccttccaccttcttcacggtgctggcgcttctttttgccgtttactacgtcgtcacgggtctctttggctcctccgacgatcaccatcaccgccaccgccacgtcnnnnnnnnnnnnnnnatgccgcctctgcgccccccggttcagctcggcgagatcacagcggaggagctcaaggcctacgacggcaccgatcccgagaagcccttgctcatggccatcaaggcccagatctatgatgtctcccagagca

SEQ ID NO: 43163 - DNA, 288 bp, Glycine max
  unsure (1)..(288): unsure at all n locations; Clone ID: 701126602H1
attgatttttcctcttccatttctcttactttctcagcctttttcgattacccatttggttatttcgccctaatggctcttgctccatccaaagtttccaccttttctggttttncctcccaaacccagtgttgggggtgctcagaaaaacccaacttgctctgtttctctgagctttttgaatgagaaacttggaagcagaaaccttagggtttgtgcctcaacggtgcctctcactggggtgatttttgaaccgtttgaggaggttaagaagagcgagcttgctgt

SEQ ID NO: 43164 - DNA, 283 bp, Glycine max
  Clone ID: 701126604H1
caaatatatcatacatatgttctagatactatagagcacctgagctcatatttggcgcaactgaatatacttcagccattgacatctggtctgttggatgtgttttagctgagctgctgcttggacagcctctgttccctggtgagagtggagttgatcaacttgttgagatcatcaaggttctgggcactccaacaagggaagagattaagtgcatgaaccctaattatacagaatttaaattcccacagattaaagcacatccatggcacaagatcttcca

SEQ ID NO: 43165 - DNA, 272 bp, Glycine max
  unsure (1)..(272): unsure at all n locations; Clone ID: 701126605H1
gttagggtttccaagatggaaggcatgnttgatcacctggctttcgagcggaacaattcgcagttcgatgtcgacgagatgaagatcgtttgggccggttctcgtcacgcttttnaagtatctgacaaaatggctcgcctcgttgccagcgatccggcattcagaaaggatgatagagttgtgcttgataggaaggctttatttaagaacactttgaggaaagcngcttatgcatggaaaaggattattgagctccgtctcagtgaagagga

SEQ ID NO: 43166 - DNA, 287 bp, Glycine max
  unsure (1)..(287): unsure at all n locations; Clone ID: 701126606H1
gnncaacccaaaactaggctatgccggaatcnccgattccggnaaccncattcccnncctccaagaaaataccacaagaagcncctgcctctcnctcttggtnnccctcctcgtgggcggctacgcacngtggccattgttgtcggngtaaaaaataanaactccgacaactctgccaccagcncncncctctccctctcccaccantnanacacgatcgtgaagagcgcgtggcagctccacattctaccccgaantctgctactccgccatcgcctctgagccca

SEQ ID NO: 43167 - DNA, 277 bp, Glycine max
  unsure (1)..(277): unsure at all n locations; Clone ID: 701126607H1
ctttcgctccaaatgccatccattctccttctntgtctgtnacgaatgangcactgaatgttatgatttctggggctcctgcttctggtaaaggaacccagtgccacctcttcaccaacaagtacggtttggttcatattgctgctggagatttacttagggcagaaattgccactggaagtnataatggaaagcgagccaaacagtatatggagaagggacagttggtccctgacgaaattgttgtgatnatggttaaggagcgtctcttgaaacc

SEQ ID NO: 43168 - DNA, 278 bp, Glycine max
  unsure (1)..(278): unsure at all n locations; Clone ID: 701126608H1
aggaggggttctgtgacctccttctattccaaattcatcgattctnacaatcttaattgtgggngtncctcttcgaatccccatcgcgtcgctccttctgcaacttcattcgatatctcttccgcttctgcgtctaaagctacgaccgacttcgtgtcgttgacccgccactatggaaggtgctattgggagctctccaaagctcgtctcagcatgcttgtggttgcaacatctgggactgggtttgtcttggggagtggtagtgctgttgatctttc

SEQ ID NO: 43169 - DNA, 276 bp, Glycine max
  unsure (1)..(276): unsure at all n locations; Clone ID: 701126609H1
agaaggtggagganttgttgctgctggatgtgatgccgcttagtcttgggattgagactgatgctggtgaaatgtcagtgttgattcccaagaacaccatgatccccaccaagagggagagcgtcttctccactttttctgataatcaaacaagtgttttgatcaaagtgttcgagggggagcatgccaagacagaggataacttccttcttgggaagtttgagctttctggtttcactccatcgccaaggggagttccacaaatcaatgtggggt

SEQ ID NO: 43170 - DNA, 273 bp, Glycine max
  Clone ID: 701126610H1
gaatttgacacattccccagctcaaagagccctgacattctacgttggaggtacgaccggttaagaactgtggctgggaggattcagagtgttgtaggagatttagctactcaaggagagaggatccaagctcttgtgaattggcgtgatcctcgtgcctccgccatgttcatggtattctgctttgtggctgctatagtgttgtatgtcacacccttccaactgcctattcttctgactggattttacttgatgaggcaccccatgcttcgg

SEQ ID NO: 43171 - DNA, 274 bp, Glycine max
  unsure (1)..(274): unsure at all n locations; Clone ID: 701126611H1
gaaaatgaaggtccttgttttcttcgttgctacaattttngtagcatggcaatgccatgcgtacgatatgttccctctccgaatgaacactggctatggtgcccgtactccggaggtgaaatgcgcaagtnngaggcttgctgtggaagcacacaacatctttggctttgagaccattcctgaagagtgcgttgaagcaacaaaggaatacatccatggcgaacaatatagatcagactccaaaacagttaaccaacaagcttacttttatgcc

SEQ ID NO: 43172 - DNA, 271 bp, Glycine max
  unsure (1)..(271): unsure at all n locations; Clone ID: 701126613H1
cagccatggggcgaagacccgcgaggtgttataggcaaattaagaacaaaccataccccaagtnacggttttgccgtggtgttcctgatcccaagatcaggatttacgatgttggtatgaagaagaagggtgttgatgaatttcctttctgtgtccatctggttagttgggagaaggaaaacgtttctagtgaggccctggaagctgctcgtattgcttgcaacaagtacatggccaaatttgctggaaaggatgctttccacttgagagt

SEQ ID NO: 43173 - DNA, 274 bp, Glycine max
  Clone ID: 701126614H1
agatggaggggaaggagcaggatgtgtcgttgggagcgaacaagttccccgagagacagccaattgggacggcggcgcagagccaagacgacggcaaggactaccaggagccggcgccggcgccgctggttgacccgacggagtttacgtcatggtcgttttacagagcagggatagcagagtttgtggccacttttctgtttctctacatcactgtcttaaccgttatgggagtcgccggggctaagtctaagtgtagtaccgttgggattca

SEQ ID NO: 43174 - DNA, 275 bp, Glycine max
  unsure (1)..(275): unsure at all n locations; Clone ID: 701126615H1
ctagaaatcaccgttatctccggcgaaancctccgcgtaacggaggacgcgtacgtcgtcgttcgggcggagtccttaaactgctgcaccacgagaaccgccaaggacgacggcaccaaactcctctcgtggaacgagaagttcctcttggacatgcccatgcatgcaaggtccataaccttcgaagtgcaatgtaacaggttcaagggctttcggccgctcggggtggcccgaatcgccgcntccgatttcctcggcngcgcctgccggaaaat

SEQ ID NO: 43175 - DNA, 229 bp, Glycine max
  unsure (1)..(229): unsure at all n locations; Clone ID: 701126616H1
tnggngccgcanncagtttcncngttgagtggaaaccaagaagnagcttatcaatgggtnacaattaactatctactgggaaacttgggaaagcattattcagaaactgttgcagtagttgatcttggaggtggatctgttcaaatgggcttatgcagtctcagagacagatgctgcgaaggctccacgagcaccggacggagtggaatcctacataacggagatgttt

SEQ ID NO: 43176 - DNA, 284 bp, Glycine max
  unsure (1)..(284): unsure at all n locations; Clone ID: 701126617H1
ctcctacttacgagaaagttgccacagcatttaaattggaggaagatgtagtaattgcaaatctggatgctgataaatataaggatctggctgaaaagtatgatgtgagtggatttcctaccttgaagttcttcccaaagggcaacaaagctggtgaagagtacggaggtggaagagacttggatgactttgtggcttttatcaatgagaaatctggaacaagtcgagatgtaaaaggacaacttacttcccangntnnttnngtagaaagcttggatgtcttg

SEQ ID NO: 43177 - DNA, 284 bp, Glycine max
  unsure (1)..(284): unsure at all n locations; Clone ID: 701126618H1
aganngtagagganttnttgctgctggatgtgatgccgcttagtcttgggattgagactgatgctggtgaaatgtcagtgttgattcccaagaacaccatgatccccaccaagagggagancntcttctccactttttctgataatcaaacaagtgttttgatcaaagtgttcgagggggagcatgccaagacagaggataacttccttcttgggaagtttgagctttctggtttcactccatcgccaaggggagttccacaaatcaatgtggtntttgatgtt

SEQ ID NO: 43178 - DNA, 149 bp, Glycine max
  unsure (1)..(149): unsure at all n locations; Clone ID: 701126619H1
ctggatcaggaaatctgatctgcatgctaattactcaataaacaaaatgtatgtttattcacatgtatgtagtactgtaanntcgtaatcctgaccttttagcttttatagattgaaggaaagaggtactaggctactagtttgatgag

SEQ ID NO: 43179 - DNA, 279 bp, Glycine max
  unsure (1)..(279): unsure at all n locations; Clone ID: 701126620H1
ctctgttcccttcttctgtctcatgcacacaccactgtaccttgttctcaccgaaaccttcaactaggaatcgatcgagagtgtcttgtgttgctagtgcaagaggctgcaatatagatagatacgttcgtgcgtacgtaggaagggtacgtacgcggtagtacacaagacacgacgccgttttgcactctgtncttatttccgatcatgagggcgcacaagaagggtgttaccgtggggatcactgttgctgcttcttaagcctttttcttttcttat

SEQ ID NO: 43180 - DNA, 279 bp, Glycine max
  Clone ID: 701126621H1
ggtcctcgcccggagaacggccttggcaagctccgaaagcaccacaccttcgctttccgatctgcctccggcaaggaatcagacagcggaagcgtgaaatcgtacggtgaagatttgccggaggatgcggtgagagtgacgcgaagtatcatgatcgtgaaaccacctggtggtaaccagagtccgagcggatccgctccggcttcccccgccggttctactcctccggtgtctcctttttcgggagctagagagtccttccgttttcggagaaggtcg

SEQ ID NO: 43181 - DNA, 91 bp, Glycine max
  unsure (1)..(91): unsure at all n locations; Clone ID: 701126622H1
cttgngcaagcttacgtcnctaaataagttgattctganncggaaacctnancctccggtgtgatcccggggacgctggggctgtgtaagg

SEQ ID NO: 43182 - DNA, 272 bp, Glycine max
  Clone ID: 701126625H1
ccttctcaggttggggaactaacgaggagctgattgtatcgatcttggctcataggaatgctgctcagaggaagcttatcagagaaacttatgcccagacctatggagaagatctcctcaaggccttggacaaagaactcacgagtgattttgagaggctggttcatctttggacacttgattctgctgaacgtgatgcatttttggcaaacgaggcgactaaaaaatggacttcaagcaatcaggttctggtggaaatagcctgcactagg

SEQ ID NO: 43183 - DNA, 262 bp, Glycine max
  unsure (1)..(262): unsure at all n locations; Clone ID: 701126626H1
tctggttccagctggcattattgcntgcttttctcccctatctgatgcaagctcctttgtgatactttannttgttacgtcagtatacttttctggagtcatggttcgcttgatgctcgtacttgctccagctgcatgtattttgtctgggattgctctttctcaggcttttgatgttttcacaagatctattaagttgcagttgcccagcctatcaggtcattctcacgttgatgcaggggaaaccagttctgaaagtgtt

SEQ ID NO: 43184 - DNA, 277 bp, Glycine max
  unsure (1)..(277): unsure at all n locations; Clone ID: 701126632H1
ganagancgntncaaaaacgcggcagagaagcagcgtgcaacagcaggaacggtgtgcgctggtcgactattcgaacgnttcaccgatcgcgggnctggcgaacgggaaggacatcattgagacgccgttgtcgtcgatggcnnnnnnnnnnnnnnnnnnnnnnacgatgaagactccggggtcgggagangctctgctgaggggccaggtgaagaccctcttgcagagggtggangaagaggctgtgatttcgaagctatcgatggaaattgttgc

SEQ ID NO: 43185 - DNA, 284 bp, Glycine max
  Clone ID: 701126633H1
atggtgtgcttcaaagggaaacataccatactttgagacctcagcaaaagaaggatttaatgttgaagctgctttccagtgcatagcaaaaaatgcactcaagaatgaacctgaagaagaaatgtacctgcccgacacaattgatgttggtggtggtggacgacagcagagatctactggctgtgaatgttaaagtgcagagaattctatggactagctttagttgcttgttttttgccaaaatacaagcgatcctcatggattattagcctgcaagtacttta

SEQ ID NO: 43186 - DNA, 267 bp, Glycine max
  unsure (1)..(267): unsure at all n locations; Clone ID: 701126634H1
gggcaaataattgccttcacgtctcanattgataatctgcacanaagacctgctttcctttacagggnggcagnagaagtcactggagcnccactgtgaaaaaattagcgnngaacatgcacanagccttgnnatggnagagaatganaagaatgactcctcangcnganctatggntcttaagngatcactggaagagcgagangattcatatcagaagtngaatgaagaatatntncanattgntagtttgtttaaggnatgcat

SEQ ID NO: 43187 - DNA, 276 bp, Glycine max
  unsure (1)..(276): unsure at all n locations; Clone ID: 701126637H1
cttcttctcgaacaagtttggtgtgaggccattgagagatagccncnatgaaatgatggcagccttataccttcaagtcagcataattagccaggctctaatcttcgtcacaaggtcccgcagctggtcttttgttgaaagacctggtcttctcctactaggtgcattttttattgctcagttggtggcaacttttatagcagtgtatgctaactggggctttgcaagaataaagggaatgggatggggttgggctggtgtaatctggctgtacag

SEQ ID NO: 43188 - DNA, 95 bp, Glycine max
  unsure (1)..(95): unsure at all n locations; Clone ID: 701126639H1
aatgtcccctcctcgattntccaaaccctctctctctntctctaccctaatctcattctcgcccacnctctatataatacncnacagcaacatng

SEQ ID NO: 43189 - DNA, 274 bp, Glycine max
  unsure (1)..(274): unsure at all n locations; Clone ID: 701126640H1
tgcccgaggctaattctatctcaaatcagatgacaaaggccaattgccagagcaatattcnattctctcagcagcccaagcttcagcngcancaacaacctggcatggtttctgaaatgcctggccacatggcacttctccctactgctacaactaaccaactttctgctggtggcagtagtatagtgactggagcaggtggtncagggcagtctgtaattacagatgangttccatctcgctccacctcaccttctacaaataactgtaccna

SEQ ID NO: 43190 - DNA, 259 bp, Glycine max
  unsure (1)..(259): unsure at all n locations; Clone ID: 701126641H1
aaaataatccaaaccgcaaatgcatatctaataaatccaacaagttntgctaatccatcctacagcanttcagatacgaaaaaaagtgaaaccaaaagtaccangaacntaaacttccttagtactctgactaaaacaaaacntctaagacncctgcaantaaactggggggaancatanggantaggantaactggaaagcagtttccagtcaaaagnctaanggnntctaagacncaagnttntcattgngngngng

SEQ ID NO: 43191 - DNA, 252 bp, Glycine max
  unsure (1)..(252): unsure at all n locations; Clone ID: 701126642H1
ctgggaactaccaagcctgatgagncggaccgccacccatactctataatagagtgtgagacctaagcgtgaagtcattttaccatctgtaatctacatacaaaagattttgcggcgaaggccatttctcntcaagnaccttgaaaatgttatgcggaaattccttcagtccttggtncttnaccgaggaaaatgagaggaaaaagttggcaatcttcacagcacttgctttctctcagaagctgtctggtc

SEQ ID NO: 43192 - DNA, 268 bp, Glycine max
  Clone ID: 701126643H1
ctgaaaatgtcttgctgcggtggtaactgtggttgcggaagctcctgcaagtgcggcaacggctgcggaggctgcaagatgtacccagacttgagctacactgagtcaaccaccaccgagaccttggtcatgggagtggcacctgttaaggctcaatttgagggtgctgaaatgggtgtgcccgctgagaacgatggctgcaaatgtggaccaaactgctcctgcaacccctgcacttgcaagtgaggtgttgggagagcaagcttca

SEQ ID NO: 43193 - DNA, 186 bp, Glycine max
  unsure (1)..(186): unsure at all n locations; Clone ID: 701126644H1
agttctgagctctttgangaatcaaattcagatcggnttagtcccatnagcaangtnaaaacacaaagtgtgaanctgttgnccggggccagcttctgctcggagccnggancaaggctnatcctcttcnagcatgaacggaaaagagacgagaatctcccaagatgacgatctttcccaagatcc

SEQ ID NO: 43194 - DNA, 229 bp, Glycine max
  unsure (1)..(229): unsure at all n locations; Clone ID: 701126645H1
caganacgcaaacttaaagaacnctggctaccacacatgggaaanattaatactcaaggaanccacaagatccttccactccaaatgcagtttcatacaaaacagcagcgagagagaaactgataaggcagggatacaacattgttgggatcattggagaccaatggagcgatctcctcggaggccacagaggcgaaagcaggacctttaagcttcctaatcccctgta

SEQ ID NO: 43195 - DNA, 269 bp, Glycine max
  Clone ID: 701126646H1
attcgcttcagtcactcacgagagagaaagatgaacaagaacaaagctggtgcatcgttggattccttgatgtcttccttcaacgctcgcataacgcagcttcaggagctcgtcattgcgcgaaacatgtaccctgcgagcggcgtcgaggatctgtcagcggtggacgcggcggtgagcgcgatggagcttcaggtgaaggctatcaaggaccgcctgcgcgaagaggcactagccattcccaaaaccaagaaactgattgatgcatc

SEQ ID NO: 43196 - DNA, 279 bp, Glycine max
  unsure (1)..(279): unsure at all n locations; Clone ID: 701126648H1
gcganttncgcgatcntgtggggcaagaancntgcatgtnctccagtcagntagagggncgttggacctaaantgangtacagagatggggggctgcccanagtactggagcagatttgtcagccatctgtggacatcaagacagtactgtcccaggtnanggaaaggctntcaaattatgctgcttcaagttcagacgtnttgccagagttnttacaagtggaagcnttttccaanttaagcaangccnttggcaaggtgatagaggcacagnctgac

SEQ ID NO: 43197 - DNA, 280 bp, Glycine max
  unsure (1)..(280): unsure at all n locations; Clone ID: 701126650H1
aggagtgttcagtgataagccttgaatgttgtaaacnaganaagcaagancttgaagcttctcttgtaaaatgcaatgaggagaagtccaaaatcgaagtagagcttaccttggcgaaggaattggttgagacttcgggatctcatgtgaattctctgaatgagggcaatggtacattctcttcattgaatcctcaagaaaattctactcatgctgcttgcagtcatgagccagagagtgcaagcatcaatatgcaatccaaggatcctcttgcatttat

SEQ ID NO: 43198 - DNA, 260 bp, Glycine max
  unsure (1)..(260): unsure at all n locations; Clone ID: 701126651H1
gccgcccttaagcacaggtcaatggacagagtgatcatgtgcgctatagacnacngaggtggtaaatttttgccgaaaatacttgattgtaaataaggaggcgttttctcataagaagctggaccttgtcatcaatgatgccaaggctgaattggagaagagaaaggaaaagtttgatatcattgttggagatttggcagacccacttgaagatgggccatgctatcaactctacaccaaatccttctatgagaagatcc

SEQ ID NO: 43199 - DNA, 273 bp, Glycine max
  unsure (1)..(273): unsure at all n locations; Clone ID: 701126653H1
gtttagnncagaaccagatcntnttctcttcttccattggcaaacatggcnactcaaatgagcaagaagagaaagtttgtggcggatggngtgttcttcgccgaactgaacgaggttctgacacgtgagttggcggaggacggttactccggcgtggaggttagngttacgccgatncgcaccgagnttatnatnagngccaccagannncaagccgttctcggttagaagggaaggagaattagggaacttacctcagtggtgcagaagagg

SEQ ID NO: 43200 - DNA, 271 bp, Glycine max
  Clone ID: 701126656H1
ctgctggccaagaagattacaatagattgagacccttaagctatcgtggagcagatgtattcctgcttgctttctctctcataagcagggccagctatgaaaatgttgccaagaaatggattcctgagttgaggcattatgctcctggtgttccaattattcttgttggaacaaaacttgatcttcgggatcctaagcagttctttcaagaccatcctggtgcagtgcctatcaccacagcacagggtgaggaactgagaaagcttatcgg

SEQ ID NO: 43201 - DNA, 247 bp, Glycine max
  unsure (1)..(247): unsure at all n locations; Clone ID: 701126657H1
gcgccgatcccgagcacagagaacaggaggaggcacccgacgttggcgacgacgaggacnacggagctcacgtcgctccaatcgtcaagctcgaggaggttgctgtcaccaccggcgaggaggacgaagatgcaatcctggatctcaaatcgaagctttaccggttcgacaaggacgggaaccagtggaaggagcgtggcgccggcactgtgaagttcctgaagcataaggcttccggcaaggttag

SEQ ID NO: 43202 - DNA, 266 bp, Glycine max
  unsure (1)..(266): unsure at all n locations; Clone ID: 701126658H1
tgtgatggttggnatggggcaaaaggacgcatatgttggtgatgangctcaatccaagangggtattttaacactgaaatacccaattgagcatggcatagttaacaactgggatgacatggagaagatctggcatcacactttctataacgagctgcgtgtggccccggaagancaccctgttctcctcacagaagcaccacttaatcccaangccaaccgtgagaaaatgacacagattatgtttgagaccttcaacactccgg

SEQ ID NO: 43203 - DNA, 271 bp, Glycine max
  unsure (1)..(271): unsure at all n locations; Clone ID: 701126659H1
anatggcggaaccgtcgtccacngccgccaccgctnancaccgccgccaccgcttccacnncncatncnncgggnaccagngaccanaagccgggccgacgaagcagacgaagaaaccanccaacacctccancgccgagncannnnncncctccatcaacctggaagcgntaaccatcgacgataaaganaataantctgccaaangcgtggangancccgaggattccaatatccaagcgggnacttctggcgacacgccgtacacctt

SEQ ID NO: 43204 - DNA, 245 bp, Glycine max
  unsure (1)..(245): unsure at all n locations; Clone ID: 701126660H1
gggctcgagctgaaaggncgcataccagctttggngtcaagcgggngcatncacggcaagtactatcattaagaagcaaggccttagaanagctgcagcagtttcnggngtcagggctggtgtggggggttnnnagnatctcttggagccactatggggggtgggaacnatcacaagagaggtngcaaactncgttgcatatgcatttgcnccagcagnnnnagnnacnccncttggtgcatgaa

SEQ ID NO: 43205 - DNA, 246 bp, Glycine max
  unsure (1)..(246): unsure at all n locations; Clone ID: 701126661H1
gagctctgtcattgtctcaagttccaggtttcagcgatttcgatctcgcatagcattctacaatggccactattccagttaaccccaagcctttcttgaacaatttgactgggaagcccgtaattgtgaaactcaagtggggaatggagtacaagggctatctcgtttccgttgnttcctacatgaacttgcagctggccaacactgaagagtacattgagggacagtttactggaaatttgggag

SEQ ID NO: 43206 - DNA, 261 bp, Glycine max
  Clone ID: 701126663H1
atttccgcttccttcaatttttgaacaagcttctcgcttccctagcttagcaactacatcacagatctttaacgataaaataaaaatggatccaaacgcggtgaagtccactctctccaatctggcgtttggaaacgtaatggcagcagctgcccgtgattatcagaaggaattgcttgctcaagagaagactcaaggatcaagttcagtacatgaggaggttgaccttgacgagttaatggatgatcctgagttagaaaa

SEQ ID NO: 43207 - DNA, 276 bp, Glycine max
  unsure (1)..(276): unsure at all n locations; Clone ID: 701126666H1
gaggggtattgagattgannttcaagtaatgnggaagancaaggttcttgtggtggggggaactgggtacatanggaggaggatagtganggcaagcctggcactgggccatgagacctatgtggttcagangccagagttgagcctccagatagagaagctgcagaggctcctctccttcaagaagcaaggtgctcatctcattgaggcctctttcaatgatcacaagagccttgttgatgctgtgaagcaggttgatgttgtcatcagtgccat

SEQ ID NO: 43208 - DNA, 71 bp, Glycine max
  unsure (1)..(71): unsure at all n locations; Clone ID: 701126667H1
gcaggtcccatggcccatccagtgcgaccacactnttacatcaagatggacaacttccacacaacataccg

SEQ ID NO: 43209 - DNA, 272 bp, Glycine max
  unsure (1)..(272): unsure at all n locations; Clone ID: 701126668H1
ggatgtcgaggatcattgtcagagaaaataatgaaaaagtacaacctaaganagaagggaggttctgaacatcagacatatgctttgggaattaaagaggtttgggaaattgatgagaaaaagcatcaacctggtgctgtaatccacacattgggatggtnnntggatcataaaacatacggaggatcttttctgtatcacatgaaagataaacaaatatctataggccttgtggttgctttaaactatcagaaccctttcatgaatcctta

SEQ ID NO: 43210 - DNA, 270 bp, Glycine max
  unsure (1)..(270): unsure at all n locations; Clone ID: 701126669H1
gatggtatagttcanctgcagaggcaacttgttgattatactgcttcccnatttcatgagggntttctagatgaccaatttaaccagnttcagcaacttcaagatgaaagcaacccagattttgtggttgaagtggtgactctcttttttgaagatgcggagaggcttcttaatgagctcacaaaaacactaggccagccaagcattgattttaaaaggttggatgctcatgttcaccagntgaagggtagcagctccagcattggagca

SEQ ID NO: 43211 - DNA, 268 bp, Glycine max
  unsure (1)..(268): unsure at all n locations; Clone ID: 701126670H1
anaaccaactcctggacttgctgtcaatatcacaccataactgctattgaagctctgctctctgacttgcttgcatactctctctgttttttctgttcacaaagatttgtaaatttatatttatcataccatatatactatataatatattgtatgctccacttgtttgaagctgtgttgcatattctggatcctatcatcttgtggctttgatgtctagancattggaacatgattacatagggttggcagagaatccgtcaatgga

SEQ ID NO: 43212 - DNA, 259 bp, Glycine max
  unsure (1)..(259): unsure at all n locations; Clone ID: 701126671H1
gttcgttcactttcactttaccaactcctaacaatttctctctntttccttcancaccgcatcaatggagttggacggcgttctcctcggtanntgcaaccctctcctcgacatctctgccgtcgtcgacgacgctttcttgcaaaaatacggtatcaagttgaacgatgcgattctcgctgaggataagcacaaacctatgtatgaagaattggctaacaatcctaatgtggagtacattgctggaggtgctactcag

SEQ ID NO: 43213 - DNA, 267 bp, Glycine max
  unsure (1)..(267): unsure at all n locations; Clone ID: 701126672H1
gtttganaaaatctctggtcagccgaccttctaggcaccttggacctcctcctggtttcagtcatgttcctcntaaacaaggttcacccactgtttctgattcaattagtgggaatccaattatggatgattacagttggttggatggatatcagttgcctgcatcaaccaacgatttaggccctganngtcctcttacttactctcagtcaaatcctcatcaaattggtttgagtgggacagccagttttccctttcctggaaaac

SEQ ID NO: 43214 - DNA, 245 bp, Glycine max
  unsure (1)..(245): unsure at all n locations; Clone ID: 701126673H1
gaaaaattaagatggaggggaaggagcaggatgtgtcgctgggagcgaacaaantcccggagagacagccgattgggacggcggcgcagagccaagacgacggcaaggactaccaggagccggcgccggcgccactggttgacccgacggagtttacgtcatggtccttttacagagcagggatagcagagtttgtggccacttttctgtttctatacatcactgtcttaaccgtcatgggagtc

SEQ ID NO: 43215 - DNA, 266 bp, Glycine max
  unsure (1)..(266): unsure at all n locations; Clone ID: 701126674H1
ctgcngttncaacaggttcgcacnttgatgctatnaccttactctggaaaatatgatggagttattggtgttttaggtgctattgaagccatcagagtcccgaaaaggnctggttttaaacctngangatcantngnagtcatattattcacatcagaagaaccaacacgctttggantaggtagcttgggaaggtcagaaactgcatttctatactgtatcacaataggacttctatttgtggctatttttatcaataaatccat

SEQ ID NO: 43216 - DNA, 264 bp, Glycine max
  unsure (1)..(264): unsure at all n locations; Clone ID: 701126675H1
ttagctaaaagcccangtatatactaatgcatttcanaagggtttaaaagttaaattcaaaccagccaatgcatcnnaaaatgatagtggagccacagatggttctgatactttaccaatgtcagattcgggtttgttggatcctgttgctgttaagtcagttccgcccaggagaanaacacaccaataacattagaattttgaaggataataatgtgttatgttcatctgaaggggttactggtgagaatgggatgccggtgg

SEQ ID NO: 43217 - DNA, 261 bp, Glycine max
  unsure (1)..(261): unsure at all n locations; Clone ID: 701126676H1
ggcaaggtgtgtttgancaaatatccaatggtggtatcccatggttcttgggaacaagtgtggtccttacccttgcttccttgattccactcttccaagggatcagcgtggagtctaagtccaaagggttcatgtcctcagatgcagaactgtggaatgggagatttgctatgttgggtttggttgctctggcttttactgagtatgttaagggtggtaccttggtgtaattcagtcatgaatgcacaccaaaatggtctt

SEQ ID NO: 43218 - DNA, 260 bp, Glycine max
  unsure (1)..(260): unsure at all n locations; Clone ID: 701126677H1
ttataacttggactgagatggtcacagcgtatatggagtttgggttggtcaatttgnccttgaaggtgttcgatgaaatgccaganaagaattccgtgtcttataacacggttctggctgggttctgtcgaaacgaacaaggtttngaggccatgaggttgtttgtaagaatggtggaggagggtttgganttgacggattttagtttgactagtgttgttgatgcttgtggattgcttggtgattacaaggtcagcaag

SEQ ID NO: 43219 - DNA, 264 bp, Glycine max
  unsure (1)..(264): unsure at all n locations; Clone ID: 701126678H1
gctagcgcgagtnaccggagcggcgaagatagagtcagatcggaagcggaagaaggcgtcgacctcggcggcggagaaggagaaccggaatangcataagaannnnnnnnnnnnnnnnnnnnnnnnnaagggtggtggcggtnttgaggttagggcttcgcacatattgataaagcacgaaggttctagaaggaaggcctcgtggaaggatcctgaaggtcgcntcatcaagagcacaaccagagaaaacgcggtttctcagct

SEQ ID NO: 43220 - DNA, 258 bp, Glycine max
  unsure (1)..(258): unsure at all n locations; Clone ID: 701126679H1
atggcacctgcaacactgtctctgtcttctcctcctcctgttctcactcagcatcgccgnaaccgttagatcgagcgactacgactacgattgtgtgtacactgcatacgttagaaccggttcggtgttgaagggcggaacggactctaagatcgggctgaagctgtacgacaagtacggctactacatctacattaaaaacctcgaagcatggggcggcttgatgggcaagggctacgactacttcgagcgcggcaa

SEQ ID NO: 43221 - DNA, 276 bp, Glycine max
  unsure (1)..(276): unsure at all n locations; Clone ID: 701126681H1
aaagaaagtgtcactgttgttaccatggccgaggaagttccaangacaagcannactccagaggnngtngtggtctctgacgtgacacctgctgacgananancagncaccaccaccgacgttgttgttcccgtagagananacgcncaacaagaacaagaaacctcgccagagaaggagaaagagaacgttcccganacagctgaaaccgagtccgaggttgtttcaaanccaagcggtgacgacaacgttcctgaatccggttcttgcaaggag

SEQ ID NO: 43222 - DNA, 272 bp, Glycine max
  unsure (1)..(272): unsure at all n locations; Clone ID: 701126682H1
gaaatcataggggaaatatctgtggtgttgacttcatttggctttgcaatcccaaccaagcacgtaaacctttgaagacaagttgggctgaagctgtatttagtatactaaaattccagttacgaaaagcatcagtgtctgaagatgacgcatttacctttctgaagggtgacaactatgctgnttttntgacttattttagtttttctgaagcactccgtcaggtgaagttagttggtgtgccttatggactatgctttcaacagttgcaa

SEQ ID NO: 43223 - DNA, 228 bp, Glycine max
  unsure (1)..(228): unsure at all n locations; Clone ID: 701126683H1
cnncacccaccaatagggaacgngagcngggngtagaccgncgtgagacaggtgagtnnnancctactganganagggtcgcaanagtaangcaaccgagnacgagagaacancgnagatgcgcacaattgggcanccgcgcnnggttnaaaanccagtggcgcgaactaaccgtgcgntggagnangactgaacgcctcnaagtcagacccgggctagaagnacgcg

SEQ ID NO: 43224 - DNA, 70 bp, Glycine max
  unsure (1)..(70): unsure at all n locations; Clone ID: 701126685H1
cttgatcaccataaccatgtcaatggcaacaacatcccctcnnaccgcnctcttncanaaccgcnccaat

SEQ ID NO: 43225 - DNA, 267 bp, Glycine max
  unsure (1)..(267): unsure at all n locations; Clone ID: 701126687H1
gcaccttctccttctcaatcttgtaattctatntccaccacnanaangattaacggncntnngncagggccacgcaagaacaagccnggnacagcacncgatcacctcaacgtctatgaactcaccccaancaacggctatgcnnannggcatggccnaggagtctaccagtcaggggnacaagttcatngattggaanatgggnttggngcgcacgancacgacacaacggggattttcgaagtccaacccaaacactgcccnggg

SEQ ID NO: 43226 - DNA, 69 bp, Glycine max
  unsure (1)..(69): unsure at all n locations; Clone ID: 701126688H1
catcgttatcatatcattccngcnncactctgntcncatcgtgtaganggtgggagatngggntgcctg

SEQ ID NO: 43227 - DNA, 263 bp, Glycine max
  Clone ID: 701126689H1
actaaggttgacaaggtggttgtcctgtggacagccaacacagagaggtacagcaacgtagttgtgggactaaacgacaccatggaaaacctctttgcttccttggacaggaatgaggctgagatttccccttccaccttgtatgccattgcttgtgttatggaaaatgttcctttcatcaatggaagccctcagaacacctttgtcccaggactcattgatctggccatcaaaaggaatagtttgattggaggagatgactt

SEQ ID NO: 43228 - DNA, 236 bp, Glycine max
  unsure (1)..(236): unsure at all n locations; Clone ID: 701126690H1
gttcccacacttgcaaagccggttacgctggcgaaaatgctcccacngccgtctntccctcctgttgttggtgcaattgatcaaatggacattgatggaactgctgatattaatgatgagaactctgacaaaaccaagggaaaatgcaaactttatgtaggatctcagtcactaggataccgcagagaccatatggaggtgctgtcacccttgaagaatggagttgttgttgactg

SEQ ID NO: 43229 - DNA, 262 bp, Glycine max
  unsure (1)..(262): unsure at all n locations; Clone ID: 701126692H1
aatttcccctctngaaagagncacgcntctaaganaatcacatcacggcaatggaggaaaagcacgcagcagcnatcgaatccgcacacgccgaatctnncggcgtctctcacggcgccgaccacggctggcagaaggtgacctacgctnnnnnnnnnnnnnnnnnnnctgttaacgccgctaacggcggccccgattcccgcgccaattccagcaagctcgttccgnncggcacgctgtccggcaacgacggcgtgttccg

SEQ ID NO: 43230 - DNA, 262 bp, Glycine max
  unsure (1)..(262): unsure at all n locations; Clone ID: 701126693H1
aaaaaatccgcgattngctcttctcttggaaaagtgaaaaccagaagtacgaacgaaagagaagagcgatttagaagtgagagaagatggggttgtcgttcacgaagctgttcagcaggttgtttgcgaagaaggaaatgaggattctnatggtaggtctcgatgctgctggtaagacaaccatcttgtacaagctcaagcttggagaaatcgtcaccactatccccaccatcggatttaatgttgagactgtggagtacaa

SEQ ID NO: 43231 - DNA, 94 bp, Glycine max
  Clone ID: 701126695H1
aatttaaactccgttttccatttccttttataggaaggaggaaggaacgaagctgaatctgaatctgaatcggaatcgctttgtctttgaaatt

SEQ ID NO: 43232 - DNA, 261 bp, Glycine max
  unsure (1)..(261): unsure at all n locations; Clone ID: 701126702H1
gttcactccgtcctcggcggtggaaaacctgctgatgtgctcttgtggagnnacaagaagatatctgctagtgtacttggtgtagccactgctgtttggntcttttttgagttgcttgaatatcacctgcttactctagtttgtcacatttcgattctggtgcttgcngttttgtttttgtggtccaatgcccatacctttattcacaaggcaccgccttgcatcccaaccgttcatctccctgaagaaccaattcgccaa

SEQ ID NO: 43233 - DNA, 261 bp, Glycine max
  unsure (1)..(261): unsure at all n locations; Clone ID: 701126703H1
ataatgttcgaccggaggttcgagagcgaggaggatcccatcttccagaggctaagagccttgaacggagagaggagtcgcttggcgcagagctttgagtataactanggtgattttnttcccatcttgagacccttcttgaagggttacttgaagatttgcaaggaggtgaaggagacgaggttgaanntttcaaggattacttcgttgacgagaggnagaagcttggaagcaccaagagcnccaacaacaatnatgant

SEQ ID NO: 43234 - DNA, 269 bp, Glycine max
  unsure (1)..(269): unsure at all n locations; Clone ID: 701126704H1
cnatcaatttgcatggngtccttcacgttcaanccaccaaagtaggatctgatacagttttgngtcagataattagtttggtggagacagcccagatgtccaaagctcccattcnaaagtttgctgattatgtaccattcttttggcttgcnggttgcnagcatatttgttcctacagttgtggtgttggcattattgacactattgtgttggtatgtagctggggctcttggagcatacccngatnaatggctgccaaannntggaaa

SEQ ID NO: 43235 - DNA, 273 bp, Glycine max
  Clone ID: 701126708H1
gcgtttctccgatcgccattacaaaattacctgggactgaggtattctcacaatttgagtccggtaatggtttagcatcagtgctgagaagctctggaatgggcttgtaccagccagctggggggcttgtaccgccttttgctagcaggtttatgtcaacagaggcaacttctgttgattcttcttctcaagatagttcgatgctggagcctgaagttcctcctcgtatcaaatttaagagattagacaaaactgccaggcacattatgcagg

SEQ ID NO: 43236 - DNA, 274 bp, Glycine max
  unsure (1)..(274): unsure at all n locations; Clone ID: 701126709H1
tgaggcccgtcagangactattttggagaagaaagcaaagcaacanttcccaaagcaggtatgggaagggaaacctgctgatgagaagattgagataaatggggaagtcaatactcaaaaatctgaagttagctcggaagtgctcaaggagtcccttgctgagaaggatagtgatgaccacaaagttcccgagaatggatgtgctacaaannctggagatgccccanagggtgctaaaccagttgttcctgagagcnagattgtngccaatggg

SEQ ID NO: 43237 - DNA, 77 bp, Glycine max
  unsure (1)..(77): unsure at all n locations; Clone ID: 701126712H1
gngntgatgtcaaggcaattgttgttacaggtgcaaagggnaaattttctggnggttnnggntntcctnctgccgct

SEQ ID NO: 43238 - DNA, 277 bp, Glycine max
  unsure (1)..(277): unsure at all n locations; Clone ID: 701126713H1
ctgtcactntaaaccaagtcagatacgcctctcagcatttntttccctgcttttctgcttaggtaaatgcngaaacaattcaatggggaattgttggagtcttcaatcaggttctccaggcgatcatcccaactccaatactgcccccaacctcaacaatcantcagggaatattcaattttctgctggtntaagcaacacaagattaacacagaatggcaattctacttctcttgggcgtagagccactctggaggnatcagcagcaggttctttg

SEQ ID NO: 43239 - DNA, 283 bp, Glycine max
  unsure (1)..(283): unsure at all n locations; Clone ID: 701126715H1
ctaggtacaatacaattcaccggagcaaatactaaggaggtttagctcaattgattcagcaagtgtgtgagtnagtnattgtaaactttctgatatctgtcttccatttttatgattaanaaaatcagagcaatgaatgttttatatttaagctcaagttcaagcctaagcntgtccaagccgtttcaattctcaagtaaacatcatcaaagagcttctagtgtgaagtttggtggtgtttcatgcngagccgcaacgttaacccaaganaacttgtacaana

SEQ ID NO: 43240 - DNA, 284 bp, Glycine max
  unsure (1)..(284): unsure at all n locations; Clone ID: 701126716H1
gtgagaagaagagggggtcagagtgagaaagagaaagagaganttcgtaaaccctaatttcggaaagatcggcgatgactgcctccaaggatcgcgagancttcgtctacatcgccaaactcgccgagcaggccgagcgttacgaagagatggtggaatcaatgaagaacgttgcgaatctcgacgttgaactgacggtggaggagcggaatttgctttctgttgggtacaagaatgtgattggtgctcgcagaggtcctggaggatcctgtcttccattgagc

SEQ ID NO: 43241 - DNA, 141 bp, Glycine max
  unsure (1)..(141): unsure at all n locations; Clone ID: 701126717H1
ggctactnttctgatagaatgctttttcagtttaaaaatgatgtgttctatttgcttgttactttgacttctcattnntgcttttgtatgggaacatccnaatgtatagtcccgcaatctataatnaatnagttgaagaca

SEQ ID NO: 43242 - DNA, 269 bp, Glycine max
  unsure (1)..(269): unsure at all n locations; Clone ID: 701126718H1
ganaacctaagcttagaattaganacanaganaagaagaaaggnaagaattgatcgttgaaaatngcngggnggnaaganagcgggagantccattatggnaacagctacaaacattggtgcttcggccaaggctggcatggagaagncnaaggccactgtccaagagaaggcaganagantgacagcacgtgatccggtgcaaaaggngttggcnacccaanananagnggcaaagatgaaccaggcggantggacaagcaggcggcg

SEQ ID NO: 43243 - DNA, 270 bp, Glycine max
  unsure (1)..(270): unsure at all n locations; Clone ID: 701126721H1
cngntcgnggccaaaacacctctgcttatgctcacactcataaccagcaagtgaatcatccttnctttgttcctaatatctcccctcaagcaccgtccagaccacttgtttgtgatctgccaattgctaggaaagcttcacttcatcggttcctttctaagaganaagataganttgctgccaaagcaccctatcaaataaacaatcccaactctgcttcaagtaagccggctgaatccatgtcatggcttggattaggtgctcaatcaa

SEQ ID NO: 43244 - DNA, 272 bp, Glycine max
  unsure (1)..(272): unsure at all n locations; Clone ID: 701126724H1
gtgaagtttctgataccaaacaatgccgtcatcgtccttcagggacgctacgccggcnaaanngccgtgatagtgcganccttcgatgaaggcacgcgcganncccctacgggcactgcttggtggcagggataangnngtaccctgcganggtgatcaagaaggattcggccnagangacggccaagaagtcgcgtgtgaaggcgttcgtgaagctcgtgaactaccagcacctcatgcccacgcgctacacgctcgatgtcgatttgang

SEQ ID NO: 43245 - DNA, 273 bp, Glycine max
  unsure (1)..(273): unsure at all n locations; Clone ID: 701126727H1
aatcaaagagcataatgtcaggnatcattcacaagattggggagatccttcatgtgggagggcacaaganggtggaggagcataagggtgagcaccatgctggagaatacaaaggggagcaccatggtgaacacagtagtgagtacaaaggagagcatcatggtgaacacaaagctggagagtaccatggtgagcacaagccagagcacaaagaggggttcctagacaantnntaggacaagatccatggtgagggcggcgccgccgagggcg

SEQ ID NO: 43246 - DNA, 276 bp, Glycine max
  unsure (1)..(276): unsure at all n locations; Clone ID: 701126729H1
cctgaagcttcgggttccngtgctgctgctctgtctcctgaaagtgagggttctgcggattcttctgctttgtctgatcttacctttgatgtaaccgagccgcaatgggaggatgcttcagcacattttaatttgcaaaagtttccttcttatgagatcgattgggattctctctgaagactcnttgggtttttatnnngatgtctagtcttgtgggtaattaataatttagttataattaggattgctcttgtggctgctgcaattgagtttttg

SEQ ID NO: 43247 - DNA, 264 bp, Glycine max
  unsure (1)..(264): unsure at all n locations; Clone ID: 701126736H1
gttagangtgctacaatacaaacaatggcanctacncaggaagatgtgaagcttttnggtattgtnggatgcccatttgtntgcngngtccagattncccntaagttgaagggngttgaatnnaaatttttggnagaaaatttgggcaacaagagtgatttgcttctcaaatacaaccctgtncacaaganggttccagtgtttgttcacaatgagcagcccatagcanagtctcttgtgattgttgantacttgatgagacat

SEQ ID NO: 43248 - DNA, 262 bp, Glycine max
  unsure (1)..(262): unsure at all n locations; Clone ID: 701126738H1
ggggctgatcatgctgtgtttgancaaggtgcttccgctggaaatgtcggaaaggaaaagatggtggagcagaagaaggcaaatcctgttgctctgcttctctcctccgccatgatgctcaggcatctacagtttccttcantcgcggaccgccttgagactgctgtcaagcgtgtcatttcggagggcaactgcagaactaaagatcttggtggagacagcactacacagcaagttgttgacgctgtcattgccaatctcg

SEQ ID NO: 43249 - DNA, 104 bp, Glycine max
  unsure (1)..(104): unsure at all n locations; Clone ID: 701126739H1
cggttcctcactcctcttccatngcctgcggccttcactctcatctcctggtctccagtgagatgaaccctagctccaattggtccctttaatcaattacctct

SEQ ID NO: 43250 - DNA, 267 bp, Glycine max
  unsure (1)..(267): unsure at all n locations; Clone ID: 701126740H1
cncnctccaaaacgtcttcgttcggctcctctctgttttccttcaccgagtcggacgaaggannnnnnnnnnnnnnnnnnnnnnnnnatggatgggacaacggtgacggcggagggtcggggttttgggattcgaataatgggaatgatagcncggacttgtattaccggacgatgattgangcgaatccagggnaccctctgtttcttggcaactacgcgaggtacttganagaggttcgaggggactatgtganancggaggngt

SEQ ID NO: 43251 - DNA, 274 bp, Glycine max
  unsure (1)..(274): unsure at all n locations; Clone ID: 701126741H1
accctcaccaacaccatcccattcagcctnacagcaacaaagannatnaacattncagccagnggaagtccattacactgaacctccatatcgtaaccctggccgttcctacccgccacaaatcgaaaaatcagatcacgggtctgataatatgtggagagttaggcaggatcatgtgtcatctagttatctttctcaacgaaaccataacaacaactataacacaattgttgggggatccagacaatctggtttttatgatagaaataatcat

SEQ ID NO: 43252 - DNA, 272 bp, Glycine max
  unsure (1)..(272): unsure at all n locations; Clone ID: 701126743H1
caaagccttcctagaacganaaanaannngnngagcaattttncctnancaaagangangaagcaaacnntggccgatcaacttaccgntgaacagatctccgagttcaaggnngccttcngcttgttcgacaaggacggcgatggttgcntcacaaccaaggagcttggaactgttatgcgttcnttggggcaaaacccaactgaggcanagctccaggncntgatcaatgaagtggntgctgatgggaatggtaccattgacttccctga

SEQ ID NO: 43253 - DNA, 235 bp, Glycine max
  unsure (1)..(235): unsure at all n locations; Clone ID: 701126753H1
gcataatcttgttgnctnggcacggccgcttntcanagaccgtaggangtnccccaaaatngctgaccctctacttcnaggccgttacncgatgcgaggnctgtaccaagcacttgcngttgctgcaatgtgtctgcnggnncnagctgctacaaggcctctnattggagatgtggtgactgctctcacatatcnggcctcacagacatacgaaccaaatgcagccaatcaatcc

SEQ ID NO: 43254 - DNA, 268 bp, Glycine max
  unsure (1)..(268): unsure at all n locations; Clone ID: 701126756H1
gatggtgctgaagccaatatagctgctctgaganaacaatctgaggggttccttcttgagtatgatcgcttacttgaggnaaaccagaacctccgcaaccaactacaatccttggacaggaaattgtcacattcaggttccaagaagaatatgtaagataattgcaggtaagaatggcttcttttgtatactcttaaggaattccatggcagtttgttgataacagcttgtcaatccctgtaagcttgctcctaaaggaatacgattt

SEQ ID NO: 43255 - DNA, 94 bp, Glycine max
  unsure (1)..(94): unsure at all n locations; Clone ID: 701126758H1
cagagagcactgagagaatttgaagcctgtgttctcctttggttgtttttacatgtacttactgatcctccctttttccacntcaacataacgg

SEQ ID NO: 43256 - DNA, 270 bp, Glycine max
  unsure (1)..(270): unsure at all n locations; Clone ID: 701126760H1
caaacctcttcgttccttcgattcattccatttcttccaaaatggccaaagacccagttcgcgttctcgtcactggagccgcagggcaanttggatatgctcttgtccctatgattgctaggggagtgatgctgggtcctgaccagcccgtgatcctccacatgcttgacattcctccagcagcagagtcnttgaatggggttaanatggaattggtggatgctgcattccctcttcttaaaggtgttgttgctacaaccgatgtggttg

SEQ ID NO: 43257 - DNA, 274 bp, Glycine max
  unsure (1)..(274): unsure at all n locations; Clone ID: 701126761H1
caagccttctccttcttagcattggtttggttatttanctgtggatgtntccatggagccaccccagcagtnaaagtnggtaacttttcaaaggtggaagatgctggaaacttccatatttactatggccagaccttcaaagtcattnaganttctgctgatggccagagctaccttcttctccagaataattcnnggattgcntcaaggactaantattgcncatcaagaatcaagtcatttgtcataccattgncgaactatnctgtcgatt

SEQ ID NO: 43258 - DNA, 277 bp, Glycine max
  Clone ID: 701126763H1
cgaatggtcctgacccttccatcgacccttcatttctttcccaactacaatcactatgccctcaaaacggtgacggttcaaaacgagtagcgctagatacgggtagtcaaaccaaatttgatttatcttactatagtaatttgaggaattctcgtggaattctgcaatctgatcaagcactatggagtgatgcttccacaaagacaactgttcagaggtacttgggcttaataagagggttacttggattaacattcaacgtggaatttgggaagtc

SEQ ID NO: 43259 - DNA, 279 bp, Glycine max
  unsure (1)..(279): unsure at all n locations; Clone ID: 701126764H1
cacggccccagaacaaacatggtttcttccaacactgccgagctgnngagagaggagattcctgtgaagcaacaacctctgactttgtctgcagacatcataaccggcctcgtactcgtcgatgttgtcaatggcttctgcaccgttggagctggcaatttggcgccgaaagaaccagatgaacgaatttctcagatggtaaaagaatctctgaggctgtccaaagcattctctgagagaaagtggccaatttttgctttccttgattgccatcacccc

SEQ ID NO: 43260 - DNA, 261 bp, Glycine max
  unsure (1)..(261): unsure at all n locations; Clone ID: 701126769H1
ttttnttcgcgtgaaggtaagatattgctttgatactaaaagattggggtatgtttacgaagatgttgatcttccatggttgcgaacgccacccacatcgcgaaanagcnagctactaagagaagccaaanagggttcncttttgagttcaaagccatggaaatttcctttggttttggattccataacgagtattgttgttangnggccgaagaaatggaggngcnnggaggngatagancaagaggaggaggttttggt

SEQ ID NO: 43261 - DNA, 156 bp, Glycine max
  unsure (1)..(156): unsure at all n locations; Clone ID: 701126771H1
ttcgctatgatgttaccgcctgtnanaccaaggtgattcctggtgaatntggtntcgttgctcagcttancgagggtcgtcacctcaagangaggccaactgagttccgngttgatanggtccttcaaccctttgntgannncaaattcnactttt

SEQ ID NO: 43262 - DNA, 265 bp, Glycine max
  unsure (1)..(265): unsure at all n locations; Clone ID: 701126772H1
gcagatccaggttacggaagcaggctgaatgtgatgaactagctcagcgtgctgaagctttganagangaaaatgccactctccgatcagaagtgagccagatcaggagtgagtatgagcagctacgttctgagaatgctgccctcaaggagagacttggggacatacctggtgtcgcgacgcctgggaaggaggatcttaggtctggtcagaatgatcagcatgtgagtaatgacactcaacagagtggtcagacagaggttgt

SEQ ID NO: 43263 - DNA, 266 bp, Glycine max
  unsure (1)..(266): unsure at all n locations; Clone ID: 701126773H1
gtctaaggnctcttacaaaatcccagttgggtgagattctnacaccagctgcttgcaccattgtttcttcgctcaaaaacgataatgtcgactcctntgttctatctgantccagcctctttgtntatgcctacnagatcatcatcaaaacctgtggtactactaagctattgcttgcnatcccacccatattgaagttngctganatgctttcccttaatgttaagtctgtgaattacaccaggggaagtttcattttccccagt

SEQ ID NO: 43264 - DNA, 266 bp, Glycine max
  unsure (1)..(266): unsure at all n locations; Clone ID: 701126774H1
ctagaaacagtgtgatgaaaatgaaggtccttgttttcttcgttgctacanttttngtagcatggcaatgccatgcgtacgatatgttccctctccgaatgaacactggctatggtgcccgtactccggaggtgaaatgcgcaagttggaggcttgctgtggaagcacacaacatctttggctttgagaccattcctgaagagtgcgttgaagcnacanaggaatacatccatggcgaacnatatagatcagactccaaaacagtt

SEQ ID NO: 43265 - DNA, 270 bp, Glycine max
  unsure (1)..(270): unsure at all n locations; Clone ID: 701126776H1
cgcgccatggctggcatcaccacctccnccntcaaactctctcactttccgactacacttcncttctnctgattccaaactcttcngncnaagnncncnccaatcccnatnccctcaaattcgacccnncttctctcnccactacctctctctccnacgtcaaagcccgctactannnnnnnnnnnnnnnncctccccgctcccccaacgactcccgcttccgcaagtcctccgattccgacgacgacgataaagcnctcgacctctcca

SEQ ID NO: 43266 - DNA, 276 bp, Glycine max
  unsure (1)..(276): unsure at all n locations; Clone ID: 701126780H1
caagtccaaggatttaatttcagcttttggcaccgatgaccactccaaaatttgcttagatattttaaaganaggggagcttcaggtagctgggaaagagagggaatcattgttatcgagtcagttcagggatattgcgaccattgtgatgcacaagacttacaatcctgagactcagcgtccatacactatcagtatgattgancgcctcatgcggganatccattttgctgttgatccacacagcacctcnaagaagcaggctctggagttaat

SEQ ID NO: 43267 - DNA, 256 bp, Glycine max
  unsure (1)..(256): unsure at all n locations; Clone ID: 701126782H1
gccatttgcccagagagagaggatgatgcattcagggaactgtggagtcagcagtttctccaggtcttagttcagcttattgtttggtgctttggggctatccttttggnggaaagtgcccattcttgcaaagactgtgtttgtncccttccacccctttcccttttgtgggctccttttatagtctccatgtatgtgccaacgtatttttgtttcatggatacgatttctgtaatatttgttgcctgtcacatag

SEQ ID NO: 43268 - DNA, 259 bp, Glycine max
  unsure (1)..(259): unsure at all n locations; Clone ID: 701126785H1
ggaagatgtgctgtctcttcataaacnatcttgatgcagganctggtcgtcttggtggnnccactcaatacactgtgancaaccagatggtgaatgccaccctcatgaacattgctgataaccccacaantgttcagcttcctggcatgtacaacaagcaagagaacccccgtgtgccaatcatcgtcaccggnaacgatttctcaacactctatgctcctctcatccgtgatgggcgtatgganaagttctactgggc

SEQ ID NO: 43269 - DNA, 259 bp, Glycine max
  unsure (1)..(259): unsure at all n locations; Clone ID: 701126787H1
tagtgtcaaacatttgggtagcgttgaccgatgaattgacctttgcggtttcatgcatataataagaagacattgttttctttggtcttaattttctatcaatcgttactgtattgtcctgttaactgtggtgttgagtagtcctgaaacaataacatgatgcttcgattcctagtgctgtttcttacgttggcnagttgtagggagagttacaaaatggcgaaagcagagtataactatacggtnnnttcagcgagag

SEQ ID NO: 43270 - DNA, 263 bp, Glycine max
  unsure (1)..(263): unsure at all n locations; Clone ID: 701126788H1
gttcacgtgcatccatctacgatgtgttcctcaacttcagaggggaagacacacgctatggtttcaccggcaatctctacagggctctttctgacaagggaattcgtaccttctttgacgaagagaagcttcacagcggagaggaaataacacctgcacttttganggcaattaaagattccagaattgccatcactgtgctctctgaagactttgcttctncctcattttgcttagatgaacttacatccattgttcactgc

SEQ ID NO: 43271 - DNA, 264 bp, Glycine max
  unsure (1)..(264): unsure at all n locations; Clone ID: 701126789H1
gctatagtaagctacacttatttgaggttggagaaatatggctaaagatgttgaggttcaagagcaaggaggagagtactctgcaaaanactaccatgaccctcctccagcacccttgttcgacccagaggagctcacacagtggtccttttatagagccctaatcgctgagttcatagcaacccttctcttcctttatgtcaccgtgctcaccattattggctacaaaaggcagactgatgccacgctaggtggcaccgagtg

SEQ ID NO: 43272 - DNA, 66 bp, Glycine max
  unsure (1)..(66): unsure at all n locations; Clone ID: 701126790H1
gtctgcaactatgagcaaggattatctaatcatactttctctccttctttccacggtgcttgcnac

SEQ ID NO: 43273 - DNA, 265 bp, Glycine max
  unsure (1)..(265): unsure at all n locations; Clone ID: 701126791H1
attttttacattgtttctctctgggaagagaaaaacagattcagaagctgctgaaagtnatgaccgaaagaatacacacaaagttagaggggtatcatcttccacagatgtatcatctgatagttccaagagttcatcaaaaagggtgtcttctcattcctctgcatcatctggccctacaagaagtagtcagcttggaatgggaaatttcacctttgaggnnntctacaaggcaacggcaaagttctctcttgataataagatt

SEQ ID NO: 43274 - DNA, 266 bp, Glycine max
  unsure (1)..(266): unsure at all n locations; Clone ID: 701126792H1
cntcactattgccgtcattagtgttgcctganatgtcatcaccatcgccgtcgttagtccaccgtagccctatccgtgatggcgattcattttgcagaggggacttcaggtagaagctgatgtcccagtagaaagttttgaattgtcacctgttgaccagatttttgttcgaataaggccaaagtacatttttaattaagctttcaaaaactgcatcaattctgtcatcagctactcataattcattggtggctctggatgagctt

SEQ ID NO: 43275 - DNA, 257 bp, Glycine max
  unsure (1)..(257): unsure at all n locations; Clone ID: 701126801H1
aganagcgcgtcttaataaacgctcttctctgaaaaccccnatttcttttcttctntcttcttctctttcgcttcttcgatcttcgatcttcgtcgctgaaaatgagagagtgcatttcaatccacatcggccaggccgggattcaggttggaaacgcctgctgggagctttactgcctcgaacacggcattcagcctgatgggcagatgcnaagtgacaagaccgttggtggaggtgatgatgctttcaacacctt

SEQ ID NO: 43276 - DNA, 256 bp, Glycine max
  unsure (1)..(256): unsure at all n locations; Clone ID: 701126802H1
aggaagatgtgaagcttttgggagttgtgggaagcccatttgtgtgtagggtccagattgccctcaagttgaagggaattgaatacaaatttgtggaaganaatntggccaacaagagtgatttgcttcttaaatccaacccagttcacaagaaagttccagtttttattcanaatgngaagcccatagcagagtctcttgtgattgntgagtacattgatgagacatggaagaacaaccccatcttgccttcnga

SEQ ID NO: 43277 - DNA, 226 bp, Glycine max
  Clone ID: 701126803H1
cttgggaacccaagaccttgaggtttcaaaactgggattcggatgtatgacccttactgacagcgtacaatgaccctctccaagaacaggatggcatatctgttatcaagtatgcgttcagtaagggaatcacattttttgatactgcggatgtttatggagccaatgctaatgaacttttggttggaaaggctttgaagcagctgcccagagaaaagattcagat

SEQ ID NO: 43278 - DNA, 139 bp, Glycine max
  unsure (1)..(139): unsure at all n locations; Clone ID: 701126804H1
ttttctcatcatcatcgactttttctcttatgcaaggaaggttctccttctccgatttncaatttgattgaacgagtagtgttaagattatgatattttttgagaagcttcgtttctctcctcacctaagccgcttcat

SEQ ID NO: 43279 - DNA, 138 bp, Glycine max
  unsure (1)..(138): unsure at all n locations; Clone ID: 701126805H1
ttcttcgtgctttcacagagaggcgataanatcgtctaccgcgactatcgtggtgaagctcaaaaaggaagcgctgagacatttttccgaaaagtaaagttctggaaagaagatgctgagggagatgctccacctgtt

SEQ ID NO: 43280 - DNA, 137 bp, Glycine max
  Clone ID: 701126806H1
aacaaaatactttttatattctattcggctacctcgctcgctccttctctgttctctctcatctcatcggatcgatcaagcatcagggagctttgagggttgattctctggtgtagtagcaatcagcacaatagaaa

SEQ ID NO: 43281 - DNA, 250 bp, Glycine max
  unsure (1)..(250): unsure at all n locations; Clone ID: 701126808H1
gttatctatgttttgcttagaatgttggtgttccattcgancttcacctggaagcactggattgggttgattgtgacttctttggcatatgttattccctatcaacagctcgcgaagatggcaacccctgcttacgctgaagatggtgaacttttagatggtggatttgatatgtctactggtggagtttgtgggtatttacatgatgttatctacataacatgctttgtgcaagtcatgtccatcgtct

SEQ ID NO: 43282 - DNA, 249 bp, Glycine max
  unsure (1)..(249): unsure at all n locations; Clone ID: 701126809H1
aagagatggtggagttcatgcagaaggtggtggtggggtggacgcctgcgtcnganctcacggtggaggagcgcaacctcctctcggtggcctacaagaacgtgatcgggtctctgcgtgccgcgtggcgcatcgtgtcctccatcgaacagaaggaggaagggcgcaagaacgacgaccacgtgtccctcgtgaagcactacagatccaaggtcgagaacgagctcacgcaggtctgcgccanatcct

SEQ ID NO: 43283 - DNA, 249 bp, Glycine max
  unsure (1)..(249): unsure at all n locations; Clone ID: 701126811H1
gcgaaatcaagcgccgacgacggngagntccggcgagcttncnatcgccgcaattgaggacccgaggcanaagattntgatggcgctgcgcgtcgccaanagtcacggcatctttggaaaatcttcctctaagcttggtcgcatggccaagcccagggttctcgctctctccattgttggtnacgacgtggtgtttcctgcagcgaaancgaaggggctgaggacatcggcttttcttcgagtnttgat

SEQ ID NO: 43284 - DNA, 137 bp, Glycine max
  unsure (1)..(137): unsure at all n locations; Clone ID: 701126812H1
gcaggttntnccagttnatcntnttctnctctggcatccatcatatccanngnttctcgcgatacgtgacaatttttcanttgtttggtgngtagaggnagcaatgtcanaggctaaggttcaggatttgaagaagg

SEQ ID NO: 43285 - DNA, 180 bp, Glycine max
  unsure (1)..(180): unsure at all n locations; Clone ID: 701126813H1
ggtatcagtgagagtagtcaatttttggnngatctagngatgctgagtggtttactagatgancatttaccaaatttcacagaggaaagaagtcctgatcatcttgaaaatgggctgggtagtttcaaactacagggaagttgtaatccgttagaacaactaggcttgtacatgaaggct

SEQ ID NO: 43286 - DNA, 140 bp, Glycine max
  unsure (1)..(140): unsure at all n locations; Clone ID: 701126817H1
atttatcactgancttccttccttgttctctcgntaaccactctctcatcaatcaaaggtactcattgtgggaatacaatgtcctccacttcctttagcaatggatggaaatatgatgttttcctcaacttcagaggctt

SEQ ID NO: 43287 - DNA, 139 bp, Glycine max
  unsure (1)..(139): unsure at all n locations; Clone ID: 701126819H1
ccttcctagaacgaaaaaaaaaaagaagagcaattttccctcaccaaagaagaagaagcaaacaatggccgatcaatttaccgatgaacagatctccgagttcaaggaagccttcagcttgttcgacaagganggngat

SEQ ID NO: 43288 - DNA, 102 bp, Glycine max
  unsure (1)..(102): unsure at all n locations; Clone ID: 701126821H1
ggatgancacnagagtnagnagtaccanaagaaccagaagangannanggttttgtgtgtgtcgaagtggataattccttccttcaattaatctccgatccg

SEQ ID NO: 43289 - DNA, 249 bp, Glycine max
  unsure (1)..(249): unsure at all n locations; Clone ID: 701126822H1
gttgaaaganagggacctgtgagtgtcacaaacatgggagaggagaatgttaaacaaccgttgttggagaggaagtactacaaggactgcccaggttgtaaagtggatcaagccaaagagttgantgagggaaagggtgtacctgttaaaaatctttttatcatgtggatggtggtgctgtgtgctgcactgcctatatcatctctctttccattcctctatnncatggtaagggatttcaatattgcg

SEQ ID NO: 43290 - DNA, 250 bp, Glycine max
  unsure (1)..(250): unsure at all n locations; Clone ID: 701126823H1
ccctcctcgggtcaagctcagtcagcactgcaccgcaaatttttctttgcccctttcgangagtaangccacagactccgccggcgagatcccaccggagacgaggtccgccgagagtgacgattaagatcaatgttacgcacggttcctctcaccancatttanacctnccggcccaatcaacttnaggggatgttaagaaactccttgtcaataaaactggtttagagcctgcagagcaacgactttt

SEQ ID NO: 43291 - DNA, 249 bp, Glycine max
  unsure (1)..(249): unsure at all n locations; Clone ID: 701126824H1
gaaaattgagtcgatcacctgatgctgttgttagagcaacaagttctgctgctctgggcttgttgctgaaatcctcccatttatgctcatggagagctgttgaactcgatcggttagaatcaacatcacggaaccatgatgtggagtctacgaaaaannagcaacaattctggaatatataccaaaatcatgattagctatgcgcttgaagcactgccttttgggaatggtcgagtggactagggtgct

SEQ ID NO: 43292 - DNA, 247 bp, Glycine max
  unsure (1)..(247): unsure at all n locations; Clone ID: 701126825H1
gaactggtatnaaggtttctataagacatcttggcccgtccatgattcancagatgcagcatgcttgcaatgaatgcaagggtactggagaaaccatcaacgacagagatcgctgcccacagtgcaagggagaaaaggttgtgcaggngaaaaaagtccttgaagttattgtggaaaagggaatgcagaacgggcagaagattacattccctggcgaactgatgaagcgccagacacaattactggg

SEQ ID NO: 43293 - DNA, 242 bp, Glycine max
  unsure (1)..(242): unsure at all n locations; Clone ID: 701126828H1
ctcctactaaggtggacaatgccaaaaggnctgatcccaaagctcaggccttgangacagctaaggctgtcaaatcaagaggtcaagtgtttaggaanaaagctaaaaagatcaggacatcggttacatttcacaggccaangaccttgaagaaggaaaggaaccctaagtaccctcgcattagtgctccacccagaaacaagttggaccattatcagatacttaantttcctctaactact

SEQ ID NO: 43294 - DNA, 239 bp, Glycine max
  unsure (1)..(239): unsure at all n locations; Clone ID: 701126830H1
aactcttggtcttggagcaccgttctcttctctctgtgttanagcttctttttcctttcgctcatgcntctncagtctcnnnnnnnnnnnnnnnnnnnnnnnnnnnnnnnnnngaaaaanangattcttatgttttaatgactactctccatttnngancctctctcttgctctctctccgagtntgagcctcgctgttcagactcgctttctctgctcactcagagactgagacactt

SEQ ID NO: 43295 - DNA, 242 bp, Glycine max
  unsure (1)..(242): unsure at all n locations; Clone ID: 701126832H1
taagntatcctnataaatacactctaattangtggcaagataagtgtctanccttagtaacattgccacatattgtgttcattttggaattgtgccactaaaattctattcaattcatctatggctgcctcttcttatgctatgcaatcaatcctggcaaaccctttgatccgcatttccagcgggtctagggtgaaccaatttggcgttcctgctttgcacatgagaaggaatgttggcct

SEQ ID NO: 43296 - DNA, 255 bp, Glycine max
  unsure (1)..(255): unsure at all n locations; Clone ID: 701126833H1
attttcccttcaacaagctcccagcagacatgcttctaggtggtttctcaaggcttgaccatgcagcagcacagcctattaggccaccttgtggaacctataagaacaacaccactactaaggccaatgttggcatttcttgcttgttgacagtgggaaatcctggccagaatttcaaggaatccaatgaaacaaaagcacctcacatcttgttatttggaaaactcattcagactgagcaaaanagttcaaact

SEQ ID NO: 43297 - DNA, 254 bp, Glycine max
  unsure (1)..(254): unsure at all n locations; Clone ID: 701126834H1
ccgatgccactatgagggaaattaaaggctgttgactctgaaaaccagaagaatttattatctgatgcatggagaatgaaccagcttcagaaacatctcagtgatgaagatcatccgtatcataaatttagtacagggaactgggacactttggaagttagaccannagcaaaaggnttagatacaaggagcgagcttctcanattctatgaagaaaactattctgctaatctaatgcntctagtnatatacac

SEQ ID NO: 43298 - DNA, 250 bp, Glycine max
  unsure (1)..(250): unsure at all n locations; Clone ID: 701126836H1
aaaaccttcgtcgcaaaatgcaacanattcagaggcctcaaaccgagagaatacgctgccttgaaggactgcgctgaaganatcagtgacagcgtcgaccggctcagccggtcgctgaaggaactcaaattgtgtaaggtgaagggtgaggacttcacgtggcacatcagcaacgttgagacgtgggtgagtncggctttgaccgatganagcactngcggcgatgggctcgccgggaangcttgaatgt

SEQ ID NO: 43299 - DNA, 248 bp, Glycine max
  unsure (1)..(248): unsure at all n locations; Clone ID: 701126838H1
aaatattatggtgaataattttnattttattagaggtcaatgatattgtgtatcctgtgtagttgatctcacctaatgggataaggttattgatgtcgtgttagatccccatgctttctcattataggttggttctagtaaaattcatctgttaagacttgattcatcaataatcncatcatgttagtcacatgcagcgtttgggaaacatgttacttcnaanttgcaattggggctacanggattgt

SEQ ID NO: 43300 - DNA, 247 bp, Glycine max
  unsure (1)..(247): unsure at all n locations; Clone ID: 701126839H1
caaggtttgtnttgtgttgggtganattttattctaacatcgtttcatcaaatggcttttatgtctggagttcagcgtctgcttcgccgcactccacttgttcattcccactatgcttctattcgtctcagctcaactctcacttcccccaaacttttcgncagcggtctttgtagactgacaacagatgaaaaacttaaggaagcattttcgtcttttgggcagctggtngaagctaaggtgatat

SEQ ID NO: 43301 - DNA, 246 bp, Glycine max
  unsure (1)..(246): unsure at all n locations; Clone ID: 701126840H1
antttcntactttggtcttgccttggtcaaccatctcttgctcttaggttactctcttcgagtcaccgttgacaacccagaggacatagagaagctgagggaaatggagaggcgtggtgaagtgagggctacagaaggaaatttggaagtaataatggcaaagctaactgatgttgatgggttggagaaagcatttcagggctgtcgtggcgtctttcacacttctgcatttanagaccccgctgg

SEQ ID NO: 43302 - DNA, 242 bp, Glycine max
  unsure (1)..(242): unsure at all n locations; Clone ID: 701126848H1
acnagccgcgcntgtagcatgtttggntcttttggacaagtctgccantaaaatcgcntncctcaactantcacaanaataataaagagtgantgtatgtaaactcgaagaatgttgtagagtagtcatttcaatacaaaggatggatgcatggtgaatctataaacggagagcgagcgattacacggaagataacaaanacaanttttctgtcattttgcttcatactgtaattacatacc

SEQ ID NO: 43303 - DNA, 133 bp, Glycine max
  Clone ID: 701126853H1
ttcggtggaaccaaagcgtgcttcctcttgctcctatcctaagtcctaattcagcatcgtgctgttccaattcgaaactcatatatataaatacagatcccaactcaaaagccaaatcacaattccacacaac

SEQ ID NO: 43304 - DNA, 237 bp, Glycine max
  unsure (1)..(237): unsure at all n locations; Clone ID: 701126854H1
cttggactatggtttcaagggagctncaaattgccatggcttcttactgctcagaactccaatatcttgcaaatccagtaactacccatgtccaaagtgctgagcaacacaaccaggatgtcaactctttgggcttgatctcatctagaaagacaaatgaagccatcgagatccttaagctcatgtcttccacattcttgattgcactttgcnaagcaattgantnggggnttgngg

SEQ ID NO: 43305 - DNA, 128 bp, Glycine max
  unsure (1)..(128): unsure at all n locations; Clone ID: 701126861H1
cnaccncacttctgctccgcanttatcatgggcnatgtctnnatcggaatcaacngatttggaagaattngccgtttngtagccagagtggctctgcagagagaaccatgttganctcgttgccgttt

SEQ ID NO: 43306 - DNA, 205 bp, Glycine max
  unsure (1)..(205): unsure at all n locations; Clone ID: 701126862H1
gctcggttctccgatcgccgtcttngccttgcccattcctgatcaatatgtctagaagatatgatagccgtacaacaatcttctcccccgaaggacgtctttaccaagtggagtatgcaatggaggccattgggaatgctggaactgcaatagggatcttgtcaaaagatggggtagttctggttggtgaaaagaaggtcacatc

SEQ ID NO: 43307 - DNA, 114 bp, Glycine max
  unsure (1)..(114): unsure at all n locations; Clone ID: 701126865H1
tgcccttcagtccttcagcaatgacttacgtgaagtcacnaaaatcaaaagcctacttcaagaggtatcaagtcaagttcaagagaagaagagagggaaaaaccgnttaccgtg

SEQ ID NO: 43308 - DNA, 248 bp, Glycine max
  unsure (1)..(248): unsure at all n locations; Clone ID: 701126866H1
tttgttttctttgttgctgcagtagttttggtagcatggccatgccatggcgcaggctaccaaaggttccctctccgaatgaaaactggctatggtgagcgttcttcggaggtaaaatgcgcaagttttaggcttgctgtggaagcacacaacatccgagcntttaaaaccattcctgaagagtgcgttgaaccaacaaaggactacattaatggcgaacaatttagatcagactctaaaacagttaa

SEQ ID NO: 43309 - DNA, 249 bp, Glycine max
  Clone ID: 701126867H1
ttgagaaacattattcccattgctatatattatggctagcatgaaggttacatgggtggttgtgatcatgtgcatggccgtggtgggtgcaccgatgatggcgcaagccatgagcatgcaatgatgtgacggtgaacatggcacagtgcctatcctacctgatgcagggaggaacaccttcaacactttgctgcagcggagtcaagaacattcttggctctgctgtcaccaccgttgacaaacaaactg

SEQ ID NO: 43310 - DNA, 134 bp, Glycine max
  unsure (1)..(134): unsure at all n locations; Clone ID: 701126868H1
caaaggaatcgtagatccgtttnccntgtgtagtttttnttnttngncagagaagataagcgagggggttntgggaancttttcncaatnggcttcgcagcctcttttncangcaggaaatggaattancccng

SEQ ID NO: 43311 - DNA, 215 bp, Glycine max
  unsure (1)..(215): unsure at all n locations; Clone ID: 701126872H1
ctattttggagtnccttacnacantccttncccnagtttaattaattanngancgctantcaactttcaattggactgcagcagatggctgaggagggttgcagggttactctaaatgtttatgacttgagccaaggantagcacggcagctttcaatgtcctttttggggaaagctattgaaggcatntggcacncnggagttgtggtttatgg

SEQ ID NO: 43312 - DNA, 131 bp, Glycine max
  unsure (1)..(131): unsure at all n locations; Clone ID: 701126873H1
cgcttcaatgcgtctcgtagggctaatccgcctcacnanngtcancaacggcacgttnnctttngngggccgangccccctactgctggttcggcaaacggacggcgggcgcacnnntcgcttntagcccg

SEQ ID NO: 43313 - DNA, 119 bp, Glycine max
  unsure (1)..(119): unsure at all n locations; Clone ID: 701126877H1
gctcgagagangtcatagacnnaacncnagacatgtntgttgttnagtcaggtgancacaacaacatcngangagtacctnctcatggtggacgctatgttcagtacaatntctatggc

SEQ ID NO: 43314 - DNA, 231 bp, Glycine max
  unsure (1)..(231): unsure at all n locations; Clone ID: 701126878H1
tngctgcattcccccatggcttctgcttcaggtacagattttncgttacggtttcttctgaactcgagtcagttttgaggctgaagactgttaactactttgttacgaggaggccatggctcgatctntatggagttaacgtgagacctgttgcgcctgttgggagtgcaagtaggaggccttacgtggatcctgcacttatacatcgttccttacctgatgagctgnttt

SEQ ID NO: 43315 - DNA, 234 bp, Glycine max
  unsure (1)..(234): unsure at all n locations; Clone ID: 701126879H1
gtgccctgagatcacattgaacaatggtnaangctgtngccgttcttggcattagtgagggtgtcactggaactattcacttcgttcaggagggaagtngnccnaccaccgtaactggatctcttgctggtcttaagcctggtctccatggtttccatgtccatgccttggnggacactaccantggttgcctctcaactggatcacatttcaatcctnataacaaggngcatg

SEQ ID NO: 43316 - DNA, 247 bp, Glycine max
  unsure (1)..(247): unsure at all n locations; Clone ID: 701126881H1
gacgctacgacgacatgtgggcaggctggtgctgcaaggtaatctgtgatcacttgggattnggaatcaagactggtctgccctatatctatcacagcaaggccagcaacccatttgtgaacttgaggaaagagtacaaaggcatattctggcaagaagacattatcccgttcttccagagcattgttcttcctaaagaagctaccactgttcagaagtgctacattgagcttgccaagcaagtcaa

SEQ ID NO: 43317 - DNA, 240 bp, Glycine max
  unsure (1)..(240): unsure at all n locations; Clone ID: 701126882H1
gggaaaagatctggcatcacacattttacaatgaattgcgtgttgctcctgaggagcacccagtgcttnctgactgaggctccactcaacccaaaggccaacagagaaaaaatgacccaaatcatgtttganaccttcaatgtgcctgccatgtatgtggccatccaagctgtcctctccctatatgcaagtggtcgcacaactggtatgttttggactctggcgatggtgttagtcacc

SEQ ID NO: 43318 - DNA, 125 bp, Glycine max
  unsure (1)..(125): unsure at all n locations; Clone ID: 701126885H1
atttcattctcagcttcttttcttntggggggcaaaaggggtcactttttcagaanccgagattgagctcctttacccatcatcatcatggagctcctcgggtacctgaatcagggtcacccttt

SEQ ID NO: 43319 - DNA, 243 bp, Glycine max
  unsure (1)..(243): unsure at all n locations; Clone ID: 701126887H1
acaacaagcctcccccctcttttcccccaacaattttgtnncactcccatgatttttacngaggatctctggccactgctccagcaactcgttggaaaaactcctctcttctcatcttcatcatcagcttcgtcgtccttcttccagaacnatcgggaatcgatgacgaactcaagttgnggaggcgcggagttggagctatgccgagatgaatcagcngcattggttctcaagtncgtcgct

SEQ ID NO: 43320 - DNA, 244 bp, Glycine max
  unsure (1)..(244): unsure at all n locations; Clone ID: 701126888H1
ggatcacagangagaattgtacaagangcaccatcctcntagtctgtctgatgaagtttngagattggaaaaaatangcaaggatggagctttccacaagcgcttnagtcacgganaagatccttactgttagagagtttctcacacttctcaatctggatccancaaaactgcgcagtatactgggcactggtatgtctgccaagatgtgggaagtaactgtggagcatgctcgaacttgtnt

SEQ ID NO: 43321 - DNA, 239 bp, Glycine max
  unsure (1)..(239): unsure at all n locations; Clone ID: 701126890H1
aacnnatttcacttgagacagttatctttatctacgcaaganaagaatagaaaatggatatcaggttgatggatttggnctctccattgtcnaacactctgcaccgaatcatggatctgacagangacncagagaagaacttgaacgctccgacgcggacatacgtncgcgacgcgaaggcaatggctgcgactcctgcggacgtgaaggagtaccctaactactacgtgttcgtgatc

SEQ ID NO: 43322 - DNA, 238 bp, Glycine max
  unsure (1)..(238): unsure at all n locations; Clone ID: 701126891H1
anagatagcccttanttaggaataatnatanactattaatgtgtagcnnnnaacttatgtattatgtctgtnatggttttcgtgcactctggtgttttgtgttaaacaancatccttagaataaagtggtcatgtcttgcctttcagcaagttcaagtgttttggacttgtgatgggtgtgttaanctcatggttgcttcnnttatnnattttntnaatgnttgnaaattggcccctc

SEQ ID NO: 43323 - DNA, 234 bp, Glycine max
  unsure (1)..(234): unsure at all n locations; Clone ID: 701126893H1
anacaaggtgatcctacacgggatgtgggncagcccnnatgccaanngggtggaattncgnccttanttttaagggcatnccctatggntntgttgaagaagacttgagaaataagagtgatttgcttctaangtacaaccctgttcacaanaaggttcctgtacttgttcataatggannggccattgctgaatccatggtgntccttgngtatattgatgnaacatggaaag

SEQ ID NO: 43324 - DNA, 154 bp, Glycine max
  unsure (1)..(154): unsure at all n locations; Clone ID: 701126901H1
gtacctttcancacagcacaacacnntaagagngtgaaattgganaaatgccaatcnaaaaggactcttctctctctctgatttgtncnncgttngatggcgtgtnaggaagtggctcattncgaggccgcgtncctcacgatctacactattc

SEQ ID NO: 43325 - DNA, 151 bp, Glycine max
  unsure (1)..(151): unsure at all n locations; Clone ID: 701126902H1
gccctgttgacattgagccaagacggatcctgnnntcctactnctanttacactactaacacacttttggntatagtgactgctgcaaccatacagttcaaggaaatgggtggaagcaggtggcctgctgaagcagtgaaaccaaatgacc

SEQ ID NO: 43326 - DNA, 150 bp, Glycine max
  unsure (1)..(150): unsure at all n locations; Clone ID: 701126903H1
gganaatatgaagttnntngttttctttgttgctgcagtagntntngtagcatggccatgccanggcgcaggctaccaaaggtnccctactaccgaatgaaaactggctatggtgagcgntctttcggaggtaaaatgcgcaanttttag

SEQ ID NO: 43327 - DNA, 258 bp, Glycine max
  unsure (1)..(258): unsure at all n locations; Clone ID: 701126904H1
caaagctcaacaccttgtcttcccagtggatcgcccacaattccttctctcctcgccgtggatcctcttctcgccgagtctctcttccgatccgcgcttcttcttaccaacacgaactcntccaaaccgccaaatctattgcatctcccggtcgtggaattcttgcaattgatgaatcaaatgccacatgtgggaagcgtttagcatccattggattggacaatactgaggtgaatcgccaggcctataggcaacttc

SEQ ID NO: 43328 - DNA, 253 bp, Glycine max
  unsure (1)..(253): unsure at all n locations; Clone ID: 701126906H1
gtcgaaattcagctgatctgtatcgaagctttgggtttgatacgcagccagtcctcattgggctcatcatatttcagcatactgtaatcccacttcagcaattggtcagctttggtctgaacctagtcagccgatcatttgaatttcaggctgatggctttgccaagaagcttggatatgcatctggattacgcggtggtctgtgaaactacaggaggagaatctgtcagctatgaatncagatcctnggnnc

SEQ ID NO: 43329 - DNA, 252 bp, Glycine max
  unsure (1)..(252): unsure at all n locations; Clone ID: 701126907H1
atagatcactagcaatttccatagtaacaggaacaccagaaagttcttccaagatgggtctagctgccaaagcagcattataacttgtaccacaaccaatgaaaagtatccttctacttcgcctaattgttttgaggtgatccttncagcccacccaacagaacagacttggatttgttagatcctcgatgtataagcctccccctcattgtggttgttagagactctggctgctcatgaatttcctttgca

SEQ ID NO: 43330 - DNA, 254 bp, Glycine max
  unsure (1)..(254): unsure at all n locations; Clone ID: 701126908H1
cnaaagcanaaggnaagaatatcaacnaggtaangtagattccttactagacatggcttgaaggacacattctacatatcctcatggatncaccaactttgtccatagntgaatccattgcaggccaggaagttccttncagtcatggaagaaggacgtgtttcctncaaagaccctctnncaattcttgtcatncncggtacntggnaaaccgcagtccccaggtcaacgtcgtanacnccancaagggcanc

SEQ ID NO: 43331 - DNA, 251 bp, Glycine max
  unsure (1)..(251): unsure at all n locations; Clone ID: 701126909H1
ggaaaacccaaatcgaaaatggcagtgatggagaggttgaagatgttcgtcgttcaagagccagttgttgccgcttcctgtctcatcgctggcttcggtctttttcttccagcttttgtgaggcccatgttggattncatatcaggcaaccaagcaacctccccagcctgctttaagtgangtggttgcaggaatgactggtaaaaagtaaaggtgatttacttgacagatgcaagggcaaatttgctaag

SEQ ID NO: 43332 - DNA, 141 bp, Glycine max
  unsure (1)..(141): unsure at all n locations; Clone ID: 701126911H1
gtgcgcacttcccccattaagtcccgtgaatgtgacgcatagaatatttgcttgctttattatatgtatgtacctacaagtaaagctctgtgcaattccaataattattatacagttcctcactatggcagaggnatctac

SEQ ID NO: 43333 - DNA, 143 bp, Glycine max
  unsure (1)..(143): unsure at all n locations; Clone ID: 701126912H1
ggcaaaacgnaagttataaggncatgatctcaatccaatatggaagtnggtgtttgtncaatattcaacaagngggaagcaaggcacagtaccttggnagtagagtgctataacttcaatagcaatggaaaacatgatttcat

SEQ ID NO: 43334 - DNA, 252 bp, Glycine max
  unsure (1)..(252): unsure at all n locations; Clone ID: 701126914H1
tgtttgtnttctttgttgctgcagtagttttggtagcatggccatgccatggcgcaggctaccaaaggttccctctccgaatgaaaactggctatggngagcgttcttcggaggtaaaatgcgcaagttttaggcttgctgtggaagcacacaacatccgagcncttaaaaccattcctgaagagtgcgttgaaccaacaaaggactacattaatggcgaacaatttagatcagactctaaaacagttaacc

SEQ ID NO: 43335 - DNA, 255 bp, Glycine max
  Clone ID: 701126916H1
atatctatctattgagaaacatgaagaaggtttcacccttggcattttccattctctttttggccttcaccatagaaccctttattggcattgctgcagcagcccagaagcagtgcttgacacctcaggccagaagctgagaacaggtgtcaagtactacattctgccagtgttcagaggcaaaggtggaggcctaacagtttcaagcagtggcaacaacacatgccccctctttgtggtgcaagagaagcttga

SEQ ID NO: 43336 - DNA, 50 bp, Glycine max
  unsure (1)..(50): unsure at all n locations; Clone ID: 701126917H1
cnatngnncataaggagaaaaactttcaaagaggtgncnagcaaaagaga

SEQ ID NO: 43337 - DNA, 146 bp, Glycine max
  unsure (1)..(146): unsure at all n locations; Clone ID: 701126918H1
gcgggtncggtttcgangtgncttcnanntcgtgtntgntctttctctccttcttccttttcagatctccgctgaggaatcatcggagaaagagttcgtactcacattggancactactaactttcngacactgtcagcaancacc

SEQ ID NO: 43338 - DNA, 145 bp, Glycine max
  unsure (1)..(145): unsure at all n locations; Clone ID: 701126919H1
gcttgataatatcaattttagtttctgcccctncagtttgtttaaaaanattcgaagtaacccaacaaaattaggagtaatttgatnacctagaaanacaagactgaattgcagaaacaaaaaacctacatatatgtnctccagg

SEQ ID NO: 43339 - DNA, 256 bp, Glycine max
  unsure (1)..(256): unsure at all n locations; Clone ID: 701126920H1
gtgaaggcattgcataccagtggaattacatggttgaaaatcagtatggggatggaggaaggaaagcaggaagttgtccacacagagcagaatcttctcctcttgatgacaagaggcaagtccttagtgttggtaaactatttccgctgctacgccatttaagcctattgcatgtgaagataactctggaggactcattgacatgctacaaacctgtcatggtgctgctgccaacaggtgggctattntttggntg

SEQ ID NO: 43340 - DNA, 252 bp, Glycine max
  unsure (1)..(252): unsure at all n locations; Clone ID: 701126921H1
ggaaggaagaagatgggtggcgtgacctcttcaatggcggcgaantggcgttcttccctccgtccccggcgtcctacaaggtgctgaaggaggaggcgacngggctgctgctcatggagccgttcccgcaccgcgagaacgtggagattcttcggttcccgaaccgccgcggcacggagatcgtggccatgtacgtgcggcaccccatggccaaatccaccttgctctactcgcacgggaacgccgccgaca

SEQ ID NO: 43341 - DNA, 139 bp, Glycine max
  unsure (1)..(139): unsure at all n locations; Clone ID: 701126922H1
ctacctctttttcttctctctcaacaacttcannttcttcctccncgatcatgtctcacttcaagggcaagtaccatgatgagcttatcgccaatnctgcgtacattggcactcctggaaagggtattcttgctgctgc

SEQ ID NO: 43342 - DNA, 250 bp, Glycine max
  unsure (1)..(250): unsure at all n locations; Clone ID: 701126923H1
gctgaatacggttgtggccccagcgctccgttttacactcaaaaagacctcatgtctaacatagaggagaacaaatatctaggacagatggacgtgaatgcatctgataagtcagctaacatggccatcattcccaaaagcaggaggaggctgtaaagaaaaagtatggaggaatgctggcccaaaaaggccgccatcatatctanggacctgagcgtgcttactttgattctgcggattgggcacttgg

SEQ ID NO: 43343 - DNA, 241 bp, Glycine max
  unsure (1)..(241): unsure at all n locations; Clone ID: 701126924H1
cttggatctgtaacactgcaacgtcactcatncnaaccttactcatattaattttcgccatcctcttctctttgttacaagaatttcatcaagaatgcgaaancatcaactgcggtgaaggaagaatttctgaagaantggatatggggtctgagaanntatagctctcanaagaagancatgagtctgntggagagnaagaaagcnataaagctgtcagcagattagctatggcttncac

SEQ ID NO: 43344 - DNA, 246 bp, Glycine max
  unsure (1)..(246): unsure at all n locations; Clone ID: 701126925H1
cttgcataatccatcanaatttgaacattttaattattgcctcattgattattgtgtgtttaattcttagatgttgggtgctaacacatgattgggcacaatgaacttgttttgactttgaattgatgtttctttggttacaggattgctaggngtagcagccaacagattggaagtaggctgagtttgagcagagactatgcggctaaanncattaantttggtgtggaggctcgggctctgang

SEQ ID NO: 43345 - DNA, 242 bp, Glycine max
  unsure (1)..(242): unsure at all n locations; Clone ID: 701126926H1
ggaactaagggttgtgttgtgtcgtttcgttttcactctcacgttctcaaattttgtttgtgtatcgcaggaattaggatccgttatggggttctctgtaaccacgctaattttcgcagtgattggaattgtggcgtcccttgtaccagaatttgtttcaacagaggaccttccgctaatnctatttcacctaacttggttcttactgcaacaacagctgctggatgagtgggcgatgtata

SEQ ID NO: 43346 - DNA, 245 bp, Glycine max
  unsure (1)..(245): unsure at all n locations; Clone ID: 701126930H1
gtctgcaactccaganactcttcttaaggaagctattcatgttatcagttgtggttacgaggataaatcagaatggggaagtgagataggatggatctatggttctgtncacagaagatattcttactggattcaagatgcagacccgaggttggaggtctatttantgnatgcccaanctcccagcgtttnaaggttctgctcctatccaatctttcaaatcgtcctganccaagtgcttcgnc

SEQ ID NO: 43347 - DNA, 143 bp, Glycine max
  unsure (1)..(143): unsure at all n locations; Clone ID: 701126932H1
gactaaccntcccaaagatgaaaaacccnaacacaaggnagaacagaaacccgtgtaggaagaaaagaaggaacatgctgctgacgtggncgaagagacaganaaagaagctgcagaagttacggtaaccganactgnaggtt

SEQ ID NO: 43348 - DNA, 267 bp, Glycine max
  unsure (1)..(267): unsure at all n locations; Clone ID: 701126933H1
cttgtttccattgctggtaaagaatctccaatcttccaacactgcgtcactcgctttgttcccaattcagtccacaatttactttttccactttcccctaacctcccactcggaactcgtcgttacctatcgataatgaatttggggttacctcgctcacatccatcggtgtttactctgtaattaggaaccatgtcgaggcccatgttgcttgttttcttgctgattatacttntaatcacctccacagtnggagtggaagccanc

SEQ ID NO: 43349 - DNA, 144 bp, Glycine max
  unsure (1)..(144): unsure at all n locations; Clone ID: 701126934H1
cttttcaagatcttttgatttgagggtagagttttctatcaatttatcctatttttctcggagcctgcagcaggcatttttctttgtaccaatataccctctccacctttaggggtagctcttctaattatcaggntttgctct

SEQ ID NO: 43350 - DNA, 233 bp, Glycine max
  unsure (1)..(233): unsure at all n locations; Clone ID: 701126936H1
gggagagtctagagagagaaagcanaagcccaaacaccccatttcaccattgcaatcttcgttcggtttcagagaaccccttttgaatttgtttgaattttctgggaaactgggcattttgtgatcatcatctgggttctctcgatctccatcttttttttctggctttcggttttttctcctacagatcctcttctgtttttgttttctcagtttttttattcgaattttta

SEQ ID NO: 43351 - DNA, 251 bp, Glycine max
  unsure (1)..(251): unsure at all n locations; Clone ID: 701126937H1
tacgaagaagaggtgcgcaagancttcagcaagttcgacaagaacggcgacggcaagatctcgtgcgcggagtgaaggagatgatggcggcgctgggatccaaaacgacgttcggacgaggtgaagcgcatgatggcggagctggaccggaacgcgacggctacattgacttgaaggagttcggcgagttccactgcggcggcggtggcgacgggagggagctccgggaggcgttcgagctgtacgatctg

SEQ ID NO: 43352 - DNA, 254 bp, Glycine max
  unsure (1)..(254): unsure at all n locations; Clone ID: 701126938H1
ggagggcaaaggtttcacggaagagcaagaagctctggtggtgaaatcatggaacgaaatgaagaagaattctcaagaactcggtcttaaatttttcaagaaaatattggagattgctcccagcaggctcagncaattgttctcattcttgaaggattcaactgttnccttggagnaaaaccccaagctcaagccccatggccntggcgtncttgtcatgacntgtgantcacctgtnccaaccgnngaaaacc

SEQ ID NO: 43353 - DNA, 250 bp, Glycine max
  unsure (1)..(250): unsure at all n locations; Clone ID: 701126939H1
agagtcttnagttgagatcanacgcgatttactcgtgcagtggaaggcnccacgctgcatgagctncangggcggtgcngctcggcgatttgtacgcggaggaagnnagggagctcttggtggagttnagaattccggngtggnctggaactggggcccaccaccacgtgatgacggtacgtgcctgtataaagaccctgntcacgcangagatcgtattanagtagggagcaggggttcggtgcncncc

SEQ ID NO: 43354 - DNA, 248 bp, Glycine max
  unsure (1)..(248): unsure at all n locations; Clone ID: 701126940H1
attccttcattccncagnannnaaaaaaataaaaaananncnnanaanaanaatggccgatgccgaggatattcanncctcgtnanngataatggaaccggaatggtccaaggctggttttgctggagatgatgcaccgagggctgtgttccctagcattgtggggcgtccacgtcacactggggtgatggttgggatggggcagaaggatgcgtatgttggggacgaggctcaatccaagaggggta

SEQ ID NO: 43355 - DNA, 244 bp, Glycine max
  unsure (1)..(244): unsure at all n locations; Clone ID: 701126941H1
gtggtcgtcaacacctcatggaaacaagaagttggagaatgcttatgaggatgcaangaaaatagcagctgaaaagtctgaagtgtgccctattttcctattgttttctgttaatgcaagtggacagttctgtggggttgcagagatggttggtacagttgnntttagcaagaatatggncttttggcagcaagataatggngnggaagctttccgnngaagtggcacttataaaagatgtacc

SEQ ID NO: 43356 - DNA, 127 bp, Glycine max
  unsure (1)..(127): unsure at all n locations; Clone ID: 701126943H1
atcatcgtcaccaacatctttgagttcaccatttgnacatgctgagttgacacctacacaccctcccaatacaaattatggtcactcctacagggacttctttgggtctgaagganagatgtgtggc

SEQ ID NO: 43357 - DNA, 136 bp, Glycine max
  Clone ID: 701126944H1
aggttcttctcctttgcggggacttcatggaagactatgaagccatggttccatttcaggcattgcaagccttcggtctcgccgtcgacgccgtctgtcccggaaagaaatccggcgatgtctggccgcaccgctg

SEQ ID NO: 43358 - DNA, 254 bp, Glycine max
  unsure (1)..(254): unsure at all n locations; Clone ID: 701126946H1
anaaacagcgccctagatttgctcttctttgcttcggaagaaagagaaaaacaaataacaatggcgttcgcttgctttcctcggcagagttcctcttcgcttccgtcttacatactctctgcttaccaagaatttaacgaatttggagttgatgggggacctgnagcaaaagcactcagacctaagtttgatggcctttcacacatcgagtgcattctcaagttggctttcaacttcctgagattgatctgaaa

SEQ ID NO: 43359 - DNA, 138 bp, Glycine max
  unsure (1)..(138): unsure at all n locations; Clone ID: 701126947H1
gatccttctaagccgtggccaattgttctatggttgcaaggaggacctggtgcttcaggagttgggattggaaattttgaggaggttgggcctttagacacaagcttgaagccaaggaactnccacatggttgaaaaa

SEQ ID NO: 43360 - DNA, 253 bp, Glycine max
  unsure (1)..(253): unsure at all n locations; Clone ID: 701126948H1
anatgcatcttgttacatattgagctgaagatgcatcttgtttgttagatacaaaggagaggctcactccttgaaggtggaaaagattttgtttcaaggaaagtcagaataccaaaatgtcatggtcttccagtcatcaacatatgtccaaggttctgttttggatggagtaattcagctaacagaaagggatgaatgtgcctaccaagaaatgatcactcatcttcctctttgctctattccaaaccctaaa

SEQ ID NO: 43361 - DNA, 146 bp, Glycine max
  unsure (1)..(146): unsure at all n locations; Clone ID: 701126949H1
anattgttcattttcctctaatctatggntcccggaacagntttagagcttgttcaagcacggtgtcactcttctcttcctcgatgttcctcagtacaccctcgtcgaccgtcggtactcagatnttctctntggggcctactttt

SEQ ID NO: 43362 - DNA, 245 bp, Glycine max
  unsure (1)..(245): unsure at all n locations; Clone ID: 701126952H1
ggatgagatgaagacagagatggaatagttgacgaggttggattagggctagaatgaaggggagctgtaaatgaagtgggttctgttgtntggttggggtggatgaattcagggagagattttgagtttgtcccaccaagctgtcatacgaggaactggatccactacttgaatgagatacacctgttgctcaaaaaacgttgtcttgattatacttgaaggtgggggcggaatgatgccaggnc

SEQ ID NO: 43363 - DNA, 248 bp, Glycine max
  Clone ID: 701126953H1
agatggtgagattgtccaggctgccgctctagtgagtcaatcagccctttacaacaaggagcttatgcatcagcagccagttggaccagccatgattcatccatcccaaacagctgcaaaagggccgagttggagtgaccttttagagcctggagtgaagcatgcactgattgtgggggtggggattcaaattcttcaacagttctctggtataaatgtggtgctctactatacacctcaaattcttg

SEQ ID NO: 43364 - DNA, 252 bp, Glycine max
  unsure (1)..(252): unsure at all n locations; Clone ID: 701126954H1
aagcaatggcgccgaagaagccgagaaccacgacaaggaaccctgatttggttagggggattggcaagtnttcgaggtcgcagatgtaccacaagangggcatctgggccatcaaggccaaaaacngtggcgttttgccccgccacgatncccaagcccaagcccgaggnccccggcccagangcncgcccaagttctaccccgnggacgatgttaagaagcccctggtncaacaagcanannnnttaaccc

SEQ ID NO: 43365 - DNA, 239 bp, Glycine max
  unsure (1)..(239): unsure at all n locations; Clone ID: 701126955H1
attccttcgtcctcgncaacttgaacctctttctttgactccgccatcatacatnattacagagcgttggagttgaaagagaaggttcagcctctgatcccatggccggtgtctccctttacaaacctaaatcctacgaattccctctcttatgctcttcaagacggcaaaattcgcctcgaaatcgatttcccccaggcctttgccccagtaacatttcttcttataagggatctnca

SEQ ID NO: 43366 - DNA, 135 bp, Glycine max
  unsure (1)..(135): unsure at all n locations; Clone ID: 701126956H1
tcttcaaatcaatctcttctcagaaatgggtgtggctacaaaacattcccgatgcggaggagggaaccttggagnttggaatggaatacagaactgtgtctgnagttgctgggccattggtcattcttgataaag

SEQ ID NO: 43367 - DNA, 247 bp, Glycine max
  unsure (1)..(247): unsure at all n locations; Clone ID: 701126958H1
cgaccaggttcaagaagaacaggaagaagagaggtcacgtcagcnccggacacggccgtatcggaaagcaccgcaagcatcccggaggtcgcggtaacgccggtggcatggcatcaccaccgtatcctcttcgacaagtaccatcctggtttcttcgggaaggtaggcatgcgctacttccacaaacttcgcaacancttctacaatccgatccatcancatcgacaagctgtggtcccccctcccc

SEQ ID NO: 43368 - DNA, 245 bp, Glycine max
  Clone ID: 701126960H1
cttgcaacttcacccaagtctcaaacaaccttttaaacctcatcaaacatgtctctcattccatcattgctaagcaacagaaacatcatggaccccttctccaccaacatctgggcaccctctgactccgacagcgaggtttccgccttcgtgaacgcacgtgtggactggaaggaaaccccggagtcgcatgtgttcaaggcggattggccggggctgaagaaggaggaggtgaaggtggaggt

SEQ ID NO: 43369 - DNA, 211 bp, Glycine max
  Clone ID: 701126962H1
cctttttttatagttcggtgtcttattatttaacattatatctagtgaaaataaaaaagctatttccactcctattcctaatggagtttgttatgttgttcttgataagagtgcttgagagttagttgtgtattgtgtgggagatgtatttatcagatgatggcattctagcaggagccagccatattattaatttataattttataattc

SEQ ID NO: 43370 - DNA, 240 bp, Glycine max
  Clone ID: 701126963H1
caacaacaaacaaactctttctggattcagtttttgatgtgaaaatggcagtgactcttacatcaacactctttctggctttgctatttgctgcttcagcttttgctgctcttcagcctagagtacctgaagcttacctccaaaatgggaactttgaggagcagccaaaccctaaatacctgaagaaaacaaagctctttggtaaatacgctttgcctaaatgggagatcaatggtctgg

SEQ ID NO: 43371 - DNA, 252 bp, Glycine max
  Clone ID: 701126964H1
gttagggttcccaatttctccgccaatcagaagatgagttccaccggtggttctaccaagggcggaaggggcaagcccaaagcctccaaatccgtttcaagatcgcagaaagctggtctccaattccccgttggaagaatcgctacgattccttaaggctgggaaatacgctgagcgtgttggtgctggtgctcctgtgtacctctctgcagtgctcgagtatctcgctgctgaggttttggaatggctggg

SEQ ID NO: 43372 - DNA, 133 bp, Glycine max
  unsure (1)..(133): unsure at all n locations; Clone ID: 701126965H1
gttgagttttagaatttgttgtgtttgactattaaacatgttttctgnaactttgtatatatttcttctctgtaatgagttgaaattcaatatctctgcaatgaacttggtcatgtcgaggtcgttttttttt

SEQ ID NO: 43373 - DNA, 245 bp, Glycine max
  unsure (1)..(245): unsure at all n locations; Clone ID: 701126968H1
aattcatcaccttggaaggagataacctcactagtctgtttcctggtacatccttagatttgggtggtttcaagttagactctatgcatatgtttggagtttggctgaaggatcttcgtataatctcttatctatcaggtggnggggttgttgcaacaattttgattatgatttgcgtgttttgtgttgggacaatagacagtgttggnttccatcacacgggtcaattggtaanaggaaggcnc

SEQ ID NO: 43374 - DNA, 245 bp, Glycine max
  unsure (1)..(245): unsure at all n locations; Clone ID: 701126970H1
ctcgngccngagagtgctaagcaatcgtcttctcttctcggancttggctttgcttatcgnattctctctcctctgcgtttctctaattccaaggtttgtaaaanatggcagatgccgaggatattcaaccccttgtttgcgacaatggaactggaatggtcaagggcaggatttgctggtgacgatgctcctagggngtcttcccagtantgttggccgacctcgacatactggtgttanggnc

SEQ ID NO: 43375 - DNA, 241 bp, Glycine max
  unsure (1)..(241): unsure at all n locations; Clone ID: 701126971H1
tttataaaaagctctttcccttcccctaaatccctcacactcattccatttttacctttctctctcgctcgcaaacgcaaataataaaaaacaaggttttagccatggcatcgaagcggatcttgaaggaactcaaggatctccaaaaggatcctcctacctcatgcagcgccggtcctgttgctgaagacatgtttcactggcaagcaacaattatgggtctccagaaagtcttatgnng

SEQ ID NO: 43376 - DNA, 132 bp, Glycine max
  unsure (1)..(132): unsure at all n locations; Clone ID: 701126973H1
gaattgacaaggncattgaagatggtgtcaacatcctttccatgtncaattnggggnngtttgctggattactacaaaganactantgcanttggaactttnggcggcnacngaccatggatactggnttcc

SEQ ID NO: 43377 - DNA, 242 bp, Glycine max
  unsure (1)..(242): unsure at all n locations; Clone ID: 701126974H1
ctttctcaagggttgagattgcacatattgctgaacttattgaacntcccaccgatcatgtggatnggaagttgtgctcagatgattttggacaagaagtttgctggaacattggatcaaggtgctggatgccttgtcatattcgacgatcccaagactgatgctatatatcctgactactctagagaccatttccaatgttgggaaagtcgtggacagtctttatgttaggtcgccaagac

SEQ ID NO: 43378 - DNA, 131 bp, Glycine max
  unsure (1)..(131): unsure at all n locations; Clone ID: 701126975H1
ccaaaccctggaattaagcacgttatttcattagggttggttttgttgaacagaaaaaaagagaaaaaaaaattatgggaagcgatggcgtgaggnaaccaagattcctatgccttcatgggttccgaaca

SEQ ID NO: 43379 - DNA, 130 bp, Glycine max
  Clone ID: 701126976H1
cttggaaggtatgataagtttgacatcttttgatgtatcatacaaccagtttgagggtccacttcctaacattctagccttccaaaatactacaattgatacattgagaaataataaaggcttgtgtggc

SEQ ID NO: 43380 - DNA, 133 bp, Glycine max
  unsure (1)..(133): unsure at all n locations; Clone ID: 701126977H1
tttacttctgngatcaaagatggaggacgagaaaatngttggatacgttacggcgttccttaagaagaaaggcttcacgcaaaccgagaagnttttccaggaagaattccacacaacatacaangnngaaaaa

SEQ ID NO: 43381 - DNA, 248 bp, Glycine max
  unsure (1)..(248): unsure at all n locations; Clone ID: 701126978H1
ggcgacccatacatccttcacaccaacgtgtttagccaaggcaagggaaatagggagcaacaattctacctctggtttgacccaactggcagattttcacacctattccatcctatggaaccctcaacgtattgtcttctcagtggatggaagtccaattagggagttcaagaacatggagtcaaagggtgttccattccccaagaaccaggcaatgnggatnnacncaaaccctgtgaaatncanat

SEQ ID NO: 43382 - DNA, 241 bp, Glycine max
  Clone ID: 701126979H1
ggaaactttgatgtgtttgactggtctattccagaagaagtgatggataagttctctgaaattaagcaggatagactaattaagggcactttttttgttgacgagacctatggtgcctttaagaccgttgaagagctttgggatggtgaactctgagcaatatgctcatagagatgttgacaaatgcactgctcctcaagcagattgattccgcctttaccgttaagatcttaaagctacc

SEQ ID NO: 43383 - DNA, 248 bp, Glycine max
  Clone ID: 701126980H1
gagggcgtcactagcctgtggagaggctcatcgcttacggtgaaccgcgccatgctcgtgacggcgtcgcagctggcttcctacgaccagttcaaagaaatgattctcgagaacggcgtgatgcgcgacggcctacgggacccacgtcacgggcgagcttcgcgcggggttcgtggcggcggtggcgtccaaccccatcgacgtgatcaagaccgggtgatgaacatgagggtggagcccggggaggc

SEQ ID NO: 43384 - DNA, 141 bp, Glycine max
  unsure (1)..(141): unsure at all n locations; Clone ID: 701126981H1
gttgggtttctatcaacctgaactcctaatccaacaaacttttttttatttagaaaccaaccaagttgtgttatttctatttggtttggctatatnctctatggcactagtcaaagacctatggctaaccttttcttctcc

SEQ ID NO: 43385 - DNA, 130 bp, Glycine max
  unsure (1)..(130): unsure at all n locations; Clone ID: 701126982H1
attagtgagttggtcattgacacactactttnngaaggttgtnttgccaganngttctaaagatattncagtattctgttccannncctangaaacantcgnaggaganaaagcttncccacttggntat

SEQ ID NO: 43386 - DNA, 226 bp, Glycine max
  unsure (1)..(226): unsure at all n locations; Clone ID: 701126983H1
aganggagaagaggctgagggctaannggagggagattgtangaacctttctatgacaagacagaagctgctaagctcgctgcccaagaggccgcccttgccgncacctaagctggaggttccttcgaaaccaaatactgccatggaagcgtccattccactaacaacaccaacattgatgtggagatggctgatggcagtcaaagcatggcttcctaaagcctgt

SEQ ID NO: 43387 - DNA, 134 bp, Glycine max
  unsure (1)..(134): unsure at all n locations; Clone ID: 701126984H1
gttntagcanaanctcgnatnatattattntgtcacaataataatgtctcactccattaattcagagttcaagtttgatcccaaggnaccctccatgcccatatcgtatccaataaagaccctcaaggagttgg

SEQ ID NO: 43388 - DNA, 132 bp, Glycine max
  unsure (1)..(132): unsure at all n locations; Clone ID: 701126985H1
gaaaggggtggtgagaatggggggctggaatgataagnngnacgatgacattgacgcgctgctcggggcggatganaagcttgaggatttcgntgatgatcaggngnntaaggcgncacaaggaaggnntcc

SEQ ID NO: 43389 - DNA, 242 bp, Glycine max
  unsure (1)..(242): unsure at all n locations; Clone ID: 701126987H1
ctttagtttaggatgacccaagtgaggnacaagcaagtggttctaagagactatgtcaccggattccctaaagaatccgacatgaacattgttgaaggcaccataatattgaaggttcccagnaggttccaatgatgtccttctaaaaaatctctacttgtcatgtgatccatacatgcgactcctcatggccaaggaccgttctttcggagatggctcntgcaccctggcctctccattgc

SEQ ID NO: 43390 - DNA, 130 bp, Glycine max
  unsure (1)..(130): unsure at all n locations; Clone ID: 701126988H1
aganaaggagtgagagatggagancttccctgtgatcaacttgaagactatcaatggtgaggagngaaagactattcttggagcaaattcaagatggctgtcagaatggggttttttgnanttggtgnnt

SEQ ID NO: 43391 - DNA, 128 bp, Glycine max
  unsure (1)..(128): unsure at all n locations; Clone ID: 701126989H1
gttcgtataccacagattggtgataaattcagtagtagacatggtcaganggggacagttggtatgacttatacacaagaagacatgccctgnactgtggaaggcattacccctgatattnttgtcaa

SEQ ID NO: 43392 - DNA, 136 bp, Glycine max
  unsure (1)..(136): unsure at all n locations; Clone ID: 701126990H1
gcgatggaggtggtgaagggtctggacgtgaaacggtaacatgggtnccgtggtacgagattnacgtgtttcccgtcgaggtttcaacccantgacgncntcaancaccagagaccaaactgnnccnctcnnagnt

SEQ ID NO: 43393 - DNA, 87 bp, Glycine max
  unsure (1)..(87): unsure at all n locations; Clone ID: 701126993H1
accagcttacgtcccttgcatgctgcctacactttactncatttgtggaattacttttgtactcttcctgctcctggatcttccaca

SEQ ID NO: 43394 - DNA, 134 bp, Glycine max
  unsure (1)..(134): unsure at all n locations; Clone ID: 701126994H1
cggaatgggaagggtgattcgcgcacagcgtaaggntgcggggtcggtgttcaagtcccacacccaccaccgcaaggntccggcnacgttccncagcctncgacttcggcgagcgcaaccggctacctcaaang

SEQ ID NO: 43395 - DNA, 125 bp, Glycine max
  unsure (1)..(125): unsure at all n locations; Clone ID: 701126995H1
ctggcggagtcaactgaatgaccaaagcatcggttgattccacttgtggcctanttcgaccgccttgacaccttaatctcagggaaccccctgctcctctcntnttctcttcatgnatgtgggct

SEQ ID NO: 43396 - DNA, 250 bp, Glycine max
  unsure (1)..(250): unsure at all n locations; Clone ID: 701126996H1
tgcagaacttagggnntgggcctttttttgaggtttncagcgcttctttctcacaatggttcttcagaatgatattgatttgctgaatcctccagctgagttggagaagagaaagcacaaactcaagcgtcttgttcagtncaccaaactctttcttcatggatgttaagtgccagggatgcttcaacataacaactgtgtttagccactctcaaactgttgtggtgtgcggaaactgccagactgtttt

SEQ ID NO: 43397 - DNA, 232 bp, Glycine max
  unsure (1)..(232): unsure at all n locations; Clone ID: 701127001H1
attaagttggccaattcagcacctttgatcaatggaaagctccgttatgctgttaacagtgtctcctatgttaaccctgacacccctctcaagcttgctgattacttcaacattcccggaatcttcagtgtgaatttactccaaaactctccctcaatggtccaggatacataggcacctcagtgttgcaaacttctctccatgattttatngaggttattttccagaacaa

SEQ ID NO: 43398 - DNA, 292 bp, Glycine max
  unsure (1)..(292): unsure at all n locations; Clone ID: 701127002H1
cgtctacatcgccaaactcgccgagcaggccgagcgttacgaagagatggtggaatcaatgaagaacgttgcgaatctcgacgttgaactgacggtggaggngcggaatttgctttctgttgggtacaagaatgtgattggtgctcgcagagcgnctggaggatcctgtcttccattgagcagaaggcagaaacaanagggaacgagttgaatgcgaacggattaangagtacagacagaagggtcgaattggagctatcgaaacatctgtnatgntgttntgcagnnttnc

SEQ ID NO: 43399 - DNA, 232 bp, Glycine max
  unsure (1)..(232): unsure at all n locations; Clone ID: 701127003H1
ttggatctaacatcacaaaaataggaggtatttgcctttagaagggtatctctnactggtggtagctgaccatggcattttcaacttnctgaatttgtggttgagggttcatgtcttagacccttcccattaggctcaggtntttcccacgtcaatatcatcagggggctatggacctccnatggcaatccccgcatgtcgttggggtggcggcatgtnagnngactttanc

SEQ ID NO: 43400 - DNA, 286 bp, Glycine max
  unsure (1)..(286): unsure at all n locations; Clone ID: 701127004H1
gagaccaggtgtggaaggcaaatatacctcatacccatcttgcaactgaaaaatctgaccagaactggatggttgtgaaaggcgaaacaatagtgtttcctggtggaggaacccacttccataatggtgctgataaatacattgcttcaattctaatatgcttaattttccaaacaacaatatanancaatgggggaagagtcaggtctnttcttgatggtgnctctggggntgctagctntggaggatacctcctttcctccaatgtgatagcatggcattgggc

SEQ ID NO: 43401 - DNA, 190 bp, Glycine max
  unsure (1)..(190): unsure at all n locations; Clone ID: 701127006H1
ctcgagnngtcctgggaactaagagactcccttacccaagcagatcttttgagctcgctnattgtngctcgttgtcgaattgattggcttcaaagaganggaattctacttcttgaactagnnncggttgctcaggccaggaggttattntnatatcanctcctgaaagcanatgctcaggatgaagagg

SEQ ID NO: 43402 - DNA, 281 bp, Glycine max
  unsure (1)..(281): unsure at all n locations; Clone ID: 701127007H1
ctttctagagtaggactaaactcatacactgatcatgggagtgnntttaagacaagtggtggcgggtgtcctcaccctcacaatgttcgtcatgcttatacacatgatcaaaagagaccattttgatgctgttgatgataaacttcctgaacggaggatgtcagctttgaaagtacaaactttgatactactcatgttagaaagaacatcgggatttggaagggagatggtgatgagttaanncccatgttggcttaagccatctgaagataacgtggacc

SEQ ID NO: 43403 - DNA, 222 bp, Glycine max
  unsure (1)..(222): unsure at all n locations; Clone ID: 701127008H1
gaaggaagcaaatgctaaaggaagtctatttcaaagatttccttcagatttgttgacacagctgaagacagattgtctcgtcctgcacaatcatcgttatgccatatccccacgcaagctncaatataataccaagttatctgacttttngagattcnggcaacatcctgaggatagagatggaaagactttcgtttccacagcagtggtaggaaatnnccc

SEQ ID NO: 43404 - DNA, 227 bp, Glycine max
  unsure (1)..(227): unsure at all n locations; Clone ID: 701127009H1
ttaagttggccaattcagcacctttgatcaatggaaagctccgttatgcngttaacagtgtctcctatgttaaccctgacacccctgctcaagcttggctgattacttcagcattcccggaatgcttcagngtngaatttactccaaaactcncctcaaatgggncnggatnnataggcacctgcantggtgtcnancttctcgcnatgatttgagggaggttagtc

SEQ ID NO: 43405 - DNA, 223 bp, Glycine max
  unsure (1)..(223): unsure at all n locations; Clone ID: 701127010H1
gtgaatcatgtcggacgaagagcatcacttcgattctcaggcggatgcgggancgtccaagacgnatcctcagcaggctggtaccattcgccaagaatggctacatcgtcatcaaatccaggccttgcaaggttgtagaggtctctacgtaaagacaggccaancatggacatgcanagtgtacactttgttgccanngnnattgttactggganangtttgc

SEQ ID NO: 43406 - DNA, 279 bp, Glycine max
  unsure (1)..(279): unsure at all n locations; Clone ID: 701127011H1
ttagtttcaataatccacaccccaaaccccaaatctttccctatttattttcatcttagttttccctaggaccatatattataccatatttatatatcttcacatacttaataatatataataatgggtgttgtacggacgtgggagagggagggcggactggaggcctttcgccggagcctggtggcanccgccggcatccagcggcggaaagacgatgagggggggagaacccacaagtttgttncctcctaatgancatgatgatggaangggncc

SEQ ID NO: 43407 - DNA, 277 bp, Glycine max
  unsure (1)..(277): unsure at all n locations; Clone ID: 701127012H1
cttaagttcattccttgtgttttgctttcttcctcaaaaccaaacatgtcgaacacatgcggcaactgcgactgcgctgacaagactagctgcaccaagggaaacagctatggtgttattgtagagactgagaagagttacatcgagacgttgtcatggatgttccagcagctgagcatgatgggaagtgcangtgtggcanaactgcacttgcacggactgcactgtngcccttaagggaatatgtntgaanatgtaattgccctgtgttgggnaa

SEQ ID NO: 43408 - DNA, 114 bp, Glycine max
  unsure (1)..(114): unsure at all n locations; Clone ID: 701127013H1
annactctgcatcgcttcaggttcttctgaaaagatctntcgcgnatntgttggtacacttgacattcacgagtcancngcnaganntgaccgaatacagacactntcgtgtcg

SEQ ID NO: 43409 - DNA, 175 bp, Glycine max
  unsure (1)..(175): unsure at all n locations; Clone ID: 701127014H1
gcggaatncagatctngcgtttgcactttgcacaatgcgagttctancaggatcgttnggttataccgattagtgtntactaaaacaacgttttngtgatatcgagaaaaaaganaaataaaaagtgatgtcgaggagaccggggaatccttnngaangnncggnggacgtggcg

SEQ ID NO: 43410 - DNA, 225 bp, Glycine max
  unsure (1)..(225): unsure at all n locations; Clone ID: 701127015H1
aaaacatcnaaattaaaagangcaagcatgggggaatccaatgtcatgaccaagactgaggatggtgcttgtctgttctgcaatgctgcttagtactaatctagtgtaccctgcagtactgaatgctgctattgagctcaacttgtttgagatttgctaaggcagcaccagctggttctttatgtcatcccntgaattggcttctaaagctccnaacaaaacact

SEQ ID NO: 43411 - DNA, 286 bp, Glycine max
  unsure (1)..(286): unsure at all n locations; Clone ID: 701127016H1
gaagaatactactaactgtgttgtaatacctcagtggagaacaagatgaatccatggaacatgagaacttccaagttactctctcaacaacttgcttatcctccttatcgcttggtagaagagattccaaacatgggnaattccagttgtgtgacaaggagcccaagagggtcacgatgacnatcttttatgggggncantttctgtcttggatgatattccagcngacaaagcccaggncatcatgtnttttgncggcnaaagnatntctcaaaacccgaanggt

SEQ ID NO: 43412 - DNA, 285 bp, Glycine max
  unsure (1)..(285): unsure at all n locations; Clone ID: 701127019H1
atngggggtgatcgcgatggtaatccaagagtaactcctgaagtgacaagggatgtttgcttattggctagaatgatggctgctaatttgtattattcccagatagaagatcttatgtttgagctctctatgtggcgctgcaatgatgaacncgcgttcgtgcagaagaacttcacaggtcttccaagaaagatgaagttgcaaaacactatatagattttggaaaaaggttcccccaaatgaaccatatcgtgtggtactcggtgaagtaagggataggctcta

SEQ ID NO: 43413 - DNA, 281 bp, Glycine max
  unsure (1)..(281): unsure at all n locations; Clone ID: 701127020H1
atgagtggtagcaacgatngtnncggcagtggagctctaggnntttgaaggtggctagtgcagctgccgctacanccgccgttgccggcggtttatatgccattctttcatcctcaacctctgctagctctgagatggaagtgccgtttgcagcgcacggcgtgagagcaaagaacgtgacgatggtggctccgggtctcatcctcgcgagggtgccaccacggtcagtcgttggaagaaacctganattggttgggtgaagctgaacgtggatggttcnc

SEQ ID NO: 43414 - DNA, 190 bp, Glycine max
  unsure (1)..(190): unsure at all n locations; Clone ID: 701127022H1
gctttctgtgagtaaganattggacgtagagggcctagttactggggtcttctgcttcttacagctagctagcccagagctccaacaagcattacatattcagcgtctatctgagcaaactgcttcgaagagattgcntgcattaagttaatgaaaaaggcanattcaggtantccttgtgtgganttgt

SEQ ID NO: 43415 - DNA, 285 bp, Glycine max
  unsure (1)..(285): unsure at all n locations; Clone ID: 701127023H1
cttaggagaaggaaacnagagctggnggctgtaatatcatctgcngatgctgactctttggttgctgatgctgaatcaaagtggcaggnacttagtgatgctaaaatattggttgatgatgcaatagggcagcttagaagtgttactgaagtatnaatgnccgaacacgacanattnaacagatcanagatggcnttgaatannattgaagtcattggnangagagtatganaggacaacttcaagnangatgcnaaacnagttggngcattgcagagtaananc

SEQ ID NO: 43416 - DNA, 272 bp, Glycine max
  unsure (1)..(272): unsure at all n locations; Clone ID: 701127024H1
ctcaaagctctctgcttttttgtgacacagatcccntgctgggttcaagttnctcactttggattctctccctaatgggttcctctgatcgattgtttaaccggcaaagaagtcttcatgagatccttggtggtggtcaattgcagatttaatactnnggaggcggaagaaccttanctggggggatattganggncacactagctgtttgggttgtnttgaaagatctgggttatacnctnctgtctcttgnttcnaatgtnctcctccnc

SEQ ID NO: 43417 - DNA, 279 bp, Glycine max
  unsure (1)..(279): unsure at all n locations; Clone ID: 701127025H1
attaattggtgtactatataagcttattttttatatcttaaagtataccatgttgcnaacatttttataagcaaatttacacttatatatttgaaggaattttctagacgcaagcaaaatttggtgagaaaaaagaggggatgtaaattcttcatatacgttatctttcttttgtatccatacataatcatgatctgagttgtaaaaaaggatgtttcttgtgcttgaaattgagacaatgcacgggttgccttaanatagaaggtaanccagcaggat

SEQ ID NO: 43418 - DNA, 277 bp, Glycine max
  unsure (1)..(277): unsure at all n locations; Clone ID: 701127027H1
gttgtattgcctctctcgccgaaaccctcgtttccaacttctacagaatccatttcttcgccatggatattgangaggacatccgttctttgcagctcgattcggcagcagaagacaataatggggtggtaaatccagaggatggaaagcagaagaagttgagaaatatgataagatggatgangatcccaaagcaggaggttgaggctgagncaaaggctgttgaggctgagncaaagtgaaagataggggattcctcggtcnagatgaagaagng

SEQ ID NO: 43419 - DNA, 283 bp, Glycine max
  unsure (1)..(283): unsure at all n locations; Clone ID: 701127028H1
gccgccaccgacggcgacgccgatccgctttacataggttgtgtggagcagtgtaaganaactggatgtgtaggggatagatgctttcaacattgtaaattttcatcagatggaaaaccantngatggtccatggtatatgcatgaacctctatctgaggtggaaacaatgggatgttngcactgagctgtaggtnntactggatgctagctnaagcgggagnaaggaacaaaacttgggcgnccngccngtccaatatctgggaaatgggcccttccggtcc

SEQ ID NO: 43420 - DNA, 104 bp, Glycine max
  unsure (1)..(104): unsure at all n locations; Clone ID: 701127029H1
cttcactctcagcttccatggcgatctcgggnncacgtgccaccgntgctgcangttnacntcaattgggtttgctttctgcntgnatttgccnnnaaaagagg

SEQ ID NO: 43421 - DNA, 283 bp, Glycine max
  Clone ID: 701127031H1
gcttatcagggttttgctagcggaagtctagatgcagatgcccagcctgttcgtttgtttgttgctgatgggggtgaattgctggtggcacaaagctatgcaaagaatctgggtctttatggggaacgtgttggcgccttaagcattgtctgaagtcagctgatgttgcaagcagggtcgagagccagctgaaactagtgattaggcccatgtactcaagtcctcctattcatggtgcatccatgtggctgccattctcaaggaccgggatttgttcaatgac

SEQ ID NO: 43422 - DNA, 313 bp, Glycine max
  unsure (1)..(313): unsure at all n locations; Clone ID: 701127033H1
ataggaantgttgtctgagaacccaaactgctaacatatggctggctcagaatccatgtatgttggtnaccgatgcctcctttgggctccaagtgaagagcttcaattgggtctcatatacttccttgttccaatttcccaaatccaagaatcccactctttttcaggacttggggggcaatagccatccanggctaatggcaggctccntggnnctggctggnaanaacngnatnaaacaatnaaccctaatnttaanaaaccntgttcgacaaaaaagnttcggaaaagnnnataanttnntcnaangtgt

SEQ ID NO: 43423 - DNA, 284 bp, Glycine max
  unsure (1)..(284): unsure at all n locations; Clone ID: 701127034H1
cagccccaaatccaatggcttcagagaagaaactttcgaacccaatgagggagatnaaggtgcagaagctcgtcctcaatatctccgttggcgagagtggagatcgtctcacccagagccgctaaggttttggnacagcttcatggccaaacctgtgttttccaaagcaangtnnacggttcgttcctttggattanaagtaangngaagattgcnagcnntgaccangncagaggttgangagggcngcaattttgggngcttggtttnaagnnggananntc

SEQ ID NO: 43424 - DNA, 289 bp, Glycine max
  unsure (1)..(289): unsure at all n locations; Clone ID: 701127035H1
attgaactctagtgaggatctctttccattgaaacggttcaagtggcttattgagttttccatggatcatgattggtgtgcagcagtgagaaaactgttgaacctactgcttgatggaactgtaaatacaggagatcatccttccttgtactcgcgctttcagagatgggtctccttcacaaagctgtaaggagaaacagcaaggcagttagtggagtgtctttgagatatgttccctgagaatattcnggataaaactaggacctgaagaccaaggcactggttgatg

SEQ ID NO: 43425 - DNA, 284 bp, Glycine max
  unsure (1)..(284): unsure at all n locations; Clone ID: 701127037H1
attctgggaggtgtttatattgtaacaggtgcacaactccttagcaaagggagctggccaaggaatgtgcttcatctgcggcttctctttgctcatacacctaattgcagtatccggaagtcagagtggactgctgcaccagaggcttcagaaaatcatcttttctcacaaatttgagcacaacattttcgttcacacagcacggtaacactggtcctccaaaacaggctccaactgtacttaactctggagtttatccagaaggtccacctgtgcaatttcnt

SEQ ID NO: 43426 - DNA, 222 bp, Glycine max
  unsure (1)..(222): unsure at all n locations; Clone ID: 701127038H1
cagccatatccccatcgcaacttttctgaggaagttgctattcttgatggctactttggcaaacttggtgcaggaagcaatgcttatattttgggtggccaagacaaagcacanaactggcatgtctactctggcttctgcagattctgaactcaatgtgccaatgnttacactcntgagntgnggcatgactggctggatagagagaangcncaggttttc

SEQ ID NO: 43427 - DNA, 277 bp, Glycine max
  Clone ID: 701127039H1
actagccaatgcaaactgtaaacttaaaatatgtgattttgggttagctagagttgctttcaatgacacaccaacaactgtgttttggacggattatgttgctacaaggtggtatagagcaccagaactctgtggatcattttactaaggtatactccagcaattgacatttggagtataggttgcatctttgctgaagtattaataggaaagcctcttttccctgggaaaaacgttgtccatcagttggatctgatgacagatttgcttggcctcc

SEQ ID NO: 43428 - DNA, 209 bp, Glycine max
  unsure (1)..(209): unsure at all n locations; Clone ID: 701127040H1
agctcctgcacaagaactattgcaaaacnctaaatngaccacaaaaccgcgcgcctttctgagtttggagaaatggtcagagcagcttttgggctacctttaaatgtaaaccatgatggaaaaccactcgctggacataatgtcctcttgtttcntcgcgaagattatntagctcatccacgtcacagtggaanacttgaatcacgatt

SEQ ID NO: 43429 - DNA, 282 bp, Glycine max
  unsure (1)..(282): unsure at all n locations; Clone ID: 701127041H1
atccctggcaaaacctatgttctctcattctctgttggggatgctagcaactcctgtgaagggtccatgattgtggaagcctttgcaggcaaagacaccatcaaggtgccctatgagtccaaaggcaatggagggttcaagcgtgctcacncaagtttgtggcggttacccctagaacaagagtcatgttncttagcanttgctaacaccatgcagaagtgntnactnctgccncatgctgtgggcncgngattgntgntgtcnagtcggnnacccngcnnc

SEQ ID NO: 43430 - DNA, 220 bp, Glycine max
  unsure (1)..(220): unsure at all n locations; Clone ID: 701127042H1
atgaagttgtttgttttctttgttgctgcagtagttttggtagcatggccatgccatggcgcaggctaccaaaggttccctctccgaatgaaaactggctatggtgagcgttcttcggaggtaaaatgcgcaagttttaggcttgcgtggaagcacacngcatccncgccnntaaaaccattgcctgaagagtgggttgaaccannnaaggcactacatt

SEQ ID NO: 43431 - DNA, 223 bp, Glycine max
  unsure (1)..(223): unsure at all n locations; Clone ID: 701127043H1
gcgggagcagacgacctgtcttcatcgccaaacaacctcaaaaacattcatcaacgttcactattantccanccatcattangtaaganaataaggttcgatttttttatctttgtttngcttnctgatccatcatggaggtggncgagtcctgggatgccctcgcaaacaggcaagaanncntgaaggntcagtttggatgaacngangnnnttctnancgt

SEQ ID NO: 43432 - DNA, 282 bp, Glycine max
  unsure (1)..(282): unsure at all n locations; Clone ID: 701127044H1
ataaccttagtcatcctcttctttcatctttctccctaacggtatcgagggaaaaatatggcggaagaacacagatgccaggcaccgcgcttctgcgccaacaattgcggtttctttggcagccctgccacgcagaatatgtgctccagtgctaccgcgatttncagntcaaggagcagcaatcttccaacggcnagatggttctcaatcagttcgctggttannntcaacggtcaacggggtganttcctcagnggtcgtctncttntttgggcggcggta

SEQ ID NO: 43433 - DNA, 278 bp, Glycine max
  unsure (1)..(278): unsure at all n locations; Clone ID: 701127045H1
atgnagttgttcttctacgcggtgttcggcggtttgggagcggttgttgcagtgacggagctgagcaagagcaacaaggaccgaatcaacacctcttccgcattcaattccttcnagaacaactacctcatcgtctattccctcntgaggctggagattggctacaaggtccatatgtctactacctttacagtacatatggntatgggaagggagacataggacaactcttcattgctggttttgggtctccatgctctttggaacaattgtcggat

SEQ ID NO: 43434 - DNA, 189 bp, Glycine max
  unsure (1)..(189): unsure at all n locations; Clone ID: 701127046H1
atgccgttgaaggtgttagaggcgacagtgtcgagtttcgatgtggtttttgagaagttccgatcagaggctccacanaacaaggccaatctcatcctcttncttggncggacnatgacccggctacctctctcagctggtgccctgattggtgagagcagnaccngtgntatacaagnaatctggngg

SEQ ID NO: 43435 - DNA, 286 bp, Glycine max
  unsure (1)..(286): unsure at all n locations; Clone ID: 701127048H1
ggtggctccgggtctcatcctcgcgaggntgccaccacggtcagtcgttggaagaaacctgagattngttgggtnaagtganacgtggatggttcacgcgacncatacaaaagttcctccgctggttgtggtggtgttctgagggacggcanagcnaagtggctccgtggncttgctanaaaactgaaaccctacntatgcagtgcaccagacagagttagaagccnnttctcacggggcttnaangtggcttcagagattgaatgttaagnactaatgtggagtc

SEQ ID NO: 43436 - DNA, 283 bp, Glycine max
  unsure (1)..(283): unsure at all n locations; Clone ID: 701127049H1
aaanttgttttcacataccatggacaacaacaatgacttttggnaattcagtgaccagttngaggcttgaatctngtttggccaatctgtctctgaatgattattccattnggagcaacagctacagctccaagaggcntgatcagaggaggatttgatgtcaagggcagtgtttcaanaacancaacaatgcatcanaggtttggtgatgattncaagatnggtggagatcaccanttccaatgggaccccttttcncnatgccngnacngnancaaaattc

SEQ ID NO: 43437 - DNA, 290 bp, Glycine max
  unsure (1)..(290): unsure at all n locations; Clone ID: 701127050H1
gcagtgccccattgttgagagactcaccaactctctcatgatgcacggaaggaacaatggaaagaagctcatggctgtcaggattatcaagcatgcaatggnaattattcacttgctcactgacctgnaacccaattcaggtcattgttgatncgtccatcaatagtggtccccgtgaagatgcaactaagaattggttctgcnggagtggtgaggganacagggccgttgatatcccancccttagangtgttnatcaggccatcttcttcnaacaacgggtgcncngg

SEQ ID NO: 43438 - DNA, 190 bp, Glycine max
  unsure (1)..(190): unsure at all n locations; Clone ID: 701127051H1
gtgaatattggaacggatctctcagatatgccacaccctactncaagnngtagctctactaaaagcccagcannttcggcatgttcgagtatatgatgcagaccaagctatgctccttgcactngcacagacgggcattacaggttgctgtgctgtcccaaatgacgagntcctagcaattngtcaatcc

SEQ ID NO: 43439 - DNA, 246 bp, Glycine max
  unsure (1)..(246): unsure at all n locations; Clone ID: 701127054H1
cttccattctcgacgccctgaacgttcgcgtggaaggttccggcnacaagtaccttgtcctggcacacggcttcggcacggaccaatccgcgtggcagcgcgtgctcccttanttcacccgcaactacagcgtcattctctacgacctgtctgcgccggcagcgtcaacccccgaccanttgcgnctaccnccgttatacaccctcganggntaagtcgacgacctcntnaaantctgngnnggcc

SEQ ID NO: 43440 - DNA, 276 bp, Glycine max
  unsure (1)..(276): unsure at all n locations; Clone ID: 701127055H1
atgggtggagctgagatcattaaatctgaccctgttgtgtcattcagggagactgtcctggagagatcatgccgcactgtgatgagcaaatcacccaacaagcacaatcgtctgtacatggaagcaagaccattggaggagggtctgccgaggccattgacgatggcaagattggaccaagggatgaccccaagatncgctccaagatcttgtcagaagagtttggttgggacaggatctcgccaagaaatctggtgctttngccctgagaccctt

SEQ ID NO: 43441 - DNA, 177 bp, Glycine max
  unsure (1)..(177): unsure at all n locations; Clone ID: 701127056H1
tcacccttgaggtcgagagctctgacaccattganactgttaaggctaagntncaggacaaagagggtatcccaccagaccaacaaaggcttatctttnccaggaaagcantanaagntggcagaaccttggctgattcaatatncntaaggaancnaacctccacttggtgntncg

SEQ ID NO: 43442 - DNA, 275 bp, Glycine max
  unsure (1)..(275): unsure at all n locations; Clone ID: 701127058H1
caaattttctctcccagaagaaatattttcatttcatttcgagtaaaagtaaaacacagttcctgatccatggcatcngccgccgcatgttgttgaaggtcataatcctcggagacagcggggttngtaaaacatcactgatgaanagtatgtgaatcgtaaatttagtaatcagtataaggcaaccatcggcgcagattttctaccaaggangttcaatttgaagataggttgttcacattgcagntttgggatactgctggtcanaagcggtt

SEQ ID NO: 43443 - DNA, 278 bp, Glycine max
  unsure (1)..(278): unsure at all n locations; Clone ID: 701127059H1
gttgaaccctacaacagcgtcctctccacccactccctcctggaacacaccgacgtggcggtcctcttggacaacgaagccatctacgacatctgcaggagatccctcgacatcgagagaccaacctacaccaacctcaacaggctctttcccagatcatttcgtccctcaccacttcttggaggttcgatggtgccatcnatgtggatatcactgagttccagancaaacttgtgccctaccctagggatccnttnnaggnttgngcctaagccnng

SEQ ID NO: 43444 - DNA, 281 bp, Glycine max
  unsure (1)..(281): unsure at all n locations; Clone ID: 701127060H1
cccttctggcctttctggtgcccttggcttccatcgagaaattgaagctttgaagcatgtatttgccgtgagaatgaatcttggtgaccctgattttgtaaatataactgaggttctttctgatatgctttctcatagttttgctaaaggttgaaaaatgacatcaatgataatnngactttggccccagtcattacggcggcnngtggatccgataaatggatccanggtacaagtccatttaagtataatagattccggagaaaaaacgccnttgccnc

SEQ ID NO: 43445 - DNA, 225 bp, Glycine max
  unsure (1)..(225): unsure at all n locations; Clone ID: 701127062H1
gcgtgaccaaggagcttcacaaaaggcaatgtcatntcccancttcaccanacgattatggaggccaggcttctgagagaagtggatcatcaagatacagagtgaatgatgaaatggagtcaacatggaataaagtactggaatctccanttncaataataaacctctgttaccatatgacaaanggaatattgganttcccggcgtgactgtgggaacntcggg

SEQ ID NO: 43446 - DNA, 286 bp, Glycine max
  unsure (1)..(286): unsure at all n locations; Clone ID: 701127063H1
tctctcaacaacttcaccttcttcctcctcgatcatgtctcacttcaagggcaagtaccatgatgagcttatcgccaatggctgcgtacattggcactcctggaaagggtattcttgctgctgatgagtcaacagggacaattggcaagcgttggccagcatcagtgtagagnacattgaatccaacaggcgagctcttagggagctgcttttcactgctcctggtgttcttcaatatctcagtggtgtcatcctctttgaggnaaccctctaaccagagcacagg

SEQ ID NO: 43447 - DNA, 191 bp, Glycine max
  unsure (1)..(191): unsure at all n locations; Clone ID: 701127065H1
gttgcgatggaacttgtagctgaatccgagcgaactctgtacccatacgtgactggatcctctgnagtcgctatcaannacaaagatgggnttctaatggccgctgacatgggagggttcntatggatctacntgcggtataagagtgttagcgatgcnagccnattgaaaagcattcctcttcttgcggg

SEQ ID NO: 43448 - DNA, 286 bp, Glycine max
  unsure (1)..(286): unsure at all n locations; Clone ID: 701127066H1
gttctttggaaagtctgcaagctaatgtgcagaggctgaaaacatacaaggccaaattggttgtgttcccaagacgggcacacaaggttaaggctggtgattctactcccgaggagcttgcaaatgcaacacaagtccagggtgctttctgcctattgtgagggagaagccaactgttgaacttgtaaaggttacagatgacatgaaggctttaaagcttattacaagctttcgtcttgaacgcacaaacaaacgccatcatggtgcccaactgannnaaggctgc

SEQ ID NO: 43449 - DNA, 281 bp, Glycine max
  unsure (1)..(281): unsure at all n locations; Clone ID: 701127070H1
gctgattcaggccctggcncttcggcccggtgggcctccgctgttgaggctcacgggaattgggcttccctcgtccgacaaccgcgacacgctccgcgaaattgggctcaggctcgctgagctggcgcggtccgtgaatgttaggttgcatttcgtggcgtggcggcgtggcgccttgaagacgtgaagccgtggatgctgcaggtgaatccgaacgaaagccgtggcggttaactccatcatgcatngcatcggcnttcttgcttcgggactcnaancnc

SEQ ID NO: 43450 - DNA, 125 bp, Glycine max
  unsure (1)..(125): unsure at all n locations; Clone ID: 701127072H1
gggtaacncatgccctccttatctggaggcagtntgcaggantatcttaaaaatgtgtggggggttnccactggcaattntggcaatnggtggtgcattggcnacnaaaaacagggcaaacatng

SEQ ID NO: 43451 - DNA, 169 bp, Glycine max
  unsure (1)..(169): unsure at all n locations; Clone ID: 701127073H1
tgtatccttcctngtgctgcttcttgcagcccttatcctcatgcctcaagggcttgctacttactacaanaccaattaagaagccaccagtgtancaagcctccagtgtncaagccaccagtgtgcaaancnccggtntataangcnagaccannggtttacaggncnc

SEQ ID NO: 43452 - DNA, 184 bp, Glycine max
  unsure (1)..(184): unsure at all n locations; Clone ID: 701127074H1
aaatnacctaaatgccactgtcactggagttctttctctaaccctcttctttttgtttttgtataatcccttcaaatttgcattaggtaaaaaagaggctcccaaanttgcaggtgcatagccaatacnnggtcacctancactatgagtggttcagagannaccccntacggtnttggctggc

SEQ ID NO: 43453 - DNA, 284 bp, Glycine max
  unsure (1)..(284): unsure at all n locations; Clone ID: 701127075H1
gggaaggngcagnatttgtcgttgggagcnaacaagttccccgagagacagccaattgggacgnnggcgcagagccaanacgacggcaaggactaccaggagccggcgccggcnccgactggttnancccgacggagttnacgtcaggtcgtttttncagngcagggatnagcagagtttntgggccactttnactgtttctctncatcactgtcttaaccgttatgggnngtcgccgnggnnaagtctanttngtggtacccnttgggnntncaagggatcnt

SEQ ID NO: 43454 - DNA, 61 bp, Glycine max
  unsure (1)..(61): unsure at all n locations; Clone ID: 701127077H1
agaacattnattnccctataaattangacgtgcgtttcgttccggctacncactnccaagg

SEQ ID NO: 43455 - DNA, 279 bp, Glycine max
  unsure (1)..(279): unsure at all n locations; Clone ID: 701127080H1
cttaataaacgctcttctctgaaaaacctnatttcttctcntncttntcttgctctttcgtttcgatcttcgatctctgaaaatgagagagtngcatttcaatccacatcggtnaggccggtattcaggtcggaaacgctggctgggagcttactgnctcgaacacgggcattcagctgatggnncagatgccaagtgataagacngttggtgncagtgatnatgctttcaanactncttnaatgnaactggggctgganagcacgtgccnntgngatt

SEQ ID NO: 43456 - DNA, 188 bp, Glycine max
  unsure (1)..(188): unsure at all n locations; Clone ID: 701127081H1
gtagagantactagtgttccaaccctctctcttncnctcatcatcccccttttccntcggnnnctncntctnctncttcctcctccttgcaccannccttatatgatnctnataaaaancactctgaggagaaacacnataatcaatcaggaggggtctcacatggggttgtngcncgtnttgnctnc

SEQ ID NO: 43457 - DNA, 186 bp, Glycine max
  unsure (1)..(186): unsure at all n locations; Clone ID: 701127082H1
gcnaacaatgtgctttgcattgctttcattatcactttaacgtgggcagttgnanctcgaattccggggatttactctggnggtgcatggcaaagtgctcacgccaccttntacggagganccnnacgcttccggcaccanggggggngngtgggtatgggaacctgtacagccagggggccggtg

SEQ ID NO: 43458 - DNA, 284 bp, Glycine max
  unsure (1)..(284): unsure at all n locations; Clone ID: 701127083H1
gtccctgaatgctttttagagagagaaagagtaataataataaagtggaagaaaaagaattaggagagtgannnnnnnnnnnnnnnnnnnnnnnnnnnnnnnnnnnnnnttgagaagatggtgtttgaggaaactgagctgaggctggactgggactatgtactccctggaaatggaaccacggcaacaactgaagctgctgctgcggaattaggagtgaggaagagagggntctctgagactgaaactgatgaaacagccaccgttgatttgatgcttcnacc

SEQ ID NO: 43459 - DNA, 279 bp, Glycine max
  Clone ID: 701127084H1
cttgctttcaccctaggtgtgaagcagatgatctgttgctgtaacaagatggatgccactacccccaagtactctaaggctaggtatgatgaaatcgtgaaggaagtctcttcttacttgaagaaggttggttacaacccagacaaattccctttgttcccatctctggttttgagggtgacaacatgattgagaggtccaccaaccttgactggtacaagggaccaactctccttgaggctcttgaccaaatcaatgagcccaagaggccctccgaca

SEQ ID NO: 43460 - DNA, 69 bp, Glycine max
  unsure (1)..(69): unsure at all n locations; Clone ID: 701127085H1
tgttaagcggtttaanaggantgcttggccaantgctcggcagtttttggcannanncaagatcngttg

SEQ ID NO: 43461 - DNA, 272 bp, Glycine max
  unsure (1)..(272): unsure at all n locations; Clone ID: 701127087H1
gttttatgcaccatggtgtggacattgcaaaagtcttgctcctacttacgagaaagttgccacagcatttaaattggaggaagatgtagtaattgcaaatctggatgctgataaatatagggatctggctgaaaagtacgacgtagtggatttcctaccttgaagttcttcccaaagggcaacaaagctggtgaagactacggaggtggaagagacttggatgactttgtggcttttatcaatgagantctggagcagtcgagatggaanag

SEQ ID NO: 43462 - DNA, 183 bp, Glycine max
  unsure (1)..(183): unsure at all n locations; Clone ID: 701127088H1
cgtgttccatgactactactacttcattcataggtctaatgtcatctcatcaatacttaaacngtnttttttttnccttnnctccttttactcanaatttanttttgggtnangcaatgtnaccgttttgatgcaatgganattttcagaattttgtaccaatngattgcntttgggaggggg

SEQ ID NO: 43463 - DNA, 280 bp, Glycine max
  unsure (1)..(280): unsure at all n locations; Clone ID: 701127089H1
caacaatggcttgctcctcctccttcctctttctttgtcaatatcaacaccanccagaatcttcccatttcaggaaactcttctctcagccttcttcccggcctttcttttccaaaactcatggaaggttctatccttgaaacgttgattttgggaagatgggaatacgggtgcaagcattatagaagaaggatggcgggattagaggcacccangnngcaatgagctcnacttttgccgccatgtcanaaangaggcaacggaggtanaacatgttgtt

SEQ ID NO: 43464 - DNA, 182 bp, Glycine max
  unsure (1)..(182): unsure at all n locations; Clone ID: 701127090H1
atgggttaaccctttnncctctgaatcgcgcattcagaggcctcgaaatctncgtccctagccnctcctgcgctcnattcaaacgttgccananacgtcgacgttgccactctgagcaaantctgcgncgacatcgtgctcaatgcccccagttgncccntacntcnntgntcaangcangg

SEQ ID NO: 43465 - DNA, 218 bp, Glycine max
  unsure (1)..(218): unsure at all n locations; Clone ID: 701127091H1
gtccacgtgtaccgcaacttcgaccgcgggatccacggcaagggcgtcgccgtganattcgccggagatggttcgacaccgagacaaggctttgttgatgcgcgcagaaacgaacatgatgctgatgantcccttaaacgacggaanccncacgcttcgaagcttcaccagctcgacattgnaacggggaagattgtcacggagtggaantttngaca

SEQ ID NO: 43466 - DNA, 187 bp, Glycine max
  unsure (1)..(187): unsure at all n locations; Clone ID: 701127092H1
aacgcctttcttctccgtttccgtttcctcgttcgaattcgctttttgatctgcgaaaatgagagagtgcatctcgatccacattggtcaggctggtatccaggtcggaaatggctgctgggagctctactggcctcgagcacggctcggggccnatgggcaaatgcccaantgaacaagacngttg

SEQ ID NO: 43467 - DNA, 188 bp, Glycine max
  unsure (1)..(188): unsure at all n locations; Clone ID: 701127093H1
cagcatgtggtggcctttctgggagaaaagggggttctgcattttcatacttcttccactgntgatggaagttacagaaggnatcgatggncncggcctcactgctattgttactggggctaccagtggtantngtgcngagactacgcggtacttgccatgcctngangcccatgncattntnggtg

SEQ ID NO: 43468 - DNA, 188 bp, Glycine max
  unsure (1)..(188): unsure at all n locations; Clone ID: 701127094H1
ctttgttgctaaagttgctgattttggcctctccaagactggtccntctcttgatcaaacccatgtgagcactgctgttaagggtagttttggttatctcgatcctgaatacttcagaaggcaacagcttactgagaaatcagatgtgattcatttgggggtggtgttaatggaaggtgttatgccac

SEQ ID NO: 43469 - DNA, 68 bp, Glycine max
  unsure (1)..(68): unsure at all n locations; Clone ID: 701127095H1
tcacctngcaggccctttagncggcncatccggtgatcaccctangggtccaccnacgctntngaagg

SEQ ID NO: 43470 - DNA, 280 bp, Glycine max
  unsure (1)..(280): unsure at all n locations; Clone ID: 701127101H1
ggaaaatgggtgatattgtccacacattaacaaacannnaggtggctgganaaatgtgtagcttatgctgaaagtccatgaccaggcctggttggtgacaagacaattgcattttggttgatggacaaggatatgtatgacttcatgggctttagacagaccntccacacctttatagatcgtggtatagcgttgcacaaatgataggcttattaccatgggtctggtggtgagggtatttaaatttatggggatgatttggccatcctgatggattgtt

SEQ ID NO: 43471 - DNA, 129 bp, Glycine max
  unsure (1)..(129): unsure at all n locations; Clone ID: 701127103H1
gagaccaggtgtggaaggcaaatatacctcatacccattcttgcaactgaaaaatctgaccagcaactggatggttgtgaaaggcgaaacaatagtgtttcctggnggagnancccacttccataatgg

SEQ ID NO: 43472 - DNA, 275 bp, Glycine max
  unsure (1)..(275): unsure at all n locations; Clone ID: 701127104H1
atcttcttttaaagacaatcttatttgtttatttctgcacgagaattcgaaccttgaacaacataaacatgggaataaacacacgtacactagaaatcaccgttatctccggcgaaancctccgcgtaacggaggacgcgtacgtcgtcgttcgggcggagtcctaaactgctgcaccacgagaaccgccaaggacgacggcaccaaactcctctcgtggaagataagtttctcttggacatgcccatgcatgcaggtccatagcctncgaagtg

SEQ ID NO: 43473 - DNA, 268 bp, Glycine max
  unsure (1)..(268): unsure at all n locations; Clone ID: 701127106H1
caattttnccacacactnnannatttnccgctgttaactttcccctttgaaatacntttctgagttctgcgatanctgaatcaagcanatcgaactccgccatagtcttcatcgagacagagatcggaatctgattcccaaacggcaacagtatggcgtcatcgacattctaacccgagtcgattccatttgccagangtangncanatntnacgttcgaaaagcnccncgatgacangntcncctncnncgangnntnggccagacc

SEQ ID NO: 43474 - DNA, 100 bp, Glycine max
  unsure (1)..(100): unsure at all n locations; Clone ID: 701127107H1
ggcaaaatggatccgtaacctncgggaaaaggattggctctgagggctgcggcacgtggggtccccagtgcccgaanccgtcggctgtcnggtggantnc

SEQ ID NO: 43475 - DNA, 70 bp, Glycine max
  unsure (1)..(70): unsure at all n locations; Clone ID: 701127108H1
caganatctcgtgtggnacaaaagggtaaangctcgtttgattctgatttccacacncacatacgncgna

SEQ ID NO: 43476 - DNA, 253 bp, Glycine max
  unsure (1)..(253): unsure at all n locations; Clone ID: 701127109H1
gggctacccttattgctcccagcaaccactctccccaagaanacgctgaggctctcagaaangcttttgaaggatgggggactgatgagaaaactgtcatagtaatattgggtcatagaactgtttatcagaggcagcaaatagaagagtctatgaggaaattttccaggaggatcttgtgaaacgcctagagtctgagatcaaaggagactttgagaaagccgtgtaccgatggatactagaacctgcagat

SEQ ID NO: 43477 - DNA, 135 bp, Glycine max
  unsure (1)..(135): unsure at all n locations; Clone ID: 701127110H1
gtaaatnttacctacagttatanctgtaggtaatatttactgcagactctccaaatccaagcaaattaatgttgtaatcaataacacccccaccccccttnncncccatgtaataataagcttggtcaattaana

SEQ ID NO: 43478 - DNA, 269 bp, Glycine max
  Clone ID: 701127111H1
ctctgaaaccggcatggatttgcagcagagcgagttcgatcgcctcttgttcttcgagcacgctcgcaaggccgcagaagctgaatacgagaagaaccctctcgatgccgataacttaacaagatggggtggagctctattagagttgtctcagtttcaggttttcctgaatcgaagaaaatgacccaagaggctgtttcgaagctagaggaggcgcttgcagtgaatcccaagaagcatgacactctttggtgccgggaaacgctcac

SEQ ID NO: 43479 - DNA, 272 bp, Glycine max
  Clone ID: 701127112H1
aagagtcctcttctcctccaaatgaacccggttcacaagaagattccggttctcatccacaatggcaaacccatttgtgaatccctcattgctgttcagtacattgaggaggtttggaatgacagaaatcccttgttgccttctgacccttaccagagagccaggctagattctgggctgattatgttgataagaagatatatgatcttggaaggaagatttggacatcaaaaggagaagaaaaagaagctgccaagaaggagttcatagaa

SEQ ID NO: 43480 - DNA, 274 bp, Glycine max
  Clone ID: 701127113H1
ctttggggataccccgttcaatcatggcttacaccaatgtgtcaagccgactactaaatataaagctgcccaaggatttgatcgctatctaaccgtgagaagtaatggtggactaaatcaaatgcgaactgatatcagacatggtggctgtggcacatataatgatgcaactttagtcatacctcaattggataagcgttcattctggaacgactctagtgtgttttcagatgtatttgatgagctcatttcatcgaatccctgaaaggagtat

SEQ ID NO: 43481 - DNA, 279 bp, Glycine max
  unsure (1)..(279): unsure at all n locations; Clone ID: 701127114H1
ttctgaccttggatggggtgaacaagtccccaagacccccgagatntcatccttgctttctgctgntcctttggagggtgctgctgatcaggttcagaagaccaacaactcgcaggatntggtggctgcacaagatgattctgcaaaaaccctttccgaagagctgnagacattgaatcccagctgcaagttctttgagacccccttcttttctngatgaagcctgggctgatgctaanttgggcgtcttgntcgggcggagacgcaactcatgagcgg

SEQ ID NO: 43482 - DNA, 286 bp, Glycine max
  unsure (1)..(286): unsure at all n locations; Clone ID: 701127116H1
gattcgctcttctcttcgaataaaccacaanaccaacaaacgagaagaggagtgagagaagatggggttgtcgttcacgaagntgttcagcaggttgtttgcgaagaaggaaatgaggattctgatggtangtctcgatgctgctggtaagacaaccatcttgtacaagtccaagcttggagaatcgtcaccaccatccccaccattcgggatttaatgttgagattgtggagtacagaacatcnagcttcangtgtgggatgttggtggtcnaggacaanatccc

SEQ ID NO: 43483 - DNA, 286 bp, Glycine max
  unsure (1)..(286): unsure at all n locations; Clone ID: 701127117H1
ctcaaagccgcactcaactttctaaaaccanatcggtttgaatcctcatttcccgcctctcactggaaagcagcaaaatcacctttctctactatctatctgttccttttgtactctgagtgggtagaagtcatggtaaggctcactgctgacttgatttggaaaagcctcatttcttcaacacgattaaagagcgcgagttagatctcagaggcaaacaagatagctgtaattgaaaactgggtgctaactgaggaccaatttgacacaatagacttatctgaca

SEQ ID NO: 43484 - DNA, 277 bp, Glycine max
  Clone ID: 701127118H1
ctaaacatggcaatgtctgcttgggaattctagatggcactgaaataggactaggaaatactaacataattggagatatctctttacaagataagttagtgatttatgacaacgagaaacagcagattggatgggcctctgccaattgtgatagatcttccaattctaaataaatcaatgtaatttttttctttagctgagactgtagatagggattcctcaaggaaatcttagcaaaccggtgccctgcaactatgatgttatagattatcaagag

SEQ ID NO: 43485 - DNA, 274 bp, Glycine max
  unsure (1)..(274): unsure at all n locations; Clone ID: 701127120H1
ancaaaacnacgaaccagtacctgtcgttttgaaactcgacatgcattgcgagggatgtgtcaagaagatcaaccgcgccgttcgccatttcgaangtgttgaagacgttaaggccgatctatcaagtaacaaactaacggttnttggaaaactcgaccctgtcgaagtgcgagataaactagcggagaaaactaggaagaaggtcgaactcgtttctcctcagcctangaaggattccgccggcgataagcgccggagaagangtccgaggag

SEQ ID NO: 43486 - DNA, 275 bp, Glycine max
  unsure (1)..(275): unsure at all n locations; Clone ID: 701127121H1
aganaactcaatattcgtcgctcatggcactctcttctcgtctcttttccaaatccaaattgatctntggcagtccaaatacttctacaaaaggagcatgctattccagttcgtcactttgctaaagagtctgcccctcctgcccttaagggagacgagatgtgaagaacatttttgtggaggtgaagaacaaatttgagaccgccataggaatattaaagaaggagaaaatcaccattgacccagaagatccagctgctgtttctcattatgca

SEQ ID NO: 43487 - DNA, 275 bp, Glycine max
  Clone ID: 701127122H1
agaaaactcaatattcgtcgctcatggcactctcttctcgtctcttttccaaatccaaattgatctatggcagtcaaatacttctacaaaaggagcatgctattccagttcgtcactttgctaaagagtctgcccctcctgcccttaagggagacgagatgcgaagaacatttttgtggaggtgaagaacaaatttgagaccgccataggaatattaaagaaggagaaaattcaccattgacccagaagatccagctgctgtttctcattatgca

SEQ ID NO: 43488 - DNA, 273 bp, Glycine max
  Clone ID: 701127123H1
tctcactccccaattcccaatactacctttcgtctcagagccatggcgcctcacagcacgcctcttgaactcaatcgcttcgccgaggtcggtaacaaagtcgccgatgctgccggagaagttatccgcaaatacttcagaaaaaacttcgacgttattcaaaacatgatctcagtccagtaaccattgcagatcaatctgctgaggaggctatggtttcaatcatactagacaatttcccttctcatggccattacggagaggaaaatgggt

SEQ ID NO: 43489 - DNA, 272 bp, Glycine max
  unsure (1)..(272): unsure at all n locations; Clone ID: 701127127H1
gtttagagttgccaaggactatgagaatgccaaaatagcatatgagaaagcttcgaaaggacaagagatgctttcttcaccttgggatgcagctaagcacatggaatctgctgctgctctagcgaaggatctaagacactggcaagaagttgtggacttcatcgaagggcatctgaattgtatatggagtgtggganaccccaacctgccatcagacgctcttgcaaagggagcccgtgctctggaagatagtatgtctgaagaagctattc

SEQ ID NO: 43490 - DNA, 272 bp, Glycine max
  Clone ID: 701127128H1
ccgacaatggccacccaaatgagcaagaagagaaagttcgtagctgatggagtgttcttcgctgaactgaacgaggttctgacaagggagttagccgaggacggatactccggcgtggaagttagggttacgccgatgcgcaccgaaatcatcatcagagcaccagaacccaagccgttctcggtgagaagggaaggagaatcagggaacttacctcggtggttcagaagaggttcaagtttcccgagaacagtgttgaatttatgctgaaa

SEQ ID NO: 43491 - DNA, 277 bp, Glycine max
  unsure (1)..(277): unsure at all n locations; Clone ID: 701127129H1
ggcactgtnggcagaagtcttaggagtgtaaaacagagacgcaaaatgaagacgattctatcgtccganaccatgaatattcccgacggcgtgagcatcaaggttcacgctaaggttatcgaggttgagggccctcgtggaaaactcgtgcgagacttccaccattgaacttggnnttccaacttattaccgacgatggcggtaaaaggaagctcaaacttgattcttngtttggttctcgtaaaacctccgccgccatccgcaccgncctcagcca

SEQ ID NO: 43492 - DNA, 151 bp, Glycine max
  unsure (1)..(151): unsure at all n locations; Clone ID: 701127130H1
atctaactcaatatagcatancatgtnattttcttcccccnaattattgtattttcataattaaaactcataaatgaaatttgctaatgaataataatataaatgaatgagagaagagcctatgcactccaatctcaaatatatatntatt

SEQ ID NO: 43493 - DNA, 279 bp, Glycine max
  Clone ID: 701127131H1
atttgcttcaactacaatacagcttattggtattgttggtgtaatgacagaagttacatggcaagttttgctcttagttgtcccaatggctgttgcttgtttgtggatgcagaaatactacatggcttcctcaagggaactggttcgtattgttagcatacagaagctccaattatacatctttttggtgaatcaattgctggagcatccaccatcaggggttttggacaagaaaaaaggttcatgaagcggaacctctatctctgatgctttgcacga

SEQ ID NO: 43494 - DNA, 282 bp, Glycine max
  unsure (1)..(282): unsure at all n locations; Clone ID: 701127132H1
gaccaaccagtctccaaagttagtgagtgagagagtagcagctagcaatggagatttctgccctagcttcttctgctactccaagaccttctcttacaactccttccacttctccacacactgtagtcactcaccaccttcagcaaacctcaactgagacgctcccacgtacagtatcattcctacctcaaccaccatttcactgctcgctctcttcgcccttccaagcgagccaaagcgctgtcagcatcgcnaagacagattgtctcattctcacccaag

SEQ ID NO: 43495 - DNA, 284 bp, Glycine max
  unsure (1)..(284): unsure at all n locations; Clone ID: 701127133H1
ctactcattctccatacctcaacgaagangttaangagacggcaacactttgctgtccgccttgaccgagcagagcttcgtcttggccctcgattttgccctaaagtactctcagtcacaacagacacnnnnnnnnnnnnnnnnnnnnnnaatggcaccgaagcagacaaggctgagaagaagatcgcttacgatgcgagctgtgcgacctaatggaggagtacggccagatcctncntgtgaactccgataacgtgggatcgaaccagctccanaacattcgc

SEQ ID NO: 43496 - DNA, 127 bp, Glycine max
  unsure (1)..(127): unsure at all n locations; Clone ID: 701127134H1
aattaaccaaaacgtcacacctctttcaacaaccctgcngaatgcagagccgtatcctctgcttctcaacgcgtcgtttaccactccatcagcgtcgttttctcagccacttcattccacacaacat

SEQ ID NO: 43497 - DNA, 274 bp, Glycine max
  unsure (1)..(274): unsure at all n locations; Clone ID: 701127135H1
attnaactctagngaggatctctttccattgaaacggttcaantggcttattgagtnttccatggntcatgatnggtgngcagcagtganaaaactgttgaacctactgcntgatggaactgtnnatacaggagatcntccntccttgtatcncgcgctntnaagatgggnctcctcacaannctgtanggngnnacagcaagcagttantggagtgtcttttgagatatgtnccgagantatttctgataaactaggancgaagacaaggnac

SEQ ID NO: 43498 - DNA, 235 bp, Glycine max
  unsure (1)..(235): unsure at all n locations; Clone ID: 701127136H1
ctnnagccgnatggncgnagtcaantgaatgnacnaaagcnncggttgcttccacttgtggccttcttngaccgccttgacaccttaatctcagggaaccccctctcctctgcttcttctcttcatgtatgtgggctgcctgccccgtcccgaatagacgaacagaacaagntaaaggcgcgagagagngtttatactcaangcacntcctctcttcnanaattnggtgaattgc

SEQ ID NO: 43499 - DNA, 274 bp, Glycine max
  unsure (1)..(274): unsure at all n locations; Clone ID: 701127139H1
ctcacttttntnttgtggttttctcttttgggtcttcagcttttcaagtgaagtcccaaagatcaaaatttcaggtgtgtttctttctctttttctttcttctgggtttgttttgtttttatttntatttttatgtgcctttttctttctgggtatttgtggaatgtttttatgatttgctgttggattttgtagaagagggattntgtttnatnttatgggggggatntttttcttcttattacacggntgtancagaaaantgagtccttgt

SEQ ID NO: 43500 - DNA, 269 bp, Glycine max
  unsure (1)..(269): unsure at all n locations; Clone ID: 701127140H1
gctcttcaaggattacttcgttgacgagaggaagaagcttggaagcataaagagcagcaataacaatgaactaaaatgcgctattgaccacattttggatgcccagagaaaaggcgagatcaacgaagacaacgtcctttacattgttgaaaacattaagtcgctgcaaangagacaactctatggtcgattgaatggggcattgctgagcttgtgaaccacccagagatccagcagaaggtgagggatgaattgatagagttcttgaa

SEQ ID NO: 43501 - DNA, 265 bp, Glycine max
  unsure (1)..(265): unsure at all n locations; Clone ID: 701127141H1
anagagcgttcttgttgcaattcttttaatgctcatgaagattacatttcagacatgactttcgtttctgatgcaatgaaactgttggctacaagtggagatgggacactgtctgtttgcaatcttcgaagaaataaantgcaagctcagtctgaattactgaagatgagctattgtctgtggttttaatgaagaatggtaggaaagttgtatgcggatcacnaatggagtcatctatgtacccaggggatgcncaaggattgna

SEQ ID NO: 43502 - DNA, 268 bp, Glycine max
  Clone ID: 701127142H1
agaaagcgttgtgaagaatggcggaagagggacaagtgatcggtgtccacagcgtagaggagtggaaggaacatctcaagaagggagaagagtccaagaaattgattgtggtggattttactgcttcttggtgcggtccatgccgtttcattgccccattcttgcagagtttgctaaaaagttgccgaatgtcaccttcctcaaggtggatgtggatgaattggagactgtttccaaggagtggggaattgaggctatgccaaccttc

SEQ ID NO: 43503 - DNA, 267 bp, Glycine max
  unsure (1)..(267): unsure at all n locations; Clone ID: 701127143H1
atttacaataactcacgcaccttgttcaaccaactaagattcgagtcatccgcacatgtcggctgccttcggacatcactggtgaatagttcaggaatttcatttcatggatttagtagtaaaggattctgttggattttgggcctcgttgaagttgagcgtttggaggaacgtcatgtttaggtaaacacttttagagcaagacaacctacacgtttgaaaattgtaaatatcnaggattagtatttgtgccatanctttttggct

SEQ ID NO: 43504 - DNA, 98 bp, Glycine max
  unsure (1)..(98): unsure at all n locations; Clone ID: 701127144H1
gtcactctttggtatatagccaccagagcttttgcttggngccactgtattatggcactggctgtggatttatggagtacaggtgngcatagcttgnc

SEQ ID NO: 43505 - DNA, 273 bp, Glycine max
  unsure (1)..(273): unsure at all n locations; Clone ID: 701127145H1
caaaaatgaactgtcttcggaatctttctcgattctctgttttgcccttcgaaacacctgttacgcgccaccgcaagaaccttcccctttccctgggtttcgtcaacaattctcgtcaatatccaactatggccctcaaggctgcctcaggttctataccagtgcagacacaagtagtgccgataaggaggaagaaaagtctgagacatatagtcntaacatgacagaagccatgggtgctgttttgacttataggcatgaattaggaatgna

SEQ ID NO: 43506 - DNA, 196 bp, Glycine max
  unsure (1)..(196): unsure at all n locations; Clone ID: 701127146H1
cacagcctagcctctgctctagaagatggctcctccaanaggtggtgggttcannggtggtaggggtgacagangtagaggaaggggcggtggtggangaanangaggatacaggggcacgccgttnaaagctagangcggtggccgtggangagccagatgcggcggtgnccgtggaggagncaggggcggccgc

SEQ ID NO: 43507 - DNA, 279 bp, Glycine max
  unsure (1)..(279): unsure at all n locations; Clone ID: 701127147H1
gttggggnatatcattaatctagacacantggatctatctagcaagaattgttcagggaatgtgccagcatcngttggncttcnngaggcatcncctgaaccctgaatttgagtcataaccaccttgatggtccctagcctgctgagttagggaatctcagnagcatcagantctggntttgnnatcaataggtcgcnngtancagtcctccggaaattgggacagctgcagaaccngtgtcgcngantatggacaaatanggnctgccngggaagnnt

SEQ ID NO: 43508 - DNA, 286 bp, Glycine max
  Clone ID: 701127148H1
agctaggcctttactctcccccttctgccagaatggaggtagacaaataatgagcaggattggcatgactgcctgctctctttcttctgcagctgaagcttcagattttgaatgtgatgcgatccatgatgatgtcaaagcagcagagaaagataatgcactttgcttgctgtctcgcagcttgctagcgagtttagcaaggaatctatgttatcttctgcagaagatttttggtgtacgccgtgcttcatgtgatatctacaggctccttgaagcctgatctagc

SEQ ID NO: 43509 - DNA, 280 bp, Glycine max
  unsure (1)..(280): unsure at all n locations; Clone ID: 701127149H1
attacaacccccccgttactcaaatcagaaactctcatttgaagctnacaaacaacaaagatcaacggatctatctaccttcagtcatggtgttttctttcaaccaacgcttctgggtttcttcttcgcttctcntcctcgcggtcctctctgtntcttctctcactcccactttcctttctgacaccgttttcgattctcaaccagcgcatacggtcggaaactncttcaggctaaaaaggttgttctgtgatttcgagttttaaaanacacagtaacc

SEQ ID NO: 43510 - DNA, 276 bp, Glycine max
  Clone ID: 701127150H1
ataggcgtgcagggaaaccatttcattttcgagcgcgtcgctttcgaatccaatggccttcaacaacgcactgagatctgccgcgaagtcgtcgcttcttccgaatcttccttctctaactcagtgagcagaggttttcattcaactggcatgaagaggatggaggtggacatggtcatgatgagccctactatcttcatgcaaagcacatgtacaacttggacaagatgaagcaccaggggttgaaaatgtcccttgctgtgttcatgtttcagc

SEQ ID NO: 43511 - DNA, 237 bp, Glycine max
  unsure (1)..(237): unsure at all n locations; Clone ID: 701127151H1
aaccatgaganagatcttgcacgttcagggaggccaatgcggtaaccaaatcggttccaagttctgggaggtgatctgcgacgagcacggcntcgatcccaccggaaagtacaacgaggaaggcaacagcagcatccaactcgaaaggatcaatgtgtattacaacgaggcntctggcggaaggtacgttccccgtgcngtgcttatggatctcgaacctggaaccntngacagcnt

SEQ ID NO: 43512 - DNA, 273 bp, Glycine max
  Clone ID: 701127152H1
gaaggagtagagagggttgtggattcgaaggacttgcagcaacagagcaaagctttcgacaagctgcacagaccgcgtcgaggatcgccaactcgattcttcacgagtccaagaggccatggcatcaattgctgcatcttctgaagctgactggcaagccatcgtaagagggagaaagaattagctgctgttaagataaatgctgctgatgttgacataattgcaaatgaactagagctggataaaaaggtggctgaaaggaccttgcgtgac

SEQ ID NO: 43513 - DNA, 273 bp, Glycine max
  unsure (1)..(273): unsure at all n locations; Clone ID: 701127153H1
caaccatcttcttcgcctcgagcacatnttaccctaattcgattattccccantttcatcgantaactcaatnaatcatntacacattnggngnttaattttngatgccggtanaaaangccgccgnngcagcagcaatcgnaagcngntttagcgangngcagaagattgtagnggannanacctncggnctcnagaacnagatcgggancnnaaatgttgnagaagtntgtccagaacctcnagcaatccgtgcagcccaggcccgaggcc

SEQ ID NO: 43514 - DNA, 270 bp, Glycine max
  Clone ID: 701127154H1
gcgccttcgatccagaaaacatgactaagagaacaaagaaggctggcattgttggaaaatacggtacccgttatggcgccagtctgcgtaagcagattaagaagatggaagttagtcaacacagcaagtttttctgtgaattttgtggaaagtatgctgtaagaggaaagctgtgggaatatggggatgcaaggactgtggtaaagtgaaagctggcggtgcttacactttgaataccgcaagtgccgtgactgtacggagcaccatcag

SEQ ID NO: 43515 - DNA, 273 bp, Glycine max
  unsure (1)..(273): unsure at all n locations; Clone ID: 701127156H1
gcggnaaatgtggcggtgcattgntcgtggactccgtggacctgcttccaccagatccacctgccaatcactcacttggatctcacttttatagattcttctctagtggggcgaactcttcgtacaccgtggtggatcatacttatgatgtngttgtcgtggtgctggtggagcgggattgagagctgctaattggactttcagaacatgggttcaaaaatgccttgtattaccaagcncttcccaattcgtttcacacanggnngggagctc

SEQ ID NO: 43516 - DNA, 265 bp, Glycine max
  Clone ID: 701127157H1
attagctcctttcaggggtttcttgcaggaaagattagctctgaaaggagggggagctgaacttggcccttcagttttattctttggatgcaggaaccgtcaaatggactacatctatgaagacgagttgaatcacttcgttaatactggtgcactttctgagctcattcttgccttctctcgagagggacccaccaaggagtatgtacaacataaaatgatggagaaggctcagaatttggagcagatatctcaaggagcttac

SEQ ID NO: 43517 - DNA, 267 bp, Glycine max
  unsure (1)..(267): unsure at all n locations; Clone ID: 701127158H1
cgcgtttntcgcattccatacgaggccgaagcgaagagtgtttgtagggtttgcgttgcgcatcgtttgagagagagagatgggaagagaaaaagagacaacaaaggtagcttacgcagtggagcagcttgtagccttcaatcgatacaatcccgatatcttccagatctcgaaaactatgtcaacgaccaggtttcgtcgcaaacttatagcctggacgcgaatctctgcctcttcgcctctaccagtttgaacctgagaaaatgc

SEQ ID NO: 43518 - DNA, 269 bp, Glycine max
  Clone ID: 701127159H1
gctgaccccatggccggtcgcgccagcattcattcgcttgttctcaatttgtccaatgtcggggaggcgaattcggatgggagtagccgcggctccagccaccagcgaagagatagagaggttgaaagcccggagttgaggaatgaggtcaaaatcagtgtgctaaggctctttggaaactctccaaagggtgtctttcaagttgcaggaagattaccgagactaaaggtttgctttgtcttgctaagattattgagtccgagagtggg

SEQ ID NO: 43519 - DNA, 273 bp, Glycine max
  Clone ID: 701127160H1
ctaagtccctttggtcttcatcttctgttctgatccaggtatggcttctaaacgcatcttgaaggagctcaaggatttgcagaaggatcctcctacctcatgcagtgcaggccctgtggctgaggacatgtttcactggcaagccacaatcatgggacctgctgatagcccatatgcaggtggtgttttcctagtttcaattcattttcctcctgactatcccttcaagccaccaaaggttgcttttcggactaaggtgttccacccaaacat

SEQ ID NO: 43520 - DNA, 275 bp, Glycine max
  unsure (1)..(275): unsure at all n locations; Clone ID: 701127161H1
gaaaagtgaaacaaaaaacagaacaacaatggcgacacttaaggttcctcagcctcttccccccgttgcagatgattgtgagcagctccgaaaagccttctcaggttggggaactaacgaggagctgattgtatcgatcttggctcataggaatgctgctcaaggaagcttatcagagaaacttatgcccagacctatggagaagatctcctcaaggccttggacaaagaactcacgagtgattntgagaggctggttcatctttggacacttga

SEQ ID NO: 43521 - DNA, 274 bp, Glycine max
  unsure (1)..(274): unsure at all n locations; Clone ID: 701127162H1
tgtagttcttgcaactatgctggtacataccggcctgccaagtgccaacttggttgtggacaacctacttcaacgatggtatcatgtgccaagatcatggttaaggccaacaaagaacttgatagtagtatttgaggaattgggtgggatcctggaaaatagtctagtaaaaaggacaacacatactccagcaaactagtggacccgttcaaagaactgaaaaaacgtgaatntggcagtccaatggtgatcgaccagggcaacgtgcatgggc

SEQ ID NO: 43522 - DNA, 279 bp, Glycine max
  Clone ID: 701127163H1
ctgaccaacattagtggtgaaactgaaagctctcatgtaattgaggatagaaacattgccatctccattcaagatctacgcaaggtcaccaataactttgcttcagaaaatgagctaggccatggtgggtttggaactgtttacaagggtgagctagaaaatggtaaaaaatagcagtgaagagaatggaatgtggagctgttagcagtagagcactggaggagtttcaagctgaaatagctgttcttccaaggtccggcaccggcatttggtatccta

SEQ ID NO: 43523 - DNA, 284 bp, Glycine max
  unsure (1)..(284): unsure at all n locations; Clone ID: 701127164H1
atcaaaacaanaacttgttcacccttccccttctccttacttctcactctctttccaaaacactccctttctccttccccttacccttcttctgtgtgtgatgatgtagatagagaataaaaagagacnctgtgcagtgagaaagaggttggtcacttcttgtgtggcttgttttgttcnntgtgttggaatttgttgatgggtgaagagggagaagangtgtcaagagataaggaacagcaacacatgggagtttatggaaatgagtggttgtttagtagttt

SEQ ID NO: 43524 - DNA, 196 bp, Glycine max
  unsure (1)..(196): unsure at all n locations; Clone ID: 701127165H1
cngaaacccttcttccattacnggngancgangtcggtggcagaanangaacaacctcnattcccaaatcgtanaatccgatgacgaccgctgcaagacccacatgggcacctgctaaaggtggcaatgaacaaggcggtactcgaattttcggtccctcacaaagtactcttctagggacatcgcatcgcacncc

SEQ ID NO: 43525 - DNA, 277 bp, Glycine max
  Clone ID: 701127166H1
tgcttgaagaagttgaggaagagaagagtcgctagctagtggtacgcaggtgaattggagtagctgtttgtatatatacactgaaatgaagttttgccaaagtaattgaaacagaaatttcaatctattggggactagttcagaaaggttttagctatgcttcttcaatttactcagacaaaaggatgagacttcaaaatccttagtgttctgctcacaaaaaattccagatggaagcaactctgtaagatatgatgataatgctttaagttcatat

SEQ ID NO: 43526 - DNA, 276 bp, Glycine max
  unsure (1)..(276): unsure at all n locations; Clone ID: 701127167H1
caacctacccctttttcttctcccaccaacttcaccgtcttcttcctcgatcatgtctcacttcaagggcaagtaccatgatgagcttattgtcaatgctgcttacattggcactcctggaaagggtattcttgctgctgatgantcaacagggacaattggcaagcgtttggccagcatcagtgtagagaatgttgaatccaacaggcgtgctcttagggagctgcttttcaccgctcccggtgctcttaaatatctcagtggtgtnatcctctt

SEQ ID NO: 43527 - DNA, 271 bp, Glycine max
  unsure (1)..(271): unsure at all n locations; Clone ID: 701127168H1
acagatcaaactatggccacctcaagcgccaaatcagtccatgatttcaccgttaaagatgccaagggaaatgatattaatcttggtgactacaaaggaaaggtccttatcattgtcaatgttgcctcacaatgtggcttgactaattcaaattacactagctcagtcagttgtatgagaaatacaaacagaaaggtctggaaattctggcatttccatggcaatcancttggggcacaggagccggatctaatgaacagatacaagagtt

SEQ ID NO: 43528 - DNA, 273 bp, Glycine max
  unsure (1)..(273): unsure at all n locations; Clone ID: 701127170H1
tctacccgncgctcgatgggaattgcgcttcaaggcgtctcgtagggctaatccgcctcacgagggtcaccaacggcacgtncnctttggggggccgaggccccctactgctggtcggcaaacggacggngggcgcacgcgtcgcttctagcccggatttgacttagaggtcgttcagtcataatccaatgcacggtagctttcgcgccactggcttttcaaccaagcgcgatgaccaattgttgngaatcaaaggttcctctcgtactaggt

SEQ ID NO: 43529 - DNA, 247 bp, Glycine max
  unsure (1)..(247): unsure at all n locations; Clone ID: 701127171H1
atatgcttgtctcaaagattaagccntgcatgtgtaagtatgaactaattcagactgtgaaactgcgaatggctcattaaatcagttatagtttgtttgatggtatctactactcggataaccgtagtaattctaggctaatacgtgcaacaaaccccgacttctggaagggatgcatttattagataaaaggtcaacacaggctctgcctgttgctttgatgattcatgataactcgtcggatcgc

SEQ ID NO: 43530 - DNA, 266 bp, Glycine max
  unsure (1)..(266): unsure at all n locations; Clone ID: 701127172H1
cttcgttcgttccctccactaagcaaaacccanaagacattcatttncgtttcgtttgtatagagcatggccggtggttctatcaagagacattgtttctccgaagaggacgatgtggagcctgggtattctgggcacaaccacttccatcattacaacacggttttanttctaggacattgggttatggcactttctacaaccgacgtgtgaggagccattngattttctcgccgagatctgggagattttatgatgccagattc

SEQ ID NO: 43531 - DNA, 269 bp, Glycine max
  unsure (1)..(269): unsure at all n locations; Clone ID: 701127173H1
ctggtgggggttgttgcaggcatctcctatgccatcaacagtggttaccaatcatggggtcccctctttggtaagcttttctttgcattttgggtgatcatccatctctacccctttcctcaaaggtctcatgggtcgccagaacagaacaccaaccntgttgtagtctggtccattccttcttgcatccattttctctctggctgtgggtccgaatcgacccgtttacgacaagagtcactggtcctgatgttgancagtgtggaatc

SEQ ID NO: 43532 - DNA, 224 bp, Glycine max
  Clone ID: 701127175H1
aattcgcaggcattgccattttacttaatcactgaccacggccttcaaaaaggagaggttcagtttgtgtcatgtgcatacagcaatcggattgtttggatcagaagtcaattgaggtgtagatggaacttgaagcaagtaatcaacccaagcaagagcgttcaaggacaagatggacagcatcccttgacaagatatttgcagacttggttgtcaagcagatt

SEQ ID NO: 43533 - DNA, 271 bp, Glycine max
  unsure (1)..(271): unsure at all n locations; Clone ID: 701127176H1
gtaaaagcatggatattatataattttntttttcatgaatacattgagtagaagagattaattacctaaaagaaaagaacacacactgaagaaaggaaagtgcttgaaaatactaaagggtatttaccaaaggctcttgtcttgaaagaacctttaatctacataggatcaaagaaaagcttgcaataaaagcacaagcaattgccattattaataacattattattcttacaatatcaagtcattttgcttccaattatctcctttttga

SEQ ID NO: 43534 - DNA, 269 bp, Glycine max
  unsure (1)..(269): unsure at all n locations; Clone ID: 701127177H1
gatgatactgccttggttgtctttcctggtgatctggaacgaggtttaaagtttgtagaagataaggaagccatgttccggagattggcttcagagcaactgaatcccttgaaaggccttgataaagtgaggaaatgggttgaaaaccatggtctgaaggagctgcagtcaccaatgctccaaggaaaaatgcagaactcattatctcaaaacttggtctaacagatttctttgatgcgttattatggtgatgatgtgaacatgnccaa

SEQ ID NO: 43535 - DNA, 273 bp, Glycine max
  Clone ID: 701127178H1
ggaaaatatacgtcgattgacgcgcagagcttcagggatctgttcctgccgttccagattcacgacccgccaccgtcaatttcgcagattcaaatcttcagacttttcctccttctggagctcagggcaagatcaccgctgcttccgggcctcctcgtgagctgatgattcattttcaaaacctgtatctggttctgatgaaccgcagcagggtggttggtttcagacttttacaattgctgcttacaaaccatactttgatgttgacactca

SEQ ID NO: 43536 - DNA, 276 bp, Glycine max
  Clone ID: 701127179H1
cttctggaagggatgcatttattagataaaaggtcaacacaggctctgcctgttgctttgatgattcatgataactcgtcggatcgcacggcctttgtgccggcgacgcatcattcaaatttctgccctatcaactttcgatggtaggatagtggcctaccaggtggtgacgggtgacggagaattagggttcgattccggagagggagcctgagaaacggctaccacatccaaggaaggcagcaggcgcgcaaattacccaatcctgacacgggg

SEQ ID NO: 43537 - DNA, 276 bp, Glycine max
  unsure (1)..(276): unsure at all n locations; Clone ID: 701127182H1
gaaaagtggatgtatttactgttttgcaagcataaaaacatttaacactttctttgtttaatattgaaaattattagatggatttaaaattatattttcatttgactatattctaaggtagttatactttttgttataaattttggtccctactctctgtaccttgatcgccactgcctgaanttgaaacactagctagaatatgtatagcacttggtgttataatanaccactggcattataatttttggtccttccctcttccctaatcaacct

SEQ ID NO: 43538 - DNA, 269 bp, Glycine max
  unsure (1)..(269): unsure at all n locations; Clone ID: 701127184H1
tttaccaactcctaacaatttctctctgtttccttcttcaccgcatcaatggagttggacggcgttctcctcggcatgtgcaaccctctcntcgacatctctgccgtcgtcgacgacgctttcttgcaaaaatacggtatcaagttgaacgatgcgattctcgctgaggataagcacanacctatgtatgaagaattggctaacaatcctaatgtggagtaaatgctggaggtgctactcagaatcnntcagggttgctcagtggatgc

SEQ ID NO: 43539 - DNA, 263 bp, Glycine max
  unsure (1)..(263): unsure at all n locations; Clone ID: 701127185H1
caatgtatggcattgctgtggctgcccttnnggatgctgagcaccattgcgacagggttggncattgatgcctatgggccaatcagtgacaatgcaggaggtattgctgagatggcaggcatgagccatcgtattcgtgagagaactgatgccctgtgctgctggcaacactactgctgccataggcaagggatttgctattgggtctgctgctttggtgtctttggccctatttngtgcattgtgagcagagctggaatttt

SEQ ID NO: 43540 - DNA, 267 bp, Glycine max
  unsure (1)..(267): unsure at all n locations; Clone ID: 701127186H1
atagaaggttacctttgactggggagagcttggattctaggggcctttatatatatgacgatggcttgcaattcattatatggtttggtagactgatttcacctgatatagctaagaacttacttcggtcggaccttgcagaagagttagcaaaggtttgtatattcaagaaagaggagagagggaaagagagtacaagggttaattatttttgtcattttaggcagttctgtattctaaaattttcatttttatctcacntgttca

SEQ ID NO: 43541 - DNA, 265 bp, Glycine max
  unsure (1)..(265): unsure at all n locations; Clone ID: 701127187H1
aggaggtgacccttttgggagctactggaagcccatttgtgtgcagggttcatattgccctcaagttgaaggngagttcaatacaaatatgtcgaagaaaatttgaggaacaagagtgaactgcttctcaaatccaacccagttcacaagaaggttccgtgtttattcacgatgagaagcccatagcagagtctctgtgattgttgaatacattgatgagacatggaagancaaccccatcttgcctctgatcctacnaagagcc

SEQ ID NO: 43542 - DNA, 270 bp, Glycine max
  unsure (1)..(270): unsure at all n locations; Clone ID: 701127188H1
gtgagccctccaccaccttctccatctcctcctccaccataccattacacatcaccacctcctccttccccagctcccgctcccaagtacatttacaaatcacctccacctccagtttacatatatgcttccccacctccacctatctacaagtaagtngaattgcggaagcaccattcacgataaatcatgtnctagtttttatcgaggaataaaggcaagctctatttggagtcaagtgaaacatctatcttcctgtccaagttcttt

SEQ ID NO: 43543 - DNA, 153 bp, Glycine max
  Clone ID: 701127189H1
ggggtcttaccatactgagtggttcaagcttgccaaacagtcaagaaattagattactgtatttgagccaatcaggattttcctaataaatgtaatattttctgctcagactgtatgctgagttgagtttgccaagcaattcagttggaaata

SEQ ID NO: 43544 - DNA, 200 bp, Glycine max
  unsure (1)..(200): unsure at all n locations; Clone ID: 701127190H1
tccaagttcnnatcccctcccgtctccacccattgctttcatgctttccgatcccaactaatccccaagggtcatcatgttcatgtgccacaatgaggaacttttctaagatggtctctgctgaacaaaaggaggagggattaaagctgctagtgagtgggggttctcgtgctcagaaatggttggaatatggctcttgg

SEQ ID NO: 43545 - DNA, 210 bp, Glycine max
  Clone ID: 701127191H1
ccaccttcttaattaataaccgtcgtcgtttcaatctcgttacacacctcaaaacgcagcggcacactcactagaatgcaagccgtttcgctctcacctttgtcgtttagggattcttccgacgagttcgctggaaagttcgaacacgatttcatggcaagctcaaaatcaacgaagagaaagtcgaaaacgaaaacgaagagaagcata

SEQ ID NO: 43546 - DNA, 280 bp, Glycine max
  Clone ID: 701127195H1
ggctgcgtctcttcctcttctctttcgatccatccctcattcctaatcctccaatccaaccacctcagcctcacactcacatatacacatatctgaacgcgtatcgtccctcctatggcttcaaagcgcatcctcaaggagctcaaggacttgcagaaagacccacaacttcttgcagcgctggtccagtagctgaggacatgttccattggcaagcaacaataatgggtcctgctgatagtccttatgctggaggtgtatcctagtcactattcacttc

SEQ ID NO: 43547 - DNA, 277 bp, Glycine max
  Clone ID: 701127196H1
ccgaggtacccaaaggcccctggacttgccctaaagccttttgccagccctacaacgaatccgtcccctttcaggacagagtagacactgttctcagctatttcgatttaccctctcatcaagttccttcctttattacgctctattttgaagaccctgatcatcaggtcaccaggttggcctgatggatctcaatcactcaagcgttgcggaaattgatgccattgtggggagactcattcaggggttggaacaagaggtgttttcaggatgttca

SEQ ID NO: 43548 - DNA, 301 bp, Glycine max
  unsure (1)..(301): unsure at all n locations; Clone ID: 701127201H1
ccatcttccactctccaacgtttcagacaacgcagatcttgatcaagattacaggaagacaatgaagcaatttgctnctggaactggagaaacttgcagagcagcttctagacttgctatgcgagaatctgggcctggagaaagggtacctgaagaaggtgttctacggatcnaggggtcccaatttnngggacaaaagngaagcactaccccngnttggccccncctnnntnngnnaaggggantancacnnncnccctgtggncgagagncantttnnannnctcgcangncggggggg

SEQ ID NO: 43549 - DNA, 293 bp, Glycine max
  unsure (1)..(293): unsure at all n locations; Clone ID: 701127203H1
agaaaaccccaaatttgaacgcttcaaattcaattcaggaaaccctagtgactaatctcgttggcgaaancggcgattgaagatgatcgtgagccagatggtnntagcggaacggaaattatctgtcagcagaacattccgatgttggacgtgaagtatcatatttgcntggcgcaagaacacaacgtnaaggttgaggtttctcccaaatcatcnncaccttctcttccgatctttggnccaagcatgagttgctccgagatccttnnagctcccatttnggaggcccctnc

SEQ ID NO: 43550 - DNA, 260 bp, Glycine max
  unsure (1)..(260): unsure at all n locations; Clone ID: 701127205H1
gcgaatttaaactccaatttccatttcccattgataggaagaggaaggaacgaagcgngaaggggaangcaaatggcttngtctcctatattgnncnactttgaatctgtgcgccgcaacggtagatcaaatccgagtttcacctgaatgactctttctggntgngatttaggttgntgaaggaaacaacaagtgaaaacatgattctctcanagacatgtgcntgcagcncagaacaatatagacaccanatttatcnt

SEQ ID NO: 43551 - DNA, 208 bp, Glycine max
  unsure (1)..(208): unsure at all n locations; Clone ID: 701127206H1
ttttangctcactcacnaacacttntttcactantttcattncncncgtatattatatggctcctgaacttgtnaccaccgttgcgttcnngaaaccnngaacccttccaaggngtgcctagcgtcacattcctcggcggaancgnngcactactgaaaggagtcgttggtnttgccgaaagggntncnnatggtnacnagcncgtat

SEQ ID NO: 43552 - DNA, 294 bp, Glycine max
  unsure (1)..(294): unsure at all n locations; Clone ID: 701127207H1
gctgctcatagcctcaacagagagtttggacctaagttgaaggaggagatgcagtactgtgttgnttcacccagaggannttagnaagcttgctcanagtgaaagctcaggtttcagacgtcaaaggagttatgatggaaaatattgagaaggttcttgaccgtggggagaaaattnagcttttggtggataaaacagagaaccttcgctctcaggctcaagntttcaggnagcanggnaccaagantnngagaanatnnggttccaaaacatgaagtagagctaatngttctg

SEQ ID NO: 43553 - DNA, 304 bp, Glycine max
  unsure (1)..(304): unsure at all n locations; Clone ID: 701127208H1
agccaccatgtcatcaagtggaaccatttggagctatgatgaagacaaagcatttgagnatgccatagctatgcattcggattgaggaatcctccaaaagngcaatgggagaaaattgcttcagcagttcccagcaaaaagcatggaagaagtgaagcaacattnaccaggttcttgtagaggatgtaagtgcaatagaggcaggtcacatatcatncccaaactntgncttctgatgaaaccannnnttcaaatgaggncttnccagggctcttccaaggcgacaagctcagatnaaagatcc

SEQ ID NO: 43554 - DNA, 308 bp, Glycine max
  unsure (1)..(308): unsure at all n locations; Clone ID: 701127210H1
ccggaagaagggagcaacaccatctttcnatttccgggcgatctcttgtttcttccatcatcaccgttttcccggcgatcctaatcctcgnanacagaaatgaacgacatcaaggcggctttgcgganaggaaaggtnaacnagtttgnanaagaccatcnaaaaaaagaggntttgtgcnagacactaaccataaggaagggaaaaagacnaccctgttggccccatgtgcctcggtttctncgtccttngtggtcntgggatccntctctcntccagatnatcagggcaaccaacgggtgggaggc

SEQ ID NO: 43555 - DNA, 167 bp, Glycine max
  unsure (1)..(167): unsure at all n locations; Clone ID: 701127211H1
cagcatgtggtggccnttctggagaaaggggtctgcatttcatctcttcatntgatgagtncagagatcgtgatgctatgnatgtanggcacatgatgtnganntcggntgcanggagcagatagganttatcgagnagnantaggtcngtatnnagtgcngnagac

SEQ ID NO: 43556 - DNA, 296 bp, Glycine max
  unsure (1)..(296): unsure at all n locations; Clone ID: 701127212H1
gcttttgaattttcgtgttttgatcagaatcagaggaaaaaatcacataatttcgaattcacaatttgaattttcgtgtatnaaacgaagagangagaatggnatcggaggattngtgaagccaggattggnggattgccgaaaccaattggggaaggaggctaaatttgaagcctcnatttcggcncaaaaatntcngncganaacnnacttccnctcgaggtnccncngngntncgaaaaatccttntntggnatacanggcgngttgctnccggnttgaagcccagtataccc

SEQ ID NO: 43557 - DNA, 223 bp, Glycine max
  unsure (1)..(223): unsure at all n locations; Clone ID: 701127213H1
tagtgctccttgccagaagttaaaatggccaagaaattcctatcacatctgaatcagtgaacgagggacctganaagtctgtgaccagnttcgatgtgtgncgatgcatgtggagnggcccctganngcaggntgcctggganactgcacaagaccaacanggngtgttnncggagaancacaacnnggcngggggacnananagnttgcggnacannggcac

SEQ ID NO: 43558 - DNA, 227 bp, Glycine max
  unsure (1)..(227): unsure at all n locations; Clone ID: 701127214H1
gctagactacaatngcagnaactgcagtgtccttggctggtcagcatgcnttccaacaatttggaagctgtcaantgttggagnttcccnaagagtngagacttacngatgacttgaaagttcagattctcatgtgctgtaanggngaactgacanntgatgnagggtctganaaanaagggnntgggcnaacnantttgnngaagtcccccgaantanccccnngg

SEQ ID NO: 43559 - DNA, 264 bp, Glycine max
  unsure (1)..(264): unsure at all n locations; Clone ID: 701127215H1
gttgattganacaacaagtaagtctattattgtgattnaggacattgattgttctcttgatctactgggangaaggtggttaaaaaggggaagaanagagtgaggatgcgaagatcctgtgagagactgaacagaagagatatcatganataagtgacttngtcggtttgtgaattgcatgatgggttggtcagttgtncggaganagatcatgttcacacaanattggncaactggacctgcnctatangnngggggtganaa

SEQ ID NO: 43560 - DNA, 277 bp, Glycine max
  unsure (1)..(277): unsure at all n locations; Clone ID: 701127216H1
ctcagctggatctggacaatgattataggagcaatgtatgcttgctgtnatttttgttgggattaacaattgtcaaactgttncaaccnattgtagccgttgaaagnaacagtgttctatcgagaagagctgctgganggnagntctttgccttagncttagcacaggtaagggatgggttngctcaaagacatttacttttcagnatngnggtgtnagggggcangcctgncagtanccttggnngtgctttaangngggttttgnaaaanccatt

SEQ ID NO: 43561 - DNA, 82 bp, Glycine max
  unsure (1)..(82): unsure at all n locations; Clone ID: 701127217H1
aaaatgcctttcaagnngtacgttgagattggnagggntgctcngatcaactatggcaaagagtacgggcngtcacncgntc

SEQ ID NO: 43562 - DNA, 281 bp, Glycine max
  unsure (1)..(281): unsure at all n locations; Clone ID: 701127218H1
catccctgaagatagctatactctgatagccattgtgggaatcaaggatcctgtgcgccctggggttaggncagctggtaaaaacttgtgntagctgctgggaataactgtccgcatggtaactggtgataacataaaatncggctagggctatagctagagaatgtggcattcttacagaggatggnntggccatagaangcccccantttcggganttgtntacggagcaaatgaagntatgannccaatatccaggtngcggngnnanctttnctttg

SEQ ID NO: 43563 - DNA, 111 bp, Glycine max
  unsure (1)..(111): unsure at all n locations; Clone ID: 701127219H1
cnnacctttcnaagtttcaacttactccgatttgggaggaatctctaaccctncacgnatccccnnttttantnttcagaanggcangcatggtncacaantctggatgca

SEQ ID NO: 43564 - DNA, 286 bp, Glycine max
  unsure (1)..(286): unsure at all n locations; Clone ID: 701127220H1
cgcgtttgtcgcattccatacgaggccgaagcgaagagtgtttgtagggtttgcgttgcgcatcgtttgagagagagagatgggaagagaaaaagagacaacaaaggtagcttacgcagtggagcagcttgtagccttcaatcgatacaatcccgatattcttccagatctcgaaaactatgtnaacgaccaggttcngtcgaaaattancgntgganncaattcgctgccttttcgtctctaccatttgaacctgagaaatgagttcccagattgtggcccgcat

SEQ ID NO: 43565 - DNA, 294 bp, Glycine max
  unsure (1)..(294): unsure at all n locations; Clone ID: 701127221H1
gtcctctttcaccggaatcaggacaagcaaagagcttcggcatatgatgtcactgtgtnagttgacaangcataacatgcttctcnagtttgtnatcaaaagcaaaaatacaatcaaaagctttacattattcncgttagaactgtttntgttcngttctgcatctcaagatcctcagttgggtcagtggaattgagtgggacangcacacacagtgatgcttattcaggattttcagctccaaatgactatcagagaatcgacagtttagagnaagagttggaagaattattt

SEQ ID NO: 43566 - DNA, 288 bp, Glycine max
  unsure (1)..(288): unsure at all n locations; Clone ID: 701127222H1
ctccgcttcacgcattcattcctttctctggttcggtgcatttcattctgatancactatgggccaatggtccaagcaccgttttctgagattngccaaaagggcaaaagatcttttgtacaaggattacaactttgatcacaagtttagcctgtcaattccaaactccactggattggggcttatagcaaccggattgaagaaggatcaaatttttgttggtgacataagtacactctacaagagtggaaatactanagtggatgtgaaagttgatacanannnnat

SEQ ID NO: 43567 - DNA, 283 bp, Glycine max
  unsure (1)..(283): unsure at all n locations; Clone ID: 701127224H1
cgctcaaagctctctgcntttttgtgacacagatccctngctgggttcaanttcctcacttggantctctccctaatnggttcccctgatcgattgtntaaccggcaaagaagtcttcatgagatcctggaantggtcaagttgcagatttaatactgtggaggcggaagaaccttactgtggggatattgttggtcacactagctgtttgggttgtgtttgaaagatctggttatactcttctgtctcttgttctaatgttctctcctcctcatgtcatctt

SEQ ID NO: 43568 - DNA, 276 bp, Glycine max
  unsure (1)..(276): unsure at all n locations; Clone ID: 701127225H1
ctgccacgtcttggncttctccgacacgctgaaatccgttcgggagaaggnaatcaagagacagacattgatggagctctngtttcatccattcggggtcggggaagataacggagacttgccaggaagagtgatcaaaatggtgtcggcgaaattttcggtgcctccngccggcgtcgcacgagaacacggccaggaagccacggatccggaggaggagaccgtgctcgaaccggcgtggcgantgaactcgtctagagttncctcanatagtgt

SEQ ID NO: 43569 - DNA, 237 bp, Glycine max
  unsure (1)..(237): unsure at all n locations; Clone ID: 701127229H1
gccgctcgatgggaattgcgcttcaaggcgtctcgtagggctaatccgcctcacgagggtcaccaacggcacgtgctttngngggcgaggcccctatgtgtcgcaacggacgcggcgagcgtnntttagccggatctgcttagagcgtcagtntatcacgcacgtaactcggnnctgcttcaacancngtgcaatntcgatacgtcnngananctgatcantgnnntncaaggggna

SEQ ID NO: 43570 - DNA, 224 bp, Glycine max
  unsure (1)..(224): unsure at all n locations; Clone ID: 701127232H1
ggagacttgagctcatagagaaatcatagtttgtttaatttcaattctgagcaaaggtcaacatgcnattttttccatgaaggcgaaagtgcttgtcagtngttgtccaaggccatggatggtctactgtncatacatgccctcnnctcggggcaatgaagcagggctnagttgnaacacgannntncgncgcnnggggtnnancntgnnncntngggnnncat

SEQ ID NO: 43571 - DNA, 104 bp, Glycine max
  unsure (1)..(104): unsure at all n locations; Clone ID: 701127234H1
aaacactnaatcacctaggntaaaatcgtctccgtcttcattcctttttttnccggnatagagnattcgacaagatttncatggtanntgagcagncanantga

SEQ ID NO: 43572 - DNA, 292 bp, Glycine max
  unsure (1)..(292): unsure at all n locations; Clone ID: 701127235H1
aagaagggtctttgcttgattttggagatgtctctgctctcagatctcatcaaccttaacctctcccgatnancaccgagaaggtgatcgcagagtacatatggatcggtggatcaggaatggacctgaggagcaaagcaaggactctcccaggaccagttagcgacccttcagagcttcccaagtggaactatgatggttccagcacaggtcaagctcctggtgaagacatgaagtgnnnngatacccacaagccattttcnagggatccattcaaaaggggnaacaatnt

SEQ ID NO: 43573 - DNA, 291 bp, Glycine max
  unsure (1)..(291): unsure at all n locations; Clone ID: 701127236H1
ggcgaacaaaggccttggttccggaatcggtggtgnagaagcgagaaaangaacgaggagtggggctttgggcgaagaagcaggaactngatgcccgctaagaaaatgaggtncgaaacgcggaagctgatttttaacagagccaaacaatactcaaaggaatacgacgagcagcaaaaggaactgattaggttgaagcgtgaagccaagcttaagggagggttttatgttgaacccgaagctaagctcttgttcatcatcaggatccgtggtatcatgccatggatccca

SEQ ID NO: 43574 - DNA, 288 bp, Glycine max
  unsure (1)..(288): unsure at all n locations; Clone ID: 701127237H1
gaaagatggaggggaaggagcaggatgtgtcgttgggagcgaacaagttccccgagagacagccaattgggacggcggcgcagagccaaagaacgacggcaaggactaccaggagncggcgccggcgccgctggttnacccgacggagtttacgtcatggtcgttttacagagcagggatagcagagtttgtggccacttttctgtttctctacatcactgtcttaaccgttatgggagtcgccggggctaatnctantgtantaccgtngggatcaaggaatcgctt

SEQ ID NO: 43575 - DNA, 277 bp, Glycine max
  unsure (1)..(277): unsure at all n locations; Clone ID: 701127238H1
gaagagcttgtcaagtggactcttattncttgagcttctgagtgnctgttgaggcctagggangtcanttggaaacnacctcancaagggtgaaagtgatgatgagaagaggttgaatgccactnanataatcagcgttgcacggaancccggtngnacnatatttnggtnaccctgnggatattangcgaggtaaannnagaagatgcncctncactgcgngcagccagtannangtattggagcctgcaacaaccagactgaaagacanggtncc

SEQ ID NO: 43576 - DNA, 302 bp, Glycine max
  unsure (1)..(302): unsure at all n locations; Clone ID: 701127241H1
ctatgatcttggcactctttgccatttccatacttcaaacagtggtaatggctgctaatgaacaaggaggncacttgtatgaccaacaagagaaaatatggaagtggaagtgtcaagagttaccaatgcccatcacaatgctcgaggagatgtaagccagacccaattaccnacagagccctgcatgtttttctgtcagaagtgctgcaggacatgcctgtgtgtgcccccggggtattatggtaataaagctgtgtggccnttgctacaacaaatggaagancaaggaaggaggaccccag

SEQ ID NO: 43577 - DNA, 299 bp, Glycine max
  unsure (1)..(299): unsure at all n locations; Clone ID: 701127244H1
gaaaatgatacccagatgctctgtttcaccccctcagattcgcccatttcagtttcagaacttgaacggtctccgacaactcgccgaaaacgcggcgtttcaaggtatggttggctggaccagttcggagtcctccacgatggaaaacaaccttaccccggtgccatttcaacctttagaaaatatngctangacgggtncnaagngggngntcatgagcancttcatcganacgttcannggtgactattgaaganattcaagggtcttggatttggatgcctctctttttcngggtg

SEQ ID NO: 43578 - DNA, 273 bp, Glycine max
  unsure (1)..(273): unsure at all n locations; Clone ID: 701127245H1
ctctatttctcagtctctgtgtttgcngctgaggattccgaacgagtnnccttcttcgtttctcgcaaagtttaagtaatcatgggtaaggaaaaggttcacatcaacattgtcgtcattggacatgtcgantctgggangtcaactacngtggnncantgantcnanaacgcngggggtttganaaccgtgtgtgtaagagtttcgaanagggagnctgcnnagatgnanaaggggncnntcnnttgagnngtggtntctctatangcncaa

SEQ ID NO: 43579 - DNA, 225 bp, Glycine max
  unsure (1)..(225): unsure at all n locations; Clone ID: 701127246H1
gagagagtacatttcaatccacatcggtcannaccgnncattcaggtcngaaacncctggctnggagctctactgcctccgaacacngnnatccancctganggggcagatgncaagtgataagactgttgntngaagtnntggnccttacancanccttcctnnaagaaaaanggggggngaaaaanaacntccctnggggaaatttcacaagacccagacccc

SEQ ID NO: 43580 - DNA, 287 bp, Glycine max
  unsure (1)..(287): unsure at all n locations; Clone ID: 701127248H1
gaaaatgagtagtgaggagcagcagcagaagnngaataatgaagaaggggaagaagaagcgttgaagccgttggagatcgagnaacggtcttcgcctaattcccgncgcgtganagctcnagccntcacnggtgtaaccctttcnacggcccctganacaantttacccaacngcattccgantaatnggcaagaatgaagtcgggcattcatcnganttnccncnaatgcntgcnngaggnctntgaaggtttnncnggnggnaagcagcncntgnaattnagagg

SEQ ID NO: 43581 - DNA, 288 bp, Glycine max
  unsure (1)..(288): unsure at all n locations; Clone ID: 701127251H1
gctgtctcttaatgttgcagcttccaccacaaactcaagggtggtcttgttcaacacaaagaaccacgcttctaggcttcttgtgagggcttcagacgagcctgcagcggcggcacccgcaaccaccacccctccagctgaagctgaagcaaagccaaaaccaccacctattggccccaagagaggtgctaaggtgaagattcttaggaaggaatcctactggtacaaaggcactggttcagtggttgctgttgatcaggaccccaacactcgctacctnttgtggtt

SEQ ID NO: 43582 - DNA, 289 bp, Glycine max
  unsure (1)..(289): unsure at all n locations; Clone ID: 701127252H1
cgcgtttctctctctccctctctcaacgaatatttgtgtacttcctcttttgtgggtagattcaatttanccatgtcgagttncatcggaatacctctcaattttccggccagaaaccggcgaggtcgccggagaaatcgagcttctctcagacttgtagcctgttgagtcaatacatcaaggagaagggtagcttcggagatcttaccctcggaatgacatcagtgggtcacctgagacatcttgtcaatctgctacaaccatgaacttgtttcctaccaaggaaaac

SEQ ID NO: 43583 - DNA, 269 bp, Glycine max
  unsure (1)..(269): unsure at all n locations; Clone ID: 701127253H1
attcttcacacttcgatcttgtgtantcgtatattaattntncccttttgtttcttcttanngctatcaatggcgactaaagaattatttcactcatcagatcaagaagaagcagtnaatgaagaaagcnctgctactgcagcatgnaggtagatnctnacgaagaagaagaaactcnatnctctttctgaccttccaatttaccgnggggcctcaatttcagncnagttgggnnggggattccccaaagnaagtggggaaaantttgt

SEQ ID NO: 43584 - DNA, 292 bp, Glycine max
  Clone ID: 701127254H1
ctacgtagaccctccgccagcccccctcatcgacttgggccgagattaagctctggtcctttctacagagccctcaatcgcccgagtttatcgccacactcctcttcctctacgtcaccgtcgccaccgtcattggccacaaaaaacagaccggaccatgtgacggcgttggccttctcggcatcgcatgggccttcggtggcatgatctttgtcctcgtctactgcaccgccggcatttctggtggacacatcaaccctgcggtgattttggcctgttcctggcccgcaag

SEQ ID NO: 43585 - DNA, 253 bp, Glycine max
  unsure (1)..(253): unsure at all n locations; Clone ID: 701127255H1
cgaaattgatgnttcgcttggggattctgatggcctaaaaaatcctgctttgaagaaaaggactaaatctgattcaagtactntttctagnncaaagcgtgtcgggacaantgaggagggtnggcttatganaattntngactgnnctcnacttggagccngnnancctcnaanaaagaacnannctccntctgattgntgccgccgntggncaccanctgcgggatccngcctgnatngangactcaatcga

SEQ ID NO: 43586 - DNA, 296 bp, Glycine max
  unsure (1)..(296): unsure at all n locations; Clone ID: 701127256H1
gcaggctaccaaaggttccctctccgaatgaaaactggctatggtgagcgttcttcggaggtanaatgcgccaagttttagggttgctgtggaggcacacaacatccgagcctttaaaaccattcctgaagagtgcgtngaaccaacaaaggactacattaatgggcgancaatttagatcagactctaaaacagttaaccaacaagctttcttttatgctagtgaacgcgaatccatcacaacgacatatttatattcggcatagataacaccgtactctctaatatcccatact

SEQ ID NO: 43587 - DNA, 283 bp, Glycine max
  unsure (1)..(283): unsure at all n locations; Clone ID: 701127259H1
gtcctganactcacagagacagagagaatgagtnngcgtgcgagaagggnaggngggnagtaatggtcatggaattgcaaancagggccaggctatgttnccccatggaaaccnatgctggngccagagagtctcctcatgtatgncaacnnctgtctacacagggacggagcagagaagcngactattggcganagggatgtggnatccaaangtccacnttatnccnaagtcatcataggcccctgttccnaattaggngacgatngcancccacaggcgg

SEQ ID NO: 43588 - DNA, 299 bp, Glycine max
  unsure (1)..(299): unsure at all n locations; Clone ID: 701127260H1
attgaaatcatatgtatgaatttntcctcatctggagaagaagtagaatgggatggagatgccttcaaggagatgaaaaatctgaaaacactatnatcaagagtggttgttttttccaaaggtcccnaaacatctttccaaatacttnangagttggaaatggtggaaatgccntnccanggaatggnccnggatttttaaccccaangcaacttggcnaatntggcaggttacccgagagtactttnaggtcacccgggttggccccatttttggnaanggggccgtgnatntgggcc

SEQ ID NO: 43589 - DNA, 267 bp, Glycine max
  unsure (1)..(267): unsure at all n locations; Clone ID: 701127263H1
gtctccataaatgaaatgagtgagggagagaacagaaaattacaaggaaatgactcagtgcagtgactctgaaaacnatcatcataacatcatagtggagggacgaaaagatagcttatcagaacttgtctacttgtggtcaccatatnaatgcaagaacagggtgtggattcatgcttgcctggnctgctgctgnatgagttgatccncggtcagagatctgaacatttnnagnnaggggcancgnattcaagnnccccccntngg

SEQ ID NO: 43590 - DNA, 275 bp, Glycine max
  unsure (1)..(275): unsure at all n locations; Clone ID: 701127265H1
gtcgaccaatgncnttcananaagnacgttgcgattggaagggttgctcagatcaactatgggcaaanantacgggcggntcntgatcnttgtcgatgtcattgaccagaatangggctcttgtnggatgnctcccgaanatggtgaggtcccaagtgaccttcangaggctntcgctcagtggancatcaagnttgatatnaagaggctncccaaggaagaaggnnctctncangccatggngaccgtgaaacnnaaannagatnggnntaanc

SEQ ID NO: 43591 - DNA, 244 bp, Glycine max
  unsure (1)..(244): unsure at all n locations; Clone ID: 701127266H1
aaaaattccactgcaccaccaccctncccatttgtacttttcttctcattctcattccacttcccctggcattctncnacacaatctagcnntaccgtgnttctgggncaaccgcataaggttnaactgttaaggcntggnttacgtggatccaaaanggcaanggnnaattttgtngnaaaanttttncntgtcngcagnatcangcggnanttgagncannatcaggagnaagatnccgcca

SEQ ID NO: 43592 - DNA, 308 bp, Glycine max
  unsure (1)..(308): unsure at all n locations; Clone ID: 701127268H1
gctagctgtgacttgttttgagttcaatcaaatcgcattggtattctgaaatcaggaaagatggttagcgtagctggaggatcagggcanggcacaannnggcagnaangcccagcaaccatcccttgccattggaactgtcanaancccaccanacccgngttgatccagagnnnctatnctgnttagntnctttcanaatcaccaacagtgacccacatgcaccgagctnnnacnnacatttccagcgcagctgtgcnnaagtctatgcncnaggncgnggatatatggnagctaancgacgantt

SEQ ID NO: 43593 - DNA, 89 bp, Glycine max
  unsure (1)..(89): unsure at all n locations; Clone ID: 701127270H1
cacttctctanaaaanctgaagacatgtctggtcattgggggattcttgtttccgatccatgggcttcagaatcagtccccactnactt

SEQ ID NO: 43594 - DNA, 259 bp, Glycine max
  unsure (1)..(259): unsure at all n locations; Clone ID: 701127271H1
gttagaacccccttcgcncttcggattccgccaccgncataacgccatagctgccggcgaaacgatttctggggttgttatntttcacctcaaagttcctatcnttanccccggacaatggcgagggtagacagntcaaaactgaanngtggnaaaattcnccnagntntnggtanaggtggcgntnaaangttgntngnggatngccantggtgaacttgnttncgaaaggcatgaaaggtgatgtttgnnantnnna

SEQ ID NO: 43595 - DNA, 264 bp, Glycine max
  unsure (1)..(264): unsure at all n locations; Clone ID: 701127272H1
gtgggtgatggagctgttcatctganggaaaagaacggtgctgagttccttctttgttgcccccagatnaccttcctcctgagtaaactccattgtgnttacaaatgtgctcagggagactcgcatatatgtacagttgctacttccatgataacaaaatttacagaaaagggagaagaaagttaatgtaacctctcctactagatgataatcgatgaagccatctcggntgagtagggacttaaagatctcgaggagggntac

SEQ ID NO: 43596 - DNA, 291 bp, Glycine max
  unsure (1)..(291): unsure at all n locations; Clone ID: 701127274H1
annttttcgggtttcgggtcgnctaatttcgtccccgaattctccgattttccgagcttcgatgatttcggccacgattttcttncgtggcatgagcttccgggttccgataacggagaagagaacttggatgggttgataattcaaggattcgttccggnggaatttccaaancnggtcgggnttagganaatttatatntnccccaancngggtaaaaancgggnangcacccnnanttggntgggnaantttntnaaaacanaccctttgttacaanaaangggggac

SEQ ID NO: 43597 - DNA, 286 bp, Glycine max
  unsure (1)..(286): unsure at all n locations; Clone ID: 701127276H1
caattttcgtacaatacaaanacnttctctcggatttcgtttcatggaatcgccgcattcatagcacaactcttcaaantgtattccttcaaagacaaagtncacagaaactctccatctncttcccaatctcctcctctcgccccaggatagtccatattcgcaagaggtaaaccttgtcttcatatttatctgaantnatcccttcnaacnagctnggatgggncngaagtcaatcangantcaacngnaattaaaccattcaatcggcttcctcgggatanna

SEQ ID NO: 43598 - DNA, 289 bp, Glycine max
  unsure (1)..(289): unsure at all n locations; Clone ID: 701127280H1
tagggcaccaacacctttgatccaatgggttcggttgccgcagaagaactgaacttagatttaagatcctnctttcgtccccaaaaccatcacggattttctcggcaagctttnccgnncaacaacaacagcctgccaccctcggcgattttnntcnccggntcgaagaggagctgcngcagtcnacgcttnaacgggatntcccctnncnatgggcnngtnanggnnnattnccgttcgagggncanctgncagattgtcnggggcagcccggnatcccccnngggnc

SEQ ID NO: 43599 - DNA, 85 bp, Glycine max
  unsure (1)..(85): unsure at all n locations; Clone ID: 701127281H1
ggggtcttaccanactgagtggntcaagcttgccaaacagtcaagaaattagatactgnnngggaggcaatcaggatcntcctac

SEQ ID NO: 43600 - DNA, 286 bp, Glycine max
  unsure (1)..(286): unsure at all n locations; Clone ID: 701127282H1
agcaaatattgcctattccgcaatatggcggaaaatgcttcgattganctgaacaagtttgtntncttttgtntgttggtgctaatacaagtggcagtntctgaaatcaantttgaagagcgttttgatgatggatggcgaggtaggtgggtgaagtcagactggaaaagcagtgaaggcaaagcaggttcatttcaagcacacagctggaaaatgggccagtgatccagatgatanaggtattccaaacatccagtgatgcnaaacactttgccatctcngcaaa

SEQ ID NO: 43601 - DNA, 285 bp, Glycine max
  unsure (1)..(285): unsure at all n locations; Clone ID: 701127283H1
acccttcaagcctcgcccatgaacgaaaccaagaagacccnagaagaataagaataagaagaagagcgaccaanaanagnccctcgggagattgctancgnggagcgtccagaggnagaggagaatgagaataatacagatagcgatggagaatcctcnnnnnnnnnnnnnnnnnnnnnngtggaaggagaaagtgaagtgangagaaaaaggtgaagaacatggtggctctggaattatgagcatgagtctttgaatctctcggattgtctgaacctattntcc

SEQ ID NO: 43602 - DNA, 295 bp, Glycine max
  unsure (1)..(295): unsure at all n locations; Clone ID: 701127284H1
gatttacgatagcttttganggtaccagtttttgtcatcactctctcagctgatcggtgcttatagatccagcggtccacaagattccaatttggaccctggaagcnnatttctcatttcaaagattaggtgnaaaacatggntgtnccttgatgccatccattgtgagcaaatcctggnaaagttctagtttctagacagtttgtggacatgtctcgtatcagaattgagggtctctggcagcatttcccaaagttaataggcatggaaanccacacccatatgttgagacggg

SEQ ID NO: 43603 - DNA, 293 bp, Glycine max
  unsure (1)..(293): unsure at all n locations; Clone ID: 701127285H1
cttcctcaagattagcacaagananatttagtggaactggcaagtgaatctgaagatgacaatgagagaaatgatgctggcagaggaagnaacagatgatgatgacaatgccttttttgctactcgtgatatgcggtcatccagtcctttnaaacntnatgggnctggntaccgagnatcctccctgccnctncanntgntgaaggnttgctatgncntttgnatcagggggtgncctagcnccctccgcataggannggtggnacccnttcccctccngntangcgggggnc

SEQ ID NO: 43604 - DNA, 297 bp, Glycine max
  unsure (1)..(297): unsure at all n locations; Clone ID: 701127286H1
cagagcaantatgcacatgacttgagcatttcatagcntttggtgngancnataancactgagagctgaangtgaaatctgtcatagtcatagntatgaacatacanccanactatctattacctatnacaaggtacttccctaggttanggaactggttcatgctgcattggtgctgtcaattctnatgngtgaagttnccttctttgaaccctagaagattctggatgtaggcactggatcacctggcaggatctagncctataatagtgatantctgcnaaattgnaagggcct

SEQ ID NO: 43605 - DNA, 220 bp, Glycine max
  unsure (1)..(220): unsure at all n locations; Clone ID: 701127290H1
ctcgctctcagttatgtctctaattnattaattctaacctgcattttgcatttggagttcangttnngtacttttacganatgtcgtttaaaccgantcggaatctcaactcgtgtntgttttttnaacaacnnnctttngtttggnctgcnacttactaantactnaccagttgaagaantncaacgtntgtngtgnnntgtgnaacactngncaggct

SEQ ID NO: 43606 - DNA, 278 bp, Glycine max
  unsure (1)..(278): unsure at all n locations; Clone ID: 701127292H1
gggacggtgtgtgtgattttggcatacctggcctctgcagcaatctgtgccaaacccacgcagnccagtggatgtacaatttggccganactacgtgcccncatggggcctttgatcacatcaaatatttcaatggtggttnctgacattccagttacattcttgaaangtacactggtactggcttccagtccaaagggtcttacttgttggggtcnnttnagcntgtacnaaangganggtccccgnagtntctgctggcacantcantgnttttt

SEQ ID NO: 43607 - DNA, 201 bp, Glycine max
  unsure (1)..(201): unsure at all n locations; Clone ID: 701127293H1
accgtatccaggacaatagactcaaatgcatctgaagtgaaggatatacatgctctcagaattnggtatgctggagcttgtggtccagctgaactgaggatgatcgttagaagncttgacanctctgntccnagagagcacctnnganggcncnagngcgcagnagatngcgnagngctcngtaangccggacttgncnaa

SEQ ID NO: 43608 - DNA, 295 bp, Glycine max
  unsure (1)..(295): unsure at all n locations; Clone ID: 701127294H1
caagttcataagaattgggaaggtgatgaaactaatcgatgagcagcagtgaaaaaaaacttgtttgaaccccaatgattaattatntaatcaaattcaattcaatgancaacccatncttctncggcctcttgtaactttgcgcttctttcaaaccaggaccncagctanttngccgttnggnnccaganatggggntangaannttgangccnattacanggagggtttgtantgaaagaacggtcggagnttngcncntgcngaaancnnntnancccagncnttttnntgg

SEQ ID NO: 43609 - DNA, 76 bp, Glycine max
  unsure (1)..(76): unsure at all n locations; Clone ID: 701127295H1
gaganaccannaatctcaacaaagcagtntctaagatccgatccattcagaccnttccacacaacngacgncgnng

SEQ ID NO: 43610 - DNA, 276 bp, Glycine max
  unsure (1)..(276): unsure at all n locations; Clone ID: 701127301H1
aatggcttctacttctaatgccatcatccaatgcacctcttcttcttcttcgtttgantatgacgtgtttgtgatcttccgcngtgnanacacncgaaacagnttcacaggttgtctttttgaagctctgaaaaaacaaggcatcgaggccttcaaagatgataaagatatnaggaaaggcgattccannncacngtggngattngggcnnngtnaggggcncngngtgnncnnngggnttncnccaggggggtntgntcacanaantggtncctg

SEQ ID NO: 43611 - DNA, 287 bp, Glycine max
  unsure (1)..(287): unsure at all n locations; Clone ID: 701127303H1
gccacttgtatgacaacaagagcaaatatggaagtggaagtgtcaagagttaccaatgcccatcacaatgctcgaggagatgtagccagacccaataccacnagccctgcatgtttttctgtcagaagtgctgcaggacatgcctgtgtgtgcccccggggtattatggtaataaagctgtgtgcccttgctacaacaactggaagaccaaggaaggaggacccaagtgcccttgagcttcaacttgttcaacttnaatngtcgcttgcctacattnttatggcttc

SEQ ID NO: 43612 - DNA, 283 bp, Glycine max
  Clone ID: 701127305H1
gttctaacgtataagttatgattattcataaactttctgctttcttttgcagacatatgaaagatcttgcattcaaaaatggctgatgctggtcacaaaacctgccccaagacacagcagacacttgtgcatacagcccttacccctaactatgttttgaagagtttgattgctttgtggtgtgaaagcaatggcattgagctaccaaagaagcaagggagctgtagaacaaagaaatgtggtggcagctgccctttgctgttctatatcgttactcaatagt

SEQ ID NO: 43613 - DNA, 283 bp, Glycine max
  unsure (1)..(283): unsure at all n locations; Clone ID: 701127306H1
gtccctccttcctctgccttataattcttgtgacccttttngctggtagcattgaaagtgcaccagcaaacgtgaagccaagccattatgctgcacccttcaataggagtgtttttccttctggttttctatttggaataggctctgcagcttaccagatagaaggagcagcagctatagatggcagangaccaagtatatgggacacctatactaaacagcaaccagggaagatttgggatcatagtgatggaagtctagcaattgattnttatcaccggta

SEQ ID NO: 43614 - DNA, 281 bp, Glycine max
  Clone ID: 701127307H1
caaagattaagccatgcatgtgtaagtatgaactaattcagactgtgaaactgcgaatggctcattaaatcagttatagtttgtttgatggtatctactactcggataaccgtagtaattctagagctaatacgtgcaacaaaccccgacttctggaagggatgcatttattagataaaaggtcaacacaggctctgcctgttgctttgatgattcatgataactcgtcggatcgcacggcctttgtgccggcgacgcatcattcaaatttctgccctatc

SEQ ID NO: 43615 - DNA, 282 bp, Glycine max
  unsure (1)..(282): unsure at all n locations; Clone ID: 701127308H1
gggaaaggggaaggcagcgaaagatcctaacaagccaaagaggcctccaagtgctttcttcgttttcatggaggaattcaggaaggtgttcaacaaggaacatcccgacaacaaagcagtgtctgctgtgggcaaagctgctggagcaaaatggaagacgatgtctgatgctgaaaaagcaccttatgtggnaaagtctgagaaaaggaaagtggagtacgannngaacatgagangttataacaagaaacaggcggnagctcatactggtgnggatgaaga

SEQ ID NO: 43616 - DNA, 287 bp, Glycine max
  unsure (1)..(287): unsure at all n locations; Clone ID: 701127310H1
cttttccttcctctgtctacatttcatttcattcaaaacaatcanggcatctcttcattccacatgttcaacaaaaaccgtcntttatgcattggtattgttggcctcttccatggcaanttctaccaggattttgacataacatggggagatggtcgtgccaagatactcaacagcgngcgagnttcttantctnacccnttngtaaccncctccnggangggntttcagtccnagnacgngtcatgtnnttggnaagantggtatgcaantcgagcttgtacncg

SEQ ID NO: 43617 - DNA, 268 bp, Glycine max
  unsure (1)..(268): unsure at all n locations; Clone ID: 701127311H1
atttgcagcatcaaaatgagtgganagcaacgatggtagcngcagtggagctgctaggttnttgaaggtggctagtgcagctgccgctacanccgccgttgccggcggtttatatgccattctttcatcctcaacctctgctagctctgagatggaagtccccgtttggcaggcgcacggcgtgagagcaaagaacgtgaccaatggtggctccgggtctcatcctcggcgagggtgccaccacggtcagtcgttggaagaaacctga

SEQ ID NO: 43618 - DNA, 288 bp, Glycine max
  unsure (1)..(288): unsure at all n locations; Clone ID: 701127312H1
acggtttaaggcaanaaaacggaaaacgcganacgcaagcgcaaaagcacggaataggagcgattaagcgaatctccaatcttgattatcgattaacagtggtcgatgatcgatgccaaagatgaagcacctgctgagaaancttcacatcggtggtggcgctgccaccatcaaccccagtcccaatcacaacgcattgtcgtcgcacgctcacaatcacactccccctcnctccacttccacgctcccttctccctacgtcgtttcggatcggagccccgtcgtcgt

SEQ ID NO: 43619 - DNA, 290 bp, Glycine max
  unsure (1)..(290): unsure at all n locations; Clone ID: 701127314H1
gcttaccatgttctttataagaagtctctggaggaggatgttgctcatcacacaacaggagacttccgtaagctcatactacctctggttagttcttatcgatatgaaggagatgaggtcaacttgaccctggcaaaaactgaggcaaaattgctgcatgagaagatttcaaacaaggcttataatgatgacgacttcatcaggattttggccacaaggagcagagcacagattaatgctactttgantcactacaaagatgcatttggacaagatatcaaaaggccctg

SEQ ID NO: 43620 - DNA, 296 bp, Glycine max
  unsure (1)..(296): unsure at all n locations; Clone ID: 701127315H1
cttcaacttcacacattcatacgtggtgttgttactgctgctctnnttctcttttcttttctctttagttctctcttccccttnnnnnnnnnnnnnnnnnnnnnnngctgagcttgtntaagcttttcttccattaacatattatcacaatgtgtggtattcttgctgttcttggttgttctgatgactctcgagccaaaagggtccgcgtgcttgagctctctcgcagattgaagcaccgtggccctgaatggagtgggctccatcaacatggtgactgntttttggcacatcaa

SEQ ID NO: 43621 - DNA, 298 bp, Glycine max
  unsure (1)..(298): unsure at all n locations; Clone ID: 701127316H1
cgagagcagtgctattgttggctatgtgtgtgcttccggccatggttgtggccattcgcccagcaaagaaccctttttgcgtgaagggtcgcgtctactgtgacccttgccgtgctggttttgagacctcagcaaccacctacattgccggtgctgagattatgttgcaatgcaagagcagggttagcaacgaggttgtgtacaccaagaaggggtacactgactcaactggagcatacacaatgtacgtggacgangatcacgcagatcaaatatgcagtgccaagcttgtaagcag

SEQ ID NO: 43622 - DNA, 283 bp, Glycine max
  unsure (1)..(283): unsure at all n locations; Clone ID: 701127319H1
aaatgtttggttttgttcacttgtacaatggccaagaggctgtgtcaactgggttcatcaagcttctgaagaaggaagattctgtggtgagcacctacagagatcatgttcatgcattgagtaagggggtcccgtctcgggaagtgatgagtgaactgtttgggaaggcaacagggtgctgccgaggtcaaggtggttcaatgcatatgttctcgaaagagcacaacttgctcggtgggtttgcctttatnggtgaaggaatccggtggccacggggctncat

SEQ ID NO: 43623 - DNA, 283 bp, Glycine max
  unsure (1)..(283): unsure at all n locations; Clone ID: 701127320H1
ggaaagaagctgaaaatactgtgcctccacggattcagaacaagtgggagttttcttaaaaagcaaattcagcaaatgggatccttctctattcattcaatttgatatggttttcccagatggtaaataccctgctggagggaagtctgacatagaaggcatcttccctccaccttactatgagtggtttcaattcgaaaaggacttcacagtgtactttaacttggaagaatgcatctcatacntatgcgattatattacagccaatggtcccttgatggct

SEQ ID NO: 43624 - DNA, 283 bp, Glycine max
  Clone ID: 701127321H1
gttatcttgagaaacattattcccattgctatatattatggctagcatgaaggttacatgggtggttgtgatcatgtgcatggccgtggtgggtgcaccgatgatggcgcaagcatggacatgcaatgatgtgacggtgaacatggcacagtgcctatcctacctgatgcagggaggaacaccttcaacactttgctgcagcggagtcaagaacattcttggctctgctgtcaccaccgttgacaaacaaactgtgtgcaactgtctcaaggcggatgctgct

SEQ ID NO: 43625 - DNA, 290 bp, Glycine max
  unsure (1)..(290): unsure at all n locations; Clone ID: 701127322H1
aaaaaatggagtgctacacaaggccanacaggagtgacatccncctctcagcagaggaagaagccaccatagaagcaaagaccagagagtactttgatggagtcgcaccacaacgccncacaaagcctcaacgaagtgagctattcagctccaatatgtcgattcnttgctcnaatgcccatgcantcttntggngactataccgggatnaanncgattccaactcctccagantgncnccccangagaagagattggggtncaangggaagtcangtaccggnagattt

SEQ ID NO: 43626 - DNA, 280 bp, Glycine max
  unsure (1)..(280): unsure at all n locations; Clone ID: 701127323H1
gtgaaccctaagtgaggatacactatactccggtagccgctgtgttggtgagtgagttgtggtgcttttgaaagatgaggccgattctgatgaaaggtcatgagaggccattgacgttcctgaaatacaacagggacggcgatctcctcttctcctgcgccaaggaccacaaccctaccgtctggtttgccgacaacggcgaacgcttgggcacttatcgcggccacaacggcgccgtttggacctgcgacgtctcaagagattcggctcgacnnatcag

SEQ ID NO: 43627 - DNA, 286 bp, Glycine max
  unsure (1)..(286): unsure at all n locations; Clone ID: 701127325H1
tcaagatgcagatcttcgtcaagaccctcaccggcaagaccatcacccttgaggtggaaagctctgacaccatcgacaacgtcaaggccaagatccaggacaaggnaggaatccccccggaccaggnaacgtntcatgttcgccgggnagcagcttgaggacggncgtacccttggtgantacaacattcagaaggagannactcttcantcgttntcggtnnccgtggtggnatggnagagtttnggtgagannnttanngtgnnaganngtgngcctggnggtt

SEQ ID NO: 43628 - DNA, 283 bp, Glycine max
  unsure (1)..(283): unsure at all n locations; Clone ID: 701127326H1
aagactcagactcagactcagtcaccatgttattcaccttttctntgtttctcactcatgggccctttacaatccttgcctatatcagtgagagtctctcncctttangncaagctttactttcaaatgccagnattgtgatactgtcaacagttagtgggggttctgacttctgagtagttcgtcaccttaaacagaacacatgggctanttttgagaaagataaggtgccaattttctcagnagttcatcccaaaccatcaaatgaacctgttgatactaa

SEQ ID NO: 43629 - DNA, 248 bp, Glycine max
  unsure (1)..(248): unsure at all n locations; Clone ID: 701127327H1
agaggccccaaaagctgcacacattgcccttcctgtccaggaatttgagatctagcaactaacaaggcaataatgaagttcttgttccagtgcccttgctgctctgcttttgttcatgaagccaaacaagggaaggcaaagtcaaggaagtcaagaaccaaggtgaagaaaaaaggtgagaaagaagctgacatgtactcattcagttcttggtatatagatatatagatnacacaattggctcttat

SEQ ID NO: 43630 - DNA, 219 bp, Glycine max
  unsure (1)..(219): unsure at all n locations; Clone ID: 701127329H1
atcaaccctccaatttgtttacaatatggaacagaccctctccttgatttgagcatgaattgttcaaacacggcagagtgaatcgtgatatgatcaactgagcatggatctactggttgatcagactattcattggacacagcaagctgaggagcttaaanacgacccagggtncaagtctgtcggaantgatgtnantcgtgcaaactccgctcatag

SEQ ID NO: 43631 - DNA, 293 bp, Glycine max
  unsure (1)..(293): unsure at all n locations; Clone ID: 701127330H1
cagaactgaactcgctgactgaaactcgcaaaaattagggttttgcagtgatggcactgtccaaccgcgtccgatcgggaatctctctcttcaccaaatccacgttcctcacttccgagcgatccactctncaacgattcctcgttgccccttccatttccttcgcctccagaaattacgccaacgtgccggggcaaaaggaaaacaaagttaaggtcccnnnggctttgtttggaggttcaggaaactatgcctctgctttgtatattgcatctgtgaaagctaatgcagtg

SEQ ID NO: 43632 - DNA, 296 bp, Glycine max
  Clone ID: 701127331H1
gaaagaagctgcggttggttatcttggaggggttattcagaaacttcaagatactagagagcagcgcatagaagaacctattctttacattaagatgcaaatagcaatattaaagcttgagcaaggtgatcaaaaggaatgcaagaaacttctagaagatggaaagagtacactagacagcatgacagatattgatccatctgtatatgctagctattactgggtatcatctcagtttcataagacacgtcaagaatttgctgagttctacaaaagtgccttctctatttggcata

SEQ ID NO: 43633 - DNA, 145 bp, Glycine max
  unsure (1)..(145): unsure at all n locations; Clone ID: 701127333H1
ggnacgacatcanagtgtatggtgangttttggagaagccnactgactctntttcccngtccaagcngcntncanttcgtgtcacttcncttcaanatggncgttaccttctcaaatctccacacagnnntcatgtcttngagtc

SEQ ID NO: 43634 - DNA, 290 bp, Glycine max
  unsure (1)..(290): unsure at all n locations; Clone ID: 701127334H1
cttggtttcatgccagattagggaactcttttagttgtcaattagatcacagagacatggaggttgctatggaactggaagatgatcttttttttgctgatttgagcaaggaaattgctctactaattatggatgaagatgaagatcctcttgcttcttgtcctcctgactctcttcaggctttttnctggggcaattcatcctcctccacagtttgctttnantgaggngcatgctttgagacgagaaagcaaaggncnaggtgtgttgancccccaancnacnnagnc

SEQ ID NO: 43635 - DNA, 280 bp, Glycine max
  unsure (1)..(280): unsure at all n locations; Clone ID: 701127336H1
gtgaccttcttcgtttctcgcaaagtttaagtaatcatgggtaaggaaaaggttcacatcaacattgtcgtcattggacatgtncgactctgggaagtcaactaccactggtcacttgatctacaagcttggaggtattgacaagcgtgtgattgagaggttcgagaaggaggctgccgagatgaacaagaggtcattcaagtatgcctgggtgctcgacaagctgcaaagctgagcgtgnanccggattaccattgatatngcttgtggaagtttgaaa

SEQ ID NO: 43636 - DNA, 280 bp, Glycine max
  unsure (1)..(280): unsure at all n locations; Clone ID: 701127337H1
ggggcctaaagaggctggagggtccaaggcatatttagatcgcttttggcaagttgggccagaaacatttgctgagcttcttganaaacttggtaaatcaaatgaccatgttgattgtgttgtttatgatgcantcttaccttgggcactagatgtggctaagagatttgggatagttggtgctgcttatctcactcanaatatgactgtgaatagtatatnttatcatgtccaatngggaaagcttcaagctccnctcatagancatgatgtttccctt

SEQ ID NO: 43637 - DNA, 259 bp, Glycine max
  unsure (1)..(259): unsure at all n locations; Clone ID: 701127338H1
catctttgcnatcagtaaacgacantgatttacgacgttanctctcctcttttccgatcantcctcagccagaagggaggctcctctgataagaggaaatcggacgaacagaagccaaaagagcagaaacccaaagccagcgagaacaaacctataatgactgagtgataacagctgagctgcattcagttgtagaatgaaaataggtggtaggtattgtatttggtgctaaactaaggtctttttggctgtgttctga

SEQ ID NO: 43638 - DNA, 275 bp, Glycine max
  unsure (1)..(275): unsure at all n locations; Clone ID: 701127340H1
ctcatttcttcatcgttcgattcttctcctcctaaagatgcagatcttcgtgaaaactttgaccggtaagaccatcacccttgaggtggagtcctccgacaccatcgataacgtgaaagctaagattcaagacaaggaagggatcccacctgaccagcagagacttatctttgcgggtaaacagcttgaggatggtcgaacccttgccgatacaacatccaaaaggaatccatctccacctcgtgcttngcctcaggggtggcatggnaaatcnt

SEQ ID NO: 43639 - DNA, 283 bp, Glycine max
  unsure (1)..(283): unsure at all n locations; Clone ID: 701127341H1
aaacccaacgccacaaagaaagtcatatcgaggacgcttaagcttttccttttgggactgttacttgcaaggtgggtatntccatgggcacggcanattaacgtatggagttgatttgagcaagatacgctggcttggcgtacttcaggatgttntctatcttactttgcctcngtgtacctttgtttgctctacggtctntatgtnccgaattggaaattcnagcattctagtttgctttcgtccagtgactccagtgnatncnatcaagtnttcggaangc

SEQ ID NO: 43640 - DNA, 254 bp, Glycine max
  unsure (1)..(254): unsure at all n locations; Clone ID: 701127342H1
gattcctcaactcaccatccgcgttcattttccctcacaactgcacacgtgcccctattcactttcattcattcntgactctctccttttctatcggaaccaccatccaatgagacggcgcnccgtggcgggtgttctccccgaccanatggagaaagcaaacaccaaaaaccctnattccagactttgctttctcgcttncctctncgtattcttctggttctcctcctctattccacttcgcngtcntccgc

SEQ ID NO: 43641 - DNA, 280 bp, Glycine max
  unsure (1)..(280): unsure at all n locations; Clone ID: 701127343H1
gcacgctcaacctccgtcaaagcaaagaaacagtgtttcatcatttgggtttcgcagaagagagagaaacccatttctagagagagaaactcgcagtcgcagacatgtcttccttcgatgccttcgccgacgacttgaacgtcaactcttcttccactcgccagcacgacgatgacgaggacaacttctctggctacggcggctactcctccttcaccggaggattctcagccgacggagatgtgnncngtngntcacgcggcggcgngttgngggagtt

SEQ ID NO: 43642 - DNA, 205 bp, Glycine max
  unsure (1)..(205): unsure at all n locations; Clone ID: 701127344H1
tgtgctgaggtcctcaggcaatacgaggagttcgacaatgagaattaattacgtaattaatttcagtaatactgttattattaatctactttcgatttgggttttctaatgtctatttaattcaatcttgagtggagctatctcgcatttcaatacngtttagtaggccgccttataatatcacagacactggcagagngngatc

SEQ ID NO: 43643 - DNA, 288 bp, Glycine max
  unsure (1)..(288): unsure at all n locations; Clone ID: 701127345H1
cgaaaaactaccatagccactacttgcttccacttctgattcagaaactcttaggcattccacattctgcaaccccgaaccctaagagcagagcgaaaatgacaaccaccttcgcgaccgtcgcaggactcggtggcgcattactgtcatccacctcatctcgtctcacctcagggtttgtgatatccccagtgattgctaggaatcccttgaggcaagctgtggcaatgggaaatgggaggattacatgctttgagaggaattggctgcgggcagnttacagtgtgt

SEQ ID NO: 43644 - DNA, 288 bp, Glycine max
  unsure (1)..(288): unsure at all n locations; Clone ID: 701127346H1
gttttgatcggaataaactacccggggcacgaaggcggagctgaaaggatgcataaacgacgtgaggaggatgcaacgctgcctcatcgatcgatacggtttctccgaagacgacatcaccgttttgatcgacacggacgagtcctacacggagcccacggggaagaacatccggtcagcgttgaccaggctggtccgatcggcgaancaggggacattctgttcgtccattacagcggacacggcacgcgcctccccgcggaaaccgganaggatgatganacggct

SEQ ID NO: 43645 - DNA, 287 bp, Glycine max
  unsure (1)..(287): unsure at all n locations; Clone ID: 701127350H1
ggttctctcagctttcacctttccaggctcggatccaaagaaaaatctcaactttcttcaacaattcatctccacaatttctgggtagtggctttttttagcaggaatggctcaacgttctaatgttccaatgttaggcaagagtgaagagaatgtttcagatacagctcattctgacaaagcccagaaaggtcagccaggttcaaagatgattaatccaaatgacaccaaggaanattcagatgtagtttcttctgctggcctaccccattcaaaacccagagttc

SEQ ID NO: 43646 - DNA, 281 bp, Glycine max
  unsure (1)..(281): unsure at all n locations; Clone ID: 701127351H1
aagcgatcatagtttcacttcggccttatccagtttagggtttcggttctctcccctatctttcacgtatcgaaaccttaaatttacgatcaggtctgagcaatctggttggtagaacctttggtcttagtgagtcaagttttatgtctgaattagacgatcaaattcctactgccttcgatccttttgctgatgcaaatgctgatgactcgggtgctgggtcaaaggagtatgtgcatattcgtgtacagcagcgaaatggtaggaaaancctgacaacc

SEQ ID NO: 43647 - DNA, 281 bp, Glycine max
  Clone ID: 701127353H1
gctggcataacttcaacaacttattctttgttctcgatctcacgatggctcatttggccctgtctcagcagatggctgtaactgttcctgttggcagcgatttgtctctcagaagatctgcggttaaggcacctaactttaacttttgggataaatcatgggcaccagtatttactttgtacttgaaggcaaacaactcaagtttaagaagtcgtcatgtggtattcatgtcagtgcaacaagcaagtgtacccaaagttaatgtatcacctttagagttg

SEQ ID NO: 43648 - DNA, 279 bp, Glycine max
  Clone ID: 701127354H1
gtccaaaccctcctaagccttttgttggaggatcattggcagcattggacaatgctttcatttgggcacaaaaccatgggatgaaagtgatcatagacttgcatgcagctgaaggttcacaaaatggcaatgaccacagtggcacaagagatggatatacagaatggggagattcatacataccaaacacagtccaagtcatagacttcttagccgaaagatatggtaataggccaaacttaggaggaatagagctgatgaatgagccacaaggtgtga

SEQ ID NO: 43649 - DNA, 256 bp, Glycine max
  Clone ID: 701127355H1
ccttaaaagaaaatgccttcaccagtgcagccaagtcactctccatcatctgctgaaggtgagaaacatgcacgcaagcaattggatagagagattagggacatggtctctgccatcactgacagggtcacagattttcacaaaccaggctcaaccaaccatatggagaatgatggtgaacatggtttgagcatggtcacccttgtaggaaacaacaacggcgccactatgaaaagtgattcgacgaaaaatcagg

SEQ ID NO: 43650 - DNA, 279 bp, Glycine max
  Clone ID: 701127358H1
gcaaagtgcaaggcgaaagcaataacagtagcaccccggtagatgagtcacagtttagcttgctaaatgttctaataaatgaagtaggaaagggaaaagcagatgacaactttctgagagacacagcaataaatctccttgcagctgggagagacaccattagttcaggtctcagttggtttttctggctggtggcaacacacccatctgtagaatctaagattcttgaagagatccgaaaaaatttaccagcaagagaaggtattggaagatttaggc

SEQ ID NO: 43651 - DNA, 254 bp, Glycine max
  unsure (1)..(254): unsure at all n locations; Clone ID: 701127359H1
gaaattcccaatnnncccttcccaattttacaccanaacannaatactcccacaccaatcttanatcatggacgccgattcacaacctcaacaactgcgaagagagaacagaggagcaagaactgaagtacctggaattcgtgcaattcgcgaccatacaggctctgatgcgctgcgccatcctctactcatacgccaaggagcgcgcgggtcctctgaagcccggtgtcgacaccgtggaggaggcctgaaga

SEQ ID NO: 43652 - DNA, 281 bp, Glycine max
  unsure (1)..(281): unsure at all n locations; Clone ID: 701127360H1
gttgctgaagagagttaaataaagaccaggaatttcactgccagaaacgttcaatattatggagattgaagccgacgcaagagatagttctctcgttctgctcaagcaaggagctgaagctagggtttttgagtcttcttttgtgggaaggacatctgttgtcaaggaacgcttctcaaagaagtacagggcatccaactttggattcaaaattgaccctcaagcgcttaaatgcgagncacggtgctgaccanngcaaggngacttggggttggtntcng

SEQ ID NO: 43653 - DNA, 284 bp, Glycine max
  unsure (1)..(284): unsure at all n locations; Clone ID: 701127361H1
attgaatttccatgatcagtggggtggttagaacttagaagagaagagaactagagaagtgattttttgcaaagacaaagcgagggttctattgtnttgttgagaattcaattcaaagcttttgatttgatgatcataacataaccccatgagagatatttgtaggancttccagcgaggcagctgtcatatggaganaggtgtagatatttacatgttcagccacagcgaaaacctaatgttaatgggttggaggtcagagcagttctatcaacagcaaaata

SEQ ID NO: 43654 - DNA, 295 bp, Glycine max
  Clone ID: 701127363H1
ggggacagcaagagcaagattctgttcatcggagggactggttacatcggaaaattcatcgtggaagccagcgccaaagctggccacccaactttccttttggtgagggagtccactctctccaaccccgcaaaatcacccctcatcgacaatttcaaaggcctcggtgtcaatcttgttttaggagatctatacgatcaccaaagtttggtgagtgctataaagcaggtcgatgtggtaatttctactgtaggacacctggcagctagctgatcaagataagatcatttctgca

SEQ ID NO: 43655 - DNA, 85 bp, Glycine max
  unsure (1)..(85): unsure at all n locations; Clone ID: 701127364H1
ccgaatttcanagtngttgctccacgagagagaggcttagaagcagnnttgtngtaccgngcgagagnnnccaaangggcaagct

SEQ ID NO: 43656 - DNA, 290 bp, Glycine max
  unsure (1)..(290): unsure at all n locations; Clone ID: 701127365H1
gnaaattcgtcatcatagagatttctgaagaaatcttggtagatacaatacaagtagctaattttgagcaccattcttccaatttaaaagcttttgaacttcttggcagtctgagctttccaacagatgtttgggttttctttgggaatttcactgcctcaaatgttaggcatgctcagaggtttgttcttcaggagccaaaatgggtgagatacctaaaattgaatcttcaaagtcactatggttctgaatttattgcacactangcgcattgaagtttatggtgtgga

SEQ ID NO: 43657 - DNA, 282 bp, Glycine max
  unsure (1)..(282): unsure at all n locations; Clone ID: 701127367H1
aactgaccccagagatcttctctttacgtgctcatgtgaggacccaattcttcttctccttcttccggtgcttggatctgcanttttcggtgttttctttcattctcgcaagcgaactcggtcacgggttaattccaattttgcgcgctggtttttcccgcacgacaaaaagctttcgggaagtatttgttgggtggtcgaaggtcgagaaaggttctagattgangtggctttggttcgtttnantcctgaaggggtttgtttgtncnganaacnnacaat

SEQ ID NO: 43658 - DNA, 251 bp, Glycine max
  unsure (1)..(251): unsure at all n locations; Clone ID: 701127368H1
atgctattcttagccnttncnncnatctgcnatgcnttcattannngttgtncnttgnntgtnatcccagantcnctaggnatttccacgtattcctccnattctgggattncnttcnatgaacnaccnttaatgaaagcattgcngattgctganaaggctagggatggctattcttagcgggaaatttgatgcaggtacgggtcanccttncaaatggtgacntggtgggggcatgcntccgacattga

SEQ ID NO: 43659 - DNA, 275 bp, Glycine max
  unsure (1)..(275): unsure at all n locations; Clone ID: 701127369H1
ctggggggcaaaaggggtcacttttcagatccgagattgagctcctttacccatcatcatcatggagctcctcgggtacctgaatcagggtcacncttctagaggaacaacacttgntattactctntcattggtgctntcgacanttgtgtcctnctccantttcacanatgncttctcttcttcngcgtntccggaactgnatcctntaaancctaggcatcacgtcttctcaggagngccgtgaaanatganactctacatnacagntnctg

SEQ ID NO: 43660 - DNA, 277 bp, Glycine max
  unsure (1)..(277): unsure at all n locations; Clone ID: 701127370H1
gaacagccaacacatgtatggtagggagttccaatcgatgttggacggactcgacgaggaagggtgtgttgaagaaccggggtatcaatctgagaagaagcgtcgtctaagtgtggatcaagtgaaggctttggagaagaactttgaggttgaaaacaagcttgaacctgagaggaaggtgaagcttgcccaagaacttgggttgcaacctagacaggtagccgtatggttccaaaaccgtcgagccanatggnaaaaccaancattgggngagggt

SEQ ID NO: 43661 - DNA, 274 bp, Glycine max
  unsure (1)..(274): unsure at all n locations; Clone ID: 701127371H1
tcgctcttcccttcctctggtggcgacaatgtcgactcctgctangaagaggctgatgagagacttcaagaggctgcaacaagacccgcctgcagggatcagtggtgccccccaggataacaacataatgctgtggaatgctgtcatatttggtcctgatgatactccatgggatggaggcacttcaagttgacactccantttactgaggactatccaaataaaccaccgactgtacgntttgtgtctcgcatgtttcatccaaatatttatg

SEQ ID NO: 43662 - DNA, 276 bp, Glycine max
  unsure (1)..(276): unsure at all n locations; Clone ID: 701127372H1
aaactgcttacaaggaagccattgaagagtatcgtgctgtttcacaagctcggatggnaaaatgttccaatcttaattcaaagagtgttcttgaagttcttcctcgacgacagataaacaactattttgttcagttccgcaagatagcaaaccatcccttggttantaaggcgantctacaatgatgaggatgtcattcgctttgcgaganagctacntcnaataggtgcttttggttttgaaggtantttggacagggttatgggggggcttaaa

SEQ ID NO: 43663 - DNA, 273 bp, Glycine max
  unsure (1)..(273): unsure at all n locations; Clone ID: 701127373H1
atatttctccgttttttgcatcatgggtttttccctcaaaatgggttcttttgagatgatgagttggtgagtactgtggtatttattttnggttttggcttcaatttggactgcatgaaatggnttctcttgtgagnaagtnaaggccnncgtctgtgccgactgttacggtggaaagngaaggtagcttaggcagctatnagtactnccttgctgtggtgtagaatggcnctcctcnnanttactcnatnctgcaaatcctgntgnaaaggg

SEQ ID NO: 43664 - DNA, 277 bp, Glycine max
  Clone ID: 701127374H1
atggaggggaaggagcaggatgtgtcgttgggagcgaacaagttccccgagagacagccaattgggacggcggcgcagagccaagacgacggcaaggactaccaggagccggcgccggcgccgctggttgacccgacggagtttacgtcatggtcgttttacagagcagggatagcagagtttgtggccacttttctgtttctctacatcactgtcttaaccgttatgggagtcgccggggctaatctaagtgtagtaccgttgggattcaaggaat

SEQ ID NO: 43665 - DNA, 281 bp, Glycine max
  unsure (1)..(281): unsure at all n locations; Clone ID: 701127375H1
atctggatgggaaccccataaagcccatcaccatttgcatgattggcgccggtggcttcattgggtcccacctctgcgagaagctcatgtcggagacccctcacagtgtcctcgccttggatgtctacaatgacaagatcaaacacctcttggaaccccacacgctcccttgggcctctcgcatccagttccatcgcctcaacatcaagcacgattcccgtctcgaaggcctcatcaaaatgtcagatctgactattaatctgggctgcnatttgcactcc

SEQ ID NO: 43666 - DNA, 286 bp, Glycine max
  unsure (1)..(286): unsure at all n locations; Clone ID: 701127376H1
ctataaagtacgtgaaacaactggcaaganagggtaaagactctggacgaacaagctgtggataaaacagttgaatcagcagttttngtgaagnnatctgttgtgtnttgccggcgttgatngctcctcctccgacgaaaactccgnccaattcgctccccgaaatggnagcaagaatttctggtaaagaggtagtaatcngnattcactgcgacaaanacagtggaggtagctgctgctatncnnaggganttacnagaagcattntctcacagttcagagtagc

SEQ ID NO: 43667 - DNA, 285 bp, Glycine max
  Clone ID: 701127377H1
tagggtttcgcaagtgcgatccaagaagaacaacgacgatggcgatggctgcagctctgcgtcgcgaaggaaggcgtttgacccaaccaatcaacgccctccactcttctctcaattcctccctcatctctcaagaccaagcccctcatggcgcgcgctccatttccactcaagttgtgaggaaccgaatgaagagtgtgaggaatatccagaagatcaccaaggccatgaagatggttgccgcgtccaagctgcgggccgttcagaccagaactgaaattcccg

SEQ ID NO: 43668 - DNA, 288 bp, Glycine max
  unsure (1)..(288): unsure at all n locations; Clone ID: 701127378H1
ccccatttcctcacctccttcaaccgctgctaaattctagggttccgaaatggacgctggcggaaagatcaagaagggcgccggaggtagaaagggcggcggcccaaagaagaagccggtttcaaggtccgtcaaagccggtctccaattccccgtcggaagaattggccgttatttgaagaaaggaaggtacgctcagcgtgtcggtaccggtgctcccngtatacttggctgaagtttctngnatccnngnctgcccgggttntggantnggncggaantncnccc

SEQ ID NO: 43669 - DNA, 226 bp, Glycine max
  unsure (1)..(226): unsure at all n locations; Clone ID: 701127379H1
cctgctatcttgggaagggcttctcccatcgcaaattgtctcccagttatcacatttcacanaaccattgacgagtcctntgcagttatcttcgntgcgggtagnacgggaagnnngtgtacatgggntatcgttttgnccagacanttagntnttccttcgnattgggncaggacttgggtngtntngtcaagactatggccaggtttaanngtttcgnngaggt

SEQ ID NO: 43670 - DNA, 92 bp, Glycine max
  unsure (1)..(92): unsure at all n locations; Clone ID: 701127380H1
gttgtntccatgccagncaaggataaactcaatggagttnggtatagctggtgtataggnaaccagcttctnatgagtgttatgagaaacgt

SEQ ID NO: 43671 - DNA, 286 bp, Glycine max
  Clone ID: 701127381H1
ataacaatgagtattctcttcccaagaagttcctcagcagcaaagaggaaaagggtcattagagaacttgttcagggtcgagactatgctactcagttgaagtttctgcttcagaagcctattggccctgatgggtctgtttctgctaaggaacttgtggccaatgtgctgagatctttcgctgaaactctctctgtgttgacttcttcttccgaggattcaacaagtggtcatgatcatgacgacgaggttattgctcagaatctgtaatttccggagaagatgc

SEQ ID NO: 43672 - DNA, 286 bp, Glycine max
  unsure (1)..(286): unsure at all n locations; Clone ID: 701127382H1
aaaaaatatgggttaacatttatgaaaatgtgaaggaagtggattgaataganaattccaaaacttattgcattacaaaacattaaaaaatagacttctggtattttataacatctttggtgttcaagtcatagatcttgcaaatgtttacgatagcatgttgactangaccttctagagcggacnaggattatctagtncctttggagggcntgcaacncccaacanggtgcatggnnaactctgnaacctcggnntttncagtctcnngtcannttaacatcgt

SEQ ID NO: 43673 - DNA, 283 bp, Glycine max
  unsure (1)..(283): unsure at all n locations; Clone ID: 701127383H1
gcttaaggagtttccagtgacggaagatgcactacttcctgtgggaacatcacttaatgttcgccattttgttccaggccagtatgttgatatcacaggaataacaaaaggaaaaggttttcagggtgtgatgaagcggcatggatttagtggagggccagcatcccatggtaattcattgggcccatgcgaacacttggttctgtaggtcatttaactagttcatgggaaaggtttttaaaaataaaaagatgcctggggcgaatgggtggaaancaaagat

SEQ ID NO: 43674 - DNA, 281 bp, Glycine max
  unsure (1)..(281): unsure at all n locations; Clone ID: 701127384H1
atatatttnncngctgacaccgagaaggaaagcaggaaaaaaacaaaaaggagcagatgggtagctcaggtttctcatggaaattggcggatcatccaaagcttccaaagggtaagactgtggctgttgtggtattggatggttggggagaggccacacccaatgagtacaactgcatccacanggctgaaacaccctgncatggattcacttaaaaagggtgctcctgaacggtggagattggtccagggctcatggtactgctgtacgacttcnaacag

SEQ ID NO: 43675 - DNA, 277 bp, Glycine max
  unsure (1)..(277): unsure at all n locations; Clone ID: 701127385H1
gttcttcttcttctatgtggacggtgtgtgtgattttggcatcactggcctctgcagcactctgtgccaacccacgcaggccagtggatgtacaatttggccgaaactacgtgcccacatgggcctttgatcacatcaaatatttcaatggtggttctgacattcagcttcatcttgacaagtacactggtantggcttccagtccaaagggtcttacttgtttggtcacttcagcatgtacataaagatggttcctggagattctgctggcacagt

SEQ ID NO: 43676 - DNA, 324 bp, Glycine max
  unsure (1)..(324): unsure at all n locations; Clone ID: 701127386H1
atatgcttgtctcaaagattaagccatgcatgtgtaagtatgaactaattcagactgtgaaactgcgaatggctcattaaatcagttatagtttgtttgatggtatcttctaactcggataaccgtagtaattctagaggctaataacgtggcaacaaaaccccgnacttgctgggaaggggatggcattttatttaggattaaaaaggttcaaacaccaggggctctggcctggttggcttttggatggatttccatggantaaacttcgttcgggattcggcaacgggccttttggtggncngggcgaacggcattccattt

SEQ ID NO: 43677 - DNA, 275 bp, Glycine max
  unsure (1)..(275): unsure at all n locations; Clone ID: 701127387H1
gtggctagaaccatccctggcaaaacctatgtgctctcattctctgttggggatgcaagcaactcatgtgaagggtccatgattgtggaagcctttgcaggaaaagacaccatcaaggtgccctatgagtccaaaggcaaaggagggttcaaacgtgcagcactcaagtttgtggctgttacccctagaacangaatcatgttnccttagcacattctacaccatgagaagtgatgacttttcttcactctgtgggcctgtgattgatgatgtca

SEQ ID NO: 43678 - DNA, 334 bp, Glycine max
  unsure (1)..(334): unsure at all n locations; Clone ID: 701127388H1
attaagacccttgagctatcgaggagctgatgtcttcatacttgccttttctctcataagcaaggctagctatgaaaatattgcaaagaaggttgatttcttcggttccaagaattcaatgtagggatggtaattatttnnaatcgntttcttgcanctttagtatattataaactgnatggaanattcattggctctgtttngattntcttgcttgtncagtngggantcccctggagaactnaagggcattnaatggncccctggngtngtttcccaatgaaatgtnctccgtgtggggnaancannctgtttaanggtaaggggtgttgna

SEQ ID NO: 43679 - DNA, 222 bp, Glycine max
  unsure (1)..(222): unsure at all n locations; Clone ID: 701127389H1
gattgatcccttgccatcttatgganngagggagggacacaannggtggaaggtttagcagactgatttttggaancancctcacngatgtnntcataactngggacaatggcanaatagatgggcgaaggtgntctgtggtggcaaaaattccanaaggggtgagctcangtncncccgtcnttnccngtgntgagantntgncgctcagntgattngcng

SEQ ID NO: 43680 - DNA, 277 bp, Glycine max
  unsure (1)..(277): unsure at all n locations; Clone ID: 701127390H1
ggacagttgggtatatagctccagaagtgtggaacagaaactttggaggggtgtcatataagtctgatgtctatagttatggantgatgattttggnaatggtcggaggaaggcaaagtatcagtattgaagcaagtcattcaagtgagacatattttcctgattggatatacaagcatgttgagttgggaagcaatttagcatgggatgaaggtatgaccacagatgaaaatganatttgtaagaaaatgatattgtgggattgtggtgcatacaa

SEQ ID NO: 43681 - DNA, 281 bp, Glycine max
  Clone ID: 701127391H1
cttctactgcctctctctagctagttccttcttcttcttcaaagattctgtactatataaaatcaaaggaagaaaagaggcctaattaagtagctttcagttgtggaatcatcatattgcagcgttgatggggcatttttcatctgcgttcaataggttggcaaagtcttttgcaacgaagaaagggaggagttctgatgaatgtaatggaagagaagcggcggtagcaatggcaaaggaagccaaaagaaatcacttcatgttgcatagctccggcacat

SEQ ID NO: 43682 - DNA, 282 bp, Glycine max
  unsure (1)..(282): unsure at all n locations; Clone ID: 701127392H1
tttcttgtgttttcattctgttctaaaatcaaaaaccctaaccaagaaagttttcaccgcatctccacctattctcaatctccacaaatcgaaganaagagaatgagtagacgctngagcagaactgtctacgttgggaatctacctggtgatatccgtgaaagagaagttgaagattngtttctgaagtatggacacataacacacattgacctaaaggttcccccaagaccacctggttatgcatttgtagagtttgaagatgctcaagatgctgaggat

SEQ ID NO: 43683 - DNA, 286 bp, Glycine max
  unsure (1)..(286): unsure at all n locations; Clone ID: 701127393H1
cacaacgaaactcacagaagaaagaagaaaaagaagcgagactanagtcagcattcgaaaaagatgagtagcatcggtacaggttacgatctatcggtcaccantttctcccctgatggccgngttttccagatcgagtatgccgctaaagccgtcgacaacagcgggactgttattgggntcaagtgcaaagatggggttgtgttgggcgttgagaagcttattccgtcgaaaatgaggcttccgggttccaatagaagagtacactccgtnnnatcgtcattcg

SEQ ID NO: 43684 - DNA, 286 bp, Glycine max
  unsure (1)..(286): unsure at all n locations; Clone ID: 701127394H1
aagtcagcgttaagggtttagtttggcgcgtgcgatgaagatcgaggaattggacgatggagagtgtagtagggaccatgaagagaagtttgagaggcagattgtgagcgttgatgccaagagagcgttggttggagcaggtgctcggatcctgttctatcccacactctgtataatgtgcttcgtaacaagattgaagctgagttcaggtcncngggatcaaattgacgagtttttgttactgggcgctgttccgttccccaaagacgttcctcacttgaagnag

SEQ ID NO: 43685 - DNA, 285 bp, Glycine max
  Clone ID: 701127395H1
cacggcttgcattacatgcaccaaccaccctcttaaaacaggatgcaccaacaaccacgtgtggtgtagatccattcaaccccttcggcgagttcttcgtgagtggagacgtgggtgaagacatcttgtcctcgctgcactcaacaagcggtgcacgagcacctttccactttgcacgtgccacgctttcgtttctacatgtgtgtacccagataaatttggggttgagggctttctccagggcctggctaatggcaagaaaggagttttaggcttgcaaggatg

SEQ ID NO: 43686 - DNA, 241 bp, Glycine max
  unsure (1)..(241): unsure at all n locations; Clone ID: 701127402H1
gngtggaatggctttactacattcangcaggcattcaatgcnggtgatttattacaatatncagaattatgtcgggtgcataatgctgctttaagagcccaaccagcactagttcaaaatgagcaaaagttgtcggaaaagatcaacattctgtgtttgatggagattatattcagtcggccttcggaagatcgaactattcccttgagtgtattgcagagcgtacaaagctttctataga

SEQ ID NO: 43687 - DNA, 145 bp, Glycine max
  Clone ID: 701127403H1
tgggaaacccaaacaatgaggttacagttaggcagcttgctgaaatgatgactcaggtttattcaaaggtaagtggagaagcacctctggaaaaacctactattgatgtgagctccaaagaattttatggtgagggatatgatga

SEQ ID NO: 43688 - DNA, 259 bp, Glycine max
  Clone ID: 701127404H1
acaatacaaacaatggcagctactcaggaagatgtgaagcttttgggtattgtgggaagcccatttgtgtgcagggtccagattgcccttaagttgaagggagttgaatacaaatttttggaagaaaatttgggcaacaagagtgatttgcttctcaaatacaaccctgttcacaagaaggttccagtgtttgttcacaatgagcagcccatagcagagtctcttgtgattgttgaatacattgatgagacatggaaga

SEQ ID NO: 43689 - DNA, 261 bp, Glycine max
  unsure (1)..(261): unsure at all n locations; Clone ID: 701127405H1
aaaaccctagttcatccatcaccagtcgaggaagaagatggtgaagttccttaagccccaacaaggctgtcatcgtcctgcagggccgctacgccgggcgcaaggcggtgatcgtgaggnccttcgacgagggaaccagggagcgcccctacggccactgcctcgtcgccggaatcaagaagtaccccagcaaggtcatcaagaaggactccgccaagaagacggccaagaaatctagggttaaggcgttcgtgaagctct

SEQ ID NO: 43690 - DNA, 261 bp, Glycine max
  Clone ID: 701127406H1
agcaacctttctactaccaaacctcaaataggtagccctaatcctagtcctccttcgaatggggatctgttccttcaaacaggtcgccaactaaagattcgattgatgggggtgttgatttgaatcaaagagcagtagcagtaccatcactctttgaagaagatgttgaatttgtaggtgtagaattagaaggtactgagaaggctatggaacaggctctgaaagaagggatagttggggaggcaggaccattgaaaagat

SEQ ID NO: 43691 - DNA, 149 bp, Glycine max
  unsure (1)..(149): unsure at all n locations; Clone ID: 701127408H1
gcattggagcagtggaggcattgaaggatcaattgggggtgtgcaggtggaaccatgcattgangtcactgcagcagcatgccaagagcaacattagatcctacactcaggccaaaaccttgtcttctgctacttctgctgctgtctcc

SEQ ID NO: 43692 - DNA, 265 bp, Glycine max
  unsure (1)..(265): unsure at all n locations; Clone ID: 701127409H1
gcctttggttggtctgtagtagatatacaaggtaatatatcatttctgagcattgtgcagccgtggttggtcatttaacaagttttgtagcagtcgatgtcaatattcaaattattggtttgtctccataattgtaatgttaagtcgaaaatagatatgatttagtgaatgaattaagttttgaccccccccannnccccgcccatcaatcccttagcgtcttcagccatggatatcgatgcatcatatgtacacaattcgagaa

SEQ ID NO: 43693 - DNA, 264 bp, Glycine max
  Clone ID: 701127410H1
atttgcatgcactgttcttcatacaatggcattacgcgagcttattgtgatggggttattgctgctggtttgtcttgcaaaggtttcatctgatgttaacatagaaaaggagcaagatgaagaatttcgctttcctgttgaccatcttatcgtgagaggcgggaacagaaggctaatgcaggacatagattgtggaggattgtgcaagacaaggtgcagtgcccattcaaggccaaatgtgtgcaacagggcttgtgggcacat

SEQ ID NO: 43694 - DNA, 265 bp, Glycine max
  Clone ID: 701127411H1
agctaaagcaccaaagaaagcttgtgaggagcttgaaaaagaagtctctttggtccagaactttgggaagagatagttgaaaagcttgtagatattgttacctatatacatcaagcaatttatgagttcgctggaaatcatggtatgagattgtatcccttatgaatcaaaaaccaatgctgtacataatatagctgtagcatatgcaactcttcatgcactaggagtccaggaattaacttagggttggaagtctgaacttgtt

SEQ ID NO: 43695 - DNA, 259 bp, Glycine max
  unsure (1)..(259): unsure at all n locations; Clone ID: 701127412H1
catgcatgtgtaagtatgaactaattcagactgtgaaactgcgaatggctcattaaatcagttatagtttgtttgatggtatctactactcggataaccgtagtaattctagagctaatacgtgcaacaaaccccgacttctggaagggatgcatttattagataaaaggtcaacacaggctctgcctgttgctttgatgattcatgataactnnnnnngatcgcacggcctttgtgccggcgacgcatcattcaaatt

SEQ ID NO: 43696 - DNA, 258 bp, Glycine max
  Clone ID: 701127413H1
aaaaaaacttgttacgatggtttcttccgacaaggatccacgagaggaagtccttcaagcatggtacatggatgatagtgatgaagatcaaagactcccccaccacaaagaacccaaggagtttgtctcgttggaccaacttgctgaacttggagtccttagctggaaattagatgctgataaccatgaaaatgatccagagctgaaaaagattcgtgaagagcgtggctacacctacatggatgtttgtgaggtctg

SEQ ID NO: 43697 - DNA, 258 bp, Glycine max
  unsure (1)..(258): unsure at all n locations; Clone ID: 701127414H1
atcggcatcaactacggcacgctcggcgacaaccttccaccgcccgcngcgtggcgaacttcctgaagacgaagacgaccatcgaccgcgtgaagatctacgacgtgaacccggacatcctgcgggccttcgccggcagcggcatcnccgtgacggtgaccgcccccaacggcgacatcgccgccttaaccaaaatcgactcggcgaggcagtgggtggcgacgcacatcaaaccctttcaccctcagaccaaaatta

SEQ ID NO: 43698 - DNA, 169 bp, Glycine max
  Clone ID: 701127415H1
cttgggtaggcctggtggtattgctgtgtttgattgtcacggccatcgccgaacaatgcggtcgtcaagctggcgggcagacatgtcccaacaacctatgctgcagccagtacggttggtgtggaaacaccgaagaatactgttccccttctaagaactgccagagcaa

SEQ ID NO: 43699 - DNA, 145 bp, Glycine max
  unsure (1)..(145): unsure at all n locations; Clone ID: 701127417H1
agaatttcccaaatntctccactaccctatctccnttgctcctgaaactnncacangcttcacnaggaaatgcacgatacttcaatacgaatgcagttcgatatttgatatcggagtatcggtgtttgaggggtgaatggaattg

SEQ ID NO: 43700 - DNA, 148 bp, Glycine max
  unsure (1)..(148): unsure at all n locations; Clone ID: 701127418H1
ggaaaacccaccgcaaccttcgcggtttgcgattccgcttccggttccaccgtggctcctcttacacacgtattcaactattcaattttnntccttaacgtttaccgttttcttggaacacgttcccaattttttcccccaattgtga

SEQ ID NO: 43701 - DNA, 125 bp, Glycine max
  Clone ID: 701127419H1
aattgatgtgccattgttcgagcattcttcttccgccggagaatcctaaacacgacgtgtaccgctttctctaaagtacgctctcgttgttctcaaccaaagcctaccgagatttgctcctctgc

SEQ ID NO: 43702 - DNA, 259 bp, Glycine max
  unsure (1)..(259): unsure at all n locations; Clone ID: 701127420H1
gtctttnaccgtgtcgacacggttcttcaattcaatcaaatcttgtttctatggaaggaaattgggtgtttgattcattatcaaggtttntcatcagctaccagcacttcacattctacccagttttgtgctttgcaagggtcaatttgtacctccagactttgttgctgttgttctctaggagaaaggtgccagatagagcctttaacataatggggatccttgtgttttgggtttggttccctctgttgatctcttc

SEQ ID NO: 43703 - DNA, 262 bp, Glycine max
  Clone ID: 701127421H1
ccaaaatccaagagaaatagacaagttacgctttcaaagacgaagaaaaagggaagagacccacaaagagacgatagtgaacggaataaaagatgctgcagaaaagtacgggcacgtgtacgtgttctcgttcgagaacatgaggaatcagaaattcaaggagttcagggaccagttgaaatcgagtagcaggttctttctcggctctaacaaagtaatgcaagttgctttaggtcgctctgcttcggatgagatcagaccc

SEQ ID NO: 43704 - DNA, 263 bp, Glycine max
  Clone ID: 701127422H1
aatttcccctccaatttcccatttatgatccatttggcatttcatcatatttcaccacttgtccttactccacttggatgatttcctaacgtattgttttcacaaatccttgttcttcatcagctaatagtttgagtccaacgaattcagcaacactatagatatatgctatatcttcctttccctatacattttccttccaaagtatctctagttctctacaaatcaacgtggcacattttttagcctaagaaaagctttag

SEQ ID NO: 43705 - DNA, 147 bp, Glycine max
  Clone ID: 701127423H1
aaaaaaaacactgcacaaaacaatggctttgaatttgattcatcgaccagccactaaaccaccatcttcctcctcctctttcgtcacccctcgccctttgcggaccacacagagcatccctgtgaggaactcgcggcgctccatcgc

SEQ ID NO: 43706 - DNA, 263 bp, Glycine max
  unsure (1)..(263): unsure at all n locations; Clone ID: 701127424H1
caaaacttgctctacaatgagtttccttcgttcttttgcaagaaacaaggatatatcaaaagtaggacgcagaggtatccattgcatgcagaaactatgtgcagaaaaaatatctcctgattcactagagaaggcccaaaatcgtgtgatagatgctgcactcacacttgttcgagaaaatacaaggcttaagaaagaacttgtgcatagtttgggaggtgctgtagcaacttcaactcttcttggagtccttngggcanaat

SEQ ID NO: 43707 - DNA, 147 bp, Glycine max
  Clone ID: 701127425H1
ggcgaacagagagacccgaagccagatttcaagatgaagttcaacattgcgaatcccaccactggttgtcagaagaagctggagatcgatgatgacctgaagctacgagcattttgggacaagaggatctcacaagaggttgttggt

SEQ ID NO: 43708 - DNA, 262 bp, Glycine max
  unsure (1)..(262): unsure at all n locations; Clone ID: 701127426H1
gtcaaggctcagaaatcaaaagcctacttcaagagatatcaagtcaagttcaagagaagaagagagggaaaaaccgattaccgtgccaggattcggttgattaatcaggacaagaacaaatataacactccgaaataccgatttgtggttcgctttagcaacaaggacattgttgcacaaataatatctgctagcattgccggcgatttagttcttgctacgcatattcacatgagctgccacgatatggtctggagtangg

SEQ ID NO: 43709 - DNA, 242 bp, Glycine max
  unsure (1)..(242): unsure at all n locations; Clone ID: 701127427H1
aatattctgacatccgccaccgcaacgtgtcaacctaattacggattccacagtcttcttcnttcttcagctccacgcgccctctttccctttcctgtttctagctgttaccgacgtcaattgttactccgattatttattcttatttattttccccatctcactctccttcgattcgggatcactcacaacacaagtactactaccttggaatcaatttttagggtttctgattcctttat

SEQ ID NO: 43710 - DNA, 255 bp, Glycine max
  Clone ID: 701127428H1
tatggtagtgccatcaccgggagccaactacacactcacatggaatgaattatagaacccaaacccacaccattcacagatctcaaggatctcacaatttcctttttttcccttcaataataaagttttgctctttttggtcttctgagtgctcactcctcttgcttggattcaaattctccattttccaacttggttttgtggtggcaaagaaagaagcaattttggcatctgggttctgtttggtttgatgtt

SEQ ID NO: 43711 - DNA, 258 bp, Glycine max
  unsure (1)..(258): unsure at all n locations; Clone ID: 701127429H1
aactttggacaaaaaatggagtgctacacaaggccaaacaggagtgacatccacctcttcagcagaggaagaagccaccatagaagcaaagaccagagagtactttgatggagtcgcaccacaacgccacacaaagcctcangngaagtgactattcagctcaatatgtcgatnctttctccaatgcncatcactcttctttaactataccagnattancanaattccaactcctccagaatgntccccaagagaaga

SEQ ID NO: 43712 - DNA, 142 bp, Glycine max
  unsure (1)..(142): unsure at all n locations; Clone ID: 701127430H1
cacaaaggtggacatctctggtgttaatgttgataaatttgatgacaagtactttgccaaggaagccaagaaaaaganaacaaagggcgaaggcgagttcttcgaggcagagaaggaggagaaaaatgtgcttccccaagaa

SEQ ID NO: 43713 - DNA, 257 bp, Glycine max
  Clone ID: 701127431H1
ccccccacaactactgggagagaaaaaaggaaggaaattttgctattttctgagactcttgattttattttatttttatattttttctgctctgaagaagaaagatggaaatgatggcataccagtttactcggttaccttactcggattccctcaaactgctcgaggctgatatacagcatgcaaatgctttggctgctgcaattcccagagccaagggtgggactcttctccaaatgaaattggtttacaaccac

SEQ ID NO: 43714 - DNA, 259 bp, Glycine max
  unsure (1)..(259): unsure at all n locations; Clone ID: 701127433H1
caaacccaacgccacaaagaaagtcatatcgaggacgcttaagcttttccttttgggactgtnacntcaaggtgggtatttccatggnccacggcaaattaacgtatggagttgatttgagcaagatacgctggcttggcgtacttcaggatgttttntatcttactttgctcagtgtacctttgtttgctctacggtctttatgttccgaattggaaattcaaacattctaatttgctttcgtccagtgactccagtt

SEQ ID NO: 43715 - DNA, 143 bp, Glycine max
  Clone ID: 701127435H1
cgaccggttcgaagctctactcactcaaatcctcttcagatctggggggtttgattgcaattctcactctggctgctcggatttgttcgtttgaaatgtcgattttaccgaaaggcgattcggttcaaatcagggaggtttgg

SEQ ID NO: 43716 - DNA, 258 bp, Glycine max
  Clone ID: 701127436H1
ctaaactcatacactgatcatgggagtggatttaagacaagtggtggcgggtgtcctcaccctcacaatgttcgttcatgcttatacacatgatcaaaagagaccattttgatgctgttgatgataaacttcctggaacggaggatgtcagctttgaaagtacaaactttgatactactcatgttagaaagaacatcgggatttggaagggagatggtgatgagttaaaaccatgttggcttaagccatctgaagata

SEQ ID NO: 43717 - DNA, 254 bp, Glycine max
  unsure (1)..(254): unsure at all n locations; Clone ID: 701127437H1
gcaagtatggggatggactactatgggattttggaggttgacaggaatgcctcagatgaagagttgaagagagcctacagaaagcttgcaatgaaatggcaccctgacaagaacccaaccaataagaaagaggctgagattcaattcaaacagatatctgaatcctacgaggttcttagtgatccccagaagagagcaatttttgatcggtatggagaaggtggccttaatggtggatgcaacaccggatgang

SEQ ID NO: 43718 - DNA, 260 bp, Glycine max
  unsure (1)..(260): unsure at all n locations; Clone ID: 701127438H1
gagaatatgaagttgtttgttttctttgttgctgcagtagttttggtagcatggccatgccatgggcgcaggctaccaaaggttccctctccgaatgaaaactggctatggtgagcgttcttcggaggtaaaatgcgcaagttttaggcttgctgtggaagcacacaacatccgagcntttaaaaccattcctgaagagtgcgttgaaccaacaaaggactacattaatggcgaacaatttagatcagactctaaaacag

SEQ ID NO: 43719 - DNA, 253 bp, Glycine max
  unsure (1)..(253): unsure at all n locations; Clone ID: 701127441H1
cttagctttcaattcattttctccattaccccaaaatttgggctcttttttaaccttttctaatctaatccnnnnnnnnnnnnnnnnnnnnataaataacaagaacatcagcagccatgtccttgaagtttgcacctttctgacacacccagattctcccaatttgggttgggcaccatggaaactggaagaatccagggacttggggatttcgctctttatccaaagtcgttttgtgcaccatttctggggc

SEQ ID NO: 43720 - DNA, 262 bp, Glycine max
  Clone ID: 701127442H1
atcttcctcttgctcctcccgttcctgttcctgtgaagaatagctcctccatatagttttatgaaacaatacagttgcagaagttccaacataaatggtgatcatcactcgcagttctgctggtagaaaaccaagtgaaattatgaagtttttcttgacaacttttattggtatagttttcggattctttataggagtatcaattccaacattgtcaataacaaagttgaatctcccatctggcctgttccctccattgatt

SEQ ID NO: 43721 - DNA, 262 bp, Glycine max
  Clone ID: 701127443H1
atggcttctctagcaaccttgggctgctgttcaaccagctacgatcaatggccttgctggaagtttcccctctctggaactaagctctctttcaagccctctcgccacagtgtcaaatccaagaacttcaggagtggtgccgtggtagcaaagtatggtgacaagagtgtgtactttgatttggaggatctgggcaacactacagggcagtgggacttgtatggctcagatgcaccttcaccctacaaccctcttcagagca

SEQ ID NO: 43722 - DNA, 255 bp, Glycine max
  Clone ID: 701127444H1
ataggttcccaataagaaagaagagtcatcacaaggaaaaaggggaaagaaaagatgccttgcctttacatctccaccaacataaacttagatggagttaacatcgatccaatcttttctcaagccaccactgcagtttccacaatcatcggcaaaccagagaagtttgtgatggtcatattgaaggggtcagtgccaatatcttttgagggtaacaaagaaccagctgcatatgctgagatagtttcaatgggt

SEQ ID NO: 43723 - DNA, 254 bp, Glycine max
  unsure (1)..(254): unsure at all n locations; Clone ID: 701127445H1
cacaatccattattggatcgccattgcaactttctgttttttattcttttcagcagctatccaaacaaaacaggttcctcgttgactgagtgtgtcaggtcggaacagtgagtagagaataagctatgcagttcaatatcacatcacaattccttcatatcttctctcttancttcttccttatcattacctcttcactttcacaatccaaccagttttgtgatgctgggactgaaattccatcatccaagttg

SEQ ID NO: 43724 - DNA, 252 bp, Glycine max
  Clone ID: 701127446H1
gttgttactgctgctcttttctcttttcttttctctttagttctctcttcccctttctttttcttttcttcttcttctgagcttgtttaagcttttcttccattaacatattatcacaatgtgtggtattcttgctgttcttggttgttctgatgactctcgagccaaaagggtccgcgtgcttgagctctctcgcagattgaagcaccgtggccctgactggagtgggctccatcaacatggtgactgctt

SEQ ID NO: 43725 - DNA, 253 bp, Glycine max
  Clone ID: 701127447H1
gctccacccgaagtggtggcgcgtatggctgcggctaagcaagagtttgaggcacggcaaagatcttcagttggttcaagggaaacttcaaaagaccctgaacttgaccaattcatggaagcatactatgacatgcttgtgaagtatagagaggaattaacaaggcctattcaagaggctatggatttcatgcgaaggatagaaactcagctaaatatgctttgcaatggacccgtgcggatctctctgatga

SEQ ID NO: 43726 - DNA, 255 bp, Glycine max
  Clone ID: 701127448H1
ctctctgtctagggtttcattctttttcagctttatttgttctgtagatccatctagcttcggtgctgcaaatggacgtcgcagtcactgccgttcggtcaccgctgatcgtcctgggaagtccggtcaacgggtccgcctcagctcggttgggttccacttttgggttttccagaaagctatgcttgaattcagtatttatcccgaagcaagttcgtagaagagggtttgttgttagagctgcatcctcatctc

SEQ ID NO: 43727 - DNA, 246 bp, Glycine max
  unsure (1)..(246): unsure at all n locations; Clone ID: 701127449H1
ctctctttgctgcattttccatttgtaaagttgccaaggatgcagctggagtncgcaggccaaagttcagtgatcagttcctaacatgttgtattttaaactgccatcggataggtgagaatgattggattatcgctggcagttcttggcatatttgcaatcatattagttggaagcttgcaaatagatgacattataatgcggcggttctttgtgggattcttgagctgtgcctctctcatttca

SEQ ID NO: 43728 - DNA, 139 bp, Glycine max
  unsure (1)..(139): unsure at all n locations; Clone ID: 701127450H1
gcttcttcaatgatggggcttcttgggagtccacatatggggacttcttcctctcttggtattccaatcagctcatagctcatggagattgcctcctttcattggcatcttcaacttttggtgactctggggtganaat

SEQ ID NO: 43729 - DNA, 232 bp, Glycine max
  unsure (1)..(232): unsure at all n locations; Clone ID: 701127451H1
aaaaaaagagcgacttttgagttacnaagatgactaacttnccattgatcaacttggagaagctcagtggtgaggaaagaaacgataccatggaaaaaattaaagatgcttgtgaaaactggggattctttgagctggtgaatcatggcattcctcatgacatattggacactgtggagaggttgaccaaggngccttacgggaattgcntggaanagnggttcanggatta

SEQ ID NO: 43730 - DNA, 256 bp, Glycine max
  Clone ID: 701127452H1
atccagccacagcacagcactctttgcaacacaacaaaaaaagacaacacagagagaagcggtcttaataaacgctcttctctgaaaaacctgatttcttctcttcttctcttctctttcgtttcgatcttcgatctctgaaaatgagagagtgcatttcaatccacatcggtcaggccggtattcaggtcggaaacgcctgctgggagctctactgcctcgaacacggcattcagcctgatgggcagatgccaag

SEQ ID NO: 43731 - DNA, 256 bp, Glycine max
  Clone ID: 701127453H1
gttcgaaattcccatctttttggatgcacattaattcggcatccctcgaagaagcgcgtttgatctaaaaccataaacctctgtctcgttagatctccttcttccgttctctaaacctctcctccgatccgatctgatccaaaatggcgacgatgacgagcttgattggtctcatcaataagatccaacgagcctgcaccgttttgggagatcacggtggcgagggcttgtcgctctgggaggctcttccctctgt

SEQ ID NO: 43732 - DNA, 255 bp, Glycine max
  Clone ID: 701127454H1
agcaccgtcgcaccttccctgaggcttctcttgtctgtcgcgagtgaccatggtgagggtagtgtgctgaacgatgctctgaagagcatgtacaatgctgagaaaaggggaaagcgccaagtcatgattcggccatcctccaaagtcattatcaaattccttttggtgatgcagaagcacggatacattggagagtttgagtatgttgatgaccacagggctggtaaaatcgtggttgaatgaacggtagactga

SEQ ID NO: 43733 - DNA, 144 bp, Glycine max
  Clone ID: 701127455H1
aaaaaaacttgttacgatggtttcttccgacaaggatccacgagaggaagtccttcaagcatggtacatggatgatagtgatgaagatcaaagactcccccaccacaaagaacccaaggagtttgtctcgttggaccaacttgc

SEQ ID NO: 43734 - DNA, 259 bp, Glycine max
  Clone ID: 701127456H1
tgcaggaactgtaggaaggaagagtcaagcgaggaggatcattgaagcgattgaggttggagtgatgaagaagctgaagacgaaggaagaggagatagagaaaatcggaaaactgaattgggcgttggaagagaaagtgaagcatctctgcatggagaatcaggtgtggcgtaacatagcggaaaccaacgaagccacagcgaatgctctgcggtgtaatttagagcaggttctcgcgcagccggcggaatggcggcgg

SEQ ID NO: 43735 - DNA, 143 bp, Glycine max
  Clone ID: 701127457H1
ataatgttgtcaatagctatagcagtgatggagatctctgcagaattaacaagagtgggtgtttttcgtcagcggcagaggtggatagagacccttcttgtgtttcattcaccactttcaacattctggctccgatttacaaa

SEQ ID NO: 43736 - DNA, 144 bp, Glycine max
  Clone ID: 701127458H1
gaaaaaccctaaaccagaaacactccaaactgaaaaattccatctttctctttcaacgttccctcaaatcaatagcgcattctaagcttcgcgagcaataatttcgattgctttcccaacatgaccgcttccaacaagaaaaac

SEQ ID NO: 43737 - DNA, 252 bp, Glycine max
  Clone ID: 701127460H1
tcaaccttctttcttcttatatatcgaacatggctaagtatcattcaagtgggaaaagctcttccatgactgctatagccttcctgtttatccttctaatcacttatacaggcacaacagatgcacaatccggggtatgttatggaagacttggcaacaacttaccaacccctcaagaagttgtggccctctacaatcaagccaacattcgcaggatgcgaatctacggtccaagcccagaagtcctcgaag

SEQ ID NO: 43738 - DNA, 251 bp, Glycine max
  Clone ID: 701127461H1
taaaccctaatttcggaaagatcggcgatgactgcctccaaggatcgcgagaacttcgtctacatcgccaaactcgccgagcaggccgagcgttacgaagagatggtggaatcaatgaagaacgttgcgaatctcgacgttgaactgacggtggaggagcggaatttgctttctgttgggtacaagaatgtgattggtgctcgcagagcgtcctggaggatcctgtcttccattgagcagaaggaagaaac

SEQ ID NO: 43739 - DNA, 135 bp, Glycine max
  unsure (1)..(135): unsure at all n locations; Clone ID: 701127462H1
tttcntttgangcttctgacactgctccttttctttntctcngtgtnctaatggctctccccgactcttcttcncgcngcaactccctgatcccctccttcatctactcctcttcctccaaaacgctccctctag

SEQ ID NO: 43740 - DNA, 251 bp, Glycine max
  Clone ID: 701127463H1
agcggctcttatgattctgaggatggcttccgcctgttggataaagagatttcagagcatgaatatttgaaaaacagtgttgagggtttatctcggaggcttttctatcttgctcttccaccttcagtatatccatcagtttgcaagatgatcaagacttgttgcatgaataaatctgatcttggtggatggacacgtgttgttgttgagaaaccttttggtaaggatctagaatcgcagaggaactcagt

SEQ ID NO: 43741 - DNA, 253 bp, Glycine max
  Clone ID: 701127465H1
ctgttcctcagattcaacaccaccttgcgtggcgccaatgggaaaagccttcgacatcggagccgttccgttcaacgccgacgggtggggtccgccggacaacgcgacctcaggcagcaacaacaacaacctccctctgaacgtccccttcgcccccttctcccgctccgacaaattgggccgcatcgccgactggacccgcaacttcaacaatccgacccgctccaagaaccccgccgatgccgtcttcgat

SEQ ID NO: 43742 - DNA, 252 bp, Glycine max
  Clone ID: 701127466H1
gcgactctctttccttccctctttttccgaatctgaatcgaaatggcttcggagactgagacgtttgcttttcaggccgagatcaaccagctcctcagtctaatcatcaacaccttctacagcaacaaggagatctttcttcgtgagctcatcagcaatgcctctgatgctttggacaagattcgatttgagagtcttacagacaagagcaagcttgatgctcagccagagttgttcattcacattattcct

SEQ ID NO: 43743 - DNA, 252 bp, Glycine max
  unsure (1)..(252): unsure at all n locations; Clone ID: 701127467H1
atactcctctgttctctctgtttctcttcaatcttcctgaaaaaacaaaaacacgaaaaatcatcnnnnnnnnnnnnnnnnnnnnnnnnnnnctttcaactaatatggcaattgaaaaccaagacaacactgtcagagaaatcaagccaaagaacaggagaatcangggtgctggaggccctgatgatgacgacaataggnggccaccgtggttnangccactgctgaagagagcttttngttcaangnagg

SEQ ID NO: 43744 - DNA, 251 bp, Glycine max
  unsure (1)..(251): unsure at all n locations; Clone ID: 701127468H1
cttgaagctcctgtttcgggtagcaagaagccagcagaagatggccaactcataatacttgctgctggagataaggcattgtatgatgaagtgcttccagcatttgatgtactggggaagaagtctttctttctgggtgaggttggaaatggtgcaaaaatgaaacttgttgttaacatgataatgggcagtatgatgaatgctttctctgagggactcacactagctgaaagaagtggtttgancccngg

SEQ ID NO: 43745 - DNA, 244 bp, Glycine max
  unsure (1)..(244): unsure at all n locations; Clone ID: 701127469H1
gttaaggcttggactgcctggaaacggaggcactgaagaagtgctcatcaggangaggggtttctctgagactgaaactggtcatgaagatgagtctgccaccactgtggatttgatgcttaatctttcttctaaggagnnnnnnnnnnnnnnnnnnnnnnnnnnnnnnnnnnnngataagcacaagactttgcctaaggagaagacccttctgccagcagatcctgctaagcctccagccaag

SEQ ID NO: 43746 - DNA, 183 bp, Glycine max
  unsure (1)..(183): unsure at all n locations; Clone ID: 701127470H1
gangtggtggtggtttgggtggttctggtcatggtggaggctttggtgcaggtggcggtntaggaaggtggaggtggggccggtttaggtggaggtggcggccgtggcggcggccgtggtggagggattggtattgggattgggattggagtaggagttggggttggagctggtgctggtcat

SEQ ID NO: 43747 - DNA, 120 bp, Glycine max
  unsure (1)..(120): unsure at all n locations; Clone ID: 701127471H1
gcaaagttgattctttctctctttntctttctttccccaatntgtgagtgttactgttgaatcgattggattggcattaggttgatctgaaatacgcaattgacatggcgagcgcgatgg

SEQ ID NO: 43748 - DNA, 143 bp, Glycine max
  unsure (1)..(143): unsure at all n locations; Clone ID: 701127472H1
cataaataaaaccttgctcttttttcacgccctagctcattttcttctccgttctcttctctctgttncctcactcactcgcatttattcaccatgactaagcaacaagctaattggtctccatacgataacaacggaggatc

SEQ ID NO: 43749 - DNA, 255 bp, Glycine max
  unsure (1)..(255): unsure at all n locations; Clone ID: 701127473H1
agcggtcgtttaaccttcgaatctgaaattgtttctccaacttcctccttccttaatcaacctctgttgcaatgtccatgtcgtgcaattctcttctccttcttttctcctccatattcctcacctatttcccaggattgattatatctgcggacgtgacgctgagctcgattgagatcttcanaacccangagtttcttaaagcnactcnaatgtcnatttctgngnaangggganaanaaanccatttgcnga

SEQ ID NO: 43750 - DNA, 236 bp, Glycine max
  unsure (1)..(236): unsure at all n locations; Clone ID: 701127474H1
acaagtttctcgaggaaggatccanagcccaatgaatgaatngttatcgttttgaagaagcttttgatggcagtgctctgggactgaacaactgaaactattagattcaatttattcgctcctttcttcactgaaccaaaattgaattgaatggatgctatcagaaagcaagcctccaagcttcgagaacaggtcgctcgccagcaacaggctgttctgaagcagtttgggggtgg

SEQ ID NO: 43751 - DNA, 255 bp, Glycine max
  Clone ID: 701127475H1
acactgcacagatctgagtggtgactctttcacttctcatcactattattattaggtctgaaggctcattgccattatcatgtcaaggaggccagtaaatccttcgcgtcggctaggtgatggtggaagtataccatttgttgcatctatccagtccaaatctcaaaactctcccctactatctattgggcttgtcattgtgggtgcaatcctcctgattggttattgttacagcaattcaggtggagctagcgg

SEQ ID NO: 43752 - DNA, 260 bp, Glycine max
  unsure (1)..(260): unsure at all n locations; Clone ID: 701127476H1
gcggcggtggcggcggcatagagtggaagtagtaaggatcaatggcagttccagggaggcgcaacgggcatgaacgacgacgaagaggaattagacgacaacgcccttttcgaagaacaaggtgccgtcgaagacgacgccgatacccctcctcacctccgcgacctctccgccgccgctcagctaggcgacgtccacgccctccgtatcgctcttgataacttgactggtagtattgatganccagtggaggatgggga

SEQ ID NO: 43753 - DNA, 250 bp, Glycine max
  unsure (1)..(250): unsure at all n locations; Clone ID: 701127477H1
attttactggggagatacctgcatccctttcaaattgtacctatcttaatantcttagacttgaccaaaaccaactcaccggtcacattcctgcaaacttgagtcagctcccgcggcttaagttgtttagtgttgccaataatcttttgacagggccagttccaccctttaaacctggtgtagctggtgcagataattatgcaaataattcaggcctgtgtggtaatcccttgggtacttgccaggtcgg

SEQ ID NO: 43754 - DNA, 260 bp, Glycine max
  unsure (1)..(260): unsure at all n locations; Clone ID: 701127478H1
accctgccgcngcgggcttcagcccgcgattgatgagatcaatgacacgattccgactttgggatancgagactaattttaggaatgggaagtatttganttactcgagaggtggggattactgcaagggaatgaatcattatttgtggagtttcttgtgtggattgggggaagctatgtttttgaacaggacttttgttatggatttgagtgtttgtttggcttcaacttataaccctagtaacaaggatgaggagggg

SEQ ID NO: 43755 - DNA, 261 bp, Glycine max
  Clone ID: 701127479H1
agagaatgatgatgaagtctgctatgtgtgcagtggtggttgtagcacttcttcttctggcggaggtggggcccatggctgaggctgtgacatgcaccccaacagagttgagtccgtgtcttccagcaatcacttccggtgctaaaccttccaatgcttgttgcacgaagctgaagcagcaaaaaccatgcttatgtggctacctcaaaaacgctagcttgaagcagtatgttaactctcctaatgcccgaaaaaccgttg

SEQ ID NO: 43756 - DNA, 248 bp, Glycine max
  Clone ID: 701127481H1
aggaattaagattacgtgaatttttaggtttttagtgggtgaaaaaatggggggaggttgtgttgtatcatccccttgccttgatattaattgtgataattttaggtttggaatatgcgttgttgtttgagcatctgttactgttatggttgggtttttgacatctgataatgaatctgtgtactggaaggattactgggtcttggtcatccagattgaaatacctgaaaatccttgctacttataca

SEQ ID NO: 43757 - DNA, 137 bp, Glycine max
  Clone ID: 701127482H1
gtcactgctttgtttagatcagaaccagatcgtgttctcttcttccattgggcaaacatggcaactcaaatgagcaagaagagaaagtttgtggcggatggagtgttcttcgccgaactgaacgaggttctgacacg

SEQ ID NO: 43758 - DNA, 251 bp, Glycine max
  Clone ID: 701127483H1
ggaagaggcccagaaaataccctttctccgccgattcatcttctcgcaagcaatttgaacaatattctggacggacatttgcatttacgggggaagtgaattttatgcaagatgatgataatcgtctggagattacccgaactaaatttggaagtttgcttaaaagacacggagatttgacagagcgtcttgctagggattctgacaagataatatttgagcgtctacagaaggagtttgaagctgcacga

SEQ ID NO: 43759 - DNA, 251 bp, Glycine max
  unsure (1)..(251): unsure at all n locations; Clone ID: 701127484H1
cgtcgcgatgaaaccaggcttcatctgattccgatttcccttcgctccttctcctccttaaaccttccatcttcttcgattcctcnnnnnnnnnnnnnnnnnnnnnnnnnnactcgatcttcgcctcgcataaccttcgcgtcttcggtcccggcttgaatcccttcgcaccttattgcatcgccaatcactcccttttcctttccctttcctctcgctaaattacaattnccttccttttnnctctccaa

SEQ ID NO: 43760 - DNA, 252 bp, Glycine max
  unsure (1)..(252): unsure at all n locations; Clone ID: 701127485H1
cagagagcgcgtcttaataaacgctcttctctgaaaacccccatttcttttcttctttcnttcttctctttcgcttcttcgatcttcgatcttcgtcgctgaaaatgagagagtgcatttcaatccacatcggccaggccgggattcaggttggaaacgcctgctgggagctttactgcctcgaacacggcattcagcctgatgggcagatgccaagtgacaagaccgttggtggaggtgatgatgctttca

SEQ ID NO: 43761 - DNA, 254 bp, Glycine max
  unsure (1)..(254): unsure at all n locations; Clone ID: 701127486H1
gaggagctggtggccgctggcagcagaacgccgtcgccgaagacgacggcggggaagctgcttgaaccggtnncgtggagagcaaggcgtcggcggtgtcgctgcaggtgggggaacacgtgcagttggcttacacacaacacaacgaatcaccgtggcatcccagatcatttgctgttaaggatgagatattctgcttgtttgagggggctctagacaatttgggcagcctgagacaacagtatggactggcc

SEQ ID NO: 43762 - DNA, 255 bp, Glycine max
  unsure (1)..(255): unsure at all n locations; Clone ID: 701127487H1
actgagtgcgattcaataattgcgaaaaaccaacggggagtgttgtttgtttcggtcccggctgganccagggaatgaatagagatgagaggctttcggcttaagaaaactgagttaagcggccaagccaaacgcagaatcggcggcagaaattgccaccggaagcacgtcgaagacgggtgaactaaaaagaagaatctcatccaccacttatctttcaatccccaaccccaaaaaaatcacaattctagtngt

SEQ ID NO: 43763 - DNA, 258 bp, Glycine max
  Clone ID: 701127488H1
aaacccctctactcaaaccactctgtttctcttgctctgctattaccctgtttcctgtggaacaaaatttccatctagctctcctccgaattaggttttgttctggagaaatgtatgcagagactggtcttctcttcccatatttgaacaacatctctcacggccttcatcagctcgaggagtactgcaaaacccagaagtccaatgcttcaatggatgaccttgttcagtcttctgtcatgtcagagtatgatttgg

SEQ ID NO: 43764 - DNA, 252 bp, Glycine max
  unsure (1)..(252): unsure at all n locations; Clone ID: 701127489H1
attctacccgccgctcgatgggaattgcgcttcaaggcgtctcgtagggctaatccgcctcacgagggtcaccaacggcacgtgcctttggggggccgaggccccctactgctggtcggcaaacggacggcgggcgcacgcgtcgcttctagcccggattctgacttagaggcgttcagtcataatccaacgcacggtagcttcgcgccactggcttntcaaccaagcgcgatgaccattgtggaatcaang

SEQ ID NO: 43765 - DNA, 254 bp, Glycine max
  Clone ID: 701127490H1
gctggattcaagggatgctatacaggtttgggtcctactgtaagtcgagcatttcctgctaatgctgcaacaattgtcgcatgggagctagcattgaaaatgctaggcattaagcatgactgagagtctacctaattgcggataatactacaaagttcaggtgttcattcagttatttctttcattcttgctttcattttggatcgtgctgctcatcatcacagacagtttgcattaatcctcgagccacaatc

SEQ ID NO: 43766 - DNA, 261 bp, Glycine max
  Clone ID: 701127492H1
aaagaacaaggatcagaatcgtttaatcaagttgaggaagatggcactagtctccggaggaagatcaacactgaaccctaacgcccctctttacattcccgccgcgttccgccaagtggaggatttttctccagaatggtggcagctggtgacgacactgacatggtaccatgactactggctaagccagcagcacgatgatggagccttctatggcgaggatgggtttgatggcaatgatgtggttgatttgcttcctga

SEQ ID NO: 43767 - DNA, 246 bp, Glycine max
  unsure (1)..(246): unsure at all n locations; Clone ID: 701127493H1
cttcactttatcgctattaggtaacaagaattcctctgagaaaaagaaaccccccnctctgcatcacctttggttctccccttgtcggtaacaaaaagtttcaagaagccatatcacgtagttctacatggagttcttgctttctacatgtggtctctatcaaagacccatttcncaaaagattgaatcctgacatcaaggattacatgccttttgggacatttctcttctgctctgatataagtt

SEQ ID NO: 43768 - DNA, 245 bp, Glycine max
  Clone ID: 701127494H1
ctcacacccttcataagctttgtgtttttttcgtagaaacaaagatctgatacatgactatgatgagcagcagcaacaacaacgttggagaatttggagacaccactctgaccaaggtttttgttgggggcttagcttgggagactccgaaggatgcccttaaagaccactttgagaagtatggtcagatccttgaagctgtcatcatttccgataagcacactgggcaatccaaaggctatggc

SEQ ID NO: 43769 - DNA, 263 bp, Glycine max
  Clone ID: 701127495H1
tcttcccttcctctggtggcgacaatgtcgactcctgctaggaagaggctgatgagagacttcaagaggctgcaacaagacccgcctgcagggatcagtggtgccccccaggataacaacataatgctgtggaatgctgtcatatttggtcctgatgatactccatgggatggaggcacgttcaagttgacactccaatttactgaggactatccaaataaaccaccgactgtacgatttgtgtctcgcatgtttcatccaaa

SEQ ID NO: 43770 - DNA, 289 bp, Glycine max
  unsure (1)..(289): unsure at all n locations; Clone ID: 701127501H1
cctgacactccttcttctccgcttcctcttcgatcatcgcttcagaatgccgccgaagttcgacccctcccagatcgtcgacgtcttcgtacgcgtcaccggcggtgaggtcggcgcggcgagttccctcnccccgaagatcggtcccctcggtctctcccccaagaagatcggagaagatatcgccaaggaaaccgccaaggactggaagggcctccgcgtcaccgtcaagctcaccgtgcagaaccgtcaggccaaggtcacggtggtcccatccgccgccgcgctc

SEQ ID NO: 43771 - DNA, 287 bp, Glycine max
  Clone ID: 701127502H1
gccaacttcacatctcaagtcattatcatgaaccaccctgggccagattggaaatggatacgcaccggtgcttgattgccacacttctcacattgctgtcaagttttctgaaatcttgaccaagattgacaggcgatctggtaaggagcttgagaaggagcccaaatttttgaagaatggtgatgcaggtatggttaagatgattccaaccaagcccatggtggttgaaactttctctgagtatcctccccttggtcgttttgctgtgagggacatgcgtcaaactg

SEQ ID NO: 43772 - DNA, 266 bp, Glycine max
  unsure (1)..(266): unsure at all n locations; Clone ID: 701127503H1
ccaattcgtgccactctcttcaaaatggccgttaccttctacaaatctccacacagaatcangtctcaagtccctcgacgacttcctctctgggaaggtctacgtttctggggatcagttcacaaaggacgacatcaaagtgtatggtgctgttttggagaagccaggtgactcttttcccaatgctgccaagtggtacgaggttgtctcatctcagcttgctgcaagcttccccggcaatgctcaaggggtgagattcagtggca

SEQ ID NO: 43773 - DNA, 263 bp, Glycine max
  unsure (1)..(263): unsure at all n locations; Clone ID: 701127504H1
atagccagcatcagcattcagtaacatcaatatcatcgacaacagacaacaatttcgggantccgctggctatgactgcagttgtggtcgtcccattgggccttctcttcttcgcttccggcctcatcgttaacctcattcaggcaatatgctacgtggttgtgcggccggtgtcgaagaatctgtaccggcggatgaacagggtggtggcggactgctctggctggagctcgtgtggattattgattggtgggccggtgtta

SEQ ID NO: 43774 - DNA, 285 bp, Glycine max
  unsure (1)..(285): unsure at all n locations; Clone ID: 701127505H1
gttccttggctgggttaacaacgttgcaaagactttaggtattaggaacctaagcttcaccacttgtggtgcttntggaactttggcctatatttctatctggtccaacctacctcataggaaaacagactctgatgagttccatgttccggggttccctcaaaactacaaattccaccgnacccaattgcataaatttctaagagcagctgatggcactgatgantggtcacagtttttcattccacagattgcactttctatcaagtctgatgggtggattgc

SEQ ID NO: 43775 - DNA, 286 bp, Glycine max
  unsure (1)..(286): unsure at all n locations; Clone ID: 701127506H1
aggcatcagttgcaatggctcgttacggtgagggcgacaagcggtggatcgtggaggaccgccccgacgggcaccaatgtccacaactggcattggtccgagaccaactgcctcgactggtccaagaccttcttcaccagcctcctcactaacctccctatcctcgacggcganggtaacctcttcctcaaaacgacgtcgcttcgctccctcgacggcgangcctacatcaatgtccgaaaggggaagatcatccccggctacgagatcagctcactctcaattg

SEQ ID NO: 43776 - DNA, 219 bp, Glycine max
  Clone ID: 701127507H1
ggatcatccacaagattgaggagaccctccatgtgggagggcacaagaaagaggagcacaaaggagaacaccatggtgagcacaaaggtgaacacaaaggagaacaccatggtgagcacaaaggtgaacacaaaggagaacaacaccatggggagcacaaggagggacttgtggataagatcaaggacaagatccatggtgatggccatgacaagggtg

SEQ ID NO: 43777 - DNA, 285 bp, Glycine max
  Clone ID: 701127509H1
gttggttttgtttcaactattgttggacttgtttgttacggtctcagctcctccttcaactacctatttggagagtggagctgttgaagatctttctttacagtggttttagtctcttcatctgccttgggaatctgtttgcaaaggtatgtcgaccctcaacctcaacgagtctccgattcaaagctcattcatcattcttggttttgaccatcacatctgtgtattcctattttgctgacaaagctatgaatggaaaaccagatgtatatagcttgatttcat

SEQ ID NO: 43778 - DNA, 285 bp, Glycine max
  unsure (1)..(285): unsure at all n locations; Clone ID: 701127510H1
aacacctctctctctctcccctcgttgatcccaaatctattaggggtttttattcgatgctattcggcctgaagctttcgtttcgcggatttttttaattattttttttcctgcctatcaggaaagttgaaaaaaagatggaccatgacaagactggatgcgaantcccccagaaggtcctatattgtgcatcaccaactgcggattttttggaagtgcagctaccatgaacatgtgttctaagtgccacaaagacatgatgctgaaacaggagcaggcagggct

SEQ ID NO: 43779 - DNA, 285 bp, Glycine max
  Clone ID: 701127512H1
atttaaacctccatacaagccaccgaatagtttgatgcattgtcatttggcattgaatgaagcctttcctgtatgtacatttattgctgttaaaaattcatggtaattgattagtggaggcactgatagctgctaattctgcgacatatactcgaagccaaagcttgaggcatgtcaccctctgctgatggttgcacagctgactataacctgtcgatatctgcttaatgtgtagatctcagtcggttccataactaacctaatatgtggcgcaagatactactg

SEQ ID NO: 43780 - DNA, 286 bp, Glycine max
  Clone ID: 701127513H1
ctcgttatttcgatactctctccctttggaaaaaatcaaaggtgctcgcagtcgcagcgattagttcaaagattgtaagcgatcgtgaatcgtcgacaaaggttcgtgtctgaattgaagtagtgtcatcaccatgagattgagaaagggaaataaggtggagatccgtggcaatgctgatggacttagtgtggaatggtgttgtgctcgtataatttctggtgatggacacacctacagtgtccagtatgactgttctagcacaacaagcgaggccagcatagag

SEQ ID NO: 43781 - DNA, 287 bp, Glycine max
  unsure (1)..(287): unsure at all n locations; Clone ID: 701127514H1
gagaactcctatcttgttccctctcttctttcttctttgtgccttcacctcatatctancttcagccancgctgatgatgatcatgtgtacgacactgacggcgataagcttcaatacggtgtcaattatttcgtgttgccagtgataagaggaaatggcggtggaatacaagtagcaaaagcaggaaacgaaacttgccctctgactgtggtgcatctgggcaacgagctctctgaggggttaccgataaagattgcatctcgatcagcaggagtcgctttcatcc

SEQ ID NO: 43782 - DNA, 288 bp, Glycine max
  Clone ID: 701127515H1
gcaacttcgagctgggtccgaagccctccgccctgaaaggaactgtggtgattggtggcagccactacgatcccagaatgggagatctctggcttcgtggagtacataaagtccggccagaagcagggcgacatgctgctcgtggtccccgagggggcctacgcggtgcgcctcgggaacgaggcctccatcaagcagaggatcaaggtgatcaagggcatgtactactccatcaccttcatggtggcccgcacctgcgcgcagaggagaggctcaacatatccgtca

SEQ ID NO: 43783 - DNA, 290 bp, Glycine max
  Clone ID: 701127516H1
ctcgacttatccataacttgtggaagatccacagggaccctagtgtttggtcagacccattggaattcaaaccagaaaggttccttaccactcacaaagatgttgatctaaggggtcacaattttgagttgttaccctttggaagcgggagaagagtttgtgctggaatgtcccttggcttaaacatggttcatttcactttggctaatttattgcattcctttgacatcttgaatccatcggctgaacctgtagacatgactgaattctttggatttaccaacaccaag

SEQ ID NO: 43784 - DNA, 285 bp, Glycine max
  Clone ID: 701127517H1
agaatttcccaaatttctccactaccctatctcctttgctcctgaaactcccacattcttcaccagcaatgcacgatcttcaatacgaatggcagtttcgatatttgatatcggagtatcggtgtttgagcggctgaattggaattggaaaatgctgaggcaatggaaagttcggtcaatggtgggttcacccatttgcagagctgtggagatagcagcgaagaagagttatcggtgcttcctcgtcacaccaaagtggtcgtaacaggaaataaccgcaccaaa

SEQ ID NO: 43785 - DNA, 287 bp, Glycine max
  Clone ID: 701127518H1
agcggatcagttgggattcaagaaggaatatctcgatcaaccggacattcccagcacatggaaagcaatggaggcacttctatgactcaggcaaggcaagagccataggagttagcaatttctcttcaaaaaagcttcaagatctcatgaatatagcaagagtgcctcctgctgttaaccaagtggaattgcacccaggatggcagcagccaaagctgcatgcattctgtgaatctaaaggagttcatctgtctggatattctccactgggctcaccaggagttctc

SEQ ID NO: 43786 - DNA, 262 bp, Glycine max
  unsure (1)..(262): unsure at all n locations; Clone ID: 701127519H1
acaagtttctcgaggaaggatccanagcccaatgaatgaatggttatcgttttgaagaaacttttgatggcagtgctctgggactgaacaactgaaactattagattcaatttattcgctcctttcttcactgaaccaaaattgaattgaatggatgctatcagaaagcaagcctccaagcttcgagaacaggtcgctcgccagcaacaggctgttctgaagcagtttgggggtggcggttatggaggttcagataatgtgg

SEQ ID NO: 43787 - DNA, 249 bp, Glycine max
  Clone ID: 701127520H1
cattcccttcttcaatttcatcaacacaaccatcaatttcatcaaccatcgcataataatagtattatcatgatagccgtggcccgaaaggacatggaccggatcaagggcccgtggagcccggaggaggacgaggcccttcagaagcttgtggagcggcacgggcccagaaactggtcgctcatcagcaggtccattccgggccggtctgggaagtcatgcaggcttcggtggtgcaaccagctgtcg

SEQ ID NO: 43788 - DNA, 286 bp, Glycine max
  Clone ID: 701127521H1
ggcttcctctgcctcgcttttgaaaacgcgcgtttcaggcgaagatggttggcgacaacacgaagaagttgaaagtcgccgagaatttggaggatagcatcgacggcgaactcgtcctctccatcgagaagctgcaagaagtccaagacgagctcgataagatcaatgaagaggcgagtgataaggtcctcgaagtagagcagaagtacaatgagataaggaagccagtttacgataagcgaaatgatgtcgtcaaatctattcctgatttctggttcactgcttt

SEQ ID NO: 43789 - DNA, 264 bp, Glycine max
  unsure (1)..(264): unsure at all n locations; Clone ID: 701127522H1
gngaatcgtgatgtgacaggaagcannaacagcgttgagatcgatgctctagctcgctttactgttgaagaacacaacaaaaaacagaatgcccttttggagtttgaaaaggtggtaactgcgaaacagcaagtggtttctggtaccttgtacaccatcactttggaggcaaaagatggtgggcaaaagaaggtttatgaagccaaagtttgggagaagtcatggttgaacttcaaggaggtgcaagagttcaagcttgttgga

SEQ ID NO: 43790 - DNA, 284 bp, Glycine max
  unsure (1)..(284): unsure at all n locations; Clone ID: 701127523H1
gggaaaggttccatgtgaacggcacttgcacatgggttagtcgatcctaaggnacgggggaagcccgtctgatagcgctctgtgcgcgtactccgaaagggaatcgggttaaaattcctganccgggacgtggcggctgacggcaacgttagggagtccggagacgtcggcgggggccccggaaagagttatcttttctgtttaacagcctgcccaccctggaaacggctcagccggaggtagggtccagcggctggaagagcaccgcacgtcgcgtggtgtcc

SEQ ID NO: 43791 - DNA, 286 bp, Glycine max
  Clone ID: 701127524H1
ggcaacgccactgcaatctgttctaattagaaatagaaggttcatcatctcaaaaaggcttttgtgattctcgatttgatttggatcgcacagaacgaaggcatgggtcaagcttttcggaagctcttcgacaccttcttcggcaacaccgagatgcgggttgtgatgcttggtctagatgctgctggcaaaacaactatactgtacaagctccacattggagaagttttatctactgttcctacaataggttttaatgtggagaaggttcagtataagaatgttg

SEQ ID NO: 43792 - DNA, 286 bp, Glycine max
  Clone ID: 701127525H1
cccagattccctccactcattgcaatttcttcgatccgctttctaaattccacacccctccgttccactgcttcgccgcgacaagttacaagaatggcttcgaagaatgctcaacaagacacgcgcttagccagaatcgcctctgcgatccgagtcatccccgactttcctaagccaggaattttgtttcaggacataaccacgctgcttcttgatacaaaggctttcaaagacaccgttgacttgtttgttgagaggtacagagatcaaaacatcaatgttgtcg

SEQ ID NO: 43793 - DNA, 283 bp, Glycine max
  unsure (1)..(283): unsure at all n locations; Clone ID: 701127526H1
atgatcatggtngcagccaacttcaaaggctgcagtatcaagttacgaaaatgataaaaggattttctagccctccagaagttaaatatacaaattacaatccggaaatcttgacaactcagaagcgtcaatgggctgcaaactttcagttgcagtacacggaccataagtcttggaaggagccaacaaagctgtttgaaagcatggtggttgctggacttcatcctaattgtgatattcaggcatgcaaaggcaatgttttttaagaaagtctgaaggcccg

SEQ ID NO: 43794 - DNA, 284 bp, Glycine max
  unsure (1)..(284): unsure at all n locations; Clone ID: 701127527H1
cttataattcttgtgacccttttngctggtagcattgaaagtgcaccagcaaacgtgaagccaagccattatgctgcacccttcaataggagtgtttttccttctggttttctatttggaataggctctgcagcttaccagatagaaggagcagcagctatagatggcagaggaccaagtatatgggacacctatactaaacagcaaccagggaagatttgggatcatagtgatggaagtctagcaattgatttttatcaccggtacaagagcgacataaagat

SEQ ID NO: 43795 - DNA, 284 bp, Glycine max
  unsure (1)..(284): unsure at all n locations; Clone ID: 701127528H1
ggagcttcaagaactctacaactcccagcaacttttgactgatgaattgagtgttaaacttgaaaaaactgagaaaagtctagaagaaactganccagtcattgtttgatcttgaggaaaggcacaaacaagcaaatgcaacaatcaaggaaaaggaatttttgatatcaaatctcctaaaatctgagaaagcacttgtggagcgtgcaattgaactgcgagcagaactcgagaatgctgcatcagatgtgtcaaacctcttttctaaaattgagcggaggnta

SEQ ID NO: 43796 - DNA, 283 bp, Glycine max
  unsure (1)..(283): unsure at all n locations; Clone ID: 701127529H1
gaaaccctcttcatcttgttctatctgtgacgagcatcatggcctcaagagcagtgttattgttgggctatgtgtgtgcttccggcgatggttgtngccattcgcccagcaaagaaccctttttgcgtgaagggtcgtgtctactgtgacccttgccgtgctggttttgagacctcagctaccacctacattgctggtgctgagattatgttgcaagcaagagcagggttagcaacgaggttgtgtacacgaagaaggggnacaccganttcnaccggggata

SEQ ID NO: 43797 - DNA, 287 bp, Glycine max
  unsure (1)..(287): unsure at all n locations; Clone ID: 701127530H1
accgttgattcgcacaattggtcatcgcgcttggttgaaaagccagtggcgcgaantaaccgtggcgttggattatgactgaacgcctctaaggaaacttcaaaagtagagttgtgatcatgtatagaagcagtgcaatatgagttcagcacagaaagcttggattgtggcaactagtgttggagttgtggaggccttgaaggaccagggcatctgcaggtggaactatgctttaagatcagctcagaaacaagtcaaaagccacgttggatctttgtcacaggcaa

SEQ ID NO: 43798 - DNA, 288 bp, Glycine max
  Clone ID: 701127531H1
gaagtgggtcatcggaactgaagtgaagtgatgcgcggcaacatttgggaaacaaaatggttgacagtgagcataaccctaacactcaccgccgtttccatctctgcgtacgtattaaagagaaaatggaatcatctgaactccaaaattgaggagcttgaggcatctctcaagtctttctcagacaattgcgcctccgaaagacaaggccgaattagagctcaacaggccttgagaaaagaagtaacacagtcgcaacctaattctcaaaagcttaacctcattctt

SEQ ID NO: 43799 - DNA, 288 bp, Glycine max
  Clone ID: 701127532H1
caaaacacccttcacttgttttgtttacttaactcgcacttcctcttctccaatttcgaggtctcaattccggctttgaacagacacaagcacgcattgcttgttcaaggttcaaaccatcattcaagacattcatggaagcagttaatgaaactagacctgtttccttctgatatataagaaaaaggttcacatggtttctacagacaaaagtgcggatcaaaatatcccttctgatgaattgcagcagagagtgagtcctgatagtgatactacattgtcacaagg

SEQ ID NO: 43800 - DNA, 285 bp, Glycine max
  Clone ID: 701127533H1
ctccccaattctcaaacctcacctagtattttcgtttctgaacccaattaattaagcacacaaggaccataacatacctatacctcaatatcacaagtcttatggaggcagagcgagacaagtacaagatgatcaactttgaagaaaccgagttacgactcggcctgccactcagtggaaacgagacgctcaaaaacacttgcagcactgggaagagggttttttcggatactgccgtggatttgaagcttaacctttcctcaacctcaaatagtgcttcttctg

SEQ ID NO: 43801 - DNA, 284 bp, Glycine max
  Clone ID: 701127534H1
ctctctccccgcccaaaccctaactccctaccctattccgctttctctcatccatcatgaaaggaggaaagtccaagaccgaatctaagagagccgatgccaaacttgctgtgaataagaagggcgccgccaccaagactaggaaacccgccggaaaggggaaggcagcgaaagatcctaacaagccaaagaggcctccaagtgctttcttcgttttcatggaggaattcaggaaggtgttcaacaaggaacatcccgacaacaaagcagtgtctgctgtgggc

SEQ ID NO: 43802 - DNA, 282 bp, Glycine max
  unsure (1)..(282): unsure at all n locations; Clone ID: 701127535H1
ccaagaatgtacctcttggattttagaacttagatagtttaaatttaagtgagggcctaggatcagagcaatagtatctatgtatacagtgggtccctgcaagtgtagatatgaaagtntccaaacctacttgtgaccaacagttgatatttatgcatccctgtgcggtgtgcttgtttgacactgctctaagcaattcttttattgtatttatcatctgcatgatgtaaattgcatgtacatgaaatgtttatcgtgatcaatganatatttatccngntg

SEQ ID NO: 43803 - DNA, 281 bp, Glycine max
  unsure (1)..(281): unsure at all n locations; Clone ID: 701127536H1
ggnattagaaaagcctcaagtgaagtgtacttgcatcttgttcttggaaaatttcagttgaatatggggactccaagaggaatagctcttctcagtttcacataccttcttgttttggagctcagcgaatgctttgcnttctcctaagggagtgaactttgaagtgcaagctttaatgggcataaaatattctctagaggatccacatggtgttctagataattgggatggggatgcagttgatccatgtagctggactattgtcacatgttcttctgaaa

SEQ ID NO: 43804 - DNA, 282 bp, Glycine max
  Clone ID: 701127537H1
agtataggcgactttctattcaataccatccagataaaaacccagatccagaggcacacaagtacttcgttgagtacattgccaaagcttatcaagctcttacagatccaacagctcgtgaaaattatgaaaaatatggccatcctgatggcaggcagggattccaaatgggtatagctcttcctcaattcctgctaaatattgatggggcatctggtggaatacttctgctttggattgttggtgtgtgtattctcttgccgttggtcattgctgttgttt

SEQ ID NO: 43805 - DNA, 284 bp, Glycine max
  unsure (1)..(284): unsure at all n locations; Clone ID: 701127538H1
gggacataccatatatacatatattatagtttagtttgcactattttaatggtggctgggctancttaattccacatggctaaaattttgcacccctttattatataaccgtttcattctctatagcatctcaaagggtgtccaaagaaggaatcacacaagagaaattttgggtggatcttggtaatttaaatttggtccaaaaatagtaagaaaaaaaaaccatagttcattaattttcatgtccttgctaacggtggcgcaccaaagggggtcaggtgagt

SEQ ID NO: 43806 - DNA, 283 bp, Glycine max
  Clone ID: 701127539H1
gggaatcatcaattgtccaacaagtacttcgaataaagcctttgttgatttgattcttaaaccctcagaagacgacatcaagatttggcctcacagttttgaatttcgtcttagggtagctcttggacctggaggagatctgttgatgacatctcggatcaggaaacactaacattgatgggaagccattttcattcacatttgcttatcatacatatttctctgtgtcagatataagtgaagtgcgggttgaaggattagagacattggattatcttgacaa

SEQ ID NO: 43807 - DNA, 282 bp, Glycine max
  unsure (1)..(282): unsure at all n locations; Clone ID: 701127540H1
agangcaccaccgcgaccggcgaatccagccaccgtgtgcggcttcgaattgagtccgagaacgcagttagacaggctttatattgaaacttgagacttgaagggaagctgttataattggtcagtcttcccatggcgtatcccttctcagatttcaagtactcagatggcctcactgtagtgggtatctccttctgcacagctattgtctgtgaggctatctccatgggttcttatctatcggaccaattctacaaaaacttaggtctccattganaaagc

SEQ ID NO: 43808 - DNA, 282 bp, Glycine max
  Clone ID: 701127541H1
gtcctaaaagaggctggatacactgaacaaatggtatacaaattctgagaagtttagttttcttgcatctgaagatagtattcgaagcactgtccgctgcagaattcgtgtactgaaatggttttctgaagaataacagttgggtgcggttgaaaattccaacaataaatctagaattacagaggatagagaattattgattgtgtgtattttcaaaattttgtggatatttaatcatgcagttgtctagcatggaagtcaataatgggcatctgtgggggt

SEQ ID NO: 43809 - DNA, 282 bp, Glycine max
  unsure (1)..(282): unsure at all n locations; Clone ID: 701127542H1
caacaaagtaacgtgaaagagagagagatggaggcgattgttccagtggtggatttccagaggcttcagaggaagaggagcgcaagaagctgagaaaaacatgtgagaaaccagggtgtttcagaatcatcaaccactcaattccactaacactcatggctgacatgaagtcagtggttaaatacttgcatgaccttcccacggnaatcaaaatgcgcaacaaaccctccgtccctgagagtggctatagggcggcaatgccaacaagtcctctatacgagg

SEQ ID NO: 43810 - DNA, 281 bp, Glycine max
  Clone ID: 701127543H1
gctattttgggcaaaaaaacacgttttcgtgaagaaaaatcaagtcgaagtacttccgtaacgcttccgtaagcgattctgtggaaattcttcatcgctcttcgtcgttcttcaccgttcttcatccgttcttcgttcgttcttcgttcttcaacggtgtgtcggcctctacctatatattccactcactacccagaaactagggtttagcgccacactccaatcgtagccgtcgcactctgtgttttctgcgccgtctccgatctccgacaaggcgaccc

SEQ ID NO: 43811 - DNA, 221 bp, Glycine max
  unsure (1)..(221): unsure at all n locations; Clone ID: 701127544H1
gggataccttgtttagactagtaagtnttcatcaacaacaacaacccgatccctccctcaactccacgacnagcagaaccncccagcagctcccagatcctccagacaaaactantacccttattcttcctatcaagaagaagaagaatgcttcaacttttacatggatgaagaagacttatcctcgtcttcttccaaatactactacccttaccaacccc

SEQ ID NO: 43812 - DNA, 282 bp, Glycine max
  unsure (1)..(282): unsure at all n locations; Clone ID: 701127545H1
gtgctgtgaaccctagggtgaaattcagcgacgaacaaatcaacgcgatccttgatgaggtgttccgaacatacggcgaattcatcgacggcgacaagggtctcacgtacgagggtttgttgcgcacgtacgacgacggcnccggcnacgtcgaccgtgacttcgacgcgctcggcctcgacctcgtcgccgctgangccgcgaaggagcccctcgcggcgttggaggcgtcgtcctcgtcgattgtcgacgagaggatggcggtggagacgcagaagaagc

SEQ ID NO: 43813 - DNA, 283 bp, Glycine max
  Clone ID: 701127546H1
agaaaatcataagtacccctgtgattttcatcaatggcagctaataacattttagaggtgtatttgttcgggatattctagaattcaaggaacgtctgccctcgtgagccattttcaaaattcaagtctgatgaatgaagataagcgatgtcgtcctattctcttccactccgagggttctgaagtttgtgatctggtaattggaaaacattgactagtgcatttgttatattttcttcacaggaaattgaaatttgaaacttgtagattgtacaagaccacc

SEQ ID NO: 43814 - DNA, 285 bp, Glycine max
  Clone ID: 701127547H1
cttgggagaatgatctgtcaagctctgataaatcagttgttgcacaatcttctagtgatcatgatgaaattcagagttctaatgctatccaggttgaatctgcacactgttttggcacttccaatgatgaagttggagaattgcatgatgcagttgacaaatttcctccaagcatttcttctgtgacctctgaaaaatttgagacccctaaattcaggtcacccactggtgaagcagatttggaagttgataggcacggggaagttgaaaatgaagaccaaaatg

SEQ ID NO: 43815 - DNA, 285 bp, Glycine max
  unsure (1)..(285): unsure at all n locations; Clone ID: 701127548H1
gggaatcgcagcgaagtccactatgccgaagcaaattcacgagattaaggncttcctcctcactgctaggaggaaggatgcacgctctgtgaaaatcaagcggagcaaggatgtggtgaagttcaaggtccgttgctccaagtacctttacaccctctgtgtgtttgattctgagaaggctganaagttgaagcaatcacttcctccaggtttaagcgtgcaggatgtgtgattcttactgctgtatgaagatcaggtttttctctggatttggggattcatagt

SEQ ID NO: 43816 - DNA, 280 bp, Glycine max
  Clone ID: 701127549H1
atcaaaaccagaaaaacacactgcaattgtttggactagttttaatttcttccaattccatggctgggaaagatagaatcctgattttgggacccactggagccattggaaggcacatagtctgggcaagtgtgaaggcagggaacccaacatttgtgttggtgaggaacacccctggctctaacaacagggtcaatctggtcaaagctgctaatcctgaaaccaaggaagagctcattgagagcttcaaaaattcaggagtaaatctaattcagggaga

SEQ ID NO: 43817 - DNA, 273 bp, Glycine max
  unsure (1)..(273): unsure at all n locations; Clone ID: 701127552H1
caaaatctttcaccaccaacacacagccatggcaggctctcaccttctttctcactcaccctcccttcccaaaacctataactactccttaaaccaaaaccctttatcccaaaatcttttttttncacccctcanattcaaaagcnccacaaaancgcgtgtnctcagagctgttctctcccaaaacgctgcaaaaaccgcggtagaggacacaaagaacgctcattttcagcattgtttcaccaaatccgaagatgggtatctgtactgtga

SEQ ID NO: 43818 - DNA, 281 bp, Glycine max
  Clone ID: 701127553H1
ctttgctgttaaagatcatagaggagaattgtacaagaaacactacccacctgctttgcatgatgaagtttggagattggatcggatagctaaggatggtgcacttcacaaaaaattgattcaggcaaaaattgtaactgtagaagatttcctacgtcttcttgttcgtgagccacagaagttaagaagtatacttggtagtggaatgtccaatagaatgtgggagaatactgtggagcatgccaagacatgtgtcttgggtggcaagctctttgtatact

SEQ ID NO: 43819 - DNA, 281 bp, Glycine max
  Clone ID: 701127554H1
gcttgttgctgcatctgtactttctaatccctttgagtattgtgatattgtgaccaccacaaccccacaagtctttacgaggtccaagaggtggtatgatattcttcaagaaagatactgtgcatggggttgatttggagcctgccattaacaatgctgtttttcctggtctacaggggggtcctcataaccacacaattggaggactagcagtttgcttgaagtatgctcagtctccagaatttaaaaattatcaaaatcaggtggttgctaactgtaga

SEQ ID NO: 43820 - DNA, 281 bp, Glycine max
  Clone ID: 701127555H1
gggacaaccatgtcctagggctcgacacaacgtttccctacacaatctccctttatctttcagctcattagattttaacctcagtttctatttcaactgcagttcttacccttcatctattcagcacatagggtgcatgaaacatgataagtatcagtcttacgtgtttaagaccggggatgaagctgaaagtaatggctttgattggcttaggcactgtgaggagcatgttgtggtgacagtgaagaaggatgagattgaaattagtggtttgatcactg

SEQ ID NO: 43821 - DNA, 281 bp, Glycine max
  Clone ID: 701127556H1
ggaagctcctgcaagtgcggcaacggctgcggaggctgcaagatgtacccagacttgagctacactgagtcaaccaccaccgagaccttggtcatgggagtggcacctgttaaggctcaatttgagggtgctgaaatgggtgtgcccgctgagaacgatggctgcaaatgtggaccaaactgctcctgcaacccctgcacttgcaagtgaggtgttgggagagcaagcttcaagcagagatagcccttaattaggaataatgataaactattaatgtgtag

SEQ ID NO: 43822 - DNA, 128 bp, Glycine max
  unsure (1)..(128): unsure at all n locations; Clone ID: 701127557H1
atttcaacctacctatgtgtactgataagatctgcttccctacttaaagagancatcatcctgtgatcagtgtgcttcgtattctctctctctatatatatatggtaaaaagtggttatctcgtgcct

SEQ ID NO: 43823 - DNA, 249 bp, Glycine max
  unsure (1)..(249): unsure at all n locations; Clone ID: 701127558H1
aggttggattgttgctagcagctatgggatangacaataanactcgtttatatcttgcctctcacaaggtctatggtggagaggcaaggatttcaactttgagggaattatttcctctgatggaagacaagaagagccttgcttcatctgaagagcgttctcagataaagggaaaagcttctctattagctgcacttgactactatgttggcttgcatagtgacatcttcatctctgcttccccaggaa

SEQ ID NO: 43824 - DNA, 282 bp, Glycine max
  unsure (1)..(282): unsure at all n locations; Clone ID: 701127559H1
caaagggcggtggtgagtgcttctgcttcatcatcatcagagaatggcggctactgtgtcttctgcttggtcaaagcccggcgcgtgggccctagattccgaggaacacgaagccgagctccttcaacnnnnnnnnnnnnnnnnnnnnnnnnnnnnnnnnnnnnnnnnnnnnnnnnnnnnnnnnnnnnnnnnnnnnaagcccaagaagaagaaggcccagacctactccctcgccgaattcaccgccaagcccgactccgccttcgccgaccaagatcccgt

SEQ ID NO: 43825 - DNA, 281 bp, Glycine max
  Clone ID: 701127560H1
gtttaaagtaagagagaagaaagaagcaaatggcaaactttccagttgttgacatggggaagcttaacaccgaagagagacctgcagccatggagattataaaagatgcctgtgagaactggggtttctttgagttggtgaaccatgggatatccattgagcttatggacacagtggagaagctcacaaaagagcattacaagaagactatggagcaaaggttcaaagaaatggtgaccagcaaaggtcttgagtcagttcagtcagaaatcaatgacttg

SEQ ID NO: 43826 - DNA, 280 bp, Glycine max
  unsure (1)..(280): unsure at all n locations; Clone ID: 701127561H1
gcttccttcccaaactgtaaatgaatggtttttgagcaacagcagttaaaagagaaaagggattcagcgaagatgacatcngttggtgtggcaccaacttcgggtttgagagaagccagtgggcatggagcagcagctgcggatagattgccagaggagatgaacgatatgaaaattagggatgatagagaaatggaagccacagttgttgatggcaacggaacggagacaggacatatcattgtgactaccattgggggtagaaatggtcagcccaagc

SEQ ID NO: 43827 - DNA, 283 bp, Glycine max
  Clone ID: 701127562H1
ccagactggggcatctctaaaccttggcatattgctgtgtattgaatgctctggagtgcaccgaaatcttggtgttcatgtctcaaaggttagatctataacgttagatgttagggtttgggaaaataccgttctggagttatttgataacttagggtaggtgaaccaaatgtgccaatgaaaccttgctctgcagatgccttccaacacaaggagaagtacatccaagcaaagtatgtagagaaatcactgatcatccgagaagaggatatacccgagaatc

SEQ ID NO: 43828 - DNA, 284 bp, Glycine max
  Clone ID: 701127563H1
gggagcttccaggaaggatacacagcaaatgactggcattcaagttagcttagctatgatgaatgaagaggagtatagatggtcaacgtttttggtaagcaactagtaattaagcaagcaagaatcacaaattggaaccatgtttctcaaatgttttggcttcggcgctcagagacagtatccaacggtgatagaagagttgtgccatcgattttctctcgcagatctaaggaaatcaaccaacaatttcgatcaaaacacagtaattgatcgtggaggatgtg

SEQ ID NO: 43829 - DNA, 277 bp, Glycine max
  unsure (1)..(277): unsure at all n locations; Clone ID: 701127564H1
ctttgacgggtgttggcggttgcggtttccgttgtgctgaatctnnaccgttattttgggggcctcaaatcgccgatactgtgttcactttcattgccgtggcgggcgaaccaccgtaccagccaccgacaccgtccatccatttcagctttcgaattacgatgacgtatttcgaggaggacgccattaacgatgacggtgatcgcgtgagggacgtcgagcgcaatcacgacggcggaggagatacgtcaaattggttgggatccacaacggaggc

SEQ ID NO: 43830 - DNA, 278 bp, Glycine max
  unsure (1)..(278): unsure at all n locations; Clone ID: 701127565H1
cgcgacngaccgcctcgagattcccgtcggcgactcctccttcgccgtctccgcttccaccttctcctggcccccacctcccgccaatgtcagtgtcgaaattgatgcttcgcttggggattctgatggcctaaaaaatcctgctttgaagaaaaggactaaatctgattcaagtactgcttctagctccaaagcgtgtcgggagaagttgaggagggataggcttaatgacaagtttgttgaattgggctccatcttggagcccggaaggcctccca

SEQ ID NO: 43831 - DNA, 278 bp, Glycine max
  Clone ID: 701127566H1
gagcgagagtggaatagaacaaagaagatgagcggcgccagcagcactataaggctatcgccgatggtgagcgtgtccccgaattgcaattgcttcatcgatgatggtgatgaagaagacgacgacggcggtggctcctttgtggatgaaaagcaagagcgttaggggtggtattaggtgcgaggtggctattaatgcggtggatgagtcgacgacgtcaccggagtcgaagattggagcgcgtgtgaaggtgaaggcgggtgtaaaggtgtaccacg

SEQ ID NO: 43832 - DNA, 280 bp, Glycine max
  unsure (1)..(280): unsure at all n locations; Clone ID: 701127567H1
cttccttcctctgaaacaagaaccaaaatggagaattcgaccgaanaatcccatctccgatcggaaaactccgtcacttacgagtccccttaccctatctacggcatgtcattctccccctcccacccccaccgnctcgccctcggcagcttcatcgaagaatacaacaaccgcgtcgacatcctctctttccaccctgacaccctttcggtaactccccacccttctctctccttcgaccacccttaccctcccaccaaactcatgttccanccccgna

SEQ ID NO: 43833 - DNA, 280 bp, Glycine max
  unsure (1)..(280): unsure at all n locations; Clone ID: 701127569H1
cttatatataacttgttacttagatttttcttcttctttttttatctctcaacggagagacagaaaannnnnnnnnnnnnnnnnnnnnttaattagagggacatgagaacaaggagaggtgcgtgttatcctggtgtagtctcaaggatgtgctccaatgtgagggttacgnagaaaaaaagcaaggatctgcacatgcatatgcatgttcctgccggagactccattatttatagccggaaaaagcagaaganaacgccggaaaactcgccgccggtcg

SEQ ID NO: 43834 - DNA, 278 bp, Glycine max
  Clone ID: 701127570H1
gcccatcctcctccatctttctctctttcagacacaaaccatactcaaaaggccctagctatgattttttttttaaacaattaagttgccctagctatctatgtagcttgttagctaatagctatagctttcttgttcaaataacctagacaagaattgcgttaggttgcattgtcgataagactataatttataccactatgcttcatgtgatgggtcaataatttattaagatctatataatacttcttccttgcttatttgtgtttgagtgttgc

SEQ ID NO: 43835 - DNA, 278 bp, Glycine max
  Clone ID: 701127571H1
atcttgcttggttatgatattggagtgatgagtggagcagccatatacataaaaagggacctgaaagtctcggacgagcaaatcgagatcctgctcggaatcatcaacctatactctctgataggctcatgtctcgccggcagaacctccgactggataggtcgccgttacacgattgttttcgccggcgccatcttctttgtcggagcacttctcatgggtttctcccccaattattcctttctcatgtttggccgtttcgtcgctggcattggcat

SEQ ID NO: 43836 - DNA, 281 bp, Glycine max
  Clone ID: 701127572H1
aactagccgcagcacgaggagcagcctcaggaggagaaggatgtctcacaggaagttcgagcacccaaggcacggttcactgggatttcttcccaggaagcgtgctgctcgtcacaggggaaaagtgaaggcattccccaaggatgacccatccaaggcacccaagctcactgcattcttgggttacaaggccggtatgactcacattgttagagaggtcgagaagccaggatcaaagcttcacaagaaggaaacttgtgagcctgttacaattattgaga

SEQ ID NO: 43837 - DNA, 259 bp, Glycine max
  unsure (1)..(259): unsure at all n locations; Clone ID: 701127573H1
cttaaaaccatttgtcacgctgttacattgggacctcccacaagctcttgaagatgaatatanggggatttctcaaacctgaaatagtgtaaataaatactcaattatatatgattcactatagtatttttaaataatgaaaaagaaaatatagtaaatgtttatggaaaaataaaaatagggaggacttccgtaactatgctgacttttgcttcaagacatttggtgatcgggtgaagcactgggtaaccctaaatga

SEQ ID NO: 43838 - DNA, 277 bp, Glycine max
  Clone ID: 701127574H1
cccagatctgcagacaatatgcgaagaactggcttgttacatttgttatgccttgtcattgctttagtaagtgtgcaagcagaagatgcgtataagtattacacatggacggtgacttatggaactatttctccattgggtagtccccagcaggttattcttatcaatggtcagtttcctgggcctagacttgacttggtgactaatgagaatgtaattctcaaccttatcaacaagctggacgagccatttttactcacttggaacggtattaaac

SEQ ID NO: 43839 - DNA, 277 bp, Glycine max
  Clone ID: 701127575H1
ggatgaagaagccttctattatcctcacaatcttgattttcgagggcgagcttatcccatgcacccatatttgaatcatcttggttctgatttatgccgaggcatacttgagtttgcagagggacgttcactagggaagtcaggcttgcgctggttaaaaatacatcttgcaaatttgtatgctggtggtgtcgacaagttatcttatgatggccgaatatcatttactgagaaccacctggatgatatatttgattctgcagacaggctcttgaag

SEQ ID NO: 43840 - DNA, 278 bp, Glycine max
  Clone ID: 701127576H1
gccaaacaccattttttcttccttccttttttgtttcctattccttcttcaattctctctcttcatttagtagtaaacatttttttggcctcgttgaagcaatggtggggggtggcaattccaaatccgatatctcctttgctggcacttacgctagcagtgctttcgctgcatgtttcgccgaggtgtgcactcttcctttggacactgctaaagttaggcttcagcttcaaaaacaggctgtacttggtgatgcagtgaccttacctagatatagg

SEQ ID NO: 43841 - DNA, 280 bp, Glycine max
  unsure (1)..(280): unsure at all n locations; Clone ID: 701127579H1
gctagggtttaagcgacgagagcgaaaataccccaaatcctccctttgaattcgaagccagccattctgatttcgatttcgtggcgattattatagttaacaatggtttccaacacgaaaacggggtcgaatattgacccgaatcctattggggtggagncagcaatggcttcccagcacgaaaatgggtcggaaatgacccgaacctactggggtggagacatcatgtcttcccttcacgaaaacgggtcngaattgatccagnaaccttatttgggcg

SEQ ID NO: 43842 - DNA, 279 bp, Glycine max
  unsure (1)..(279): unsure at all n locations; Clone ID: 701127580H1
ctagcacatacacacagttgttaaagattataagatagtgatgaanaggaagttcatttcggtggttgttttgggagtatgtttggtgctgggaatatcccaatatgttgatgcaagaaacttggaggcatttacaaaggaattggatttggaggggttggaggtggtgtaggtgctattggtggtgttggtggtgtcattggtggtttcaagcatgttgaagccaacaagccttgaaaaatcaattgagttaattacgtacgtacgttcaataattcc

SEQ ID NO: 43843 - DNA, 251 bp, Glycine max
  Clone ID: 701127581H1
aacgccgttgttgtttcctgaaacttctcaaacagaagcaacttaagccagcaaagaacaacctttaaaccaattcattcaaaattacgtttcttggcttcgcttcccccaacccacaatttcctctcaatttccctgatcctatttaaaccaactcacattaaccctcaatttcccaaaccgatcgtgttctctctcacgagagcacggtcgccgaagaagtaagaaaaccaatgccagaaaccgaaagc

SEQ ID NO: 43844 - DNA, 275 bp, Glycine max
  unsure (1)..(275): unsure at all n locations; Clone ID: 701127582H1
gcggcattaaaaatgcagatcttcgtgaaanccctaacggggaagaccataaccctcgaggtcgaaagcagcgacaccattgacnatgtcaaggctaagattcaagacaaggaaggcatccctccggatcagcagcgtttgattttcgccggaaagcaacttgaagatggaaggaccttggccgattacaacatccagaaggaatcaacccttcaccttgtcctcaggcttcgtggtggcatcatcgagccttccctcatggtttggctcgcaaa

SEQ ID NO: 43845 - DNA, 277 bp, Glycine max
  Clone ID: 701127584H1
caaatttcaggaaatcaattatggctcaaccctcaacaagaataggccttgctggactggctgttatgggccaaaatctaggcactcaatattgctgagaaaggctttcccatttctgtttataaccgaaccacttccaaggttgatgagactgtagaacgagcaaaacaggaaggaaatcttccagtttatggctaccatgaccccgaagcttttgttcattccattcaaaagcctagggtgataataatgcttgttaaggctggggcacctgttg

SEQ ID NO: 43846 - DNA, 276 bp, Glycine max
  Clone ID: 701127585H1
attttccatctctaagaatgaccgtacttcaaattccaattccaaatttcttaccttgcccaccattttgactcttggccgtgtcgccgctgtacctcttcttgttgccaccttctacatggatggttggcgaggaacagttgttactacaagtatcttcactgctgcagcagttacagattggcttgatggttatattgctcgtaagatgaaaatgaaatctacatttggtgcctttttagatccagtagctgacaagcttatggtttctgccac

SEQ ID NO: 43847 - DNA, 277 bp, Glycine max
  unsure (1)..(277): unsure at all n locations; Clone ID: 701127586H1
cactgtcggagtaacaccttctgatcctcgaaaatcacttcctcaatggggtcttcatttcctctcctacactcacaggctcaaccagattaagaaaaggtcaagtggggtatatgcatcactatccgagagagagagaggagagtattattcccagagaccgncaactccgctantagacaccgtcaactatcctattcatatgaaaaatctctctaccaattgtttctagaactgggggccatttgggctcaagtcttggtgtggtggaactcac

SEQ ID NO: 43848 - DNA, 278 bp, Glycine max
  unsure (1)..(278): unsure at all n locations; Clone ID: 701127587H1
gtagggctaatccgcctcacgagggtcaccaacggcacgtgcctttngngggccgaggccccctaactgctggtcggcaaacggacgggcgggcgcacgcgtcgcttctagcccggattctgacttagaggcgttcagacataatccaacgcacggtagcttcgcgccactggcttttcaaccaagcgcgatgaccaattgtgcgaatcaacggttcctctcgtactaggttgaattactattgcgacactgtcatcagtagggtaaaactaanctgt

SEQ ID NO: 43849 - DNA, 278 bp, Glycine max
  Clone ID: 701127588H1
gtttggcacaggctgcgcagtgtttgaacgttgaaggagagcgtagaggcagtggttttctttttttgatttctctttgtagaatcgaatcgagttaatttttgatcgtgtgagtgtccgatcttgaaatccacaacaacaatggtgagaggattgctcaacaagctcgtctctcgctccctctcggtcgccggaaaatggcagcacaatcaactccgccgcctcaacatccacgagtaccagctctttgattgaatgattgacctagcgtcgtcgct

SEQ ID NO: 43850 - DNA, 277 bp, Glycine max
  Clone ID: 701127589H1
ctaaaacccattttcttctccaaaaccttcgacttttctctaaccgaaacgcgcttcggaacatttcttcttcgcttctctcacatcttccattgctccaactttcacgcactatcaaattccgacactactgtgtgtgtgctaattgatcaaggaagttgataaggagccagttcagttttctaccttaacgacagaaaaaaggaccgatcaaattctatggctggtgctgtattggttctctccctcagatcaaaatagagttcggagaggtagc

SEQ ID NO: 43851 - DNA, 274 bp, Glycine max
  unsure (1)..(274): unsure at all n locations; Clone ID: 701127590H1
ctaaaacccattttcttctccaaaaccttcgacttttctctaaccgaaacgcgttcggaacatntcttcttcgctctctcacatcttccattgctccaactttcacgcactatcaaattccgacactactgtgtgtgtgctaattgatcaaggaagttgataaggagccagttcagttttctaccttaacgacagaaaaaaggaccgatcaaatctatggctggtgctgtattgggtctctcctcagntcaaaatagagttcngngaggnagnc

SEQ ID NO: 43852 - DNA, 277 bp, Glycine max
  Clone ID: 701127592H1
tgttgaatgctctttattcaagcagtggttgcataacttgcaaactgagaatggggttctagctgatggtaccttgggctctgagacaagttctaattcagggagtagacatgtttggaaagcgcattgggtttctcaagttcaaagctgacatttttgacaaggaaacagggaaaatggttccaggtattgtgtttgcaagaggaccagctgtggctgtgttgatgctcctggaatcagagggtgagacttatgctgttcttactgaacaggcaag

SEQ ID NO: 43853 - DNA, 278 bp, Glycine max
  Clone ID: 701127593H1
gtagggtgctcctcattagatggacgcaatttattggagtcttccaaaattgcttcttgataaaggaaagcttgaggatgctgtgaattatggaacaaaggcattagctaagatgatgggctgtttgtggaccctttcatcaaaatactgcaagtgcatatagtcttctagctgtggttctctaccacactggagattttaaccaggccaccatctatcagcaaaaggccttggatataaatgagagggagctagggcttgaccaccctgacactatg

SEQ ID NO: 43854 - DNA, 275 bp, Glycine max
  Clone ID: 701127594H1
ctattttgcagattctttggaaggagtgccaccctatcccttatacaagcgcttttcttcagctctgttgaagtgtatggattctgaaacattttgtaggacaggcgccaatttagccatgaccgatgaatttgaagattcttccatgcagcagaagcgtaatgagtggcacagattgattgtggagaaggggtttgaaatagagaatattttgaagagtgtttccttgaatccatgtccaagagccttctttcacagctaaatgatggcctaaa

SEQ ID NO: 43855 - DNA, 280 bp, Glycine max
  unsure (1)..(280): unsure at all n locations; Clone ID: 701127595H1
gcgagatnaactgatgcaaacggnangcggantccaagcctcaaacaatgaggcagatttnaggaganagttganagagtnagagggangaactgtgtgttgtgcgngtaaganngccatnnggnaatctacctcctgnttcaaacnaatcacttgcggtggcgatncggcggannaggangatnaccaccaagtcnctgagatcaaggaatctnacgataaacgtggttggagtctccgaaagaaatctgcaaggcatcgtgtgcttagcaatactgtg

SEQ ID NO: 43856 - DNA, 280 bp, Glycine max
  unsure (1)..(280): unsure at all n locations; Clone ID: 701127596H1
atggtcatagtgtacacctagttaggcaaacacatcaaacaccaaacaccaaactagttggctcaattctctttgaatggctttggaggctttgaattcaccaacagcagccaccactccgttccgtggctaccnnnnnnnnnnnnnnnnnnnnnnnnctgaccttcacttacgtgagccttgggctaaaaggaaacgctccaaacgaccgcgttttgagacggaggaagagtacctcgctctttgcctcatcatgctcgcacaaagcggtaacaccaga

SEQ ID NO: 43857 - DNA, 289 bp, Glycine max
  unsure (1)..(289): unsure at all n locations; Clone ID: 701127601H1
aagaaaggaaagggaaaagaggaaaatggtgtgcataaggnaggcgacggtgaaggaccttctgggcgatgcagggcgtgcaacctgttctgcctccctgagaactaccagatgaagtactacctctatcacatcctctcctggccccagctcctctacgtcgccgaagactacaacggccgcatcgtcggctacgtcctcgccaagatggaggaagaaaccaccgactgccacggccacatcacctccctcgccgtcctccgcacccaccgcaagctcggcctcgcca

SEQ ID NO: 43858 - DNA, 284 bp, Glycine max
  unsure (1)..(284): unsure at all n locations; Clone ID: 701127602H1
atactcctctgttctctctgtttctcttcaatcttcctgaaaaaacaaaaacacgaaaaatcatcnnnnnnnnnnnnnnnnnnnnnnnnnnnctttcaactaatatggcaattgaaaaccaagacaacactgtcagagaaatcaagccaaagaacaggagaatcatgggtgctggaggccctgatgatgacgacaataggtggccaccgtggttgaagccactgctgaaagagagcttctttgttcaatgcaagttgcatgctgactctcacnagagcggatgc

SEQ ID NO: 43859 - DNA, 280 bp, Glycine max
  Clone ID: 701127604H1
atgaagttgtttgttttctttgttgctgcagtagttttggtagcatggccatgccatggcgcaggctaccaaaggttccctctccgaatgaaaactgggctatggtgagcgttcttcggaggtaaaatgcgcaagttttaggcttgctgtggaagcacacaacatccgagcctttaaaaccattcctgaagagtgcgttgaaccaacaaaggactacattaatggcgaacaatttagatcagactctaaaacagttaaccaacaagctttcttttatgct

SEQ ID NO: 43860 - DNA, 279 bp, Glycine max
  Clone ID: 701127606H1
gttccttggctgggttaacaacgttgcaaagactttaggtattaggaacctaagcttcaccacttgtggtgcttatggaactttggcctatatttctatctggtccaacctacctcataggaaaacagactctgatgagttccatgttccggggttccctcaaaactacaaattccaccgcacccaattgcataaatttctaagagcagctgatgggcactgatgagtggtcacagtttttcattccacagattgcactttctatcaagtctgatgggt

SEQ ID NO: 43861 - DNA, 279 bp, Glycine max
  unsure (1)..(279): unsure at all n locations; Clone ID: 701127607H1
catggacttgtctttctctttctgggtctccattaaatttttcttctctccctnnnnnnnnnnnnnnnnnnnnnnnnnnnnnnnnnnnnnnnnnnnnnnnnnnnnnctctctctctcccctccgccatggctgaggataaggagatgtctacctctgtcatcaatgggaatgattccctaactggtcacatcatatctacaactattggaggcaaaaatggggaacccaaacagactattagctacatgggcagaacgggttgtaggaactggatcatt

SEQ ID NO: 43862 - DNA, 280 bp, Glycine max
  Clone ID: 701127608H1
gaagcgtcttaataaacgctcttctctgaaaaacctgatttcttctcttcttctcttctctttcgtttcgatcttcgatctctgaaaatgagagagtgcatttcaatccacatcggtcaggccggtattcaggtcggaaacgcctgctgggagctctactgcctcgaacacggcattcagcctgatgggcagatgccaagtgataagactgttggtggaggtgatgatgctttcaacaccttcttcagtgaaactggggctggaaaagcacgtgcctcgt

SEQ ID NO: 43863 - DNA, 278 bp, Glycine max
  unsure (1)..(278): unsure at all n locations; Clone ID: 701127609H1
gcagactatgaaaccttctatctccgaatttctctctctaaaaccaccgtctcgttctcagagcagctgcactttctctccgactctcgctcggaggagcacttggatgtgagtggtttccacatcggttagatcggccatggcggaggtttccggcgaggggggagcagaggcgacggtggccacgccggtgctgccgttggcggtgtctggatcgttcaaggaagggaaganctcgtcgcggaggcgcgcgcattcgatgaggccgagctcgacgc

SEQ ID NO: 43864 - DNA, 278 bp, Glycine max
  Clone ID: 701127610H1
accaaaactcactatcacactcatcttcttcttcgtgctgtttctgaccgcacttggcaacaccaacaccaacacggtgggatcggagttgctgaaggttgctccttccgaattcgctgggacagtgagaaccgtcgttgatgtgttgcaagatattacctccattctctccgagttcggttctggcttcggcgattcgcgtctttctaacgccgtttctgattgtcttgagttgcttgacatgtcctctgatgaactcgattggtctgtctccgcta

SEQ ID NO: 43865 - DNA, 279 bp, Glycine max
  unsure (1)..(279): unsure at all n locations; Clone ID: 701127611H1
ctgagtcaaccctagaaccttacacgcgtctgggtaaancacttttccttatcctctgcgtacacttcacccacccacttcctccgtgccaactgctcccccaggcgcattgcagcctccaccgtgctctccgcgctatcgtgcgccgaatccacgattcccatcctcacngcctccgccgccgttagcttcgcgccgcccagcaccaagtcgcgcatcaccgccggggacctgatcttggaccttatgacggcggcgaatagcccggcagcggnagcc

SEQ ID NO: 43866 - DNA, 277 bp, Glycine max
  unsure (1)..(277): unsure at all n locations; Clone ID: 701127612H1
aatttttctctcaaccggcccaatttagcataagcccagcatggccaccgcaacagcagcagccaccttcgtccttcatggggacgcgcctcctggaggcccattccggggcggggcgggtgcaggcccggttcgggtttggcaagaagaaagccgccgccccgaagaaagtttccagggggtcgggctctagttccgataggcccttgtggtatccgggcccaaaggcnccnantactgggntgggantttgtggaaaaagggnnncccncntnng

SEQ ID NO: 43867 - DNA, 278 bp, Glycine max
  Clone ID: 701127613H1
attgttgaaaagtctcagccaatacaagttttgtttgtctatatagacgaactagttatcaagcctgaattgcatatctgtctatcagttcttctttcctcaaccttctttcttcttatatatcgaacatggctaagtatcattcaagtgggaaaagctcttccatgactgctatagccttcctgtttatccttctaatcacttatacaggcacaacagatgcacaatccggggtatgttatggaagacttggcaacaacttaccaacccctcaagaa

SEQ ID NO: 43868 - DNA, 251 bp, Glycine max
  unsure (1)..(251): unsure at all n locations; Clone ID: 701127614H1
gaaacactacacatccatggcaactgctggcgtgcaagaagttcgtgttccccctctaacttccacctctgagccaccttctctctttgacggaaccaccaggttgtacatcagttatatttgtccctatgcgcaggtgtttggatcactcggaactataagggactacaagacangntcaaacnggtcctatggncntaaaaaagggccttttggtatnggganagttccccngaaaanagggggccttt

SEQ ID NO: 43869 - DNA, 271 bp, Glycine max
  unsure (1)..(271): unsure at all n locations; Clone ID: 701127615H1
aggagattcatctctgcaggttgttttagaaaagaaaaaatggtgaagatttgctgcattggtgctggatatgtggggggtccaacaatggcagtcattgctctgaagtgcccctccattgaagtggctgttgttgacatctccaaatcccggattgcagcatggaacagtgaccagcttcctatctatgagccaggccttgatggtgtggtgaagcatgtcgtggaaagacctttcttcagcatgntgtngaaaacntgtctagggnnaa

SEQ ID NO: 43870 - DNA, 282 bp, Glycine max
  unsure (1)..(282): unsure at all n locations; Clone ID: 701127617H1
aaacctcttctttcaggtccaattcactcgcttattcttttctttccatacacatgcagacantaagttcgaacaagttcaggactggcatggacttctttcaccgcncgaaggcggtgcgcctccgcagccaccacgacaagtacctcctcgcggaggacgacgaggattcggtgacgcaggaccgcaaaggctcctcgaaaagcgcgcggtggacggtagaatacgtggctgaatacgataacataattcgcctgaagagctgttacggcaatacctcac

SEQ ID NO: 43871 - DNA, 281 bp, Glycine max
  unsure (1)..(281): unsure at all n locations; Clone ID: 701127618H1
gtttctctcaggttggcttcccctctcccctatcgctctctccctaatcgcatctcaacttgtngtcgtcggtgattcattctccctaatcataaccctaatcgcatcttaaatngaactcaatcaganacaaaacaangttgttgattctgttacaaaacatagcacggtggacaaacgttaaacaaggctacagatctttgattcagttganagcagattgaaggggagtaaaacaggaacagagcaacctgcagaattactctatcaaggtgccataa

SEQ ID NO: 43872 - DNA, 277 bp, Glycine max
  Clone ID: 701127619H1
gcaggaggcatcaccgttaccaaacatggtgaaagggcgacaaggagagcgtgttagactttacgtcaggggttcaatacttggatacaagaggtccaagtcaaatcaatacccaaacacctcattaatccagattgagaatgtaaacactaaggaagaagttgcgtggtactgtgggaagcgtatggcttacatttacaaagccaaggtaaagaaggacggaagccactatcgctgcatttggggtaaggtcaccaggcctcatggtaacatggta

SEQ ID NO: 43873 - DNA, 276 bp, Glycine max
  Clone ID: 701127621H1
ataggttcgtaccttacattgctgctattgacacaagggtgtgttgttttgtttttatcatcattgagaactaattaaggtacgtgtaaatgggtaagaagcttgatgctctccttggtagaaccttcaaggctgcaaagttcaaggctattgttaaccttgccatctcgcgccttgccgttctcaagaaccagcgccaggctcgccttagacaggcccgttctgatatccttgaactcctccaaatggtcacttgaacgtggcttcgcttcgagt

SEQ ID NO: 43874 - DNA, 278 bp, Glycine max
  unsure (1)..(278): unsure at all n locations; Clone ID: 701127622H1
cttgagcgcatgcttgagaagtcagtcagcccagcaaaagcagatnnaattcactctcaagaagaacatcttatntatctttgcttgatcttcctgtgatagaagagccatttctttcagttcagcggggagatatgatttgtaattcctgagtttctaggtgttatcaccctagttttcttgatgaccgtttcctataaatatgcactctttcacgcgcatttttggcactgatcagtactgagtcgtaaaactaaagcaaaagtagcatctgagaa

SEQ ID NO: 43875 - DNA, 273 bp, Glycine max
  unsure (1)..(273): unsure at all n locations; Clone ID: 701127623H1
gaaagaggctatggcagaagtgaaggagtggctggcgaagacgttcgaaggcgcgggtaaatccgttcctgaattcgaatacacgccgcgcagtccaaacatttgaaccatctcatgactctctccaaagccaaagacgaagccgcgcgcctcgtcgctcgcgatttccgcctcaagtcctccgagtaccgatcccaagctgcgaggattagggagattttggagaatctgggattggcgcaggagagttgccctccatgtggttantcggca

SEQ ID NO: 43876 - DNA, 273 bp, Glycine max
  unsure (1)..(273): unsure at all n locations; Clone ID: 701127624H1
aaaggactcaggtgaaagantaacgtatctattgtgttgctaataagcactgaaattnctggtggtgtgttttttttcaaaggtaagcagatccttgagaganaaaggttcctgcttagaaaaccggggtgctaatttgtgcttgagggtttgtgcttgaaaatggagaaaagagggaatgtgttgatggagaagtatnagtttgggaagctattaggtcaaggaaactttgcgaaggtttaccatgcaagggacgtcaganctggggagant

SEQ ID NO: 43877 - DNA, 276 bp, Glycine max
  Clone ID: 701127626H1
gtagccgcaagcttcgccgtttgaaacagtgcctcaaccatggcagaacaaacagagaaggcttttctgaagcaaccaaaagtgtttctatgctctaagaaaggtgggaagggaaagaggcctgggaaaggtgggaatcgcttttggaagtcaattgggcttggattcaagactcccagagatgccattgaaggaacatatattgacaagaagtgccccttcactggcaatgtttccattcggggtcgtatcctagccggtacttgtcacagtgct

SEQ ID NO: 43878 - DNA, 273 bp, Glycine max
  Clone ID: 701127627H1
attgattggtagggctagtggtttctctgagtatgatgagtatgttcccatggttgacaaggctgttgacctcgggtggaaggagaaacaagtaacaactcaaaactcatatggctcaacagaaaatttcctactgagggctggaaaatctggtggaaactgtgcatatatcttggctgttatcgtgggcttctttgttgccatttttacttttgttcgttcattagcacttcgtgtgactaagagaatacaagacacaaaatctgattctgc

SEQ ID NO: 43879 - DNA, 277 bp, Glycine max
  unsure (1)..(277): unsure at all n locations; Clone ID: 701127628H1
aaattatctgccnttngannntcactatcaannagaggnctncctccaaatagggagganaggtggagctggaagcatgatcanagnggatactactcaacaaaaancggatatgncttgatatgggaagcacagatgggagctaatcagaatttggactgnggngacatntggaagctctaaatacccacgnnaatcaccggtttngccnggaggctannanggacagancntccaaataggagaantctnagggggcggcaggttgngataaatg

SEQ ID NO: 43880 - DNA, 277 bp, Glycine max
  unsure (1)..(277): unsure at all n locations; Clone ID: 701127630H1
gggagctctacttttggtggcacttatgtgcttctggggttgttttctttataaaaagtttggcaaaaacgacagaataagtctggcaatggatgttggtgcaggtgcatcaattgtgatgtttcatggagacttaccatattcttcaaaagacatcatcaagaaactagagactttgaatgaggaacacntaatagggataggggggtttggaaactgtttacaagctagccatggatgatggnaatgtgtttccttnaaaagggntngnaaagtg

SEQ ID NO: 43881 - DNA, 275 bp, Glycine max
  unsure (1)..(275): unsure at all n locations; Clone ID: 701127631H1
atttatcagttatatttttgagctgcctagttctctattctttcctaatcctaaacctataattcttttaacagttcttgttctagcattgtcctgacatttgattgctgtaattggtcctcattgctcatggttctatgttattctctgttcttatccagactacatgatatccatgtccaccttctcatatcatccaaatagttataagcgataaaaactggnggcattncttttttnccgaangtttgcnaanggatctnggnaaggtggcc

SEQ ID NO: 43882 - DNA, 278 bp, Glycine max
  unsure (1)..(278): unsure at all n locations; Clone ID: 701127632H1
gcaggagcataaccatgagctgcaggaatggctgaggcagctcaaaagtgtcttctatgacgccgaagatgtgttggatgaattcgaatgccaaacactgcgaaagcaactgctcaaagctcatggtaccatcaaagacgaggtaagccacttcttctcaagttctaatccacttgtttttcgttccaagatgggctcaacaaatcaaagatgtcagcaagaggctagacaaggttgcagctgataggcataagttggtctccgnataatggatgttg

SEQ ID NO: 43883 - DNA, 280 bp, Glycine max
  Clone ID: 701127633H1
gttgccttttacactggtcccacaggtatgaatctaaaccgaaaaagtgtatcaattttggagaatttatcaccatgaaaatttcctttaatagctaatatttaatttggaacataatataattaatatttgattgttgtatcaattttgaagtttataaacatcaagagttaggactattttcacattattgcaccaatcgaatgttctagactattggttttcgagacaaaccatgtgctacttgtgatcttggaaatagtaaaatcaaagggttaaa

SEQ ID NO: 43884 - DNA, 249 bp, Glycine max
  Clone ID: 701127634H1
atctcctcctccgtaactgacgacggtgtttacgatatcttacatctctctctagccacaggtgatttgaaacagttcttcctggtctaaaggagtagtggagagatatggaagtcaacaattggcataaggagcttacatatgatgagtgggtaccgatcactgtatctggtgcacgtccagctgctcgctacaagcatgctacagcagtagttgatgaaaaattatacattgctggtgggagtcgta

SEQ ID NO: 43885 - DNA, 275 bp, Glycine max
  Clone ID: 701127635H1
gttaatttcctctctttgtttcgcagacctcaccaaccccttttagctcaccctctcactctcagccaccgcacgccgccgtctccggcagccactgtccgttttcacttgtaatttgtcaactcagcataaaaggggtgggttaggctttgcaaccattggaagttccaacaatggcaggcatagctatacttttagatctatggaggaaaaatcaaaacttgagctctggattgcatcctctcatgcttttcagtcttccagtgccttttttt

SEQ ID NO: 43886 - DNA, 223 bp, Glycine max
  Clone ID: 701127636H1
tgaagccatcgatgctcagatctctccactccgccgccacccgcggcgcctctcatctcttccgccgtgggtacgcctccgagccggtgccggagcgcaaggtagccgttctcggcgccgcggcgggatcgggcagctctctcccttctcatgaagctcaatccctcgtttcgagcctctccctttacgatatcgcggaactccggcgtcgcgccgatatcac

SEQ ID NO: 43887 - DNA, 274 bp, Glycine max
  Clone ID: 701127637H1
ttcagggttggaagaatttttgcgataaaatattttttcacccaaaaaaaatggtgttggatccaagactggtgctggtgctgttcatcggcacttgcattttggccatcaatggtgacacagatccaaatgacgttgcttctctaaaggttttgtttcaaagtatgaactcaccatcccagctaaattggaatggtgatgatccttgtggacagtcgtggcaaggcatcacttgctctggcaatcgagtcacagagattaagttactggtcgt

SEQ ID NO: 43888 - DNA, 255 bp, Glycine max
  unsure (1)..(255): unsure at all n locations; Clone ID: 701127638H1
tcatcacttcacttcactaatacatcatggcagacgagacccagaacaagtannagagctctgaggttgaggtccaggatcgtggtgtttttgactttctcggtaagaaaaaggatgaagaagacaagcctcatcctcaggaggaggtcatcgccaccgagtttcaaaaagtcactgtctcagaccaaggagagaacaagcacagcctcttagaaaagcttcaccgatctgacagcagctctagctcttcaagtg

SEQ ID NO: 43889 - DNA, 246 bp, Glycine max
  unsure (1)..(246): unsure at all n locations; Clone ID: 701127640H1
caaattaatcctgaanaatganaaattcanacctngtctcacnatgtncaanangtgtgacannttggnccttgtcgttaaatttgtgaaatcattttgncacattacaaaatgatttcacaantttaacgacaagaccaatctgtcacactttttgtacattagagactaaatttgtgaaatcatttgtaatgtgcaanaataccanntgtcactgcctcatactttgagggatcaaagtntttc

SEQ ID NO: 43890 - DNA, 276 bp, Glycine max
  Clone ID: 701127641H1
agaacattgcacctgcaacttcaacttcacttctccgttctaacactcgccatgttccttatcaagacatggagacagacggctttcggtgtttttgggtacctgaatttcaccaaagctggcttccttgatcattctaagaaattcaacccagaggacatggaattacgaataccagggaagaattgcattgttactggagctaactctggaattggctatgcaacggctgagggtcttgcaaagcgtggcgcaactgtctatcttgtatgtcgt

SEQ ID NO: 43891 - DNA, 273 bp, Glycine max
  Clone ID: 701127643H1
cttaaatgctgatggatctgctgtcaaccctggttctttccagcagcacattagacatgattctaatttgatgagtcagctctttcagagtgatccagagttggcacaagctattttagggaatgatctgaacaaattgcaggaagttttacgattgcgtcatcaccaaagagatgaattaaagcgtcagaaggaagaagagcttgctcttctttatgctgatccttttgatgttgaagcacaaaagaagattgaagctgccatccgccagaa

SEQ ID NO: 43892 - DNA, 273 bp, Glycine max
  Clone ID: 701127645H1
gttgagttctggtttccacccggtaagggttctactgtggagtatcgatctgcatctcggttgggaaactttgattttgatgtgaacagaaaaagaataaaggcactgagacaagagttggagaagaaaggatggacatctcaagataccatatgattaataaactcaggctgaattagcatcagcatctaagcaaatattatttcatatactttggaccttgtatacttttgtattagatacaaatcgcacaggatcatgcaagcaaacttt

SEQ ID NO: 43893 - DNA, 275 bp, Glycine max
  unsure (1)..(275): unsure at all n locations; Clone ID: 701127647H1
tngcggtttccgcaattggttttgaaggtttcgagaaaaggttggaaatatcctttttccagccgggactttttgctgaccctgaaggaaggggtctaagggctcttacaaaatcccagttgggtgagattctaacaccagctgcttgcaccattgtttcttcgctcaaaaacgataatgtcgactcctatgttctatctgagtccagcctctttgtttatgcctacaagatcatcatcaaaacctgtggtaactactaagctattgcttgcaat

SEQ ID NO: 43894 - DNA, 275 bp, Glycine max
  Clone ID: 701127648H1
tttggaaaccaagaatttttgaagggtagcatcaacaagaagttctggaaatggagatcaccaatgtcagcgagtatgaagctattgcaaagcagaagttgccaaagatggtgtttgactactacgcatctggtgcagaggaccagtggactctgcaggagaacagaaatgccttttccagaattttgtttcggccacgtattcttattgatgtgagcaagatagacatcacaactactgtcctgggcttcaaaatatccatgccaatcatgctt

SEQ ID NO: 43895 - DNA, 277 bp, Glycine max
  unsure (1)..(277): unsure at all n locations; Clone ID: 701127649H1
gttaatttcctctctttgtttcgcagacctcaccaaccccttttagctcaccctctcactctcagccaccgcacgccgccgtctccggcagccactgtccgttttcacttgtaatttgtcaactcagcataaaaggggtgggttaggctttgcaaccattggaagttccaacaatggcaggcatagctatacttttagatctatggaggaaaaatcaaaacttgagctctggattgcacncctctcatgcttttcagtcttccagtgcctttttttc

SEQ ID NO: 43896 - DNA, 99 bp, Glycine max
  unsure (1)..(99): unsure at all n locations; Clone ID: 701127650H1
gnccgcccttttttttttagccgttggaggttgttctttaaagagatgactatggtttttggttttattttcaagtaatatatatgctgagaagatttg

SEQ ID NO: 43897 - DNA, 272 bp, Glycine max
  Clone ID: 701127651H1
ctatcctcggggtaactgtcgcttataacaaagatccaagtccagttaagctcaacttgggagttggtgcttaccgaactgaggaaggaaaacctcttgttttgaatgtagtgaggcgagttgaacagcaactcataaatgacgtgtcacgcaacaaggaatatattccgatcgttgggcttgctgattttaataaattgagtgctaagcttatttttggggctgacagccctgctattcaagacaacagggttaccactgttcaatgcttg

SEQ ID NO: 43898 - DNA, 271 bp, Glycine max
  Clone ID: 701127653H1
atgatcactattgctggatgcgtccggaggacatggactatgaccgccctgtgactgaatgccacagttgttccgatctcgcggctgagatggctgctgccttggcttctgcttccattgttttcaaggacaacaaggcctattccaagaaactggtgcatggtgcgaccacgctgttcaagttttccagggatcagagaggcaggtacagtgctgggagttcagaggcttcaatattttacaattctaccagttactgggatgagtacgt

SEQ ID NO: 43899 - DNA, 271 bp, Glycine max
  Clone ID: 701127654H1
ctagtgaagatgacaatgaacttagaagagggccttggactcttgaagaggataatttgctctcccaatatatttctagtcatggagaagggcgatggaatttgctagctaaacgttcaggattaaagcgaactgggaaaagttgcagattaaggtggctaaattatctaaagccagatgtaaaacggggaaatttaaccccacaagagcaacttataatcctcgaactccactcaaagtggggaaacaggtggtcaaaaattgcacaaaa

SEQ ID NO: 43900 - DNA, 271 bp, Glycine max
  Clone ID: 701127655H1
atcatttttattttttccaatcaaaccaaacaaaacataagcaccgctcttttctctccgaaatccccatctcccttcacttctgagctctggacgagatcccagatctcaccatctttcacgcactcttccatcagattcaccctttcgtttaacgcaaactcataacttgaaggttaatggctgctccaccggcaagggctcgtgccgattacgattatctcataaagcttctcttgatcggtgacagcggtgttgggaaaagttgcct

SEQ ID NO: 43901 - DNA, 271 bp, Glycine max
  Clone ID: 701127656H1
ataggctcctcactggggcatgagtagtgaactttggataagttttttgtgtgaagaatttgtataataatggcaggcatggcaagaggaagagcagatgtgaaatctagaaaaaatttggtcactacaactgtgttggttttggtgactgttggtggttttttctacttctattctcagaatagtgattcatcatcttctgttgagtatggtgctaaatctttgagccacactggtttgggaggggacaaagatgatggtgtatcttccc

SEQ ID NO: 43902 - DNA, 273 bp, Glycine max
  Clone ID: 701127657H1
attccccttatctttctctcttctctctccccgcccaaaccctaactccctaccctattccgctttctctcatccatcatgaaaggaggaaagtccaagaccgaatctaagagagccgatgccaaacttgctgtgaataagaagggcgccgccaccaagactaggaaacccgccggaaaggggaaggcagcgaaagatcctaacaagccaaagaggcctccaagtgctttcttcgttttcatggaggaattcaggaaggtgttcaacaaggaa

SEQ ID NO: 43903 - DNA, 270 bp, Glycine max
  unsure (1)..(270): unsure at all n locations; Clone ID: 701127658H1
aaaaaaaatgaggttttttacagtgaaagtagctctgtgctgtgtggtggttatgctactaaccctctcagatgcacagctagataactctttttacaaggacacgtgtccaagagtgcattctattgtgcgtgaagttgtcagaaatgtttccaaatctgatccccgcattcttgccagtctcataaggctccactttcatgattgtttcgttcaagggtgtgatgnacaattctgtngacggacacagnaacgatcgtgagggaanaa

SEQ ID NO: 43904 - DNA, 271 bp, Glycine max
  Clone ID: 701127659H1
cgagtttgtccacgcaaacgtatcgagccagcctctcaagctagggttcttcaccgcgctccaaccttcttctctctcccttcgtcccctccaattggaatgtgattgtgacttcacatgctggtagctgacattttgaaattgtaactgtggtgggagcaatattatatattttgcgacatcatggagatacagacttgtggcaggccgattgactccttgcctagagaaagtgcttggtatgaatattctgtcgtctgattacttcaag

SEQ ID NO: 43905 - DNA, 272 bp, Glycine max
  unsure (1)..(272): unsure at all n locations; Clone ID: 701127660H1
cgataccccaattcatagaaaggaaggcttgaggaggggtcggcgtgttcacacttccaacccaattcnggctgtcaaaacgacgtcgttgacagcccggttctctggaggtagtagatagatatgcccattcccagtttcagatagggacaagggttactacttattggtgttgtgctatagtattgctttgacaagcttttgcgttgagttgaatatntgcaatgagttcgttttctggagccattcaaagacctcttgtagcggctgcc

SEQ ID NO: 43906 - DNA, 271 bp, Glycine max
  unsure (1)..(271): unsure at all n locations; Clone ID: 701127661H1
gaaacatccgaggaacaaggttctgtgcagagcgggactgtgattcaacgcgtgtcttctgaaactggataattttggaacagggagtagaatgtcttgcgccaccttcaatgttgcagcttctttgaatcttcatggacgtactaagcaagcagtttctaagccatttgggtcaagaaatcactgtactttccccaagttttcttttctctatnnnnnnnccttgaatttgagctccacttattatagttttggccgggatacaccctca

SEQ ID NO: 43907 - DNA, 273 bp, Glycine max
  unsure (1)..(273): unsure at all n locations; Clone ID: 701127662H1
gctgatcttatacaggcactgaacaatcgtctggtagctctatcatttcatattagagaatactattggattgatttgaaaaaattaaatgagatttaccgttacaagacagaggagtactcatatgatgcagttaataagttcaacatatacccagaccagatttctccttggttagtggaatggatgccaaacaaaggaggctatttaattggcaacctacaaccagctcacatggnttccngntttnttncggggggaaannggnggtcc

SEQ ID NO: 43908 - DNA, 229 bp, Glycine max
  Clone ID: 701127664H1
cgccttctctctccgacgatctcggattcgattttccggcgaagaagctgataagagaccttaacctttttccttctgaagatgtcaacatcgttcctcgccactccaattctcacgccaacaaaatcgtcgagaaaccgcttaggttcccaaacttagtgccttcagactccggcatttccctcgacgattggctcaccgcgtggctattatcttattctcattctca

SEQ ID NO: 43909 - DNA, 275 bp, Glycine max
  unsure (1)..(275): unsure at all n locations; Clone ID: 701127665H1
gagagggagcacagtgaagaagagaacgaaggaacgaagatggagactcctcctccgcaacaaggcgtggtgaagaagaaggagacaaggggccgaaaacccaagccgaaagacgaacacgccaaggcgttgaaggaagggagaaaaacacagcaacaacaacatgnnnnnnnnnnnnnnnnnnnnnnnnnnnnnnnnncttcggtggacgagaaatacacgcatgaagtcccttgttcctgtcctctacgactggctcgccaaccacaacctcg

SEQ ID NO: 43910 - DNA, 271 bp, Glycine max
  Clone ID: 701127667H1
attttctcacacacactctctttttctcttccaattacaacacaatcagtctgagattcgccaccgaaaaacctctcaccatggtttctcgccatttggtttcgctcttcctctgtttcctctgtttcgagatctctgtttcatcaattcgattgcccggtttggaccaagacgccaaggccacgcatggatcggtgcttaggttgaacagaggaggctcttcagtgaagtttgatcccacacgggtcactcagctctcgtggagtcccag

SEQ ID NO: 43911 - DNA, 270 bp, Glycine max
  Clone ID: 701127668H1
gttccgcttctctctgcttttcacactccttctttcttccattctcttatcgaatcactcagtaaaatgcggcgaccgtgacgaggaagatgatctttatcagggaatcaacaagtatagggaatcattaaacttgacatctctaacaaagaatgaaaatgcaaattgctttgctgatgaaatggctgaccagttcaagaatcaaccttgtacaaataccacaggcgcaaacacagtaccaggcacagagctcggttctccaactatccc

SEQ ID NO: 43912 - DNA, 268 bp, Glycine max
  unsure (1)..(268): unsure at all n locations; Clone ID: 701127670H1
cgcancgtagcagtaactcgtggaattgctagcaatggcgaggatcaaggtttacgagctgaggcagaagacgaaggctgatctgttgaatcagctgaaggacctcaaggccgagcttgccttgcttcgtgttgctaaggtcaccggcggtgcacctaacaagctctctaagatcaaggtggtgaggttgaacattgcccaggttttgacggtgatttctcagaagcagaangccgcgttgagggatgcctacaagaacaagaagtac

SEQ ID NO: 43913 - DNA, 269 bp, Glycine max
  Clone ID: 701127671H1
aagaggcatcagttgcaatggctcgttacggtgagggcgacaagcggtggatcgtggaggaccgccccgacggcaccaatgtccacaactggcattggtccgagaccaactgcctcgactggtccaagaccttcttcaccagcctcctcactaacctccctatcctcgacggcgagggtaacctcttcctcaaaacgacgtcgcttcgctccctcgacggcgaggcctacatcaatgtccgaaaggggaagatcatccccggctacgag

SEQ ID NO: 43914 - DNA, 269 bp, Glycine max
  Clone ID: 701127672H1
ccaaggtcctgaatctcacagagacagagagaatgagtacggtgggagaagggaaggtgagtagtaatggtcatggatgttgcaaatcagggccaggctatgcttccccactggaagccatttctggtcccagagagtctctcatttatgtaacctctgtctacacagggaccggaatagagaagccagactatttggcgacagtggatgtggatccaaactctccaacttattccaaagtcatccataggcttcctgttccttattta

SEQ ID NO: 43915 - DNA, 270 bp, Glycine max
  unsure (1)..(270): unsure at all n locations; Clone ID: 701127674H1
ggaagaatcagagctcagcgataagcagaaagtggagatcgcgaaatggttcctcctcaactctcctnacngagaaatccaatacgttgccaaagatgtgaaatcgattctcaacaacgacgatttgtacaaggaagccgcttccgaggcttttccctattacaacaaatcnccacttgatttccattccaatgcccaacncaagcggagacgtactggttacttcgttcggtgagcttgagggtaatgcatttcttgaacctaggactg

SEQ ID NO: 43916 - DNA, 251 bp, Glycine max
  unsure (1)..(251): unsure at all n locations; Clone ID: 701127675H1
tcttgtaggagttgaactgaagcatgcggcggagggcgtaccggagncgaatangcnccgccaagcccaccaagcagggcgagggcctccgccactactattctctcaacatccacgagcatcagctccttcttcgccaaaagactcataacctcaaccgtctcgaggctcagagaaacgacctcaattctagggtgaggatgctgcgcgaagaattacagcttctgcaggaacccggctcttatgtcggt

SEQ ID NO: 43917 - DNA, 269 bp, Glycine max
  Clone ID: 701127676H1
gttaacactcttcttcatcgtcgtcgcaatgggacgtgtgatccgtgcgcaggtaagggagcaggctcggtcttcaagtcccacacgcaccaccgcaagggccctgcacgcttccggagcctggacttcggggagcgcaacggctacctcaagggcgtggtcaccgacgtcatccatgaccctggccgcggcgcgccgctcgccaaggtcgccttccgccaccctttcagatacaagaagcagaacgagctcttcattgccgccgaggg

SEQ ID NO: 43918 - DNA, 269 bp, Glycine max
  Clone ID: 701127677H1
gttaaactgggccatgttgactgtgatgctgaaaagtctctaatgagcaggttcaaagttcaaggattcccaactatcttggtgtttggtgctgataaagatagtcctattccttatgaaggcgcaagaactgccttggctattgaatcatttgcattagagcagctggaaacaaacgttgctcctccagaagtgacagagctacacagtccagatgttttggaagagaaatgtggttctgccgcaatctgttttgttgccttccttcc

SEQ ID NO: 43919 - DNA, 271 bp, Glycine max
  unsure (1)..(271): unsure at all n locations; Clone ID: 701127678H1
cgtggcaccaatgagagcctcaattaccttatcccacatcgacaatctaatccaattttcccaatcatcctcttccaatatcctcgttgccacataacacacattgaaactaaactccaacaagttcctaccatagtctgaggaaagtgagtgagagaaagagatcgcagaccacagagcagantggnttctacccaangtttctngnacnaccatgctctnacnaccctngcaagggnnganccccatcannnggctttngggtnaaanc

SEQ ID NO: 43920 - DNA, 280 bp, Glycine max
  unsure (1)..(280): unsure at all n locations; Clone ID: 701127679H1
gtgacggagttgcaaattggcgtgaaggtgtagcctttaacctattactttgattaagatccattgcatcttttatagtttaggttaaaggtttcgattaattaacatttgccgatctaaaaaaaaaggtttcgaataatttgtacggaaagaggagtttgcataaagtgtttttaatnaaaatttaaacttaaaantcncgtggccnggggaaaantttttaangttgatccgggacccccgaangaantgtnaaggggaaaatngnccngnnggnggc

SEQ ID NO: 43921 - DNA, 272 bp, Glycine max
  unsure (1)..(272): unsure at all n locations; Clone ID: 701127680H1
aanaaatctaggaaagatcctaaaagtcgancgtcgcagtnacttcgtttaccttccaagangatgaatcatttggtncacctgaagtcatcggattttcttgtttatatacttaagtctgcatctcaaaatgtcatacccaaattacaatctgcacttaggctacagttcaatgcagcctgagtttaatagcttcgatgacgtgcgaggactctatgatggtggaattaagttacctactgatacacttagccagcttagcccataccatt

SEQ ID NO: 43922 - DNA, 270 bp, Glycine max
  unsure (1)..(270): unsure at all n locations; Clone ID: 701127681H1
gatggcagaggtgaagcttcatggattttggtatagtccctacactttgagggtggtatggaccttaaagttaaaggatataccatatcaaaacatagaagaagaccgctacaataagagtcttcaacttcttgaatacaacccagtatacaagaaaactccagtgcttgtccataatggnaaaacccttatgtgagtccatgcttattgttgaatacattgatgagatttggtcacataattcatacttcctgctgatccctacgagag

SEQ ID NO: 43923 - DNA, 268 bp, Glycine max
  unsure (1)..(268): unsure at all n locations; Clone ID: 701127682H1
ggcattaanantgcngatcttcgngananncctaacggggaagnncataaccctcgaggtcgnaancagngacaccattgacaatgtcaaggntaagnttcnnganaaggaangcatncctccggatcagcaccgtttgattttcgccggaaagcaacttgaagatggaaggaccttngccgattacaacatccagnaggaatcaacccttcaccttgtcctcaggcttcgtggtggcatcatcgagcctccctcatngctttggctg

SEQ ID NO: 43924 - DNA, 267 bp, Glycine max
  Clone ID: 701127684H1
atgcttccaatcctaagaacattttggactctgtcaaaaatgtattgtctgctttctactggttttcctatccatacacaatgattggcataacattatgcgcattttcttcatctcttctcgcggtggaaaaattatcagatatatctttatcatttttaattggcgtgttacagggtgtgctgcctcaattgtttattgaaatttatctttgtggtgtgaatcaactgtatgaccttgaaatagacaagataaacaaaccacatc

SEQ ID NO: 43925 - DNA, 267 bp, Glycine max
  Clone ID: 701127685H1
cgcaaagccagagaagaataaaaagcctttctcccggggccagtccagttcattgtagagagcagacaccaacaccaaaccttaaaattattttgcccctctgcttctctctctgtctttctcagaagacaactcaaaaaaaccatggacgtgggtcagatgcagagacagtggatcgactacaccaaatccctcttccttgagggcttcctggatggtcagtttctgcaacttcagcagcttcaagatgagaacaaccctgacttt

SEQ ID NO: 43926 - DNA, 265 bp, Glycine max
  unsure (1)..(265): unsure at all n locations; Clone ID: 701127686H1
gctacagcgatggccataaccgccaccatttccgttcccttcacatcccccagtcgccgcactctcgcctccgtcaatagcctctctccgcgttctacccgatccactttgcccacaccgcaacgcactttcaaataccctaattcgcgcctcgtcgtgtcttccatgagcaccgaaacagccgtcaaaacttcatccgcctccttcctcaacgcaaggagtccggnttctccatttcgccagtaccanggcctcggaaacgatt

SEQ ID NO: 43927 - DNA, 264 bp, Glycine max
  Clone ID: 701127687H1
cgtcgctctttcttcaacttcaagcttaattcctcatgtctttcagaggcctcagccggccaaatgccacattcaggcatgggtgttgctgatcacagcaaaaacaccttcatggaattgaagcagaagaaggttcatcgttatgtgatctttaaggtcgatgagaagaaaagggaggttgtggttgagaagactggtggcccggctgagagctatgacgattttgctgcatcttgccggagatgattgcagatatgctgtctt

SEQ ID NO: 43928 - DNA, 268 bp, Glycine max
  Clone ID: 701127688H1
cacccttcatttatttcttcctattcaccagaaaaaaagcttccatttttgctcagatcttcctcttgctcctcccgttcctgttcctgtgaagaatagctcctccatatagttttatgaacatacagttgcagaagttccaacataaatggtgatcatcactcgcagttctgctggtagaaaaccaagtgaaattatgaagtttttcttgacaacttttattggtatagttttcggattctttataggagtatcaattccaacattg

SEQ ID NO: 43929 - DNA, 266 bp, Glycine max
  Clone ID: 701127689H1
ggtaaatccgtgactgagctaccaggcacggatgcagaacaagtatggactgcgttagaggatttctgcaacctacacaagtggtggcccatagaaacatgttaccaactagagggtgtaccaggtcaacctggtctaatccgctactgtgcttccaccgttgaagaagctgttgttggtgctcagaagacaacaacaaccatcaagtggaccaaagagaagctactcgcgatcgatcccgtccaacgttgtttgtcctatgaaat

SEQ ID NO: 43930 - DNA, 234 bp, Glycine max
  unsure (1)..(234): unsure at all n locations; Clone ID: 701127690H1
gttttaagttacacngtttttcattgtttanacttaatcanccaatggctgcttcaacaatganntctctcttcatcatcattggctggccaagctatcaagcttgccccctccacccctgagcttggtgttggaagggttagcatgaggaaaacagcctccaaaactgtttcctcaggaagcccatggtacggcccagaccgtgtcaagtacttgggcccattctcaggtgag

SEQ ID NO: 43931 - DNA, 265 bp, Glycine max
  unsure (1)..(265): unsure at all n locations; Clone ID: 701127691H1
ctctcctctccgctccggcgagtaagaaaaatgcagcatttcgtggatttgcaaganaattcggagttgggtgagtcgaattcatggctttcagcgaaagagcagtccggtgcggcacccaacaccaatttggatcgcgtcctcttcaacgacctcgtcgagattgtccctctcgttcagtcactcatcgatcgtaaagcaagccgttcattcacgcggcgtggttccatgatctacaccaagacacccacaagagaatcattgt

SEQ ID NO: 43932 - DNA, 266 bp, Glycine max
  Clone ID: 701127692H1
gcgaaactggagggatggaacaactaccaacattgtagatcccacattaactgacggtttgcgaaatgaaataatgagatgtatccacattgggttattatgtgttcaagaaaatgtggctgccagaccaaccatggcttctgttgcactcatgcttaatagctattctctaactctaccggtgccttcagaaccagcatttgttggggatggtagaactagaagccttccagacatgcagtcctcatcagagcataattcaaggc

SEQ ID NO: 43933 - DNA, 266 bp, Glycine max
  Clone ID: 701127693H1
attagttgtcatatatagaagtgagtgatcagtgtcgatcagcagatttttcaaagaatggtgagggacgtgaagaatggtagagctctccttgttgcatttctgatgtttctgttggcatcagaagtgttgattttggaggctgagggtgcaggagaatgtggaaagacccctatagggtctgcagctgctagcctgagcccatgtttgggtgcagttagcaatgtgagggcaaaggttccattggcttgttgtgccagagttgg

SEQ ID NO: 43934 - DNA, 249 bp, Glycine max
  unsure (1)..(249): unsure at all n locations; Clone ID: 701127694H1
ggctttctagtgagggtcttagtgtacgttcagcaaaaattgntggagaaaagtatttgttangcatttggaggttataatgggaggtatagcaatgaggtttttgttatgagacccaaggcaaaggataccatgcgtcccaagatttttcaatccaccagctgccgccgctgctgcagcttctgtnacttcagcttatgcattatctaaagtccgagaagttggatttcattcacctnggatgatata

SEQ ID NO: 43935 - DNA, 265 bp, Glycine max
  unsure (1)..(265): unsure at all n locations; Clone ID: 701127695H1
gcatataatacgttattgacaccgaacgaaagaaacgcagcacgcgtctgtgagctatnnnnnnnnnnnnnnnnnnnnnnnnnagcttcggcgagttcacgttcgcgtcgtttccgagtcaaccaacctcaaacgacaccaanccccctcgacgacgacgattggggcgacttcatgaaccattccaaccggatcaacggacccttcgactcgttcgggttcccaggatcccacgaacaaacacgtgaacgacgacaaggcgttg

SEQ ID NO: 43936 - DNA, 268 bp, Glycine max
  Clone ID: 701127696H1
aagaggcatcagttgcaatggctcgttacggtgagggcgacaagcggtggatcgtggaggaccgccccgacggcaccaatgtccacaactggcattggtccgagaccaactgcctcgactggtccaagaccttcttcaccagcctcctcactaacctccctatccttcgacggcgagggtaacctcttcctcaaaacgacgtcgcttcgctccctcgacggcgaggctaacatcaatgtccgaaaggggaagatcatccccggctacg

SEQ ID NO: 43937 - DNA, 286 bp, Glycine max
  Clone ID: 701127701H1
gaaaaattaagatggaggggaaggagcaggatgtgtcgctgggagcgaacaagttcccggagagacagccgattgggacggcggcgcagagccaagacgacggcaaggactaccaggagccggcgccggcgccactggttgacccgacggagtttacgtcatggtccttttacagagcagggatagcagagtttgtggccacttttctgtttctatacatcactgtcttaaccgtcatgggagtcgccggggctaagtctaagtgcataccgttgggattcaagga

SEQ ID NO: 43938 - DNA, 263 bp, Glycine max
  unsure (1)..(263): unsure at all n locations; Clone ID: 701127702H1
ctttgattctctgttctctgtannnttctgtttcgcganacaggaacttaaacaatgaangactgcaaagggcaagggagcagcgaggccctcaaaagaatcactgaagcctgttgatgaccganaggttggaaagcggaaggcttctggtaagcctgagaaaagcagagcaccaaagaaggagaagaaggccaagaaagaccccaacaagcctaaaagaccaccgagtgctttcttcgtgttccttgaggagttcaggaaga

SEQ ID NO: 43939 - DNA, 282 bp, Glycine max
  Clone ID: 701127703H1
cactcttctctgcagcttttgcctacaactcccttcaccatggctgaacaaaccgagaaagcttttctgaagcaaccaaaagtgtttctcagcacaaagaagactgggaagggaaagagacctggaaaaggtgggaaccgcttttggaagtccattgggcttggatttaagactcccagggaagccatcgaaggaacctatattgacaagaagtgccccttcactggcaatgtttccatccgtggccgtatcttggctggaacatgtcacagtgctaagatg

SEQ ID NO: 43940 - DNA, 278 bp, Glycine max
  unsure (1)..(278): unsure at all n locations; Clone ID: 701127704H1
cttggctctctctgtttagggtacgcaacctctgtctccttttcctccatactctctttttcttaattgtttttctttcaacttcatatcataattgtgttcatatgctaacttttcatactttttcgtcacttttctatagtttatttggtcaaattaatgggaatatccttatatgctcttgttttgaattttgttgtgcaaactgtgtctgagttttttatttcttggaggactaggagcacttgttcgtctacactctacatctaantttctct

SEQ ID NO: 43941 - DNA, 277 bp, Glycine max
  Clone ID: 701127705H1
ctgtttctcttgctctacttttaccctgtttccagtggaacaaatcttcatccaaattaggttttgttttggagaaatgtatgcagagactggtcttttcttcccatatttgcacaacgtctctcacggccttcaccagcttgaggagtactgcaaaacccagaagtccaatgcttcaatggatgaccttgttcagtcttctgccatgtcagagtatgatttggcagctgagggagatctgttcaaagctcctgaacctattattgaagagccaatc

SEQ ID NO: 43942 - DNA, 275 bp, Glycine max
  Clone ID: 701127707H1
agagagtgaggaagttgccccagttgagtagtaagtgatgatggagatggattccatgtgtatgtgggtggtccttgtggccattgctggtgctcttttagtcctaagatctatgctcaagaatgtaaattggtggctctatgaatccaaattgggtgtgaaacagtactctttgcccccaggtgacatgggatggcccttcattggcaacatgtggtccttcctcagagctttcaagtccaaggaccctgattccttcatctcctcctttgtct

SEQ ID NO: 43943 - DNA, 272 bp, Glycine max
  unsure (1)..(272): unsure at all n locations; Clone ID: 701127709H1
gctgtgacttgttttgagttcaatcaaatcgcattggtatctgaaatcaggaaagatggttagcgtactgagatcaggcaggcacaaagggcagaaggcccagcaaccatccttgccattggaactgcaaacccaccaaaccgtgttgatcagggcactttccgnntannattcnngttncccaanatggcccattnncnggnnnnangggnaattttcggncntttngaaagtttttttncaggggggtttttttccctaaaggggggntt

SEQ ID NO: 43944 - DNA, 94 bp, Glycine max
  unsure (1)..(94): unsure at all n locations; Clone ID: 701127710H1
actccgtcaactgaatctccatcattttncccctttcgcnnctncgtgtttttncttctctctcactttnacatctacacgatccacncnnncc

SEQ ID NO: 43945 - DNA, 271 bp, Glycine max
  unsure (1)..(271): unsure at all n locations; Clone ID: 701127712H1
ctaataacgtctggccccggtcgggagccggcggtcgggtcagctggagcaacccactgcggcggcgccgacggcgggggaaagatggtgtatggttcggcggtgacgagnttnagcgaggaggtgaaggtggggtttagggtttcgagggctgtggtgtgggttttcatggtggtggtggcaatnaccttctcgtcgggntgtttccnatggtgccggtnaanaaancgatntnttggtggcccctcgaagngtnntntcccccnnncnt

SEQ ID NO: 43946 - DNA, 269 bp, Glycine max
  unsure (1)..(269): unsure at all n locations; Clone ID: 701127713H1
gtaatcatgggggttcatcctacgaggaaacagactctatagctctatttattgggccaaaaacccatgcctctggccattcatcatccaatcatgacacaattttncaggttgatattgcaccaacaatngctttnnttgtgggtgnnccaattcccaaaaaatantattggggtttggatccccccaaatggttgnctctcctgacagatgaccaaaanttgagggcnctgcagttgaactcatggcngttgttcagttacnncang

SEQ ID NO: 43947 - DNA, 223 bp, Glycine max
  unsure (1)..(223): unsure at all n locations; Clone ID: 701127714H1
atcacacactctcttcaatttctagggttttgctattgctttgcctccgttccccctttctcacaaaaacaacgccttttctcttctccttcgtatctattctttgcntttngtttttggttgattganggcattcacagcgtaattngttgctgcatttnnatcgatttatctaaccaggactgaatgacctaatggagtctaaaggtgggaaaaagaagtc

SEQ ID NO: 43948 - DNA, 272 bp, Glycine max
  unsure (1)..(272): unsure at all n locations; Clone ID: 701127715H1
caaagctgcatgcattctgtgaatctaaaggagttcatctgtctggatattctccactgggctcaccaggagttctcaaaagtgacattcttaagaatcctgttgtgatagagattgcagagaaattggggangncaccggcacaagttgcccttaggtggggactgcaaaanaggtcatngtgtnccggctanggacccnatggngcccnaatnngggaancttggnngtttgcnanggnctaccnnngangggttgtgnnccctntnaaa

SEQ ID NO: 43949 - DNA, 280 bp, Glycine max
  Clone ID: 701127716H1
taccattcatcccttggggtcagatcataccaaaaacaaaacaagccaagtgaaagagagaagaaaagtcaaagacaatgtcagggatcattcacaagattgaggagacccttcatgtgggaggccacaagaaggaggaggagcacaagggtgagcagcaccatggtggagaatacaaaggggagcatcatggtgaacacagtactgaatacaaaggagagcatcatgttggtgagcacaagccggagcaccatggaggagaagagcacaaagaggggtt

SEQ ID NO: 43950 - DNA, 278 bp, Glycine max
  unsure (1)..(278): unsure at all n locations; Clone ID: 701127719H1
gcaggagtgaggaatcacaacctccaccggcgaaacctgtaactntcggcgacgctcaacactcgcactacgccgacagtgatggagagtgcttttgcaagcgcttctgcgattacagaccagaggcaaaagatagagcagtataagcaaatacttgctgccgtcatttcatctantgacattgttcaggctaggaaattcatagatcacatgttatcagatgatgttccattagtagtgtctcggcagcttttgcagacttttgctcaagagtgggg

SEQ ID NO: 43951 - DNA, 277 bp, Glycine max
  unsure (1)..(277): unsure at all n locations; Clone ID: 701127720H1
ctttgacttgcaattctatggaattcattangtgttctatagctggggttgcttatggacaaagagttacagaagttgagagagctctatctgggagacatgaatcacatccaggccaagtganggaaaagatcagtncaatcaaagtcatccattaaagggtttaactttatggatgaaagggtcatgaatggaaattggatcaaagaacccaatgccaatgtaatccagaatttcctacagttgctggctgtatgccatactgcaatacctgaag

SEQ ID NO: 43952 - DNA, 274 bp, Glycine max
  Clone ID: 701127723H1
aagggtttaacctttctggctgtgttaatatgcgtttcagcactgtcactgagtccttctgttgcgggggaagggcaaaataatggccttgttatgaacttctacaaggaatcatgccctcaggctgaagacatcatcacagaacaagtcaagcttctctacaagcgccacaagaacactgctttctcctggctcaggaacatcttccatgactgtgctgttcagagttgtgatgcttcactgttgctggactccacaagaaggagcttgtctg

SEQ ID NO: 43953 - DNA, 202 bp, Glycine max
  unsure (1)..(202): unsure at all n locations; Clone ID: 701127724H1
ggaagatngctcgcnctctttcagtacctgccaatgacaacnataaaagcctaaggaggatggattcatttttccgtgttgttccttccactcctcaagtnannaccaggaaatgaattgttggccacacacacaacanntnctntcnaaaatnnagatnctaanngtnaagatntagnngaagaagnggctntntgnagaa

SEQ ID NO: 43954 - DNA, 274 bp, Glycine max
  unsure (1)..(274): unsure at all n locations; Clone ID: 701127725H1
gttgtagcacttcttcttctggcggangtggggcccatggctgaggctgtgacatgcaccccaacagagttgagtccgtgtcttccagcaatcacttccggtgctaaaccttccaatgcttgttgcacgaagctgaagcagcaaaaaccatgcttatgtggctacctcaaaaacgctagcttgaagcagtatgttaactctcctaatgcccgaaaaaccgttgcttcttgtgggattccctttccaacttgttaattaattaagccttcttata

SEQ ID NO: 43955 - DNA, 263 bp, Glycine max
  unsure (1)..(263): unsure at all n locations; Clone ID: 701127727H1
ggccgcccttttttttttgacgagacctatggtgcctttaanaccgttgaagagctttgggatggtgaactctgagcaatatgcttcatagagatgttgacaaatgcactgctcctcaagcagattgatcccgccttttnccngtnaagatctaaancctcccgngcggnatccncccnnttgtgtgtggngatgngggaggtngttttntnnaanaaaatngggcgnggnngngcnggnggnnngaaanagggggngcntnt

SEQ ID NO: 43956 - DNA, 270 bp, Glycine max
  unsure (1)..(270): unsure at all n locations; Clone ID: 701127729H1
ccttttttaatggcactgttgaagttgttgaatctggtgcttttctaagcatggaatctgtttttcttgttactcttggggttgcactccttgtcctcctggggctatggattcatggtcaaatacaacacctatctaagaaaacaaagagggcgccaaaagttgaagttgggactaggactactgatgcttcaacagatgaatggctgcagggaactncatanacccggtcagggncngcaagtccaagaaggaggattgtaagccntt

SEQ ID NO: 43957 - DNA, 111 bp, Glycine max
  unsure (1)..(111): unsure at all n locations; Clone ID: 701127731H1
cttctggattctgattggtnctgaacactaggaatctaagggaattggacttgcaggagagtgaagtggaggaccttagtgggcactggctaagccattttcctgattcca

SEQ ID NO: 43958 - DNA, 275 bp, Glycine max
  unsure (1)..(275): unsure at all n locations; Clone ID: 701127733H1
gcgacttttgagttcaaaagatgactaacttcccattgatcaacttggagaagctcagtggtgaggaaagaaacgataccatggaaaaaattaaagatgcttgtgaaaactggggattctttgagctggtgaatcatggcattcctcatgacatattggacactgtggagaggttgaccaaagagcactacaggaatgcatggaagagaggttcaaggattngtggcaagcnaaggtctagatgctgtccanactgaggtcaggtanggactggg

SEQ ID NO: 43959 - DNA, 251 bp, Glycine max
  unsure (1)..(251): unsure at all n locations; Clone ID: 701127734H1
ctcactctggcagcggcactctcggtggctacnnnatctttactcgtggtgagttgtcaagatgtacacancaaggaagaaaatccacaaggataaggatgctgagccaactgaatttgaggaatcagtcggacaggcattgtttgatctggaaaataccaacaatgagctgaaaagtgatctgaaagatttatacataaactcagctgtccaaattgatgtttctgggaaccgcaaggctgtggttatcc

SEQ ID NO: 43960 - DNA, 275 bp, Glycine max
  unsure (1)..(275): unsure at all n locations; Clone ID: 701127736H1
gccatggcgtcgtttcttcaatcgtttctggatccgaagaagaactggttcgccgctcagcacatgaaatccctctaccaaacgcctccgcaaatatgggctccgatacgacgatttgtacgntccttactacgatctggatgtgaaggaggcgctgaatcggcttccgaaagaggtggtggacgctcgccacgcgcgtcttaaacgcgccatcgatctttccatgaagcacgagtacctccctgacaatctgcagtcaatgcaaacaccattca

SEQ ID NO: 43961 - DNA, 272 bp, Glycine max
  unsure (1)..(272): unsure at all n locations; Clone ID: 701127737H1
catgcttccgatctccttcctcatctcctccgatcntccttggtcatctcttccgatcatccttcgtcatttttttcttcttcctttgttagcatcacagaaaagttcaataaggcaacaaatttgagatatgaatataagcaattcagaaataggtgggattctttgaaaaaggaatggcaattatgggctaagcttattgggaaggacacaggtcttggctgggatggggagaagaaaaccattgcagctagtgatgaatggtgggaagc

SEQ ID NO: 43962 - DNA, 218 bp, Glycine max
  unsure (1)..(218): unsure at all n locations; Clone ID: 701127738H1
gagaaananaagaatggcaangttaataaaattctttgagttgaacacaggggccaagattccttctgttgggttaggcacttggcaagctgagcctggtgttgtagccaaanctgtcaccacagccattcnggntggatacnggnatattnnttntgcncanncgngnatcnagcgcncatttngttgntcaangatnangtnttttcagngggngg

SEQ ID NO: 43963 - DNA, 271 bp, Glycine max
  Clone ID: 701127739H1
accatgtcgaatttgagtttccttcaatttcatagtagcagccctttggggcactcctcttctcaacccaaaagtccaaccccaaacagcaacaacttcaaatcatcaaaacatacatcaaatgtagggtgcaatattcaaccaaaatcggaggaaatgaaattggtgttcgacaagtttgacaccaacaaagatggcaagattacccttgaagagtacaaagcagctatgaggacaatggggtggggaatcgaaggcatgaggctgatga

SEQ ID NO: 43964 - DNA, 270 bp, Glycine max
  unsure (1)..(270): unsure at all n locations; Clone ID: 701127740H1
cgatgatgcagctattgagaaaatgcggaaagaaatcgaggtgaatcaggatagtgcattgagtctttgtactgagaaggttttgttggcaagacaagcatatgacttgatagatagccatataaaacgacttgatgaggatttaaacaactttgctgaagatttaaagcaagngggtaaantagcnccagatgacccagcaattctgccccnatngcctatngtccctaaagctgaaangcgcacgcccatatatatnctcctcaatca

SEQ ID NO: 43965 - DNA, 246 bp, Glycine max
  unsure (1)..(246): unsure at all n locations; Clone ID: 701127741H1
gctcgatgggaattgcgcttcaaggcgtctcgtagggctaatccgcctcacgagggtcaccaacggcacgtgcctttggngggccgaggccccctanctgctggtcggcaaacggacggcgggcgcacncgtacgcttctancccgnnttnngatttagaggngttcattnatannccnangcngganntntannncaacggtttanaaantgntangggggtttntgggagngcantctgatggg

SEQ ID NO: 43966 - DNA, 272 bp, Glycine max
  unsure (1)..(272): unsure at all n locations; Clone ID: 701127742H1
aaaaantgaggttttttacagtgaaagtagctctgtgctgtgnggtggttatgctactaancctctcagatgcacagctagataactctttttacnaggacacgngtccaagagtgcattctattgtgcgtgaagttgtcagaaatgtttccaantctgatgccggcnntcttgccagtctcatanggtcccaantgtcnaggnttgntntgntnnagggggatgggaancggtttntgtngaggtncnangttncgntntgagngggnaat

SEQ ID NO: 43967 - DNA, 268 bp, Glycine max
  unsure (1)..(268): unsure at all n locations; Clone ID: 701127743H1
agttgacagtccttccatgcagaaaaanggcaacagaatctgttgccatagctgatgagaattcaaatcccccaaagcctaagaaagcgcggtttaagaggaagtcttccaagaggaaaccctctagagacaagatgggccaaattcatactgaaaacttgggcattggagcaaatatcaatcatgaggtagaaacacatgcaagtnncaatggtgactggggctntaaaaaatntgnaantcntttggggggggcncgcnttttttt

SEQ ID NO: 43968 - DNA, 186 bp, Glycine max
  unsure (1)..(186): unsure at all n locations; Clone ID: 701127744H1
atgagctgccatgtgcgttanggtttgcgttttgcattcaaattccaaattccaaattccaaattccaagttccaaacactcncttnctccnntngacgatgagcattgttcccaaagagacgttgaangttatcgncgnaggnagtgggntcaanaannggtcncatantntcnccnngncgncg

SEQ ID NO: 43969 - DNA, 268 bp, Glycine max
  unsure (1)..(268): unsure at all n locations; Clone ID: 701127745H1
tctgggttcttgagcaatcgaactacggtgggagtggacaaaacagggaacaaatacttcaccagaaatgaagaggttgatggtatcatgaaagagaaaagatgggtgatatttaagggagaggaggatcctacctctattccagttgaatggganatgttgnctnagtngggcngggaaaaaggcccccaccccccgnngnattggngttnnncccnccnnttttttctnnaaanntnctntnctnnnannaaaaggngggnganng

SEQ ID NO: 43970 - DNA, 271 bp, Glycine max
  unsure (1)..(271): unsure at all n locations; Clone ID: 701127746H1
gcagcacccatttggatcctctcttctcttctttgatctccgttaccctttttgttttctcannnnnnnnnnnnnnnnnnnatctttcgaagttcgtttgcgtgtgttgtgtggtcagtcaccgatggcagcaccacctgcgagggcacgtgccgattacgattacctcatcaagcttcttcttattggcgatagcggtgtgggaaagagttgtctgcttttgcgattttctgatggttccttcacaaccagttttatcaccaccattggc

SEQ ID NO: 43971 - DNA, 264 bp, Glycine max
  unsure (1)..(264): unsure at all n locations; Clone ID: 701127747H1
ggagctagcaatgctgaatggcactcttcgtgaggagggttctcccatgtctggttctgtttcacccttccacaacagccttggtatgaagagggccaagaccagggggtaaattatcctaaagggtaanagggatttgggatntgngtaaattttccacancnncacttacggngcnagggnaatgnttnnannantncccnganatgggtagggngngntggntannaagtcnnttcnnaattgggcagnntgggtggggng

SEQ ID NO: 43972 - DNA, 276 bp, Glycine max
  unsure (1)..(276): unsure at all n locations; Clone ID: 701127748H1
gcttactggtatactcgaggatctggaccaggcaaatccatatgagtacttaanagggatgatcaactgtcacagantgcatctttttgatgttgttaatcaatatcnagcaatatttgcggatgacacatcaggaagtgaggaaaattatgacggtgggcttctttttagttgggcaatgcaccanattaccttcacacctacaaactctgaaagttatgcttccaaagataactgaaggtggatcactgtcaaatattttggatcagtgcatgt

SEQ ID NO: 43973 - DNA, 276 bp, Glycine max
  Clone ID: 701127749H1
cttgatccttctttttctccttgaactcaaacatggcagatgaggtggttctgctagatttctggccaagtccatttgggatgagggtcaggattgcacttgctgaaaagggtatcaaatatgagtacaaagaagaggacttgaggaacaagagtcctcttctcctccaaatgaacccggttcacaagaagattccggttctcatccacaatggcaaacccatttgtgaatccctcattgctgttcagtacattgaggaggtttggaatgacagaa

SEQ ID NO: 43974 - DNA, 265 bp, Glycine max
  Clone ID: 701127750H1
cttctctttctctctctttgtctctcaaattcccaaaccaaagacaccacaattcactttccctttttaacattaaaatgatgaaaactcgggccttactagttctcatgttattggtgaacttagtttttttcaggggctcagaagcccgtccattgagtatcattgagacggaaaaatcagtcactggaggggaagtggtggatttctttgattggttatctcttggagcaatgaaggattctgggccaagtccaggtgtggg

SEQ ID NO: 43975 - DNA, 271 bp, Glycine max
  Clone ID: 701127751H1
gggggtcccagtcccgaacccgtcggctgtcggtggactgctcgagctgcttccgcggcgagagcgggtcgtcgcgtgccggtcgggggacggattgggaacgggcccttcggggcctcttccccgggcgtcgaacagtcaactcagaactggtacggacaaggggaatccgactgtttaattaaaacaaagcattgcgatggtccctgcggatgttgacgcaatgtgatttctgcccagtgctctgaatgtcaaagtgaagaaattcaac

SEQ ID NO: 43976 - DNA, 240 bp, Glycine max
  unsure (1)..(240): unsure at all n locations; Clone ID: 701127753H1
tcttgaggcattccanagagctttaacaactnggagcaggtgggttgatgaccaacataaatccatccaagaccacggtcttcttcagaggctattctgcatcccacttcagtggtggacaatggaattcaggtggtcaatgtgatagtgaaactgatccaattgacaacgagaagtacctaaccgagtatccagataagatgaaggttttggagaaggtgctaaagaatatgaaaaccc

SEQ ID NO: 43977 - DNA, 268 bp, Glycine max
  unsure (1)..(268): unsure at all n locations; Clone ID: 701127754H1
cacatttgaaggatgtgatacggaggaattctctggggctggacgctgaggtatctgaggcaggcgagaacttcagtgttggacaaagacaactgttgagtctttctcgggctttattgcgtagatcaaagatattagtacttgacgaagcaaccgcagcagttgatgttagaacagatgcactcatacagaaaacaattcgagaggaattcaaatcttgtacaatgctcattatagctcatcgccttaacaccataatngatggggc

SEQ ID NO: 43978 - DNA, 244 bp, Glycine max
  unsure (1)..(244): unsure at all n locations; Clone ID: 701127755H1
ttgaagcatgantaaaatcatgagggcacnaatcttnaaaatcatgcagtgtgacaanaaatgcattacaagaacntagataacaanttntanggngactcacatccaacancgttaatcantttagtttaacacacaanggttggangaanccaaangataantaacaangtcgngccttcttcccctcngtttcccctttgcttgtnggtgacagcatggcatcatgcnttgcaattacaga

SEQ ID NO: 43979 - DNA, 251 bp, Glycine max
  unsure (1)..(251): unsure at all n locations; Clone ID: 701127757H1
cggncaagcaactccatccgcaatgggaatcgatttgaaggcaggaggtaagtccaagaagacccaaacgtacagcccccaaatccaatgatatttacctcaagctcctcgtcaagctgtaccgttttcttgttcggaggactggtagtaacttcaatgccgtcatcctcaaacgccttttcatgagcaaggtcaacaagcccccgctatccctctctagattgattcgttacaccaagggaagggaggnt

SEQ ID NO: 43980 - DNA, 264 bp, Glycine max
  unsure (1)..(264): unsure at all n locations; Clone ID: 701127758H1
gcaaactggtagtctctactctgattgggatcttctccctccaaagacaatcaaagatcccgaggctaaaaaaccagaagattgggatgacaaagaatttattcctgatcccgaggataagaaaccagaggggtatgatgacatcccaaaagagctcccagatcctgaagccaagaagcctgaagattgggatgatgaggaagatggtgagtggacaccccctaccttgccaaccnggtttaaagggccctggaggcaanannt

SEQ ID NO: 43981 - DNA, 269 bp, Glycine max
  unsure (1)..(269): unsure at all n locations; Clone ID: 701127760H1
ctcccctgcaatcaacggcaccccccacaaaaatgacaggagagacagtgaacccaaaagcttaccctttggccgatgcgcaactcgcaataacaatcttggatcttgtgcaacaagctgccaactacaagcaactaaaaaagggtgctaatgaagcgactaagacactgaacagaggcatttctgagttcgttgtgatggccgcagacactgagcctcttgagattcttctccatcttcctctccttgctgaggataagaatgtncct

SEQ ID NO: 43982 - DNA, 261 bp, Glycine max
  unsure (1)..(261): unsure at all n locations; Clone ID: 701127763H1
atctgcttcccctagcaaccttcttcttacttctctccgcttcttatctccagattgctggggcggaagcacaaccgttgactagtctcaaacttaactctcatattcttcatnagtctactgctaaagagattaatgaaaatcccgaggcaggatgggaggctgctataaatcctcgtttctccaattatacagttgaacaatttaagcgccttcttggagtcaaaccaatgcctaagaaggacttngaggtacnctgnt

SEQ ID NO: 43983 - DNA, 124 bp, Glycine max
  unsure (1)..(124): unsure at all n locations; Clone ID: 701127764H1
atttcacaaagttnataaaactttactanaaacagtagtggagagagggagannaaccaaagaagattgaccatggcttcttcattgaggatctcaaggctcctctctcgttcttttctttctg

SEQ ID NO: 43984 - DNA, 273 bp, Glycine max
  unsure (1)..(273): unsure at all n locations; Clone ID: 701127765H1
cccggtcgtactcataaccgcatcaggtctccaaggtgaacagcctctggtcgatggaacaatgtaggcaagggaagtcggcaaaatggatccgtaacctcgggaaaaggattggctctgagggctgggcacgggggtcccagtcccgaacccgtcggctgtcggtggactgctcgagctgcttccgcggcgagagcgggtcgtcgcgtgccggtcgggggacggattgggaacgggcccttcggngcctcttccccgggcgtcgaacagtca

SEQ ID NO: 43985 - DNA, 270 bp, Glycine max
  Clone ID: 701127767H1
ggtctccttacgataacaacggaggatcatgtgttgcgattgctggagcagattactgcgttatcgccgcagatacgagaatgtccaccggttacaacatcctcactcgcgattactccaaaatctcccaactggctgagaagtgtgtgatggcttcatctggctttcaagctgatgtcaaagctttgcagaaggttttgtctgctaggcatttgatttatcagcatcaacacaacaagcaaatgagttgccctgcgatggctcagttgc

SEQ ID NO: 43986 - DNA, 269 bp, Glycine max
  unsure (1)..(269): unsure at all n locations; Clone ID: 701127768H1
agtcaattaccantctncatgtntttgtgttgcaaagttccatataggaacacattatnnatttgtntcttattgtttaaatgatnnaggggagtattcattttccccaataccatcctcaagatcagcttagattgataacatctaagcttctggaaattggggttgccagtttcaaatgagttcctgaaattcacttaactgcaaatgttattcaggctatnctttttctctaataatggcatcaagattagcttttagttcgctcc

SEQ ID NO: 43987 - DNA, 248 bp, Glycine max
  unsure (1)..(248): unsure at all n locations; Clone ID: 701127769H1
agcgtctccatcgccaccactcacagcaaaaccctagaaaaagccggcgtcattttctgcncccatctccgaggccattaaggagtatcctgatttggtgagaaagcatttgggaagagttgtcccctccgacgacaactactacgccgcgttgaacgccgccgtcttcagcgacgggtcgttttgctacattccgaaggacaccaagtgtcctatgcagatttcgacttacttcagaatcaagcgtt

SEQ ID NO: 43988 - DNA, 263 bp, Glycine max
  unsure (1)..(263): unsure at all n locations; Clone ID: 701127770H1
agtcaattaccattcttcatgtttttgtgttgcaaagttccatataggaacacattatttatttgtttcttattgtttaaatgattgaggggagtattcattttccccaataccaatctcaagatcagcttagattgataacatctaagcttctggaaatgggggtcnccagtttcaaatgngntcntganatncnnntgactggaaatgngnnnnangttnttctnnngggtnatnaggcngtttttnngccccccncngcc

SEQ ID NO: 43989 - DNA, 264 bp, Glycine max
  unsure (1)..(264): unsure at all n locations; Clone ID: 701127771H1
gaatgattaccgaaagagaaaaaggggaaaagaaaattatagcataagcngtattcataagctaaagaaatttcatttcggtgttatcaatttgcngtgtgtncttcttctgtatcgaatcaccgtcgcgcgattttccatctncacnacatnngcgacnncgacgatggttcataatgagaacccactttggttttgattattgtngcngttgttgttaactgtnattgtatgtnctagggtttagcggtttgaagcttaaga

SEQ ID NO: 43990 - DNA, 264 bp, Glycine max
  unsure (1)..(264): unsure at all n locations; Clone ID: 701127774H1
gnagatttggagcaacttgttcgtgtctcaaaaactgttagagaagcggtaagttctggggtaatattcagcactgtggtccatttttgtttcaaattcgatttggttgttctgaatttttgtttcaagttcgattgattgttctgattttggaagtgttgggttttgctattgcnggctgatntncggggaanacnttttggggtaagccnnccaagnnananattttttncccccccaaaccntttnataagnggggggggg

SEQ ID NO: 43991 - DNA, 255 bp, Glycine max
  unsure (1)..(255): unsure at all n locations; Clone ID: 701127776H1
agcctccgccgttgggcattaccgccattgaagctcattcaagctttttttcaccgtnccacacaaganaagancnggttgtaaaactccgttttaactttgacgcaaccaaactctcgtccaattaagaagaaaaaacgaaaggcatgttcgttggactgttggtgaggactgagatagatacgaaggctgctggctgctgcacaagntcaatcttnnaaaattngannnaacanncnnnnnnnanngnngnng

SEQ ID NO: 43992 - DNA, 266 bp, Glycine max
  unsure (1)..(266): unsure at all n locations; Clone ID: 701127778H1
gaaagatggttagcgtantgaagatcaggcaggcacaaagggcagaaggcccagcaaccatccttgccattggaactgcaaacccaccaaaccgtgttgatcagagcacctatccctgattactacttcagantcaccaacagtgaccacatgaccgagctcnncganaatttcagngcntgtgtgacaagtntntgttnaggccnngtttttganccnanangnggagttnttgaanagnnttccaanntngtggntncttnncc

SEQ ID NO: 43993 - DNA, 247 bp, Glycine max
  unsure (1)..(247): unsure at all n locations; Clone ID: 701127779H1
gtttgccaataatctgaataaggcgcatgttgattacttttattggctacttnctggaatcacaatgctgcaaagaattgggactggaatatctatatccatatttaccatagtatttgcagcccttgttgagatgaaaagnttgaaaacagctcaagagtnggtgttgtnnatnnncctaatgcccccncgccnatggtngggggggccccncccnntngggtgggngnngnnnnngggnnggagg

SEQ ID NO: 43994 - DNA, 263 bp, Glycine max
  unsure (1)..(263): unsure at all n locations; Clone ID: 701127780H1
gatcctccatggcctccaccaaggaacgtgaaaacttcgtctacgtcgccaagctcgccgaacaagccgaacgctatgaagaaatggtggaagcaatgaagaatgtggcgaactaaacgtggaattgacggtagaggagcggaaccttctgtcggttgggtacaagaacgtggtgggtgctcgtagggcttctggaggattctttccncgttaaccngaaagagagctaanggaactttttaacctnaagggnnaaggctttt

SEQ ID NO: 43995 - DNA, 273 bp, Glycine max
  unsure (1)..(273): unsure at all n locations; Clone ID: 701127781H1
gtgggttcttcttcttctattacaacaacgtcgcgccaagaccatgaccatggccatggccacgatcctgctcctgttcacggtcttcgcggtttcatcggccctagacatgtcgataatctcgtacgacaacgcccacgccgccacgtcgcgcagnnannngaagctgatgtccatgtacgagcagtggctagtaaagcacggcaaggtgtacaacgcgctcggagagaaggagaagaggttccagatcttcaaggacaacctgcgattcnt

SEQ ID NO: 43996 - DNA, 269 bp, Glycine max
  Clone ID: 701127782H1
cttgtctcaaagattaagccatgcatgtgtaagtatgaactaattcagactgtgaaactgcgaatggctcattaaatcagttatagtttgtttgatggtatctactactcggataaccgtagtaattctagagctaatacgtgcaacaaaccccgacttctggaagggatgcatttattagataaaaggtcaacacaggctctgcctgttgctttgatgattcatgataactcgtcggatcgcacggcctttgtgccggcgacgcatcc

SEQ ID NO: 43997 - DNA, 264 bp, Glycine max
  unsure (1)..(264): unsure at all n locations; Clone ID: 701127783H1
ctattggtgaggatttattagccattgcagcagaccagccctttcggtttcctgctacattcacatttgttgttagggccttctcagtgttggatggcattggaaagggccttgatcctcgttttgatattactgagattgccaaaccttatgctctggagttgctaagattccgtgaggcaggagttgaagttatcctaaaggacttcagaaagagatgggacagacaatctcaagcattttacatttnttngacnggntgng

SEQ ID NO: 43998 - DNA, 258 bp, Glycine max
  unsure (1)..(258): unsure at all n locations; Clone ID: 701127784H1
cgttancacaaactatcatggccacggcaacaccancttgncacctcgtcctttntggggacgcgtctncctggaggctcactccggggcggggcgagtgcacgcccgattcggcttcggcaagaaaaaggctcccgccccaaagaaagcctccaggggatcgggccgagacaccgacagacccctttggtatccgggcgccaaagcgccgaatatctcgatgggagtcttgtcggagatacgggttcgatccgtttg

SEQ ID NO: 43999 - DNA, 264 bp, Glycine max
  unsure (1)..(264): unsure at all n locations; Clone ID: 701127786H1
cttnagtntctctcttactagnttattagattctgcaatggcccttcgttgttctcaaaactcttgtggtcttttggccttatttttgtctcttcttgtcctagtagtttctcttcaatgccaagtagcttcttctgctgtgctgttaagcatgaaacataagcacaaccatgtgaacaatcagagaccaatggtccaaaaaaccaaccaaagcatttgttcatgtttgagggtgcttgggtccgtgatgnaactgaaggatac

SEQ ID NO: 44000 - DNA, 264 bp, Glycine max
  unsure (1)..(264): unsure at all n locations; Clone ID: 701127788H1
gggggagtggctggagaaggcgttggtggagttgtgctccaagattgaaactggcttgggtttaggtttggaccaagacatcatcaaaggcctcgtgtcttactgtgaccttgccgagccacgagatgccaaagagtaccttgacaatataatcggtcaggatgcagggaaaactgtgattgaagaatatttacgacggagaggttactcagaatccagcatcggctcaaatgtnccaactaccaattacttgcgtatgtcaac

SEQ ID NO: 44001 - DNA, 264 bp, Glycine max
  Clone ID: 701127789H1
attaaccttctttttgcgtcaatcttgatatcttagatttgcttgcaagattatgtcaagaccctttcttgcctcctctcattaggataattggctttcccaaatttgcaagttttttgggtttacttacatggggtattgagaaaatactttttcgctgaagctctgaataacagaccatcatcgacagatggggtctgaaggtcctccagcagctgtggcaacagttcatgtaacaggtttcaggaaattccatggagtttc

SEQ ID NO: 44002 - DNA, 267 bp, Glycine max
  unsure (1)..(267): unsure at all n locations; Clone ID: 701127790H1
gcncatngcacattgcacattgcanattgcagccattcttctcagatnctatagcaacgtccaaggaaatcaactttnctcttaaagcacacttttaaagtctttgtgtgttgaggcgtttggtttcctcagatgcctcatgtgagatgaggaagaaaacctactccgacttgtctctcttttttcttccnnctcttgctcattctngttncacactctntntgagnncccgnntnctcgcacaatggacctcncacagactcccaa

SEQ ID NO: 44003 - DNA, 212 bp, Glycine max
  unsure (1)..(212): unsure at all n locations; Clone ID: 701127791H1
ctcgagcccaagcaagaatccatttatagatcatgatgattcttctggtagcaacctttctactaccaaacctcaaataggtagccctaatcctagtcctccttcgaatggggaatctgttccttcaaacaggtcgccaactaaagattcgattgatgggggtgttgatttgaatcaaagagcagtagnagtncccatctctctnaanaaga

SEQ ID NO: 44004 - DNA, 231 bp, Glycine max
  unsure (1)..(231): unsure at all n locations; Clone ID: 701127792H1
aagacatcaacaccccttatctctctctctgcccaattctggtgantattcccctttctncctccntactcctttncnnccaattgggtcatnacanttcacagcaacgggtnnaagtttaggcttttnntttgccnaatttggcngncactcanagtctatgtnatcatcgaatcccaagtttctncgtnaaanttcgaatctnttgcnngctnatnctgccacacagca

SEQ ID NO: 44005 - DNA, 271 bp, Glycine max
  unsure (1)..(271): unsure at all n locations; Clone ID: 701127795H1
agnnctcnnnttaccgcncttcccgaacgccatcacccttttgcctctagtgctggcgttgcgaaaacgcaccgttttgttcctgttctcgttcctaagaaaactgaacaagtgaagcagggtttgattcaaagctcggtgcataaacagcaatggcagagaaaccccaaccggttcgggttctatactgcggggtgtgcagcttgccccccgaatactgcgaattcggatccgatttcgagaaatgcaaaccctggttgatccaaaacgt

SEQ ID NO: 44006 - DNA, 289 bp, Glycine max
  unsure (1)..(289): unsure at all n locations; Clone ID: 701127801H1
aaggctactaattttccaggtgataaattaggggacactgacacccaaatgattgatcaacttccgcaagtacaaacaatagcttcagaagaaatttcagctgaatgtganagtgatcccacttcgattggagttagttcgcctttacaacgggntgtgcaaggcatggaggnagactccatgggnttttagttcaaacttctttgggcaagagaaccggcanagctccatgtagtggangaatttncctnccngtgggaaactctttgcggaaggcnttagccnaant

SEQ ID NO: 44007 - DNA, 293 bp, Glycine max
  unsure (1)..(293): unsure at all n locations; Clone ID: 701127802H1
aatggcgacaaaacctcgtttggcttatctctcttccacttttcttcttctntantgttgtaactgtctttacttcggtgtcggcacaagccccagaatccccatnactctacaanaccttccgtcaatgcctcancaaatanacaaannaccccctcnaacatagtcttggggccagcgnncggccccaagttcccccaactagtctncaaanacnanatcngaanagngcgttcaaaaacttgcnctgaggggngaaacattngtnnatnggaatgncccaggnaaggant

SEQ ID NO: 44008 - DNA, 276 bp, Glycine max
  unsure (1)..(276): unsure at all n locations; Clone ID: 701127805H1
aatttccctttttcctgccttgtcgttttgatccctcccccaaactaaacgacccctctcctcttccggaaccttcgcnaccattctccgcccaattttcccgcgctttctcgaacctccgacgccactccggacaccgcagagtgaacaaggtcgtggaagatgagcaangtgttcgagggttacgaacgccaatactgcgagctctcggcgnatctagcgaaaaagtgcactgccgctggtgntcttaatggagagcanaagaaacagaaagtt

SEQ ID NO: 44009 - DNA, 277 bp, Glycine max
  unsure (1)..(277): unsure at all n locations; Clone ID: 701127806H1
gcagcaaccccacgtggaactaccccgtgaaattctctgtcaacgaatcgctggcgaaggaaaatcgtntatnctcttgagatcaagctcatctccgacngcaccctcggcnacaccgtcatcggcaccgtccatgttcctctcagggaactcctggataaccccggggatgacagctcnttccgccaagtcagttatcaggtgatgnaagcaatcaataanatccaagggatcnttgaagttcgcntacaaattcngngnacatnttcccgcnccg

SEQ ID NO: 44010 - DNA, 269 bp, Glycine max
  Clone ID: 701127809H1
caaaagtgtaaatcaggaggggatgaatatgatgaagatgaacctgatgccaaaagatggaaaattgaaggtgaaaatgagggtatgtcagcccctggaagtagaacagtgagagaacctagagttgtagttcagacaaccagtgacattgatatccttgatgatggctataggtggagaaaatacgggcagaaagtagtgaagggcaatccaaatccaaggagttactacaagtgcacacacccaggatgtccagtgaggaagcacgt

SEQ ID NO: 44011 - DNA, 267 bp, Glycine max
  Clone ID: 701127810H1
actacctgcaagaaacatcgccaagagctgataagaaaatgcagttatatcatcatccgttggatttggacagccagagggtgagatttgcattggaggaggagggtgtagattatacatcccaccatgtcaatccgataactggcaagaacttggattcctctttcttcaagatgaatcgccatggaagggttccggttttccaaaatggctctcacatcatttacaatactattgatataatccagtacatagaaagaattgctg

SEQ ID NO: 44012 - DNA, 95 bp, Glycine max
  unsure (1)..(95): unsure at all n locations; Clone ID: 701127811H1
cgcggngtccaccttctacccagccagcagccnncatcaaaccaccgcgaaccgatnccgcttttggtgctgaaccgaacctnccacacaacatt

SEQ ID NO: 44013 - DNA, 264 bp, Glycine max
  unsure (1)..(264): unsure at all n locations; Clone ID: 701127812H1
ggtggagaaaaccacgagtggtcgcgagtacaaggtcaaggacctttcccaggccgacttcggccgcctcgagatcgagctggccgaggttgagatgcccggcctcatggcctgtcggaccgagttcggcccctcccagcccttcaagggggcccgcatcaccggctccctccacatgaccatccagancgccgttctcattgagaccctcaccgcccttggcgccgaggtccgctggtgctcctgcaacatcttctccaccca

SEQ ID NO: 44014 - DNA, 264 bp, Glycine max
  Clone ID: 701127813H1
ataactctgccgccgcaacagccccaaatccaatggcttcagagaagaaactttcgaacccaatgagggagataaaggtgcagaagctcgtcctcaatatctccgttggcgagagtggagatcgtctcaccagagccgctaaggttttggaacagcttagtggccaaacccctgtgttttccaaagcaaggtacacggttcgttcctttgggattagaagaaatgagaagattgcatgctatgtcactgtcagaggtgacaagg

SEQ ID NO: 44015 - DNA, 267 bp, Glycine max
  Clone ID: 701127815H1
ggacctcttggttccttctcatccccctccaatgatcttgtcaatttgattgtatctgttgaagatacaggtgaaggtattcctcttgaatctcagccactcatcttcaccccattcatgcaggtaggttcatccatctcccgaaagcatggaggaacaggcattggcctaagcattagcaaatgtttggttggcctcatgaatggggaaattggatttgtgagcatacccaagattgggtccacattcacttttactgctgtattc

SEQ ID NO: 44016 - DNA, 83 bp, Glycine max
  unsure (1)..(83): unsure at all n locations; Clone ID: 701127817H1
aagttgggtgggtcctcatgcagaatctgcttatganaaatttgaacagngggagacngagttaatcttctaagagttccaaa

SEQ ID NO: 44017 - DNA, 275 bp, Glycine max
  unsure (1)..(275): unsure at all n locations; Clone ID: 701127818H1
ctagcttcctcccctaagaagaaaagcatgttagttgtgtctgaattcattggctgttccccatctttaagtggagcaatcagagtgaacccctggaatattgatgcagtagctgatgcaatggactcggcgcnggaaatggctgatttggagaaggagcttaggcatgaaaagcattatagatatgttagtactcatgatgtcgggtactgggctcgaagcttcttgcaagatttggaaaggacctgtagtgatcatgtgcgacgaagtggtgg

SEQ ID NO: 44018 - DNA, 276 bp, Glycine max
  unsure (1)..(276): unsure at all n locations; Clone ID: 701127819H1
agtgtgtgtagagttaacaagaccagagaganagacgaagccgancgaaacataaataaaaccttgctctnttttcacgccctagctcattttcttctccgttctcttctctctgttcctcactcactcgcatntnnttcaccatgnctaagcnanaagctaattggtctccatacgataacaacggnggatcatgtgttgcaattgctngagcagattactgcgtcatcgccgcggatacgaggatgtccaccggttacaatatcctcactcgcg

SEQ ID NO: 44019 - DNA, 272 bp, Glycine max
  unsure (1)..(272): unsure at all n locations; Clone ID: 701127820H1
gctagtttatcgtgaggagaatatgaagttgtttgttttctttgttgctgcagtagttttggtagcatggccatgccatggcgcaggctaccaaaggttccctctccgaatgaaaactggctatggtgagcgttcttcggaggtaaaatgcgcaagttttaggcttgctgtggaagcacacaacatccgagcctttaaaaccattcnngaagagtgcgttgaaccaacaaaggactacattaatggcgaacaatttagatcagactctaaaa

SEQ ID NO: 44020 - DNA, 259 bp, Glycine max
  unsure (1)..(259): unsure at all n locations; Clone ID: 701127821H1
ctcattcccccactaacctacctgnancancacaaantcctcanttccccttcctccactctttgtcctnttnctgaagacaaacaacacacncanagacacagaacaacaacgtggaaaaatgtcgacaaaccactacaccatggaccntcccgaaccaacactctggtggccacacccacannacatgcgagggggcgnnagagggnnggggcctgtncntggggancggngnngnggngnnnacgannanggnggg

SEQ ID NO: 44021 - DNA, 271 bp, Glycine max
  Clone ID: 701127822H1
caatgagcttccaactcttaaccaaggcgagaaagcgaactgtgttttcatatctactctcacgcgcattctctcaccgatcggaacgagcttgcaggcctacatttggcatcgctttcgacatcgacggtgtccttttgctcggaaactcccccgtcggtggctctcccggagcactgaaaagattatacgacgccgatggtaaattgaaaatcccttacgttttcctcactaatggtggtggctatcctgaagctaaaagagcttttga

SEQ ID NO: 44022 - DNA, 70 bp, Glycine max
  unsure (1)..(70): unsure at all n locations; Clone ID: 701127823H1
gnggagnganagagcgtggagnacangtggggntacctgcccggagcnctgccgcagaggacgcctccng

SEQ ID NO: 44023 - DNA, 278 bp, Glycine max
  unsure (1)..(278): unsure at all n locations; Clone ID: 701127824H1
gcctcctctgcctcgcaatcatcggcattgtngtnnccgccgtcggaggtcagtcctccagcggcggctcccaccacttcctgcggnntccncnggncacagcccctttctanacctananncanaatcacctgcgccagttgcnnctncccacttcatntcctaacagnttcatccnccantggctgcaaccgcaacccctncccggntcgactcccacngtagcatgctcctccgtctaaagctgctnctccagtcnagcaaccactncttnggtg

SEQ ID NO: 44024 - DNA, 264 bp, Glycine max
  Clone ID: 701127825H1
ttccttttgaaggttagaagtgctacaatacaaacaatggcagctactcaggaagatgtgaagcttttgggtattgtgggaagcccatttgtgtgcagggtccagattgcccttaagttgaagggagttgaatacaaatttttggaagaaaatttgggcaacaagagtgatttgcttctcaaatacaaccctgttcacaagaaggttccagtgtttgttcacaatggagcagcccatagcagagtctcttgtgattgttgaata

SEQ ID NO: 44025 - DNA, 81 bp, Glycine max
  unsure (1)..(81): unsure at all n locations; Clone ID: 701127826H1
cacaggggccaagattccttctccttgggttagggacttggcaagctgaacctggtgttgtagctgaagctnctcaccaca

SEQ ID NO: 44026 - DNA, 261 bp, Glycine max
  Clone ID: 701127828H1
tgctcgctatcatatcacagtatatatcttcttatttgtttaatttttatgtttcttaggtgaattactcaagagggctcgacaatcccacaaagtagaaaaagaggttatgttatggcgggcaaaggtgttagttcggtggctaaggcggtagcagaatatcagtatccttggcgtgagaagttggggaaatataaggatgagcttgccaagggtgtgtggggatactgggagctgggggcatggaagccgctgagtatc

SEQ ID NO: 44027 - DNA, 266 bp, Glycine max
  unsure (1)..(266): unsure at all n locations; Clone ID: 701127830H1
aaagagaggatttgggattgggaaggcgagggattgcgctgcgtctcttcctcttctctttcgattcatccctcattcataatcttccaatccaacaacctcancnctcacactcacacatacacacatctgaacgcgtatcgtccctcccatggcttcaaagcgcatcctcaaggagctcaaggacttgcagaaagacccaccaacttcttgcagcgctggtccagtagctgaggacatgttccattggcaagcaacgattatgg

SEQ ID NO: 44028 - DNA, 265 bp, Glycine max
  Clone ID: 701127832H1
ccactctttccttggtcgatgccgccgatcccacatttggcttcacccctcttggattatctagtagctcaaacttgcaaatccaaaagccttacgacgttgcagtcaacgagcgctacagcttttcaaatggagtgcacagattttgggtatactccacggacaagcctcatatgcaaggcagcaatacgaagccacgaactgagatcgtatcgctggatacgattatacatccggtgtgtggcaatttcaagggtttttttac

SEQ ID NO: 44029 - DNA, 274 bp, Glycine max
  unsure (1)..(274): unsure at all n locations; Clone ID: 701127833H1
attgtggggatgtgaaggcagaagaatggaagcaacaatttgaatttcattcaagtgcaaaatttgaatatagaatctagggagaattctataaaaagagctcttggtgagaattttctcaaatgttatgaatgattntgatttgggnttgatatattgtctaggtccaacacttgatgttgatcagcgcaacaatgtgtcttttgtcacaagttccccagacaatatgantnangtttgcaaaattggagaaacccgccctataaaacttttg

SEQ ID NO: 44030 - DNA, 87 bp, Glycine max
  unsure (1)..(87): unsure at all n locations; Clone ID: 701127834H1
ggaaaacctgacttgggcctggtccaggctatatggtcctttgnganaaggatgagnatctantcacgnggctncatnncatcaact

SEQ ID NO: 44031 - DNA, 130 bp, Glycine max
  unsure (1)..(130): unsure at all n locations; Clone ID: 701127835H1
gcaattccnaacgcttctgctncctncagggggagttcgaatcctgtgagctttcaatatgacggcgtncttgaagcctgatgaatgcgntgaaaagggnggaagaantantcantggtgggnaggaagc

SEQ ID NO: 44032 - DNA, 269 bp, Glycine max
  Clone ID: 701127836H1
gggtcaccgtcatcggcttctggggttactaacaatggagcttcgggcattcatagcgtgcctttgagctcaaagtacttgaaggcagcgcatgagcttctagaagaggttgcgaatgtcaacaacgggattggcactgagttgaggaaaaagagtgggggacagaccagggtgattggagaatcatccgcagcaggaagtggagatggttcagttggtggggaagggaacgggaagcgtactcagagctatcaactgcagaaagacaa

SEQ ID NO: 44033 - DNA, 269 bp, Glycine max
  Clone ID: 701127837H1
gttctatctgtgacgagcatcatggcctcaagagcagtgttattgttggctatgtgtgtgcttccggcgatggttgtggccattcgcccagcaaagaaccctttttgcgtgaagggtcgtgtctactgtgacccttgccgtgctggttttgagacctcagctaccacctacattgctggtgctgagattatgttgcaatgcaagagcagggttagcaacgaggttgtgtacacgaagaaggggtacaccgactcaaccggagcatacac

SEQ ID NO: 44034 - DNA, 267 bp, Glycine max
  Clone ID: 701127838H1
gtctcgaagagttgctaccagatagaatctcaagtacttatcgatgtttcattcttcttagaacagcacttgttgtatctaccgtttgtgctgcttttcttattcctttttttgggtttgtgatggctttaattggttctctcttcagtgtacttgtgtcagtgataatgccaagtttatgttttatgaaaattgtgggaaaaaaagcaactgctacacaggttgcgttgagcgttgtaattactacatttggagtcattgtgggat

SEQ ID NO: 44035 - DNA, 266 bp, Glycine max
  unsure (1)..(266): unsure at all n locations; Clone ID: 701127839H1
ctctccctnccntccatnccaancacnangganngagaagacataaanaatggngaagatttggctgcattggancnggctatganggtggcccaaccatggctgtaattgccttgaagtgtcctgagatcgaggtggtcgtggtggacantgctgcaccgcgaatcaacgcgtggaacagcgnccacctcccgatatatgagcctggccnngatgatgtggtgaagcagtgcagggggaagaatctcttcttcagcatgatgtag

SEQ ID NO: 44036 - DNA, 264 bp, Glycine max
  unsure (1)..(264): unsure at all n locations; Clone ID: 701127840H1
atcatagtctcagcatataaagtaatatcntaacctatctgcttaattgtntgattgngatggcggatgaagggggaattnagaagcggcgctacgatgtttttctgtgttttagaggggaagacacgcgctacaccttcacaggtaatctctatgctgctttgcggcaggcgagattgaggaccttcttcgatgatgggttcaagagtggcgaccanatctttgacgttgttcttcaagcaattcaggaatcaaggattcaat

SEQ ID NO: 44037 - DNA, 263 bp, Glycine max
  Clone ID: 701127841H1
gaaattcagatctgctgcttactctaactgttctcgcaaaccatcctgatacacatccggattgatagttcgttgcatgcaaccatagttttattaggattttttcttctttgttttcaattaggtttttttgttgctctccttcaaactccatctttccaaatcctctctttgcgattgtgttttgatctgcttcctactgcgatagtttctctactgttacatggccatggcggtttccgcaattggttttgaaggtttcg

SEQ ID NO: 44038 - DNA, 253 bp, Glycine max
  unsure (1)..(253): unsure at all n locations; Clone ID: 701127842H1
attcctaatcacctggttaatttcttcacatagagctatcttngatccaacgttaacatgaagaatgttttagtaaggtcagctgcgcgagctctgcttggcggcggtgggcggagtactaccgccagctctcaacggcggcgatcgtggaacagagacaccagcacggtggcggcgcgtttggaagcttccacttgcggaggatgtccactcttccagaggtaaaggatcagcactcagaggagaaaaagaa

SEQ ID NO: 44039 - DNA, 259 bp, Glycine max
  unsure (1)..(259): unsure at all n locations; Clone ID: 701127843H1
cgagattcccactgtccctgtctactatccagcgaaaccacagccaagggaacgggcttggcggaatcagcggggaaagaagaccctgttgagcttgactctagtccgactttgtgaaatgacttgagaggtgtaggataagtgggagctggaaacagcgaaagtgaaataccactacttttaacgttattttacttattccgtgaatcggaagcngggcactgcccctctttttggacccaaggtcggcttcggccgg

SEQ ID NO: 44040 - DNA, 258 bp, Glycine max
  unsure (1)..(258): unsure at all n locations; Clone ID: 701127844H1
gttccatttcaggcattgcaagcnttcggtctcgccgtcgacgccgtctgtnccggaaagaaatccggcgatgtctgccgcaccgctgtccatgtacttgccggcgcccagacttatagtgagacggttggtcacaatttttcactcaatgcaacgtttgatgaagttgatgctgcaagctatgatgggttgtgggtgccaggtggganggctccagagtatcttgctcatgttcctggtgttgtggaatggtgacca

SEQ ID NO: 44041 - DNA, 260 bp, Glycine max
  Clone ID: 701127845H1
cggcgatcctagcactctcttctgcagctttcgccgacagcttcattcaccatggctgagcaaaccgagaaggcttttttgaaacaaccaaaagtgtttctcagctcgaagaaaactgggaagggaaagagacccggaaagggtgggaaccgcttttggaaatccattgggcttggatttaagactcccagggaagccatcgaaggaacctacattgacaagaagtgccccttcactggcaatgtttccatccgtggccg

SEQ ID NO: 44042 - DNA, 262 bp, Glycine max
  unsure (1)..(262): unsure at all n locations; Clone ID: 701127846H1
ggcttgatattatttccaatgctagctgcacaaccaactgccttgccccacttgccaaggttatcaatgacaggtttggcattgttgagggtttgatgaccactgttcattccatcaccgctacccagaagactgttgatggaccatcagccaaggactggagaggtggaagagctgcttcatttaacatcattcctagnngcactggagctgccaaggctgttgggaaagtcctccctgctttgaatggaaaattgactgg

SEQ ID NO: 44043 - DNA, 263 bp, Glycine max
  Clone ID: 701127847H1
gagaccatggccaaaagccccttcaagcttgaacatcccttggaaagaaggcaggctgagtctgctcgcattagagacaagtatcctgatagaatacctgtgattgttgagaaagctgaaagaagtgacatcccagacatcgataagaagaagtaccttgtcccagcagatttgactgttggccaatttgtttatgttgtccgtaaaaggattaaggtcagtgcagagaaggctatttttgtttttgtcaataacactctacc

SEQ ID NO: 44044 - DNA, 263 bp, Glycine max
  Clone ID: 701127848H1
ggttggtgtagtagctttttggagggttgacatggaagaacggtatgatccattgaaggagctggtgctgggaattttggtgtggcaaggttggcaaaagacaagaaaactggagagcttgttgcggtcaaatacatagagaggggcaaaaagattgatgagaatgttcagagggagataattaaccaccgatctttaaggcatccaaatataatcaggtttaaaagaggtgttactgacccctacacatttagctatcgtct

SEQ ID NO: 44045 - DNA, 272 bp, Glycine max
  unsure (1)..(272): unsure at all n locations; Clone ID: 701127849H1
acttgctctacctctgccactttctgagtacaatacaacacggccatggctgcctcagtctccactattggagctgtcaacagagctccagagtcgtgagttttggtacacttcaaaaagtgtcnattcaagaatatgatacatagaggggaaactcttatgntttttaactcctcatttatattggnagtaaactccatatagggtaataactgtggtatgtaatgtaataatccatatatgngatngcaaattnggaaagnatggnggtt

SEQ ID NO: 44046 - DNA, 270 bp, Glycine max
  unsure (1)..(270): unsure at all n locations; Clone ID: 701127850H1
gctgctcatcctccataacctccgagctctacaccgaagaacgaagccatggggaagacacatggaatgggagctgctcgcaagctcaagtctcaccgcaggaggcaaaggtgggctgataagtcatacaagaaatcccatcttgggaatgaatggaagaaaccttttgccggttcatcccatgcnaagggaattgtccttgnaaagataggtattgaagctaagcagcccaactctgntattcgtaagtgtgccagagttcaattatca

SEQ ID NO: 44047 - DNA, 270 bp, Glycine max
  Clone ID: 701127851H1
gcagccgtagcagtaactcgtggaattgctagcaatggcgaggatcaaggtttacgagctgaggcagaagacgaaggctgatctgttgaatcagctgaaggacctcaaggccgagcttgccttgcttcgtgttgctaaggtcaccggtggtgcacctaacaagctctctaagatcaaggtggtgaggttgaacattgcccaggttttgacggtgatttctcagaagcagaaggccgcgttgagggatgcctacaagaacaagaagtactt

SEQ ID NO: 44048 - DNA, 268 bp, Glycine max
  unsure (1)..(268): unsure at all n locations; Clone ID: 701127852H1
acttaaagaaggaacagcaacaacctctcatggcactgatgatggcaaaaagttcaagctcatcagcaaattgaaggtcaccanagcagatgggaagntncnnaagggtgaanactgtgagaatgaacaacttgagaggngtgggattacagaggaatttgaccnacctgttacttctgtggagccttgctgtntgtctgacagtactcaaagcngcaagagaaaaaggagctccccacaattaactcatgttcatggacctgctatt

SEQ ID NO: 44049 - DNA, 266 bp, Glycine max
  Clone ID: 701127854H1
atttgagagagggggcactatttataaactgtttatacaattgtagccggaagaaaagggaaggttatatatcttactcttttcagatgtacatatttttaaagatcaaatcatagtgagggactagcatgtagcatgtcctattcagaaccagtaatgtgtattgtcatcatgttaaatgccgtaaagtttatgtatgctattgccaaatgttaacaggctgattagtgtacattcccaaactgcaattgtaatctttatatttt

SEQ ID NO: 44050 - DNA, 255 bp, Glycine max
  Clone ID: 701127855H1
attcccagtctccgattttgcttaacgttcaattctccaaccgaattgaacttcagaggtccttgcaatggcaacgaattcttctgatgtactgtcgccgaagcaacctcccttgccatctcccttgcgtttctccaaattctatcagtctaacatgagaatcttgattacgggaggagctggattcattggttctcacctagttgatagattgatggaaaatgaaaaaaatgaggtcattgttgctgacaacta

SEQ ID NO: 44051 - DNA, 263 bp, Glycine max
  Clone ID: 701127856H1
gggaaaaggagggaaggggcttcttgcagcgaaaaccaccgcggcgaataaggacaaagacaaggacaagaagagacctatttctcgctcttcccgtgctggaatccagtttcctgtgggacgtatccataggcagctgaaacaaagggtccaagccaatggacgtgttggggcaacagctgcagtgtacttagcctcaattctagagtatctgactgctgaagttcttgaacttgctgggaatgcaagcaaggatctgaagg

SEQ ID NO: 44052 - DNA, 259 bp, Glycine max
  unsure (1)..(259): unsure at all n locations; Clone ID: 701127857H1
tgaaaaccttctcttacccttctctcaagtttcaagagatttcatcatggctccaaagaaggacaaggctccaccaccttcctccaagcccgccaaatctggcggtggcnnnnnnnnnnnnnnnnnnnnnnnnnnnggaaagcaaaaggagaaggtgaacaatatggtgctgtttgatcagggcacctatgacaagctcctttctgaagctcccaaatacaagctcatcactccttccattctctctgatcgtttgagg

SEQ ID NO: 44053 - DNA, 168 bp, Glycine max
  unsure (1)..(168): unsure at all n locations; Clone ID: 701127858H1
ggacctccgtgaatcgataagcaaccaaaccgacgncgctctgagcatcacaaagctcctgttgtgcgaaaaacgctcgggacagtaacctcgtgtactcgccgctgtcgttgcacgttgttctgagcatcatcgcttctggctccaagggccccacactcgatnagt

SEQ ID NO: 44054 - DNA, 257 bp, Glycine max
  unsure (1)..(257): unsure at all n locations; Clone ID: 701127860H1
gcacttaccaacaccacttccaatggcttcatatcatgaagaagaagtgaggctattgggcaagtgggccagcccatttagcaacagagtagaccttgctctcaagctcaagggtgttccctacaaataatccgangaanatcttgctaacaagagtgctgatcttctcaagtncaaccccgttcacaagaaggttccggttttggtccacaatgggaacccattgcccgagtcactcatcattgttgaatacatag

SEQ ID NO: 44055 - DNA, 88 bp, Glycine max
  unsure (1)..(88): unsure at all n locations; Clone ID: 701127861H1
gtcccattccctgcacaaacagcngngcttcattattaaancttcctcaaccagcaacttnngcttcctccgttccncanttcatgng

SEQ ID NO: 44056 - DNA, 259 bp, Glycine max
  Clone ID: 701127862H1
ggagtttttctccttggagagaatcggtgggaagaaccatcaagacttgttgcaagggatggagttgataagagcaagaacaaggatatgacaacaaaatgccttcaatgtcgtggggaaggtcgcttgatgtgtacagaatgtgatggatctggcgagccaaatattgaacctcaatttattgaatgggtggaagagggtacaaaatgcccatattgtaaaggcctagggtatactgtatgtgatctatgtggaggga

SEQ ID NO: 44057 - DNA, 260 bp, Glycine max
  unsure (1)..(260): unsure at all n locations; Clone ID: 701127863H1
ctcnatctgggcagtgntnnggttctnctacttttntncttgctgcttcantctcagatggctcgtnctgccacctacacagntggagattcnnggggttggacctntaacactgntgcctggcccaaaggaaagctcntttcgggcnggtgacacactggctttcaannatagcccgggacncacaaagtggtggccgngaacaaggctggatatgatagctgcaagantccaagaggagccaaagngtanaagtcagg

SEQ ID NO: 44058 - DNA, 262 bp, Glycine max
  Clone ID: 701127864H1
gctgcccttgaaagcaaggtaagtaattggcacaagaaggaaactggatggcagaaaagggaagctgcattgagttttcaagttcagaagcttacagagggaagtgatcgccacaagaaagaagccggatggcagaagaaggaagctgcattgaatcttcaagttcagaagcttactgagagaaacacttatttggagatgctactagatatgcagagcaggcattgatgttcaattttgaattgcagaaaacgtttgatct

SEQ ID NO: 44059 - DNA, 100 bp, Glycine max
  unsure (1)..(100): unsure at all n locations; Clone ID: 701127865H1
gnacgctctgcttccagcgagtggtccttcttcggttcaacaccctaatttgnacangctgnttcttcagctgngaaatggnacnagnaacccttctntt

SEQ ID NO: 44060 - DNA, 123 bp, Glycine max
  unsure (1)..(123): unsure at all n locations; Clone ID: 701127866H1
gcaagagttatcgaaaccctgctttttgtagctggtattaacacattgttgcaaacaatgtttggaactcgattgcctgcagtaattngagggtnttacacctttgttccanccacaatctct

SEQ ID NO: 44061 - DNA, 267 bp, Glycine max
  unsure (1)..(267): unsure at all n locations; Clone ID: 701127867H1
gccgaactgtgcagaagcagaatgtgcattcactcggggaactgaaaaatgtgggtatatattcatgatcttgatgagctcttcaattgttttatgcgacaacttaatcctctttaatcagaagctgcttttgaagtctttcgtctcgcgtggttcatccaactttgtgatncagttaagcagcaaaacgaggcgtcttaacgggttcatttcaaaagcggaaaagcatagtggccattcaaggaaaagcagttggtggcagaaatt

SEQ ID NO: 44062 - DNA, 268 bp, Glycine max
  unsure (1)..(268): unsure at all n locations; Clone ID: 701127869H1
cttaataaacgctcttctctgaaaaacctnatttcttctcttcttntcttctctttcgtttcgatcttgcgatctcngaaaatgagagagtgcatttcaatccacatcggtcaggccgnnagtcaggtcggaaacgcctgacngggaggnctactgactcgnnnacggnattcagcctgatgggcatatgcnaggngataagactgntggtggaggtgangatgcntgcaanacnttctncagtgaanntggggcaggaaatcacgtt

SEQ ID NO: 44063 - DNA, 246 bp, Glycine max
  unsure (1)..(246): unsure at all n locations; Clone ID: 701127870H1
gaggaactcgagttcgtgatccaaacacgagggccattttgcnnttcctcctcgaaagagggcangtgcgatgggactcttcgcggaggatctgagtcggaggtacttccatcaattgattttgtcgtcgagaactgccactcgcgcgacgtcttccagcgcgacctcaagccggagatctcctnctcgacgagaacggcgatttgagtgnngttaggcatcagaattcaaaacagacccgatggg

SEQ ID NO: 44064 - DNA, 262 bp, Glycine max
  unsure (1)..(262): unsure at all n locations; Clone ID: 701127871H1
acgggtcgagatcgagcctcggaanagggaatcgcagcgaagtccactatgccgaagcaaattcatgagattncagacttcctcctcactgcaaggaggaaggatgcacgctctgtgaaaatcaagcggagaagggatgtagtgaagttcaaggtccgttgctccaagtacctgtacactctgtgtgtgtttgattctgagaaggctgataagttgaagcaatcacttcctccaggnttaagcgtgcaggatgtgtgattct

SEQ ID NO: 44065 - DNA, 242 bp, Glycine max
  unsure (1)..(242): unsure at all n locations; Clone ID: 701127872H1
ggaacctattgacttatccctttgncgagggatgcggttgtncagaagaaaacacttgccttanaaaggtgcacattacaatttcgttaagggcacatttgagctttgggatctggacttcaaaatctctaactctgtatccgtttaagaccactgaagaagcaataaacgaaagtgttcttgaccctgctgtgggatgtacatgacctagcttccccttgcaagtgtttcaaattgtataa

SEQ ID NO: 44066 - DNA, 257 bp, Glycine max
  unsure (1)..(257): unsure at all n locations; Clone ID: 701127873H1
aaacattactgcttctcctttgtgtgaaactcttctgttatgcagtgattggtgctcctccaaacttgtcctgctaaaaatgaggataaatgcggcgattcagatgaatggaaaggggagtttttccctgacnttcccaaaattnaatntgagggtccgtcaagtaagaatgtgctttcatttaaatggtataatgcagaggaggaaatcttnggaagaatatgaaggattggttaagattagtgttgcattttggc

SEQ ID NO: 44067 - DNA, 257 bp, Glycine max
  unsure (1)..(257): unsure at all n locations; Clone ID: 701127874H1
cttagtcagaaaacatagaccatgtcgaatttgagtttccttctanntcatagtagcagccctttggggcactcctcttctcaacccaaaagtccaaccccaaacagcaacaacttcaaatcatcaaaacatacatcaaatgtagggtgcaatattcaaccaaaatcggaggaaatgaaattggtgttcgacaagtttgacaccaacaaagatggcaagattacccttgaagagtacaaagcagctatgaggacaat

SEQ ID NO: 44068 - DNA, 255 bp, Glycine max
  unsure (1)..(255): unsure at all n locations; Clone ID: 701127875H1
ggcgggtagggtttcgacgtgcttcttcttcgtgtttgctctttctctccttcttccttttcagatctccgctgaggaatcatcggagaaagagttcgtactcacattggatcactctaactttcatgacactgtcagcaagcacgatttcatcgtcgtcgagttctacgctccatggtgtggccactgtaagaagcttgctcccgagtatgagaaagctgcttctatctngagtagtcatgatcctccggttgt

SEQ ID NO: 44069 - DNA, 254 bp, Glycine max
  Clone ID: 701127876H1
agattattgcctcttcgttactcaaccgatgccctcatcgttcagaaattcagagtattgctcttgctgaggtggtgggctgtggctatatattgctgggaagtgtggattcacatggtcatctcattgtgtctaaactagatgcgtctggtgaagatgttgacaagctaacatattctgcattgcctcatgataatggtatcggggaaggaagttggtcaggactctgcttttgcccaaatcaatggtctatg

SEQ ID NO: 44070 - DNA, 256 bp, Glycine max
  unsure (1)..(256): unsure at all n locations; Clone ID: 701127877H1
gcgcanatccaccacgtccgcaaaaatcccacaccgcttgcttccntggcccctcccctctctcacatcaaatccatttcgccaaatttcacatcactcttcacanacagaaaaatagtcctccgcngccggcnatcctaggtttncggtgacgatgctcccctacgcttccatcccggaggccgtggcggcgctgggccgcaacctcaccttcgcggagaccctctggttcaactactccgccgccaagtccgat

SEQ ID NO: 44071 - DNA, 256 bp, Glycine max
  Clone ID: 701127878H1
ggtccccaatgtgctgatgggcataggaacaggaactggtgtaattgtcttcatgatgatgccctctcaaatattcagatcattacctgacattccaaagttcttctggcgctatcccatgtcctacctcagttttgctgcttgggcagttcagggacaatacaagaatgacatgctgggggttgaatttgatcctttgctgccaggagatgttaaagttagtggagaacaagtgctatcattggtatttggtgtt

SEQ ID NO: 44072 - DNA, 260 bp, Glycine max
  unsure (1)..(260): unsure at all n locations; Clone ID: 701127879H1
ggatgctnnaatttcnntgtggttantgaggaaatttcatatccgcaagggcagagagtngaaggaagaagagagaaagagggaagctgctgctgaatcgtaatcgntctnatatctacactctaccatggannntgatgatgatttcacatnttgtcaggtcagtgcacctgttgatgttgaaacaaacaagcttgcntcagatatagctgatatgtccattaaagaagaatctncaaatgcagctaatactgctcagg

SEQ ID NO: 44073 - DNA, 259 bp, Glycine max
  unsure (1)..(259): unsure at all n locations; Clone ID: 701127880H1
gttcgcgtttgtnctgcttttcctatcngcctcagcagncgacgtcgttgtgctctctnaagataacttncgagaaggaagttngtcangacagaggngctctcgttgagttctatgcnncttggtgtggncactgcaaaaagcntgctccanantatgaaaagctggtngcagcttcaagaaagccaaatctgttttaatcggcaaggttgactgtgatgagcncaagagtttgtgcanncaaatatggagtctctgg

SEQ ID NO: 44074 - DNA, 281 bp, Glycine max
  unsure (1)..(281): unsure at all n locations; Clone ID: 701127881H1
tagtttagggcggtgttactccttctctcgttgattcggntctagagtctttttttcactcttcagttctcgttgttgttcttcgctttcctgaaactagggttttcaatttcgatncattcgttaataattaaagangtttngggaggggcaccgaagaaagaggcgataatacgaggtaactangagatccngcngcgttncgnggaacgcttcncanggatngagctggaggaanggcttacnaagaaaagcggccaatnaggaanaaccngggggng

SEQ ID NO: 44075 - DNA, 267 bp, Glycine max
  Clone ID: 701127882H1
cagaatatgaacatatatttacagacttcctgttgagcttggggcaggggaagtacaagaaaaaataggctaaaataactgtttccagcccttttatttatgtcccccacatgacgtaagcccccttgcctctcagtttgaagctcaaaactatggctgtaggaaagtatcttagaaagcattagtgataataactttttcagttatggctgtgtgatggaagtgccatggaaaactatcaagacttgtgtttcaggaacttcgacc

SEQ ID NO: 44076 - DNA, 266 bp, Glycine max
  unsure (1)..(266): unsure at all n locations; Clone ID: 701127883H1
ggggtagtcacagaaacacataaacaagaagacacccaccaatatnttgctttctcttttcttttcctgcttataactgccttttgtnttggntttaattccacctcanatnttatnaanggttccaaacntcttcttggantgtcncttccttantacncctcaaagnanagccncnttaacatctcttctcngnaaattctctttagagagatagagagaggaagaaagnatggcagcttgcactgtctactcnacacagtnta

SEQ ID NO: 44077 - DNA, 264 bp, Glycine max
  unsure (1)..(264): unsure at all n locations; Clone ID: 701127884H1
gcagacatgtcttccttcgatgccttcgccgacgacttgaacgtcaactcttcttccactcgccagcacgangcntgacgaggacaacttctctggctacggcggctactcctccttcaccggaggattctccgccgacggagatgtcgccgtcgatcactccgccgccgcgtcgccggagatctacggcttcactgattcgaatcccgcttactctcagtctcccttcgaatcggccaccgtagagaacgaaaacggaaacgg

SEQ ID NO: 44078 - DNA, 263 bp, Glycine max
  unsure (1)..(263): unsure at all n locations; Clone ID: 701127885H1
gcaatgcttgggttttgtgtttgaggttatgaggaaaaagatgaatagagtataattaagaggaagaggattgagagttaggacacataacnnnnnnnnnnnnnnnnnnnnnnnngtnccttttaaaatttccctctccgcgttcctgntctatcttctttttncaatttttttnattncaaaaaataaggggaaattttnctngctgaatttcacaggtgaaaaatggcgagctcagtggagaaggagggtggtgcgaccna

SEQ ID NO: 44079 - DNA, 236 bp, Glycine max
  unsure (1)..(236): unsure at all n locations; Clone ID: 701127886H1
ctctgattccaagtttcttcggtggccgaaggagcagtnntttcgacantttctccantcgatgtgtgggagccctttaaggattttccatttcccagttctctttctgctgaaaattcagcctttgtgagcacacgagtggattggaaggagacaccagaagcacacgtgttcaaggctgatattccagggctgaagaaggaggaantgaagntggagattcaagatgacagant

SEQ ID NO: 44080 - DNA, 260 bp, Glycine max
  unsure (1)..(260): unsure at all n locations; Clone ID: 701127887H1
gctacttcctactccaaccgcactncctgctccgcaattatcatgggcaaggtcaagatcggaatcaacggatttggaagaattggccgtttggtagccagagtggctctgcagagagacgangttgaactcgtngccgtnaacgaccctttcatcaccaccgattacangacatacatgttnaaatacgacagtgntcatggacactggaagcancacgangtcaccgttaaggacgagangacccntctnctcgggga

SEQ ID NO: 44081 - DNA, 259 bp, Glycine max
  unsure (1)..(259): unsure at all n locations; Clone ID: 701127888H1
attccaaagcaaggaaggaagaaataaaccgaatgagagcattaacctcttcttcttccactttcattccaaagngttatnnnnnnnnnnnnnnnnnnnnnnntctcttcgctcttcgatcctcgtccgggggctgctccgaataccaccaccaccacgcgccgntggccacgataggaggcttacgcgactcccaaggctctcagaacagcgtccaaaccgaggccctcgntcgattcgccgtcgatgaacacaacaa

SEQ ID NO: 44082 - DNA, 254 bp, Glycine max
  Clone ID: 701127889H1
gactgctccagtggcagttccaagcacaagaagcgcaagcaattgcagacggtggaggtgaaagtgaagatggactgcgaaggatgcgagaggaaagtgaggaaggcggtggaggggatgaaaggcgtgaaccaggtggatgtggagcgtaaggccaacaaagtcactgtggtcggctacgtcgaggcctctaaggtggtcgcccgcatcgctcaccgcaccggcaagaaagcagagctctggccctacgtccc

SEQ ID NO: 44083 - DNA, 253 bp, Glycine max
  unsure (1)..(253): unsure at all n locations; Clone ID: 701127890H1
tgcatctcatcgtctccgaaaatgaacgacgcagatgtctcgaagcaaatccagcagatggtgcggttcatccgccaggaagctgaggaaaangccaacgagatctctgtctccgccgaagaggaattcaatatcgagaagctgcagttggtcgaagccgacaagaagaagatcaggcaagaatacgaacgcaaagagcgccaagttgaaattcgcaagaagattgagtactcaatgcagctgaatgcttctc

SEQ ID NO: 44084 - DNA, 252 bp, Glycine max
  Clone ID: 701127891H1
gttaacggttaaggtgtatgtatattcaggaccggcgaggtgttaccggcagataaagaacaaaccgtacccgaaatcccgtttctgccgcggcgtgccggagccgaagatccgaatctacgacgtgggaatgaagaagaaaggcgtggacgagttcccgttctgcgtgcacctggtctcgtgggagaaggagaacgtctccagcgaggctttggaggcggcgcgcatcgcatgcaacaagtacatggccaa

SEQ ID NO: 44085 - DNA, 245 bp, Glycine max
  Clone ID: 701127892H1
gcttagagagagagcaaaacatattattttcattttcatctttttttgagtatcaacaaatggcaaccactgtgatgaccactctcccccaattcagtggtcttagaccccaattctcagctgcccctgtgaagaacttggttgctgtgcaacccatgagtcgcaaggggaagggtgcattgggagctcgatgtgactacattggttcatccactaatctgattatggtggcttctacaaccctg

SEQ ID NO: 44086 - DNA, 70 bp, Glycine max
  unsure (1)..(70): unsure at all n locations; Clone ID: 701127893H1
agcagcngtggtggacgtcgggctctaagctnctcaaagcggactttgcaattcctncaccagacncccg

SEQ ID NO: 44087 - DNA, 236 bp, Glycine max
  unsure (1)..(236): unsure at all n locations; Clone ID: 701127894H1
ggtaactcgactctattgagtgatacacaatcgcttctccancttgaactagactttccaacttgcgaanaaaaccaaagtttcgtttggtcgaaaacgcacgcggtttgacccactttcancttcaccaagaagtggtttcatcacttggtggttacacaccacnccactgtgaagcgtgaatatgaacgttccttttagcctctctttcattnncccttttccagataccgggt

SEQ ID NO: 44088 - DNA, 282 bp, Glycine max
  Clone ID: 701127902H1
aaaacaactcctccgccattgctcacccaaccctattccatttccctcactccttcactccttcactcagtccctatcaaaatgcacagtgcaacgcacgccgaagcagagcgtcttctcagcatgcaatcccatattcgcgaccttggcttggactcctccttggagctgcacacagtctcggaggacatggtcgggcaaatcacaatctcaccggcccctttgatttaggtgtcaaatttgaggcgacatcgcaggactacatgcagtctcatggacatt

SEQ ID NO: 44089 - DNA, 283 bp, Glycine max
  unsure (1)..(283): unsure at all n locations; Clone ID: 701127903H1
cttggaagtagacagatacgttgtaactgggcaacaaaaggtgctggtggtaatgaagagaagcaaaactcagatgcaaaaagtgtggtggaacttacaaatggctcatctgaagatggtaaagagacatctaacagtgatgctcctgngaacaatcctcagtatactactgtttatgtgggtaaccttgctccagaggtaactcaacttgatctccatcgccacttccatgctcttggggctggagtgatggaggaggttcgggtccagcgtgataaagggt

SEQ ID NO: 44090 - DNA, 260 bp, Glycine max
  unsure (1)..(260): unsure at all n locations; Clone ID: 701127904H1
cgatatgatctcnncnaccttggagaaancctncgtgcaacataaggcttntacagaaggtggaatnangactagaagggatgtttggctgtngagnttatggagggtcaagcncnntgttgaatagtgtnngtgtngcctntatctgcaacntntaantgaaccaatccnacccnntntatgaacatatgaaaagatcggntttttgtggntccnccactcattgtngtngacgggntcgcgaaatcaatcaagttttg

SEQ ID NO: 44091 - DNA, 224 bp, Glycine max
  Clone ID: 701127906H1
ggaaggattagggtttgtggagatgcaaggggcaaggcgttgatgaagtgagcatagaagagttggcgtcgaatctttccctctacaaagatcaactgaaccaggttagagaactcttaaacgatggccctgcaaattctgaatatgttgacatggagagggaactttccgaggtaagctcaattcaaccccagttttgatgttttgtttccgccttgttctct

SEQ ID NO: 44092 - DNA, 231 bp, Glycine max
  unsure (1)..(231): unsure at all n locations; Clone ID: 701127907H1
cnattacgaagagagatacgaagggaacggagaagaagaggaacttcacaattctcancatacaacctcattctganncctcnaccnatacccacccacgatnatctcnccgattccaaatctcgccatggatcncgcgattatgacagagattcttccagaancananataantagcnngananagggaganncagggagnaaaaangggaananggganngacagggna

SEQ ID NO: 44093 - DNA, 279 bp, Glycine max
  Clone ID: 701127908H1
tatgcttgtctcaaagattaagccatgcatgtgtaagtatgaactaattcagactgtgaaactgcgaatggctcattaaatcagttatagtttgtttgatggtatctactactcggataaccgtagtaattctagagctaatacgtgcaacaaaccccgacttctggaagggatgcatttattagataaaaggtcaacacaggctctgcctgttgctttgatgattcatgataactcgtcggatcgcacggcctttgtgccggcgacgcatcattcaaa

SEQ ID NO: 44094 - DNA, 218 bp, Glycine max
  unsure (1)..(218): unsure at all n locations; Clone ID: 701127909H1
attggatatgtccgagcggctaaannggcagacttgaaatctgccgagtttcagccgcaacggttcgagtcccgctgtgttctttgttggagtgtgagcttgaggtgtttgtctatcgtggctcttggcagtatttcaacttaaataatgtaggttagattctgatctcangagtttgngtcagaatggagacacanccaangagcaggtgggtggag

SEQ ID NO: 44095 - DNA, 279 bp, Glycine max
  unsure (1)..(279): unsure at all n locations; Clone ID: 701127910H1
ataccatacaagaacgacaanctgaagtgtgtgtagctctatgggattatcactttccttactccaatctgcgtgnngaagaaattgttagacattttcccttttctgatttgcctctcagcatcagctttgcttccaaagatggaactntgattttaagggcatcaagcttcaagagaagagaatcagaaagtgctattactgttttgtcaaacgggtccagaagttcgaaccggttgagggataacagaccccaacatgtgatcctgaaagaaattt

SEQ ID NO: 44096 - DNA, 280 bp, Glycine max
  unsure (1)..(280): unsure at all n locations; Clone ID: 701127911H1
tgaagttgnttgtcttcnttgttgctgcagtagtnttggcnccatggccatgccatggcgcaggctaaccaaaggttccctactccgaatgaaaactggctatggtgagcgttcttcggaggtaaaatgcgcaagttttaggcntgctgtggaagcacacaacatccgaaccaaaaaaaccantcctgaagagtgcgttgaaccaacaaaggactacattaatggcgaacaatttagatcagactctaaaacagttaaccaacaagctttcttttatgct

SEQ ID NO: 44097 - DNA, 281 bp, Glycine max
  Clone ID: 701127913H1
ctactctctctatcactctcccatggcttcctcttccctctttctctcactctctctcaccctttgccttgtttcctctctctgctatgctcacaaatcttccttaaccctacctgtgacaaaagacgattcaacccaccaatacctaacaaccctctcttatggcacccctgttgagtctgcaaaattcgtgcttgatctcggaggctcaatcctctgggctgactgtgcatccagaaccaccccatcttccacccttgccccaatcttccaccgttcaa

SEQ ID NO: 44098 - DNA, 283 bp, Glycine max
  unsure (1)..(283): unsure at all n locations; Clone ID: 701127914H1
cncttctcgcncttggcttttcgctcttcactcactctcattcatncatttccaccgnacataaaaanancnaaacntgtngggtaacacgcccttnncgacggtngatcccgagntccatgacctcatcgagaaggagaancgccgncaatgccgcggaatcganctcatcgcctccgagaactncacctccttcgccgtcatcgaggccctcggcagcgctactcacnaacaaatacnccgagggcatgncgggcaaccnctactacggcggcaatgaata

SEQ ID NO: 44099 - DNA, 249 bp, Glycine max
  unsure (1)..(249): unsure at all n locations; Clone ID: 701127915H1
atggacgagtcatggagaatgcgaatgggccaaacgccgggcctccctcgccggagatccatggaggagcgctcctccgncaganctncgcctcaccatnttcgncggtgccggggctggcgaacaggaaaccctcnaccccgacgacttcgccgacntattnggcggcccgccgangancctcctngcgcacaaattctcgaggtcgaattcgttctacgangagattttccggccgccggnnttcgc

SEQ ID NO: 44100 - DNA, 285 bp, Glycine max
  unsure (1)..(285): unsure at all n locations; Clone ID: 701127916H1
gaaaaatgttcatcgagagtttcaaggttgagagtcctaacgtgangtacacagagactgagattcagtccgtgtacaactatgaaaccactgancttgttcacgagaacaagaatgggcacttatcagtgggttgtcaagcccaaaactgtcaaatatgaatttaaaaccaacacccatgtccctaaactaggggtaatgcttgtggggtggggtggaaacaatggctcaaccctcaccggtggtgttattgctaaccgagagggtatttcatgggcaacaaag

SEQ ID NO: 44101 - DNA, 285 bp, Glycine max
  unsure (1)..(285): unsure at all n locations; Clone ID: 701127918H1
cttcactactacaccaaattaatagncnattaaagatatatcattccacaacacaaattaaanttagtgagacgtacccttattatggccaaagaaggtcttggacttgaaatcactgagctaaggttgggtctacctgatgcggagcatcaagtangtgtagtcaataagaaaaatgagaagaagagggcattctcggaaattgatgatggtgttggagatgaaaatagctcctccggcggaggcgaccggaaaatggagacgaataagagtcaagtggtgggg

SEQ ID NO: 44102 - DNA, 284 bp, Glycine max
  unsure (1)..(284): unsure at all n locations; Clone ID: 701127919H1
gaagtcnggnatgtgtgcancggtggttgtagcacttcntcttctggcggnggtggggcccatggctgaggctgtgacatgcaccccancagagttgagtccgngtcttccancaatcactnaccgnggnctaaaccntccaatgctngttgcacgaagctgaagcagcaaaaaccatgcttatgtggctacctcaaaaangctagcttgaagcagtatgttaactcnccctaatgcccgaaaaaccgttgctttcttgtgggatccctttccaacttgnaaat

SEQ ID NO: 44103 - DNA, 280 bp, Glycine max
  unsure (1)..(280): unsure at all n locations; Clone ID: 701127920H1
ataactgttctgtcacctcataagctnagggcgaacgcgatggcgccatcggaaacttcggtcttccggactacggaggactcatcgntggctctgtgctgtatcccaccaaaggctcccncgggtgtcaggtcttcgagggcgataagcccttcaaaattcactcttatcgtcccactattgttctccttgatcgtggagagtgttactttgccttgaaggtttggcatgccgaacaggctggtgctgcggcagttttggtgactgacagcattgagga

SEQ ID NO: 44104 - DNA, 260 bp, Glycine max
  unsure (1)..(260): unsure at all n locations; Clone ID: 701127922H1
atggcttaacacgacgtctcttaantgctcactctgacactgctctgtataaaactgttggnacaaatctgtactctccaaaacaagcacaataaagtgatggacatggaccagtgtttgcatcatccatcttcatttcttggtgataatacaatcatagctattcatagggagattaaaaactttggtcaaattccttgtatatttttaccataaagttctcaaattaaacaacatgtacatagttttttcaactttaa

SEQ ID NO: 44105 - DNA, 280 bp, Glycine max
  unsure (1)..(280): unsure at all n locations; Clone ID: 701127925H1
attccatctggttcttgagcacagagctagagcttaatgggataatggtatttatcaagaagatcattgctaatggngcttatgacttcacaagagctgctctaaggacttcattccttgcttcatgtgtctctgcttgccagagtagnacaatgagtcttgctgatacagttactgtaatggcccaaaggttgcatgaacgtctccaggaatgcaatggagatgaagtattgaaggcagaagctggtgctaaggttcaaaagtttactgaatgggctct

SEQ ID NO: 44106 - DNA, 280 bp, Glycine max
  unsure (1)..(280): unsure at all n locations; Clone ID: 701127926H1
cgattctgttcagttttccacgttttgagtttaaattcacagtattttgaggaaacnaattaaagggtaatcgctcgcttaatccaccgagctcaattcccacatccccacaaaanngaaatcncacaaaatcagatttggtgaagaagagagtgtgatttgatgattatgaattgaagtttgaggtggagacatgaacgtgagccatgcttcggttcatccagttgaagaagctccaacgactgaaggtggtggtgctgaccaaaacgtcaagctccta

SEQ ID NO: 44107 - DNA, 109 bp, Glycine max
  unsure (1)..(109): unsure at all n locations; Clone ID: 701127927H1
gctcgancngctcacanccttnctactcatntcntctngtctnncgtnttcccttacgcaagtgagagatggcgcaaattctgcttcatgggactantnccacacaaca

SEQ ID NO: 44108 - DNA, 285 bp, Glycine max
  unsure (1)..(285): unsure at all n locations; Clone ID: 701127933H1
gttactgtctgttcaagctaccatctctctntctctttcttagtgcctccttgccagaagttaaaatggcccaagaaactttcctattcacatctgaatcagtgaacgaggggcaccctgacaagctctgtgaccagatctccgatgctgtgctcgatgcatgctggggagcaggaccctgacagcaaggttgcctgtgaaacctgcaccaagaccaacatggtgatggttttcggagagatcacaaccaaggccaacgtggactatgagaagattgtgcgtgac

SEQ ID NO: 44109 - DNA, 98 bp, Glycine max
  unsure (1)..(98): unsure at all n locations; Clone ID: 701127935H1
aagagatcgagcaatggcattagtgacttcactttctcctgcgaccccttcttcggttcanaccaacactttgaaccctttgggttggactgatgatc

SEQ ID NO: 44110 - DNA, 278 bp, Glycine max
  unsure (1)..(278): unsure at all n locations; Clone ID: 701127936H1
gggtagcnccatttgggagnccgggacagaagtgtgggttggtgttagaccaccaacagatattgatgcatttggtcggtcagatagtgaaggggttgaatctaagatgcatattatggatgcttttctttggggaaggtgcttaactgatgatgaggtttcttctctctatacctcaatggcttcggcagacttcggtgcacttgatttccctgaagataattggcagtgggctgattcaccttcgagggttgatggttgggacagtgatcctgctg

SEQ ID NO: 44111 - DNA, 280 bp, Glycine max
  unsure (1)..(280): unsure at all n locations; Clone ID: 701127937H1
gccgnaggttcntccaatctccgncangccttcaccggattgcaaccatgtcgaggagccnngttagagagccanaggaggannacgtgactctgggcccagctgttagagatggtgaacatgtttttngagtcgctcgcatctttgcctccttcaatgacaccttcattcatgtcactgatctgtctgggagggaaacacttgtccgcatcactggcgggatgaaggttaaagctgacagagatgaatcatctccatatgctgctatgcttgctgcgca

SEQ ID NO: 44112 - DNA, 278 bp, Glycine max
  unsure (1)..(278): unsure at all n locations; Clone ID: 701127940H1
attgcatccctcttgatttgtagtttgttttgtgctttagataaaagttctgccaaatcaagaggggttttaagatcatagtgtgtgttttgcaacaatggctaagttctttgctgctatgatcttggcactctttgccatttccatacttcaaacagtggtaatggctgctaatgaacaaggaggccacttgtatgacaacaagagcaaatatggaagtggaagtgtcaagagttaccaatgcccatcacaatgctcgaggngatgtagccagaccc

SEQ ID NO: 44113 - DNA, 276 bp, Glycine max
  unsure (1)..(276): unsure at all n locations; Clone ID: 701127941H1
ttggacactgtggagaggttgaccaaagagcactacangaaatgcatggaagagaggttcaaggaattagtggcaagcaaaggtctagatgctgtccaaactgaggtctaggatatggactgggagancaccttccacttgcgtcacctccctgaatcaaacatctcagngatccctgatctcattgangagtacaggaaggtgatganggattttgctttgaggttagagaaactagcagagcagctgctggacttgttgtgtgagatcttggcc

SEQ ID NO: 44114 - DNA, 277 bp, Glycine max
  Clone ID: 701127942H1
ctctccttgaggctcttgaccaaatcaatgagcccaagaggccctcagacaagccactcaggcttccattgcaggatgtctacaaaattggtggtattggtaccgtgccagtgggacgtgttgagactggtgtcgtgaagcccggtatggtggtgacttttggtcccactgggctgacaactgaggttaagtctgttgagatgcaccatgaggctctcacagaggctcttccaggtgacaatgttggctttaatgtgaagaatgttgcagtcaagga

SEQ ID NO: 44115 - DNA, 268 bp, Glycine max
  unsure (1)..(268): unsure at all n locations; Clone ID: 701127943H1
ctttcacttagcccgcctctnccatgacnggaccannncggatctgccctcgaaagtactctcttcattttgggagcagagcatgcaaaatcgagcaattaatcttataaaaatttcctcgggtctctagaaatctataaaaatgaaaagcccgggtancagcacaagcaaaaggagagaagaaaagtagaaaaaggaaggggggaggagactcgcctcaatacttcccactggacgagaggnccacctaacccacctacccactcat

SEQ ID NO: 44116 - DNA, 277 bp, Glycine max
  unsure (1)..(277): unsure at all n locations; Clone ID: 701127945H1
ccggtgaantgccccgtcaccgtctgcngcgatattcacggccagttttacgatctcatcgagctgtttcggattggngggaacgcacccgataccaattatctcttcatgggtgattatgtagatcgtggatactattcagtggagactgttacacttttggtggctttgaaagtccgttacagagatagaatcacaattctcaggggaaatcatgancgtcgtcaaattactcaagtgtatggcttctatgatgaatgcttgagaaaatatggaa

SEQ ID NO: 44117 - DNA, 280 bp, Glycine max
  unsure (1)..(280): unsure at all n locations; Clone ID: 701127946H1
ggtggcgacactcataacgtcttcgtgtacggtagtctgttagctgatgaagttgtccataccctnctgaagcgcgtccctccaaccgcacctgccatccttcacgactatcacaggtttaaagatcaaaggtcgcgttatcccgctattctccctgtccagaataacaaagtttatggcagggtgcttcttggtatctccggagtagaactagatattttngatgantttgnaggatgttgaatatactagaactgatgttgaggtttccttgaaggac

SEQ ID NO: 44118 - DNA, 273 bp, Glycine max
  unsure (1)..(273): unsure at all n locations; Clone ID: 701127947H1
gaaaatatctgctggcgtgcttggcggagccactgctgtttgggtcctttttgcngttgcttgagtatcaccttcttactctggtgtgtcacattctgatactgttgctcgcagttctgttcttgtggtctaatgcccatacttttatccacaaatctccgcctcgcattccggaagttcatcttcctgaggagccattccagcaagttgcgtctgcattgagaattgaaatcaaccggggatttgctattttgcatagtattggctctggaa

SEQ ID NO: 44119 - DNA, 283 bp, Glycine max
  unsure (1)..(283): unsure at all n locations; Clone ID: 701127948H1
gcttaacgcaggggacattcgctaatgaagaatgatcctggaagctanaagagtccaaatcttcgaaggtcgttgaccaatgaaacagaacatggtgacagatatgaactggttgcatatcgtaatgaaactcagggtagttttggagcatcaaagagtcaatctactggtccttggaatcaggattcaagagtaactaaggtggaaacatcaaatggggaatctagtgcaagttatgtagagagtaagacaagtgaggataagttgctggagacaattgtaa

SEQ ID NO: 44120 - DNA, 283 bp, Glycine max
  unsure (1)..(283): unsure at all n locations; Clone ID: 701127949H1
gttcgaacttcccttgtgctgtacaaggaactgtattttgtcaaaggaagcaattaactcatggatgcacaaaccaaaaatcaaaggattncattgtgcaggatagctgcatgttacagcattcggagaaancattgaggaggacacttttcctttctgtcttggtctcagctggtgtttttccaactttgtcgtcttatggcaagacaaagagtaagaatccgtatgatgaaaaacggttgcttcaacaaaatcggcggatacagaaagaaaacaatgcgcc

SEQ ID NO: 44121 - DNA, 281 bp, Glycine max
  Clone ID: 701127950H1
gggaaatggctcccaaaccgcctagtacgggtctgtttgttggactgaacaagggacatgtcgtcaccaagaaggaattgcccccacgcccctcggatcgtaaggggaaaacaagcaagagggtgcactttgtgaggaacctcataagagaggttgctggttttgcaccctatgaaaagcgtataactgagttgctgaaggttgggaaggataagagggcacttaaggttgcaaagagaaagcttggaacccacaaacgtgcaaagaagaagcgtgaggaa

SEQ ID NO: 44122 - DNA, 276 bp, Glycine max
  unsure (1)..(276): unsure at all n locations; Clone ID: 701127953H1
tttgcaaaaatgtgaaaatcaggtgtcaggtttgntcaatttactaataaaaatatttgctctaccaggtttatcaatcgattaacagtttttggttattattatgatcttattaccacccggatagactatttttggtttgataaagcattccttcattcaatttggatgctcacatagacgagtagtgttgcaaaaagaagacatgctcgtgtttatgtgcatccgcagtatctgcattgcatgttttttggatgattatgcgtaacataaacc

SEQ ID NO: 44123 - DNA, 228 bp, Glycine max
  unsure (1)..(228): unsure at all n locations; Clone ID: 701127954H1
tantgcctccttgccagangttaaaatggcncaagaanctttcctattcacatctgaatnngtgaacgaggggcaccctgaacaanctctgtgancagatctccgatgctgtgctcgntgcatncttggagcaggaccctgacagcnaggttncctgtgnaacntgcaccaagnccancatggngatggttttcggaganntcacaaccanggccaacgtggactatg

SEQ ID NO: 44124 - DNA, 280 bp, Glycine max
  unsure (1)..(280): unsure at all n locations; Clone ID: 701127956H1
attctcagatttgcggggcgngatgatgcagcagccaggacccggcatggcacctcccaccatggggccagcagccgcagcaatagtaccagcagcagcctccgccgcagcagcaacaaccctacgtcatgatgccgccgcagcatcaggcgccgcagcctatgtgggccccatccgcccagcctccgctgccgcagcagcctgctagcgccgacgaggtccgaaccctctggatcggggatctgcagtatggatggacgagaactatctctacacctgc

SEQ ID NO: 44125 - DNA, 260 bp, Glycine max
  unsure (1)..(260): unsure at all n locations; Clone ID: 701127957H1
ctagcatgaaatcatccttcgangangnaataattccaatcantcctagaatcctcntccctcanncnnngaatttgatgcctcctcgcattcaattccacgctctggtggcatnnatcatcatggatcggngtaataacaacaataacggcnnnnnnnnnnnnnnnnnntgggtgcgaacggggacacgctctgaaggtgccgtttagagtaaacgacgtgctccccgtgctgccgcgcgagatctcgtggccggttct

SEQ ID NO: 44126 - DNA, 274 bp, Glycine max
  unsure (1)..(274): unsure at all n locations; Clone ID: 701127958H1
gtctgaattctcttctgggaattggaggttttccgaaaaggtttagtttttgnttganttggattggttctttggccatgtctacgtccaacgctgggggtgctggatccaatgattccaatgctaccaggagacaaagcaagagacccaagtactcaaagtttacacaacaagaacttnccagcatgcaaacctattctcacaccaagagcggtnctttcagcattcttgattgtcaccatgtgttcatcccatggagttgcttcataattgc

SEQ ID NO: 44127 - DNA, 279 bp, Glycine max
  unsure (1)..(279): unsure at all n locations; Clone ID: 701127959H1
agtcacttttgtgactgacaatgaccgatcacttttaaaagccattnncaaaganggcaggttcaaagctgaaaagccgnatngttgccgagcaatctatacataagtgncgctcatataattgagcaaatggaagaccaaatttctgaagtacttcaagaagagagagaagaaagagttctaagaaaagccgaaatggaggccacaaaggctgaaaacatgattgcacatagggaagagancttttcccgccccaaaagaacctggtttgtcacagag

SEQ ID NO: 44128 - DNA, 277 bp, Glycine max
  unsure (1)..(277): unsure at all n locations; Clone ID: 701127960H1
gcacancagatgcacaatccggggtatgttatggaagacttggcaacaacttaccaacccctcaagaagttgtggccctctacaatcaagccaacattcgcaggangcgaatctacggtccaagcccagaagtcctcgaagcactangaggttccaacattgagcttttgntagacattccncatgacaacctcagnaacctagcatctagccaagacaatgcaaacaaatgggtgcaagacaacatcaaaaatatgccaacaatgtcagattcaga

SEQ ID NO: 44129 - DNA, 177 bp, Glycine max
  unsure (1)..(177): unsure at all n locations; Clone ID: 701127961H1
gtgctgccnaattatagtaactctcggncctctatctgaagaagaagaagntctgaagaagcatgtgtggangtgctatcatctcagacttcattggtgtgaancgtggccgcaacctcgnccgcgcaggaactgtggtccgagcttgacccnttctcngacctccnnggcttcgat

SEQ ID NO: 44130 - DNA, 282 bp, Glycine max
  unsure (1)..(282): unsure at all n locations; Clone ID: 701127962H1
cacngttccagggcagctcgtgtgggagatcgtgaagaaaaacaactcctttttggtcaagcagttcggaagggggacccagagcgtcgaattcagcagagagagcaacaatctctacaacctcaattcgttcaagtactctggtttggcaaacaagaaaactgttacggtacagcctgagggtaaagatcaggctgtgttgttggctacaacaaagacaaagaagcaaaacaagcctgctgcattgcttcacaaatctgtgatgaaganggtgttcaggag

SEQ ID NO: 44131 - DNA, 293 bp, Glycine max
  unsure (1)..(293): unsure at all n locations; Clone ID: 701127963H1
cctaagccgcctccgccacccaaacatcgtcanaatcctcacgttactgggcctcaggccctganacgcctcctncgtctaacgagttcatcgaaaaggggaaacctcgaccaagtnggctccacgagcccggtttnctctctctccctttncccaattaccntnggncccacacgtgtcaacatcatccgtggcgtgggcccatgggtttncttacttccagggccttgaanaagcccgtcaattcacggggacataaaagctgggcaaatcttgttggatcnaagttcnag

SEQ ID NO: 44132 - DNA, 276 bp, Glycine max
  Clone ID: 701127968H1
ctgcacaggtctccaaggttttctggttttcaatgctgtgggtgggggaactggctctggacttggttcccttttgctggaacgcctttcagtggactatggcaagaagtccaagcttggtttcactgtctatccttcaccccaagtttcgacctctgttgttgagccttacaacagtgtcctctccactcattctcttcttgagcacactgatgtggctgtcctgctcgacaatgaagccatttatgacatctgcaggcgttcactggacattga

SEQ ID NO: 44133 - DNA, 201 bp, Glycine max
  unsure (1)..(201): unsure at all n locations; Clone ID: 701127969H1
cccancaattncatnagagcncatgtaccganncctgactgtaaagctgagagtgggcctgncgnatnaacatctataaacatccaggaattttctccgcnaaaatgtngggaaancgtatccaagnggaacanngacacnaacaggttgaanccagcnttncgcnnaggccanacattaangatgcntgccaatcatgct

SEQ ID NO: 44134 - DNA, 271 bp, Glycine max
  unsure (1)..(271): unsure at all n locations; Clone ID: 701127970H1
acttaatcgatcatcacttcacttcactaatacattcatggcagacgnctcccccanaacaagtatgagagctctgaggttgaggtccaggatcgtggtgtttttgactttctnggtaagaaaaaggatgaagaagacaagcctcatcctcaggaggaggtcatcgccaccgagtttcaaaaagtcactgtctcagaccaaggagagnacaagcacagcctcttagaaaagcttcaccgatctgacagcagctctagctcttcaagtgagg

SEQ ID NO: 44135 - DNA, 267 bp, Glycine max
  unsure (1)..(267): unsure at all n locations; Clone ID: 701127972H1
gaaagttgagaaggtgaaagangaagaagatattggcaaagaagagagtggtggnggccttatcaacaacttggtttccactttgatcacacccttgagtccaggcattgggaaagccactgaaaatgaaagtggtgctgatgctgatgaagatgaaggagagaatgaaggagggatcatcagcaaaatggtttctaatttcttccatcaaagtgaaggtgaaggtgtggtggaagctgaagaggacaaagaacaagaggaggaaat

SEQ ID NO: 44136 - DNA, 277 bp, Glycine max
  unsure (1)..(277): unsure at all n locations; Clone ID: 701127973H1
gggaggccagtagaacccccttgtttattcggcatacacatcgtcgggggctagccaccgagtgcagtgcaaccatcggaaaatnatggcaganacagattcgtcgtcctcttcagatggagaaccctcgcaatcgctggcgtcgattgcggagaatcttcagcgttctgccattcaatctgctcgaactgtgcaacatagctcttgcaactcatttccgtgccttcagaattttttaccagaagcagtatcacagtatagaacatatgnggatgct

SEQ ID NO: 44137 - DNA, 276 bp, Glycine max
  Clone ID: 701127974H1
cctcttcatacttcttttgcctgtcctgcatcagtgactacagttccatcaatgaataccggtgaagcaccggctctgaaggcagagcaagaaaaaactactctacaaaatcctcctcttcaagatcagatgctggatccagaatactcggaagctcaacaagctcaacattcagcttcaaagtcaccagctgccattttatcagattctgagagtggagatgccaagttaaatacttcatcaaaggttactgatcatgagacgaacaaaacaatt

SEQ ID NO: 44138 - DNA, 259 bp, Glycine max
  unsure (1)..(259): unsure at all n locations; Clone ID: 701127977H1
atttggctngccattatctcagcangcatggagttagtgcactcaggaggctgaggaaaactgataataatagaattgcaaaggcttgtggtgctgttattgtgaatagaccagatgaattgcaggagtctgatgttggtactggcgctgggttatttgaggttaagaaaattggagatgagtactttgcattattgttgattgcnnagaacccaaggcttgtactgttctactaaggggtgctagtaaggatctatta

SEQ ID NO: 44139 - DNA, 277 bp, Glycine max
  Clone ID: 701127979H1
ggctcttttcctctttccattcacttgttctgttacgaaaacttcaggctgggatacaatttctttatttttcagtttctcaatctgtgacctatgtgaactggagttaattagggtttttaaatttggatacagaaatgaatttgtgagttttatgtaggctagtgataggtttaacatcaattctcagctcgagcatctccaagccaaatatgttggaactggccatgctgatttgaacagatttgagtgggcagtgaacattcaacgtgatagc

SEQ ID NO: 44140 - DNA, 287 bp, Glycine max
  unsure (1)..(287): unsure at all n locations; Clone ID: 701127980H1
gtggcctcagggnatggatattatatccatgggcaatgcgccattatcatgtttgatgttactgcccgactaacttacaaaaatgtccctacctggcatcgggatctttgccgggtctgtgagaacatcccaattgttctttgcggtaacaaggttgatgtgaagaacaggcaagtgaaggcaaagcaggttactttccacaggaagaagaattnccagtactatgagatttcagctaaaagcaatacaattttgagaagcctttcctgtatttggccagaaaactt

SEQ ID NO: 44141 - DNA, 284 bp, Glycine max
  unsure (1)..(284): unsure at all n locations; Clone ID: 701127981H1
ctccgacgaccagctccagncnctgtctcgagagtggcgacgncgaaaccaaaacntcgtncgttcacccacgngcncttcgncagcgccggcattgaccccttcgccaccattcaccacnncttccgtncngttaggaaccnncancacacgtnccncactccnggacgagangaaacncncctggcatngtcgactgcttcggctggtgcacctgggatgccttctaccaggaagttantcaggaaggagtcgaggncggaatcaaatccctagccggcgga

SEQ ID NO: 44142 - DNA, 279 bp, Glycine max
  Clone ID: 701127982H1
caattctcaaacctcacctagtattttcgtttctgaacccaattaattaagcacacaaggaccataacatacctatacctcaatatcacaagtcttatggaggcagagcgagacaagtacaagatgatcaactttgaagaaaccgagttacgactcggcctgccactcagtggaaacgagacgctcaaaaacacttgcagcactgggaagagggttttttcggatactgccgtggatttgaagcttaacctttcctcaacctcaaatagtgcttcttct

SEQ ID NO: 44143 - DNA, 267 bp, Glycine max
  unsure (1)..(267): unsure at all n locations; Clone ID: 701127984H1
ggacatctttgatgaaccaacgcaatttagatatgtgantaagaagtttagtaatcagtacaaggcaaccattggagcggattttttaaccaaagaagtgcaattcgaagataggcttttcaccttacagatttgggatacagctggccaagaaagattccaaagccttggagttgctttctatcgtggtgctgattgttgtgttcttgtatatgatgttaattcgatgaaatcattgacaaccttaataactggagggaggaattc

SEQ ID NO: 44144 - DNA, 276 bp, Glycine max
  Clone ID: 701127985H1
gtaacctttggttcctttcccaacactcaccatggtggcagattctaagtccaaatccgacctctctttcggcaaaacctttgccagcagtgctttctctgcatgtttcgctgaggtgtgtactattcctttggacactgccaaagttaggcttcagcttcaaaagcaagctgcaactggtgatgtagtctccttacctaaatataagggtatgctgggaacagttgcaaccattgccagggaagaaggtctttcagcactctggaagggcattgt

SEQ ID NO: 44145 - DNA, 255 bp, Glycine max
  unsure (1)..(255): unsure at all n locations; Clone ID: 701127986H1
cgatcttaaggctgggggtaagagacnaaagaccaaaaganacagcaccaaaatccaatgacanctacctcaaattacttgtcaagctttatcggttccttgttcgaaggactggcagcaatttcaatgctgttatactcaagcgcttgttcatgagcaaggttaacaagcctccaatttctttgtcaaggttaattaagtatacaaaggggaaggaggataaaattgctgtaatagtggggactgtaactgatg

SEQ ID NO: 44146 - DNA, 274 bp, Glycine max
  unsure (1)..(274): unsure at all n locations; Clone ID: 701127987H1
ttttatgaaggcactgttaagtcntatgactctttaaagaggaaacatgtgatattatataatgatggggatgtagaagttctcaatttggaaaaggagcgatgggagcttagtgacagcaaacctactaagaagctaaagctctcaaaaactgtctcttcccctgaagtgtctactgggaagaagcagagaagttctagtggttcagcaagtaaaaagacanaaaaaatagttaatggtaagaatctccaagcaaccatgtaaaacatggaca

SEQ ID NO: 44147 - DNA, 270 bp, Glycine max
  Clone ID: 701127988H1
gaagccagaagacaagaaagatccaaaggaggaatatgctgaacttctgaacgccttttataatcagaccagacagcagcaataccccccttattatcacagaacagtggaagaggatccaactagctgtgttatttgctaagtattggaatatcatatggagtttgaaatgatggataataaaatgagatcaagaaaagatggtggctgcatggagttgaagaagaattatgtttcttttggagttcccttttcctctttcttctatgt

SEQ ID NO: 44148 - DNA, 278 bp, Glycine max
  unsure (1)..(278): unsure at all n locations; Clone ID: 701127990H1
gagaaaatgaccgaggtgtatcatttacatttggggctgacaccgttgttgaatttcttgaacatcatgatctcgatctgatttgcagagctcaccaggttgtagaggatggatatgagttttttgccaagcgtcagtggtgacgatattctccgcaccaaattactgtgntgaatttgataatgctggtgctatgatgagtgtggatgacaccttgacatgctctttccaaatacttaaatcttctgaaaagaaagggaaaggtggatttggcatca

SEQ ID NO: 44149 - DNA, 283 bp, Glycine max
  Clone ID: 701127992H1
gtttctgtgtgttcgagattgaagaagatgatgcaggctggacccggcggcatggcccaacaagcgaaccaacaatacgcacagcaacagcaacaaccctacatgatgatgccgccgcagcctcagccccctcagatgtgggccacatcggcccagcctccgtcccagtcggtggctcctccgcaacccaccagcgccgatgaggtccgtaccctctggatcggtgatttgcagtactggatggacgaaaattatctctacacctgtttggcacacaccggcg

SEQ ID NO: 44150 - DNA, 281 bp, Glycine max
  unsure (1)..(281): unsure at all n locations; Clone ID: 701127993H1
aaaagtttctgtcatcaacattactcaactatcagagtatagaaaggatggccatccttccatttttcgcncattttgggagccccttcgcccggaacaattgtcaaatcccccatcttactctgattgcatacattggtgcttgcctggggtacctgatgtgtggaatgagttactattccattttttgtagaagttgtttattcaattttcttgattgaatatagcnnccaatgtctgcatttttaaagagtggcaaaagctgcttacatagttgtttg

SEQ ID NO: 44151 - DNA, 284 bp, Glycine max
  unsure (1)..(284): unsure at all n locations; Clone ID: 701127995H1
tctttgttaggcaatacaacatttattacgcatactcaaagtagcttcgaagttcgtatttttattggcatatcatggagaataataatcagtcgttttggcaattcagtgaccagctgaggttacaggcatctaatttggcgaacctttctctaaacgattcgatttggagcaacagttacatctccaagaggcgtgatganaggattaattttgacatccaaagttgggggtgagatcaactctttcaagtcaaaggagccagcttgtgattacaatgataa

SEQ ID NO: 44152 - DNA, 140 bp, Glycine max
  unsure (1)..(140): unsure at all n locations; Clone ID: 701128001H1
gttggggttganccaaggtctctatttgcngccaccccctttttggaaaataactttgatcagttctcaatanaaacgaggttgagttgtttggcgatttnaacttnntnttnctctnaatttcnggnagagccaagnga

SEQ ID NO: 44153 - DNA, 154 bp, Glycine max
  unsure (1)..(154): unsure at all n locations; Clone ID: 701128002H1
gttcttcttctcttntcaaagtacataacatagcggaaatttcacaccananacattcctgctgcaatgggaagttattttctgaaaatcatgtttgcagtgttactgcgcttgcttttcgcanaccatagtatccattcttggattccacnca

SEQ ID NO: 44154 - DNA, 286 bp, Glycine max
  unsure (1)..(286): unsure at all n locations; Clone ID: 701128003H1
atagagtcttacagagaagagtgtgtgtgtgtgataattgggataagctctantcaatcaatttcaatggcatcatccaattcgactcagcaagaagggaacaaacccgcaaagagaaaacccgtgttcaccaaagtggatcagctcaaacctggaaccaacggtcacacgttggtggctaaggtcttgtcctccgacaccgtcgtacacaaaccgagaccctcttccgcacacaacctcaaacccactgtcatcgccgagtgcctcatcggcgacgacaaccgga

SEQ ID NO: 44155 - DNA, 289 bp, Glycine max
  unsure (1)..(289): unsure at all n locations; Clone ID: 701128004H1
caaccctttgagagttagaatggctgctgctattgaaatccccanaatagtgtttccaaactcctctgcccaacagaggatgccagtggttggaatgggatctgcccctgacttcacatgcaagaaagacacaaaggaggctatcattgaggccgtgaaacagggttacagacncttcgacnctgctgctgcttatggctcngaacaggctctcggtgaagctcccaaggaagctatcccatcttggactcgtctcccgccaagacctccttgtcacttccaagctttg

SEQ ID NO: 44156 - DNA, 287 bp, Glycine max
  unsure (1)..(287): unsure at all n locations; Clone ID: 701128005H1
tatggctatatggttgcatttgctggccacagatatgcagnaagatcgcctcctggcttttgttgcaaacggcacatatactgttaccagttttactcttgtccttgagtttaagaggggnangctgcaaaatttatattggaaaagagatgggtgttnnaaatgctcaagcaactcgaaagctgtctgtctcaacaatcaggattgtggcactacaaacatccacttgcaagagcccatggaggaactgtggattgcagcataggatacaatgggcattctctggc

SEQ ID NO: 44157 - DNA, 286 bp, Glycine max
  unsure (1)..(286): unsure at all n locations; Clone ID: 701128006H1
ttttactgggtccttactcaagcccttagatgnaaccttgtgntcanacaacccttcaaaaacagactctctcaaagatatgagaaaaagttgccaacantggacatatttgngtgcacagcacncccanatattgagccagcaatgatggtgattaacacagtgctatcncgacatggcttatgattatccaactgaaaaattgagtgtgtatctctctgatgatgctggatcgcaaatcacgttctatgctctgctagaggcttcaaactttgcaaaacattgg

SEQ ID NO: 44158 - DNA, 145 bp, Glycine max
  unsure (1)..(145): unsure at all n locations; Clone ID: 701128011H1
ataatagtcatgggtttgaaggaggattttgagcagtatgctgagaaagcaaanactttgccaccgactcaatcaaacgangacttgcttatcctttntgggnngtacanacaggccaccgttggaccnntcagatccagcngtt

SEQ ID NO: 44159 - DNA, 277 bp, Glycine max
  unsure (1)..(277): unsure at all n locations; Clone ID: 701128012H1
aatctttaatgaatttaatgctcgaaagccagatganttcaacatattcaaaggagtcacaagaaactacctctttntgggtatcattggattaactgttgtgntcagattgtcatcattttatttcttggcactattacnacaacagtgaggcttaattggaagcagtggctcatctctgtcgttattggattgattggttgggcctcttgctgtgattgggaaattgataccagtgccaacaactcccatcancaatgttttttcaaaatttcga

SEQ ID NO: 44160 - DNA, 281 bp, Glycine max
  unsure (1)..(281): unsure at all n locations; Clone ID: 701128013H1
tgcgttttttgcacagaagaattaacacgtatatagcaagcatggcagttcacactctacgaccttagctctgcctctgggntgaagaagcttgatgagtnccttntcccacgcagctncatcaccgggtaccaagctacnaaggangntcttactgtttatgncagctttgccaactgctccatcagatgaatatggaatgnncccaggtggtacangcnccntgtgcctnctngggantccnccggnntttggncnngnnnacngggcgcnnttcncgg

SEQ ID NO: 44161 - DNA, 200 bp, Glycine max
  unsure (1)..(200): unsure at all n locations; Clone ID: 701128014H1
gtagcgcacctcnctccctgatgctggtacanccttcaagacctnttntngctctcagtgaaccacnttctctctctatcctctcctttttaagccctccaaatgcctccacatngagcccaantncaggacttgccatgccctcgtcgccgctttggctgcagaggtcnagtggctcnaactgtncacgacannggngg

SEQ ID NO: 44162 - DNA, 79 bp, Glycine max
  unsure (1)..(79): unsure at all n locations; Clone ID: 701128015H1
tctngttcgcgtcgcccaaggctcancagcatgacaaacgattcngtnctcggcaaggtacntngtgctgancgcncgg

SEQ ID NO: 44163 - DNA, 280 bp, Glycine max
  unsure (1)..(280): unsure at all n locations; Clone ID: 701128016H1
tccaagtacggttgggttggagagaaaatgcgtccctgctgaaaacaccaaaccctaaaacgcgaaaagggttctaagaatttgcgaaggaaagagctagcggagatggagattcactacagtaacagctatttcgagaggcgccccatcctcaagtccaaggctgccgctgtcaaatgggtcaaagaatgggttccccaagatcttgtgacaacaggagggagtgcatgatcttaaaatgggtaaagnggataccttgaagacttgaaagaaaaggtaa

SEQ ID NO: 44164 - DNA, 106 bp, Glycine max
  unsure (1)..(106): unsure at all n locations; Clone ID: 701128017H1
ggccagctagcgcttcttctcnngcattccgtggacanctagtgcnnccaaacctcgctgaaaatnagggtntcgcttcggaggtagaggaanngctnnccaacgg

SEQ ID NO: 44165 - DNA, 170 bp, Glycine max
  unsure (1)..(170): unsure at all n locations; Clone ID: 701128018H1
gtcgagccgttcncaaccaaaantgcanagttcagtctcacaatctgagntttgcatcngnggttncnttctnccccaagaagttccgtctcnntttcantttccagatatgagcnacaataacatnncagtganccgtgnggaccttnaggtgccncgggtnacgtctt

SEQ ID NO: 44166 - DNA, 289 bp, Glycine max
  unsure (1)..(289): unsure at all n locations; Clone ID: 701128020H1
gncggancatcctcgtccgtgattaaggtggctgcactttccggatctttaaggaaaggctcttacaacagngccctcnttcgttctgctattgagctaatgccaaggnanacttggaggccttcaaatcgagtacgttgatatttcgnanttgccccttctcaacaccgatcttgaggtgnatgnggacctacnccccacangttgnagnctttcgncagaagattcttgcagctgatagnatnctctttggcttcccctgagnacaattactgcnntngnaagtcnt

SEQ ID NO: 44167 - DNA, 81 bp, Glycine max
  unsure (1)..(81): unsure at all n locations; Clone ID: 701128023H1
gtgcactcgcannagcgcagaggcacctgcagagttgcgattgcgctctttccagatctcgtagattcnacacaacatacg

SEQ ID NO: 44168 - DNA, 284 bp, Glycine max
  unsure (1)..(284): unsure at all n locations; Clone ID: 701128024H1
gcnnttttctattttctcctctcatggcttcagattccaaaaaggatttccccnctgatgacaaagctggaacagaagagacncnaacatccaaagatgagacttcatctaaagattctccagcagaacnaagacggccagtacttttggacctagacctggacctgctgggcatccaggcaacccttttgatctctcagcaatgtctggtctgctcaatgatccaagtatcaaggaattggctgancagatagcaaaagatccatcgttcaatcagatggctg

SEQ ID NO: 44169 - DNA, 282 bp, Glycine max
  unsure (1)..(282): unsure at all n locations; Clone ID: 701128025H1
gggcacttcgttgcttggtgatgtccctttctgttctcttcactcttggtcttgcgagagaaagccatgccagagacgaagatttttggcatgctgtttggccaaacactcccattccaagttcattgcgagatcttctaaagcctggcnctgcaagtgttgaaatcgatgatcaccctatgcaaattgaagaaacacagtacccgaaaacctcttctataaagaagaccttcatccaggcaaaacaatgaaagtacaattcagcangctccctttcaacaa

SEQ ID NO: 44170 - DNA, 279 bp, Glycine max
  unsure (1)..(279): unsure at all n locations; Clone ID: 701128026H1
tcgagccnntttgtttctctctaaagagtctccgctgaactttttggtttcttgaagatgtccgttactctccgatcttatcaaccttaacctctccgacatcanngataaggtgatcgccgagtacatatgggttggtggatctggcatggatatgaggagcaaagcaaggactctctcgggactggttaatgacccttccaagcttcccaagtggaactatgatggttccagcactggtcaagctctggacnaagatagtgaggtgacntnatnccc

SEQ ID NO: 44171 - DNA, 276 bp, Glycine max
  unsure (1)..(276): unsure at all n locations; Clone ID: 701128027H1
gatggctgcagctctgcgtcgcgaaggaaggcgtttgacccaaccaatcaacgccctccactnttctctcanttcctccctcatctctcaanaccaagcccctcatggcgcgcgctccatttccactcaagttgnnagcancccgaatgaagagtgtgaggaatatccagaagatcaccaaggccatgaanatggttgcngcgtccaagtgcgggcgttcagaccagatctgaaaattcccgnggcctctggaaacgttcangntnttttggtgng

SEQ ID NO: 44172 - DNA, 279 bp, Glycine max
  unsure (1)..(279): unsure at all n locations; Clone ID: 701128029H1
ancgtacctacgtccaatattcctattattccttatcnttctcgaccaatccatttcggcgagtgctgctataaatattaatggtctgagaaacaaaattagagaagttctaaacaagcacccgagcatcaatcttccggcagataaactgaagaaggtgaagagaccactgaaggcactggattatctgcttggcgaatgtaaggacaggccgcctcaagaatttcaagaattttgcccgaaatttaagaacgattatcaacaaaattgcccgaatgc

SEQ ID NO: 44173 - DNA, 220 bp, Glycine max
  unsure (1)..(220): unsure at all n locations; Clone ID: 701128030H1
ggnaaaaccgagcagtggaacaacaccaaaggggggcagctaatggcatttctatgacagccatgtctcttttcaaagctattggccctgctacaggtggtgcagtattaacttggtcacaaaagcggatggatgcttcattcctcccaggcacccatatggtgttctttgtactgaacatagttgangcacttggatactaatgatttcaaacnctccc

SEQ ID NO: 44174 - DNA, 282 bp, Glycine max
  unsure (1)..(282): unsure at all n locations; Clone ID: 701128031H1
gtgtgttgnnatgtgaagcattttccaantaanggaagcnatgttcaccanatcggagacgcagatgctaattcgcctccgtgtttcnnaccgagttcgtgccactgantcggtctccgccgagttactcacttcacangaagatgttaagtctgcagacaggatctcagatgctgctcttgaatctgcggttctgcagtctatcccttgcatccgttctggtagttttgctgacattgggccacggagatacatggaagatgaacatataaggatanatga

SEQ ID NO: 44175 - DNA, 199 bp, Glycine max
  unsure (1)..(199): unsure at all n locations; Clone ID: 701128032H1
ggcggttctagaaagaagggaaagggtggcaataagaagtacagtgacaagaagaaggcgatgggaaganctgnatccactgtacccatgtttantatggaagacatagaggagggtgttgaaggttatgatgatgaaaggacactacttntgtctcaaaagagcttggagaagcgtttggtcnatctccggttttttt

SEQ ID NO: 44176 - DNA, 280 bp, Glycine max
  unsure (1)..(280): unsure at all n locations; Clone ID: 701128035H1
cagggtgnatgctggaaagctaggtgctgggtcttatgtactcaatgcaaacaaagggaaaaaggagagaattggtatnntttagaaatgcatgcaaacagcagagatgatgttaaagtggctttagctggtgatattattgctcttgcaggtttgaaagatactattacaggtgaaacattgtgtgaccctgataatccaatcgtgctcgagcggatggactccctgatcctgttattaaggntgcaatgaaccgaaaactaaagctgatgttgacaag

SEQ ID NO: 44177 - DNA, 281 bp, Glycine max
  unsure (1)..(281): unsure at all n locations; Clone ID: 701128036H1
gtttgggccttggctgtaggcagnanaacagaaaanctngcaacnggtggcnnagantccgctgnccantnnnggttncnntcngctgnanntgngatcngcccctgatttcagatgcgaggaagacanaaatgaggctatcattgaggccgtgaaacagggttacagacacttcgacactgcngctgcttatggctctgaacaggcnctcggtgaagctctcaaggaagctatccatcttggctcgnctcccgccaagaccnctttgtcattccaagttt

SEQ ID NO: 44178 - DNA, 292 bp, Glycine max
  unsure (1)..(292): unsure at all n locations; Clone ID: 701128037H1
ctggggtttggaaatgggcagcggcangttgtcagaagcttctgganttgagcacgaagatcgtcgctgttggcanaaactacgctgctcatgccacagaactagggcaacgccgttncccaaggagccggtgttgtttctgaaaccgacgttcgtcttacttgagtnacggcggaaccnttcaaattcccacacaacnacggcntccgnnatcncgaggttgagcncgctgtggnncncnccnnngaaancccgtgnacgtctccgaancctcnnccatggattacgncnc

SEQ ID NO: 44179 - DNA, 100 bp, Glycine max
  unsure (1)..(100): unsure at all n locations; Clone ID: 701128039H1
ggaacgagncacgagcacgccacaacgagattngcgacngaatgcaatgcatgaacccanccctcacagnncgcancnancacacacancacacnncacc

SEQ ID NO: 44180 - DNA, 280 bp, Glycine max
  unsure (1)..(280): unsure at all n locations; Clone ID: 701128040H1
gttaatgcatcagaatggtactgttcatcaagactctcatctcaaagaacgtaacccatagcaaagctagcttaaactacacactgangatgacactgatacattagggttccanatnattttgttaacataatntncnggttcccctccgaggccntacgtgcatnccctcatatggcatgccctggagcttctttctccacaacaggcttgagcanctcgnnaancgnngttgcctcctcaggtccacatgaccagcaccncaatncnggcggtatnt

SEQ ID NO: 44181 - DNA, 77 bp, Glycine max
  unsure (1)..(77): unsure at all n locations; Clone ID: 701128041H1
gcacaaggnccctntnaacnttgtgctatagggctagtcttgntagttggnaantgtcttgtganctcaatttttaa

SEQ ID NO: 44182 - DNA, 271 bp, Glycine max
  unsure (1)..(271): unsure at all n locations; Clone ID: 701128042H1
gtagctacttcgcttctaccctccattccattctctgaagtgcaggaacannctcctgagaaantcacagctgaaaaccttttnaacacccttgtggaaacacttactgagaagcaaaaatctggatcattttttgaagaagacaagtcaagctcagtgagctaccaattcaacagactgtttggacgccagananctgtgcaccatattttagggggtggaaaatctgcctgangtccttgttatgggggaaangaagtccngctgggnt

SEQ ID NO: 44183 - DNA, 156 bp, Glycine max
  unsure (1)..(156): unsure at all n locations; Clone ID: 701128047H1
ggtagttgcccttgttcntcaccaattccatttcgatttctggntcacccaacccatcacaaataganactcactatcgcaaaactgacaaactacnaacccagataagggaaaaaggttgttatctctgttaagtttccgtgtgtgagattttna

SEQ ID NO: 44184 - DNA, 273 bp, Glycine max
  unsure (1)..(273): unsure at all n locations; Clone ID: 701128048H1
gctaaatttagcggtgtcactcacctgaatttntcttttttgtgatctttggggcctttatcaatgccacatctctttctttctctcttgatctcattttgtgatctttggggcctttatcaatgccacacctaaatttagcaatgtcactcacctgaaattaagtgtgtattctttcttttgcgaattttttcagagttgattgacgtaacccaaaatcgtgtttaatgttttgaggcaattctttgtttgctacatcaaggggttctttaa

SEQ ID NO: 44185 - DNA, 284 bp, Glycine max
  unsure (1)..(284): unsure at all n locations; Clone ID: 701128049H1
aacagccantaagatgttctntgagtcttggcacgccacgtgttcagaactgccaacagatagcnccatctctttctccttctccctaaacctcgaactcagcacccccatccactggtgattgtttgattgagccttgaagaaatggaccacagcgctgatgcacatcgcacggacttgatgaccataacgcggttcgtgctgaacgagcaatccaagcaccccgagtnacgcggcgatttcaccatcttgctcagtcacntgttctcggttgnagttcgttg

SEQ ID NO: 44186 - DNA, 287 bp, Glycine max
  unsure (1)..(287): unsure at all n locations; Clone ID: 701128050H1
tcttacgatgtgttcctnagcttccgaggggaanatactcgttatggtttcactggntatctctacaatgtcnttcgggaaaggggaattcacaccttcattggtgacgacgagccccaggaaggggacnnaatcgcgncngcatttgggcgcggctacttncnatnccnagntgttcatcntcntgcnctcngnaanactacgcntctnccnacttttgtttaaactccaggcacnngcnagccttnaacnttactaagnagaataaggaggngtnaggntncgcc

SEQ ID NO: 44187 - DNA, 100 bp, Glycine max
  unsure (1)..(100): unsure at all n locations; Clone ID: 701128052H1
atttgctggcagtagtgactatgtatccagtgatngaagcaggctgtngggtgnnatttataccataacttattcagagggcagcanccggncnnatnng

SEQ ID NO: 44188 - DNA, 108 bp, Glycine max
  unsure (1)..(108): unsure at all n locations; Clone ID: 701128056H1
tctattttcnaattctacatcatgggcacggaggttctacggccacaagattgtttcacccaacgcatcggtgttccaccgcctgnnatttcccggcgaagaacctat

SEQ ID NO: 44189 - DNA, 100 bp, Glycine max
  unsure (1)..(100): unsure at all n locations; Clone ID: 701128057H1
tggcttctncgcngcccgcgctcgcnggaaaattttaccacgaantggatcaacaatgagtgctccattcgcgagaagaggggtccgaaggaggaggaga

SEQ ID NO: 44190 - DNA, 270 bp, Glycine max
  unsure (1)..(270): unsure at all n locations; Clone ID: 701128063H1
taantgntctgtnacctcataagctgaaggcngaaggcnattggggcaatccggaaattcggtcttcgggactacggaggattnatngttggntctgtgctgtatcccaccaaaggntccaacgggtgtaaggtcttcgagggcgataagccttcaaaattcactcttatcgtccaactattgttctcnttgatcgtggagagtgtactttgccttgaaggttggcatgccgaacaggtggtgctgcggnaantttggtgattaaanaat

SEQ ID NO: 44191 - DNA, 283 bp, Glycine max
  unsure (1)..(283): unsure at all n locations; Clone ID: 701128066H1
ttcgagaagaaggtttcgataaaggantcgatgtcgatgtcgatgtcgacagagcttgatccagccaaagttcttcttttgcttcgtggtttcctnccaaattcagcaacgcagggcngnagcatattntaagctcaaaagtgggttttctgantacatcgcctctggaggggaattggcttacaagcagctctgcagtnnaatcncaatagggtttaacaattgctcggaaanangtccttgaaatggagtcactgtttngaagccctggttactgccgggt

SEQ ID NO: 44192 - DNA, 100 bp, Glycine max
  unsure (1)..(100): unsure at all n locations; Clone ID: 701128069H1
cattggtcnccatnntgtgcttngttgcagtgtttactatttgattgtccatctactcagctcggnatcngntcangtgtnngctgnaaagacagtattt

SEQ ID NO: 44193 - DNA, 278 bp, Glycine max
  Clone ID: 701128071H1
gctaaattaagacagggcacaataccagctcttgactgctcaagtttttgtggtgcaagatagattatgcccgacattttatctcaatagtcacaagtccctttttcttccaccattgttctttggataaaatttgattgcagtttcttatgtgcttttagtattgttctccaatcaaaattagagtttgactatagatatattcaatgattctatcaatactagtctctttaggaatacatggaattgtgatggggtggggttttgctacatcgcag

SEQ ID NO: 44194 - DNA, 154 bp, Glycine max
  unsure (1)..(154): unsure at all n locations; Clone ID: 701128072H1
tntctnccngcccaaaccctaactncctaccctattcngctttctctcatccatcatgaaaggaggaaagtccaagacngaatctaagagagccgatgccaaacttgctgtgaataagaagggcgccgccactaaanactaggaaacccgccgg

SEQ ID NO: 44195 - DNA, 278 bp, Glycine max
  unsure (1)..(278): unsure at all n locations; Clone ID: 701128073H1
ggaaaggtggatcgtattcaacactatctttattgaggaaggaactacgagaaggaantttgcaatccctttttggcggntcttcatgtatagtgtcctcatctaatgcagatccactgttgtcatcatttatattgcctttagctaatgaacatgccagttctcagcctcacttncacactgagacaagatcntctanaaaatgcttagatgagactgtgtcaacaagaaatgtggagacatcaacttgtccagttaaggataaggaggagaaggaa

SEQ ID NO: 44196 - DNA, 270 bp, Glycine max
  unsure (1)..(270): unsure at all n locations; Clone ID: 701128075H1
atctcctgtgatttaagattgatgaaagtgacgcacaacatctgaaggagcccataaatttgttattttttgtgatcccattgtgaattgtggggatctgaattgcgaagatgatccagcttctgttcacggtgatattttcggagacggcgatgatagcgttgctctgttnangacccctttgaggaagctggtgataatggggttggatcggttgaagcgtggncgtggaccctgatggttaaaaccgttgcagggaccgttctctgg

SEQ ID NO: 44197 - DNA, 173 bp, Glycine max
  unsure (1)..(173): unsure at all n locations; Clone ID: 701128078H1
tttagtctgtggtaactgtgttgtgtggaagggtgntccaacaactcctttgataactattgctgtgacaaagctagtagctgaagttcttganaggaacaaattacctggtgcaatattcacctctttctgtggaggtgctgacattggtcangaaatagcaaaagacaccc

SEQ ID NO: 44198 - DNA, 278 bp, Glycine max
  unsure (1)..(278): unsure at all n locations; Clone ID: 701128079H1
caacttcnnggaatgaacntnntcaaatccccactggaccatgatttgaactgtggtggaatattccacgactcancagnactgctcttattcgtctgaaacaaggagcaccccctcagancaagaagtgattctagcgtcaggcgggccaaagaagcgagcgggaagaagagtcttcaaggagacaatgcaccccgtctaccgaggagtgcgtcgcaggaacaagaacaagtgggtctgcgagatgcgagtccccaacaacaactcacggntttggc

SEQ ID NO: 44199 - DNA, 277 bp, Glycine max
  unsure (1)..(277): unsure at all n locations; Clone ID: 701128080H1
aaaaatggcacctttcgtttccntctctttgttgcttctntttctcaaccaccccctcctttccctctcaaccaaccctgaagggaacgctctgcatgctttgagaagcaggctttctgatcccaacaatatgttgcagagttgggacccaacactggttaatccctgtacttggtttcatgttacctgtgactccaacaatcatgtgnttcgctnagncttgggnaantctaaggtttccggganctngggcacaananttggcantnannatntg

SEQ ID NO: 44200 - DNA, 279 bp, Glycine max
  unsure (1)..(279): unsure at all n locations; Clone ID: 701128081H1
actggttctcctcccaagccttgtgataaccctattggagatcattaccttttgaagtcgattaagaataagattgattactgtagattacacgggattgaaattgtgtataatttggctcatttggatgtggaacttgctgggtattgggcnnagttgcctatgattaggaggttgatgttgtcgcaccctgaggtggagtggatttggtggatggatagtgatgctttttttactgatatggtgtttgagcttcctatgtctaagtatgatgngtat

SEQ ID NO: 44201 - DNA, 113 bp, Glycine max
  unsure (1)..(113): unsure at all n locations; Clone ID: 701128085H1
gggacagccacacagaagttntctgngnntcagaaaacatgatgctaagangctcttcaacaccagttcttggannccctcctctcntcnttcccagatagtcctnacaacag

SEQ ID NO: 44202 - DNA, 100 bp, Glycine max
  unsure (1)..(100): unsure at all n locations; Clone ID: 701128086H1
cggaagcgtcnccnagctcaacctcagggactgcgataacgcaattgaaaattgcgacgaatccactggacacaaggtnccgaagaaggaatccaaagta

SEQ ID NO: 44203 - DNA, 278 bp, Glycine max
  unsure (1)..(278): unsure at all n locations; Clone ID: 701128088H1
gtttcttcaaaggaatgctcagaacaaagagttgcaaggtgcgagaagaaagaggagactaactgctaccccaagtgtggagaatttgcagcaagatcatttcgctttgtcaattgaagaaggatcggctactattgagtcacagatggagtcttttttctcagctgcgtgtaatgatccgttagaatcaaacagtgaactcaaagacccantntnggnttcagnttccagttgcaagtgggagtaattggggggagtgagtgattctggttggggag

SEQ ID NO: 44204 - DNA, 268 bp, Glycine max
  unsure (1)..(268): unsure at all n locations; Clone ID: 701128090H1
gcggcattaaaaatgcagatcttcgtgaaaactctgacagggaagactataaccctcgaggtcgagagcagcgacaccatcgacaatgtcaaggccaagattcaagacaaggaaggcattcctccggatcagcagcgtttgattttcgccggaaagcagcttgaagatggaaggaccctggccgattacancatccagaaggaatcaacccttcatctcgtcctcaggcttcgtggtggatnatgggcttccctcatggnttggctcg

SEQ ID NO: 44205 - DNA, 125 bp, Glycine max
  unsure (1)..(125): unsure at all n locations; Clone ID: 701128091H1
atttggagataacaaacccaggcttgacatacaatgcctcccattcatgtaaaccctttacaaggtaacattgatgttgcaccatcagttttagtgcatcaagggttttcttccacacaacanac

SEQ ID NO: 44206 - DNA, 91 bp, Glycine max
  unsure (1)..(91): unsure at all n locations; Clone ID: 701128093H1
caacgaaccactctgaagcngctcacgtnantccacaccacttctcgacttancnnacaccctaaccaatccaaccatggcttcttcttcc

SEQ ID NO: 44207 - DNA, 201 bp, Glycine max
  unsure (1)..(201): unsure at all n locations; Clone ID: 701128096H1
aaagccttcctanancgananannaaaagnngagnaattttccctcaccaaggnagaaganncaagcaatggcccgntacancttaccggtnaacagntctccgagttcaaggaagccttcagcttgttcgacaaggacggcgatggntgcatcataacnaaggngctnggaatggttangagtccattggggnnaaaccc

SEQ ID NO: 44208 - DNA, 70 bp, Glycine max
  unsure (1)..(70): unsure at all n locations; Clone ID: 701128104H1
aaggggnggnactatcanactaacccnttgtttggcatacagncttacattgcgggnatcgtgnganaga

SEQ ID NO: 44209 - DNA, 289 bp, Glycine max
  unsure (1)..(289): unsure at all n locations; Clone ID: 701128109H1
gtaaggnttgacagactgagagctctttcttgattctatgggtggtggtgcatggccgttcttagttggtggagcgatttgtctggttaattccgttaacgaacgagacctcagcctggctaaanagctangtggaggtaaccctccacggccagcttcttagngggactatggccgcttaggccacggnagttgaggcaatatncaggtctgtgangcccgtagatgttcngggccgcacgggngctaacatgaatgnattnacnagtcnatagcctagncgnnngnc

SEQ ID NO: 44210 - DNA, 299 bp, Glycine max
  unsure (1)..(299): unsure at all n locations; Clone ID: 701128110H1
tttgagaaacaggttcctattgatgcagtgttccagaaggatnctgntgattgacatcnttggtgtgaccangggtaaaggttatgagggtgttgtcactcgttggggtgttacccgccatccccgtaagacttcanagaggtttgaggacggttgctnnattggtgncctgngcatcctgcaaagantttncattgcactgttgcccagggnntggtcnaganttgataccaccaccggacngcagttggaacaagaaaggttnacnagcntngacnaagctggcagatgacatctcc

SEQ ID NO: 44211 - DNA, 103 bp, Glycine max
  unsure (1)..(103): unsure at all n locations; Clone ID: 701128111H1
gggtctncnagggacacggncanattgggngaaagcncatatntgggtttctttcnagatgacacgnacgcgcccctgtgtgtctgttttcgacatcgcatcc

SEQ ID NO: 44212 - DNA, 280 bp, Glycine max
  unsure (1)..(280): unsure at all n locations; Clone ID: 701128113H1
gntcccactacctctactttcttcttcctcctctcttctctcaatncccanccaccttcgctccttcttcagacacaaaccactctttaacaacccctcccttctcctgcgccctcctttgaggtcncctcgacacttaacccgcgccgacgatgacgacggcgacggcggcggccccgaccantangagatggacgaggacgaaatggaggagctcgacaacaagaaggactttgacatcgagtacgaccccctcgtncccgccgccgctgccgncgcc

SEQ ID NO: 44213 - DNA, 278 bp, Glycine max
  unsure (1)..(278): unsure at all n locations; Clone ID: 701128115H1
agttgctgctgctttgcattcctgttagcanaagaaagtgaacatattggagttcaagtttttncagataaggcnantcattccggtgcagatcttgaatactgctattncaaattgtatgggctacnaatctgagggtcagggcttcatngtaggggtgaagataaatcccgtgccgggtttgcctactggttttccagaattacttgagtttgtncatggaacacgttgnangagcaagaatgttgaaccacttcttgaggggtgctgaagctcnt

SEQ ID NO: 44214 - DNA, 281 bp, Glycine max
  unsure (1)..(281): unsure at all n locations; Clone ID: 701128117H1
ggcgccactcgatgtttccatttgcctgnatgccnttggtattgnggggtgtgggtcntttagnggtgtcaantctgcgaacgtgagggtgcatgantggtaatcgggatgtttttgttgcacggctccatgctgcgcatgcaacgtgtgacatgcatcctttcattgtcacctagnctcgtggctagtgctgacgatggnccgtgttgcctacctaccaaaggtattcgtgtggctatcagnccattccatccaggctctttaaggggagcngaggattc

SEQ ID NO: 44215 - DNA, 181 bp, Glycine max
  unsure (1)..(181): unsure at all n locations; Clone ID: 701128119H1
ggtnggactatatactaccatgttgcagaagatantggggatgtggatgatgagaatangcagngttattctttgaatntcaaagggaatgnggttgagcagttggctcggaagtnngaggnagaaacgggacttgaggganttatnggatgcactcgnantcctcngacnggaaaactcc

SEQ ID NO: 44216 - DNA, 293 bp, Glycine max
  unsure (1)..(293): unsure at all n locations; Clone ID: 701128121H1
agaagaagatggtgtcaggntctggaatctgtcgcaaagcgggtggtggtggacgcgcgccaccacatgctgggtcgtctagcctccatcgtggcgaangagcttctgaacggccagaaagtggtggtcattcgctgtgaaganatttgcatctcgggngggctgntnaggcacaagatgaaatacttgaggttccttacgcaaaggctgaaacaccaagancctnccatggncccaagccattccgtgcccctccaannatcttcnggcacacgtncctgggaatcataccc

SEQ ID NO: 44217 - DNA, 145 bp, Glycine max
  unsure (1)..(145): unsure at all n locations; Clone ID: 701128124H1
gtcgaaggaaganataatcgccaatggcaattgaacacgaagacgatctnaaagangagaagaaccctacgaagcccttcgaacgaggatgancatcgnnctcctcnaannnntacggtttgggaccttattccacacgncngnt

SEQ ID NO: 44218 - DNA, 284 bp, Glycine max
  unsure (1)..(284): unsure at all n locations; Clone ID: 701128125H1
gngaaggaagggctgttaacatccacatgttttgtgcccgcaagcctagtctgttgctctcaaccatgagggctttggataacctggattagacattcagcaggctgttatcagcngcttcaatggatttgctatggatatttttcgagccgagcaatgcaaagaaggtcaggatgtccatccggagcaaattcaaagcagtactctggattcagcggctacaatgggctgatgtaactagtttgacaagaaacaaanggtacngcnatttcacagtcaatttg

SEQ ID NO: 44219 - DNA, 208 bp, Glycine max
  unsure (1)..(208): unsure at all n locations; Clone ID: 701128126H1
cgctgactgcgatcggatttcatggctcctaaganagacaaggctcccccaccttcatccaagcccnccaanttctggtggtgggaagcagaagaagangaagtggngcaagggaaancannaggagaaggtgagtaaccaggtgctgttcgatcaggctacctatgacaagctcctctccgaggcacccaaatngnaanccnttant

SEQ ID NO: 44220 - DNA, 282 bp, Glycine max
  unsure (1)..(282): unsure at all n locations; Clone ID: 701128127H1
ggagaatangaagttgtttgtnttctttgttgctgcagtagntttggtagcatggccatgccatggcgcaggctaccaaaggttccctctccgaatganaactggctatggtgagcgttcttcggaggtaaaatgcgcaagttttaggctnctgtggaagcacacaacatccgaagattaaaaccagtccggaaaaangcnttgaaaccancaaaggacnaccntnaatggngaaccaattagntcnaaccanaaaannngtaancaanaagntntccntaa

SEQ ID NO: 44221 - DNA, 170 bp, Glycine max
  unsure (1)..(170): unsure at all n locations; Clone ID: 701128130H1
gtacctgcctagccattgatttggaaaagtccaagcttcaaagatgagtaagcttcagagtgatgctgcttagagaagctatctcaggaatcatgactgattccaaggaaaagaacaggaaatttgtggagacccttgnaactccaaattgggctgaaaaactntgatcc

SEQ ID NO: 44222 - DNA, 76 bp, Glycine max
  unsure (1)..(76): unsure at all n locations; Clone ID: 701128131H1
tgctaatcccattacatttggtgactatcangagagtaangagatactttagttggttctagactccacncattcc

SEQ ID NO: 44223 - DNA, 155 bp, Glycine max
  unsure (1)..(155): unsure at all n locations; Clone ID: 701128132H1
ctgtctttnggtgantgtgagggacaatcctctgctgttatctngaagtttgaactcatgcatgcncctataattganactgggcctgnntnactaggttcactggatncatatgctgcttcagtnnangaatagaaaatcccccctaaagctcc

SEQ ID NO: 44224 - DNA, 78 bp, Glycine max
  unsure (1)..(78): unsure at all n locations; Clone ID: 701128140H1
ggagtacgacacannaaactgaagactcttctntcnnncncagatgcctcggnagagaaggctgagacacntgacagc

SEQ ID NO: 44225 - DNA, 92 bp, Glycine max
  unsure (1)..(92): unsure at all n locations; Clone ID: 701128141H1
tgttattcgcaccgcaaacaaacagtgagccatggncgtccgganngancaagcgcntgctnccaaaggggggaaggntggcnccatgnaac

SEQ ID NO: 44226 - DNA, 94 bp, Glycine max
  unsure (1)..(94): unsure at all n locations; Clone ID: 701128142H1
gcnccttcntcagcctgagngatggcncgaganacctttgctattcacatctgantcngtaaacgagggtncannncgacaggctgtgcggcca

SEQ ID NO: 44227 - DNA, 95 bp, Glycine max
  unsure (1)..(95): unsure at all n locations; Clone ID: 701128145H1
gtttttgaaacgcagatgcaaatgtcanntgttagngttaaccagaatttgccaccggcattcaaanttggggtcctcctcctncaagggtttcc

SEQ ID NO: 44228 - DNA, 132 bp, Glycine max
  unsure (1)..(132): unsure at all n locations; Clone ID: 701128147H1
gntctctagatnccccccccnctctcaagtctcaaccatgtctnccgtcnaccctagannacgagaaacctcaagtggaagcngaacangcccaagctgaaganaaccanacnaagcantagggtgattcgg

SEQ ID NO: 44229 - DNA, 276 bp, Glycine max
  unsure (1)..(276): unsure at all n locations; Clone ID: 701128148H1
gagaggaancatcaccaaccctaatttcttagctaaaccctattcgnttagcatttcctctcttttctcccacncgtaaatcctctnccaaacttntcagatccaaataaatcatggttttctgggtttttggctacggtncactggcgtggaaccctggattcgattacantgagaagattataggtntcattaaggacnacagacgcgtgnttccatttancgtgcantggatcncggggaacacnngnnaacccagcaagaacttgcacgttg

SEQ ID NO: 44230 - DNA, 157 bp, Glycine max
  unsure (1)..(157): unsure at all n locations; Clone ID: 701128149H1
gttcgtattgtccgtgatatcccagaatggtttaccgataaatcngagctatttacnagcataagacggngtgtaanaaacattccccaatatgcaccagcacaattntacatcgntnatgttcngccccgngtcnaggagaaganggntntggctc

SEQ ID NO: 44231 - DNA, 296 bp, Glycine max
  unsure (1)..(296): unsure at all n locations; Clone ID: 701128155H1
gcagccacacctcccgcagcagccatggttctcaaaactgaactatgccgattcagtggtgccaagatctacccaggaaagggcatcanatttgttcgtngtgattctnaggttttcctgtttgcaaactcaaaatgtaagaggtatttncacaatcgcctgaagccttcaaagctcnactnggacttgcaatgtacggaaangcancnncaaaagggacattgctccaagaagcgtgaggaaagaggnagacgtgctggccaaaaggcctactcnaggtccatngttggggcgac

SEQ ID NO: 44232 - DNA, 193 bp, Glycine max
  unsure (1)..(193): unsure at all n locations; Clone ID: 701128157H1
accttgaagattgaaaagaattctgaaaagaaatattaaactaagaggttccctttttgcagttagtggcactgcatgtgataaggaatcactcagtttaacnttatatatgcgtatcacccctcggncatcnatcatatacnccttctccttcnctccttataacatcactgagttctcagcacttggctaa

SEQ ID NO: 44233 - DNA, 280 bp, Glycine max
  unsure (1)..(280): unsure at all n locations; Clone ID: 701128158H1
aactcccttgcattatgctgttacatgtgagagagaagccatagccgagtatttattgaagcataatgcagacatatattcaaaagataatgatgggagttcaccacgtgacacctgngagtcaaactggccctgtatgcagcatgtggggggagaagtaannnnnnnnnnnnnnnnnnnnnnnnnngntngntctggcnaatacaaccttttacccaaatccctataggatgttcgtgtctatataacttgattttttttgtccttantcagntgtatc

SEQ ID NO: 44234 - DNA, 120 bp, Glycine max
  unsure (1)..(120): unsure at all n locations; Clone ID: 701128161H1
cgcttatcgaactcggacggaagcactgagttaactcagagcgagtgaaagtgntgcngcntgatgtccngtggtattcgcccgtngacgcctcaccgaggaagcgcaagtngtggagna

SEQ ID NO: 44235 - DNA, 271 bp, Glycine max
  Clone ID: 701128164H1
aaacgacattcattcatctatggctacccttattgctcccagcaaccactctccccaagaagacgctgaggctctcagaaaggcttttgaaggatgggggactgatgagaaaactgtcatagtaatattgggtcatagaactgtttatcagaggcagcaaatcagaagagtctatgaggaaattttccaggaggatcttgtgaaacgcctagagtctgagatcaaaggagactttgagaaagccgtgtaccgatggatactagaactgcag

SEQ ID NO: 44236 - DNA, 260 bp, Glycine max
  unsure (1)..(260): unsure at all n locations; Clone ID: 701128165H1
cagggaactgttttanagccattgttggaaanngctgaganngacaaggttaatgctgaagatgagatatgtggcaatatagctgtaacatcaataaatgaaggtacctgccaaagttccataactaatacagttncctcagaatgatgaaacagaggaaactcatgaantgaacctcaacaagaaattctggatcggaattgagaaggttgtgcttctgatcaggaanncctacagaaacaatggccntaagctttcgg

SEQ ID NO: 44237 - DNA, 101 bp, Glycine max
  unsure (1)..(101): unsure at all n locations; Clone ID: 701128166H1
gnttttgggaaatcnactctggttgtctccaaatgaattgctatangatttgatttattgctttaacaantgtcanttgacaatgcatggtancatganac

SEQ ID NO: 44238 - DNA, 67 bp, Glycine max
  unsure (1)..(67): unsure at all n locations; Clone ID: 701128173H1
gnttanaagangcnagcatgggggnatccaatgtcntgcaccaagnactgnaggattggtggcttgt

SEQ ID NO: 44239 - DNA, 87 bp, Glycine max
  unsure (1)..(87): unsure at all n locations; Clone ID: 701128174H1
aaaagcanacttgttccttntgcttgnnctatgctggcctccatgactnncagcttgacttggttatgatnattggagtgatnaacg

SEQ ID NO: 44240 - DNA, 277 bp, Glycine max
  unsure (1)..(277): unsure at all n locations; Clone ID: 701128175H1
tgacatccttcatatttgggacgtcattttaagtgatccagagggtccacagcctatgccaaatggctttgataggcctttgccagctattntgcccagtggaaggacctgagattctgctgctgcccccaagatacggtgttggaaaaggagncacttctgcagaatatgctgcgcaatgctaattctggttcgtangngccngnatcgggtganttcacttctaacnnnangtnggcngncaaggtntncntgtacancatagtccantggntcc

SEQ ID NO: 44241 - DNA, 66 bp, Glycine max
  unsure (1)..(66): unsure at all n locations; Clone ID: 701128176H1
atatcacacacagttcgagcttgacnttgangancgcataacttggttgtnnnccntgtgggacgc

SEQ ID NO: 44242 - DNA, 269 bp, Glycine max
  unsure (1)..(269): unsure at all n locations; Clone ID: 701128180H1
gggggatacccagaaagcttttcttgctttccagaaaagctcctgagaggaatattgtttcttggnantctatgattgcngggtatacgagaaatggaaatggagagctagcctccgccgttggatctccatcgcttcaacacggaacctcaccaatngccacgtcaccgttctcaacgtctttgcctgcgcgacggcgatatgtgcaagtggctgttttgctccggatccgacgctcctggctttcaagaaagcagcggntcgatgga

SEQ ID NO: 44243 - DNA, 287 bp, Glycine max
  unsure (1)..(287): unsure at all n locations; Clone ID: 701128181H1
tttgtctgggtgctgaagttggatttaatacaacttctgcttnnntcacaaaatataatgctggagttgccttcaataaaccagatttctctgtggcacttatgctggcanataaaggacagaccctgaaggcancttacatcattatgtngatcgcccgatgganttacggttgcngctgaaatctcccacaggtnttcttccgtnagagnacagtttactattgggagcngcgccgtcnatagatncnaagacntttaaagacncggtncatgaccatggcanac

SEQ ID NO: 44244 - DNA, 59 bp, Glycine max
  unsure (1)..(59): unsure at all n locations; Clone ID: 701128182H1
anttaccacagggataactgngcttgatggcagccaagcgtttcnnaggcgnacgntng

SEQ ID NO: 44245 - DNA, 120 bp, Glycine max
  unsure (1)..(120): unsure at all n locations; Clone ID: 701128184H1
cagtttcacctgaatcctatgaagaggcagttgaaggttttaaaangggaactcaccaacaagtgtactgtggagagaatcaagtttcanagcggggcancttatncagngtctgntgaa

SEQ ID NO: 44246 - DNA, 170 bp, Glycine max
  unsure (1)..(170): unsure at all n locations; Clone ID: 701128186H1
gaaaatggcagaggctaatgtagtgctgttggatttctggccaagctcttatggaatgagagtgaaaatcgctttggcagagaagggaatctcatatgagtgcaagcnagaagacttggaagctagaagctctctgcttttagagatgaacccggttcacaaaatgatac

SEQ ID NO: 44247 - DNA, 288 bp, Glycine max
  unsure (1)..(288): unsure at all n locations; Clone ID: 701128187H1
attagggttttctcaaccctagggtttancncntcttcccctgttcgaaattaggcaaatcaanacagaaacacgactacaaanagaagaaaagaaganaaagaatcaatcattcattgatcgctgaaacgatacgatgacagggnnggcgaacgnagaagcacacggcgaaggagatcgcggcgaaggtngacgcggcgatcacgaaccgcggcngcggnaaaggcggtnttgaagacaccnaccnggttgnangaantntggcccannaannnncctaccctcnnc

SEQ ID NO: 44248 - DNA, 288 bp, Glycine max
  unsure (1)..(288): unsure at all n locations; Clone ID: 701128188H1
gtttgtaaactgttggaatgtgactttggcgaaagcaaatgtcattctcccagcagcataatgcagatgtttcaaagctcgcttttctgcttgcaaccccagggtgattcatacacgcgaagannctgcttttgattcaatgctggctggtngtatacctgtcttcttccatccnggctcagcatatacccngtatantnggcancttcccaagaatttcncaaagtattccggncttcatncccaggnnnggntntcncgnaaaggggnttccntttggggnaaggt

SEQ ID NO: 44249 - DNA, 200 bp, Glycine max
  unsure (1)..(200): unsure at all n locations; Clone ID: 701128189H1
caaattgaaaggatgtcgatcttcgagtacaacggaagcgccgtgntggctatggtcggcaagaactgcttcgccattgccagcgancgaaggctcggcgttcagctccaaaccatagccacggatttccaacgnttttccaagatncacgacaancttcttcatcgctctctctggctcgccaccgatgtcaaacatgg

SEQ ID NO: 44250 - DNA, 109 bp, Glycine max
  unsure (1)..(109): unsure at all n locations; Clone ID: 701128190H1
ggtttcactaacttgctcgtnagagctggagaggaacatcctcagggaatatccaaatttctcaaaaccactccgctaattgtcaacaacgtttccacaacaacanagc

SEQ ID NO: 44251 - DNA, 116 bp, Glycine max
  unsure (1)..(116): unsure at all n locations; Clone ID: 701128192H1
gtgcagagnacaacaaagttcacaactttaaggaaaattganatggcccnagtgagcagagtgcacantcttgctcaaagcactcaaatttttggccattcttccacataacatac

SEQ ID NO: 44252 - DNA, 121 bp, Glycine max
  unsure (1)..(121): unsure at all n locations; Clone ID: 701128193H1
gcgaattcngngagagttgcggctggnnntngacggtncacgncgaggnctgacnccgcaggngaccgctttgtatgaccgtcaaattagggnttggggagctgatgctcaaagaagatta

SEQ ID NO: 44253 - DNA, 129 bp, Glycine max
  unsure (1)..(129): unsure at all n locations; Clone ID: 701128194H1
gaganaaanccagnagatnaacctanngagagtatggtggttttgaagatcaaactgcactgtgacggttgcattgcgacanttcgaagaatcattatgaggtttcaaaggtgtacaatccgngancct

SEQ ID NO: 44254 - DNA, 277 bp, Glycine max
  unsure (1)..(277): unsure at all n locations; Clone ID: 701128195H1
gggatcattcaccgtgacctnaaacctgataacttgatcttgacagaagatcataaaactgttaaacttggctgatttcggtctagccagagaagngtccntaacagagatgatgaacgtctgagacagggacatatcgatggatggctccagaactttacagcactgttantgctgcgacanggggnncagcagcattacaaccataaggtgnnngcctatagctttgactntcagngttntgggaactccttccatnatnngttcacttttgang

SEQ ID NO: 44255 - DNA, 271 bp, Glycine max
  unsure (1)..(271): unsure at all n locations; Clone ID: 701128196H1
aaaataatgttcatcgagaattttaaggttgagtgtcctaatgtgaagtacaccgagactgagattcagtccgtgtacaactacgaaaccaccgaacttgttcacgagaacaggaatggcacctatcagtggattgtcaaacccaaatctgtcaaatacgaatttaaaaccaacatccatgttcctaaattaggggtaatgctgtgggttggggtggaaacaacggctcaaccctcaccggtggtgttattggctaaccgagagggcnttt

SEQ ID NO: 44256 - DNA, 128 bp, Glycine max
  unsure (1)..(128): unsure at all n locations; Clone ID: 701128201H1
ggctgttccctgaggctgttacaattggtgnagatgtgagtggaatgccanaattctgccttcctacgcaagatngtggggttgncttncatcannnaccncnnnatgagcncantgcaganccagca

SEQ ID NO: 44257 - DNA, 123 bp, Glycine max
  unsure (1)..(123): unsure at all n locations; Clone ID: 701128204H1
gggctcgngnttagatatgcacactccancaactccatcatcacttcctccctgtnatnatcannnttagggttctctttnnggcacancacaagaagaganacccatgtcaggngtcctctg

SEQ ID NO: 44258 - DNA, 275 bp, Glycine max
  unsure (1)..(275): unsure at all n locations; Clone ID: 701128206H1
cgagttcctgttgccagtgagggnttgagtttggttgtaagctcctatgatantgaagatgtanttgtatgntttggagggtacaatngaccgttacaacnatgagggctatgttcttaaaccacgccacanatcaacntgcantccaaaataattganaattnccatcaccagacagtgtttcagctatcccacaatgtncacnaatgtggagtnctgaatttgaaggnggccatgattctantccaccaaaatccnnaggtgatattgtatcc

SEQ ID NO: 44259 - DNA, 277 bp, Glycine max
  unsure (1)..(277): unsure at all n locations; Clone ID: 701128208H1
gcaacaagggtcagatccaacaaagcantcaccggcaaccngttttccggtgagctatagcaattcnacaacgtattcgaccaacgaggcttcctacgctccagtcccacctccccagcccaaacctcttgtcgattggtccaccggcctctgtgactgcttctccgaatgtggaaactgttgcatgacgtgttggtgtccatgtgttacctttggccgagttgcagaaattgttgacaagggatccacatcatgtggtgctagtggggctctgtat

SEQ ID NO: 44260 - DNA, 277 bp, Glycine max
  unsure (1)..(277): unsure at all n locations; Clone ID: 701128209H1
gnaggcagttggaagacctcacggataaattgcgagnatgtaaacggcttattaaggagtttgatanagaagtcaaaacattgganagtcgctttgctagagaaaccacacaaaatgttgaatgaganaaagcagtcaatgatcaaagagctaaactcatatgntgctttgaaaaaacagtatgctacaaatattgagantaaacgaattgaactctttgaggggcccaatgaaggntatgcagaagaaaatggcttgctagcatcctcaatgacac

SEQ ID NO: 44261 - DNA, 270 bp, Glycine max
  unsure (1)..(270): unsure at all n locations; Clone ID: 701128210H1
tctgagctngtttaagcttttcttccattaacatattatcaggaatgtgtggnattcttgctgttcttggttgttctgatgactctcgagccaaaagggtccgcgtgctngagctctctcgcagattgaagcaccgtgganctgagtggagtgggctccatcaacatggtgacngcnttttggcacatcaacgggnagncatagntgancctggntctggggatcaacctctcnttaacgnggacaaatncngcttgttacggnaacngg

SEQ ID NO: 44262 - DNA, 272 bp, Glycine max
  Clone ID: 701128211H1
gcttcattctgtttccgattctctttgcatttacctttctgtcctcgcccgttctctctgcttcggatctggtcctcgccaaggttgaccgtcgcattgatctgacttcacagattgtgcgcatcactacttcactaaaggtgcagaatacgggatctgatgttgtgtctgagattttgctgtcctttcctgagaaccaggcaagtaacttggcatacttgaaggcaacacttggtgatgggaagggaaaatcaaaaccatcttctggtgtt

SEQ ID NO: 44263 - DNA, 282 bp, Glycine max
  unsure (1)..(282): unsure at all n locations; Clone ID: 701128212H1
gatagntgtcattggggcnatnganccncncagcttcgaatggtcnccgccttacngtcttgtggcaatngacaagcttccaccaaatnggtcccnagnangcngcgtntantactgtcacgagangtgtggtggtcagattccacaaagagggagctgatttgtcgatacggactccctaagaagatcncaactnacaatggccccnntcctnnccnacacaatganncaagaaatgtgcgcangatttcangatccaacatcanaattncacaccacnnc

SEQ ID NO: 44264 - DNA, 275 bp, Glycine max
  unsure (1)..(275): unsure at all n locations; Clone ID: 701128213H1
gantttatgacccaacaaatctgccattagacganaaattattctcccctgtcnatgcacatttcccaacagntttttattatcaanctaacaatcaatcagaacttcagtatggtacaaatgcgaatatttcagnattttttgactcggttgttaattgggangcgntctctcatganactngcagtctagatctgagctcatccnctncnnannnatantacggacnntggatcnggcagagaancgnntnntcgncntgnccnatatnccac

SEQ ID NO: 44265 - DNA, 258 bp, Glycine max
  unsure (1)..(258): unsure at all n locations; Clone ID: 701128214H1
anganactcaagaagatggannanggatcacncagacataagattttgcttcatgcatgctnaanccntcatcntccacccancccaacgaatcatcctccctacatgnttcancatgtgtggcgggggatancgcnncttatcaaagnacatcgacantnggggangatgttgtgatacgtggctngcttatcggantgctcantnnanagctaaacgaggtggcntcaangacnntcttcctgatgatctactggc

SEQ ID NO: 44266 - DNA, 270 bp, Glycine max
  unsure (1)..(270): unsure at all n locations; Clone ID: 701128215H1
tttgaacccttctggcaggtttgtcattggagggccgcatggngatgctggtctcaccggcngcaagntcancatcgacacctatgntcngatggggtgcacatggtggtggtgccttctntgggaaggatccgccaangttgataggagtggtgcctacattgtgaggcaagctgcaaagagcattgttncaaatgganttgctaggagggcaattgtgcaagtttcctatgccattggtgtgcctganccntgtctgtgnttgttnac

SEQ ID NO: 44267 - DNA, 274 bp, Glycine max
  unsure (1)..(274): unsure at all n locations; Clone ID: 701128216H1
anaatatgaaggaggtggaagttgaagatggatatgtcttgaaagaagagatccatctcacggtgctaaaaacctctctgttcttccgcgggcgatggcttcagcgtctacgattgcaaagntcaactcgtgttcagagttgactcttatggacccgacactcgcgacatagacgaactcgttctcatggatcctaacggacgttgcctcctcaccgttcgtcgaaagcggccgagtttgcatcaacggtgggaaggtttcaaaggggagagaa

SEQ ID NO: 44268 - DNA, 61 bp, Glycine max
  unsure (1)..(61): unsure at all n locations; Clone ID: 701128220H1
gcgangagcngccantatccagttcgcaanaagcccgagcattcgncagagggcngtcngg

SEQ ID NO: 44269 - DNA, 162 bp, Glycine max
  unsure (1)..(162): unsure at all n locations; Clone ID: 701128223H1
gtttgagtcttcttgatccttcttnttctccttgaactcaaacanggcagatgaggtggttctgctagatttcnggncaagtcnatntgggatgagggtcangattgcacntgcngannagggnatcaactcngagtacanagangagnnngtgaggcganc

SEQ ID NO: 44270 - DNA, 275 bp, Glycine max
  unsure (1)..(275): unsure at all n locations; Clone ID: 701128224H1
gtcatattggcgtaatccaccatacactgctgtnaggtttttcttcactactttcatagncctgatgtttggaacaatgttctgggacctcggaagcagacgtacaacaagagganacctgttgaatgctctaggttcaatgtatactgctgttctcttccttggaatacaaaatgcttcctctgttcagccagtggtagcagttgaaaggactgtcttttatagagaaaaagctgcgggaatgtattctgccttaccctatgcattgcacaggt

SEQ ID NO: 44271 - DNA, 273 bp, Glycine max
  unsure (1)..(273): unsure at all n locations; Clone ID: 701128225H1
gcagantttcagttgctgaagcaacaatttaagttaatatccatcctgaaggatcaaatggtatctttggaagattgggctactttggatcggttgtantctagttcactttcaggagctactgaagccctaagggctagcactcttcgacttcctgttgttggtggggccaagacagctttgctaaatttgaaggatgcaattagctcagcaatggatgtgatgcaggcaatggcntcctccatatgcctattgtcaccanaggttgggcac

SEQ ID NO: 44272 - DNA, 273 bp, Glycine max
  unsure (1)..(273): unsure at all n locations; Clone ID: 701128226H1
caacaacatcgtcatcccatggcaaacgccgcatctggtatggcagtccatgatgactgcaagttaaggtttttggagctgaagacaaagangncacaccgtttcatagtttttaagattgangagcagcagaagcaggtcattgtggagaagcttggtgagncancccaaggctatgaanattcactgccaggccttcctgctgatgcgtgccgttatgctgtttntgantttgagtatctgactgaagggaatgtccctaaaagcaaattt

SEQ ID NO: 44273 - DNA, 117 bp, Glycine max
  unsure (1)..(117): unsure at all n locations; Clone ID: 701128228H1
tcntctttattttcacnagctacatattttngttatcagcaatggncttctactttggnaacncccttatncgtatgnncactatgnnngcaatatacattgctacatnacttntgg

SEQ ID NO: 44274 - DNA, 273 bp, Glycine max
  unsure (1)..(273): unsure at all n locations; Clone ID: 701128230H1
atcaaagtcttgatggcaactaacaggcctgacactctggatccagcactactacgacctggacgattggatcgtacagttgaatttggccntcctgatttagagagtaggactcaganattcaagatacacacaagaaccatgaactgtgaaagggatatccgctttgaacttttagctcggcttngcccaaattctactggagccgatataaggagcgtttgcactgaagctggtangtangntattcgagccagaaggaagaccgtgcac

SEQ ID NO: 44275 - DNA, 50 bp, Glycine max
  unsure (1)..(50): unsure at all n locations; Clone ID: 701128234H1
gcaatggcngccattgtnttcatccacacaacatacnaaaataancaang

SEQ ID NO: 44276 - DNA, 85 bp, Glycine max
  unsure (1)..(85): unsure at all n locations; Clone ID: 701128235H1
tggtttcgnaccctcgttgtggttangtcttcttgcacctttcganttntggaatccatgggnccanggnanccgngcgacaaga

SEQ ID NO: 44277 - DNA, 244 bp, Glycine max
  unsure (1)..(244): unsure at all n locations; Clone ID: 701128237H1
gtctaagnggtgccctgagatnactntgngcnatggnganngctgtggcagttcttggcancnnngagggngtcactggnactantcncttcactcagnanggaantngtccaaccaacgtaactggatctcttnctggtcntaagcctggtctccatggcttccatgtccatgccttnggggacactacncaatggttgcctgtcaactggagcgcattcaatccacacancntccanngncc

SEQ ID NO: 44278 - DNA, 59 bp, Glycine max
  unsure (1)..(59): unsure at all n locations; Clone ID: 701128238H1
tntctnctgctngaggtcattantaagtattcaccatggaggcancatctgtcacagac

SEQ ID NO: 44279 - DNA, 146 bp, Glycine max
  unsure (1)..(146): unsure at all n locations; Clone ID: 701128239H1
gcgagttgctgtgactgactcagtgagcgatcgagcganttactcatggcgcagagcgcgcgcntcggcacgtgacnctgctcccgganacnaanncnntgntagganccgcctgcnccnagtcngcgaattgcttncagcnacna

SEQ ID NO: 44280 - DNA, 253 bp, Glycine max
  unsure (1)..(253): unsure at all n locations; Clone ID: 701128241H1
aagaccaaaganaaaaccaaaatcnnagtgtggtttttcaaannnccaaattcaaatcatccantaaaaagggggggtatggaaggaggagagagangtgttaatcccaataattatgagctccaagtntccntcgcaaacacccctcaagccatccatggaaatgggttttgttcaatttgnaganaaccaggntcttaggctcttggcaccctctgcttcaatcccatcttctcagcnctctcaatctcta

SEQ ID NO: 44281 - DNA, 154 bp, Glycine max
  unsure (1)..(154): unsure at all n locations; Clone ID: 701128243H1
gnagcacttangccanccatntcatcggnggtcagcatgctagaagganacattgtngttgntnnnnagtcnttactggagaganaactgaggtattggatgagaagcaaatggcnccanatnagatngacttaccaacagctgagtgagtcaa

SEQ ID NO: 44282 - DNA, 276 bp, Glycine max
  unsure (1)..(276): unsure at all n locations; Clone ID: 701128248H1
gnttcatatcatgaagaagaagtgaggctattgggcaagtgggccagnccatttagcaacagagtagaccttgctcctcnagctcaagggtgntccctacaaatactccgnngaagatcttgctaacaagagtgctgatcttctcaagtacaaccccgttcacaaganggttccggttttggtccacaatgggaacccattggcccgagtcactcatcattgntgaatacatagatncagacgtggcnaaaatnacccactattgcgtcaagaccc

SEQ ID NO: 44283 - DNA, 85 bp, Glycine max
  unsure (1)..(85): unsure at all n locations; Clone ID: 701128253H1
gnttactctctcgttcactctgcatctgantnctatagtttcctcngctaatnccatatccccgttttccntcactacttgaaac

SEQ ID NO: 44284 - DNA, 269 bp, Glycine max
  unsure (1)..(269): unsure at all n locations; Clone ID: 701128258H1
gtaagctaccttgcaaagcnacacatggcttctacagacaagcatggcgacactgnatacagaacatcntcttcaactcnagctcctgcgggtgttgattactttaaatttgatgttntcctaaggtttgtgttatttgcagcatcactggtagctgttgtggtgatcgtcactggtaatcaaacanaggttattcttgtgccacagcctgtgccatggccagccacgttcagatacacaccagcctttgtgtattttgtagctgcatg

SEQ ID NO: 44285 - DNA, 79 bp, Glycine max
  unsure (1)..(79): unsure at all n locations; Clone ID: 701128262H1
ccctttctccttctaacgagtgaggacaaatggcgcgtnagaagatcancagagtatgaatcaaagaggttgntgaagg

SEQ ID NO: 44286 - DNA, 278 bp, Glycine max
  unsure (1)..(278): unsure at all n locations; Clone ID: 701128263H1
gnatctctgtgaagtcgctttataacactcaacctaagatgcagaacgaggaaggacagatcaccgagctttacattcctangaagtgctctgccacaaaccgattgattaccgctaaggaccatgcttcggttcaggttnccantgggcatgtggatgngaatggcgtctacnatggccatttctaccanttttgctctctgcggcttcatacgtgtctcagggtgcatgcccgacngtggccctagntngctgngtggtngacgangaaagtganc

SEQ ID NO: 44287 - DNA, 273 bp, Glycine max
  unsure (1)..(273): unsure at all n locations; Clone ID: 701128265H1
caaaaactaagttcatttcttgtgctttgctttattccttaaaaaccaaacatgnnngaacacatgcggcaactgtgactgcgctgaacaagactaaactgcaccaagggaaacagctatggtgttatagtagagactgagaagagctacatcgagactgttgacatggatgttccagcagctgagcatgatgggaatgcaagtgtggcactaactgcacttgcangggctgcacttgtggnccataaggagtatgtatgaaaatgtnangcc

SEQ ID NO: 44288 - DNA, 54 bp, Glycine max
  unsure (1)..(54): unsure at all n locations; Clone ID: 701128268H1
ttcacgtncattatcctaaaaacttancagannttcacatcccancacnacata

SEQ ID NO: 44289 - DNA, 271 bp, Glycine max
  unsure (1)..(271): unsure at all n locations; Clone ID: 701128272H1
gccgcaccagatctagaaggagacgttaccggtgaattgaaaganaccttgcagtttacctggcattaaactgtgggtttgatgtttgttatggtacaaggtgcttcagtactatattaatttataaacagccgtggctagatcaacaatgcacctatttcttcttcatttctgtccttttatgaacgtccttcaattagtccaatgntcatcattataaaaactagagcaggctattggagcacnacagactcaacgntctggttgtatt

SEQ ID NO: 44290 - DNA, 271 bp, Glycine max
  unsure (1)..(271): unsure at all n locations; Clone ID: 701128274H1
gtaaagntggaggggaaggagcaggatgtgtcgttgggagcgaacaagttccccgagagacagccaattgggacggcggcgcagagccaagacgacggcaaggactaccaggagccggcgccggcgccgctggttgacccgacggagtttacgtcatggtcgttttacagagcagggatagcagagtttgtggccacttttctgtttctctacatcactgtcttaaccgttatgggagtccgccggggctaagtctaagtgtagtaccgtt

SEQ ID NO: 44291 - DNA, 268 bp, Glycine max
  unsure (1)..(268): unsure at all n locations; Clone ID: 701128278H1
aaccttccctgnatttatctggaacagggaagaacacgtgtgtaaaatttggtccagattctaaatacatagctgtgggatcaatggaccgaaatcttcnnatattcggnttgcccggtgaagatgctcctactgagtnntaaaatgcctcagttgtacaagccaaagtcttgctctggagtanacngttgctacctgntattggtgcttggtctaaatatctatgatgagattggaaaagttaatgaaggtagtggtttctttgctt

SEQ ID NO: 44292 - DNA, 269 bp, Glycine max
  unsure (1)..(269): unsure at all n locations; Clone ID: 701128279H1
catcggcggcgacagtnatctccgacaacaacacttccnnggcganaaatgtctctngtggcgnacgaggntttccagcacattactgcgtgtgctgaacaccaacgtggatgggaagcagaagataatgttcgctatgacctccatcaagggtattggnaggagattcgccaacatcgcttgcaananggccgntnttgacatgaacaaaagggctggtgagntgannganttcagngttggatagtgtgatggactgtngtgncgnc

SEQ ID NO: 44293 - DNA, 269 bp, Glycine max
  unsure (1)..(269): unsure at all n locations; Clone ID: 701128280H1
gnctctgtctgtggttggtcttatcttttgctgaaacttganattgaatctctctcaagcttcctttcttaaaangttaggaatttnaagcagaagtaagaactaggaagagatgggagtggatttnagacaagtggtggcaggtgtcctcacccncacaatgtttgtcatgcttggaaatatgatcaaaagagaccacttcgntaattcacttncaagaaaagcttccaggaggatcggaagatnccancttnganatgcctacnttg

SEQ ID NO: 44294 - DNA, 244 bp, Glycine max
  unsure (1)..(244): unsure at all n locations; Clone ID: 701128281H1
caaaactcagaaccctnnctatatccatggcnanngggtggaacagangctttanncagatttgggtcaacantgccagcnccgcgattgcnancnagctcgattttcttcctttnacctgngacggttgcccaacaggtaattcattnttcatcagcnttttagttcgcatagcatcataattagaacgcctataattatgcanctnacaattgtantnttctatctcantaantaaatcnat

SEQ ID NO: 44295 - DNA, 277 bp, Glycine max
  unsure (1)..(277): unsure at all n locations; Clone ID: 701128282H1
gtttctggagcgtttgctgttggtacatggacactggtgttatcggcgtatatcaatgatgtaatcgctactangcgtttttgatcaggatgtttctgccaaactttgcctaaagtatccttatctatatctagagggagtagaggatatcctcttcagctggccccggattcttggctggatgttgaatggagtccttagttctttagtgatcttcttcttgaccactaattctgtcttgaatcaagccttcagaagagaggcaaggtggtagant

SEQ ID NO: 44296 - DNA, 214 bp, Glycine max
  unsure (1)..(214): unsure at all n locations; Clone ID: 701128283H1
ttgaggctaagcagcccaactatgccattcgaaaatgtgccagggttcnactcatcacaaatgggaagaacgattgntgnattngtgccaaatgatggntgcttnaattacattgangaggctgatnnngtcntgntagctggatntngacgacaagggtcatncngncggtagatattcctgnantcagattcanngtcgngaagntttcngc

SEQ ID NO: 44297 - DNA, 274 bp, Glycine max
  unsure (1)..(274): unsure at all n locations; Clone ID: 701128286H1
ggctcagttctcatatttttctttaaaaaagccatagatgtggtattgagaaaatactttttcgctgaagctctgaataacagaccatcatcgacagatggggtctgaaggtcctccagcagctgnggcaacngttcatgtaacaggtttcaggaaattccanggagtcnncngcgaatccnacggagacaantgtcaataatttgaatgngtatttgnacacgaagaanggtntgccanaaggcnagtncnnnggngtngcacacattccgag

SEQ ID NO: 44298 - DNA, 114 bp, Glycine max
  unsure (1)..(114): unsure at all n locations; Clone ID: 701128288H1
gntttctctgccttatttattgattagcttttatacataattgcatgtcctacattctcactgcaataatcgctataataaccattacaataaccgctataataaccactacaa

SEQ ID NO: 44299 - DNA, 261 bp, Glycine max
  unsure (1)..(261): unsure at all n locations; Clone ID: 701128289H1
atcgcatagtattctccttctgttgtttcttctactgttccatgcgttatacannanccaaaatacaggggaagaagaaaaatggtgattataaaccttgtnnnnnnnnnnnnnnnnnnnnnnngagaaggaatgcgacttgggaaatacgacttgggtaggactcttggtgagggcaattttggcaaagtcaagttcgctaggaacactgattctggccaagcttttgctgttaagatcattgacaagaacaccatcgtc

SEQ ID NO: 44300 - DNA, 268 bp, Glycine max
  unsure (1)..(268): unsure at all n locations; Clone ID: 701128291H1
gggaacncaccacttcttcaattggtgcngtttattcatggaccagaagaatacatcatagcttctttctcatttcacacacaatagaanccnggaganancatgangatngcaagtnccaagnaattggntgngggagntgcacttggnaatgaaggataggcaacgttggagagctgaagaggatnctntacttcgngcatatgtcnaacagtanggtactagggnanggaanctcgaggctcagcgcatgaaacacctcnnaacc

SEQ ID NO: 44301 - DNA, 264 bp, Glycine max
  Clone ID: 701128292H1
acctcacacgactccctttgttgcgttgtgtttcctttcgccgaaaccctcgctcgcaacttctacagaatccctttcaccatggatattgaggaggacatccgttctttacagctcgattcagcagaagacaataatggggtggtaaatgcagaggatggaaggccagaagaagttgagaaatctgataagatggatgaagatccaaagcaggatgttgaggctgagccaaaggctgttgaggctgagccaaaagtgaagata

SEQ ID NO: 44302 - DNA, 270 bp, Glycine max
  unsure (1)..(270): unsure at all n locations; Clone ID: 701128293H1
gagcaggaggccattccgtgctctccagtagcctcaacatttccttcatactcctcatccatttcaagtgttttgaggactcttcgggncaacaggagannagntgcaatangctgcagcataatttgtaagccctacttcaagaccanatcgtggnngctcatgtgcatatgctgcagcaagaacaatatcgccagcaatgctagcagatattatttgtgcaacaatgtccatgataatcatctctactgaccaaatctgaaganaatt

SEQ ID NO: 44303 - DNA, 81 bp, Glycine max
  unsure (1)..(81): unsure at all n locations; Clone ID: 701128294H1
tggaagatgatgtgctgccagctgaagctgagcgtaggtatccaagcagtaacanatcagngtatatttccacacaaacat

SEQ ID NO: 44304 - DNA, 161 bp, Glycine max
  unsure (1)..(161): unsure at all n locations; Clone ID: 701128295H1
gncgntcgcgattcatangtggtgttgtnactgctgctcttttctcttttcttttctntntagttctctgcttccccttnctnntnctttnncttcttcttctgagctgtntaagctttnctnccattaacatattatcngnatgngtggtattcttgcng

SEQ ID NO: 44305 - DNA, 290 bp, Glycine max
  unsure (1)..(290): unsure at all n locations; Clone ID: 701128303H1
gggagaagctctggctgtaagttttccctatgttttgcaccacatgcctgatgagagtgtgagcactgagaatcacagagatagattgctgaggttggttaagaggttgtctcccaaggttgttaccattgttgagcaagaatcccancacccaacacgtccccattctttcacaggtttgttgagaccctggattattatactgcaatgtttgaatctatagatgtggcttgccccagagatgacaagaagcggattagcgcagagcagcattgcgtggcacgagacat

SEQ ID NO: 44306 - DNA, 282 bp, Glycine max
  unsure (1)..(282): unsure at all n locations; Clone ID: 701128304H1
attagctgaccctgtaggcagagcncctagaagatgtgtatngnggangtagcannggaatattgnnggctgtagngcttcttcgacccactaacccgagggnctcaagtggcgcnatcacnngccnttntggnagcncactncctnatacgtnnngggnnaagttagttgntgtagctgataangcttcgttccatcncttggntttgggcatcnnatgngccatggatacagtccttatcggacccccacttttaccggagctggctagggaaacacttc

SEQ ID NO: 44307 - DNA, 288 bp, Glycine max
  unsure (1)..(288): unsure at all n locations; Clone ID: 701128305H1
aagacttcaattcatataaaccaaagatatactatcttcatnagcaaaggactcaaagtaatagntttctttaaaaaaaattgaagtgtgggggggatctanatctctatgggatcatcactttcgttactctcatcagcctgggaangaaatcgttagggcattncctctttggtctgnctntgaanttcattttggttccaaagatgggnctgtgaatttgcagatcaggcagctttcnaggaanagngnatcagaaactacttcaagggtnctctactaccaaca

SEQ ID NO: 44308 - DNA, 198 bp, Glycine max
  unsure (1)..(198): unsure at all n locations; Clone ID: 701128306H1
gatgaattcattcaacactcatgatgacactcanaagattgttgaaaaataccanaactcaaatattgagattcatacttttaaccagagccagtatcctcgattggttgttgaggactttttgccattgcttccaaagggcatactgacaaggatggatggtaccctcctggccatggtgatgtcttcccatcatta

SEQ ID NO: 44309 - DNA, 282 bp, Glycine max
  unsure (1)..(282): unsure at all n locations; Clone ID: 701128307H1
gctctgcttccagcgagtgttctttcttcgtttcaacaccttaatttgcanacgctgcttcttcagcttgagaaatggcacaagaaacctttctattcncatctganncctgtaaacgagggtcaccccgacaagctgtgcgaccagatctctgatgcagtgctcgatgcgtgccttgaacaggaccctgacagcaaggttgcctgtgagactgcaccaagaccaacatggtcaggtcttggagagatcacaaccaaggccaacgtagactatgagaagatg

SEQ ID NO: 44310 - DNA, 286 bp, Glycine max
  unsure (1)..(286): unsure at all n locations; Clone ID: 701128308H1
atggatcctcagcctgagccagtcagctacatatgcggagattgtggaatggngaattanggatgacgcccggtgacgttatncagtggccgtgagtncggttaccgtattctttacaagaagcgcactcgtcgcattgtccagtncgcggcangctgaaganaactggctatancgtttgcaagtantttccatgaagaaattgttactacatctgtgttgtgtgatattgaaganctactttnaatctacagtagattgcttttgggtgatgtttancaaaaga

SEQ ID NO: 44311 - DNA, 269 bp, Glycine max
  unsure (1)..(269): unsure at all n locations; Clone ID: 701128309H1
ggagcataaaaagttggattctttnnntgaatttggattaactgagccagagaaatattnccacggaattggaggtggctgttagagcagtgcagatggcgtgttccctctgccaganagtgcaggacactttgatttccaacgctcggaccaatcatcgtcaggttcagtccaaggatgacnattctccggttacggttgccagattgggagtgttcaagcaattgtcagctgggatgttgtcagaatgttttagggagtcaaaagtc

SEQ ID NO: 44312 - DNA, 287 bp, Glycine max
  unsure (1)..(287): unsure at all n locations; Clone ID: 701128310H1
gcaacttgttatggaagcaaatggctttgaacctcttatttctnntttcagttncagatcctgatgtgactggttagaactanagcactgggtgcaatatcttcactantccggcacnacaaacangggcttactgtatttcgtttggnaaatgggtatgctgctttgaaagatgcactagcctctgaaantgtgagatttcanaggaaagctctcaacttgacccattacctgttgcagagaatattncagactgcaacatcgtgaatgagctgggntttcctcga

SEQ ID NO: 44313 - DNA, 290 bp, Glycine max
  unsure (1)..(290): unsure at all n locations; Clone ID: 701128311H1
ggcgcctccatgacctccaaggagaagctggatgtggcgcggcagttgccaaggctcgggcgtcgacatcatcgaggncggctttccctgccngcntccaaggatgacttcgaggccgtcaaaatgaacgcncaagaggtcggcaacgccgttgacgacgacggatacgtcccngtnatctgtggctctcccgntgcaacgagaaggacattcgaacagcctgggaggccgtcaagtacgncaagaggcccaggattcanaccttcatcgccaccagcggccattcacat

SEQ ID NO: 44314 - DNA, 283 bp, Glycine max
  unsure (1)..(283): unsure at all n locations; Clone ID: 701128312H1
gcacttagtgctattcaataattacgaaaaaccaacagcgagtgttgttnttgntnnggtccaggctggaccagggaatgaatagagatganaggctttcggttgangagaactgagttaagcggngaagncacacgcagaatcggnggcagaanttgccaccggaagcacgtcgaaganggtgaaccaaagcacanaattccancnccactntctcttttcaatccncagactcanatctgtgaangagaatcnncatttcnagattgnnntcntnacngct

SEQ ID NO: 44315 - DNA, 295 bp, Glycine max
  unsure (1)..(295): unsure at all n locations; Clone ID: 701128314H1
atgaagttgtttgttttctttgttgctgcagtagttttggtagcatggccatgccatggcgcaggctaccaaaggttccctctccgaatgaaaactggctatggtgagcgttcttnggaggtaaaatgcgcaagttttaggcttgctgtggaagnncacaacatccgagcctttnnaaccattcctgaagantgcgttgaaccaacaaaggactacattaatggcgaacaatttagatcagactctannncagttaanccaacaagctttcttttnngcctagtggaacgcgagg

SEQ ID NO: 44316 - DNA, 294 bp, Glycine max
  unsure (1)..(294): unsure at all n locations; Clone ID: 701128315H1
gnntctcgtgatcaacatggcttgatctcctcaaggtaatatatgcttttccttttctttntcttccctttatttagctcacttttttccgctaattataagctcatgtataattattccctgttgcaccctagaaactcctgtttcagngaagantctgtgtacntggctaattngatngcttcttgttttgtcccaatttgggntgagagagaatgggtcnagnatttcngncgnttggtacatgtgaangtgcccaggcgnggnaaaaaaaatanggnacggtggactttc

SEQ ID NO: 44317 - DNA, 309 bp, Glycine max
  unsure (1)..(309): unsure at all n locations; Clone ID: 701128316H1
gtgatccgtgcgcaggtaaggntagcaggctcggtcttcaagtcccacacgnaccaccgcanggggcntgcccgcttccggagcctggntttcggagagcgcnacgggtacntgaagggtgtcgtcactgacgtcatcncacgatcctgggccgtggcgnngcctctnggttaaggtcggccttcngccaanccgttcggtacangaagcagtgccgagcttcttccatcgcnggcgaangntctctacaccggccaattcntcntactgcggcaagaaggccaccctcngttgtngggaaagtgttgc

SEQ ID NO: 44318 - DNA, 293 bp, Glycine max
  unsure (1)..(293): unsure at all n locations; Clone ID: 701128317H1
ggtgtcgtcncaggttgtgaatacttacccgttgtccagctacacgttcggcatgaaggagcccnngatggagaaggatacctccgtcgcggatcgtctcggctcgcatgaaagtcaactatntgaannaggtctgaggancnagtgtggnatgaattntactggtgcaagagcacaatcatcctcatgtattcttcctccaattggnaacaacatncggcaaanntcccaggcggtngtctcaaaccaggcgaggnngacatngagggctgaagaggnagtgacttagcnag

SEQ ID NO: 44319 - DNA, 203 bp, Glycine max
  unsure (1)..(203): unsure at all n locations; Clone ID: 701128319H1
ggngatgccatgtttgtaagtgtagaaaattgaagtcgccctgggaaatggggnggaggcggatgctganaggtttattcttctttcanttagggtgttggatatatatgtattgtgtgaagatcnttgtttatcaaganacttgnacatttaatagacctanatctcagtagtgntttcagcananagagaccagccaaanc

SEQ ID NO: 44320 - DNA, 290 bp, Glycine max
  unsure (1)..(290): unsure at all n locations; Clone ID: 701128320H1
ggcaaaatcaccttgagtgtcaccaagaccaagcctgagacgggtgaggttatcggtgtgttcgagagtgttcaaccattctggacactggatttgggagcaaaggntccaaaggatgtcaagatncagggcatctggtntgctcagcntgngtnatagagngtttagtntccngtnctngtttgttggnctcagattgtgttagtaacttcatgnatggtggttgctgcattatcccttgacccaacttncctagcactactgagatactgtcatggttgtatattata

SEQ ID NO: 44321 - DNA, 90 bp, Glycine max
  unsure (1)..(90): unsure at all n locations; Clone ID: 701128321H1
ttgttggaaaangccananactatgttggcggagaaagtcaccancatgcccaagccagaggcgagtgtncaccnacgtggnctttcanc

SEQ ID NO: 44322 - DNA, 99 bp, Glycine max
  unsure (1)..(99): unsure at all n locations; Clone ID: 701128322H1
ggcngngaangncttcgccagctcgtcgtcgttcanggaggaaactgaggacnaggaagcgttancgctgggcggcgctcgagagngcttcccangcaa

SEQ ID NO: 44323 - DNA, 284 bp, Glycine max
  unsure (1)..(284): unsure at all n locations; Clone ID: 701128324H1
tgcctcctcgtcggtgccaatggatccggaaagacgactttgctgnagattctggcggggaagcacatggttggaggaagagacgttgtgcgcgtcttgagtggttccgcttttcacgacactcagctcgtttgtagcggagatctcgcttatttgggcggatcttggagcaaaaacgttggctccgctggagaaattccgctccaaggagacttctctgctgaacatatgatctttggagttgagggtggcgatccagaaaggagagataagttaattgagct

SEQ ID NO: 44324 - DNA, 130 bp, Glycine max
  unsure (1)..(130): unsure at all n locations; Clone ID: 701128326H1
ggagtatcngctctaacttggagactacaanngcagngagatctgtgtggctgatgaagtgcccttngtggtggctaagtcntgggcagacccatcctccttctcaacctctcgccaaggttgtgctctc

SEQ ID NO: 44325 - DNA, 294 bp, Glycine max
  unsure (1)..(294): unsure at all n locations; Clone ID: 701128330H1
ctgtgcattcgtctccgaaaatgaacgacgcagatgtctcaaagcaaatccagcagatggtgcagtttcatccgccaggaagctgaggaaaaggccaacgagatctctgtctccgccgaagaggaattcaatatcgagaagctgcagttggtcgaagccgacaagaagaagatcaggcaggaatacgaacgcaaagagcgccaagttgaattcgcaagaagattgagtactcgatgcagnaaatgcttctcggattaaattcttcagctccagangacgtggatcagttccatg

SEQ ID NO: 44326 - DNA, 255 bp, Glycine max
  unsure (1)..(255): unsure at all n locations; Clone ID: 701128331H1
agtgatttggcaggaacagcaagcacagaacaacaagaatctccaccacaatattatttgtatcatctaactttgtaactacacttgttactctcgagtgataaattcgacttcttcactcagggcatatattccaaatggcatagtagttatatggccgaagaaatcgtttttatnaattttgaacttgtcctaaaccttggtccaccaatggtaacattgtcattggatttcaccattaaaggttaatggagg

SEQ ID NO: 44327 - DNA, 300 bp, Glycine max
  unsure (1)..(300): unsure at all n locations; Clone ID: 701128333H1
ctttattccttttgtaatttcattnattcttantctttgtgaaaaataatgttcatccgagaattttaaggttgagtgtcctaatgtgaagtacaccgagactgagnttcagtcngtgtacaaactacgaaaccaccgaacttgttcanggganaggaatggcacctatcnagtgganttgtcaaaacccaantcngtcagatgaggntttnaaancaaccatccangctcccnnaaattaggggtaaggccngtggggtnngggtgcnaaanaacgnttcacacctcaccggtgngntt

SEQ ID NO: 44328 - DNA, 287 bp, Glycine max
  unsure (1)..(287): unsure at all n locations; Clone ID: 701128334H1
ctttcttattatcttctctgtttctacccccaattttttagtgagtcagtgtgagcttttcctgttctatccaattagttaanccataagtctataactacttnaantgggatagaatttataaatctacgtgnctggaangancttagtttnnagntatgtgagattacaatttagttgggatctataatgtaatgtgtatggnaatgtgatgtcaattcaanttgagctataactttgnggnatggtttagaaaggaaaaaagtngtacgggttgttgcaatgga

SEQ ID NO: 44329 - DNA, 279 bp, Glycine max
  unsure (1)..(279): unsure at all n locations; Clone ID: 701128338H1
ttgatgaagcctgggctgatgctgcattggcgtctttgctcagtnaagatgcntctncaggatgctgctggaaaccctatgancctttggagcttcgacgacntgncttccatggcagagtcttctgaacaccttcatatccctttttatgaattgtgatcgtgatgttggtgatggaatccacagcaagaaaaccaacctgcttaaagcatatgtggagtttatttatcntgtagctaatgcagtataggactatatataggtttttatanggtatcc

SEQ ID NO: 44330 - DNA, 282 bp, Glycine max
  unsure (1)..(282): unsure at all n locations; Clone ID: 701128340H1
aagggtcagatccaacaaagcaatcaccggcaaccggttttccggtgagctatagcanttcaacaacgtattcgaccaacgaggcttcctacgctccagtcccacctccccagcccanacctcttgtngattgntccaccggcctctgtgnactgcttctccgaatgtggaaactgttgcatgacgtgttggtgtccatgtgttanctttggccgagttgcagaaattgttgacaagggatccacatcatgtggtgctagtggggctctgtatacgctgatt

SEQ ID NO: 44331 - DNA, 286 bp, Glycine max
  unsure (1)..(286): unsure at all n locations; Clone ID: 701128341H1
ttccttccccttctctcttttccaaaactaatggaaggttctgtacttgaacgtcttgattntggggaagatgggatacgggtgcaagcattatagaagaagatgcaggattagagcaccatgttgcaatgagctctacttttgccgtncattgntcataacgaggcaacgagcatngctgcgcaacccttttgatccggcacgaactcgtccgccaggacgttncaacatgttgttgttcagtttgtgacacagagcagccagttgctcnagtttgcacaaatng

SEQ ID NO: 44332 - DNA, 291 bp, Glycine max
  unsure (1)..(291): unsure at all n locations; Clone ID: 701128344H1
anancatcgnncatnggcagacctccaatgccantgatgcagcagcagatgcttccaaggggacgtgtctatcgttaccctccctggccgcaacatgcaagatgtcncaattcaagttgcagctggtggaatgctgtnggtnccttatgacatgggaggtctggccaatngcgcgatgctgtgggacaggccaatgcccattcnaagcttggntacagncctcgcaaatgctccaccngagcaggcaganaaatntgctcggtgaagcnttatacccacttgtggatncac

SEQ ID NO: 44333 - DNA, 159 bp, Glycine max
  unsure (1)..(159): unsure at all n locations; Clone ID: 701128347H1
gngttctaancgtancgcatggagcagcnactgcaacantcttcatgcaccgaggaagagtacctcgctctctgtntcatcatggctcgntcacggcggcgccggcggtgttccccgcngcaaggcntgctgtntccgacaacaattccggcagctanc

SEQ ID NO: 44334 - DNA, 307 bp, Glycine max
  unsure (1)..(307): unsure at all n locations; Clone ID: 701128348H1
attcagaggatgtcgatcttcgagtacaacggaagcgccgtggtggctatggtcngcaagaactgcttcgccattgccagcnaccganggcttcggcgttcagctccaaactatagccacggattttcancgcatttcccaagattcacggacaagctcgtcatcgctnctctctggncttcgccaancgnatgctcaaacattgtaatcngagtcttgttttccggcacaaactngtagcnnctgcgtgaagagagggatatgnaacccagagacctttgnccatttgagtcnatggntctgctct

SEQ ID NO: 44335 - DNA, 81 bp, Glycine max
  unsure (1)..(81): unsure at all n locations; Clone ID: 701128350H1
tccctaatccctttcttcctctctgcacgctcttgcctcntccgatctcagntctcttctccgattccagaacagangnga

SEQ ID NO: 44336 - DNA, 288 bp, Glycine max
  unsure (1)..(288): unsure at all n locations; Clone ID: 701128355H1
ggangnggctcgtcatttcatgaatgaaaaatcaaggagctgttcttgtgaganttgcaactttcagtgggcacataccccagatctaggaagcatgcaagacttgaancatcctcttgagcgcccatctgcagtagacccagaggcgtcaggttagctggaggaggttggagcgccagaggggatcttggcgacctccttaggcanacttcaaacttccattgggggtgatggtcccatanatgatggtggtctgctggctgtgtttttcntcattcttcagcctgc

SEQ ID NO: 44337 - DNA, 278 bp, Glycine max
  unsure (1)..(278): unsure at all n locations; Clone ID: 701128357H1
caaganagantttcaataacttgcaacttgcctacaccatatttttttttgttcacaattgatatatggtatctagcctgtggtgtggccataacaagaagggagagaaaacaaaataatttaaggttgagatgaggaagtgtgagctctgtaacagtcccgcgaagttgttctgcgaatcagatcgagccagcntctgttngaaatgcgntgctnaggttcacagtgcgaactcctcgtcaccnaacatcccaggattcttctctgccagtgtgtca

SEQ ID NO: 44338 - DNA, 122 bp, Glycine max
  unsure (1)..(122): unsure at all n locations; Clone ID: 701128358H1
gaaacanatagctataattcatttnatcaccttcaactacagaattgttgaatgcganacanttcccaagcctagcaactccccaatagccaagtctncgtaccacaaagtatattacatcc

SEQ ID NO: 44339 - DNA, 286 bp, Glycine max
  unsure (1)..(286): unsure at all n locations; Clone ID: 701128359H1
agaatgttggacatcaacctattcagagaggagaagggccacaaccctgaactcatacgcgaatcccaacgccgtcgtttcgccagcgtcgaaatcgtcgacgaggtcatcaatctcgacaaagaatggcgaaaacgtcaattcgagttggaaaatctccgcaaggaattcaacaagatcaacaaggaagtctccaaactcaagcgtgctggggaggatgcttctaagttcantactgaatcagaggngancanaaaatcgatagcggagaaanaggttgaagtgc

SEQ ID NO: 44340 - DNA, 300 bp, Glycine max
  unsure (1)..(300): unsure at all n locations; Clone ID: 701128364H1
gntnnanagacttgggaaagtggatccgaacaaacttatgcaggttacgaccatggatagatatgtaaaataccatgtgcaggagtttganaaagcttttaagataaagtttcctgcttgcacaattgccgccaagagacacattgattcaagcaccacgatactagatgttcaaggcgtgggccntcaagaactttacaaagtctgctcgggatctcattatgcggttacaaaanattgatgggtgacaattaccctgggactctctgccnaatgtttatcataaatgnttggccctgg

SEQ ID NO: 44341 - DNA, 98 bp, Glycine max
  unsure (1)..(98): unsure at all n locations; Clone ID: 701128365H1
gtangcnacganatgcttcggggagttgaacaataagcgtcagatccggggattcccgatnataacgtncaacctttgcgaactgcngctgaatncac

SEQ ID NO: 44342 - DNA, 71 bp, Glycine max
  unsure (1)..(71): unsure at all n locations; Clone ID: 701128367H1
ggnggtagggattcatcattnngctttcagntntctggcattnaagagtcngagntcggaaaattccacac

SEQ ID NO: 44343 - DNA, 300 bp, Glycine max
  unsure (1)..(300): unsure at all n locations; Clone ID: 701128368H1
ctgcgatgaagcccaataagcctggnttggaggagtnccaanaacagatccacaagatnanggattcaccctttcctccaagcacgttcananaatctcgagaaggtttgtgnggnacttggttcgtggtgcnaangnataagaggctcaagggttaagnggacntgtcagggntgcccactaaaggntcttccagnttcataacanggnangttccccctgtggtgganggtancancacatggggnnngnnttgaancttcgtgtgcncaagaanggtgattggncctgctaaagttc

SEQ ID NO: 44344 - DNA, 148 bp, Glycine max
  unsure (1)..(148): unsure at all n locations; Clone ID: 701128369H1
cgaatttgggaattgcttgctttggaagttctnttatttctatctgangtaatagctggcaagtnttgtgggtgtgatntgtgaaagggncatgagccagaactggccgagctttaaanannacncaacntggncanagnnnnncccc

SEQ ID NO: 44345 - DNA, 93 bp, Glycine max
  unsure (1)..(93): unsure at all n locations; Clone ID: 701128370H1
gcntcatnnanatttctgccctatcaactttccgatggtaangatagtggcctanccacggtgntgngcgggtgacggagaagttagggnncg

SEQ ID NO: 44346 - DNA, 266 bp, Glycine max
  unsure (1)..(266): unsure at all n locations; Clone ID: 701128371H1
angcaaagccatctgtttntgcatcnnagtgcgnaanancaantgcaaggnnagcnaagtgananattcagaganacncttnccatgtcaagcctagtcacaagggaanaaccaaagggtgtacttcaagcnactnctgttggngatggtggtgggcatcaatgttcatggagccancacagttgctaacgatgntgtanggagtngctngctggtggagntnactgcagctcatacctctttgatgagtgnccaatggagttcaa

SEQ ID NO: 44347 - DNA, 283 bp, Glycine max
  unsure (1)..(283): unsure at all n locations; Clone ID: 701128373H1
cttgaagaaagttttagtgtatttttttttccttagaganacagaacatatcctgttcnttctttccgctgtttggcattnnnnnnnnnnnnnnnnnnnnnnnnnnnnnnnnnnattatctagttaagcatgacaacatttatggacatgtacaacactactngtagcatcatgacaccggatttcttagaccagtgtagtnantcaagagctgatgaaagcacttgnagccttttatganaagtgnttcatctagcatgacttcctcatcactaacaacnnc

SEQ ID NO: 44348 - DNA, 88 bp, Glycine max
  unsure (1)..(88): unsure at all n locations; Clone ID: 701128379H1
agctcatcctagagttttaaaaatggcagcagcntcctnccatggctctntcttcnccatccttggntgnnncaggccgtgaagntgg

SEQ ID NO: 44349 - DNA, 316 bp, Glycine max
  unsure (1)..(316): unsure at all n locations; Clone ID: 701128380H1
ggattcacaaaatcttgttgtagagaggcgtgaagaggganctatggcacctgtggcacctgtgactatggnatgcctttgcgttatctctaaatctcaggggctcaatccgagtagtcttttngagaagcanatnggntannttaaaaanggganacacganttacntncaacgtgtncanncanntnncnaatnaatttcnaaaatagangaannctggccggagccccngggncctttgcatgntaaagcaagaacagactgtnaattnnaaggatttcaaggtgnnaanacgacaagnacggaaaggttctt

SEQ ID NO: 44350 - DNA, 302 bp, Glycine max
  unsure (1)..(302): unsure at all n locations; Clone ID: 701128385H1
ggttttagaagctcagctaagcacaatagagagtttaattaggccattaacatatcatatgggtgtgactaagcctcatgtgcttatggctgttgctcatcatggttgtctcanttgcagaganaccatcagtnatagcangnaaggggnnctttnccttgcatatcctgggtcnaaggggtanctcaaagcattttnggcaaacgcttgggaacttnnatgncangtgttgnnganaggggttggcacntgcccggcattngtaacatggacagagtcttngcaataactnagcagngttt

SEQ ID NO: 44351 - DNA, 278 bp, Glycine max
  unsure (1)..(278): unsure at all n locations; Clone ID: 701128386H1
gaatcaacttactcaaacatctcaacttgcatctattgattttnttgccgatttttcagagcagncttctactgtaacctcagatgggaaggcactgggattatctgtccctaaaaacaaaggatgggcaacttttgatatgcctcagagcacctcatctgctgcacaagtggaaattccagccactgtaccctcaagtgctaaatctatagaagaaagattgatccanttccaacctcacatgcanacgtgcaacaatggccatcttttgnaatttc

SEQ ID NO: 44352 - DNA, 279 bp, Glycine max
  unsure (1)..(279): unsure at all n locations; Clone ID: 701128388H1
ttcactcaccaacaatcattgtcgctcttgtttttaatccattccntgctaactttttttatgttgattaatcactgaaacaatttcatccttttctaatttattttggtatactgatgcaattttatcagcaatcactcggtgtgtgttgtgtcaatgttttaaggaaaaggggtttattgtgatttattttttgttcagaaatgttctaccttcaggtctcacacccgagtgcggcaacactgttaaagttgaagaggcataccatagagntggttt

SEQ ID NO: 44353 - DNA, 281 bp, Glycine max
  unsure (1)..(281): unsure at all n locations; Clone ID: 701128389H1
gcaatggtgtacgtcaaggctcagaaatcaaaagcctacttcaagagatatcaagtcaagtttcaagagaagangagagggaaaaaccgattanccgtgccaggattcggttgattaatcaggacaagaacaaatataacactccgaaataccgatttgtggttcgctttagcaacaaggacattgttgcacaaataatatctgctagcattgccggcgatttagttcttgctacagcatattcacatgagctgccacgatatggtctgnagtaggactta

SEQ ID NO: 44354 - DNA, 102 bp, Glycine max
  unsure (1)..(102): unsure at all n locations; Clone ID: 701128390H1
cttgcgtcctctctctcacaggctgcgacacagtcacacacaaantatcganngaganggttcagcttccctgacttggctttnctcctctcttcctcttcc

SEQ ID NO: 44355 - DNA, 283 bp, Glycine max
  unsure (1)..(283): unsure at all n locations; Clone ID: 701128391H1
agcttctgtgnntcaaccaaaaatctcccttctancctnatncttcttctnttccttcaccatcattgcgcatgcnattggttccntcaaaacngagaccttncaatttgagagctcaggtnaacttggaccctanatcgntngagtacggtgcagattccagnantgntgaggcatgttcaagctcgccgttcnnagttggctnntanaanaccnacccngcatgnccttcacgctcagntttngtgtgagggatcnanngctcgtgcagctattggtngng

SEQ ID NO: 44356 - DNA, 289 bp, Glycine max
  unsure (1)..(289): unsure at all n locations; Clone ID: 701128392H1
atgtcctcaaagttgatagctggtgatagtgacttctttgccgttttggttgtggatgcagtgcaagctgtaaaaatgaccatngctcgaggtgaagttaaatacccaatcaagggaatcactatcttgaaagctcatgggaaaaagtgctagagacagctttctgntgaatggttatgctnctanatactggccgtgctgactcaaggantgcctctcannnnntgcncctgcaananntgcntggcttgnnttcaatcttcagaagacnaaaatgcagttgggtgtt

SEQ ID NO: 44357 - DNA, 289 bp, Glycine max
  unsure (1)..(289): unsure at all n locations; Clone ID: 701128393H1
attacaatgtagcggatgcaagattagcgcaacatgtggaganagggattgcagatggccttctaattagttgtgtggcttcttgttccaatctctggggcacttattatgggatgctggaactggcttttcaaagtnaagtttataagttgtcaccatttttcttaccacaaggaatggatcatggnacagnggganaaganctattacattacttctattgcaggggcnaataangggagctctcttgtggtganctcaaaagggncacagtatncncaacaatcct

SEQ ID NO: 44358 - DNA, 276 bp, Glycine max
  Clone ID: 701128402H1
caaaagtcaaaagttcaatttagggtaacaaaatggaaaatcaagcctcatcatcgatgcagttcctcatcctcgaacaagttcagttcttgaaggtgaacgacgattccctcttgcagtgggaactcgtcgacgtcgttgacgccgaagaggagatagatggctttggttctcggattcttccgtttcttggttcgaatccgattcttctccctgcgatgccccaattgaagaaattcgacaccttcttcttcatcccgatgttggtttacaaga

SEQ ID NO: 44359 - DNA, 230 bp, Glycine max
  Clone ID: 701128403H1
aattgagccacttaccatcagatttagatctcccaacagagagtttctcaaaattgccaagtacccttttcaggatcaaggaagagaatcaagaaccaccaaaaggtgttgttcttgttgtagttgtttgtaactgtagcaacatgaagatggttagaaagttggttgtggtgaggctgtgttggcccatatcgtgttgagctctctccttctgacaacctcgggaacag

SEQ ID NO: 44360 - DNA, 266 bp, Glycine max
  unsure (1)..(266): unsure at all n locations; Clone ID: 701128405H1
agcttccntcttttttcttctctttctgtttgttctctccataaaattccagaatttaaactctcacacaaaaaatcataaacaccccaaagtagcagtacgtgttgcactagtaacatctttttttatgggaatatatgcttttttttcctgttgaataaaattaaacaagaagagggagcagatgcaattncagttaccctgacagttttcagatcaccacttctttttttggctttgtgtctcaaattcttcacaaacattcc

SEQ ID NO: 44361 - DNA, 274 bp, Glycine max
  Clone ID: 701128406H1
gctatccaatagggagtcagcccgtcgctctagaagaagaaagcaggctcatttaactgacctagaaacacaggtttctcaattaagaggtgaaaattctaccttgttaaagcgccttactgatgttagtcagaaatacagcgactctgctgttgacaacagagttttaaaagctgatgttgaaacattaagagcaaaggtgaagatggctgaagagaccgtcaaaagaattactgggttgaacccaatgcctcatgccatgtctgatatatcc

SEQ ID NO: 44362 - DNA, 254 bp, Glycine max
  unsure (1)..(254): unsure at all n locations; Clone ID: 701128407H1
gggcttcctcaatgatctcctccccagctgttaccaccgtccaaccgngccgangccggcatggttgctccattcaccggcctcaaatccatggctggcttccccacgaggaagaccaacaatgacattacctccattgctagcaacggtggaagagtacaatgcatgcaggtgangccaccaattggcaagaagaagttcgagactctttcctattgccagacctcgatgatgcccattggcaaggaagtcga

SEQ ID NO: 44363 - DNA, 273 bp, Glycine max
  unsure (1)..(273): unsure at all n locations; Clone ID: 701128408H1
cgagancccaaaccttttcctccacttggctttcattgctacgttctttgctggagttttgcaagcatcactcggtctcttcaggttagggtttatcgtggattttctgtcacatgcaaccatagtagggttcatgggtggagcagctacagtggtttgtctgcaacagctaaaatcaatccttggccttgagcattttacccacgaggccgatctcgtgtcagtaatgcgctctgttttttctcaaactcatgagtggaggtgggaaagcgc

SEQ ID NO: 44364 - DNA, 276 bp, Glycine max
  unsure (1)..(276): unsure at all n locations; Clone ID: 701128409H1
atcactcccttatccatttccacacaacatannanngnaaaaccaacgctctctcttcagcctccattctacgctctcccaaannccagtctcantntccgaagagcgaaccataatggaagagtaaattaccggaaaccgaataaccgtttctgngtgaaagcctccgccaaagagattgcctttgancagcattcccgntctgntatgcaggccggcattganaagctcgccgacgntgttnggcncactcttgggnccaagggnnnaatntnt

SEQ ID NO: 44365 - DNA, 266 bp, Glycine max
  unsure (1)..(266): unsure at all n locations; Clone ID: 701128410H1
gagagaaaatggtttcggggtcaggaatctgcgcgaagagggtagttgtggacgcgcggcaccacatgctggggatgctggcatcgatcgtggcgaaggaacttctgaatgggcagaaggtggtggtggtgcgctgcgaagagatttgcatctccggtgggctcttcaggnagaanntgaantacttnngtttccnccnaaagcnntganacccaagcccttaaggccacanacattccgtgcacccggcaaatttcggcgcacgt

SEQ ID NO: 44366 - DNA, 273 bp, Glycine max
  Clone ID: 701128411H1
agaaaaccacccctctctctctaagcacagcctaagatgtcttactcatgatttcctgctatctcaaattgctgctacaagcaagaagaagtggagtctgattgaactctgaagtgggcagaatgcgttttgaaatcaagtggaccttgagtgcttaccgtagtgtacaattttgaattgctttgccaatattgctgggtgaattgatacagtgggaggcaatcaatagttgtaactggatattctaaggaaatgtaaacttgataagttgga

SEQ ID NO: 44367 - DNA, 278 bp, Glycine max
  unsure (1)..(278): unsure at all n locations; Clone ID: 701128413H1
caacaagtctctatgatatggatcaaatgagtcaacaaaggcatggctattttcattcagaaagtatccatttcagaggcagcaacatctctcaacctaatgtatgcacactcgtgacagcctcagggaacggaactaatctagattcccattatttactagatgcttatgacaatggtatggtgtatggaatgacacaatacaatggagttcaacatcaacatnnttcttgatatgggtgttccagctgcggccaacttatattattctagcatgaa

SEQ ID NO: 44368 - DNA, 284 bp, Glycine max
  unsure (1)..(284): unsure at all n locations; Clone ID: 701128416H1
gttacaacttcaccatggnctgctttttggacaactcacttagtgaaatccaaagaagcagatgcaaagggtccaggcccaacaggcctttgcaacctttaccttgatgagccagatgagaaatggataacccaaattgaagattttgaccatgtcattctcaatggaggacattggtttacaaggtcaatggtgttctatgagaaacaaaaaattgttggatgccactattgcctcttagaaaatgttcctgacttaaccatgtactatggctacagaaaggc

SEQ ID NO: 44369 - DNA, 272 bp, Glycine max
  unsure (1)..(272): unsure at all n locations; Clone ID: 701128418H1
cgaattagttatcttgagaaacattattcccattgctatatnttatggctagcatgaaggttacatgggtggttgtgatcatgtgcatggccgtggtgggtgcaccgatgatggcgcaagccatgacatgcaatgatgtgacggtgaacatggcacagtgcctatcctacctgatgcagggaggaacaccttcaacactttgctgcagcggagtcaagaacattcttggctctgctgtcaccaccgttgacaaacaaactgtgtgcaatgtc

SEQ ID NO: 44370 - DNA, 171 bp, Glycine max
  unsure (1)..(171): unsure at all n locations; Clone ID: 701128419H1
ctcgagctcnntnngctcgagagaatgnactgngtggatggcttgnanagtttcaaatgacaagaatgccgtcnncnataagtggtcaatgatcccgtcccttatatggcatctcanggangtaacttggcatgtataaaacttgcctaggntgaccaagaagttgtccat

SEQ ID NO: 44371 - DNA, 272 bp, Glycine max
  unsure (1)..(272): unsure at all n locations; Clone ID: 701128420H1
gaaacccccttgtttattcggcatacacatcgtcgggggcnagccaccgagtgcagtgcaaccatcggaaaataatggcagagacagattcgtcgtcctcttcagatggagaaccctcgcaatcgctggcgtcgattgcggagaatcttcagcgttctgccattcaatctgctcgaactgtgcaacatagctcttcaactcatttccgtgccttcagaattttttaccagaagcagtatcacagtatagaacatatgaagatgcttttgtca

SEQ ID NO: 44372 - DNA, 255 bp, Glycine max
  unsure (1)..(255): unsure at all n locations; Clone ID: 701128426H1
ggcggtgcctcttctctcgaagaaanatcgtgaagaagagactgaagaagttcaagaggcanccaaagtgacaggaagatttctgtgaagacaaactggcgcagaccaaagggtatcgattcccgtnntaggagaaagttcaagggatgcactttgatgccgaacattggttatgcttcagacaagaagacccgccactatctcccgaatggtttcaagaaatttgttgttcacaatgtgaaggatttggaactg

SEQ ID NO: 44373 - DNA, 281 bp, Glycine max
  unsure (1)..(281): unsure at all n locations; Clone ID: 701128429H1
atttggttgctgcaaacattataaagggaggcttttcatacagtggtcagaggtgcactgctgttaaggttgtcctggtaatggagtccgttgccgatgctttggttgagaaggtgaaggctaaggtggcaaaactaactgttggaccaccagaggatgactgtgatatcaccccggttgtgtnagaatcnatcctgcccaatttccattgaaaggcctggtcttggatgcctaaggagaaaggngcaacanttctgccagggttacaaaagggagggcat

SEQ ID NO: 44374 - DNA, 281 bp, Glycine max
  unsure (1)..(281): unsure at all n locations; Clone ID: 701128431H1
caaaattgattttagtccatattttaaaagaaatattttncgtctttgtattttataattgatgaatttcgtcttcttcatgaaacctaacctagctgtggtagtangatgagagacgaaattcactaattataaaaattacaaagactaatttttgatggaaattaaagaagttaaaacacattttaccctaataataatggatggatggagaattgggacacgaaccaataccctgcaagtagctagctnggcacatgcatgtaccttatcacacacct

SEQ ID NO: 44375 - DNA, 273 bp, Glycine max
  unsure (1)..(273): unsure at all n locations; Clone ID: 701128433H1
tcttccgccctaatctctatcaagccccctctcttcctcgcctcngccctcatcggactcctcaccggcctcgacgactacctctacgcctgcngcgtggcncgccttccggtctccactttctctctaatccaagcctcccacctcgccttcaccgncgtcttcgccttcctcctcgtccgccacaggttcacgccctactccgtcaactccgtcgtgcttctgaccgtcgccggtgtggttctggctctgcgttccagcggggacgccccg

SEQ ID NO: 44376 - DNA, 253 bp, Glycine max
  unsure (1)..(253): unsure at all n locations; Clone ID: 701128434H1
atatgggggtctggaaggcattactattgtgtgaccaagggagtaaattgtccttcaatgcctagaaaagataaacctagacgcgttgatgtgtactactctagttggtgcatagagcagtggaatcaaatagaggtaatggccagttaactgccggngaagcctgcctnccncccngngannnggcntnccncagggaatnnaaaacntngannaaanaaanatgggggntnnnnaanntancccccnngac

SEQ ID NO: 44377 - DNA, 269 bp, Glycine max
  Clone ID: 701128435H1
cctcttcatcttgttctatctgtgacgagcatcatggcctcaagagcagtgttattgttggctatgtgtgtgcttccggcgatggttgtggccattcgcccagcaaagaaccctttttgcgtgaagggtcgtgtctactgtgacccttgccgtgctggttttgagacctcagctaccacctacattgctggtgctgagattatgttgcaatgcaagagcagggttagcaacgaggttgtgtacacgaagaaggggtacaccgactcaac

SEQ ID NO: 44378 - DNA, 268 bp, Glycine max
  unsure (1)..(268): unsure at all n locations; Clone ID: 701128436H1
tgaatttactgaccatttgacacacaangtaaagncnncatcctggtcaaattgaggctgctgcaattatggagcatattttggatggaagttcctacatgaaagctgctaagaagttgcatgagattgatccattgcaaaagngnaaacaagatcgatatgcccttagaacttcaccacaatggcttggncctctcattgaagtgattcgtttctcgactaagtcaattgagagagagattaactctgtgaatgacaaccctttgat

SEQ ID NO: 44379 - DNA, 261 bp, Glycine max
  unsure (1)..(261): unsure at all n locations; Clone ID: 701128437H1
acttgttttgagttcaatcaaatcgcattggtatctgaaatcaggaaagatggttagcgtantgagattcaggcaggcacaaagggcagaaggcccagcaaccatccttgccattggaactgcaaacccaccaaaccgtgttgatcagagcacctatcctgattactacttcagaatcaccaacagtgaccccatgaccgagctcnnagngaatttcagcgcngtgtganaatcttgntcagncgagtattnncnaancgg

SEQ ID NO: 44380 - DNA, 267 bp, Glycine max
  unsure (1)..(267): unsure at all n locations; Clone ID: 701128438H1
gagaattgctagatcggatattggccaagaaggacagtcgttatactgaaaaagatgcagctgtggttgtaaggcaaatgcttaaggttgcggctgagtgtcatttacatgggttggtacaccgggacatgaaaccagagaattttcttttcaagtcaaccaaagaagattcacctttaaaggctaccgattttggtttgtctgattttataaaacctggaaagaggtttcaagatattgttggnagtgctactatgttgcaccaga

SEQ ID NO: 44381 - DNA, 266 bp, Glycine max
  unsure (1)..(266): unsure at all n locations; Clone ID: 701128439H1
gtttcctttttgtttctcctttccagatctgcatcttccnttttttaggattaagcggtgagattcgtgaatctgagaaatgtcggattcttctcgggaggagaatgtttacatggcgaaattggcggagcaggccgagcgttacgaggagatggttnagttcatggagaaggtagcaaagactgtggaggttgaggagttgacggtggaggagagaaatcttctctctgtggcttacaagaacgtgattggtgcgaggagggctc

SEQ ID NO: 44382 - DNA, 259 bp, Glycine max
  unsure (1)..(259): unsure at all n locations; Clone ID: 701128440H1
cttggcccctttttgttttgtgttctttgcttatcattataggcaatatttnnagcctatgctttgaaactgatggtttcattaattatgcaggagaattagtcataggacacatcatcaaaaccatggccatgttgaaaacgatgaatcttggcaccggatgagttgattttcctttgtncngtttccttgtggaaacttggctttngnccccaaaaatttggnatctatnaggggncnattnnaaaatgttaaatgg

SEQ ID NO: 44383 - DNA, 266 bp, Glycine max
  unsure (1)..(266): unsure at all n locations; Clone ID: 701128442H1
ggggtcagtatagaagactggtggagaaatgaacaattctgggttatcggtgggacatctgcgcatcttttncctgtgttccaagggcttcttaaagtgcttgctgggatcgatacaaattttactgttacatcaaaggcatcagatgaggatggtgacttgccgagctttacgtgtttaaatggacatcacttctcatccctcctacaacggtgcttattgtgaatttggtagggattgttgccggggtgtccatgccataaana

SEQ ID NO: 44384 - DNA, 270 bp, Glycine max
  Clone ID: 701128444H1
ctgagaaaggatctctatctacgaaggagcggaataaaacccttctctctgtgattaagagaatggctcagatcggaaacttcacacttttgaggaggtggcaaagcacaaccagaccaaggattgctggctcatcatttctggcaaggtgtatgatgtcacccctttcatggaggatcatcccggaggtgatgaggttttgttatctgcaacagggaaagatgcaaccaatgactttgaagatgtggggcacagtgattctgctagaga

SEQ ID NO: 44385 - DNA, 271 bp, Glycine max
  Clone ID: 701128445H1
gtggttgcggaagctcctgcaagtgcggcaacggctgcggaggctgcaagatgtacccagacttgagctacactgagtcaaccaccaccgagaccttggtcatgggagtggcacctgttaaggctcaatttgagggtgctgaaatgggtgtgcccgctgagaacgatggctgcaaatgtggaccaaactgctcctgctacccctgcacttgcaagtgaggtgttgggagagcaagcttcaagcagagatagcccttaattaggaataatga

SEQ ID NO: 44386 - DNA, 273 bp, Glycine max
  unsure (1)..(273): unsure at all n locations; Clone ID: 701128448H1
gctgatatcctcgttctctctgccagagatggcattgtttcgctaggaggtccccatatccctcttaagactggaagaagggatggtagaaggagcagagctgatgtggttgagcagttcctcccagaccacaatgagtcnatttctgcagttcttgacaagtttggtgccatgggaattgacacccctggcgtcgttgcactgcttggngcacacagtgttggtcgaacccatgtgnaaantgggacnccttttncccnnnnnanncnaccc

SEQ ID NO: 44387 - DNA, 67 bp, Glycine max
  unsure (1)..(67): unsure at all n locations; Clone ID: 701128450H1
cccgcngctcgatgggaattgcgcntcaaggngtctcgtanggctaatccgcntcacatatgnnacc

SEQ ID NO: 44388 - DNA, 53 bp, Glycine max
  unsure (1)..(53): unsure at all n locations; Clone ID: 701128451H1
ttttgtctctgtcactttcccaccatccatcatcantttngacccctcagtcc

SEQ ID NO: 44389 - DNA, 263 bp, Glycine max
  unsure (1)..(263): unsure at all n locations; Clone ID: 701128453H1
aagaaagaagaaaatggcaaactttccagttgttgacatgggnnaaacttaacaccgaagagagagcagcagccatggagattataaaagatgcctgtgagaactggggtttcttgagttggtgaaccatgggatatccattgagttgatggacactgtggagaggctcacaaaagagcactacaagaagacgcaggagcaaaggttcaaagaaatggtggccagcaaagggctgagtcagttcaatcagaaatcatgactgg

SEQ ID NO: 44390 - DNA, 147 bp, Glycine max
  unsure (1)..(147): unsure at all n locations; Clone ID: 701128454H1
ctcggnccgcgtntnnncnnttcngcatgcgnttgagctgccnntggatgcngcgttctaccgaagagggngnancactgagtgncccattcgcatctccctgccaatggatcaattcgntaactcccaatccaacgcaaccctctt

SEQ ID NO: 44391 - DNA, 269 bp, Glycine max
  unsure (1)..(269): unsure at all n locations; Clone ID: 701128456H1
gagctatggcgcaagaagcagtctgatgttatgagattcttgcagcgggtgaggtgctgggagtaccgccagcaaccttctattgtccgtttgacaaggtctactcgcccagacaaggctcgccgcttgggtttcaaggctaagcagggttatgtgatttncccgtgttccgtgtaccaaggggaacncngaagnaccccattnccaaagggtntttatngggaancccccaaannggggtnnnccncngcgaaatttcccgncnncag

SEQ ID NO: 44392 - DNA, 264 bp, Glycine max
  unsure (1)..(264): unsure at all n locations; Clone ID: 701128458H1
ctcataggcagttcgacgcggcggttgcagaagaagattgcaagatgaagttcaacatcgcgagtcccaccactggangccaanagaagctcgagatcgacgacgatcagaaactacgagcattttgggacaanncngatctcacaggaggtcagcggagatgcacttggtgaggaatttaagggctatgtcttcaaaattactggaggttgtgacaaacaaggatcccgcagnaaacagggangcnnanccggcctgnncaat

SEQ ID NO: 44393 - DNA, 263 bp, Glycine max
  Clone ID: 701128459H1
gttcttctgcagaaaaaggggttgactctaaatcctattacaagcttatattacatagctccatggcagtttgtgttctctttgtgcctggtacctactggagaagcctgtaatggaagtttcgcagattcagtttaatttttggatctcttgtccaacgctatatgtgctctagccttaaatttctccattttcttagtcatggtagaaccggtgctgtaaccatccgggtcgccggtgtgcttaaagactggatattgata

SEQ ID NO: 44394 - DNA, 267 bp, Glycine max
  unsure (1)..(267): unsure at all n locations; Clone ID: 701128460H1
gctttgtgctttggtcttaggatcaggggaaaaccgcatatagaaaagatactcactcgctacgacactgccaaggtccaaacagaggtttcttctactctcaatccatacactattctttcttctctccctaactgcaaaagataaatggagtggcctgcgtctacggacgaatacgaaaagctcataatacggatgagcactcccagggttgtcattgataattccgtttgctcctcagctacgctatcaaggttganagcgcna

SEQ ID NO: 44395 - DNA, 266 bp, Glycine max
  unsure (1)..(266): unsure at all n locations; Clone ID: 701128462H1
atgtgaatcgtaaacaagancataatantcctaagcctgatcagctatctctggacgtggagaatttgaatttaaaagaggtttccaatgaaggaaaagttnacagttaccgggcacagacatttnccttntgctgagcttgcagctgcaacagggaatttcaggtcagattgcnttctgggtgaaagnngcntggcaggttataangggcgatngaagnaanaaccnggnttnaannannaagcnanannccccnccgggntnna

SEQ ID NO: 44396 - DNA, 81 bp, Glycine max
  Clone ID: 701128463H1
gattttcttatctcttgtctttgaaactagaagctccgtgattgattcaatggcgacaaaagaaggcaaagccataggcat

SEQ ID NO: 44397 - DNA, 231 bp, Glycine max
  unsure (1)..(231): unsure at all n locations; Clone ID: 701128465H1
tcaatgattcgaagccttgntnctnnaacttgggctgcacgattccgacacaactacnactnanagcgtntnnnnnnnnnnnnnnnnnnnnnnnnnnnnnccactcnncatcatgccactccctctncttcttcctctgagcccgttcacatcanccaaaactgcgttcgaagaatganggaantggannagggtgaatcatcaacagatggaaaaatgcttcgttgagtg

SEQ ID NO: 44398 - DNA, 260 bp, Glycine max
  unsure (1)..(260): unsure at all n locations; Clone ID: 701128467H1
ctcttatttgcttcttcgagtttcacagccaagtcgtaanagggtntcaagggatggaaaacatgcagagcttctggcaattgggtgatgaactccgtgggcactcaaaagcatcggaggatcacaagtggttaatggttgcctcgaaactggccgaacagacaagattgaagggggagcgtgtgaacaaccttgatctttcaaagggacccattgaaaaaggtcaagggtaatttgggttcaggangananaaatttnt

SEQ ID NO: 44399 - DNA, 118 bp, Glycine max
  unsure (1)..(118): unsure at all n locations; Clone ID: 701128469H1
tgtggatnntnntgttcntgactcatcttggagtccttctcacattgtgatggttctggcagnttnnggttagacaaccngatggtgctacatcttccgaggggaccggccacacaac

SEQ ID NO: 44400 - DNA, 264 bp, Glycine max
  unsure (1)..(264): unsure at all n locations; Clone ID: 701128470H1
cgaagggnctatagccgcgcaaagtaccgccntgaacacattgntcgcacgcataagggnnnccgatgaccgcagctnccacgngngtgtaccaanagngnagangagcaaaaacnaaaggnactaaagatccagcaaagacttaattganatnggnggtgatgctctnggnggcaacancaccacacnaggacccttggtgctacccttttctgagcagcttctcgnnttagcaccctgtgnggaggcactatntggcancaa

SEQ ID NO: 44401 - DNA, 250 bp, Glycine max
  unsure (1)..(250): unsure at all n locations; Clone ID: 701128471H1
atccttatcctgtttctttcaatggaagtcatttctgcttctagcttgaatcccaacgctccgatgttcgtgccattcgnctatcggacggtggaagattctccgaccagtggtggggactcgntcatcctccccctggttccgcgactactggntccgngagtgcttccaagatccccagttccaaaacgngaggtttcgantngatttgacnagatcccaagatgaacaggagggaaagnaggaaggg

SEQ ID NO: 44402 - DNA, 188 bp, Glycine max
  unsure (1)..(188): unsure at all n locations; Clone ID: 701128473H1
anaaacctcgaagatttagggtttcgcanccgctacttcgcgttcgttcatctctctctcacggctcgtaatcttcggttgctttggttttcgttccctcttttctttcctgaacccgagtccattccgtttngatnctccngngtggaantgcgagctaatttggggcnangcnctttgnggggaaa

SEQ ID NO: 44403 - DNA, 262 bp, Glycine max
  unsure (1)..(262): unsure at all n locations; Clone ID: 701128474H1
ggcccttgngcttcagtctcgagcccatnntcgtgaaataatgactgaggttcttaaagctttgcaagaattaantgtttgtnggaagaagattggtcactacaacatgaagtgnaggtgggttgctggcattcntggtcaccacgaaggaatggnnnaacncaatgtgcanngtaatcnttactttggagatgattccancantattgagaagatgctgtttcnacttcaaatgtggtcaagtttgaagngnagctttaca

SEQ ID NO: 44404 - DNA, 265 bp, Glycine max
  unsure (1)..(265): unsure at all n locations; Clone ID: 701128475H1
cagaacatgnacgttaacaatgggttctcgctacgaggtngaactgaagctctcatcggcacgcgctctcaagaacgtgaactggcgccatngcccgaaccgcccatacgtcgtcgtttgggtcgacccaagcaacaagctctcnacgcgcgtggacgaaagcggcgacactgacgcgaattgggaccaaacgctcacaattccgttgccaccaaancncctcgaggatcaaacgttgtacatcgacgtggtccacgccggctcg

SEQ ID NO: 44405 - DNA, 263 bp, Glycine max
  unsure (1)..(263): unsure at all n locations; Clone ID: 701128476H1
anagcctccaaatccaatggnntcagagaagnaactttcgaacccaatgagggagataaaagtgcagaagctcgtcctcaatatctctgttggcgagagtggagatcgtctcaccagagccgccaaggtgttggaacnncttagtggccaaaccccagtgttttccaaagcacggtacactgttcgttccttgggattagaagaaatgagaagattgcatgctatgtccacggtcanaggtgaccanggnaatgcaattttgg

SEQ ID NO: 44406 - DNA, 269 bp, Glycine max
  unsure (1)..(269): unsure at all n locations; Clone ID: 701128478H1
ganaataataacaaaagtaaatataatttattcaaaccaagaggaacaggcaaatgagcaaagtaattttcatccccaaaacctaccaccacaagtccactcctcaagtcttctcataattcacaatgcttatgcctccttcaaattatttagtctttatttcagatccaccgtatgcctagcttctgcaattcgtttgttctttttgttttttttttccccacttaatgtgtacaattaattcttcatgttaatttgtcctatctcac

SEQ ID NO: 44407 - DNA, 269 bp, Glycine max
  unsure (1)..(269): unsure at all n locations; Clone ID: 701128479H1
attatataaccaggcagtttgncagcagagatcacggagaaggtaaggaaaatggcagctgataggcagatcactttcaagatgtataaacggagaggagagagggacctgaaagaaaaggcaaaggaaaaaaaggatgggaggaagacgagggcgagacaacgccaatggggtggaggccgtcagaaattataattttcatcagtgaagctgacttaaatatgtagtaatctcagaggagtctgatttctggcaagaattggtcaagc

SEQ ID NO: 44408 - DNA, 268 bp, Glycine max
  unsure (1)..(268): unsure at all n locations; Clone ID: 701128480H1
agatgacnctaaagatggcnnggatggttcagaagaacaagctgtgattggattatggagtggcattgctggttggttggaatgactgtattcattgctgtgttgtcagaatatgtggtggatacaattgaggacgcatcagattcatggngtttgtctgtgagcttcctaagcataatcttgctgccgatagttggcaatgcagctgaacatgcaggagcaatcatatttgcctcaagaacaagctggacatctcattgggtgttgc

SEQ ID NO: 44409 - DNA, 265 bp, Glycine max
  unsure (1)..(265): unsure at all n locations; Clone ID: 701128481H1
gctccacaggnctacgctttaccaaattgaagccttgctgaagctcttaagatatcaagaggcctataccatctacaataaaatgccaaaattttcaattgattggtgtaccaagatatttggcccagcttgtagcgcttncctattgatgataggctcaatgatttacttggcatctggcaggtttgaggaagctgtgacagcagctcagcaagcagttaaagttgatccaggcaatagagagcgnaatgcaatggtaaagaag

SEQ ID NO: 44410 - DNA, 266 bp, Glycine max
  unsure (1)..(266): unsure at all n locations; Clone ID: 701128482H1
ggacatcgnaacgtatnaaacngcctgattaatctanngtnnncaancancancagntttagatctcccaacagagagttnctcaaaattgccaagtaccctttttcaggatcaaggaagagaatcaagaaccaccaaaaggtgttgttctttgttgtagttgtttgtaactgtagcaacatgaagatggttagaaagttggttgtggtgaggctgtgttggccatatctgtgttgagctctctccttctgacaacctcggcacag

SEQ ID NO: 44411 - DNA, 200 bp, Glycine max
  unsure (1)..(200): unsure at all n locations; Clone ID: 701128483H1
gntcccactaatggtacggcaccaacgggagcgagcaaaccacagtnagcatctccggtatcatncaccacttcaaagacagggaacgactatnantnttccnccttaanacaaggaanctttgcaanacaacngcnnnaccnngacttaacnatccccggcaaagnccncagnccncaagcaaattnacncaagantac

SEQ ID NO: 44412 - DNA, 261 bp, Glycine max
  unsure (1)..(261): unsure at all n locations; Clone ID: 701128485H1
atccgcggcaggacggtaancctccaacaacaanacttccngangcgaaaaatgtctctggtggcgaacgaggatttccagcacattttgcgtgtgctgnacaccaacgtggatgggaagcagaagataatgttcgcaatgacctccatcaagggtattggaaggagattcgccaacatcgcttgcaagaaggctgatgttgacatgaacaaaagggctggtgagttgactgntgctgagttggatagtgtgatgactgtg

SEQ ID NO: 44413 - DNA, 261 bp, Glycine max
  unsure (1)..(261): unsure at all n locations; Clone ID: 701128488H1
gtgtgtgtatgtgtgtatactctctcaagtacgcacatacatacacatccattcgtacataaatacttatatctcttgcttcctcgccgttaattctctgaatccctagctcttctgttctccgatctgatcatggcctcgcttgtcaacnacgctaacggcgccgtcaatggttttcctggaatatcccagaagctcattatcgataccgaccctgggatcnatgatagcatggccattctatggcttttcaaagtccag

SEQ ID NO: 44414 - DNA, 53 bp, Glycine max
  unsure (1)..(53): unsure at all n locations; Clone ID: 701128489H1
ttctatttctcagcaccagtccagcaacnacaacacccctttcctttccacac

SEQ ID NO: 44415 - DNA, 265 bp, Glycine max
  unsure (1)..(265): unsure at all n locations; Clone ID: 701128492H1
ttttgaaanccttttttctcttctcaaaccnaaccaagcaagcaattatattacactantcactcactgngaccatggctcctaatatcaccaccgtcaccgacnctcaagccaaggccgccggngggcgtggccgtgcctacgtcaccttcctcgccggaaacggtgncctatgtgaaaggtgtcgttggcttggccaaaggtctgaggaaggtgaaaagcatgtaccctctggtggttgcagtgttacccgatgttccagaac

SEQ ID NO: 44416 - DNA, 266 bp, Glycine max
  unsure (1)..(266): unsure at all n locations; Clone ID: 701128493H1
ggctgcgatgaaacccaccaagccagggttggaggagtcccaggaacagatccataagataaggatcaccctttcttccaagcacgtcaaaaacntcgagaaggtttgtgcggacttggttcgtggtgcaaaggacaagcgcctgcagggttaagggacctgttaggatgcccactaaggttcttcacatcactaccaggaagtccccctgtggtgaaggtaccaacacatgggatagatttgaattcgtgtccacnagagagtga

SEQ ID NO: 44417 - DNA, 280 bp, Glycine max
  unsure (1)..(280): unsure at all n locations; Clone ID: 701128502H1
ttcctcatggagctaagctacatgcactaattgatgcctgccatagtggcactgttctagatttgccatttctttgcagaatgancaggagtgggcaatatgtatgggaggaccatcgccctagatctggtgtatggaagggatctagtggtggagacattatctgcttcagtggatgcgatgatcatcaaacttcagctgatacatctgctctatcgaagattacatcgactggggcaatgacatttgcttcatccaagccatagagggtggtcatggg

SEQ ID NO: 44418 - DNA, 177 bp, Glycine max
  unsure (1)..(177): unsure at all n locations; Clone ID: 701128504H1
ctgaaagggaatggaaggagatattaagcttttggatggagatgacactcacaaaaagaaagaaagttctctggtgaagataaaagtattgtttttcgccagagcccgtgatctcactggcctgagtgagttgccactggaggtgtcatcnggaagtactnctcatgattgtttgaa

SEQ ID NO: 44419 - DNA, 60 bp, Glycine max
  unsure (1)..(60): unsure at all n locations; Clone ID: 701128505H1
tgataggcgcgtatctgcagggnnaacanattgtttatcgaatntaatgnggcntcaacc

SEQ ID NO: 44420 - DNA, 281 bp, Glycine max
  Clone ID: 701128506H1
ctttaggctccatctaaaaaaaatggctggtttggctagcaatcttcctctaattgttatgataggtctgcaaattcattatgcagcacttgccatattcacaagagccgctctcttagatgggttgagtacaacggtgtttgtagtatacaggcaaggcatagccactttggctttggcgcctatatttttctctcctaagaggagacaatcagtgaaagattctttgggattcaggagcttctttttgatgtttgtgaccgctcttgttggagtcacgg

SEQ ID NO: 44421 - DNA, 178 bp, Glycine max
  Clone ID: 701128507H1
gccatttcctgctcaagggcatgtcaatcctctgatgctcttgtcaaaaaaactagctgaacatggcttcaaagtcacttttgtcaacacagatttcaaccacaagagagtgttgagtgcaacaaatgaggagggatcagcagtgagattaatctcaatcccagatggtttaggcccc

SEQ ID NO: 44422 - DNA, 176 bp, Glycine max
  unsure (1)..(176): unsure at all n locations; Clone ID: 701128508H1
ttctcagtcgcttctcgaaccctacttcttccgcggtgattgcatttgaattcctgtaatggcgattgataatatttttaaacatgaagccagtgaagaaaaaggagagcgggccagaatggcttcttttgttggagccatggctattgctgacttggtgaagacaacctnggggc

SEQ ID NO: 44423 - DNA, 178 bp, Glycine max
  unsure (1)..(178): unsure at all n locations; Clone ID: 701128509H1
gtttgccaganacaagatgggaaggaaccattttcagcagcaacactgtgctgatgggagcatgtggatggagagtcagggtcagcaacagagctatgccttccaagaagagtcttggagcccntgttaaaatttggcccnaaccccnngnntttcccggggtnccnnnnaannnnnc

SEQ ID NO: 44424 - DNA, 280 bp, Glycine max
  unsure (1)..(280): unsure at all n locations; Clone ID: 701128511H1
gggactatgccaccttctaatctcacccgctacaatttgacatcatttgccatcacactgaatgagcttactccccgggctaaagccttttctgatcccgggtaatttgatcacggattaaaggagaagcttccacccacggattccaggctgagaccagaccagcgacatctagagattggggataccanaaggctaatntggnggaacccaaggttggnaaaggggccaanatttcagggaaatnccanaaaatggttngcnccccagggggttccca

SEQ ID NO: 44425 - DNA, 261 bp, Glycine max
  unsure (1)..(261): unsure at all n locations; Clone ID: 701128513H1
gtaacactggtccagcctgcaatgtggttggaatgattgatcgaatgatattgggtatacaacacctgtacaagagaccaatatatgcgcggatgcctgnntgcagtattaattctcccaactatggaccattacctcctgatgctctgcntggtgtcaggcccttttgaacctgagggcccccaagttcaggnnggcantnnnccccnnnaatgggggcccatnggccaatattgncctttanggccnaggggnatctat

SEQ ID NO: 44426 - DNA, 270 bp, Glycine max
  unsure (1)..(270): unsure at all n locations; Clone ID: 701128514H1
cttcctcagtagtgcgattttccgattctcttctctgcaactatgcctaaccctaaggtcttcttcgacatgaccatcggcggtcaacctgccggccgcatcgtgatggagctctacgccgacgtgactccgagcaccgccgagaatttccgncgctctgcacggcnaaaaaggccccgggcgaanggaaanccctccataaaaaggnngttcttncnacgggnnaccccaattttnttncggggggggnttttnccgggnaaaannccc

SEQ ID NO: 44427 - DNA, 173 bp, Glycine max
  unsure (1)..(173): unsure at all n locations; Clone ID: 701128516H1
ggagcagntcgactggggataacactgctgattgggatcacctaagagtttctatcccaatggttttgacccttggtcttactgggatgtcattctctggtgctgatattggtggattttttgggaatccgaacctgagttaattggttcggtggtatnagctaggagcttac

SEQ ID NO: 44428 - DNA, 280 bp, Glycine max
  unsure (1)..(280): unsure at all n locations; Clone ID: 701128518H1
gaccggtcggtgttgttgattgaattcacctgacgttcaacgcatctctgtcaannntctccagtttggagaatcattccgtttattcggtgaattataagatagagtggaagcaaaggcttctttcttccttttggtggcggtggcggtggcgatggcggaaggggaagagcttcggcctgacttgctgaaaaacacgccttctaacattgcgagattggaggacgtgatcgaacactctaaagcaaggcaaaagtatctcgcccatacttctagctcc

SEQ ID NO: 44429 - DNA, 173 bp, Glycine max
  unsure (1)..(173): unsure at all n locations; Clone ID: 701128519H1
aattatcttcttcctctttaagtcaaaccataactattccatttctttccacaccacannttcnttantctgggtgttnagtttcattttctccatttttttttctctcccttggatntntnattttcaatcnaaaanatnatnaaaaaaatatatnnagaatcngaaagagt

SEQ ID NO: 44430 - DNA, 277 bp, Glycine max
  unsure (1)..(277): unsure at all n locations; Clone ID: 701128520H1
gtagcactagcattggcttgcttgtgtttccaaccaaagtctagaccatcaatgcaacaagtgggctcaagaactctgtgcttcgaaactacccccacctctgcctttctataaaatttcaattgctcagttgatgactccagatatattattgtcttcattgagtatgaaccacggaancttgcgcgcaacaactcaggaaagtaatattttggttaaaatagttttaggnccangttaantnccanntttgngttnggggncccaaanaaaaaaa

SEQ ID NO: 44431 - DNA, 276 bp, Glycine max
  unsure (1)..(276): unsure at all n locations; Clone ID: 701128521H1
gctcaatgaagcaggagaagtggtttaaaacaaggctagactggttgtttaagaatacaatcaacaagtaattgactatgaataaacctttgcaccagtaacaatacttgaagccattagaatactcttngcttatgctgncnacaaacacatcaaactgtaccaaatggatgttaagaatgcctttctaaatggattctaaatgaagaggtgtatgtgaagcaaccactaggatttgaagtaaagaaagaccttgtcatgtgtacaagcttatcc

SEQ ID NO: 44432 - DNA, 270 bp, Glycine max
  unsure (1)..(270): unsure at all n locations; Clone ID: 701128522H1
cttttgggtattgtgggaagcccatttgtgtgcagggtccagattgccctanagttgaagggagttgaatacaaatttttggaagaaaatttgggcaacaagagtgatttgcttctcaaatacaaccctgttcacaagaaggttccagtgtttgttcacaatgagcagcccatagcagagtctcttgtgattgttgaatacattgatgagacatggaagaacnaccccatcttaccttctgatccttaccaaagagccttggctcgttnc

SEQ ID NO: 44433 - DNA, 174 bp, Glycine max
  unsure (1)..(174): unsure at all n locations; Clone ID: 701128523H1
gaccatctgggtgacatagacttcaagattgctggaactcgaaaaggagttacggctattcaattggatataaaaccagcagggattcctctggatatcgtatgtgaatgtttagaacctgcacacaaagctcgtcgccaaattcttgatcacatggaccaggaatccatnccc

SEQ ID NO: 44434 - DNA, 279 bp, Glycine max
  unsure (1)..(279): unsure at all n locations; Clone ID: 701128526H1
tagccatggccatctccagcaacgcttctcctnttgattccatcatcttcgatttggacgacaccttgtacccgtcaagcaccggtattgacaagtgcgtcaagaaaaacatccaactctttctcatccagaaatgcggattctcagaatccgaagctttcaccctccgagttgatctcttaaaaaacctagggaggcccctttncgggttaangacccnggggcatnttttccnccnggggggnacnccggttnnggncnngggggggcncctttncc

SEQ ID NO: 44435 - DNA, 204 bp, Glycine max
  unsure (1)..(204): unsure at all n locations; Clone ID: 701128527H1
gccaagagngtgcaattacatgagctgaaagaagtaacgcaaaagcccctttattttttatggttagaacttagaagctgattgtgacaatggatgctcgtggagaagggtcttctacttcctnanannanggtcntggggttnccccacattncnanggggggnannnanncngnttaaggnngncaaacagggcccccnnaa

SEQ ID NO: 44436 - DNA, 116 bp, Glycine max
  unsure (1)..(116): unsure at all n locations; Clone ID: 701128528H1
gngggcaaccaagtgtattggtaangacgattgaaacgaggccagattattgtcttgggnctcacttgcgccaaatgctttcttatggttgtacacgattggagattggagtccaa

SEQ ID NO: 44437 - DNA, 269 bp, Glycine max
  unsure (1)..(269): unsure at all n locations; Clone ID: 701128529H1
gcaccaccacccaccaccctgncttagaccaggtcctctctctctctagagagaaagagaaaaaagaaaanaaaaaacaactaacattaagcttttaatagtaagacatggctcaacccagttccaacggggatctgaataanacccagccagcagggtcaggttcagcaanaacagcagnggggcaattggcnggggggccncncnntngtttcccggncnnnggnggcttgnatncccggcccccccngggcnttttggnnnaaatt

SEQ ID NO: 44438 - DNA, 175 bp, Glycine max
  unsure (1)..(175): unsure at all n locations; Clone ID: 701128530H1
ggcgttatcgtggagttcaacttcgagggtttccttcacaactctgtaatttctaattccacagttactcttgtgnttnagcgagattcngagtggagtgatggctgggaaggaagagnatcgaanatttgtgggngggttactcttgggaaattnanggggnccccccccccac

SEQ ID NO: 44439 - DNA, 270 bp, Glycine max
  unsure (1)..(270): unsure at all n locations; Clone ID: 701128531H1
atgataccaggggaaagacnttacttgcaaagctgccgtggcatatggtcctggagagccctttgtggtggaacgtgttcttgttcatcctcctcagaaaatggaggttcgaatcaagatcctcttcacttcaatctgccacaccgatctcagtgcttggcaaggcgagaatgaggctcaacgtggcatatcctcggattttcggccatgaagcttccgggattgtggaanttgnggaaangtnnnantncnanaaagggggntntttnt

SEQ ID NO: 44440 - DNA, 259 bp, Glycine max
  unsure (1)..(259): unsure at all n locations; Clone ID: 701128532H1
gngggcccacctcgcagagctcgannaagcgcgtcacgctgcagccagttgcgccagangcaccgcgcctcccagcccatcaccatngtcancgcctacgactaccccgccgcggtgcacctcgataccgccggcgtcgacatctgtctcgtcggcgactctgcggcgatggtggtccacggccatgacaccactctccccatcacgctcgaggagatgctcgtccactgccgcgccgtggcgcgtgggagccaagacg

SEQ ID NO: 44441 - DNA, 282 bp, Glycine max
  Clone ID: 701128533H1
caaaggcagtcaaagacatgggttcctctatccataaatgatggaactacttctcataccatgggaagtaaatattctaatggcacaacactgagtgctgcttcaaactttgagtaccgtgtcccttttgtggcggttcaggaggctacaaataatttcgatgagagttgggttattgggataggtggtttcggaaaagtgtacaagggagagttgagtgatggcacaaaagtggcagttaagagggggaatccacggtcccagcaggtcttgcagaattcc

SEQ ID NO: 44442 - DNA, 278 bp, Glycine max
  unsure (1)..(278): unsure at all n locations; Clone ID: 701128534H1
gttctcagatagggcacgtctctcgcggcctcttctctcccctcgcgccgcctacacaaaaaggttattgctctattattgtttgacgatggctgatgctcatgggactgataagaacattgaggtgtggaaaatcaagaaattgatcaaagctcttgaggctgccagaggaaatgggacaagtntgatttcccttatcatgcctcccacgtgatcaaatatctcgtgtcaccaagatgnnttggtgatgagtttggactgcntcnaacnttcaaagc

SEQ ID NO: 44443 - DNA, 107 bp, Glycine max
  Clone ID: 701128535H1
gtagcaagcatgaaggaggaggaggagaggaagaatcgaaagacgaaggcgggttgatgatcaagccgcagagcttcactcccccaatcgacacctcccaatggccc

SEQ ID NO: 44444 - DNA, 253 bp, Glycine max
  unsure (1)..(253): unsure at all n locations; Clone ID: 701128536H1
attacataccgatgacaccttaanntgctttgttatatgannacctatctgatgacttgnngctaagcttcattaatctgatcggtggaagtgtttgatcatgtccaattgcttttnnaattatntgatttncgantanngnttttccgtaactttattttaacccccccccaagggatgttagagctagggacatgaatcgcaagttcacngggcgtaccagtccaatgcatcngaaattctacgcncttna

SEQ ID NO: 44445 - DNA, 276 bp, Glycine max
  unsure (1)..(276): unsure at all n locations; Clone ID: 701128537H1
gcttgtctcaaagattaagccatgcatgtgtaagtatgaactaattcagactgtgaaactggcgaatggctcattaaatcagttatagtttgtttgatggtatcttctactcggataaccgtagtaatnctagngctantacgtgcaacaaaccccgacttctggaagggatgcatttattagataaaaggtcaacacaggctctgcctgttgctttgatgattcatgataactcgtcggatcgcacggcctttgtgccggcggacgcatcatcaa

SEQ ID NO: 44446 - DNA, 257 bp, Glycine max
  unsure (1)..(257): unsure at all n locations; Clone ID: 701128538H1
cntcttttcttctggggggcaaagggggtcacttttcagatccgagattgagctcctttannccatcatcatcatggagctcctcgggtacctgaatcagggtcacccttctagaggaacaacacttgttattactctttcattggtgctttcgacacttgtgtccttcncccactttcacacatgatagaggnnaaanctgcgtntgcggaactgaatcctataaaacctaggcatcacgtcttctcaggagtgcc

SEQ ID NO: 44447 - DNA, 273 bp, Glycine max
  unsure (1)..(273): unsure at all n locations; Clone ID: 701128539H1
cttcccggaatcgtgcatacctacgttcaatatgtcgctggtggcaaacgaggatttccagcacatacttcgtgttttgaacacgaacgtagatgggaagcagaagataatgttcgctcttacctcaatcaaaggtattgggaggcgattttctaacatttgctgcaagaaggctgatgttgactgaccaaaanaccggnaaacnnggtnccnnnntnnnaannnnnnnccctngggnnncnccccccccgngnnnaaaaaanntcnggtttt

SEQ ID NO: 44448 - DNA, 169 bp, Glycine max
  unsure (1)..(169): unsure at all n locations; Clone ID: 701128541H1
ctaaaccccgttttcggtgagatcgagatcgatcgaacntggatgaggagtacgatgtgatcgtgttgggcacgggtctcaaggagtgcattctcagcggtcttctctccgtcgatggcntcagggtntgcnnaangnaaggacnnntttnggggggaannncnctttc

SEQ ID NO: 44449 - DNA, 263 bp, Glycine max
  unsure (1)..(263): unsure at all n locations; Clone ID: 701128544H1
cggcattaaaaatgcagatcttcgtgaaanccctaacggggaagaccataaccctcgnggtcgaaagcagcgacaccattgacaatgtcaaggctaagattcaagacaaggaaggcatccctccggatcagcagggttngttttcngcggaaancaatttgaaatggganggacttggccggttacaacntcnggaagggattcaaccttcaccttgtctcaggctcgngggggntangggccttccccaaggtttggncnca

SEQ ID NO: 44450 - DNA, 274 bp, Glycine max
  unsure (1)..(274): unsure at all n locations; Clone ID: 701128545H1
gctaggtggtggtgattagtgtacatatatatatggttgaagtgggtatttatcagatccctacgagcactttcgacccatttgcggaggcaaaagaaacagatgctcccggggcaaaagagtatgtgcatatccgcatacaacagaggaatgggaagaagagtctgacccacagtgcaagggtgaagaaaaganttcanctacgagangttccnnaanggcccccaagaanggnttcctgcgcanangccaagtttgncanaanaagggcttt

SEQ ID NO: 44451 - DNA, 166 bp, Glycine max
  unsure (1)..(166): unsure at all n locations; Clone ID: 701128546H1
aatctccaaccttcttctccnntgttccgtttctctctccaacgggaagaactttttttttgtgtgtgtttttggtggtgagtttgtaagaagcaatggcacgcaagaagatcagngantatgncncnangannttttagggccctttaaaancccccccgggccc

SEQ ID NO: 44452 - DNA, 133 bp, Glycine max
  unsure (1)..(133): unsure at all n locations; Clone ID: 701128547H1
gcagcccccgaaggagcacnagaggtacaacttgaagaagctgacttatgaggagaggaaggctaagttgattgcacgtgtggcgtctctcaactctgctgctgataacgttgaagttgtgngnaatnctccc

SEQ ID NO: 44453 - DNA, 277 bp, Glycine max
  unsure (1)..(277): unsure at all n locations; Clone ID: 701128549H1
ggagtgcaaaagtcttggtcaaaggcgaaccaaacatatcttatatctnnctcctatagtacctagnacagatataagatntgttctaggtactatagagcacctgagcttatatttggtgcaactgagtacaccacggccattgatatctggtcagccggttgtgtacttggtnnactattgncttggccagcctctattccctactgagagtggagtagatcagcttgttgaaattatcaaggttttaggaaccccgacaagggaagaaatcaag

SEQ ID NO: 44454 - DNA, 279 bp, Glycine max
  unsure (1)..(279): unsure at all n locations; Clone ID: 701128550H1
atggcggntagggtttcgacgtgcttcttcttcgtgtttgcnctttctctccttcttccttttcagantctccgctgaggaatcatcggagaaagagttcgtactcacattggatnactctaactttcgggacactgtcagcaagcacgatttcatcgtcgtcgagttcncacgctccatggtgtggcccactgtaagaagnnttgctcccgagtatganaaagctggcttctatcngagtagtcatgatcctccggttgttttggctaaaatagnaaa

SEQ ID NO: 44455 - DNA, 264 bp, Glycine max
  unsure (1)..(264): unsure at all n locations; Clone ID: 701128551H1
gnaaattgagatacaccacttacaactatcatcatgactttttcatcacttcaccttctgcctcttacctattccgatcatgcaccccaaaagcctcgtagtgtgttacccatctttggtttcatcaacatgacaatcagcagcgtggncanaatntacnggggngnaaanaaaagggaccncccacggaaggtngggggttttgccnatttggntcctcnggntggatanggcttcgctgcancatnccgacaaatntcnacc

SEQ ID NO: 44456 - DNA, 254 bp, Glycine max
  unsure (1)..(254): unsure at all n locations; Clone ID: 701128553H1
gattaagncatgcaagtntaagtatgaactaattcagactgtgaaactgcgaatggctcattnaatcagttatagtttgtttgatggtatctactactcggataaccgtagtaattctagagctaatacgtgcaacaaacccngacntcnggnaggggtgcntttattagataaaaggtcnacacnggcttctgcctgttgctttgatgattcatgataactcgtcggntcgcacggcctttgtgccggcgacg

SEQ ID NO: 44457 - DNA, 135 bp, Glycine max
  unsure (1)..(135): unsure at all n locations; Clone ID: 701128555H1
ttgttgtngccttgaatntganggatctctgccttggtggaactctggggntgagctnatgaaaatgtccaanntanaatctattatgtngcggaataacncncttnctgggatcatccctgnaagganttgnag

SEQ ID NO: 44458 - DNA, 246 bp, Glycine max
  unsure (1)..(246): unsure at all n locations; Clone ID: 701128556H1
cacaaccctcttactcctcggatgttgacaatggtatagagaaggatgtagtccctatggagaagaaaganaataaatataagcgttctagtctgcaacagtagcatgggtgttgatggaagtatttgaattcaattcccggctgngnccccggggggcaaaaccgtttggncnaaatnccccnngnncaaaangnnnnnnantttttgggaaagggacccccncnttttnngggggggnnnnnnt

SEQ ID NO: 44459 - DNA, 260 bp, Glycine max
  unsure (1)..(260): unsure at all n locations; Clone ID: 701128557H1
gcaatcattgctgaagaatctaagcaatttgaagcttggagggactcgctggaaactgttcctactattaagaaattgagggcttatgctgaaagnntcaggcttgctgagcttgagaagtgcttaggtaagatggggntgtttncccaagaaaaccggggnncccnngggngnnnccncnananccgggnnaaantnaaacagtcgctnnagggcccnantgcaattttnaagggttnnaggggaaccnannggggggc

SEQ ID NO: 44460 - DNA, 271 bp, Glycine max
  unsure (1)..(271): unsure at all n locations; Clone ID: 701128558H1
gnagcaccatgatggttatgaagcactgccatctggtcccgagctggcataaaatattataagagtatggtttcgttttccttttcttttgtttttgggtcatgaacatttttgtttacgtattttgatttttaggacactaaccttacgaaaaacaactagatagatgaacattgacaagaatgcctaaccaagctacttttttnacattaggggcattanccngggttgctctgcnggattccccctaacaagggtagggggcctttaa

SEQ ID NO: 44461 - DNA, 262 bp, Glycine max
  unsure (1)..(262): unsure at all n locations; Clone ID: 701128561H1
attcggtgggatctaggtaagcagcaaccagcgcaatctgggacttttcttagctttctccccacacccagattccgncactcagctctgctctttcgtttggatctcaaaacatgttcttcttcgattggttctatggnattcaacttccctcggtctctggcagaaaagaagccaaaattccntncccgggnncggaaaaatncggggaannccacccncttnaaaagnccaaaagcggggnnttnttncncccccnncc

SEQ ID NO: 44462 - DNA, 181 bp, Glycine max
  unsure (1)..(181): unsure at all n locations; Clone ID: 701128562H1
gtgaggagaatatgaagttgtttgttttctttgttgctgcagtagttttggtagcatggccatgccatggcgcaggctaccaaaggttccctctccgaatgaaaactggctatggtgagcgttcttnggnggnaaagcnnnaantttngggtttnngggnannnnnnnncggcgccgnccg

SEQ ID NO: 44463 - DNA, 267 bp, Glycine max
  unsure (1)..(267): unsure at all n locations; Clone ID: 701128563H1
acggatgncatgattctggagccagggaatcttttaatggtagttttgcgtcacttgtaaatgatcttggttcctgttcttcaggggagaacaaacggtgcaaaaaaccttgtgatgagaaaatcatccacgaggacttaggagcgatggaaagaaccttctttcctgttgatactcgtaaaaaaaaagactcggggatggtactgaatgagcctcgtgcatacgtggaccaatttcaagttggaattccanntntagagcttggtt

SEQ ID NO: 44464 - DNA, 270 bp, Glycine max
  unsure (1)..(270): unsure at all n locations; Clone ID: 701128564H1
gcgcttaganaaaagaggggnaactgggtnaggaatattcannacttttgcacgagttcatgactgctgtcaannaaaactacggngaaaaagtncttgttcagtttgaagattttgcaaaccacaatgcttttgagttgcttgcaaaatatggcacaactcatcttgttttcaacgatgatattcaggggactgcatctgttgttcttgctggggttgtggcagccttgaagctcatggaggtactctggctgaccacacatcttgttt

SEQ ID NO: 44465 - DNA, 276 bp, Glycine max
  Clone ID: 701128565H1
tttgcgtttcatttggcgttttgtttctttctggaagcttcgttcgggcatcaatggcgtccttcgatgaagctcctcccggaaactccaagaacggcgagaagatcttcaaaaccaagtgcgctcagtgccacaccgtcgacaaaggtgccggccacaaacaaggacccaatctgaatggtttgtttggaagacaatctggtacaactcctggatattcctattctactgctaacaaaaacatggccgtgatttgggaggaaaagaccctctatg

SEQ ID NO: 44466 - DNA, 168 bp, Glycine max
  unsure (1)..(168): unsure at all n locations; Clone ID: 701128566H1
anaaaaacaaaaaatgggcgtttctcgttctcaaaagcctcatgttgtttgtgtgccattcccagcacaagggccacgtgaacccttttatgcaactaagcaaactccttctttgcaccggtttccacacaacatacgacnnnaanngntnnggngnnnannngnnng

SEQ ID NO: 44467 - DNA, 204 bp, Glycine max
  unsure (1)..(204): unsure at all n locations; Clone ID: 701128570H1
cttggngatctgtagggatggacgaagaatgaaattgaaaagtgaaaagtagagatggaagaagaaaaagtagcggcatactacgacgagctgagccgtaagggcgagggagccgcgaggttcaagcaaggtctcggcttttcctcttccacacaacatacgantttgnannngnnnncncctnnnnccnntccannnncgnca

SEQ ID NO: 44468 - DNA, 268 bp, Glycine max
  unsure (1)..(268): unsure at all n locations; Clone ID: 701128572H1
tcaggaagccgtgcaggatagagaccacaaatttttaagaaaagctgttgaagaagcatataaaggggtagattgcaaagatggaggcccttttggtgctgttatagttcataatgatgaaatagttgctagttgtcacaacanggtcctgtgnancacaccccnanttncnccngngggnncnnnaaannggggttttaaannctcccncggannanctncgcttngaaaaaaaaactttttganncccccccccnnntnnggggga

SEQ ID NO: 44469 - DNA, 75 bp, Glycine max
  Clone ID: 701128573H1
tccctcttgatttgaaggttgttttgtgcttatagataaaagttctgccaaatcaagaggggttttcagatcata

SEQ ID NO: 44470 - DNA, 92 bp, Glycine max
  unsure (1)..(92): unsure at all n locations; Clone ID: 701128578H1
atcctccagggcctccaccanngancgtnantcacttcgtctacgtcgccaagctcgccgaacaagccgaangctatgtcngnaatggngga

SEQ ID NO: 44471 - DNA, 131 bp, Glycine max
  unsure (1)..(131): unsure at all n locations; Clone ID: 701128583H1
cttgaatcntcggtatccttctnttnttncnccttgaactcgaatantcactatggcagatgatgtngntctggctaggattctggccaagtccatttgggagagggncggatngccanngcaaaaaaggg

SEQ ID NO: 44472 - DNA, 88 bp, Glycine max
  unsure (1)..(88): unsure at all n locations; Clone ID: 701128585H1
ctcganccngcggaaaacgaaatttatggtggacgtngcgnagatntaccngtatnatttgaaananaattattcaggnctcgcaaga

SEQ ID NO: 44473 - DNA, 274 bp, Glycine max
  unsure (1)..(274): unsure at all n locations; Clone ID: 701128586H1
aggttactctgctgttaatcnggganactgccatcctancaattctgnaagcattgcaagaacaggcagaaaggnngactgtgagctctcgagccttctacaatgatcgcttccgcagactttgctgagtatgtgacaaacatgtttggttatgatatggtacttcctatgaataccggtgctgaaggtgtggaaacaggcncgaaagttaancacgaaantgggggttncgaaaaggnaaaggattcccaaaantggggcnnttatggcccca

SEQ ID NO: 44474 - DNA, 136 bp, Glycine max
  unsure (1)..(136): unsure at all n locations; Clone ID: 701128588H1
ctctgttncaccccctcagantcgncccanntcagtttcagaaacttgaacggtctcncgncaactcgccgaaanngcggcgtttcaaggtatggttgcnggaccagttcggagtcctcnangatggaaaacaacc

SEQ ID NO: 44475 - DNA, 241 bp, Glycine max
  unsure (1)..(241): unsure at all n locations; Clone ID: 701128589H1
ctgtaanccgagggtcaccccgacaancntgtgcgacnagatctctgatgcagtgctcgatgcgtgccttgaacaggaccctgacagcaaggttgcctgtgagacatgcaccaagaccaacatggtcatggtctttggagagatcacaaccagggcaangtanannntgagaagantgtccnggananangccgcgaaattggattcnaccccggannanttgggtnnnnncnnnaaaant

SEQ ID NO: 44476 - DNA, 130 bp, Glycine max
  unsure (1)..(130): unsure at all n locations; Clone ID: 701128592H1
agcgtatcnacaatcaagcagagattggttctgctcttangaagctttttgatgatggtntanctnaancgtgaggacttatgnnntcanctccaaactctggtgtcacagtncatgctgcagaagaagt

SEQ ID NO: 44477 - DNA, 113 bp, Glycine max
  unsure (1)..(113): unsure at all n locations; Clone ID: 701128593H1
gccgtcgcgatcnggagccggtcacngganaggntgttccgaatcctcnacgtgttnccagacgctgngtgaactatntccggnagntcnaggcnnttttttaagaaagctaa

SEQ ID NO: 44478 - DNA, 198 bp, Glycine max
  unsure (1)..(198): unsure at all n locations; Clone ID: 701128594H1
gggcaaggtcaagatcggaatcaacggatttggaagaattggccgtttggttgccagantcgctctgcaaagagacgatgtggagctcgttgccgttaacgaccctttcattaccacngattacnngncanncnttttaananagnanttttccgcgnnnccggcnacaccnatggncnacananngaggggggnaag

SEQ ID NO: 44479 - DNA, 265 bp, Glycine max
  unsure (1)..(265): unsure at all n locations; Clone ID: 701128596H1
ganggcngtggcggccaattntgcaagaanaaccctccaaatagcttcctctgccaccagaancctcttctntcgtcgatcttcgtgcgccactaagctcaatggantnnnnnnnnnnnnnnnnnnnnncaagaaacgcgccctctcgttttcccggcttccggtgcagttggttggtggacaagtgtctttgacgccgttgcatagtgttactgccctctggcctgttcacttctctgctttctctgcacaacactaacngggg

SEQ ID NO: 44480 - DNA, 271 bp, Glycine max
  Clone ID: 701128604H1
agatcatcttccttttattttttggttaaaagagatgatatggaatagcattagcttctgcaaatgaagaaaacaccagcccccagtttgcatcagtctaaccaaagacaaaagaatgttggattccaagatagaggtgcagccaatggcacacagagtcacagtgttcagaaccattctgctctgacatatttcaagtcttccttcaagaaattttttacattgtttctctctgggaagagaaaaacagattcagaagctgctgaaagtg

SEQ ID NO: 44481 - DNA, 251 bp, Glycine max
  unsure (1)..(251): unsure at all n locations; Clone ID: 701128605H1
ctcgcctttcttatgattctnatanttagggatcatgttnttgttgacagaggtggtaanccaatncagatttacaggagaaaactgataatattgttaatgcttttattggacaacttgttcctgtgtcatctgaaatcagggagatatcaaattttgaaactggctctcaatctagtcttcatgattcagatgttttagcgggacaatcatctgctcttaaggataagatgcctgtacacacagatgct

SEQ ID NO: 44482 - DNA, 269 bp, Glycine max
  Clone ID: 701128606H1
acccctcttatccacaaagccaaggatgggaatttcctggtattggcgaatttcagtgctatgacaaatatttgaaggcagatttcaaagcagctgtagcaagggctggccatcctgaatgggaactgccagatgacgcaggcaagtacaatgatgtcccagaatctactggattcttcaaatcaaatggcacgtatgtcactgagaaagggaagttcttcttgacctggtattctaacaaattgctgaatcatggtgatcaaatacta

SEQ ID NO: 44483 - DNA, 269 bp, Glycine max
  Clone ID: 701128607H1
ctccgcaccagtttcaccgcacgaatatcttgttgtttggagcgatccgagaaaaactctgtaaacatgttggtttaccaggacctccttacaggtgatgagcttctctctgactccttccgttacaaggaaattgagaatggaatgctgtgggaagttgaggggaagtgggttgttaaaggagcagttgatgtagacattggtgcaaacccttctgctgagggtggaggagaagatgagggagttgatgatgcagctgttaaggttgt

SEQ ID NO: 44484 - DNA, 272 bp, Glycine max
  Clone ID: 701128609H1
gggagctagagaatgatgatgaagtctgctatgtgtgcagtggtggttgtagcacttcttcttctggcggaggtggggcccatggctgaggctgtgacatgcaccccaacagagttgagtccgtgtcttccagcaatcacttccggtgctaaaccttccaatgcttgttgcacgaagctgaagcagcaaaaaccatgcttatgtggctacctcaaaaacgctagcttgaagcagtatgttaactctcctaatgcccgaaaaaccgttgcttc

SEQ ID NO: 44485 - DNA, 272 bp, Glycine max
  unsure (1)..(272): unsure at all n locations; Clone ID: 701128610H1
gcgaaagtnaagcgatgagcagtgataggaatattggggttgccttggacttttccaaaggaagcaaaatcgctctncaaatgggctattgacaatcttctccgcaacggtgacatactctacatcgtccacatcaagccttccgnaggaagtgaattccgaaatcttctctggtccaccactggttcacctctgattccgttgtcggagtttcgtgagaaggaggtgatgcatcactatgaggtggatactgatgctgaggtgttggactt

SEQ ID NO: 44486 - DNA, 272 bp, Glycine max
  unsure (1)..(272): unsure at all n locations; Clone ID: 701128611H1
gaaattcgatccaaaaactgnggagctgattgtaacaacttaccaggcttcggnattgcttcnatttaattcctcagatagactgagtnnnttcggagataatgtctcagttaaacttatctgatgacgatgttattagactgctccactccttgtcatgtgccangtacaagattcttaacaaggaaccgagnnacgaaaacaatatcttctaccgactattttgaatttaattcaaaatttacagacaaaatgaggagaatcaagattcc

SEQ ID NO: 44487 - DNA, 269 bp, Glycine max
  Clone ID: 701128612H1
tgtaagcttagacgcatctcctgttatgcatgaccataattggattggcgttgcgttttgtgcaatattcgtcgtacctcatgaaacactctcagcaatgagtttttcagaaacagaatatccattccatttgtttggtgatattcgagtggatttatatggagatttagatctagaacttgttttagacaaatcagatcacatgtggctattctttgtgaatcgacatgacatcattgcagatttccatctcaaggacaaatatcttg

SEQ ID NO: 44488 - DNA, 269 bp, Glycine max
  unsure (1)..(269): unsure at all n locations; Clone ID: 701128617H1
ctgtgttgtttgctacagttgcttttgctgctatattcaccgtgcctggtggggatgatgatgatggctctgcagtggtagcagcttatgctgcttttaaaatcttctttgtctttaatgctatcgcactttttacatctttggctgttgttgttgttcaaattactttggttagaggtgaaactaaagcagagaaaanggtggtagaggtgatcaacaagctcatgtggttggcttctgtctgtacttcggtggcgtttattgcttct

SEQ ID NO: 44489 - DNA, 272 bp, Glycine max
  unsure (1)..(272): unsure at all n locations; Clone ID: 701128618H1
cacccgcgcgcctctccttcccgcagcctccattaccggcgcatcctgcgtctccggtcgccattgaaaccctaataatctgctaaagcatcaaactcagtcgtcgttgctgtcgaactcgaaccagtgagactcgcacgagcgaacaccagtgctgcaaagaagtgagaagcaacacccactagagaaaaaaaggnaaaaccctaattgtaaaatggaggctgagacagagactatggtggnnaagagggngntaatcaacaatgtgntgt

SEQ ID NO: 44490 - DNA, 208 bp, Glycine max
  unsure (1)..(208): unsure at all n locations; Clone ID: 701128619H1
gagtattgagcatggaggcgccatctctcaccaaacccaacgaccnaacaaaaccttccaacacttccagcattaacagtctgncagggggggccgggcgaangagcccactccgaaaaatgtttgcggtggcgtncatcgccgcnggcatacagttcgggtgggctctgcagctgtctctcttaaccccctacgttcagctcttagg

SEQ ID NO: 44491 - DNA, 268 bp, Glycine max
  Clone ID: 701128620H1
ctgaaatccatgagaagtccaatatattgaaccctctggatggcaagcttgtcaagccaaatgctatgttcacgaaaattaccaagctgtctgcaaatgctttcattcggaagcttcttacttcgtcaactacaataatggcgctgcggttgcaatatgttcccggcgatccaaattcagtcctaagttggttggagcgctggtcagcatctcacttttggaaaccagttccccaacccaagaaaattcgagatactaagtctcagag

SEQ ID NO: 44492 - DNA, 267 bp, Glycine max
  unsure (1)..(267): unsure at all n locations; Clone ID: 701128622H1
agaatngcngccgccggagatctagcctcttcgacatcaccaccgatanggtgatggaatnttctactataatggaagaagaacaagttccgccaganacggtggcngcgcctctccccgccgcatatccgccgtcgcattacggggcttttgccggcgcgggttttccgatagctccggnggtgttgccggtgagtggcgagagactaaccaagccgatcaggccgacgccgattttgccagtncctccgtcttcgaagatggcta

SEQ ID NO: 44493 - DNA, 268 bp, Glycine max
  unsure (1)..(268): unsure at all n locations; Clone ID: 701128623H1
gcgntttnntatctgcaattcagaagcatggggcactnccaangtgtggaattctcacccnaagaactacggaccncggttgcncgcacttggtatgttactcatctncgccaaatggngnttcaggatgagttgatccttttccctctttgttccttctcaatttgattangcgattattatnaaggntnttgcttntaatttgaagcnagtaatggnatcccccatatgagtactntgaatctgtgntntttctgataacaagnnt

SEQ ID NO: 44494 - DNA, 268 bp, Glycine max
  unsure (1)..(268): unsure at all n locations; Clone ID: 701128624H1
gctccggctcttgccgctaagaagaagcctgagaaggtttcgaatccgttgttcgagaagcgtccaaagcagttcggaatcggaggggcgttgcctccgaagagagacttgactcggttcgtgaagtggccaaagaatgttcaanttcagaggaagaagaggattctgaagcagaggttgaaggttcctccagctttgaaccagttcaccaaaactcttgacaaaaacntagcaacaagtctgttcaagttacttctgaaatacaggc

SEQ ID NO: 44495 - DNA, 269 bp, Glycine max
  Clone ID: 701128625H1
gaaaagatggctcagcaggaagtggtagaagggttcaagttcgaacagaggcacgggaaagagcgcgtgagagtggcgcgcgtgtggaagacgaggcaggggcagcacttcgttgtggagtggcgcgtgggcatcactctcttctcagactgcgtcaactcgtatctccgcgatgacaactctgacatcgttgctactgataccatgaaaaacacagtgtatgcaaaagcaaaggaatgctcagacatactctctgctgaggactttgc

SEQ ID NO: 44496 - DNA, 258 bp, Glycine max
  unsure (1)..(258): unsure at all n locations; Clone ID: 701128626H1
catggtttgtgaaattctgcgttccctggtgcaagcattgtaagaacctgggtnctttgtgggatgatttggggaaggcaatggaaggagaagatgaaatagaggttggagaagtcgattgcggcatggacaaagcagtgtgttccaaagttgatattcattcatatcctacctttaaggttttctatgatggcgaggaagtagccagataccaaggtacaagagatgttgaatcaatgaaaacctttgttttggaag

SEQ ID NO: 44497 - DNA, 204 bp, Glycine max
  unsure (1)..(204): unsure at all n locations; Clone ID: 701128628H1
ancttctggcantccagcgctcacattctcggccagtcacttgagnccggagtatggatgcaagctatgcattgggccttgcactacangtggngnccattctantatgntgcgtntnacggggacttgggtctcaatgacgatcactntnagcagnatgnggctggancatgaaggctgttgcggagaaggcnaccntttnng

SEQ ID NO: 44498 - DNA, 270 bp, Glycine max
  unsure (1)..(270): unsure at all n locations; Clone ID: 701128629H1
aatcccctcatattatctctctctctcttaaaccatcatgtcctccaccgcgcctcccgtcctccccatctccaactcccaaaccaccgcgggaaccaccggtgcaggcggcggcgccatcgaggctccggccaacaacccggccttccgcgctttcatcaacancctctccaactccctccgccacggcctcgaccagcgccgcccctggtcggagctcgcggaccgctcagcgttctcgaaacccgagtccttctccgaagccaccct

SEQ ID NO: 44499 - DNA, 200 bp, Glycine max
  unsure (1)..(200): unsure at all n locations; Clone ID: 701128631H1
attttganagtcgagtgantgagtgctgcttcctctgaatcaaatcattcatcactctctctggttctgagtttctgactcnanaatggtgaatcctcgaattccacgttcaaggancccaagttncacaccttncagttgngctatctcnatcgccctcngaattgtcttngnncnnnnnnttctcntnanttcnnatt

SEQ ID NO: 44500 - DNA, 163 bp, Glycine max
  unsure (1)..(163): unsure at all n locations; Clone ID: 701128632H1
agagcatgcaattcttggctttnttgtctacatagtnaatattaaggctgggnttgcanaatnatggnngggtnntgcnactanatnatttcnttggttcagaagcgttacngtnatgtngctggggctgcaatcgagtgtagaaatcttntngtgttggtat

SEQ ID NO: 44501 - DNA, 267 bp, Glycine max
  unsure (1)..(267): unsure at all n locations; Clone ID: 701128633H1
catcatggcctcaagagcagtgttattgttggctatgtgtgtgcttccggcgatggttgtggccattcgnccagcaaagaaccctttttgcgtgaagggtcgtgtctactgtgacccttgccgtgctggttttgagacctcagctaccacctacattgctggtgctgagattatgttgcaatgcaagagcagggttagcaacgaggttgtgtacacgaagaaggggtacaccgactcaaccggagcatacacaatgtacgtggatgg

SEQ ID NO: 44502 - DNA, 267 bp, Glycine max
  unsure (1)..(267): unsure at all n locations; Clone ID: 701128634H1
caattttcaggctccgcttttgggacaagtaaagacagaagttgcacatttaatggccctgccaacctacgtgctggaactaataaaatagcacttcttagtgtagctgttggattaccaaatgttggattccattttgaaacatggaaggctgggatcactggagttttgcttaatggacttgatcatggacaaaaagatttgacttggcagaagtggtcataccagattggtctaagaggagaggctatgaatttggtggcnccc

SEQ ID NO: 44503 - DNA, 268 bp, Glycine max
  unsure (1)..(268): unsure at all n locations; Clone ID: 701128635H1
gggtgcaccagagacagagttttttaccgagtatggagaggcaagnccaatatcagatccaagaggttgttggaaaaggtaagttatggtgttgtgggttctgccattgatactcacacaggtgaaaaggttgcaatcaagaaaatcaatgatgtttttgagcatgtatctgatgccacgcggatccttagaganantaagctcttgcggttgcttaggcatcctgatatcgtggaaattaagcatattatgcttcctccttcacgga

SEQ ID NO: 44504 - DNA, 266 bp, Glycine max
  Clone ID: 701128636H1
gaaaaagaaaagttagggttagggattttgagagatggcatcgactaagaagatcaccctgaagagttcggacggtgaggccttcgaggtggaggaggcggtggcgctggagtcgcagacgattcaagcacatgatcgaggacgactgcgccgacagtggaatccctctccccaatgtcaccagcaagattctggcgaaggttatcgagtactgcaagaagcacgttgaggcgaacagtgctgatgagaagcccagtgaggatgtg

SEQ ID NO: 44505 - DNA, 263 bp, Glycine max
  Clone ID: 701128637H1
gttaaagatcagggtcactgtggttcttgttgggcatttggtgctgttgaatcattgtcagatcgcttttgcattcattttgatgtaaatatctctctctctgttaatgaccttcttgcatgctgtggctttctgtgtggatctggttgtgatgggggatatcccttgtatgcgtggcaatacttagcccaccacggtgttgtcactgaagagtgcgacccatattttgatcaaattggctgttctcatcctggttgtgagcc

SEQ ID NO: 44506 - DNA, 263 bp, Glycine max
  unsure (1)..(263): unsure at all n locations; Clone ID: 701128638H1
ctagtttatcgtgaggagaatatgaagttgtttgtnttctttgntgctgcagtagttatggtagcatggccatgccatggcgcaggctaccaaaggttccctctccgaatgaaaactggctatggtgagcgttcttcggaggtaaaatgcgcaagttttaggcttgctgtggaagcacacaacatccgagaactaaaaccattacctgaagagtgcgttgaaccaacaaaggactacattaatggcgaacaatttagatcaga

SEQ ID NO: 44507 - DNA, 265 bp, Glycine max
  unsure (1)..(265): unsure at all n locations; Clone ID: 701128639H1
ggcggcttgactcgagacatctgttggtatgtcaatggcaaagaaacccgtgaaatactatgtggtggacgcgtttactgagtcagcattcaaggggaaccctgcatctgtgtgtttcttagaggaagagagagatgaggagtggctgcaagcagtagccgctgaattcaatatctctgagacttgttacttatcacgcatcacccactcgctccatggaatctctaatccccgttttcgncctcagatggtttactcctgttgc

SEQ ID NO: 44508 - DNA, 266 bp, Glycine max
  unsure (1)..(266): unsure at all n locations; Clone ID: 701128640H1
atctggtggatgcggtcccaaacccatcaaaagagcaactagtagacgttgttcagaggcatttncatgtcgcagcaaatggacgagttgcaggtgattgtgggatttgtccaagctgcaaagaggcttaagactgtctgcanatgagatggaatgatgcgagaaaatgatatttgaaaagtaaaattgtctatgctaacaaagataatgtatgtaatatccacttcccttcgtattatgtaacatattttatcggtgatttttaa

SEQ ID NO: 44509 - DNA, 266 bp, Glycine max
  Clone ID: 701128641H1
gaaggcattctcctgggcattggtaaccctctcctcgacatctccgccgtcgtcgaccaagacttctttaaaaaatatgatatcacctcaaacaatgcgattcttgcggaggacaagcacacgcctatgtttgaagaattggttgagaaatataatgtggagtacattgctggaggtgccactcagaattcaatcaaggttgctcaatggatgctccaagttcctggtgcaacaagttacatgggtggcataggaaaggataagtt

SEQ ID NO: 44510 - DNA, 249 bp, Glycine max
  unsure (1)..(249): unsure at all n locations; Clone ID: 701128642H1
cttctttcttcttatatatcgaacatggctaagtatcattcaagtgggaaaacgctcttccatgactgctatagccntcctgtttatccttctaatcacttatacaggcacaacanntgnagcaatccggggtatgttatggaagacttggcaacaacttaccaacccctcaagaagttgtggccctctacaatcaagccaacattcgcagnnngcgaatctacggtccaagcccagaagtcctcgaag

SEQ ID NO: 44511 - DNA, 264 bp, Glycine max
  Clone ID: 701128644H1
tggggatctgagaggagaggtgcggcgatggcttttgcagttacgcccaagataataacggtgtcattcgataagcaaaaccaaaggaggagtttcgaaggattgtttgggaaaaggtatcgggtaagggtgaagcgaagtcaagatcattcagtgaagtgtggtattgagcgaacagtcagcgatggaaagaaagggggcggaggaggaggcgtgtcaaattcgaactacgtggtgccgctggacaacatggcgaactcatcc

SEQ ID NO: 44512 - DNA, 246 bp, Glycine max
  unsure (1)..(246): unsure at all n locations; Clone ID: 701128645H1
gttccgttccgttttcctctgttacttntttttctttcttaccaaatccccgcttcgtggacatcccgaaccagaaaccatgcttctccgaaccgctgctgcttctgcttcgtccctctccctcttcagcccgaacgccgaacctccccgttcggttcccgctcgtggattggtggttcgcgcagaacaggatccacgaaccaccgcgccctgaccggagtnatttttgaaccgttcgaagaggtg

SEQ ID NO: 44513 - DNA, 268 bp, Glycine max
  unsure (1)..(268): unsure at all n locations; Clone ID: 701128647H1
tggtggatatgggtagcctcaacggnacactgttgaattctacgccgatcaaccatccagacactggaagtagggantngggggatccaatgaatcttactaatggagatactcataacacttggancaacatgcaaaagtaatggttcatattacattcacaaactcagncatcacattccctttgganttggtatgggtnagatccgttggcttngntncgaganggananggtctcctngggagncgttctctatttaaangggc

SEQ ID NO: 44514 - DNA, 271 bp, Glycine max
  unsure (1)..(271): unsure at all n locations; Clone ID: 701128648H1
aaaaaatttgtccctgatttttatagtcaccaacaatttttgtcagacctaanccaagaaaacagnnagtcatttttcataagnnaatatactgtagnngaaacactacagtaatcattgatgtcaaaactcatgtctcaaatttctgagttcttggaggcttcaagctcttcatgatctatactcaaacaagaatcatcaggttaaagtctttcagttaactgcaacctcagctganaggaaatttgaatgaagtacgtcctggccagaa

SEQ ID NO: 44515 - DNA, 265 bp, Glycine max
  unsure (1)..(265): unsure at all n locations; Clone ID: 701128649H1
gttgtgaactgaacaacatatatattctaagctctttgaacttatccttcactgatcagattcagagaaatggaaaacatcaaagatccatcaatttaccgcaatccagtcatattgcagagcgaggacttaaccaagtatattctggaaactgctgtttaccctagagaacctgcgcctctaaaagagctgtnggaagccactaataatcacccttggggcttcattgctactttacctgaagcgggtcagctaatgaccttac

SEQ ID NO: 44516 - DNA, 265 bp, Glycine max
  unsure (1)..(265): unsure at all n locations; Clone ID: 701128650H1
attttggtagcatggcaatgccatgcgtnncgatatgttccctctccgaatgaacantggctatggtgtccgtactccggaggtgaaatgcgcaagttggaggcttgctgtggaagcacacaacatctttggctttgagaccattcctgaagagtgcgttgaagcaacaaaggaatacatccatggcgaacaatatngatcagactccanaacagttaaccaacaagcttacttntatgccagagacctcgaagtccatcccagg

SEQ ID NO: 44517 - DNA, 262 bp, Glycine max
  unsure (1)..(262): unsure at all n locations; Clone ID: 701128652H1
ctttgatgactacatcaacgactctagacagagcaggggatcctnttctagcccagcaaacttctgaatcagaagctatgaggctggtcaaagctactccttttgattatgggagtggtcatgttgatccaactgctgcattggaccctgggctcatctttgatgcagggtacgaggattatataggcttcttgtgcacaacacctagcattgatgttcatgagataaggaactacactcacaccccatgtaacacctccat

SEQ ID NO: 44518 - DNA, 254 bp, Glycine max
  unsure (1)..(254): unsure at all n locations; Clone ID: 701128653H1
tgttcacgtgccaaccaagaatctcgaagctcccaaaatccaacagctaaaaaattcacagctgtgtcatccatgaccatgattcaatcccatccaaatccctntctataatgccttcatcaagatccagtagtaggaacgaaacaacgattgagtaatcctcacttgatgatactactagtcctgagatgataacatcaaacttcgcaataacaacgaaacttccttataanntatctttctctctttctttc

SEQ ID NO: 44519 - DNA, 266 bp, Glycine max
  unsure (1)..(266): unsure at all n locations; Clone ID: 701128654H1
tctctctctctagtttccatagcacacacacanggctaatcattcgacgaggccgcaagtgagtgagagagaagaatcactgcactgatccacacacaaaccagaaggnaaaccaagcacagacagcgtgcgctcttcttgtgatttgtgttanaagcaaccaaccacactcacacacacccctccataataaaaatcacttccatgctctcttcttcancccaaccaaaacaaacaggtttgcatttgcttaactggagccagat

SEQ ID NO: 44520 - DNA, 250 bp, Glycine max
  Clone ID: 701128655H1
gttggtggcttgcttggtcttggtggaggttttattttgggacctcttttcctcgagctaggaatccctcctcaggtgtcaagtgctacagctacttttgccatgacattttcagcatctatgtcagtggtggaatattaccttctaaaacggtttcctattccttatactctttacttcgtggctgtatccacttttgcggcctttgttgggcaagttttagtgagaaagctggttgccatactaggga

SEQ ID NO: 44521 - DNA, 263 bp, Glycine max
  unsure (1)..(263): unsure at all n locations; Clone ID: 701128657H1
tcatgctccacaacaacaacactgggcgatgataacaacaaaaccagcactaacactgggttagggtacatttcatgganagtgancaanntcnnnnnnnnnnnnnnnnnnnnnnnnnnnnnnnnnnnnnnnnnnnnnntgctgtcaaggccaagatcatggctcatcctcactatcaccgtctcttggcagcttacgtcaattgtcagaaggttggagccccaccggaagtggtggcaaggttagaagaagcatgtgcttct

SEQ ID NO: 44522 - DNA, 262 bp, Glycine max
  unsure (1)..(262): unsure at all n locations; Clone ID: 701128658H1
agatggcnnaagcaggaagcagcattaacagangagcaagatggtctctcaatggaacgacggctctcgtcaccggcggcacccgtgggatcgggcacgccatagtgagtgacttggccgcgtttggcgctgctgtgcacacttgctccaggacccaaacagagctcaacaaatgcttacaagagtggcagagtctgggctttcaggtaactgggtcggtgtgtgacgtgtcctcaccatcccagagagagaagctcattga

SEQ ID NO: 44523 - DNA, 263 bp, Glycine max
  unsure (1)..(263): unsure at all n locations; Clone ID: 701128662H1
ggaatgggggtggnttctacgacgcnttccnncgaagcntcatcaagggngatnacatcnaacgtggaagaatttcatgcactgttgttgccaaaccacccatcngtaatcgctatggaactctgcatggaggntctgntgggtccttggttgagattttatcgaatgcntgaccgaaactgtagttgccaaggacaaggaactttttcttggggaaannagcatttcttacctctctgccactccagcaaatgaagaagtgc

SEQ ID NO: 44524 - DNA, 266 bp, Glycine max
  Clone ID: 701128663H1
caaggggaggggaccatgatctagatgacgacgatgttgagaagggtgatgattgggagcatgaagagattttcactgatgatgatgaagctgttggcaatgatcccgaggaaagggaggatttggctcctgaagttcctgctcctcctgaaatcaagcaggatgaggaagaagaggatgaagataatgaagaggggggaggtctgagtaaatctgggaaagaactgaagaagctgcttggaaaagctagtggtctgaatgaatct

SEQ ID NO: 44525 - DNA, 269 bp, Glycine max
  Clone ID: 701128664H1
ctccgcaccagtttcaccggcacgaatatcttgttgtttggagcgatccgagaaaaactctgtaaacatgttggtttaccaggacctccttacaggtgatgagcttctctctgactccttccgttacaaggaaattgagaatggaatgctgtgggaagttgaggggaagtgggttgttaaaggagcagttgatgtagacattggtgcaaacccttctgctgagggtggaggagaagatgagggagttgatgatgcagctgttaaggttg

SEQ ID NO: 44526 - DNA, 263 bp, Glycine max
  unsure (1)..(263): unsure at all n locations; Clone ID: 701128665H1
cgggacgtggcggctgacggnancgttagggagtccggagacgtcggcgggggccccggaaagagttatcttgtctgtttaacagcctgcncaccctggaaacggctcagccggaggtagggtccagcggctggaagagcaccgcacgtcgcgtggtgtccggtgcgcccccggcggcccttgaaaatcctnaggaccgagtgcctcccacgcccggtncgtactcataaccgcatcaggtctccaaggtgaacagcctctgg

SEQ ID NO: 44527 - DNA, 259 bp, Glycine max
  unsure (1)..(259): unsure at all n locations; Clone ID: 701128673H1
ancagcancgaggtggnnnnngggnncaagttcgaacagangcacnggaaagancgcgtgagagtggcgcgcgtgtggaagacgaggcaggggcagcacttcgttgtggagtggcgcgtgggcatcactctcttctcagactgcgtcaactcgtatctccgcgatgacaactctgacatcgttgctactgataccatgaaaaacacagtgtatgcaaaagcaaaggaatgctcagacatactctctgctgaggactttg

SEQ ID NO: 44528 - DNA, 263 bp, Glycine max
  unsure (1)..(263): unsure at all n locations; Clone ID: 701128677H1
ggaaactgncattagtaagacttaagtancctaagttcggtgcctcctcaaaactcaggcaanagccagttaaaggttcaatggttctgactctgcgtccctatccttcaattgccaatcttctgtttttggcttatcggaaatcaccatcagtcgcctttgcaagatacaagccaccaaaaggaaaattgagcacatgccaaacataacagtgatagggaatgcatcaacattgtacagcacaacacacacaaaantgttga

SEQ ID NO: 44529 - DNA, 265 bp, Glycine max
  Clone ID: 701128680H1
tccatacatagccactttacactcactcttgtgttgttgccttcatggccaagccagtgtccattgaggtatggaacccaagtggcaaatacagagttgttagcaccaaaccaatgcctggaactcgttggatcaatcttctcgttcaaaatgatgttcgccttgaaatatgtaccgagaagaaaacgattctgtcagttgaagacatcattgctttgattggtgataagtgtgatggagttattggacagctgactgaagactg

SEQ ID NO: 44530 - DNA, 257 bp, Glycine max
  unsure (1)..(257): unsure at all n locations; Clone ID: 701128686H1
gctagngcccagtgcaccggagcggcgaagntagagtcagatcgnaagcggaagaaggcgtcgacctcggcggcgganaaggagaaccggaataanctaanaannnnnnnnnnnnnnnnnnnnnnnnnaagggtggtggcggtattgaggttagggcttcgcacatattgatanagcacgaangttctanaangnaggccncgnggaaggatcctgaaggtcncatcatcaagancacaaccnganaaaacgggttt

SEQ ID NO: 44531 - DNA, 240 bp, Glycine max
  unsure (1)..(240): unsure at all n locations; Clone ID: 701128688H1
cggncgatctcctcttcnccctgcgccaagncaccacaacccaaccgtcngngtttgccgacaatngcgaacgcttgggcacttntcgcngccacaacggcgccgtttngacctgcgacgtctcaagagattcggttcgtctgatcacgggtagtgccgntcagaccgccaagctatgggacgtgcaaagcggtctgcaattgtacaccttcaatttcgattcccctgccaggtccgtcg

SEQ ID NO: 44532 - DNA, 257 bp, Glycine max
  Clone ID: 701128689H1
cgaagatgataactatgatctcgcctacgacctcttaactcaggccattggtctcagccccaacaacgcagacctatatgctgaccgtgcgcaagtcaacatcaaagtcaacaacctcaccgaggctgtttctgatgcaaacaaggcgattgagttgaatccttctcactcaaaagcatatttgcgaaaaggtaccgcatgcatcaagcttgaggaatatcagactgctaaggcagctctagagatgggtgcttcat

SEQ ID NO: 44533 - DNA, 258 bp, Glycine max
  unsure (1)..(258): unsure at all n locations; Clone ID: 701128691H1
ttgctgcagtagttttggtagcatggccatgccatggcgcaggctaccaaaggttccctctccgaatgaaaactggctatggtgagcgttcttcggaggtaaaatgcgcaagttttaggcttgctgtggaagcacacaacatccgagcnattaaaaccattcctgaagagtgcgttgaaccaacaaaggactacattaatggcgaacaatttagatcagactctaaaacagttaaccaacaagctttcttttatgcta

SEQ ID NO: 44534 - DNA, 256 bp, Glycine max
  unsure (1)..(256): unsure at all n locations; Clone ID: 701128692H1
cgtttgtgagtgtgagagagtcataacantggttgtggaagatgcccaaaaatcagccatcacggaggaccaaaaccctagcagggtcgccaacgacaacaacgacgacgaagatctcgaagagggggagatcctcgacgacggtgacgacggcgcctccgccacatcaaagcctccgtccgcnctcgtccgcaacccccannctctcgagaatcctnngaccttctngttcganaanncttccgcgaagtccaaa

SEQ ID NO: 44535 - DNA, 251 bp, Glycine max
  unsure (1)..(251): unsure at all n locations; Clone ID: 701128693H1
cagagaagaagggacggcgtgtgttatatgagtcgaatcctccctcatatggnncacgtcaagcttcgccacattctntctcagttcggcgatattcaaagaatttttctcgctcctcaagattcttctgtccaagtgcctgctaagaggtcacgtggatcccgagaccaagcatattcagaaggatgggtcgaattcggtaataaaagtgttgctaagaggnntgccaatatgnnanatggtgaacaaat

SEQ ID NO: 44536 - DNA, 263 bp, Glycine max
  Clone ID: 701128695H1
gtgatcatggacgtctcttattcatgcaatgaacaacaagcccccgagatcgttttctttgatttggaaactacagtgcccaaaaagggtggagagcgtttctgggttctggagtttggtgcaattgtggtcacaccccacaaactcaccgagattgagagctacaccacgctgataagacccaaagacctatctgtggtgtcagtgaaatccagcagaagtgatggaataactcgtaaagctgttgaaaatgcaccatcttt

SEQ ID NO: 44537 - DNA, 264 bp, Glycine max
  unsure (1)..(264): unsure at all n locations; Clone ID: 701128696H1
ggntcganatngnaagtnnatcttcttcgtatagagcgatccgaganaaantctgtaaaacatgttgggttaccanganctccttacaggtgatgancttctctcngactccttccgttncnaggaaattgagaatggaatgctgtgggaantnnangggnagtgggntnntaaaggagcagttnatgtanacattggtgnaaanccntctgctgagggtggaggagaagatgaggganttgatgatgcagctgttaaggttgt

SEQ ID NO: 44538 - DNA, 286 bp, Glycine max
  unsure (1)..(286): unsure at all n locations; Clone ID: 701128702H1
gttggttgttgttttgccaacgttacgaaacgaaacgcagcattgtctccactgcacgcatgccgtttactatatatgtataatctttcanaacgttgattgaattggttcaattattgtgtgtctggtaatttaatggttgatgcgtgtttgatgggatgggagctcagaagagcatccatgctgnncaaagcaaagattgacgtcaatgttgattttactcacaagctatgcgcttctttgatgcttcctaccctcaggagtactggcagtccatttcactggt

SEQ ID NO: 44539 - DNA, 165 bp, Glycine max
  unsure (1)..(165): unsure at all n locations; Clone ID: 701128704H1
ggaaaagctcttccatgactgctatagccntcctgtttatccttctaatcacttatacaggnnacaanancatgncnaatccggggtatgttatggaagacttggcaacaacttaccaacccctcaagaagttgtggccctctacaatcaagccaacattcgcag

SEQ ID NO: 44540 - DNA, 277 bp, Glycine max
  Clone ID: 701128705H1
gtttattttctttgttcggttaatcaaatgtttctcttagaatatgtgtttgggttcaacttaatccaaaagagttagttcaaaggacgagaattactccacttatatattatatcttgactttatctttaaccgatgtgaaattttgagtttttctcaatatacttccttacgtccaatacttttgggtttggtacatgattaaactattagtgacccatttaataaatctataatagacttgatatcatcatacaatatgagttttacttaactc

SEQ ID NO: 44541 - DNA, 151 bp, Glycine max
  unsure (1)..(151): unsure at all n locations; Clone ID: 701128706H1
cattagatctcaggcaaattattagnaatatcaactgctgaaagttgaagtgagattttacggattcggatgttaacgggctagcaacactttctcttctgcaagatattanaaattaattcaaagggcgtcccacactcccactgacana

SEQ ID NO: 44542 - DNA, 279 bp, Glycine max
  unsure (1)..(279): unsure at all n locations; Clone ID: 701128707H1
ctggaatcnaatgntcaagttaatcgagtacnccaagcagcaatatgattcgtataagcgtgaggnagaaaatagtcttaagtnattggaagaatttgctaagcaaaagtactttaatgaanagcncgatgatcatctgacattagagcaatttttgaagaaggaatccacttgcattgaagagtaataccttttgtataaggatcataaaaggaaaaatatcaagacaatggagcaatattttatgcagagattgcgttccaatagagagcaactcga

SEQ ID NO: 44543 - DNA, 240 bp, Glycine max
  unsure (1)..(240): unsure at all n locations; Clone ID: 701128708H1
gcaagagcaagagcgaaagcgncagagaagatggaaggagaagagggttctcagcagccacagttggtgctcgcggacaagctattccttctccggcaacccgatgtgcaagacattgacaaggttcgctacaaagaggatgtcttcactcatgtcaaggaaaacgatatggtccctctgtacgaaaccctagtcgctgattccgtgttggacttggatcgtgcccttttggactctatg

SEQ ID NO: 44544 - DNA, 249 bp, Glycine max
  unsure (1)..(249): unsure at all n locations; Clone ID: 701128709H1
atcacccgcttttgatgatttgatccctggctttggtgtttccaataatggtgttgggntgaacaatccaagtgttactccaaacaaacctgctgcagcagcggcggcgtctcatgatgatccgtttttgatatttgaaactgcttcaagctcgccgtcttcagaatctttcctggacgcgctggagcagattagtaagttgaataattctaaagggacaaaaggaggttccccatcattgaatctccc

SEQ ID NO: 44545 - DNA, 270 bp, Glycine max
  unsure (1)..(270): unsure at all n locations; Clone ID: 701128710H1
tgttggtgatgttgccgggggagttgagttgctgagtttcgtagggtttgaactcagggaggagaatggagagacatgggcagtnnatggagtttccctctgaggaacaaataaaattcattcagagagcaatagtgttgctggaatcacaacttgtacaacaaggacctcctaagagagacgatttgccgtctgcaacttctaccgagatgggtccaaaggcagaaacnaagccggttgacagacagtgaggtcttcttgctgtccctg

SEQ ID NO: 44546 - DNA, 174 bp, Glycine max
  unsure (1)..(174): unsure at all n locations; Clone ID: 701128712H1
ttcganccgcacagntccggtttctcaagggggagttcgaaataccggggagtgacactncncaaatgtggccgttgngaagctcgaatgggacaattccttgggaaaaaggcttatgacaaggcagctatcaagtgcaatggaaganaggctgtgactaactnganccaagtc

SEQ ID NO: 44547 - DNA, 152 bp, Glycine max
  Clone ID: 701128713H1
atcagcaatcacatggtgatcagaatatcattcagcaattgaagatcagtggcatcaggcataggctagcaagcaatgatatggctttcttcccagcaaatttcatgctacaaacacctcaccaagatgaccatcaacctccaccttcactc

SEQ ID NO: 44548 - DNA, 130 bp, Glycine max
  unsure (1)..(130): unsure at all n locations; Clone ID: 701128714H1
gancggtgcggccttgatcattgggcatttatgatgaaccaatgactccaggtcaatgcaacatggtagttgaaaggcttggtgattatctcattgaacagggtctctaatctttgcttaatgtcttgtt

SEQ ID NO: 44549 - DNA, 85 bp, Glycine max
  unsure (1)..(85): unsure at all n locations; Clone ID: 701128715H1
gcttcgttgttcgctcatcaccaccgtcagcagcagcagncggccatcggagaagctttggcggcgagggtgggaatnacttccg

SEQ ID NO: 44550 - DNA, 134 bp, Glycine max
  unsure (1)..(134): unsure at all n locations; Clone ID: 701128716H1
aatggcgcaaccttcctcctcctcgaagcctgttgtccctctcctgaaggacgagctggacatcgtgatcccgacaatccgaaacctcgacttcctcgagatgtggcggcccttcttcgaaccttacnacctca

SEQ ID NO: 44551 - DNA, 284 bp, Glycine max
  Clone ID: 701128717H1
ccacactctcactctctcctttacttctcttcctactcttctccctagtccaaggactcacccccaaatgtgacacccaagaccatggctcaacccttgaagttttccatgtgttcagcccatgttccccatttaggccatcaaagccactctcatgggcagagagtgtcctccagctgcaggccaaggaccaagccaggctacagttcctggctagcatggtggctgggaggtcaattgtgcccatgcctcaggaaggcaaattattcaaagcccaacttaca

SEQ ID NO: 44552 - DNA, 151 bp, Glycine max
  unsure (1)..(151): unsure at all n locations; Clone ID: 701128718H1
gtgaaaaaaccactgcgatcaatggcaacgatcaaggccgtgaaagcttcgccagatncttcgacagccgtggaaatccaaccgtcgaagttgacgttattctcagcgatggaagcttccacagagccgccgtgcctagcggtgcntcaac

SEQ ID NO: 44553 - DNA, 222 bp, Glycine max
  unsure (1)..(222): unsure at all n locations; Clone ID: 701128719H1
agggttttctcaaccctagggtttaccttctcttcccctgttcgaaattaggcaaatcaanaacagaaacacgactacaaaaagaagaaaagaagaaaaagaatcaatcattcattgatcgctgaaacgatacgatgacagggaaggcgaagccganagaagcacacggcgaaggagatcgcggcgaaggtggacgcggcgaccacgaaccgcggcgcggga

SEQ ID NO: 44554 - DNA, 218 bp, Glycine max
  Clone ID: 701128724H1
gccatttctgatattggggttgggattgagaataaaataattttacactttaaaaatgttttctggcctaatgtggaattcttaggagtagttgcagagacatcttatggatgcagctactttcttaatctccacaaggctacaggtcgtcctgtccttgtttacatgcctgctgggcagctggccaaagacattgagaaaatgtcgatgaagcagcc

SEQ ID NO: 44555 - DNA, 233 bp, Glycine max
  unsure (1)..(233): unsure at all n locations; Clone ID: 701128725H1
aagaagcaaatagcggagtgagcaaaagcctcaaagaaggagagaggctcgtgggcccaacgagacggcccgacggaacccnanncaagcccattcgaatccgcgccggctacacccctcaagacgaatcgccatttaccaacccaaaggagcactcttgaaaaaggngatgggctccgctgggcctcccgggtacgaaccagacgctgattccaagcccaggncaagtccgt

SEQ ID NO: 44556 - DNA, 267 bp, Glycine max
  unsure (1)..(267): unsure at all n locations; Clone ID: 701128728H1
gngccggnnanacgacgagcngcgagtgngtggcggcgtgggacgaggtggaggagctgagcgcggnggcgagcnacgccaantacaagcaaaaaggaaaaggantccgacccgctcgagacctactgcaaggacaatcnngagaccattgagtgcaaaactttcgaagattganaaanggttttaaggggcnanangngcnccaaaggcnannnaaaaaaaaaacannggagngncacgaagagaannaaatncggnacaaggnat

SEQ ID NO: 44557 - DNA, 143 bp, Glycine max
  unsure (1)..(143): unsure at all n locations; Clone ID: 701128731H1
ctcaaacacttctccttaaccactgagagccttggttgtgttcaaagctctatatttaggagcatccatggaaatatgatcatatggtatggagcatggcagaggcggtcgagtaaggaaaaagaggagctgaccctnanccc

SEQ ID NO: 44558 - DNA, 193 bp, Glycine max
  unsure (1)..(193): unsure at all n locations; Clone ID: 701128732H1
cacgccgtttgaaaagctaattagaggntcgaagattctgccattggctggcgctgaatactcaaagaaggtgatggaaaactgcgtggcacacatgaagtctgttnngacttacggtgatgctgaagccgcagccattgaaaagtttgctgaagccttcaagaatgtgaattttgcacctggtgcctctgtt

SEQ ID NO: 44559 - DNA, 157 bp, Glycine max
  Clone ID: 701128736H1
gtatgcattatgcagttacagaaaatcttaatgtccactcgttttattatacatgaagaattggtgattgatagtgaatctcattgtcggtacacatgttattgattggatttttcttgtaaatctcagcttgtattgtgaatttgtgatgctgtaa

SEQ ID NO: 44560 - DNA, 187 bp, Glycine max
  unsure (1)..(187): unsure at all n locations; Clone ID: 701128738H1
ctatgcccnccatgggtatgtccaaggaggcaattaatctatttaatgaaatgcaagaattaggtgtttgtgctaatgatgtcacctttgttggacttctgacggcttgcantcatactggtttagttgaggaggggttnnaatactttgatnaaattctgaaaaacagatcgatacaactcagagc

SEQ ID NO: 44561 - DNA, 277 bp, Glycine max
  unsure (1)..(277): unsure at all n locations; Clone ID: 701128739H1
atccccaaatgattcattgaggccatcttgcagttctggttagccnaccntntnctagntnatatccggcagangtttccaacttcagangtttgtgtgcaatgcttcagcagagttgagacatgttactttcccaanccatttccaagtacccaaggcnttaaaaagtggtactgacatttggtngctnngatacttttggcccaagtgaaaaatccaacagtggagctggtngtgacataacgcttctcctgcccttganttgagtgacgaaacc

SEQ ID NO: 44562 - DNA, 260 bp, Glycine max
  unsure (1)..(260): unsure at all n locations; Clone ID: 701128740H1
gggctgcccaacctaaacctcagaaccgacgacccatttctaacatcgtcatcgtcgttgctatgcagacggaggcacttcccattgtcaacagatttcagctcaccgaggaccctcactctccgtttccgcgaggggttccttgggttcgttatcaggggacatacaaagatcttaatataagcttgatttggcctggaaaagatccaactttgggggntgatagtgtaggcncgatatcancggccccggtacgnagc

SEQ ID NO: 44563 - DNA, 52 bp, Glycine max
  unsure (1)..(52): unsure at all n locations; Clone ID: 701128742H1
aatctcgttatccttctttttttctccttgaactcgaatattnactatggca

SEQ ID NO: 44564 - DNA, 221 bp, Glycine max
  unsure (1)..(221): unsure at all n locations; Clone ID: 701128743H1
cttaccaacaccacttccaatggcttcatatcatgaagaagaagtgaggctattgggcaagtgggccagcccatttagcaacagagtagaccttgctctcaagctcaagggtgttccctacaaatactccgangaagatcttggctaacaagagtgctgatcttctcaagtacaacncccgttcacaagaaggttccggttttggtcncaaaggggaaccc

SEQ ID NO: 44565 - DNA, 104 bp, Glycine max
  unsure (1)..(104): unsure at all n locations; Clone ID: 701128747H1
gnaaatcgcaggtgaaaatgagcggaacggtgaagaaagtaaccgatgtagcattcaaggtgggaaggaacatcntatggggatggaatggcgaacttcctcgc

SEQ ID NO: 44566 - DNA, 152 bp, Glycine max
  unsure (1)..(152): unsure at all n locations; Clone ID: 701128748H1
caatggtgtacgtcaaggctcagaaatcaaaagcctacttcaagagatatcaagtcaagttcaagagaagaagagaggggnaaaccgnttaccgtgccaggattcggnngattaatcngganaagagcanatatancactcncgcgatancg

SEQ ID NO: 44567 - DNA, 153 bp, Glycine max
  unsure (1)..(153): unsure at all n locations; Clone ID: 701128751H1
ttttatcactggattaataattagcacatagttttttggaagagttgtgaaaatgggacttgnggagctttntggagtggcatctatgcccgtgatcaaagtacnaataatcactgcagttggcntgcttncttgcacggataacgtaaacnc

SEQ ID NO: 44568 - DNA, 274 bp, Glycine max
  unsure (1)..(274): unsure at all n locations; Clone ID: 701128752H1
gggaaaatgcttcgattgagctgaacaagtttgtnttcttttgtttgttggtgctaatacaagtggcagtttctgaaatcatttttgaagagcgttttgatgatggatggcgaggtaggtgggtgaagtcagactggaaaagcagtgaaggcaaagcaggttcattcaagcacacagctggtaaatgggccagtgatccagatgataaaggtattcaaacatccagtgatgnccaaacactttgccatctctgcaaaaataccagattcacaac

SEQ ID NO: 44569 - DNA, 220 bp, Glycine max
  unsure (1)..(220): unsure at all n locations; Clone ID: 701128754H1
aaatttttaattcagatttattaattaatgttatatggaattaaatatacactaaaancatagaaatagaaccttaccagttggcagcgttagcaatgacattacatcgcaaacctcncctggaataaagatgagtaatgtccccaacatgggtaaagaacttttgggcatcaatgttttttcctgcaattttagccttaactaaggacagatcttgatt

SEQ ID NO: 44570 - DNA, 267 bp, Glycine max
  unsure (1)..(267): unsure at all n locations; Clone ID: 701128755H1
atcaaattnaagttctcattatcaaggtgttttgatctgttgagggggtttaatactgaaaatgggacaagtgttaggtnncntgcaagtggatcagtcaagtttgncccatcaaggaggttttcgggacagtacgatgatgttctcgaacctggttgccactgtgtnccatggtgtttcggcagtcgtgtggctggtgctctttctttgcgtgtcaaacagctagatgttcgctgtgaaaccaagactaaggacaatgtcttgtgc

SEQ ID NO: 44571 - DNA, 261 bp, Glycine max
  unsure (1)..(261): unsure at all n locations; Clone ID: 701128757H1
gttaagangttgaagagtattggcatgattgatagcgttcctggaatgaaggctttggatatgaatgctgcagaggatnctattgtgaggctcacganggagattgtgcccggcatgattgtcaccggcatggaggtggcagaaattgatggctccccaaggatgggtccgacgtttggggcgatgatgatatcagggcagaaggcggctcattggcgttgaaggcgttggggaggaacaatgcattgatggaacgtgtgg

SEQ ID NO: 44572 - DNA, 125 bp, Glycine max
  unsure (1)..(125): unsure at all n locations; Clone ID: 701128763H1
ctcgtttcgttctcgaagaatcgatctgcgataatgactcgcggtaaccagagggatcgtgatcgcgaaaggnntcaggctagaaccggtggtaaaggcaagcagaaagatgatgggttgacccc

SEQ ID NO: 44573 - DNA, 153 bp, Glycine max
  unsure (1)..(153): unsure at all n locations; Clone ID: 701128764H1
ctttgtgcgtgtgtgtatatatataagctctctcttgttccttccatcatcacaagancacaacaagggatttccntggaagtctcaaaanaagaagctcgagtggcacccgcaccggccctagtggcgatgctgccatcccctggcatgggc

SEQ ID NO: 44574 - DNA, 142 bp, Glycine max
  unsure (1)..(142): unsure at all n locations; Clone ID: 701128766H1
gttcattatcactacgattgttctaaaagcaattattactcttgagaagaattaaaagatcatcatcacaataacaagatgagttcaggaattagagcatggagtgtggcagctagtgttggagtngtggagggccngaaac

SEQ ID NO: 44575 - DNA, 226 bp, Glycine max
  unsure (1)..(226): unsure at all n locations; Clone ID: 701128767H1
caatatatgtcatggcaggacaagaaattactggcaggatgcacttgattgctcacactgctcagagttatacgatctttttaacattgtcagctaaaacgtggggtcctggtgctgaacaaggagggattcttcaaacatcatcctgtaaacttgatctgaaagaaccttactatagaatgtctcaaccacnagcttatncnttaacccaagatcagcaacctcc

SEQ ID NO: 44576 - DNA, 232 bp, Glycine max
  unsure (1)..(232): unsure at all n locations; Clone ID: 701128768H1
ggcgtacaatgggacactccaacgtttggaactctcacccaaaaaactacggtcctggttctncgcacttgccgtgtgtgtgggaatccacatggactgatcaggaagtatggccttatgtgctgcaggcagtgcttccgtagcaatgccaaggaaattggcttcatcaagtatcgctaaaagagcgttgtcaactacggacnnatattgtgttctggcactaggagtttnc

SEQ ID NO: 44577 - DNA, 69 bp, Glycine max
  unsure (1)..(69): unsure at all n locations; Clone ID: 701128771H1
cntacctggcncaactttcaagatgcaaggcntcgtcaagacactcactggnaaagncnaacacccgng

SEQ ID NO: 44578 - DNA, 71 bp, Glycine max
  unsure (1)..(71): unsure at all n locations; Clone ID: 701128779H1
gccaggtcnccgacaaccttcngngcgccggaggacacggccaacctccncaattccacacaacanangac

SEQ ID NO: 44579 - DNA, 99 bp, Glycine max
  unsure (1)..(99): unsure at all n locations; Clone ID: 701128780H1
aacctcttcaacaaaaacacccnttnttattcacaccaatcttcactcaacactttcattcagaatggttaagtcagagaacaagatccacccagaaca

SEQ ID NO: 44580 - DNA, 154 bp, Glycine max
  unsure (1)..(154): unsure at all n locations; Clone ID: 701128782H1
gatctcattacaatctcccaagtttntaatctcagctaagaanaaccaaaagatgtctctgattccaggtttcttcggtggccgaaggagcaacgtgttcgatccattctcactcgacatgtgggatcccttcaaggatttcatgttcccactt

SEQ ID NO: 44581 - DNA, 268 bp, Glycine max
  Clone ID: 701128784H1
ggacactttcaaaggctacgctaaaggcgcagaagataacaaggttggcttcacaacctacagcgctaacacaaacgctacctttaaagattacgccaaacacggcgtttcctttgctagttacaacgtctcttcggaatctaaaacagtcagtagcagtgtggtaaaaaggtgggttgaaccgggtaagttttttcgcgagaccatgcttaaggaaggcactgttatgcccatgcccgatataagggataagatgccgaaaaggtcc

SEQ ID NO: 44582 - DNA, 266 bp, Glycine max
  unsure (1)..(266): unsure at all n locations; Clone ID: 701128785H1
gtgacccatagattctcaactaatgagaacactctcacccttggtacccagcatcagttggatccattgaccacattgaaggcacgtgtgaacaactttggaaggacaagtgctctgatccagcacgagtggcgtcccaaatcgttctttaccatttctggtgaggtagacaccaaggccattgaaaagagtgctaaggttggattgagtttggttctcaaaccctaagaatttgatccatcctggcaagagcnttgagtaggtgt

SEQ ID NO: 44583 - DNA, 110 bp, Glycine max
  Clone ID: 701128786H1
gtggttcgtgtggcttttggcggtactaggcatcatcggagccacactcttcatagtgagcttgatccaaacctcggagaacaacttcctatgttccacacaacatacga

SEQ ID NO: 44584 - DNA, 72 bp, Glycine max
  unsure (1)..(72): unsure at all n locations; Clone ID: 701128789H1
aaggccacgtgaacccttttatgcaactaagcaaactccttctttgcaccggtttccacacaacatanganc

SEQ ID NO: 44585 - DNA, 162 bp, Glycine max
  unsure (1)..(162): unsure at all n locations; Clone ID: 701128791H1
catgtctcagactgttgtcctcaaagttggtatgtcatgtgaaggatgtgttggagcagtgaagagagttctaggaaaattggatggtgtggaatcatatgacattgatttgaaggaacaaaaggtggtagtgaaaggaaatgtccagccagacacagntct

SEQ ID NO: 44586 - DNA, 141 bp, Glycine max
  unsure (1)..(141): unsure at all n locations; Clone ID: 701128792H1
gnganaaagtagctgatcctccatggcctccaccaaggaacgcgaaaactttgtctacaccgccaagctcgccgaacaagccgaacgctatgaagaaatggtggaagcaatgaagaatgtggcgaagtgaacgtggattgc

SEQ ID NO: 44587 - DNA, 121 bp, Glycine max
  unsure (1)..(121): unsure at all n locations; Clone ID: 701128795H1
atggaatgcnggtgttctaggcccaattacattaagtggtctcaatgagggtaggagggacttaacttggcagaagtggtcntacaaggntggtcntaaaggtgaagccttgaatcnncnc

SEQ ID NO: 44588 - DNA, 201 bp, Glycine max
  unsure (1)..(201): unsure at all n locations; Clone ID: 701128801H1
tctctctctcattcacacgaatcacactctccacagtgcgattcattcaccaatggatcgcaacggtgttctctctcttgcattcatctgcattgtagtcgccggcgtcggaggccagtctcccgccgcagcgcccncgaacactccggcaacccccgccgcngcnactcncgcccaagcaccttccacacaacatagaca

SEQ ID NO: 44589 - DNA, 247 bp, Glycine max
  unsure (1)..(247): unsure at all n locations; Clone ID: 701128802H1
cattctgctgccttactgactttgtgttctttactccattgtgatgagttaatttgtactttttaaattaacttcattggaggattaattccttgcttgctttttattcttcattttattanttggtgagcttctttctagacttgttttagtttgtagagttggatttncactggtggtttgttaccttgttgcctttctattatttattttactatggctaaataataggttcatatttattgct

SEQ ID NO: 44590 - DNA, 281 bp, Glycine max
  unsure (1)..(281): unsure at all n locations; Clone ID: 701128803H1
ggctctttagaagggcacatgaacancaaaganagagtagcaacaacttcaataatctccctcccaaaagggaagatatcagtggtaagattaggatggagtgatcttaagtttcttgactattatttgcttcttattagtncatattctagaaatggagaacataatagactaagacttgttattatgcttattttggtttactaaatgaagagttttaatgcaaatatatttgtcttcatttcaaaacaaaaggctaaagggaaagaggtaaatccggt

SEQ ID NO: 44591 - DNA, 278 bp, Glycine max
  unsure (1)..(278): unsure at all n locations; Clone ID: 701128804H1
gcctcacgcttggaattatgatattgttggccatggtaattgtagcgttccacagatccagccaatcgaagcgattgaggaaaggatccagcagaactgggcaaggtcctccaaaactggttattcttcacatggatatggctatccacaccttggatgatataatgagaagtactgagaatctcaatgagaaatanntnnatagggtatggtgcgtctagcactgtatacaaatgtgttttgaagaattcccgaccaattgcaattaagcgactgta

SEQ ID NO: 44592 - DNA, 275 bp, Glycine max
  unsure (1)..(275): unsure at all n locations; Clone ID: 701128805H1
ctactgatgctgagctggaagctgagctttccaagtatgggtctgtgaaggaggtgaagtttttcgatgagaaggccagtgggaaatcaaaggggtattgccaggttgagttttatgcaagcttttgctgcgactgcttgtaaggaagggatgaatgggcatgtttttaatgggagacctgtgttgttgcatttgcatcgccttttacggttaagaaaatgggggaggctcagattttnnnnnatcagcagatgaaccanactgctgttcctcag

SEQ ID NO: 44593 - DNA, 276 bp, Glycine max
  Clone ID: 701128808H1
agttgcacttaatagtatcttaggatagtctccactcatgaaattcagagttaaatatcaaatggtagaaaaagaaccgtgagaattttgatatatactagttgttggatgcatgcatctttgaggaacttaggattttgcctaagatagtgtgtgtggaaaaaagtggatgcttgatattttgatgcacgaaatctttaaccgtgtaataaaatgtaacatcagaaagggtagtacagcctatttaaaaaaatgaatgcttgacattttgatgca

SEQ ID NO: 44594 - DNA, 278 bp, Glycine max
  Clone ID: 701128809H1
ctgctaccctcttctctctctctcggggctgatttcttgcgcggtttatcatgggggatagtcagtattcgttttctctcaccacatttagcccttctggaaagcttgttcagattgagcatgctttgacggctgtcgggtctggacaaacgtctttgggaattaaagctgcaaatggagttgtcattgctaccgagaagaaattgccatctatattggttgatgaagcatcagtccagaaaattcagttattaacaccaaatataggtgtcgtatat

SEQ ID NO: 44595 - DNA, 279 bp, Glycine max
  unsure (1)..(279): unsure at all n locations; Clone ID: 701128811H1
aatcgcactaatggctgtcaccttctcagatctacacaccgaagagggtcatcaaatccctcgatcaattcctttctgggaaaacctatatttctggggatcagttgacaaaggatgatattaaagtgtatgcagctgttgttgaaaagccaggggacacttttcctaatgctgccaagtggtacgatgctgtctcttctcaacttgctccaagctttcctggcnnnnntcaaggggtaagattcagtggcgctgctgctccagctgaagcgcacctgc

SEQ ID NO: 44596 - DNA, 280 bp, Glycine max
  unsure (1)..(280): unsure at all n locations; Clone ID: 701128812H1
aagacattgaaaattccattaccaggacgtcatccaccatctcctgctcctggtccacatgatgaacctgcaaagtcaggagaanctagtattgagaggaaacccctacgcataggtcaatctgccatgaaggaacctctccagtccttaggactgaaaccacctcaaccgaatatttctccagctatgagcattttacagaaattctatggcctcaaatcttngnantcaagagatacattgaatggaacagaaatggcagtttatttgtcctcaaatt

SEQ ID NO: 44597 - DNA, 234 bp, Glycine max
  unsure (1)..(234): unsure at all n locations; Clone ID: 701128814H1
aagaagatggctctgnaactatgggagacattgaaggaggccatagttgcctacacggggctctccccgcccaccttcttcacccttctggccctgatcctagccctatactacgtcgtttctgggctcttcccctcttccgaccaccgccacaacaccgcctcgngcgacttggagccccagatggagcctctgcgaccccccgttcagatcggcgaggtcaccgaggacgat

SEQ ID NO: 44598 - DNA, 271 bp, Glycine max
  unsure (1)..(271): unsure at all n locations; Clone ID: 701128816H1
gaaaatttcaagcacaaaaaatggcggagaagaaagtggtgancctaggagncggtgttgccggtgcnaaccttgcaaaaactatacaacgtcaagccaacgtcacccttattgatccgaaggaatattttgagattccatgggcaagtttgaggggattggttgagccaacttttgctgaaaggatagtgatcaaccatagagagtacttcaaaaagggtaaccttgttgtatccagtgctgtcaacataactgaaactgcagtggtgac

SEQ ID NO: 44599 - DNA, 281 bp, Glycine max
  unsure (1)..(281): unsure at all n locations; Clone ID: 701128817H1
gagaaatttgagcagaggangaggagcatttaggtgtgggcgttattcgaagttgatacatgcnnnnnnnnnnnnnnnagaanaagaagaggaggtgcngagttctagaatctctaggccgctcnctgaaatactgaaagagctgaacaagaaagtaccggactcnctcgtcaaaacccgcctccagaaagatcaagatgctcccccatcagatnntttcccggttcgttctctctattctccccatacataacataccnnaccttaatcatctatctatt

SEQ ID NO: 44600 - DNA, 275 bp, Glycine max
  unsure (1)..(275): unsure at all n locations; Clone ID: 701128818H1
atttgtgtttccccgaccccgattgcaagcaatggacgccttcaattccttcttcgattcaaganaccgatggaattacgatactctcaaaaacttccgtcagatttctccggtcgtgcagaatcacctgaagcaggtttattttactctgtgttttgccgtggttgctgnggctgtcggggctaccttcatgtcctcttgaacattgggggttttcttactacagtggcatgcatgggaagcagctttggttatctccacactcctttgaanag

SEQ ID NO: 44601 - DNA, 278 bp, Glycine max
  unsure (1)..(278): unsure at all n locations; Clone ID: 701128820H1
cccttcctnactttttcttttatncacatccaattaatgttccatcnacctgtgtgcatncaattatgttcaagtaacatttctgttattgttttcataaagtttgattaaaatttgtgttgtaggtgtatggccagaatctccgagctttagagatgaggggatgggacctataccatcaaggtggaaaggaacttgtcaacatgatcacaccggcttccgttgtaacaggaagctgataggtnnaaggtactcaacaaaggtatatggcccagctg

SEQ ID NO: 44602 - DNA, 110 bp, Glycine max
  unsure (1)..(110): unsure at all n locations; Clone ID: 701128821H1
tcttttgttcaccgaaacctcacccaccccttactcttactctgtgctattgttctttctttccaacaagtttcttacttcctttccacacaacatangagtcctccgng

SEQ ID NO: 44603 - DNA, 278 bp, Glycine max
  unsure (1)..(278): unsure at all n locations; Clone ID: 701128823H1
caaaaatggtgaagtttctgaaaccaaacaaagccgtcatcgtccttcagggacgctacgccggcaaaaaagccgtgatagtgcgaaccttcgatgaaggcacgcgcgagggcccctacgggcactgcttggnggcagngataaagaagtaccctgcgaaggtgatcaagaaggattcggccaagaagacggccaagaagtcgcgtgtgaaggcgttcgtgaagctcgtgaactaccagcacctcatgcccacgcgctacacgctcgatgtcgatttt

SEQ ID NO: 44604 - DNA, 279 bp, Glycine max
  unsure (1)..(279): unsure at all n locations; Clone ID: 701128824H1
atcacaatcgctatggctaggtacgaccgagcaatcaccgtgttctcccctgacggccatctcttccaggtcgagtacgccctncgaagccgtccgcaagggcaacgccgccgtcgggtccgcggncaccgacaatgttgtcctcggcgtcgagaagaaatccaccgccaaactccaagactccaggtcggtgaggaagatagtgaatctggacgaccacattgcgctggcctgcgcggggctgaaggccgacgcacgcgtgctcataaacagggcacg

SEQ ID NO: 44605 - DNA, 278 bp, Glycine max
  unsure (1)..(278): unsure at all n locations; Clone ID: 701128826H1
attctgannggaactctcttctacnnncctatgngncnngntcagaaaatccaacatgctttgctggagctnganactgctcnggtggcacctgatgacgatcaagttaacacaccgaatacattggccgagagcagcaggccaatggcatcaggccagagatccaggtcctggagcaatgagaaccatgtgtcacantatactcaaactcagcctnctanncgnntgccatatgcagtcaagtgaagttgtgcacgtagagaaacggcaaaagttga

SEQ ID NO: 44606 - DNA, 277 bp, Glycine max
  unsure (1)..(277): unsure at all n locations; Clone ID: 701128827H1
ggggaatccgacngtttaattaaaacaaagcattgcgatggtccctgcggatgttgacgcaatgtgatttctgcccagtgctctgaatgtcaaagtgaagaaattcaaccaagcgcaggtattactgcaccatgtgcaccagaaaactcgtccttcagtaatactgcatgatgctgatgctcatcttactttttttcccgggttttatttactacttaatttccatgtatatgtagggttttcataggatcataggatcagcaccataagatcaact

SEQ ID NO: 44607 - DNA, 281 bp, Glycine max
  unsure (1)..(281): unsure at all n locations; Clone ID: 701128828H1
ctcgtganncanctnttnaacatcaatgctggcattgttaagacgctgngtactgctattgctaagtanngccccccatgccctnanacaacatgataagcaatcctgtgaactccactgttcctattgctgcctgaagntttcaagaaggcaggnacttaggatgagaagagatngtttggngttaccacccttgangttgttagggcaaaaactntctatgcngggaaagccantgntccagttgcaggtgtnaangtacctgttgtgggcggccagca

SEQ ID NO: 44608 - DNA, 281 bp, Glycine max
  unsure (1)..(281): unsure at all n locations; Clone ID: 701128829H1
gggaaccgtcgtccaccgccgccaccgctgccaccgccgccaccgcttcnaccgctgatcctccggcgccagtgactaaaagctgggccgacgaagcagacgaagaaaccaacaacacctccaccgccgagtcagaaagctcctccattaacctggaagnnttaaccatcgacgataaagaaaataactcttccaaattcttggatgatcccgatgattccaatatccaagcggttacttctggcggacagcgtacacctcggcggcgaggttcgaggact

SEQ ID NO: 44609 - DNA, 284 bp, Glycine max
  unsure (1)..(284): unsure at all n locations; Clone ID: 701128830H1
aaacgaggtcacgattctggtcaccaacgacgatggtatcgatgctcctggcttaagagcattggttcactccctcgtcaacgccaaccttttcaacgttctagtgtgcgctcctgatagcgagaaatcagctgttagccacancatcacttggctccatccagtagctgttaagcaagtactcatcgagggaaccaccgcatttgctgtttctgggactcncggctgattgtgctctctagggattccaaagctctctttcccacagtacctgatctggtggt

SEQ ID NO: 44610 - DNA, 285 bp, Glycine max
  unsure (1)..(285): unsure at all n locations; Clone ID: 701128831H1
cgaatacctagtgcaggatgccatggagtctctcatgaaaggaagaacagttctagtcattgctcacaggttatccacagttaaaactgctgatactgttgcagttatatctgatggccaagtagttgagagaggcaaccatgaagagcttctcagcaagaacggtgtctatactgcattggtcaagagacaactgcaaacaacaaaagccgaaatctcggtttaacaagcaagatggtaggtttggttattcagatttgcagagcaaagtatatgagtcantgt

SEQ ID NO: 44611 - DNA, 290 bp, Glycine max
  Clone ID: 701128832H1
ggttgctttcactgggggtcgtacacaacctggaactaccaagcctgatgagggggaccgccacccatactctataatagagtgtgagcctaagcgtgaagtcattttaccatctgtaatctacatacaaaagattttgcggcgaaggccatttctcatcaagaaccttgaaaatgttatgcggaaattccttcagtccttggaacttttcgaggaaaatgagaggaaaaagttggcaatcttcacagcacttgctttctctcagaagctgtctggtctcccaccagaaa

SEQ ID NO: 44612 - DNA, 280 bp, Glycine max
  unsure (1)..(280): unsure at all n locations; Clone ID: 701128833H1
gcatcagggagctttgagggttgattctctggtgtagtagcaatcagcacaatagaaaatgttttttgacggatatggatatcatgggacatcatttgagcagatatatcgatgctacccagcttcctttattgaaaagccccaaatcgaaagtggtgacaaaattatcatgcctccatcagccctgaccgtctagcatctctgcatattgatnnttaaatgttgtttgaactccgtaatgatggctgccgagcgggtttctcatgtggggtcnggagtt

SEQ ID NO: 44613 - DNA, 191 bp, Glycine max
  unsure (1)..(191): unsure at all n locations; Clone ID: 701128834H1
aataaatataccctgtcctgtgccgtgacatctttaagccaattgcaatcaaacaaagtttcagtttttggtgtccatttttctcctccanctttatctaaacataactgaatctccattccttaaattnagcnanngctagnccncacaacatacgannannnnnagnngnanagaggtgcngngagnna

SEQ ID NO: 44614 - DNA, 271 bp, Glycine max
  unsure (1)..(271): unsure at all n locations; Clone ID: 701128835H1
ggtaaatnnctttctctctcatnatgccntaatttgagaagattggtcccaaagtttattgcaatactnncanagaggttgatnaaagctccaacaatccactcccccatgaatgnnatgatgtggcactgcaaaggagacaccacatgcagncgaagaaaattccaatggccagaaatatggtcctntattttccctcaattggataaggccagccatagttgnttccctccaanttngccaaagaggtaatgagagacangaccttggg

SEQ ID NO: 44615 - DNA, 273 bp, Glycine max
  unsure (1)..(273): unsure at all n locations; Clone ID: 701128838H1
gggcctaagagctcacactgatgctggtggcataatcctactgttccaagatnacaaggttagtggattgcagcttctcaaggatgatcagtggatcgatgtcccaccaatgcgtcactccattgtaatcaaccttggtgaccaacttgaggtcataaccaatggcaagtacaagagtgtcatgcaccgagtgattgcccaagccgatgataccagaatgtccatagcttctttctacaaccctggtgatgatgctgtcatttctcctgcacc

SEQ ID NO: 44616 - DNA, 275 bp, Glycine max
  unsure (1)..(275): unsure at all n locations; Clone ID: 701128839H1
ggctgaangaggggcatcagatccctactttgtataaatggggttgtctttctaaacaaccccatcacntcattaagagggggggatcgatccttgatttgtgaatttgcttgcattagcaagatcatatatattcattcatntacacaattacatatcaagatcacatgcnttntggtgttcttgatctcatanacaacatggagggtcagagacaagaagtacatctcatctgaggagctgaaggagcacaacaagtcaggggatttgtggat

SEQ ID NO: 44617 - DNA, 253 bp, Glycine max
  unsure (1)..(253): unsure at all n locations; Clone ID: 701128840H1
gttctgtgtttgtgtttgtttttantctcacctgaaaatgancttgctgcggtggtaactnnggttgcggaagctcctgcaagtgcggcaacggctgcggagggtaagattttcgttgtaacattgtttttttcttgggaaaatagagtttttccgggaaaattttctttttggatttttaattgttattatggttacccttttggttcaattgcatgaaaaaactatgctttgtttattttcttgcatgggg

SEQ ID NO: 44618 - DNA, 257 bp, Glycine max
  unsure (1)..(257): unsure at all n locations; Clone ID: 701128841H1
cttaaactccttttagtttcaatgantccacaccccaaaccacanatctttccctatttatacttcatcttagttttccctaggaccatatattataccatatttatatatcttcacatacttaataatatataataatgggtgttgtacggacgtgggagagcaggagggcggagtggaggcctttcgccggagcctggtggcagccgccggcatccagcggcggaaagacgatgagggggggagaacccacaagt

SEQ ID NO: 44619 - DNA, 253 bp, Glycine max
  unsure (1)..(253): unsure at all n locations; Clone ID: 701128843H1
ggaacatgaaacatctcaccgtannaaagaggcacaaaangngtgacangccaaagaagaaannggaaaaagatcaaagtaaaagccaccgtcataagtggcagaagcataaagtaaaagagctgggatctgtgacatgtttgggtgcttgattgacttgcttcgatgttgtttctggtggggtttgtcctggcaatgggagctttatatagaaacagcatgatgagaggagcagcagccctgtgcagcttcc

SEQ ID NO: 44620 - DNA, 276 bp, Glycine max
  unsure (1)..(276): unsure at all n locations; Clone ID: 701128845H1
ctttcttcaagcaccctagntttcctcnctctctctctaaaatggcgttctcttcttttctcggccgagtcctcttcgcctctgttttcatcctctccgcttaccaagaatttaatgcttatggagttgatgggggacccacagcaaaagcactcnnaccgaagtttgatgcctttgcacatcaagtacattctaaagctggctttcaacttccagatattgatatgaaaattttagttgctggggctattgctctcaagggctcggagggatctt

SEQ ID NO: 44621 - DNA, 277 bp, Glycine max
  unsure (1)..(277): unsure at all n locations; Clone ID: 701128847H1
aacgaagggtgggttcgtttgtgagagttgtggtgatgtgaggttngtgccgtgtgggaactgcagtgggagtaggaaggtgtttgatgaggatgaaggggtgttgaagaggtgtttggagtgcaatgagaatggctgattcgatgtcctaattgttgttctgaagttggcaaacaaaataaacaaagaagaaaatttgaaacctnntgtgtgtagttgtttttttttgttgcagaaacatagatgcggttccttacatgattctggtgttgttgtc

SEQ ID NO: 44622 - DNA, 203 bp, Glycine max
  unsure (1)..(203): unsure at all n locations; Clone ID: 701128849H1
catggattcagcatttgcgagaacgagaacaagatccatgttcttcttagcntcactcctcttctacatattcgnagtcncaccaccaccaccttcgcatccatccacatctacgacgannnnctntcatagaactcggcaatncnacctccncncnggcngaggaaggcntcgtngnncnangcgaatgcancagngaggna

SEQ ID NO: 44623 - DNA, 275 bp, Glycine max
  unsure (1)..(275): unsure at all n locations; Clone ID: 701128850H1
gggagagtgttcttcgatgtgtganttggatggataaatgagtacattgttatgtattcctagtccttgaatcatgatttgcaacatgaaaatgttgaagtgtgctttttccctttcgtatttgattaaaacttattcaataaagcagagctgctatcgtattgcactgcaaatgcacttgaagccagtaaagtaattaataggggagataatagtggtcctgttgctccaaagtgttttagtcgtataatccagaaacagcatcattggtattc

SEQ ID NO: 44624 - DNA, 274 bp, Glycine max
  unsure (1)..(274): unsure at all n locations; Clone ID: 701128851H1
acaatgctgaaaatgagtatctgtactgtgagggcctcaaggtgcatnacatcatggaatctgttgagagaagacctttctatttgtacagcaagccccagataactaggaacgttgaagcctataaggatgcattggaagggttgagttctataattggttatgccattaaggctaacaacaatttgaagattttggaacatttgaggcacttgggttgtggtgctgtgcttgtntagtgggaatgagctaggttggctcttcgtgctggctt

SEQ ID NO: 44625 - DNA, 273 bp, Glycine max
  unsure (1)..(273): unsure at all n locations; Clone ID: 701128853H1
gtccctccttcctctgccttataattcttgtgacccttttngctggtagcattngaaagtgcaccagcaaacntgaagccaagccattatgctgcacccnncaataggagtgtttttccttctggttttctatttggaataggctctgcagcttaccagatagaaggagcagcagctatagatggcagaggaccaagtatatgggacacctatactaaacagcaaccagggaagatttgggatcatagtgatggaagtctagcaatgattttt

SEQ ID NO: 44626 - DNA, 274 bp, Glycine max
  unsure (1)..(274): unsure at all n locations; Clone ID: 701128856H1
atgaaggtccttgttttcttcgttgctacaattttggtagcatggcaatgccatgcgtacgatatgttccctctccgaatgaacactggctatggtgcccgtactccggaggtgaaatgcgcaanttggaggcttgctgtggaagcacacaacatctttggctttgagaccattcctgaagagtgcgttgaagcaacaaaggaatacatccatggcgaacaatatagatcagactccaaaacagttaaccaacaagcttactttatgccagaga

SEQ ID NO: 44627 - DNA, 271 bp, Glycine max
  unsure (1)..(271): unsure at all n locations; Clone ID: 701128857H1
aaagaattgagaaaggatagggtttagggttggcaaaggaaggaagggatggaagcagctgtggtggacgtcggctctaagcttctcaaagcggactttgcaattcctgaccagactcccgccatgataattcccactcagatgaagcanttgctcgatgatggatcagtcactgatagttcactggctgacnnnacaccgttgatcccgtcgtgcgaggattattagagattgggatgccatgaagattgttgcaccatgttttgtatac

SEQ ID NO: 44628 - DNA, 275 bp, Glycine max
  unsure (1)..(275): unsure at all n locations; Clone ID: 701128859H1
aaaacttgctctacaatgagtttccttcgttcttttgcaagaaacaaggatatatcaaaagtaggacgcagaggtatccattgcatgcagaaactatgtncagaaaaaatatctcctgattcactagagaaggcccaaaatcgtgtgatagatgctgcactcacacttgttcgagaaaatacaaggctaagaaagaacttgtgcatagtttgggaggtgctgtagcaacttcaactcttcttggagttccttgggtcataatcatcgtttcttga

SEQ ID NO: 44629 - DNA, 281 bp, Glycine max
  unsure (1)..(281): unsure at all n locations; Clone ID: 701128860H1
gagagatnnagaaaaaaggtaacactaaagaaaatgactatggttacacggnnagaagatgatcaagagaatggaagtcccagcnncagtgccagttccattgcctgatatggcncctgccaccatcctttgacagtgacaatccagcctatagataccgtttcttagagccaacttctcagctcctgacaaggccagtcttagacagccatgggtgggatcatgattgnggttatgatggtgtaaacattgaacagagtctagccatcatcaataaattc

SEQ ID NO: 44630 - DNA, 283 bp, Glycine max
  unsure (1)..(283): unsure at all n locations; Clone ID: 701128862H1
gggcgctgnngnggtccaatgnccgcgaacngtnacttgncctggatgtggaccgggttcgtcctcggaccggacccggacctccgtggtcaancgtttgaagaannagctgaaggattcgatggagagtttcaacgagattaccggncctgtttcgtcggagtaccgcgagaccgtgcagcggcggtacttcaccgtcaccggcgagaatcccgatgataagacgctcgattctctgatctccaccggtgagagtgagaccttccttcagaaagccatcaga

SEQ ID NO: 44631 - DNA, 286 bp, Glycine max
  Clone ID: 701128863H1
ggcagtagccgagattccgtgagttgcaaaaatgaagacgattctttccaccgagaccatgaacatcccggacggcgtgagcatcaaagttcatgccaaggtcatcgaagttgagggcccccgcggaaaattggtgcgagacttcaagcatttgaatctcgattttcagctcattactgacgaaaacggtaaaagaaagctgaaaatcgacgcgtggtttggttctcggaaaacatccgccgccattcgcaccgccttgagccacgtggagaatcttatcaccggg

SEQ ID NO: 44632 - DNA, 287 bp, Glycine max
  Clone ID: 701128864H1
ctcgactccacaaactgacagaaatagtcgaaaagtataaggaacttcatggtagattaccgattattgttgccgaaactcttctacgctcagatcctaagattgaattacctctttggcttgtacaattgttcaaggagggtcaaaaagaaaggtcgtgggggatgactggcagggaatcaaatcctgcatctttatttcagctttatgttagctatgatcgatatgcagaagctacttatcttttgctcgagtgcatagactcatttgcttcaatgagaccagca

SEQ ID NO: 44633 - DNA, 278 bp, Glycine max
  unsure (1)..(278): unsure at all n locations; Clone ID: 701128865H1
atggatgnngaggtaggtgggtgaagtcagactggaaaagcagtgaaggcaaagcaggttcattcaagcacacagctggaaaatgggccagtgatccagatgataaaggtattcaaacatccagtgatgccaaacactttgccatctctgcaaaaataccagaattcacaaacaagancagaacattggtccttcagtattctgtaaaatttgagnnagagattgaagtggtggaggttactcaagcttctctctgganttgttaatcaaaagaagtt

SEQ ID NO: 44634 - DNA, 274 bp, Glycine max
  unsure (1)..(274): unsure at all n locations; Clone ID: 701128870H1
gcgggcagnagtagctgcgccgaacgctcaaaaggtcactttcccanatcaanncacaagcnatcttacttgacttgtctctgtctgtccatatataacacncctaatcgtacttcattttcatnctcactccctcaaacagtcaaactttcatctttctcattcacttaacccaagtgtaaaaatggcagcattgaatatgtccactgtgagacttccaagagcttccttgtctggaacgacaccagctaggagatctngtgctctcatcaag

SEQ ID NO: 44635 - DNA, 272 bp, Glycine max
  Clone ID: 701128871H1
acctatctttcttctctctctgtgtgtgcgcttcaacggcaaccagaagcagccatggccactgcaaggactgtgaaggatgtttcacctcatgagttcgttaaggcgtactcctctcacctcaagcgatccggcaagatggagctgccagagtggactgatattgtgaaaactgcaagatttaaggagttggctccttatgatcctgactggtactatgtcagagctgcttccatggcaagaaagatctacttgagaggaggacttggtgt

SEQ ID NO: 44636 - DNA, 273 bp, Glycine max
  unsure (1)..(273): unsure at all n locations; Clone ID: 701128873H1
cgcgtttcctttatcatattcttattccgccatgtcccagttgaacggagcctactatggcccctccatcccgccgccgaaaacctcctaccaccgcccagggcnnnnnnnnnnnnnnnnnnnnnnnnnnnnnnnnagcctcatcttcaagctcatcttaaccgtgataatcatcgttggcatcgccgggttcgtgttctggctcatagtccgtccgaacgtggtgaaattccacgtgaccgacgccaccctgacgcattcaactacaccgcc

SEQ ID NO: 44637 - DNA, 96 bp, Glycine max
  unsure (1)..(96): unsure at all n locations; Clone ID: 701128876H1
gattttgcatggtcttggagagctttacgtgcaggctcaaggattgttcaatgatgtcatatccaccacaacatancgaacnaanccggngctnng

SEQ ID NO: 44638 - DNA, 148 bp, Glycine max
  Clone ID: 701128877H1
ggcgacgcaccggcattgccagagactcttaaaaattacaacaagctgttgtctcttggcttcaagattgtattcttgtcaggaagatatcttgacaaaatggccgtaacagaagtaaacctaaagaaggctggcttccacacaacat

SEQ ID NO: 44639 - DNA, 284 bp, Glycine max
  unsure (1)..(284): unsure at all n locations; Clone ID: 701128879H1
atggcgtctgcatgctctgcaaacagaaacccagtccctcccaaaccctctcctgtagaacatgtgctactncctggcacctttccgtgtctcccttcggcccctctctccctctccgactcacattgggactgccccgactgttccgacacctccaaccattaccccgtcgctcccaccgccgaccttgtctccgccgttcatgccattcaggccgacacctctctcatgaccaggagaaggcaaagaaacgtcaagaactcctcgctggctcttccgactcc

SEQ ID NO: 44640 - DNA, 187 bp, Glycine max
  unsure (1)..(187): unsure at all n locations; Clone ID: 701128889H1
gtctttcatcatcctcttcgtgatcgtcttctgttgttgctccactcactatctttatttttcctattctatcnttctcgcttcttaggttagccgagcgtcatcgatccagaaacgataaaggcagtcataaagtgagaatggatctgtgtgctgctcatgcgaagaaccttttccacacaacata

SEQ ID NO: 44641 - DNA, 272 bp, Glycine max
  unsure (1)..(272): unsure at all n locations; Clone ID: 701128891H1
atgnnannntgccagagattcnncagattgccatgggngcttatcaaccatttcatttggctgccaggnancctgccaggggacagatccatggtttccgcangncgtngnggngngagcaccttggcttgcttcatgactctttcctccaccctgaaaatgaagnatgtattaagaaggtgaaccaaattgctgacaagtattgggatatctatcaantgagtcactgaggcagaccntcccgnncacnggcccggaaatccnttggggtt

SEQ ID NO: 44642 - DNA, 277 bp, Glycine max
  unsure (1)..(277): unsure at all n locations; Clone ID: 701128892H1
aggcattcgtggagcatcactacagnaccttcgacaccaacaggaacgnnactagcgaatctctaccaggagggttccatgctcactttcgaagggcagaagatccaaggcgcttccaacatcgttgccaagctcacctccctcccttttcagcagtgccaccactcaatctccaccgtcgactgccagccctccggcgtcaacgccggcatgctcgtcttcgtcagcggaaaccttcagctcgccggcgaacagcacactctcaagttcagccaga

SEQ ID NO: 44643 - DNA, 277 bp, Glycine max
  unsure (1)..(277): unsure at all n locations; Clone ID: 701128893H1
gccgattcaggcgttttgagctcatagaacaaccacctttcttccactcctgctactcttnccccttccttcgtcctccaagactcactctctctcgacctcgacctcttgccacttcccagccacttcgacgctttcgcagatctggtgcacgcgccgtcgttcgcttaccggcgcgtggagaggcatctcgagaatgagttgcgtttgcagagcctctctgaccgtgtggcggagtggagtcgcggttcgaccgtgtgctcggcggagatcggaa

SEQ ID NO: 44644 - DNA, 285 bp, Glycine max
  unsure (1)..(285): unsure at all n locations; Clone ID: 701128896H1
gatggcggtggcggccaattctgcaagaaaaaccctccaaatagcttcctctgccaccagaaccctcttctctcgtcgatcttcgtgcgccactaagctcaatggactnnnnnnnnnnnnnnnnnnnnncaagaaaacgcgccctctcgttttcccggcttccggtgcagttggttggtggacaagtgtctttgacgccgttgcatagtgttactgcctctgccttgttcacttctctgctttctctgcacaacactaactggggttgtcttcagaaggtttgca

SEQ ID NO: 44645 - DNA, 265 bp, Glycine max
  Clone ID: 701129301H1
atcaatatccatggcttcggaggacagaaacgaagaagagcttcacgttctattggtggcattctctgcccaaggtcacatcaaccctttgcttaggcttggcaaaaaactactaagcagaggcctccacgtcaccctcgccaccaccgaattagtttaccaccgcgtcttcaagtcctccgccgccacccccaccgccaccgtccccacttcaatcaccaccaacggaatccaagtgctattcttctccgacggcttcggaacg

SEQ ID NO: 44646 - DNA, 257 bp, Glycine max
  unsure (1)..(257): unsure at all n locations; Clone ID: 701129303H1
gtacaattcgctggcggatctgtaccagaagaagctctggcaccagctcactctcaagatcgagcagtttgtggctctcgccgtcttccaggctggtgatgcttnaatacaattatatcacaatttcatcacagactttgannggaaaatcaaccttctcaagcttgcacattttgctgttatagtttctcggcagtattctgaaaaagaagctgctgttggttattcttggaggggtcattcagaaacttcagaca

SEQ ID NO: 44647 - DNA, 256 bp, Glycine max
  unsure (1)..(256): unsure at all n locations; Clone ID: 701129304H1
aaaagcaaaaacatcctccttttagntttgttagccatagcaatagaaacgggatggtcatcagaagaagaaagcagcatcatatcacgattccagcaatacctgaaaatccaacactgcccaacccaccccgcgttaccacgaagccgccgatttcctgatatcccaaggtaaagccctctccctggaatcccaaagcattgagtttgtggcaggcaagccacttgtccttctgaaatgggaaggctcaaaccct

SEQ ID NO: 44648 - DNA, 251 bp, Glycine max
  Clone ID: 701129305H1
caacaacttcaccttcttcctcctcgatcatgtctcacttcaagggcaagtaccatgatgagcttattcgccaatgctgcgtacattggcactcctggaaagggtattcttgctgctgatgagtcaacagggacaattggcaagcgtttggccagcatcagtgtagagaacattgaatccaacaggcgagctcttagggagctgcttttcactgctcctggtgttcttcaatatctcagtggtgtcatcct

SEQ ID NO: 44649 - DNA, 249 bp, Glycine max
  Clone ID: 701129306H1
gctgaacgtggcattgagcacaacgagatcgtgaatgtgataaagagcttgcacgggttcagatacgttgacgcacaagacattaagagggaaacgtgggtcctcactgatgagggggaaacgtatgctactgttggatcccctgaagttcaactctttttggctataccgcaagagggtatctctaaggaagagcttcagaaaaagctggatcctctctcttcaagataggttgtgctcaggctgcga

SEQ ID NO: 44650 - DNA, 249 bp, Glycine max
  unsure (1)..(249): unsure at all n locations; Clone ID: 701129307H1
gngggtcccagtcccgaacccgtcggctgtcggtggactgctcgagctgncttccnccggcgagagcgggtcgttcgcgtgccggtcgggggacggattgggaacgggcccttcggggctcttncccgggcgtcgaacagtcaactcagaactggtacggacaaggggaatccgactgtntaattaaaacaaagcattgcgatggtccctgcggannttgacgcaatgtgatttctgcccatgctctga

SEQ ID NO: 44651 - DNA, 246 bp, Glycine max
  unsure (1)..(246): unsure at all n locations; Clone ID: 701129309H1
gctgaacgnggcattgagcacaacgagatcgngaatgtgntaaagagcttgcacgggttcagatacgttgacgcacaagacattaagagggaaacgtgggtcctcactgatgagggggaaacgtatgctactgttggatcccctgaagttcaactctttntggctataccgcaagagggtatctctaaggaagagcttcagaaaaagctggatcctctctcttcaagataggttgtgctcaggctg

SEQ ID NO: 44652 - DNA, 246 bp, Glycine max
  unsure (1)..(246): unsure at all n locations; Clone ID: 701129310H1
gttctaaccatacctttgacagacttaggccatatatgaatgttgtatttcacttgtccttnttatcattgttaattgggataccccgtttgtcatattaatttataatatcgaagttaagatgtgtgtggtgaaactttggtacgtttttttggttttactggaattggtagtttaagatgaacagataccattaatcaacagcaaaaggatgatgtatagtgaaatattaacccagggtctgag

SEQ ID NO: 44653 - DNA, 247 bp, Glycine max
  unsure (1)..(247): unsure at all n locations; Clone ID: 701129311H1
taacaatgtcaacatgagccaccacaatcctaatttcacaggaacaaaggaagttgttgttgaagacgaggaatcaccattgttggcgttgccactgctaaganacagagaggaagatgaacaagggtcagggtcaaaggcatcggttactggttctgtgttcaatctctcaacaaccatcatcggcgccggaatcatggccttacctgcagccatcaaagtcgtcggcgtcggcgtcggtgtcgtc

SEQ ID NO: 44654 - DNA, 107 bp, Glycine max
  unsure (1)..(107): unsure at all n locations; Clone ID: 701129312H1
cgagtcgnagcggaagtgagagaggaggcactgaagacatcccaacaatggnccttgttactgctgacncacgngtcaaaccgttacttcctcggaacgntcgtcat

SEQ ID NO: 44655 - DNA, 247 bp, Glycine max
  unsure (1)..(247): unsure at all n locations; Clone ID: 701129313H1
gagagtagagagtaaacagaaaatctgaggcgcgagtggctggtgaaggcaggcgactgcgagggaagggaagcatctttagctccaaatccaatggcggatacctcaagccgatcaagagacctcgacaagctccttctccgccctggcaatctcgtcggtcctaggttcgaacctggccctgagttgcgagatgaccttcaggccttcgccaaagtgttggtggttggggctggtggcttnggtt

SEQ ID NO: 44656 - DNA, 249 bp, Glycine max
  Clone ID: 701129314H1
ctttgaaggtgactctttatcctggaaacgtgttatcacttaaaatgtcaaagccgcatgggtttagctacaaaagtggacaatacatgtttgtgaactgtgctgctgtgtctccatttgaatggtatgcatttgaagaaacatattctaaatgaaatgtttgcatgtaaataccttcataacaccctgaggtgctttgtttacgcattcataggcatccattttccataacttccgcccctgatgatg

SEQ ID NO: 44657 - DNA, 252 bp, Glycine max
  unsure (1)..(252): unsure at all n locations; Clone ID: 701129315H1
aaaaaagcaccgaaaaacgttgcgccaccttgattactctctcgcggaagacaaaggctcggtaggataggttggtccttgagctgcttgtgtcagcacaaaggagagttgtattgntccctcaaggaacgattcagacatgggtgactcagacaaatgcgggttgtatatcgaaaaaatccttcctgcctagttgtcttaggaaaagtttatgagggatccacaatcgtncacaacattcctttgttgtag

SEQ ID NO: 44658 - DNA, 246 bp, Glycine max
  unsure (1)..(246): unsure at all n locations; Clone ID: 701129316H1
aatttcagcgcatgtgtgacaagtctatgatcaagacgagatatatgtacnnaaacgaagagatcttgaaagagaatccaaacatgtgtgcttacatggcaccttctttggatgctaggcaagacatggtggtggtagaggtaccaaagctagggaaagaggctgcagtaaaggccataaaggagtggggccagccaaagtcaaagattacccacttgatcttctgcaccacnagcggtgnggact

SEQ ID NO: 44659 - DNA, 264 bp, Glycine max
  unsure (1)..(264): unsure at all n locations; Clone ID: 701129317H1
atgccatggagcagagttggtgggccaatatgcctcacgagcttctcagagaggtcctcctcccgaattgaatcgtcggagtccacgtggccgctgcggaggagcgtcgtggcttgtggcggagtgtgccgcacctggaggaggctcatcgtcaaggagattgtcaagccacctcaattctcttccaacatacccttccccncctctctcaaacaggttcagtgctcttcttctctattcaaattaaatcaattttgtttattt

SEQ ID NO: 44660 - DNA, 259 bp, Glycine max
  unsure (1)..(259): unsure at all n locations; Clone ID: 701129318H1
acaatgtcgtatttttcaaggggacgtcgcgacgacgacgacacggtggacgactacgacgagtacgaccccaccccatacggcggcggctacgacattcacctcacctacggccgccccgtctctccttcagaaganacctgctacccactcggagcctcttccgatgaaaacttcgattacgatcgcccccagtacacctcttacgcngaaccctctgcttatggcgatgaagccctggccactgagtatagcagtt

SEQ ID NO: 44661 - DNA, 227 bp, Glycine max
  unsure (1)..(227): unsure at all n locations; Clone ID: 701129319H1
gattaaagcagcatttagcccgagtttctggtgaagtaacatacngtgaaaaggctcctgatgaagtctacctgaaaatgaaaganaatcttgaaggctgccgttcccataaganacaaaaacaagttgacacacaagcatatatgaattttcactctaatgatgatgaagatgaagaagagcaagttgggtgtagaagcaaagggaagcattgatggatgatcgaa

SEQ ID NO: 44662 - DNA, 254 bp, Glycine max
  Clone ID: 701129320H1
attaagtataacacccatagagcactcgggatcaccctcttctgccttggaacccttcaggtttttgctctgctacttgaggcccaacaaagaccacaaaatcagaatctactggaacatttaccactacgccgttggatactccaccataatcatcagcatcatcaacgtctttaaagggtttgatgcattggagacttctgtaggggatcgctacaatgactggaagcatgcttacattggcatcattgcag

SEQ ID NO: 44663 - DNA, 251 bp, Glycine max
  Clone ID: 701129321H1
gctactccttaattactttcattctttaatttgctgcaagctatagcttcattagttcattcacaaaattaattattacaatggtgagtgttgaagagatccgtcaggcacaacgtgcagaaggccctgccactgtcatggctattggcaccgccactcctcccaactgcgtggatcagagtacctatcctgactattatttccgcatcaccaacagcgagcacatgaccgagctcaaagaaaaattcaaa

SEQ ID NO: 44664 - DNA, 249 bp, Glycine max
  Clone ID: 701129322H1
cacatgtttgatgtttctattgttcttcttttttgtggtacaggttaattatactaaggagtttgagatggaaatggctaatggaaacggtttccaacttagtgtgaagaagctaagtgaaccaactctagttcctcctgctgaagaaacaaagaagggtttgtatttcctatctaaccttgaccagaacattgctgtgattgtgagaaccgtttactgcttcaaaactgatgagagggggaatgagaa

SEQ ID NO: 44665 - DNA, 247 bp, Glycine max
  unsure (1)..(247): unsure at all n locations; Clone ID: 701129323H1
ataccttggatgattcatcatcttcattgggggatgcttctgtccagaatgaaagatctttgcctatagtgaggacttcaattggttctgatgctcctgttcaggacaagtacacgagggaagtgagcagaggaaacaggactatgggcctgggagcgcacaacataccttctgattctgatagttatcgtgtggttgcaaattcacaagagactcttgctagaactaatgnncctcacattnngag

SEQ ID NO: 44666 - DNA, 247 bp, Glycine max
  unsure (1)..(247): unsure at all n locations; Clone ID: 701129324H1
atctcttccctttcactcattctttgatcccctttttctncacgccaactctctcttctgggtttctttcattttcagaatctcattatcacctcactgtgattatcttctaattccaaattggtgtttggttgctgagaaactccaagaaaaaaaaaatacagcttttccgtgtattgatgatcctctgnncactcagaaaacttttctctttngtgtgtagagtctagtacctcagacggnnngc

SEQ ID NO: 44667 - DNA, 248 bp, Glycine max
  unsure (1)..(248): unsure at all n locations; Clone ID: 701129326H1
ttagatgctgctaatactactacnaanaccaccccaccaacgncaatccccaccaccaccccaaagtctctatctttccgccaacggcacactcaagcgccatcccaccaccaccgttgctcagccgccgtccatggtggtttcctacaaagaatgcctcaaaaaccacgccgccagnatcggcggncatgctctcgacggctgcggngagttcatgctgttttcttcnaccgtcccctccgaccccc

SEQ ID NO: 44668 - DNA, 245 bp, Glycine max
  unsure (1)..(245): unsure at all n locations; Clone ID: 701129327H1
gcaagcatatattgaagtacgactaacaccgtctatatatagagagagctatgggacaagtaacacggacacggagacataattcttcacacaaacgttgtnttgggacaccttgtgcaatgtgcataaatatcccatttctcttattcacctgatttctatgaacttcaataataattctgataccctttgacgtaaatagatcaacagcgtgccaaaggagcaagcttttgtgtgatggagca

SEQ ID NO: 44669 - DNA, 246 bp, Glycine max
  unsure (1)..(246): unsure at all n locations; Clone ID: 701129328H1
ctttggggaaccctttttcttggtcatacatgaaggggagactntggctgaaattaaagtaagaatacagaagaaacttcaagttcctgatgatgagtttgtcaagtggaaatttgcctttttttcattagggcgtcctgaatatcttcaggattctgacattgtatccagtcgttttcagaggagagatgtttatggtgcttgggagcagtatcttggcttggagcatactgacaatgctcctaa

SEQ ID NO: 44670 - DNA, 248 bp, Glycine max
  Clone ID: 701129329H1
gtggtattgctagttgggcttacattgcttttgggtctcttcctcgctgttcttctattcaacccacgacaccgcaaatctgggcataaggcaaaagctcaagccagtttaaacgttgataaggcatcaaaatcctacagtaaaacagaagtttcgttgcataacaagagaacagactgttggataatcatcaagaacaaggtatatgatgttacctcatatgtggaagaacatccaggtggtgattc

SEQ ID NO: 44671 - DNA, 250 bp, Glycine max
  unsure (1)..(250): unsure at all n locations; Clone ID: 701129330H1
ggcaaaccaagggcagtcctagctcttagctgtgtatcagatggtatgcagacgatagatgcactcctaacatgcaagatgaaaaggaaaagggacgagaatagttcaattatgaggaaatctgctctgacatctcaacaagacagtctatcgtttaaggagcttacaaaagacatacctttccctgttacatactatacactaacagagaaagagttggaagagaatggatattctgttaataagccng

SEQ ID NO: 44672 - DNA, 254 bp, Glycine max
  Clone ID: 701129331H1
aagaacttcaggaattttgctccatatgattcggaaacaccaacgagctccgtggagttcgaccacagtgggtcctacctagcagttgctggttctgatataaggatttaccaagtagcaaatgtgaaatctgaatggaactgtatcaaaaccttccctgatttatctggaacagggaagaacacgtgtgtaaaatttggtccagattctaaatacatagctgtgggatcaatggaccgaaatcttcggatatt

SEQ ID NO: 44673 - DNA, 140 bp, Glycine max
  unsure (1)..(140): unsure at all n locations; Clone ID: 701129332H1
taaacacacattactctctcagtntctcnctcttcttacttcngctcnncaaaccttacatgcacaaagttgtgtttgtgttctaatggaacttgcttgcntagactaatcaaccaagtttngcatttccagtaaccaaa

SEQ ID NO: 44674 - DNA, 259 bp, Glycine max
  Clone ID: 701129333H1
gcttgacgtgcagagaattatcaatgagcccactgctgctgcactttcatatgggatgaacaagaaggagggtctcattgccgtttttgaccttggtggtggaacatttgatgtgtccatcttagaaatttctaatggtgtttttgaggtgaaagcaacaaatggtgacactttcttgggaggagaggattttgacaatgccttgttggattttctggtgaatgaattcaaaagaactgagagtattgaccttgcaaag

SEQ ID NO: 44675 - DNA, 257 bp, Glycine max
  unsure (1)..(257): unsure at all n locations; Clone ID: 701129334H1
cttgcagttgctgcgtcgcaaggtaccggcggcgacggagagctatcttctcaatttccgatncactgcattggttctgttgacgagggttttgttctacttgacttgcatacttgatggcgtcaaagttgcagaagttgcagtccgcagcatgtcaagcatctcaatttgtatccagtcgtggaactaactactacaggcaattgctggaacagaacaagcaacacattcaggagcctcctacagtagagaaatgc

SEQ ID NO: 44676 - DNA, 252 bp, Glycine max
  unsure (1)..(252): unsure at all n locations; Clone ID: 701129335H1
cttcttttccatactattaattcatnacgttctgcttatcaatgcatcgctctcaagcctggcttctttgatgcgtataacgtttccggcaattccgtgcaatgcagtgtgcttctgaaggctgtttgtgctgttctcaggacacctattacgaatattgaccatttgaccgtgagactgcctgatccagatgctccaaactgcagtggattttggnnngctataatggtatgagaaaaacctattggatta

SEQ ID NO: 44677 - DNA, 251 bp, Glycine max
  Clone ID: 701129336H1
gtaccaagttaataggtctttatatttagttgttgacatcaacaaagtcatggaggaagttaatgtggttcaaaccaagaatggaactgttgcagtagcttctgcgtttgctggacataaggaagctatacagcaaagggaccacaaatttttaagaattgctgttgaagaagcctataaaggggtagactgtgaagatgggggtccctttggtgctattatagtatgtaatgatgaaatagttgctcgat

SEQ ID NO: 44678 - DNA, 247 bp, Glycine max
  unsure (1)..(247): unsure at all n locations; Clone ID: 701129337H1
ggtcttcntctttctccatccatntcttcctcctcctctcaatagcccttttctcagtttgtngcttagcagcatctcaagctcccaccaccaaatcacacccctatanccttcccattaagaaagaccccgcaacaaatttgtactacacttcagttggcattggaactcctaggcacaactttgatttagtcattgatctttctggtgaaaacttatggtacgattgtgacactcatacaactca

SEQ ID NO: 44679 - DNA, 246 bp, Glycine max
  unsure (1)..(246): unsure at all n locations; Clone ID: 701129338H1
ctcctctgtcggtcacacngcgataganagataatngagaatagaaagcattcataggcgccaatannnnnnnnnnnnnnnnnnnnnnnnnnnnnnnnnnnnnnntacacaaagcagagagacaagtttgtgtttttctacttttccattttttgggggagagagatctgattcttcaccataagtgtcattgctttgccttgcttctcactcagcaaagttanaacaagaagggcattgcttttt

SEQ ID NO: 44680 - DNA, 246 bp, Glycine max
  unsure (1)..(246): unsure at all n locations; Clone ID: 701129339H1
ggcttcacaaagatgaatcgggaaaagttgatgaagatggccggttcggttagaactgggggaaagggtaccatgagaagaaagaagaaggctgtccacaagacaacaaccacagatgacaaaaggcttcagagcaccctgaagagaataggggtgaatgccatcccggctattgaggaggtcaatatctngaaggatgacgtagttatccagtttctaaatcccaaagttcaagctccttgctgt

SEQ ID NO: 44681 - DNA, 246 bp, Glycine max
  unsure (1)..(246): unsure at all n locations; Clone ID: 701129340H1
atccgctaaggagtgtgtaacaactcacctgccgaatcaactagccccgaaaatggatggcgctaaagcgcgcgatcctatacccggccgtcggggcaaggaccaagccccgatgagnaggagggcgcggcggtcgctgcaaaacccagggcgcgagccgggtcggagggttcgtcggtgcagatcttggtggtagtagcaaatnttcaaatgagaactttgaangccgnagangngattnttcct

SEQ ID NO: 44682 - DNA, 244 bp, Glycine max
  unsure (1)..(244): unsure at all n locations; Clone ID: 701129341H1
gntacactgggagaggagtcatacaaggatagcactctgatcatgcaactccttcgtgataacctcaccctttggacctctgacatgcaggatgatggagcagatgaaattaaagaagcagcaccgaaacaggatgaccagtaaaaatattttactgctaattagaattgancttctcctccatatctttttgaagggngnaggtgtttgttgctaatatctctttggtactgagattttaggc

SEQ ID NO: 44683 - DNA, 144 bp, Glycine max
  unsure (1)..(144): unsure at all n locations; Clone ID: 701129342H1
gccggtgacaccttcatcgttttccgccatgtcctcctattccgaacaaccttagattnnccgtcaatctctctcacctttttcccttctttcaacagaaaaagagagagagtgtgtgtgtgattttnttttttttngaaaaaa

SEQ ID NO: 44684 - DNA, 245 bp, Glycine max
  Clone ID: 701129343H1
ggaggctggtggtgttcaggttgtattggatctgataggttcaagtgatccagaaacatcaattcaggcggcaatgtttgttaaacttctcttctcaaataatactattcaagagtatgcttctagtgaaacagtcagagcaattactgctgctattgagaaagatttatgggcttctggaactgtgaatgatgagtatctgaaagcctaaattctctatttaccaacttcccaagacttagagc

SEQ ID NO: 44685 - DNA, 236 bp, Glycine max
  unsure (1)..(236): unsure at all n locations; Clone ID: 701129344H1
attccattgttgttgttattgtatcgtagccagagacagaagaagagaagagntcgcggcgaagaaagaaagatgacggaggcacatataaggaagaagcccgggatggcgagcgtgaaggacatgccggttctccaggacggtccaccgccgggcgggttcgctccggtccggttcgcccggcgcatcccgaacaagggccccagcgccgttgccatcttcctcaccaccttcgg

SEQ ID NO: 44686 - DNA, 245 bp, Glycine max
  Clone ID: 701129345H1
cactcttgttcttcagtctcctcctattatccgccaccgtagccgccgccgaacggatcgacgatgaagacgaccttctgatccgtcaagtggtgccggatgcggaggaccaccacctgctcaacgcggagcaccacttctccgccttcaagacaaagttcggcaagacctacgccacgcaggaggagcacgaccaccgcttccgtatcttcaagaacaacttgctccgcgccaagtcacaccag

SEQ ID NO: 44687 - DNA, 249 bp, Glycine max
  unsure (1)..(249): unsure at all n locations; Clone ID: 701129347H1
gnaattggcaaatgctcataccttcattagtagtttgcagaagggttatgacacgttagtaggggagcgaggagttcaattatctgggggacagaagcagcgtgtggcaattgcacgagctatagtgaagagtccgaaaatattactactagatgaagccacaagtgcactggatgcggagtctgaaaaagtggttcaggatgcactagaccgtgttatggtggaccgaaccacaatagtagtggctca

SEQ ID NO: 44688 - DNA, 252 bp, Glycine max
  Clone ID: 701129348H1
cacatagctagttgtttaaagtaagagagaagaaagaagcaaatggcaaactttccagttgttgacatggggaagctaacaccgaagagagacctgcagccatggagattataaaagatgcctgtgagaactggggtttctttgagttggtgaaccatgggatatccattgagcttatggacacagtggagaagctcacaaaagagcattacaagaagactatggagcaaaggttcaaagaaatggtgacca

SEQ ID NO: 44689 - DNA, 259 bp, Glycine max
  Clone ID: 701129349H1
gtgtacgtcaaggctcagaaatcaaaagcctacttcaagagatatcaagtcaagttcaagagaagaagagagggaaaaaccgattaccgtgccaggattcggttgattaatcaggacaagaacaaatataacactccgaaataccgatttgttgttcgctttagcaacaaggacattgttgcacaaataatatctgctagcattgctggcgatattgttcttgctgcagcatatgcacatgagctgccacgatatggtc

SEQ ID NO: 44690 - DNA, 256 bp, Glycine max
  unsure (1)..(256): unsure at all n locations; Clone ID: 701129350H1
caaaattcgtgcttgatctcggaggctcaatcctctgggctgactgtgcatccaganccaccccatcttccacccttgccccaatcttccaccgttcaattcgctgcctcacggcaaagggtcctgaaattgagacacatagatggctctcgagtctcgcaaatcccatagatcaagatcagccgtgtcaaattcctgcagagaacagcatctcggggaaaagggtcaccgaaggagagcttgtggaagattagtt

SEQ ID NO: 44691 - DNA, 241 bp, Glycine max
  unsure (1)..(241): unsure at all n locations; Clone ID: 701129351H1
ctggattatggggtgcatganaacaatgatgaccttgacaatgggaaaactngtctgccccaaccttctttttctcattttggtcatgtgaatgcactcgcaggtttcttggaggagcacaaagtatatgtgaatagcttcttggggaatttgaggtttgcaaaggtgggtggtgtgccatcaagtgtgcctggagaagaaagcccttcaacaaacggagaggganatattagtagtaaca

SEQ ID NO: 44692 - DNA, 250 bp, Glycine max
  unsure (1)..(250): unsure at all n locations; Clone ID: 701129352H1
cgtaaaccctaatttcggaaagatcggcgatgactgcctccaaggatcgcgagancttcgtctacatcgccaaactncgccgagcaggccgagcgttacgaagagatggtggaatcaatgaagaacgttgcgaatctcgacgttgaactgacggtggaggagcggaatttgctttctgttgggtacaagaatgtgattggtgctcgcagacgttcctggaggatcctgtcttccattgagcagaaggaag

SEQ ID NO: 44693 - DNA, 245 bp, Glycine max
  Clone ID: 701129353H1
tctattcgcatctgaattctcagtcgcttctcgaaccctacttcttccgcggtgattgcatttgaattcctgtaatggcgattgataatatttttaaacatgaagccagtgaagaaaaaggagagcgggccagaatggcttcttttgttggagccatggctattgctgacttggtgaagacaaccttggggccaaagggaatggataaaattttgcagtcaacaggtagaggacgtgaagttact

SEQ ID NO: 44694 - DNA, 223 bp, Glycine max
  unsure (1)..(223): unsure at all n locations; Clone ID: 701129354H1
attgtcncctaccgtccgtgtgcatttccctttccattacgtcaaatnttcntcttnttccttctttcttctcgttcagtaaaaatcactgaacagttccaaaatcaaatcacccnaatccacatcagaaccccatnttcttcacactcagaatctttcttggtctttttcttgaattcaagtcccaaagtttgagtcttttccgactttggttgaaccccat

SEQ ID NO: 44695 - DNA, 252 bp, Glycine max
  unsure (1)..(252): unsure at all n locations; Clone ID: 701129356H1
gcacaaactatcatggccacggcaacagcagctgccacctcgtcctttatggggacgcgtctccctggaggctcactaccggggcggggcgagtgcacgcccgattcggcttcggcaagaaaaaggctcccgccccaaagaaagcctccaggggatcgggccgagacaccgacagacccctttggtatccgggcgccaaagcgcccgaatatctcgatgggagtcttgttcggaaattangggtttcgatnc

SEQ ID NO: 44696 - DNA, 193 bp, Glycine max
  unsure (1)..(193): unsure at all n locations; Clone ID: 701129357H1
gngcagccaaagaacaaggatcagaatcgtttaatcaagttgaggaagatggcactagtctccggaggaagatcaacactgaaccctaacgcccctctttacattcccgccgcgttccgccaagtggaggatttttctccagaatggtggcagctggtgacgacactgacatggtaccatgactactggctng

SEQ ID NO: 44697 - DNA, 243 bp, Glycine max
  unsure (1)..(243): unsure at all n locations; Clone ID: 701129358H1
gttctcatttcgcaaccatcggccgcacttactcttgttctcaagggattcgattttcctctgcactcacttactagggtttcctccgcgctatcagcaatcatggccgacgaaacaccaaatgagatgaaggaggaggttccagaaattgttccttttgatcctaccnnnnnnnnnnnnnnnnnnnnnnttacaattgtagatcctgctgatgaccctgtggaganattggctgagaagaca

SEQ ID NO: 44698 - DNA, 245 bp, Glycine max
  unsure (1)..(245): unsure at all n locations; Clone ID: 701129359H1
gtgttaccaatatcatatcatatattctttcatcttcttgggttagggttctacacttgcaatctccnttcacacccacccaccctnccaaccatttcaattccttccctcacccaaaccgcactatcgttcttcgacacggtcctgtttattaagcggtttggataaaagaatagaagcgtaaaagggccttngtagcacatcaaccnccngggtttgtttgtgacatcttcctcgaggcgttt

SEQ ID NO: 44699 - DNA, 147 bp, Glycine max
  Clone ID: 701129360H1
cttttatttggaatgtacttttgggaagggtgcggcgattatccaagcatgctcctagtagtttatttggacaaaaatggtcatggcacatcaaggatctttgtttttctttttaccactttattggacatgtgaaatatatatata

SEQ ID NO: 44700 - DNA, 245 bp, Glycine max
  unsure (1)..(245): unsure at all n locations; Clone ID: 701129361H1
tgttttgagtttccaaccttaaaagactctcttttctctctctgaactctgaagcaaaacaacattaccagagtggttctagtaattcagtgctgctagaagatggaaactagtgaatggcatatcgagcgaagatctagcttcggctctgaatcccccttagcaagagaggcaggaaatgtgcctganactgggtcactctctattgtggtgcttggtgcttctggtgatcttgctaagaagaa

SEQ ID NO: 44701 - DNA, 129 bp, Glycine max
  unsure (1)..(129): unsure at all n locations; Clone ID: 701129362H1
acaccaccgcaaaaccctaaattcaattttctccatttccgatcttgcccccggactgcaaatggggagcaggagggacgaggcgcccgccataaacaacaccaacgtcttcgnggcgctcggnagctt

SEQ ID NO: 44702 - DNA, 252 bp, Glycine max
  unsure (1)..(252): unsure at all n locations; Clone ID: 701129363H1
gtcttacttagaaaagacaaatcaaccttcacatttgataagggttgggccttccctagaagaatttatttcaatggggataactgtgttatgcctcctccagatgcctacccctggcttccaaatgcaagttctaaactagttttcnctttactcagtacagtcatagccactttagcttctttgtnaatcttattgaatcaatcatagaaaatataaagatgccatcnactctttcggagtattgtacct

SEQ ID NO: 44703 - DNA, 136 bp, Glycine max
  unsure (1)..(136): unsure at all n locations; Clone ID: 701129364H1
gtgaccacatgaccgagctcaaagagaaatttcagcgcatgtgtgacaagtctatgatcaagncgagatatangtacctaaacgaagagatcttgaaagagaatccaagcatgtgtgcttacatggcaccttcttt

SEQ ID NO: 44704 - DNA, 256 bp, Glycine max
  unsure (1)..(256): unsure at all n locations; Clone ID: 701129365H1
agagggttccgcagatggtacaatcntccttggttctctgaggctattccatctgccccttatgatcctcttgttttaagacacgcctttgagcaggcagtcataaaaaggttgatgactgatgtgccttttggtgttctactctctggaggtttggactcttctttggttgcatccatcacttctcgttacttggccaacacaaaggctgctgagcagtggggatcaaagttacattcattctgtgtaggcctga

SEQ ID NO: 44705 - DNA, 251 bp, Glycine max
  unsure (1)..(251): unsure at all n locations; Clone ID: 701129368H1
gtacaaccccaaatatgaggttcatgtggtctcccctcgcaattactttgcattcactcctttgctgcctagtgttacctgtggcaccgtggaagctcgcagcattgtcgaacccgtccgcaatattttcaggaagaaaaagatggacatgcaatttagtgaagcagaatgtctcaagattgacgcagcaaacaggaaggtttactgtccgatctaatataagtnataatttgancgagaaagaagaattt

SEQ ID NO: 44706 - DNA, 245 bp, Glycine max
  Clone ID: 701129370H1
ctgtttgcagatgggttgaagattgggaagataacaaaattattatttgtaacagatgccaaatagcagtccaccaagaatgctatggggcaaagaatgttcaggattttacttcttgggtttgtagagtatgtgaaactcctgatgttgagagagagtgttgcctctgcccagtaaaaggtggtgctctaaagccaacggatgttgaaatgttgtgggttcatgtaacatgtgcttggtttcga

SEQ ID NO: 44707 - DNA, 82 bp, Glycine max
  unsure (1)..(82): unsure at all n locations; Clone ID: 701129371H1
ggatattactctttttgttccaanaactttatctgcnnacctctncctaagggatncttnnctttncccatgttcatganca

SEQ ID NO: 44708 - DNA, 162 bp, Glycine max
  unsure (1)..(162): unsure at all n locations; Clone ID: 701129372H1
gcatgtatgaggtaatggctagcaaaacaaagatatacattgtattggaatttgtgactggtggggagctgtttgataaaattgcacgcagtgggaggttgaaagaagatgaagcaaganaatactttcaacagcttatatgtgctgtggattactgtcata

SEQ ID NO: 44709 - DNA, 93 bp, Glycine max
  unsure (1)..(93): unsure at all n locations; Clone ID: 701129373H1
ggaggagtcctgatattccttctnccgtcttcatcggaaccctnaagccccttcggcaattcggaagaagaatcatccaatggaaggagtntt

SEQ ID NO: 44710 - DNA, 82 bp, Glycine max
  unsure (1)..(82): unsure at all n locations; Clone ID: 701129374H1
ctacgagccctncgaagccgaattcggctcgagncggtctcgaggtccgcctanntttttttttntttangttttttannta

SEQ ID NO: 44711 - DNA, 242 bp, Glycine max
  unsure (1)..(242): unsure at all n locations; Clone ID: 701129375H1
gtcagtcatcaccctccaatgagtgctgggcatgctgaaactgaacatttcacttatgatgttacatcaaaattgaaaaccaaatttctcggcaactcagttgatgtatatcctgttggaagaacgcgtgtnaccctcaaaagagatggtgtggtccttgattnggtgcctcctccnacnnnagttagcaacttgatttttggacgaacttggattgattcaccaggagagatgatcctgac

SEQ ID NO: 44712 - DNA, 243 bp, Glycine max
  Clone ID: 701129377H1
agaagagaagatgtcgaccgtaccaggacagctcatctgggagatcgtgaagaagaacaactcctttttggtgaaagagttcggaaggggcactcagagcgtgcagttcagcagagagcccaacaatctctacaacctcaacactttcaagtactccggtttggcgaaccagaaaactgtcactgttcaacctgctggtaaagaccagtccgtgttgctcgcaacaaccaagacaaagaagca

SEQ ID NO: 44713 - DNA, 245 bp, Glycine max
  Clone ID: 701129378H1
cttgttctatctgtgacgagcatcatggcctcgagagcagtgctattgttggctatgtgtgtgcttccggccatggttgtggccattcgcccagcaaagaaccctttttgcgtgaagggtcgcgtctactgtgacccttgccgtgctggttttgagacctcagcaaccacctacattgccggtgctgagattatgttgcaatgcaagagcagggttagcaacgaggttgtgtacaccaagaaggg

SEQ ID NO: 44714 - DNA, 237 bp, Glycine max
  unsure (1)..(237): unsure at all n locations; Clone ID: 701129379H1
ctcgagcggctcaagggcggagaagaaagtggtgaancntaggaggtggtgtannnnggtgcannccttgcaaaaantatacaacgtcaagccaacgtcacccttattgatccgnagaatattttgagattccatgggcnagtttgaggggattggttgngccaacttttgctgaaaagatagtnatcnaccatanagatattcaaaaanggtaccttnttgtatccagtgctgtca

SEQ ID NO: 44715 - DNA, 248 bp, Glycine max
  unsure (1)..(248): unsure at all n locations; Clone ID: 701129380H1
cggtattgaacaagaatacaccttgttgcagaaagatatccaatggcctcttgggtggcctgttggtggtttccctggacctcagggtccatactactgtggtgttggcgctgacaaggcttttggccgtgacattgttgacgcacactacaaagcctgtatttatgctggcatcaacatcagtggaattaatggagaagtgatgccggtnagtgggaattccaagttgganccttcatgggatcccg

SEQ ID NO: 44716 - DNA, 256 bp, Glycine max
  Clone ID: 701129381H1
gttaaccatgtccctatgtaagtaccctgaggctgaaacagtacccctttatatacccttcaaatctattgacatgttcacccttggaggaaagcatttttgttcttattttgctccatctctgtatatcatcacaacttccaaaggcttacttactctaatatatctctgattcaagtggttctgtgagttttcttgttttagtctgaggctttgagttttgtttaatagatatgccaagggcaaattgcagttt

SEQ ID NO: 44717 - DNA, 252 bp, Glycine max
  unsure (1)..(252): unsure at all n locations; Clone ID: 701129382H1
gcagccagataggaaggagatccgtctcggtttgcccagcaaaggtcgcatgtccgctgacaccctacgaacttctcaagaattgtcaattgtcagtgaagcaggtcaatcctcgtcagtatgttgctgaaattcctcagctatccaacctcgaagtttggtttcagaggcccaaagacatcacaagaaaattgttatctggagatcttgaccttggtattgttggatcgatactttcagtgancaggcnag

SEQ ID NO: 44718 - DNA, 248 bp, Glycine max
  unsure (1)..(248): unsure at all n locations; Clone ID: 701129383H1
gtggaccatgaagaaattcttaattttgctaagtcacaggctgattacattttggggtccaacccaatgaacatgagctatttagttgggtatggccctaactaccctaaaagggtgcaccatagaggggcatccattgtgtcatacaaaaagaataaagggttcatagggtgcactcaagggtatgataattggtatggtagccangcacctaatcctaatgttctggttggggcacggttggaggg

SEQ ID NO: 44719 - DNA, 247 bp, Glycine max
  Clone ID: 701129384H1
ggcctcttcagtgatggcatctgtggccctcaaacctgcccctttcactgttgagaagtcctcagttagaggccttccctccctctcaaggaactcctcttcattcagagttgtggccagtggtggcaagaagatcaagactgacaagccttatggaattaatggtggcatggctttgagggaaggagttgatgcatctggcaggaaaggaaagggaaagggcgtttaccagtttgtagacaaatac

SEQ ID NO: 44720 - DNA, 245 bp, Glycine max
  Clone ID: 701129385H1
gttcctagctagaagaaggaaatcacttttcactttcgggctatttgctttcttagggcatctctaacaatatggccaaatccactttctttgtctgccttaacctttcattactcttctctctagtcacagccacttactactcaagtttaaccccaacacttttgggttttcgcgaggagaagttcacccacctccacttcttcttccatgatgtcgtgtcgggcccaaagcccagcatggtg

SEQ ID NO: 44721 - DNA, 236 bp, Glycine max
  unsure (1)..(236): unsure at all n locations; Clone ID: 701129386H1
ctcaaggtttggcttgtgcctttgtgtgctcatttntcactaaacaccaacaccaaaccttatacacaaacattcttaattttgatatttttgttatatattctaggnnnttgttaatnaattatattaagcntcatgggaaccccacaatccaataacttgccaccagggtttaggttccacacnacagacgacctaaacagtcttcactacctaaggaagaaggttgcctccat

SEQ ID NO: 44722 - DNA, 245 bp, Glycine max
  unsure (1)..(245): unsure at all n locations; Clone ID: 701129387H1
gacaacatcccctcacaccggcctcttccaaaaccgcaccaaaccttcttttcctttctcttcttcctccttcaagttcaaacccacatccatcaaatgcgccacccaactccacacccaagctccgcccctcacccactcccaagatcgcgtcttcaacttcgcngcnggncccgccaccctcccggaaaacgtcctcctccgngcccaatccgagctctacaatggcaggatctggcatgagt

SEQ ID NO: 44723 - DNA, 177 bp, Glycine max
  unsure (1)..(177): unsure at all n locations; Clone ID: 701129388H1
gtnatcattcaagtgggaaaagctcttccatgactgnnatngccttcctgttaatccttctaatcacttatacaggcacaacagatgcacaatccggggtatgttatggaagacttggcaacaacttaccaacccctcaagaagttgtggccctctacaatcaagccaacattcgcg

SEQ ID NO: 44724 - DNA, 241 bp, Glycine max
  Clone ID: 701129389H1
ttcctatttacctcagagtcagtgaacgagggacaccctgacaagctctgtgaccaaatctctgatgctgtcctcgacgcttgcctcgaacaggacccagacagcaaggttgcctgcgaaacatgcaccaaaaccaacttggtcatggtcttcggagaaatcacgaccaaggccaatgttgactacgagaagatagtgcgtgacacctgcaggaacatcggctttgtctcaaacgatgtgg

SEQ ID NO: 44725 - DNA, 182 bp, Glycine max
  unsure (1)..(182): unsure at all n locations; Clone ID: 701129390H1
ggttttccctcctttctcagagcttgcatttcccaggatcaatggcaaagctccattttgcgttcagtnnctcacttttgtttctactcagcaatgcctcngctgcaccatccaccactttacccgccaagattgttagtgggtttctctcaaatgcggttcctgcgttcaccaaangggtg

SEQ ID NO: 44726 - DNA, 242 bp, Glycine max
  unsure (1)..(242): unsure at all n locations; Clone ID: 701129391H1
gtggcctcaaattggtctacctaaagatcaaagccctccaccttacaaganaccacatgacctaaagaaggcatggaaggttggtgttctcactgcggtcatcaagcatangtnccctgatattgccaaaattcgcaagcttgtgagggagtctaagtgtcttcaagagaaaatgactgcaaaggnaagtgcaacctggcttgcnatcatcnaccaagaggaagccttggctagngngcttt

SEQ ID NO: 44727 - DNA, 241 bp, Glycine max
  unsure (1)..(241): unsure at all n locations; Clone ID: 701129392H1
ggaaattggactgatcctttcncnctcnctctctctctntctccncaacgcctcttcctttcaatntaatccaacaanaataatgnttcgcnaaanaacgttgaacagatnnnnnnnnnnnnnnnnnnnnnnnnagaatttcaaggtcttgtattgcaaggntattgaggatanganggngtgtgtggaggagagcggtgtttgtgtagaagntgaagagggaacagcaagngggaggccg

SEQ ID NO: 44728 - DNA, 182 bp, Glycine max
  Clone ID: 701129393H1
ggcctcaagagcagtgttattgttggctatgtgtgtgcttccggcgatggttgtggccattcgcccagcaaagaaccctttttgcgtgaagggtcgtgtctactgtgacccttgccgtgctggttttgagacctcagctaccacctacattgctggtgctgagattatgttgcaatgcaaga

SEQ ID NO: 44729 - DNA, 87 bp, Glycine max
  unsure (1)..(87): unsure at all n locations; Clone ID: 701129394H1
ttacaaccatgaagagctcaggaannagctgcctaatcaannnttccgaactggaagtanntgtgatgttattgcacacctgtacnt

SEQ ID NO: 44730 - DNA, 187 bp, Glycine max
  unsure (1)..(187): unsure at all n locations; Clone ID: 701129395H1
gttgaccatggcttcttcattgaggatctcaaggctcctctctcgttcttttctttctgcttccactactactcctttggnttctagaggcggaagtggtgctcttggtgcagggctcaanaaattcagcactgctgctgccattgaagaaccaattaaaccaccaattaaagtagaacacacccgg

SEQ ID NO: 44731 - DNA, 190 bp, Glycine max
  unsure (1)..(190): unsure at all n locations; Clone ID: 701129396H1
gatggattggctttcgtcctcagtcctgggcattacgaaaagtttcagaatgaggnccgttgtactcacttagagccatncatctgcaaccaccagttcgataatgatgatgtgaaaccctttgatataacanngattaagggttattggaaacaggaaattctcaggtacatgtatacccaattggacc

SEQ ID NO: 44732 - DNA, 294 bp, Glycine max
  unsure (1)..(294): unsure at all n locations; Clone ID: 701129401H1
atggcactcatgtcaaagcctctttcaaggttccactggatgcatacantcntggactttgtattctctgagagtgaacatggtggagtttttgataacaaatttggaatggattatcacataccagtttttggaagtattgcaaaggaaccacctttgcatatcatccatatngctgtggagatggccccaattgcaaaagttggaggccttggtgacgttgttactagtctatcccgggctgttcaggatttaaatcacaatgtggacatcattcttccaaagtatgactgt

SEQ ID NO: 44733 - DNA, 289 bp, Glycine max
  Clone ID: 701129402H1
acagattctaatctcttcacaactatcactgtcaatgaacctgctcctggtctgaaggctatttttagcttcaaagttcctgaccaaaggtctggaaaggtggaagttcagtacttgcatgactatgctggaataagcaccagtgttgggttgacagcaaacccaattgtcaacttctctggtgttataggaactaatgttcttgctcttggtgctgatctttcttttgactccaaaattggggagttaacaaaatccaatgctggactgagcttcactaaagatgact

SEQ ID NO: 44734 - DNA, 286 bp, Glycine max
  unsure (1)..(286): unsure at all n locations; Clone ID: 701129403H1
gtttgtttactttccattgattgagcgaaagctttgttttttctgcgatcattttccattgggtggaagaaagtctcaacctttagtcgaaagagcaaggatctgagtgagtgagcgatcatgtgtggtggtgcgattatctccgacttcattccagnnggtcccgccggcggggcgcagcgcgtgaccgccgacatcctgtggccgaatttgaggaagcggttctcgaagtcgctgctggacgatgatttcgaggcagggttcagagaattcgaggatgactcgg

SEQ ID NO: 44735 - DNA, 287 bp, Glycine max
  Clone ID: 701129404H1
accctcgatcactctcacgcgctcctatattcgctcctccaccgtcgctctctcgaacaaccacaacaccatcttcatcacatggcaaacgcagcatctggtatggcagtccatgatgactgcaagttgaggtttttggagctgaaggcaaaaaggacacaccgtttcatagtttttaagattgaggagcagcagaagcaggtcattgtggagaagcttggtgagcctgcccagggctatgaagatttcactgccagccttcctgctgacgagtgccgttatgctgt

SEQ ID NO: 44736 - DNA, 281 bp, Glycine max
  Clone ID: 701129405H1
gtttggatgatatgaatattgcggggtggaatgcaatgatggctggttatgcacagcatggggattatcaatctgcttttgaactgtttgagtctttggaaggttttggacttgtgcctgatgagtatacttttttggcgatattgactgctttgtgtaatgctgggatgtttctggagatttatcggtggtttacgaggatgagagtggattatggtttggaaccgagtttggagcattatacgtgtttggtgggtgcaatggcacgtgctggagaattg

SEQ ID NO: 44737 - DNA, 284 bp, Glycine max
  unsure (1)..(284): unsure at all n locations; Clone ID: 701129406H1
gccattttctctctcactccccaattcccaatactacctttcgtctcagagccatggcgcctcacagcacgcctcttgaactcaatcgcttcgccgaggtcggtaacaaagtcgccgatgctgccggagaagttatccgcaaatacttcagaaaaaacttcgacgttattcacaaaacatgatctcagtccagtaaccatngcagatcaatctgctgaggaggctatggtttcaatcatactagacaatttcccttctcatgccatttacggagagnaaagggg

SEQ ID NO: 44738 - DNA, 279 bp, Glycine max
  unsure (1)..(279): unsure at all n locations; Clone ID: 701129408H1
attaggaagttgaacttgaagtctttgaggcttaaaattgggttggtgcagcaagagccagcactttttgcagcaagcattttcgagaacattgcatatgggaaagaaggtgcaaccgaggctgaggtgattgaggccgcgcgtgctgcgaacgtgcacggatttgtgagtggtttgcctgaaggttacaagacaccggttggcgaaanaggctccnnnnctctgngagggnaaangccntgnttncccattacnannncccgtntaaggccccnantt

SEQ ID NO: 44739 - DNA, 280 bp, Glycine max
  unsure (1)..(280): unsure at all n locations; Clone ID: 701129409H1
caactatgagcaaggattatctaatcatactttctctccttctttccacngngcntanaacangaaaaannnnnnnnnnnnnnnnnnncctctatcntgggaagggcttctcccatcgcaaattgtctcccagttatcacanncacaanaccattgacgntcctangcagtnatcttcgatgctggtagcangggaagccgtgtacatgtctatcgtttnaacnaacaangganccctgggatggccaaaacctgnagtggttnanaaagactagncggt

SEQ ID NO: 44740 - DNA, 283 bp, Glycine max
  unsure (1)..(283): unsure at all n locations; Clone ID: 701129412H1
gttctgatggctctgcgatcattctcttacgatgtgttcctcagcttccgaggggaagatactcgttatggtttcactggctatctctacaatgtccttcgggaaaggggaattcacaccttcattgatgacgacgagccccaggaaggggacgaaatcacgacagcacttgaggcggctattgagaagtccaagattttcatcatngtgctctctgaaaactangcatctcccccctttggttaaaactcacncactcantcntaaatttnacagnggaaaa

SEQ ID NO: 44741 - DNA, 283 bp, Glycine max
  unsure (1)..(283): unsure at all n locations; Clone ID: 701129413H1
tagggtatagagatcaaagagcagcaatttactagtaagatatatcacgacgctaacaagttctatgcctatgaaaagaatgcccgattctgtggaaatcaacctcgaacatgtagatgaggccaaagcagcagacaaagtgtccaactccaaccataataaggaagctagtaatggcaaaaaaaaaaggcgaccagaaaatcaatgataccacaaaaggtcaaaatagtacttacactaacatcatgtaatcacagtgtcaanggctctatatncggnggcc

SEQ ID NO: 44742 - DNA, 285 bp, Glycine max
  unsure (1)..(285): unsure at all n locations; Clone ID: 701129414H1
cgccgttgtctccgccatcgctgcctccgccatcccctccctcgtcctcgcccgcggccaccgcatgcgagtccgtcccggagctcccactcgtcgttagcgactccgccgagagcgtcgagaaaacaaaagaagcaatcaaagtcctcaagcagatcggagcattccctgacgcagagaaagcaaaagacagtcgcagtttcgtcctgnaaagggnaaantgngnancngncgatanntctcagggggggnnccttnttngtaaaggnangaaggcccnactnt

SEQ ID NO: 44743 - DNA, 285 bp, Glycine max
  unsure (1)..(285): unsure at all n locations; Clone ID: 701129415H1
aaagttccctcctttttcactccaaccaccccccacgaaacgaatccatgaggagttcggagtgacccacgtacaccagcttccgaatccaaccccattccgnaaaagggtactttcttcaacgatggttganaactcgacgctaggncncttncacnannantngctcgntctncgctgctgggtccccgngttcttnagctggnanaagaccctntngactttgtatggaggnccgtctgcggngggttttgctgnggnagagnnaantgggtngtttttntg

SEQ ID NO: 44744 - DNA, 275 bp, Glycine max
  unsure (1)..(275): unsure at all n locations; Clone ID: 701129416H1
atttgttagtcacagactggcaatatagagtatatttgctaattttctctacaggagctggcttattgacattggaggatttgcaaagaaagtgaaaagcactactctatcttcagctgatcaaatcaaagattgtggggcatatcgtgaatgtccaaactgttcttatcatattgataacagtgatgtttctactgagtggcctggctttcctcttggtgtaaagtttgancctcctgatgnagacctcttanaccttnagcagcaaangnggg

SEQ ID NO: 44745 - DNA, 286 bp, Glycine max
  Clone ID: 701129418H1
ggattccaagtttttctctctttttcttttttccccagcctaaataccatacgagtttatcttcaatccttgttggtggagaattgggcgaatatggcttgaactactttgatcgttgtgcctgtcagctgcattcaattttcacaccgaaggtttctttcatggatgatggtccttgggaaataaaggttattcgtgatcacttttgatttccaacatctggtgtagaatctcttgaggacggaacgccttctattacaaaacctggaactgctaaattctttgg

SEQ ID NO: 44746 - DNA, 284 bp, Glycine max
  Clone ID: 701129419H1
ggagatgaggaacggtggtgaggattatagcaatggtcatggtggtggtgtaagggacttgtatggagaggattgtgccacagaggaccagcttatcaccccatggactttctctgtggccagtggatgcagtttgctgagagatccacgctacaacaaaggactggcctttactgagggagagagagatgctcattacttgcgtggccttttgcctccagctgtcttcaatcaagaacttcaggaaaagaggttgatgcacaatcttcgccagtatgaggttc

SEQ ID NO: 44747 - DNA, 281 bp, Glycine max
  unsure (1)..(281): unsure at all n locations; Clone ID: 701129420H1
cttccgaagacctttgggtcgagtatcttcggatggaacttaccttaccttaataagttgaaggcacgcaaggttgctttaggtgaggatcagggaactctcacccgtgatcctaggagttctgatgaaaaacattggagggatgaaaacagtgagctgtttatgcctcttggtgaaagaggggatggtgatggtgatgatgatagagcaaatgttgnaagtgatgngtcgnaaaannagcaggngctntttgaagnncgtggtatgatatttntcaaang

SEQ ID NO: 44748 - DNA, 280 bp, Glycine max
  Clone ID: 701129421H1
cgaagacacgttcttctctcaagtgctgaaaaaaaggtaccattgtccatttctcgatccgtaaattttgttgtgcgttttcgttattttcgcgcatgttctgtaccgatcttttgtttcgcatcgtgaatattattcggaactctcttcttcgtttttctttgctcgaacaatttcggattttctggtctgaatttttctcttttcattataaccgaatattagagttccttcaaccatcttttggagatgttgatcaccgactgccacgaatcaattg

SEQ ID NO: 44749 - DNA, 281 bp, Glycine max
  unsure (1)..(281): unsure at all n locations; Clone ID: 701129422H1
ggaaattcagactctcactcttcccttctctcctctccttagcttccactcattgnacacaaaattctgcagagacagagagaaaagtgttgaacatggcaggaagagaagttcgtgaatacaccaacctcagcgaccccaaagataagaaatggggcaaggggaaagataagattgacgatgaagacattactttccaacgcatggttgcaaagggatatgggctncctgtaatngggnggctganncaagcatngccagaggttcnngggacnccnntt

SEQ ID NO: 44750 - DNA, 278 bp, Glycine max
  unsure (1)..(278): unsure at all n locations; Clone ID: 701129423H1
agagaaatggagaatgcggaggagatgatgcagcaaaacgacgaggttttgtcggttgaacttccagctccttccggttggaataaactgtttttccctaagaaactgggaacaccaagaaaaagtgagattgtattcattgctccaactggagaggagatcagtaccaaaaaacaattggagcagtacctaaaggcacatcctggcaatcctgtccatttcagatttncctgggnatntggtganccccctaggcgatcagcaggnntcagtgagag

SEQ ID NO: 44751 - DNA, 282 bp, Glycine max
  Clone ID: 701129424H1
agagtgttgacgctccatcaagatgggtatttctagggattccatgcacaagaggcgtgccactggtggcaagaagaaggcatggagaaagaagagaaagtatgagcttgggcgtcaggccgcaaacaccaagttatcaagcaacaaaactatccggaggattcgtgttcgaggtggcaatgttaaatggagggcattgaggttggataccggcaattactcatggggtagtgaagcagttactcgcaagactcgtattctagatgttgtttacaatgcctc

SEQ ID NO: 44752 - DNA, 281 bp, Glycine max
  unsure (1)..(281): unsure at all n locations; Clone ID: 701129425H1
cacgcttgagaatctgagttcagacttggaacctttcgttgttcctaatctgccacaccatatcgaaattcncgaggtctcaggttcctatttttctgagaagcccgtctccgtttcctgataggatgaggcagttagaggagaagagtttcggcattgttaccaacagcttctatgacttggaacnggattatgcggattnnttaaaaaagggaagganggcagggnttanaggccnatnttccnttnaaaaagantgacaaaanaaanncggggggggc

SEQ ID NO: 44753 - DNA, 277 bp, Glycine max
  unsure (1)..(277): unsure at all n locations; Clone ID: 701129427H1
cttgagaaacgtgggggagctacttggcgttgcaataagaangggttgggtgctaaccctgcacaagttacaggaatttagtgcgattggtttgtatgaaaggtagagtccaattcacgctgagcttaaagaaccttatgcttgcactatgtccacttgattggcttatcatatataacattcttatgttctatcttttgtctgctggaaacagtttggatgttaataagntactancngaantngaggagaaganttggcttgagaagtgggcnca

SEQ ID NO: 44754 - DNA, 285 bp, Glycine max
  unsure (1)..(285): unsure at all n locations; Clone ID: 701129428H1
gatcccttgcaaccctagtcttcgaattgccccatatcacaaaccacattaaaaaaagactaccacgtattcttctnctannnnnnnnnnnnnnnnnnnnnnnnnnnnnnnntcanagtgccaatggcggatccaatcgcgaaggctctgatcgcgtttgcgctcttagcttccctcttgctgtgttcgcacgcttcctccgacgttcccttcatngttgctcacaagngggcctcccanaacagactnaagtccggcgcngaaagggtctcggncacaagnnat

SEQ ID NO: 44755 - DNA, 265 bp, Glycine max
  unsure (1)..(265): unsure at all n locations; Clone ID: 701129429H1
gttcatccatagatacctctgaaaaccaaattagactcttgcaccgcacnaatggcaataaaatactagcataatttatttgtgagtctcaaaaccttagcacacaatatatatacactgcatagccttggggtcttcaaaatcatcaattcaatggcttccctcatgagcaccatcctcatgcaaaggtcttcttctattcacttgctgctgggaggttgttctnccacancaacagcaaccattatngattcccttcnacttg

SEQ ID NO: 44756 - DNA, 281 bp, Glycine max
  unsure (1)..(281): unsure at all n locations; Clone ID: 701129430H1
gaattattttccctcttttctctcagtttttagtttccgagaagaagtacggttacggaatcttgctggaaattgaggtggcttttgacttttctattgtgattttctgttatcatgggatcagcttgttgtgttgcngcaaaggatcnaaatctgccnaacagaactggggatganaattgcaaaaaaatgtgggngttccncnaccaggggcttccaaggggaaacccgggggnttttcncnnaaaaaatggaaannnntcnangaccacncccggggg

SEQ ID NO: 44757 - DNA, 285 bp, Glycine max
  unsure (1)..(285): unsure at all n locations; Clone ID: 701129431H1
ctaagaccctacgcgcacatcttgcaactccaatcgacatagcagcaatgtctacgctcgaaattgaagctcgagatgtcatcaagattgtgcttcagttttgcaaagaaaattcgttgcatcagacttttcagatgctgcagaacgaatgccaggtttctctgaacaccgttgacagcattgagacctttgttgctgatattaatagtggaaggtgggatgcaatattgcctcaagtttctcaactacaagcttcccaggaatnagtggggaggtttgtacgna

SEQ ID NO: 44758 - DNA, 274 bp, Glycine max
  unsure (1)..(274): unsure at all n locations; Clone ID: 701129432H1
atttgttagtcacagactggcaatatagagtatatttgctaattttctctacaggagctggcttattgacattggaggatttgcaaagaaagtgaaaagcactactctatcttcagctgatcaaatcaaagattgtggggcatatcgtgaatgtccaaactgttcttatcatantgataacagtgatgtttctactgagtggcctgggcttcctcatggtgtaaagtntnatccnncngnatgtnnnactntngaactttagcngcaaatgtgg

SEQ ID NO: 44759 - DNA, 285 bp, Glycine max
  unsure (1)..(285): unsure at all n locations; Clone ID: 701129433H1
ccccgacgcgcttttgatttgcaacggcttcaaggatgcggagtacatttctcttgccctggttgccaacaagcttgcgctcaacaccgtgatngttctggagcaggaagaggaggttgatttgatcgttgaattgagcaagaagctctgcattaagcccgtgattgggctcgtgcgaanttagaaccaagcattctgggcatttcggtgggacttcaggagagaaggggaagtttgggctcaccaccgcacagattctgagggttgtnaagaagctggcccagc

SEQ ID NO: 44760 - DNA, 286 bp, Glycine max
  unsure (1)..(286): unsure at all n locations; Clone ID: 701129434H1
tctagggttatcatatctccatttccatttcctctctctcagtttccaagaatcttaagctatgggaaagtcttacccaaccgtgagcgctgattaccagaaggccgttgagaaggcgaagaagaagctcagaggcttcatcgctgagaagagatgcgctcctnctaatgctccgtttggcatggcactctgctggaacttacgacgtgagctcgaagaccggtggtcccttcggaaccataaagcacccctccgaactcgctcacggcgctaacaacggtcttga

SEQ ID NO: 44761 - DNA, 283 bp, Glycine max
  Clone ID: 701129435H1
catcccttcttcaatgatctgcgggacccaaatgcatgcttgcctaatgggcgacctctacctcctttgttcaacttcacatctcaaggtaagatgatttgaacttacattttggttaagtgatacatttcttgccttaggcattgctcatgtaagaaaacaatgcagaactggctaatgcacctgaagagttgcgccaacgcctcattcctgagcatgcaaggagttgaatcaatttgaaagttgaaacatctctagggcattgtaaatgggttttgaatga

SEQ ID NO: 44762 - DNA, 281 bp, Glycine max
  Clone ID: 701129436H1
gaagtgtaagttttcattcaatggccagcgctcagctctcagcaatatcttcgtcgatctctacggcgtcgtttgaagggcttcgaccttcggctgttcagtttgcttccgcgggcagaattagaattggcaatctctcccaaaggtctttccggggcttggttgtcaaagccgccaccgttgttgcccccaaatacaccgcgattaagcctctgggagacagagtgctgataaaaattaaggaagcagaggagaaaactgagggtgggattttgcttcca

SEQ ID NO: 44763 - DNA, 279 bp, Glycine max
  unsure (1)..(279): unsure at all n locations; Clone ID: 701129437H1
attgcatcgctgtccatggctaccatcgttagcatcaaggcccgccagatcttcgacagtcgtggcaatccaactgtcgaggtggatttgacttgctccgatggtacttttgccagagctgctgttccaagtggtgcatccactgggatttatgaggcccttgaattgagagatggaggntctgactaccttggaaagggtgtatcaaaggctgttgacaatgtgaacaccgtcattggccctgctttgattggcaaggacccaactgagcagactgct

SEQ ID NO: 44764 - DNA, 279 bp, Glycine max
  unsure (1)..(279): unsure at all n locations; Clone ID: 701129438H1
attgccattggctctctttctttgccgtaccatttgaattgaatgtgattgcaattgcaaatccccccttcaattcaattactactttcacgacctaatctaacccttcgctctgctctgctctcacttcancatattcacacccagatggaaactgtntgtctccantgtggcgacagaggctttccagagacatgggttttttgnaccgaatgtatggcttangacgntgcanaggtattgttggtcnacccccngnagngnnntgangnnaganac

SEQ ID NO: 44765 - DNA, 274 bp, Glycine max
  unsure (1)..(274): unsure at all n locations; Clone ID: 701129439H1
gaccaggcttccaacatcacaagaaggctggagctatgaatgctttgattcgagtttctgctgtacttgaccaatggtgcatatcttctgaatgtggattgtgatcactatttcaataatagcaaagccctcaaagaagccatgtgtttcatgatggatcctgttcttggaaagaagacatgctangtncaattncctcagagntttgncggcnttgacttgcacgatcgatatgccanncgnaaaaggggtcctngatcccaccagaangggg

SEQ ID NO: 44766 - DNA, 276 bp, Glycine max
  unsure (1)..(276): unsure at all n locations; Clone ID: 701129440H1
gatcccccatctctggacctgcttgcaagggaaggaataattgctcttcggagagcaaagaggagaaacatggaaagattggttttggcctgtggaggggaggcagtaaactctgtagatgatttgactcctgaatgtctgggttgggcaggattggtatatgaacatgtccttggtgaagagaaatatacattcgtagaaaatgttaagaatccttttccctgnacaatctggattaaaggncctaangcccatacataccncagnttaaagngc

SEQ ID NO: 44767 - DNA, 191 bp, Glycine max
  unsure (1)..(191): unsure at all n locations; Clone ID: 701129441H1
gacgtggccctgagcatctcaaagctcctgttgtcgaaagaagctcgggacaagaaccaccgtgtantcgccgctgtcgttgcacgttgttctgagnatcatcgccgctggctccaagggccccacactngagcagcttctctccntcctnngatcnaaatcnaccgatcatctcaactcctnngnttgtc

SEQ ID NO: 44768 - DNA, 279 bp, Glycine max
  unsure (1)..(279): unsure at all n locations; Clone ID: 701129444H1
gaatttcgctttcctgttgaccatgtatgttatttatttttttccttggcaaaaatattagtcaaaatatttacttaaattctgtgattttcttatgtgcttgatgtaaccgtgtatgtcataatatccttactggaaatatgaaattctcttcagcttatcgtgagaggcgggaacagaaggctaatgcaggacataggtaagcaaaacagagtattttggatgctttattaggttactttgatctcgtgcttccggttnaaggtttnaagcagnagc

SEQ ID NO: 44769 - DNA, 279 bp, Glycine max
  unsure (1)..(279): unsure at all n locations; Clone ID: 701129446H1
gctgaatctcagtggatcgtggcagcaaggccactctgccacttacaataccccgtgtttattaattgctgacgattatcactaaaacaaacactaggtatgagttgattcataagaaaccctagcctctgccaccaaaacctttctttgaaactttttaagtcagagagtctttgttgagacgaaaaacaaaaaccatgtcatcatcaacaatacggagagatctagaaagtggaggggcgaacaagancatcaacaacntaagctacatgcngcncc

SEQ ID NO: 44770 - DNA, 280 bp, Glycine max
  unsure (1)..(280): unsure at all n locations; Clone ID: 701129447H1
ggaattccggtgaagctgctccacgaggcttcggggcacgtggtgacggtgnagctcaagagcggagaactctacagaggcagcatgatcgagtgcgaggacaactggaactgccaactcgagagcatcacctacactgccaaggatggcaaaacatcgcaacttgagcatgtttttattcgaggaagcaaagtcaggtttatggtcatcccagacatgctgaagaagcgcctatgtttaagcgttnggatacaanantcaggggcangggttctttttt

SEQ ID NO: 44771 - DNA, 283 bp, Glycine max
  unsure (1)..(283): unsure at all n locations; Clone ID: 701129448H1
gcattttcccgccacaacgcgagcaagaggctccatgttcccgccaaatgcaaagccctagttagcggcaaaaaaaaggaaccaccaccctccttttcttctattcttctaaatctctctctttctgtttgttatcagaggcttcgatacgacaatggatttgagcgaggaagttagggcagctcacaagcgagaattctccgatttcttagatcaagatgttggaaagggcatatacatggacgaaatcaaaaccctaatcaaccacagngtcacggcttca

SEQ ID NO: 44772 - DNA, 285 bp, Glycine max
  unsure (1)..(285): unsure at all n locations; Clone ID: 701129449H1
ggttctctcagctttcacctttccaggctcggatccaaagaaaaatctcaactttcttcaacaattcatctccacaatttctgggtagtggctttttttagcaggaatggctcaacgttctaatgttccaatgttaggcaagagtgaagagaatgtttcagatacagctcattctgacaaagcccagaaaggtcagccaggttcaaagatgataatccaaatgncaccaaggaaaattcagatgtagtttcttcngctggcctaccccattcaaaacccagagtt

SEQ ID NO: 44773 - DNA, 282 bp, Glycine max
  unsure (1)..(282): unsure at all n locations; Clone ID: 701129450H1
gttttcttcgttgctacaattttngtagcatggcaatgccatgcgtaacgatatgttccctctccgaatgaacactggctatggtgcccgtactccgacggtgaaatgcgcaagttggaggcttactgtggaagcacacaacatctttggctncgagaccattcctgaagagtgcgttgaagcaacaaaggaatacatccatggcgaacaatatagatcagactccaaaacagttaaccaacaagcttacttttatgccaganncctcgaagtccctcccac

SEQ ID NO: 44774 - DNA, 282 bp, Glycine max
  Clone ID: 701129451H1
gggaggccatatttcttatagaaaaatctgacattcttcgaacaatttcaacaatgagggtcgatgttctatacaacaatgagttgccttaagcttctcaaacttgaccatttggactttaacgtcaaaatcaattttttttcaggaacacttgttaagctttccaatgaattaggatatcttcgttgggaaaagtatccttttgagtgtttgccaccaagttttgagcccgacaaacttgttgagttgattctacctaaaagcaacatcaaacaactttgg

SEQ ID NO: 44775 - DNA, 276 bp, Glycine max
  unsure (1)..(276): unsure at all n locations; Clone ID: 701129453H1
cttatgtaacaaagtacagangagttgtttctgctcaaactcaccgtgaagaaatcatccaagatctttataatacacatgaagatcctgtgaggggaaagacacattcgggaattatcaggtactggggacacgggattgatgtggtatttctgctcagactcaccgtgaagaaatcatccaattgcttttcttgcctctgttttttcagggaattacttcgtgctttccgtttatcaactaagactaagcccagagaggnttatnttctacagg

SEQ ID NO: 44776 - DNA, 277 bp, Glycine max
  unsure (1)..(277): unsure at all n locations; Clone ID: 701129454H1
cgagcttgcagcagcgatttctcatttcatttttcacacttcaacaatgncggaaaaccttcaaatacatcatcctcggtggaggagtttccgctggttatgcggcgagggagtttgccaaacagggcgttaagccaggggagttggctatcatttcgaaagaagcggtagcaccttatgaacgtcctgctctgagcaaggcttacctttttccagagtcccctgctagacttcctgggttccatgtctgtgttggaagtggaggagaaaggttgct

SEQ ID NO: 44777 - DNA, 272 bp, Glycine max
  unsure (1)..(272): unsure at all n locations; Clone ID: 701129455H1
agttcacccaaacacttcaaacaaaaccatgcattgaagcctcttaacaagttccaataatgagagaacaaggggtctttcatacttgaggaacatggccagacagagaggtcccagtgggtgcttgattctcccaaccctcctcctctctggaagaagctatttagttctgtcaaggaaaccattctgcctcatggcaacaagttctgcttctcatccaagaggaaanccatcatggacatgcactctcatgctgcagantttgtnccaat

SEQ ID NO: 44778 - DNA, 277 bp, Glycine max
  unsure (1)..(277): unsure at all n locations; Clone ID: 701129456H1
gcggactcgccggatgattcttcgaggtatcccggaaacggcaaggacatggaggacattacatcctctgttgccaatgcaagtagctcttcaggctcaggcattcctggcaaagggttgtctaaagtgaccacattgccggcagacatatcacaagataaatcggagtcaagttcaagtaagtttaagatggaaaggtcaaaaacagagaggcagagacacctaagtcctgaagatgcagcacaatttttgaatgacaatttcntatccaagagac

SEQ ID NO: 44779 - DNA, 279 bp, Glycine max
  unsure (1)..(279): unsure at all n locations; Clone ID: 701129457H1
gtgtaactgggcagattgttaangttacaactcctgcaaattttttccatgttttactgtgggntnttgtagttggtacagtgatttgatttaagtgacaaagcccttcctcctctaaccntacantagcctntctnnctntctatgtnctctctatcncacnctcatcncactttcttttctnttcttttctntntccgaatctgaaantntncccnacaaaatccagtccctgtcctcaaagacagatccgaaagtggaggccaatnnantaaccct

SEQ ID NO: 44780 - DNA, 186 bp, Glycine max
  unsure (1)..(186): unsure at all n locations; Clone ID: 701129459H1
cttgttgtttggagcgatccgagaaaaactctgtaaacatgtnggtttaccaggacctccttacaggtgatgagcttctctctgactccttccgttacaaggaaattgagaatggaatgctgtgggaagttgaggggaagtgggttgttaaaggagcagttgatgtagacattggtgcaaacccnc

SEQ ID NO: 44781 - DNA, 188 bp, Glycine max
  unsure (1)..(188): unsure at all n locations; Clone ID: 701129460H1
gtggnagtnccaccgccacagccgtnggnncaagtctctaaagtactctttgaaggagacnttcttcccngatgacccttgaggcagttcaagaacaagccagcntccaagaagttcatgcttggccttcagtncnncntccccatttncgaangggntcccaaatacacctttacagtncttgaaag

SEQ ID NO: 44782 - DNA, 280 bp, Glycine max
  unsure (1)..(280): unsure at all n locations; Clone ID: 701129461H1
cgcaaaccttctcagaaacttgtccttccacgcgcgccgtcttcgtttctctcccactccttccatcttctctcctacagctacagcacccacctccttctcttctcgctcccatgtccccgacaaaccccactccctccttgaagacattagcaacgaagagttgaagaggcgtgtggcaaagttcaagagggggatgctgaggcaattccttctgtgtttgaggctatatngcagaggtatttagcagggaagcctatagaagctgatgaggagttgt

SEQ ID NO: 44783 - DNA, 187 bp, Glycine max
  unsure (1)..(187): unsure at all n locations; Clone ID: 701129462H1
gaaaaaggagggaaatgctgccaaatttgttattaggtcacaggcactcaagcagcttcaaatcagtttacccctttttaggaaactatgtattttgaaaggtgtaactccccgggagcccaagaaaaagttcaagggaactcatcagacttattaccatgtcaaggatgttncctccttcannang

SEQ ID NO: 44784 - DNA, 276 bp, Glycine max
  unsure (1)..(276): unsure at all n locations; Clone ID: 701129464H1
gggagagcgaataaaaaaaggcaaatcaaattcgagagaaggagagaatttagagagggaaaggatgaagatcacggcgttgttggtgcttaaatgcacgggcgagggatccgatccggtgattctggcaaacgcttccgatgtcagccacttcggctacttccagcgttccagcgttaaggaattcatcgttttcgttggtcgtacatcgccatcgcattcctgcaggccaacgccaatcggtacagcangagggtacaggtgcccactacaccg

SEQ ID NO: 44785 - DNA, 278 bp, Glycine max
  unsure (1)..(278): unsure at all n locations; Clone ID: 701129466H1
gctagctccaacaatgggttctagcagattatcattcattttagtacttgtgcttgtaacattttcatccatgatcattgactcaagggttgcagaggcacgtaccctgccaaaatcagccttattgccttccaaagttgatatacctactgctgttcctcttccagccttagtgccattgccaccactggcaaatttgcctgttactctccctccagtgcctgaatacctgcagtacctaaagtaccantcctgaagtaatagttaataacgccaaa

SEQ ID NO: 44786 - DNA, 269 bp, Glycine max
  Clone ID: 701129467H1
tcataaatcacatagctagttgtttaaagtgagagaaaaagaaagaagaaaatggcaaactttccagttgttgacatggggaaacttaacaccgaagagagagcagcagccatggagattataaaagatgcctgtgagaactggggtttctttgagttggtgaaccatgggatatccattgagttgatggacactgtggagaggctcacaaaagagcactacaagaagactatggagcaaaggttcaaagaaatggtggccagcaaagg

SEQ ID NO: 44787 - DNA, 278 bp, Glycine max
  unsure (1)..(278): unsure at all n locations; Clone ID: 701129468H1
gcggttctgcctgcaaattttcttcccctcaatctatattactcaggtggtgttcctgttcccctcaagcacccctgagattcattcccaaaaagcttaaaaaattctattcaattcaaattctaaatttaatttccatttcgttttcgttttctgttttgatttgatcttccactggcgtccgatggcttcaccgacaagaacaccgtgttcagaaagctcanggcgaagtccgaaaataagatgtgtttcgattgcaatgcgaagaaccctacctg

SEQ ID NO: 44788 - DNA, 274 bp, Glycine max
  unsure (1)..(274): unsure at all n locations; Clone ID: 701129469H1
cgggtatggattggaagcagtaccggctcgtacccaagaacaagaacatggattatggcttcctgcttttgctcctcttcttccatatcttccttcctcactcctctggtaaacccagtggagtgtgtgtttctcaaggaggtcgttttcctcccttcaaatcagagggtagcactcccaaaaagggtcctaaagatttgactctttgccggatctttcgcaaaaagacttgctgcgatgtaacccatacacatcctgcattcngtctgtaagg

SEQ ID NO: 44789 - DNA, 269 bp, Glycine max
  unsure (1)..(269): unsure at all n locations; Clone ID: 701129470H1
caggaatcctcaatctgaaactagcttgacgccgctctgccacggctgagaaaatagcgacgcggaaacacgctcgtcttcacgatccagcgattccgctctccgacgagtctgcgtaaggtgaagaatcacgaggccagccgccggtgaagaatcgcgcgattcgtctggaaatcgcgattcaagctcgattcatctcngtnatanagtttcacccagtttcgggaacaaaaagaagacncngnggtnntttancagnnaaaatttnt

SEQ ID NO: 44790 - DNA, 271 bp, Glycine max
  unsure (1)..(271): unsure at all n locations; Clone ID: 701129471H1
ggcagcatcaagagattttttactccgcacgaatcatcaccgtcagatcaaggatcaagggcgggagcntcgcaggagcgaactattttaaagggagtaacggggatagcacatccaggggagatcttagcggtgctgggcccatcggggagcggaaaatcaacgctccttaacgcgctcgcagggagactccacggacacggtctcaccggaacantccncgcaaactcgagcaaactcaccaaccggttctcggcgaccgttttgtccc

SEQ ID NO: 44791 - DNA, 275 bp, Glycine max
  unsure (1)..(275): unsure at all n locations; Clone ID: 701129473H1
caaggggaagaaattcaatgccatttgccacttttttggttatcaagctcgtggatctctgccatcaaaatttgactgtgattacgcatatgttcttggacacatctgctaccacatacttgccgctggtctaaatggatacatggcaactgtaactaacctgaagantcntgtaaacaagnggcgatgtggggctggcnccaatagcatctangangantgtaaanngngggtnnnaaancnaggacccacntcngnggnaanccgtttttccc

SEQ ID NO: 44792 - DNA, 276 bp, Glycine max
  unsure (1)..(276): unsure at all n locations; Clone ID: 701129474H1
gtgtcacttcccaatagaaaaattacagcatntataagtaaccatacaagtataagctctattgtagtatatatagagaagttgtgagcatagctttcttcatcacttcatagtaagcactatagaaaaaacgacattcattcatctatggctacccttattgctcccagcaaccactctccccaagaagacgctgaggttctcagaaaggcttttgagggntgggggctgatgagaaaccngtcatagtaatatggggtcatagaactgtttatc

SEQ ID NO: 44793 - DNA, 277 bp, Glycine max
  unsure (1)..(277): unsure at all n locations; Clone ID: 701129476H1
atagtgtacacctagttaggcaaacacaccaaacaccaaacaccaaactagttggctcaattctctttgaatggctttggaggctttgaattcaccaacagcagccaccactccgttccgtggctaccnnnnnnnnnnnnnnnnnnnnnnnnctgaccttcacttacgtgagccttgggctaaaaggaaacgctccaaacgaccgcgttttgagacggaggaagagtacctcgctctttgcctcatcangctcgcacaaagnggtaacaccagaaac

SEQ ID NO: 44794 - DNA, 277 bp, Glycine max
  unsure (1)..(277): unsure at all n locations; Clone ID: 701129477H1
atccctcttgatttgaaggttgttttgtgcttatagataaaagttctgccaaatcaagaggggttttcagatcatannnnnnnnnnnnnnnntaaacaatggctaagttctttgctgctatgatcttggcactcattgccatttccatgcttcaaacagtggttatggctgctaatgagcaaggaggccacttgtatgacaacaagagcaaatatggaagtgggagtgtcaagagataccaatgcccatcacaatgctcgaggagatgtagccagcc

SEQ ID NO: 44795 - DNA, 258 bp, Glycine max
  unsure (1)..(258): unsure at all n locations; Clone ID: 701129478H1
tctgtgtaattcggaaccactantcgctgaaccatccanaatcgctctgctttgagttggcgaaggttataaattgtcatgggaaacagatttgtcaggggaaacaaattggagaagcaagaaaaggatgacataatattactcaagattgtacctcccgtggaccagatttatgctaaatggcttgccagagaccttgcaaganttcacagctttaactccaaaangtattcgtgcagtgcagccgccggattntna

SEQ ID NO: 44796 - DNA, 277 bp, Glycine max
  unsure (1)..(277): unsure at all n locations; Clone ID: 701129479H1
aaaagagcaaacaaatattgcttccagcaaaaaccgaccaacagccgaggaatataacaagcaccccagggatacagaaattccagtgcctaggtcaatgcagggaccacaaagaattccactagcaaaacctggaaaagttgttgggcccgttgttccttacgagtanggtaacattgtcaaggattcatatgatcctaggtctttatcagaggttctgtgcttcctacacaancngttccccncagnatttcttatcaaagtccggcanggaanc

SEQ ID NO: 44797 - DNA, 287 bp, Glycine max
  unsure (1)..(287): unsure at all n locations; Clone ID: 701129480H1
atgaacttcgcgatcttgtattgctagataataatagctttggtgtgataatacgtgtagaaagtgaggcatttcaggttcttaaggggattcctgaacagacctgnagtngtgcttantaaattaagngagatcaaatgncaagntagntaaganaataaagtgtgccaggataggnttaagantacagtntgcgtcaanggatgttgtncggaccgttcgatggtnccngnnaanggnnancagggccctgaggngcaccntangtggggnnctcttnttccncc

SEQ ID NO: 44798 - DNA, 283 bp, Glycine max
  unsure (1)..(283): unsure at all n locations; Clone ID: 701129481H1
caaacacacactcgtcgcgaaggtgaagacaaagagttcagtttctggggctcatcaaacatcataccttctgaaaatgattgtgatcaaccacaaggtaatgaatcaaggctcaaaaaggaagcatactttggagaaaccacaccaaagaaaaagccttaaatatgagtattcacggttttgttcaacagtttcagaccccttcaaggagcaaagctatttcagaaggacaaagggaacttatggagatgatgcaagacatgcntnnttctggttatgaaac

SEQ ID NO: 44799 - DNA, 276 bp, Glycine max
  unsure (1)..(276): unsure at all n locations; Clone ID: 701129482H1
gtaacctggcttcgtgcctatcctccaccctcaacacagccntcctttcctcttctccttttctttaccaattttataataatatatttatatctttnctnttccnnnttaccatnncgatcccaattcttcctcacaccattnnnanacnacagggttaggtttaggtcccttgtctggtctggtgtgcaattctccccanacaataacaatacacccactttatcaaccatcaatcaatatacctagtagtgattagatttagtgatcgatccc

SEQ ID NO: 44800 - DNA, 273 bp, Glycine max
  unsure (1)..(273): unsure at all n locations; Clone ID: 701129484H1
ggaggttggtgctggtgaccagggtcacatgtttggctatgccactgatgaaacccctgagtacatgcccctcagccatgtccttgcaaccaaactcggtgctcgcctcaccgaggttaggaaaaatggtacctgtgcttggctgaggccagatggcaagacacaagtaactgttgagtactacaatgacaatggtgccatggttccagttcgtgtccacantgtcntaatttccacccancatgatcctnctgtgagcatgaccaaattggt

SEQ ID NO: 44801 - DNA, 272 bp, Glycine max
  unsure (1)..(272): unsure at all n locations; Clone ID: 701129485H1
ctgacatcattgatggtttgggtgctgagactggtcacgtgataagaaccagcgttggtggccgaaatggtcaatctaagcagaatgttagttatatttctgagcatgttgtgggaacaggctcttttggtgttgtttttcaagccaaatgtagagaaacgggagaaattgtggccatcaagaaagttctccaggacaagcgctacaagaatagagagttacaaattatgcaaatgctggatcatccaaatattgttgccctnaggcattgt

SEQ ID NO: 44802 - DNA, 274 bp, Glycine max
  unsure (1)..(274): unsure at all n locations; Clone ID: 701129486H1
gagggtttctaatgaagaggctaagaaagtagagatttccaaacttcaaaagatgttagaagctctgaatcttgaattggatgcagctaaattggcaaaaattaatgagtgcaacaagaatgctgttctgcaaaatcaatttgaattgtcagtaaaggaaaagtctgctttaaaaagagagctagttgcagtggatganttacgnaaggacaatgcctcatnaaaggttccnttgggaggcttntganaaggaatgccacaccctaagnncttg

SEQ ID NO: 44803 - DNA, 269 bp, Glycine max
  unsure (1)..(269): unsure at all n locations; Clone ID: 701129487H1
ctcaaagcctgttggagcgcttgatactaaacgatttgaggtatttgaagatagataccgtaacttctgtgatcctgatatacccagtttctactatggatctcattactcaagtatgggcattgtgctttattaccttcttagattggagccctttacctctcttcaccgtaatctgcagggtggtaaatttgatcatgtgaccgtctttttcanggtattgagggtacctacagaaattgccttacaaatactagtgatgtgaaggc

SEQ ID NO: 44804 - DNA, 274 bp, Glycine max
  unsure (1)..(274): unsure at all n locations; Clone ID: 701129488H1
ggaagccagaggagatggaagaagagggttctcagcagccacagttggtgcttgccgagaagctattccttctccgacaacccgttcaagacattgacaaggttcgctacaaggaggatgttttcactcacatcaaggaaaacgngatggtccctttgtacgagaccctagtcgccgattccgtgttggacttggatcgtgcccttttggacttcatgcgcgctaaaattgaagacgagctcaccaagctcgacgaaaagattgctgatgctga

SEQ ID NO: 44805 - DNA, 276 bp, Glycine max
  unsure (1)..(276): unsure at all n locations; Clone ID: 701129489H1
gcttggggtttgaatcgaatcgaatcgaagcgattcatcgatcgatcgatggctcttgtaggagttgaactgaagcatgcggcggagggcgtaccggaggcgaattgctccgccaagcccaccaagcagggcgagggcctccgccactactattctctcaacatccacgagcatcagctccttcttcgccaaaagactcataacctcaaccgtctcgaggctcagagaaacgaccttcaattctagggtgaggatgctgcgcgcnntttnacagct

SEQ ID NO: 44806 - DNA, 271 bp, Glycine max
  unsure (1)..(271): unsure at all n locations; Clone ID: 701129490H1
ctgtaaagtcaacttccaagctttaacctttgttcctcatatcngagcacttggagatgcccttatcagccgccttcgctatcctgaaggctcagctggagaaatgggctccaactaccttcaagaggtcactggtgcaggtgctaggaaaaatgcagggaaatttgttgttctacacctccgatttgataaggatatggcagcccattcggccngccgattttggtgggaggaaaagctgaaaattggcccttgcaaatntgacngtttt

SEQ ID NO: 44807 - DNA, 269 bp, Glycine max
  unsure (1)..(269): unsure at all n locations; Clone ID: 701129491H1
attttgtagtagagcttgaagaaagtgcaaagacagggatactagttgcatatgatgatatattaattggagtctagggattgcagacccactaaagagagaagctgctgttgttatagagggcctacagaaaatgggagtcatacctgtgatggttacaggagataactggagaacagctcgagctgtagccaaagaggttngtatatatataatatcccctttngataaaaattngcngtggaaaanactgggaggntnttcccanc

SEQ ID NO: 44808 - DNA, 271 bp, Glycine max
  unsure (1)..(271): unsure at all n locations; Clone ID: 701129492H1
caacattgaacccgatggtaggaattgtggaatacaagaacattagcttcactgtttgggatgttggtggccaggacaagattcgtcccttgtggaggcactacttccagaacacccagggtcttatttttgttgtagacagcaatgatagggacagagttgttgaggccagagatgagttgcataggatgttgaatgaggatgaactgagagatgcatattgcttgtgtttgccaacaancaagatctcccaatncaagaanggcgggga

SEQ ID NO: 44809 - DNA, 274 bp, Glycine max
  unsure (1)..(274): unsure at all n locations; Clone ID: 701129493H1
gctgttcttatcattgattcgaccactggtggttttgaagctggtatttccaaggatggacagactcgtgaacatgctctgctttcattcacccttggtgtgaaacagatgatttgctgctgtaacaaaatggatgctactacacccaagtattccaaggccaggtatgatgaaattgtgaaggaagtctcttcctacttgaagaangtaggntacaacccngacaagatnccttntgttccatctctggtttngnggganncaacatgtttgg

SEQ ID NO: 44810 - DNA, 277 bp, Glycine max
  unsure (1)..(277): unsure at all n locations; Clone ID: 701129494H1
tctagacacattancctcacaaagtaagcaatggnataccaaaactacaacaactatgggtggcgatgcccctctgacgagtaccangtgtacgaccccccagtagagggcaacatatcctaggcaaaatcatcacaagaagggtcatgtgggcattcagaaccanctatgaggattctatngncgangtagatccaangtggaggncngagaacntaaccgcgggttnggganncnnagggttnaaaaangggggcccaaagggntggggtttntt

SEQ ID NO: 44811 - DNA, 88 bp, Glycine max
  unsure (1)..(88): unsure at all n locations; Clone ID: 701129495H1
tagagatgaataaaatctaattgccgccgtttgtatctgtatctgtgttgtaatttaatntaatcttaggtgcacattattgattgtt

SEQ ID NO: 44812 - DNA, 278 bp, Glycine max
  unsure (1)..(278): unsure at all n locations; Clone ID: 701129496H1
cttgaaatatgacacaggaaactcacctaattcacccttctccacttattttgattctgacactctttcggcattgagtgacggccaggagcaatacagccctggagaaatcctctctggtgtcagcccctcttgtaactcttctctggaaaccaaccattatatgtatagatcagtctccactttggacagtttcccattatattctgataggaactctcttctacngactatgagtccnaatnagaaangccaacatgctttgcnggnantaagac

SEQ ID NO: 44813 - DNA, 196 bp, Glycine max
  unsure (1)..(196): unsure at all n locations; Clone ID: 701129501H1
ttggttggttaanaacaatggcatgagatttantntatangngcntttgttggatgcagtntcntcntccntttttcntaagaagctcnactttcattacagcattggttcnttgcagatttcntccacanttttcaagagtcntcaatttgtcacagaaggggccaaagtttaanntgtntnagtttnntgtaat

SEQ ID NO: 44814 - DNA, 258 bp, Glycine max
  unsure (1)..(258): unsure at all n locations; Clone ID: 701129506H1
aaaacaggganangcttctcncntcccttcgtcnncncctctcagnctcttcncgttctctccntggcttcgtcctccttcaaggtggcgangagcaaacgcgttncgacnccgatcacttggagctcttcaggcaagagagtnncttcgcttncttgtttggngtcntngagcctggattctntgcngctnttgacgttgcnactggganttctntcctntttgctcctnggttnccttctgagtntgctgtttggt

SEQ ID NO: 44815 - DNA, 266 bp, Glycine max
  unsure (1)..(266): unsure at all n locations; Clone ID: 701129509H1
ggcgacngtcnctctccgacancnncncttccgcggcgaaanntgtctctggtggcgaacgaggntttccngcncnttctgcgtgtgctgaacaccaacgtggatnggaacacaacatnntgttcgtntgncctccntcaagggtattggaacgagattcgccnncntcgcttgcnagaaggccgatgttgacntgancaaaanggctggtgagttgagtgctgcagngttggatngtgtgatgnctgtggtggcganccctnggc

SEQ ID NO: 44816 - DNA, 280 bp, Glycine max
  unsure (1)..(280): unsure at all n locations; Clone ID: 701129510H1
gtttgttgtgagctntnagctngtttntcgtgaggagantntgaagttgtttgttttctttgttgctgcagtngttttggtagcntggccntgccatgggcgcangctnccaaangttccctctccgnatganaactggctatggtgagcgttcttcggaggtaaaatgcgcnagttttnggcttgctgtggaagcncacnacatccgagcctttnanaccnttcctgangagtgcgntgaaccnacaaaggactncnttnatggcgaacaatttngatc

SEQ ID NO: 44817 - DNA, 280 bp, Glycine max
  unsure (1)..(280): unsure at all n locations; Clone ID: 701129516H1
tangcactctctattcccnttcnttgcnnaanaanntgnangctcacccctncgtcccacgcgatttgcncttncccggctacgctccctgcttcctttccntgtccnacnttctttccgtcttcgcctcctcctcnttgctcntcgtcnctctcgtctggntcttctctggacgctttaagaaaaccaaagttgatagagtgctgatgtgctggtgggccttcacaggtctcncncncnttnttcttgagggttnttttgttttctctcctgagttttt

SEQ ID NO: 44818 - DNA, 256 bp, Glycine max
  unsure (1)..(256): unsure at all n locations; Clone ID: 701129518H1
gtgatccttntgtagtactcaanactagggaatcagacnngcaaanaccaangtaattagtagctgcttgantcctgtttggantgaanagctgaatttcactctgacanaaccattgggagttctgaatttggaagtgtttganaaagatcttttgaaggctgatgacaagatgggaaatgctttcttganccttcaaccantagtctctgcngccagattaagagacatcttangngtgtcctctggtgagaca

SEQ ID NO: 44819 - DNA, 275 bp, Glycine max
  unsure (1)..(275): unsure at all n locations; Clone ID: 701129521H1
anntntgcntggngtctctctctctgtatgancncgcaaaagaccnttgattgtccgagagancgcaagcnctgacntcngtnctccntntntttgctnctctgcatgaacntnncnttcatncttnagttttgctggttgtgtgtgtgttttttgttcttggtcgagccttgtnctgattnncgagantggacaaggaagtggagcttggttcccttganggtgaaatggccacccagcncntttcacaaccncagaagcgcaagggtggtctt

SEQ ID NO: 44820 - DNA, 49 bp, Glycine max
  unsure (1)..(49): unsure at all n locations; Clone ID: 701129522H1
atttgcggggcgagatgntgcagcngccaggncncggcntggcacctcc

SEQ ID NO: 44821 - DNA, 279 bp, Glycine max
  unsure (1)..(279): unsure at all n locations; Clone ID: 701129523H1
anancaccnacgttnncnntgggttctcgctacgangtggaactgaagctctcntcggcacgcgctctcaanancgtnaactggcgccntggcccgancccgcccatncgtcgtcgtttgggtcgacccaagcnacnagctctcgacgcgcgtggacgaaagcggcgacactgacgcgaattgggaccnaacgctcncnattccgttgccnccaaagcctctcgangatcnnncgttgtncntcgacgtggtccacgcnggctcggacgaggacaccaa

SEQ ID NO: 44822 - DNA, 280 bp, Glycine max
  unsure (1)..(280): unsure at all n locations; Clone ID: 701129524H1
agcaatggtgtacgtcaaggctcagaaatcnaaagcctacttcaagagatatcaagtcnagttcaaganaagaananagggaaaaaccgattaccgtgccaggattcggttgattaatcaggacaacaaccaantatnacactccgaaataccgntttgtggttcgctttngcnncaaggacattgttgcncaaatnntatctgctagcnttgccggcgatttngttcttgctacngcatattcncatgagctgccacgatatggtcttgaagtaggact

SEQ ID NO: 44823 - DNA, 279 bp, Glycine max
  unsure (1)..(279): unsure at all n locations; Clone ID: 701129525H1
ggttccctnnaagctntgactnnngggagtgatgcaangtacttgggtgntncagcnaagctnaannttgctcanggggttgttgnagctgttaaanataanggttctgtcttgantttcatnccntaccnccttgcnagcngtcaggcaagggtttcnggatatcggtgcctcctctctncngtctgctcntgaccttctnngatccagggagttaagactggaggtccggagtggagcagcacaggttgaaggtggagttcntgggctggtttcttg

SEQ ID NO: 44824 - DNA, 280 bp, Glycine max
  unsure (1)..(280): unsure at all n locations; Clone ID: 701129529H1
canttctcagcttcttcagcgttcttttttttctctctntctctcttccttacgcacccaagagacanaaananaaanagaatcgatcgacgctgctagagaagtagaagaagatggcgggtggtgctcccaaacaattgttcggattcggagttgtggcgtngcttgccactctcattcttcctctctttatgcccgcngctgttcaggctcantccgcagcccctgcacctgcccctgctagcgacgggtcctcccttgatcaagggatagcttatgt

SEQ ID NO: 44825 - DNA, 271 bp, Glycine max
  unsure (1)..(271): unsure at all n locations; Clone ID: 701129533H1
gtgttcttcgtttgctnccttctcccagaantggttncgttcaggtttcaccagtnccaggtggtcgggagggctctcccancggaagcngatcngcntccgaagatctnccgantgangctctgggccaccaacgaggttcgcgccaagtctaagttctggtattttttgaggaagctgaacaaggtgaanaagagcaatggtcaagttcttgctntcancgagntttttgngangancccnaccaagattnaganctacgggatatggt

SEQ ID NO: 44826 - DNA, 237 bp, Glycine max
  unsure (1)..(237): unsure at all n locations; Clone ID: 701129541H1
gcnttttccgtgtctcntcnaaccctggttatgatcggtcaancgcaaagtttgttcttntttcgccgntcgancctcgntctggttcttagggatgattttcgttggaggtttnggcggcaccggtgnttntcgtacgtgntctttctgcggtggatgttgatggtctcgtgtcgaangactcgantcngnntnattnncgccngnttcgctgtgtnntttngantttnttggtaa

SEQ ID NO: 44827 - DNA, 275 bp, Glycine max
  unsure (1)..(275): unsure at all n locations; Clone ID: 701129542H1
anaaagcnttgantctttgangaanaaaganaaagaagccagcnntggccaagtccaagancnatgccaagangttgtcctncntctcagttccttctcngatcntcaactccntctcntcttcttctcttcnntctctgcttgantctcccnagangtgtgcaagacnctccanattcttcncctttgtcnagtgcntaaggccaagactcttccttttcnctctctttttccttgctttctttgccntgctcaagtttggtctcnatctttnc

SEQ ID NO: 44828 - DNA, 279 bp, Glycine max
  unsure (1)..(279): unsure at all n locations; Clone ID: 701129543H1
gggcacgtntctttngtngccctanaagctctgantcaggtgatacctcntccgtggttccaatggatggganatnttcttctnctagcnangatgacantganactagcaacaacccccatgggctgattcagaaagatntatcagtncnagggatagttgttcgactcgagttgccntnctcagagatanggaaaaggatcgtngtgatccagattntgaccgtngttntggaaggtntgctaggagtntcccancctctgctgttnacttggtgcg

SEQ ID NO: 44829 - DNA, 55 bp, Glycine max
  unsure (1)..(55): unsure at all n locations; Clone ID: 701129544H1
gnacagcntcncttcgnttctcnggcggatgcgggagcgtccaagacgtntcctc

SEQ ID NO: 44830 - DNA, 153 bp, Glycine max
  unsure (1)..(153): unsure at all n locations; Clone ID: 701129545H1
gggtttctccnccnacagggaaatggctcccnanccgcctnntacgggtctgtttgttggnctgancaacggacntgtcgtcnccnacaagganttgcccccacgcccctcggntcgtaangggaaaacnagcnagagggtgcnctttgtgag

SEQ ID NO: 44831 - DNA, 280 bp, Glycine max
  unsure (1)..(280): unsure at all n locations; Clone ID: 701129546H1
gngcttcgctccctctctctnnnnccaacncatnctncttctcttcngcttctcccnctnaancncnctntctntntggaagtgccggantncttcgtcggaagcttttttggcaccggaggagccgaacngttctgccctccggagaagcgccnctccgaccngaaaaccggcgagcctttcgccnttgacgacctcctcgacttctcccncgccgacgccnttntgtccgacggtttcttcgacantgtcgccggaaactccnccgactcctccnccg

SEQ ID NO: 44832 - DNA, 280 bp, Glycine max
  unsure (1)..(280): unsure at all n locations; Clone ID: 701129547H1
tctcactcgccatttccagtaanaganagcganttcaccttcaatcccatttcnnaaccgctccttctccttctccttatttntaanacttctntctttctctctcttctttgccttttggttttctctantaccatgtaaagaaaaaaanaantacaatctttcantcngcaaaatctacngtttcaatctttcggatcttgttggtgttgtgtgtggatccttggatcgtgatcctctactcantcctcattctgggtcggttttctttctggggggg

SEQ ID NO: 44833 - DNA, 258 bp, Glycine max
  unsure (1)..(258): unsure at all n locations; Clone ID: 701129549H1
caagttagagccgccncctctgactcaagcttgttccgagantacnttggagcnttgttcnntcagtgtcaanttctcngatgtncccntaancccaantgtnaattttcncttcnttttgtccttcgctnttgactacgacncatcatctggttcnccttctcccaccnncggaaaatttnacntcttttgggacaaccnanncctcacccctncccnngtttcttccattaaggccaaanntccaaacgttaaggt

SEQ ID NO: 44834 - DNA, 272 bp, Glycine max
  unsure (1)..(272): unsure at all n locations; Clone ID: 701129551H1
agagccagttgaaaaggattgcccgaccaatgtactctaatccnccggtacacggggctaggatagttgccgatgttgttggaaacccngttctctttaatgaatggaaagcagagatggaaatgatggctggaangataaagantgttagacagcngctntatgatagtnttacttcnnaagacaaaagtggaaaggattggtcnttcntncttaagcagataggcatgttctcnttcactggcttgaacnagaaccagagtgacaacntg

SEQ ID NO: 44835 - DNA, 275 bp, Glycine max
  unsure (1)..(275): unsure at all n locations; Clone ID: 701129555H1
tccntgttgtctcacgtgangntttnaacngtgtctttganaaatttggtacngtgaagtncnttgntttcnagattggagcanagtcanganacattcgctttgaanaaactgaagctgctcanaaagcacgtgctgctgcagttatttcnganaaggatggcttggttgtaaagaattntnttgctattctagatccagtgactggtgaggccgaaaaagaatnctggaacctgcttcgtggtnatcaaggcaagcaccgtgantttnagaat

SEQ ID NO: 44836 - DNA, 277 bp, Glycine max
  unsure (1)..(277): unsure at all n locations; Clone ID: 701129557H1
ggntnttggtntagaaagggctactggaattgtatggaacntaactggtggaagtgatttgaccttgtttgaggtaaatgttgcagcagaagttntntntgaccttgtggacccccactgctaatttnntatttggggcagtantngntccntcactcagtgggcaagtaagcntaacnttnatcgcaactggattcaagcgtcaagaggaaagtgaagggagacctatgcaggccagtcaactcacacaaggagataccgttggtatcantcggcg

SEQ ID NO: 44837 - DNA, 180 bp, Glycine max
  unsure (1)..(180): unsure at all n locations; Clone ID: 701129558H1
gctctgtgtcgggaatgctntnntgttcnntggtgntnganctgcncgtccttncnaatgggcncagcacctggcgggtnttgntttcttgcctgaggtggctcccttgctgcttgctagccgtganacttcagacagtggtgaagctgccnaaggtgangacttcntnnctngtctttc

SEQ ID NO: 44838 - DNA, 260 bp, Glycine max
  unsure (1)..(260): unsure at all n locations; Clone ID: 701129559H1
gaaaaanaaancnaannntcagatgagccagtggatncacgtggcggtggcngcntccgccgtgggatgcgtctcgacccttttgttggtctttctctggcgttggtgccntnnnaganntcatcgcngaantttcgttgagccggctagtttgaccnnagtggagagtgtccagggagggatttctgtttccaggcttcntcancnacnncnnccttttcnnttggatcagggaaacaagaacnacnacaagggcnatt

SEQ ID NO: 44839 - DNA, 276 bp, Glycine max
  unsure (1)..(276): unsure at all n locations; Clone ID: 701129561H1
anacacgttaaannaagtcccnttcccactnccgaagcaaattaagaanatgaagcagcanagagtggagtttatgggcctgggcatgggcatgggcatgggccttttggtggtgatgatggcntgtgggtcggcgagtggtgcggatgatttggcaaccaagtgttcagcggtgattcanaaggtaataccgtgtttggatttcgcgaaggggaaggaanaaacgccgaaaaagcaatgttgcgacgcagcaacgtccntnaaggagagcaaccc

SEQ ID NO: 44840 - DNA, 279 bp, Glycine max
  unsure (1)..(279): unsure at all n locations; Clone ID: 701129562H1
tcggaaccctactcggctccgtccttcccgatggaaccgtcgatntccgcnattcctntgctgttcctcncnacgantctntcgaacaggttgcgttggntatacagtncgnccncnntntgttnntntcccaccnaaaagtgantccnaaggaantcntngtaggatggtnttcaaccggtcttggagtaacaggtggtagtgcnttnnttcncgagttttnttctcgagaagtccccnatcccntncacttgacggttgatacaggatttacgaatg

SEQ ID NO: 44841 - DNA, 228 bp, Glycine max
  unsure (1)..(228): unsure at all n locations; Clone ID: 701129563H1
gtgagggggatcnanacnttcctngnttggnatntggcnaaacttggttgttctngtcgtnggaaagcnattgaggagctccttngagggcgtgnttgtgccaaacnncttaggagtgtcntcnatgggagttgtgaagatggatcntcnncnaccccntcntttgctgaacnacttgtgaaggaggtgctcntgtccttcnccnactccctctcgttcttgaagaac

SEQ ID NO: 44842 - DNA, 281 bp, Glycine max
  unsure (1)..(281): unsure at all n locations; Clone ID: 701129564H1
gaacatcgaaacggtgaanaagcctaacagcagcaaanagcgttagagctgatcgcttgagataaggtcaatttgcagttgcacgcttcccaattcgcacacccntatcacatcacatctttctnccacacgcaacgcaaccnctttntnatcnntcntcctcactcgcntttnanganncagcaatctttnccgtganaagggaccatggaggcaaattcaggtgccagcgaccgantttcgagaatcgccggccacctccgcccccanaganaggatga

SEQ ID NO: 44843 - DNA, 263 bp, Glycine max
  unsure (1)..(263): unsure at all n locations; Clone ID: 701129566H1
gctctagtcncagacaccgncacagntctgtcttccgangcaggaactaaatntggctgacttgttggnntggtcnaagcaagataaganacgantgcttcntgtcgtntaccgtgttggtgaccttgntcgcnccntcnnnttttncncagaatgtttnggantgaagcttttgaggcaaagagntntcccagaggagaaatntgctantgcttttcttggatttggccctgaagantcccnttttgttgttganttancnt

SEQ ID NO: 44844 - DNA, 271 bp, Glycine max
  unsure (1)..(271): unsure at all n locations; Clone ID: 701129567H1
gggagtagcggcattaaaaatgcagatcttcgtgaaaactctgacagggaagactataaccctcgaggtcgagagcagcgacaccatcgacaatgtcaaggccaagattcnagacaaggaaggcatnncctccggatcagcagcgtttgattttcgccggaaagcagcttgaagatggaaggaccctggccgattacnacatccagaaggaatcancccttcatctcgtcctcaggcttcgtggtggcatcattgagccttccctcatggc

SEQ ID NO: 44845 - DNA, 262 bp, Glycine max
  unsure (1)..(262): unsure at all n locations; Clone ID: 701129568H1
gggggtcagagtgagaaagagaaagagananttcgtanaccctantttcggaaanntcggcgatgactgcctccnaggatcgcgagancttcgtctncntcgccaaactcgccgagcaggccgagcgttacgaagagatggtggaatcaatgaagaacgttgcgaatctcgacgttgaactgacggtggaggagcggnntttgctttctgttgggtacaagaatgtgattggtgctcgcagacgttcctggaggatcctgtc

SEQ ID NO: 44846 - DNA, 273 bp, Glycine max
  unsure (1)..(273): unsure at all n locations; Clone ID: 701129570H1
aaanaaaaanaagagagtgtaggtaaacagaagcacacactacacagttaccaaaatcaggttcnaacgcacagntctggganaaganaanaagaanaanaacaagatgggacaggatcagaaccagagntcgctgatctncgcgttcgtgtctcgcggcacggtgattctcgccgagtacactganttcagtggcaacttcnncncaatcgcgttccagtgcctccagaagctccctgcctccnacaacaagttcncctacnactgtgacgg

SEQ ID NO: 44847 - DNA, 273 bp, Glycine max
  unsure (1)..(273): unsure at all n locations; Clone ID: 701129571H1
gnaantcgttctaagcgatttgatttaggacangggtatcgaacacaaantnntcnctcgannaaaaaacacgctggggctggnagcttttgcnatanaanggctagtgccttggtgctgagcnanagctttgaacatggtgccagcaaagctgttgaggntattgactgggatgctctaactgtgaanggtacttgccaggaaattgaaaagcgttacctgcgcctnacttctgcncctgatcctgccactgtangacctgaagnggttctt

SEQ ID NO: 44848 - DNA, 271 bp, Glycine max
  unsure (1)..(271): unsure at all n locations; Clone ID: 701129573H1
ctccacccacacgtaccttggtaggccttggaaaccctattctaggacnntnttcntgcnntcttacnttngtgatgtgttgaggccagaagggtggttggagtggaatggtgattttgctttggacactttgtactatgctgagtacntgaattatgggcctggtgctnnagtggctaatagggttaaatggcaagggtaccatgtgatgantgattctngtcaggctagtantttcacggtgtcacagtttnttgaggggaatctttgg

SEQ ID NO: 44849 - DNA, 276 bp, Glycine max
  unsure (1)..(276): unsure at all n locations; Clone ID: 701129575H1
gcggcattaanantgcagatcttcgtgaaaactctgacagggaanactntaaccctcgaggtcgagagcagcgacnccatcgacantgtcaaggccaagattcaagacaaggaangcatnncctccggatcagcngcgtttgattttcgccggaaagcagcttgaagatggaaggaccctggccgattacnacatccagaaggaatcaacccttcntctcgtcctcaggcttcgtggtggcatcnttgagccttccctcatggctttggctcgcna

SEQ ID NO: 44850 - DNA, 50 bp, Glycine max
  unsure (1)..(50): unsure at all n locations; Clone ID: 701129576H1
gtcgcagntncntgtgttgccntggntgagtgggtgcanaaccctactgc

SEQ ID NO: 44851 - DNA, 217 bp, Glycine max
  unsure (1)..(217): unsure at all n locations; Clone ID: 701129577H1
tcganccgattcttccccccananaaaacntggctcctctcccgccagtgtnagctannctnttngttttttngtgaggtgctgctgaantccctnnttcgnctttccncttgattncgntcccttcncccttcttaggntggcaaatgctgcngaagntttctcccnattcgggatttcnaaggaggaaaaggataagcttgttgggganttgntt

SEQ ID NO: 44852 - DNA, 278 bp, Glycine max
  unsure (1)..(278): unsure at all n locations; Clone ID: 701129578H1
atcagatcncaccaccgcaannccctnanttcnattttctccntttccgntcttgcccccggactgcaaatggggagcaggagggacgaggcgcccgccataaacaacnccaacgtcttcgcggcgctcggcagcttnnnnnnnnnnnnnnnnnnnnnnnnngaccaggaccagggcccgtccaagtccaaggcccaggacaacaagaaggacgtcttttgggcccccgcgcctctcacctccaagtcatgggccgatgtcgacgacgaagatgacga

SEQ ID NO: 44853 - DNA, 274 bp, Glycine max
  unsure (1)..(274): unsure at all n locations; Clone ID: 701129580H1
cttnttctttctngncgcttccnttgntcggcgntttcttnnacntggcggagcntcncgaacncgangaagtgaanggtgagtccttgttggagaagatttctgggaacatccncgaccncgnttcgtcntcttcgtcggnttccgacaacgagaaanccngcgcttctgactccttgangtcnaaggttttcnggcttttcggcnnagaaaagcccnttcnccntgttcttggcggcggaaaaccggccgacgtttttctctggaganncna

SEQ ID NO: 44854 - DNA, 267 bp, Glycine max
  unsure (1)..(267): unsure at all n locations; Clone ID: 701129581H1
cctactccgcctccggaaccccatgtagnggcggaacccattactgaggatttggtccaagacaaagaagaagaggatgatagtagtnagattgttattccagtcccagagagcgagtccttgtcattgaaggaggatagcaatagggtttctgattccgagaaaaatgccattgatgagctgaagaagctcctgaaagaggaattagaggacgaggaggtttcnatctggggngtccctctctttaaggatgacaggactgacgtc

SEQ ID NO: 44855 - DNA, 268 bp, Glycine max
  unsure (1)..(268): unsure at all n locations; Clone ID: 701129583H1
tatgaagttgtttgttttctttgttgctgcagtngttttggtagcntggccntgccntggcgcaggctaccaaaggttccctctccgaatgaaaactggctatggtgagcgttcttcggaggtaaaatgcgcaagttttaggcttgctgtggaagcacncnacntcngngcctttnanaccattcctgaagagtgcgttgaaccnacnaaggactncnttnntggcgaacnntttngntcagactctaaaacngttnaccnacanctt

SEQ ID NO: 44856 - DNA, 272 bp, Glycine max
  unsure (1)..(272): unsure at all n locations; Clone ID: 701129584H1
antnaantgaatcgnatcgtgttctgntgggttcccaaangacnaatgaaaagcatcangncaggtcaggtcacgtcaagtcacggaattagcgtgtaaccgacttctccttccatcctctccggagttgtgtgganacaaataanatacnatannntcntagttcagctcaagtgagnnnnnnnnnnnnnnnnnnnnnnnntnnaattagggtttgtggtgaagaaatgcagatagaggtatgttcatncgagttacaatgattatgcgct

SEQ ID NO: 44857 - DNA, 204 bp, Glycine max
  unsure (1)..(204): unsure at all n locations; Clone ID: 701129587H1
accantggagtctccaacgacgccgtttcaacgctacccaatgaccctcaataccctggtatctctgctgttattcccggttggttctcagaaatcagcccaatgtggcctggggaggcgcactccttgaaggtggaaaagattttgtttcaagggaagtctgactatcagaatgtcatggtcttccagtcatcaacatatggc

SEQ ID NO: 44858 - DNA, 274 bp, Glycine max
  unsure (1)..(274): unsure at all n locations; Clone ID: 701129589H1
atgaagttgtttgttttctttgttgctgcagtagttttggtagcatggccntgccatggcgcaggctaccaaaggttccctctccgaatgaaaactggntatggtgagcgttcttcggaggtaaaatgcgcaagttttaggcttgctgtggaagcacacaacatccgagcctttaannccattcctgaagagtgcgttgaaccaacaaaggactncnttaatggcgaacnntttngatcagactctannacagttaaccnncnagctttctttt

SEQ ID NO: 44859 - DNA, 276 bp, Glycine max
  unsure (1)..(276): unsure at all n locations; Clone ID: 701129590H1
gggtntcgantntgagtncnangaagaggacttgaggaacaagagtcctcttctcttncaantgaacccggttcacnagaagattccggttctcatccaaatggcaaaccccatttcngantccctcattgctgttcagtacnttgaggaggtttggaatgacaganatcccttgttgccttcngacccttaccagagagctcaggctngattctgggctgattatgttgacnttnagatacntgatcttggaaagaagatttggacatcaaaggg

SEQ ID NO: 44860 - DNA, 278 bp, Glycine max
  unsure (1)..(278): unsure at all n locations; Clone ID: 701129591H1
ggtttctctngtcttcttctgtggagagcttgttttctcttgttcnttcntctcncttccnnttnaggaacnagctttccnccnntttgantcaccnntgggctcgctctttctccnncctcnaggttctctctgctcttgtcgccgacggattctccnacnctctcnncaggcgtgggtncgcngtagcgacncanagcgcaacaagaggaggagcagcctccntcagcggcaagtcaggggaanacnaggtactnngaggaggtgctgaaaaggtt

SEQ ID NO: 44861 - DNA, 275 bp, Glycine max
  unsure (1)..(275): unsure at all n locations; Clone ID: 701129592H1
anacaagccagcaagctcagagagcaagttgccaaacagcaacaggctgtnataaagcagttcagtagtagtggttatgagagttcagatgttgtggtcatcgatgaggtcgaaatgcagagacatcaccagctggaaaagttgtatagggccacacgttcagggaaggacttccagaaggaaattgttaaagcagcagaaacntttacagctataggttatnagcntattgaaacaggaacaaaactttctgaggattgctgtaaatntggagc

SEQ ID NO: 44862 - DNA, 276 bp, Glycine max
  unsure (1)..(276): unsure at all n locations; Clone ID: 701129593H1
ggcggcacntctgacantgtcttccgcccggatcgaccggccgaagccgaccttgggtccaaaaanaggggcagtgccccgcttccgnttcacggaataagtnaaatnacgttaaaagtagtggtatttcactttcgctgtttccagctcccacttatcctacacctctcaagtcntttcncaaagtcggactagagtcaagctcaacagggtcttctttccccgctgattccgccaagcccgttcccttggctgtggtttcgctggatagtagac

SEQ ID NO: 44863 - DNA, 278 bp, Glycine max
  unsure (1)..(278): unsure at all n locations; Clone ID: 701129594H1
gcggtncccttgctctccaagaggatcgtgaagaagcgcgtcaagaagtttatacgcccccagagtgatcgcnagatctccgtcaagccaagctggcgcagacccaagggtattgattctcgtgtcaggagaaagttcaaaggatgcactttgatgcccaacattggttatggctcagacaagaaaacccgccnttntctaccaaatggtttcnaganntttgtcgtgcacantgtgaaagacctggaacttctcntgatgcntaacaggacatactg

SEQ ID NO: 44864 - DNA, 274 bp, Glycine max
  unsure (1)..(274): unsure at all n locations; Clone ID: 701129595H1
cctcagcacngtttcccntcganaactagcccntctttttccctcgtaccttttgcttcagcnacaacnacntcgtcgtcacnantctanagatacatanatacatananacaaacggttganttgaagatgaaantcactgtcatgactgctgatgaacaantcntcncgttagatgtggatccccacgaatctgtggaaaacgtcaaagcnttgctcgaggttgagacaagtgtgcctcttcnacaacagcagcttctgtttaatgggaagg

SEQ ID NO: 44865 - DNA, 277 bp, Glycine max
  unsure (1)..(277): unsure at all n locations; Clone ID: 701129602H1
ctctctcgcatcttccccaaaaccctaacccnnncccccttcnctcttccgctccctcaccacngncccctctcgtccntncctccccgcggtctccttcntncgccgtatctccgttgcagcnaacncctccgtcggntggggtnctnctagccaaangtcnnctgncctgccgcggncctnttccagacgcgcnaganctncctgatgaacgacgncnaaccntaantggtcgaactgtancccgaaagaaaccatcttggtcgacggnggngat

SEQ ID NO: 44866 - DNA, 268 bp, Glycine max
  unsure (1)..(268): unsure at all n locations; Clone ID: 701129604H1
gaacttgccatttcaagggttttagggttagggttttctcaaattgcaaggacatgggtttcaaccttcaaccatatgggattcaatccatgctcaaggaaggccataagcacctntctggcctcgacgaagcggttctcaagaacatcgacgcttgcaaacaactttccactattactcgaactncccctcggtcccaatggaatgaataagatggttataaatcacttggacaagctttttgtcacgaacgatgctgggacaattg

SEQ ID NO: 44867 - DNA, 267 bp, Glycine max
  unsure (1)..(267): unsure at all n locations; Clone ID: 701129605H1
gttttgatcacccttttgaacacatctcatctcaaaatattttactcttctatccaccatgatgaggctanagtggagaaggcaaaaacgtntctgctttgancagaaaaagttaggactcaccccattaaagtgctgtcaaagnaatctcatatatatttagcggcagcaaggacctgccaccgaaaaacgaagtagctcatgtgtcaacaccaccatcctaattaaagcagcaacattattgctcaaacagcatacagaaaaagc

SEQ ID NO: 44868 - DNA, 266 bp, Glycine max
  unsure (1)..(266): unsure at all n locations; Clone ID: 701129606H1
caacactgtctctgtctctcctcctcctgttctcactcagcatcgccgtaaccgttagatcgagcgactacgactacgattgtatgtacactgcatacgtnagaaccggttcggtgttgaagggcggaacggactctaagatcgggctgaagctgtacgacaagtacggctactacatctacattaaaaacctcgaagcatggggcggcttgatgggcaagggctacgactacttcgagcgcggcaacctcgacatcttcagcgga

SEQ ID NO: 44869 - DNA, 250 bp, Glycine max
  unsure (1)..(250): unsure at all n locations; Clone ID: 701129608H1
gaaaagagggtagaaatgagatnngggaagtggaaganttgaggcagaggaagaggcaggggagtaataaganccaaagagagtgtgagtgtgaagaaagagaaaaatcaagggaagaagaacaagaagatttccaagctgaagantgaaccaaggagggtaccttcttctaagaatggttcaaagggtcgaactcgaaaccatcatggtgaggttaaagatttgtcatctgtgtcctcaaactcctcta

SEQ ID NO: 44870 - DNA, 269 bp, Glycine max
  unsure (1)..(269): unsure at all n locations; Clone ID: 701129609H1
agcaatctatgtggttggtcgagatgacgatgatgaatcanttgctgctgggagtgaaataagtgatgctgcaagctgggaaactgttaatgagcgatgaaatggaagtccttgaggattccagagaggatattgagagggaaaattcaagcagtgttacttctgaggcagaagaaagtgganagaatgattttggtaggactgcagctctctctgttcccctagcagcatttcgatttgtacactagactgccagtggaatattctcc

SEQ ID NO: 44871 - DNA, 267 bp, Glycine max
  Clone ID: 701129610H1
aattttttaaacttgacatatctgctatcaccttttccgtttcttgcgattcgacgatggccgatcaaaagctttcagaaccggcgcttaaacgtgagcagcttgatgaattcgtgagtagtctatattttgaacaacgaattcttgaactccgacttcttcaagacctcgagaacaatgatgaatgtaggaaaaatgggagcctgaaaaggttaaatgaccagagtgatgtctgtggatttagaagttgcttcaaaaatcattatg

SEQ ID NO: 44872 - DNA, 205 bp, Glycine max
  unsure (1)..(205): unsure at all n locations; Clone ID: 701129611H1
tgccactttcgatgtaaccnatgacgattcttcttttttctctcttttttattttaggatctctggccactgctccagcaactcgttggaaaaactcctctcttctcatcttcatcatcagaagcttcgtcgtccttcttccagaaccttcgggaatcgatgacgaactcaagttgcggaggcgcggagttggagctatgccgag

SEQ ID NO: 44873 - DNA, 266 bp, Glycine max
  Clone ID: 701129612H1
gctccatctaaaaaaaatggctggtttggctagcaatcttcctctaattgttatgataggtctgcaaattcattatgcagcacttgccatattcacaagagccgctctcttagatgggttgagtacaacggtgtttgtagtatacaggcaaggcatagccactttggctttggcgcctatatttttctctcctaagaggagacaatcagtgaaagattctttgggattcaggagcttctttttgatgtttgtgaccgctcttgttg

SEQ ID NO: 44874 - DNA, 234 bp, Glycine max
  Clone ID: 701129613H1
catcatcttgttactcctcagcttcagcctcttcttcatgtgcttctccaatgcaatgtttctgtttcactactaccgaggggaagagtagttcttcttcggtctcgattttcctgctgagtggtaacgatggaatcataaagggtaggtgtaggccattggatattgttccaagaagaagagattgtgaaggtggtggttttgatcatcaggtcatgataagagtgccaacaa

SEQ ID NO: 44875 - DNA, 267 bp, Glycine max
  Clone ID: 701129614H1
attgaggtagcgctgattcgatcgcatcagaacattcattcacattcatatcctctctctccgatcccaatggcggatgagagccccaaaccagagaccttcgaactcaacaatggaagcatgcaggtcctcctcaccaatctcggctgcaccatcatctccttatccgtacctggaaaagatggtctttttccgttccaatttttcattttcattttcattcattgctatttgcgtttcactctctctctttctgttttcaaggtg

SEQ ID NO: 44876 - DNA, 265 bp, Glycine max
  unsure (1)..(265): unsure at all n locations; Clone ID: 701129616H1
tggaatgtgcaggctgcttttccatttggacatttacactagtgtatttatacctaatgctacctgtactcaagaagagttgcagtagtattggatcgatggatgctggaataggtttctagcagccattttaggantanacttctgtaaanaggaaaatcatgtctgaatcaaaatatgattctttgtagtcttgtccagcattgagtttgtngatagttgtcaatgctggtaaattgtgtgacgatggatgggccatcatatt

SEQ ID NO: 44877 - DNA, 269 bp, Glycine max
  unsure (1)..(269): unsure at all n locations; Clone ID: 701129617H1
ctatttttgaaacaggcaaagcaatacgcagatgcaagaccaagctatcctccacaactcttccaattcattgcttccaagactccctctcacaacctcgcttgggacgtcggcactgggagcggccaagctgccaaatctttagctgcaatatacaagaatgtgatagcccacagatgctagtgacaaacaacttgaatttgcngccaagctcccaaatgtgagataccaacacaccccttcaaccatgtcgacggccgagttgaaca

SEQ ID NO: 44878 - DNA, 268 bp, Glycine max
  unsure (1)..(268): unsure at all n locations; Clone ID: 701129618H1
gaaagagcaacgtcaganagtttgccgtagggttctccttggtttgtggtttccgctttttcctttttctgttttaggtgaggattgtcctcagatcccagaagctatccagacttgttacatacgaaaaactcagatctatggctcatgacaattcacaaaactccaaatatgagaaaagatgaagggtttgaatatttgatgttccaaaaaccatgtnctaatttgacttctgcatccggtgaagctagtgcatcttcaggcaaca

SEQ ID NO: 44879 - DNA, 285 bp, Glycine max
  unsure (1)..(285): unsure at all n locations; Clone ID: 701129619H1
tgttgtcaccccttcttctatttctatgcctaactcttcctttgtttttgttgtccttcttcaaataccgtanaaccttacaagaatccaccacttccaccaggtnccaagagggcctcccatanatagggaatncttcatcaactagatagtnncttnctcttcatggagtcngnctnatgggcatctctncaaaggaaatatggtnccttnattttcccttccaatttgggattaaggccagccatagttgtttcctnctccaaaattgggccaaagaggtat

SEQ ID NO: 44880 - DNA, 267 bp, Glycine max
  Clone ID: 701129620H1
attatttacaccttcaaatcattttaatttaatttaatcctccgtttcaattttctccgtttaacgaacgcgaatttgcattggttttgatcgatcagatcctgtgttccggagaaaggaaaggaaaggaaagatgtcggggcaaacgcagcgtctgaacgtggtccccaccgtgacgatgctgggagtggtgaaggcccgattggtcggcgccacgccgggccacgcctacctgaagaagaagagcgacgcgctcacggtgcagtt

SEQ ID NO: 44881 - DNA, 266 bp, Glycine max
  Clone ID: 701129621H1
caacactgtctctgtctctcctcctcctgttctcactcagcatcgccgtaaccgttagatcgagcgactacgactacgattgtgtgtacactggcatacgttagaaccggttcggtgttgaagggcggaacggactctaagatcgggctgaagctgtacgacaagtacggctactacatctacattaaaaacctcgaagcatggggcggcttgatgggcaagggctacgactacttcgagcgcggcaacctcgacatcttcagcgg

SEQ ID NO: 44882 - DNA, 267 bp, Glycine max
  Clone ID: 701129622H1
gttgcctatggtgctgcagtgcaaggaagcattttgagtggagagggtggtgaagaaaccaaagacatccttctcctggatgtggctcccctcactctcggaattgaaactgttggtggagtcatgacaaagttgattcccagaaacactgttatcccaaccaagaaatctcaggtgttcaccacctatcaggaccagcagactacagtctccattcaggttttcgaaggcgagaggagtctcacaaaggattgccgccttcttggg

SEQ ID NO: 44883 - DNA, 259 bp, Glycine max
  unsure (1)..(259): unsure at all n locations; Clone ID: 701129623H1
cttccatcttcttcccttttcacgtcattatcctaaaaacttgcagattttcncatcccaaacaacatgaaggngcaggntcatgtttctgtcggtgctcctttgtgccacttttcatgtctccttctctattatcgacggtttagttgccaacggcnactttgagttgggtccaaagccctccgccctaaaaggaacagtggtggtgggcgggancnactcgatcccagaatgggagatctccggctttgtggagtac

SEQ ID NO: 44884 - DNA, 257 bp, Glycine max
  unsure (1)..(257): unsure at all n locations; Clone ID: 701129625H1
ccctcaccctttcctcctntccatctttacccattttattttatantattaactacatcacattattntctcttcttnnctttcctttttaccattttcagttcacagggttaggtcttgctcccttgtctggtctggtgtgcaattcccataccaatnacaatacacccattttaccattcaatatacctatagtcatcctctccttcgttctgaaaatcgtagattttngttttagggtntctctatataatcnt

SEQ ID NO: 44885 - DNA, 266 bp, Glycine max
  Clone ID: 701129626H1
ggaggatgagtctccttgtatttttggttcaattgaaaagcagagatggtcctatgcctgtgctaagcagttgattgagaggcttgtttatgctgagggtgctgaaaatggcttggaattcacaattgtgaggccttttaattggattggaccacgaatggatttcattcccggcattgatggcccaagtgagggtgttcctcgggttctggcatgctttagcaataatctcctccgtggagagcccctcaagcttgtggatggtg

SEQ ID NO: 44886 - DNA, 266 bp, Glycine max
  unsure (1)..(266): unsure at all n locations; Clone ID: 701129627H1
cttcgtagtttcttaagtcaagagaagaagtgaagtgctgctncaatggcttcaagtcaggaagaggtgatccttttgggggttattggaagcccatttctgcacagggtgcagattgctctcaaattgaagggagttgantacaaatatttggaagatgatttgaacaacnagagtgatttgctcctcaagtataacccagtttataaaatgattccagtgnttgttcacaatgaaaagcccatatccgagtcccctgtgattgt

SEQ ID NO: 44887 - DNA, 266 bp, Glycine max
  Clone ID: 701129628H1
cgacgatccaagtgatagacactcgttgcgatggaacttgtagctgaatccgagcgaactctgtacccatacgtgactggatcctctgtagtcgctatcaaatacaaagatgggattctaatggccgctgacatgggaggttcgtatggatctaccctgcggtataagagtgttgagcgtatcaagcctattggaaagcattctcttcttggtgctagcggggagataagtgactttcaggaaattttgcgctaccttgacgagct

SEQ ID NO: 44888 - DNA, 264 bp, Glycine max
  Clone ID: 701129629H1
gccacaccacaccacaattagcaagtatcaattgggttatttttggtcatctaataaaaagcaaaattaagcaagagttactttgaagaagacttgtacaaagatgagttcagcaagcagaacttgggctgtggcagcaagtgttggagttgtggaggccttgaaggaccagggcctgtgtaggtggaacattgctttaagatcagcacaacatcaagtgaaaaaccatgtgagatcctgtctcaggaaaagaaggtttctctc

SEQ ID NO: 44889 - DNA, 267 bp, Glycine max
  unsure (1)..(267): unsure at all n locations; Clone ID: 701129630H1
ggaggagtggaggggaacggatctgctgggtgggactagataaagtgaagcaagctgacaagactaagggaagattggatggtggaaatggaatcggcagctgaaaaccctaattacccggcggtggactacaagcgaccttccatcttgtcatntcctcggaggcccgccctcagagttacatccgagttcgatagtgaaagcgcagtcttcttccataagatttcctgcaagttgttggacagccttgccaagttcaagttttcg

SEQ ID NO: 44890 - DNA, 266 bp, Glycine max
  Clone ID: 701129631H1
tgctgcggctgctggtcaactagcacacttccctattcttaaaggggttcaggatctcaaggtacctgccaaggaacaaaagtctgtcaagttcaacttgccagaggaggatgaatttgatgccagtgatgatggttatgatgaggatggattaggccatggacatccaatgcagaacaagatcatgcccatgatgattaatcacaaccataaagacaattctggtgggagtaggaatattaatggaagtgttaagaaagctgacg

SEQ ID NO: 44891 - DNA, 245 bp, Glycine max
  unsure (1)..(245): unsure at all n locations; Clone ID: 701129632H1
attgatgcttccttacaagtanttntgagcattccgantccttcctccagggaaaanttagcgtgtctttaggtcacaggattttgagagntttnctttttantctgcntctgaatcanttctgcaagaagatatataatgtttggttcaaagaaatctcctttgaaggttgntgaacctagctccgttgagtcttggacgaatccatttgattctaatgatgagggaatggntaccgaanagta

SEQ ID NO: 44892 - DNA, 269 bp, Glycine max
  unsure (1)..(269): unsure at all n locations; Clone ID: 701129634H1
caaccctccaatttgtttacaatatgnccctctcctttgaatttgagnatgaattngttcaaaacacggcaagagtgaaatcngttgtatgcgtccaactgagccatggcttctactgggtttntattcaggaactattnctatttgggaactatcagnnaaagactgaaagnggaagtctttnaaaatcagcgaatctccagtgngatcagcaagttnttgctcggganantnggattgttgcnngctacggnttgacaaaaanattc

SEQ ID NO: 44893 - DNA, 239 bp, Glycine max
  unsure (1)..(239): unsure at all n locations; Clone ID: 701129635H1
catncagtccatgacaacccccaaccctaacagattctcccttngccatggagagaaccgggcnatgggttttctcnccagaaatcccaaccgatgttattgttggcagttggagantccactttttctctccatnagtttnttctgggcggctaagagtaactacatcagaaaagtgataatggaatcagaggagagtgacctaacaagantagagtttccaacatacctggnggacc

SEQ ID NO: 44894 - DNA, 264 bp, Glycine max
  unsure (1)..(264): unsure at all n locations; Clone ID: 701129636H1
ctgtgatcatganctctggcttgcacgatggcgtccactggcgcaacataagagcattctctgttggagcagactatgcagcatcctttggggagatgttatgaagacagtgaaggcaaagggggttggcatggccaagagtgtttttccggaatacagttgcaactggtggatatgcaaggtcactagcattcaatcctaacaagatggaggtgttcaatggtgtgttgttggagaaattgaagcaatcaggagttgtttctg

SEQ ID NO: 44895 - DNA, 220 bp, Glycine max
  unsure (1)..(220): unsure at all n locations; Clone ID: 701129637H1
ttcnnagattntttttgtnaagagatgnagttcttgaattnnggantatgatgacttagtaccttttttntgaggcttattttcatatgnnaattatnaagcgtaacaacttnttgtaagatcaatatatanatcntaattaggcaatntanacttgtgtcatcttgnattntatatatatatatnatgtgttccgtgtctatgttttnnactntagttg

SEQ ID NO: 44896 - DNA, 265 bp, Glycine max
  Clone ID: 701129639H1
aaaaataaaaatcaaagagcataatgtcagggatcattcacaagattggggagacccttcatgtgggagggcacaagaaggaggaggagcataagggtgagcaccatgctggagaatacaaaggggagcaccatggtgaacacagtagtgagtacaaaggagagcatcatggtgaacacaaagctggagagtaccatggtgagcacaagccagagcacaaagaggggttcctagacaaagtcaaggacaagatccatggtgaggg

SEQ ID NO: 44897 - DNA, 265 bp, Glycine max
  unsure (1)..(265): unsure at all n locations; Clone ID: 701129643H1
gggcgcctccttcaccctaatcgattttttcttcatggagtagtgtcataatcagacacagatcatggttgttnctttactggcaccnccttcacctctttgtggggnatatttgactgtgaagttctgtctttctcccttgcagaggcatccattcctctttctggattggntctaacaactaataacggagggcaatcttcatagactgttctaaatatgaaatcanttggcagtggaaggagganttcggtgctagttttng

SEQ ID NO: 44898 - DNA, 263 bp, Glycine max
  unsure (1)..(263): unsure at all n locations; Clone ID: 701129645H1
gacgagattccgagtgctcacactattaacctcttgaggtggtgtgatgatgtgccttcagtccttcatcttcagctgaagaactatctatactcctttgagtttctcttggatgataacagctggagagcttctgttcacagatatcagagtggtaagacaaggtatgctcattaccgccagtctgatgacttattggcggatgctggttggcattgcagctnttgcttccgctatatcagcgattncgtctttaagatgaa

SEQ ID NO: 44899 - DNA, 266 bp, Glycine max
  Clone ID: 701129646H1
gcacgctctgcttccagcgagtgttctttcttcgtttcaacaccttaatttgcacacgctgcttcttcagcttgagaaatggcacaagaaacctttctattcacatctgaatctgtaaacgagggtcaccccgacaagctgtgcgaccagatctctgatgcagtgctcgatgcgtgccttgaacaggaccctgacagcaaggttgcctgtgagacatgcaccaagaccaacatggtcatggtctttggagagatcacaaccaaggc

SEQ ID NO: 44900 - DNA, 266 bp, Glycine max
  Clone ID: 701129647H1
gtgggtttgaaacaacgactggagagcagtggcttgcatttcgtgatgatgggaaatataacgctgcagactatgcaaaacttgcaagtgagagggtatcgagagatcgagaagggtcatcctggaatccctttgagcaaggactgacaaccaaaaggagacaaaattttatcataaagatgctccaaggtgtcatgaagggtctagcttacttgcatgacccacgataggttgcaccagagtctaggaccgtttctgtggttctc

SEQ ID NO: 44901 - DNA, 262 bp, Glycine max
  Clone ID: 701129648H1
attggcatgtgaagaacatcatcaatagggatagaggtgtcaacctagttaaaatttctgtccctattgtgatgttaaatcatgcctcctttgattaaaaggaaaaaagaaaagagtaatttaatataaagacaactatttaacagagttagaaaatatatatatcttatgtaaatattattatggctgtttttgacacattcaagcctattttgtattgagtaaagttctttagcttaaaaaaaaatcaaagcatatgttt

SEQ ID NO: 44902 - DNA, 263 bp, Glycine max
  unsure (1)..(263): unsure at all n locations; Clone ID: 701129649H1
tgcacctcctgctagggattttattggtgctctaaaggcagccaacgancgaactggacttccagggttgattgctgaagtgaagaaggcatcaccaagtagaggtatcttgagagaagactttgnanccaagttagcctatacaattttatttcantttaggacgttaggggggttgaggggggntntgtgttggtgaatagaatgtagaagctgttnatgttggaggttgtttggaatgaagatgttgtngtngttcaccc

SEQ ID NO: 44903 - DNA, 217 bp, Glycine max
  unsure (1)..(217): unsure at all n locations; Clone ID: 701129650H1
tgacggcggaggatgangacaccggancgcggtcgctccgatcgtgaagctcgaataggtngccgtcacnatcggcgangngnacgaggatcccatcnttgacctgaaggngaactgtaatacggtttgacaaggagnggaaccagtggtnggaacntggctgcggnnacgttaagctgntgaaacatnaggtcaccgagaaggtgagactagtact

SEQ ID NO: 44904 - DNA, 263 bp, Glycine max
  Clone ID: 701129651H1
gggaaggatttgaagtgggttattgttgtttgtggatttcttcattgttttgctctaaaaatggagagagattttctgggtctgagctcaaaagaaccattggctatgatgaaggaagagatgaatattgatattggaagcaaagacacaggtttcacaaatggagcagtggtaaaatggcccttcatgaacaaagtatatgtccatcccttttgatgtcattcaatcctcctcagtgaattctgtggaaccatcctcatggt

SEQ ID NO: 44905 - DNA, 263 bp, Glycine max
  Clone ID: 701129653H1
atcagcctcattgtttgggttgactgggagcacaactttttcttcagggagttcattgttttcttcttcaagttccgtcccaaacaatttcaatgcgggtacaacttctgggcaaagtacccctgctgcttcttcagaaaccaaccctgttagctccagtagtggcatgagttcttctgtgtttgggctttcaagttggcagcccagcaagtcttcatttggttcttccttagttcatcatcatcaccttcctctgggttttc

SEQ ID NO: 44906 - DNA, 265 bp, Glycine max
  Clone ID: 701129654H1
gtgatggtcaacctataggacgatacgatgatatgtgggctggatggtgtgttaaggttatctgtgaccatttgggcttgggagtgaagactggccttccatacatctggcacagcaaagcaagcaatccttttgtgaatctcaaaaaggagtacaagggcattttctggcaagaagagatcattccattcttccaaagtgccaccattccaaaagaatgcacttctgtccaaaaatgctacattgaatctccaagcaagtcaaa

SEQ ID NO: 44907 - DNA, 266 bp, Glycine max
  Clone ID: 701129655H1
gttaggtcaaatactcaaagggcaaggagccagcttttggaaacgcatcttgcaaaattgtttaagcagaaagttgaaattttcacaaaagtagaatatacacaggagtctgttgttacaactttagttaaattgggccttaaaagttttcaagaatttgtccgactccagacttttaaccgaagtggattccagcaaattcaattggatatccagttcgtaaggatccctttaagagaaatagttgaagatgaagctgcaatcga

SEQ ID NO: 44908 - DNA, 265 bp, Glycine max
  unsure (1)..(265): unsure at all n locations; Clone ID: 701129656H1
ctctcgctctctgccttccatcaccctcgccatttcccttccanagatngtagaagatggcagacgctgaggatattcaacctcttgtttgtgacaatggaacaggaatggttaaggctggttttgctggagatgatgccccacgtgctgtgtttcccagcattgtaggtcgtcctcgtcacactggtgtgatggttggcatgggccaaaaagatgcatatgttggtgatgaggcacagtctaagaggggtattttgactctcaa

SEQ ID NO: 44909 - DNA, 266 bp, Glycine max
  unsure (1)..(266): unsure at all n locations; Clone ID: 701129657H1
agaagattccacccttcatttattnacctcatacacgtgtctctgccgctgaaaaattctttcttttcnccgctctataacttcattgtttgtnttcgatcaacatcatcaaactcctcgcacttgggctgtttttnnctcagcttttcaccagaaaaagcttccatttttgctcagatcttcctcttgctcttcctgttcctgggaggatactgccaattgataaacagtgaagaatagctcctccatatagttttatgaacata

SEQ ID NO: 44910 - DNA, 266 bp, Glycine max
  Clone ID: 701129659H1
actcaaatgacttttgccttaaatagcatctatcacgagcctttaaaaattgccaggtgagactgtcttgaataagtgcccaaataggctcacttaagcaaggccttcaaatatgatattggcctctagaacttctctcacttaagcgaggttgcactgcagcactggtaccatctcaatgcctcaattaagccccaggatgactcgcttaagcgaggctgcatcttcaaggagctcgtgctccacccccttgtcctcgaagtggt

SEQ ID NO: 44911 - DNA, 235 bp, Glycine max
  unsure (1)..(235): unsure at all n locations; Clone ID: 701129660H1
ctttttctgtgannctttctttcaggttacttaacttgatcagtgtgcacgtgtccaaatcataagggtagttgcaaattgcaatggctaagcatgatgttgagggtggttccttctctgcaaaggactaccatgatcctcctccagcaccgttgattgatgctgaggaactcacacagtggtccttctacagggctttgattgctgagttcattgccacaatgctcttccttta

SEQ ID NO: 44912 - DNA, 264 bp, Glycine max
  Clone ID: 701129661H1
gcacgattggaacgaaataaaaaccgatccttattctcgtgaaatcttagccgggagtttactcatcgtatcatagtaaacaaagttaagagttcaccaggatcactggttcatctatcatagcactgaggttatgaagttttctgaagctgtaacaagacgactttccaataaatgtgttcaatgctattctacactttgtttctttttgtctcaattcttagtttaggttcctttcctttcctttttggtgctgcagttgtt

SEQ ID NO: 44913 - DNA, 264 bp, Glycine max
  unsure (1)..(264): unsure at all n locations; Clone ID: 701129662H1
tatgaagttgtttgttttctttgttgctgcagtagttttggtagcatggccatgccatggcgcaggctaccaaaggttccctctccgaatganaactggctatggtgagcgttcttcggaggtaaaatgcgcaagttttaggcttgctgtggaagcacacaacanccgagccttnaaaaccattcctgaagagtgcgttgaaccaacaaaggactacattaatggcgaacaatttagatcagactctaaancagttnaccaaca

SEQ ID NO: 44914 - DNA, 265 bp, Glycine max
  Clone ID: 701129663H1
ataactttggccaccaacacccccgtctctcatacattctacgaagtgaagcgtcaatggcaagttgtgttggcacttcacctctatatttaccagttggtattggaaattttcctcatgctcatgttaagcttactagaccaaacattgttgggatgaaacccttaccatataacatcagaaaaggagaacttaagattgctacattgcaaaatccatcatcccatgtcagacatgctgctgctttgaattttaaatgtgctgc

SEQ ID NO: 44915 - DNA, 263 bp, Glycine max
  Clone ID: 701129664H1
ggttgctgaagacaagctcggttcccaacttgatattcttgctccagtcaagtactgagtagtctatgtttttaaatttttttatgcaacttatacccaattgaaactacctttcagttttgcttgttattggctatgaagtattgacaccgatacggacaccggacacggacacgttgacacctgtaatgtccaaaatatagaacgtagtatgggtgttgtgtccgtgttggacactgacacggacgtgggtcgaacatcgg

SEQ ID NO: 44916 - DNA, 266 bp, Glycine max
  unsure (1)..(266): unsure at all n locations; Clone ID: 701129665H1
tacctcccattgttgctgcactgtactgcttgtttttcgcttatgttggagcgggaggtctaagttttcttcaattctgcaacctcaacagttttagaacaatatttgtattaggcnactccatcttcattggctgtctgtgtcgcagtacntgcaatgagtacacagcaattaatgggttatggtccggttcacaccaaagcaagatggttcaatgatataatccaatgtcccgttccaatcagagcctttgttgcgggtggtgt

SEQ ID NO: 44917 - DNA, 262 bp, Glycine max
  Clone ID: 701129666H1
cgagcatcagttgagtggggcattcctgttcctgatgacaagacccagactatatatgtatggtttgatgctttactaggctatatatcagcactatctgatgatcaggaacaacctgatttacttaaaactgtttctcaggttggccagcttcactggcacttgattggtaaggatattctacgcttccatgctgtttactgggccagctatgctaatgtctgctggactaagccttcctaaaatggtatttggccaggat

SEQ ID NO: 44918 - DNA, 262 bp, Glycine max
  unsure (1)..(262): unsure at all n locations; Clone ID: 701129667H1
taaaatgggttccgataataccaacttggagttcttgaaggagatcggtttgggctcctccaacattggttcttacattaatggccantggaaagccactggttcttctgtcacttctgttaatccttctaacaatcagagcatagctcangtnactgaagcgactttgcaagattatgaggngggattgcaagcttgcagtgaagcagaccaagacatggatgactattccggcaccgaagagangtgagattgtgagaca

SEQ ID NO: 44919 - DNA, 261 bp, Glycine max
  unsure (1)..(261): unsure at all n locations; Clone ID: 701129668H1
aatttcaatggttgcgagagtaacggaattgagtgtgtttgaagtgattatgggtcctatgaggatgctgaataacaganaganaggacagcagaagaagttttgttaacctataccgtatttattatatctatatttaccaatttttttctgccattccatacgatagagcgaancagttcgtagtaggtgtttttaacccccacgcgatcttattatggatggtccaaccagcattatatgattgggaataacatcaca

SEQ ID NO: 44920 - DNA, 260 bp, Glycine max
  unsure (1)..(260): unsure at all n locations; Clone ID: 701129669H1
ggcggattcttctcgggaggagaacgtttacatggcgaaattggcggacaggccgagcgttacgangagatggttganttcatggagaaggttgcnaagagctgtggaggntgangagttgacggtggangagaggaatctcctctctgtggcttacaagaacgtgattggtgcgaggagngctcgtggaggatcatatcctccattnagcagaaggangagagcaggggcaatgaggaccacgtggccattataaaggc

SEQ ID NO: 44921 - DNA, 246 bp, Glycine max
  unsure (1)..(246): unsure at all n locations; Clone ID: 701129671H1
attcaagttccaatcggaatcggaatcggaatctgaaatgantagtagganntggtttctactattccttctgctgatcncgaaatgccatcaagtgtggggctcctacgcgggttccgctagctccatcgtcaacccttccaaggtcaaacagatttcctggaagccaagagctttccgnttatgaaggtttcctcacggatttggantgcgaccacttgatctctttagccaaatcggagcttt

SEQ ID NO: 44922 - DNA, 263 bp, Glycine max
  unsure (1)..(263): unsure at all n locations; Clone ID: 701129673H1
cagggagattgacgaacgcagcatcgaggatcttaggcggaaacggcgtcgtttaccgatccgtagcttcctctcttcgcctccgctccggcatgggcctccccgtcggcaaacactatgttcccgacaaaccccttcccatnaatgangaactcctgtgggacaacggcactgcatttcccgaaccgtgtatagatcgtattgctgacactgtcggaaagtatgaagcattggcctggctgtgtgggggattgagttttttc

SEQ ID NO: 44923 - DNA, 262 bp, Glycine max
  unsure (1)..(262): unsure at all n locations; Clone ID: 701129674H1
ctcaatccagtcattgctgtgtgatccaaacccaaattcaccagcaaattctgaagctgctcggatgttcagtgaaaacaagcgtgaatacaacagaagagtacgtgagattgttgagcagagttggactgctgactaatcatcatagntaagatagggcttctgtgacantcaaaaggttgtcaaaaggatatatgattgaataaccagcagacttcannaagaaccattatgattttctagtccttgacactgtgcttgc

SEQ ID NO: 44924 - DNA, 262 bp, Glycine max
  Clone ID: 701129675H1
gcccttcatggtggtaacttccaaggaacacctattggagtgtccatggataacacccgtttggctcttgcatcaattggcaagctcatgtttgctcaattctctgagcttgtcaatgactattacaacaatgggttgccctcaaatctcactgccagcagaaaccccagcttggattatggattcaagggagctgaaattgcaatggcctcttattgctctgaactccaatacttggcgaacccggtgacgagccacgtgc

SEQ ID NO: 44925 - DNA, 261 bp, Glycine max
  unsure (1)..(261): unsure at all n locations; Clone ID: 701129676H1
atttggtaactaacttaacttgtttgttcaggtcgcgtttggatgggggcatgctcttgctcgtactgcggatggcaagttgtttggatggaggctattcagcggacggtaggataggaaaaatggggaataatcacttccagacatctccgttggaatccgagtctccaaatatctcacagctctcgcggaccttgaagctgctgaaaagagagtctgcaaggaatggagcaggagantaacatgccaatagtatgggag

SEQ ID NO: 44926 - DNA, 259 bp, Glycine max
  Clone ID: 701129677H1
tgccacactacaccgatatttccaccaaacccgtttgcgttgttgtttgcgaataaatggcgactaagaggagcgtgggaacgttgaaggagggtgatttgaaggggaagagggtattcgtgagggtcgatctgaacgtgccttggatgacaaccttaacatcaccgatgacactagagtccgtgctgctgttcccaccatcaagtacttgactggttatggtgctaaagtgatccttctagccattgggacgtccaaa

SEQ ID NO: 44927 - DNA, 262 bp, Glycine max
  unsure (1)..(262): unsure at all n locations; Clone ID: 701129678H1
caatttaggggtgctgctgtggccattgcttctgatgaaaagatagccttgctgggtgccatacagtctctctttgaaggttcaatgtacacctttgtgtttctatggactcctgcattgagcccaaatgatgangagattccccatggttttatttttgcaacatttatgttggcttcaatgttgggaagctcgcttgcatcgaggttgatggcccgttcttcactccgagtagagagctatatgcagattgtttntgcag

SEQ ID NO: 44928 - DNA, 228 bp, Glycine max
  unsure (1)..(228): unsure at all n locations; Clone ID: 701129679H1
gtgccggtttcattggcacccacaccgtcgttcagcttctcaaagctggcttcagcgtttcaataatcgccaatttcgatnnctccgtcatggaagcagnggaccgcgtccncnnactggttggcnctctgctttnctcagaaccnccaattcacccanggcgatctncgncatanggatgnntggagngncacgnactngaanacancacttgntgncgnnntncac

SEQ ID NO: 44929 - DNA, 270 bp, Glycine max
  unsure (1)..(270): unsure at all n locations; Clone ID: 701129680H1
cgtgaaatactatgtggtggacgcgtnnactgagtcagcattcaaggggaaccctgcanctgtgtgtttcttagangangagagagatgnggagtggcngncaagcagtcgccgctgaattcaatctnctcngagacttgttacttatcnggcatncacccatccgctccntggaatctctaatccccgtnngacatctcagatgggttnacnactgttggctgaggttagaactcngntggtnatgccacattagctgactgcgcacnc

SEQ ID NO: 44930 - DNA, 263 bp, Glycine max
  Clone ID: 701129681H1
gcagggttgggctatccatttgtttcgagaatgcggtctctctcagccaacccttccttactgcgacaagctgttccagttttggtcaaaccctacaaatccattctctctcgagcattcctcttcagctcccctgcctccacatctcattctcacaatactcaatttcttagatccgtcacgtttttctctcctacttctcttcgtaattttaattcacgcgccacccatctcaacgatgctggtctatcgactctcctctt

SEQ ID NO: 44931 - DNA, 261 bp, Glycine max
  unsure (1)..(261): unsure at all n locations; Clone ID: 701129682H1
ggagagcttgttattctctatcaacaaggaaaatgtcaggtgaagaggttgttgttgcagctgagccagctgctaccatcccaggcgagcctatggatatcatgactgccttgcaacttgtgctcagaaaatctctggcttatggtggtctgcacgaggccttcacgaaggggcaaaagtgnttgagaagcatgctgcacaactctgtgttctagcagaagactgtgaccagcctgactatgttaaactggttaaggccct

SEQ ID NO: 44932 - DNA, 316 bp, Glycine max
  unsure (1)..(316): unsure at all n locations; Clone ID: 701129683H1
ggcctttgtggtttcaggattgccgagctgttgatgttctcaatgtgctgcccacagcaaatggtggaaccattgagctggctttatatgcagctatatgcaccaaccacattgggcttcctgctcgagaacttctggttgttngcggctaacacttnctgttttnagaaagatgggcagccttaagtggatctggtgnagaagggtccactttaannnaataactncaaaaatgggttcccaaaggcatggcccttccctggttggcnagncattttttggtttaagaagccaggangatggctggccctnagnc

SEQ ID NO: 44933 - DNA, 263 bp, Glycine max
  unsure (1)..(263): unsure at all n locations; Clone ID: 701129684H1
gttcgagcacccaangcacggttcactgggatttcttcccaggaagcgtgctgctcgtcacaggggaaaagtgaaggcattccccaaggatgacccatccaaggcacccaagctcactgcattcttgggttacaaggccggtatgactcacattgttagagaggtcgagaagccaggatcaaagcttcacaagaaggaaacttgtgagcctgttacaattattgagacccctccaatggttattgttggtgttgtgggttatg

SEQ ID NO: 44934 - DNA, 261 bp, Glycine max
  unsure (1)..(261): unsure at all n locations; Clone ID: 701129685H1
ctttaggtggtgaagaacaagagctcaaatcaaatcgaatcgaaaaaaganaganagatcatattcatggcgatggcaagcctggctcgaacggaagggttacgccgtcgttttgtcgtcgaggtcgtcgtgttgtctgacaagctggaggggattcncgtccggatctgacgaaaacgacgtcgtctcatcggcggcggtcccggcggctacgtggccgccatcaaagccgcgcactcggtctgaaaaccacttgcatcg

SEQ ID NO: 44935 - DNA, 263 bp, Glycine max
  unsure (1)..(263): unsure at all n locations; Clone ID: 701129686H1
atccctcttgatttgtagtttgttttgtgctttagataaaagttctgccaaatcaagaggggttttaagntcatagtgtgtgttttgcaacaatggctnagttctttgctgctatgatctngnactncttgccatttcccatacttcaaacagtggtaatggctgctaatgaacaaggaggccacttgtatgacaacaagagcaaatatggaagtggaagtgtcaagagttaccaatgcccatcacaatgctcgaggagatgt

SEQ ID NO: 44936 - DNA, 259 bp, Glycine max
  unsure (1)..(259): unsure at all n locations; Clone ID: 701129687H1
atgaacccggttcacaagaagattccggttctcatccacaatggcaaacccatttgtgaatccctcattgctgttcagtacattgaggaggtttggaatgacagaaatcccttgttgccttctgacccttaccagagagctcaggctanattctgggctgattatgttgataagaagatatatgatcttggaaggaagatttggacatcnaaaggagaatnanaagaagctgccagaaggattcatagaagccctaant

SEQ ID NO: 44937 - DNA, 262 bp, Glycine max
  Clone ID: 701129689H1
tttgggtcttttgccagggacaactgtttataggaatgttaaacagtatcctgaagcatatacatacaatggaattgtaatcgttcgtgttgatgctccaatttattttgcaaacacaagttacatcaaggacaggttgcgtgaatatgaagttgatgttgatcgttctaaaagacgtggacctgaggttgaaagaatttatttcgtgattctagagatggcacctgtgacatacatagattctagtgctgttcaggctttg

SEQ ID NO: 44938 - DNA, 260 bp, Glycine max
  Clone ID: 701129690H1
gggagcatggggatagttcggtggcgttatggtctagcattagcattgggggtgttccggttctgagctttttggagaatcaacagattgtgtatgagaaagagacgttggagaacatacacaagtcagtgatagacagtgcgtatgaagtgatcaagctgaaagggtacacttcatgggccattgggtactctgtggctaacctggcccggtccttatcaggaaccagaggaagatccaccctgtgtctgttctggcta

SEQ ID NO: 44939 - DNA, 245 bp, Glycine max
  unsure (1)..(245): unsure at all n locations; Clone ID: 701129691H1
aatggaaccgaagaatcaagaatggctgctgtcagcaaagaacaggaacaaaccaggtcaagaagcagcattgtgactactcaaattctgcaacttggaacattttaccctgcagagccagagcaccagaaatttgaactcaagcaaaataccatccttcttcagttaattgggaaccttcctgcagaggagcttgagnggtctagcctggcaacaaanttgaatggatatgtggccgagctttg

SEQ ID NO: 44940 - DNA, 264 bp, Glycine max
  unsure (1)..(264): unsure at all n locations; Clone ID: 701129693H1
gtttggaagaagctgatccgagaagatggtgcagcgtctcacctaccgcaaacgccacagctatgctaccaaatccaaccagcacagagtcgtcaagactcccggtggcaagcttgtttatcagaccacgaagaagagggccagcggacccaagtgccctgtcactggaaagaggattcaagggattccacatttaaggccatcagagtataatagatcaaggttacacagnaaccgaaggnctgtgaaccgtgcatatggtgg

SEQ ID NO: 44941 - DNA, 274 bp, Glycine max
  Clone ID: 701129701H1
ccaccactgtgcaatggccgacgaggaacctgttgatcagaagagatatcttgaagagtcttgcaaaccaaaatgtgtaaaaccattactagaataccaggcgtgcattaaaaggatacatggtgatgaatctgggcagaaacactgcactggacaatattttgattattggtcttgtattgacaaatgtgttgcaccgaagctattcaccaaactgaagtaaatcgggaaggatttgatggctatcattgcattcttctgttttcatcccaaa

SEQ ID NO: 44942 - DNA, 271 bp, Glycine max
  unsure (1)..(271): unsure at all n locations; Clone ID: 701129702H1
aaaagatccagttgtcggaggcgcagagtagagcagcagagaagagagaaaacggcactgcagccgtagaaggaaaaccgaccatggtgcacgtctccttttacaggaactatggtaagacgtttaagangccccgccgtccgtacgagaaggagcgtctagacgcggagtgaagctggtgggggagtacgggctgcggtgcaagagggagctgtggagggtgcagtacgcgctcagccgcatccgcaacaacgcggaatctccttaccct

SEQ ID NO: 44943 - DNA, 264 bp, Glycine max
  Clone ID: 701129705H1
atgggcctttgatcacatcaaatatttcaatggtggttctgacattcagcttcatcttgacaagtacactggtactggcttccagtccaaagggtcttacttgtttggtcacttcagcatgtacataaagatggttcctggagattctgctggcacagtcactgctttctatttatcttcccaaaacgcggagatgatgagatagactttgagttcttgcggaacagaacaggacaaccttacattgcaaacaaatgtgttcac

SEQ ID NO: 44944 - DNA, 263 bp, Glycine max
  Clone ID: 701129706H1
gtttgtccaatttgcagacaggagctgtgctgaagaggcccttcgggtgttgaatgggacgctgttgggtggacaaaatgtgcgtctttcatggggtcgcagtccttcaaacaaacaggctcaggcagatccaaaccagtggaatggtgctgctggtgctggttctggtggtggatattatgggtatgctgctcaaggatatgaaaattatggttatgctcctgctggacaggatcccaacatgtagcagttatccgggatat

SEQ ID NO: 44945 - DNA, 262 bp, Glycine max
  Clone ID: 701129707H1
ggaaactcggtgcatgaggtggccgcgagggccggttcggcggacctaagcccggtccgggtcgcgggggcaattccggttcaccccggttttgtccggtccaaccggagccggtccgagatggaaatgccacagacaccgtttttaacgttggacatgctggacaagttcttagccttggcgcttcctgttggggccaccaaggaccacccctttacgtgcccgatgggtgaggcggcaccgcctcgaagggctgaaactg

SEQ ID NO: 44946 - DNA, 245 bp, Glycine max
  unsure (1)..(245): unsure at all n locations; Clone ID: 701129708H1
ctccgagggagacaatgcgatcnctttggatgtcctcttgcttggtgagttatggagcatgtaaattgctgggtcagaaaatgccaagacttaatgttgaagtcattgatgaaagaggatctccagattcaaggccggagagtagtcctgttgagaagttatacatatacaggactgtttctgggccaagattggacatgccaggctatgtatggagaatgcaagatgtctgcattanggatttc

SEQ ID NO: 44947 - DNA, 265 bp, Glycine max
  unsure (1)..(265): unsure at all n locations; Clone ID: 701129709H1
gaccctacgaatccgaagcactattggagattccgtgtgcatgtgactttggaatcattgatcaaggataatgacctccaaaccaccatcaaagatctcgtcagttggagtggaagatcactccctaaggaagacgactcagaaatagaagcgagcccagtgtcggtgttgtcagcagcagaagctctttctgagaagcagaagtttgccagtaccacggaaaagcctgttcttgtcaaataaaaattagctgntgttattcatg

SEQ ID NO: 44948 - DNA, 265 bp, Glycine max
  unsure (1)..(265): unsure at all n locations; Clone ID: 701129710H1
gnngacaactctgtgacccagcgtcccatttggtcttcacccagagttcaatacgtaggaactgcttgcttgcggcttcaatatctgctaaccaaacccttagtcatctgggatttaaagggttggtgttgagcagatagagatgaacccgccaacactagtgaagcgcactcagaacatcaatgccagagaagctgcactcagcatncggcgaccatgcctcctggcacaccaagtacaaggattccttacatcttcgtcggtg

SEQ ID NO: 44949 - DNA, 264 bp, Glycine max
  unsure (1)..(264): unsure at all n locations; Clone ID: 701129711H1
gggtgaggtgctgggagtatcgccagcaaccttctattgtccgtttgacaangtctactacgcccagataaggctcgtccgcttgggtttcaaggctaagcagggttacgtgatttaccgtgttcgcgtacgaaggggtggccgtaagagaccagttccaaagggtattgtttatggtaagcccaccanccanggtnttcccacannnnattttncnacgcaacaaganttctgttcccgaggananccgnaagganttgggtc

SEQ ID NO: 44950 - DNA, 213 bp, Glycine max
  unsure (1)..(213): unsure at all n locations; Clone ID: 701129712H1
acgaaaccctaaacttgaaacctaccccactcatcgtgtgtgtgtgtgcagagatggcagaagaggattcaaagcctctgaactacatctccgaggtcattctcaagaagaggaagaacaccgaagcatgggctttaaggaaaaaagaacagttccagcaaaaganataccaatccatcaagaagccggaggattttccacgagtatcgcaac

SEQ ID NO: 44951 - DNA, 263 bp, Glycine max
  unsure (1)..(263): unsure at all n locations; Clone ID: 701129713H1
cgaaaccagctagcggaggctgacgagttcgaagacaagatgaaggagcttgagagcatttgcaacccaatcattgccaaaatgtaccagggtgcaggtgctcccgacatggctggaggcatggatgaagatgttcctccatctggatccggtggtgctggccccaagatcgaggaagttgattaaattgtttcattatttagatgggatgggcttgtgttggatctattccgtttntttttcctnctttattnggtctagaa

SEQ ID NO: 44952 - DNA, 264 bp, Glycine max
  unsure (1)..(264): unsure at all n locations; Clone ID: 701129714H1
aganggtgtaaccccctgcattcagtctatgcaattgcaagctggagatactgtaacatttagccgtatggaccctgaggggaaacttataatggggtttagaaaggcaacaaattctactgcagtacagtcacaaaagggntgttcagaaacccacctaaatgcgctgtctaagaaatggaactcagctggtggtgacatgaattggcatagcattgacatgcctganagcaganaaagagatggggccattgccacctgtga

SEQ ID NO: 44953 - DNA, 245 bp, Glycine max
  unsure (1)..(245): unsure at all n locations; Clone ID: 701129715H1
tgttggggaagaggccccggccaatgatcggaaagttgtcggagnngttggtctcgagaggccgcacggtggcatatttggacaccaccggaagccctagaggcccattagacatgaagatgatgcaatcatcaccaagaggcttaaaaaactatgatcttggtggtgttggtcttggaattgtagtggctctgataaatccaacgaggttgctgcacgtgaagtttcccaaacacgccgtttnc

SEQ ID NO: 44954 - DNA, 268 bp, Glycine max
  unsure (1)..(268): unsure at all n locations; Clone ID: 701129720H1
gcgagctttgcattgcttggcagatttgcgaacaaggagcgaagagattcgagcccactggttcttaccatatttncataacagccgctttcaggatttcatcttcggtgtttntccaaacaccgcccttaatcataatcctcatcttcgcttcaactacagacagcaacaaaacaattcaaacaaagatgattagatgtgaaaaataggggaaaagaaaaataaagagaaatcagggtttaggttagggaatcagagacgcaccaca

SEQ ID NO: 44955 - DNA, 262 bp, Glycine max
  unsure (1)..(262): unsure at all n locations; Clone ID: 701129721H1
tcgancgaatcggnctcacgnnntacgagattaattntanggttgctanaannccttttgaacgtatnnanctgcatgtnnnataatttatcggtanaaaaagtcataaacaaggtattcttcacggttcagatacaaagtttgcttcttgtttgttgtcccaagattctttcttccatcagcctatatttttggagggtctgtgcctcggtggagttaagagtataatgtaaagaacatagcactntcggcgctcgtatct

SEQ ID NO: 44956 - DNA, 258 bp, Glycine max
  unsure (1)..(258): unsure at all n locations; Clone ID: 701129722H1
cagggagttgctctngatgatgcttgagcaanantcattcgttcctttgaagtttgtgctttatattattattatggttgggtttcagccaacagtggattaaggtacaatgagagctgcgagctcttgctcctgtagaggcttaatataggataggtttcaaaataagagggttttgtggcatcctggtgttgcattgagcttgatctaattgttcnnnncaatgttcatttccaaatgagtactttgttggttaaa

SEQ ID NO: 44957 - DNA, 261 bp, Glycine max
  unsure (1)..(261): unsure at all n locations; Clone ID: 701129723H1
ggggaaagaagaccctgttgagcttgactctagtccgactttgtgaaatgacttgagaggtgtaggataagtgggagctggaaacagcgaaagtgaaataccactacttttaacgttattttacttattccgtgaatcggaagcngggcactgcccctctttttggacccaaggtcggcttcggccggtcgatccgggcggaagacattgtcaggtggggagtttggctggggcggcacatctgaaaagataacgcagtgt

SEQ ID NO: 44958 - DNA, 262 bp, Glycine max
  Clone ID: 701129724H1
gtcagggatcattcacaagattggggagacccttcatgtgggagggcacaagaaggaggaggagcataagggtgagcaccatgctggagaatacaaaggggagcaccatggtgaacacagtagtgagtacaaaggagagcatcatggtgaacacaaagctggagagtaccatggtgagcacaagccagagcacaaagaggggttcctagacaaagtcaaggacaagatccatggtgagggcggcgccgagggcgagaagaag

SEQ ID NO: 44959 - DNA, 264 bp, Glycine max
  Clone ID: 701129725H1
atcaggcaacgcctttcacacttgctttcttcagttcctccatctacattgcaccatttgaagggaatagcatcaattattgaaaccggttcgtactcaaaggaagttcgtcgaattgctcgtgccctgcgccttacatttgcatttaggcgtaaattgacaacaccagttctctcatcttttcttgattatgttcttactcccgcttctgaacctcacactaggttatcctcttatctccctaatcaggagggtgatcgagag

SEQ ID NO: 44960 - DNA, 219 bp, Glycine max
  Clone ID: 701129728H1
ctcaaaaatcgttctcttcgattttagggttttgttttgctgctgcctccgttccccccttctcataaacaacgcgttttctcttctgcttcgtatctattctttgcttttggttttggttgattcaaggccttcacagcattcgttgcggcattttaatcgatttatccaagcaggactgaatgaactaatggagtctaaaggtgggaaaaagaagtc

SEQ ID NO: 44961 - DNA, 261 bp, Glycine max
  unsure (1)..(261): unsure at all n locations; Clone ID: 701129729H1
taatganngtgngggtggatcagatgttccagttatnggaattganaacaatgttgngatggttgactcgctgccggaaagtgggagagatggaaatnttgaggctgatgccaagttggataatggtggagtattggaggctgaaggtgtagatgatgtttttatggaagggtctgttccaaatgaggctattgtnaagaaggatgagatcagnggtaatgaaatggggggtgactgtgtgttttgaagtgaaggagaagg

SEQ ID NO: 44962 - DNA, 261 bp, Glycine max
  unsure (1)..(261): unsure at all n locations; Clone ID: 701129730H1
ggcaatctcacttcctccgcgccgtatattaattcccctcattttcgctcacaacttaagctttccagcaactcctctttgcacaagccactcatgcgcgacaagactgtgctggtaaccggcggaggttacatcggcacccacaccgttcttcagctcttgctcggaggttgcagaacnncgtcgtcgacaatctcgacaattcctccgaggtttctatccaccgagtcagggagcttgccggaatttgggaacaactct

SEQ ID NO: 44963 - DNA, 268 bp, Glycine max
  unsure (1)..(268): unsure at all n locations; Clone ID: 701129731H1
ggaccctcgtgtcgtcgcgttgttngancggtgcctncttnccgatccncttcgacnacgacaaggtcgagaagctcaacgttctcgacgggcaccttcatgccttccaccaagttcaccggcnggttccgcgtctgcgcctacctcgacaccaccgaacccaaccacgcactcatcaaacagttcttccttaacgtcctcgccaagcgaaaagactcttttgtccctctgttccgaaactgcctccaggaggttcgcggagatgagg

SEQ ID NO: 44964 - DNA, 270 bp, Glycine max
  Clone ID: 701129732H1
gtctaaacagatggagcgaagaaagacaatccagacagagaagaagagtctgtccgatctgaaaagcagcggagaagactaccctggctccgactaccgtccccaagacagaaaaaactggatgtcccatctcgaccctcagaaactccgcatcaaccaaatcgtctggcccggcacccacgactccgcaaccaacaaaattggcatccctctcctcactcgccccttcgcccagtgccaatccctctccataccgccagctctccctcg

SEQ ID NO: 44965 - DNA, 274 bp, Glycine max
  unsure (1)..(274): unsure at all n locations; Clone ID: 701129733H1
gcggccgctcgcaatgttctcacagtgccattttctctctcactccccaattcccaatactacctttcgtctcagagccatggcgcctcacagcacgcctcttgaactcaatcgcttcgccgaggtcggtaacaaagtcgccgatgctgccggagaagttatccgcaaatacttcaganaaaacttcgacgttattcacaaacatgatctcagtccagtaaccattgcagancaatctgctgaggaggctatggtnnatcatactagacaattt

SEQ ID NO: 44966 - DNA, 269 bp, Glycine max
  Clone ID: 701129734H1
actgtcactttacccaatcctaacactttcttctctctgttttccttcttcctcgcatcaatggagttggacggcgttctcctcggcatgtgcaaccctctcctcgacatctctgccgtcgtcgacgacgctttcttggaaaaatacggtatcaagttgaacgatgcgattctcgccgaggataaacacaaacctatgtatgaagaattggctaacaatcctaatgtggagtacattgctggaggtgctactgaattcaatcagggttg

SEQ ID NO: 44967 - DNA, 268 bp, Glycine max
  unsure (1)..(268): unsure at all n locations; Clone ID: 701129735H1
ctttagaactcctcaagatacactttggagagagcagcctatcagaaatgtgagattatgctcaatgatctaattggctcaaagagaatcaacagtaacattaaagctaccataaatcagccatctcagaccagtgttgaattgggagacagtgcaatatccatggatgtaatttctgctactatcatatcttctaatttctggcctccaatacaggatgagccccttaacctgcctgagcctgttgaccctcctatcngattangcg

SEQ ID NO: 44968 - DNA, 216 bp, Glycine max
  unsure (1)..(216): unsure at all n locations; Clone ID: 701129736H1
ctcgagcgtttttnttttttngantcataatcatctnaaatngtaaatactannggcctcaatattngccacttctactaagcaattggcttcccttgtcaaactatattngggttaccttttattttnccctattncatcaaatttnctattngaattttgngaagtgaaataaaatcngganttngcatgcncngtnctncananaagggcatt

SEQ ID NO: 44969 - DNA, 264 bp, Glycine max
  unsure (1)..(264): unsure at all n locations; Clone ID: 701129737H1
ccctccccgattcgttttgcccctttcgttgccctaatttcaaccatgcctcgccgtagctccggtggaagatctgcccgtncctgctcctcgtgcagcacctcgtcctgctccagttcaccatgctcctcctccagcccctgctcagagcggtggcggatctatgcttggtggcattggttcaaccatagctcaaggtatggcttttggcactggaagtgcagtggcacacagggctgtggatgctcatgggtcctcgtacca

SEQ ID NO: 44970 - DNA, 263 bp, Glycine max
  unsure (1)..(263): unsure at all n locations; Clone ID: 701129738H1
ggagatggttgccatgaggtttcaccagtaccaggtggtgggaagggctcttcctaccgaatccgatgagcatcctaagatctaccgcatgaaactctgggccaccaacgaggtccgtgccaaatccaagttctggtattttttgagaaaattgaagaaggttaagaaaagcaatggacaagtgctagccatcaatgagatttttgagaagaatcctaccaagattaagaattatggaatttggcngttatcagagccgcact

SEQ ID NO: 44971 - DNA, 260 bp, Glycine max
  Clone ID: 701129739H1
cgcagcgtagcagtaactcgtggaattgctagcaatggcgaggatcaaggtttacgagctgaggcagaagacgaaggctgatctgttgaatcagctgaaggacctcaaggccgagcttgccttgcttcgtgttgctaaggtcaccggcggtgcacctaacaagctctctaagatcaaggtggtgaggttgaacattgcccaggttttgacggtgatttctcagaagcagaaggccgcgttgagatgcctacaagaacaag

SEQ ID NO: 44972 - DNA, 262 bp, Glycine max
  unsure (1)..(262): unsure at all n locations; Clone ID: 701129740H1
ggaagcttctttttctgatcttttacgtgtcaatataaattcccttcaaagaaataagctttccactactttttcaatcaatcaccaatggctccttctttcacttacgtcaaaatcttctcttctctcgtcgcagaggattctccaacgctctcaccagacgcgggtacgctgttgcatcanaaagtgcaacaaagggaggagtggcntnaatgagcggcaatatggcnccaaagtcaggggagtaacaanggggtgtctc

SEQ ID NO: 44973 - DNA, 261 bp, Glycine max
  unsure (1)..(261): unsure at all n locations; Clone ID: 701129741H1
aatcccccttcgccagaacgacatcaccgcagcgtcgtctccaatctggcnctgcctacgacaactacctccgcctccctgagctcagagccctctgggcctccaacgacttccctaattgggccaacgagcccatcttaaagcccaccttacacgccctcgaaatcaccttccgcttactcgnaaccgttttatcggaccnggggngnatnanaaaaggggtttgccccggggggnaagntttcncggggnccaattttt

SEQ ID NO: 44974 - DNA, 262 bp, Glycine max
  unsure (1)..(262): unsure at all n locations; Clone ID: 701129742H1
caccggcggggaaggggaagaggtccgcgtctccggtgccgtccaagtgtgtggttccgagcctcgtttcggcgcgcgaggaaaaccggaaggtgtcgagggagccggcgattatcgtgccgtcgaggtaccggcagccttctccgaccgggaggaagcagccgtcgtncgagtccgcggcggacatcactttctcccgggaggaggttgtctgggggacttaaggtttcgccgctggtggcggacctccgtgaagaagaag

SEQ ID NO: 44975 - DNA, 263 bp, Glycine max
  unsure (1)..(263): unsure at all n locations; Clone ID: 701129743H1
gttcctcctctcactctctccctcaacacaccattgattttggtttcagctttatttggaagagggttgtaacgctgacgtgaaatttttctgaagacaaagatgcaggcttgtacaacgatgagttctttgcagcaacaacctatttggaccaaagggttaaatttccctgcaaaagggtatggcagcaataacgggttncnnccccngggtngggtnccnaantttaaaccccccaaagctcncggtggaaananatttnt

SEQ ID NO: 44976 - DNA, 262 bp, Glycine max
  unsure (1)..(262): unsure at all n locations; Clone ID: 701129744H1
gaaaaatggtgtcgctgaaactgcagaagcncctctccgcaagcgtgctcaagtgcggcagaggaaaggtttggctgaccccaatgaagtcaacgaaatctccatggccaattctcggcaaaacatcaggaagttggttaaggatgggtttatcatcaggaagccaaccaagattcactcccgctacacgtgctcgtaggatgaaggaggcaaagaggaagggccgccactccggttatggtaaataagggtacaagggagg

SEQ ID NO: 44977 - DNA, 261 bp, Glycine max
  Clone ID: 701129745H1
gagtctggtaattggaatgagtacaatctaaatcccttaacgaggatccattggagggcaagtctggtgccagcagccgcggtaattccagctccaatagcgtatatttaagttgttgcagttaaaaagctcgtagttggaccttgggttgggtcgatcggtccgcctccggtgtgcaccggtacggctcgtcccttctgccggcgatgcgctcctgtccttaactggccgggtcgtgcctccggctgttacttgaagaaa

SEQ ID NO: 44978 - DNA, 264 bp, Glycine max
  Clone ID: 701129746H1
gcacgttgaagttgccgttcccagtccaaaggcaaatgaggttttaatcaaactggaagcagttagcattaaccctattgattggaagattcagaagggtcttctccgtcctttatttctccccagaacctttccccacataccttgcactgatgtggctggagaaatagttgagatcggaactcaagtcaaagatttcaaagttggcgaccaagtccttgctaaactcactcatcaatatggaggggtttgccgagtttgctg

SEQ ID NO: 44979 - DNA, 254 bp, Glycine max
  Clone ID: 701129747H1
cgcaccgttagcaaaagctcgtggaattgctagcaatggcgaggatcaaggtttacgagctgaggcagaagacgaaggctgatctgctgaatcaactgaaggacctgaaggcggacttgccttgcttcgtgttgctaaggtcaccggtggtgcccctaacaagctttccaagataaaggtggtgaggttgaacattgcccaggttttgacggtgatttctcagaagcagaaggctgctgagggatgcctacaag

SEQ ID NO: 44980 - DNA, 266 bp, Glycine max
  unsure (1)..(266): unsure at all n locations; Clone ID: 701129748H1
aacaaaacaagcaaacaccatggtgattaagtctgtgttgttcagcttcattttccccccgccaccttctctggtggtttgggggttgactgtgacaagcttcctgatactggctaatgctttcttgtcagaaattagagggaagcatttgaactattcaaagttttggaatgctaatccctctgcagaaaagcaggtcaagttgtctagcaaagctggnatgcttttgctgtncactcctgcttttcgctggccttgcatccttc

SEQ ID NO: 44981 - DNA, 274 bp, Glycine max
  unsure (1)..(274): unsure at all n locations; Clone ID: 701129749H1
ctccgagcgcttttgtnccttccctaggaaattttctattgatgncatcagatgcagaagaggtancccgtgtntgttcattcactttgcctaatcctagaaccaacgaacgaacgaagacactgcaatctagaaaaaaagttttgaactttgatgcacggaaagccttcatgcccgaccatgacatgtaccattttgatcacatggacgaagacgatttttttgacgaaattgatgaccaaaaccatggtaggggttggggatgctgctcttg

SEQ ID NO: 44982 - DNA, 269 bp, Glycine max
  Clone ID: 701129750H1
attgatatgaccaacagctcatcttcgacaaagcacggtcaagatcagcctgatttaagtggtcctacccccaaatacacagcgaaccaaaatgggcaaatccgaagacaacgataagaagaacttaggtaagaaactcaaagatgtggaaataagcattccaatagtatatgggaacgtagcattttggctggcaaaaaggctagcgagtatcagtcgcacaaatggacagtatatgttcgtggagctacatgaggatcttgggacgc

SEQ ID NO: 44983 - DNA, 261 bp, Glycine max
  unsure (1)..(261): unsure at all n locations; Clone ID: 701129751H1
atttgaatgggatacaaattcatgtgtaatctccgttgatttgaatgagcatcatcgatagaaggtagttgctttgttgcagacaaaaaaaactgaataatttctgcatgagaattgttgtggcaacttgtgttgtaataatagttcctggtctgttccacaatgactgtgattataagaaactcacctctagtgactctagttgcagactagataaagaaattagtaatcaattatnttttctatatttcacttccttaa

SEQ ID NO: 44984 - DNA, 263 bp, Glycine max
  unsure (1)..(263): unsure at all n locations; Clone ID: 701129753H1
catcgttctccatttttggctttacaaaaccactgtgtctgattaagggttctttaatatttccaatatttgcttgtagtgaaaaagttgttagctaaaagaagaccaagtttttggtgttgtagaaggaagagaagaattaacatgaaaattcagtgtgacgtgtgtgaganagctccagcaacagtgatttgttgcgcggatgaggctgcttgtgtgccanatgtgacgttgaagtttcatgctgaacaagcttgcaagca

SEQ ID NO: 44985 - DNA, 263 bp, Glycine max
  unsure (1)..(263): unsure at all n locations; Clone ID: 701129755H1
caatacaatacgacaccgcttaatgcaagtcctcgtcgtcgtttaacgctcacgttttctgttctactgagaaggtanaangcgttaaaacgcagcatctcaaacacgcgattccgaagcttttctgcgatcaatggagttcgacccgatcccaatcggttcgtgctccaaagancaccagatgatctataaggagtggttcaattacgctgattcagatagcgatggccgcattacggggagtggccaccaagtttttcgcc

SEQ ID NO: 44986 - DNA, 261 bp, Glycine max
  unsure (1)..(261): unsure at all n locations; Clone ID: 701129756H1
gttgtggtagtggtgagtgtgaatgaatgtgaaatgaatcccttgaagcccttcaattattangttggaagaagatagagaaatcaggtggttttgagtaatggtagtagtttgtgtgtgaagaaagaggtgaggtattatgccgcaataaaggacaaaacaaaaatgaatgattagtccatgtctgggggttagagaaagtagcactaacgctggcatggggtgtgtgagctgtattnntanttatttttaatgagaaga

SEQ ID NO: 44987 - DNA, 260 bp, Glycine max
  Clone ID: 701129757H1
aaattcagcacttatgaaccaaatttctgagtcccagtgtacagaaacagagttggaggagaagatcatatcagctgtggacctcttgataagtttcagggaacagagagataggcttaggatagagcatgcaaatgcagttagggaagtcaaagtgctgagaaaaattggggaagcagatacttccttctcttatcgggtagaattccctgcattttcttttgtggagataaatgaggcaacatgattttgatccatct

SEQ ID NO: 44988 - DNA, 259 bp, Glycine max
  unsure (1)..(259): unsure at all n locations; Clone ID: 701129758H1
aatgacttgagaggtgtaggataagtgggagctggaaacagcgaaagtgaaataccactacttttaacgttattttacttattccgtgaatcggaagcngggcactgcccctctttttggacccaaggtcggcttcggccggtcgatccgggcggaanncattgtcaggtggggagtttggctggggcggcacatctgttaaaagataacgcaggtgtccnaagatgagctcaacgagaacagatctcgtgtggaacaa

SEQ ID NO: 44989 - DNA, 262 bp, Glycine max
  unsure (1)..(262): unsure at all n locations; Clone ID: 701129759H1
agagtcccctcagtcccattgtcgttgtcttgtgtcgccgtgctccagtcgacctctccaacgtaangaangaagaagaagtagtagttgctacttgatatggctcnanagaggaagcgncagatggcagtcaaagatcanaatnaaggaaaagctttnagagncatcnancaattnaactagctnggnatcnnncagagataanntctnanattcctccncgtgtttcatcacatgcnatatcatcctactggtcctcctg

SEQ ID NO: 44990 - DNA, 262 bp, Glycine max
  unsure (1)..(262): unsure at all n locations; Clone ID: 701129760H1
gcttatacagttgtatantctatataatttctgnagctgtaantacaaggatatggacacaaacagatatgctcctatatctcaagtctcccagaacaggtcagaactttgaaacatatatgaatatgatgactatgaaactgatatcgattccaatagagcatccacgtactcctttaagtttcacttttgtaattgcacaatggcgacacttaaggttcctcagcctcttccccccgttgcaggattgtgagcagctccg

SEQ ID NO: 44991 - DNA, 221 bp, Glycine max
  Clone ID: 701129761H1
ggaggttttaccaacggtgaagttggtgaagaaggacgcccaagaagagcatttgaacaccacagtgggactggacgaggaaatgaattcaaacgggatggctctggacgtgggaactggggtacacagaatgatgacattgctgtggttactgaggaagtggtgtatgaaactgaaaagaattttgctgatgagaagcctgcacgaggaagatgcacctg

SEQ ID NO: 44992 - DNA, 265 bp, Glycine max
  Clone ID: 701129763H1
caaaaacttaccaaccctgccttggaaaacaagattggagatcatgcttggtgttgctcaaggactagcttatctacatgaaggactggaaattcaggtgatctaccgagattttaaatcttcaaatgttctattagatgcggacttccacccaaagctctcagattttggtctggctagagaaggaccacaaggtgatcagactcatgtatccactgcggtagttggaacacagggttatgctgcaggagtacattgaaacggg

SEQ ID NO: 44993 - DNA, 265 bp, Glycine max
  Clone ID: 701129764H1
ctttatcactttcattctttaattgggttcaaagaagcttaattaattggttgcagagattgaaaattaggaaaatggtgagtgttgaagagattcgtaaggcacaacgtgcggaaggccctgccaccgtgatggctattggcacggccactcctcccaactgcgtagaccagagtaccctcctgactattatttcagaatcaccaacagtgatcacatgaccgagctcaaagaaaagttcaagcgctgtgataagtcaatgatt

SEQ ID NO: 44994 - DNA, 271 bp, Glycine max
  unsure (1)..(271): unsure at all n locations; Clone ID: 701129765H1
caacaatcacaaatagaaactcactctttcgaaaaaaccaggtcatctacgtgtctcattttatntctgtttttncttctcttcattctgttacgctatttttgaattttccccaaaatttcctttttagtttttagaatattcggaccatttatttgacctatcccctacaaataannnnnnnnnnnnnnnnnnnnnnnccagatcaggggaaaagtttgttatatctgttaagttttcgtgtgtgcgattttcagaatttgaatatgac

SEQ ID NO: 44995 - DNA, 267 bp, Glycine max
  Clone ID: 701129766H1
aaccgggcgaggtttatgttccaagagatgaaaattttggtcacttgaagtcatcggatttccttacatacggaatcaaatccttatctcacgatgtgatacctttgttcaaatctgcaatttttcaattaagggtcacatcgagtgagtttgaaagcttcgaagatgtgcgtagtctctatgagggtggaattaaattgccaacagatatactgagccaaattagccccttaccagccctcaaggaaattccgcactgatggtgaa

SEQ ID NO: 44996 - DNA, 263 bp, Glycine max
  unsure (1)..(263): unsure at all n locations; Clone ID: 701129767H1
gcaacgatngtngcggcantggagctctaggtttttgaaggtggctagtgcagctgccgctacanccgccgttgccggcggtttatatgccattctttcatcctcaacctctgctagctctganatggaagtgccgtttggcagcgcacggcgtgagagcaaagaacgtgacgatggtggctccgggtctcatcctcgcgagggtgccaccacggtcagtcgttggaagaaacctgagattggttgtgaagctgaacgtggat

SEQ ID NO: 44997 - DNA, 262 bp, Glycine max
  Clone ID: 701129768H1
gggatgctgtatgttggacgaggagccatagtcacaaccttcattgtttgctatgctctcacatctttacatttctggttatgtgagtgggggaatgtactcacgtaatgggggtaaaaattggattaaatccatgatccttacagcatcactgttcccattcatgtgctttggaattggttttattttaaacacaattgctatattctatggatctctagctgcaatcccctttggtactatggtttgtcttgttatatgg

SEQ ID NO: 44998 - DNA, 259 bp, Glycine max
  Clone ID: 701129770H1
cttatggatcacttccaaactctggtgttcagatcatgcaccagaagatgtgccaaaagcattggataaaacattacaggaattgcaacttgactatcttgacctctatctggtatgcatgtattatatttactgatatgtgaattcatgttgaaaatttgggggaagattaagggtttgtttagtacaaggaaacattcatttttactttttgaatgaaaaactttcgaaccaactatttcaggaactaggtttggac

SEQ ID NO: 44999 - DNA, 259 bp, Glycine max
  Clone ID: 701129771H1
gttgagtggaaaccaagaaggagcttatcaatgggtaacaattaactatctactgggaaacttgggaaagcattattcagaaactgttgcagtagttgatcttggaggtggatctgttcaaatggcttatgcagtctcagagacagatgctgcgaaggctccacgagcaccggacggagtggaatcatacataacggagatgttccttaggggaaagaaatattacctctatgtacacagttttgcgatacggtatgct

SEQ ID NO: 45000 - DNA, 261 bp, Glycine max
  Clone ID: 701129772H1
gccgctctcaagcctcagactcgacgactcaccaccactgctcagactgctacgccggcctctaatttatcaaagcttctgcgcctcccacgttattttcaatactctcttggggttcgcatagtgagatggggaagaaggcgaagaaagctatgaataatttgaaaagggcttcctttaataataagccatctgagggtgctgatttcttgccctggaaggtggtcctgctcgtaagctcgcgctcccagcagaagccgc

SEQ ID NO: 45001 - DNA, 259 bp, Glycine max
  unsure (1)..(259): unsure at all n locations; Clone ID: 701129773H1
tctttcgaaaaaaccagaatttgaatatgacgttagggtttgagggttatagttataccacaacacttggaaggaagagggtcgtgttattacacaatgaagcttcttctctcaactctaattcggcggtgaatccattgaagagaatgtgcagcggaaaattcacttttgactctgaaaggtctcgccttgaggcccttcctcttgatgtctnatagggtgtnttggggngccgaannnantttgggggnnncctttt

SEQ ID NO: 45002 - DNA, 259 bp, Glycine max
  unsure (1)..(259): unsure at all n locations; Clone ID: 701129774H1
ctaagttatcctcataaatacactctaattaggtggcaagataagtgtctaaccttagtaacattgccacatattgtgttcattttggaattgtgccactaaaattctattcaattcatctatggctgcctcttcttatgctatgcaatcaatcctggcaaaccctttgatccgcatttccagcgggtctagggtgaaccaatttggcgttcctgctttgcacatgagaaggaatgttggcnagagttaggtccatggc

SEQ ID NO: 45003 - DNA, 262 bp, Glycine max
  unsure (1)..(262): unsure at all n locations; Clone ID: 701129775H1
gggcagtgatttcaacaactcatcaaagccttttgatgatgatttcaatgatggctggaagatcaccaattccaatggaccccttttctctatgcctcacaacaacaacactcacactcttgaagttggaggcttcaacaagggaggaatctattccaacaccaacaccacttcctccttatatcctaaccttaacaacaacactcttggaggcttcancaagggaatctattccaaaaccaacttnaccctatnntaaact

SEQ ID NO: 45004 - DNA, 259 bp, Glycine max
  Clone ID: 701129776H1
gcggctctctcatgtctcaacccaaccacccggattctttctgaatttttgggcttggagacaatgcttgcaattgtgtgcagttcttatgaaggcattaatgcactggagaagtatgatcctgaaggcttgataaactgtaatggtggattgcatggtatagggtctcaattggaaagagaataaatggccgatttgttgtcatatctcttgaagatataagaccctttgttggaggttttagccaatgatccacaat

SEQ ID NO: 45005 - DNA, 260 bp, Glycine max
  Clone ID: 701129777H1
cccgccgctcgatgggaattgcgcttcaaggcgtctcgtagggctaatccgcctcacgagggtcaccaacggcacgtgcctttggggggccgaggccccctactgctggtcggcaaacggacggcgggcgcacgcgtcgcttctagcccggattctgacttagaggcgttcagtcataatccaacgcacggtagcttcgcgccactggcttttcaaccaagcgcgatgaccaattgtgcgaataggttcctctcgtacta

SEQ ID NO: 45006 - DNA, 241 bp, Glycine max
  Clone ID: 701129778H1
tacttacgtctgttttctctgctctctctttctctaatggagttcctcagtttactttatggtgctatggcattgtacttctgtttcctgatctggaaattgtttgatcagagaagggaccaagagtgctacgtattggactaccaactttacaagccaagcgatgaaagaaagcttggaactgaacgctgtgggaagatcatagggaggaacaagcacttggctgaatgagtacaagttc

SEQ ID NO: 45007 - DNA, 263 bp, Glycine max
  unsure (1)..(263): unsure at all n locations; Clone ID: 701129779H1
aganggtgtaaccccctgcattcagtctatgcaattgcaagctggagatactgtaacatttagccgtatggnccctgaggggaaacttataatggggtttagaaaggcaacaaattctactgcagtacagtcacaaaagggatgttcagaaacccacctaaatgcgctgtctaagaaatggaactcagctggtggtgacatgaattggcatagcattgacatgcctganagcagaaaaagagatggtgccattgccacctgtg

SEQ ID NO: 45008 - DNA, 244 bp, Glycine max
  unsure (1)..(244): unsure at all n locations; Clone ID: 701129781H1
accaaagacgnaacactctagtcattacttttgcttcaaagtctggaggaggattttcacttaactcgttactgaaaagttgtaaaagttgcggaggaaagggggcaattgaatgtcctggatgtaaggtgccatgccatgaaattcattttcaaggttctgttgttttgtttctttattattaagaagataaaatgatttanaagctagttattttggagctggcaggacggnaagaataana

SEQ ID NO: 45009 - DNA, 266 bp, Glycine max
  Clone ID: 701129782H1
gggcatgtcaatcctctgatgctcttgtcaaaaaaactagctgaacatggcttcaaagtcacttttgtcaacacagatttcaaccacaagagagtgttgagtgcaacaaatgaggagggatcagcagtgagattaatctcaatcccagatggtttaggccctgaggatgacagaaataacgtggtcaatttatgttcggaatccttaagcagtaccatgacttctgcccttgagaaggtcataaaggattgatgcacttgatagtg

SEQ ID NO: 45010 - DNA, 263 bp, Glycine max
  Clone ID: 701129783H1
gccaacctcaaataacccttgttatctctctttcattctcacttgtactcatctctttttcacaactttttttgtaccttctgatctaatggcagttccagtgattgatttttcaaagctgaatggtgaagaaagaaccaaaactatggcacagattgctaatgggtgtgaagagtggggattttttcagttgatcaaccatggtattccagaggaactccttgagagggtgaagaaggttgcctgagttctataagctggaa

SEQ ID NO: 45011 - DNA, 258 bp, Glycine max
  unsure (1)..(258): unsure at all n locations; Clone ID: 701129784H1
ttccaactggtttgccttccaagatgacagaattggtgatgcacctgggggcacatcatcctctgagatgatggatgagataaaattgaatgcagttgcaaatagtggncgcaacagtagtgatgatgaggtagtggttggagaggatgaagaattggctgacagcaaaaatactgtgaatggtacatctagcttaagtgcagactcttagtggattgactgccagtgattccatgaatggggacttaaacttgaaag

SEQ ID NO: 45012 - DNA, 261 bp, Glycine max
  unsure (1)..(261): unsure at all n locations; Clone ID: 701129785H1
gtttcttattccttctagacgcttccattgatcggcgatttctgatacatggcgganatcacgaacacgaggaagtgaagggtgagtccttgttggagaagatttctgggaagatccacgaccacgattcctcgtcttcgtcggattccgacaacgacaaaaccagcgccactgattccttcaagtctaatgttttcaggcttttcggcagagaaaagcccattcatcatgttcttggcggtgaaaccggctgatgttttt

SEQ ID NO: 45013 - DNA, 260 bp, Glycine max
  unsure (1)..(260): unsure at all n locations; Clone ID: 701129786H1
agaactttccagttgttgacatgggaaacctgaataatgaagagagatcagcaaccatggagataatcaaagatgcctgtgagaactggggtttctttgagttggtgaaccatgggatatccatagagttgatgatggacaccgtggagaggatgacaaaagagcactacaaaaagtgtatggagcaaaggttccaagaaatggtagcaagcaanggcnnnngagtctgctcaatctgaatcagnttnggncngggaanc

SEQ ID NO: 45014 - DNA, 260 bp, Glycine max
  Clone ID: 701129787H1
ataacagttcattcatgtgattctatatttggtgatgctgagactagactcctgatgcacatcataggattactcccttggctctgtcttcaacttagcaaagacatagtgataggtccagcttctccactccaacatcaatatcaaaaggcttgctccgttgctgccaatgttgcaatctggtgtcgagcaaaatcttttgatgaattagctactgtatttatgatttactctcgtggtgattaagagtgttgataatt

SEQ ID NO: 45015 - DNA, 254 bp, Glycine max
  unsure (1)..(254): unsure at all n locations; Clone ID: 701129788H1
gccatctcccaaacccaccaagcccaaagccttcgtcttcccttcataggacaccttcatctcttaaaagacaaacttctccactacgcactcatcgacctctccaaaaaacatggtcccttattctctctctactttggctccatgccaaccgttgttgcctccacaccagaattgttcaagctcttcctccaaacgcncgaggnaacttccttcaacacaaggttccaaanctcacataagacgcctcacct

SEQ ID NO: 45016 - DNA, 259 bp, Glycine max
  Clone ID: 701129790H1
ggtaacagcgctggtgctgatagctttggcaacaatttctctccaatcttcagcttcagcttcatcagtgggtaaattcgtcgacgaaaccatcacttcccacaagatcgtcattttttccaagacctattgcccgtactgtagaagagcaaaagctgttttcaaagagttgaaccaagttccacatgttgttgagctcgacgagagagaggatggttcaaagattcaggatatcatggttaattgttgggaggcgtac

SEQ ID NO: 45017 - DNA, 259 bp, Glycine max
  unsure (1)..(259): unsure at all n locations; Clone ID: 701129791H1
cgacagagtgcagccttgctttgcttcgctgttgatccattctagagagagaaacactttttcaactctctctctctctaagatggccgacgatccaatgcccatgcgctggtctttccaggacttcaaattgtattatgatgctaagtttggtaggaagaaagtacgcggagaatggagatactgctactgataaagcggtcagcaatggaaattcagtgacagtgaccatgtgtccaatnaacaaaagggcatcgga

SEQ ID NO: 45018 - DNA, 259 bp, Glycine max
  unsure (1)..(259): unsure at all n locations; Clone ID: 701129792H1
cttatctctctctctctcccgaattattgttcgttcgacccttttacttagtattccctgtttccggtattcgctccctttttttctgcattctggttttacttagatctctgtcccgcaccagatctggtgcagggtgaganggttgggttcattaattttgtatcaatcttccttctgagcggtaggcgtggggataccagagtcttttcgggaagcaagagagggttctctccgttttctagatctctcactgtct

SEQ ID NO: 45019 - DNA, 263 bp, Glycine max
  Clone ID: 701129793H1
gctttctctcatccatcatgaaaggaggaaagtccaagaccgaatctaagagagccgatgccaaacttgctgtgaataagaagggcgccgccaccaagactaggaaacccgccggaaaggggaaggcagcgaaagatcctaacaagccaaagaggcctccaagtgctttcttcgttttcatggaggaattcaggaaggtgttcaacaaggaacatcccgacaacaaagcagtgtctgctgtgggcagctgctggagcaaaatg

SEQ ID NO: 45020 - DNA, 261 bp, Glycine max
  unsure (1)..(261): unsure at all n locations; Clone ID: 701129794H1
agcagatcatgttggatatcttggatatgtaccaaaactagttgctgctgttgcatttgagggaaggcgagaaacaatgtcatcaggtgaggtaaacaatgggagacatgcagaacaaacatatgacccagataaggaatcagcagnngaacacacaaactcctcaagaacgtgtgcgcctnagttgtttgcgtgtcttgcatcaacttgcagctagtaccacctgtgcggaggccatggcagcacgtgttggaacacctc

SEQ ID NO: 45021 - DNA, 264 bp, Glycine max
  unsure (1)..(264): unsure at all n locations; Clone ID: 701129795H1
gtccctccttcctctgccttataattcttgtgacccttttggctggtagcattgaaagtgcaccagcaaacgtgaagccaagccattatgctgcacccttcaataggagtgtttttccttctggttttctatttggaataggctctgcagcttaccagatagaaggagcagcagctatagatggcagaggaccaagtatatgggacacctatactnnnncagcaaccagggaagntttgggatcatagatggaagtctagcaat

SEQ ID NO: 45022 - DNA, 295 bp, Glycine max
  Clone ID: 701129801H1
aatggctgccaccaccttagtctctgaagtcactctcccctcctcctccggccagcggaagatgccgctgatgggcctcggcaccgcgccggaagcaaccagcgcggttaccacaaaagatgctgttcttgaggccatcaagcagggctacaggcactttgatgctgcttctgcttatggtgtggaacagtctgtgggagaagccatagctgaagcacttaagcaaggactaattgcatccagatcaactcttcatcactaccaaattgtgggtcatgataaccatgcccatact

SEQ ID NO: 45023 - DNA, 283 bp, Glycine max
  Clone ID: 701129802H1
ccatgttatgtcttgagctctggtacaacacaatattggttcttttgacgggtaacatgaaaaacgcggaggttgaaattgatgctctatccatatgtctcaacatcaatggatgggaaatgatgatatcacttggtttcatggctgcagcaagtgttcgagtggcaaatgaacttggaagaggaagtgccaaagctgcaaagttctctattattgtgtcagtgctcacatcattgccatcggattcctctgttcatattctcttattttttagagaaagact

SEQ ID NO: 45024 - DNA, 290 bp, Glycine max
  Clone ID: 701129803H1
ggaggatctgatgtactcgctcgtggatctcaactatattcacgatcatgatggcccttgaaaattctgaaaatatgcaaataaactgtgaggcatctttaaaatgcctccagggcaagggatttccttgcaattttcagagtaatgggagttctatggaaggctttacagagcttaaaaatgagcctggtactcatcctgctggggatgttgctgagcctaactgtcacttaggcagtagtttcttgagccttccaatgaatttcacatcaaacctacttatcaccaaa

SEQ ID NO: 45025 - DNA, 281 bp, Glycine max
  Clone ID: 701129805H1
atttggaggctaaaagaggacttagtaagaaaaggccacatgaaaatgtttctggtgtccccaacaacaatgcccagactaatatggagttagatattgtggacgaagattaccagattttcctgaattcttgtagggatgactatatacctagtgaattaatagaaaagcagaatttggaggctaaaagaggacttagtaagaaaaggccacatgaaaatgtttctggtgccccaacaataatgcccagactaatatggagttaattgttgtggatgagg

SEQ ID NO: 45026 - DNA, 281 bp, Glycine max
  Clone ID: 701129806H1
cttgagatggatggaagcggtgttgccgctgggaatcatagctggaatgctctgcgtcatgggaaacgctcagtattacattcacagagctgcacacgtcagacctaagcacatcggaaacgatatgtgggatgtggcgatggagcgaagggacaagaagcttatcgagcaagcctctccctccaattaacatcgttgttttgccgatgtcattgtgaagaaaataaactctcacctggatttacggctgtgttcttgggaagcagggttaatcacaagaa

SEQ ID NO: 45027 - DNA, 290 bp, Glycine max
  Clone ID: 701129807H1
aaacaagtagtgttccgaaaagatggctcagcaggaagtggtagaagggttcaagttcgaacagaggcacgggaaagagcgcgtgagagtggcgcgcgtgtggaagacgaggcaggggcagcacttcgttgtggagtggcgcgtgggcatcactctcttctcagactgcgtcaactcgtatctccgcgatgacaactctgacatcgttgctactgataccatgaaaaacacagtgtatgaaagcaaaggaatgctcagacatactctctgctgaggactttgctattttg

SEQ ID NO: 45028 - DNA, 270 bp, Glycine max
  unsure (1)..(270): unsure at all n locations; Clone ID: 701129808H1
agganactgaaggaggcagcnntcgggattactctaggcagcttcaaggtgtggagattttcccgagattcaagagattcgtgcaattttgacatcacggtttggcaaggagtttgctgctcgatctattgagttaaggaacaactgtggagtccatcctcagatgacacagaaattgtcaacaaggatgccaagcctggaaagcagaatgaaggtactcagacattgcttctgagaatggtattgttctgcagcttgaagaaacttctg

SEQ ID NO: 45029 - DNA, 277 bp, Glycine max
  unsure (1)..(277): unsure at all n locations; Clone ID: 701129809H1
gttacattctgaaaagaaaacgggctattctgaaattggtggttaganctttgaactcggaaagtcatttgaagtaataatagttgaatagctataagaaattgagtttaatttatatgcattgttagtgtaaatttttttatattgtcaacctataaganatcatcattaatatgatttttaaggtagttattgtaaaagttaacaaatcacaaattttcacacaagaggncnncatgaacgaacgtgaaaaaaccaatcacaaaccagtgcatag

SEQ ID NO: 45030 - DNA, 286 bp, Glycine max
  Clone ID: 701129810H1
ctggactcatctccaagaatattgagaaggccttggttgaagccttccaacccttgggaatctccgattacaattctatcttctggattgcacaccctggtggacccgcaatttggaccaagtggaggctaagttaggcttgaagcctgaaaaaatggaagctactaggcatgtgctcagcgagtatggtaacatgtcaagtgcatgtgtgctattcatcttggatcaaatgcggaaaatcaatagaaaatggacttggcacaaccggcgaaggccttgactgggg

SEQ ID NO: 45031 - DNA, 250 bp, Glycine max
  Clone ID: 701129811H1
atctgtgacgagcatcatggacctcgagagcagtgctattgttggctatgtgtgtgcttccggccatggttgtggccattcgcccagcaaagaaccctttttgcgtgaagggtcgcgtctactgtgacccttgccgtgctggttttgagacctcagcaaccacctacattgccggtgctgagattatgttgcaatgcaagacagggttagcaacgaggttgtgtacaccaagaaggggtacactgactca

SEQ ID NO: 45032 - DNA, 284 bp, Glycine max
  unsure (1)..(284): unsure at all n locations; Clone ID: 701129812H1
ctctttctcgtcactagctctgtgcattcttctctcgctctctgccttccatcacactcggcattnnctttcccaagatagtagaagatggcagacactgaggatattcaacctcttgtntgtnacaatggaacaggaatggttaangctggatttnctggagatgatgcnccatgtnctgtgtttnccagcattgtaggtggtnctcgtcacactggtgtgatggttggcaggncaaaaagatgcatatgttggtgatgaggcacaatctaagaggggtattt

SEQ ID NO: 45033 - DNA, 284 bp, Glycine max
  Clone ID: 701129813H1
atctgtcgtcatgctaaggtgagtcttctccccaatcagttaccatccgatgcccgtatatcaagctttaggctgaaggtgccatcccctgagcttgaaaggtcattaaaaatcaaggaaagacttgagaattctctgactctgaagaagactctactatttttcgttcttgctggtacttctatggttattgctaatggtgttgttacaccagcgatgtcagtactgtcatctgtgtggtttaaaagttggggtagatgcatcaagaaagatgaagtggtgat

SEQ ID NO: 45034 - DNA, 286 bp, Glycine max
  Clone ID: 701129814H1
ggggttgcaaattttgatgaaatccttgcaaattcagatgcatttatggtggcacgtggtgaccttggaatggaaattccaatagagaagatatttctcgcacagaaagtgatgatttacaagtgcaacatccaaggaaaaccagttgtcactgcaacccagatgttggagtcaatgatcaaatctcccaggccaaccagggccgaagctactgatgttgccaatgcagttctggaggcacagactgtgtgatgcttagtggtgaaaccgctgctggagcctatcc

SEQ ID NO: 45035 - DNA, 284 bp, Glycine max
  unsure (1)..(284): unsure at all n locations; Clone ID: 701129815H1
agcctccatgggacaggatttgtccccagtggacttaatcaatgtccatcaatttgcacagagggtaatggacctatctgagtacagaaagaacttatatgattacctggttgctaaaatgaatgatattgcaccaaatttggccactttaattggtgaagttgttggtgctcgtttgatttcccatgctggtagcctcacaaatttggcaaagtgcccctcttcaactcttcaattcttggtgcggagaaggctttgttcagggcnttaaaaacaagnggaac

SEQ ID NO: 45036 - DNA, 284 bp, Glycine max
  Clone ID: 701129816H1
gcttggtatcacttttaaggtattagttattataaacaccaccaacaaagggctacataattatcatccacgacaatttttaattggttgcacatgtgaaaatccttgagactgtttgtacgtatgtagtatttgcttaataatattacatttctactcagataaatttcttaccatcatgtaatgttgttgttgagacatttttgaatgaataaatgcaggcagttacacctgagacctacacctacaagacctgcagctcctacaaaacctgcacctgcagt

SEQ ID NO: 45037 - DNA, 291 bp, Glycine max
  unsure (1)..(291): unsure at all n locations; Clone ID: 701129817H1
gnactaaccagcaccacttccaatggcttcaaatcatgaagaagtgntatttttgggcaagtgggccagcccatttagcaacagagtagaccttgctctcaagctcaagggagttccctacaaatactccgaggaagatcttgctaacaagagtgctgatcttctcaggtacaaccccgtgcacaagaaggttccggttttggtccacaatgggaacccatacccgagtcacttatcatgtgaatacatcgatgagacatggaaaaataatcccctcttgcctcgagaccc

SEQ ID NO: 45038 - DNA, 288 bp, Glycine max
  Clone ID: 701129818H1
ggagattataagagtttttcattttccaaaatgatgggctgctgtggttgcttcggatttgtccaaaaaccaagacgacggcgtcgggataaacgtggcatcagtaatcttctctcccaggggctattattggatggagaaactgaaggcgatgagacatatagtggtgacgttactagtaactgcaccagtgtagatgacaatgaggtgcaagctgtacgcaaccgttcagaggattttaaactttagagctaagaatggcatggtttgcaggccgtttcctgttaa

SEQ ID NO: 45039 - DNA, 284 bp, Glycine max
  Clone ID: 701129819H1
atgaggttgctgcagcaggtgtctaatgtgtaccaatctatgaagattgaaaccttatcggggatgatccccttctttgatttctctcaagtggaaaaggtttcggtagatgctgttaagcagaagtttgtatcgatgagagttgaccacatgaaaaatgctgtgattttttgcaaaaagagtcttgagtctgatggcttaagggatcacttggccaattttgctgaacaattaaaaagcaagacagatgatttatcctcctgataggagatcatcaaaactgg

SEQ ID NO: 45040 - DNA, 218 bp, Glycine max
  unsure (1)..(218): unsure at all n locations; Clone ID: 701129820H1
aggaggagtagaaagtggtgcctccgccgatgcagtggcggcgacggtgaccgtgacacatgatgtggcgacgacaaccggaggaggcggtggtggatcaaataattcgggggacgatgagaggggtagaatcgnagaaggtgaacgtagcttcggcggtaaccggtgccacgacaagagactttggccttgttaaggatacgctccgatatggacgt

SEQ ID NO: 45041 - DNA, 286 bp, Glycine max
  Clone ID: 701129821H1
ggctgcttttgggttcccagagactcctgaagatgctgccagagctggtcttattagtgggaaggataatatcattgatcgtagtattcaagatgcttatattaatgctattcgacgtgcaaagaacttcatctatattgaaaatcagtatttccttggaagctcttttgcctggagtgctgatgatattaagcctgcagacattggtgctttgcatctaatcccaaaggaactttctcaagattgttagcaagattgaagctggggaaaggtttgctgtgtatgt

SEQ ID NO: 45042 - DNA, 287 bp, Glycine max
  Clone ID: 701129822H1
atttattttgcagtaacggaagagagtggaactggatccccgtcatcggataaacacaatagctgtagctagagaggagattcgcagaagaagataagggatgtttgggttaatcggaagaaaggccaatttgttggtaggatcgggaacaagaagaaggtggttgagcttcgcagcaacagccacaaccacttctaatggtggtgccatggaggagttgctttcgcaactccaatcatgtccaaaaggctcttgctggtggaggacccgaggcagtgaagaggaac

SEQ ID NO: 45043 - DNA, 287 bp, Glycine max
  Clone ID: 701129823H1
attgtggcataggaatgccctcttgttctctatttcaccacacaaattcccaattctaacttggtttttttttgtctctcacacactcctttcaatctccaattaattacttttcttcaatttgaagcgtgtctgaagttggttgaagcattgtgttattgttctggttttggtctccgaggtttgtgtcggattccgatgtattatgtaaaagaagctgcgcatgtcgaccccatgtcgtagctgataacaccaaccccaaggattattacaaagtgctggaggtt

SEQ ID NO: 45044 - DNA, 286 bp, Glycine max
  unsure (1)..(286): unsure at all n locations; Clone ID: 701129825H1
tccatcacaagcagaggaagaagatggtgaagttcctgaagcctaacaaggcagtgatcgtcctgcagggccgctacgccgggcgcaaggcggtgatcgtgaggnccttcgacgagggaaccagggagcgcccctacggccactgcctcgtcgccggaataaagaagtacccaagcaaggtcatcaagaaggactccgcgaagaagaccgcgaagaaatctagggttaaggccttctgaagctcgtgaactaccagcacctcatgcccacgcgctacacgctcgac

SEQ ID NO: 45045 - DNA, 283 bp, Glycine max
  Clone ID: 701129826H1
gaagatggcatgattagtttggcgctgatttgctcgtttaatcgaatgcgaaaacaccttaatttgggtgatgttaagcccgatgaagtggcccaagaaaccgtgaatactgttgctcaaactttgagaaattcggcttcactcaaggtctccgaagatgggaaaaaagttggcaggaaaactgaacttccaaagctagaagatgttgagcaggtggagataagaacacttgctgatcaccattgaatatgatctgaagcttgaagatgtggagaattttttg

SEQ ID NO: 45046 - DNA, 275 bp, Glycine max
  unsure (1)..(275): unsure at all n locations; Clone ID: 701129827H1
ctcgcccgcgcaggacgcgctttttagggttcaccagcgcgtgattgcggangacgcacgtgaggatgaggacgaggagaggaatcatgtgactgcgaacttctcgtgccgtccgatcagatcggatgcgtcattggaaaaggcggccagatcgtgcagaatatacggagcgaaaccggcgcgcagattcggatccttaaggatgatcgcttgcctccttgcgcgtaagcaccgatgaacttgttcagatatctggtgaggctgcggttgtgaag

SEQ ID NO: 45047 - DNA, 281 bp, Glycine max
  unsure (1)..(281): unsure at all n locations; Clone ID: 701129828H1
atgggttctgagaacaaagaagccgcaggnggagaacttaacaattcgtctccttcgccctcttctatctcatgcttggaaaagtcgaatcgttattccaacccttctcgcaggagtngctggtgctggagctgggttgatttcaaagcatcgaagaactcttggtcttgctactgtgtgttctaactatgctgtgaatttcaccattgtacaccgggtgctattgtggggcacgaattgtggctgcaactagaaaaacgggacctgatgacatattgaat

SEQ ID NO: 45048 - DNA, 285 bp, Glycine max
  Clone ID: 701129829H1
gttgatgtcaatgaccagacacatttgggttcacaagtaaacttagagaagctagatagtaggattgactcaaaatctacatcaagggttccaacaagcagtactctattatgtcaagaaatgaactccactgtttcatccctgaaagttagtgtccttgaacaagaacagtgcagagagtctaaacctcctgaagcaatgggaagaagtgcaagtactaggattgtggaaacaaaactgattctgatatttctgtcaagcaagagaacactttgtctttgattc

SEQ ID NO: 45049 - DNA, 273 bp, Glycine max
  unsure (1)..(273): unsure at all n locations; Clone ID: 701129830H1
atttcatcaaaacactgaggtatgatgtaaagattgttgaaagcatnccagaaaatcagaaaaatggcaaaaagaagaaaataaagccatttcagcttcgtcctcctagagatgctcctgtaagttggtatactactgatgctctgaagaaaatgaaggaacatggtgccatctatcttactcccttttcacatcgcttagctgaagaaattgacaatcctgagtccaaaggttgaggtgtagagtcaactatcatgcttaagatttaagcca

SEQ ID NO: 45050 - DNA, 280 bp, Glycine max
  unsure (1)..(280): unsure at all n locations; Clone ID: 701129831H1
atgactgaaccctaaggggaaaattgccgatgcggcaccgtaataccatttcccaattctagcactgttggctggggcaaattcctcacccaaaacgacacatgtttggggggccattttgatttgaggtgcgttgagacagaaaacattaggccaccatagttctcttctctctcgcaatttccatctggtctcaatttttctcgtgattccatctccattccggtgtagtccnttgatttgaccatcttctcttccgccatcatccattgaagcagag

SEQ ID NO: 45051 - DNA, 281 bp, Glycine max
  unsure (1)..(281): unsure at all n locations; Clone ID: 701129832H1
ttaaagcctccaacgtcgctctcaagatcctcttccccagcgagcnccgtctctgcgaccgcgtcttcttcggattcgcctccgccgcggacttctctttcatggaggtctgcngcggatcggcgattcagctgctgaatttcgccgacgccgtcgcgatcgggagccggtcgccggaaaggctgttccgaatcctcgacgtgttcgagacgctgcgtgacctatttccggattcgnggctctgttttctgatcantttagtgtgtcgctcaggaatgaag

SEQ ID NO: 45052 - DNA, 289 bp, Glycine max
  Clone ID: 701129833H1
cctaaatcgctcttactctctttcgtcagtttcgggggaagagatccagcagcaatggtgtacgtcaaggctcagaaatcaaaagcctacttcaagagatatcaagtcaagttcaagagaagaagagagggaaaaaccgattaccgtgccaggattcggttgattaatcaggacaagaacaaatataacactccgaaataccgatttgtggttcgctttagcaacaaggacattgttggcaaataatatctgctagcattgccggcgattagttctgctacagcatatt

SEQ ID NO: 45053 - DNA, 288 bp, Glycine max
  unsure (1)..(288): unsure at all n locations; Clone ID: 701129834H1
ctcttactctctttgcctttgcgctcctcaaaaacagagtagnctacacgtatcagagagagtgagagaagagagagaatatttctgttcgtgcnnnnnnnnnnnnnnnnnnnnnngagctccacaagaatgaaatgggtctccatcttcacacttctattcctctcccactcgcccctcacaaccttcgcagaagatgggctagtggcgaatggagattttgaggttagcccatcatgggttccctaacgaggcgattgtggagggccccagcgaggtcccaaactg

SEQ ID NO: 45054 - DNA, 283 bp, Glycine max
  unsure (1)..(283): unsure at all n locations; Clone ID: 701129835H1
ataacttaatgatctacccaggntatgttcctcgcgagggaattgagccaattcttcttcactatgggttgccatttagtgttgggaattggtcattcaataaactggctcaccatgatgacggaattgtatatgaatgtaaccagctctttccagaacctccttacccaaaagaggtaagacagttggaacttgatcctaatcgaaggcgaggactatttctaagtttagaggcataaacattataaatgagggtctttattacaacatgcagcaaatggtt

SEQ ID NO: 45055 - DNA, 281 bp, Glycine max
  Clone ID: 701129836H1
agatttgaacttcgtgtgcacaagagggtgattgacctctacagttccccagatgtggttaagcagattacctctatcacgattgaacctggtgtggaggttgaggtgaccattgcagatgcttgatctggatccaaattttaactgttatgcttcctagttttttttccctctctttttgtattttgtaagttttgattgtgggactgagttggattgttttctctagtttacggttgtagacattgatgaatacccgagaaatgtcacttaatatattc

SEQ ID NO: 45056 - DNA, 284 bp, Glycine max
  Clone ID: 701129837H1
ctgaacgttggggccgatgcagtttcagtgttgagtggaaaccaagaaggagcttatcaatgggtaacaattaactatctactgggaaacttgggaaagcattattcagaaactgttgcagtagttgatcttggaggtggatctgttcaaatggcttatgcagtctcagagacagatgctgcgaaggctccacgagcaccggacggagtggaatcatacataacggagatgttctaggggaaagaaatattacctctatgtacacagttacttgcgatacggta

SEQ ID NO: 45057 - DNA, 276 bp, Glycine max
  unsure (1)..(276): unsure at all n locations; Clone ID: 701129838H1
attccncttatctttctctcttctctctccccgcccaaaccctaactcnntaccctattccgctttctctcatccatcatgaaaggaggaaagtccaagaccgaatctaagagagccgatgccaaacttgctgtgaataagaagggcgccgccaccaagactaggaaacccgccggaaaggggaaggcagcgaaagatcctaacaagccaaagaggctccaagtgttcttcgttttcatggaggaattcaggaaggtgttcaacaaggaacatccc

SEQ ID NO: 45058 - DNA, 285 bp, Glycine max
  unsure (1)..(285): unsure at all n locations; Clone ID: 701129839H1
attgcatccctcttgatttgtagtttgttttgtgctttagataaaagttctgccaaattcaagaggggttttaagatcatagtgtgtgttttgcaacaatggctaagttctttgctgctatgatcttggcnctctttgccatttccatacttcaaacagtggtaatggctgctaatgaacaaggaggccacttgtatgacaacaagagcaaatatggaagtggaagtgtcaagagtaccaatgcccatcacaatgctcgaggagatgtagccagacccaatacca

SEQ ID NO: 45059 - DNA, 287 bp, Glycine max
  Clone ID: 701129840H1
gggcgacggttactacaaaggcgacgacgacaaagccaaggcaaaggccaagtccaaagccacctccgccgccgagcaggaccaccgcaaaaaggttctccgggaacttaactccctcatctccggctcctcctccgcttccgcctccgacgacgtcgacgaggaagtcaccgacaccgagtggttcttcctcgtctccatgacgcagtccttcgtcaacggcggaggactgcccggcaggccttcttcaatcgacccccgtttgggtcaccgggagtgaccgtctc

SEQ ID NO: 45060 - DNA, 285 bp, Glycine max
  unsure (1)..(285): unsure at all n locations; Clone ID: 701129841H1
gccagatcccgtcaccggttactacaaaccggaaaacatcaaggaggttgatgttgccgatttgcgtgctacccttctccgcaaaaaattcaacaactaatttcaacaattttaattttttaccaaaccttgggtgattgattcgttatggaattaattttgatactcatatgctctgcccaccttcattatacgattgctatagttttacaagtcagtagaataactattagcgctaatnagaattgtaatttcttttaatcttattcattacttcagtttttt

SEQ ID NO: 45061 - DNA, 265 bp, Glycine max
  Clone ID: 701129842H1
gcgctttctgcaaaccgaacatttcatctccaaagggatcaacaggtcgaaggagaaatggggctgacattcacgaagcttttcagccggcttttcgcgaagaaggaaatgcgaattctgatggttggtcttgatgctgctggtaagaccactatcctctacaagctcaagctcggagagatcgttactacaattcctaccattgggttcaatgtgagactgtggaatacaagaacattagcttcactgtttgggatgttggtgg

SEQ ID NO: 45062 - DNA, 281 bp, Glycine max
  unsure (1)..(281): unsure at all n locations; Clone ID: 701129843H1
cttgtttnnattgttcttccttcttgtcatgccacaaagtttttgactttattggtagtggattgcgttgcagttttccatttcctcctcttgtnaccatcaaaacacatgtccctgaacatcaagatagctttttgttgtcatgtncctgttctgtatctcagcatttaattagnnttattaatctgagtgaaattttngagtgctttcatatttacaaatttatatatcataagaattaagatcttcatcttgttattttgcatacatgttagttttga

SEQ ID NO: 45063 - DNA, 271 bp, Glycine max
  unsure (1)..(271): unsure at all n locations; Clone ID: 701129844H1
ctttagggacactgaataggacaaccaatgaattttcatcttcttatancttattacctgctgctacaactacaagggatcaaagcacgtcccaaggggtgaagcagtaaagtaaacaacttcattttgtagcattacatgttgttttcttttcatttaatttccttcttttgattctcatttttgggatgatgattattcatgtgattaagacatatacatagcatcatgcttttataggcggctattcaaaattttgcctgcattgggg

SEQ ID NO: 45064 - DNA, 280 bp, Glycine max
  Clone ID: 701129845H1
gcgatccgagaaaaactctgtaaacatgttggtttaccaggacctccttacaggtgatgagcttctctctgactccttccgttacaaggaaattgagaatggaatgctgtgggaagttgaggggaagtgggttgttaaaggagcagttgatgtagacattggtgcaaacccttctgctgagggtggaggagaagatgagggagttgatgatgcagctgttaaggttgttgattgttgacacattcagacttcaggagcaacccgcattcgataagaagca

SEQ ID NO: 45065 - DNA, 279 bp, Glycine max
  Clone ID: 701129846H1
cttgcgcggtttatcatgggggatagtcagtattcgttttctctcaccacatttagcccttctggaaagcttgttcagattgagcatgctttgacggctgtcgggtctggacaaacgtctttgggaattaaagctgcaaatggagttgtcattgctaccgagaagaaattgccatctatattggttgatgaagcatcagtccagaaaattcagttattaacaccaaatatagtgtcgtatatagtggcagggtcctgattttcgagttttggttcggaa

SEQ ID NO: 45066 - DNA, 277 bp, Glycine max
  unsure (1)..(277): unsure at all n locations; Clone ID: 701129847H1
gctcactacaggtactaagtgattgagatgatcaactgaaaagtgagtgagggaaagncaaaaatcggttttatcaatcggatttgattgtttaattttcctttttttgatttttggtgttagacttttcagatttgtggtagaagaattgtagccatttttatttctgtagaacttttgttcgagtgggtgggaccagtaaggaggaaggcggcatcctgttggtttcgtnatatgaaaccaatttgggttgaataaggctgttttgtttggggga

SEQ ID NO: 45067 - DNA, 257 bp, Glycine max
  unsure (1)..(257): unsure at all n locations; Clone ID: 701129848H1
atcatggcctcgagagcagacgctattgttggctaactgtgtgcttccggccatgnttgtggccattcgcccagcaaagaaccctttttgcgtgaagggtcgcgtctactgtgacccttgccgtgctggttttgagacctcagcaaccacctacattgccggtgctgagattatgttgcaatgcaagagcagggttagcaacgaggttggtacaccaagaaggggtacactgactcaactggagcatacacatgtag

SEQ ID NO: 45068 - DNA, 288 bp, Glycine max
  unsure (1)..(288): unsure at all n locations; Clone ID: 701129849H1
gtgtacgtcaaggctcagaaatcaaaagcctacttcaagagatatcnagtcangttcaagagaagaagagagggaaaaaccgattaccgtgccaggattcggttgattaatcaggacaagaacaaatataacactccgaaataccgatttgtggttcgctttagcaacaaggncattgttgcacaaataatatctgctagcattgccggcgatttagttcttgctacagcatattccatgagctgccacgatatggtcttgaagtaggacttacaaattatgcagcag

SEQ ID NO: 45069 - DNA, 282 bp, Glycine max
  unsure (1)..(282): unsure at all n locations; Clone ID: 701129850H1
gcaaagttaataaaattctttgagttgaacacaggggccaagattccttctgttgggttaggcacttggcaagctgagcctggtgttgtagccaaagctgtcaccacagccattctggttggatacaggcatattgattgtgctcaagcgtataacaatcaagcagagattggttctgctcttaagaagctttttgatgatggtgtggtgaagcgtgaggacttatggatcatccaaactctggtgttcngatcatgcttcagaagatgtgcccaaagcatt

SEQ ID NO: 45070 - DNA, 281 bp, Glycine max
  Clone ID: 701129851H1
attcacaggccagagggcaaagattttgagcacaatggcctcgacacaatgctttttgcaccaccacgccctcaccactccagctagagcttcaacacagcgcctagttgtgagcaccaaaccaaaccacattgtttgcaaggcagcacagaagcaggttactgtccaagagggtgaggacactactactggccttgtctctcgcaggttggccctcactgtgctcattggtggctgctgttggctctaaggtggcactgctgatgcagcctatggagaag

SEQ ID NO: 45071 - DNA, 283 bp, Glycine max
  Clone ID: 701129852H1
gctagctatgggggaattcaagcactttgtaattgttaagttcaaggaaggtgtggcagttgacgacctcactaaagggatggaaaagttggtctcagagattcatgctgtcaagtcctttgaatggggacaggacattgaaagcctagatgtgttgagacaaggattcactcatgccttcttgatgacattcaacaagaaagaagactttgttgcatttcagagccacccattcatgtcgagttctcgacaaaattttcggcagctattgagaatattgtgc

SEQ ID NO: 45072 - DNA, 275 bp, Glycine max
  Clone ID: 701129853H1
tttcggacacgacttcctattggtgctacagctgcacgcgcttcgttcacatacaagaacagaacgacgtcgtttgcccgcgctgccacggcggcttcgtcgaaaaggtcaccgccccccaatcgtcaaggcaaggcttccgccgccgacgccgcaacgccgggaaccactcggcgttcaacccggtgatcgtgctccgcggaccgggagaggacgaggagagcagtttgagttatatacgacggcttcgacggcgaggggctccgccgctgcca

SEQ ID NO: 45073 - DNA, 259 bp, Glycine max
  unsure (1)..(259): unsure at all n locations; Clone ID: 701129854H1
ggcgggtgatgtgtgtggtgganttggcattcttggcantgcttgggcctttggtagcatgatcttcattctggtgtactgcactgctggaatctcagggggtcacataaacccagcagtgacatttgggctcttcttggctcgcaaggtgtctttgattagagcaataatgtacatggtggctcagtgcttgggagccatatgtggagttgttggttaaggcctccaaaaggcttactacaacaggtatggtggtggg

SEQ ID NO: 45074 - DNA, 283 bp, Glycine max
  Clone ID: 701129855H1
gtttttccacatagtactggagcgaaatatgcagcttcatccacgctactttggtcgtaaccttcgcgataatctcgtttccaagcttatgaaagacgtggaaggcacttgcagtggccgacatggatttgtggtggcagttacagggatagagaacatagggaaagggctaattcgtgatggaacagggtttgtgacatttccagttaagtaccaatgtgttgtcttcagacgtttaagggagagatcttggaagcagttgttactatggtgaacaagatgg

SEQ ID NO: 45075 - DNA, 282 bp, Glycine max
  Clone ID: 701129856H1
gtctctgtctctcctcctcctgttctcactcagcatcgccgtaaccgttagatcgagcgactacgactacgattgtgtgtacactgcatacgttagaaccggttcggtgttgaagggcggaacggactctaagatcgggctgaagctgtacgacaagtacggctactacatctacattaaaaacctcgaagcatggggcggcttgatgggcaagggctacgactacttcgagcggcaacctcgacatcttcagcggaaggggaccctgtcttgacggacccg

SEQ ID NO: 45076 - DNA, 282 bp, Glycine max
  Clone ID: 701129857H1
gataccctcaggtagagctatatctaaagagtcaacagatgcacaacattgctgatttgttgaaagggtccaaggaagatgttgaaaaagaatctattgaactgaatatcgaagaactaaaaaccgtactctctaaagtggattcccagatgaaatttcttcctgctacagcgcaggttgcatctcagcaaggcacctacctggccaagtgctttaatcggatggaagagtgtagaaaaacccagagggtcccatcaggttcaggggagaagggcgccatcg

SEQ ID NO: 45077 - DNA, 273 bp, Glycine max
  unsure (1)..(273): unsure at all n locations; Clone ID: 701129858H1
atttcattccattccattccattttntgtngngngcncacgaatgaggatannagaagaagcggtgctagannnnnnnnnnnnnnnnnnnnngaagagacatcatcgaacatctcgaaagagagggaaaatgggtagttacgaggcgttgacggagaagccggcgacggcgacgaagtgggtggtgacgtgcatggtgggaggggtgatcgtgggggtgtcactggggtgcatactcgagccagctctggaagagccgaagacgcaacaagaa

SEQ ID NO: 45078 - DNA, 279 bp, Glycine max
  unsure (1)..(279): unsure at all n locations; Clone ID: 701129859H1
cnccgccgcaaggacctcacgctgccgctgccgcagcgggacaccaacttggcggtgccgcttcctctgcccccatcgacggcttctgctgcggcggcgcagcaggtgatccccttctcggagctggagagactgaaccgcatcgggagcgggagcggcgggacggtgtacaaggtggtccaccgcaccagcgggcgcgtgtacgcgctgaaggtgatatacggtcaccaaggagtccgtgcggcggcagatccaccgggaaatccagatcctccgtga

SEQ ID NO: 45079 - DNA, 261 bp, Glycine max
  Clone ID: 701129860H1
aacactcccccttaatttgatgtgtgctggttgtgttttgttgtaattttctttttcttttttcttttcttctcgttacactatataggttttctttttcttttttccattaagattagttgattaaaattttaaaaatagtgtggtcaatgggtatgattcctttgctataaatgcatcggctaattaaattacgtttgttttggtaacttaccccattttttttgttggtttggaatcgatagaatgagaccttgtttc

SEQ ID NO: 45080 - DNA, 279 bp, Glycine max
  Clone ID: 701129862H1
aagaatttacaggtttcttcacactggggggtgaaaataaaacaatgaattgtaagtttctgcaacaacaatcaagattgggatttggaaagttccaacttctaagagctctttacttctcggacaccatcattcctggacttcaaattcctccatagatatcccccgctggccatgtcaacgaatacccagaatccattctgaatcatctgaaacgaaagcaacaatttagtcaggatcaaaatctagaaaatcaagaatgatggtgaattgtataaa

SEQ ID NO: 45081 - DNA, 280 bp, Glycine max
  unsure (1)..(280): unsure at all n locations; Clone ID: 701129863H1
ggcaatcaccacttagcaccgttcaaacaccatctcatttctgtaactttttctgcagcagattctcattccatnttccctatgggatgaactcgctgtctcaatgagcctctagcactctccactctgctcctcaactggttaatcaaaagatggagcgcaccaggctaaacatgagaggtcgttgctctggttcgactccctcagaagaatctgctttggatcttgaagaaactgttgcagtcattctaatctgccttcacttagtcctccgacgctt

SEQ ID NO: 45082 - DNA, 278 bp, Glycine max
  unsure (1)..(278): unsure at all n locations; Clone ID: 701129864H1
gcaactccttcgtgataacctcacactttggacctctgnacatgcaggacgatggagcagatgaaattaaagaagcagcaccgaaaccggatgaccagtaaaaatattttactgctaattagaattgaacttctcctccatatctttttgaagggagaaggtgtttgttgctaatatcttttggtactgggattttaggcattcatgtctgttatgaattgtggatgtaggggccgtttagtttgtcctccattttctcaagtgttttcccaaattgc

SEQ ID NO: 45083 - DNA, 285 bp, Glycine max
  unsure (1)..(285): unsure at all n locations; Clone ID: 701129865H1
gttgggccatagcactacacggcggcgccggcgacatcccgctttcccttccaccggagcgccgccagcttcgcgangaggccctccgccactgcctccaaatcggcgtggaagctctcaaggccaaactgcctcctctcgacgtggttgaacttgtcgttcgggagttggagaacattccgcagtttaacgcgggaaggggatctgtgctgacttgcagaggcaccgtggaaatgaagcttccataatggacggcaccactatgaattgcggactgtttccggc

SEQ ID NO: 45084 - DNA, 283 bp, Glycine max
  unsure (1)..(283): unsure at all n locations; Clone ID: 701129866H1
ctcgtgtccgttcgtaggctgcaaccggaacaagctccaccggcggttccggccgctgaaatcggtgatttgcgtgaagaaccacttcaagcgaancactgcccgaagatgtacacgtgcgagcggtgttcgcaagaagcacttctcggtgctctcggatttgaggagccacttgaagcattgcggaggagaggccaggtggaagtncacgtgcgggaccacgttctcaaggaagacaagttgtttggccacattgcgctgtttgagggccacgcgcctgcgc

SEQ ID NO: 45085 - DNA, 278 bp, Glycine max
  unsure (1)..(278): unsure at all n locations; Clone ID: 701129867H1
cggaaagcacgtgccccgcgccgtcttcgtggatcttgaacccaccgtgatcgacgaagtccgaaccggtgcgtaccggcagctcttccacccggagcagctgatcagcggcaaggaagacgccgccaacaacttcgcgcgtggccactacaccatcgggaaggagatcgtcgatctctgcctcgacaggatccgaaagctcgccgacaactgcaccggtctccagggttntcgtcttcaacgccgtcggtggcggcaccggttctggcttgggctcg

SEQ ID NO: 45086 - DNA, 281 bp, Glycine max
  Clone ID: 701129868H1
gcaaatctcaatcgaatctcagaaaaatgagagaaatcatcagcattcacataggtcaggccgggatccaggtcggaaactcctgctgggaactctactgcctcgaacatggcatccagcccgacggcatgatgccttctgactccaccttcggtgtagcccacgacgccttcaacaccttcttcagcgaaaccggatctggcaagcacgtcccccgtgctgtcttcgtcgcctcgaacccaccgtcatcgacgaggtccgctgcggcacctaccgtcaac

SEQ ID NO: 45087 - DNA, 278 bp, Glycine max
  unsure (1)..(278): unsure at all n locations; Clone ID: 701129869H1
attcaaagagagagtttcttgttctgtattttttgatttgatcatttcaatcttcaatttttttttatatatccaccaatccgcaaagtgcaaatttctaatctttcacgtattgggttcttctcttttccctcttcgtctccgatcgatccaattctcttcccatggctacgatcggacacaacaatctcaatgccaaattggttcttctcggggacngggtgctgggantccagcctcgttttgcgctttgncagggnnatttcccgaatncagga

SEQ ID NO: 45088 - DNA, 283 bp, Glycine max
  unsure (1)..(283): unsure at all n locations; Clone ID: 701129870H1
gaaaacgcttcatcaccggattctcgctctcaactcagataccaacttcggagtttcggactcatcgcctccgattcaaaaccctaactcggacctcaaactcaatcgatttcatacaacatggcttcggatgctgatanggaggactatggatttgagtactcagatgaggagcaagaggaacaggatgttgatattgagaatcaatattacaattcaaaaggtttggtcgaatgatccagaaggtgcacttgctggttttgctgaggtagtgcgcatggaa

SEQ ID NO: 45089 - DNA, 282 bp, Glycine max
  Clone ID: 701129871H1
ataaaaagagaagttactcgatagttcaaatcagaagatggttcctgtcacaccaactcaataacagatcaaaccaaacccaaactgttaggtttcctttgtttggtgtgaagccatggctgattcttcttccaacctgaaatccgacgcgataatggagcagatgaagcaacacctcgccaccgacgctggcaaacaagtcaccaataaaattggactcgtttatcagtttcattgctcctaagaaacttggattcgacgaggtcgtctacaccgttgatc

SEQ ID NO: 45090 - DNA, 281 bp, Glycine max
  unsure (1)..(281): unsure at all n locations; Clone ID: 701129873H1
gcgaaagtncagcctnnncagattngcatcaattncancagagatnnagcgtcgcgatgtggatngctgtaaagtngcattatttggccatnagctaatggacaagggggtgcctcnnagccncttcgncnntganggttctttcatggagaggtncaagcaacttcaacaagagcaggataaagggncgaatgncnnatnggaggattcnaaaccanttaaggntattncaggtctttgtcncccatccttccgttaccaaaacgnctgtggattnaagg

SEQ ID NO: 45091 - DNA, 277 bp, Glycine max
  Clone ID: 701129874H1
gcaatgttgttgacgatatggtcaacagcaacgccatcctctatgagcctggtgaacatccggaccatgtggttgtcattaagtatgtaccttacgttggggacagcaagagggccatggatgagtactcttctgagatattcatgggcggaaagaacacaattgtgttgcacaacacttgtgaggattcactgttagctgctcctattatcttggacttggtcctctgctgagcttagcactcgaatcgagtttaaagctgaaaatgagggaaagt

SEQ ID NO: 45092 - DNA, 278 bp, Glycine max
  Clone ID: 701129875H1
accctacgcacacatcttggtgtaagtccaatcgatatagcagcaatgtctacgcttgaaattgaagctcgagatgtcatcaaaattgtgcttcagttttgcaaagagaattcgttgcatcagacttttcagatgctgcagaacgaatgccaggtttctctgaacactgttgacagcattgaaacctttgttgctgatattaatagtggaagatgggatgcgatattgctcaagtttctcaactcaagcttcccaggaataagttggaggatttgtat

SEQ ID NO: 45093 - DNA, 276 bp, Glycine max
  unsure (1)..(276): unsure at all n locations; Clone ID: 701129876H1
gaccattttgatgctgttgatgataaacttcctggaacggaggatgtcagctttgaaagtacaaactttgatactactcatgttagaaagaacatcgggatttggaagggagatggtgatgagttaaaaccatgttggcttaagccatctgaagataacgtggatcagactgaggggtttgttaccttttctttaaccaatggcccggngtaccatatatctcagatgcagatgcagtgcttgtggctcgnagtcttggggcaacactngtcancc

SEQ ID NO: 45094 - DNA, 278 bp, Glycine max
  unsure (1)..(278): unsure at all n locations; Clone ID: 701129877H1
gggacccttttggggtggaaggataagaatcaagttgaggatgattcaccaatatttaggaacaaagagaagctattggtcacttgctctaggcgcatcaattacaggtaccggcatttgatgttgaatttggtcacacttttgcctcattgtaagaaggataacaaagttgaatcaaaggaaactaaaggagccaccctcaacgagcttgttgagctaaaaaattgttccntgtttattttttgagtgcaggaagcataaggatctttatcnccggg

SEQ ID NO: 45095 - DNA, 104 bp, Glycine max
  unsure (1)..(104): unsure at all n locations; Clone ID: 701129879H1
agtaagtttatttaagaatgatgttgaagacggnatttgatttcctattnccaagtttacttgggagcnattttatgtttcctaccaatgaaatgaaatgaaaa

SEQ ID NO: 45096 - DNA, 279 bp, Glycine max
  unsure (1)..(279): unsure at all n locations; Clone ID: 701129880H1
gcttcgtatagnatcccttcctccctcccactgcgcanacacaggangcacagacaccaccaagccctaaaatctccaacaacactcagaaccacacattttagggttanagaggagaatccttagcctagttcctctctgacctctgtcgtgaattgtagctacccttgcttgatttctgtatccaagtgcantcgcctcatgtcgaggatatgcgngaagaatttgcgaaagatgtcgccgangnagaactgcggnganttcttttctggnaaaagg

SEQ ID NO: 45097 - DNA, 284 bp, Glycine max
  Clone ID: 701129881H1
tttgctgctttgcctttctctctcctttcttcctctcctcaagtttgagaaaatcaagagaaagggaggagagagagaaaacaagaaaagaaagacatatttgaagagaaacatggccatttccagtgcttcattcagggtggttgccttccttagcctcttgcttgcagctcttatgacactggcttcttcacaagtcactgctccggctcccgctccagcaagcgatggcaacaatcgaccaagcggttgcatatgttctaatgcttgcggctttggtgctg

SEQ ID NO: 45098 - DNA, 280 bp, Glycine max
  Clone ID: 701129882H1
gcaaggtcttcttggtgctggggaagacagaatggagcaatcatattcatgggagaattgggctcttgacaaggaaatgggggaggatgaggaggagttccttcgcgacatccttagtaaaccggctttttcttccgagagtgaaagtcaagcaccagttgtctcatgctctgccaaaagcaaaagggctccgatgacatacattttgtcttttgataactccaccatacaccagcaccttcttccccccccaccctagaggcccaacctggaaagaggg

SEQ ID NO: 45099 - DNA, 273 bp, Glycine max
  unsure (1)..(273): unsure at all n locations; Clone ID: 701129883H1
ccactgcacaattgccacatgaatcattagttagggtttattctccaagaaaagcaatgagtgcgtccaggttcatcaagtgtgtcactgtgggtgacggtgccgttggcaagacttgcatgctcatctcctacaccagcaacacttttcctacggactacgtgccaactgtctttgacaatttcagtgcaaatgtagttgtggatggaagcactgtgaatcttgggtgtgggatnctgctggccaagaagntacatagnttagnncccttag

SEQ ID NO: 45100 - DNA, 270 bp, Glycine max
  unsure (1)..(270): unsure at all n locations; Clone ID: 701129884H1
cgcaattcctccttagaaactggaaattggacacgtagtcctacacacacagaacataacactgcttctaataccatgttttcttcgtctccacnnnnnnnnnnnnnnnnnnnnnnnnnagttacgatgcttcatgaacaagctgctcctgcagttgcatcctggtcttctagttctgcagctcagcattttcctacctcagttcttttacaagagcagcgatgagtataagcccttatggcacgtgcataataaggngacaacactaaa

SEQ ID NO: 45101 - DNA, 72 bp, Glycine max
  Clone ID: 701129885H1
aaaacggcgtcgttcggctccgctttgttttccttctacgagtcggacgatggagacgttgcggttgttgaa

SEQ ID NO: 45102 - DNA, 280 bp, Glycine max
  unsure (1)..(280): unsure at all n locations; Clone ID: 701129886H1
gtttcattgtcttataattagcatggcctttgccgcagttaaagtgttcatgatattggggcttttagccaccgcgtgtgtagcacaagcccctggacctgcacccacgcaaccaccatcaacaaccccatcaccgnccacgttcagcancnganccatcntcaacnggnaacaccnctcntcctgcngttgcanctgnacncgtnanaccatgaccnaacacaggctccttnacnccaannccnncnacngctnatctcaggtnccggtntaccatttc

SEQ ID NO: 45103 - DNA, 275 bp, Glycine max
  unsure (1)..(275): unsure at all n locations; Clone ID: 701129887H1
gggaaaaccgttgcagcaatgagcttccaactcttaaccaagngcgagaaagcgaactgtgttttcatatctatctcacgcgcattctctcaccgattcggaaacgagcttgcaggcctacatttggcatcgctttcgacatcgacggtgtccttttgctcggaaactcccccgtnggtggntctnccggagcactgnanagnttatctgacgccgatggtnaattgaaaaccctacgtttcctcataatgtgtggctatcttgaagnnanagag

SEQ ID NO: 45104 - DNA, 148 bp, Glycine max
  Clone ID: 701129888H1
gcggctgtgcattttgtgctgctgcaaatgtgcttcatggagtcatttatttagacgatagtgatacaatgtaaatgggaaaaattgtccgcttcaagtcaagcgttttgttttttccccactatacaatggttgtgcgtttatgttt

SEQ ID NO: 45105 - DNA, 275 bp, Glycine max
  unsure (1)..(275): unsure at all n locations; Clone ID: 701129889H1
cacaaagccatgtctccaggtcctgttgtcgacgcttcccctgaggttgaagcagagcaacaacttccctccgtcgatgacgcaacccagttgaagaaatcccaaccgcaggaggatgatgctcccgttgtcgaggacgtgagggnnnnnnnnnnnnnnnnnnnnnnnnnnnnnnnnnnnnnnnnnnnnnnnnnnnacaaggaagacgatgctctaggtggtgctgaggttcaaagcagagcagaatgagaagaagagtcgaaaagcatgttgaa

SEQ ID NO: 45106 - DNA, 274 bp, Glycine max
  Clone ID: 701129891H1
ccctactcacccaaatcgactgggaatcgttcctcgacgacatacctgaacttaacgtcgatgattttttgcaggacgacaacgccgttcctgttgttaccgacaatcattcctccccgaacgacgaccccgttttgtccgagatcgagaacatgctcatgacgcaggccgaaaacgacgctgtcgttttgcccgagacgccgtcttcggaggccgggtattacaatcttcgaggagattctggtggaggagcccaaggaaggacccgtgagcc

SEQ ID NO: 45107 - DNA, 244 bp, Glycine max
  unsure (1)..(244): unsure at all n locations; Clone ID: 701129892H1
gataaccaatgatacgtcgtcgttttgcccnccagaacctctgaagaagaagaaatggcgagtagcagcagcaacactccgaaggaaagcgttgttgtcgactgcggaaggcgtcgaacctcttgcggctattgcagatcctctcgtcacaatagcatctctcatggcatgtgggcacatagccttactgtggatactaccaagatcttcttgatcgtggctggagaaggtctggatgttttct

SEQ ID NO: 45108 - DNA, 144 bp, Glycine max
  unsure (1)..(144): unsure at all n locations; Clone ID: 701129894H1
ggaactggtgagcttctgttgtncttttcctttcttgtttctttggcgctatggttccaactctgtttcgctggagatactttgatcgctggncatgngataantcagaacaggacngggnaccttgnttcatcnagccgnaca

SEQ ID NO: 45109 - DNA, 272 bp, Glycine max
  unsure (1)..(272): unsure at all n locations; Clone ID: 701129895H1
gggaacattcactatggaagaaccaacctctctaacggtctcactgcgttggaattaacaggnactgacccgagntggtctttatcggaagtgttctgctgtactggctgatcttcaatgtgatgtggttgagtctaaggtttggacacacaatggccgtattgcctccttaatctatgtaaaagattctagttctgggtcgctattgaggactctcagaaaatttaagattgaatgngcctaagaaatgttttgaagggcgacaatgactt

SEQ ID NO: 45110 - DNA, 281 bp, Glycine max
  unsure (1)..(281): unsure at all n locations; Clone ID: 701129896H1
tggaagccaatggttgaggaaatgtaccaagaggagtttggacnttccgagatgaactgcnacctttcatctgagaacancacggtcannggtaanagngatgatgttcaagagtctgataacttanccaataataactaataaatgggaagagtcacagganaatttagtcactgttggncantgtgcaagtancgcactcangncaganntggantngngtggtgnaatggccgntgtaggtgagccttccagganctcnaagngttnnccggagtccc

SEQ ID NO: 45111 - DNA, 276 bp, Glycine max
  unsure (1)..(276): unsure at all n locations; Clone ID: 701129901H1
aatggctgccaccaccttagtctcctgaagtcactctnccctncctcctccggccagcggaagatgccgctgatgggcctcggcaccgcgccggaagcaaccagcgcggttaccacaaaagatgctgttcttgaggccatcaagcagggctacaggcactttgatgctgcttctgcttatggngtggaacagtctgtgggagaagccatagctgaagcacttaagcaaggactaattgcatncagagatcaatcttcatcataccaaattgtgggt

SEQ ID NO: 45112 - DNA, 275 bp, Glycine max
  Clone ID: 701129902H1
gattactatgggatacgttctaatacagaggctgttaagcagggaccttctgtaggaacagctgcaattgggggtccatttcaccttgtcaaccatcacggaaaacatgtaactgaaaaggatttcttgggaaagtggactttgttatattttggctttactcactgcccagatatctgtccagaggaactacagaagttagcagctgctgttgataaaataaaggagaaagctggaattgaaactgtaccggtttttatctctgttgatcctga

SEQ ID NO: 45113 - DNA, 272 bp, Glycine max
  unsure (1)..(272): unsure at all n locations; Clone ID: 701129903H1
aaaattcaacatgggtggccctatatggtctgctcctatccatgaccaagaatgggtggntgctattctggctgatgtaaaatatatgaaagacagatanccagcttatgatcgcatttcagctgtgttgactacaatatcagaggaattgcctgatgttcccctctttttgagtctgcacaacctctgtgcaaccctcaaatgcacttctccgtcagcaattattttccgttctgcggtgatcaatgcaggctatcgtatatctggaactc

SEQ ID NO: 45114 - DNA, 275 bp, Glycine max
  Clone ID: 701129904H1
aaagaaccagattattaattgttcctcccctttttgttggtctcctcttactctttctgtccctctgatatataattaaggatacttgtcaagttcaagctgaggccagctccttggtggatattgttatctactctgattggagaaatgatgtgctcgtctggctccctagatgtcatgtttccaattacatcaaagcatccttttccatttccatgattcagttcctaatggtgaggaatcagtttctatatatgcttgataaagatccacct

SEQ ID NO: 45115 - DNA, 276 bp, Glycine max
  unsure (1)..(276): unsure at all n locations; Clone ID: 701129905H1
ctagcancgctttgntttcagcctcatccacagcgagtaaganaggaagaaagtaggtagtggatattgagagaacacaaatgagatctgaagccttcgtaacagctaacatttatccgccttcttctcaaggcggtcaaganacatattgggaaggaagagaacangaaacattttatagaatttgtaacctcagagttccgtaacaanccgaaatttgtctgacaaggtggcntcaaccaganaataaagcttgntcgtgatatncttttcttc

SEQ ID NO: 45116 - DNA, 275 bp, Glycine max
  Clone ID: 701129906H1
cttatcaatctctctttctctctgcggcacctcttgttaaaaatttgttcttttcaccgaaacccgtaaagggtcgtgagctagcttcttctcgatccatggtcctggtttttcttcctcttgttttcagcttctatatgcaaaaggggggagaccgaatgatgcaaaatatttataatgtagttacctcactaaccacctaagccatgaaaacaacctttcttctcggttgggtaattctgcgaattggtgcattgtttaaccctctaggggcc

SEQ ID NO: 45117 - DNA, 276 bp, Glycine max
  unsure (1)..(276): unsure at all n locations; Clone ID: 701129907H1
ggaactgaagaacacacaattctcaagtcaagatgcagcttcacaacaggaactgctgcataaggaacttgtgggagagaaaattgttctaattcctgagttgtatnaagctgttgaggaaggaaatgtgnacaagtttcttgatgtgttggagcaagatgtaaacacaggncttgaatttgtctgttatccttggnacaaagttcactgannacaggngttcatggcttcatgtgggcngcagnttaggggtaagnaanagatgnnggcttgatt

SEQ ID NO: 45118 - DNA, 279 bp, Glycine max
  unsure (1)..(279): unsure at all n locations; Clone ID: 701129908H1
accctaaccgggaagaccatcacccttgaggtggagtcaagcgacaccattgacaatgtcaaagccaagattcaggacaaagaagggattcctccggatcagcagaggttgatcttcgccggtaaacagctggaagatggccgtaccctcgctgattataaccttccaaaaagagttnaacattggcatcttgttttaaggcttcgtggtggtattattgagnccatctttgatggcactggccgaggaantataaccaggttaggatgatctgcccgc

SEQ ID NO: 45119 - DNA, 279 bp, Glycine max
  Clone ID: 701129909H1
tttgcttccttcgtatagggataagagagcagcaagtaatgatggatgcgctgataaaggtgcagttcaacgcaccaaaaccataaaaagcgcttctttcgtcttatggcatgtctgaggaggaagaagcactgcgtcaaaggccaacatcgttgatttctttcccaccccatgacaattcttcgctttcttctgccccttctttatactcttcttcactccaatagctttctgtggcaagcgttcaccggaacctatggtataaattatgggtaggat

SEQ ID NO: 45120 - DNA, 270 bp, Glycine max
  unsure (1)..(270): unsure at all n locations; Clone ID: 701129910H1
cttgttgtttggagcgatccgaganaaactctgtaaacatgatggtttaccaggacctccttacaggtgatgagcttctctctgactccttccgttacaaggaaattgagaatggaatgctgtgggaagttgaggggaagtgggttgttaaaggagcagttgatgtagacattggtgcaaacccttctgctgagggtggaggagaagatgagggagttgatgatgcagctgttaagttgttgacatgttgacacttcagacntcaggagc

SEQ ID NO: 45121 - DNA, 276 bp, Glycine max
  unsure (1)..(276): unsure at all n locations; Clone ID: 701129911H1
ctctgcttctgatagtacccatttcactggtaaccctctggntcggttacaccctataccagcngctacgcttcaagctccctcctggcccacggccctggccggtagtcggtaacctctacgacataaaacccgtccggttccggtgcttcgctgagtgggcgcagtcttacggccctatcatatcggtctggttcggttcgaccctaaacgtcatcgtttcaaactcgggagttggccaaggaggttctgaaggagcacgatcagcagctggcg

SEQ ID NO: 45122 - DNA, 274 bp, Glycine max
  unsure (1)..(274): unsure at all n locations; Clone ID: 701129912H1
gtgcagccttgcttgcactcttggctatcaanttctccttgttgagccctcaaaccctgttttctccgcctgagattccgggctcgaaggaccaccttcacgctgctcggttactccatgtcaccggagccgtcgggccggagagtcttgtcttcgacgctgacggcggagggccctacaccggcgtcgccgatggccggattctcaagtgggaaggggaagagcgaggttggactgaatttnctgtcaccagttccaataggtcggatgtgta

SEQ ID NO: 45123 - DNA, 276 bp, Glycine max
  Clone ID: 701129913H1
caaattctttgtcccacaaaagatggggttcactcccacaagtactgcaacatgctttctcataatagcacctctggttgtgctatggtgttggaagctactaaagtgggtgtggctgaggccaaagagattggagagagcattaagggcacagggccttcaggggaatccctacagcctcttgattggggacactaaggaaatgtacacagtgctcatgcaagctgccagatctcaacaatctacaagttcttttctctctaaggataaggatgc

SEQ ID NO: 45124 - DNA, 276 bp, Glycine max
  unsure (1)..(276): unsure at all n locations; Clone ID: 701129914H1
gctcgatgggaattgcgcttcaaggcgtctcgtagggctaatccgcctcacgagggtcaccaacggcacgtgcctttggngggccgaggccccctactgctggtcggcaaacggacggcgggcgcacgcgtcgcttctagcccggattctgacttagaggcgttcagtcataatccaacgcacggtantttcgcgccactggcttttcaaccaagcgcgatgaccaattgtgcgaatcaacggttcctctcgtactaggttgaattactattgcga

SEQ ID NO: 45125 - DNA, 254 bp, Glycine max
  unsure (1)..(254): unsure at all n locations; Clone ID: 701129916H1
gtccctccttcctctgccttataattcttgtgacccttttngctggtagcattgaaagtgcaccagcaaacgtgaagccaagccattatgctgcaccctcaataggagtgttttccttctggtttctatttggaataggtctgcagcttaccagatagaaggagcagcactatagatggcagagacaagtatatgggnactatctaacancaccagggagntgggacatatgatggagctanattgatttatnc

SEQ ID NO: 45126 - DNA, 273 bp, Glycine max
  Clone ID: 701129918H1
gaattttcttcatccttctctgttctcctagaacttgattacttgaacattccctatgacagatgaggtggttcttctggatttctggccaagtccatttgggatgagggtcaggattgcacttgctgaaaagggtatcgaatatgagtacaaagaagaggacttgaggaacaagagtcctcttctcttacaaatgaacccggttcacaagaagattccggttctcatccacaatggcaaacccatttccgaatccctcattgctgttcagta

SEQ ID NO: 45127 - DNA, 271 bp, Glycine max
  Clone ID: 701129919H1
aagaaggtgataatgttgtagaagagggctcccgcagatataccatctttgctggagttgaagcagatatattacgaactaatgattcggtattattcccataacaatgattatcttgaaatttgccgttgctacaaggcaatatatgagattccatctgtcaaagaagaccctgcccagtggattccattcctaaggaaaatatgttggtacttggttctagcgccctatgatccatgcagtcaagccttctcattccaccttggaggat

SEQ ID NO: 45128 - DNA, 247 bp, Glycine max
  unsure (1)..(247): unsure at all n locations; Clone ID: 701129920H1
gcgcactcgcacctttctctcatttccctcgcttccaaagtgtgtgcncanncactggaagcctctactccacccacattgtcgncgacagccgttctggtcgggattattcattctgcactctaccatccgttacatggtacttctccccaaagatcgcggtccgttggagtcctcctaatgctattaagttcaaccaacttcnagggcggaaagcttatatgagtattggataatatttacaagc

SEQ ID NO: 45129 - DNA, 267 bp, Glycine max
  Clone ID: 701129921H1
caggtcaagggtataatgcaaattatggcactgctgatgttggatatgctggaaatccttaccctggcatttatggcatgaatccaggttatgaattttgggcccaaacattgtgcctcggactctggttccatcgttcacatctgcagaagagcatggttgaaaattgtaatcccccggatttgggcttctcctgaagtgagaaggtgcatttagaggataaagtgcaattactatccattgattagaaaatcaatggttgaaatt

SEQ ID NO: 45130 - DNA, 277 bp, Glycine max
  unsure (1)..(277): unsure at all n locations; Clone ID: 701129922H1
gtttctttgcttatacactaactaagatttcaaaccccccgcggccaactaactaagatctggttttgttctgattgattcgtgcattggactgtgaaacgcacgccaaaatgtggtggatgatgaacgagactggaggcaattactgttctaagaagagcgatgatttgtgcagcaatgtttgtgatcaggaatccangtcaagtattgggcntgtcacgaattcnncggtaatccgcgtggntttggatgtggaaaacctataatatncatgttt

SEQ ID NO: 45131 - DNA, 283 bp, Glycine max
  unsure (1)..(283): unsure at all n locations; Clone ID: 701129923H1
aattgccattgacccaacaagcaataggccagcaccaaaatgagaaatgggtcaatgagttgttggattgcccagtaggattcttggacctattaggcaaaacaagggattccattctgttgatgaaaggaagtgttggagagcttcagagtgcacttagaaggaaaagggtggagattantacatgggagagtttnctcntctacctatttggaggctccagaccgaaaccntggaggagggagtgcacaaagtcctgggcctttggttgaagcaagatggg

SEQ ID NO: 45132 - DNA, 278 bp, Glycine max
  unsure (1)..(278): unsure at all n locations; Clone ID: 701129924H1
gttttgagttcaaaagatgactaacttcccagtgatcaacttggagaagctcaatggtgaggagagaaacgacaccatggagaaaataaaggntgcttgtgaaaactggggattcttgagctggtgaatcatggcataccccatgacttattggacactgtggagaggttnaccaaagagcactacagganatgcatggaagagaggttcaaggaatttatgggcaagccnagggtntaagatgctgtcccanactgaggtcaaaggactgggattng

SEQ ID NO: 45133 - DNA, 271 bp, Glycine max
  unsure (1)..(271): unsure at all n locations; Clone ID: 701129925H1
cttttgatagcaaacaatgctgcccaagggattttatcctctatcttcttcaaatatgcagatacaattttgaagaagtactcatcaacagtagcaacaatcttcactggtatagcatctgctgtactatttggacatactttaacaatgaacttcgttattggcatctctattgnntcatctcaatgcaccagttctttcaccactttcaaaagttaaagatgaacaaaatggtgtgctggaactgcatgatgttcatgacaaacaaagg

SEQ ID NO: 45134 - DNA, 276 bp, Glycine max
  unsure (1)..(276): unsure at all n locations; Clone ID: 701129928H1
ctcacaaaggacagaagaaacgcgaatgccaggagaactccaattaccacccgggttcagattccaccccactgacgatgngcttgtgaatcactacttgtgtagaaagtgtgctgcacaaaccattgctgttcccatcatcaaagaaatcgatttgtacaagtttgatccatgggcagcttccagagatggctctttacggtgagaaagagtggtactttttctctcctcgagaccgaaaatacccaaacggttcgagaccgaaccgggctgccg

SEQ ID NO: 45135 - DNA, 104 bp, Glycine max
  unsure (1)..(104): unsure at all n locations; Clone ID: 701129931H1
agaaggttgggcatggagggtttgggacagtgtntcanggggagttgagngatgcttcggttgtggcggtgaagangttngcagangccagcnnggtnggnaga

SEQ ID NO: 45136 - DNA, 266 bp, Glycine max
  unsure (1)..(266): unsure at all n locations; Clone ID: 701129932H1
tgcgtattttcgttttggttgtgaccagagacggtggtgaccgttcgcaatgtgctgggaagatggggcaagaaggccgcagaggctactaagaaggctganagtctcgctggaaacacgtggcagcacttgaaaacaagccctagctttgctgaagctgctatggggagattgcccagggaacaaaggtctggcagaaggtggatatgagaagatttcctgaatactttgagacagtttccggaggagcggcttctgaattctta

SEQ ID NO: 45137 - DNA, 274 bp, Glycine max
  unsure (1)..(274): unsure at all n locations; Clone ID: 701129934H1
gcttcttggcaccccaactgaggctgaccttgggttagtgaaaaatgaagatgcaagaagatatatcagacaacttcctcaatatcctcgccaacctttagctcaagtcttcccccatgttcatccggcagccattgatcttgttgataaaatgttgacagttgatcccaccaaaagaattacagttgaagaagcactagcccatccataccttgaaaaactgcatgatgtagctgatgaaccaatctggcatggagccatttncatttgattt

SEQ ID NO: 45138 - DNA, 107 bp, Glycine max
  unsure (1)..(107): unsure at all n locations; Clone ID: 701129935H1
actcaacctcgttcgtttcgttcctccatgaaataatggcttccgtttctactttcctgtttcgtnactcttccttcctncttccttccacacaacatncgaacnnc

SEQ ID NO: 45139 - DNA, 270 bp, Glycine max
  unsure (1)..(270): unsure at all n locations; Clone ID: 701129936H1
ctttatctcgggacttctaagaagctctccctctccagaaatgtcatatgctccaagtgcactggtaagggttctaagtctggtgcttcgatgaagtgtgctggttgtcaaggaactggtatgaaggtttctataagacatcttggcccgtccatgattcagcagatgcagcatgcttgcaatgaatgcaagggtactggagaanccatcaacgacagagatcgctgccccacagtgcaagggagaaaggttgtgcaggagaaaaaacnc

SEQ ID NO: 45140 - DNA, 264 bp, Glycine max
  unsure (1)..(264): unsure at all n locations; Clone ID: 701129938H1
ggcatcttcttctggtagtttagacacctctgcaagtgcaaactccttcaccaacttcaccttctccacacaccctttcatgnccacttctttctctgacctccttgcttctcccttggacaacaaacaagccaccacagggtggtttgtctgagagaatggctcnggtgtncccaaattcagtccacaccacaccttcttcggntctctatcnccttccnatttctnttcttctnnttgntatncctcctggttgagcctgtg

SEQ ID NO: 45141 - DNA, 94 bp, Glycine max
  unsure (1)..(94): unsure at all n locations; Clone ID: 701129939H1
caaaaattcatctcatctatctgtagatcggaganaccaaanaanaaaaaanggngttcgncgagangaangcantgntccgcgangtggcgtt

SEQ ID NO: 45142 - DNA, 268 bp, Glycine max
  unsure (1)..(268): unsure at all n locations; Clone ID: 701129940H1
agatcctagggcttatagtaacagagcagcatgctacactaaattgggggcaatgcctgaagggttaaaggatgcagagaagtgcattgaacttgatccaacctttgtaaagggttatacccggaaaggtgcagtccagtatttcatgaaggaatacgacaaggctttggagacatatagggacgggttgaatntgactctaacnaccaggagttgcntgaaggctcagaacatgcatacancaaattaacanggctagccgtggaga

SEQ ID NO: 45143 - DNA, 271 bp, Glycine max
  unsure (1)..(271): unsure at all n locations; Clone ID: 701129941H1
gggcgacagtcactctccgacaacaacacttccgcggcgaaaaatgtctctggtggcgaacgaggatttccagcacattctgcgtgtgctgaacaccaacgtggatgggaagcagaagataatgttcgctatgacctccatcaagggtattggaaggagattcgccaacatcgcttgcaagaaggccgatgttgacatgaacaaaaggggtggtgagntgagtgctgcagagttggatagtgtgatgactgtggtggcgaaccctaggcat

SEQ ID NO: 45144 - DNA, 244 bp, Glycine max
  unsure (1)..(244): unsure at all n locations; Clone ID: 701129943H1
actcgattgagttgtagaatgcnagtgatcggattccgaaatggcttcgaacccttcgcttctccctgagatcggacccgatggtctcgctaaagaagctcccgtnatcggctacaccgagaagatcatcgaagcagaacagcttcaattgcagaaatacattcaagaaaactattctaaaattcgtgatgtggagcgtgagttgcaaatctttcactggagatgaaactaacagctgggccga

SEQ ID NO: 45145 - DNA, 272 bp, Glycine max
  unsure (1)..(272): unsure at all n locations; Clone ID: 701129944H1
gtagcaacgatggnngcggcagctggagctctaggttttagaaggtggctagtgcagctgccgctacanctcgccgttgccggcggtttatatgccattctttcatcctcaacctctgctagctctgagatggaagnnccgtttggcagcgcacggcgtgagagcaaagaacgtgacgatggtggctccgggtctcatcctcgngagggtgccaccacggtcagtcgttggaagaaacctgagattggttgggtgaagctgaacgtggatgg

SEQ ID NO: 45146 - DNA, 271 bp, Glycine max
  Clone ID: 701129945H1
tcttcactgcacttgttgctcaattgttcctcatgtcactttgccacctcaaatttgggatcttcttgctctttgcttccttaattatcttcatgagcttctttgtcttcttccttttgcccgaaaccaagaaagttccaattgaggagatttatcttctttttgagaatcattggttctggaggagattgtaactgaccaagacccagagacatcaaaggggactgcttaaaattctcaacaaaatagattgaacaagtgtaggtttttt

SEQ ID NO: 45147 - DNA, 275 bp, Glycine max
  unsure (1)..(275): unsure at all n locations; Clone ID: 701129946H1
gaagactctgacttagaagactctcactttcttccaacagtgagggtnngatgctctatcaacaatgagtaaccttaaacttctcaaatttagatacgctgggctacgaaatcaattattcaggancacttactaagctttccaatgaattaggatatcttacttgggtaaagtatcctttgagtgtttgccaccaagttttgagccggacaaacttgttgagttgattctacctaaaaggcaacatcaaaacaactttgggaagatagaaagcc

SEQ ID NO: 45148 - DNA, 272 bp, Glycine max
  unsure (1)..(272): unsure at all n locations; Clone ID: 701129947H1
tgggattncnaaanggggtnctnctnggntcccggnatnnttnggggcaaggtctcttcntggntcctggangntgcttaanttgtggccttgatggtcattgggcaacgganttcaaaacttgggatttgaagaataagtgttaccgntttgggaaagaagacatatagaaagaactgcaagaacagccccaaaaaaattagcacaaggcnaagacggattattcacggtcaccagtcangtcacatttcacctcgtcgtggcagaagcgg

SEQ ID NO: 45149 - DNA, 274 bp, Glycine max
  unsure (1)..(274): unsure at all n locations; Clone ID: 701129948H1
agaggtcgagtttcacagcagcaatggtgtacgtcaaggctcagaaatcanaagcctacttcaagagatatcaagtcaagttcaagagangaagagangganaaaccgattaccgtgccaggnttcggttgattaatcaggacaagancaanataacactccgaaatnccgatttgttgtncgtttcgcaacanggacattgttgcacaaatattttctgctagcattgntggccgatatgttntggcngnggcatttgnnaatgngtcnncng

SEQ ID NO: 45150 - DNA, 268 bp, Glycine max
  unsure (1)..(268): unsure at all n locations; Clone ID: 701129949H1
anaagattgtgtttgttctgaataataaaaatttcatcttcattgttggggatgctacggattttgtanatttagcaccttttttttttcttttttgatttggcccttatcctggatttgtttccttaatccccttttgcggctaatcggatgaatatattggtaaatcccattggatttgagnggattctccaataaaggttggaaatttttnatctgctggacccctttgggcacaaaattggtggtgaaattgggaacaaatctg

SEQ ID NO: 45151 - DNA, 268 bp, Glycine max
  Clone ID: 701129950H1
ataagccacgcacacgtagcttccttcatttcggaaattctaagcaatcattaaaagatggcagatggtgaggatatacaacctcttgtttgtgataatggaactggaatggtcaaggctggatttgctggagatgatgctccaagggctgtgttccctagcattgtgggtcgtccacgccacactggtgtgatggttggaatggggcaaaaggacgcatatgttggtgatgaggctcaatccaagaggggtattttaacactgaaat

SEQ ID NO: 45152 - DNA, 253 bp, Glycine max
  unsure (1)..(253): unsure at all n locations; Clone ID: 701129951H1
aaaaataagaccataatacttntaacccaccaagtggacnttcttgcataatgttgactgtataatggtaatgcgagaagggaaaatcgtgcaaagtggcaagtatgatgaacttctcaaagcaggcttggattttggtgcacttgtggctgctcacgaatcctctatggagattgcancagtctagtgatagagttggtgaaagattctgctgagtcctccaaaacttgctcggatcccnttccaaaagaaa

SEQ ID NO: 45153 - DNA, 273 bp, Glycine max
  unsure (1)..(273): unsure at all n locations; Clone ID: 701129952H1
ganttatcttaatgatcatgcgtctaccaccaccgagcatgcatctaccaccacaccagactcaaaaggaaagaaaccagaagttgttgagtttgactcaactggcactgccaatactccagaatcaatccagcgggcaagggaaccattggttttgaaaaacaaagctcctagatggcacgaacaactgcaatgttggtgcttgaatttcaagggaagggttacagtggcctctgtgaagaacttccagcttgtagcagctgctgaaaccat

SEQ ID NO: 45154 - DNA, 240 bp, Glycine max
  unsure (1)..(240): unsure at all n locations; Clone ID: 701129954H1
gaagaggtgactcttttgggagtaattggaagcccatttgcttgcagggtgaagattgcccttaagttgaagggagttgaatacaaatatgtggaaagaaaatttggccaacaagagtgattgctctcanatccaacccagttcacagaagttcagttttatcacatgagagcctagcgagctctgtgatcgagacatgtgagcatggagacacccatctgctcgntccctaccaaggct

SEQ ID NO: 45155 - DNA, 272 bp, Glycine max
  unsure (1)..(272): unsure at all n locations; Clone ID: 701129956H1
gaaaatttcaagcacaaaaantggcggagaagaaagtggtgatcctaggaggtggtgttgccggtgccaaccttgcaaaaactatacaacgtcaagccaacgtcacccttattgatccgaaggaatattttgagattccatgggcaagtttgaggggattggttgagccaacttttgctgaaaggatagtgatcaaccatagagagtacttcaaaaagggtaaccttgtngtatccagtgctgtcaacataactganactggcagtggtggc

SEQ ID NO: 45156 - DNA, 269 bp, Glycine max
  unsure (1)..(269): unsure at all n locations; Clone ID: 701129957H1
cttactcactagcctaatttgctcctttagcctcactcctgctntncttctacgtcaaatcctaagaaacccatttgaaatttgaaatctcgttctggctaattccatgttcattgtttactatacctcaccactccaagggtctcataaatttcttctgcttccaactctgctgcagaaaaagaaactgttggttctagatacaagtgggtttccagagtagaagtgaggctatggggcatgagataaacagcaagcaccatcatcta

SEQ ID NO: 45157 - DNA, 266 bp, Glycine max
  unsure (1)..(266): unsure at all n locations; Clone ID: 701129958H1
gctgtcagtgcccagttgggtttcgtggggatggtactaataaatgcgaagacgttgatgaatgtaaggnacgaagtgcttgtcagtgtgatggctgcagctgcaagaatacttggggtagttacgattgtaaatgcaaggggaacctcctatatataaaggaacaagatgcttgtatcgaaagaagtgaatcaaaatttggacggttccttgccttgtggtcatagcagttgttgttggtgctggtctagctggttactgttcna

SEQ ID NO: 45158 - DNA, 248 bp, Glycine max
  unsure (1)..(248): unsure at all n locations; Clone ID: 701129959H1
gtcaaccacgaagaaacagcgtantgctacccacactcacnttaaaggcttaggtctcanngcgagtggaaaagcattgccttttgctgctgggttcgtgggacaagttgaggcgaganaagcatctggtcttgtggttgacatgatacggcagaagaagatggccggccgggcacttcttctcgccggaccacccggaaccggcaagacggcgttaactcttgggatangccaggagcttggcacca

SEQ ID NO: 45159 - DNA, 273 bp, Glycine max
  unsure (1)..(273): unsure at all n locations; Clone ID: 701129960H1
aaaccctttcattccaccaattanngaaggnnnatatacgctctcatcattcgccattcgctgtccgctaatttncctttttcctggccttgtcgttttgatccctcccccaaactaaacgacccctctcctcttccggaaccttcgccaccattctccgcccaattttcccgcgctttctcgaacctccgacgncactccggncaccgnagagtgaacaaggtcgtggaaggatgagcaacgtgttcgagggttacgaacggcaataatgcg

SEQ ID NO: 45160 - DNA, 269 bp, Glycine max
  unsure (1)..(269): unsure at all n locations; Clone ID: 701129961H1
ggggcactgaagtgcattgtgttttatgccctcgcaatcctgatgatggtggaagctttgttcaggatttagaaatttccaccatgtttactcatncnccagaaaattgtagtcgtggatggtgaattgccgagtggagattctaataagagaagaattgtgagttttgtggggggtaatgatctctgtgatggaagatatgacactcaattccattcactttcagaaccctggacacagcacatcatgatgactttcatcagcctaac

SEQ ID NO: 45161 - DNA, 271 bp, Glycine max
  unsure (1)..(271): unsure at all n locations; Clone ID: 701129962H1
gaccttgtatgatgaatgggttaacaagggcaatgcaccggcactgcccganactcttaagaattacaacaagctggtgtctcttggcttcaagattatattcttgtcaggaagaacactggacaaacaggccgtaacagaagcaaacttaaagaaggctggctaccacacatgggaaaaattaattctcaaggatccacaagatccttccactccaaatgcagtttcatacaaaacagcagcgagagagaaactgataaggcagggatac

SEQ ID NO: 45162 - DNA, 272 bp, Glycine max
  unsure (1)..(272): unsure at all n locations; Clone ID: 701129963H1
gnaagcggatcgctaagtatcatcctcgttgctttctctttgcacttcattcttggtttttccgacgagtcagctggttctaaagatgctacaaagacagaacctcatgccggcagaagcactagcactgtagttatcgttgtattaattttgcttgtgctcttttcttattctcctttgtactttttaagctgtggcggaagaagaaaagggaagagcaatatggctcgtcttttgaaattgtttgaagaggatgatgagttagagcttga

SEQ ID NO: 45163 - DNA, 271 bp, Glycine max
  unsure (1)..(271): unsure at all n locations; Clone ID: 701129964H1
cacaactctctgccaacatgggtatctccagagattctatgcacaagangcgtgccactggtggcaagaagaaggcctggaggaaaaagagaaagtatgagcttggtcgccagcctgctaacactaagctgtcaagcaacaagacagtcaggaggatccgtgttagaggtggaaatgtgaatggagggcttgagattggatactggaattactcctggggaagtgaagctgtaactcgcaagactcgtgtactagatgtggtttacaatgc

SEQ ID NO: 45164 - DNA, 264 bp, Glycine max
  unsure (1)..(264): unsure at all n locations; Clone ID: 701129965H1
catggcatctcaaggtttgtgtccttcgataaaaaatattcttcttttggactctgaagggaagnnccgtggcagtcaagtattactcagatgactggccaacaaacaatgcaaagttagcttttgagaagtttgtatttactaagactgttaagacaaatgctcgtacggaagctgaggtaacactacttgagaacaatatcatatttacaaatttgtacaagacctgcattcttgtcatggtggtgaagatgaaatgagctc

SEQ ID NO: 45165 - DNA, 265 bp, Glycine max
  unsure (1)..(265): unsure at all n locations; Clone ID: 701129966H1
cattaacaaggatagtcctgctgcaaaataccttctggagcgaggtgtggaacaaaaggacttcaactcttatggaagtcgtcgtggcaatgatgaagtgatggcaaggggaacttttgccaacattcgtcttgttaacaagctcttgaatggagaagttggccccaagacagttcacattccgactggggagaagcttatgtgtttgatgcagccccagagntacaaggctgaanggncangacaccatgtgctggctggagct

SEQ ID NO: 45166 - DNA, 268 bp, Glycine max
  unsure (1)..(268): unsure at all n locations; Clone ID: 701129967H1
gcagttctagtgaagatgacaatgaacttagaagagggccttgggactctggaagaggataacttgctctcccaatatatttttaatcatggggnagggcgatggaatttgctggctaaacgttcaggattaaagagaactgggaaaagttgcagattaaggtggctaaattatctaaagccagatgtaaaacggggaaatttaaccccacaagagcaacttataattcttgaactccactcaaagtgggggaaacaggtgggtcaaa

SEQ ID NO: 45167 - DNA, 274 bp, Glycine max
  unsure (1)..(274): unsure at all n locations; Clone ID: 701129968H1
ggggcactgaagtgcattgtgttttatgccctcgcaatcctgatgatggtggaagctttgttcaggatttagaaattnccaccatgtgtaactcagcaccagaaaattggtagtcgtggatggtgnaattgccgagtggagattcnaatangagaggaatgnggagttttgtggggggnaatgatccccggtganggaagatatgacactccattccattcacttttcagaancccgggacacnncaanatcatggaggantttcatcnagccc

SEQ ID NO: 45168 - DNA, 208 bp, Glycine max
  unsure (1)..(208): unsure at all n locations; Clone ID: 701129970H1
tacgcacccaagagagagaaagagaaagagaatcgatcgacgctgctagagaagtagaagaagatggcgggtggtgctcccaaacaattgttcggattcggagttgtggcgttgcntgccactctcattcttcctctctttatgcccgccgctgttcaggctcaatccgcagccctgcactgccctgctagcgacgggtctccctgat

SEQ ID NO: 45169 - DNA, 264 bp, Glycine max
  unsure (1)..(264): unsure at all n locations; Clone ID: 701129971H1
gttccatcccatctattctatctatttagataaaacacganatcccaatcttaatcgcaagcaattcctctctctgagagaagctctcgnaattcttctgntactcgtaganttntaatggcntgttcatcatncgattcaaaaaaaccagtgacgncgctgntgttctntccttcctaantccgatacttccgattctctntccggcctacgcatactngatacttgntgcatctctcncttcgcaaattccgatnccttngg

SEQ ID NO: 45170 - DNA, 265 bp, Glycine max
  unsure (1)..(265): unsure at all n locations; Clone ID: 701129972H1
agaaccanacaaanaacaannagcacnattaaatctgtgaatggagannctaattngntttggtgaacaaaatccagaggggctgcaccgctttgggtgaccacggcgaagaaagtgccttaccaactctcngggactctctcccngctatcgccgtngtcggnggccagagctctggaaagtccncggtgttggaaaagtgttgttggcaaggatttctaacccgnggaancagggattgtactcggagacccctgtntgcagc

SEQ ID NO: 45171 - DNA, 266 bp, Glycine max
  unsure (1)..(266): unsure at all n locations; Clone ID: 701129973H1
ctcaaagtgcttgctggaattgacaccaacttcactgtcacctccaaggcctcggatgaagacggagactttgccgaactatacatgttcaaatggaccacccttcttattcctccaacaacccttctcataataaacttggtgggggtngttgctggaatctcctatggccatcaacagtggctaaccaatcttggggaccctctttggtaagcttttcctttgcattttgggtgatcatccatctataccctttcctcaaaggt

SEQ ID NO: 45172 - DNA, 263 bp, Glycine max
  unsure (1)..(263): unsure at all n locations; Clone ID: 701129974H1
ctcttgcggctagggttttagcgcactttcttctagatttaaggnagatgggtaaggaaaaggttcacatcagtattgtggtcattggccatgtcgactctgggaaatccactaccactggtcacctgatttacaagcttggaggcattgacaagcgtgttattgagaggtttgagaaggaagctgctgagatgaacaagaggtctttcaagtatgcctgggtgctggacaaacttaaggctgagcgtgaaagaggaatcacc

SEQ ID NO: 45173 - DNA, 264 bp, Glycine max
  Clone ID: 701129975H1
gcatggattcacttaaaaagggtgctcctgaacggtggagattggtcagggctcatggtactgctgtaggacttccaacagaagatgacatgggcaatagtgaagttggtcacaatgcccttggggctggtcgcatatttgctcagggtgctaagcttgtcgacctgctctagcctctggaaaaatttttgaaggagaaggtttcaagtacataaaggaatgttttgaaaatggcacattgcatctcattgggctactgagtga

SEQ ID NO: 45174 - DNA, 264 bp, Glycine max
  unsure (1)..(264): unsure at all n locations; Clone ID: 701129976H1
gctactctcagacatagatgaccaagatgggttacgtttccaaattccggtgatacagttctatcgccacgacccatcaatggcagggaaagaccctgtcgatgtgataagaaaggctgtggccaaaacgcttgtgttttactatccttttgcaggtaggcttagggaaggacttggtcggaaactgatggtggattgtactggggaaggtgttttgttcattgangctgatgcagatgtcactcttaagcaattggtgatgcc

SEQ ID NO: 45175 - DNA, 232 bp, Glycine max
  unsure (1)..(232): unsure at all n locations; Clone ID: 701129977H1
aaatccccgcttcgtggaaatcccgaaccagaaaccatgcttctccgaaccgctgctgcttctgcttcgtccctctccctcttcagcccgaacgcngaacctccccgttcggttcccgctcgtggattggtggttcgcgcaggaaaggntccacgaaccaccgcgccctgaccggagtgatttttgaaccgttcgaagaggtgaagaaggagctcgatctcgttcccaccgt

SEQ ID NO: 45176 - DNA, 264 bp, Glycine max
  unsure (1)..(264): unsure at all n locations; Clone ID: 701129978H1
ctttcaaagaggtgaaagcaaaagagttcttcttttccttttttatatatacttgggtgctaagctgtgtgagttcattgacaagcctgaaatggcaactatgctgacaaaggagcatggtctgaacctcaaggagaccgagctttgcctcggtttgcctnnnnnnnnnnnnnnnnnnnnnnnnnnnnnnnaggtggaaactccaagggccactgggaagagagggttccngagaatnttgatctgaaacttaatcntcaatcc

SEQ ID NO: 45177 - DNA, 268 bp, Glycine max
  unsure (1)..(268): unsure at all n locations; Clone ID: 701129979H1
gacgccgcagccatggtgaagtactccagagaacccgacaatcccaccaagttctgcaaggccagaggcgctgancttagagtgcatttcaagaacactagggagactgcctttgccatcaagaagttgcccctggttaaagctaanagatacctggaggatgtttggcccacaaacagggcattccttttcgagcttctgtggtgtgttgggaagacagcccaggttaagagcaggcnantccannggtcnaaggannntggccgtt

SEQ ID NO: 45178 - DNA, 245 bp, Glycine max
  unsure (1)..(245): unsure at all n locations; Clone ID: 701129980H1
aatggcttcanacncaggnggaggtgacacntttgggagctactggaagcacatttgtgacgcagggttcatattgccctcaagttgaagggagttcaatacaaatatgtcgaagaaaatttgaggaacaagagtgaactgcttcctcaaatccaacccagtttcacaagaaggttccagtgtttantccacattggggangcccctngnnggagtcnctngggatggnngaanancntggngng

SEQ ID NO: 45179 - DNA, 264 bp, Glycine max
  unsure (1)..(264): unsure at all n locations; Clone ID: 701129981H1
atggaatgtatggaggaaggttttctggncaagataatccgtggggatggggcaaaagaaattaaagttggtgaggtaattgccgtaactgttgaagatgaaggggatattgcaaaattcaaagattaccaaccttcagcatctgaaccaagtganccccctgccaaagaaacatctgccccacctccaccaaagnaagaagaggtggtagaggagcctgcccgagaanctgagccaanggttctaaacccagtgcaccacctt

SEQ ID NO: 45180 - DNA, 262 bp, Glycine max
  unsure (1)..(262): unsure at all n locations; Clone ID: 701129982H1
acaggccttaacttgcttcttaatgttccattcactcttcactangaacatccgacncccactaccctcccctaatcaccacataacctatttaaggatctgcattctggattaagcttctatatgtaatggtttgagtttttttaaattgtttgactcatgaagtattgttttgaaggggntttttntttttttcnatttngngggaaangattttgggggaaaaancctgggngtttaaattaaggggntcnattacncc

SEQ ID NO: 45181 - DNA, 265 bp, Glycine max
  Clone ID: 701129983H1
gagcacgacgatgagttctgctgaaaattaaaaatcgaaataaatccgttaggaagttgttgaagtgggtggaacccaacgaagcagagatggaggcttgctgcaattcgcaccgatgcagagctccgttgatgagggtttctgggcaccgtttgtcttctttgaagctcaacaagcttgggcattgaccattctcccaattcccttattcggtttttatgcaccgtgctctcactctcaagtatcaaatcattaactgttttag

SEQ ID NO: 45182 - DNA, 239 bp, Glycine max
  unsure (1)..(239): unsure at all n locations; Clone ID: 701129984H1
ggatttggatagagggtctagtggaggaagatcttggaagtgattgggagaaggtggtgttcaaggtggatacgacaaagaagtgacccggtgtactacaacgtctttggggagttgaggacaaggagtgtacacaagaacgttttggacgagnaaagaagnacaagtcataagtgaggatcagtcgttgagaagacngtagaagcttgactctcccggatgggtacngcatatcagtg

SEQ ID NO: 45183 - DNA, 264 bp, Glycine max
  unsure (1)..(264): unsure at all n locations; Clone ID: 701129985H1
catcactaacactcagtctctgaattggggctgagggtttcgagtaacgtttatttttcacgagtttaagatatcatgggtaaagagaaggttcacattaacattgtggtcattggccatgttgactctgggaagtcaaccaccactggccacttgatttacaagcntggaggtattgacaagcgtgttattgagaggtttgagaaagaagctgctgagatgaacaagaggtcattcaaatacgcctgggtgcttgacaagctt

SEQ ID NO: 45184 - DNA, 262 bp, Glycine max
  unsure (1)..(262): unsure at all n locations; Clone ID: 701129986H1
gggaatccccaatcttgtaacggaactttttttcttatcagttccatagctagctgtgtggagacgacaactgccacccattccaacatacagagaggctatttactaattactgttcctcgtgtgaacaaacatataaaccacctcggattttgcttcctctgctgtgttttaacgacaacgcgtttcttgttatacactaaggatttcaaacggcgattcgttttgcgatgtgtggtcgcgatctggtttgntttgattc

SEQ ID NO: 45185 - DNA, 263 bp, Glycine max
  unsure (1)..(263): unsure at all n locations; Clone ID: 701129987H1
ggttggcttcctttcgctctcttctctncaaatgcttcattccaagatggttaggactctgtaggctgataaagacaacactcataccgttggaaagaaggatgctgctggccatgttgctaatttagttcttgcttcctttgncttcttgagtttatcagagacgggagtgcagggatcactagcgctttcattcggtcagagtggccggcagttgacatcccccntggatcangaagcatttgcagttccaaagggntana

SEQ ID NO: 45186 - DNA, 262 bp, Glycine max
  unsure (1)..(262): unsure at all n locations; Clone ID: 701129988H1
gatccccacgagtttgagcaatgagatttggatgcgcggttttagttgtgatcaataagtcgatagtnagaacaatagtcttggtataaggaccttgccaataattttttagttctgattcacagagctaagacagttccgtcttagactttaaaagttttgatatttagctttaatacttgaagtttacttccaattttatggggtatccccaaaacatttcatacccttgctatgttaacttttttccccttgatccgga

SEQ ID NO: 45187 - DNA, 263 bp, Glycine max
  unsure (1)..(263): unsure at all n locations; Clone ID: 701129991H1
gccgctcgatgggaattgcgcttcaaggcgtctcgtagggctaatccgcctcacgagggtcaccaacggcacgtgcctttggngggccgaggncccctactgctggtcggcaaacggacggcgggcgcacgcgtcgcttctagccnggattctgacttagaggcgttcagtcataatccaacgcacggtagcttcgcactnatggcttttcaaccaagcgcgatgaccaattgtgcgaataaacggttcctctcgtataggtt

SEQ ID NO: 45188 - DNA, 180 bp, Glycine max
  Clone ID: 701129992H1
gcttggtcttggttccagccagccatgtctctttttgtacaatgtaggataaaaaggcgtaaaaaatagggaacatggcctagaaggaagtagaggagttccaaagagccagcatgctgaccaattttattttttttaattagcatgcatgttggatatataaaatcctactgtattgat

SEQ ID NO: 45189 - DNA, 268 bp, Glycine max
  unsure (1)..(268): unsure at all n locations; Clone ID: 701129993H1
caagggtttaatctttttggctgtgttatgcttctcagcactgtcactgagtcgttgtcttgcggaggataatggacttgttatgaacttctacaaggaatcatgccctcagggctgaagacatcatcaaagaacaagncaagcttctctacaagcgccaacaagaacactgctttctnctggctcagaaacattctttccatgactgtgctgttcagagttgtgatgcctcactgttgctggactccacaagaaggagctgtctgag

SEQ ID NO: 45190 - DNA, 265 bp, Glycine max
  unsure (1)..(265): unsure at all n locations; Clone ID: 701129994H1
gtttccatggaacattagctggcatgcctagtacatcgtcacaattccctcctttgccacagaatgttttggaccacgagttccaaagcttctatggaattggatacgattctaatacagcacttgacaacttggaacccaatgggcggttgaaaacagagttatagtgtgtggattattatatagccatgttactacaaccaacaaagactttggattntcttgttgactgcnacaatttaactgaggatgaaatggggggnca

SEQ ID NO: 45191 - DNA, 283 bp, Glycine max
  unsure (1)..(283): unsure at all n locations; Clone ID: 701129995H1
gtttccccgctcaggtacgagtgataactaggaaaacttgtgaaccactggaggaggattccttcaggncaatcctcaccactatgatggtcccaagttccgtcttgagctgaatgtgcccgaggcgttgtctctgctggatatttttgcagaacaagacaccttcagtgggcacttttaagggctttgccgggataaaaagggngataaattangcaaaattattncnaaccaggaaggaaannttcacctcaacaggggcaaatagnnnatttngggggtt

SEQ ID NO: 45192 - DNA, 266 bp, Glycine max
  unsure (1)..(266): unsure at all n locations; Clone ID: 701129996H1
anaaaagcaccgaaaaacgttgcgccaccttgattactctctcgcggaagacaaaggctcggtaggataggttggtcctgagctgcttgtgtcagcacaaaggagagttgtattgatccctcaaggaacgattcagacatgggtgactcagacaaatgcgggttgtatatcgaaaaaatccttcctgcctagttgtcttaggaaaagtttatgagggatccacaatcgttcacaacattccttgttgtatgataangtcaaggttg

SEQ ID NO: 45193 - DNA, 274 bp, Glycine max
  Clone ID: 701130002H1
aatggatagttcctctcatcagctcctccccttcaacgaaaacgacccagaagacatgcttctctatggcatcatcacttcatgccaagaaaaaaaagtgaccatcaaccaagagcaagtgaataagaagaggagcagcttccgcggcgtgcggaggcggccgtgggggaagttcgcggcggagataagagactccacgcggcatggcgtgagggtgtggcttgggacttcgacaacgccgaggccgccgcgctggcgtatgaccaagccgcat

SEQ ID NO: 45194 - DNA, 274 bp, Glycine max
  unsure (1)..(274): unsure at all n locations; Clone ID: 701130003H1
gtctcttcgtatgtgtaatacaaggcaggcttttgaaaactgttctatccaaatctcaaatgcaatgccatgtacttgaggaaatgagcattgactattgcaatgatttgattacattacctgatggactgtgtgagattagcccattgaagaaacttagtatcactaactgccacaaactttctgcactgccacaaggtattggaaaactggagantctggaagtgctaaggctatgttcctgctctgatttgctagagatgccaaattcttt

SEQ ID NO: 45195 - DNA, 270 bp, Glycine max
  Clone ID: 701130004H1
agacaacccagagagcgcgtcttaataaacgctcttctctgaaaacccccatttcttttcttctttcttcttctctttacgcttcttcgatcttcgatcttcgtcgctgaaaatgagagagtgcatttcaatccacatcggccaggccgggattcaggttggaaacgcctgctgggagctttactgcctcgaacacggcattcagcctgatgggcagatgccaagtgacaagaccgttggtggaggtgatgatgctttcaacaccttctt

SEQ ID NO: 45196 - DNA, 272 bp, Glycine max
  Clone ID: 701130005H1
ctagcaacgctttgatttcagcctcatccacagcgagtaagaaaggaagaaagtaggtagtggatattgagagaaacaaatgagatctgaagccttccaaacagctaacatttatcgccttcttctcaaggcggtcaagaaacatattgggaaggaagagaacaagaaacattttatagaatttgtaacctcagagttccgtaacaaccgaaatttgtctgacaatgtggctatccaacagaaaataaagcttgctcgtgattatacttttc

SEQ ID NO: 45197 - DNA, 275 bp, Glycine max
  unsure (1)..(275): unsure at all n locations; Clone ID: 701130007H1
cttatcaagttgccacggtttggagaggacctaattcttggaaanctagttctcgaaggatgtcgaaaactacagacacattgatccatccatcggtcttctaaaaaagctcagagaattgaatttgaaaaactgcaaaaatctagtaagcttacccaatagcatactaggcctcaattctcttcaatatctgaatctctctggctgttcaaaagtgtacaacaccgagttattgtatgaactaagggatgcagagcaattgaagaagattgatt

SEQ ID NO: 45198 - DNA, 274 bp, Glycine max
  unsure (1)..(274): unsure at all n locations; Clone ID: 701130010H1
tgaaggtccttgttttcttcgttgctacaattttngtagcatggcaatgccatgcgtacgatatgttccctctccgaatgaacactggctatggtgcccgtactccggaggtgaaatgcgcaanttggaggcttgctgtggaagcacacaanatctttggctttgagaccattcctgaagagtgcgttgaagcaacaaaggaatacatccatggcgaacaatatagatcagactccaaaacagttaaccaacaagcttactttatgccagagac

SEQ ID NO: 45199 - DNA, 247 bp, Glycine max
  unsure (1)..(247): unsure at all n locations; Clone ID: 701130012H1
tcaaatcaaaacccctcacaaaattcacaacaacatacccacaaatcccaaatcctgtcttctcatataaaagaacccttctttcgaannnnnnnnnnnnnnnnnnnnnnnnnnnnnnnnnncctatccgattcaattcgcgcgcagttccaaaccctaatccctctctccgaggtctgatttcacaccccaaaccccccaattcttgttttcttaaacaaaatttttaaagantaagagggttcgt

SEQ ID NO: 45200 - DNA, 273 bp, Glycine max
  unsure (1)..(273): unsure at all n locations; Clone ID: 701130013H1
ggatggtcaatttcttcaacttcagcagctacaggatgagaacaacccggactttgtagttgaagtggtctctctacttctttgaagattctgagagacttctcaatgaccttacctttgctctaaatcagaaaagtattgacttcanaaaagttgatgctcatgttcaccagctaaagggtagcagctcaagcataggtgctcagagggtaaagaattgttgcattnctttccgcaacttttgtgaggaacagaacatagacgcgtgcctca

SEQ ID NO: 45201 - DNA, 281 bp, Glycine max
  unsure (1)..(281): unsure at all n locations; Clone ID: 701130014H1
gcacgccccaagagaatgtcgagaaatcgttcttagcgttctacgaggggtggcttgcgcgtcaagagaatttgctgaaacagcttctcagcgtggcgcgcaatggtcctctctcactaccagcaatttatggaagagaaatccaacgtggcaaacgacgacgtttaccttctcttttctccaccctggctttccgcgtacgaaagggctctcctctggattggggactacaagccctctctaattcacngtttagtagacggcgccgtgaaggggttaac

SEQ ID NO: 45202 - DNA, 276 bp, Glycine max
  unsure (1)..(276): unsure at all n locations; Clone ID: 701130015H1
ctttagacgaacgcccttctgcgaaaaggtggcttcctcttgaagctaacccngaagtcatgaaccagttcctttggggtcttggccttccactggacgaggcagagtgctgtgatgtgtttggcttagatgaagagcttctgganatggntccgnagcnccgtcctcgccgtgcttagtcnttatccaattaccgcaaagtccgaagaagnaaggttgcannaggaaaaagagnaanaggatgatagcagcaaagtgtatnttatgaaggcaaac

SEQ ID NO: 45203 - DNA, 274 bp, Glycine max
  unsure (1)..(274): unsure at all n locations; Clone ID: 701130017H1
gaaaaaatgaccaagatcttctttgtattgctgttatgtctgatcatagcagcttcttctgggtttgtgaatngctttgatgttgaaaagaaggaaaagattggaatatttgagctcaataaangtgacctttctttgaaggtcaccaactggggtgcttcaattttgtccctggtgattcctgataagaatggaaagttgagtgatgttgttctggatatgatctgttaaggattacactaatgatacaacatattttggagcaactgttggc

SEQ ID NO: 45204 - DNA, 272 bp, Glycine max
  Clone ID: 701130018H1
tggaaaacaatccccttattgcagttgacgttctcactaagttgataaattctccagaaatagcagaatactttacagtacttgtcaatatggacatgagtctacattcaatggaagttgtgaacaggctgacaacagctgttgaactaccatctcaattcattcacatgtacataactaattgtatagcatcttgtgtgggcatcaaggataaatacatgcagaacaggcttgtgagacttgtctgtgtttttctgcaaagcctcattcgg

SEQ ID NO: 45205 - DNA, 270 bp, Glycine max
  unsure (1)..(270): unsure at all n locations; Clone ID: 701130019H1
cttgagnaacattattcccattgctatatattatggctagcatgaaggntacatgggnggttgtgatcatgtgcntggccgnggtgggtgcaccgatgatggngcaagcntgagatgcaatgctgtnacggtgaacatggcacagngcntatcctaccngatgcngggnggaacaccttcaacnctttgctgcagcggagtcnagaacattntcngctctgctgncaccaccgtngncaaacaaantgtgtgcaatgnnttcanggcggt

SEQ ID NO: 45206 - DNA, 267 bp, Glycine max
  Clone ID: 701130020H1
aaaaattgaattgaattgcattgcattgcttttgctgcgttgaaaatccgaagaaatcgaattgcattgctccgtgaaaaaaatggaaagcgagaaagcgtttgagtttctcggatgcgttcctctcctgcagaggcttccgagctcgtctctgaggaagatagctcaacttgtggatgtcaaacattgtgagcccggagagtatgttgttcgcgagggtgaacccggagatggtgtgtattcatattggatggagagctgaggttc

SEQ ID NO: 45207 - DNA, 262 bp, Glycine max
  unsure (1)..(262): unsure at all n locations; Clone ID: 701130021H1
ggcgtcgtcacaaccagagatggagcatccaaagaaggtttttggttgggctgctcgggactcatctgggcttctctccccattcaacttctccagaagagaaacgggggagaaagatttggtattcaaagtgcaatactgtggaatatgccactcagatctacatatgttaaagaacgagtggggcaacacaacctatcctctggttcctgggcacgagattgctggtgtggtaacagaagtnngnagcaaggtgcaaaaa

SEQ ID NO: 45208 - DNA, 265 bp, Glycine max
  unsure (1)..(265): unsure at all n locations; Clone ID: 701130024H1
atttgaaataatgtccgggatcatccacaagattgaggagnccctccatgtgggagggcacaaganagaggagcacaaaggagancaccatggtgagcacaaaggtgaacacaaaggagaacaccatggtgagcacaaaggtgaacncanaggagaacaacaccatnnggagcacaaggagggacttgtggataagatcaaggacaagatccatggtgatggccatgacacgggtgagananagaagnagcaggacnnnaagacg

SEQ ID NO: 45209 - DNA, 278 bp, Glycine max
  unsure (1)..(278): unsure at all n locations; Clone ID: 701130025H1
acctagtctgnaaaccatagcnnaaaatcaaccatgtctccattgattgttgccttngctacaatcgcagcagcaatcctacatatatcgtataatnaagttcataacacgcccatccctccccctcccaccgggccctaaaccatggcccatagtgggaaacttgccacacatgggcccggtnccgcaccactccctcgcggcgttggcccgcatccacggcccgttgatgcacctccgcctcggcttcgtcgatgtcgtggttgccgcgtcggcct

SEQ ID NO: 45210 - DNA, 254 bp, Glycine max
  unsure (1)..(254): unsure at all n locations; Clone ID: 701130026H1
ggttgaccacatgaagatnatgangancaatgcnattgtanncaacattggnncactttnatcatnagntcgacatnctnggggtggagnactaccccggcgtgangcgcatccaccatcaagccccaaaccgacagatgggtcanccccgagaccaatgtcggcatcattgtcttggccgagggtcgtttgatgaacttgggatgcgccacaggacaccctagttttgtgatgtctgtcctcacnaaccaggt

SEQ ID NO: 45211 - DNA, 279 bp, Glycine max
  Clone ID: 701130027H1
cgggatgccaagctacgctcctccattgccttcttctaattccatagccatggaagcaactaatgttcatccttcccgcatttctgaatttggaaccctggagcaatctcttggatttcgcgttgaagataccattaatcttagcagaaatccgatgtttaatcaaatgaaatcaaatagccaagctctaggtgctgatattcaatttggtgctttaaataagtcaattgcaacatcagatataaacctctctgctgctattgctgggtctccaagcat

SEQ ID NO: 45212 - DNA, 282 bp, Glycine max
  unsure (1)..(282): unsure at all n locations; Clone ID: 701130029H1
gctgcttcctctgaatcaaatcattcatcactctctctggttctgagtttctgacaccaaaatggtgaatcctcgaattccacgttcaaggatcccnactttcacacctttcacttctgctatctccatcgccctctgcattttctttgttctctctcttctcttcacttcccattctgattcatcccatcaataccaccacacaggttctgatggtggtgttgcacatggatttgagtcantaaggagatccattctagctcctgaaaacagatcctctca

SEQ ID NO: 45213 - DNA, 273 bp, Glycine max
  unsure (1)..(273): unsure at all n locations; Clone ID: 701130031H1
cgagtttgagatcagtgtgaattatcataagatcggtgtgtcagaaatatatgtttataaaacaanaataaaaaccctttcattaaccccaacagtgtcgctgctggagaagatcgnatcgaaacgcgaataagtntctttctctctcgttggacgaataatggttctgaggaggnagaagatggancagcgcttncaccttcttctgctgttgatttcatggccacctcccagtcccagcatcgctgcgttttcgttgggaatataccgtat

SEQ ID NO: 45214 - DNA, 137 bp, Glycine max
  unsure (1)..(137): unsure at all n locations; Clone ID: 701130032H1
tactctccttgatcaacatcagtatcaacttgagaatgtgaataaggagttgaacgaagaggagganatgttgtggaacttcttttctagaggaggcttcaatgtngcgnaaggaattgnntngtgaggttttngnc

SEQ ID NO: 45215 - DNA, 272 bp, Glycine max
  unsure (1)..(272): unsure at all n locations; Clone ID: 701130034H1
tctnctttgctcgctctataactttcgactttattttcgatcaacatcatcaaactcctacgcatttggggttttntttntcctcagctattcaccagnnanaaagcttccatttttgctcagatctncctcttgctccncccgtnccngtncctgggnnnttatnactttaatttgncaagcatatcngttncttatactgaggatacttgccaattgataaacagtgaagatagctcctccanatagttttatgaacatacagttgcagt

SEQ ID NO: 45216 - DNA, 239 bp, Glycine max
  unsure (1)..(239): unsure at all n locations; Clone ID: 701130036H1
gcgacggggtattganangtggcagagtggcantnctgccacgatccactgacncttttttancatgttnntnnntctttggntnctaatctgatgnttggacaggaattttctatttggncacagctcatacatttttaatgcnggctccnggatntttacaaatgnnggctatgtgctgatcattgnnnctttctnttatattgngaatgtgctttcagctttggtttncttaccng

SEQ ID NO: 45217 - DNA, 269 bp, Glycine max
  unsure (1)..(269): unsure at all n locations; Clone ID: 701130038H1
gntcctatggaagagtatattatggtgttcttaaaagtgggcangctgcagcaatcaagaatttggatgccagtnaacagcctgatgaggaatttttagcccaggtttcaatggtatcaaggctgaagcatgaaaattttgttcagttgcttggatattgcattgatggaacctcccgtattcttgcttatcagtttgcatctaatgggtctcttcatgatattttacacggcagaaaaggtgttaaaggagcacagcctggtccagtt

SEQ ID NO: 45218 - DNA, 272 bp, Glycine max
  unsure (1)..(272): unsure at all n locations; Clone ID: 701130039H1
gcagcaggacggccaggnccaccaccaccactcgttggcggaggtgtccgccgtggcaaacccgtcccacgcgcacgcgaagacgctgttcttccggtcggcgtacaacgtgcaggtggtggtggtagagaacgagccggaggaanggctgctcaaccgcttccggagagaggtcatgagagccggagtncattcaggagtgcaagaggagacggttcttcgagaacaagcaggaggngaagaagcgcaagacccgcgaactgccaagcgta

SEQ ID NO: 45219 - DNA, 275 bp, Glycine max
  Clone ID: 701130041H1
gtgtcctcaccgcctcatcagcctctttgtttcccctttcatggatgaaatccagatggaaattcaatgcccatcttccttcatggatggattctctcattataccctccatcatgaagaagccaccaacttctcaaaacccatttcctgcaacctcaaaatctgtcctcaaccacgcagacttgagctctcttctctctgtttgtggcagagatggaaaccttaatcttggttcttccatccatgcccgtatcatcaagcaacctccatctttc

SEQ ID NO: 45220 - DNA, 271 bp, Glycine max
  Clone ID: 701130042H1
tggtcatgttgcaccatttgttaagtctgaacccattcccgagactaacgatgaacctgttaaagtggtagttggggccagtcttgaggacattgttttcaaatctgggaagaatgttctgctggagttttatgctccctggtgtggtcattgcaaacagttggctccaatattggatgaagttgctatctcatatcaaaatgaagctgatgttgttattgcaaaactggatgcaatgccaacgatatcccagtgaaacctttgatgtcca
